United States Patent Application Publication US 2005/0244851 A1 - sequence listing, part 44

SEQ ID NO: 1703468 - DNA, 25 bp, Homo sapien
cgggggtggagcctgtggagctggc

SEQ ID NO: 1703469 - DNA, 25 bp, Homo sapien
tcatccatcggggatcaaagttcat

SEQ ID NO: 1703470 - DNA, 25 bp, Homo sapien
taaggaggaatcatcatccatcggg

SEQ ID NO: 1703471 - DNA, 25 bp, Homo sapien
gggtccacataaggaggaatcatca

SEQ ID NO: 1703472 - DNA, 25 bp, Homo sapien
atcaaagttcattgggggcatgggt

SEQ ID NO: 1703473 - DNA, 25 bp, Homo sapien
gccaactttggatccaccggtggag

SEQ ID NO: 1703474 - DNA, 25 bp, Homo sapien
tgtggcggtgaagacatctcctacc

SEQ ID NO: 1703475 - DNA, 25 bp, Homo sapien
tgacggtcaaatggctctgagcttg

SEQ ID NO: 1703476 - DNA, 25 bp, Homo sapien
taacatagcaggtgcatgacggtca

SEQ ID NO: 1703477 - DNA, 25 bp, Homo sapien
acccatttctcatgaccaagactca

SEQ ID NO: 1703478 - DNA, 25 bp, Homo sapien
gaacactttattatgatgcagactc

SEQ ID NO: 1703479 - DNA, 25 bp, Homo sapien
gatggcatccagttgccgaggctag

SEQ ID NO: 1703480 - DNA, 25 bp, Homo sapien
caggcctagatcctttcactgtgaa

SEQ ID NO: 1703481 - DNA, 25 bp, Homo sapien
tacgaatagtccctccgaagccttg

SEQ ID NO: 1703482 - DNA, 25 bp, Homo sapien
tcgaaactctcggtaactgcggaat

SEQ ID NO: 1703483 - DNA, 25 bp, Homo sapien
gatggcacccctctgggagtgaaga

SEQ ID NO: 1703484 - DNA, 25 bp, Homo sapien
tggagggattccacgacgactgctc

SEQ ID NO: 1703485 - DNA, 25 bp, Homo sapien
acatggctgaaatacctggtacggc

SEQ ID NO: 1703486 - DNA, 25 bp, Homo sapien
gaaacgaggcggtttatcctgctgc

SEQ ID NO: 1703487 - DNA, 25 bp, Homo sapien
tggctctctggctcagatctccgcg

SEQ ID NO: 1703488 - DNA, 25 bp, Homo sapien
tgggatcaacttctctttcaaaggc

SEQ ID NO: 1703489 - DNA, 25 bp, Homo sapien
ctcctcttgtcgcctcgtcctggcc

SEQ ID NO: 1703490 - DNA, 25 bp, Homo sapien
agctcctcttgtcgcctcgtcctgg

SEQ ID NO: 1703491 - DNA, 25 bp, Homo sapien
cagctcctcttgtcgcctcgtcctg

SEQ ID NO: 1703492 - DNA, 25 bp, Homo sapien
gccagctcctcttgtcgcctcgtcc

SEQ ID NO: 1703493 - DNA, 25 bp, Homo sapien
cgggggacgctcctctggaggacga

SEQ ID NO: 1703494 - DNA, 25 bp, Homo sapien
agccccgggggacgctcctctggag

SEQ ID NO: 1703495 - DNA, 25 bp, Homo sapien
ccgggggacgctcctctggaggacg

SEQ ID NO: 1703496 - DNA, 25 bp, Homo sapien
tgcagttacactcccttgacggcta

SEQ ID NO: 1703497 - DNA, 25 bp, Homo sapien
tgacggctactaagctgggccagag

SEQ ID NO: 1703498 - DNA, 25 bp, Homo sapien
gataacttggtccaggcggaagaca

SEQ ID NO: 1703499 - DNA, 25 bp, Homo sapien
aactgaggccgctgttgaccctctg

SEQ ID NO: 1703500 - DNA, 25 bp, Homo sapien
attggccccggctcctcaaagtggg

SEQ ID NO: 1703501 - DNA, 25 bp, Homo sapien
cattggccccggctcctcaaagtgg

SEQ ID NO: 1703502 - DNA, 25 bp, Homo sapien
gcagagtcccgaggagtcccaccca

SEQ ID NO: 1703503 - DNA, 25 bp, Homo sapien
ctaaccccggcagagtcccgaggag

SEQ ID NO: 1703504 - DNA, 25 bp, Homo sapien
tagcagctctggttttctgggaggc

SEQ ID NO: 1703505 - DNA, 25 bp, Homo sapien
tctgggaggccgctcccgacgttta

SEQ ID NO: 1703506 - DNA, 25 bp, Homo sapien
aggcttagagcccaagaatccagag

SEQ ID NO: 1703507 - DNA, 25 bp, Homo sapien
cctgggccctcaggcttagagccca

SEQ ID NO: 1703508 - DNA, 25 bp, Homo sapien
gggtcagggcctctgtgcctgtatc

SEQ ID NO: 1703509 - DNA, 25 bp, Homo sapien
aaacggttccagatgtgaggggtca

SEQ ID NO: 1703510 - DNA, 25 bp, Homo sapien
gggagcaccaaccagaagagaagtg

SEQ ID NO: 1703511 - DNA, 25 bp, Homo sapien
aagggagcaccaaccagaagagaag

SEQ ID NO: 1703512 - DNA, 25 bp, Homo sapien
caccaaccagaagagaagtgaggag

SEQ ID NO: 1703513 - DNA, 25 bp, Homo sapien
ctggagaagggagcaccaaccagaa

SEQ ID NO: 1703514 - DNA, 25 bp, Homo sapien
ctgggccggtaactctttcggctag

SEQ ID NO: 1703515 - DNA, 25 bp, Homo sapien
catggagctgggccggtaactcttt

SEQ ID NO: 1703516 - DNA, 25 bp, Homo sapien
ggctccatccaaggctccatggagc

SEQ ID NO: 1703517 - DNA, 25 bp, Homo sapien
agctgggccggtaactctttcggct

SEQ ID NO: 1703518 - DNA, 25 bp, Homo sapien
tacctgactgatgcacacatacaaa

SEQ ID NO: 1703519 - DNA, 25 bp, Homo sapien
tggggggtatgaccagtgctcaaaa

SEQ ID NO: 1703520 - DNA, 25 bp, Homo sapien
agtcagggtagaaagcaccccaata

SEQ ID NO: 1703521 - DNA, 25 bp, Homo sapien
catacaaactgcagaaaggggacag

SEQ ID NO: 1703522 - DNA, 25 bp, Homo sapien
tgacacctgagaatccccactcagg

SEQ ID NO: 1703523 - DNA, 25 bp, Homo sapien
ggtggaccctcacaaggaacagcat

SEQ ID NO: 1703524 - DNA, 25 bp, Homo sapien
tcctaggaggttcagagccaggtgg

SEQ ID NO: 1703525 - DNA, 25 bp, Homo sapien
ctccatcaggggaacttcgctggct

SEQ ID NO: 1703526 - DNA, 25 bp, Homo sapien
gctgtgatcgttctgtgccaatggg

SEQ ID NO: 1703527 - DNA, 25 bp, Homo sapien
caggctctgtgcctcggtctgtatg

SEQ ID NO: 1703528 - DNA, 25 bp, Homo sapien
gggaccaggtcgatgggatggccga

SEQ ID NO: 1703529 - DNA, 25 bp, Homo sapien
tgtcactagtgccaaactggactgg

SEQ ID NO: 1703530 - DNA, 25 bp, Homo sapien
tccacccaactcaggatacccagat

SEQ ID NO: 1703531 - DNA, 25 bp, Homo sapien
attgtcccgtgacagacatgtgtcc

SEQ ID NO: 1703532 - DNA, 25 bp, Homo sapien
ccgtgacagacatgtgtcctctatg

SEQ ID NO: 1703533 - DNA, 25 bp, Homo sapien
tgtgtcctctatgtcccacctttag

SEQ ID NO: 1703534 - DNA, 25 bp, Homo sapien
actgatgctgttagctccttctctg

SEQ ID NO: 1703535 - DNA, 25 bp, Homo sapien
ctaccactaggcgtaagtctgagtc

SEQ ID NO: 1703536 - DNA, 25 bp, Homo sapien
gctgtctcctaccactaggcgtaag

SEQ ID NO: 1703537 - DNA, 25 bp, Homo sapien
tgctttcaagctgtctcctaccact

SEQ ID NO: 1703538 - DNA, 25 bp, Homo sapien
cagcaatcttccccagaaatcttgg

SEQ ID NO: 1703539 - DNA, 25 bp, Homo sapien
gcaatcttccccagaaatcttgggc

SEQ ID NO: 1703540 - DNA, 25 bp, Homo sapien
tccccagaaatcttgggcctttcca

SEQ ID NO: 1703541 - DNA, 25 bp, Homo sapien
aatcttccccagaaatcttgggcct

SEQ ID NO: 1703542 - DNA, 25 bp, Homo sapien
cccagtctcgtgatacaggaatggc

SEQ ID NO: 1703543 - DNA, 25 bp, Homo sapien
caggttcttggattgtggctcagca

SEQ ID NO: 1703544 - DNA, 25 bp, Homo sapien
aacctcaggatacaggcgctggcct

SEQ ID NO: 1703545 - DNA, 25 bp, Homo sapien
agcactgccatagaaaacctcagga

SEQ ID NO: 1703546 - DNA, 25 bp, Homo sapien
cagctttagtatctgtggtcaagaa

SEQ ID NO: 1703547 - DNA, 25 bp, Homo sapien
tcccacccatagaagcaaaaagtag

SEQ ID NO: 1703548 - DNA, 25 bp, Homo sapien
caactctgcaacgtagaaaggcttg

SEQ ID NO: 1703549 - DNA, 25 bp, Homo sapien
gaggagcacggttgaaacagcttta

SEQ ID NO: 1703550 - DNA, 25 bp, Homo sapien
taagggtgcagtgagggtgtcccag

SEQ ID NO: 1703551 - DNA, 25 bp, Homo sapien
tgtaattgagagtccatggctcccc

SEQ ID NO: 1703552 - DNA, 25 bp, Homo sapien
tgtcccagggcggaagcctccactg

SEQ ID NO: 1703553 - DNA, 25 bp, Homo sapien
gggcggaagcctccactgtttggat

SEQ ID NO: 1703554 - DNA, 25 bp, Homo sapien
gcagaaagccggagagtagaggaag

SEQ ID NO: 1703555 - DNA, 25 bp, Homo sapien
caacgatgtgtcaggcaaaggactg

SEQ ID NO: 1703556 - DNA, 25 bp, Homo sapien
gagaaatccagaaactggcccttga

SEQ ID NO: 1703557 - DNA, 25 bp, Homo sapien
agctctgtagcttgcattgtggaga

SEQ ID NO: 1703558 - DNA, 25 bp, Homo sapien
aatccgaaggggatggcagatcctg

SEQ ID NO: 1703559 - DNA, 25 bp, Homo sapien
taaaaatccgaaggggatggcagat

SEQ ID NO: 1703560 - DNA, 25 bp, Homo sapien
aaatccgaaggggatggcagatcct

SEQ ID NO: 1703561 - DNA, 25 bp, Homo sapien
aaaatccgaaggggatggcagatcc

SEQ ID NO: 1703562 - DNA, 25 bp, Homo sapien
agcccctgaagggagaaagccactt

SEQ ID NO: 1703563 - DNA, 25 bp, Homo sapien
cctgaagggagaaagccactttggc

SEQ ID NO: 1703564 - DNA, 25 bp, Homo sapien
caggagcccctgaagggagaaagcc

SEQ ID NO: 1703565 - DNA, 25 bp, Homo sapien
cccctgaagggagaaagccactttg

SEQ ID NO: 1703566 - DNA, 25 bp, Homo sapien
ggaaaatcaaagccagcaactggac

SEQ ID NO: 1703567 - DNA, 25 bp, Homo sapien
agggaaaatcaaagccagcaactgg

SEQ ID NO: 1703568 - DNA, 25 bp, Homo sapien
gggaaaatcaaagccagcaactgga

SEQ ID NO: 1703569 - DNA, 25 bp, Homo sapien
gcagggagccaaagttcaccacagg

SEQ ID NO: 1703570 - DNA, 25 bp, Homo sapien
agctgtgagtctaccatgggtagaa

SEQ ID NO: 1703571 - DNA, 25 bp, Homo sapien
gctgtgagtctaccatgggtagaag

SEQ ID NO: 1703572 - DNA, 25 bp, Homo sapien
ggagccaaagttcaccacaggcagc

SEQ ID NO: 1703573 - DNA, 25 bp, Homo sapien
aatacagaatccctactcccaagtc

SEQ ID NO: 1703574 - DNA, 25 bp, Homo sapien
aaaaaatcatgagctgcctaccttg

SEQ ID NO: 1703575 - DNA, 25 bp, Homo sapien
tagcccctcagttcctgtaccttac

SEQ ID NO: 1703576 - DNA, 25 bp, Homo sapien
ctcccaagtcttggcgctccctagc

SEQ ID NO: 1703577 - DNA, 25 bp, Homo sapien
ccaaggttgctgctcagtttttgat

SEQ ID NO: 1703578 - DNA, 25 bp, Homo sapien
cgtgatgatccaggtcccccaaggt

SEQ ID NO: 1703579 - DNA, 25 bp, Homo sapien
gataatcctggaacggctttagttc

SEQ ID NO: 1703580 - DNA, 25 bp, Homo sapien
cagttgggggagtccgtgatgatcc

SEQ ID NO: 1703581 - DNA, 25 bp, Homo sapien
gcacttggaaagtccacatccctat

SEQ ID NO: 1703582 - DNA, 25 bp, Homo sapien
cctggttccaaagtaaggaagcact

SEQ ID NO: 1703583 - DNA, 25 bp, Homo sapien
taaggaagcacttggaaagtccaca

SEQ ID NO: 1703584 - DNA, 25 bp, Homo sapien
ggatccagaccctggttccaaagta

SEQ ID NO: 1703585 - DNA, 25 bp, Homo sapien
gagacgggaattgaggccagagaag

SEQ ID NO: 1703586 - DNA, 25 bp, Homo sapien
cttgagacgggaattgaggccagag

SEQ ID NO: 1703587 - DNA, 25 bp, Homo sapien
gacgggaattgaggccagagaagga

SEQ ID NO: 1703588 - DNA, 25 bp, Homo sapien
tgagacgggaattgaggccagagaa

SEQ ID NO: 1703589 - DNA, 25 bp, Homo sapien
tcgacgcgctgggtgcggaagactc

SEQ ID NO: 1703590 - DNA, 25 bp, Homo sapien
actccactgtaggtggaaggcgtgg

SEQ ID NO: 1703591 - DNA, 25 bp, Homo sapien
gctgggtgcggaagactccactgta

SEQ ID NO: 1703592 - DNA, 25 bp, Homo sapien
ctgctggtaaaggtcgacgcgctgg

SEQ ID NO: 1703593 - DNA, 25 bp, Homo sapien
gggacaggcatgtgttaaacagtga

SEQ ID NO: 1703594 - DNA, 25 bp, Homo sapien
caggaaatcaggtggcaactcgaat

SEQ ID NO: 1703595 - DNA, 25 bp, Homo sapien
cacagtgagaggtcagcgatgagat

SEQ ID NO: 1703596 - DNA, 25 bp, Homo sapien
tgtgttaaacagtgagtcacagtga

SEQ ID NO: 1703597 - DNA, 25 bp, Homo sapien
gtggcagccctgtccgctcccaagg

SEQ ID NO: 1703598 - DNA, 25 bp, Homo sapien
tctgcccgtcgggagggcccttctc

SEQ ID NO: 1703599 - DNA, 25 bp, Homo sapien
tggcagccctgtccgctcccaaggc

SEQ ID NO: 1703600 - DNA, 25 bp, Homo sapien
gctcctctgcccgtcgggagggccc

SEQ ID NO: 1703601 - DNA, 25 bp, Homo sapien
tatttataatctatatacaagcccc

SEQ ID NO: 1703602 - DNA, 25 bp, Homo sapien
ttataatctatatacaagccccggg

SEQ ID NO: 1703603 - DNA, 25 bp, Homo sapien
atctatatacaagccccgggggtag

SEQ ID NO: 1703604 - DNA, 25 bp, Homo sapien
gggaagtgaggccccagccccacaa

SEQ ID NO: 1703605 - DNA, 25 bp, Homo sapien
aggtagggcacagtccatggtggca

SEQ ID NO: 1703606 - DNA, 25 bp, Homo sapien
ccaacagctccaacccgggtggtga

SEQ ID NO: 1703607 - DNA, 25 bp, Homo sapien
ctcagccctcttcggtctgtctctt

SEQ ID NO: 1703608 - DNA, 25 bp, Homo sapien
tagggcacagtccatggtggcagct

SEQ ID NO: 1703609 - DNA, 25 bp, Homo sapien
ggagccggaagtatcgcttcgagat

SEQ ID NO: 1703610 - DNA, 25 bp, Homo sapien
gggctgcggactttctcgtcgtgcc

SEQ ID NO: 1703611 - DNA, 25 bp, Homo sapien
ttcgagatccccaaatactatcggg

SEQ ID NO: 1703612 - DNA, 25 bp, Homo sapien
gactttctcgtcgtgccccacaaaa

SEQ ID NO: 1703613 - DNA, 25 bp, Homo sapien
gaaagagtaacttccggaggcacag

SEQ ID NO: 1703614 - DNA, 25 bp, Homo sapien
agaacaaaattgaccagtgccgccc

SEQ ID NO: 1703615 - DNA, 25 bp, Homo sapien
taagtgtccacgcatccgtagtgcg

SEQ ID NO: 1703616 - DNA, 25 bp, Homo sapien
taaaacgtgtcatgtccccttggcc

SEQ ID NO: 1703617 - DNA, 25 bp, Homo sapien
gagaagcctgtggtctttgaacctg

SEQ ID NO: 1703618 - DNA, 25 bp, Homo sapien
ttccggatgcaaccactccatagta

SEQ ID NO: 1703619 - DNA, 25 bp, Homo sapien
ccatagtacaccctggcatgtccag

SEQ ID NO: 1703620 - DNA, 25 bp, Homo sapien
gaccctttcacctgctaatgagtaa

SEQ ID NO: 1703621 - DNA, 25 bp, Homo sapien
tcagggcactggtagatggagttaa

SEQ ID NO: 1703622 - DNA, 25 bp, Homo sapien
aaggataataccatagaagtagagc

SEQ ID NO: 1703623 - DNA, 25 bp, Homo sapien
tgtcagttgactgtgctcagggcac

SEQ ID NO: 1703624 - DNA, 25 bp, Homo sapien
catccacgcccagagttgtcagttg

SEQ ID NO: 1703625 - DNA, 25 bp, Homo sapien
agagccagcagccatattgaagaca

SEQ ID NO: 1703626 - DNA, 25 bp, Homo sapien
tggtagcacgaaggtggagctgcat

SEQ ID NO: 1703627 - DNA, 25 bp, Homo sapien
gcgataaagtaccactggcccaagt

SEQ ID NO: 1703628 - DNA, 25 bp, Homo sapien
aaaagttgccaactcctccttggtg

SEQ ID NO: 1703629 - DNA, 25 bp, Homo sapien
gtcaggtggtagatccatttccggg

SEQ ID NO: 1703630 - DNA, 25 bp, Homo sapien
ccttcagtcaggtggtagatccatt

SEQ ID NO: 1703631 - DNA, 25 bp, Homo sapien
cagtcaggtggtagatccatttccg

SEQ ID NO: 1703632 - DNA, 25 bp, Homo sapien
gtagatccatttccggggcacacag

SEQ ID NO: 1703633 - DNA, 25 bp, Homo sapien
aggagaaagcgctggtaaccctggc

SEQ ID NO: 1703634 - DNA, 25 bp, Homo sapien
gaaaagagctcagtcttcatgtcag

SEQ ID NO: 1703635 - DNA, 25 bp, Homo sapien
gcatgattccacctgggcatgagct

SEQ ID NO: 1703636 - DNA, 25 bp, Homo sapien
gcgctggtaaccctggcctgtctca

SEQ ID NO: 1703637 - DNA, 25 bp, Homo sapien
taggagtcaataagaaggctttgga

SEQ ID NO: 1703638 - DNA, 25 bp, Homo sapien
tcagggacttgaattcctccacaca

SEQ ID NO: 1703639 - DNA, 25 bp, Homo sapien
cttgattcctaggagtcaataagaa

SEQ ID NO: 1703640 - DNA, 25 bp, Homo sapien
caggaagtcagggacttgaattcct

SEQ ID NO: 1703641 - DNA, 25 bp, Homo sapien
tggtgacatcacacgagcctctttc

SEQ ID NO: 1703642 - DNA, 25 bp, Homo sapien
ggagaacgtgttctttcattccctg

SEQ ID NO: 1703643 - DNA, 25 bp, Homo sapien
caggtgacatcacagctcttagcca

SEQ ID NO: 1703644 - DNA, 25 bp, Homo sapien
caccagaagactttgtgagtcctaa

SEQ ID NO: 1703645 - DNA, 25 bp, Homo sapien
tcagttattggacagctcacaggcc

SEQ ID NO: 1703646 - DNA, 25 bp, Homo sapien
cagttattggacagctcacaggcct

SEQ ID NO: 1703647 - DNA, 25 bp, Homo sapien
aacaactcagctcccattgtaccca

SEQ ID NO: 1703648 - DNA, 25 bp, Homo sapien
aactcagctcccattgtacccatct

SEQ ID NO: 1703649 - DNA, 25 bp, Homo sapien
tcagctcccattgtacccatctggg

SEQ ID NO: 1703650 - DNA, 25 bp, Homo sapien
ctccaacaactcagctcccattgta

SEQ ID NO: 1703651 - DNA, 25 bp, Homo sapien
caggatctgagccatcgagggaaga

SEQ ID NO: 1703652 - DNA, 25 bp, Homo sapien
gtctggatagggccccacaggtgac

SEQ ID NO: 1703653 - DNA, 25 bp, Homo sapien
taactgtgtcacatcaaatcctaaa

SEQ ID NO: 1703654 - DNA, 25 bp, Homo sapien
gcagtaagagagtggttgggaaacc

SEQ ID NO: 1703655 - DNA, 25 bp, Homo sapien
aaaaagtatgatggtggtgaataaa

SEQ ID NO: 1703656 - DNA, 25 bp, Homo sapien
caccctttgcacttcgcctgcctct

SEQ ID NO: 1703657 - DNA, 25 bp, Homo sapien
tgcccaccctttgcacttcgcctgc

SEQ ID NO: 1703658 - DNA, 25 bp, Homo sapien
tgcacttcgcctgcctctttggtct

SEQ ID NO: 1703659 - DNA, 25 bp, Homo sapien
ccaatggggatgaggcggccactga

SEQ ID NO: 1703660 - DNA, 25 bp, Homo sapien
agttaaagactacacgatccaggag

SEQ ID NO: 1703661 - DNA, 25 bp, Homo sapien
gagtttgctggacactttcattcca

SEQ ID NO: 1703662 - DNA, 25 bp, Homo sapien
aatcaagggacgaacgctgctggct

SEQ ID NO: 1703663 - DNA, 25 bp, Homo sapien
tcctaacaaagagaattcctattcc

SEQ ID NO: 1703664 - DNA, 25 bp, Homo sapien
cagtcgggccactttgtagaaatca

SEQ ID NO: 1703665 - DNA, 25 bp, Homo sapien
tgttcgcgggccagtcgggccactt

SEQ ID NO: 1703666 - DNA, 25 bp, Homo sapien
agtaggcccgcgctttgcttcgtaa

SEQ ID NO: 1703667 - DNA, 25 bp, Homo sapien
tgaccttgtggaggccgcgtctctg

SEQ ID NO: 1703668 - DNA, 25 bp, Homo sapien
tggtaggcacaagaagagctcactg

SEQ ID NO: 1703669 - DNA, 25 bp, Homo sapien
gaagcatgagaaacccgggaaaatg

SEQ ID NO: 1703670 - DNA, 25 bp, Homo sapien
ggagggctgttcaagtcgcaagact

SEQ ID NO: 1703671 - DNA, 25 bp, Homo sapien
cttgtcttgctcatgccgggtggta

SEQ ID NO: 1703672 - DNA, 25 bp, Homo sapien
ggaggagttccctgactacagccaa

SEQ ID NO: 1703673 - DNA, 25 bp, Homo sapien
ggaccaagaattgcccagcttcgtg

SEQ ID NO: 1703674 - DNA, 25 bp, Homo sapien
aagcctgggagccacatgcaagtcc

SEQ ID NO: 1703675 - DNA, 25 bp, Homo sapien
tctccaggtggcatgataaggtcac

SEQ ID NO: 1703676 - DNA, 25 bp, Homo sapien
ttgggagcgggatctaaggacttac

SEQ ID NO: 1703677 - DNA, 25 bp, Homo sapien
gaacctcgagttctgactttggtaa

SEQ ID NO: 1703678 - DNA, 25 bp, Homo sapien
ttttggtcaataggctctgtcttcg

SEQ ID NO: 1703679 - DNA, 25 bp, Homo sapien
taaagtctgaccctagtctgctgct

SEQ ID NO: 1703680 - DNA, 25 bp, Homo sapien
actgagtgaacaattaattcagata

SEQ ID NO: 1703681 - DNA, 25 bp, Homo sapien
gaaaagtggagtaaggagtttgatc

SEQ ID NO: 1703682 - DNA, 25 bp, Homo sapien
ctgagtgaacaattaattcagataa

SEQ ID NO: 1703683 - DNA, 25 bp, Homo sapien
aactgagtgaacaattaattcagat

SEQ ID NO: 1703684 - DNA, 25 bp, Homo sapien
caagggagatcccttgaggctgagg

SEQ ID NO: 1703685 - DNA, 25 bp, Homo sapien
ccttgaggctgaggataagatgact

SEQ ID NO: 1703686 - DNA, 25 bp, Homo sapien
gcccgagctttctatgaggccctga

SEQ ID NO: 1703687 - DNA, 25 bp, Homo sapien
agagatctcagactgaacctgccag

SEQ ID NO: 1703688 - DNA, 25 bp, Homo sapien
cattacacggcttctcggcattcca

SEQ ID NO: 1703689 - DNA, 25 bp, Homo sapien
tctaagtgtgaccttcgaaccctgg

SEQ ID NO: 1703690 - DNA, 25 bp, Homo sapien
cgaaccctggtcagagtaatggtga

SEQ ID NO: 1703691 - DNA, 25 bp, Homo sapien
gcaggcgtgacgttatttcattaca

SEQ ID NO: 1703692 - DNA, 25 bp, Homo sapien
gcacgacctggctgtcacgaaggcc

SEQ ID NO: 1703693 - DNA, 25 bp, Homo sapien
gaaagcgaactaccaatcccaggat

SEQ ID NO: 1703694 - DNA, 25 bp, Homo sapien
gctacttccagggaacggcggcgac

SEQ ID NO: 1703695 - DNA, 25 bp, Homo sapien
acgcaagcgccaagggtcaggtgcc

SEQ ID NO: 1703696 - DNA, 25 bp, Homo sapien
tgggggcgattgtcaggtccctttc

SEQ ID NO: 1703697 - DNA, 25 bp, Homo sapien
gtcaggtccctttcaccggaatcca

SEQ ID NO: 1703698 - DNA, 25 bp, Homo sapien
gggcgattgtcaggtccctttcacc

SEQ ID NO: 1703699 - DNA, 25 bp, Homo sapien
cgattgtcaggtccctttcaccgga

SEQ ID NO: 1703700 - DNA, 25 bp, Homo sapien
cattctcaagcaagaaccgggctcc

SEQ ID NO: 1703701 - DNA, 25 bp, Homo sapien
atcattctcaagcaagaaccgggct

SEQ ID NO: 1703702 - DNA, 25 bp, Homo sapien
ttctcaagcaagaaccgggctcctc

SEQ ID NO: 1703703 - DNA, 25 bp, Homo sapien
caagggtttccaagtttatcattct

SEQ ID NO: 1703704 - DNA, 25 bp, Homo sapien
agaattcattgccacggagcccaca

SEQ ID NO: 1703705 - DNA, 25 bp, Homo sapien
gagtccagtaagattaaatttgtcc

SEQ ID NO: 1703706 - DNA, 25 bp, Homo sapien
gattaaatttgtcctggatgtagtc

SEQ ID NO: 1703707 - DNA, 25 bp, Homo sapien
catgtctagagcttgtcggtagtga

SEQ ID NO: 1703708 - DNA, 25 bp, Homo sapien
gtagtgagggacctgctcattgagt

SEQ ID NO: 1703709 - DNA, 25 bp, Homo sapien
tgctcaatcaggtcactctggttgg

SEQ ID NO: 1703710 - DNA, 25 bp, Homo sapien
atgccacggttggtaaggatgtagc

SEQ ID NO: 1703711 - DNA, 25 bp, Homo sapien
catctgggcgatgccacggttggta

SEQ ID NO: 1703712 - DNA, 25 bp, Homo sapien
gatgtagcgggcgtggatcaatcca

SEQ ID NO: 1703713 - DNA, 25 bp, Homo sapien
ttctctggactagatgggctctcaa

SEQ ID NO: 1703714 - DNA, 25 bp, Homo sapien
taggcaggctacaaaccatcagagc

SEQ ID NO: 1703715 - DNA, 25 bp, Homo sapien
tctcagctagcttccttaaacaggg

SEQ ID NO: 1703716 - DNA, 25 bp, Homo sapien
gaacctgtgtctcttactgctcaga

SEQ ID NO: 1703717 - DNA, 25 bp, Homo sapien
gaggacagtaaccaaagtctccttg

SEQ ID NO: 1703718 - DNA, 25 bp, Homo sapien
tacacacgaggacagtaaccaaagt

SEQ ID NO: 1703719 - DNA, 25 bp, Homo sapien
ggttctcacagtacacacgaggaca

SEQ ID NO: 1703720 - DNA, 25 bp, Homo sapien
ggaagcattggctggttctcacagt

SEQ ID NO: 1703721 - DNA, 25 bp, Homo sapien
ggactcaggctccaatgtgttgagc

SEQ ID NO: 1703722 - DNA, 25 bp, Homo sapien
tcagcaggccaggtatccccctatt

SEQ ID NO: 1703723 - DNA, 25 bp, Homo sapien
tgggagacagccagactcagcaggc

SEQ ID NO: 1703724 - DNA, 25 bp, Homo sapien
ttcccataagactgccacacggtgc

SEQ ID NO: 1703725 - DNA, 25 bp, Homo sapien
tcttgatgacttgggtgtgtacaca

SEQ ID NO: 1703726 - DNA, 25 bp, Homo sapien
gccggtactcgggatgcaccatgaa

SEQ ID NO: 1703727 - DNA, 25 bp, Homo sapien
aaaccagtgccgaagtaggcgccat

SEQ ID NO: 1703728 - DNA, 25 bp, Homo sapien
gccatccgtgtgatggtgtcttgat

SEQ ID NO: 1703729 - DNA, 25 bp, Homo sapien
cggatggatcttgaaaccgtagagc

SEQ ID NO: 1703730 - DNA, 25 bp, Homo sapien
cagctggtaggccatcggatggatc

SEQ ID NO: 1703731 - DNA, 25 bp, Homo sapien
tcagcgaatcgtcttgactgggctc

SEQ ID NO: 1703732 - DNA, 25 bp, Homo sapien
ctcttgaagttgctggcggcttgga

SEQ ID NO: 1703733 - DNA, 25 bp, Homo sapien
accatacagggttcctgaaagggtg

SEQ ID NO: 1703734 - DNA, 25 bp, Homo sapien
ccaccacaataacgactcctttaat

SEQ ID NO: 1703735 - DNA, 25 bp, Homo sapien
atttcatattcccaccacaataacg

SEQ ID NO: 1703736 - DNA, 25 bp, Homo sapien
tacagggttcctgaaagggtggcaa

SEQ ID NO: 1703737 - DNA, 25 bp, Homo sapien
gacagtcatagatatccaaacaaat

SEQ ID NO: 1703738 - DNA, 25 bp, Homo sapien
gttctgctccatactaaaaacacca

SEQ ID NO: 1703739 - DNA, 25 bp, Homo sapien
cactgagcacaaatctgtcctggtt

SEQ ID NO: 1703740 - DNA, 25 bp, Homo sapien
gcatttcatcacacgcagtcctagg

SEQ ID NO: 1703741 - DNA, 25 bp, Homo sapien
caacctggccaggaaatcaagcatc

SEQ ID NO: 1703742 - DNA, 25 bp, Homo sapien
ttttgacaaggtctgagcaggagct

SEQ ID NO: 1703743 - DNA, 25 bp, Homo sapien
tgtcttcgtcatacaacagggccaa

SEQ ID NO: 1703744 - DNA, 25 bp, Homo sapien
tgagcagcaattccggaccttgtcc

SEQ ID NO: 1703745 - DNA, 25 bp, Homo sapien
cctttcctactgtgaagcccaccat

SEQ ID NO: 1703746 - DNA, 25 bp, Homo sapien
tcctggactcagttaccccttcctc

SEQ ID NO: 1703747 - DNA, 25 bp, Homo sapien
ggccagtaggaagcccgattatcca

SEQ ID NO: 1703748 - DNA, 25 bp, Homo sapien
gaagcccgattatccatggccacgc

SEQ ID NO: 1703749 - DNA, 25 bp, Homo sapien
ataccctgggccagtaggaagcccg

SEQ ID NO: 1703750 - DNA, 25 bp, Homo sapien
tggcacgtccggatgtcgggaacag

SEQ ID NO: 1703751 - DNA, 25 bp, Homo sapien
gtggcacgtccggatgtcgggaaca

SEQ ID NO: 1703752 - DNA, 25 bp, Homo sapien
ctacgaggcagaagtggcacgtccg

SEQ ID NO: 1703753 - DNA, 25 bp, Homo sapien
cacgtccggatgtcgggaacaggaa

SEQ ID NO: 1703754 - DNA, 25 bp, Homo sapien
gagctgctgatggtacacttctctg

SEQ ID NO: 1703755 - DNA, 25 bp, Homo sapien
ggatgagctgctgatggtacacttc

SEQ ID NO: 1703756 - DNA, 25 bp, Homo sapien
gctgctgatggtacacttctctgag

SEQ ID NO: 1703757 - DNA, 25 bp, Homo sapien
gctgatggtacacttctctgagcct

SEQ ID NO: 1703758 - DNA, 25 bp, Homo sapien
gaaagctgataaccccttccaatag

SEQ ID NO: 1703759 - DNA, 25 bp, Homo sapien
caagaacccctgctactgacttttc

SEQ ID NO: 1703760 - DNA, 25 bp, Homo sapien
gaggctagaaaagtgagctctgctg

SEQ ID NO: 1703761 - DNA, 25 bp, Homo sapien
ttccaatagcttcccatagtccaag

SEQ ID NO: 1703762 - DNA, 25 bp, Homo sapien
tgggcctgataccagtactctgcaa

SEQ ID NO: 1703763 - DNA, 25 bp, Homo sapien
tcgaacgatgaagcgaaccttgaca

SEQ ID NO: 1703764 - DNA, 25 bp, Homo sapien
gcagcggtaggaaatgtactgtcca

SEQ ID NO: 1703765 - DNA, 25 bp, Homo sapien
gtactgtccacagcctcgaacgatg

SEQ ID NO: 1703766 - DNA, 25 bp, Homo sapien
caggttcagggacagtgtgaccatg

SEQ ID NO: 1703767 - DNA, 25 bp, Homo sapien
gaacaagtacatgcggcgcagctca

SEQ ID NO: 1703768 - DNA, 25 bp, Homo sapien
aggctccgtcccagcatggaaattg

SEQ ID NO: 1703769 - DNA, 25 bp, Homo sapien
aagtcctgaactattgaggaacaag

SEQ ID NO: 1703770 - DNA, 25 bp, Homo sapien
tcacagtgaccaaagaatgtgggtg

SEQ ID NO: 1703771 - DNA, 25 bp, Homo sapien
cacaaaagtcatatagatgctagtg

SEQ ID NO: 1703772 - DNA, 25 bp, Homo sapien
gctagtggtacaacagacggaggcc

SEQ ID NO: 1703773 - DNA, 25 bp, Homo sapien
gacggaggcctaagaaatcacagtg

SEQ ID NO: 1703774 - DNA, 25 bp, Homo sapien
tggagctgagcagaacagacccttc

SEQ ID NO: 1703775 - DNA, 25 bp, Homo sapien
gaaggaatggaggaaccactgtgcc

SEQ ID NO: 1703776 - DNA, 25 bp, Homo sapien
tagcccagtcccagtttattgtgga

SEQ ID NO: 1703777 - DNA, 25 bp, Homo sapien
cagagctagatgtcaataggcaggt

SEQ ID NO: 1703778 - DNA, 25 bp, Homo sapien
gagactttgtgcagggttgtatccc

SEQ ID NO: 1703779 - DNA, 25 bp, Homo sapien
tgtgaccggactcgggaatagcgtc

SEQ ID NO: 1703780 - DNA, 25 bp, Homo sapien
tgccgaaatccctctggtcagtggt

SEQ ID NO: 1703781 - DNA, 25 bp, Homo sapien
tttaactgtcgaggtgctcctggca

SEQ ID NO: 1703782 - DNA, 25 bp, Homo sapien
cagtggcgtgcagtttcctctcgaa

SEQ ID NO: 1703783 - DNA, 25 bp, Homo sapien
cgcagtccggccctaatatagtttt

SEQ ID NO: 1703784 - DNA, 25 bp, Homo sapien
ccgtcctaccggagttctgaggtgc

SEQ ID NO: 1703785 - DNA, 25 bp, Homo sapien
cgaccagaacctccagacgggaaat

SEQ ID NO: 1703786 - DNA, 25 bp, Homo sapien
acctcagccgactccattctttttt

SEQ ID NO: 1703787 - DNA, 25 bp, Homo sapien
actacacacagctgatttttcgtat

SEQ ID NO: 1703788 - DNA, 25 bp, Homo sapien
cccacctcagccgactccattcttt

SEQ ID NO: 1703789 - DNA, 25 bp, Homo sapien
ccacccacctcagccgactccattc

SEQ ID NO: 1703790 - DNA, 25 bp, Homo sapien
ggtaaagcaggccttacagtctgtg

SEQ ID NO: 1703791 - DNA, 25 bp, Homo sapien
cactagcctggtacatatttcatta

SEQ ID NO: 1703792 - DNA, 25 bp, Homo sapien
aggaaagtaaagctgtgaaggtcag

SEQ ID NO: 1703793 - DNA, 25 bp, Homo sapien
ctctcagaattctgtacatacagga

SEQ ID NO: 1703794 - DNA, 25 bp, Homo sapien
gcctggggagttccacataggaaca

SEQ ID NO: 1703795 - DNA, 25 bp, Homo sapien
gcagcctggggagttccacatagga

SEQ ID NO: 1703796 - DNA, 25 bp, Homo sapien
cagcctggggagttccacataggaa

SEQ ID NO: 1703797 - DNA, 25 bp, Homo sapien
tggggagttccacataggaacagga

SEQ ID NO: 1703798 - DNA, 25 bp, Homo sapien
tgttcgtccccatgtagagtagatg

SEQ ID NO: 1703799 - DNA, 25 bp, Homo sapien
tttgagcaccaagacgtcgtacacc

SEQ ID NO: 1703800 - DNA, 25 bp, Homo sapien
ccacttggacttgggctaccagggt

SEQ ID NO: 1703801 - DNA, 25 bp, Homo sapien
ggatccctccaaccacaaagaatag

SEQ ID NO: 1703802 - DNA, 25 bp, Homo sapien
tcacagagtccatgcgtctgctggg

SEQ ID NO: 1703803 - DNA, 25 bp, Homo sapien
gcagcccttgcagataactgggatc

SEQ ID NO: 1703804 - DNA, 25 bp, Homo sapien
tgccaggctaaagctgacccctttg

SEQ ID NO: 1703805 - DNA, 25 bp, Homo sapien
gattcttggtcttcggctcctgggc

SEQ ID NO: 1703806 - DNA, 25 bp, Homo sapien
agggccaggatgacaactccctggc

SEQ ID NO: 1703807 - DNA, 25 bp, Homo sapien
aaggcatgtcccagcccgtggaagg

SEQ ID NO: 1703808 - DNA, 25 bp, Homo sapien
aactccctggcccattgtgagcagc

SEQ ID NO: 1703809 - DNA, 25 bp, Homo sapien
atcagaatccaaggcatgtcccagc

SEQ ID NO: 1703810 - DNA, 25 bp, Homo sapien
gacgggccaaatggatgttctcata

SEQ ID NO: 1703811 - DNA, 25 bp, Homo sapien
ccaagacgggccaaatggatgttct

SEQ ID NO: 1703812 - DNA, 25 bp, Homo sapien
ggtttgaactgaggaatcgaggcat

SEQ ID NO: 1703813 - DNA, 25 bp, Homo sapien
agacctggatttcgggtttgaactg

SEQ ID NO: 1703814 - DNA, 25 bp, Homo sapien
gaaggctccgctgctacatctgtgg

SEQ ID NO: 1703815 - DNA, 25 bp, Homo sapien
cgggacgatgaagcttgtggcatca

SEQ ID NO: 1703816 - DNA, 25 bp, Homo sapien
cctgttcccaccgagtgtcgggacg

SEQ ID NO: 1703817 - DNA, 25 bp, Homo sapien
tattggcacttcaggtaggactctg

SEQ ID NO: 1703818 - DNA, 25 bp, Homo sapien
ccaaggcagcccctagcagggagct

SEQ ID NO: 1703819 - DNA, 25 bp, Homo sapien
agcaagatcccaacaaactggggtt

SEQ ID NO: 1703820 - DNA, 25 bp, Homo sapien
agatcccaacaaactggggtttcat

SEQ ID NO: 1703821 - DNA, 25 bp, Homo sapien
ggagctgagcaagatcccaacaaac

SEQ ID NO: 1703822 - DNA, 25 bp, Homo sapien
ctgtgtgagaagctagctggccgcc

SEQ ID NO: 1703823 - DNA, 25 bp, Homo sapien
aggcctgtgtgagaagctagctggc

SEQ ID NO: 1703824 - DNA, 25 bp, Homo sapien
gcagaaggcctgtgtgagaagctag

SEQ ID NO: 1703825 - DNA, 25 bp, Homo sapien
gcctgtgtgagaagctagctggccg

SEQ ID NO: 1703826 - DNA, 25 bp, Homo sapien
tcgccacaggtggtcacggcctctt

SEQ ID NO: 1703827 - DNA, 25 bp, Homo sapien
gtctgccctcgccacaggtggtcac

SEQ ID NO: 1703828 - DNA, 25 bp, Homo sapien
cacagttgtagcaccgcattcggtt

SEQ ID NO: 1703829 - DNA, 25 bp, Homo sapien
ggtcacggcctctttgcaagaactg

SEQ ID NO: 1703830 - DNA, 25 bp, Homo sapien
cagaaggattgacatggggctggag

SEQ ID NO: 1703831 - DNA, 25 bp, Homo sapien
gcctatgagattcttttaggagaat

SEQ ID NO: 1703832 - DNA, 25 bp, Homo sapien
agcctggagggttctggaagccaga

SEQ ID NO: 1703833 - DNA, 25 bp, Homo sapien
ccagagccagactgagcctggaggg

SEQ ID NO: 1703834 - DNA, 25 bp, Homo sapien
gcagagcagatgtgatttcaaggag

SEQ ID NO: 1703835 - DNA, 25 bp, Homo sapien
tcctggcttcaggacttgccttctg

SEQ ID NO: 1703836 - DNA, 25 bp, Homo sapien
tgtgatttcaaggagcccaaaggga

SEQ ID NO: 1703837 - DNA, 25 bp, Homo sapien
caaggagcccaaagggattttcagc

SEQ ID NO: 1703838 - DNA, 25 bp, Homo sapien
tgttggtgaatcaaggtcactgggg

SEQ ID NO: 1703839 - DNA, 25 bp, Homo sapien
atgttggtgaatcaaggtcactggg

SEQ ID NO: 1703840 - DNA, 25 bp, Homo sapien
ctgcgacgcaggctggatgttggtg

SEQ ID NO: 1703841 - DNA, 25 bp, Homo sapien
tgcgacgcaggctggatgttggtga

SEQ ID NO: 1703842 - DNA, 25 bp, Homo sapien
ggtctcccaggtagcagtccctgtg

SEQ ID NO: 1703843 - DNA, 25 bp, Homo sapien
acaggtctcccaggtagcagtccct

SEQ ID NO: 1703844 - DNA, 25 bp, Homo sapien
ggctggataagtcacgtctcccacc

SEQ ID NO: 1703845 - DNA, 25 bp, Homo sapien
ggataagtcacgtctcccaccgact

SEQ ID NO: 1703846 - DNA, 25 bp, Homo sapien
tcctggcaagagacaggtcagggcg

SEQ ID NO: 1703847 - DNA, 25 bp, Homo sapien
acagtcctggcaagagacaggtcag

SEQ ID NO: 1703848 - DNA, 25 bp, Homo sapien
tggcaagagacaggtcagggcggta

SEQ ID NO: 1703849 - DNA, 25 bp, Homo sapien
cagtcctggcaagagacaggtcagg

SEQ ID NO: 1703850 - DNA, 25 bp, Homo sapien
ctcacattagatgttcagatgtccc

SEQ ID NO: 1703851 - DNA, 25 bp, Homo sapien
ttttaatgactcacagaaggatgtt

SEQ ID NO: 1703852 - DNA, 25 bp, Homo sapien
catagattttaatgactcacagaag

SEQ ID NO: 1703853 - DNA, 25 bp, Homo sapien
tgtttgtcttctcacattagatgtt

SEQ ID NO: 1703854 - DNA, 25 bp, Homo sapien
tgagtaataaatgtctgagtctgat

SEQ ID NO: 1703855 - DNA, 25 bp, Homo sapien
tacatttattataagaagacctaag

SEQ ID NO: 1703856 - DNA, 25 bp, Homo sapien
catttattataagaagacctaaggg

SEQ ID NO: 1703857 - DNA, 25 bp, Homo sapien
aaatgtctgagtctgataaaatgta

SEQ ID NO: 1703858 - DNA, 25 bp, Homo sapien
ctccagcctgggcgacagagccagc

SEQ ID NO: 1703859 - DNA, 25 bp, Homo sapien
cctgggcgacagagccagccagacc

SEQ ID NO: 1703860 - DNA, 25 bp, Homo sapien
gcagtgaactgtgatcaggccattg

SEQ ID NO: 1703861 - DNA, 25 bp, Homo sapien
agtgaactgtgatcaggccattgca

SEQ ID NO: 1703862 - DNA, 25 bp, Homo sapien
cagggttcccttgggccctcgagag

SEQ ID NO: 1703863 - DNA, 25 bp, Homo sapien
gggccctcgagagcagcagcggtag

SEQ ID NO: 1703864 - DNA, 25 bp, Homo sapien
ccttgggccctcgagagcagcagcg

SEQ ID NO: 1703865 - DNA, 25 bp, Homo sapien
ttcccttgggccctcgagagcagca

SEQ ID NO: 1703866 - DNA, 25 bp, Homo sapien
tgtggttagggcacgtccacagggc

SEQ ID NO: 1703867 - DNA, 25 bp, Homo sapien
tggttagggcacgtccacagggcaa

SEQ ID NO: 1703868 - DNA, 25 bp, Homo sapien
agaggccggaggctgtggttagggc

SEQ ID NO: 1703869 - DNA, 25 bp, Homo sapien
aggccggaggctgtggttagggcac

SEQ ID NO: 1703870 - DNA, 25 bp, Homo sapien
ccagcacgtgaagcactgtacggct

SEQ ID NO: 1703871 - DNA, 25 bp, Homo sapien
ccagcggatgggatgagagactcct

SEQ ID NO: 1703872 - DNA, 25 bp, Homo sapien
gcccttgcagaaaaaagtgcccgag

SEQ ID NO: 1703873 - DNA, 25 bp, Homo sapien
cctccgcaggagagattcacccggt

SEQ ID NO: 1703874 - DNA, 25 bp, Homo sapien
ggcccaaagctcccagtccgagcac

SEQ ID NO: 1703875 - DNA, 25 bp, Homo sapien
ccaaagctcccagtccgagcaccaa

SEQ ID NO: 1703876 - DNA, 25 bp, Homo sapien
aaagctcccagtccgagcaccaacc

SEQ ID NO: 1703877 - DNA, 25 bp, Homo sapien
gcccaaagctcccagtccgagcacc

SEQ ID NO: 1703878 - DNA, 25 bp, Homo sapien
ctgtaagggacatatgagtctttga

SEQ ID NO: 1703879 - DNA, 25 bp, Homo sapien
gaaccaccagtcttgtctcactggt

SEQ ID NO: 1703880 - DNA, 25 bp, Homo sapien
gggacatatgagtctttgagaacca

SEQ ID NO: 1703881 - DNA, 25 bp, Homo sapien
tgagaaccaccagtcttgtctcact

SEQ ID NO: 1703882 - DNA, 25 bp, Homo sapien
tagggagtggtcgaatcggttgcgg

SEQ ID NO: 1703883 - DNA, 25 bp, Homo sapien
tctagggagtggtcgaatcggttgc

SEQ ID NO: 1703884 - DNA, 25 bp, Homo sapien
aatctagggagtggtcgaatcggtt

SEQ ID NO: 1703885 - DNA, 25 bp, Homo sapien
caaatctagggagtggtcgaatcgg

SEQ ID NO: 1703886 - DNA, 25 bp, Homo sapien
tggggagtgggcatgtaggagaaag

SEQ ID NO: 1703887 - DNA, 25 bp, Homo sapien
ggtggggagtgggcatgtaggagaa

SEQ ID NO: 1703888 - DNA, 25 bp, Homo sapien
ggagtgggcatgtaggagaaagaaa

SEQ ID NO: 1703889 - DNA, 25 bp, Homo sapien
gggagtgggcatgtaggagaaagaa

SEQ ID NO: 1703890 - DNA, 25 bp, Homo sapien
ctgaaggatggagagaaggtgacca

SEQ ID NO: 1703891 - DNA, 25 bp, Homo sapien
gaaggatggagagaaggtgaccaac

SEQ ID NO: 1703892 - DNA, 25 bp, Homo sapien
ggatggagagaaggtgaccaacgtg

SEQ ID NO: 1703893 - DNA, 25 bp, Homo sapien
gatggagagaaggtgaccaacgtgt

SEQ ID NO: 1703894 - DNA, 25 bp, Homo sapien
tcctcctttactggcctctggggct

SEQ ID NO: 1703895 - DNA, 25 bp, Homo sapien
tccccttcccatccccatgccctta

SEQ ID NO: 1703896 - DNA, 25 bp, Homo sapien
ctatccccttcccatccccatgccc

SEQ ID NO: 1703897 - DNA, 25 bp, Homo sapien
atccccttcccatccccatgccctt

SEQ ID NO: 1703898 - DNA, 25 bp, Homo sapien
tatccccttcccatccccatgccct

SEQ ID NO: 1703899 - DNA, 25 bp, Homo sapien
ggtccattttcctcagagattctgg

SEQ ID NO: 1703900 - DNA, 25 bp, Homo sapien
ccacagtcttccttggggttcaggc

SEQ ID NO: 1703901 - DNA, 25 bp, Homo sapien
gggaggaagacaagatggtctccac

SEQ ID NO: 1703902 - DNA, 25 bp, Homo sapien
aggaagacaagatggtctccacagt

SEQ ID NO: 1703903 - DNA, 25 bp, Homo sapien
ggtccagatccgcatagagcaggct

SEQ ID NO: 1703904 - DNA, 25 bp, Homo sapien
tgagggctagatggtccagatccgc

SEQ ID NO: 1703905 - DNA, 25 bp, Homo sapien
tagatggtccagatccgcatagagc

SEQ ID NO: 1703906 - DNA, 25 bp, Homo sapien
agggtccgctgtggacagccggcgg

SEQ ID NO: 1703907 - DNA, 25 bp, Homo sapien
tgatgagagtgtcccagaagaagag

SEQ ID NO: 1703908 - DNA, 25 bp, Homo sapien
gaaaggaggtctgcgtgactcccag

SEQ ID NO: 1703909 - DNA, 25 bp, Homo sapien
cttgtatccaaagccaaggcacgtg

SEQ ID NO: 1703910 - DNA, 25 bp, Homo sapien
tgagcagagtacattcacgtggcag

SEQ ID NO: 1703911 - DNA, 25 bp, Homo sapien
tggatctggccaaagctcaaaggga

SEQ ID NO: 1703912 - DNA, 25 bp, Homo sapien
tgagcgcatcctagtggctgccaag

SEQ ID NO: 1703913 - DNA, 25 bp, Homo sapien
tgccacctgaggagtcattgccgct

SEQ ID NO: 1703914 - DNA, 25 bp, Homo sapien
ctcgttcgggtattcaggacttcca

SEQ ID NO: 1703915 - DNA, 25 bp, Homo sapien
tacgcccgggaagaattcgcttcca

SEQ ID NO: 1703916 - DNA, 25 bp, Homo sapien
gaatcctggagcacttgttccggga

SEQ ID NO: 1703917 - DNA, 25 bp, Homo sapien
gcaagtggcaaaggccctcaaataa

SEQ ID NO: 1703918 - DNA, 25 bp, Homo sapien
gggagtgcatcggtacttgagcaat

SEQ ID NO: 1703919 - DNA, 25 bp, Homo sapien
tgattgagcttgtgttgtgctgaag

SEQ ID NO: 1703920 - DNA, 25 bp, Homo sapien
tggtccccgacgcaaccatggctga

SEQ ID NO: 1703921 - DNA, 25 bp, Homo sapien
cctagtttgggtgcaagtaggtctg

SEQ ID NO: 1703922 - DNA, 25 bp, Homo sapien
gtccctgagtgtgagacccgccttc

SEQ ID NO: 1703923 - DNA, 25 bp, Homo sapien
gaatcttcacgggtgtgcccaagct

SEQ ID NO: 1703924 - DNA, 25 bp, Homo sapien
tatgcccaatcccaagtgtaggcca

SEQ ID NO: 1703925 - DNA, 25 bp, Homo sapien
gctaacggttcctatctgcagtccc

SEQ ID NO: 1703926 - DNA, 25 bp, Homo sapien
tgcagaatgattaaacgaccacctt

SEQ ID NO: 1703927 - DNA, 25 bp, Homo sapien
gtcgctacaggtgggagaacgcccc

SEQ ID NO: 1703928 - DNA, 25 bp, Homo sapien
gcctgcaaaaggagcgcgccggcgc

SEQ ID NO: 1703929 - DNA, 25 bp, Homo sapien
gccggcgcgtgagcgaggtgcgcgc

SEQ ID NO: 1703930 - DNA, 25 bp, Homo sapien
accgaccgccacgagcctgcaaaag

SEQ ID NO: 1703931 - DNA, 25 bp, Homo sapien
gaccccagcctcacgcgcttatctt

SEQ ID NO: 1703932 - DNA, 25 bp, Homo sapien
tcgcagcgttttcccgccttttcag

SEQ ID NO: 1703933 - DNA, 25 bp, Homo sapien
gagtcgtgcacgtcttatgtctctg

SEQ ID NO: 1703934 - DNA, 25 bp, Homo sapien
tgcctctgccaaccacgcgccagga

SEQ ID NO: 1703935 - DNA, 25 bp, Homo sapien
ctcattcctgtcacgcggaggttac

SEQ ID NO: 1703936 - DNA, 25 bp, Homo sapien
cctcattcctgtcacgcggaggtta

SEQ ID NO: 1703937 - DNA, 25 bp, Homo sapien
caggaggtgaattctcgggtattta

SEQ ID NO: 1703938 - DNA, 25 bp, Homo sapien
ttgtgggaaactccacgcgccccac

SEQ ID NO: 1703939 - DNA, 25 bp, Homo sapien
actaaagtacagattgtgggaaact

SEQ ID NO: 1703940 - DNA, 25 bp, Homo sapien
acaggaggtgaattctcgggtattt

SEQ ID NO: 1703941 - DNA, 25 bp, Homo sapien
ggaagcaacgattcacagaggaggc

SEQ ID NO: 1703942 - DNA, 25 bp, Homo sapien
ttcggaagcaacgattcacagagga

SEQ ID NO: 1703943 - DNA, 25 bp, Homo sapien
agtgagggcggttcggaagcaacga

SEQ ID NO: 1703944 - DNA, 25 bp, Homo sapien
ctgcggatgcaaaaagtgagggcgg

SEQ ID NO: 1703945 - DNA, 25 bp, Homo sapien
ttgggttcgctcctaaggaggccat

SEQ ID NO: 1703946 - DNA, 25 bp, Homo sapien
tcctccttgggttcgctcctaagga

SEQ ID NO: 1703947 - DNA, 25 bp, Homo sapien
tccttgggttcgctcctaaggaggc

SEQ ID NO: 1703948 - DNA, 25 bp, Homo sapien
cccaggtctcggtccctgcggtgtc

SEQ ID NO: 1703949 - DNA, 25 bp, Homo sapien
cataagtgtagggtttaccatgtct

SEQ ID NO: 1703950 - DNA, 25 bp, Homo sapien
ggaaatcactattagaatcactcat

SEQ ID NO: 1703951 - DNA, 25 bp, Homo sapien
gccactcaggaggtaagagacttgc

SEQ ID NO: 1703952 - DNA, 25 bp, Homo sapien
gataggcatcatcacccccatttag

SEQ ID NO: 1703953 - DNA, 25 bp, Homo sapien
tagtggagtcactagtatcatagta

SEQ ID NO: 1703954 - DNA, 25 bp, Homo sapien
aagtggatagtggagtcactagtat

SEQ ID NO: 1703955 - DNA, 25 bp, Homo sapien
gatagtggagtcactagtatcatag

SEQ ID NO: 1703956 - DNA, 25 bp, Homo sapien
tggatagtggagtcactagtatcat

SEQ ID NO: 1703957 - DNA, 25 bp, Homo sapien
gtttggcactcgtaacaacagactg

SEQ ID NO: 1703958 - DNA, 25 bp, Homo sapien
ctcatcctgtttggcactcgtaaca

SEQ ID NO: 1703959 - DNA, 25 bp, Homo sapien
gaaatcgagtcatattctcatcctg

SEQ ID NO: 1703960 - DNA, 25 bp, Homo sapien
caagctttcccagaaatcgagtcat

SEQ ID NO: 1703961 - DNA, 25 bp, Homo sapien
aaatccacacttggcaaaaatatga

SEQ ID NO: 1703962 - DNA, 25 bp, Homo sapien
aaaatccacacttggcaaaaatatg

SEQ ID NO: 1703963 - DNA, 25 bp, Homo sapien
aatccacacttggcaaaaatatgat

SEQ ID NO: 1703964 - DNA, 25 bp, Homo sapien
caaaatccacacttggcaaaaatat

SEQ ID NO: 1703965 - DNA, 25 bp, Homo sapien
tagggcatgaggagcacaaaggttt

SEQ ID NO: 1703966 - DNA, 25 bp, Homo sapien
gaggcttcccaataagctgcaggtt

SEQ ID NO: 1703967 - DNA, 25 bp, Homo sapien
caaaaagtgtcaccactcctcaggg

SEQ ID NO: 1703968 - DNA, 25 bp, Homo sapien
ccggaacagggagttaggctaagca

SEQ ID NO: 1703969 - DNA, 25 bp, Homo sapien
cttgtagctcaattttttcacccca

SEQ ID NO: 1703970 - DNA, 25 bp, Homo sapien
gaatgagacaatagaagcaagagag

SEQ ID NO: 1703971 - DNA, 25 bp, Homo sapien
ggcaagcaaagggaacggtcttgta

SEQ ID NO: 1703972 - DNA, 25 bp, Homo sapien
caagctcacacaggcagttaatgga

SEQ ID NO: 1703973 - DNA, 25 bp, Homo sapien
tctcagtggcagtcatggcgtctgg

SEQ ID NO: 1703974 - DNA, 25 bp, Homo sapien
tgaggaggcagtcaaagggaataat

SEQ ID NO: 1703975 - DNA, 25 bp, Homo sapien
cagaaaggaggcgttgtttgcttat

SEQ ID NO: 1703976 - DNA, 25 bp, Homo sapien
gaagaggattttctcagtggcagtc

SEQ ID NO: 1703977 - DNA, 25 bp, Homo sapien
agccctagcacttgtgccgcctccc

SEQ ID NO: 1703978 - DNA, 25 bp, Homo sapien
ccttatcccccaggaccaatctcac

SEQ ID NO: 1703979 - DNA, 25 bp, Homo sapien
aggccagtacctcccagaattcagc

SEQ ID NO: 1703980 - DNA, 25 bp, Homo sapien
tcccagaattcagccctagcacttg

SEQ ID NO: 1703981 - DNA, 25 bp, Homo sapien
gatcagcagtggaatcggggtaaat

SEQ ID NO: 1703982 - DNA, 25 bp, Homo sapien
ggaggggatcagcagtggaatcggg

SEQ ID NO: 1703983 - DNA, 25 bp, Homo sapien
cagcagtggaatcggggtaaatctt

SEQ ID NO: 1703984 - DNA, 25 bp, Homo sapien
gggatcagcagtggaatcggggtaa

SEQ ID NO: 1703985 - DNA, 25 bp, Homo sapien
tatagtcttccagttcaaccccgat

SEQ ID NO: 1703986 - DNA, 25 bp, Homo sapien
gggacgctgacattatagtcttcca

SEQ ID NO: 1703987 - DNA, 25 bp, Homo sapien
tcttcgacccaggaacttcagcagc

SEQ ID NO: 1703988 - DNA, 25 bp, Homo sapien
cagttcaaccccgattcttcttcga

SEQ ID NO: 1703989 - DNA, 25 bp, Homo sapien
aagtgtcttgatctatgttcaccag

SEQ ID NO: 1703990 - DNA, 25 bp, Homo sapien
ctgtaagtgtcttgatctatgttca

SEQ ID NO: 1703991 - DNA, 25 bp, Homo sapien
ttgatctatgttcaccagatgagtc

SEQ ID NO: 1703992 - DNA, 25 bp, Homo sapien
tgtcttgatctatgttcaccagatg

SEQ ID NO: 1703993 - DNA, 25 bp, Homo sapien
cactgaggggtgagactcactctta

SEQ ID NO: 1703994 - DNA, 25 bp, Homo sapien
cactggccactttgtacactgaggg

SEQ ID NO: 1703995 - DNA, 25 bp, Homo sapien
cagtccactggccactttgtacact

SEQ ID NO: 1703996 - DNA, 25 bp, Homo sapien
gtacactgaggggtgagactcactc

SEQ ID NO: 1703997 - DNA, 25 bp, Homo sapien
ctgagcagcttctctccccacttac

SEQ ID NO: 1703998 - DNA, 25 bp, Homo sapien
ttttgcattttagtagagatggggc

SEQ ID NO: 1703999 - DNA, 25 bp, Homo sapien
aggcacctaccaacacgcttggcta

SEQ ID NO: 1704000 - DNA, 25 bp, Homo sapien
ttacaggcacctaccaacacgcttg

SEQ ID NO: 1704001 - DNA, 25 bp, Homo sapien
gcacctaccaacacgcttggctaat

SEQ ID NO: 1704002 - DNA, 25 bp, Homo sapien
tcttaatcctgaaggtaatgggaaa

SEQ ID NO: 1704003 - DNA, 25 bp, Homo sapien
aagatgctaatcttaatcctgaagg

SEQ ID NO: 1704004 - DNA, 25 bp, Homo sapien
gatggaccctgaacatcattatact

SEQ ID NO: 1704005 - DNA, 25 bp, Homo sapien
gggtaaacgtgatggaccctgaaca

SEQ ID NO: 1704006 - DNA, 25 bp, Homo sapien
agaggcatgcgccatgatgctgggc

SEQ ID NO: 1704007 - DNA, 25 bp, Homo sapien
gattttgataggtacagaacaagga

SEQ ID NO: 1704008 - DNA, 25 bp, Homo sapien
gacctggatgtaagattttgatagg

SEQ ID NO: 1704009 - DNA, 25 bp, Homo sapien
tcggtagacgtgaagtttcaccaag

SEQ ID NO: 1704010 - DNA, 25 bp, Homo sapien
catgagtcggacgtgtgaaccatag

SEQ ID NO: 1704011 - DNA, 25 bp, Homo sapien
ccaggagccgatgcagcatctgagc

SEQ ID NO: 1704012 - DNA, 25 bp, Homo sapien
aatgacgtccagacgagaactgagc

SEQ ID NO: 1704013 - DNA, 25 bp, Homo sapien
gaaaaaactgaatgacgtccagacg

SEQ ID NO: 1704014 - DNA, 25 bp, Homo sapien
ccccacctccctgccctccaccctg

SEQ ID NO: 1704015 - DNA, 25 bp, Homo sapien
tccttccccacctccctgccctcca

SEQ ID NO: 1704016 - DNA, 25 bp, Homo sapien
tccctgccctccaccctgggctcac

SEQ ID NO: 1704017 - DNA, 25 bp, Homo sapien
cacctccctgccctccaccctgggc

SEQ ID NO: 1704018 - DNA, 25 bp, Homo sapien
gagaacctgccagtcgctgaccttg

SEQ ID NO: 1704019 - DNA, 25 bp, Homo sapien
tgggacaacttcatgcgtttcagaa

SEQ ID NO: 1704020 - DNA, 25 bp, Homo sapien
acaacttcatgcgtttcagaatcag

SEQ ID NO: 1704021 - DNA, 25 bp, Homo sapien
gctgaccttggtgtgggacaacttc

SEQ ID NO: 1704022 - DNA, 25 bp, Homo sapien
tgggggaaatatcaagcaattttct

SEQ ID NO: 1704023 - DNA, 25 bp, Homo sapien
gagtgggggaaatatcaagcaattt

SEQ ID NO: 1704024 - DNA, 25 bp, Homo sapien
gggaaatatcaagcaattttctgta

SEQ ID NO: 1704025 - DNA, 25 bp, Homo sapien
aaaagagtgggggaaatatcaagca

SEQ ID NO: 1704026 - DNA, 25 bp, Homo sapien
gatagggacagactcagaagaacaa

SEQ ID NO: 1704027 - DNA, 25 bp, Homo sapien
caaagaccagtagggaagatcacag

SEQ ID NO: 1704028 - DNA, 25 bp, Homo sapien
aaaaagatatggtccctgtcccaga

SEQ ID NO: 1704029 - DNA, 25 bp, Homo sapien
tatagctataaaaggccatgagtct

SEQ ID NO: 1704030 - DNA, 25 bp, Homo sapien
cgatatggtgcaggtcatcagagaa

SEQ ID NO: 1704031 - DNA, 25 bp, Homo sapien
cgaaagagctggatggactgcggca

SEQ ID NO: 1704032 - DNA, 25 bp, Homo sapien
tactttcccaatgaggctggcgata

SEQ ID NO: 1704033 - DNA, 25 bp, Homo sapien
tcagagaactcttgggcaatgtccc

SEQ ID NO: 1704034 - DNA, 25 bp, Homo sapien
ggaggactgtgaagcgattttcagc

SEQ ID NO: 1704035 - DNA, 25 bp, Homo sapien
tcaatttcaggatctatgttgggga

SEQ ID NO: 1704036 - DNA, 25 bp, Homo sapien
gaggactgtgaagcgattttcagca

SEQ ID NO: 1704037 - DNA, 25 bp, Homo sapien
ttcaggatctatgttggggaggact

SEQ ID NO: 1704038 - DNA, 25 bp, Homo sapien
gatgacactgcatgaaggaatacgg

SEQ ID NO: 1704039 - DNA, 25 bp, Homo sapien
gctccttgcgggcaacctcagtaag

SEQ ID NO: 1704040 - DNA, 25 bp, Homo sapien
tgggaagtcccatcagtcttcgctt

SEQ ID NO: 1704041 - DNA, 25 bp, Homo sapien
gaaggaatacgggagtccagattct

SEQ ID NO: 1704042 - DNA, 25 bp, Homo sapien
cagtccattaatctcaaagtcactg

SEQ ID NO: 1704043 - DNA, 25 bp, Homo sapien
atctcaaagtcactggcctctacca

SEQ ID NO: 1704044 - DNA, 25 bp, Homo sapien
agtccagtccattaatctcaaagtc

SEQ ID NO: 1704045 - DNA, 25 bp, Homo sapien
attaatctcaaagtcactggcctct

SEQ ID NO: 1704046 - DNA, 25 bp, Homo sapien
gctggtaaagctcagagtaaaacta

SEQ ID NO: 1704047 - DNA, 25 bp, Homo sapien
tgtggactttgcatctcttggtcct

SEQ ID NO: 1704048 - DNA, 25 bp, Homo sapien
ctcaccttacagaggttgagggtct

SEQ ID NO: 1704049 - DNA, 25 bp, Homo sapien
gtaaaactacagaggagagatccca

SEQ ID NO: 1704050 - DNA, 25 bp, Homo sapien
catccagctccttggttcgggcact

SEQ ID NO: 1704051 - DNA, 25 bp, Homo sapien
tcgcagtgcaggtcccccagcaatg

SEQ ID NO: 1704052 - DNA, 25 bp, Homo sapien
gcactacgatagtgcagcttctcct

SEQ ID NO: 1704053 - DNA, 25 bp, Homo sapien
ccttggttcgggcactacgatagtg

SEQ ID NO: 1704054 - DNA, 25 bp, Homo sapien
gaggcaaggtccaatactcgggtta

SEQ ID NO: 1704055 - DNA, 25 bp, Homo sapien
actcgggttaagacagctgctcgtg

SEQ ID NO: 1704056 - DNA, 25 bp, Homo sapien
tctggattcgtaccccaaggacttg

SEQ ID NO: 1704057 - DNA, 25 bp, Homo sapien
ttgagtagccatagtcccgggcagc

SEQ ID NO: 1704058 - DNA, 25 bp, Homo sapien
gaggtatatgctcttccctgatgag

SEQ ID NO: 1704059 - DNA, 25 bp, Homo sapien
agtgatgactttgaccctccctttg

SEQ ID NO: 1704060 - DNA, 25 bp, Homo sapien
ccacattctgtggagttgggcacaa

SEQ ID NO: 1704061 - DNA, 25 bp, Homo sapien
caaaggttcgggcacagagttccat

SEQ ID NO: 1704062 - DNA, 25 bp, Homo sapien
gatggcgtctactgccccaatttcg

SEQ ID NO: 1704063 - DNA, 25 bp, Homo sapien
gagatggattcgcagctatgaattc

SEQ ID NO: 1704064 - DNA, 25 bp, Homo sapien
cctaccagggccatgaatgtgatca

SEQ ID NO: 1704065 - DNA, 25 bp, Homo sapien
tatgaattcgtgtgaagatggcgtc

SEQ ID NO: 1704066 - DNA, 25 bp, Homo sapien
cagcgactgtgcagtggcattgttc

SEQ ID NO: 1704067 - DNA, 25 bp, Homo sapien
ggcatgtgggtccacgtgccagcca

SEQ ID NO: 1704068 - DNA, 25 bp, Homo sapien
acagcggccagaagcgcgagcccat

SEQ ID NO: 1704069 - DNA, 25 bp, Homo sapien
gctgaacaaggctcagaaagttggt

SEQ ID NO: 1704070 - DNA, 25 bp, Homo sapien
cagtgtcggagcacagcggccagaa

SEQ ID NO: 1704071 - DNA, 25 bp, Homo sapien
tcctgtcctgaaacccttggccaat

SEQ ID NO: 1704072 - DNA, 25 bp, Homo sapien
ttcctgtcctgaaacccttggccaa

SEQ ID NO: 1704073 - DNA, 25 bp, Homo sapien
ataaaagacagtgtatcatcaatca

SEQ ID NO: 1704074 - DNA, 25 bp, Homo sapien
taaaagacagtgtatcatcaatcac

SEQ ID NO: 1704075 - DNA, 25 bp, Homo sapien
aataaaagacagtgtatcatcaatc

SEQ ID NO: 1704076 - DNA, 25 bp, Homo sapien
gaagacaagatcgttgccatcctca

SEQ ID NO: 1704077 - DNA, 25 bp, Homo sapien
gacaagatcgttgccatcctcacag

SEQ ID NO: 1704078 - DNA, 25 bp, Homo sapien
gaagaagacaagatcgttgccatcc

SEQ ID NO: 1704079 - DNA, 25 bp, Homo sapien
tgatagaagaagacaagatcgttgc

SEQ ID NO: 1704080 - DNA, 25 bp, Homo sapien
cttgccacgagccacaagcttgtca

SEQ ID NO: 1704081 - DNA, 25 bp, Homo sapien
gcatggctggccttcgcaacacctt

SEQ ID NO: 1704082 - DNA, 25 bp, Homo sapien
agccacaagcttgtcaggaagccca

SEQ ID NO: 1704083 - DNA, 25 bp, Homo sapien
atggctggccttcgcaacaccttcg

SEQ ID NO: 1704084 - DNA, 25 bp, Homo sapien
ggtggttgcacatttggatctcatc

SEQ ID NO: 1704085 - DNA, 25 bp, Homo sapien
cagaaatcctgtggacctagaccca

SEQ ID NO: 1704086 - DNA, 25 bp, Homo sapien
ccagtaggactaggaatgaaaggga

SEQ ID NO: 1704087 - DNA, 25 bp, Homo sapien
caagcaagaaggtgggaggagtaag

SEQ ID NO: 1704088 - DNA, 25 bp, Homo sapien
ttgacaggcttgatgggttttccac

SEQ ID NO: 1704089 - DNA, 25 bp, Homo sapien
gatgggttttccactgcggatcaag

SEQ ID NO: 1704090 - DNA, 25 bp, Homo sapien
ggcttgatgggttttccactgcgga

SEQ ID NO: 1704091 - DNA, 25 bp, Homo sapien
ttagcaaatccttgacaggcttgat

SEQ ID NO: 1704092 - DNA, 25 bp, Homo sapien
cgttcaagtccaggttaggatcttc

SEQ ID NO: 1704093 - DNA, 25 bp, Homo sapien
gctcatgaaaacgttcaagtccagg

SEQ ID NO: 1704094 - DNA, 25 bp, Homo sapien
caggttaggatcttccaaatccagt

SEQ ID NO: 1704095 - DNA, 25 bp, Homo sapien
ccagtttcataaacttatccactaa

SEQ ID NO: 1704096 - DNA, 25 bp, Homo sapien
gaggctggggaggacactggaagga

SEQ ID NO: 1704097 - DNA, 25 bp, Homo sapien
tcaggaggctggggaggacactgga

SEQ ID NO: 1704098 - DNA, 25 bp, Homo sapien
aggaggctggggaggacactggaag

SEQ ID NO: 1704099 - DNA, 25 bp, Homo sapien
cggagtctcaggaggctggggagga

SEQ ID NO: 1704100 - DNA, 25 bp, Homo sapien
actaaaaactctgcgtctgagggag

SEQ ID NO: 1704101 - DNA, 25 bp, Homo sapien
ctctgcgtctgagggagataaggaa

SEQ ID NO: 1704102 - DNA, 25 bp, Homo sapien
taaaaactctgcgtctgagggagat

SEQ ID NO: 1704103 - DNA, 25 bp, Homo sapien
aaaactctgcgtctgagggagataa

SEQ ID NO: 1704104 - DNA, 25 bp, Homo sapien
tcctagtctcttgttttgagactaa

SEQ ID NO: 1704105 - DNA, 25 bp, Homo sapien
tctcttgttttgagactaaagaaac

SEQ ID NO: 1704106 - DNA, 25 bp, Homo sapien
cctagtctcttgttttgagactaaa

SEQ ID NO: 1704107 - DNA, 25 bp, Homo sapien
gttcgttctcatgaagtatcctggg

SEQ ID NO: 1704108 - DNA, 25 bp, Homo sapien
gggttcgttctcatgaagtatcctg

SEQ ID NO: 1704109 - DNA, 25 bp, Homo sapien
aggctggggtgttcctacttgagaa

SEQ ID NO: 1704110 - DNA, 25 bp, Homo sapien
tgttcctacttgagaagagagacca

SEQ ID NO: 1704111 - DNA, 25 bp, Homo sapien
gtcttggcggcttgtccccagcggc

SEQ ID NO: 1704112 - DNA, 25 bp, Homo sapien
gggtcttggcggcttgtccccagcg

SEQ ID NO: 1704113 - DNA, 25 bp, Homo sapien
tgcaccaagggcaccccgccagagc

SEQ ID NO: 1704114 - DNA, 25 bp, Homo sapien
ttggcggcttgtccccagcggcagc

SEQ ID NO: 1704115 - DNA, 25 bp, Homo sapien
ctgtcgctgtgcctccctcagatgg

SEQ ID NO: 1704116 - DNA, 25 bp, Homo sapien
gctgtcgctgtgcctccctcagatg

SEQ ID NO: 1704117 - DNA, 25 bp, Homo sapien
tgtcgctgtgcctccctcagatggt

SEQ ID NO: 1704118 - DNA, 25 bp, Homo sapien
caccaagggcccctagatgcagctg

SEQ ID NO: 1704119 - DNA, 25 bp, Homo sapien
caacttaacacttggtggcatcctg

SEQ ID NO: 1704120 - DNA, 25 bp, Homo sapien
tacgatgctgcctccaactcatgat

SEQ ID NO: 1704121 - DNA, 25 bp, Homo sapien
cctctccagagtggtctcaggctgt

SEQ ID NO: 1704122 - DNA, 25 bp, Homo sapien
ggtgaaaacctgaggtcgtctgcca

SEQ ID NO: 1704123 - DNA, 25 bp, Homo sapien
cggggggcgaccaggctctgagtgt

SEQ ID NO: 1704124 - DNA, 25 bp, Homo sapien
tgaatctgggctaacggggggcgac

SEQ ID NO: 1704125 - DNA, 25 bp, Homo sapien
ctaacggggggcgaccaggctctga

SEQ ID NO: 1704126 - DNA, 25 bp, Homo sapien
gctctgagtgtaaatctgttagaaa

SEQ ID NO: 1704127 - DNA, 25 bp, Homo sapien
agcactgaccccaacaactcccctc

SEQ ID NO: 1704128 - DNA, 25 bp, Homo sapien
cccaacaactcccctctctagtcca

SEQ ID NO: 1704129 - DNA, 25 bp, Homo sapien
gggaaattcgctgtgttttctgtta

SEQ ID NO: 1704130 - DNA, 25 bp, Homo sapien
ggtggtgcaggaactagccttgttc

SEQ ID NO: 1704131 - DNA, 25 bp, Homo sapien
ggtgcaggaactagccttgttcagt

SEQ ID NO: 1704132 - DNA, 25 bp, Homo sapien
ccttgttcagtggacttggggagaa

SEQ ID NO: 1704133 - DNA, 25 bp, Homo sapien
ctgggtggtgcaggaactagccttg

SEQ ID NO: 1704134 - DNA, 25 bp, Homo sapien
tcctgccctccttcttgaagtttac

SEQ ID NO: 1704135 - DNA, 25 bp, Homo sapien
cccagccctgtagggtggggctcct

SEQ ID NO: 1704136 - DNA, 25 bp, Homo sapien
ctctgggctcctcccagccctgtag

SEQ ID NO: 1704137 - DNA, 25 bp, Homo sapien
ggaggagaaacagatggggcctctg

SEQ ID NO: 1704138 - DNA, 25 bp, Homo sapien
ttggtgcagccccgctgagccatct

SEQ ID NO: 1704139 - DNA, 25 bp, Homo sapien
ttagacacgggtagggcctcttggc

SEQ ID NO: 1704140 - DNA, 25 bp, Homo sapien
gtagggcctcttggccccttggtgc

SEQ ID NO: 1704141 - DNA, 25 bp, Homo sapien
tggctgggtgactcctttctgctgc

SEQ ID NO: 1704142 - DNA, 25 bp, Homo sapien
tttaaggctgaaggacagtttcaat

SEQ ID NO: 1704143 - DNA, 25 bp, Homo sapien
gaaagatcgtttttgcatgtcatat

SEQ ID NO: 1704144 - DNA, 25 bp, Homo sapien
tgaacttcattgactcactacctgg

SEQ ID NO: 1704145 - DNA, 25 bp, Homo sapien
gaaactttacaccaacatgtctgaa

SEQ ID NO: 1704146 - DNA, 25 bp, Homo sapien
tatcctgtcaaggtgccgctcgaag

SEQ ID NO: 1704147 - DNA, 25 bp, Homo sapien
caagctgcaagccaagcgagttgag

SEQ ID NO: 1704148 - DNA, 25 bp, Homo sapien
cgtctgcgggaacgccgtgctgcct

SEQ ID NO: 1704149 - DNA, 25 bp, Homo sapien
gcaagccaagcgagttgaggcccag

SEQ ID NO: 1704150 - DNA, 25 bp, Homo sapien
cagtcagaagacctgagtgtgttct

SEQ ID NO: 1704151 - DNA, 25 bp, Homo sapien
agtcagaagacctgagtgtgttcta

SEQ ID NO: 1704152 - DNA, 25 bp, Homo sapien
tgaggatgtattggatacctggttc

SEQ ID NO: 1704153 - DNA, 25 bp, Homo sapien
gatgaggatgtattggatacctggt

SEQ ID NO: 1704154 - DNA, 25 bp, Homo sapien
aggatgtattggatacctggttctc

SEQ ID NO: 1704155 - DNA, 25 bp, Homo sapien
gaggatgtattggatacctggttct

SEQ ID NO: 1704156 - DNA, 25 bp, Homo sapien
agccaaggagttcggagtgtcccct

SEQ ID NO: 1704157 - DNA, 25 bp, Homo sapien
gagtgtcccctgacaagatcagtct

SEQ ID NO: 1704158 - DNA, 25 bp, Homo sapien
actgggtgagtggacgcaatgaggc

SEQ ID NO: 1704159 - DNA, 25 bp, Homo sapien
ccctgatgggcggtactgggtgagt

SEQ ID NO: 1704160 - DNA, 25 bp, Homo sapien
tgaggcccatcagcgcacatggcat

SEQ ID NO: 1704161 - DNA, 25 bp, Homo sapien
cccgacatttgcagggagtggtgca

SEQ ID NO: 1704162 - DNA, 25 bp, Homo sapien
tgtcactgtcagtgacccagcggtg

SEQ ID NO: 1704163 - DNA, 25 bp, Homo sapien
cacatggcatgcctggatggacaac

SEQ ID NO: 1704164 - DNA, 25 bp, Homo sapien
tgggcatcgccatgatgaggcctca

SEQ ID NO: 1704165 - DNA, 25 bp, Homo sapien
ggaggccatcagcatcatggactcc

SEQ ID NO: 1704166 - DNA, 25 bp, Homo sapien
cattgaggacaaccccatggtggtg

SEQ ID NO: 1704167 - DNA, 25 bp, Homo sapien
tacacccaggtgctgtgaagatcac

SEQ ID NO: 1704168 - DNA, 25 bp, Homo sapien
gccagaattccgagccgtgctagga

SEQ ID NO: 1704169 - DNA, 25 bp, Homo sapien
gtttgtcacgtgtgtccggcagcca

SEQ ID NO: 1704170 - DNA, 25 bp, Homo sapien
gagaagtggttctatactcaggagc

SEQ ID NO: 1704171 - DNA, 25 bp, Homo sapien
tgcccgccggatctggaataatgtg

SEQ ID NO: 1704172 - DNA, 25 bp, Homo sapien
atgagaggagtaatagggaacagct

SEQ ID NO: 1704173 - DNA, 25 bp, Homo sapien
ctttccagggcagcatgtgattcat

SEQ ID NO: 1704174 - DNA, 25 bp, Homo sapien
gggaacagctatcctctcttgagaa

SEQ ID NO: 1704175 - DNA, 25 bp, Homo sapien
gataagtaggctgggaaacttcaaa

SEQ ID NO: 1704176 - DNA, 25 bp, Homo sapien
catcatcaagagtaatgctacctac

SEQ ID NO: 1704177 - DNA, 25 bp, Homo sapien
ttatccacatatgggctctggttcc

SEQ ID NO: 1704178 - DNA, 25 bp, Homo sapien
caaatagcatttcaaggggctcgag

SEQ ID NO: 1704179 - DNA, 25 bp, Homo sapien
ccattctctcaaagagcactggtgt

SEQ ID NO: 1704180 - DNA, 25 bp, Homo sapien
tttccaaactgaagcgaaggcgtcg

SEQ ID NO: 1704181 - DNA, 25 bp, Homo sapien
aatcaccgagctcgatgaggctgcc

SEQ ID NO: 1704182 - DNA, 25 bp, Homo sapien
tttataagtcgtcacggagacccgc

SEQ ID NO: 1704183 - DNA, 25 bp, Homo sapien
gcgcttcagcgcctaattgacagga

SEQ ID NO: 1704184 - DNA, 25 bp, Homo sapien
tgccgatcgccgcggctttggccat

SEQ ID NO: 1704185 - DNA, 25 bp, Homo sapien
gtcgatgccgatcgccgcggctttg

SEQ ID NO: 1704186 - DNA, 25 bp, Homo sapien
caggtcgatgccgatcgccgcggct

SEQ ID NO: 1704187 - DNA, 25 bp, Homo sapien
atgccgatcgccgcggctttggcca

SEQ ID NO: 1704188 - DNA, 25 bp, Homo sapien
gcttcgcgtcaaacacggtgttctg

SEQ ID NO: 1704189 - DNA, 25 bp, Homo sapien
ccgggtcgccgaacttgcggccgat

SEQ ID NO: 1704190 - DNA, 25 bp, Homo sapien
gtgttctgcgggttcagcgccacct

SEQ ID NO: 1704191 - DNA, 25 bp, Homo sapien
tgtctccgtcgttgatcacctggaa

SEQ ID NO: 1704192 - DNA, 25 bp, Homo sapien
gagtcgttgaagtaggccggcacgg

SEQ ID NO: 1704193 - DNA, 25 bp, Homo sapien
ttgagccccgcgatcacacccgcat

SEQ ID NO: 1704194 - DNA, 25 bp, Homo sapien
tggtcaccgggtagcccaggtacgc

SEQ ID NO: 1704195 - DNA, 25 bp, Homo sapien
ccggcacggtgatcaccgcgttggt

SEQ ID NO: 1704196 - DNA, 25 bp, Homo sapien
gtagaagtcgatgccctcaaacagg

SEQ ID NO: 1704197 - DNA, 25 bp, Homo sapien
tcttgttcaggtcgcgcccgttgaa

SEQ ID NO: 1704198 - DNA, 25 bp, Homo sapien
aagatgccgtcgtcgatcgtcagga

SEQ ID NO: 1704199 - DNA, 25 bp, Homo sapien
gaacctcgccctggtgatggacgtg

SEQ ID NO: 1704200 - DNA, 25 bp, Homo sapien
atgacctcttgacacttgtccagca

SEQ ID NO: 1704201 - DNA, 25 bp, Homo sapien
gacctcttgacacttgtccagcacc

SEQ ID NO: 1704202 - DNA, 25 bp, Homo sapien
gatgacctcttgacacttgtccagc

SEQ ID NO: 1704203 - DNA, 25 bp, Homo sapien
tgacctcttgacacttgtccagcac

SEQ ID NO: 1704204 - DNA, 25 bp, Homo sapien
cagaccctcccttgggaccctgagc

SEQ ID NO: 1704205 - DNA, 25 bp, Homo sapien
accggcaccctggtacagtccgctg

SEQ ID NO: 1704206 - DNA, 25 bp, Homo sapien
ggaccaccggcaccctggtacagtc

SEQ ID NO: 1704207 - DNA, 25 bp, Homo sapien
gcaccctggtacagtccgctgatga

SEQ ID NO: 1704208 - DNA, 25 bp, Homo sapien
tcaacattgcaaacacaggaaattg

SEQ ID NO: 1704209 - DNA, 25 bp, Homo sapien
ttcaacattgcaaacacaggaaatt

SEQ ID NO: 1704210 - DNA, 25 bp, Homo sapien
gcatgtagaaaccggaaaaaaagca

SEQ ID NO: 1704211 - DNA, 25 bp, Homo sapien
ctgcatgtagaaaccggaaaaaaag

SEQ ID NO: 1704212 - DNA, 25 bp, Homo sapien
tagtcgtaagatggcagtataaatt

SEQ ID NO: 1704213 - DNA, 25 bp, Homo sapien
aaagaagaaatagtcgtaagatggc

SEQ ID NO: 1704214 - DNA, 25 bp, Homo sapien
aaatggcctgagttaagtgtattaa

SEQ ID NO: 1704215 - DNA, 25 bp, Homo sapien
taaaaaatggcctgagttaagtgta

SEQ ID NO: 1704216 - DNA, 25 bp, Homo sapien
tttgtacttttagtgcaggaggtgg

SEQ ID NO: 1704217 - DNA, 25 bp, Homo sapien
gcttgatagggccataggaactctc

SEQ ID NO: 1704218 - DNA, 25 bp, Homo sapien
gccacagtagtggtagttgctcctg

SEQ ID NO: 1704219 - DNA, 25 bp, Homo sapien
tcaacaaaggcatttggtaggtcct

SEQ ID NO: 1704220 - DNA, 25 bp, Homo sapien
ggaggtcctatagcaaaggcatatt

SEQ ID NO: 1704221 - DNA, 25 bp, Homo sapien
ttatattcacgtaaggatcgctccc

SEQ ID NO: 1704222 - DNA, 25 bp, Homo sapien
tccaattcttgatcgggctggacgt

SEQ ID NO: 1704223 - DNA, 25 bp, Homo sapien
tccctctggctgaactacacctgat

SEQ ID NO: 1704224 - DNA, 25 bp, Homo sapien
gatcgctccctcagaaatcgccaat

SEQ ID NO: 1704225 - DNA, 25 bp, Homo sapien
catactaggtgatttacaagacgaa

SEQ ID NO: 1704226 - DNA, 25 bp, Homo sapien
gattctcggttgctgggctcctccg

SEQ ID NO: 1704227 - DNA, 25 bp, Homo sapien
gaaaggacctttcgagtttctctca

SEQ ID NO: 1704228 - DNA, 25 bp, Homo sapien
aagaaaattagaccctcaggagtga

SEQ ID NO: 1704229 - DNA, 25 bp, Homo sapien
aagacgaagcggaccctcgcagcag

SEQ ID NO: 1704230 - DNA, 25 bp, Homo sapien
tcgctctggaaagccttgggaccgc

SEQ ID NO: 1704231 - DNA, 25 bp, Homo sapien
tgcagccgcacaggttcgctctgga

SEQ ID NO: 1704232 - DNA, 25 bp, Homo sapien
gaccgcgggagtcactctcgaaaga

SEQ ID NO: 1704233 - DNA, 25 bp, Homo sapien
gggatccgcgacaagagctcagtcc

SEQ ID NO: 1704234 - DNA, 25 bp, Homo sapien
tggaaacggcggacgggatccgcga

SEQ ID NO: 1704235 - DNA, 25 bp, Homo sapien
gctctgtgggctccgctctgagact

SEQ ID NO: 1704236 - DNA, 25 bp, Homo sapien
agctcagtccttcggaacgccggaa

SEQ ID NO: 1704237 - DNA, 25 bp, Homo sapien
gtgttctgcgggttcagcgccacct

SEQ ID NO: 1704238 - DNA, 25 bp, Homo sapien
gcttcgcgtcaaacacggtgttctg

SEQ ID NO: 1704239 - DNA, 25 bp, Homo sapien
ggtcgatgccgatcgccgcggcttt

SEQ ID NO: 1704240 - DNA, 25 bp, Homo sapien
tgtctccgtcgttgatcacctggaa

SEQ ID NO: 1704241 - DNA, 25 bp, Homo sapien
gtagaagtcgatgccctcaaacagg

SEQ ID NO: 1704242 - DNA, 25 bp, Homo sapien
tcttgttcaggtcgcgcccgttgaa

SEQ ID NO: 1704243 - DNA, 25 bp, Homo sapien
gaacctcgccctggtgatggacgtg

SEQ ID NO: 1704244 - DNA, 25 bp, Homo sapien
aagatgccgtcgtcgatcgtcagga

SEQ ID NO: 1704245 - DNA, 25 bp, Homo sapien
cctcttgacacttgtccagaacctt

SEQ ID NO: 1704246 - DNA, 25 bp, Homo sapien
gatgacctcttgacacttgtccaga

SEQ ID NO: 1704247 - DNA, 25 bp, Homo sapien
tgacctcttgacacttgtccagaac

SEQ ID NO: 1704248 - DNA, 25 bp, Homo sapien
tcttgacacttgtccagaaccttct

SEQ ID NO: 1704249 - DNA, 25 bp, Homo sapien
gagtcccaacagtccacctcaaaga

SEQ ID NO: 1704250 - DNA, 25 bp, Homo sapien
cctttgtagtgttttcgccaagcaa

SEQ ID NO: 1704251 - DNA, 25 bp, Homo sapien
atgaagccagctaattaccatcagg

SEQ ID NO: 1704252 - DNA, 25 bp, Homo sapien
taactttacaaagaagtgaagcagc

SEQ ID NO: 1704253 - DNA, 25 bp, Homo sapien
gctgccatccgacttttccctgaaa

SEQ ID NO: 1704254 - DNA, 25 bp, Homo sapien
tgtggactccgctcactaagtagaa

SEQ ID NO: 1704255 - DNA, 25 bp, Homo sapien
actctaatcaagacgggcacctgca

SEQ ID NO: 1704256 - DNA, 25 bp, Homo sapien
taaatgaatatgagccgaggtcagg

SEQ ID NO: 1704257 - DNA, 25 bp, Homo sapien
ttagctatgggtggtggcatacacg

SEQ ID NO: 1704258 - DNA, 25 bp, Homo sapien
tactaagtgctatggtcagaggctt

SEQ ID NO: 1704259 - DNA, 25 bp, Homo sapien
tattgttccattagggtggagagcc

SEQ ID NO: 1704260 - DNA, 25 bp, Homo sapien
gagattctgaattggcctgagagag

SEQ ID NO: 1704261 - DNA, 25 bp, Homo sapien
ctctgggcaaatattcggagatgct

SEQ ID NO: 1704262 - DNA, 25 bp, Homo sapien
tctgtctggccaggcggaagaaagt

SEQ ID NO: 1704263 - DNA, 25 bp, Homo sapien
caggaaagtatgtttcacactcctc

SEQ ID NO: 1704264 - DNA, 25 bp, Homo sapien
aatattcggagatgctttctgaatt

SEQ ID NO: 1704265 - DNA, 25 bp, Homo sapien
ttatctgcctggctagacgcgcggc

SEQ ID NO: 1704266 - DNA, 25 bp, Homo sapien
cgggtatagttgttttcttatctgc

SEQ ID NO: 1704267 - DNA, 25 bp, Homo sapien
ttccccattgtttgtccacacagaa

SEQ ID NO: 1704268 - DNA, 25 bp, Homo sapien
gagcccacttcgcaaaaagaactaa

SEQ ID NO: 1704269 - DNA, 25 bp, Homo sapien
tcactcaacagtcgggccattacaa

SEQ ID NO: 1704270 - DNA, 25 bp, Homo sapien
aaggcagcgcaagccgttgggatcc

SEQ ID NO: 1704271 - DNA, 25 bp, Homo sapien
ctgcgcaaaggcagcgcaagccgtt

SEQ ID NO: 1704272 - DNA, 25 bp, Homo sapien
ctcactcaacagtcgggccattaca

SEQ ID NO: 1704273 - DNA, 25 bp, Homo sapien
cggtagttcacccaactgcactggg

SEQ ID NO: 1704274 - DNA, 25 bp, Homo sapien
cctgccacgagctaggtcagttcca

SEQ ID NO: 1704275 - DNA, 25 bp, Homo sapien
taggtcagttccaagcaaagacacc

SEQ ID NO: 1704276 - DNA, 25 bp, Homo sapien
ccagaaactccagtgtgcaacggta

SEQ ID NO: 1704277 - DNA, 25 bp, Homo sapien
ccattttgcaatcactcgcccaacc

SEQ ID NO: 1704278 - DNA, 25 bp, Homo sapien
cacccccattttgcaatcactcgcc

SEQ ID NO: 1704279 - DNA, 25 bp, Homo sapien
cccattttgcaatcactcgcccaac

SEQ ID NO: 1704280 - DNA, 25 bp, Homo sapien
cccccattttgcaatcactcgccca

SEQ ID NO: 1704281 - DNA, 25 bp, Homo sapien
tggcatcagcgacacactcagagtt

SEQ ID NO: 1704282 - DNA, 25 bp, Homo sapien
agcgacacactcagagttacctggg

SEQ ID NO: 1704283 - DNA, 25 bp, Homo sapien
tcagagcgctgcggtgatggcatca

SEQ ID NO: 1704284 - DNA, 25 bp, Homo sapien
cgctgcggtgatggcatcagcgaca

SEQ ID NO: 1704285 - DNA, 25 bp, Homo sapien
agcctgagaaatgctggaccgaggg

SEQ ID NO: 1704286 - DNA, 25 bp, Homo sapien
ggaatcttggccatgaactcgttga

SEQ ID NO: 1704287 - DNA, 25 bp, Homo sapien
tgaactcgttgagcctgagaaatgc

SEQ ID NO: 1704288 - DNA, 25 bp, Homo sapien
aaagattaggaatcttggccatgaa

SEQ ID NO: 1704289 - DNA, 25 bp, Homo sapien
ggataacacggcgatgaacgtctta

SEQ ID NO: 1704290 - DNA, 25 bp, Homo sapien
tcaaggataacacggcgatgaacgt

SEQ ID NO: 1704291 - DNA, 25 bp, Homo sapien
ctttactcaaggataacacggcgat

SEQ ID NO: 1704292 - DNA, 25 bp, Homo sapien
cacggcgatgaacgtcttacaactc

SEQ ID NO: 1704293 - DNA, 25 bp, Homo sapien
agcctgggtgacaaggcgagactgt

SEQ ID NO: 1704294 - DNA, 25 bp, Homo sapien
ctgggtgacaaggcgagactgtctc

SEQ ID NO: 1704295 - DNA, 25 bp, Homo sapien
cagtgagatcgtgccaccgcacttc

SEQ ID NO: 1704296 - DNA, 25 bp, Homo sapien
gaaggcgcaggttgcagtgagatcg

SEQ ID NO: 1704297 - DNA, 25 bp, Homo sapien
ccgcactgaattgtgttcttgccac

SEQ ID NO: 1704298 - DNA, 25 bp, Homo sapien
tgaaggccgcactgaattgtgttct

SEQ ID NO: 1704299 - DNA, 25 bp, Homo sapien
gtgacagggaggctgtcttaaaaaa

SEQ ID NO: 1704300 - DNA, 25 bp, Homo sapien
aacccgggagttgaaggccgcactg

SEQ ID NO: 1704301 - DNA, 25 bp, Homo sapien
accacttgagccctgacggtggatg

SEQ ID NO: 1704302 - DNA, 25 bp, Homo sapien
acttgagccctgacggtggatgttg

SEQ ID NO: 1704303 - DNA, 25 bp, Homo sapien
agaccacttgagccctgacggtgga

SEQ ID NO: 1704304 - DNA, 25 bp, Homo sapien
cacttgagccctgacggtggatgtt

SEQ ID NO: 1704305 - DNA, 25 bp, Homo sapien
atgagtgagactcatgtccccccgc

SEQ ID NO: 1704306 - DNA, 25 bp, Homo sapien
aagtcaccaacaccagacgcagcaa

SEQ ID NO: 1704307 - DNA, 25 bp, Homo sapien
gtaatctctagaaagtcaccaacac

SEQ ID NO: 1704308 - DNA, 25 bp, Homo sapien
agtgagactcatgtccccccgcccc

SEQ ID NO: 1704309 - DNA, 25 bp, Homo sapien
tctggatcaagggaagctcttctgg

SEQ ID NO: 1704310 - DNA, 25 bp, Homo sapien
tctggaaagagatctagtacactca

SEQ ID NO: 1704311 - DNA, 25 bp, Homo sapien
tctaacaaatgagtccaggagtgga

SEQ ID NO: 1704312 - DNA, 25 bp, Homo sapien
gaaaacacaacagtcccagtatata

SEQ ID NO: 1704313 - DNA, 25 bp, Homo sapien
gagactctagtctgtgaaatcatca

SEQ ID NO: 1704314 - DNA, 25 bp, Homo sapien
gcatcggagactctagtctgtgaaa

SEQ ID NO: 1704315 - DNA, 25 bp, Homo sapien
tgacatcatgaccagcatcggagac

SEQ ID NO: 1704316 - DNA, 25 bp, Homo sapien
cagaacttagttttgacatcatgac

SEQ ID NO: 1704317 - DNA, 25 bp, Homo sapien
caaggtgaaaacaagacaatttgaa

SEQ ID NO: 1704318 - DNA, 25 bp, Homo sapien
aataaacagaattatggccctccca

SEQ ID NO: 1704319 - DNA, 25 bp, Homo sapien
tggagacccaagtatccagttccct

SEQ ID NO: 1704320 - DNA, 25 bp, Homo sapien
ttggcccttctggagacccaagtat

SEQ ID NO: 1704321 - DNA, 25 bp, Homo sapien
ggagattccaaaccttagaccttca

SEQ ID NO: 1704322 - DNA, 25 bp, Homo sapien
cagattagtgcagaatctctgtgaa

SEQ ID NO: 1704323 - DNA, 25 bp, Homo sapien
tccaaaccttagaccttcactcaga

SEQ ID NO: 1704324 - DNA, 25 bp, Homo sapien
aaggtgcattgtccctggctgggct

SEQ ID NO: 1704325 - DNA, 25 bp, Homo sapien
ctaagcatgacagccatacaaagct

SEQ ID NO: 1704326 - DNA, 25 bp, Homo sapien
gacagccatacaaagcttctctcca

SEQ ID NO: 1704327 - DNA, 25 bp, Homo sapien
catgacagccatacaaagcttctct

SEQ ID NO: 1704328 - DNA, 25 bp, Homo sapien
agcatgacagccatacaaagcttct

SEQ ID NO: 1704329 - DNA, 25 bp, Homo sapien
cagcctgaaggtcaagttgcaggaa

SEQ ID NO: 1704330 - DNA, 25 bp, Homo sapien
tcccagcctgaaggtcaagttgcag

SEQ ID NO: 1704331 - DNA, 25 bp, Homo sapien
tctcccagcctgaaggtcaagttgc

SEQ ID NO: 1704332 - DNA, 25 bp, Homo sapien
tgaaggtcaagttgcaggaatcact

SEQ ID NO: 1704333 - DNA, 25 bp, Homo sapien
caaaaaacacacaaaacatgttggg

SEQ ID NO: 1704334 - DNA, 25 bp, Homo sapien
tgcactccagcctggatgacagagc

SEQ ID NO: 1704335 - DNA, 25 bp, Homo sapien
ctgcagtaagccaagagtgtaccac

SEQ ID NO: 1704336 - DNA, 25 bp, Homo sapien
gcaagacagtctcaaaaaacacaca

SEQ ID NO: 1704337 - DNA, 25 bp, Homo sapien
tagaaccatatgagatgcaccaata

SEQ ID NO: 1704338 - DNA, 25 bp, Homo sapien
taaatctacaataaaagctgaggct

SEQ ID NO: 1704339 - DNA, 25 bp, Homo sapien
gcttgagcaccatagtgggacccca

SEQ ID NO: 1704340 - DNA, 25 bp, Homo sapien
ccaaggcagaagtgttcggaggcca

SEQ ID NO: 1704341 - DNA, 25 bp, Homo sapien
ggtgacagctgctcacacaggataa

SEQ ID NO: 1704342 - DNA, 25 bp, Homo sapien
ccaggcggaagatattgtgtcagca

SEQ ID NO: 1704343 - DNA, 25 bp, Homo sapien
ttcttaggatatgcccagcaccagg

SEQ ID NO: 1704344 - DNA, 25 bp, Homo sapien
cacaggataatacaggaaagttgta

SEQ ID NO: 1704345 - DNA, 25 bp, Homo sapien
atagaagctatctacttgaagtgcc

SEQ ID NO: 1704346 - DNA, 25 bp, Homo sapien
agaagctatctacttgaagtgcccc

SEQ ID NO: 1704347 - DNA, 25 bp, Homo sapien
tagaagctatctacttgaagtgccc

SEQ ID NO: 1704348 - DNA, 25 bp, Homo sapien
accattgttctgagaccaaaccacg

SEQ ID NO: 1704349 - DNA, 25 bp, Homo sapien
gaacactgacaaaagagctccaagc

SEQ ID NO: 1704350 - DNA, 25 bp, Homo sapien
tagaaattttactcctcgaacactg

SEQ ID NO: 1704351 - DNA, 25 bp, Homo sapien
tgtgactctggccaatgggtagaaa

SEQ ID NO: 1704352 - DNA, 25 bp, Homo sapien
ccatgagttctgttggtgcaggttt

SEQ ID NO: 1704353 - DNA, 25 bp, Homo sapien
cacaggtattccctgggtggcacta

SEQ ID NO: 1704354 - DNA, 25 bp, Homo sapien
tttagaggcaatcaacccagtgtgg

SEQ ID NO: 1704355 - DNA, 25 bp, Homo sapien
tcaaggtggtaccagctaatgctgc

SEQ ID NO: 1704356 - DNA, 25 bp, Homo sapien
tgaggttcacctgactggaggcaat

SEQ ID NO: 1704357 - DNA, 25 bp, Homo sapien
caaaccttccactctatggaaaatg

SEQ ID NO: 1704358 - DNA, 25 bp, Homo sapien
actctatggaaaatgaccagagcgg

SEQ ID NO: 1704359 - DNA, 25 bp, Homo sapien
tgccccatgcgcctgcgctcttcag

SEQ ID NO: 1704360 - DNA, 25 bp, Homo sapien
cagagcgggatgtcactactcactc

SEQ ID NO: 1704361 - DNA, 25 bp, Homo sapien
tccatatggctaagtgtggccccac

SEQ ID NO: 1704362 - DNA, 25 bp, Homo sapien
tcctgtatgagaaaggccggaacca

SEQ ID NO: 1704363 - DNA, 25 bp, Homo sapien
tctccgtggccaaaatcagtgtcta

SEQ ID NO: 1704364 - DNA, 25 bp, Homo sapien
tcatggcggaaagagacagtccagc

SEQ ID NO: 1704365 - DNA, 25 bp, Homo sapien
ttacaggtctccattttgtggtaaa

SEQ ID NO: 1704366 - DNA, 25 bp, Homo sapien
agccatccaacctcacttcgcctta

SEQ ID NO: 1704367 - DNA, 25 bp, Homo sapien
tcacttcgccttacaggtctccatt

SEQ ID NO: 1704368 - DNA, 25 bp, Homo sapien
accgtccagccatccaacctcactt

SEQ ID NO: 1704369 - DNA, 25 bp, Homo sapien
gagtagacttcctggagcggcttca

SEQ ID NO: 1704370 - DNA, 25 bp, Homo sapien
agcggcttcaggtcaatcattgtcc

SEQ ID NO: 1704371 - DNA, 25 bp, Homo sapien
gcagtgaggactcccgagtagactt

SEQ ID NO: 1704372 - DNA, 25 bp, Homo sapien
cctatgagggaccttctcgaggaga

SEQ ID NO: 1704373 - DNA, 25 bp, Homo sapien
gtttgatgaattgaagtcgggcctc

SEQ ID NO: 1704374 - DNA, 25 bp, Homo sapien
cccatcctcagttgaagtttgatga

SEQ ID NO: 1704375 - DNA, 25 bp, Homo sapien
ccgtgttccccatcctcagttgaag

SEQ ID NO: 1704376 - DNA, 25 bp, Homo sapien
gtcgggcctctatgccaactggttc

SEQ ID NO: 1704377 - DNA, 25 bp, Homo sapien
tgcagcaaacctgggacctgaaggc

SEQ ID NO: 1704378 - DNA, 25 bp, Homo sapien
gacaggtttgactatggcgaccgct

SEQ ID NO: 1704379 - DNA, 25 bp, Homo sapien
taggttgggtgtcgggtccctctca

SEQ ID NO: 1704380 - DNA, 25 bp, Homo sapien
gtccgggtcttcatgctgcaccaag

SEQ ID NO: 1704381 - DNA, 25 bp, Homo sapien
accatggattcctgtcccacaggta

SEQ ID NO: 1704382 - DNA, 25 bp, Homo sapien
tgtcccacaggtatgtcggggagct

SEQ ID NO: 1704383 - DNA, 25 bp, Homo sapien
gaaccatggattcctgtcccacagg

SEQ ID NO: 1704384 - DNA, 25 bp, Homo sapien
ccacaggtatgtcggggagctgatc

SEQ ID NO: 1704385 - DNA, 25 bp, Homo sapien
tccttagatagctggctcctctcct

SEQ ID NO: 1704386 - DNA, 25 bp, Homo sapien
atgccttgagttccttgccactcct

SEQ ID NO: 1704387 - DNA, 25 bp, Homo sapien
gctcttgccccgaatcatgccttga

SEQ ID NO: 1704388 - DNA, 25 bp, Homo sapien
atatcgcccattcctgccgggtggc

SEQ ID NO: 1704389 - DNA, 25 bp, Homo sapien
gattttcgagtgtaaccaggcgtgc

SEQ ID NO: 1704390 - DNA, 25 bp, Homo sapien
aaccgggtcgtacagagtggcatca

SEQ ID NO: 1704391 - DNA, 25 bp, Homo sapien
tcatctgcgagtaagtcaccgggag

SEQ ID NO: 1704392 - DNA, 25 bp, Homo sapien
tgctggtatgacaaggtgcgtgccc

SEQ ID NO: 1704393 - DNA, 25 bp, Homo sapien
tcagagaactgcgagacgtccacca

SEQ ID NO: 1704394 - DNA, 25 bp, Homo sapien
tgcgagacgtccaccatgaacatcg

SEQ ID NO: 1704395 - DNA, 25 bp, Homo sapien
catgaacatcgatcgcaacatcacc

SEQ ID NO: 1704396 - DNA, 25 bp, Homo sapien
ctgaggattacaagtacatctcaga

SEQ ID NO: 1704397 - DNA, 25 bp, Homo sapien
aactcgctgtcctgcatcttacctg

SEQ ID NO: 1704398 - DNA, 25 bp, Homo sapien
ttttagtgtgagaatgtcctgtgta

SEQ ID NO: 1704399 - DNA, 25 bp, Homo sapien
gcacagatgcatacttttttagtgt

SEQ ID NO: 1704400 - DNA, 25 bp, Homo sapien
gaacgtgcccattccctgtgtcaac

SEQ ID NO: 1704401 - DNA, 25 bp, Homo sapien
ccaaccctgagctgcggaacaaaga

SEQ ID NO: 1704402 - DNA, 25 bp, Homo sapien
gaaatcgggccatccgcacagagaa

SEQ ID NO: 1704403 - DNA, 25 bp, Homo sapien
actcaaccgcaagctccgacttggg

SEQ ID NO: 1704404 - DNA, 25 bp, Homo sapien
cccgagcgctccgacgtgtggtttg

SEQ ID NO: 1704405 - DNA, 25 bp, Homo sapien
gccgaagtccttctgaatgcgcgct

SEQ ID NO: 1704406 - DNA, 25 bp, Homo sapien
gacctccatgctgtcaactaccatg

SEQ ID NO: 1704407 - DNA, 25 bp, Homo sapien
ccctgcacatcgcagctcgggagag

SEQ ID NO: 1704408 - DNA, 25 bp, Homo sapien
tcgggagagctaccatgactgcgtg

SEQ ID NO: 1704409 - DNA, 25 bp, Homo sapien
gggtggacgcccatcatctgggctg

SEQ ID NO: 1704410 - DNA, 25 bp, Homo sapien
agcacaagcacatcgaggtgatccg

SEQ ID NO: 1704411 - DNA, 25 bp, Homo sapien
gtgatccgcatgctactgacgcggg

SEQ ID NO: 1704412 - DNA, 25 bp, Homo sapien
catcgaggtgatccgcatgctactg

SEQ ID NO: 1704413 - DNA, 25 bp, Homo sapien
cggccagaagcattttttagagaat

SEQ ID NO: 1704414 - DNA, 25 bp, Homo sapien
ccggccagaagcattttttagagaa

SEQ ID NO: 1704415 - DNA, 25 bp, Homo sapien
ttgtcgctgcttctaggacttttga

SEQ ID NO: 1704416 - DNA, 25 bp, Homo sapien
cgctgcttctaggacttttgagtgg

SEQ ID NO: 1704417 - DNA, 25 bp, Homo sapien
tgagcacaggacaggtggacgtcaa

SEQ ID NO: 1704418 - DNA, 25 bp, Homo sapien
aggacaggtggacgtcaatgcccag

SEQ ID NO: 1704419 - DNA, 25 bp, Homo sapien
tcgggaacttggagatggtcagcct

SEQ ID NO: 1704420 - DNA, 25 bp, Homo sapien
caccacgcagccaaaatcgggaact

SEQ ID NO: 1704421 - DNA, 25 bp, Homo sapien
tgatggaggccgtggtgaacaacca

SEQ ID NO: 1704422 - DNA, 25 bp, Homo sapien
aacagcagcggacgccactgatgga

SEQ ID NO: 1704423 - DNA, 25 bp, Homo sapien
caacataaatgcagtggacaaacag

SEQ ID NO: 1704424 - DNA, 25 bp, Homo sapien
tagcccgttacatggtgcagcgtgg

SEQ ID NO: 1704425 - DNA, 25 bp, Homo sapien
ggagatctgccatgtgctgctgcag

SEQ ID NO: 1704426 - DNA, 25 bp, Homo sapien
tccgtggagatctgccatgtgctgc

SEQ ID NO: 1704427 - DNA, 25 bp, Homo sapien
gtggagatctgccatgtgctgctgc

SEQ ID NO: 1704428 - DNA, 25 bp, Homo sapien
ccgtggagatctgccatgtgctgct

SEQ ID NO: 1704429 - DNA, 25 bp, Homo sapien
gttgaagctctaactgaacaactaa

SEQ ID NO: 1704430 - DNA, 25 bp, Homo sapien
tctgaagttgaagctctaactgaac

SEQ ID NO: 1704431 - DNA, 25 bp, Homo sapien
gaagttgaagctctaactgaacaac

SEQ ID NO: 1704432 - DNA, 25 bp, Homo sapien
agctctaactgaacaactaagtgaa

SEQ ID NO: 1704433 - DNA, 25 bp, Homo sapien
tgcccggcgttcaggagaagtgacc

SEQ ID NO: 1704434 - DNA, 25 bp, Homo sapien
tcggaggagttaggttctgcccggc

SEQ ID NO: 1704435 - DNA, 25 bp, Homo sapien
atgagcgcgtggactccgacagcaa

SEQ ID NO: 1704436 - DNA, 25 bp, Homo sapien
cggtggtgggtgatgacttcagtct

SEQ ID NO: 1704437 - DNA, 25 bp, Homo sapien
aaggaggaagctgaactcaggaggt

SEQ ID NO: 1704438 - DNA, 25 bp, Homo sapien
gccaaaaggaggaagctgaactcag

SEQ ID NO: 1704439 - DNA, 25 bp, Homo sapien
tctggccaaaaggaggaagctgaac

SEQ ID NO: 1704440 - DNA, 25 bp, Homo sapien
caaaaggaggaagctgaactcagga

SEQ ID NO: 1704441 - DNA, 25 bp, Homo sapien
aatacagcatttccgcatgagtgat

SEQ ID NO: 1704442 - DNA, 25 bp, Homo sapien
tgaaatacagcatttccgcatgagt

SEQ ID NO: 1704443 - DNA, 25 bp, Homo sapien
cagcatttccgcatgagtgatgatg

SEQ ID NO: 1704444 - DNA, 25 bp, Homo sapien
agaagcggccccctgaaatacagca

SEQ ID NO: 1704445 - DNA, 25 bp, Homo sapien
gaaaagaagattggatgacgtgaag

SEQ ID NO: 1704446 - DNA, 25 bp, Homo sapien
caagttgccgtgaaaatacactctg

SEQ ID NO: 1704447 - DNA, 25 bp, Homo sapien
caagttctagggttcttgggtcata

SEQ ID NO: 1704448 - DNA, 25 bp, Homo sapien
tctgggcacactgcgtaggagttag

SEQ ID NO: 1704449 - DNA, 25 bp, Homo sapien
agagggacagcccaaggtccaccga

SEQ ID NO: 1704450 - DNA, 25 bp, Homo sapien
tgtccagagtttggctatgaggcta

SEQ ID NO: 1704451 - DNA, 25 bp, Homo sapien
gctactgagtatgccaggagcccag

SEQ ID NO: 1704452 - DNA, 25 bp, Homo sapien
tagccgggccaagatgtcaatgaca

SEQ ID NO: 1704453 - DNA, 25 bp, Homo sapien
cctgtaggggctacaccactcattg

SEQ ID NO: 1704454 - DNA, 25 bp, Homo sapien
ccactcattggggatgaatctgaga

SEQ ID NO: 1704455 - DNA, 25 bp, Homo sapien
acctccgtgggggccggatcctgct

SEQ ID NO: 1704456 - DNA, 25 bp, Homo sapien
cacccctcgtagtgaagaaaccctg

SEQ ID NO: 1704457 - DNA, 25 bp, Homo sapien
aggaaaccagaggagccaccgagag

SEQ ID NO: 1704458 - DNA, 25 bp, Homo sapien
agaaggaaaccagaggagccaccga

SEQ ID NO: 1704459 - DNA, 25 bp, Homo sapien
ctggagaaggaaaccagaggagcca

SEQ ID NO: 1704460 - DNA, 25 bp, Homo sapien
ccccgctgagatgggggcgctgctg

SEQ ID NO: 1704461 - DNA, 25 bp, Homo sapien
aggaattctcccttgcagctcccag

SEQ ID NO: 1704462 - DNA, 25 bp, Homo sapien
ctcggtccctgcagaactgaggcca

SEQ ID NO: 1704463 - DNA, 25 bp, Homo sapien
gggacagagacgccacacctgggcc

SEQ ID NO: 1704464 - DNA, 25 bp, Homo sapien
gctcccagcttaggacagtcacagc

SEQ ID NO: 1704465 - DNA, 25 bp, Homo sapien
agtggcatcttcacgcggacttgga

SEQ ID NO: 1704466 - DNA, 25 bp, Homo sapien
gaaaacgcactagtctcctgaagga

SEQ ID NO: 1704467 - DNA, 25 bp, Homo sapien
gggaaaccagatattgaacacataa

SEQ ID NO: 1704468 - DNA, 25 bp, Homo sapien
ccagccttcaagacgctcctaagtg

SEQ ID NO: 1704469 - DNA, 25 bp, Homo sapien
gaggacaacctgatccaggcaggta

SEQ ID NO: 1704470 - DNA, 25 bp, Homo sapien
tatcacaggcccgaaagtcagttgc

SEQ ID NO: 1704471 - DNA, 25 bp, Homo sapien
caaggatgacatagggtagcagagc

SEQ ID NO: 1704472 - DNA, 25 bp, Homo sapien
tatttgtcgagaagtggaagagtct

SEQ ID NO: 1704473 - DNA, 25 bp, Homo sapien
caatgtggtaaccaatctctctttt

SEQ ID NO: 1704474 - DNA, 25 bp, Homo sapien
aatgtggtaaccaatctctcttttt

SEQ ID NO: 1704475 - DNA, 25 bp, Homo sapien
gtcatcaatgtggtaaccaatctct

SEQ ID NO: 1704476 - DNA, 25 bp, Homo sapien
gagtcatcaatgtggtaaccaatct

SEQ ID NO: 1704477 - DNA, 25 bp, Homo sapien
cgctaattcatttaggattctgtcc

SEQ ID NO: 1704478 - DNA, 25 bp, Homo sapien
atgggtatattgcactaggtagtca

SEQ ID NO: 1704479 - DNA, 25 bp, Homo sapien
caatatttagttccgttataagtga

SEQ ID NO: 1704480 - DNA, 25 bp, Homo sapien
ctaggtagtcatagaaccaattagg

SEQ ID NO: 1704481 - DNA, 25 bp, Homo sapien
tatgccatcataccaggctaagttt

SEQ ID NO: 1704482 - DNA, 25 bp, Homo sapien
agtgctgggaattcattaaaaattt

SEQ ID NO: 1704483 - DNA, 25 bp, Homo sapien
attgtttactttaattagagatgag

SEQ ID NO: 1704484 - DNA, 25 bp, Homo sapien
gcatatgccatcataccaggctaag

SEQ ID NO: 1704485 - DNA, 25 bp, Homo sapien
tcttctctttagtgactgctgggag

SEQ ID NO: 1704486 - DNA, 25 bp, Homo sapien
ctctttagtgactgctgggagctcc

SEQ ID NO: 1704487 - DNA, 25 bp, Homo sapien
gtcttctctttagtgactgctggga

SEQ ID NO: 1704488 - DNA, 25 bp, Homo sapien
ttctctttagtgactgctgggagct

SEQ ID NO: 1704489 - DNA, 25 bp, Homo sapien
cccgaaaactagagctgggtcagca

SEQ ID NO: 1704490 - DNA, 25 bp, Homo sapien
ggatggtcttctgttagggaaataa

SEQ ID NO: 1704491 - DNA, 25 bp, Homo sapien
tgaactgaagggtgaaacctttgcc

SEQ ID NO: 1704492 - DNA, 25 bp, Homo sapien
ggaaaaggtcatctgacttcccgaa

SEQ ID NO: 1704493 - DNA, 25 bp, Homo sapien
gaacagcaggcaaaaaagaaccatc

SEQ ID NO: 1704494 - DNA, 25 bp, Homo sapien
gggcaggagggagccgagtctgcca

SEQ ID NO: 1704495 - DNA, 25 bp, Homo sapien
caggagggagccgagtctgccagac

SEQ ID NO: 1704496 - DNA, 25 bp, Homo sapien
gcaggagggagccgagtctgccaga

SEQ ID NO: 1704497 - DNA, 25 bp, Homo sapien
gagggcaggagggagccgagtctgc

SEQ ID NO: 1704498 - DNA, 25 bp, Homo sapien
tgctcttgcacagccgtgatgctgg

SEQ ID NO: 1704499 - DNA, 25 bp, Homo sapien
ggtgaaggtgccacccgagatattc

SEQ ID NO: 1704500 - DNA, 25 bp, Homo sapien
gcagaccgccttagacagagaccgg

SEQ ID NO: 1704501 - DNA, 25 bp, Homo sapien
cttagacagagaccgggtggctcct

SEQ ID NO: 1704502 - DNA, 25 bp, Homo sapien
gcgagccccgcaatatgaagccatc

SEQ ID NO: 1704503 - DNA, 25 bp, Homo sapien
ctcacattgccacccacgggatagg

SEQ ID NO: 1704504 - DNA, 25 bp, Homo sapien
gtttctccatcccacatgccgttgg

SEQ ID NO: 1704505 - DNA, 25 bp, Homo sapien
ggtataaatgccattctcaaaggag

SEQ ID NO: 1704506 - DNA, 25 bp, Homo sapien
caatctccacttcctggttcaaatg

SEQ ID NO: 1704507 - DNA, 25 bp, Homo sapien
atctccacttcctggttcaaatgat

SEQ ID NO: 1704508 - DNA, 25 bp, Homo sapien
cgtgagccaccgcactccagggctg

SEQ ID NO: 1704509 - DNA, 25 bp, Homo sapien
tgcaatctccacttcctggttcaaa

SEQ ID NO: 1704510 - DNA, 25 bp, Homo sapien
tcgaggagcagcgatagcggacctt

SEQ ID NO: 1704511 - DNA, 25 bp, Homo sapien
gaagaccccgtgagcacaagattcg

SEQ ID NO: 1704512 - DNA, 25 bp, Homo sapien
cccatgaccaaagcggaagcctgtc

SEQ ID NO: 1704513 - DNA, 25 bp, Homo sapien
cactgcgcccagtgaaatgcctggg

SEQ ID NO: 1704514 - DNA, 25 bp, Homo sapien
gtcctcagggaagtcataagagtag

SEQ ID NO: 1704515 - DNA, 25 bp, Homo sapien
tcagggaagtcataagagtagggtt

SEQ ID NO: 1704516 - DNA, 25 bp, Homo sapien
ttctgggtgggattggtggccccaa

SEQ ID NO: 1704517 - DNA, 25 bp, Homo sapien
ctgggtgggattggtggccccaagc

SEQ ID NO: 1704518 - DNA, 25 bp, Homo sapien
gaaagtcattttccgacacactctg

SEQ ID NO: 1704519 - DNA, 25 bp, Homo sapien
gacacactctgcgaacagtccagga

SEQ ID NO: 1704520 - DNA, 25 bp, Homo sapien
tggatttggattttacggcccaggc

SEQ ID NO: 1704521 - DNA, 25 bp, Homo sapien
tagaggttcagatgaccagagcgct

SEQ ID NO: 1704522 - DNA, 25 bp, Homo sapien
gcatgagtataatctgagaagactt

SEQ ID NO: 1704523 - DNA, 25 bp, Homo sapien
ggcatgagtataatctgagaagact

SEQ ID NO: 1704524 - DNA, 25 bp, Homo sapien
tcccaacagtgcttgtggaataaaa

SEQ ID NO: 1704525 - DNA, 25 bp, Homo sapien
actgttctagatgatgaattcctgg

SEQ ID NO: 1704526 - DNA, 25 bp, Homo sapien
ctgcttcactcctgtgggttatctc

SEQ ID NO: 1704527 - DNA, 25 bp, Homo sapien
ccagcacagtgtcccaacagtgctt

SEQ ID NO: 1704528 - DNA, 25 bp, Homo sapien
ctgaggcaaaggtgataatggcaac

SEQ ID NO: 1704529 - DNA, 25 bp, Homo sapien
tgatcacctcagtcatatcccggga

SEQ ID NO: 1704530 - DNA, 25 bp, Homo sapien
cgctcacattgatctcaaagctgaa

SEQ ID NO: 1704531 - DNA, 25 bp, Homo sapien
tcccgggagttgtcgttcaggacag

SEQ ID NO: 1704532 - DNA, 25 bp, Homo sapien
cagactcgtgggactcaggtgccac

SEQ ID NO: 1704533 - DNA, 25 bp, Homo sapien
caactggaaggaattgaagacctgc

SEQ ID NO: 1704534 - DNA, 25 bp, Homo sapien
cagaatttgtttgcaggccctgaga

SEQ ID NO: 1704535 - DNA, 25 bp, Homo sapien
tgcagccatgcaaaccagacagtgt

SEQ ID NO: 1704536 - DNA, 25 bp, Homo sapien
ccccaattattggaaatgcaatttt

SEQ ID NO: 1704537 - DNA, 25 bp, Homo sapien
gtagggaatcactctattcccccaa

SEQ ID NO: 1704538 - DNA, 25 bp, Homo sapien
tggaatatgccaaaaggaaggactc

SEQ ID NO: 1704539 - DNA, 25 bp, Homo sapien
ccaagctggtttcctgacctcaagt

SEQ ID NO: 1704540 - DNA, 25 bp, Homo sapien
gatgatggcatgtcggatttcctgc

SEQ ID NO: 1704541 - DNA, 25 bp, Homo sapien
aaggctgcataggtgttagtcccag

SEQ ID NO: 1704542 - DNA, 25 bp, Homo sapien
gatttcctgccaggccatcgtttcc

SEQ ID NO: 1704543 - DNA, 25 bp, Homo sapien
catcgtttccatgccgaggagtcgc

SEQ ID NO: 1704544 - DNA, 25 bp, Homo sapien
ttcctcttctggttgatgttcagga

SEQ ID NO: 1704545 - DNA, 25 bp, Homo sapien
cctcttctggttgatgttcaggatc

SEQ ID NO: 1704546 - DNA, 25 bp, Homo sapien
gatatggtcaacagctgtcttggga

SEQ ID NO: 1704547 - DNA, 25 bp, Homo sapien
gatctctctgatatggtcaacagct

SEQ ID NO: 1704548 - DNA, 25 bp, Homo sapien
aagagggaaatcaccagactcctgt

SEQ ID NO: 1704549 - DNA, 25 bp, Homo sapien
aatcaccagactcctgtggctttgg

SEQ ID NO: 1704550 - DNA, 25 bp, Homo sapien
atcaccagactcctgtggctttggg

SEQ ID NO: 1704551 - DNA, 25 bp, Homo sapien
agggaaatcaccagactcctgtggc

SEQ ID NO: 1704552 - DNA, 25 bp, Homo sapien
tcttggaccctagctcattcagttc

SEQ ID NO: 1704553 - DNA, 25 bp, Homo sapien
tgaaggcatgcctctcaccatcctt

SEQ ID NO: 1704554 - DNA, 25 bp, Homo sapien
gcagaatgaaggcatgcctctcacc

SEQ ID NO: 1704555 - DNA, 25 bp, Homo sapien
gagcctttgtgtcctgcagaatgaa

SEQ ID NO: 1704556 - DNA, 25 bp, Homo sapien
cttaatagtgacatgccagggtgtc

SEQ ID NO: 1704557 - DNA, 25 bp, Homo sapien
tcagaggcgtttgctgacatgttcc

SEQ ID NO: 1704558 - DNA, 25 bp, Homo sapien
tggtcagaggcgtttgctgacatgt

SEQ ID NO: 1704559 - DNA, 25 bp, Homo sapien
gtcagaggcgtttgctgacatgttc

SEQ ID NO: 1704560 - DNA, 25 bp, Homo sapien
gctgtcaggacccattggtcggaga

SEQ ID NO: 1704561 - DNA, 25 bp, Homo sapien
cccattggtcggagatgagggcccc

SEQ ID NO: 1704562 - DNA, 25 bp, Homo sapien
tgccatcgcggaagcaatgagctgc

SEQ ID NO: 1704563 - DNA, 25 bp, Homo sapien
cacattgaccctccacagggagtgg

SEQ ID NO: 1704564 - DNA, 25 bp, Homo sapien
ggagatcaccgccttctcaataagg

SEQ ID NO: 1704565 - DNA, 25 bp, Homo sapien
caataaggaattctttgccccactg

SEQ ID NO: 1704566 - DNA, 25 bp, Homo sapien
gacatcaaaccctggggagatcacc

SEQ ID NO: 1704567 - DNA, 25 bp, Homo sapien
gccttctcaataaggaattctttgc

SEQ ID NO: 1704568 - DNA, 25 bp, Homo sapien
ctatgtcatcaccatagaactccag

SEQ ID NO: 1704569 - DNA, 25 bp, Homo sapien
tgccttgaggtctccgcagagccag

SEQ ID NO: 1704570 - DNA, 25 bp, Homo sapien
tgaggtctccgcagagccagattgg

SEQ ID NO: 1704571 - DNA, 25 bp, Homo sapien
ttgaggtctccgcagagccagattg

SEQ ID NO: 1704572 - DNA, 25 bp, Homo sapien
cagtttgctcccattcaaggcgaca

SEQ ID NO: 1704573 - DNA, 25 bp, Homo sapien
ggttaatgttcagtttgctcccatt

SEQ ID NO: 1704574 - DNA, 25 bp, Homo sapien
cactcccatcttaaggttaatgttc

SEQ ID NO: 1704575 - DNA, 25 bp, Homo sapien
caaggcgacaaaatgagcaggaaca

SEQ ID NO: 1704576 - DNA, 25 bp, Homo sapien
agacaacctcggcacagcttgtcca

SEQ ID NO: 1704577 - DNA, 25 bp, Homo sapien
ggagacaacctcggcacagcttgtc

SEQ ID NO: 1704578 - DNA, 25 bp, Homo sapien
ttgggagacaacctcggcacagctt

SEQ ID NO: 1704579 - DNA, 25 bp, Homo sapien
gggagacaacctcggcacagcttgt

SEQ ID NO: 1704580 - DNA, 25 bp, Homo sapien
cttgcagggactctcatcctcctgg

SEQ ID NO: 1704581 - DNA, 25 bp, Homo sapien
cctgggtcccactgcataggaactg

SEQ ID NO: 1704582 - DNA, 25 bp, Homo sapien
taggaactggtctgtcaccacctcc

SEQ ID NO: 1704583 - DNA, 25 bp, Homo sapien
actgcataggaactggtctgtcacc

SEQ ID NO: 1704584 - DNA, 25 bp, Homo sapien
caaggaaaactgctcccccagattc

SEQ ID NO: 1704585 - DNA, 25 bp, Homo sapien
aaaaacctgaatctccgctcaagga

SEQ ID NO: 1704586 - DNA, 25 bp, Homo sapien
aaaacctgaatctccgctcaaggaa

SEQ ID NO: 1704587 - DNA, 25 bp, Homo sapien
atctccgctcaaggaaaactgctcc

SEQ ID NO: 1704588 - DNA, 25 bp, Homo sapien
ccagggctgcatgcggaagagattg

SEQ ID NO: 1704589 - DNA, 25 bp, Homo sapien
gggttgtaaagaccccagctcacca

SEQ ID NO: 1704590 - DNA, 25 bp, Homo sapien
ccttttgcgggagtttttgtcagca

SEQ ID NO: 1704591 - DNA, 25 bp, Homo sapien
tggcggcgggaccttgctacgaggg

SEQ ID NO: 1704592 - DNA, 25 bp, Homo sapien
gatcacagggtctaagggtggccat

SEQ ID NO: 1704593 - DNA, 25 bp, Homo sapien
aggatggatcacagggtctaagggt

SEQ ID NO: 1704594 - DNA, 25 bp, Homo sapien
cagggtctaagggtggccattcaga

SEQ ID NO: 1704595 - DNA, 25 bp, Homo sapien
atggaggggcggcagattctggcag

SEQ ID NO: 1704596 - DNA, 25 bp, Homo sapien
gacaggccaaggagcgggaggtggg

SEQ ID NO: 1704597 - DNA, 25 bp, Homo sapien
ggcatcctagagacccggatttact

SEQ ID NO: 1704598 - DNA, 25 bp, Homo sapien
cctctggcatcctagagacccggat

SEQ ID NO: 1704599 - DNA, 25 bp, Homo sapien
tggtaggagccctgaggatttccca

SEQ ID NO: 1704600 - DNA, 25 bp, Homo sapien
gaccagaaataaggatccagctcac

SEQ ID NO: 1704601 - DNA, 25 bp, Homo sapien
tcactttcccggaacatccaagcgg

SEQ ID NO: 1704602 - DNA, 25 bp, Homo sapien
gaaactgcagaagtcccaccctttg

SEQ ID NO: 1704603 - DNA, 25 bp, Homo sapien
tgtgttatggtgcagagtccagcca

SEQ ID NO: 1704604 - DNA, 25 bp, Homo sapien
gaggcccaagataaagggcatcagg

SEQ ID NO: 1704605 - DNA, 25 bp, Homo sapien
ggcccaagataaagggcatcaggca

SEQ ID NO: 1704606 - DNA, 25 bp, Homo sapien
aagaggcccaagataaagggcatca

SEQ ID NO: 1704607 - DNA, 25 bp, Homo sapien
aggcccaagataaagggcatcaggc

SEQ ID NO: 1704608 - DNA, 25 bp, Homo sapien
tgaagagaaaggctgatgaagcctg

SEQ ID NO: 1704609 - DNA, 25 bp, Homo sapien
ctgaagagaaaggctgatgaagcct

SEQ ID NO: 1704610 - DNA, 25 bp, Homo sapien
aggacacacgtactccagtgcctgg

SEQ ID NO: 1704611 - DNA, 25 bp, Homo sapien
ggaaggagccgcctttgatctctac

SEQ ID NO: 1704612 - DNA, 25 bp, Homo sapien
cctcttggagaagtcggaaggagcc

SEQ ID NO: 1704613 - DNA, 25 bp, Homo sapien
ctgcacagggtacgggtagaagcca

SEQ ID NO: 1704614 - DNA, 25 bp, Homo sapien
tgagtcttcagggtgctccaggacc

SEQ ID NO: 1704615 - DNA, 25 bp, Homo sapien
ccaggaccccgtagatctgcaggta

SEQ ID NO: 1704616 - DNA, 25 bp, Homo sapien
caggaccccgtagatctgcaggtac

SEQ ID NO: 1704617 - DNA, 25 bp, Homo sapien
ttcagggtgctccaggaccccgtag

SEQ ID NO: 1704618 - DNA, 25 bp, Homo sapien
tgtttctgccttaggccactgccca

SEQ ID NO: 1704619 - DNA, 25 bp, Homo sapien
tgccgcctgccctgtttctgcctta

SEQ ID NO: 1704620 - DNA, 25 bp, Homo sapien
tgccctgtttctgccttaggccact

SEQ ID NO: 1704621 - DNA, 25 bp, Homo sapien
actgcccacactcattgccctcaaa

SEQ ID NO: 1704622 - DNA, 25 bp, Homo sapien
ctaaaactgctcctactcccggtca

SEQ ID NO: 1704623 - DNA, 25 bp, Homo sapien
tactcccggtcagcccaccttgtca

SEQ ID NO: 1704624 - DNA, 25 bp, Homo sapien
gaagcccagggtaaatgcttagtaa

SEQ ID NO: 1704625 - DNA, 25 bp, Homo sapien
ccttgtcaccctgcctagtctcatc

SEQ ID NO: 1704626 - DNA, 25 bp, Homo sapien
tattccccgttctcgaagtcgtgtg

SEQ ID NO: 1704627 - DNA, 25 bp, Homo sapien
tcacttggcaggtgcgattggcaga

SEQ ID NO: 1704628 - DNA, 25 bp, Homo sapien
accgtcatagcagtggaaagagatc

SEQ ID NO: 1704629 - DNA, 25 bp, Homo sapien
gagccccggagagtgtaaccgtcat

SEQ ID NO: 1704630 - DNA, 25 bp, Homo sapien
gatgcccgggttggagcagtacccc

SEQ ID NO: 1704631 - DNA, 25 bp, Homo sapien
tggtaggtgacgctgtcttcaaggc

SEQ ID NO: 1704632 - DNA, 25 bp, Homo sapien
acgttcgccgctgggagccacgcag

SEQ ID NO: 1704633 - DNA, 25 bp, Homo sapien
ttcctgacacgttcgccgctgggag

SEQ ID NO: 1704634 - DNA, 25 bp, Homo sapien
ttggcaggaaggctccgtcccgctc

SEQ ID NO: 1704635 - DNA, 25 bp, Homo sapien
cttggcaggaaggctccgtcccgct

SEQ ID NO: 1704636 - DNA, 25 bp, Homo sapien
tctctgtcagggaagacaggaaagc

SEQ ID NO: 1704637 - DNA, 25 bp, Homo sapien
gaaagcttcggccacctcttgaggg

SEQ ID NO: 1704638 - DNA, 25 bp, Homo sapien
cctcttgaggggtgtcgtacatgaa

SEQ ID NO: 1704639 - DNA, 25 bp, Homo sapien
gcatcgactccttctatggtctctg

SEQ ID NO: 1704640 - DNA, 25 bp, Homo sapien
ggctcctgtgaagttgctggcccca

SEQ ID NO: 1704641 - DNA, 25 bp, Homo sapien
caattaagttgactagacacttttt

SEQ ID NO: 1704642 - DNA, 25 bp, Homo sapien
cttctcaattaagttgactagacac

SEQ ID NO: 1704643 - DNA, 25 bp, Homo sapien
ttggctcctgtgaagttgctggccc

SEQ ID NO: 1704644 - DNA, 25 bp, Homo sapien
tgatcagggagctagtcctggaaga

SEQ ID NO: 1704645 - DNA, 25 bp, Homo sapien
cccgagttcagggataggaggattc

SEQ ID NO: 1704646 - DNA, 25 bp, Homo sapien
tccattcccccgagttcagggatag

SEQ ID NO: 1704647 - DNA, 25 bp, Homo sapien
gaagatcagcgagattccattcccc

SEQ ID NO: 1704648 - DNA, 25 bp, Homo sapien
cattgagctgcttcgtgacccagtc

SEQ ID NO: 1704649 - DNA, 25 bp, Homo sapien
gtggcatatgtcactagaccatatc

SEQ ID NO: 1704650 - DNA, 25 bp, Homo sapien
tatgtcactagaccatatcttggct

SEQ ID NO: 1704651 - DNA, 25 bp, Homo sapien
taattgatttcattgagctgcttcg

SEQ ID NO: 1704652 - DNA, 25 bp, Homo sapien
tcatcatgctgtacactgcctggag

SEQ ID NO: 1704653 - DNA, 25 bp, Homo sapien
tcatgaggatgatgacatggcgggt

SEQ ID NO: 1704654 - DNA, 25 bp, Homo sapien
aggagggacgtcatctggccagctc

SEQ ID NO: 1704655 - DNA, 25 bp, Homo sapien
atggcgggtgcggttccagccttca

SEQ ID NO: 1704656 - DNA, 25 bp, Homo sapien
acaggaccatgagggtaggagataa

SEQ ID NO: 1704657 - DNA, 25 bp, Homo sapien
tagtgttacaagtggacttaagggc

SEQ ID NO: 1704658 - DNA, 25 bp, Homo sapien
ggaagaattccttatgaagggtcac

SEQ ID NO: 1704659 - DNA, 25 bp, Homo sapien
agatagttgatcacagggcttagga

SEQ ID NO: 1704660 - DNA, 25 bp, Homo sapien
gggtttttgcgatccttgccaatgt

SEQ ID NO: 1704661 - DNA, 25 bp, Homo sapien
caatgacagtaattgggtccccgcc

SEQ ID NO: 1704662 - DNA, 25 bp, Homo sapien
cagataatcctcccttgggtttttg

SEQ ID NO: 1704663 - DNA, 25 bp, Homo sapien
tgtatagcaagtcccggatctcatc

SEQ ID NO: 1704664 - DNA, 25 bp, Homo sapien
gtgctgggtcctaggcaggttactc

SEQ ID NO: 1704665 - DNA, 25 bp, Homo sapien
gggtgctgggtcctaggcaggttac

SEQ ID NO: 1704666 - DNA, 25 bp, Homo sapien
tggggtgctgggtcctaggcaggtt

SEQ ID NO: 1704667 - DNA, 25 bp, Homo sapien
tgctgggtcctaggcaggttactca

SEQ ID NO: 1704668 - DNA, 25 bp, Homo sapien
ctgagggataaaaaggaaggatgag

SEQ ID NO: 1704669 - DNA, 25 bp, Homo sapien
tgagggataaaaaggaaggatgagg

SEQ ID NO: 1704670 - DNA, 25 bp, Homo sapien
gataaaaaggaaggatgagggtcca

SEQ ID NO: 1704671 - DNA, 25 bp, Homo sapien
ggcccgaccccaaacacatagacat

SEQ ID NO: 1704672 - DNA, 25 bp, Homo sapien
catttggtagaaaacatcttccagg

SEQ ID NO: 1704673 - DNA, 25 bp, Homo sapien
gactttgaacacatgttgctcattg

SEQ ID NO: 1704674 - DNA, 25 bp, Homo sapien
ttgactttgaacacatgttgctcat

SEQ ID NO: 1704675 - DNA, 25 bp, Homo sapien
tctttattcccttgtatctccctac

SEQ ID NO: 1704676 - DNA, 25 bp, Homo sapien
ttctttattcccttgtatctcccta

SEQ ID NO: 1704677 - DNA, 25 bp, Homo sapien
acttcattcccaaatggcagcagcc

SEQ ID NO: 1704678 - DNA, 25 bp, Homo sapien
gaaaactcggaacacttcattccca

SEQ ID NO: 1704679 - DNA, 25 bp, Homo sapien
cagagaaggagaatgtgctgaaaac

SEQ ID NO: 1704680 - DNA, 25 bp, Homo sapien
gagaatgtgctgaaaactcggaaca

SEQ ID NO: 1704681 - DNA, 25 bp, Homo sapien
tgtggtaatcggtacccttcctgtg

SEQ ID NO: 1704682 - DNA, 25 bp, Homo sapien
catggttgcttgtggtaatcggtac

SEQ ID NO: 1704683 - DNA, 25 bp, Homo sapien
tgcttgtggtaatcggtacccttcc

SEQ ID NO: 1704684 - DNA, 25 bp, Homo sapien
ggcctgccatggttgcttgtggtaa

SEQ ID NO: 1704685 - DNA, 25 bp, Homo sapien
gattgagtgttccttgtcatccaca

SEQ ID NO: 1704686 - DNA, 25 bp, Homo sapien
tgtcatccacagtgaaacaatgtgc

SEQ ID NO: 1704687 - DNA, 25 bp, Homo sapien
ctgtcagcacaaagtactcagacac

SEQ ID NO: 1704688 - DNA, 25 bp, Homo sapien
gcacaaagtactcagacaccacagc

SEQ ID NO: 1704689 - DNA, 25 bp, Homo sapien
gtaggtaccacctctttgtgggcag

SEQ ID NO: 1704690 - DNA, 25 bp, Homo sapien
tgggtggagtgtaggatctgtagaa

SEQ ID NO: 1704691 - DNA, 25 bp, Homo sapien
ttgcctggagagcataggtgcagcc

SEQ ID NO: 1704692 - DNA, 25 bp, Homo sapien
agcccaggaccttcagttgcatcct

SEQ ID NO: 1704693 - DNA, 25 bp, Homo sapien
ctatctccaggtcccgcttctcccc

SEQ ID NO: 1704694 - DNA, 25 bp, Homo sapien
tatctccaggtcccgcttctcccct

SEQ ID NO: 1704695 - DNA, 25 bp, Homo sapien
atctccaggtcccgcttctcccctc

SEQ ID NO: 1704696 - DNA, 25 bp, Homo sapien
tgagcttgatcagggcaacgtcata

SEQ ID NO: 1704697 - DNA, 25 bp, Homo sapien
acgtcatagtcataaaattcaggaa

SEQ ID NO: 1704698 - DNA, 25 bp, Homo sapien
tcagcttattcttgagcttgatcag

SEQ ID NO: 1704699 - DNA, 25 bp, Homo sapien
gatcagggcaacgtcatagtcataa

SEQ ID NO: 1704700 - DNA, 25 bp, Homo sapien
agtggtagttggaggaagcctcaaa

SEQ ID NO: 1704701 - DNA, 25 bp, Homo sapien
tagttggaggaagcctcaaagctcg

SEQ ID NO: 1704702 - DNA, 25 bp, Homo sapien
gctcgagttgttccctcggtgcagg

SEQ ID NO: 1704703 - DNA, 25 bp, Homo sapien
gaagcctcaaagctcgagttgttcc

SEQ ID NO: 1704704 - DNA, 25 bp, Homo sapien
tctgggccaggcatcatctcttcct

SEQ ID NO: 1704705 - DNA, 25 bp, Homo sapien
catccttatcctcttgccaagtatg

SEQ ID NO: 1704706 - DNA, 25 bp, Homo sapien
cacttgtctcttgggatctcatcct

SEQ ID NO: 1704707 - DNA, 25 bp, Homo sapien
cttcctattgcacctccctctcatg

SEQ ID NO: 1704708 - DNA, 25 bp, Homo sapien
ctgtcatctccccattgcctttgtc

SEQ ID NO: 1704709 - DNA, 25 bp, Homo sapien
actcagtagatgtcccctaagccct

SEQ ID NO: 1704710 - DNA, 25 bp, Homo sapien
tgcctttgtcactcagtagatgtcc

SEQ ID NO: 1704711 - DNA, 25 bp, Homo sapien
ggacgaatagactgcgtcacttcag

SEQ ID NO: 1704712 - DNA, 25 bp, Homo sapien
gacctccttccgagtcagctttttc

SEQ ID NO: 1704713 - DNA, 25 bp, Homo sapien
aacagagctttgatatcctgtgcag

SEQ ID NO: 1704714 - DNA, 25 bp, Homo sapien
cattcttgatgtagacctccttccg

SEQ ID NO: 1704715 - DNA, 25 bp, Homo sapien
gagctttgatatcctgtgcagggag

SEQ ID NO: 1704716 - DNA, 25 bp, Homo sapien
cctggggcatattgagcatctctct

SEQ ID NO: 1704717 - DNA, 25 bp, Homo sapien
attggggtcagcatagggactcact

SEQ ID NO: 1704718 - DNA, 25 bp, Homo sapien
cagcatagggactcactcctccagt

SEQ ID NO: 1704719 - DNA, 25 bp, Homo sapien
ctcctccagtacaaaggaaccgagg

SEQ ID NO: 1704720 - DNA, 25 bp, Homo sapien
ttgaatgaaacgacttctcttgtga

SEQ ID NO: 1704721 - DNA, 25 bp, Homo sapien
cgacttctcttgtgaactatcaagg

SEQ ID NO: 1704722 - DNA, 25 bp, Homo sapien
gaatgaaacgacttctcttgtgaac

SEQ ID NO: 1704723 - DNA, 25 bp, Homo sapien
tgaaacgacttctcttgtgaactat

SEQ ID NO: 1704724 - DNA, 25 bp, Homo sapien
tcgttcttgacacacgcaggcaaga

SEQ ID NO: 1704725 - DNA, 25 bp, Homo sapien
gaattactagccacatgcattgagc

SEQ ID NO: 1704726 - DNA, 25 bp, Homo sapien
caagacatgcggtcctaaggtgagg

SEQ ID NO: 1704727 - DNA, 25 bp, Homo sapien
ttggcatctccccagataggaaagg

SEQ ID NO: 1704728 - DNA, 25 bp, Homo sapien
cctaatcctggaagcatggctgttc

SEQ ID NO: 1704729 - DNA, 25 bp, Homo sapien
gggtgccatggatcattcagtagaa

SEQ ID NO: 1704730 - DNA, 25 bp, Homo sapien
gccatggatcattcagtagaattcc

SEQ ID NO: 1704731 - DNA, 25 bp, Homo sapien
tgttcctgcttgtgtcttagctgac

SEQ ID NO: 1704732 - DNA, 25 bp, Homo sapien
actactccccagctgattacaccaa

SEQ ID NO: 1704733 - DNA, 25 bp, Homo sapien
acatccactactccccagctgatta

SEQ ID NO: 1704734 - DNA, 25 bp, Homo sapien
tgcagacatccactactccccagct

SEQ ID NO: 1704735 - DNA, 25 bp, Homo sapien
tttgcagacatccactactccccag

SEQ ID NO: 1704736 - DNA, 25 bp, Homo sapien
gatgtgaaagtctcgggcgtgagca

SEQ ID NO: 1704737 - DNA, 25 bp, Homo sapien
gttgatgtgaaagtctcgggcgtga

SEQ ID NO: 1704738 - DNA, 25 bp, Homo sapien
ttgaaagaggttgatgtgaaagtct

SEQ ID NO: 1704739 - DNA, 25 bp, Homo sapien
aaagaggttgatgtgaaagtctcgg

SEQ ID NO: 1704740 - DNA, 25 bp, Homo sapien
tatagaaaacccaaatcctcatctt

SEQ ID NO: 1704741 - DNA, 25 bp, Homo sapien
acccaaatcctcatcttggagtttc

SEQ ID NO: 1704742 - DNA, 25 bp, Homo sapien
tagaaaacccaaatcctcatcttgg

SEQ ID NO: 1704743 - DNA, 25 bp, Homo sapien
ggagtttctccttcagccagggcag

SEQ ID NO: 1704744 - DNA, 25 bp, Homo sapien
cagctgttttaattcaatcccacgc

SEQ ID NO: 1704745 - DNA, 25 bp, Homo sapien
aattcaatcccacgcccctgtccag

SEQ ID NO: 1704746 - DNA, 25 bp, Homo sapien
cgcagctgttttaattcaatcccac

SEQ ID NO: 1704747 - DNA, 25 bp, Homo sapien
gctgttttaattcaatcccacgccc

SEQ ID NO: 1704748 - DNA, 25 bp, Homo sapien
cgctcctcgctacgtcatcgttgtg

SEQ ID NO: 1704749 - DNA, 25 bp, Homo sapien
tcctctttgcgttgctctgcgggcg

SEQ ID NO: 1704750 - DNA, 25 bp, Homo sapien
tgcttctcactcttcggcccttttt

SEQ ID NO: 1704751 - DNA, 25 bp, Homo sapien
ttgtgagcccgctatcagcggccag

SEQ ID NO: 1704752 - DNA, 25 bp, Homo sapien
aagtgcggcaagtagtcgctgcgaa

SEQ ID NO: 1704753 - DNA, 25 bp, Homo sapien
agtagtcgctgcgaagtaagccccg

SEQ ID NO: 1704754 - DNA, 25 bp, Homo sapien
cgagagcgtgaactatcgctgcgga

SEQ ID NO: 1704755 - DNA, 25 bp, Homo sapien
gtagaggcaacttccggtacagccc

SEQ ID NO: 1704756 - DNA, 25 bp, Homo sapien
agtgccccgtgcatccgagctccac

SEQ ID NO: 1704757 - DNA, 25 bp, Homo sapien
cagtgccccgtgcatccgagctcca

SEQ ID NO: 1704758 - DNA, 25 bp, Homo sapien
ttggatacagaagggagctccacgg

SEQ ID NO: 1704759 - DNA, 25 bp, Homo sapien
tcagaaacatggaggctggacctag

SEQ ID NO: 1704760 - DNA, 25 bp, Homo sapien
gacaggagtacaggcacagatgaac

SEQ ID NO: 1704761 - DNA, 25 bp, Homo sapien
tcaatgcgggtcaaaggttagggtc

SEQ ID NO: 1704762 - DNA, 25 bp, Homo sapien
tgacagaaacaactgttctgcttct

SEQ ID NO: 1704763 - DNA, 25 bp, Homo sapien
gggatgacagaaacaactgttctgc

SEQ ID NO: 1704764 - DNA, 25 bp, Homo sapien
gacagaaacaactgttctgcttctt

SEQ ID NO: 1704765 - DNA, 25 bp, Homo sapien
ctggggatgacagaaacaactgttc

SEQ ID NO: 1704766 - DNA, 25 bp, Homo sapien
aaagagaccagggatccgtcttcct

SEQ ID NO: 1704767 - DNA, 25 bp, Homo sapien
cagggatccgtcttcctctgccatt

SEQ ID NO: 1704768 - DNA, 25 bp, Homo sapien
tttgggcctgtaggtcggatgggac

SEQ ID NO: 1704769 - DNA, 25 bp, Homo sapien
ccaggacagccaaaagagaccaggg

SEQ ID NO: 1704770 - DNA, 25 bp, Homo sapien
tgtagccgagagatttgtgttctcc

SEQ ID NO: 1704771 - DNA, 25 bp, Homo sapien
tggatttccccataaggactgggag

SEQ ID NO: 1704772 - DNA, 25 bp, Homo sapien
gccggcgaagagacaaggaggttgt

SEQ ID NO: 1704773 - DNA, 25 bp, Homo sapien
gccagaagggataccgagttggatt

SEQ ID NO: 1704774 - DNA, 25 bp, Homo sapien
cctcctcccgtgtgttcagatctgt

SEQ ID NO: 1704775 - DNA, 25 bp, Homo sapien
agcctcctcccgtgtgttcagatct

SEQ ID NO: 1704776 - DNA, 25 bp, Homo sapien
gttatggtgggttcatccatccccc

SEQ ID NO: 1704777 - DNA, 25 bp, Homo sapien
tgttcagatctgttatggtgggttc

SEQ ID NO: 1704778 - DNA, 25 bp, Homo sapien
cttttggtgcaaagtccatgccttt

SEQ ID NO: 1704779 - DNA, 25 bp, Homo sapien
tgaaaccaggtggaatagtaagaag

SEQ ID NO: 1704780 - DNA, 25 bp, Homo sapien
tggtgcaaagtccatgcctttcttg

SEQ ID NO: 1704781 - DNA, 25 bp, Homo sapien
aagtccatgcctttcttgaaaccag

SEQ ID NO: 1704782 - DNA, 25 bp, Homo sapien
tctcctacaccccactcaaaaacta

SEQ ID NO: 1704783 - DNA, 25 bp, Homo sapien
caaggtcaaccttgtcatgtccatc

SEQ ID NO: 1704784 - DNA, 25 bp, Homo sapien
gaaggacatgacttctcctacaccc

SEQ ID NO: 1704785 - DNA, 25 bp, Homo sapien
tccatctctgttccttaggagaagg

SEQ ID NO: 1704786 - DNA, 25 bp, Homo sapien
ggctgaaacagtgtcccctctggga

SEQ ID NO: 1704787 - DNA, 25 bp, Homo sapien
taaggcttagtagtccaggagctgg

SEQ ID NO: 1704788 - DNA, 25 bp, Homo sapien
gacagctaaggcttagtagtccagg

SEQ ID NO: 1704789 - DNA, 25 bp, Homo sapien
ccagaggctccaacagacagctaag

SEQ ID NO: 1704790 - DNA, 25 bp, Homo sapien
ttcaacactaggtcttccaagctgc

SEQ ID NO: 1704791 - DNA, 25 bp, Homo sapien
aacactaggtcttccaagctgcttg

SEQ ID NO: 1704792 - DNA, 25 bp, Homo sapien
tcaacactaggtcttccaagctgct

SEQ ID NO: 1704793 - DNA, 25 bp, Homo sapien
cttcaacactaggtcttccaagctg

SEQ ID NO: 1704794 - DNA, 25 bp, Homo sapien
ccacatcctggtggcaaggctcttt

SEQ ID NO: 1704795 - DNA, 25 bp, Homo sapien
cagagggctctcaattagcactcct

SEQ ID NO: 1704796 - DNA, 25 bp, Homo sapien
gggtagcagtgataaagatacaacc

SEQ ID NO: 1704797 - DNA, 25 bp, Homo sapien
cagcccacatcctggtggcaaggct

SEQ ID NO: 1704798 - DNA, 25 bp, Homo sapien
aacaggggaggtggcgtccacaggg

SEQ ID NO: 1704799 - DNA, 25 bp, Homo sapien
cgatagaaatcaccaacaggggagg

SEQ ID NO: 1704800 - DNA, 25 bp, Homo sapien
gtggcgtccacagggatggcccact

SEQ ID NO: 1704801 - DNA, 25 bp, Homo sapien
ggctggggaatgaggcgatagaaat

SEQ ID NO: 1704802 - DNA, 25 bp, Homo sapien
tgtgagctgcgacaaagacagagtc

SEQ ID NO: 1704803 - DNA, 25 bp, Homo sapien
caagtgcaggatggcctgtttctga

SEQ ID NO: 1704804 - DNA, 25 bp, Homo sapien
tcctgcagatgtgtgagctgcgaca

SEQ ID NO: 1704805 - DNA, 25 bp, Homo sapien
cagagtcatgccgttccaagtgcag

SEQ ID NO: 1704806 - DNA, 25 bp, Homo sapien
ctcttgtctcagtcttagccctgaa

SEQ ID NO: 1704807 - DNA, 25 bp, Homo sapien
cctgaacctctcacttaaaggatga

SEQ ID NO: 1704808 - DNA, 25 bp, Homo sapien
tgtctcagtcttagccctgaacctc

SEQ ID NO: 1704809 - DNA, 25 bp, Homo sapien
agccctgaacctctcacttaaagga

SEQ ID NO: 1704810 - DNA, 25 bp, Homo sapien
tgaagttagccagtccctccgcaga

SEQ ID NO: 1704811 - DNA, 25 bp, Homo sapien
ctccgcagactcatggcccgcactt

SEQ ID NO: 1704812 - DNA, 25 bp, Homo sapien
tgcccttacattctcctgcatgata

SEQ ID NO: 1704813 - DNA, 25 bp, Homo sapien
gcatgaagttagccagtccctccgc

SEQ ID NO: 1704814 - DNA, 25 bp, Homo sapien
atgcagctgtacatccccggtgagc

SEQ ID NO: 1704815 - DNA, 25 bp, Homo sapien
cacatccccgaatgtgtttcggaag

SEQ ID NO: 1704816 - DNA, 25 bp, Homo sapien
aggaggcctccggatgcagctgtac

SEQ ID NO: 1704817 - DNA, 25 bp, Homo sapien
ttctggttgctcagggccttgatgg

SEQ ID NO: 1704818 - DNA, 25 bp, Homo sapien
ctcgacatcgttgatatagtgaacc

SEQ ID NO: 1704819 - DNA, 25 bp, Homo sapien
ccgaataacatctgagccactgtac

SEQ ID NO: 1704820 - DNA, 25 bp, Homo sapien
actccaggtcccgaataacatctga

SEQ ID NO: 1704821 - DNA, 25 bp, Homo sapien
catcgttgatatagtgaacctcatc

SEQ ID NO: 1704822 - DNA, 25 bp, Homo sapien
ggactgccgggttctggggagccca

SEQ ID NO: 1704823 - DNA, 25 bp, Homo sapien
gccgggttctggggagcccatggcc

SEQ ID NO: 1704824 - DNA, 25 bp, Homo sapien
gttctggggagcccatggcccttac

SEQ ID NO: 1704825 - DNA, 25 bp, Homo sapien
gactgccgggttctggggagcccat

SEQ ID NO: 1704826 - DNA, 25 bp, Homo sapien
ccttctgcccataaagaggcacagg

SEQ ID NO: 1704827 - DNA, 25 bp, Homo sapien
gatagaaacgtggtcaggtagcatg

SEQ ID NO: 1704828 - DNA, 25 bp, Homo sapien
ataagcacctcctcccacacgaccc

SEQ ID NO: 1704829 - DNA, 25 bp, Homo sapien
agaaggatgatagaaacgtggtcag

SEQ ID NO: 1704830 - DNA, 25 bp, Homo sapien
gacggtggcactcagaaggatgata

SEQ ID NO: 1704831 - DNA, 25 bp, Homo sapien
acagtgctaatcacatagatctgac

SEQ ID NO: 1704832 - DNA, 25 bp, Homo sapien
cagtgctaatcacatagatctgacg

SEQ ID NO: 1704833 - DNA, 25 bp, Homo sapien
agtgctaatcacatagatctgacga

SEQ ID NO: 1704834 - DNA, 25 bp, Homo sapien
ctgtgaaaagatagtgctccagggg

SEQ ID NO: 1704835 - DNA, 25 bp, Homo sapien
aggctcctcgggagtccagcaacaa

SEQ ID NO: 1704836 - DNA, 25 bp, Homo sapien
ccttttgtatggaaggctcctcggg

SEQ ID NO: 1704837 - DNA, 25 bp, Homo sapien
tatggaaggctcctcgggagtccag

SEQ ID NO: 1704838 - DNA, 25 bp, Homo sapien
tcctcgggagtccagcaacaaaaag

SEQ ID NO: 1704839 - DNA, 25 bp, Homo sapien
agggaggggtagccacaatgtccag

SEQ ID NO: 1704840 - DNA, 25 bp, Homo sapien
acagggaggggtagccacaatgtcc

SEQ ID NO: 1704841 - DNA, 25 bp, Homo sapien
cagggaggggtagccacaatgtcca

SEQ ID NO: 1704842 - DNA, 25 bp, Homo sapien
tgcagggcccccctgatgtgtgggc

SEQ ID NO: 1704843 - DNA, 25 bp, Homo sapien
tctgggcgtgtttgctcattctctc

SEQ ID NO: 1704844 - DNA, 25 bp, Homo sapien
aaaggtctgggcgtgtttgctcatt

SEQ ID NO: 1704845 - DNA, 25 bp, Homo sapien
ccaaaggtctgggcgtgtttgctca

SEQ ID NO: 1704846 - DNA, 25 bp, Homo sapien
caggaagaggtggatctcgctcttc

SEQ ID NO: 1704847 - DNA, 25 bp, Homo sapien
ggagggacaggtacactccgcggtc

SEQ ID NO: 1704848 - DNA, 25 bp, Homo sapien
accacgggcaactgggcacgtgtgc

SEQ ID NO: 1704849 - DNA, 25 bp, Homo sapien
tcgctcttctccgaactggtggtga

SEQ ID NO: 1704850 - DNA, 25 bp, Homo sapien
agtctgccaaatgtgtgcatgcacg

SEQ ID NO: 1704851 - DNA, 25 bp, Homo sapien
cctatccccaccagtctgccaaatg

SEQ ID NO: 1704852 - DNA, 25 bp, Homo sapien
caccagtctgccaaatgtgtgcatg

SEQ ID NO: 1704853 - DNA, 25 bp, Homo sapien
tccccaccagtctgccaaatgtgtg

SEQ ID NO: 1704854 - DNA, 25 bp, Homo sapien
caggatgccgctatggtgcacaccc

SEQ ID NO: 1704855 - DNA, 25 bp, Homo sapien
aggccgcgattcaggagctctgaca

SEQ ID NO: 1704856 - DNA, 25 bp, Homo sapien
tcaggagctctgacatgtgcaggac

SEQ ID NO: 1704857 - DNA, 25 bp, Homo sapien
cacggctgaagagcatctccacgat

SEQ ID NO: 1704858 - DNA, 25 bp, Homo sapien
tcatcatgcggtgcaggtctgccat

SEQ ID NO: 1704859 - DNA, 25 bp, Homo sapien
ggagtcaaacactactgtacgagca

SEQ ID NO: 1704860 - DNA, 25 bp, Homo sapien
tgtacgagcaggcatgtttactccc

SEQ ID NO: 1704861 - DNA, 25 bp, Homo sapien
ccttgcagagcaggataacggtgcc

SEQ ID NO: 1704862 - DNA, 25 bp, Homo sapien
tgagggcatccactcgcagcaagtt

SEQ ID NO: 1704863 - DNA, 25 bp, Homo sapien
gcatccactcgcagcaagttgagga

SEQ ID NO: 1704864 - DNA, 25 bp, Homo sapien
tcatagtgtacgtgaggcggaactg

SEQ ID NO: 1704865 - DNA, 25 bp, Homo sapien
cagcaagttgaggatcatagtgtac

SEQ ID NO: 1704866 - DNA, 25 bp, Homo sapien
tccccccagctgtaatattcaggca

SEQ ID NO: 1704867 - DNA, 25 bp, Homo sapien
accagttggccagtcatgtcaggct

SEQ ID NO: 1704868 - DNA, 25 bp, Homo sapien
ctgtaatattcaggcaggtcgacca

SEQ ID NO: 1704869 - DNA, 25 bp, Homo sapien
gggtctctgtcagttcctcccccca

SEQ ID NO: 1704870 - DNA, 25 bp, Homo sapien
cactcccaatgcgttgtgatgctcc

SEQ ID NO: 1704871 - DNA, 25 bp, Homo sapien
caatgcgttgtgatgctcctgattc

SEQ ID NO: 1704872 - DNA, 25 bp, Homo sapien
ctgtaggatcactcccaatgcgttg

SEQ ID NO: 1704873 - DNA, 25 bp, Homo sapien
gctgagagagacttcagcccgttca

SEQ ID NO: 1704874 - DNA, 25 bp, Homo sapien
caagggcttatcacacaagaccagg

SEQ ID NO: 1704875 - DNA, 25 bp, Homo sapien
aatactctgctggtggagttcgagg

SEQ ID NO: 1704876 - DNA, 25 bp, Homo sapien
gcaggaacagcttgaatcccacgag

SEQ ID NO: 1704877 - DNA, 25 bp, Homo sapien
cacgaggtcatctggatagggcacc

SEQ ID NO: 1704878 - DNA, 25 bp, Homo sapien
tcctggctggagcttgaccatggtg

SEQ ID NO: 1704879 - DNA, 25 bp, Homo sapien
tggagcttgaccatggtgtggtcac

SEQ ID NO: 1704880 - DNA, 25 bp, Homo sapien
ttctccccattcacccggagcacct

SEQ ID NO: 1704881 - DNA, 25 bp, Homo sapien
gccatatctcctggctggagcttga

SEQ ID NO: 1704882 - DNA, 25 bp, Homo sapien
gatctggggtaagatcttctctccc

SEQ ID NO: 1704883 - DNA, 25 bp, Homo sapien
tgcctctacgtgcccctctggagga

SEQ ID NO: 1704884 - DNA, 25 bp, Homo sapien
ggaggaaactcccagaccactgccc

SEQ ID NO: 1704885 - DNA, 25 bp, Homo sapien
tgtggaagccctcttactacaacct

SEQ ID NO: 1704886 - DNA, 25 bp, Homo sapien
gcaggtcattgacagggtcgagggt

SEQ ID NO: 1704887 - DNA, 25 bp, Homo sapien
gttcctggacagcagtggtcacggc

SEQ ID NO: 1704888 - DNA, 25 bp, Homo sapien
agctgcaggtcattgacagggtcga

SEQ ID NO: 1704889 - DNA, 25 bp, Homo sapien
tcattgacagggtcgagggtgggag

SEQ ID NO: 1704890 - DNA, 25 bp, Homo sapien
tgtacacactgagccccctggatca

SEQ ID NO: 1704891 - DNA, 25 bp, Homo sapien
aacgggggctgtgtacacactgagc

SEQ ID NO: 1704892 - DNA, 25 bp, Homo sapien
tgggcaggaaaacgggggctgtgta

SEQ ID NO: 1704893 - DNA, 25 bp, Homo sapien
tccagcttccgggcccggagcccac

SEQ ID NO: 1704894 - DNA, 25 bp, Homo sapien
tgatccgacagtaggaagcgcagcc

SEQ ID NO: 1704895 - DNA, 25 bp, Homo sapien
agcagcaatgactgatccgacagta

SEQ ID NO: 1704896 - DNA, 25 bp, Homo sapien
tctccttctgtatctgcattcgctc

SEQ ID NO: 1704897 - DNA, 25 bp, Homo sapien
ccatctccttctgtatctgcattcg

SEQ ID NO: 1704898 - DNA, 25 bp, Homo sapien
tagcccccctgccccaaccactgcc

SEQ ID NO: 1704899 - DNA, 25 bp, Homo sapien
cctagcccccctgccccaaccactg

SEQ ID NO: 1704900 - DNA, 25 bp, Homo sapien
ctgccccaaccactgccccacccac

SEQ ID NO: 1704901 - DNA, 25 bp, Homo sapien
cctgccccaaccactgccccaccca

SEQ ID NO: 1704902 - DNA, 25 bp, Homo sapien
gcaagaaaaagggtgggcattggac

SEQ ID NO: 1704903 - DNA, 25 bp, Homo sapien
tgcaagaaaaagggtgggcattgga

SEQ ID NO: 1704904 - DNA, 25 bp, Homo sapien
ctgcaagaaaaagggtgggcattgg

SEQ ID NO: 1704905 - DNA, 25 bp, Homo sapien
tccacgtaacccagggttcggagca

SEQ ID NO: 1704906 - DNA, 25 bp, Homo sapien
tgctcagtgcattgtcaaacatgag

SEQ ID NO: 1704907 - DNA, 25 bp, Homo sapien
ggtgctcagtgcattgtcaaacatg

SEQ ID NO: 1704908 - DNA, 25 bp, Homo sapien
tcagtgcattgtcaaacatgagctc

SEQ ID NO: 1704909 - DNA, 25 bp, Homo sapien
tggcacaagccacccgccctgccag

SEQ ID NO: 1704910 - DNA, 25 bp, Homo sapien
cagggaaggaccagatcaagaaggc

SEQ ID NO: 1704911 - DNA, 25 bp, Homo sapien
tccttggggcacttacagggctgga

SEQ ID NO: 1704912 - DNA, 25 bp, Homo sapien
cacctgggggactacctgaaggtga

SEQ ID NO: 1704913 - DNA, 25 bp, Homo sapien
aaggtgaaggtcaggaatgccacag

SEQ ID NO: 1704914 - DNA, 25 bp, Homo sapien
cgcttggccacagcccggacacgtt

SEQ ID NO: 1704915 - DNA, 25 bp, Homo sapien
aatccgcttggccacagcccggaca

SEQ ID NO: 1704916 - DNA, 25 bp, Homo sapien
ggccacagcccggacacgttctatt

SEQ ID NO: 1704917 - DNA, 25 bp, Homo sapien
atccgcttggccacagcccggacac

SEQ ID NO: 1704918 - DNA, 25 bp, Homo sapien
tcatatacaacctcaaccagcccaa

SEQ ID NO: 1704919 - DNA, 25 bp, Homo sapien
tggttcaggccacaagccacctgga

SEQ ID NO: 1704920 - DNA, 25 bp, Homo sapien
aattcctccaccgtctggttcaggc

SEQ ID NO: 1704921 - DNA, 25 bp, Homo sapien
tgccccgggcccactcatatacaac

SEQ ID NO: 1704922 - DNA, 25 bp, Homo sapien
cccagccagccgtctgcaaaatccc

SEQ ID NO: 1704923 - DNA, 25 bp, Homo sapien
agccagccgtctgcaaaatcccaaa

SEQ ID NO: 1704924 - DNA, 25 bp, Homo sapien
tagggtgaggactggatgcactcag

SEQ ID NO: 1704925 - DNA, 25 bp, Homo sapien
ggaaagtagggtgaggactggatgc

SEQ ID NO: 1704926 - DNA, 25 bp, Homo sapien
gaggctggccgcaaatacgatgtcc

SEQ ID NO: 1704927 - DNA, 25 bp, Homo sapien
ccgtagcaaggtagccgctgtctcc

SEQ ID NO: 1704928 - DNA, 25 bp, Homo sapien
acacatctcagccaggcgctgaatg

SEQ ID NO: 1704929 - DNA, 25 bp, Homo sapien
ggcgctgaatgcagcggaccaccag

SEQ ID NO: 1704930 - DNA, 25 bp, Homo sapien
cagcaactcaagcacacaacagtgc

SEQ ID NO: 1704931 - DNA, 25 bp, Homo sapien
gctgacgacaccgtatgagcggcag

SEQ ID NO: 1704932 - DNA, 25 bp, Homo sapien
gggagcatctcactaatgcttgtgt

SEQ ID NO: 1704933 - DNA, 25 bp, Homo sapien
aagactattcttcgaggggagcatc

SEQ ID NO: 1704934 - DNA, 25 bp, Homo sapien
ccaaagccggggtgagaatcagtcc

SEQ ID NO: 1704935 - DNA, 25 bp, Homo sapien
tgacctcagagacggatacccggat

SEQ ID NO: 1704936 - DNA, 25 bp, Homo sapien
tgagcctcggaacaaactacctcgt

SEQ ID NO: 1704937 - DNA, 25 bp, Homo sapien
gatcaggtggctcgcttagtcctaa

SEQ ID NO: 1704938 - DNA, 25 bp, Homo sapien
ggcagtatatctggagacccgtacc

SEQ ID NO: 1704939 - DNA, 25 bp, Homo sapien
ttcttgatctgagcgcagacgtcct

SEQ ID NO: 1704940 - DNA, 25 bp, Homo sapien
tcctaacctcactgcatttggagga

SEQ ID NO: 1704941 - DNA, 25 bp, Homo sapien
gggagctttgaggtaactggattct

SEQ ID NO: 1704942 - DNA, 25 bp, Homo sapien
acgtcatagctctgcggaggtggaa

SEQ ID NO: 1704943 - DNA, 25 bp, Homo sapien
gtcaacctccttcgtgaagctcaca

SEQ ID NO: 1704944 - DNA, 25 bp, Homo sapien
tggccacgttggtgtcaacctcctt

SEQ ID NO: 1704945 - DNA, 25 bp, Homo sapien
cgccactgtcgctgaatgattgcat

SEQ ID NO: 1704946 - DNA, 25 bp, Homo sapien
ccgccactgtcgctgaatgattgca

SEQ ID NO: 1704947 - DNA, 25 bp, Homo sapien
ctagaccaggtgatgacgaaaggag

SEQ ID NO: 1704948 - DNA, 25 bp, Homo sapien
gagcgtcaacttgtcgtccctcagg

SEQ ID NO: 1704949 - DNA, 25 bp, Homo sapien
tgatgacgaaaggagcgtcaacttg

SEQ ID NO: 1704950 - DNA, 25 bp, Homo sapien
ttgtcgtccctcaggcccgtcagtg

SEQ ID NO: 1704951 - DNA, 25 bp, Homo sapien
gcagagcagtgacgtacggtctccc

SEQ ID NO: 1704952 - DNA, 25 bp, Homo sapien
tgaaaatagggtcttccggcgcaga

SEQ ID NO: 1704953 - DNA, 25 bp, Homo sapien
aactccaaaggtctccgggatcagg

SEQ ID NO: 1704954 - DNA, 25 bp, Homo sapien
catatcccgggattttatggtaccg

SEQ ID NO: 1704955 - DNA, 25 bp, Homo sapien
ataaatcggctcacggacagggaac

SEQ ID NO: 1704956 - DNA, 25 bp, Homo sapien
cagataaatcggctcacggacaggg

SEQ ID NO: 1704957 - DNA, 25 bp, Homo sapien
ctgggcagataaatcggctcacgga

SEQ ID NO: 1704958 - DNA, 25 bp, Homo sapien
gggcagataaatcggctcacggaca

SEQ ID NO: 1704959 - DNA, 25 bp, Homo sapien
gagttctgagacagccgcgcgcgcc

SEQ ID NO: 1704960 - DNA, 25 bp, Homo sapien
agttctgagacagccgcgcgcgccg

SEQ ID NO: 1704961 - DNA, 25 bp, Homo sapien
tcagcacgatgggcggcagcgcgtc

SEQ ID NO: 1704962 - DNA, 25 bp, Homo sapien
cctcaaacaggcctcgcgggaacag

SEQ ID NO: 1704963 - DNA, 25 bp, Homo sapien
ccacggtcctgtcaggcacaaggct

SEQ ID NO: 1704964 - DNA, 25 bp, Homo sapien
tgccggtcggccacggtcctgtcag

SEQ ID NO: 1704965 - DNA, 25 bp, Homo sapien
tgtatgttcgaaccatgccccatga

SEQ ID NO: 1704966 - DNA, 25 bp, Homo sapien
gaaatgccctgtactacctgcggga

SEQ ID NO: 1704967 - DNA, 25 bp, Homo sapien
caacactgatgtacaaggcctgtca

SEQ ID NO: 1704968 - DNA, 25 bp, Homo sapien
taatgcttgctgaacggctggcgga

SEQ ID NO: 1704969 - DNA, 25 bp, Homo sapien
agaggcgtatcagggtaagatgctc

SEQ ID NO: 1704970 - DNA, 25 bp, Homo sapien
cagggagattttgtttgccaatatg

SEQ ID NO: 1704971 - DNA, 25 bp, Homo sapien
aagagagtgaaaagaggcgtatcag

SEQ ID NO: 1704972 - DNA, 25 bp, Homo sapien
aagatgctctgctatactctgggcg

SEQ ID NO: 1704973 - DNA, 25 bp, Homo sapien
agataattccatgggcatccaagtc

SEQ ID NO: 1704974 - DNA, 25 bp, Homo sapien
gcccagctggacgattctgatctcc

SEQ ID NO: 1704975 - DNA, 25 bp, Homo sapien
ctggtcctgtagtcctcagtgaaga

SEQ ID NO: 1704976 - DNA, 25 bp, Homo sapien
cgaagcccagctggacgattctgat

SEQ ID NO: 1704977 - DNA, 25 bp, Homo sapien
catacggtcggccatcacaggcctt

SEQ ID NO: 1704978 - DNA, 25 bp, Homo sapien
ctgaagctagaaatttctgcactgc

SEQ ID NO: 1704979 - DNA, 25 bp, Homo sapien
caaaggtctgtgtcatttggtcctg

SEQ ID NO: 1704980 - DNA, 25 bp, Homo sapien
tgctggaaactaaggtccccacagg

SEQ ID NO: 1704981 - DNA, 25 bp, Homo sapien
ttttgataagccaccaagaactgaa

SEQ ID NO: 1704982 - DNA, 25 bp, Homo sapien
tagctcctgcccagttgttttttag

SEQ ID NO: 1704983 - DNA, 25 bp, Homo sapien
ggcccaggtaagataggcctcctct

SEQ ID NO: 1704984 - DNA, 25 bp, Homo sapien
agcttttctggcaggttcaccaaaa

SEQ ID NO: 1704985 - DNA, 25 bp, Homo sapien
tctctgagagtgtgtctgcccatgt

SEQ ID NO: 1704986 - DNA, 25 bp, Homo sapien
tcttaggaccgaggagaggaatcag

SEQ ID NO: 1704987 - DNA, 25 bp, Homo sapien
tgtgctcgcaccaactgcctctgtt

SEQ ID NO: 1704988 - DNA, 25 bp, Homo sapien
gaaacacgggcaaccatgcaagaga

SEQ ID NO: 1704989 - DNA, 25 bp, Homo sapien
acaaagtacttgatgaatctcccag

SEQ ID NO: 1704990 - DNA, 25 bp, Homo sapien
gcatctcggacggtgaggactccag

SEQ ID NO: 1704991 - DNA, 25 bp, Homo sapien
cccagcatctcggacggtgaggact

SEQ ID NO: 1704992 - DNA, 25 bp, Homo sapien
caaagtacttgatgaatctcccagc

SEQ ID NO: 1704993 - DNA, 25 bp, Homo sapien
ggagccaccaaaaggtgaggggctg

SEQ ID NO: 1704994 - DNA, 25 bp, Homo sapien
aaaggtgaataaggcctagaggcct

SEQ ID NO: 1704995 - DNA, 25 bp, Homo sapien
ggaaaggtgaataaggcctagaggc

SEQ ID NO: 1704996 - DNA, 25 bp, Homo sapien
agccaccaaaaggtgaggggctgca

SEQ ID NO: 1704997 - DNA, 25 bp, Homo sapien
tagctgggccccaatgaggtcgtgc

SEQ ID NO: 1704998 - DNA, 25 bp, Homo sapien
ccaggagctctgataggagcagttc

SEQ ID NO: 1704999 - DNA, 25 bp, Homo sapien
tttgccttccggaccatgctaagga

SEQ ID NO: 1705000 - DNA, 25 bp, Homo sapien
gagcagttcccggtactttgccttc

SEQ ID NO: 1705001 - DNA, 25 bp, Homo sapien
tgggaggaaatcccactttgggtca

SEQ ID NO: 1705002 - DNA, 25 bp, Homo sapien
ttgggtcattgctccataatctgcc

SEQ ID NO: 1705003 - DNA, 25 bp, Homo sapien
ctgtgaggagaacttagaacttggg

SEQ ID NO: 1705004 - DNA, 25 bp, Homo sapien
gctgtgaggagaacttagaacttgg

SEQ ID NO: 1705005 - DNA, 25 bp, Homo sapien
agaaagacaaggctggagccagacg

SEQ ID NO: 1705006 - DNA, 25 bp, Homo sapien
aggagaaagacaaggctggagccag

SEQ ID NO: 1705007 - DNA, 25 bp, Homo sapien
ctgtgcaggagaaagacaaggctgg

SEQ ID NO: 1705008 - DNA, 25 bp, Homo sapien
tgcaggagaaagacaaggctggagc

SEQ ID NO: 1705009 - DNA, 25 bp, Homo sapien
ggaggagggttcctgaagtggtaga

SEQ ID NO: 1705010 - DNA, 25 bp, Homo sapien
cggaggagggttcctgaagtggtag

SEQ ID NO: 1705011 - DNA, 25 bp, Homo sapien
gcggaggagggttcctgaagtggta

SEQ ID NO: 1705012 - DNA, 25 bp, Homo sapien
ttttacacgaaagggaacagccaca

SEQ ID NO: 1705013 - DNA, 25 bp, Homo sapien
cacgtagagaaaagaaccctgccct

SEQ ID NO: 1705014 - DNA, 25 bp, Homo sapien
gcagagaagcattgctcaaacccca

SEQ ID NO: 1705015 - DNA, 25 bp, Homo sapien
ggcaattttaacatgacacgtagag

SEQ ID NO: 1705016 - DNA, 25 bp, Homo sapien
ctggccaagctaggcctcggggcag

SEQ ID NO: 1705017 - DNA, 25 bp, Homo sapien
gagaggttagatccgtctgtctgtc

SEQ ID NO: 1705018 - DNA, 25 bp, Homo sapien
gatccaagagaggttagatccgtct

SEQ ID NO: 1705019 - DNA, 25 bp, Homo sapien
ccaagagaggttagatccgtctgtc

SEQ ID NO: 1705020 - DNA, 25 bp, Homo sapien
aggatccaagagaggttagatccgt

SEQ ID NO: 1705021 - DNA, 25 bp, Homo sapien
ataaggtgaagaagctggatgccca

SEQ ID NO: 1705022 - DNA, 25 bp, Homo sapien
tgggcttctgcagagataaggtgaa

SEQ ID NO: 1705023 - DNA, 25 bp, Homo sapien
ggcttctgcagagataaggtgaaga

SEQ ID NO: 1705024 - DNA, 25 bp, Homo sapien
gataaggtgaagaagctggatgccc

SEQ ID NO: 1705025 - DNA, 25 bp, Homo sapien
tgtcctcggggcacatcctggagct

SEQ ID NO: 1705026 - DNA, 25 bp, Homo sapien
gtcctcggggcacatcctggagctg

SEQ ID NO: 1705027 - DNA, 25 bp, Homo sapien
ctgtcctcggggcacatcctggagc

SEQ ID NO: 1705028 - DNA, 25 bp, Homo sapien
gagctgcacccccaccgataggggg

SEQ ID NO: 1705029 - DNA, 25 bp, Homo sapien
gagctaagggtgaagtccacctttg

SEQ ID NO: 1705030 - DNA, 25 bp, Homo sapien
gggacattattacgagatgggtttc

SEQ ID NO: 1705031 - DNA, 25 bp, Homo sapien
tctcaggaacactgatcctttcact

SEQ ID NO: 1705032 - DNA, 25 bp, Homo sapien
actgaggagtgcgaagtctctttct

SEQ ID NO: 1705033 - DNA, 25 bp, Homo sapien
acagctcttcgcatctttcaagggc

SEQ ID NO: 1705034 - DNA, 25 bp, Homo sapien
atggaggccacagctcttcgcatct

SEQ ID NO: 1705035 - DNA, 25 bp, Homo sapien
gccacagctcttcgcatctttcaag

SEQ ID NO: 1705036 - DNA, 25 bp, Homo sapien
aggccacagctcttcgcatctttca

SEQ ID NO: 1705037 - DNA, 25 bp, Homo sapien
gataccctggatgtttgtcgttctg

SEQ ID NO: 1705038 - DNA, 25 bp, Homo sapien
gtcgttctggacagagagtccttta

SEQ ID NO: 1705039 - DNA, 25 bp, Homo sapien
tgcaaaaagaggtgcccccggcgag

SEQ ID NO: 1705040 - DNA, 25 bp, Homo sapien
tcctttagccatggcgaatgggcca

SEQ ID NO: 1705041 - DNA, 25 bp, Homo sapien
ccagggttgtaaatgggctggtccg

SEQ ID NO: 1705042 - DNA, 25 bp, Homo sapien
ggccagggttgtaaatgggctggtc

SEQ ID NO: 1705043 - DNA, 25 bp, Homo sapien
ctggccagggttgtaaatgggctgg

SEQ ID NO: 1705044 - DNA, 25 bp, Homo sapien
cagggttgtaaatgggctggtccgt

SEQ ID NO: 1705045 - DNA, 25 bp, Homo sapien
tcagtgctcgggcgcatcttctgat

SEQ ID NO: 1705046 - DNA, 25 bp, Homo sapien
agtgctcgggcgcatcttctgatcc

SEQ ID NO: 1705047 - DNA, 25 bp, Homo sapien
gtgctcgggcgcatcttctgatcca

SEQ ID NO: 1705048 - DNA, 25 bp, Homo sapien
gtgtcagtgctcgggcgcatcttct

SEQ ID NO: 1705049 - DNA, 25 bp, Homo sapien
caggcaggaggtcacatcagtggcc

SEQ ID NO: 1705050 - DNA, 25 bp, Homo sapien
aggcaggaggtcacatcagtggcca

SEQ ID NO: 1705051 - DNA, 25 bp, Homo sapien
ggcaggaggtcacatcagtggccag

SEQ ID NO: 1705052 - DNA, 25 bp, Homo sapien
acaggcaggaggtcacatcagtggc

SEQ ID NO: 1705053 - DNA, 25 bp, Homo sapien
ggacgagggcatgtacacctccttc

SEQ ID NO: 1705054 - DNA, 25 bp, Homo sapien
cacctccttcttccgcacgcggagg

SEQ ID NO: 1705055 - DNA, 25 bp, Homo sapien
acacctccttcttccgcacgcggag

SEQ ID NO: 1705056 - DNA, 25 bp, Homo sapien
gatggacgagggcatgtacacctcc

SEQ ID NO: 1705057 - DNA, 25 bp, Homo sapien
agatgtctgggatcacaaagtcatc

SEQ ID NO: 1705058 - DNA, 25 bp, Homo sapien
ctgagatgtctgggatcacaaagtc

SEQ ID NO: 1705059 - DNA, 25 bp, Homo sapien
tgagatgtctgggatcacaaagtca

SEQ ID NO: 1705060 - DNA, 25 bp, Homo sapien
gagatgtctgggatcacaaagtcat

SEQ ID NO: 1705061 - DNA, 25 bp, Homo sapien
ggtggagagcctaacaggaattggg

SEQ ID NO: 1705062 - DNA, 25 bp, Homo sapien
actgtgggggttaaccagaggctca

SEQ ID NO: 1705063 - DNA, 25 bp, Homo sapien
tgggaggtggagagcctaacaggaa

SEQ ID NO: 1705064 - DNA, 25 bp, Homo sapien
atctggggacgtgcctctgtgtggg

SEQ ID NO: 1705065 - DNA, 25 bp, Homo sapien
ccaggccatctgagaatcgggctga

SEQ ID NO: 1705066 - DNA, 25 bp, Homo sapien
tttcttcacctcaaactgggtgctg

SEQ ID NO: 1705067 - DNA, 25 bp, Homo sapien
tcacctcaaactgggtgctgctgtt

SEQ ID NO: 1705068 - DNA, 25 bp, Homo sapien
ctgagaatcgggctgagatcttcca

SEQ ID NO: 1705069 - DNA, 25 bp, Homo sapien
ctggcctggatgtctaactgcattt

SEQ ID NO: 1705070 - DNA, 25 bp, Homo sapien
ggatgtctaactgcatttcatcaag

SEQ ID NO: 1705071 - DNA, 25 bp, Homo sapien
gcctggatgtctaactgcatttcat

SEQ ID NO: 1705072 - DNA, 25 bp, Homo sapien
gtctaactgcatttcatcaagatgg

SEQ ID NO: 1705073 - DNA, 25 bp, Homo sapien
gcacatatgccaccccctgcactgg

SEQ ID NO: 1705074 - DNA, 25 bp, Homo sapien
catctaggagcccaaagcgcacata

SEQ ID NO: 1705075 - DNA, 25 bp, Homo sapien
agaaagtcttcttaccatcctcatc

SEQ ID NO: 1705076 - DNA, 25 bp, Homo sapien
tgactctccagcccccgaaagaaag

SEQ ID NO: 1705077 - DNA, 25 bp, Homo sapien
agtaatgcccatattcagcttctcc

SEQ ID NO: 1705078 - DNA, 25 bp, Homo sapien
gagggaaatgtggctctgtccattc

SEQ ID NO: 1705079 - DNA, 25 bp, Homo sapien
ctgcagcaacgtagaggcgcagccc

SEQ ID NO: 1705080 - DNA, 25 bp, Homo sapien
atactcaatgatggctgcagcaacg

SEQ ID NO: 1705081 - DNA, 25 bp, Homo sapien
tgtcgcttggtcttgctaagatcca

SEQ ID NO: 1705082 - DNA, 25 bp, Homo sapien
ccaggcacaaggtgtcgcttggtct

SEQ ID NO: 1705083 - DNA, 25 bp, Homo sapien
cacaaaataccaggatgtgagctct

SEQ ID NO: 1705084 - DNA, 25 bp, Homo sapien
tgctaagatccaaggagaagggaga

SEQ ID NO: 1705085 - DNA, 25 bp, Homo sapien
agacaccgtggcagaaactttgaca

SEQ ID NO: 1705086 - DNA, 25 bp, Homo sapien
aagctggggagcctgacatctcacg

SEQ ID NO: 1705087 - DNA, 25 bp, Homo sapien
tggcagaaactttgacaggaatgcc

SEQ ID NO: 1705088 - DNA, 25 bp, Homo sapien
acccaggagaagacaccgtggcaga

SEQ ID NO: 1705089 - DNA, 25 bp, Homo sapien
tctgagggataattattggaatgct

SEQ ID NO: 1705090 - DNA, 25 bp, Homo sapien
gatggtctgagggataattattgga

SEQ ID NO: 1705091 - DNA, 25 bp, Homo sapien
ctctgagatggtctgagggataatt

SEQ ID NO: 1705092 - DNA, 25 bp, Homo sapien
gagggataattattggaatgctgac

SEQ ID NO: 1705093 - DNA, 25 bp, Homo sapien
ccacggctcgcaagttcaggttcag

SEQ ID NO: 1705094 - DNA, 25 bp, Homo sapien
ccaacacgaggaggtcgagaatccg

SEQ ID NO: 1705095 - DNA, 25 bp, Homo sapien
agtgagcctggctatcgctggatgt

SEQ ID NO: 1705096 - DNA, 25 bp, Homo sapien
gccgctcaatagacagaaacccggg

SEQ ID NO: 1705097 - DNA, 25 bp, Homo sapien
gtcctcttgggctctcgattcatga

SEQ ID NO: 1705098 - DNA, 25 bp, Homo sapien
tgaacacgatctgccctcgggatag

SEQ ID NO: 1705099 - DNA, 25 bp, Homo sapien
ctccatggtagtagaaggccacaaa

SEQ ID NO: 1705100 - DNA, 25 bp, Homo sapien
caaacaccgagaccgaggtcagggt

SEQ ID NO: 1705101 - DNA, 25 bp, Homo sapien
catccactcgcagggagttggccac

SEQ ID NO: 1705102 - DNA, 25 bp, Homo sapien
aggccccagcctggacatccactcg

SEQ ID NO: 1705103 - DNA, 25 bp, Homo sapien
tggacatccactcgcagggagttgg

SEQ ID NO: 1705104 - DNA, 25 bp, Homo sapien
cagcctggacatccactcgcaggga

SEQ ID NO: 1705105 - DNA, 25 bp, Homo sapien
tgctgcctgcagcatacagagctgt

SEQ ID NO: 1705106 - DNA, 25 bp, Homo sapien
ggagtcggtttctaagtggagcttc

SEQ ID NO: 1705107 - DNA, 25 bp, Homo sapien
ccgttccggtactgcttggcaccgt

SEQ ID NO: 1705108 - DNA, 25 bp, Homo sapien
aagtggagcttcacggactccccgt

SEQ ID NO: 1705109 - DNA, 25 bp, Homo sapien
gccgaggtcatagctgttcatagct

SEQ ID NO: 1705110 - DNA, 25 bp, Homo sapien
aggaccacagccgaggtcatagctg

SEQ ID NO: 1705111 - DNA, 25 bp, Homo sapien
ggtccactggtctccatcagaaaag

SEQ ID NO: 1705112 - DNA, 25 bp, Homo sapien
ccacagccgaggtcatagctgttca

SEQ ID NO: 1705113 - DNA, 25 bp, Homo sapien
tcattaatcgccttttggaagttca

SEQ ID NO: 1705114 - DNA, 25 bp, Homo sapien
attaatcgccttttggaagttcacg

SEQ ID NO: 1705115 - DNA, 25 bp, Homo sapien
cattaatcgccttttggaagttcac

SEQ ID NO: 1705116 - DNA, 25 bp, Homo sapien
tcatgggcagacgtgtcaccccatc

SEQ ID NO: 1705117 - DNA, 25 bp, Homo sapien
gctgctcgcaggaacgcatcatggg

SEQ ID NO: 1705118 - DNA, 25 bp, Homo sapien
tcctggcagcagcgcttggctgtcg

SEQ ID NO: 1705119 - DNA, 25 bp, Homo sapien
gctcttcttgcgcagactctcagca

SEQ ID NO: 1705120 - DNA, 25 bp, Homo sapien
agttctctgggaagaagctgcgcac

SEQ ID NO: 1705121 - DNA, 25 bp, Homo sapien
gctgcgcacgggaatgtcatcctca

SEQ ID NO: 1705122 - DNA, 25 bp, Homo sapien
atttgaaagcggtccactgtttcca

SEQ ID NO: 1705123 - DNA, 25 bp, Homo sapien
tgaaagcggtccactgtttccactc

SEQ ID NO: 1705124 - DNA, 25 bp, Homo sapien
agagaaggcccgtctaccccggctg

SEQ ID NO: 1705125 - DNA, 25 bp, Homo sapien
gaaaaggccgggccggcacacactc

SEQ ID NO: 1705126 - DNA, 25 bp, Homo sapien
agagaaaaggccgggccggcacaca

SEQ ID NO: 1705127 - DNA, 25 bp, Homo sapien
aggcagagaaggcccgtctaccccg

SEQ ID NO: 1705128 - DNA, 25 bp, Homo sapien
aggccatggatctcccacgtggtca

SEQ ID NO: 1705129 - DNA, 25 bp, Homo sapien
ctcaggccatggatctcccacgtgg

SEQ ID NO: 1705130 - DNA, 25 bp, Homo sapien
cacgtggtcagagagtcggggagcc

SEQ ID NO: 1705131 - DNA, 25 bp, Homo sapien
cagagagtcggggagccacagtgtc

SEQ ID NO: 1705132 - DNA, 25 bp, Homo sapien
ttatccaggtagttatagaggacag

SEQ ID NO: 1705133 - DNA, 25 bp, Homo sapien
tccagctgctcaaagcggcggacag

SEQ ID NO: 1705134 - DNA, 25 bp, Homo sapien
cagacatgggcaggcggaggtgcag

SEQ ID NO: 1705135 - DNA, 25 bp, Homo sapien
gtgcaggtggaactcgcggaacacc

SEQ ID NO: 1705136 - DNA, 25 bp, Homo sapien
ctgagggcaggaaaacgaggatggc

SEQ ID NO: 1705137 - DNA, 25 bp, Homo sapien
gagggcaggaaaacgaggatggcca

SEQ ID NO: 1705138 - DNA, 25 bp, Homo sapien
tgagggcaggaaaacgaggatggcc

SEQ ID NO: 1705139 - DNA, 25 bp, Homo sapien
cacagagaaggcaacaggccgggca

SEQ ID NO: 1705140 - DNA, 25 bp, Homo sapien
tctcccacagggaattcgaaggacc

SEQ ID NO: 1705141 - DNA, 25 bp, Homo sapien
caccttcagagacacagcggcggct

SEQ ID NO: 1705142 - DNA, 25 bp, Homo sapien
tgcagaaccttggacaccgcatctc

SEQ ID NO: 1705143 - DNA, 25 bp, Homo sapien
ggaacagaccaaggcattggttcgg

SEQ ID NO: 1705144 - DNA, 25 bp, Homo sapien
ggaaaacatggttgtgaggtcacac

SEQ ID NO: 1705145 - DNA, 25 bp, Homo sapien
cccagaactttgagtttcaactcca

SEQ ID NO: 1705146 - DNA, 25 bp, Homo sapien
aggtcacacaggactacagcctgcc

SEQ ID NO: 1705147 - DNA, 25 bp, Homo sapien
cctctctatggatggccccttcctt

SEQ ID NO: 1705148 - DNA, 25 bp, Homo sapien
ctcctctctatggatggccccttcc

SEQ ID NO: 1705149 - DNA, 25 bp, Homo sapien
tcctctctatggatggccccttcct

SEQ ID NO: 1705150 - DNA, 25 bp, Homo sapien
ctgtaaccctgacgtagctgttaaa

SEQ ID NO: 1705151 - DNA, 25 bp, Homo sapien
ccccatcagggatcatattgggatc

SEQ ID NO: 1705152 - DNA, 25 bp, Homo sapien
caggtatttccaaggtccggcctcg

SEQ ID NO: 1705153 - DNA, 25 bp, Homo sapien
gatcagagttgccaggtatttccaa

SEQ ID NO: 1705154 - DNA, 25 bp, Homo sapien
tcttgtccaggtagcgggaagcagc

SEQ ID NO: 1705155 - DNA, 25 bp, Homo sapien
cacagcctcgaggaagcctcaagag

SEQ ID NO: 1705156 - DNA, 25 bp, Homo sapien
gcgtggtccttggtctcgggaggca

SEQ ID NO: 1705157 - DNA, 25 bp, Homo sapien
cagtgtcggagccaagtagatcatg

SEQ ID NO: 1705158 - DNA, 25 bp, Homo sapien
ttccagtaactgtcctttcctggcc

SEQ ID NO: 1705159 - DNA, 25 bp, Homo sapien
gtccatcttccagtaactgtccttt

SEQ ID NO: 1705160 - DNA, 25 bp, Homo sapien
ctcctgcttgcccttgcacccagaa

SEQ ID NO: 1705161 - DNA, 25 bp, Homo sapien
tcctgcttgcccttgcacccagaac

SEQ ID NO: 1705162 - DNA, 25 bp, Homo sapien
cataggaaccatccgccttccgaaa

SEQ ID NO: 1705163 - DNA, 25 bp, Homo sapien
tccgaaactgctggatccgcatgta

SEQ ID NO: 1705164 - DNA, 25 bp, Homo sapien
aggtgctgctgccccgtgacaacca

SEQ ID NO: 1705165 - DNA, 25 bp, Homo sapien
cgtgacaaccaagccgcataggaac

SEQ ID NO: 1705166 - DNA, 25 bp, Homo sapien
caaactcaggaccttcaacacaaag

SEQ ID NO: 1705167 - DNA, 25 bp, Homo sapien
aactcaggaccttcaacacaaaggc

SEQ ID NO: 1705168 - DNA, 25 bp, Homo sapien
actcaggaccttcaacacaaaggct

SEQ ID NO: 1705169 - DNA, 25 bp, Homo sapien
gccaaactcaggaccttcaacacaa

SEQ ID NO: 1705170 - DNA, 25 bp, Homo sapien
cagaagccagttagatgtctcctgc

SEQ ID NO: 1705171 - DNA, 25 bp, Homo sapien
agagaggtcctggaacgagccgtca

SEQ ID NO: 1705172 - DNA, 25 bp, Homo sapien
tgggacagaagccagttagatgtct

SEQ ID NO: 1705173 - DNA, 25 bp, Homo sapien
ggtcctggaacgagccgtcagcctg

SEQ ID NO: 1705174 - DNA, 25 bp, Homo sapien
ctggaagacggccagcccatgatga

SEQ ID NO: 1705175 - DNA, 25 bp, Homo sapien
tctctgcttcaatggctctgcaccc

SEQ ID NO: 1705176 - DNA, 25 bp, Homo sapien
gatggtcacaaaggctgtgagtgcc

SEQ ID NO: 1705177 - DNA, 25 bp, Homo sapien
gaagggcgatggtcacaaaggctgt

SEQ ID NO: 1705178 - DNA, 25 bp, Homo sapien
tgagcttgcctttgagatggaggct

SEQ ID NO: 1705179 - DNA, 25 bp, Homo sapien
ggcaacaccccgcaggtccgcaggg

SEQ ID NO: 1705180 - DNA, 25 bp, Homo sapien
tcagtgtcagggcataggccgtgat

SEQ ID NO: 1705181 - DNA, 25 bp, Homo sapien
tccgcaggggccttggtcagtgtca

SEQ ID NO: 1705182 - DNA, 25 bp, Homo sapien
gaaccagtgactgagccccagtaca

SEQ ID NO: 1705183 - DNA, 25 bp, Homo sapien
tgagaaccagtgactgagccccagt

SEQ ID NO: 1705184 - DNA, 25 bp, Homo sapien
accagtgactgagccccagtacagg

SEQ ID NO: 1705185 - DNA, 25 bp, Homo sapien
gtgactgagccccagtacaggttat

SEQ ID NO: 1705186 - DNA, 25 bp, Homo sapien
tgggtactgcggaatcccccttgga

SEQ ID NO: 1705187 - DNA, 25 bp, Homo sapien
gctttgccctcgtgaagcaggaggt

SEQ ID NO: 1705188 - DNA, 25 bp, Homo sapien
aagctgccctgacgggtgagccagg

SEQ ID NO: 1705189 - DNA, 25 bp, Homo sapien
cagcagggcgtaggctgtggtttca

SEQ ID NO: 1705190 - DNA, 25 bp, Homo sapien
tgggaggcaatccagtaggcagaca

SEQ ID NO: 1705191 - DNA, 25 bp, Homo sapien
cgaatctggcggttgttcagctgca

SEQ ID NO: 1705192 - DNA, 25 bp, Homo sapien
gacttgaacccattccggcctgtgg

SEQ ID NO: 1705193 - DNA, 25 bp, Homo sapien
cagctgcagcgcgtgggacttgaac

SEQ ID NO: 1705194 - DNA, 25 bp, Homo sapien
tcccaccttcacattgatcttgctg

SEQ ID NO: 1705195 - DNA, 25 bp, Homo sapien
cttcagggttcctttgctgtttcct

SEQ ID NO: 1705196 - DNA, 25 bp, Homo sapien
tcctcccaccttcacattgatcttg

SEQ ID NO: 1705197 - DNA, 25 bp, Homo sapien
ttcacattgatcttgctgcccaagg

SEQ ID NO: 1705198 - DNA, 25 bp, Homo sapien
tttgactgtcacttctatctgtagg

SEQ ID NO: 1705199 - DNA, 25 bp, Homo sapien
tcgtgtactcgacgtggcctttgac

SEQ ID NO: 1705200 - DNA, 25 bp, Homo sapien
tctatctgtaggtcctggcaggtcg

SEQ ID NO: 1705201 - DNA, 25 bp, Homo sapien
caggtcgtgttcttcatgtccagga

SEQ ID NO: 1705202 - DNA, 25 bp, Homo sapien
cagaggggcatctgggtcatccttg

SEQ ID NO: 1705203 - DNA, 25 bp, Homo sapien
tggctggaagctcatcgtactcata

SEQ ID NO: 1705204 - DNA, 25 bp, Homo sapien
tcctcatagtcctcgtttgcttcca

SEQ ID NO: 1705205 - DNA, 25 bp, Homo sapien
cacggtgtagtgcaccctggactcc

SEQ ID NO: 1705206 - DNA, 25 bp, Homo sapien
tgtggagacgtgtgagctgtcgtcc

SEQ ID NO: 1705207 - DNA, 25 bp, Homo sapien
tgtgagctgtcgtccaggttctgcc

SEQ ID NO: 1705208 - DNA, 25 bp, Homo sapien
agacgtgtgagctgtcgtccaggtt

SEQ ID NO: 1705209 - DNA, 25 bp, Homo sapien
caggttctgcctgcgcgggctccag

SEQ ID NO: 1705210 - DNA, 25 bp, Homo sapien
cagacagccccaccttgccgttccg

SEQ ID NO: 1705211 - DNA, 25 bp, Homo sapien
ccagacagccccaccttgccgttcc

SEQ ID NO: 1705212 - DNA, 25 bp, Homo sapien
gccagacagccccaccttgccgttc

SEQ ID NO: 1705213 - DNA, 25 bp, Homo sapien
agacagccccaccttgccgttccgc

SEQ ID NO: 1705214 - DNA, 25 bp, Homo sapien
agcacgcagggcgtggaatccactc

SEQ ID NO: 1705215 - DNA, 25 bp, Homo sapien
cttctccaggtcagcacgcagggcg

SEQ ID NO: 1705216 - DNA, 25 bp, Homo sapien
tcaggagggtgacgtccgcgatggc

SEQ ID NO: 1705217 - DNA, 25 bp, Homo sapien
cgcagggcgtggaatccactcagga

SEQ ID NO: 1705218 - DNA, 25 bp, Homo sapien
tggaaaaggggagttggtcacaggc

SEQ ID NO: 1705219 - DNA, 25 bp, Homo sapien
gtcacaggccctgcacatgacaggg

SEQ ID NO: 1705220 - DNA, 25 bp, Homo sapien
gacagggctcagtacctgggacaga

SEQ ID NO: 1705221 - DNA, 25 bp, Homo sapien
ggttgccctgggtggctgaccacac

SEQ ID NO: 1705222 - DNA, 25 bp, Homo sapien
tcaaagtgactcacgtaacggtcag

SEQ ID NO: 1705223 - DNA, 25 bp, Homo sapien
cctcggtctcaaagtgactcacgta

SEQ ID NO: 1705224 - DNA, 25 bp, Homo sapien
actcacgtaacggtcagagagggag

SEQ ID NO: 1705225 - DNA, 25 bp, Homo sapien
gggcccctcggtctcaaagtgactc

SEQ ID NO: 1705226 - DNA, 25 bp, Homo sapien
gagaaacctcctaacgcatactcag

SEQ ID NO: 1705227 - DNA, 25 bp, Homo sapien
cagctgtctcctgagaaacctccta

SEQ ID NO: 1705228 - DNA, 25 bp, Homo sapien
aagttctcaagagcaccagccgctg

SEQ ID NO: 1705229 - DNA, 25 bp, Homo sapien
tcagtaaacccggtgccatcgagtc

SEQ ID NO: 1705230 - DNA, 25 bp, Homo sapien
cttgcattaggattgtggcaggacc

SEQ ID NO: 1705231 - DNA, 25 bp, Homo sapien
catggacgtgttctctgtgaaactg

SEQ ID NO: 1705232 - DNA, 25 bp, Homo sapien
gctaagggttagcttctggaccacc

SEQ ID NO: 1705233 - DNA, 25 bp, Homo sapien
tcagcagagtcttgcatcatggacg

SEQ ID NO: 1705234 - DNA, 25 bp, Homo sapien
cagccccaccggcacttcctgcaca

SEQ ID NO: 1705235 - DNA, 25 bp, Homo sapien
acagggttgcgctggccggctgcac

SEQ ID NO: 1705236 - DNA, 25 bp, Homo sapien
ttgtagtagtcgtacagggttgcgc

SEQ ID NO: 1705237 - DNA, 25 bp, Homo sapien
aagcccacgcactcccgggaggtgg

SEQ ID NO: 1705238 - DNA, 25 bp, Homo sapien
ggagggcacctatgccaaagttctc

SEQ ID NO: 1705239 - DNA, 25 bp, Homo sapien
taccccggtgtccattgtcccatag

SEQ ID NO: 1705240 - DNA, 25 bp, Homo sapien
ggagaacagagaggagttagggcac

SEQ ID NO: 1705241 - DNA, 25 bp, Homo sapien
cccataggagggcacctatgccaaa

SEQ ID NO: 1705242 - DNA, 25 bp, Homo sapien
gtgccccgtaaaacacagaacatct

SEQ ID NO: 1705243 - DNA, 25 bp, Homo sapien
ttggtgccccgtaaaacacagaaca

SEQ ID NO: 1705244 - DNA, 25 bp, Homo sapien
cccgtaaaacacagaacatctgcgc

SEQ ID NO: 1705245 - DNA, 25 bp, Homo sapien
ccgtaaaacacagaacatctgcgct

SEQ ID NO: 1705246 - DNA, 25 bp, Homo sapien
agaacacaaggtggccaagagtctg

SEQ ID NO: 1705247 - DNA, 25 bp, Homo sapien
gacttcagcagaacacaaggtggcc

SEQ ID NO: 1705248 - DNA, 25 bp, Homo sapien
tcagcacactggcagacttcagcag

SEQ ID NO: 1705249 - DNA, 25 bp, Homo sapien
gcagacttcagcagaacacaaggtg

SEQ ID NO: 1705250 - DNA, 25 bp, Homo sapien
gaagttggggaacccatcagacagt

SEQ ID NO: 1705251 - DNA, 25 bp, Homo sapien
gttggggaacccatcagacagtgtg

SEQ ID NO: 1705252 - DNA, 25 bp, Homo sapien
agttggggaacccatcagacagtgt

SEQ ID NO: 1705253 - DNA, 25 bp, Homo sapien
ttggggaacccatcagacagtgtgg

SEQ ID NO: 1705254 - DNA, 25 bp, Homo sapien
ctccacacgggggtagtagcaggca

SEQ ID NO: 1705255 - DNA, 25 bp, Homo sapien
cgggggtagtagcaggcaaacttca

SEQ ID NO: 1705256 - DNA, 25 bp, Homo sapien
cttcatcctgtagccatcctcgtcc

SEQ ID NO: 1705257 - DNA, 25 bp, Homo sapien
atcctgtagccatcctcgtcctgca

SEQ ID NO: 1705258 - DNA, 25 bp, Homo sapien
ccagagagaccaaaacagccggtcc

SEQ ID NO: 1705259 - DNA, 25 bp, Homo sapien
gaaaggtgagttactttgaggctga

SEQ ID NO: 1705260 - DNA, 25 bp, Homo sapien
gagcaaacaggctgcgtgcatgacc

SEQ ID NO: 1705261 - DNA, 25 bp, Homo sapien
acctgtaagaggagcaggctacacc

SEQ ID NO: 1705262 - DNA, 25 bp, Homo sapien
gcggaaagcagctctgctgtcttct

SEQ ID NO: 1705263 - DNA, 25 bp, Homo sapien
gacttgggtgatcttggtctcaaag

SEQ ID NO: 1705264 - DNA, 25 bp, Homo sapien
tctcggagaaccttaacctggaagc

SEQ ID NO: 1705265 - DNA, 25 bp, Homo sapien
tcaaagaggcggaaagcagctctgc

SEQ ID NO: 1705266 - DNA, 25 bp, Homo sapien
ttcgccacccccatggagaggtgcc

SEQ ID NO: 1705267 - DNA, 25 bp, Homo sapien
ctccctatttatggccaagcccaag

SEQ ID NO: 1705268 - DNA, 25 bp, Homo sapien
tgtagatcctctcattccaccttcg

SEQ ID NO: 1705269 - DNA, 25 bp, Homo sapien
cccgcctctccggtttgcttcatac

SEQ ID NO: 1705270 - DNA, 25 bp, Homo sapien
ttagcagcggccttgacatccttgg

SEQ ID NO: 1705271 - DNA, 25 bp, Homo sapien
catccagacccatgatcaaatattc

SEQ ID NO: 1705272 - DNA, 25 bp, Homo sapien
ttcccaggttccaagcgaaggcggc

SEQ ID NO: 1705273 - DNA, 25 bp, Homo sapien
caggaagttgcgcatctgattagca

SEQ ID NO: 1705274 - DNA, 25 bp, Homo sapien
caggtggaaacggagagcacaggca

SEQ ID NO: 1705275 - DNA, 25 bp, Homo sapien
agtcagcagggctcgggaggatggc

SEQ ID NO: 1705276 - DNA, 25 bp, Homo sapien
agactgaggggaccagatgactcac

SEQ ID NO: 1705277 - DNA, 25 bp, Homo sapien
gggcaaggcctaggtggcgaggcat

SEQ ID NO: 1705278 - DNA, 25 bp, Homo sapien
cctgagtgccatactcctggaggaa

SEQ ID NO: 1705279 - DNA, 25 bp, Homo sapien
gagggcatctcctcgatccagctat

SEQ ID NO: 1705280 - DNA, 25 bp, Homo sapien
tccggcacaggcgttcagagggcat

SEQ ID NO: 1705281 - DNA, 25 bp, Homo sapien
tggaggaagtcgttgagctgggcac

SEQ ID NO: 1705282 - DNA, 25 bp, Homo sapien
catgaaagcggacacagcagtgctt

SEQ ID NO: 1705283 - DNA, 25 bp, Homo sapien
ggctgtgttcatgaaagcggacaca

SEQ ID NO: 1705284 - DNA, 25 bp, Homo sapien
tccagcttcatggttcccaggttca

SEQ ID NO: 1705285 - DNA, 25 bp, Homo sapien
cagcttcatggttcccaggttcagg

SEQ ID NO: 1705286 - DNA, 25 bp, Homo sapien
aagcctttaatatgccctggtccca

SEQ ID NO: 1705287 - DNA, 25 bp, Homo sapien
taagacagtgctcatcggaaaggag

SEQ ID NO: 1705288 - DNA, 25 bp, Homo sapien
caaacttctttggacagacgcggag

SEQ ID NO: 1705289 - DNA, 25 bp, Homo sapien
tgcaatgtccccaaaggtaccctgt

SEQ ID NO: 1705290 - DNA, 25 bp, Homo sapien
gataacagaaccaagcgtcagcagg

SEQ ID NO: 1705291 - DNA, 25 bp, Homo sapien
cccactggtcttagaaagtcaagga

SEQ ID NO: 1705292 - DNA, 25 bp, Homo sapien
tccagccagggaaagtatggattcc

SEQ ID NO: 1705293 - DNA, 25 bp, Homo sapien
tatggattcccagcacaactgggca

SEQ ID NO: 1705294 - DNA, 25 bp, Homo sapien
gatcaagggtccagccctatttggg

SEQ ID NO: 1705295 - DNA, 25 bp, Homo sapien
aggagcacctttctttggttgaaag

SEQ ID NO: 1705296 - DNA, 25 bp, Homo sapien
ccaccaggagcacctttctttggtt

SEQ ID NO: 1705297 - DNA, 25 bp, Homo sapien
ctttagccaccaggagcacctttct

SEQ ID NO: 1705298 - DNA, 25 bp, Homo sapien
ttgaaaggaaaacagcccaccttga

SEQ ID NO: 1705299 - DNA, 25 bp, Homo sapien
cgagacgcccgtcagggccctgagg

SEQ ID NO: 1705300 - DNA, 25 bp, Homo sapien
gccacttatagctcaagagccccag

SEQ ID NO: 1705301 - DNA, 25 bp, Homo sapien
catccctcctgctgtgtagactgtt

SEQ ID NO: 1705302 - DNA, 25 bp, Homo sapien
gccctgaggtgccacttatagctca

SEQ ID NO: 1705303 - DNA, 25 bp, Homo sapien
ctgcagcaagtgcaagaagcccggg

SEQ ID NO: 1705304 - DNA, 25 bp, Homo sapien
caagtgcaagaagcccggggcaaga

SEQ ID NO: 1705305 - DNA, 25 bp, Homo sapien
ggaggtggaggctccggagcttcca

SEQ ID NO: 1705306 - DNA, 25 bp, Homo sapien
agcaggcgggcgccagccagcaggg

SEQ ID NO: 1705307 - DNA, 25 bp, Homo sapien
caagcagatagattgggaggtcggg

SEQ ID NO: 1705308 - DNA, 25 bp, Homo sapien
gtcaggccaagcagatagattggga

SEQ ID NO: 1705309 - DNA, 25 bp, Homo sapien
tcaggccaagcagatagattgggag

SEQ ID NO: 1705310 - DNA, 25 bp, Homo sapien
ggccaagcagatagattgggaggtc

SEQ ID NO: 1705311 - DNA, 25 bp, Homo sapien
tggagcctgtagatgggcccgaatt

SEQ ID NO: 1705312 - DNA, 25 bp, Homo sapien
ggtggagcctgtagatgggcccgaa

SEQ ID NO: 1705313 - DNA, 25 bp, Homo sapien
ggagcctgtagatgggcccgaattt

SEQ ID NO: 1705314 - DNA, 25 bp, Homo sapien
caaggtggagcctgtagatgggccc

SEQ ID NO: 1705315 - DNA, 25 bp, Homo sapien
gccaaagcagcgtcagcggagagag

SEQ ID NO: 1705316 - DNA, 25 bp, Homo sapien
gcgtcagcggagagaggaccctctc

SEQ ID NO: 1705317 - DNA, 25 bp, Homo sapien
gccccctcctatggtgagggccaga

SEQ ID NO: 1705318 - DNA, 25 bp, Homo sapien
ggagagaggaccctctccgtcacct

SEQ ID NO: 1705319 - DNA, 25 bp, Homo sapien
gtctgccagcaaagtctgcccactt

SEQ ID NO: 1705320 - DNA, 25 bp, Homo sapien
catggcttcctcaatggtcctcttg

SEQ ID NO: 1705321 - DNA, 25 bp, Homo sapien
ttcctcaatggtcctcttggagttc

SEQ ID NO: 1705322 - DNA, 25 bp, Homo sapien
accatggcttcctcaatggtcctct

SEQ ID NO: 1705323 - DNA, 25 bp, Homo sapien
caagagcttccagggacctggattg

SEQ ID NO: 1705324 - DNA, 25 bp, Homo sapien
gcagctgagggcctgaccttcttcg

SEQ ID NO: 1705325 - DNA, 25 bp, Homo sapien
ggatgccccaaaggtggctcacact

SEQ ID NO: 1705326 - DNA, 25 bp, Homo sapien
gatatgcccccccaagagcttccag

SEQ ID NO: 1705327 - DNA, 25 bp, Homo sapien
agggctgagcgggtgagcttcttgt

SEQ ID NO: 1705328 - DNA, 25 bp, Homo sapien
gacaggtccgggtagttcctagaca

SEQ ID NO: 1705329 - DNA, 25 bp, Homo sapien
cagagcagggagtagtctcccaagg

SEQ ID NO: 1705330 - DNA, 25 bp, Homo sapien
tggctccatggagtcacggatgccc

SEQ ID NO: 1705331 - DNA, 25 bp, Homo sapien
cttgatcttgtctccgaaggtgagg

SEQ ID NO: 1705332 - DNA, 25 bp, Homo sapien
cttgtctccgaaggtgaggtaacag

SEQ ID NO: 1705333 - DNA, 25 bp, Homo sapien
tgtctccgaaggtgaggtaacagat

SEQ ID NO: 1705334 - DNA, 25 bp, Homo sapien
ttgtctccgaaggtgaggtaacaga

SEQ ID NO: 1705335 - DNA, 25 bp, Homo sapien
taacacctcctggatacatttgtaa

SEQ ID NO: 1705336 - DNA, 25 bp, Homo sapien
aataggcaggcattaagttgtcgtc

SEQ ID NO: 1705337 - DNA, 25 bp, Homo sapien
caatttggatggaccagtggctcca

SEQ ID NO: 1705338 - DNA, 25 bp, Homo sapien
agggaatcacgtccacaatttggat

SEQ ID NO: 1705339 - DNA, 25 bp, Homo sapien
tccacgatgtgatccctcttctcta

SEQ ID NO: 1705340 - DNA, 25 bp, Homo sapien
ccacgatgtgatccctcttctctat

SEQ ID NO: 1705341 - DNA, 25 bp, Homo sapien
atctccacgatgtgatccctcttct

SEQ ID NO: 1705342 - DNA, 25 bp, Homo sapien
tctccacgatgtgatccctcttctc

SEQ ID NO: 1705343 - DNA, 25 bp, Homo sapien
agggtgaaaggagcgggctgagcgg

SEQ ID NO: 1705344 - DNA, 25 bp, Homo sapien
gagccctcttccatgctcggctgcg

SEQ ID NO: 1705345 - DNA, 25 bp, Homo sapien
ccttggagcatgtagtccatcatgt

SEQ ID NO: 1705346 - DNA, 25 bp, Homo sapien
ggtctcagtgccaccgatcaggagg

SEQ ID NO: 1705347 - DNA, 25 bp, Homo sapien
gctgcgccaccccttggagcatgta

SEQ ID NO: 1705348 - DNA, 25 bp, Homo sapien
aggttgctgggaaggagccttttgc

SEQ ID NO: 1705349 - DNA, 25 bp, Homo sapien
ggaaggagccttttgcttgtcccca

SEQ ID NO: 1705350 - DNA, 25 bp, Homo sapien
tgctgggaaggagccttttgcttgt

SEQ ID NO: 1705351 - DNA, 25 bp, Homo sapien
aggagccttttgcttgtccccagga

SEQ ID NO: 1705352 - DNA, 25 bp, Homo sapien
agggcagccgtgcacggtccttgta

SEQ ID NO: 1705353 - DNA, 25 bp, Homo sapien
cagggcccagttcgtggtctagctc

SEQ ID NO: 1705354 - DNA, 25 bp, Homo sapien
agcacctcggcgatggtggcattga

SEQ ID NO: 1705355 - DNA, 25 bp, Homo sapien
aaggctaagggcacaacgggccgca

SEQ ID NO: 1705356 - DNA, 25 bp, Homo sapien
gctttcctcactcatccccaaccct

SEQ ID NO: 1705357 - DNA, 25 bp, Homo sapien
tgggctcgggctttcctcactcatc

SEQ ID NO: 1705358 - DNA, 25 bp, Homo sapien
gggctggagttagaggctggccagg

SEQ ID NO: 1705359 - DNA, 25 bp, Homo sapien
caggacctccctgggctcgggcttt

SEQ ID NO: 1705360 - DNA, 25 bp, Homo sapien
ttcggaatgatgactgtgccctcag

SEQ ID NO: 1705361 - DNA, 25 bp, Homo sapien
cctcagggatgtcgtagccggagat

SEQ ID NO: 1705362 - DNA, 25 bp, Homo sapien
ccctcagggatgtcgtagccggaga

SEQ ID NO: 1705363 - DNA, 25 bp, Homo sapien
caggtgggcgccttggaggttcgga

SEQ ID NO: 1705364 - DNA, 25 bp, Homo sapien
agaactcatgtggcctctcccagac

SEQ ID NO: 1705365 - DNA, 25 bp, Homo sapien
ccagaactcatgtggcctctcccag

SEQ ID NO: 1705366 - DNA, 25 bp, Homo sapien
cagaactcatgtggcctctcccaga

SEQ ID NO: 1705367 - DNA, 25 bp, Homo sapien
ggcaccgcagccgaaggccagagct

SEQ ID NO: 1705368 - DNA, 25 bp, Homo sapien
tggagttcttgcctggctccaggaa

SEQ ID NO: 1705369 - DNA, 25 bp, Homo sapien
tgcagcagtcgggtcagcaccacga

SEQ ID NO: 1705370 - DNA, 25 bp, Homo sapien
gcagtcgggtcagcaccacgaagag

SEQ ID NO: 1705371 - DNA, 25 bp, Homo sapien
gctctggcccgggctgtgggccccc

SEQ ID NO: 1705372 - DNA, 25 bp, Homo sapien
ctggcccgggctgtgggcccccatc

SEQ ID NO: 1705373 - DNA, 25 bp, Homo sapien
tgggcccccatcccccggggctgca

SEQ ID NO: 1705374 - DNA, 25 bp, Homo sapien
tcactggctctggcccgggctgtgg

SEQ ID NO: 1705375 - DNA, 25 bp, Homo sapien
tctcggtgcccttcacggaaatgaa

SEQ ID NO: 1705376 - DNA, 25 bp, Homo sapien
cccagtatgactgccgagcactgag

SEQ ID NO: 1705377 - DNA, 25 bp, Homo sapien
gatctcgcagcactgtgtttacagg

SEQ ID NO: 1705378 - DNA, 25 bp, Homo sapien
tgaggtacccggctggcatcggtcc

SEQ ID NO: 1705379 - DNA, 25 bp, Homo sapien
gtgctgggagctacctccttaaggg

SEQ ID NO: 1705380 - DNA, 25 bp, Homo sapien
ttcccagggagtgagctggtaccac

SEQ ID NO: 1705381 - DNA, 25 bp, Homo sapien
ggccagctcagaattaagcctcaat

SEQ ID NO: 1705382 - DNA, 25 bp, Homo sapien
gagcagatgggacatccggctttga

SEQ ID NO: 1705383 - DNA, 25 bp, Homo sapien
agaggccaagtggagctgtgctcaa

SEQ ID NO: 1705384 - DNA, 25 bp, Homo sapien
gaaggtgaagcgtgtcagatcagca

SEQ ID NO: 1705385 - DNA, 25 bp, Homo sapien
ccagggatgaggatgtgattgccca

SEQ ID NO: 1705386 - DNA, 25 bp, Homo sapien
taagaaagcaaaggcgggtgagcat

SEQ ID NO: 1705387 - DNA, 25 bp, Homo sapien
gagcatgtgacaagaagcccagagc

SEQ ID NO: 1705388 - DNA, 25 bp, Homo sapien
ggagccagaccacaagtacaagatg

SEQ ID NO: 1705389 - DNA, 25 bp, Homo sapien
gatgaacctgtacggcttccacggt

SEQ ID NO: 1705390 - DNA, 25 bp, Homo sapien
aaagctgcgcctagggcagatgaca

SEQ ID NO: 1705391 - DNA, 25 bp, Homo sapien
tgacagtgagagacatcacctccga

SEQ ID NO: 1705392 - DNA, 25 bp, Homo sapien
tgcatcccaggcttaggtcatcctc

SEQ ID NO: 1705393 - DNA, 25 bp, Homo sapien
tgtgcaccaccttagcctgctaatg

SEQ ID NO: 1705394 - DNA, 25 bp, Homo sapien
tcctggccatccaacttgctcttaa

SEQ ID NO: 1705395 - DNA, 25 bp, Homo sapien
gactgggcttttaagatatggtcgt

SEQ ID NO: 1705396 - DNA, 25 bp, Homo sapien
tgcaacccgggcttcaccggtgagg

SEQ ID NO: 1705397 - DNA, 25 bp, Homo sapien
tgtgtttgcaatgcgggctacagcg

SEQ ID NO: 1705398 - DNA, 25 bp, Homo sapien
cctgcccacgcgactgtagaggtcg

SEQ ID NO: 1705399 - DNA, 25 bp, Homo sapien
tacactggaaccgattgcggctcgc

SEQ ID NO: 1705400 - DNA, 25 bp, Homo sapien
gggttctcagagcaagagccagttc

SEQ ID NO: 1705401 - DNA, 25 bp, Homo sapien
gatatgagttggtcttctccccgct

SEQ ID NO: 1705402 - DNA, 25 bp, Homo sapien
accagcccagtttcaggtgaggaga

SEQ ID NO: 1705403 - DNA, 25 bp, Homo sapien
tctttatccacagcatcagtgagcc

SEQ ID NO: 1705404 - DNA, 25 bp, Homo sapien
agggccggctccctctctaccacgg

SEQ ID NO: 1705405 - DNA, 25 bp, Homo sapien
tctctaccacggcctgagaggaaga

SEQ ID NO: 1705406 - DNA, 25 bp, Homo sapien
cctctctaccacggcctgagaggaa

SEQ ID NO: 1705407 - DNA, 25 bp, Homo sapien
agtccagcctgaagggccggctccc

SEQ ID NO: 1705408 - DNA, 25 bp, Homo sapien
caagtacatttttgtccctcctcca

SEQ ID NO: 1705409 - DNA, 25 bp, Homo sapien
tgtaggacccttctccctgggataa

SEQ ID NO: 1705410 - DNA, 25 bp, Homo sapien
tccagtgattgggtttgtggctcca

SEQ ID NO: 1705411 - DNA, 25 bp, Homo sapien
cttccggcaaaaggaccgagccctg

SEQ ID NO: 1705412 - DNA, 25 bp, Homo sapien
ctatgtgtctctcccattatctttc

SEQ ID NO: 1705413 - DNA, 25 bp, Homo sapien
ctcttgcccctcaaattagagatgg

SEQ ID NO: 1705414 - DNA, 25 bp, Homo sapien
ctctctctatgtgtctctcccatta

SEQ ID NO: 1705415 - DNA, 25 bp, Homo sapien
caaattagagatggtttctcacccg

SEQ ID NO: 1705416 - DNA, 25 bp, Homo sapien
tcatgcccgcgtaatttcgaccagt

SEQ ID NO: 1705417 - DNA, 25 bp, Homo sapien
tcgaggccccttgagctaagtgcag

SEQ ID NO: 1705418 - DNA, 25 bp, Homo sapien
tctccagagacgcagagagtcctcg

SEQ ID NO: 1705419 - DNA, 25 bp, Homo sapien
aagtgcgtgtagtgcccttgtctcc

SEQ ID NO: 1705420 - DNA, 25 bp, Homo sapien
aggaaacaggcggagcgatccattt

SEQ ID NO: 1705421 - DNA, 25 bp, Homo sapien
cggagcgatccatttaggccagtgg

SEQ ID NO: 1705422 - DNA, 25 bp, Homo sapien
caggcggagcgatccatttaggcca

SEQ ID NO: 1705423 - DNA, 25 bp, Homo sapien
agtccgatttccccgccttgattct

SEQ ID NO: 1705424 - DNA, 25 bp, Homo sapien
ggtcgcgcaaatccgtcacgtccgg

SEQ ID NO: 1705425 - DNA, 25 bp, Homo sapien
tttctctggcaaccgcgcgagcgtt

SEQ ID NO: 1705426 - DNA, 25 bp, Homo sapien
gctgtttacttatcccaagtctgga

SEQ ID NO: 1705427 - DNA, 25 bp, Homo sapien
ggaatattccattgcgccctaggtg

SEQ ID NO: 1705428 - DNA, 25 bp, Homo sapien
ggatcttcctaatgcatcgcctcag

SEQ ID NO: 1705429 - DNA, 25 bp, Homo sapien
cctcagccatgaacaacgcggagtt

SEQ ID NO: 1705430 - DNA, 25 bp, Homo sapien
cagcgttcgggggacttgttctcta

SEQ ID NO: 1705431 - DNA, 25 bp, Homo sapien
ggagttctttaatacccgtgagcag

SEQ ID NO: 1705432 - DNA, 25 bp, Homo sapien
ggcaatcaagccacctcctctcgct

SEQ ID NO: 1705433 - DNA, 25 bp, Homo sapien
ctgagaaaggggtgataagggcatg

SEQ ID NO: 1705434 - DNA, 25 bp, Homo sapien
tcggaacagacgcccggcaatcaag

SEQ ID NO: 1705435 - DNA, 25 bp, Homo sapien
tctcgctcccacaccaggtccgtgt

SEQ ID NO: 1705436 - DNA, 25 bp, Homo sapien
aacagaagcaggacccacgccgcgg

SEQ ID NO: 1705437 - DNA, 25 bp, Homo sapien
agcagcggcaggaaaggcaacagaa

SEQ ID NO: 1705438 - DNA, 25 bp, Homo sapien
aagcaggacccacgccgcggggagc

SEQ ID NO: 1705439 - DNA, 25 bp, Homo sapien
agcggcaggaaaggcaacagaagca

SEQ ID NO: 1705440 - DNA, 25 bp, Homo sapien
acgatgaccggcttgtaggacgcgc

SEQ ID NO: 1705441 - DNA, 25 bp, Homo sapien
catgcaccacgatgaccggcttgta

SEQ ID NO: 1705442 - DNA, 25 bp, Homo sapien
agctgtcgaagagcccatgcaccac

SEQ ID NO: 1705443 - DNA, 25 bp, Homo sapien
cggaagctgtacgagctgtcgaaga

SEQ ID NO: 1705444 - DNA, 25 bp, Homo sapien
tcccatcgaagagatcgagcactgt

SEQ ID NO: 1705445 - DNA, 25 bp, Homo sapien
ttcccacaggggtcgcaagctctct

SEQ ID NO: 1705446 - DNA, 25 bp, Homo sapien
gctctctctcccatcgaagagatcg

SEQ ID NO: 1705447 - DNA, 25 bp, Homo sapien
gaagagatcgagcactgtcaccaca

SEQ ID NO: 1705448 - DNA, 25 bp, Homo sapien
cgagtagcagatgagatgcacccct

SEQ ID NO: 1705449 - DNA, 25 bp, Homo sapien
gagtagcagatgagatgcacccctt

SEQ ID NO: 1705450 - DNA, 25 bp, Homo sapien
gcagatgagatgcaccccttgaggg

SEQ ID NO: 1705451 - DNA, 25 bp, Homo sapien
tagcagatgagatgcaccccttgag

SEQ ID NO: 1705452 - DNA, 25 bp, Homo sapien
gaaagaatccacgttgtgatcatcc

SEQ ID NO: 1705453 - DNA, 25 bp, Homo sapien
agaatccacgttgtgatcatccatg

SEQ ID NO: 1705454 - DNA, 25 bp, Homo sapien
gatgaaagaatccacgttgtgatca

SEQ ID NO: 1705455 - DNA, 25 bp, Homo sapien
agggagatgaaagaatccacgttgt

SEQ ID NO: 1705456 - DNA, 25 bp, Homo sapien
ctggcaagcgaatggcaatgctaag

SEQ ID NO: 1705457 - DNA, 25 bp, Homo sapien
cgaatggcaatgctaagtgaccata

SEQ ID NO: 1705458 - DNA, 25 bp, Homo sapien
aactcagggcattctatggagtcta

SEQ ID NO: 1705459 - DNA, 25 bp, Homo sapien
cattctatggagtctagtgcccact

SEQ ID NO: 1705460 - DNA, 25 bp, Homo sapien
tggggaacagccacttcaagtagtc

SEQ ID NO: 1705461 - DNA, 25 bp, Homo sapien
aacagccacttcaagtagtccgtgt

SEQ ID NO: 1705462 - DNA, 25 bp, Homo sapien
gaacagccacttcaagtagtccgtg

SEQ ID NO: 1705463 - DNA, 25 bp, Homo sapien
gggaacagccacttcaagtagtccg

SEQ ID NO: 1705464 - DNA, 25 bp, Homo sapien
gggctatagcagatccgatagaggt

SEQ ID NO: 1705465 - DNA, 25 bp, Homo sapien
tatagcagatccgatagaggttaga

SEQ ID NO: 1705466 - DNA, 25 bp, Homo sapien
cagatccgatagaggttagaccgca

SEQ ID NO: 1705467 - DNA, 25 bp, Homo sapien
cccaggggctatagcagatccgata

SEQ ID NO: 1705468 - DNA, 25 bp, Homo sapien
aagcgtgtgcccacattcagctaaa

SEQ ID NO: 1705469 - DNA, 25 bp, Homo sapien
gcgtgtgcccacattcagctaaatt

SEQ ID NO: 1705470 - DNA, 25 bp, Homo sapien
ttacaagcgtgtgcccacattcagc

SEQ ID NO: 1705471 - DNA, 25 bp, Homo sapien
gtgtgcccacattcagctaaatttt

SEQ ID NO: 1705472 - DNA, 25 bp, Homo sapien
cagcaatagtcaaggtggatagtaa

SEQ ID NO: 1705473 - DNA, 25 bp, Homo sapien
tcaaggtggatagtaataaaatagt

SEQ ID NO: 1705474 - DNA, 25 bp, Homo sapien
ataaaatagtagtgataatgtaggc

SEQ ID NO: 1705475 - DNA, 25 bp, Homo sapien
ggaagctgcagcaatagtcaaggtg

SEQ ID NO: 1705476 - DNA, 25 bp, Homo sapien
ctttccccattgatcagggccagga

SEQ ID NO: 1705477 - DNA, 25 bp, Homo sapien
tggcattgaggtacaagtcatcgtg

SEQ ID NO: 1705478 - DNA, 25 bp, Homo sapien
gtctctttccccattgatcagggcc

SEQ ID NO: 1705479 - DNA, 25 bp, Homo sapien
ggcattgaggtacaagtcatcgtgg

SEQ ID NO: 1705480 - DNA, 25 bp, Homo sapien
agggagtaataacaccatcatcagg

SEQ ID NO: 1705481 - DNA, 25 bp, Homo sapien
acacgcagaaagttcttccgccata

SEQ ID NO: 1705482 - DNA, 25 bp, Homo sapien
caggtggcccacacgcagaaagttc

SEQ ID NO: 1705483 - DNA, 25 bp, Homo sapien
tggactgccagggagtaataacacc

SEQ ID NO: 1705484 - DNA, 25 bp, Homo sapien
taggcatgagataaagaccaactgg

SEQ ID NO: 1705485 - DNA, 25 bp, Homo sapien
aattacataggatgcaaccactggg

SEQ ID NO: 1705486 - DNA, 25 bp, Homo sapien
gaagggcctcgctatactatctttg

SEQ ID NO: 1705487 - DNA, 25 bp, Homo sapien
aaggagcaggccagtttaggcatga

SEQ ID NO: 1705488 - DNA, 25 bp, Homo sapien
tacaggcgcaaacttttcttaagta

SEQ ID NO: 1705489 - DNA, 25 bp, Homo sapien
acaggcgcaaacttttcttaagtat

SEQ ID NO: 1705490 - DNA, 25 bp, Homo sapien
caggcgcaaacttttcttaagtatg

SEQ ID NO: 1705491 - DNA, 25 bp, Homo sapien
aggcgcaaacttttcttaagtatga

SEQ ID NO: 1705492 - DNA, 25 bp, Homo sapien
ccatctccaggacggtctcatttgc

SEQ ID NO: 1705493 - DNA, 25 bp, Homo sapien
ctccatctccaggacggtctcattt

SEQ ID NO: 1705494 - DNA, 25 bp, Homo sapien
tctccaggacggtctcatttgcatc

SEQ ID NO: 1705495 - DNA, 25 bp, Homo sapien
caggacggtctcatttgcatcatag

SEQ ID NO: 1705496 - DNA, 25 bp, Homo sapien
gagagacaaagtgagttactgctgg

SEQ ID NO: 1705497 - DNA, 25 bp, Homo sapien
aagtgagttactgctgggatcctgg

SEQ ID NO: 1705498 - DNA, 25 bp, Homo sapien
cagcggctagaaggggaagtaatcc

SEQ ID NO: 1705499 - DNA, 25 bp, Homo sapien
tccccacagggtgaacccttcagct

SEQ ID NO: 1705500 - DNA, 25 bp, Homo sapien
ccgggccaatagagtcttcaaccca

SEQ ID NO: 1705501 - DNA, 25 bp, Homo sapien
gggccaatagagtcttcaacccaaa

SEQ ID NO: 1705502 - DNA, 25 bp, Homo sapien
gccaatagagtcttcaacccaaaag

SEQ ID NO: 1705503 - DNA, 25 bp, Homo sapien
tatggccccccgggccaatagagtc

SEQ ID NO: 1705504 - DNA, 25 bp, Homo sapien
tcataaagggtacggttggagtgcc

SEQ ID NO: 1705505 - DNA, 25 bp, Homo sapien
tgcaggtctcataaagggtacggtt

SEQ ID NO: 1705506 - DNA, 25 bp, Homo sapien
tcaggagagccaaggttcaatgcag

SEQ ID NO: 1705507 - DNA, 25 bp, Homo sapien
gccaaggttcaatgcaggtctcata

SEQ ID NO: 1705508 - DNA, 25 bp, Homo sapien
gaagctaaaaatgtcctgagtggcc

SEQ ID NO: 1705509 - DNA, 25 bp, Homo sapien
gaattgtcattcatggaggagcaga

SEQ ID NO: 1705510 - DNA, 25 bp, Homo sapien
cccaacttcggccttgagagaaagg

SEQ ID NO: 1705511 - DNA, 25 bp, Homo sapien
caagaacggaactgtccccataggg

SEQ ID NO: 1705512 - DNA, 25 bp, Homo sapien
tactccaacactgatcatagggact

SEQ ID NO: 1705513 - DNA, 25 bp, Homo sapien
atacagggataacacctattcaaag

SEQ ID NO: 1705514 - DNA, 25 bp, Homo sapien
cccaggggggtactccaacactgat

SEQ ID NO: 1705515 - DNA, 25 bp, Homo sapien
tatttccataaatacagggataaca

SEQ ID NO: 1705516 - DNA, 25 bp, Homo sapien
gaagctatgagctctgtaacaccac

SEQ ID NO: 1705517 - DNA, 25 bp, Homo sapien
ccaaccctctgaggcccctatttct

SEQ ID NO: 1705518 - DNA, 25 bp, Homo sapien
cctagaagtatctttccaaccctct

SEQ ID NO: 1705519 - DNA, 25 bp, Homo sapien
ccaaaacagactaggggagagttag

SEQ ID NO: 1705520 - DNA, 25 bp, Homo sapien
gaagcagctcagactggtgggtggg

SEQ ID NO: 1705521 - DNA, 25 bp, Homo sapien
cagaagcagctcagactggtgggtg

SEQ ID NO: 1705522 - DNA, 25 bp, Homo sapien
cctaaggctctgagtaaaccccact

SEQ ID NO: 1705523 - DNA, 25 bp, Homo sapien
ctcacatacccacaccgtcacataa

SEQ ID NO: 1705524 - DNA, 25 bp, Homo sapien
catcccttgctccaacaaaacaccc

SEQ ID NO: 1705525 - DNA, 25 bp, Homo sapien
tcacataacgccctaaatgcacatc

SEQ ID NO: 1705526 - DNA, 25 bp, Homo sapien
tctgcaggtaccctctaagggagtc

SEQ ID NO: 1705527 - DNA, 25 bp, Homo sapien
gggagtcaggacattcacttttaca

SEQ ID NO: 1705528 - DNA, 25 bp, Homo sapien
caggattgcctacacctgtgtgtac

SEQ ID NO: 1705529 - DNA, 25 bp, Homo sapien
ttacatactagccaccaggattgcc

SEQ ID NO: 1705530 - DNA, 25 bp, Homo sapien
tcgctttgacgctggaccctacagg

SEQ ID NO: 1705531 - DNA, 25 bp, Homo sapien
ttcgctttgacgctggaccctacag

SEQ ID NO: 1705532 - DNA, 25 bp, Homo sapien
gattcgctttgacgctggaccctac

SEQ ID NO: 1705533 - DNA, 25 bp, Homo sapien
attcgctttgacgctggaccctaca

SEQ ID NO: 1705534 - DNA, 25 bp, Homo sapien
tgcacagctcagccctggaccccat

SEQ ID NO: 1705535 - DNA, 25 bp, Homo sapien
ctaagagagtgcacagctcagccct

SEQ ID NO: 1705536 - DNA, 25 bp, Homo sapien
gagtgcacagctcagccctggaccc

SEQ ID NO: 1705537 - DNA, 25 bp, Homo sapien
taagagagtgcacagctcagccctg

SEQ ID NO: 1705538 - DNA, 25 bp, Homo sapien
tcagtagcaggaggaaggagaatcc

SEQ ID NO: 1705539 - DNA, 25 bp, Homo sapien
ctggtatcagtagcaggaggaagga

SEQ ID NO: 1705540 - DNA, 25 bp, Homo sapien
tatcagtagcaggaggaaggagaat

SEQ ID NO: 1705541 - DNA, 25 bp, Homo sapien
agtagcaggaggaaggagaatccgc

SEQ ID NO: 1705542 - DNA, 25 bp, Homo sapien
ctctgagggatccacccttggcccc

SEQ ID NO: 1705543 - DNA, 25 bp, Homo sapien
tccctcaagaggctactgaggcccc

SEQ ID NO: 1705544 - DNA, 25 bp, Homo sapien
gctcctgagaagagctcaccccggg

SEQ ID NO: 1705545 - DNA, 25 bp, Homo sapien
gccaggagtcccacttccctcaaga

SEQ ID NO: 1705546 - DNA, 25 bp, Homo sapien
tctaaacttacagttatgttttgcc

SEQ ID NO: 1705547 - DNA, 25 bp, Homo sapien
gatgaggtgggagagattgagtagg

SEQ ID NO: 1705548 - DNA, 25 bp, Homo sapien
tgaggtgggagagattgagtaggcc

SEQ ID NO: 1705549 - DNA, 25 bp, Homo sapien
gaggtgggagagattgagtaggcca

SEQ ID NO: 1705550 - DNA, 25 bp, Homo sapien
ggtgggagagattgagtaggccagg

SEQ ID NO: 1705551 - DNA, 25 bp, Homo sapien
gcctcccagcgcacaaggtcaggta

SEQ ID NO: 1705552 - DNA, 25 bp, Homo sapien
tcgttgtagtggagcgggaccacca

SEQ ID NO: 1705553 - DNA, 25 bp, Homo sapien
ctgtaagtgctgcagatgcgcctcc

SEQ ID NO: 1705554 - DNA, 25 bp, Homo sapien
cactggttggctgtaggactcgttg

SEQ ID NO: 1705555 - DNA, 25 bp, Homo sapien
caggaccctgagtacgggtcctagt

SEQ ID NO: 1705556 - DNA, 25 bp, Homo sapien
ccggctcaggaccctgagtacgggt

SEQ ID NO: 1705557 - DNA, 25 bp, Homo sapien
ggctcaggaccctgagtacgggtcc

SEQ ID NO: 1705558 - DNA, 25 bp, Homo sapien
tcaggaccctgagtacgggtcctag

SEQ ID NO: 1705559 - DNA, 25 bp, Homo sapien
acactgcatgggtctgctgaacctc

SEQ ID NO: 1705560 - DNA, 25 bp, Homo sapien
cttcacaggtgagcgcccccgggtg

SEQ ID NO: 1705561 - DNA, 25 bp, Homo sapien
tcccgccacataacgcggtacatgg

SEQ ID NO: 1705562 - DNA, 25 bp, Homo sapien
tcacctcccgccacataacgcggta

SEQ ID NO: 1705563 - DNA, 25 bp, Homo sapien
tggggttcagactcaaaccgacgac

SEQ ID NO: 1705564 - DNA, 25 bp, Homo sapien
gttcagactcaaaccgacgacccag

SEQ ID NO: 1705565 - DNA, 25 bp, Homo sapien
agactcaaaccgacgacccagctcc

SEQ ID NO: 1705566 - DNA, 25 bp, Homo sapien
agtggggttcagactcaaaccgacg

SEQ ID NO: 1705567 - DNA, 25 bp, Homo sapien
atgacagtgcttccctccccagccg

SEQ ID NO: 1705568 - DNA, 25 bp, Homo sapien
cagacgcctccgttcaggcaaggct

SEQ ID NO: 1705569 - DNA, 25 bp, Homo sapien
gggcgcactcgcactggtcaggcct

SEQ ID NO: 1705570 - DNA, 25 bp, Homo sapien
actcgcactggtcaggcctaacgca

SEQ ID NO: 1705571 - DNA, 25 bp, Homo sapien
gggcaagcacctgggtaggtgggga

SEQ ID NO: 1705572 - DNA, 25 bp, Homo sapien
cgtattaaaacaatggtgcgagcag

SEQ ID NO: 1705573 - DNA, 25 bp, Homo sapien
ctgccgtattaaaacaatggtgcga

SEQ ID NO: 1705574 - DNA, 25 bp, Homo sapien
gagggtgatgctggtcctacattca

SEQ ID NO: 1705575 - DNA, 25 bp, Homo sapien
tgcgagcagagggtgatgctggtcc

SEQ ID NO: 1705576 - DNA, 25 bp, Homo sapien
cggccacgctgagtatgctggcact

SEQ ID NO: 1705577 - DNA, 25 bp, Homo sapien
tccacgcctagcactaggtcatggg

SEQ ID NO: 1705578 - DNA, 25 bp, Homo sapien
ctctggggacccctccatgcaggtg

SEQ ID NO: 1705579 - DNA, 25 bp, Homo sapien
ctccatgcaggtgcgcccgtccacg

SEQ ID NO: 1705580 - DNA, 25 bp, Homo sapien
ctcgcagctcgtgaatctcctgctt

SEQ ID NO: 1705581 - DNA, 25 bp, Homo sapien
gccctcgcagctcgtgaatctcctg

SEQ ID NO: 1705582 - DNA, 25 bp, Homo sapien
caggcgccctcgcagctcgtgaatc

SEQ ID NO: 1705583 - DNA, 25 bp, Homo sapien
agagcgcgctcatctttttccgcct

SEQ ID NO: 1705584 - DNA, 25 bp, Homo sapien
aggaagagatgcctcagggtattga

SEQ ID NO: 1705585 - DNA, 25 bp, Homo sapien
cctcgccccacccagcaggcttggc

SEQ ID NO: 1705586 - DNA, 25 bp, Homo sapien
tgcctcagggtattgacagtgacgt

SEQ ID NO: 1705587 - DNA, 25 bp, Homo sapien
agatgcctcagggtattgacagtga

SEQ ID NO: 1705588 - DNA, 25 bp, Homo sapien
tcgctgagagattcgatccggtcac

SEQ ID NO: 1705589 - DNA, 25 bp, Homo sapien
ctggtcgctgagagattcgatccgg

SEQ ID NO: 1705590 - DNA, 25 bp, Homo sapien
aggcggcacgggcagcaccgctctg

SEQ ID NO: 1705591 - DNA, 25 bp, Homo sapien
gagagattcgatccggtcaccccgg

SEQ ID NO: 1705592 - DNA, 25 bp, Homo sapien
ctagcctctcctccagcagcagcac

SEQ ID NO: 1705593 - DNA, 25 bp, Homo sapien
atcgatgattgacgccgaggcccag

SEQ ID NO: 1705594 - DNA, 25 bp, Homo sapien
tatcgatgattgacgccgaggccca

SEQ ID NO: 1705595 - DNA, 25 bp, Homo sapien
ttatcgatgattgacgccgaggccc

SEQ ID NO: 1705596 - DNA, 25 bp, Homo sapien
tggtggctgatagccttatctgcag

SEQ ID NO: 1705597 - DNA, 25 bp, Homo sapien
ccaatcccagaggattagtgggtcc

SEQ ID NO: 1705598 - DNA, 25 bp, Homo sapien
cagaggattagtgggtccggtttct

SEQ ID NO: 1705599 - DNA, 25 bp, Homo sapien
tgcagctcacagtcggccaatccca

SEQ ID NO: 1705600 - DNA, 25 bp, Homo sapien
gaagctgatacctgaagcactccca

SEQ ID NO: 1705601 - DNA, 25 bp, Homo sapien
gaatgtggatacagcgccactcctg

SEQ ID NO: 1705602 - DNA, 25 bp, Homo sapien
taattcagaggtctcatgcctgccc

SEQ ID NO: 1705603 - DNA, 25 bp, Homo sapien
tccatttgtgaggaggacttctcgc

SEQ ID NO: 1705604 - DNA, 25 bp, Homo sapien
aagaaggagcgtcgcttcacctcgg

SEQ ID NO: 1705605 - DNA, 25 bp, Homo sapien
ctgcaagaaggagcgtcgcttcacc

SEQ ID NO: 1705606 - DNA, 25 bp, Homo sapien
ctactgcaagaaggagcgtcgcttc

SEQ ID NO: 1705607 - DNA, 25 bp, Homo sapien
ggtagggtgtgtccggagaggctgg

SEQ ID NO: 1705608 - DNA, 25 bp, Homo sapien
ctgctcacccaggacgtgagtcatc

SEQ ID NO: 1705609 - DNA, 25 bp, Homo sapien
agaccctgctcacccaggacgtgag

SEQ ID NO: 1705610 - DNA, 25 bp, Homo sapien
tgaggtcgcccagaccctgctcacc

SEQ ID NO: 1705611 - DNA, 25 bp, Homo sapien
ccagaccctgctcacccaggacgtg

SEQ ID NO: 1705612 - DNA, 25 bp, Homo sapien
gccaaggagggctttattcgtctga

SEQ ID NO: 1705613 - DNA, 25 bp, Homo sapien
ggtaataactcgctacacgctgtcg

SEQ ID NO: 1705614 - DNA, 25 bp, Homo sapien
tgctcgggactacctatagacctcg

SEQ ID NO: 1705615 - DNA, 25 bp, Homo sapien
tacggtctaagtcaatgtgcaatgc

SEQ ID NO: 1705616 - DNA, 25 bp, Homo sapien
tcctgcccacgatcgttgggcaggc

SEQ ID NO: 1705617 - DNA, 25 bp, Homo sapien
atacacacgccccaacaaaccagaa

SEQ ID NO: 1705618 - DNA, 25 bp, Homo sapien
cccacgatcgttgggcaggcttcaa

SEQ ID NO: 1705619 - DNA, 25 bp, Homo sapien
cacctcctgcccacgatcgttgggc

SEQ ID NO: 1705620 - DNA, 25 bp, Homo sapien
aacatatattacattcgaaggtcgc

SEQ ID NO: 1705621 - DNA, 25 bp, Homo sapien
ttcccgagcagtctccaaacatata

SEQ ID NO: 1705622 - DNA, 25 bp, Homo sapien
gcttcccgagcagtctccaaacata

SEQ ID NO: 1705623 - DNA, 25 bp, Homo sapien
atattacattcgaaggtcgcgcccg

SEQ ID NO: 1705624 - DNA, 25 bp, Homo sapien
tggctccctcgcccataaagcggga

SEQ ID NO: 1705625 - DNA, 25 bp, Homo sapien
tactggacactcttgccgttctggc

SEQ ID NO: 1705626 - DNA, 25 bp, Homo sapien
tctgctgatcccagctttacatact

SEQ ID NO: 1705627 - DNA, 25 bp, Homo sapien
cataaagcgggacaaccttctctct

SEQ ID NO: 1705628 - DNA, 25 bp, Homo sapien
ccaagggcagaagccttcaatcttc

SEQ ID NO: 1705629 - DNA, 25 bp, Homo sapien
tgctctccggagctggtctctggcc

SEQ ID NO: 1705630 - DNA, 25 bp, Homo sapien
ctctgctctccggagctggtctctg

SEQ ID NO: 1705631 - DNA, 25 bp, Homo sapien
ctctccggagctggtctctggccct

SEQ ID NO: 1705632 - DNA, 25 bp, Homo sapien
ctccggagctggtctctggccctgg

SEQ ID NO: 1705633 - DNA, 25 bp, Homo sapien
gaagccggcaaatctgtcaaggaag

SEQ ID NO: 1705634 - DNA, 25 bp, Homo sapien
caaatctgtcaaggaagggacacaa

SEQ ID NO: 1705635 - DNA, 25 bp, Homo sapien
aagggacacaactggacaagaagac

SEQ ID NO: 1705636 - DNA, 25 bp, Homo sapien
gtcagacgggaagccggcaaatctg

SEQ ID NO: 1705637 - DNA, 25 bp, Homo sapien
tggaagcccccggtatcaccaaatg

SEQ ID NO: 1705638 - DNA, 25 bp, Homo sapien
ggaaaggctcatgggcattgaagac

SEQ ID NO: 1705639 - DNA, 25 bp, Homo sapien
cccccggtatcaccaaatggctgga

SEQ ID NO: 1705640 - DNA, 25 bp, Homo sapien
tgtaccccggcggaaaggctcatgg

SEQ ID NO: 1705641 - DNA, 25 bp, Homo sapien
tccctgatgggagctgagtgtgact

SEQ ID NO: 1705642 - DNA, 25 bp, Homo sapien
gatgggagctgagtgtgactcttac

SEQ ID NO: 1705643 - DNA, 25 bp, Homo sapien
ggaagcatatgctcctaggctggga

SEQ ID NO: 1705644 - DNA, 25 bp, Homo sapien
aagctgtggaagcatatgctcctag

SEQ ID NO: 1705645 - DNA, 25 bp, Homo sapien
tgggtgaccctgtcccagatccaca

SEQ ID NO: 1705646 - DNA, 25 bp, Homo sapien
aaagaagaagatggcgagaaacagg

SEQ ID NO: 1705647 - DNA, 25 bp, Homo sapien
agaaacaggaagagggaatcctgcc

SEQ ID NO: 1705648 - DNA, 25 bp, Homo sapien
caggaagagggaatcctgccagctg

SEQ ID NO: 1705649 - DNA, 25 bp, Homo sapien
attaaacaacgttactgagtgagcc

SEQ ID NO: 1705650 - DNA, 25 bp, Homo sapien
gaaagacattctctcaatccatcct

SEQ ID NO: 1705651 - DNA, 25 bp, Homo sapien
tggccttagccaacagaaatagagg

SEQ ID NO: 1705652 - DNA, 25 bp, Homo sapien
cagcagggaccctcaatactgattc

SEQ ID NO: 1705653 - DNA, 25 bp, Homo sapien
aatttgtattaaaggaggtagtgag

SEQ ID NO: 1705654 - DNA, 25 bp, Homo sapien
tgagggggcggaagcacttaagagt

SEQ ID NO: 1705655 - DNA, 25 bp, Homo sapien
tgaatttgtattaaaggaggtagtg

SEQ ID NO: 1705656 - DNA, 25 bp, Homo sapien
ttaagagtcagaatccatattagac

SEQ ID NO: 1705657 - DNA, 25 bp, Homo sapien
tgcttctagaacacaggccggacag

SEQ ID NO: 1705658 - DNA, 25 bp, Homo sapien
tagctggcacttggatgggaagccc

SEQ ID NO: 1705659 - DNA, 25 bp, Homo sapien
tcatcttgtggcaaaggcggcaacg

SEQ ID NO: 1705660 - DNA, 25 bp, Homo sapien
gtggaaccgtaaccctgacctgtga

SEQ ID NO: 1705661 - DNA, 25 bp, Homo sapien
tcttcccctgtgagtgacatgtctt

SEQ ID NO: 1705662 - DNA, 25 bp, Homo sapien
tcaggattttacaagactgtcagag

SEQ ID NO: 1705663 - DNA, 25 bp, Homo sapien
gcagggctggactcagtaattttga

SEQ ID NO: 1705664 - DNA, 25 bp, Homo sapien
tcccattaaagatccgggcaggact

SEQ ID NO: 1705665 - DNA, 25 bp, Homo sapien
taagatgctaggatgaggcaggccc

SEQ ID NO: 1705666 - DNA, 25 bp, Homo sapien
ccagagcagacatcttccacgtgga

SEQ ID NO: 1705667 - DNA, 25 bp, Homo sapien
gaagcgcttcttctagccactgcta

SEQ ID NO: 1705668 - DNA, 25 bp, Homo sapien
aagggtgcccctatgatccattgtc

SEQ ID NO: 1705669 - DNA, 25 bp, Homo sapien
aacagtcaggcgcacgagagatgga

SEQ ID NO: 1705670 - DNA, 25 bp, Homo sapien
gagcagacgccgctattcctggcgg

SEQ ID NO: 1705671 - DNA, 25 bp, Homo sapien
agagatggaaagtgcggtaacccgc

SEQ ID NO: 1705672 - DNA, 25 bp, Homo sapien
gtcgctcaccaacgtaaccactggg

SEQ ID NO: 1705673 - DNA, 25 bp, Homo sapien
atctgtgaacatggataatttgagt

SEQ ID NO: 1705674 - DNA, 25 bp, Homo sapien
ctgtgaacatggataatttgagttc

SEQ ID NO: 1705675 - DNA, 25 bp, Homo sapien
gaacatggataatttgagttcttct

SEQ ID NO: 1705676 - DNA, 25 bp, Homo sapien
actgaatttgtttataaccagtgtt

SEQ ID NO: 1705677 - DNA, 25 bp, Homo sapien
acacagcttttggccaaaacaacca

SEQ ID NO: 1705678 - DNA, 25 bp, Homo sapien
ctgtgggcttccacacagcttttgg

SEQ ID NO: 1705679 - DNA, 25 bp, Homo sapien
cacagcttttggccaaaacaaccac

SEQ ID NO: 1705680 - DNA, 25 bp, Homo sapien
ccccgttcctgtgggcttccacaca

SEQ ID NO: 1705681 - DNA, 25 bp, Homo sapien
accgctgcacctggcactcttgctt

SEQ ID NO: 1705682 - DNA, 25 bp, Homo sapien
cgctgcacctggcactcttgcttat

SEQ ID NO: 1705683 - DNA, 25 bp, Homo sapien
tgcacctggcactcttgcttatctc

SEQ ID NO: 1705684 - DNA, 25 bp, Homo sapien
tggggcaacgggtgtgcatcaccac

SEQ ID NO: 1705685 - DNA, 25 bp, Homo sapien
agtaggaccgccaggccggcaagca

SEQ ID NO: 1705686 - DNA, 25 bp, Homo sapien
ggaggaaatcgctttcttccctgtg

SEQ ID NO: 1705687 - DNA, 25 bp, Homo sapien
aaatcttgcggtgttgagtaggacc

SEQ ID NO: 1705688 - DNA, 25 bp, Homo sapien
tgtgactcagccctggaggaatttc

SEQ ID NO: 1705689 - DNA, 25 bp, Homo sapien
tgggagcgacacagagccaaaggaa

SEQ ID NO: 1705690 - DNA, 25 bp, Homo sapien
ggtgcgacctcaggaaaccatgctt

SEQ ID NO: 1705691 - DNA, 25 bp, Homo sapien
tgcattgggactcatcaggaaaaca

SEQ ID NO: 1705692 - DNA, 25 bp, Homo sapien
gaagtgagtgatggtgcgacctcag

SEQ ID NO: 1705693 - DNA, 25 bp, Homo sapien
ccactgggtcgaagcttctagaaga

SEQ ID NO: 1705694 - DNA, 25 bp, Homo sapien
actccagcagactggcaccaaaggg

SEQ ID NO: 1705695 - DNA, 25 bp, Homo sapien
cttggaccgacagacacctgataca

SEQ ID NO: 1705696 - DNA, 25 bp, Homo sapien
gcatctgacaggtgccccactgggt

SEQ ID NO: 1705697 - DNA, 25 bp, Homo sapien
tcccagcatggtattgaagctctgc

SEQ ID NO: 1705698 - DNA, 25 bp, Homo sapien
tatagatgaacactacccatggcac

SEQ ID NO: 1705699 - DNA, 25 bp, Homo sapien
gacatagctctcaaacaaggtagac

SEQ ID NO: 1705700 - DNA, 25 bp, Homo sapien
tgaacaggcaagattcaagatggcc

SEQ ID NO: 1705701 - DNA, 25 bp, Homo sapien
gacaggccttgctggactataagtg

SEQ ID NO: 1705702 - DNA, 25 bp, Homo sapien
ccttgaatgccatagtaaataaagc

SEQ ID NO: 1705703 - DNA, 25 bp, Homo sapien
tacagacaatgtggagcccttggtt

SEQ ID NO: 1705704 - DNA, 25 bp, Homo sapien
agttataccttcagtttcaccaaag

SEQ ID NO: 1705705 - DNA, 25 bp, Homo sapien
ctcttcccaggaatgtatcgatctc

SEQ ID NO: 1705706 - DNA, 25 bp, Homo sapien
gaactcagttgtgaatccgtctggc

SEQ ID NO: 1705707 - DNA, 25 bp, Homo sapien
ctcagttgtgaatccgtctggccct

SEQ ID NO: 1705708 - DNA, 25 bp, Homo sapien
ggaatgtatcgatctcctccaggtt

SEQ ID NO: 1705709 - DNA, 25 bp, Homo sapien
tattaagaacatcttatactgtcat

SEQ ID NO: 1705710 - DNA, 25 bp, Homo sapien
tggcaacaaatgctctgtataaata

SEQ ID NO: 1705711 - DNA, 25 bp, Homo sapien
tactgtcatcagatacagccaaaga

SEQ ID NO: 1705712 - DNA, 25 bp, Homo sapien
agttggcaacaaatgctctgtataa

SEQ ID NO: 1705713 - DNA, 25 bp, Homo sapien
ccactagtggcattgctcgattgaa

SEQ ID NO: 1705714 - DNA, 25 bp, Homo sapien
tatatatgccatagtttccttgtct

SEQ ID NO: 1705715 - DNA, 25 bp, Homo sapien
ttccttgtctattcgttgactgatg

SEQ ID NO: 1705716 - DNA, 25 bp, Homo sapien
tagaatagtgtccaatcccatccag

SEQ ID NO: 1705717 - DNA, 25 bp, Homo sapien
gtgtgagatatccccgtccccgtgt

SEQ ID NO: 1705718 - DNA, 25 bp, Homo sapien
tgagatatccccgtccccgtgtcca

SEQ ID NO: 1705719 - DNA, 25 bp, Homo sapien
gagatatccccgtccccgtgtccat

SEQ ID NO: 1705720 - DNA, 25 bp, Homo sapien
tgtgagatatccccgtccccgtgtc

SEQ ID NO: 1705721 - DNA, 25 bp, Homo sapien
gaggcaattaggataaaaacgtcat

SEQ ID NO: 1705722 - DNA, 25 bp, Homo sapien
caaaaacgagttctgggtggatcaa

SEQ ID NO: 1705723 - DNA, 25 bp, Homo sapien
tggaatatgttccaccacatgaact

SEQ ID NO: 1705724 - DNA, 25 bp, Homo sapien
ggccacattgccctccaagggtcaa

SEQ ID NO: 1705725 - DNA, 25 bp, Homo sapien
tttgatgagctgcacaggtttagca

SEQ ID NO: 1705726 - DNA, 25 bp, Homo sapien
gctggttagcccacaccctgaatat

SEQ ID NO: 1705727 - DNA, 25 bp, Homo sapien
ccatagaggagactcaggaaacagc

SEQ ID NO: 1705728 - DNA, 25 bp, Homo sapien
ccctgccgcaggtatggaagcctat

SEQ ID NO: 1705729 - DNA, 25 bp, Homo sapien
gcttcctcagttgttctggctcttt

SEQ ID NO: 1705730 - DNA, 25 bp, Homo sapien
ctgtccgggagtgtccctcactgct

SEQ ID NO: 1705731 - DNA, 25 bp, Homo sapien
agagcttcctcagttgttctggctc

SEQ ID NO: 1705732 - DNA, 25 bp, Homo sapien
ctcagttgttctggctctttaggag

SEQ ID NO: 1705733 - DNA, 25 bp, Homo sapien
caaagcccctggagcgcttgggttt

SEQ ID NO: 1705734 - DNA, 25 bp, Homo sapien
cctggagcgcttgggtttggatctc

SEQ ID NO: 1705735 - DNA, 25 bp, Homo sapien
gcttgggtttggatctctcatgacc

SEQ ID NO: 1705736 - DNA, 25 bp, Homo sapien
cgcttgggtttggatctctcatgac

SEQ ID NO: 1705737 - DNA, 25 bp, Homo sapien
ctcaaaataatttcttaggtgattt

SEQ ID NO: 1705738 - DNA, 25 bp, Homo sapien
ctactcaaaataatttcttaggtga

SEQ ID NO: 1705739 - DNA, 25 bp, Homo sapien
tactcaaaataatttcttaggtgat

SEQ ID NO: 1705740 - DNA, 25 bp, Homo sapien
caaaataatttcttaggtgatttct

SEQ ID NO: 1705741 - DNA, 25 bp, Homo sapien
tttcttgcaactgcctcggtcagtc

SEQ ID NO: 1705742 - DNA, 25 bp, Homo sapien
ttgcaactgcctcggtcagtcatgt

SEQ ID NO: 1705743 - DNA, 25 bp, Homo sapien
aactgcctcggtcagtcatgttttc

SEQ ID NO: 1705744 - DNA, 25 bp, Homo sapien
gcaactgcctcggtcagtcatgttt

SEQ ID NO: 1705745 - DNA, 25 bp, Homo sapien
tcttgctttgacaggctttcctaac

SEQ ID NO: 1705746 - DNA, 25 bp, Homo sapien
ttcgacctcttcggctggatggagc

SEQ ID NO: 1705747 - DNA, 25 bp, Homo sapien
ccatctcttgctttgacaggctttc

SEQ ID NO: 1705748 - DNA, 25 bp, Homo sapien
ctcttcggctggatggagcactagc

SEQ ID NO: 1705749 - DNA, 25 bp, Homo sapien
tactggaaccacaatagccactttg

SEQ ID NO: 1705750 - DNA, 25 bp, Homo sapien
aaccacaatagccactttggtttca

SEQ ID NO: 1705751 - DNA, 25 bp, Homo sapien
ccacaatagccactttggtttcatg

SEQ ID NO: 1705752 - DNA, 25 bp, Homo sapien
tggaaccacaatagccactttggtt

SEQ ID NO: 1705753 - DNA, 25 bp, Homo sapien
tacactttccacagaacagaaacta

SEQ ID NO: 1705754 - DNA, 25 bp, Homo sapien
ctaaaataacctgttatacaattag

SEQ ID NO: 1705755 - DNA, 25 bp, Homo sapien
tgttatacaattagtcacaaataca

SEQ ID NO: 1705756 - DNA, 25 bp, Homo sapien
tacagtcctcgagttttttgcccat

SEQ ID NO: 1705757 - DNA, 25 bp, Homo sapien
tcacagccggagctacaggaccttt

SEQ ID NO: 1705758 - DNA, 25 bp, Homo sapien
tatttatgatactccctagagcgag

SEQ ID NO: 1705759 - DNA, 25 bp, Homo sapien
cagtatcttagggatcgctacctgg

SEQ ID NO: 1705760 - DNA, 25 bp, Homo sapien
ccaaagaggccatgcacgaagtgtt

SEQ ID NO: 1705761 - DNA, 25 bp, Homo sapien
gtgtctatggcatctaagttctccc

SEQ ID NO: 1705762 - DNA, 25 bp, Homo sapien
cattgcattgcaattgataccagga

SEQ ID NO: 1705763 - DNA, 25 bp, Homo sapien
tagcactgtctcgatcaagtattgg

SEQ ID NO: 1705764 - DNA, 25 bp, Homo sapien
caggttgcatagatcttgtagtccc

SEQ ID NO: 1705765 - DNA, 25 bp, Homo sapien
attttcatgccatccttacacacgg

SEQ ID NO: 1705766 - DNA, 25 bp, Homo sapien
ccatccttacacacgggccacgcta

SEQ ID NO: 1705767 - DNA, 25 bp, Homo sapien
tttcatgccatccttacacacgggc

SEQ ID NO: 1705768 - DNA, 25 bp, Homo sapien
gccatccttacacacgggccacgct

SEQ ID NO: 1705769 - DNA, 25 bp, Homo sapien
caaaagtccatcaatgatacaccag

SEQ ID NO: 1705770 - DNA, 25 bp, Homo sapien
aatggactaaggttcatatctgttc

SEQ ID NO: 1705771 - DNA, 25 bp, Homo sapien
tctgttcatgaaccttagtccatga

SEQ ID NO: 1705772 - DNA, 25 bp, Homo sapien
ttagtccatgaacagacaattctta

SEQ ID NO: 1705773 - DNA, 25 bp, Homo sapien
tccagcacgctgtcaggttataaaa

SEQ ID NO: 1705774 - DNA, 25 bp, Homo sapien
gaagttccagcacgctgtcaggtta

SEQ ID NO: 1705775 - DNA, 25 bp, Homo sapien
gagaagttccagcacgctgtcaggt

SEQ ID NO: 1705776 - DNA, 25 bp, Homo sapien
gcagagaagttccagcacgctgtca

SEQ ID NO: 1705777 - DNA, 25 bp, Homo sapien
cctctccaccgagccacctgagtgt

SEQ ID NO: 1705778 - DNA, 25 bp, Homo sapien
ttacaagaaggctcattacatggct

SEQ ID NO: 1705779 - DNA, 25 bp, Homo sapien
ttgcatattatcttacaggtcagga

SEQ ID NO: 1705780 - DNA, 25 bp, Homo sapien
aaacaacaattgcatattatcttac

SEQ ID NO: 1705781 - DNA, 25 bp, Homo sapien
tacatatattcactttccagggaga

SEQ ID NO: 1705782 - DNA, 25 bp, Homo sapien
gatgccctagtcactggaagtccct

SEQ ID NO: 1705783 - DNA, 25 bp, Homo sapien
aatcgggttggtgcctcaggataca

SEQ ID NO: 1705784 - DNA, 25 bp, Homo sapien
cagttccagttagaaaagccacagg

SEQ ID NO: 1705785 - DNA, 25 bp, Homo sapien
taagcagttactacccatttttcac

SEQ ID NO: 1705786 - DNA, 25 bp, Homo sapien
tactccccaggtaatctactttctg

SEQ ID NO: 1705787 - DNA, 25 bp, Homo sapien
ttcatcgccctaaacgaaacttcat

SEQ ID NO: 1705788 - DNA, 25 bp, Homo sapien
tttagagttcttccatgtcatagca

SEQ ID NO: 1705789 - DNA, 25 bp, Homo sapien
tccaggatggcagacgtcagaggca

SEQ ID NO: 1705790 - DNA, 25 bp, Homo sapien
tcgcggtcccatgcggatcactcat

SEQ ID NO: 1705791 - DNA, 25 bp, Homo sapien
gcagacgtcagaggcatcgcggtcc

SEQ ID NO: 1705792 - DNA, 25 bp, Homo sapien
tcatgaacagcactctgaacttgct

SEQ ID NO: 1705793 - DNA, 25 bp, Homo sapien
gaagataaactatatgtggaagaca

SEQ ID NO: 1705794 - DNA, 25 bp, Homo sapien
aataaacaaatataagcagtacatg

SEQ ID NO: 1705795 - DNA, 25 bp, Homo sapien
tataagcagtacatgtaacacagta

SEQ ID NO: 1705796 - DNA, 25 bp, Homo sapien
attgttagagcaaaataaagtgcac

SEQ ID NO: 1705797 - DNA, 25 bp, Homo sapien
ttctggcctcaaatgatccactcgc

SEQ ID NO: 1705798 - DNA, 25 bp, Homo sapien
cttctggcctcaaatgatccactcg

SEQ ID NO: 1705799 - DNA, 25 bp, Homo sapien
tctggcctcaaatgatccactcgcc

SEQ ID NO: 1705800 - DNA, 25 bp, Homo sapien
tatgtccgtgaaacacttgtcttcc

SEQ ID NO: 1705801 - DNA, 25 bp, Homo sapien
cactgagatttgttggcgtgaacaa

SEQ ID NO: 1705802 - DNA, 25 bp, Homo sapien
gtgagtagtacagccatccttgttt

SEQ ID NO: 1705803 - DNA, 25 bp, Homo sapien
ctggtgacttctcatgtgttaggga

SEQ ID NO: 1705804 - DNA, 25 bp, Homo sapien
tgaagaatacaagcagatctccact

SEQ ID NO: 1705805 - DNA, 25 bp, Homo sapien
taccctgtaacagtcaatctgatgg

SEQ ID NO: 1705806 - DNA, 25 bp, Homo sapien
tgtctgcctcggtgccgcagagctg

SEQ ID NO: 1705807 - DNA, 25 bp, Homo sapien
ggactttggaaatctcactagctga

SEQ ID NO: 1705808 - DNA, 25 bp, Homo sapien
ggagccaagcccatttcactgactg

SEQ ID NO: 1705809 - DNA, 25 bp, Homo sapien
gctcagaagctacattgaagccgaa

SEQ ID NO: 1705810 - DNA, 25 bp, Homo sapien
tagcaagccgaaatgagcaagcaag

SEQ ID NO: 1705811 - DNA, 25 bp, Homo sapien
gaagccgaactacatcaacgtttgg

SEQ ID NO: 1705812 - DNA, 25 bp, Homo sapien
cttgtgctcgacagacccaggctga

SEQ ID NO: 1705813 - DNA, 25 bp, Homo sapien
aggctgaaggcagttctccgtgtcc

SEQ ID NO: 1705814 - DNA, 25 bp, Homo sapien
ggctgaaggcagttctccgtgtcct

SEQ ID NO: 1705815 - DNA, 25 bp, Homo sapien
caggctgaaggcagttctccgtgtc

SEQ ID NO: 1705816 - DNA, 25 bp, Homo sapien
ttgggagtcagtagagctcgggagt

SEQ ID NO: 1705817 - DNA, 25 bp, Homo sapien
gtcagtagagctcgggagtgaggca

SEQ ID NO: 1705818 - DNA, 25 bp, Homo sapien
ctgttgggagtcagtagagctcggg

SEQ ID NO: 1705819 - DNA, 25 bp, Homo sapien
gagtcagtagagctcgggagtgagg

SEQ ID NO: 1705820 - DNA, 25 bp, Homo sapien
ctttgatagcccatgattcctgagc

SEQ ID NO: 1705821 - DNA, 25 bp, Homo sapien
tgagcgctcatcagcacagctatga

SEQ ID NO: 1705822 - DNA, 25 bp, Homo sapien
gattcctgagcgctcatcagcacag

SEQ ID NO: 1705823 - DNA, 25 bp, Homo sapien
tcagcacagctatgatgaaaaatcc

SEQ ID NO: 1705824 - DNA, 25 bp, Homo sapien
gtgctcaatatataccgacaggatt

SEQ ID NO: 1705825 - DNA, 25 bp, Homo sapien
gcaccaatgttgctctggagatgag

SEQ ID NO: 1705826 - DNA, 25 bp, Homo sapien
tcagataagaacagggctaataact

SEQ ID NO: 1705827 - DNA, 25 bp, Homo sapien
gaatggctatcactgtcccatgagg

SEQ ID NO: 1705828 - DNA, 25 bp, Homo sapien
gcctctgtggagtgtatcgatgagt

SEQ ID NO: 1705829 - DNA, 25 bp, Homo sapien
gctacacttggagagtatgctgcct

SEQ ID NO: 1705830 - DNA, 25 bp, Homo sapien
tcttaatgctccttaaattgggact

SEQ ID NO: 1705831 - DNA, 25 bp, Homo sapien
cattgagaataaccaacaccaaggg

SEQ ID NO: 1705832 - DNA, 25 bp, Homo sapien
ggagcgctttgtcatgatttccagg

SEQ ID NO: 1705833 - DNA, 25 bp, Homo sapien
tagaactcggcctggatgatcacat

SEQ ID NO: 1705834 - DNA, 25 bp, Homo sapien
tatgttggccaatgcaccttgagcc

SEQ ID NO: 1705835 - DNA, 25 bp, Homo sapien
tgatcggagtatagttggagcgctt

SEQ ID NO: 1705836 - DNA, 25 bp, Homo sapien
gggctgttcgtgagcacagttacct

SEQ ID NO: 1705837 - DNA, 25 bp, Homo sapien
gatgaggacgttgggctctctcagt

SEQ ID NO: 1705838 - DNA, 25 bp, Homo sapien
gaaacagatgaggacgttgggctct

SEQ ID NO: 1705839 - DNA, 25 bp, Homo sapien
agttccacagggctgttcgtgagca

SEQ ID NO: 1705840 - DNA, 25 bp, Homo sapien
tccatttcgaagccacgtgacattg

SEQ ID NO: 1705841 - DNA, 25 bp, Homo sapien
gtgacaggttttccatttcgaagcc

SEQ ID NO: 1705842 - DNA, 25 bp, Homo sapien
catttcgaagccacgtgacattgac

SEQ ID NO: 1705843 - DNA, 25 bp, Homo sapien
ccatttcgaagccacgtgacattga

SEQ ID NO: 1705844 - DNA, 25 bp, Homo sapien
accctgcagtcgtaaacgtcctcag

SEQ ID NO: 1705845 - DNA, 25 bp, Homo sapien
taaacgtcctcagttgagggcagga

SEQ ID NO: 1705846 - DNA, 25 bp, Homo sapien
cccagtgcttgagaagaggctcatc

SEQ ID NO: 1705847 - DNA, 25 bp, Homo sapien
cttgcggaaaaggtggtcttccctg

SEQ ID NO: 1705848 - DNA, 25 bp, Homo sapien
caagcatcataggaggaaaccttga

SEQ ID NO: 1705849 - DNA, 25 bp, Homo sapien
acaagcatcataggaggaaaccttg

SEQ ID NO: 1705850 - DNA, 25 bp, Homo sapien
aggccccctgcgttctgctgcattg

SEQ ID NO: 1705851 - DNA, 25 bp, Homo sapien
tgaagatggtcccaataatgatgcc

SEQ ID NO: 1705852 - DNA, 25 bp, Homo sapien
caccacgttctctgtagtctctggg

SEQ ID NO: 1705853 - DNA, 25 bp, Homo sapien
tgcgcaatcccttgatgatgaagat

SEQ ID NO: 1705854 - DNA, 25 bp, Homo sapien
ctatagcaagacacacatagttacc

SEQ ID NO: 1705855 - DNA, 25 bp, Homo sapien
cagttttgagctccttgcttcagat

SEQ ID NO: 1705856 - DNA, 25 bp, Homo sapien
tcaatgttcatctaacctttccaac

SEQ ID NO: 1705857 - DNA, 25 bp, Homo sapien
catagttaccaaggagtttaagatc

SEQ ID NO: 1705858 - DNA, 25 bp, Homo sapien
tggctatagggctggaaaatgctga

SEQ ID NO: 1705859 - DNA, 25 bp, Homo sapien
tgatcttctctctaagaaacaccat

SEQ ID NO: 1705860 - DNA, 25 bp, Homo sapien
gatgttagagtatggagcaatcgag

SEQ ID NO: 1705861 - DNA, 25 bp, Homo sapien
tcgaggaggcataaccactcttggg

SEQ ID NO: 1705862 - DNA, 25 bp, Homo sapien
tttattccagaggcattgcatggtg

SEQ ID NO: 1705863 - DNA, 25 bp, Homo sapien
agagacagactcctgtatgttttat

SEQ ID NO: 1705864 - DNA, 25 bp, Homo sapien
gttttattccagaggcattgcatgg

SEQ ID NO: 1705865 - DNA, 25 bp, Homo sapien
agacagactcctgtatgttttattc

SEQ ID NO: 1705866 - DNA, 25 bp, Homo sapien
tacacaagagatgccccatggggca

SEQ ID NO: 1705867 - DNA, 25 bp, Homo sapien
tcacagtttgaggaaaccttaaaca

SEQ ID NO: 1705868 - DNA, 25 bp, Homo sapien
taaacaataagtacacaagagatgc

SEQ ID NO: 1705869 - DNA, 25 bp, Homo sapien
cattcagatattttaccgggaaagg

SEQ ID NO: 1705870 - DNA, 25 bp, Homo sapien
gaaaggatcacatatattccccagg

SEQ ID NO: 1705871 - DNA, 25 bp, Homo sapien
gatcacatatattccccaggaccga

SEQ ID NO: 1705872 - DNA, 25 bp, Homo sapien
tattttaccgggaaaggatcacata

SEQ ID NO: 1705873 - DNA, 25 bp, Homo sapien
gataccagtgaaaacatagctagta

SEQ ID NO: 1705874 - DNA, 25 bp, Homo sapien
gacaaatgagcaacagttcatcgtg

SEQ ID NO: 1705875 - DNA, 25 bp, Homo sapien
gaggctaagttaagtaagataccag

SEQ ID NO: 1705876 - DNA, 25 bp, Homo sapien
tatcttagtggtttatggcaggttc

SEQ ID NO: 1705877 - DNA, 25 bp, Homo sapien
ttggcctgaagtcccagcattgatg

SEQ ID NO: 1705878 - DNA, 25 bp, Homo sapien
tggcagcgcctcatcttcaactttt

SEQ ID NO: 1705879 - DNA, 25 bp, Homo sapien
gacctagttgctactggttcagcaa

SEQ ID NO: 1705880 - DNA, 25 bp, Homo sapien
tgcccttggcctgaagtcccagcat

SEQ ID NO: 1705881 - DNA, 25 bp, Homo sapien
gcgataggtgactgtcccatgtggg

SEQ ID NO: 1705882 - DNA, 25 bp, Homo sapien
ataggtgactgtcccatgtggggtg

SEQ ID NO: 1705883 - DNA, 25 bp, Homo sapien
tggcgataggtgactgtcccatgtg

SEQ ID NO: 1705884 - DNA, 25 bp, Homo sapien
cttggcgataggtgactgtcccatg

SEQ ID NO: 1705885 - DNA, 25 bp, Homo sapien
cagtggctcagtccaggggttcttg

SEQ ID NO: 1705886 - DNA, 25 bp, Homo sapien
tgggtattgggcgatgacctctcta

SEQ ID NO: 1705887 - DNA, 25 bp, Homo sapien
tattgggcgatgacctctctagcta

SEQ ID NO: 1705888 - DNA, 25 bp, Homo sapien
cagtgaaagggtcagtggctcagtc

SEQ ID NO: 1705889 - DNA, 25 bp, Homo sapien
gctggaaacagttcctcggagtgga

SEQ ID NO: 1705890 - DNA, 25 bp, Homo sapien
ggactatgtatcctgcaaagaccca

SEQ ID NO: 1705891 - DNA, 25 bp, Homo sapien
aaggctgcggtggtctccataggcc

SEQ ID NO: 1705892 - DNA, 25 bp, Homo sapien
aagtcaggtggttccggaatggtca

SEQ ID NO: 1705893 - DNA, 25 bp, Homo sapien
cgcctgtgtgactggatcgttcgtg

SEQ ID NO: 1705894 - DNA, 25 bp, Homo sapien
gtccccacagcacgtttcttggagt

SEQ ID NO: 1705895 - DNA, 25 bp, Homo sapien
ggagtactctacgtctgagtgtcat

SEQ ID NO: 1705896 - DNA, 25 bp, Homo sapien
tgactggatcgttcgtgtccccaca

SEQ ID NO: 1705897 - DNA, 25 bp, Homo sapien
cctgcatggcagttctgacagtgac

SEQ ID NO: 1705898 - DNA, 25 bp, Homo sapien
aagttttataacactttctctgatg

SEQ ID NO: 1705899 - DNA, 25 bp, Homo sapien
tgatgattctttatattccttgtta

SEQ ID NO: 1705900 - DNA, 25 bp, Homo sapien
agttttataacactttctctgatga

SEQ ID NO: 1705901 - DNA, 25 bp, Homo sapien
tctctgatgattctttatattcctt

SEQ ID NO: 1705902 - DNA, 25 bp, Homo sapien
tgaataaactgcacaataaaaaata

SEQ ID NO: 1705903 - DNA, 25 bp, Homo sapien
aaaaataataggaggccgggcgcag

SEQ ID NO: 1705904 - DNA, 25 bp, Homo sapien
ttgggaggccaaggtgggcagatca

SEQ ID NO: 1705905 - DNA, 25 bp, Homo sapien
ggctcacacctgtaatcccagcact

SEQ ID NO: 1705906 - DNA, 25 bp, Homo sapien
actcattatccagcaggggggctga

SEQ ID NO: 1705907 - DNA, 25 bp, Homo sapien
tctttatgtactgggcaggttcagc

SEQ ID NO: 1705908 - DNA, 25 bp, Homo sapien
tttggcagatatagggggcctgtct

SEQ ID NO: 1705909 - DNA, 25 bp, Homo sapien
ctctgtagcatcaataggtttggca

SEQ ID NO: 1705910 - DNA, 25 bp, Homo sapien
tagcagttgctgttctgagttgtag

SEQ ID NO: 1705911 - DNA, 25 bp, Homo sapien
tgaggacctcgagacaaggcaatct

SEQ ID NO: 1705912 - DNA, 25 bp, Homo sapien
ggacctcgagacaaggcaatctgaa

SEQ ID NO: 1705913 - DNA, 25 bp, Homo sapien
acctcgagacaaggcaatctgaaga

SEQ ID NO: 1705914 - DNA, 25 bp, Homo sapien
gctcatcacggtggtcagggcaagg

SEQ ID NO: 1705915 - DNA, 25 bp, Homo sapien
tggtcagggcaagggcccccagcat

SEQ ID NO: 1705916 - DNA, 25 bp, Homo sapien
tccacaggggctcatcacggtggtc

SEQ ID NO: 1705917 - DNA, 25 bp, Homo sapien
gcatcagagctttgtttaggatcat

SEQ ID NO: 1705918 - DNA, 25 bp, Homo sapien
gaatagcatccttagtgaacgccaa

SEQ ID NO: 1705919 - DNA, 25 bp, Homo sapien
aagcgctactacaggagacatccga

SEQ ID NO: 1705920 - DNA, 25 bp, Homo sapien
gatggaatcatttaccccaagcgct

SEQ ID NO: 1705921 - DNA, 25 bp, Homo sapien
gaatgacatagagacctccaggcta

SEQ ID NO: 1705922 - DNA, 25 bp, Homo sapien
caccacacctggctaatttttattt

SEQ ID NO: 1705923 - DNA, 25 bp, Homo sapien
cagtcctcccactgcagccttctga

SEQ ID NO: 1705924 - DNA, 25 bp, Homo sapien
gagccaccatgtctggcccactttt

SEQ ID NO: 1705925 - DNA, 25 bp, Homo sapien
gtagctggcaccacaggcatgcacc

SEQ ID NO: 1705926 - DNA, 25 bp, Homo sapien
tgcctaatggatgagccgagcctga

SEQ ID NO: 1705927 - DNA, 25 bp, Homo sapien
gaacaaaatcagaatgggagcagcc

SEQ ID NO: 1705928 - DNA, 25 bp, Homo sapien
tggacaggcacactagcagaatcat

SEQ ID NO: 1705929 - DNA, 25 bp, Homo sapien
taccgtttccgtcactagtctgagc

SEQ ID NO: 1705930 - DNA, 25 bp, Homo sapien
tcctctaatgggcagtgtgcttgtc

SEQ ID NO: 1705931 - DNA, 25 bp, Homo sapien
ccagagcagaatggcagccgtgcaa

SEQ ID NO: 1705932 - DNA, 25 bp, Homo sapien
ccaaatgagccgaactggacattcc

SEQ ID NO: 1705933 - DNA, 25 bp, Homo sapien
tgtcaagacgtgtaagccttttacc

SEQ ID NO: 1705934 - DNA, 25 bp, Homo sapien
taatgtctgctaacaattgtagggt

SEQ ID NO: 1705935 - DNA, 25 bp, Homo sapien
tctgaaatgaagagtggaagctcta

SEQ ID NO: 1705936 - DNA, 25 bp, Homo sapien
tccttagaggagagcaactgatttc

SEQ ID NO: 1705937 - DNA, 25 bp, Homo sapien
cctctgaaggaggttactaaatgtc

SEQ ID NO: 1705938 - DNA, 25 bp, Homo sapien
aattgtctgagaacaggcaaacacc

SEQ ID NO: 1705939 - DNA, 25 bp, Homo sapien
taggacagcgatgtttgtcagtgca

SEQ ID NO: 1705940 - DNA, 25 bp, Homo sapien
tgtactggccagagggaccgtaaga

SEQ ID NO: 1705941 - DNA, 25 bp, Homo sapien
caagtttacaccataagaggcgacg

SEQ ID NO: 1705942 - DNA, 25 bp, Homo sapien
gaagtgtgaatagctctgccatgag

SEQ ID NO: 1705943 - DNA, 25 bp, Homo sapien
tgatgtgaagtgtgaatagctctgc

SEQ ID NO: 1705944 - DNA, 25 bp, Homo sapien
ctgcattacatcctggaagagccct

SEQ ID NO: 1705945 - DNA, 25 bp, Homo sapien
ctgccatgagcttctgcattacatc

SEQ ID NO: 1705946 - DNA, 25 bp, Homo sapien
atgttgtccacaagacagatgagga

SEQ ID NO: 1705947 - DNA, 25 bp, Homo sapien
ggctgacccagtgtcacgggagact

SEQ ID NO: 1705948 - DNA, 25 bp, Homo sapien
gtgtcacgggagacttggaaaacac

SEQ ID NO: 1705949 - DNA, 25 bp, Homo sapien
tgtccacaagacagatgaggatgtt

SEQ ID NO: 1705950 - DNA, 25 bp, Homo sapien
ggagggttggctctgcaaagactca

SEQ ID NO: 1705951 - DNA, 25 bp, Homo sapien
tatgaagtcgttgaggtcagaaagc

SEQ ID NO: 1705952 - DNA, 25 bp, Homo sapien
catcaaaaagtggtggaactcatcc

SEQ ID NO: 1705953 - DNA, 25 bp, Homo sapien
gaagtctatcattagaaaaccatga

SEQ ID NO: 1705954 - DNA, 25 bp, Homo sapien
accaactgaacgcaggcctcggatg

SEQ ID NO: 1705955 - DNA, 25 bp, Homo sapien
aagcaccaactgaacgcaggcctcg

SEQ ID NO: 1705956 - DNA, 25 bp, Homo sapien
gcaccaactgaacgcaggcctcgga

SEQ ID NO: 1705957 - DNA, 25 bp, Homo sapien
caactgaacgcaggcctcggatgat

SEQ ID NO: 1705958 - DNA, 25 bp, Homo sapien
aggccgctcctatgtcatcatcatg

SEQ ID NO: 1705959 - DNA, 25 bp, Homo sapien
gacagacatgagatggatgggtcct

SEQ ID NO: 1705960 - DNA, 25 bp, Homo sapien
ccttcctctcatactgcggattcag

SEQ ID NO: 1705961 - DNA, 25 bp, Homo sapien
tactgcggattcagctctaacaaat

SEQ ID NO: 1705962 - DNA, 25 bp, Homo sapien
ctcttctgctcctgtagatggcgat

SEQ ID NO: 1705963 - DNA, 25 bp, Homo sapien
agcaatttaagtcccacagaagagg

SEQ ID NO: 1705964 - DNA, 25 bp, Homo sapien
agctctgagcagatatagcaattta

SEQ ID NO: 1705965 - DNA, 25 bp, Homo sapien
ggccagaaaataatgctaggtcatg

SEQ ID NO: 1705966 - DNA, 25 bp, Homo sapien
ctgggtggcttactccaggcaactc

SEQ ID NO: 1705967 - DNA, 25 bp, Homo sapien
gttgcttccatggagattatagatg

SEQ ID NO: 1705968 - DNA, 25 bp, Homo sapien
tccaggcaactcttagtaggtaaca

SEQ ID NO: 1705969 - DNA, 25 bp, Homo sapien
tgcttccatggagattatagatgga

SEQ ID NO: 1705970 - DNA, 25 bp, Homo sapien
gatgaaagatggaaaaatttgacat

SEQ ID NO: 1705971 - DNA, 25 bp, Homo sapien
ggatgaaagatggaaaaatttgaca

SEQ ID NO: 1705972 - DNA, 25 bp, Homo sapien
tggatgaaagatggaaaaatttgac

SEQ ID NO: 1705973 - DNA, 25 bp, Homo sapien
ctggatgaaagatggaaaaatttga

SEQ ID NO: 1705974 - DNA, 25 bp, Homo sapien
tgttaaattggcttgaaacaagaga

SEQ ID NO: 1705975 - DNA, 25 bp, Homo sapien
gcttctgtgttactggacatgacaa

SEQ ID NO: 1705976 - DNA, 25 bp, Homo sapien
aattcttagccacggtttcagtcag

SEQ ID NO: 1705977 - DNA, 25 bp, Homo sapien
aggcagagggtatccattaacttca

SEQ ID NO: 1705978 - DNA, 25 bp, Homo sapien
ccttgaataaacacttacgggccat

SEQ ID NO: 1705979 - DNA, 25 bp, Homo sapien
ttctcctaggagttggcgaatccaa

SEQ ID NO: 1705980 - DNA, 25 bp, Homo sapien
cacacagtgggcgagttagcattac

SEQ ID NO: 1705981 - DNA, 25 bp, Homo sapien
cagactgtgcctctattctagggct

SEQ ID NO: 1705982 - DNA, 25 bp, Homo sapien
cacagtatttcttgaggactgagtc

SEQ ID NO: 1705983 - DNA, 25 bp, Homo sapien
aatcatgcaggttgatctgtaaccc

SEQ ID NO: 1705984 - DNA, 25 bp, Homo sapien
gaccctacatttttagctgacaaaa

SEQ ID NO: 1705985 - DNA, 25 bp, Homo sapien
tgtatagtaatgtcaataatgaccc

SEQ ID NO: 1705986 - DNA, 25 bp, Homo sapien
actatgtgccagtacagactgtaag

SEQ ID NO: 1705987 - DNA, 25 bp, Homo sapien
taattgttaacacctactgactact

SEQ ID NO: 1705988 - DNA, 25 bp, Homo sapien
ccctgtggtgtcatccgctatggga

SEQ ID NO: 1705989 - DNA, 25 bp, Homo sapien
aaatccctagtttgtttgtggcaag

SEQ ID NO: 1705990 - DNA, 25 bp, Homo sapien
ttccttaatacagtcggtgtcaatt

SEQ ID NO: 1705991 - DNA, 25 bp, Homo sapien
cagcaatgctattaccacactaaaa

SEQ ID NO: 1705992 - DNA, 25 bp, Homo sapien
gattgcctcatatcaatttggttca

SEQ ID NO: 1705993 - DNA, 25 bp, Homo sapien
cataacagcaatgctattaccacac

SEQ ID NO: 1705994 - DNA, 25 bp, Homo sapien
tgctccccagggttatagtctgaat

SEQ ID NO: 1705995 - DNA, 25 bp, Homo sapien
gtcattcaccatagggatcaaaagg

SEQ ID NO: 1705996 - DNA, 25 bp, Homo sapien
caaagaggcaccaacacttgagatt

SEQ ID NO: 1705997 - DNA, 25 bp, Homo sapien
tgcaggtcctcagacagggacactg

SEQ ID NO: 1705998 - DNA, 25 bp, Homo sapien
tgtgtctctttgtccctgtatagtt

SEQ ID NO: 1705999 - DNA, 25 bp, Homo sapien
ctgtatagttctttctgcgtgtctc

SEQ ID NO: 1706000 - DNA, 25 bp, Homo sapien
gcctagagtcaagttgatttcagaa

SEQ ID NO: 1706001 - DNA, 25 bp, Homo sapien
tcagaagtgactagttccagataca

SEQ ID NO: 1706002 - DNA, 25 bp, Homo sapien
catattgatgttcagtgcagtggcc

SEQ ID NO: 1706003 - DNA, 25 bp, Homo sapien
tgaggcggatggctgtgaccctact

SEQ ID NO: 1706004 - DNA, 25 bp, Homo sapien
ttgaggtgacccagccaacctgtgc

SEQ ID NO: 1706005 - DNA, 25 bp, Homo sapien
cagtggcctgagaatatcccagcct

SEQ ID NO: 1706006 - DNA, 25 bp, Homo sapien
tagtcaactgtacagaaggctgggc

SEQ ID NO: 1706007 - DNA, 25 bp, Homo sapien
gattttcacaaagaaggagtccaca

SEQ ID NO: 1706008 - DNA, 25 bp, Homo sapien
tccttctggtgacagggtggctcct

SEQ ID NO: 1706009 - DNA, 25 bp, Homo sapien
tgaccgtccctactaatggcagtgg

SEQ ID NO: 1706010 - DNA, 25 bp, Homo sapien
catgtgcttgaattgaatgctgtag

SEQ ID NO: 1706011 - DNA, 25 bp, Homo sapien
acactcccctagttcagagcccggt

SEQ ID NO: 1706012 - DNA, 25 bp, Homo sapien
gcataagaagactctattgtgaaca

SEQ ID NO: 1706013 - DNA, 25 bp, Homo sapien
acagatgcataagaagactctattg

SEQ ID NO: 1706014 - DNA, 25 bp, Homo sapien
cttgaatgagcattcaggaaggctt

SEQ ID NO: 1706015 - DNA, 25 bp, Homo sapien
attcaggaaggcttcataacctctc

SEQ ID NO: 1706016 - DNA, 25 bp, Homo sapien
cattcaggaaggcttcataacctct

SEQ ID NO: 1706017 - DNA, 25 bp, Homo sapien
gagcattcaggaaggcttcataacc

SEQ ID NO: 1706018 - DNA, 25 bp, Homo sapien
ttcctttatctctcgccatgtggca

SEQ ID NO: 1706019 - DNA, 25 bp, Homo sapien
cctgtgaggtccgattgttaaaaag

SEQ ID NO: 1706020 - DNA, 25 bp, Homo sapien
catcttctcacactattagttcctg

SEQ ID NO: 1706021 - DNA, 25 bp, Homo sapien
ttatctcacggcagtttattaggaa

SEQ ID NO: 1706022 - DNA, 25 bp, Homo sapien
tcccaaggcagcctcagcagttgct

SEQ ID NO: 1706023 - DNA, 25 bp, Homo sapien
ctgctctgagctgtagagcaattgt

SEQ ID NO: 1706024 - DNA, 25 bp, Homo sapien
gctctgagctgtagagcaattgtga

SEQ ID NO: 1706025 - DNA, 25 bp, Homo sapien
tctgagctgtagagcaattgtgagg

SEQ ID NO: 1706026 - DNA, 25 bp, Homo sapien
cacggcagtcagggcgagggccccc

SEQ ID NO: 1706027 - DNA, 25 bp, Homo sapien
acggcagtcagggcgagggccccca

SEQ ID NO: 1706028 - DNA, 25 bp, Homo sapien
atcacggcagtcagggcgagggccc

SEQ ID NO: 1706029 - DNA, 25 bp, Homo sapien
tcacggcagtcagggcgagggcccc

SEQ ID NO: 1706030 - DNA, 25 bp, Homo sapien
agcatgactgccctggttggttact

SEQ ID NO: 1706031 - DNA, 25 bp, Homo sapien
tatgtggaatacatgcaatccttct

SEQ ID NO: 1706032 - DNA, 25 bp, Homo sapien
cttaacaggccaccaacaaagactc

SEQ ID NO: 1706033 - DNA, 25 bp, Homo sapien
tatccttacaataaactttgactcc

SEQ ID NO: 1706034 - DNA, 25 bp, Homo sapien
ggtgacaagcaggagggtggaacac

SEQ ID NO: 1706035 - DNA, 25 bp, Homo sapien
aaggtgacaagcaggagggtggaac

SEQ ID NO: 1706036 - DNA, 25 bp, Homo sapien
gaaggtgacaagcaggagggtggaa

SEQ ID NO: 1706037 - DNA, 25 bp, Homo sapien
tgaaggtgacaagcaggagggtgga

SEQ ID NO: 1706038 - DNA, 25 bp, Homo sapien
aagttcacaccataggaggcaacat

SEQ ID NO: 1706039 - DNA, 25 bp, Homo sapien
cacaccataggaggcaacatggtca

SEQ ID NO: 1706040 - DNA, 25 bp, Homo sapien
gagactggtagaagttcacaccata

SEQ ID NO: 1706041 - DNA, 25 bp, Homo sapien
ggaccgtgagactggtagaagttca

SEQ ID NO: 1706042 - DNA, 25 bp, Homo sapien
agtctctttcgtctccaggtccacg

SEQ ID NO: 1706043 - DNA, 25 bp, Homo sapien
gacagtctctttcgtctccaggtcc

SEQ ID NO: 1706044 - DNA, 25 bp, Homo sapien
tctctttcgtctccaggtccacgta

SEQ ID NO: 1706045 - DNA, 25 bp, Homo sapien
ccagacagtctctttcgtctccagg

SEQ ID NO: 1706046 - DNA, 25 bp, Homo sapien
taaatttgctaaacataggcaactg

SEQ ID NO: 1706047 - DNA, 25 bp, Homo sapien
gcactctgcgggtcaaaacttataa

SEQ ID NO: 1706048 - DNA, 25 bp, Homo sapien
gcagcggtagagttggactgtctca

SEQ ID NO: 1706049 - DNA, 25 bp, Homo sapien
aattccaaggtgtgttttcccacag

SEQ ID NO: 1706050 - DNA, 25 bp, Homo sapien
tgtccacaagacagatgagggtgtt

SEQ ID NO: 1706051 - DNA, 25 bp, Homo sapien
gctgacccagcgtcacaggaaactt

SEQ ID NO: 1706052 - DNA, 25 bp, Homo sapien
atgttgtccacaagacagatgaggg

SEQ ID NO: 1706053 - DNA, 25 bp, Homo sapien
ggtgttgggctgacccagcgtcaca

SEQ ID NO: 1706054 - DNA, 25 bp, Homo sapien
accaactgaacgcaggccttggatg

SEQ ID NO: 1706055 - DNA, 25 bp, Homo sapien
aagcaccaactgaacgcaggccttg

SEQ ID NO: 1706056 - DNA, 25 bp, Homo sapien
gcaccaactgaacgcaggccttgga

SEQ ID NO: 1706057 - DNA, 25 bp, Homo sapien
caactgaacgcaggccttggatgat

SEQ ID NO: 1706058 - DNA, 25 bp, Homo sapien
cagacatgagatcgatgggtctgag

SEQ ID NO: 1706059 - DNA, 25 bp, Homo sapien
catgccacttcccaattcgcctaca

SEQ ID NO: 1706060 - DNA, 25 bp, Homo sapien
tcctccctctcatactgaggtttca

SEQ ID NO: 1706061 - DNA, 25 bp, Homo sapien
ttcgcctacaactttcaaccacatt

SEQ ID NO: 1706062 - DNA, 25 bp, Homo sapien
tcttctcctgtagatggtgatgcac

SEQ ID NO: 1706063 - DNA, 25 bp, Homo sapien
ttcttcttctcctgtagatggtgat

SEQ ID NO: 1706064 - DNA, 25 bp, Homo sapien
atttagcaagtccattcttcttctc

SEQ ID NO: 1706065 - DNA, 25 bp, Homo sapien
tcatttagcaagtccattcttcttc

SEQ ID NO: 1706066 - DNA, 25 bp, Homo sapien
gaatatagcaccttaagtcccagag

SEQ ID NO: 1706067 - DNA, 25 bp, Homo sapien
gagtggcttactcaggcatccctta

SEQ ID NO: 1706068 - DNA, 25 bp, Homo sapien
agggatatgataaatcaggccagag

SEQ ID NO: 1706069 - DNA, 25 bp, Homo sapien
gattttagataaaggtcattgagga

SEQ ID NO: 1706070 - DNA, 25 bp, Homo sapien
taagttatgctctcagtcagccctg

SEQ ID NO: 1706071 - DNA, 25 bp, Homo sapien
gatacactgtacttggttgctcctg

SEQ ID NO: 1706072 - DNA, 25 bp, Homo sapien
ggcctaaaacataagagtcacccat

SEQ ID NO: 1706073 - DNA, 25 bp, Homo sapien
tcagccctgagatgaaagatgggaa

SEQ ID NO: 1706074 - DNA, 25 bp, Homo sapien
tgaattttgggacggcatatacagt

SEQ ID NO: 1706075 - DNA, 25 bp, Homo sapien
ttctcactaagacctcatgtggcag

SEQ ID NO: 1706076 - DNA, 25 bp, Homo sapien
tatacagtccacaccaggaagttct

SEQ ID NO: 1706077 - DNA, 25 bp, Homo sapien
ggtactgtcaccttgggcgttacga

SEQ ID NO: 1706078 - DNA, 25 bp, Homo sapien
cccggccctatgtggaaacagcatt

SEQ ID NO: 1706079 - DNA, 25 bp, Homo sapien
tctaatggtcccagaagaaactggg

SEQ ID NO: 1706080 - DNA, 25 bp, Homo sapien
cacccagggatagccacttggaatc

SEQ ID NO: 1706081 - DNA, 25 bp, Homo sapien
ccatggactcttaggaattagactc

SEQ ID NO: 1706082 - DNA, 25 bp, Homo sapien
ttttgaccttccactagaccatgag

SEQ ID NO: 1706083 - DNA, 25 bp, Homo sapien
gcacctgggcggaaagccatatatc

SEQ ID NO: 1706084 - DNA, 25 bp, Homo sapien
ccaggaggccttacttatgtcgtca

SEQ ID NO: 1706085 - DNA, 25 bp, Homo sapien
gctttatatctgctacctggccgag

SEQ ID NO: 1706086 - DNA, 25 bp, Homo sapien
ccataaaccctaatccataatccca

SEQ ID NO: 1706087 - DNA, 25 bp, Homo sapien
taaaccctaatccataatcccatca

SEQ ID NO: 1706088 - DNA, 25 bp, Homo sapien
aaccctaatccataatcccatcaag

SEQ ID NO: 1706089 - DNA, 25 bp, Homo sapien
cataaaccctaatccataatcccat

SEQ ID NO: 1706090 - DNA, 25 bp, Homo sapien
gaagtgcatcttctgcgtgttctct

SEQ ID NO: 1706091 - DNA, 25 bp, Homo sapien
gttctctatttgaacaagcatttcc

SEQ ID NO: 1706092 - DNA, 25 bp, Homo sapien
agagagagtacgggctcagcagcca

SEQ ID NO: 1706093 - DNA, 25 bp, Homo sapien
cagaggaggccggtgaagtgcatct

SEQ ID NO: 1706094 - DNA, 25 bp, Homo sapien
tgggcttttgaaggcgcctgttcct

SEQ ID NO: 1706095 - DNA, 25 bp, Homo sapien
ttactgtaacccatcgccaagtggg

SEQ ID NO: 1706096 - DNA, 25 bp, Homo sapien
gcagagaagccggtccccagtgtga

SEQ ID NO: 1706097 - DNA, 25 bp, Homo sapien
tcgctttcttcggaagacccttgac

SEQ ID NO: 1706098 - DNA, 25 bp, Homo sapien
cacgcggcgggtatattctgttgca

SEQ ID NO: 1706099 - DNA, 25 bp, Homo sapien
gatggaccccgtggaaagattcaga

SEQ ID NO: 1706100 - DNA, 25 bp, Homo sapien
gaagctgcgcctttagatgacacga

SEQ ID NO: 1706101 - DNA, 25 bp, Homo sapien
gcacgctcttgtgggtgactacagg

SEQ ID NO: 1706102 - DNA, 25 bp, Homo sapien
gcccaggtcgtgtgacgtcgacagt

SEQ ID NO: 1706103 - DNA, 25 bp, Homo sapien
cagttgctgggtagatgaggccaac

SEQ ID NO: 1706104 - DNA, 25 bp, Homo sapien
ggaaacctcagaacagtaggcggga

SEQ ID NO: 1706105 - DNA, 25 bp, Homo sapien
ggtttagaggcgtgaaactccgcag

SEQ ID NO: 1706106 - DNA, 25 bp, Homo sapien
gagcaagtgccaggcgggaacagag

SEQ ID NO: 1706107 - DNA, 25 bp, Homo sapien
gggaacagagggactgggcgcgcct

SEQ ID NO: 1706108 - DNA, 25 bp, Homo sapien
aacagagggactgggcgcgcctcac

SEQ ID NO: 1706109 - DNA, 25 bp, Homo sapien
tggcctctccgaagtggcagatggg

SEQ ID NO: 1706110 - DNA, 25 bp, Homo sapien
ggtttcttatgtttccggcacacca

SEQ ID NO: 1706111 - DNA, 25 bp, Homo sapien
tttgcagcgcacttttcagctgcgg

SEQ ID NO: 1706112 - DNA, 25 bp, Homo sapien
tgctggcccataaacaccctgtagg

SEQ ID NO: 1706113 - DNA, 25 bp, Homo sapien
gaatgtacggaaagatgatcagcta

SEQ ID NO: 1706114 - DNA, 25 bp, Homo sapien
ggagtacaaacacaggatttgtaat

SEQ ID NO: 1706115 - DNA, 25 bp, Homo sapien
agtacaaacacaggatttgtaattc

SEQ ID NO: 1706116 - DNA, 25 bp, Homo sapien
tccttactgtaacggagtttagagc

SEQ ID NO: 1706117 - DNA, 25 bp, Homo sapien
ttactgtaacggagtttagagccag

SEQ ID NO: 1706118 - DNA, 25 bp, Homo sapien
cagtgatcctgtgaggtcagtccca

SEQ ID NO: 1706119 - DNA, 25 bp, Homo sapien
tctgtcacgtgtttcaccctagggt

SEQ ID NO: 1706120 - DNA, 25 bp, Homo sapien
tccaagctcctcgtgataatgcaga

SEQ ID NO: 1706121 - DNA, 25 bp, Homo sapien
gagcagctcctgtacgaaagccctg

SEQ ID NO: 1706122 - DNA, 25 bp, Homo sapien
gaataagctgctcatatagaggtca

SEQ ID NO: 1706123 - DNA, 25 bp, Homo sapien
catatagcttttgagtggcgcagcc

SEQ ID NO: 1706124 - DNA, 25 bp, Homo sapien
tggcgcagccttgacccaaattcag

SEQ ID NO: 1706125 - DNA, 25 bp, Homo sapien
gaatgctcatctctttactactaag

SEQ ID NO: 1706126 - DNA, 25 bp, Homo sapien
ttaatattaattaagctagtctgtt

SEQ ID NO: 1706127 - DNA, 25 bp, Homo sapien
taattaagctagtctgtttacatgc

SEQ ID NO: 1706128 - DNA, 25 bp, Homo sapien
atattaattaagctagtctgtttac

SEQ ID NO: 1706129 - DNA, 25 bp, Homo sapien
ttaattaagctagtctgtttacatg

SEQ ID NO: 1706130 - DNA, 25 bp, Homo sapien
ccctaccgccttcgttgtcagttat

SEQ ID NO: 1706131 - DNA, 25 bp, Homo sapien
gcggatagcaccaggctactgcact

SEQ ID NO: 1706132 - DNA, 25 bp, Homo sapien
gtcagttatgcagcggcactgcccg

SEQ ID NO: 1706133 - DNA, 25 bp, Homo sapien
cgggtccgcggatagcaccaggcta

SEQ ID NO: 1706134 - DNA, 25 bp, Homo sapien
ggtctgggcggtgggcctgagccgc

SEQ ID NO: 1706135 - DNA, 25 bp, Homo sapien
tgaagccattagctgcggcactggg

SEQ ID NO: 1706136 - DNA, 25 bp, Homo sapien
cagggcaacggttggctccaagagc

SEQ ID NO: 1706137 - DNA, 25 bp, Homo sapien
agagcgaaaacgcaggtgcccaggg

SEQ ID NO: 1706138 - DNA, 25 bp, Homo sapien
ctcgccagcgcaggatcagcctgtt

SEQ ID NO: 1706139 - DNA, 25 bp, Homo sapien
caatggctagctctaggtgtcccgc

SEQ ID NO: 1706140 - DNA, 25 bp, Homo sapien
acggcgtccgagtgccaatggctag

SEQ ID NO: 1706141 - DNA, 25 bp, Homo sapien
gacagtactgctacttctcgccgac

SEQ ID NO: 1706142 - DNA, 25 bp, Homo sapien
ctctcctcgccgcctggggcactgg

SEQ ID NO: 1706143 - DNA, 25 bp, Homo sapien
cctgggacagcgcacaacgcgcagc

SEQ ID NO: 1706144 - DNA, 25 bp, Homo sapien
ccaacctgggacagcgcacaacgcg

SEQ ID NO: 1706145 - DNA, 25 bp, Homo sapien
aacctgggacagcgcacaacgcgca

SEQ ID NO: 1706146 - DNA, 25 bp, Homo sapien
gcccagtggcaagtttatcaaaagt

SEQ ID NO: 1706147 - DNA, 25 bp, Homo sapien
aagtgctgttctacttcacccaggg

SEQ ID NO: 1706148 - DNA, 25 bp, Homo sapien
ctttagagtagcttcccgttgacgc

SEQ ID NO: 1706149 - DNA, 25 bp, Homo sapien
tcattgcgggttgcaagcgctggct

SEQ ID NO: 1706150 - DNA, 25 bp, Homo sapien
tctgagtatgctttccgacggaccg

SEQ ID NO: 1706151 - DNA, 25 bp, Homo sapien
tcttaccaggccgtaagttactctg

SEQ ID NO: 1706152 - DNA, 25 bp, Homo sapien
gacggaccgacttatcatgaataga

SEQ ID NO: 1706153 - DNA, 25 bp, Homo sapien
aacttcaagttagaggctattcctc

SEQ ID NO: 1706154 - DNA, 25 bp, Homo sapien
tctacttcctacttgccactgctca

SEQ ID NO: 1706155 - DNA, 25 bp, Homo sapien
tgcagatgtggtgtagacccaacac

SEQ ID NO: 1706156 - DNA, 25 bp, Homo sapien
gtaaatacatatctcagcagccagg

SEQ ID NO: 1706157 - DNA, 25 bp, Homo sapien
ggagccttaaagatcctcggttcaa

SEQ ID NO: 1706158 - DNA, 25 bp, Homo sapien
gaagcagcaaggaacacatacagat

SEQ ID NO: 1706159 - DNA, 25 bp, Homo sapien
gaggctcctacaggtagaagtgaag

SEQ ID NO: 1706160 - DNA, 25 bp, Homo sapien
gcccagctgtgatacaacacagaaa

SEQ ID NO: 1706161 - DNA, 25 bp, Homo sapien
ctgtgatacaacacagaaagaactg

SEQ ID NO: 1706162 - DNA, 25 bp, Homo sapien
acagcccagctgtgatacaacacag

SEQ ID NO: 1706163 - DNA, 25 bp, Homo sapien
ccagctgtgatacaacacagaaaga

SEQ ID NO: 1706164 - DNA, 25 bp, Homo sapien
tatggaatgtcagggcaagaacagc

SEQ ID NO: 1706165 - DNA, 25 bp, Homo sapien
gccttgatgccctcatgttagagaa

SEQ ID NO: 1706166 - DNA, 25 bp, Homo sapien
gaagtgactggctcaaagattacac

SEQ ID NO: 1706167 - DNA, 25 bp, Homo sapien
cattcccagagaggcgaagtgactg

SEQ ID NO: 1706168 - DNA, 25 bp, Homo sapien
cctgcagacactcgggaatcagaac

SEQ ID NO: 1706169 - DNA, 25 bp, Homo sapien
tcgggaatcagaacccatcacaacg

SEQ ID NO: 1706170 - DNA, 25 bp, Homo sapien
gcagacactcgggaatcagaaccca

SEQ ID NO: 1706171 - DNA, 25 bp, Homo sapien
gacactcgggaatcagaacccatca

SEQ ID NO: 1706172 - DNA, 25 bp, Homo sapien
gaaaccaggtatctgcttgacagaa

SEQ ID NO: 1706173 - DNA, 25 bp, Homo sapien
gaaggtcaactccattcctccaagg

SEQ ID NO: 1706174 - DNA, 25 bp, Homo sapien
tgcacccaaccagaactcaggaatt

SEQ ID NO: 1706175 - DNA, 25 bp, Homo sapien
tacactactgggacaggtcacatac

SEQ ID NO: 1706176 - DNA, 25 bp, Homo sapien
ggacagcttgtcaaacactcggttc

SEQ ID NO: 1706177 - DNA, 25 bp, Homo sapien
tgtcggccacggcttgggcatcagc

SEQ ID NO: 1706178 - DNA, 25 bp, Homo sapien
ccatggagctccagctggtaggcgg

SEQ ID NO: 1706179 - DNA, 25 bp, Homo sapien
tgcacagtagatgcgctcgtgcagc

SEQ ID NO: 1706180 - DNA, 25 bp, Homo sapien
ccagcaagagccgaaacaagacttt

SEQ ID NO: 1706181 - DNA, 25 bp, Homo sapien
gcagataaggttacttccgtcccaa

SEQ ID NO: 1706182 - DNA, 25 bp, Homo sapien
tgacagattcaagtgccagcaagag

SEQ ID NO: 1706183 - DNA, 25 bp, Homo sapien
taactgcctgatattatggtgggtc

SEQ ID NO: 1706184 - DNA, 25 bp, Homo sapien
gcagacaagtcctctcgatatttat

SEQ ID NO: 1706185 - DNA, 25 bp, Homo sapien
tttgcagcagccaaaacaagtggag

SEQ ID NO: 1706186 - DNA, 25 bp, Homo sapien
gacctccttcacgttggtcccagcc

SEQ ID NO: 1706187 - DNA, 25 bp, Homo sapien
atatttatagctgatatttctcacc

SEQ ID NO: 1706188 - DNA, 25 bp, Homo sapien
catagataaaggtgctgccggagcc

SEQ ID NO: 1706189 - DNA, 25 bp, Homo sapien
cgtctgtggtgaagcgcctgcactc

SEQ ID NO: 1706190 - DNA, 25 bp, Homo sapien
tgcactcctcgggagacatgcctgg

SEQ ID NO: 1706191 - DNA, 25 bp, Homo sapien
tgtcgagtcagcattcctcccaggg

SEQ ID NO: 1706192 - DNA, 25 bp, Homo sapien
catgtttcaaagccctccccaggta

SEQ ID NO: 1706193 - DNA, 25 bp, Homo sapien
caggtacccttccacttggctggtt

SEQ ID NO: 1706194 - DNA, 25 bp, Homo sapien
cacagtgactgtgtatcctcatttg

SEQ ID NO: 1706195 - DNA, 25 bp, Homo sapien
accaggcccggcattaacttaaatg

SEQ ID NO: 1706196 - DNA, 25 bp, Homo sapien
ctgtaatagtgaccaggtagatgac

SEQ ID NO: 1706197 - DNA, 25 bp, Homo sapien
ttggcagttcattgcccaagatgac

SEQ ID NO: 1706198 - DNA, 25 bp, Homo sapien
aggtagatgacacccccgcttgagc

SEQ ID NO: 1706199 - DNA, 25 bp, Homo sapien
ggtccacaccggcagctgtaatagt

SEQ ID NO: 1706200 - DNA, 25 bp, Homo sapien
cctagagagtttattacaaaataag

SEQ ID NO: 1706201 - DNA, 25 bp, Homo sapien
gccctagagagtttattacaaaata

SEQ ID NO: 1706202 - DNA, 25 bp, Homo sapien
ctagagagtttattacaaaataaga

SEQ ID NO: 1706203 - DNA, 25 bp, Homo sapien
tgacatctaggagggaagcacccac

SEQ ID NO: 1706204 - DNA, 25 bp, Homo sapien
gatcacctgtcatgtatagggctct

SEQ ID NO: 1706205 - DNA, 25 bp, Homo sapien
gaaagatgttttagacctgggacaa

SEQ ID NO: 1706206 - DNA, 25 bp, Homo sapien
aaatcattcagtacgtgatcacctg

SEQ ID NO: 1706207 - DNA, 25 bp, Homo sapien
ttgccctttaatatgaatgaatgca

SEQ ID NO: 1706208 - DNA, 25 bp, Homo sapien
caaacctctatgtgtcctatagaag

SEQ ID NO: 1706209 - DNA, 25 bp, Homo sapien
cagcctcagaacttattttgtgacc

SEQ ID NO: 1706210 - DNA, 25 bp, Homo sapien
gggctatttattgcagattttaaga

SEQ ID NO: 1706211 - DNA, 25 bp, Homo sapien
aacattcttgtcttggatacccaag

SEQ ID NO: 1706212 - DNA, 25 bp, Homo sapien
tagaaatacggtcttcctttgtcac

SEQ ID NO: 1706213 - DNA, 25 bp, Homo sapien
taatattcctcagttcatggtacat

SEQ ID NO: 1706214 - DNA, 25 bp, Homo sapien
ttgttaacctcagatgcaaatggtg

SEQ ID NO: 1706215 - DNA, 25 bp, Homo sapien
tattcatgcaccctctgattttggt

SEQ ID NO: 1706216 - DNA, 25 bp, Homo sapien
gtgcacatatattcatgcaccctct

SEQ ID NO: 1706217 - DNA, 25 bp, Homo sapien
acatatattcatgcaccctctgatt

SEQ ID NO: 1706218 - DNA, 25 bp, Homo sapien
tatattcatgcaccctctgattttg

SEQ ID NO: 1706219 - DNA, 25 bp, Homo sapien
agcttgctaagaacttagctgctgc

SEQ ID NO: 1706220 - DNA, 25 bp, Homo sapien
atgtagtgatacagaaaccactgaa

SEQ ID NO: 1706221 - DNA, 25 bp, Homo sapien
ctgaagctatggcaacagatagctt

SEQ ID NO: 1706222 - DNA, 25 bp, Homo sapien
cagatagcttgctaagaacttagct

SEQ ID NO: 1706223 - DNA, 25 bp, Homo sapien
cagattgcctccttgggatcggcgg

SEQ ID NO: 1706224 - DNA, 25 bp, Homo sapien
aaacaccggaagagagagtcgcaga

SEQ ID NO: 1706225 - DNA, 25 bp, Homo sapien
tgagctggctgaagtagacattgac

SEQ ID NO: 1706226 - DNA, 25 bp, Homo sapien
tcttctagggtaggcaggtgttccc

SEQ ID NO: 1706227 - DNA, 25 bp, Homo sapien
cttggggttttgagccgcagtgtct

SEQ ID NO: 1706228 - DNA, 25 bp, Homo sapien
agtgtctgcctctgttcaagtatcc

SEQ ID NO: 1706229 - DNA, 25 bp, Homo sapien
gttttgagccgcagtgtctgcctct

SEQ ID NO: 1706230 - DNA, 25 bp, Homo sapien
caagtatccaggctcaggtacagac

SEQ ID NO: 1706231 - DNA, 25 bp, Homo sapien
cttcttccagacaggcgttccgaga

SEQ ID NO: 1706232 - DNA, 25 bp, Homo sapien
gggagccgccggaactcttcttcca

SEQ ID NO: 1706233 - DNA, 25 bp, Homo sapien
tttctccaagcgttcggggagccgc

SEQ ID NO: 1706234 - DNA, 25 bp, Homo sapien
tgcaactgcatccaagcgctttctc

SEQ ID NO: 1706235 - DNA, 25 bp, Homo sapien
cattaggatgtaaccagggttgaga

SEQ ID NO: 1706236 - DNA, 25 bp, Homo sapien
taggtggctcaataaaagatttcca

SEQ ID NO: 1706237 - DNA, 25 bp, Homo sapien
aaattacattaggatgtaaccaggg

SEQ ID NO: 1706238 - DNA, 25 bp, Homo sapien
tgcaaagaagcagaataggtggctc

SEQ ID NO: 1706239 - DNA, 25 bp, Homo sapien
ttaaggttcctccattatccagaga

SEQ ID NO: 1706240 - DNA, 25 bp, Homo sapien
tcctgaccatcgtaaagaacaaatg

SEQ ID NO: 1706241 - DNA, 25 bp, Homo sapien
cccaaatgccaaccatgctcgaggt

SEQ ID NO: 1706242 - DNA, 25 bp, Homo sapien
tcacaacttgggtagagagatcagg

SEQ ID NO: 1706243 - DNA, 25 bp, Homo sapien
ttccctccagtttccactattagta

SEQ ID NO: 1706244 - DNA, 25 bp, Homo sapien
gagagttcccgtatgtcccctcaag

SEQ ID NO: 1706245 - DNA, 25 bp, Homo sapien
tccagtttccactattagtaacatc

SEQ ID NO: 1706246 - DNA, 25 bp, Homo sapien
gtcctgctctaatttcaccatgtgt

SEQ ID NO: 1706247 - DNA, 25 bp, Homo sapien
agagtgaggtatacaagagcatcca

SEQ ID NO: 1706248 - DNA, 25 bp, Homo sapien
ttatggataacgaaggaaaggagcc

SEQ ID NO: 1706249 - DNA, 25 bp, Homo sapien
gcagattggcttgtacgactttaga

SEQ ID NO: 1706250 - DNA, 25 bp, Homo sapien
gatgagtctcaaatatacccagaag

SEQ ID NO: 1706251 - DNA, 25 bp, Homo sapien
ttacagcacatcgttacgtttctat

SEQ ID NO: 1706252 - DNA, 25 bp, Homo sapien
tctgcatatttaggagcaattaccg

SEQ ID NO: 1706253 - DNA, 25 bp, Homo sapien
tgtaaacacatggtgtcatagtcca

SEQ ID NO: 1706254 - DNA, 25 bp, Homo sapien
tatttaggagcaattaccgtatgat

SEQ ID NO: 1706255 - DNA, 25 bp, Homo sapien
tgtttgcaaagcttagggaaccctg

SEQ ID NO: 1706256 - DNA, 25 bp, Homo sapien
cagttttcccatattagtagagagc

SEQ ID NO: 1706257 - DNA, 25 bp, Homo sapien
tgagcaatcccataagaaacaggcc

SEQ ID NO: 1706258 - DNA, 25 bp, Homo sapien
cgtggtccacctctagcaagctgta

SEQ ID NO: 1706259 - DNA, 25 bp, Homo sapien
caactgttatttatccaaagaacca

SEQ ID NO: 1706260 - DNA, 25 bp, Homo sapien
ggtttagtcaacaaagtagatattc

SEQ ID NO: 1706261 - DNA, 25 bp, Homo sapien
taattagcagcatgaaggagttaga

SEQ ID NO: 1706262 - DNA, 25 bp, Homo sapien
gaaccattaacagaaataggctata

SEQ ID NO: 1706263 - DNA, 25 bp, Homo sapien
aatgtttctccctattgctttatgg

SEQ ID NO: 1706264 - DNA, 25 bp, Homo sapien
gacatagacataggacaaaatgcat

SEQ ID NO: 1706265 - DNA, 25 bp, Homo sapien
tataggctacactctgccaatgatt

SEQ ID NO: 1706266 - DNA, 25 bp, Homo sapien
tttgggttcatgtcaaagcctatta

SEQ ID NO: 1706267 - DNA, 25 bp, Homo sapien
tcctttggacagagtaagagacaca

SEQ ID NO: 1706268 - DNA, 25 bp, Homo sapien
catttatacatacaaggtcctttgg

SEQ ID NO: 1706269 - DNA, 25 bp, Homo sapien
tacatagataagaccaacacacaca

SEQ ID NO: 1706270 - DNA, 25 bp, Homo sapien
cccatgtactagcatatggcttgac

SEQ ID NO: 1706271 - DNA, 25 bp, Homo sapien
gcatttggcctgctctaccaagcat

SEQ ID NO: 1706272 - DNA, 25 bp, Homo sapien
cacggctggcagaccatttggcatg

SEQ ID NO: 1706273 - DNA, 25 bp, Homo sapien
catacgggagtagtaaagccacggc

SEQ ID NO: 1706274 - DNA, 25 bp, Homo sapien
tagatttcaactattctggtgccag

SEQ ID NO: 1706275 - DNA, 25 bp, Homo sapien
taggtggctgtgtcccatatgtctc

SEQ ID NO: 1706276 - DNA, 25 bp, Homo sapien
cctggtttaggactctaggtggctg

SEQ ID NO: 1706277 - DNA, 25 bp, Homo sapien
tgcatggaggctttcgtgccacagt

SEQ ID NO: 1706278 - DNA, 25 bp, Homo sapien
gacagagatctgatagcccacaatg

SEQ ID NO: 1706279 - DNA, 25 bp, Homo sapien
acattcataaaattagatttcagtg

SEQ ID NO: 1706280 - DNA, 25 bp, Homo sapien
tcataaaattagatttcagtgagag

SEQ ID NO: 1706281 - DNA, 25 bp, Homo sapien
taaaattagatttcagtgagagttt

SEQ ID NO: 1706282 - DNA, 25 bp, Homo sapien
tagatttcagtgagagttttttgaa

SEQ ID NO: 1706283 - DNA, 25 bp, Homo sapien
gccttaaaatctctccgtgccgtga

SEQ ID NO: 1706284 - DNA, 25 bp, Homo sapien
gacagatggcacttcacagaacaga

SEQ ID NO: 1706285 - DNA, 25 bp, Homo sapien
tgcgcgcggcctcattacaagaagt

SEQ ID NO: 1706286 - DNA, 25 bp, Homo sapien
gacctctgaggcattcgacatttga

SEQ ID NO: 1706287 - DNA, 25 bp, Homo sapien
caaagttgccctcggcttggtacgg

SEQ ID NO: 1706288 - DNA, 25 bp, Homo sapien
cccagattggctgaccggggtcacg

SEQ ID NO: 1706289 - DNA, 25 bp, Homo sapien
tgtcccgaaacccagagcgctataa

SEQ ID NO: 1706290 - DNA, 25 bp, Homo sapien
agcgctataacgctgctgcttgtcc

SEQ ID NO: 1706291 - DNA, 25 bp, Homo sapien
ggcagccagacattgctctcgttta

SEQ ID NO: 1706292 - DNA, 25 bp, Homo sapien
aaatgagcgtcaggagagcagagtc

SEQ ID NO: 1706293 - DNA, 25 bp, Homo sapien
gttactgcgtctaaaatggccgcca

SEQ ID NO: 1706294 - DNA, 25 bp, Homo sapien
gggcaatgacacagcaactttgcag

SEQ ID NO: 1706295 - DNA, 25 bp, Homo sapien
tctgtgaatcaaccagagcccagag

SEQ ID NO: 1706296 - DNA, 25 bp, Homo sapien
tctaaataagggtgcagactctgtg

SEQ ID NO: 1706297 - DNA, 25 bp, Homo sapien
ttcttcgctaccagggagaaaacaa

SEQ ID NO: 1706298 - DNA, 25 bp, Homo sapien
ccagagtcaggatctccagagcatc

SEQ ID NO: 1706299 - DNA, 25 bp, Homo sapien
gagtcctccccacggagcggctggt

SEQ ID NO: 1706300 - DNA, 25 bp, Homo sapien
gtcctgggagggatgacttaaggga

SEQ ID NO: 1706301 - DNA, 25 bp, Homo sapien
cggcgtccggctcagagcagaaaaa

SEQ ID NO: 1706302 - DNA, 25 bp, Homo sapien
ctggtccatcggtcagcgccaggga

SEQ ID NO: 1706303 - DNA, 25 bp, Homo sapien
aattggctgagctgtggtccgccga

SEQ ID NO: 1706304 - DNA, 25 bp, Homo sapien
caagctcgagcaggtcgtgccattc

SEQ ID NO: 1706305 - DNA, 25 bp, Homo sapien
ggccagccgcaacgatgacgtcata

SEQ ID NO: 1706306 - DNA, 25 bp, Homo sapien
ccaactggagactgccaagctcgag

SEQ ID NO: 1706307 - DNA, 25 bp, Homo sapien
cccgcgccagccctttatatatagg

SEQ ID NO: 1706308 - DNA, 25 bp, Homo sapien
tccagcacgaaatggcgccgccgag

SEQ ID NO: 1706309 - DNA, 25 bp, Homo sapien
cgcgctcgctcacgcgggtgaagaa

SEQ ID NO: 1706310 - DNA, 25 bp, Homo sapien
aaggaacacctctccgcgggagctt

SEQ ID NO: 1706311 - DNA, 25 bp, Homo sapien
tatagcccgctgttggtctgcaggg

SEQ ID NO: 1706312 - DNA, 25 bp, Homo sapien
gacgaaggccatttccaagcggatg

SEQ ID NO: 1706313 - DNA, 25 bp, Homo sapien
tgtatcggtaggcagaatcctccag

SEQ ID NO: 1706314 - DNA, 25 bp, Homo sapien
tggccggcacgaaagcagtctcttt

SEQ ID NO: 1706315 - DNA, 25 bp, Homo sapien
tcaccgcccggtccagcataacccg

SEQ ID NO: 1706316 - DNA, 25 bp, Homo sapien
ccctcagccgcggaaagtccgggtg

SEQ ID NO: 1706317 - DNA, 25 bp, Homo sapien
cttgaccgcaaggaaccggcgctgc

SEQ ID NO: 1706318 - DNA, 25 bp, Homo sapien
ggtccagcataacccgctaagttgg

SEQ ID NO: 1706319 - DNA, 25 bp, Homo sapien
ttattgtggggagtcacgttttgca

SEQ ID NO: 1706320 - DNA, 25 bp, Homo sapien
tgtggggagtcacgttttgcagcat

SEQ ID NO: 1706321 - DNA, 25 bp, Homo sapien
tattgtggggagtcacgttttgcag

SEQ ID NO: 1706322 - DNA, 25 bp, Homo sapien
ttgtggggagtcacgttttgcagca

SEQ ID NO: 1706323 - DNA, 25 bp, Homo sapien
ccacacgcggctcgcggaaacgtac

SEQ ID NO: 1706324 - DNA, 25 bp, Homo sapien
tgtattcccctccacgagcagtagc

SEQ ID NO: 1706325 - DNA, 25 bp, Homo sapien
caccgttccaaaaccgtcgctcaat

SEQ ID NO: 1706326 - DNA, 25 bp, Homo sapien
gagtcgacagctgcgccgcaacagc

SEQ ID NO: 1706327 - DNA, 25 bp, Homo sapien
taaaaggctaacagaccgccgctag

SEQ ID NO: 1706328 - DNA, 25 bp, Homo sapien
gccacggcggcattaatagcgtata

SEQ ID NO: 1706329 - DNA, 25 bp, Homo sapien
cctacagggcgctagaggtgtccgt

SEQ ID NO: 1706330 - DNA, 25 bp, Homo sapien
tgactcggttaagactgggccacgg

SEQ ID NO: 1706331 - DNA, 25 bp, Homo sapien
caaagccctcatacaagagagaggg

SEQ ID NO: 1706332 - DNA, 25 bp, Homo sapien
agccctcatacaagagagagggttt

SEQ ID NO: 1706333 - DNA, 25 bp, Homo sapien
aaagccctcatacaagagagagggt

SEQ ID NO: 1706334 - DNA, 25 bp, Homo sapien
gccctcatacaagagagagggtttt

SEQ ID NO: 1706335 - DNA, 25 bp, Homo sapien
tattgcagctggttggtaactcgtc

SEQ ID NO: 1706336 - DNA, 25 bp, Homo sapien
ctggctttttgggattggacacctc

SEQ ID NO: 1706337 - DNA, 25 bp, Homo sapien
tgccggaatggccatgcgaactgat

SEQ ID NO: 1706338 - DNA, 25 bp, Homo sapien
taagttgcaaagcaggcaccgaagc

SEQ ID NO: 1706339 - DNA, 25 bp, Homo sapien
gctaagaattttggccaccgtggtc

SEQ ID NO: 1706340 - DNA, 25 bp, Homo sapien
catgagggaaaggaagaagctaaga

SEQ ID NO: 1706341 - DNA, 25 bp, Homo sapien
gggctggctatccatgggctgcatg

SEQ ID NO: 1706342 - DNA, 25 bp, Homo sapien
ggctggctatccatgggctgcatga

SEQ ID NO: 1706343 - DNA, 25 bp, Homo sapien
taaatgtaacagttggtgaacatgg

SEQ ID NO: 1706344 - DNA, 25 bp, Homo sapien
cccatgtccataggctgttttataa

SEQ ID NO: 1706345 - DNA, 25 bp, Homo sapien
tgcatacactctgaagcagcccaat

SEQ ID NO: 1706346 - DNA, 25 bp, Homo sapien
tcctcttaatagtacccatgtccat

SEQ ID NO: 1706347 - DNA, 25 bp, Homo sapien
catatccagcaataatagaaattac

SEQ ID NO: 1706348 - DNA, 25 bp, Homo sapien
ggataacaccttcagtagcaaagga

SEQ ID NO: 1706349 - DNA, 25 bp, Homo sapien
tagcaaaggatttaaactttatgta

SEQ ID NO: 1706350 - DNA, 25 bp, Homo sapien
gtagacaacatatccagcaataata

SEQ ID NO: 1706351 - DNA, 25 bp, Homo sapien
tccagcgtttgtgccattaggacaa

SEQ ID NO: 1706352 - DNA, 25 bp, Homo sapien
ctgtaggaatatcttttccagcgtt

SEQ ID NO: 1706353 - DNA, 25 bp, Homo sapien
cttgtggctgttcttagggatggtc

SEQ ID NO: 1706354 - DNA, 25 bp, Homo sapien
ggcattgatgcaaccttctgtagga

SEQ ID NO: 1706355 - DNA, 25 bp, Homo sapien
gaggagtatacagggctgtgtgtga

SEQ ID NO: 1706356 - DNA, 25 bp, Homo sapien
tgacacagaagagacggcaggcacc

SEQ ID NO: 1706357 - DNA, 25 bp, Homo sapien
tcaggtggaggagtatacagggctg

SEQ ID NO: 1706358 - DNA, 25 bp, Homo sapien
cagaagagacggcaggcacctgatg

SEQ ID NO: 1706359 - DNA, 25 bp, Homo sapien
gaaaggccaagcataggcagcatgc

SEQ ID NO: 1706360 - DNA, 25 bp, Homo sapien
gccttaggctcaagactcccaggag

SEQ ID NO: 1706361 - DNA, 25 bp, Homo sapien
catggtagtcatgcaggccaagtgc

SEQ ID NO: 1706362 - DNA, 25 bp, Homo sapien
gcatccactggtttatagaaaggcc

SEQ ID NO: 1706363 - DNA, 25 bp, Homo sapien
caccctactgtttcaaactccaaga

SEQ ID NO: 1706364 - DNA, 25 bp, Homo sapien
tgtgtgcccacataaggagacttat

SEQ ID NO: 1706365 - DNA, 25 bp, Homo sapien
tataacttccttaacccaacactgc

SEQ ID NO: 1706366 - DNA, 25 bp, Homo sapien
gagacttattgttttgcacctaggc

SEQ ID NO: 1706367 - DNA, 25 bp, Homo sapien
gacaccacaagaagagccctctctt

SEQ ID NO: 1706368 - DNA, 25 bp, Homo sapien
aggaagactcacctttccctgccaa

SEQ ID NO: 1706369 - DNA, 25 bp, Homo sapien
gagccctctcttgagagcacagtgg

SEQ ID NO: 1706370 - DNA, 25 bp, Homo sapien
cacagtggggatgaccttaaggatc

SEQ ID NO: 1706371 - DNA, 25 bp, Homo sapien
ctgcagaaggaggcagcatcagaag

SEQ ID NO: 1706372 - DNA, 25 bp, Homo sapien
gcatcccggtaatcacggttctcca

SEQ ID NO: 1706373 - DNA, 25 bp, Homo sapien
aagccgtacatcagcagcaaactcc

SEQ ID NO: 1706374 - DNA, 25 bp, Homo sapien
gcagcaaactcctgtgcatcccggt

SEQ ID NO: 1706375 - DNA, 25 bp, Homo sapien
gcagttggagaacataagccgtaca

SEQ ID NO: 1706376 - DNA, 25 bp, Homo sapien
tgtagctttcgtgccattgccacaa

SEQ ID NO: 1706377 - DNA, 25 bp, Homo sapien
tagctttcgtgccattgccacaaca

SEQ ID NO: 1706378 - DNA, 25 bp, Homo sapien
tttcgtgccattgccacaacatcgt

SEQ ID NO: 1706379 - DNA, 25 bp, Homo sapien
cgtgccattgccacaacatcgtgat

SEQ ID NO: 1706380 - DNA, 25 bp, Homo sapien
taaaggccctggttctagtggttca

SEQ ID NO: 1706381 - DNA, 25 bp, Homo sapien
ggttctagtggttcatctggcatct

SEQ ID NO: 1706382 - DNA, 25 bp, Homo sapien
ggcatcttggcataacggaactcaa

SEQ ID NO: 1706383 - DNA, 25 bp, Homo sapien
tggaggactctgaagacgatttggc

SEQ ID NO: 1706384 - DNA, 25 bp, Homo sapien
ctcgtcctcctcatcttcctcctcc

SEQ ID NO: 1706385 - DNA, 25 bp, Homo sapien
tcctcctcttcctcagaggagctct

SEQ ID NO: 1706386 - DNA, 25 bp, Homo sapien
ctgagctttcactctcttcttcctc

SEQ ID NO: 1706387 - DNA, 25 bp, Homo sapien
tcctcttcctcagaggagctctcac

SEQ ID NO: 1706388 - DNA, 25 bp, Homo sapien
gttctgctaagcgatgagccctttc

SEQ ID NO: 1706389 - DNA, 25 bp, Homo sapien
tgtagttctgctaagcgatgagccc

SEQ ID NO: 1706390 - DNA, 25 bp, Homo sapien
tcctgtagttctgctaagcgatgag

SEQ ID NO: 1706391 - DNA, 25 bp, Homo sapien
tgctaagcgatgagccctttcttcc

SEQ ID NO: 1706392 - DNA, 25 bp, Homo sapien
tcttggacttcttaggttgaggtgg

SEQ ID NO: 1706393 - DNA, 25 bp, Homo sapien
cttgtcatcttcatcggccccagct

SEQ ID NO: 1706394 - DNA, 25 bp, Homo sapien
gacagagcagccagttgttcatgta

SEQ ID NO: 1706395 - DNA, 25 bp, Homo sapien
gggtgccctaggccccttgtcatct

SEQ ID NO: 1706396 - DNA, 25 bp, Homo sapien
agccggaagggcctaaagcagcact

SEQ ID NO: 1706397 - DNA, 25 bp, Homo sapien
aagggcctaaagcagcactgccacc

SEQ ID NO: 1706398 - DNA, 25 bp, Homo sapien
tccaaagccggaagggcctaaagca

SEQ ID NO: 1706399 - DNA, 25 bp, Homo sapien
cggaagggcctaaagcagcactgcc

SEQ ID NO: 1706400 - DNA, 25 bp, Homo sapien
cctactgtgaagtgcgcatggtaca

SEQ ID NO: 1706401 - DNA, 25 bp, Homo sapien
tccaatggcccaatgatctgaggtg

SEQ ID NO: 1706402 - DNA, 25 bp, Homo sapien
gaacagccggcatgtgggcatcact

SEQ ID NO: 1706403 - DNA, 25 bp, Homo sapien
tactgggctacgcaggaggtgaaca

SEQ ID NO: 1706404 - DNA, 25 bp, Homo sapien
tgctcccttaaacactaccaaacta

SEQ ID NO: 1706405 - DNA, 25 bp, Homo sapien
taccaaactacaccatgggccagct

SEQ ID NO: 1706406 - DNA, 25 bp, Homo sapien
gacatgggtctttctgctcccttaa

SEQ ID NO: 1706407 - DNA, 25 bp, Homo sapien
cctgtttaggtatactgacatgggt

SEQ ID NO: 1706408 - DNA, 25 bp, Homo sapien
cagcaaaagaagcttcattaacctc

SEQ ID NO: 1706409 - DNA, 25 bp, Homo sapien
gtatgttcccactgttataattcag

SEQ ID NO: 1706410 - DNA, 25 bp, Homo sapien
taagggcaaaaagagttgtcagcaa

SEQ ID NO: 1706411 - DNA, 25 bp, Homo sapien
ccagtatgttcccactgttataatt

SEQ ID NO: 1706412 - DNA, 25 bp, Homo sapien
caggtggggctgtctttgtggcctt

SEQ ID NO: 1706413 - DNA, 25 bp, Homo sapien
gctgtctttgtggcctttttgggga

SEQ ID NO: 1706414 - DNA, 25 bp, Homo sapien
tgtctttgtggcctttttggggagc

SEQ ID NO: 1706415 - DNA, 25 bp, Homo sapien
tggggctgtctttgtggcctttttg

SEQ ID NO: 1706416 - DNA, 25 bp, Homo sapien
tgaatcacgtaaagagggctccctg

SEQ ID NO: 1706417 - DNA, 25 bp, Homo sapien
agcgctcaagctctctaagtgtgga

SEQ ID NO: 1706418 - DNA, 25 bp, Homo sapien
ggattatatgcacaactcggcccag

SEQ ID NO: 1706419 - DNA, 25 bp, Homo sapien
tctcatcgtaactcatgggcctgct

SEQ ID NO: 1706420 - DNA, 25 bp, Homo sapien
ggatacattaagattgccccaagca

SEQ ID NO: 1706421 - DNA, 25 bp, Homo sapien
ttatcctgggagctgacaatcctga

SEQ ID NO: 1706422 - DNA, 25 bp, Homo sapien
ttcttgaacgtcagctgccaaccaa

SEQ ID NO: 1706423 - DNA, 25 bp, Homo sapien
caagcatcttattatgggcccctaa

SEQ ID NO: 1706424 - DNA, 25 bp, Homo sapien
tagaattgagctgtccgctgacatc

SEQ ID NO: 1706425 - DNA, 25 bp, Homo sapien
tttttagtagaattgagctgtccgc

SEQ ID NO: 1706426 - DNA, 25 bp, Homo sapien
tgacatcttgtaaccgcttttctaa

SEQ ID NO: 1706427 - DNA, 25 bp, Homo sapien
ttgagctgtccgctgacatcttgta

SEQ ID NO: 1706428 - DNA, 25 bp, Homo sapien
tctgtagtggcatgaaagtatatac

SEQ ID NO: 1706429 - DNA, 25 bp, Homo sapien
gttaaagacgttcaagtctgaatct

SEQ ID NO: 1706430 - DNA, 25 bp, Homo sapien
cgaaagttaaagacgttcaagtctg

SEQ ID NO: 1706431 - DNA, 25 bp, Homo sapien
ctgcagaacaaattcgaaagttaaa

SEQ ID NO: 1706432 - DNA, 25 bp, Homo sapien
tggaagcgctaaggcgtgacactgc

SEQ ID NO: 1706433 - DNA, 25 bp, Homo sapien
ctggagctggaagcgctaaggcgtg

SEQ ID NO: 1706434 - DNA, 25 bp, Homo sapien
gcgctaaggcgtgacactgctactt

SEQ ID NO: 1706435 - DNA, 25 bp, Homo sapien
gcgtgacactgctacttgctgtgca

SEQ ID NO: 1706436 - DNA, 25 bp, Homo sapien
ttagcctgagtctgaatcactggtg

SEQ ID NO: 1706437 - DNA, 25 bp, Homo sapien
agctatggcctcaggtaactccaga

SEQ ID NO: 1706438 - DNA, 25 bp, Homo sapien
ccttagaagtgaatagggcagctat

SEQ ID NO: 1706439 - DNA, 25 bp, Homo sapien
aacaatctcaaaacagggcccttag

SEQ ID NO: 1706440 - DNA, 25 bp, Homo sapien
tgtccaagagatcactccccaatgg

SEQ ID NO: 1706441 - DNA, 25 bp, Homo sapien
aatccaattataggttagctattgc

SEQ ID NO: 1706442 - DNA, 25 bp, Homo sapien
tcaagacaattcttatgatgttcct

SEQ ID NO: 1706443 - DNA, 25 bp, Homo sapien
tagctattgccttttctcactgcag

SEQ ID NO: 1706444 - DNA, 25 bp, Homo sapien
cacagcaaaagcctactggtttaaa

SEQ ID NO: 1706445 - DNA, 25 bp, Homo sapien
aagtgggtttcatcatagggaggca

SEQ ID NO: 1706446 - DNA, 25 bp, Homo sapien
tggtaaaatccagtatccctttata

SEQ ID NO: 1706447 - DNA, 25 bp, Homo sapien
gaatttaaaacgaagtcatatgatc

SEQ ID NO: 1706448 - DNA, 25 bp, Homo sapien
ccagtgttacctgatgccaaagcca

SEQ ID NO: 1706449 - DNA, 25 bp, Homo sapien
gagtttatatcatctcaaccctcac

SEQ ID NO: 1706450 - DNA, 25 bp, Homo sapien
tgtccacccgacagctcctgagttt

SEQ ID NO: 1706451 - DNA, 25 bp, Homo sapien
cccctgcatgttagcggtgttctct

SEQ ID NO: 1706452 - DNA, 25 bp, Homo sapien
gactgactgtccttctcagtgaaca

SEQ ID NO: 1706453 - DNA, 25 bp, Homo sapien
aaaataacagtcatcacccagacct

SEQ ID NO: 1706454 - DNA, 25 bp, Homo sapien
ataacagtcatcacccagacctact

SEQ ID NO: 1706455 - DNA, 25 bp, Homo sapien
aataacagtcatcacccagacctac

SEQ ID NO: 1706456 - DNA, 25 bp, Homo sapien
aaataacagtcatcacccagaccta

SEQ ID NO: 1706457 - DNA, 25 bp, Homo sapien
tcgccaaacacagctgaccacatgg

SEQ ID NO: 1706458 - DNA, 25 bp, Homo sapien
gtttggtgactttgcccgctttgac

SEQ ID NO: 1706459 - DNA, 25 bp, Homo sapien
tgtggacctgaagaaaagcgaggcc

SEQ ID NO: 1706460 - DNA, 25 bp, Homo sapien
atcaaagcccatctggacatcctgg

SEQ ID NO: 1706461 - DNA, 25 bp, Homo sapien
tctcctttgaagaacccctcactgt

SEQ ID NO: 1706462 - DNA, 25 bp, Homo sapien
gaattgctgacccttcaagctctgt

SEQ ID NO: 1706463 - DNA, 25 bp, Homo sapien
ttcatgtgaaaactactccagtggc

SEQ ID NO: 1706464 - DNA, 25 bp, Homo sapien
gaaattaatgacactttggtagcac

SEQ ID NO: 1706465 - DNA, 25 bp, Homo sapien
gctgtcagatgttcaacagaggtca

SEQ ID NO: 1706466 - DNA, 25 bp, Homo sapien
gaatatgctgtcacatgagccaagg

SEQ ID NO: 1706467 - DNA, 25 bp, Homo sapien
tgaaagctcccattataggtgggcc

SEQ ID NO: 1706468 - DNA, 25 bp, Homo sapien
aagtatccttcgttcattgccgtca

SEQ ID NO: 1706469 - DNA, 25 bp, Homo sapien
tgggcaccgtcctcatcataaagtc

SEQ ID NO: 1706470 - DNA, 25 bp, Homo sapien
cctgagacaacggagactgtgctct

SEQ ID NO: 1706471 - DNA, 25 bp, Homo sapien
ctggtgctgggcctagtcggcatca

SEQ ID NO: 1706472 - DNA, 25 bp, Homo sapien
caagagccaatccagatgcctgaga

SEQ ID NO: 1706473 - DNA, 25 bp, Homo sapien
gaggtgaccgtgtttcccaaggagc

SEQ ID NO: 1706474 - DNA, 25 bp, Homo sapien
cagaggacttctatgactgcagggt

SEQ ID NO: 1706475 - DNA, 25 bp, Homo sapien
tcactgagggtgtcgctgagagcct

SEQ ID NO: 1706476 - DNA, 25 bp, Homo sapien
cagtgctcaacgtcacgtggctgtg

SEQ ID NO: 1706477 - DNA, 25 bp, Homo sapien
agtggtgtgatacccctctctgtga

SEQ ID NO: 1706478 - DNA, 25 bp, Homo sapien
tgatcctcttcccctagtggccatg

SEQ ID NO: 1706479 - DNA, 25 bp, Homo sapien
gactaggaagcctaagtgccccctg

SEQ ID NO: 1706480 - DNA, 25 bp, Homo sapien
gccatgggctgatcccactacagca

SEQ ID NO: 1706481 - DNA, 25 bp, Homo sapien
aacttatgccgcgtttgtacagacg

SEQ ID NO: 1706482 - DNA, 25 bp, Homo sapien
ggcgggctggctaacattgctatat

SEQ ID NO: 1706483 - DNA, 25 bp, Homo sapien
tgtacagacgcatagaccaacaggg

SEQ ID NO: 1706484 - DNA, 25 bp, Homo sapien
tgtctttatgcagcggaccatgtgt

SEQ ID NO: 1706485 - DNA, 25 bp, Homo sapien
ggttattgtgacaattcagcgagtg

SEQ ID NO: 1706486 - DNA, 25 bp, Homo sapien
atagggttattgtgacaattcagcg

SEQ ID NO: 1706487 - DNA, 25 bp, Homo sapien
tcagcgagtgaaatatgtaaagtat

SEQ ID NO: 1706488 - DNA, 25 bp, Homo sapien
tgtgacaattcagcgagtgaaatat

SEQ ID NO: 1706489 - DNA, 25 bp, Homo sapien
aattaagatcttaatgggagagaaa

SEQ ID NO: 1706490 - DNA, 25 bp, Homo sapien
gaaaacctctctactagttccgcca

SEQ ID NO: 1706491 - DNA, 25 bp, Homo sapien
acatctgtgtcatagaaaaattaag

SEQ ID NO: 1706492 - DNA, 25 bp, Homo sapien
cagtagccgtatgaccttagcaagt

SEQ ID NO: 1706493 - DNA, 25 bp, Homo sapien
aaagctatacattctacagtttcat

SEQ ID NO: 1706494 - DNA, 25 bp, Homo sapien
acaaagctatacattctacagtttc

SEQ ID NO: 1706495 - DNA, 25 bp, Homo sapien
caaagctatacattctacagtttca

SEQ ID NO: 1706496 - DNA, 25 bp, Homo sapien
aacaaagctatacattctacagttt

SEQ ID NO: 1706497 - DNA, 25 bp, Homo sapien
aaggactcgctaaagggagctcctg

SEQ ID NO: 1706498 - DNA, 25 bp, Homo sapien
ggactcgctaaagggagctcctgtt

SEQ ID NO: 1706499 - DNA, 25 bp, Homo sapien
agaaggactcgctaaagggagctcc

SEQ ID NO: 1706500 - DNA, 25 bp, Homo sapien
aagaaggactcgctaaagggagctc

SEQ ID NO: 1706501 - DNA, 25 bp, Homo sapien
ggggccgcagaaacctgcagaacca

SEQ ID NO: 1706502 - DNA, 25 bp, Homo sapien
tcagtaacgccgtcagagccactgt

SEQ ID NO: 1706503 - DNA, 25 bp, Homo sapien
cctggaccacagatgtgagcagcac

SEQ ID NO: 1706504 - DNA, 25 bp, Homo sapien
tccggggggccgcagaaacctgcag

SEQ ID NO: 1706505 - DNA, 25 bp, Homo sapien
tggatgcagacatgaacacgcccag

SEQ ID NO: 1706506 - DNA, 25 bp, Homo sapien
tgaatcctcagtgatcctcagagcc

SEQ ID NO: 1706507 - DNA, 25 bp, Homo sapien
taggccagtagggtagcaagctatc

SEQ ID NO: 1706508 - DNA, 25 bp, Homo sapien
taagaggcattcttcgtgagcactg

SEQ ID NO: 1706509 - DNA, 25 bp, Homo sapien
gagttgcccagagcacggtttgaaa

SEQ ID NO: 1706510 - DNA, 25 bp, Homo sapien
ggaattgtggaatcagccctgccca

SEQ ID NO: 1706511 - DNA, 25 bp, Homo sapien
gaacattcattctacgcagggagct

SEQ ID NO: 1706512 - DNA, 25 bp, Homo sapien
gctccctatgggttgtctcagccaa

SEQ ID NO: 1706513 - DNA, 25 bp, Homo sapien
gcaccgaggaagacagcattgatgt

SEQ ID NO: 1706514 - DNA, 25 bp, Homo sapien
ctttttgaggatcttatccttcatg

SEQ ID NO: 1706515 - DNA, 25 bp, Homo sapien
gaggatcttatccttcatgaggagt

SEQ ID NO: 1706516 - DNA, 25 bp, Homo sapien
caccgaggaagacagcattgatgta

SEQ ID NO: 1706517 - DNA, 25 bp, Homo sapien
acatttcagtctgattggtgcctca

SEQ ID NO: 1706518 - DNA, 25 bp, Homo sapien
gttatgcttaattttgacatttcag

SEQ ID NO: 1706519 - DNA, 25 bp, Homo sapien
tcagtctgattggtgcctcatgaac

SEQ ID NO: 1706520 - DNA, 25 bp, Homo sapien
ttgacatttcagtctgattggtgcc

SEQ ID NO: 1706521 - DNA, 25 bp, Homo sapien
ggctgtggaccagaaacttctggaa

SEQ ID NO: 1706522 - DNA, 25 bp, Homo sapien
cttggaccttctacgaaccctactg

SEQ ID NO: 1706523 - DNA, 25 bp, Homo sapien
gttgttgttgttgctcccataagca

SEQ ID NO: 1706524 - DNA, 25 bp, Homo sapien
tccttgaggctgtggaccagaaact

SEQ ID NO: 1706525 - DNA, 25 bp, Homo sapien
gaggaaattttgtgagcgatctcag

SEQ ID NO: 1706526 - DNA, 25 bp, Homo sapien
ctggaggaaattttgtgagcgatct

SEQ ID NO: 1706527 - DNA, 25 bp, Homo sapien
cgatctcagcacagtaagatttgtt

SEQ ID NO: 1706528 - DNA, 25 bp, Homo sapien
gtaagatttgttgcacatcagcagc

SEQ ID NO: 1706529 - DNA, 25 bp, Homo sapien
ggctgggtgactctttccatgatga

SEQ ID NO: 1706530 - DNA, 25 bp, Homo sapien
atggccggctgggtgactctttcca

SEQ ID NO: 1706531 - DNA, 25 bp, Homo sapien
ggtgactctttccatgatgactttg

SEQ ID NO: 1706532 - DNA, 25 bp, Homo sapien
gccggctgggtgactctttccatga

SEQ ID NO: 1706533 - DNA, 25 bp, Homo sapien
ctaagcgggtcgcagagcctctcca

SEQ ID NO: 1706534 - DNA, 25 bp, Homo sapien
ttctgtggtcctaagcgggtcgcag

SEQ ID NO: 1706535 - DNA, 25 bp, Homo sapien
cctgttttctcaccacgcagagaga

SEQ ID NO: 1706536 - DNA, 25 bp, Homo sapien
ctgttttctcaccacgcagagagag

SEQ ID NO: 1706537 - DNA, 25 bp, Homo sapien
cccaaatcttcccacccagggctgg

SEQ ID NO: 1706538 - DNA, 25 bp, Homo sapien
ggaggcgccactctcatctaatcct

SEQ ID NO: 1706539 - DNA, 25 bp, Homo sapien
tctcaatattaacgattcttcccaa

SEQ ID NO: 1706540 - DNA, 25 bp, Homo sapien
cggacatgagcggaggcgccactct

SEQ ID NO: 1706541 - DNA, 25 bp, Homo sapien
ttaaacgcgtagcattcctgccgtc

SEQ ID NO: 1706542 - DNA, 25 bp, Homo sapien
tgtcccattaaacgcgtagcattcc

SEQ ID NO: 1706543 - DNA, 25 bp, Homo sapien
taaacgcgtagcattcctgccgtcc

SEQ ID NO: 1706544 - DNA, 25 bp, Homo sapien
tgtgtcccattaaacgcgtagcatt

SEQ ID NO: 1706545 - DNA, 25 bp, Homo sapien
ctgtccggcactgcccgcttctcct

SEQ ID NO: 1706546 - DNA, 25 bp, Homo sapien
tgttccagtactccgcagcaggccg

SEQ ID NO: 1706547 - DNA, 25 bp, Homo sapien
acgtcgctgtcgaagcgcgcgaact

SEQ ID NO: 1706548 - DNA, 25 bp, Homo sapien
tctggctgttccagtactccgcagc

SEQ ID NO: 1706549 - DNA, 25 bp, Homo sapien
cgctgcagggtcatgggcccgccca

SEQ ID NO: 1706550 - DNA, 25 bp, Homo sapien
gggcccgcccagctcgtagttgtgt

SEQ ID NO: 1706551 - DNA, 25 bp, Homo sapien
ctcggcgctgcagggtcatgggccc

SEQ ID NO: 1706552 - DNA, 25 bp, Homo sapien
ggcccgcccagctcgtagttgtgtc

SEQ ID NO: 1706553 - DNA, 25 bp, Homo sapien
cccgcgctcgctcccctgacaagct

SEQ ID NO: 1706554 - DNA, 25 bp, Homo sapien
ttttcaccccacatgcagtcagctg

SEQ ID NO: 1706555 - DNA, 25 bp, Homo sapien
ccttgtgcgctgtcctgtggcttcc

SEQ ID NO: 1706556 - DNA, 25 bp, Homo sapien
agctgccaggcctgatgaagtcccg

SEQ ID NO: 1706557 - DNA, 25 bp, Homo sapien
tgtcttggccaaatcacaactgtcc

SEQ ID NO: 1706558 - DNA, 25 bp, Homo sapien
gaggaagccaaagctccaaggcctt

SEQ ID NO: 1706559 - DNA, 25 bp, Homo sapien
caagtccctcaggttggtgcaccag

SEQ ID NO: 1706560 - DNA, 25 bp, Homo sapien
aagtaaaatccatctcagccccgag

SEQ ID NO: 1706561 - DNA, 25 bp, Homo sapien
aggtgaacttcctttcactttccag

SEQ ID NO: 1706562 - DNA, 25 bp, Homo sapien
actcatagcaggtgaacttcctttc

SEQ ID NO: 1706563 - DNA, 25 bp, Homo sapien
tagcaggtgaacttcctttcacttt

SEQ ID NO: 1706564 - DNA, 25 bp, Homo sapien
tcatagcaggtgaacttcctttcac

SEQ ID NO: 1706565 - DNA, 25 bp, Homo sapien
gattggtgcctctacaaagtcttag

SEQ ID NO: 1706566 - DNA, 25 bp, Homo sapien
tgattacaagcagagatccccagac

SEQ ID NO: 1706567 - DNA, 25 bp, Homo sapien
tatctggctacatgggaacctctag

SEQ ID NO: 1706568 - DNA, 25 bp, Homo sapien
gaacctctagggagctgattacaag

SEQ ID NO: 1706569 - DNA, 25 bp, Homo sapien
tcaggtcccatgaaggtctcacaga

SEQ ID NO: 1706570 - DNA, 25 bp, Homo sapien
cagaatatcctgagctcctacatgc

SEQ ID NO: 1706571 - DNA, 25 bp, Homo sapien
tgcttgagtagtagaaatcccgtcc

SEQ ID NO: 1706572 - DNA, 25 bp, Homo sapien
tcacagatgaccaggtgttgcctcc

SEQ ID NO: 1706573 - DNA, 25 bp, Homo sapien
tatatagcggaatggcagggagaca

SEQ ID NO: 1706574 - DNA, 25 bp, Homo sapien
tggtcagcctggttctctaggagca

SEQ ID NO: 1706575 - DNA, 25 bp, Homo sapien
taggagcacttgaccaacgcctgac

SEQ ID NO: 1706576 - DNA, 25 bp, Homo sapien
aatagaccttcaagtagagcatgca

SEQ ID NO: 1706577 - DNA, 25 bp, Homo sapien
tgtggtgctgcaagggccccttctt

SEQ ID NO: 1706578 - DNA, 25 bp, Homo sapien
cgtcacgtggcagacaagcaggttg

SEQ ID NO: 1706579 - DNA, 25 bp, Homo sapien
ctgggtagaaatccgtcacgtggca

SEQ ID NO: 1706580 - DNA, 25 bp, Homo sapien
agggggaaacattcaccctaggctg

SEQ ID NO: 1706581 - DNA, 25 bp, Homo sapien
cactccacggtgacaggactatcca

SEQ ID NO: 1706582 - DNA, 25 bp, Homo sapien
tccactccacggtgacaggactatc

SEQ ID NO: 1706583 - DNA, 25 bp, Homo sapien
tccacggtgacaggactatccaggc

SEQ ID NO: 1706584 - DNA, 25 bp, Homo sapien
ctccacggtgacaggactatccagg

SEQ ID NO: 1706585 - DNA, 25 bp, Homo sapien
tttcgagaccagtcagtgtccctag

SEQ ID NO: 1706586 - DNA, 25 bp, Homo sapien
caaggtcaggaagtctccatttccc

SEQ ID NO: 1706587 - DNA, 25 bp, Homo sapien
tatgaatcttcaggaacccctaagc

SEQ ID NO: 1706588 - DNA, 25 bp, Homo sapien
gagtcccctgctcttcagaggtggg

SEQ ID NO: 1706589 - DNA, 25 bp, Homo sapien
ccgtcaatgtcttactccgggcaga

SEQ ID NO: 1706590 - DNA, 25 bp, Homo sapien
ccccagctcccgtcaatgtcttact

SEQ ID NO: 1706591 - DNA, 25 bp, Homo sapien
caatgtcttactccgggcagaatca

SEQ ID NO: 1706592 - DNA, 25 bp, Homo sapien
agctcccgtcaatgtcttactccgg

SEQ ID NO: 1706593 - DNA, 25 bp, Homo sapien
cattgcccatcactcaatggacgct

SEQ ID NO: 1706594 - DNA, 25 bp, Homo sapien
gacgctccgcaggagcctgagtact

SEQ ID NO: 1706595 - DNA, 25 bp, Homo sapien
aagacgaaaggttatataatcagcc

SEQ ID NO: 1706596 - DNA, 25 bp, Homo sapien
cctctctcgctataggtcatgtttg

SEQ ID NO: 1706597 - DNA, 25 bp, Homo sapien
aaaaattatggtgagaggatgcgtc

SEQ ID NO: 1706598 - DNA, 25 bp, Homo sapien
cgtctcaggctgataaataacagag

SEQ ID NO: 1706599 - DNA, 25 bp, Homo sapien
tcatgcctgagattcccttcctgga

SEQ ID NO: 1706600 - DNA, 25 bp, Homo sapien
caagttatcccaggttgccagcctc

SEQ ID NO: 1706601 - DNA, 25 bp, Homo sapien
tcctaaggcacaatagtcttttcag

SEQ ID NO: 1706602 - DNA, 25 bp, Homo sapien
tccaatttggaagttgaaggtctgt

SEQ ID NO: 1706603 - DNA, 25 bp, Homo sapien
aagtgatgagagatgatttggtgca

SEQ ID NO: 1706604 - DNA, 25 bp, Homo sapien
gagccagatgctaacgaaacacagc

SEQ ID NO: 1706605 - DNA, 25 bp, Homo sapien
tcctgaaattggaggaagccggtcc

SEQ ID NO: 1706606 - DNA, 25 bp, Homo sapien
tagctttcgggaattgaccagggac

SEQ ID NO: 1706607 - DNA, 25 bp, Homo sapien
gagtgtcatgtgtaacaggccccat

SEQ ID NO: 1706608 - DNA, 25 bp, Homo sapien
tatatctgtgccagtgacgcccaag

SEQ ID NO: 1706609 - DNA, 25 bp, Homo sapien
tatgctgcataggtttctcacaagt

SEQ ID NO: 1706610 - DNA, 25 bp, Homo sapien
ttttatgctgcataggtttctcaca

SEQ ID NO: 1706611 - DNA, 25 bp, Homo sapien
atgacctccttccatcgttgaatcc

SEQ ID NO: 1706612 - DNA, 25 bp, Homo sapien
tgaatccctggattgaaatcatatt

SEQ ID NO: 1706613 - DNA, 25 bp, Homo sapien
gaagtctagtgacaaggtggtccca

SEQ ID NO: 1706614 - DNA, 25 bp, Homo sapien
tggaggatacaacactcagctggga

SEQ ID NO: 1706615 - DNA, 25 bp, Homo sapien
taacatgagtacaggagacaagcag

SEQ ID NO: 1706616 - DNA, 25 bp, Homo sapien
tctgagtcagaggttgagtcaccca

SEQ ID NO: 1706617 - DNA, 25 bp, Homo sapien
gataaccatctgaggcagtgttgtc

SEQ ID NO: 1706618 - DNA, 25 bp, Homo sapien
tagggtaccccttgataaccatctg

SEQ ID NO: 1706619 - DNA, 25 bp, Homo sapien
aaagagagggtgagatgatttcttc

SEQ ID NO: 1706620 - DNA, 25 bp, Homo sapien
ggcagtgttgtctgttgggtggacc

SEQ ID NO: 1706621 - DNA, 25 bp, Homo sapien
tgctcaatgagacttcagagaagct

SEQ ID NO: 1706622 - DNA, 25 bp, Homo sapien
tactttggacgtgtaacatgagcca

SEQ ID NO: 1706623 - DNA, 25 bp, Homo sapien
aagaactaggaggatgtttcatccc

SEQ ID NO: 1706624 - DNA, 25 bp, Homo sapien
tctaggagggatcattaaaagccag

SEQ ID NO: 1706625 - DNA, 25 bp, Homo sapien
acagagcaggaatcagacaccggga

SEQ ID NO: 1706626 - DNA, 25 bp, Homo sapien
ttgagttgcttactatgttctaggc

SEQ ID NO: 1706627 - DNA, 25 bp, Homo sapien
tgcccgcagagtgatgttcagaact

SEQ ID NO: 1706628 - DNA, 25 bp, Homo sapien
taaacatttccagcaacgaaggaca

SEQ ID NO: 1706629 - DNA, 25 bp, Homo sapien
tggctgcttcctgtctgtacagcca

SEQ ID NO: 1706630 - DNA, 25 bp, Homo sapien
tgcttcctgtctgtacagccacttc

SEQ ID NO: 1706631 - DNA, 25 bp, Homo sapien
tcccagatcctcttttcttggctgc

SEQ ID NO: 1706632 - DNA, 25 bp, Homo sapien
agtttgttttgtggccatcttggcc

SEQ ID NO: 1706633 - DNA, 25 bp, Homo sapien
cttccccttgtcaggatatgttggc

SEQ ID NO: 1706634 - DNA, 25 bp, Homo sapien
ccccttgtcaggatatgttggcgac

SEQ ID NO: 1706635 - DNA, 25 bp, Homo sapien
tccccttgtcaggatatgttggcga

SEQ ID NO: 1706636 - DNA, 25 bp, Homo sapien
ccttgtcaggatatgttggcgacat

SEQ ID NO: 1706637 - DNA, 25 bp, Homo sapien
cagggctcagtctaggggccttaca

SEQ ID NO: 1706638 - DNA, 25 bp, Homo sapien
gagtcctgagatgtgcgggggatac

SEQ ID NO: 1706639 - DNA, 25 bp, Homo sapien
tgtgcgggggatactggctccttcc

SEQ ID NO: 1706640 - DNA, 25 bp, Homo sapien
ccataggactgtcatcagggtcagc

SEQ ID NO: 1706641 - DNA, 25 bp, Homo sapien
gtcaggaaaacaagaactcattaaa

SEQ ID NO: 1706642 - DNA, 25 bp, Homo sapien
gcagtcaggaaaacaagaactcatt

SEQ ID NO: 1706643 - DNA, 25 bp, Homo sapien
cagtcaggaaaacaagaactcatta

SEQ ID NO: 1706644 - DNA, 25 bp, Homo sapien
caggaaaacaagaactcattaaagg

SEQ ID NO: 1706645 - DNA, 25 bp, Homo sapien
gagttggaaaaggttggcagaatga

SEQ ID NO: 1706646 - DNA, 25 bp, Homo sapien
tggaccacagatatgagcagcacca

SEQ ID NO: 1706647 - DNA, 25 bp, Homo sapien
caggggccccctgaaacctgcagga

SEQ ID NO: 1706648 - DNA, 25 bp, Homo sapien
cccctgaaacctgcaggatcatcat

SEQ ID NO: 1706649 - DNA, 25 bp, Homo sapien
ccatcagtaatgctgtcagagccac

SEQ ID NO: 1706650 - DNA, 25 bp, Homo sapien
tagatgagcccgtccacaacgcgct

SEQ ID NO: 1706651 - DNA, 25 bp, Homo sapien
tgagtcccattgaacgcatagcatt

SEQ ID NO: 1706652 - DNA, 25 bp, Homo sapien
gcatagcattcctgccgttcctggt

SEQ ID NO: 1706653 - DNA, 25 bp, Homo sapien
tgccgttcctggtagacggaattct

SEQ ID NO: 1706654 - DNA, 25 bp, Homo sapien
gtactcgcctatgggccgccccagc

SEQ ID NO: 1706655 - DNA, 25 bp, Homo sapien
cccactgcgctgtcaaaatgcacgt

SEQ ID NO: 1706656 - DNA, 25 bp, Homo sapien
gctccatcactgctaggaactcccc

SEQ ID NO: 1706657 - DNA, 25 bp, Homo sapien
ctcggctcgcttccgttccataaag

SEQ ID NO: 1706658 - DNA, 25 bp, Homo sapien
ccggatgagtggctccatcagctcg

SEQ ID NO: 1706659 - DNA, 25 bp, Homo sapien
gctccatcagctcgtacttgtgtct

SEQ ID NO: 1706660 - DNA, 25 bp, Homo sapien
tcagctcgtacttgtgtctgcacac

SEQ ID NO: 1706661 - DNA, 25 bp, Homo sapien
gcgctgccggatgagtggctccatc

SEQ ID NO: 1706662 - DNA, 25 bp, Homo sapien
gacacgacgccccttttcagcagga

SEQ ID NO: 1706663 - DNA, 25 bp, Homo sapien
caccccctaacagcagttatggtta

SEQ ID NO: 1706664 - DNA, 25 bp, Homo sapien
ctaacagcagttatggttacgtctc

SEQ ID NO: 1706665 - DNA, 25 bp, Homo sapien
atcgtcgtccaacaccccctaacag

SEQ ID NO: 1706666 - DNA, 25 bp, Homo sapien
ttatgccctaatagcaagtcaaggg

SEQ ID NO: 1706667 - DNA, 25 bp, Homo sapien
ggaattgccaagattaacaccaaag

SEQ ID NO: 1706668 - DNA, 25 bp, Homo sapien
taacaggtatcaaactctactgcca

SEQ ID NO: 1706669 - DNA, 25 bp, Homo sapien
gaagattggtaaatggtgcactcta

SEQ ID NO: 1706670 - DNA, 25 bp, Homo sapien
gccatgtcgctgatttgggcctcta

SEQ ID NO: 1706671 - DNA, 25 bp, Homo sapien
tgtcgctgatttgggcctctatgaa

SEQ ID NO: 1706672 - DNA, 25 bp, Homo sapien
agaaaatgctgccatgtcgctgatt

SEQ ID NO: 1706673 - DNA, 25 bp, Homo sapien
aatgctgccatgtcgctgatttggg

SEQ ID NO: 1706674 - DNA, 25 bp, Homo sapien
tggaaaagtggaatagcatttgaga

SEQ ID NO: 1706675 - DNA, 25 bp, Homo sapien
tatttcttagacatgctcattatgg

SEQ ID NO: 1706676 - DNA, 25 bp, Homo sapien
aaaataggaatgatggccaggcgca

SEQ ID NO: 1706677 - DNA, 25 bp, Homo sapien
ctaggagtggcgaagtggaaaagtg

SEQ ID NO: 1706678 - DNA, 25 bp, Homo sapien
tagacaagcaggtcgtggtgctgct

SEQ ID NO: 1706679 - DNA, 25 bp, Homo sapien
ctgtcacgtggtagacaagcaggtc

SEQ ID NO: 1706680 - DNA, 25 bp, Homo sapien
tgtcacgtggtagacaagcaggtcg

SEQ ID NO: 1706681 - DNA, 25 bp, Homo sapien
acaagcaggtcgtggtgctgctggg

SEQ ID NO: 1706682 - DNA, 25 bp, Homo sapien
atcggacttgaatgctgtctgggta

SEQ ID NO: 1706683 - DNA, 25 bp, Homo sapien
catcggacttgaatgctgtctgggt

SEQ ID NO: 1706684 - DNA, 25 bp, Homo sapien
tccactccacggtgacaggactgtc

SEQ ID NO: 1706685 - DNA, 25 bp, Homo sapien
cactccacggtgacaggactgtcca

SEQ ID NO: 1706686 - DNA, 25 bp, Homo sapien
actccacggtgacaggactgtccag

SEQ ID NO: 1706687 - DNA, 25 bp, Homo sapien
tccacggtgacaggactgtccaggc

SEQ ID NO: 1706688 - DNA, 25 bp, Homo sapien
gacatggtcccagggtatagacaca

SEQ ID NO: 1706689 - DNA, 25 bp, Homo sapien
tgaatccttaggacctcctaggccg

SEQ ID NO: 1706690 - DNA, 25 bp, Homo sapien
gagtcccctgctcttcagaggtgga

SEQ ID NO: 1706691 - DNA, 25 bp, Homo sapien
gtcagttcaggaaggtgtctgcatc

SEQ ID NO: 1706692 - DNA, 25 bp, Homo sapien
cagatgatgagccccagcatgaagc

SEQ ID NO: 1706693 - DNA, 25 bp, Homo sapien
ttcctccttctgtgcgtgaagatgt

SEQ ID NO: 1706694 - DNA, 25 bp, Homo sapien
atgagccccagcatgaagcccctgg

SEQ ID NO: 1706695 - DNA, 25 bp, Homo sapien
ccttctgtgcgtgaagatgtccact

SEQ ID NO: 1706696 - DNA, 25 bp, Homo sapien
acagtaatcccaggttgctggcccc

SEQ ID NO: 1706697 - DNA, 25 bp, Homo sapien
tgataaagaatagagttgatctgag

SEQ ID NO: 1706698 - DNA, 25 bp, Homo sapien
aataacggtgagaggctgaatctca

SEQ ID NO: 1706699 - DNA, 25 bp, Homo sapien
gagagaaaaataacggtgagaggct

SEQ ID NO: 1706700 - DNA, 25 bp, Homo sapien
tcctcgaagcaggtactgggactaa

SEQ ID NO: 1706701 - DNA, 25 bp, Homo sapien
cattagtcttttaggcaaggtcagc

SEQ ID NO: 1706702 - DNA, 25 bp, Homo sapien
ttgattactcatggcactaaggaga

SEQ ID NO: 1706703 - DNA, 25 bp, Homo sapien
gaacttggttggaggccccatgaga

SEQ ID NO: 1706704 - DNA, 25 bp, Homo sapien
gaccatgtgtcaacgtatgcagagt

SEQ ID NO: 1706705 - DNA, 25 bp, Homo sapien
tcaagcagcagaccatgtgtcaacg

SEQ ID NO: 1706706 - DNA, 25 bp, Homo sapien
tcaacgtatgcagagtttgtgcaga

SEQ ID NO: 1706707 - DNA, 25 bp, Homo sapien
ttccccttcaagcagcagaccatgt

SEQ ID NO: 1706708 - DNA, 25 bp, Homo sapien
gttccatctgggaacgccaggagta

SEQ ID NO: 1706709 - DNA, 25 bp, Homo sapien
tgtaagaagatcctctatcagttgc

SEQ ID NO: 1706710 - DNA, 25 bp, Homo sapien
gaacgccaggagtaatggtcccact

SEQ ID NO: 1706711 - DNA, 25 bp, Homo sapien
tcagtcctgtattgtgttcagtggc

SEQ ID NO: 1706712 - DNA, 25 bp, Homo sapien
taaacactggtttctcagtcctctg

SEQ ID NO: 1706713 - DNA, 25 bp, Homo sapien
gcaatggaggcttattcatagtcaa

SEQ ID NO: 1706714 - DNA, 25 bp, Homo sapien
tctgggtataaagtagattgcctcc

SEQ ID NO: 1706715 - DNA, 25 bp, Homo sapien
tcatatgtggcactgagagatgggc

SEQ ID NO: 1706716 - DNA, 25 bp, Homo sapien
gtcctcattcatcagcctttttatt

SEQ ID NO: 1706717 - DNA, 25 bp, Homo sapien
gaaagcagtcgggatggtgagacca

SEQ ID NO: 1706718 - DNA, 25 bp, Homo sapien
ggagaaagcagtcgggatggtgaga

SEQ ID NO: 1706719 - DNA, 25 bp, Homo sapien
tcctcattcatcagcctttttattt

SEQ ID NO: 1706720 - DNA, 25 bp, Homo sapien
tttcacgagtgtagtcccggaggcc

SEQ ID NO: 1706721 - DNA, 25 bp, Homo sapien
tcccaggttgactaagaaatgccag

SEQ ID NO: 1706722 - DNA, 25 bp, Homo sapien
ttttgccctgcgtcccttctctttg

SEQ ID NO: 1706723 - DNA, 25 bp, Homo sapien
cagccctgggcacatagcataggct

SEQ ID NO: 1706724 - DNA, 25 bp, Homo sapien
gttgtctctcttcggtggccttgag

SEQ ID NO: 1706725 - DNA, 25 bp, Homo sapien
tctctgaatttgtcgggttctccca

SEQ ID NO: 1706726 - DNA, 25 bp, Homo sapien
caagggatctgcttgatatcccaag

SEQ ID NO: 1706727 - DNA, 25 bp, Homo sapien
aagggaccccagatacctgtgagga

SEQ ID NO: 1706728 - DNA, 25 bp, Homo sapien
gtataccaattttagtgacacaaat

SEQ ID NO: 1706729 - DNA, 25 bp, Homo sapien
gccagtcaaatatagcagtgggagg

SEQ ID NO: 1706730 - DNA, 25 bp, Homo sapien
ccaattttagtgacacaaatgttaa

SEQ ID NO: 1706731 - DNA, 25 bp, Homo sapien
cagtcaaatatagcagtgggaggtt

SEQ ID NO: 1706732 - DNA, 25 bp, Homo sapien
tcccgtctgtacaaagatggctgcc

SEQ ID NO: 1706733 - DNA, 25 bp, Homo sapien
gagcgacgggcttaattcgacccaa

SEQ ID NO: 1706734 - DNA, 25 bp, Homo sapien
tagatcccgcgagaacaggaagttc

SEQ ID NO: 1706735 - DNA, 25 bp, Homo sapien
aatatggcggcactccggtagcgac

SEQ ID NO: 1706736 - DNA, 25 bp, Homo sapien
gactcaactctatacctacacaggg

SEQ ID NO: 1706737 - DNA, 25 bp, Homo sapien
gactcattaggtgaggaaaaggcct

SEQ ID NO: 1706738 - DNA, 25 bp, Homo sapien
cacagggtccgctttactccaatcg

SEQ ID NO: 1706739 - DNA, 25 bp, Homo sapien
gggccctgggacactaatctttcac

SEQ ID NO: 1706740 - DNA, 25 bp, Homo sapien
gctatggccatggtgtaaatcctca

SEQ ID NO: 1706741 - DNA, 25 bp, Homo sapien
gatcgtcgtgcaggtcgtcatgacc

SEQ ID NO: 1706742 - DNA, 25 bp, Homo sapien
ccagatgctctcgtgagtgtggcca

SEQ ID NO: 1706743 - DNA, 25 bp, Homo sapien
ggaagtcctcttgcagatcgtcgtg

SEQ ID NO: 1706744 - DNA, 25 bp, Homo sapien
cagagagtgacagcatccaggtcct

SEQ ID NO: 1706745 - DNA, 25 bp, Homo sapien
gtggagtttcccaacaatccagaac

SEQ ID NO: 1706746 - DNA, 25 bp, Homo sapien
gagagtcaaggtcaagtactgtgga

SEQ ID NO: 1706747 - DNA, 25 bp, Homo sapien
aggtcaagtactgtggagtttccca

SEQ ID NO: 1706748 - DNA, 25 bp, Homo sapien
ctggtgagggagagtcaaggtcaag

SEQ ID NO: 1706749 - DNA, 25 bp, Homo sapien
aggagcccaccggaagcaaaactga

SEQ ID NO: 1706750 - DNA, 25 bp, Homo sapien
gatctgaagtagagagcgatgccgg

SEQ ID NO: 1706751 - DNA, 25 bp, Homo sapien
gagttcgactccacggggataagga

SEQ ID NO: 1706752 - DNA, 25 bp, Homo sapien
gatgccggggagagttcgactccac

SEQ ID NO: 1706753 - DNA, 25 bp, Homo sapien
ctgtgggagtgtccatgtccgggtt

SEQ ID NO: 1706754 - DNA, 25 bp, Homo sapien
catgtccgggttgctccagagtgtg

SEQ ID NO: 1706755 - DNA, 25 bp, Homo sapien
gtccatgtccgggttgctccagagt

SEQ ID NO: 1706756 - DNA, 25 bp, Homo sapien
ggagtgtccatgtccgggttgctcc

SEQ ID NO: 1706757 - DNA, 25 bp, Homo sapien
tgtgaccatgtcctcctttcacatg

SEQ ID NO: 1706758 - DNA, 25 bp, Homo sapien
ccacgtgtatgactgtgagcgtgtc

SEQ ID NO: 1706759 - DNA, 25 bp, Homo sapien
aaatttctccacgacaagaaaggca

SEQ ID NO: 1706760 - DNA, 25 bp, Homo sapien
gtcttccatgtccatgacttccacg

SEQ ID NO: 1706761 - DNA, 25 bp, Homo sapien
aaagagttggtcagagtggagaaca

SEQ ID NO: 1706762 - DNA, 25 bp, Homo sapien
gatcttccaacatgtcctctccctc

SEQ ID NO: 1706763 - DNA, 25 bp, Homo sapien
gaagaaaagagttggtcagagtgga

SEQ ID NO: 1706764 - DNA, 25 bp, Homo sapien
cagatcttccaacatgtcctctccc

SEQ ID NO: 1706765 - DNA, 25 bp, Homo sapien
catctttgggtactgtgctccctcc

SEQ ID NO: 1706766 - DNA, 25 bp, Homo sapien
gcccatctttgggtactgtgctccc

SEQ ID NO: 1706767 - DNA, 25 bp, Homo sapien
tctttgggtactgtgctccctcctc

SEQ ID NO: 1706768 - DNA, 25 bp, Homo sapien
actggcccatctttgggtactgtgc

SEQ ID NO: 1706769 - DNA, 25 bp, Homo sapien
taagcctcttttttcttcttcagcg

SEQ ID NO: 1706770 - DNA, 25 bp, Homo sapien
agcctcttttttcttcttcagcgtt

SEQ ID NO: 1706771 - DNA, 25 bp, Homo sapien
aagcctcttttttcttcttcagcgt

SEQ ID NO: 1706772 - DNA, 25 bp, Homo sapien
ctaagcctcttttttcttcttcagc

SEQ ID NO: 1706773 - DNA, 25 bp, Homo sapien
gaccatcagtgaagttgtgtgccaa

SEQ ID NO: 1706774 - DNA, 25 bp, Homo sapien
gtcagcagccagattcaggtacccc

SEQ ID NO: 1706775 - DNA, 25 bp, Homo sapien
ggcacttcatgtagcaggacagtca

SEQ ID NO: 1706776 - DNA, 25 bp, Homo sapien
ttgtggtcaggatccctagtccccg

SEQ ID NO: 1706777 - DNA, 25 bp, Homo sapien
tcctccttcagtgagaagggcacag

SEQ ID NO: 1706778 - DNA, 25 bp, Homo sapien
ctgctgtcagtagttgcagacgcat

SEQ ID NO: 1706779 - DNA, 25 bp, Homo sapien
ccagtgcccctactgctgtcagtag

SEQ ID NO: 1706780 - DNA, 25 bp, Homo sapien
gctcctccttcagtgagaagggcac

SEQ ID NO: 1706781 - DNA, 25 bp, Homo sapien
tcaaggtgggcaatcagcaccatca

SEQ ID NO: 1706782 - DNA, 25 bp, Homo sapien
tgctacgtagataaagccacctgca

SEQ ID NO: 1706783 - DNA, 25 bp, Homo sapien
tgcagtaaatggcaggacccagcca

SEQ ID NO: 1706784 - DNA, 25 bp, Homo sapien
tgattgcaatggtgatgcctccctc

SEQ ID NO: 1706785 - DNA, 25 bp, Homo sapien
tgtagcaacttggttctccgagaac

SEQ ID NO: 1706786 - DNA, 25 bp, Homo sapien
gccttccaaatgcaacatggtcaga

SEQ ID NO: 1706787 - DNA, 25 bp, Homo sapien
aagtaaccattctcccaggctacag

SEQ ID NO: 1706788 - DNA, 25 bp, Homo sapien
tgaaggccctaatgccaaagtaacc

SEQ ID NO: 1706789 - DNA, 25 bp, Homo sapien
aatcaaaggcccgccagccttaggc

SEQ ID NO: 1706790 - DNA, 25 bp, Homo sapien
tgtggagaagacaaggggccccatt

SEQ ID NO: 1706791 - DNA, 25 bp, Homo sapien
agcactaagccaatcccagcgcaga

SEQ ID NO: 1706792 - DNA, 25 bp, Homo sapien
atctgcggccaccagcgcaggccga

SEQ ID NO: 1706793 - DNA, 25 bp, Homo sapien
tgaccaaggccagtgcggagcggag

SEQ ID NO: 1706794 - DNA, 25 bp, Homo sapien
agtgcggagcggagtcggttctgga

SEQ ID NO: 1706795 - DNA, 25 bp, Homo sapien
agcggagtcggttctggagctgaga

SEQ ID NO: 1706796 - DNA, 25 bp, Homo sapien
tgcggagcggagtcggttctggagc

SEQ ID NO: 1706797 - DNA, 25 bp, Homo sapien
acagcggccgcgcactccaagggca

SEQ ID NO: 1706798 - DNA, 25 bp, Homo sapien
ctgacctcactccaataccccaaac

SEQ ID NO: 1706799 - DNA, 25 bp, Homo sapien
gggtaaggggccagaggtcacagcg

SEQ ID NO: 1706800 - DNA, 25 bp, Homo sapien
tgaggtaggacagaacacgccggac

SEQ ID NO: 1706801 - DNA, 25 bp, Homo sapien
aggtcgcaggcagctacggtggccc

SEQ ID NO: 1706802 - DNA, 25 bp, Homo sapien
ggcgtacactgaccgctcggccgat

SEQ ID NO: 1706803 - DNA, 25 bp, Homo sapien
ccctctccggccaggcgtacactga

SEQ ID NO: 1706804 - DNA, 25 bp, Homo sapien
agccgcaccgtctcctgtgccgctg

SEQ ID NO: 1706805 - DNA, 25 bp, Homo sapien
agctatgactttgtcccagtcatcc

SEQ ID NO: 1706806 - DNA, 25 bp, Homo sapien
cctcagacatgtgcagcagaaactc

SEQ ID NO: 1706807 - DNA, 25 bp, Homo sapien
caacgacagatggtgggcgagaaaa

SEQ ID NO: 1706808 - DNA, 25 bp, Homo sapien
gtgatgcccgcacaggacacaacga

SEQ ID NO: 1706809 - DNA, 25 bp, Homo sapien
ctttcctacgatgctactgatgttg

SEQ ID NO: 1706810 - DNA, 25 bp, Homo sapien
cattggacaccagggcttgtgctgc

SEQ ID NO: 1706811 - DNA, 25 bp, Homo sapien
tgttgatgatggaaccacgacaacc

SEQ ID NO: 1706812 - DNA, 25 bp, Homo sapien
cctacgatgctactgatgttgatga

SEQ ID NO: 1706813 - DNA, 25 bp, Homo sapien
atcactccagccttggatgctgcat

SEQ ID NO: 1706814 - DNA, 25 bp, Homo sapien
cactccagccttggatgctgcatag

SEQ ID NO: 1706815 - DNA, 25 bp, Homo sapien
actccagccttggatgctgcatagt

SEQ ID NO: 1706816 - DNA, 25 bp, Homo sapien
ccgggctgcggtctgggtcagccca

SEQ ID NO: 1706817 - DNA, 25 bp, Homo sapien
gaaggagagtggctgccgattctgg

SEQ ID NO: 1706818 - DNA, 25 bp, Homo sapien
ctgccgattctggagagggctgaat

SEQ ID NO: 1706819 - DNA, 25 bp, Homo sapien
agagggctgaatgctggtacctccc

SEQ ID NO: 1706820 - DNA, 25 bp, Homo sapien
agagtggctgccgattctggagagg

SEQ ID NO: 1706821 - DNA, 25 bp, Homo sapien
gacagagttacagcggatcccatgt

SEQ ID NO: 1706822 - DNA, 25 bp, Homo sapien
tgtggcactttctgtgtcatgggtg

SEQ ID NO: 1706823 - DNA, 25 bp, Homo sapien
aggacagagttacagcggatcccat

SEQ ID NO: 1706824 - DNA, 25 bp, Homo sapien
gtggcactttctgtgtcatgggtgt

SEQ ID NO: 1706825 - DNA, 25 bp, Homo sapien
aagcccagagagattgagtctctga

SEQ ID NO: 1706826 - DNA, 25 bp, Homo sapien
tctgaatgattctgccctccaccca

SEQ ID NO: 1706827 - DNA, 25 bp, Homo sapien
gaatatttaatgtttgccaggaact

SEQ ID NO: 1706828 - DNA, 25 bp, Homo sapien
aaatactcatgtgggtgaaagcttc

SEQ ID NO: 1706829 - DNA, 25 bp, Homo sapien
cccaagtgtcccatcgggatcattt

SEQ ID NO: 1706830 - DNA, 25 bp, Homo sapien
caagtgtcccatcgggatcatttca

SEQ ID NO: 1706831 - DNA, 25 bp, Homo sapien
gtcccatcgggatcatttcagtaat

SEQ ID NO: 1706832 - DNA, 25 bp, Homo sapien
gtgtcccatcgggatcatttcagta

SEQ ID NO: 1706833 - DNA, 25 bp, Homo sapien
aacagccataatctcccaccaaaga

SEQ ID NO: 1706834 - DNA, 25 bp, Homo sapien
tctgctcactcccatagacccaaaa

SEQ ID NO: 1706835 - DNA, 25 bp, Homo sapien
tcccatagacccaaaacagccataa

SEQ ID NO: 1706836 - DNA, 25 bp, Homo sapien
taatctcccaccaaagacatccctc

SEQ ID NO: 1706837 - DNA, 25 bp, Homo sapien
gatgccaagaatgcgaccacatctg

SEQ ID NO: 1706838 - DNA, 25 bp, Homo sapien
tgtgatgtatccactatcttcagat

SEQ ID NO: 1706839 - DNA, 25 bp, Homo sapien
tgaggtccctgtgatgtatccacta

SEQ ID NO: 1706840 - DNA, 25 bp, Homo sapien
aagaatgcgaccacatctgccacat

SEQ ID NO: 1706841 - DNA, 25 bp, Homo sapien
tatagtctgggttctacttctctgc

SEQ ID NO: 1706842 - DNA, 25 bp, Homo sapien
acatttggacagatgcatgggtgga

SEQ ID NO: 1706843 - DNA, 25 bp, Homo sapien
agtggctccagactccccttacttg

SEQ ID NO: 1706844 - DNA, 25 bp, Homo sapien
tacttgctttctcatatagtctggg

SEQ ID NO: 1706845 - DNA, 25 bp, Homo sapien
tcagcattcctgaaccatacactgc

SEQ ID NO: 1706846 - DNA, 25 bp, Homo sapien
actgccaccccttttgtatcctggg

SEQ ID NO: 1706847 - DNA, 25 bp, Homo sapien
tgggaacttagagtcctcatcagca

SEQ ID NO: 1706848 - DNA, 25 bp, Homo sapien
tgtatcctgggaacttagagtcctc

SEQ ID NO: 1706849 - DNA, 25 bp, Homo sapien
gacttggaatttattagggtcacaa

SEQ ID NO: 1706850 - DNA, 25 bp, Homo sapien
gaggacttggaatttattagggtca

SEQ ID NO: 1706851 - DNA, 25 bp, Homo sapien
tggaatttattagggtcacaagcac

SEQ ID NO: 1706852 - DNA, 25 bp, Homo sapien
cttggaatttattagggtcacaagc

SEQ ID NO: 1706853 - DNA, 25 bp, Homo sapien
agactcaactctcggccggagccat

SEQ ID NO: 1706854 - DNA, 25 bp, Homo sapien
ttggacaatcaggagccgcggcccg

SEQ ID NO: 1706855 - DNA, 25 bp, Homo sapien
ggcggctcgggacgtccagactcaa

SEQ ID NO: 1706856 - DNA, 25 bp, Homo sapien
catagactcgagaattgcgtttgga

SEQ ID NO: 1706857 - DNA, 25 bp, Homo sapien
ctgggccaagttcgctcggtccgca

SEQ ID NO: 1706858 - DNA, 25 bp, Homo sapien
cgggctcctgggccaagttcgctcg

SEQ ID NO: 1706859 - DNA, 25 bp, Homo sapien
gtccgcaaccgctgctcagacagca

SEQ ID NO: 1706860 - DNA, 25 bp, Homo sapien
cgcctctccctaggcccgggctcct

SEQ ID NO: 1706861 - DNA, 25 bp, Homo sapien
tgaccgggcgcagaccccccaccag

SEQ ID NO: 1706862 - DNA, 25 bp, Homo sapien
ggctccacagccgaggagaaggcga

SEQ ID NO: 1706863 - DNA, 25 bp, Homo sapien
ccacagccgaggagaaggcgaagaa

SEQ ID NO: 1706864 - DNA, 25 bp, Homo sapien
ccaccagggctccacagccgaggag

SEQ ID NO: 1706865 - DNA, 25 bp, Homo sapien
gcagctcatacagactcagttccca

SEQ ID NO: 1706866 - DNA, 25 bp, Homo sapien
gtccggtgcagctcatacagactca

SEQ ID NO: 1706867 - DNA, 25 bp, Homo sapien
gcattctgggcattcgccggcgtcg

SEQ ID NO: 1706868 - DNA, 25 bp, Homo sapien
attctgggcattcgccggcgtcgtc

SEQ ID NO: 1706869 - DNA, 25 bp, Homo sapien
ggcatcagtgagtagaaaggtggtg

SEQ ID NO: 1706870 - DNA, 25 bp, Homo sapien
ctgaaggcatcagtgagtagaaagg

SEQ ID NO: 1706871 - DNA, 25 bp, Homo sapien
gagtagaaaggtggtgtgggttaga

SEQ ID NO: 1706872 - DNA, 25 bp, Homo sapien
catcagtgagtagaaaggtggtgtg

SEQ ID NO: 1706873 - DNA, 25 bp, Homo sapien
cagatagggcacatgagttctgaat

SEQ ID NO: 1706874 - DNA, 25 bp, Homo sapien
ctgtggaggcactccttggtggtca

SEQ ID NO: 1706875 - DNA, 25 bp, Homo sapien
tgaatgcagtgaccgaggggaaaca

SEQ ID NO: 1706876 - DNA, 25 bp, Homo sapien
ggtcatcgtattcttcagcatgtcc

SEQ ID NO: 1706877 - DNA, 25 bp, Homo sapien
agaccagtgagagggccctaacttt

SEQ ID NO: 1706878 - DNA, 25 bp, Homo sapien
taggctgaaccaagaccagtgagag

SEQ ID NO: 1706879 - DNA, 25 bp, Homo sapien
gaagcctaggctgaaccaagaccag

SEQ ID NO: 1706880 - DNA, 25 bp, Homo sapien
gggaactgaagcctaggctgaacca

SEQ ID NO: 1706881 - DNA, 25 bp, Homo sapien
accagcttctttcggcaggtaggac

SEQ ID NO: 1706882 - DNA, 25 bp, Homo sapien
tctggccgtagggatcgcttggaca

SEQ ID NO: 1706883 - DNA, 25 bp, Homo sapien
cccggctaggatagatcttagagat

SEQ ID NO: 1706884 - DNA, 25 bp, Homo sapien
tcttagagatcagggcatcaaagtt

SEQ ID NO: 1706885 - DNA, 25 bp, Homo sapien
atgcgtagcccctcctcaatgctgg

SEQ ID NO: 1706886 - DNA, 25 bp, Homo sapien
catggcctgcatgcgtagcccctcc

SEQ ID NO: 1706887 - DNA, 25 bp, Homo sapien
ctcctcaatgctggagctcaatgcc

SEQ ID NO: 1706888 - DNA, 25 bp, Homo sapien
tgcaggcggctcaggcggataagca

SEQ ID NO: 1706889 - DNA, 25 bp, Homo sapien
gagcagggccagttgtttactaaga

SEQ ID NO: 1706890 - DNA, 25 bp, Homo sapien
taagaaactgcaatttacacccatg

SEQ ID NO: 1706891 - DNA, 25 bp, Homo sapien
ccctaatgatcagtctgtggtcagc

SEQ ID NO: 1706892 - DNA, 25 bp, Homo sapien
tgctgaggcttagaagctagcaggc

SEQ ID NO: 1706893 - DNA, 25 bp, Homo sapien
taacttccagcagtatgaatccggg

SEQ ID NO: 1706894 - DNA, 25 bp, Homo sapien
cttgtgaaatgcagactctcgggcc

SEQ ID NO: 1706895 - DNA, 25 bp, Homo sapien
tactaagtgttttgcaccaatcccc

SEQ ID NO: 1706896 - DNA, 25 bp, Homo sapien
cacctctcaaagtgcggtagcagca

SEQ ID NO: 1706897 - DNA, 25 bp, Homo sapien
ggtcaccagagtcttccgaaccggc

SEQ ID NO: 1706898 - DNA, 25 bp, Homo sapien
ccctccacggggtcgcttgggagca

SEQ ID NO: 1706899 - DNA, 25 bp, Homo sapien
tcatcgttgtggtctgatctgaccc

SEQ ID NO: 1706900 - DNA, 25 bp, Homo sapien
ggtatcggccgcctcacacgctggg

SEQ ID NO: 1706901 - DNA, 25 bp, Homo sapien
ccggaacacgagctcaatttctcca

SEQ ID NO: 1706902 - DNA, 25 bp, Homo sapien
gtggggccggaacacgagctcaatt

SEQ ID NO: 1706903 - DNA, 25 bp, Homo sapien
ggaacacgagctcaatttctccacc

SEQ ID NO: 1706904 - DNA, 25 bp, Homo sapien
gggccggaacacgagctcaatttct

SEQ ID NO: 1706905 - DNA, 25 bp, Homo sapien
tctgatggaaatctaggtgatcttt

SEQ ID NO: 1706906 - DNA, 25 bp, Homo sapien
ggcttagagccagagcgcctcagat

SEQ ID NO: 1706907 - DNA, 25 bp, Homo sapien
gggtttgggcaaagcccacttctga

SEQ ID NO: 1706908 - DNA, 25 bp, Homo sapien
gctttccaaaatggattctgggttg

SEQ ID NO: 1706909 - DNA, 25 bp, Homo sapien
tgttgcctccgctcgagggcaatgc

SEQ ID NO: 1706910 - DNA, 25 bp, Homo sapien
ggtcctccggtgtcagaggcgcccc

SEQ ID NO: 1706911 - DNA, 25 bp, Homo sapien
ggtggtccactgtggcattcccagt

SEQ ID NO: 1706912 - DNA, 25 bp, Homo sapien
aatgcgcagggccaagtacttggag

SEQ ID NO: 1706913 - DNA, 25 bp, Homo sapien
tccaggtgcgatgtagatggtgtac

SEQ ID NO: 1706914 - DNA, 25 bp, Homo sapien
ccccgcctccaggtgcgatgtagat

SEQ ID NO: 1706915 - DNA, 25 bp, Homo sapien
ccgcctccaggtgcgatgtagatgg

SEQ ID NO: 1706916 - DNA, 25 bp, Homo sapien
cctccaggtgcgatgtagatggtgt

SEQ ID NO: 1706917 - DNA, 25 bp, Homo sapien
tccttggtgggagcatagcacagct

SEQ ID NO: 1706918 - DNA, 25 bp, Homo sapien
tggtgggagcatagcacagctccag

SEQ ID NO: 1706919 - DNA, 25 bp, Homo sapien
gggagcatagcacagctccagtggc

SEQ ID NO: 1706920 - DNA, 25 bp, Homo sapien
tttggatccttggtgggagcatagc

SEQ ID NO: 1706921 - DNA, 25 bp, Homo sapien
tgtataaaagccacgtgtcctcatt

SEQ ID NO: 1706922 - DNA, 25 bp, Homo sapien
gaatgggagggttcttcaccttctc

SEQ ID NO: 1706923 - DNA, 25 bp, Homo sapien
tatagatgggacgttgcagggcaat

SEQ ID NO: 1706924 - DNA, 25 bp, Homo sapien
ttctccaacacctcgtatagatggg

SEQ ID NO: 1706925 - DNA, 25 bp, Homo sapien
tgtgaaagtgttcgcacagggtcag

SEQ ID NO: 1706926 - DNA, 25 bp, Homo sapien
ctgtgtgaaagtgttcgcacagggt

SEQ ID NO: 1706927 - DNA, 25 bp, Homo sapien
tgaaagtgttcgcacagggtcaggt

SEQ ID NO: 1706928 - DNA, 25 bp, Homo sapien
gtgtgaaagtgttcgcacagggtca

SEQ ID NO: 1706929 - DNA, 25 bp, Homo sapien
atagcccttgcctcactggtcactg

SEQ ID NO: 1706930 - DNA, 25 bp, Homo sapien
gacgcccccaggtatggttctgctg

SEQ ID NO: 1706931 - DNA, 25 bp, Homo sapien
tatcagaaaccatgcctgcagcctt

SEQ ID NO: 1706932 - DNA, 25 bp, Homo sapien
accagccctgagcaatgtccatagc

SEQ ID NO: 1706933 - DNA, 25 bp, Homo sapien
tcatcaaataggggcgccgggtgta

SEQ ID NO: 1706934 - DNA, 25 bp, Homo sapien
ggcacaggaagatggctcatcaaat

SEQ ID NO: 1706935 - DNA, 25 bp, Homo sapien
gcacaggaagatggctcatcaaata

SEQ ID NO: 1706936 - DNA, 25 bp, Homo sapien
ggctcatcaaataggggcgccgggt

SEQ ID NO: 1706937 - DNA, 25 bp, Homo sapien
cctataacatgaagagtaacagtaa

SEQ ID NO: 1706938 - DNA, 25 bp, Homo sapien
taacagtaaactcgtaagaacagga

SEQ ID NO: 1706939 - DNA, 25 bp, Homo sapien
gagtaacagtaaactcgtaagaaca

SEQ ID NO: 1706940 - DNA, 25 bp, Homo sapien
tgaagagtaacagtaaactcgtaag

SEQ ID NO: 1706941 - DNA, 25 bp, Homo sapien
ttgcagtccttagtgtctccatata

SEQ ID NO: 1706942 - DNA, 25 bp, Homo sapien
tgcagtccttagtgtctccatataa

SEQ ID NO: 1706943 - DNA, 25 bp, Homo sapien
ctaaataacccgtttgtcactgaga

SEQ ID NO: 1706944 - DNA, 25 bp, Homo sapien
aataacccgtttgtcactgagatct

SEQ ID NO: 1706945 - DNA, 25 bp, Homo sapien
tttgcaggagagctagatgccccac

SEQ ID NO: 1706946 - DNA, 25 bp, Homo sapien
tcttgtccagatcccactcattgtg

SEQ ID NO: 1706947 - DNA, 25 bp, Homo sapien
ccacacttggctgggtatgtagcaa

SEQ ID NO: 1706948 - DNA, 25 bp, Homo sapien
tcattgtgggagtcagttggctgct

SEQ ID NO: 1706949 - DNA, 25 bp, Homo sapien
gcaaagcgcatctcctttaagattt

SEQ ID NO: 1706950 - DNA, 25 bp, Homo sapien
cagattccctcttcaagtaacagca

SEQ ID NO: 1706951 - DNA, 25 bp, Homo sapien
caaaagctttaatggaaggcccaca

SEQ ID NO: 1706952 - DNA, 25 bp, Homo sapien
aagcttgactttgaagtcttctgag

SEQ ID NO: 1706953 - DNA, 25 bp, Homo sapien
gattatgacaacttgcttatggtac

SEQ ID NO: 1706954 - DNA, 25 bp, Homo sapien
caacagcttttgttgtagtgacagc

SEQ ID NO: 1706955 - DNA, 25 bp, Homo sapien
ccagaccaacagcttttgttgtagt

SEQ ID NO: 1706956 - DNA, 25 bp, Homo sapien
ttgcttatggtaccttctggatggc

SEQ ID NO: 1706957 - DNA, 25 bp, Homo sapien
tcccagctacttgggaagctgagat

SEQ ID NO: 1706958 - DNA, 25 bp, Homo sapien
caggaatggtggtgtacacctgtgg

SEQ ID NO: 1706959 - DNA, 25 bp, Homo sapien
gaagctgagataggaggattccttg

SEQ ID NO: 1706960 - DNA, 25 bp, Homo sapien
ccaggaatggtggtgtacacctgtg

SEQ ID NO: 1706961 - DNA, 25 bp, Homo sapien
tggtctcaatgttgagcactgaaag

SEQ ID NO: 1706962 - DNA, 25 bp, Homo sapien
gaggtcccctgaacctaatagtctg

SEQ ID NO: 1706963 - DNA, 25 bp, Homo sapien
agttctctgagctcatttagcacca

SEQ ID NO: 1706964 - DNA, 25 bp, Homo sapien
tctgtaaccttattccatgtctggg

SEQ ID NO: 1706965 - DNA, 25 bp, Homo sapien
gcaacgggaggtgtcctgagtgggt

SEQ ID NO: 1706966 - DNA, 25 bp, Homo sapien
tgcttcctgaggctgagagtggatc

SEQ ID NO: 1706967 - DNA, 25 bp, Homo sapien
agtgggtctgtgactgccgagcaca

SEQ ID NO: 1706968 - DNA, 25 bp, Homo sapien
aggtctagcccgtcggcaacgggag

SEQ ID NO: 1706969 - DNA, 25 bp, Homo sapien
tgtcctcgcctatacgcctcgtttg

SEQ ID NO: 1706970 - DNA, 25 bp, Homo sapien
gcctatacgcctcgtttgaacttag

SEQ ID NO: 1706971 - DNA, 25 bp, Homo sapien
tacgcctcgtttgaacttaggctct

SEQ ID NO: 1706972 - DNA, 25 bp, Homo sapien
tgctgtcctcgcctatacgcctcgt

SEQ ID NO: 1706973 - DNA, 25 bp, Homo sapien
aattactccgaagtcagtctgcaga

SEQ ID NO: 1706974 - DNA, 25 bp, Homo sapien
ggttcactcaactagtcaccatgtc

SEQ ID NO: 1706975 - DNA, 25 bp, Homo sapien
gtaaaaaccactgcctcaatctctg

SEQ ID NO: 1706976 - DNA, 25 bp, Homo sapien
tagctttttgacctaagatctcagc

SEQ ID NO: 1706977 - DNA, 25 bp, Homo sapien
gataagctggatccccttggccttc

SEQ ID NO: 1706978 - DNA, 25 bp, Homo sapien
tgcccaacaggataagctggatccc

SEQ ID NO: 1706979 - DNA, 25 bp, Homo sapien
gccttctgaatatcccagtgtcttc

SEQ ID NO: 1706980 - DNA, 25 bp, Homo sapien
cttggccttctgaatatcccagtgt

SEQ ID NO: 1706981 - DNA, 25 bp, Homo sapien
gctcaagaagcataagcccaacttc

SEQ ID NO: 1706982 - DNA, 25 bp, Homo sapien
agaaaccgccctgagatctgccggt

SEQ ID NO: 1706983 - DNA, 25 bp, Homo sapien
tgccggtcatctccatggacttctg

SEQ ID NO: 1706984 - DNA, 25 bp, Homo sapien
taagcccaacttctgatgtgccaga

SEQ ID NO: 1706985 - DNA, 25 bp, Homo sapien
ggatgtaatgcggagtttcaccaac

SEQ ID NO: 1706986 - DNA, 25 bp, Homo sapien
atggcaccagtatcattcaggtgac

SEQ ID NO: 1706987 - DNA, 25 bp, Homo sapien
tttcaccaacttcagaaatggcacc

SEQ ID NO: 1706988 - DNA, 25 bp, Homo sapien
aaatggcaccagtatcattcaggtg

SEQ ID NO: 1706989 - DNA, 25 bp, Homo sapien
tagcccgggtaactcagctgatccg

SEQ ID NO: 1706990 - DNA, 25 bp, Homo sapien
gatccgtggctttggtagttcctgg

SEQ ID NO: 1706991 - DNA, 25 bp, Homo sapien
gccagatccctctctgacactgttt

SEQ ID NO: 1706992 - DNA, 25 bp, Homo sapien
tgtttcctcctgctattagcccggg

SEQ ID NO: 1706993 - DNA, 25 bp, Homo sapien
aaagactggattgagagaataccag

SEQ ID NO: 1706994 - DNA, 25 bp, Homo sapien
ctttgattgagcgtggacaggctga

SEQ ID NO: 1706995 - DNA, 25 bp, Homo sapien
tgaaaggatgcagattacatggtgg

SEQ ID NO: 1706996 - DNA, 25 bp, Homo sapien
gaataccagaaaagagggtttgatg

SEQ ID NO: 1706997 - DNA, 25 bp, Homo sapien
tgactctcttggtagctgcccttct

SEQ ID NO: 1706998 - DNA, 25 bp, Homo sapien
agttcttaaggtcagcagctattgc

SEQ ID NO: 1706999 - DNA, 25 bp, Homo sapien
ccttaactttagacattgcacacag

SEQ ID NO: 1707000 - DNA, 25 bp, Homo sapien
cagtacaactgctatccgtatcgga

SEQ ID NO: 1707001 - DNA, 25 bp, Homo sapien
aaaaatgagtgggacatgttggcac

SEQ ID NO: 1707002 - DNA, 25 bp, Homo sapien
aatgagtgggacatgttggcacatg

SEQ ID NO: 1707003 - DNA, 25 bp, Homo sapien
ctgagccaggaaagttgaggttgta

SEQ ID NO: 1707004 - DNA, 25 bp, Homo sapien
ggtgggataatcactgagccaggaa

SEQ ID NO: 1707005 - DNA, 25 bp, Homo sapien
actaatcttgttgattatacgtagg

SEQ ID NO: 1707006 - DNA, 25 bp, Homo sapien
ggttacagattatcttttagtatgt

SEQ ID NO: 1707007 - DNA, 25 bp, Homo sapien
ttgcatcatctacatactaatcttg

SEQ ID NO: 1707008 - DNA, 25 bp, Homo sapien
tgttgattatacgtaggttacagat

SEQ ID NO: 1707009 - DNA, 25 bp, Homo sapien
tttttactggttagcatctgtagtc

SEQ ID NO: 1707010 - DNA, 25 bp, Homo sapien
tcatgttgatactcaaaaacttccg

SEQ ID NO: 1707011 - DNA, 25 bp, Homo sapien
tgttgatactcaaaaacttccggat

SEQ ID NO: 1707012 - DNA, 25 bp, Homo sapien
tactggttagcatctgtagtctgaa

SEQ ID NO: 1707013 - DNA, 25 bp, Homo sapien
gacattgtagtctacccttggcaac

SEQ ID NO: 1707014 - DNA, 25 bp, Homo sapien
gtaagaattcctactgagccacatt

SEQ ID NO: 1707015 - DNA, 25 bp, Homo sapien
ggagttcgagattacagcgagccat

SEQ ID NO: 1707016 - DNA, 25 bp, Homo sapien
cctaggacagtagtcttgctgctaa

SEQ ID NO: 1707017 - DNA, 25 bp, Homo sapien
tcaacgagtacctgtgcacgagaag

SEQ ID NO: 1707018 - DNA, 25 bp, Homo sapien
gcaacatttagatcaacgagtacct

SEQ ID NO: 1707019 - DNA, 25 bp, Homo sapien
ttagatcaacgagtacctgtgcacg

SEQ ID NO: 1707020 - DNA, 25 bp, Homo sapien
gagtacctgtgcacgagaagcacag

SEQ ID NO: 1707021 - DNA, 25 bp, Homo sapien
tgttctccggttccgtaacattgca

SEQ ID NO: 1707022 - DNA, 25 bp, Homo sapien
cattgcagcaaagagggatgttcct

SEQ ID NO: 1707023 - DNA, 25 bp, Homo sapien
tctgtatccacattgttctccggtt

SEQ ID NO: 1707024 - DNA, 25 bp, Homo sapien
ggttccgtaacattgcagcaaagag

SEQ ID NO: 1707025 - DNA, 25 bp, Homo sapien
gaggaagaggcggtgcgatctagga

SEQ ID NO: 1707026 - DNA, 25 bp, Homo sapien
cggaagtgacgcgatatcattatat

SEQ ID NO: 1707027 - DNA, 25 bp, Homo sapien
aagaggcggtgcgatctaggagaag

SEQ ID NO: 1707028 - DNA, 25 bp, Homo sapien
ctgtggaagagagagcggaagtgac

SEQ ID NO: 1707029 - DNA, 25 bp, Homo sapien
ccctcagggcaggacgtttccagaa

SEQ ID NO: 1707030 - DNA, 25 bp, Homo sapien
gcccgctctccggaattggaaatct

SEQ ID NO: 1707031 - DNA, 25 bp, Homo sapien
ctccatacagaaagtcgcaggccct

SEQ ID NO: 1707032 - DNA, 25 bp, Homo sapien
cctttccagggacgcgatccaaggc

SEQ ID NO: 1707033 - DNA, 25 bp, Homo sapien
tcctcagtcctgcagagtaggcaca

SEQ ID NO: 1707034 - DNA, 25 bp, Homo sapien
tatcaaacagtaaggccgataaggc

SEQ ID NO: 1707035 - DNA, 25 bp, Homo sapien
tcccaaaagtgcgtggcaaaagcca

SEQ ID NO: 1707036 - DNA, 25 bp, Homo sapien
cttagacagctttcgtgcgcccgag

SEQ ID NO: 1707037 - DNA, 25 bp, Homo sapien
cgggggaagaaatcagacacagtaa

SEQ ID NO: 1707038 - DNA, 25 bp, Homo sapien
tacgggggaagaaatcagacacagt

SEQ ID NO: 1707039 - DNA, 25 bp, Homo sapien
agtacgggggaagaaatcagacaca

SEQ ID NO: 1707040 - DNA, 25 bp, Homo sapien
gggggaagaaatcagacacagtaaa

SEQ ID NO: 1707041 - DNA, 25 bp, Homo sapien
aggctattttccgccgcccatcgat

SEQ ID NO: 1707042 - DNA, 25 bp, Homo sapien
aaaggctattttccgccgcccatcg

SEQ ID NO: 1707043 - DNA, 25 bp, Homo sapien
tattttccgccgcccatcgatgttg

SEQ ID NO: 1707044 - DNA, 25 bp, Homo sapien
ggctattttccgccgcccatcgatg

SEQ ID NO: 1707045 - DNA, 25 bp, Homo sapien
cgaagaggaccatgagatgacagca

SEQ ID NO: 1707046 - DNA, 25 bp, Homo sapien
gaaggaggaactgaatactgagccc

SEQ ID NO: 1707047 - DNA, 25 bp, Homo sapien
taggattcttaagtgcctccagcgc

SEQ ID NO: 1707048 - DNA, 25 bp, Homo sapien
ttactgacaaccaccagaagacagg

SEQ ID NO: 1707049 - DNA, 25 bp, Homo sapien
atacaagaaaagttgctgagcatgg

SEQ ID NO: 1707050 - DNA, 25 bp, Homo sapien
aaatacaagaaaagttgctgagcat

SEQ ID NO: 1707051 - DNA, 25 bp, Homo sapien
cacgcaaccacactctaacctgggc

SEQ ID NO: 1707052 - DNA, 25 bp, Homo sapien
caagatcacgcaaccacactctaac

SEQ ID NO: 1707053 - DNA, 25 bp, Homo sapien
ctttccagatataaaccgttcgaca

SEQ ID NO: 1707054 - DNA, 25 bp, Homo sapien
cagatataaaccgttcgacagaagg

SEQ ID NO: 1707055 - DNA, 25 bp, Homo sapien
caagtgggcagatgacattgagggc

SEQ ID NO: 1707056 - DNA, 25 bp, Homo sapien
gcagatgacattgagggcaggagtt

SEQ ID NO: 1707057 - DNA, 25 bp, Homo sapien
tttatagcctcattcaaaaagctca

SEQ ID NO: 1707058 - DNA, 25 bp, Homo sapien
tcacaaaggtaggatctgcaataat

SEQ ID NO: 1707059 - DNA, 25 bp, Homo sapien
ctattttgcaatcccctaggtcacc

SEQ ID NO: 1707060 - DNA, 25 bp, Homo sapien
gtttcggaattagtgttgaatctga

SEQ ID NO: 1707061 - DNA, 25 bp, Homo sapien
cgccctcttggtgaggtcaatgtct

SEQ ID NO: 1707062 - DNA, 25 bp, Homo sapien
cccgccctcttggtgaggtcaatgt

SEQ ID NO: 1707063 - DNA, 25 bp, Homo sapien
ctcccgccctcttggtgaggtcaat

SEQ ID NO: 1707064 - DNA, 25 bp, Homo sapien
tcaacaccacatgagcatatcttcg

SEQ ID NO: 1707065 - DNA, 25 bp, Homo sapien
ctagatggacccctttctgaggctg

SEQ ID NO: 1707066 - DNA, 25 bp, Homo sapien
tagatggacccctttctgaggctga

SEQ ID NO: 1707067 - DNA, 25 bp, Homo sapien
gatggacccctttctgaggctgacc

SEQ ID NO: 1707068 - DNA, 25 bp, Homo sapien
atggacccctttctgaggctgaccc

SEQ ID NO: 1707069 - DNA, 25 bp, Homo sapien
ctgggatcttgtactggcgtggatt

SEQ ID NO: 1707070 - DNA, 25 bp, Homo sapien
cagtctgggatcttgtactggcgtg

SEQ ID NO: 1707071 - DNA, 25 bp, Homo sapien
atccttctgtctgttcaagaaccag

SEQ ID NO: 1707072 - DNA, 25 bp, Homo sapien
ctggctgtattttccatcctttaca

SEQ ID NO: 1707073 - DNA, 25 bp, Homo sapien
ctgacctcctatgcccaattctgtt

SEQ ID NO: 1707074 - DNA, 25 bp, Homo sapien
tgcccaattctgttaggaccctcca

SEQ ID NO: 1707075 - DNA, 25 bp, Homo sapien
taatcctgccctcatttcagtacac

SEQ ID NO: 1707076 - DNA, 25 bp, Homo sapien
tgttttatcccctgacctcctatgc

SEQ ID NO: 1707077 - DNA, 25 bp, Homo sapien
tcttcagtcgctccaggtcttcacg

SEQ ID NO: 1707078 - DNA, 25 bp, Homo sapien
tcagtcgctccaggtcttcacggag

SEQ ID NO: 1707079 - DNA, 25 bp, Homo sapien
agaagtgacgcagccctctatgggc

SEQ ID NO: 1707080 - DNA, 25 bp, Homo sapien
ttgttgtccagaccattggctagga

SEQ ID NO: 1707081 - DNA, 25 bp, Homo sapien
tgagtcgaggtaggcagggagatga

SEQ ID NO: 1707082 - DNA, 25 bp, Homo sapien
taggaggaatgctgagtcgaggtag

SEQ ID NO: 1707083 - DNA, 25 bp, Homo sapien
aagagtcacaggtcatgcacagcag

SEQ ID NO: 1707084 - DNA, 25 bp, Homo sapien
aaaaagaagagcgagtaggaggaat

SEQ ID NO: 1707085 - DNA, 25 bp, Homo sapien
acggcggccagtggtcttggtgtgc

SEQ ID NO: 1707086 - DNA, 25 bp, Homo sapien
cttggtgtgctggcctcggacacga

SEQ ID NO: 1707087 - DNA, 25 bp, Homo sapien
gtcttggtgtgctggcctcggacac

SEQ ID NO: 1707088 - DNA, 25 bp, Homo sapien
gccacggcggccagtggtcttggtg

SEQ ID NO: 1707089 - DNA, 25 bp, Homo sapien
tactccgaggggatccgtaagagcg

SEQ ID NO: 1707090 - DNA, 25 bp, Homo sapien
ggtggctaccttgtcgccgcggcct

SEQ ID NO: 1707091 - DNA, 25 bp, Homo sapien
atggctggccgactgcggcactcac

SEQ ID NO: 1707092 - DNA, 25 bp, Homo sapien
agcgaagggcggagactagctcccc

SEQ ID NO: 1707093 - DNA, 25 bp, Homo sapien
aagagggtccagacgatcaccagca

SEQ ID NO: 1707094 - DNA, 25 bp, Homo sapien
agcaaagcggcgagaaggaggcgcc

SEQ ID NO: 1707095 - DNA, 25 bp, Homo sapien
aaggcccgaagagggtccagacgat

SEQ ID NO: 1707096 - DNA, 25 bp, Homo sapien
gggtccagacgatcaccagcagcaa

SEQ ID NO: 1707097 - DNA, 25 bp, Homo sapien
cagttcagggacgttgacatacaca

SEQ ID NO: 1707098 - DNA, 25 bp, Homo sapien
gaatgagctgcacagcagacgctga

SEQ ID NO: 1707099 - DNA, 25 bp, Homo sapien
cgtcttgaggacgtatcgggccatg

SEQ ID NO: 1707100 - DNA, 25 bp, Homo sapien
agaatagcgtctgtaccctgagccc

SEQ ID NO: 1707101 - DNA, 25 bp, Homo sapien
gggcgcagtcctttccccgtcagag

SEQ ID NO: 1707102 - DNA, 25 bp, Homo sapien
caggagcaaaagggcgcagtccttt

SEQ ID NO: 1707103 - DNA, 25 bp, Homo sapien
gctattgctcgacaccgcaggatgc

SEQ ID NO: 1707104 - DNA, 25 bp, Homo sapien
ccaggctattgctcgacaccgcagg

SEQ ID NO: 1707105 - DNA, 25 bp, Homo sapien
tggtataaggaaacagatcagctgc

SEQ ID NO: 1707106 - DNA, 25 bp, Homo sapien
tgccctagcttgagagaacaactgc

SEQ ID NO: 1707107 - DNA, 25 bp, Homo sapien
tgaccatcttttgggctggcgggcc

SEQ ID NO: 1707108 - DNA, 25 bp, Homo sapien
gggtgtctcccatatcgctgtcttt

SEQ ID NO: 1707109 - DNA, 25 bp, Homo sapien
atgtccttcccatgcagcagggtct

SEQ ID NO: 1707110 - DNA, 25 bp, Homo sapien
gtccttcccatgcagcagggtctgg

SEQ ID NO: 1707111 - DNA, 25 bp, Homo sapien
tgtccttcccatgcagcagggtctg

SEQ ID NO: 1707112 - DNA, 25 bp, Homo sapien
gatgtccttcccatgcagcagggtc

SEQ ID NO: 1707113 - DNA, 25 bp, Homo sapien
gatgctaaagagacaggcctgacca

SEQ ID NO: 1707114 - DNA, 25 bp, Homo sapien
gaagcctttctgaccactgcacatg

SEQ ID NO: 1707115 - DNA, 25 bp, Homo sapien
tgtgcagcttaactgagaggatgcc

SEQ ID NO: 1707116 - DNA, 25 bp, Homo sapien
tctttgacttgcgagggacgtacca

SEQ ID NO: 1707117 - DNA, 25 bp, Homo sapien
taatcactagttcgctgaggcctga

SEQ ID NO: 1707118 - DNA, 25 bp, Homo sapien
ctctttggtaaagtcagggcgctga

SEQ ID NO: 1707119 - DNA, 25 bp, Homo sapien
gatgtgaccctgtgttccacgagcg

SEQ ID NO: 1707120 - DNA, 25 bp, Homo sapien
gagtcagaaggcctgcccaagggtt

SEQ ID NO: 1707121 - DNA, 25 bp, Homo sapien
gcttggccaccagcttattcaaagt

SEQ ID NO: 1707122 - DNA, 25 bp, Homo sapien
ccaccagcttattcaaagtctccag

SEQ ID NO: 1707123 - DNA, 25 bp, Homo sapien
tggccaccagcttattcaaagtctc

SEQ ID NO: 1707124 - DNA, 25 bp, Homo sapien
ttggccaccagcttattcaaagtct

SEQ ID NO: 1707125 - DNA, 25 bp, Homo sapien
aatgattggccaggtgatgcattta

SEQ ID NO: 1707126 - DNA, 25 bp, Homo sapien
ttgagaatgattggccaggtgatgc

SEQ ID NO: 1707127 - DNA, 25 bp, Homo sapien
ttttgagaatgattggccaggtgat

SEQ ID NO: 1707128 - DNA, 25 bp, Homo sapien
cggccatggctatggtttttgagaa

SEQ ID NO: 1707129 - DNA, 25 bp, Homo sapien
cccatgggcagtagtttaccaagcc

SEQ ID NO: 1707130 - DNA, 25 bp, Homo sapien
tagcacagcgcttagcaaaataggg

SEQ ID NO: 1707131 - DNA, 25 bp, Homo sapien
tcaagatgatcgttctctccaggtc

SEQ ID NO: 1707132 - DNA, 25 bp, Homo sapien
tatacagaactagatgatgggccag

SEQ ID NO: 1707133 - DNA, 25 bp, Homo sapien
agactgtgccggaagtttctttctg

SEQ ID NO: 1707134 - DNA, 25 bp, Homo sapien
tctgacccttgatgggaagtgtagt

SEQ ID NO: 1707135 - DNA, 25 bp, Homo sapien
taagctgccgctcgcgataaggtgc

SEQ ID NO: 1707136 - DNA, 25 bp, Homo sapien
taagtcactcttgcataagctgccg

SEQ ID NO: 1707137 - DNA, 25 bp, Homo sapien
gtcccggatatcgactccaccctgt

SEQ ID NO: 1707138 - DNA, 25 bp, Homo sapien
agatggtgggcgaaacgcaagaccc

SEQ ID NO: 1707139 - DNA, 25 bp, Homo sapien
gaccccaagcctctcaaccgaaatc

SEQ ID NO: 1707140 - DNA, 25 bp, Homo sapien
tcttgagaggtagccctgaggggca

SEQ ID NO: 1707141 - DNA, 25 bp, Homo sapien
aaagcctactgggtgcgagacaagg

SEQ ID NO: 1707142 - DNA, 25 bp, Homo sapien
agacaagggcgctgggtctcactct

SEQ ID NO: 1707143 - DNA, 25 bp, Homo sapien
tctggaaggtacctgagctcccttt

SEQ ID NO: 1707144 - DNA, 25 bp, Homo sapien
gatgaaagcctactgggtgcgagac

SEQ ID NO: 1707145 - DNA, 25 bp, Homo sapien
tccctgtagcttcttctggatcagc

SEQ ID NO: 1707146 - DNA, 25 bp, Homo sapien
gctgttgatatttctccacttctcc

SEQ ID NO: 1707147 - DNA, 25 bp, Homo sapien
ccttctgtagctgttgatatttctc

SEQ ID NO: 1707148 - DNA, 25 bp, Homo sapien
cttctccctgtagcttcttctggat

SEQ ID NO: 1707149 - DNA, 25 bp, Homo sapien
tatccccacaatcctagtcaggtgg

SEQ ID NO: 1707150 - DNA, 25 bp, Homo sapien
gttgtaagtgcattgggcgagacca

SEQ ID NO: 1707151 - DNA, 25 bp, Homo sapien
gaggaaaggcaatttagaaacatca

SEQ ID NO: 1707152 - DNA, 25 bp, Homo sapien
ccttatctcggtaatggctttgggt

SEQ ID NO: 1707153 - DNA, 25 bp, Homo sapien
ctttcacgatattattttctgttag

SEQ ID NO: 1707154 - DNA, 25 bp, Homo sapien
ctgttagttgtgcttcaagtttctg

SEQ ID NO: 1707155 - DNA, 25 bp, Homo sapien
gcctccccgacatggatttacttaa

SEQ ID NO: 1707156 - DNA, 25 bp, Homo sapien
tcaagtttctgcctccccgacatgg

SEQ ID NO: 1707157 - DNA, 25 bp, Homo sapien
tgatcagaaccatggctagtacagg

SEQ ID NO: 1707158 - DNA, 25 bp, Homo sapien
ggatgggacatatgtgatcagaacc

SEQ ID NO: 1707159 - DNA, 25 bp, Homo sapien
atggctagtacaggtccctcctcgc

SEQ ID NO: 1707160 - DNA, 25 bp, Homo sapien
catatgtgatcagaaccatggctag

SEQ ID NO: 1707161 - DNA, 25 bp, Homo sapien
gactagcaccggacccagaagttta

SEQ ID NO: 1707162 - DNA, 25 bp, Homo sapien
ttaaagaccacgttggacccatcca

SEQ ID NO: 1707163 - DNA, 25 bp, Homo sapien
agctcctgtttgactagcaccggac

SEQ ID NO: 1707164 - DNA, 25 bp, Homo sapien
ctgtttgactagcaccggacccaga

SEQ ID NO: 1707165 - DNA, 25 bp, Homo sapien
gagctgttctgcaatggttcaacac

SEQ ID NO: 1707166 - DNA, 25 bp, Homo sapien
caatggttcacttgcatcacagggt

SEQ ID NO: 1707167 - DNA, 25 bp, Homo sapien
tagtaggactcactatggagagtgc

SEQ ID NO: 1707168 - DNA, 25 bp, Homo sapien
tggagagtgctaaacgcaagaaaga

SEQ ID NO: 1707169 - DNA, 25 bp, Homo sapien
ccgaagctgggattcgtatcgctta

SEQ ID NO: 1707170 - DNA, 25 bp, Homo sapien
tctgactgccgctcaagatcccgaa

SEQ ID NO: 1707171 - DNA, 25 bp, Homo sapien
tgttgctctgactgccgctcaagat

SEQ ID NO: 1707172 - DNA, 25 bp, Homo sapien
tgcagctgagcaagggtctccctct

SEQ ID NO: 1707173 - DNA, 25 bp, Homo sapien
tacagtatagatcctagagctgcct

SEQ ID NO: 1707174 - DNA, 25 bp, Homo sapien
tttattagctacagtatagatccta

SEQ ID NO: 1707175 - DNA, 25 bp, Homo sapien
ttagctacagtatagatcctagagc

SEQ ID NO: 1707176 - DNA, 25 bp, Homo sapien
agtatagatcctagagctgcctcat

SEQ ID NO: 1707177 - DNA, 25 bp, Homo sapien
gacagaagtgcctggtcaggaaaca

SEQ ID NO: 1707178 - DNA, 25 bp, Homo sapien
tatggtatgttgcaaatgcccttcc

SEQ ID NO: 1707179 - DNA, 25 bp, Homo sapien
gaatcatgccaaccaagatgaggga

SEQ ID NO: 1707180 - DNA, 25 bp, Homo sapien
tgttggcaaggagggtaaccacatt

SEQ ID NO: 1707181 - DNA, 25 bp, Homo sapien
tgccactggtttaccagacagctga

SEQ ID NO: 1707182 - DNA, 25 bp, Homo sapien
caggtagtgctggaaaaacgcatca

SEQ ID NO: 1707183 - DNA, 25 bp, Homo sapien
gatacctgtgtatagcttcccacct

SEQ ID NO: 1707184 - DNA, 25 bp, Homo sapien
ttggccatatcctaacatgcaaggg

SEQ ID NO: 1707185 - DNA, 25 bp, Homo sapien
agctgactatcccagcctcggctaa

SEQ ID NO: 1707186 - DNA, 25 bp, Homo sapien
ccagcctcggctaatgtattctacg

SEQ ID NO: 1707187 - DNA, 25 bp, Homo sapien
taatgtattctacgccatggatgga

SEQ ID NO: 1707188 - DNA, 25 bp, Homo sapien
tcggctaatgtattctacgccatgg

SEQ ID NO: 1707189 - DNA, 25 bp, Homo sapien
ggctccaagtgtcatcagtcgtgtc

SEQ ID NO: 1707190 - DNA, 25 bp, Homo sapien
gcttcagagtatgagctggtacagc

SEQ ID NO: 1707191 - DNA, 25 bp, Homo sapien
aaaacaatcgtgactctgcagtggc

SEQ ID NO: 1707192 - DNA, 25 bp, Homo sapien
ttctgccaggtgacaagccaggaca

SEQ ID NO: 1707193 - DNA, 25 bp, Homo sapien
gaggatggtgccgtgtttaccgtca

SEQ ID NO: 1707194 - DNA, 25 bp, Homo sapien
tcgacctcttgatcccttggtgaga

SEQ ID NO: 1707195 - DNA, 25 bp, Homo sapien
tgtgacataggccaagactcttgcc

SEQ ID NO: 1707196 - DNA, 25 bp, Homo sapien
ttaccgtcacaagccgccaatatcg

SEQ ID NO: 1707197 - DNA, 25 bp, Homo sapien
gagggtactccaccagcgaggatac

SEQ ID NO: 1707198 - DNA, 25 bp, Homo sapien
gcatagggacctaaggcccactgga

SEQ ID NO: 1707199 - DNA, 25 bp, Homo sapien
cagggatctccgagtcaggacggtc

SEQ ID NO: 1707200 - DNA, 25 bp, Homo sapien
tggagggcgctcatcaagtagctgc

SEQ ID NO: 1707201 - DNA, 25 bp, Homo sapien
ttcagccctagatggtgctcgccag

SEQ ID NO: 1707202 - DNA, 25 bp, Homo sapien
tatttaagtgatcgtgtgagtcgtc

SEQ ID NO: 1707203 - DNA, 25 bp, Homo sapien
tcttgtgcggttcaccacagttgta

SEQ ID NO: 1707204 - DNA, 25 bp, Homo sapien
gctcatcacacacagggctattcct

SEQ ID NO: 1707205 - DNA, 25 bp, Homo sapien
cccctgacatagtctcagagatctg

SEQ ID NO: 1707206 - DNA, 25 bp, Homo sapien
gcccggcggcgaaacacgatattgt

SEQ ID NO: 1707207 - DNA, 25 bp, Homo sapien
acccgtactctagggccaaatccat

SEQ ID NO: 1707208 - DNA, 25 bp, Homo sapien
tagggccgaggttacatttggagaa

SEQ ID NO: 1707209 - DNA, 25 bp, Homo sapien
cacacccagtgaatttttgtatttt

SEQ ID NO: 1707210 - DNA, 25 bp, Homo sapien
caattctgtggcttcagcctccgga

SEQ ID NO: 1707211 - DNA, 25 bp, Homo sapien
ccacacccagtgaatttttgtattt

SEQ ID NO: 1707212 - DNA, 25 bp, Homo sapien
ccactgagtggctggaatgcttttt

SEQ ID NO: 1707213 - DNA, 25 bp, Homo sapien
gatgcaggagatacagcactcagca

SEQ ID NO: 1707214 - DNA, 25 bp, Homo sapien
tgctcaatagcctaatgtgggtggt

SEQ ID NO: 1707215 - DNA, 25 bp, Homo sapien
gaagacagtgtatctccttaagaag

SEQ ID NO: 1707216 - DNA, 25 bp, Homo sapien
atgagctaaggttgtcccactgtac

SEQ ID NO: 1707217 - DNA, 25 bp, Homo sapien
caatgagctaaggttgtcccactgt

SEQ ID NO: 1707218 - DNA, 25 bp, Homo sapien
ggctgcaatgagctaaggttgtccc

SEQ ID NO: 1707219 - DNA, 25 bp, Homo sapien
ctgcaatgagctaaggttgtcccac

SEQ ID NO: 1707220 - DNA, 25 bp, Homo sapien
tagagttttggatcggcgatgctca

SEQ ID NO: 1707221 - DNA, 25 bp, Homo sapien
attttagagttttggatcggcgatg

SEQ ID NO: 1707222 - DNA, 25 bp, Homo sapien
tgcaacatgtaaacaatataagaaa

SEQ ID NO: 1707223 - DNA, 25 bp, Homo sapien
ttggatcggcgatgctcaacctgta

SEQ ID NO: 1707224 - DNA, 25 bp, Homo sapien
aataattctggtcccttatctgaaa

SEQ ID NO: 1707225 - DNA, 25 bp, Homo sapien
taaatttaaatactctagtactcac

SEQ ID NO: 1707226 - DNA, 25 bp, Homo sapien
taatatctttgggatcagacccaaa

SEQ ID NO: 1707227 - DNA, 25 bp, Homo sapien
taatctaataattctggtcccttat

SEQ ID NO: 1707228 - DNA, 25 bp, Homo sapien
ggaggcacccccggaattgctctgc

SEQ ID NO: 1707229 - DNA, 25 bp, Homo sapien
tgtgtcccacttctacccttctggg

SEQ ID NO: 1707230 - DNA, 25 bp, Homo sapien
ttgtgtcccacttctacccttctgg

SEQ ID NO: 1707231 - DNA, 25 bp, Homo sapien
cccggaattgctctgccttgtgtcc

SEQ ID NO: 1707232 - DNA, 25 bp, Homo sapien
tttcaggagggcacctatctggcca

SEQ ID NO: 1707233 - DNA, 25 bp, Homo sapien
tccctttgggctagagtggcgacgc

SEQ ID NO: 1707234 - DNA, 25 bp, Homo sapien
gaaatgggaccttctggctgcctac

SEQ ID NO: 1707235 - DNA, 25 bp, Homo sapien
gcacctgggtaagggacatctgctc

SEQ ID NO: 1707236 - DNA, 25 bp, Homo sapien
ctgcgtctggcccatatttgggatt

SEQ ID NO: 1707237 - DNA, 25 bp, Homo sapien
tctggcccatatttgggatttttaa

SEQ ID NO: 1707238 - DNA, 25 bp, Homo sapien
actgcgtctggcccatatttgggat

SEQ ID NO: 1707239 - DNA, 25 bp, Homo sapien
gcgtctggcccatatttgggatttt

SEQ ID NO: 1707240 - DNA, 25 bp, Homo sapien
caagaatgaggagagtctgacctgg

SEQ ID NO: 1707241 - DNA, 25 bp, Homo sapien
gattttatgtcagcgacacagcccg

SEQ ID NO: 1707242 - DNA, 25 bp, Homo sapien
gagacagacttgaaacccacgctga

SEQ ID NO: 1707243 - DNA, 25 bp, Homo sapien
tcagaagcttttctaggctgggacg

SEQ ID NO: 1707244 - DNA, 25 bp, Homo sapien
gcggcaatccgcaaagcaaaggctc

SEQ ID NO: 1707245 - DNA, 25 bp, Homo sapien
tcagctttgcgggtcactctttcaa

SEQ ID NO: 1707246 - DNA, 25 bp, Homo sapien
gtttcccgacaccagaccttgagag

SEQ ID NO: 1707247 - DNA, 25 bp, Homo sapien
tctagcgcgttgaccttgcctgaca

SEQ ID NO: 1707248 - DNA, 25 bp, Homo sapien
agtccacaaggtggagatgggcttc

SEQ ID NO: 1707249 - DNA, 25 bp, Homo sapien
gtccagcagacgtgtctggtcccca

SEQ ID NO: 1707250 - DNA, 25 bp, Homo sapien
tccttgccgtccaagagagagtctc

SEQ ID NO: 1707251 - DNA, 25 bp, Homo sapien
agcggcgacgaagcgagtgcggcca

SEQ ID NO: 1707252 - DNA, 25 bp, Homo sapien
aagcttaagttttacacagaaacat

SEQ ID NO: 1707253 - DNA, 25 bp, Homo sapien
aatgttctgggataacatttggagg

SEQ ID NO: 1707254 - DNA, 25 bp, Homo sapien
gatggactaagctaatccccttttg

SEQ ID NO: 1707255 - DNA, 25 bp, Homo sapien
tctgggataacatttggaggaaggt

SEQ ID NO: 1707256 - DNA, 25 bp, Homo sapien
cccagttgctgattcctccacgagg

SEQ ID NO: 1707257 - DNA, 25 bp, Homo sapien
gaaaaagatatgtaccctgcccagc

SEQ ID NO: 1707258 - DNA, 25 bp, Homo sapien
ggtcagtgcatgagaagaatgggaa

SEQ ID NO: 1707259 - DNA, 25 bp, Homo sapien
gattcctccacgagggtggactctc

SEQ ID NO: 1707260 - DNA, 25 bp, Homo sapien
catcgttactgtcagaagaacccct

SEQ ID NO: 1707261 - DNA, 25 bp, Homo sapien
tggaacctggcaaacagatcagcag

SEQ ID NO: 1707262 - DNA, 25 bp, Homo sapien
ccagcatagatgctgaaagcaatgg

SEQ ID NO: 1707263 - DNA, 25 bp, Homo sapien
caaaggacgcatagtgtcaccatcg

SEQ ID NO: 1707264 - DNA, 25 bp, Homo sapien
gaagcaccgggtgaaaagagctcca

SEQ ID NO: 1707265 - DNA, 25 bp, Homo sapien
tgattggcggagtcgtagaagcacc

SEQ ID NO: 1707266 - DNA, 25 bp, Homo sapien
ctgggtcagccgaataagccgtgga

SEQ ID NO: 1707267 - DNA, 25 bp, Homo sapien
tgtgttataacgatcgcgggacgca

SEQ ID NO: 1707268 - DNA, 25 bp, Homo sapien
ggtgggtatcaaatctgtttcttca

SEQ ID NO: 1707269 - DNA, 25 bp, Homo sapien
atctgtttcttcatccttcattctt

SEQ ID NO: 1707270 - DNA, 25 bp, Homo sapien
aggtgggtatcaaatctgtttcttc

SEQ ID NO: 1707271 - DNA, 25 bp, Homo sapien
caaatctgtttcttcatccttcatt

SEQ ID NO: 1707272 - DNA, 25 bp, Homo sapien
ggcaagatgcccaccacttgtggaa

SEQ ID NO: 1707273 - DNA, 25 bp, Homo sapien
tagggatctaataagctctgtgacc

SEQ ID NO: 1707274 - DNA, 25 bp, Homo sapien
cgattctaggactcagcgttaggga

SEQ ID NO: 1707275 - DNA, 25 bp, Homo sapien
caacggacgggtgtttgcgattcta

SEQ ID NO: 1707276 - DNA, 25 bp, Homo sapien
ctcttgaccccatgatacgcccacc

SEQ ID NO: 1707277 - DNA, 25 bp, Homo sapien
ttgaccccatgatacgcccacctcg

SEQ ID NO: 1707278 - DNA, 25 bp, Homo sapien
cgatctcttgaccccatgatacgcc

SEQ ID NO: 1707279 - DNA, 25 bp, Homo sapien
gaccccatgatacgcccacctcgga

SEQ ID NO: 1707280 - DNA, 25 bp, Homo sapien
ccgccttggttaggatagaccatct

SEQ ID NO: 1707281 - DNA, 25 bp, Homo sapien
tggttaggatagaccatctcacccc

SEQ ID NO: 1707282 - DNA, 25 bp, Homo sapien
gggctttagatccttgactgaccat

SEQ ID NO: 1707283 - DNA, 25 bp, Homo sapien
gatagaccatctcaccccctaccat

SEQ ID NO: 1707284 - DNA, 25 bp, Homo sapien
atgttgtgcgctgagggagcttttt

SEQ ID NO: 1707285 - DNA, 25 bp, Homo sapien
ggatgttgtgcgctgagggagcttt

SEQ ID NO: 1707286 - DNA, 25 bp, Homo sapien
tggcaaacacgttggatgttgtgcg

SEQ ID NO: 1707287 - DNA, 25 bp, Homo sapien
gcaaacacgttggatgttgtgcgct

SEQ ID NO: 1707288 - DNA, 25 bp, Homo sapien
gcaaaagcatttccaatgacatctt

SEQ ID NO: 1707289 - DNA, 25 bp, Homo sapien
taacttctcaccaaatatggtgagg

SEQ ID NO: 1707290 - DNA, 25 bp, Homo sapien
aacatggtgaaatcgatgggccctg

SEQ ID NO: 1707291 - DNA, 25 bp, Homo sapien
tatggcatcaaggtatgcatcggtg

SEQ ID NO: 1707292 - DNA, 25 bp, Homo sapien
ccgtaaaccgatcccacatggttat

SEQ ID NO: 1707293 - DNA, 25 bp, Homo sapien
tccgtaaaccgatcccacatggtta

SEQ ID NO: 1707294 - DNA, 25 bp, Homo sapien
cgtaaaccgatcccacatggttatc

SEQ ID NO: 1707295 - DNA, 25 bp, Homo sapien
ttgctccatgtttcaggatgcatgt

SEQ ID NO: 1707296 - DNA, 25 bp, Homo sapien
gctccatgtttcaggatgcatgtga

SEQ ID NO: 1707297 - DNA, 25 bp, Homo sapien
tcagtcgtctttgtcttttgctcca

SEQ ID NO: 1707298 - DNA, 25 bp, Homo sapien
cttttgctccatgtttcaggatgca

SEQ ID NO: 1707299 - DNA, 25 bp, Homo sapien
gtaggaatgcttgaccactgcggtt

SEQ ID NO: 1707300 - DNA, 25 bp, Homo sapien
cactgcggtttaggcatgtgcggct

SEQ ID NO: 1707301 - DNA, 25 bp, Homo sapien
ggtcctgtccacctgatggtagtca

SEQ ID NO: 1707302 - DNA, 25 bp, Homo sapien
tagtcaggactgtcccttaccggga

SEQ ID NO: 1707303 - DNA, 25 bp, Homo sapien
tctggctggcatcctggctttgagc

SEQ ID NO: 1707304 - DNA, 25 bp, Homo sapien
ggctttgagctgctggccgcctctg

SEQ ID NO: 1707305 - DNA, 25 bp, Homo sapien
catcctggctttgagctgctggccg

SEQ ID NO: 1707306 - DNA, 25 bp, Homo sapien
cctggctttgagctgctggccgcct

SEQ ID NO: 1707307 - DNA, 25 bp, Homo sapien
gctcgcgaagcagggtagagaactc

SEQ ID NO: 1707308 - DNA, 25 bp, Homo sapien
cacttttgaattccaacggccacca

SEQ ID NO: 1707309 - DNA, 25 bp, Homo sapien
gtcttttctgtttcgcaggcgcagg

SEQ ID NO: 1707310 - DNA, 25 bp, Homo sapien
aatagtgctggacttccgctcggct

SEQ ID NO: 1707311 - DNA, 25 bp, Homo sapien
gggccttaatcagaggtctcttcag

SEQ ID NO: 1707312 - DNA, 25 bp, Homo sapien
taatcagaggtctcttcagttctat

SEQ ID NO: 1707313 - DNA, 25 bp, Homo sapien
gccttaatcagaggtctcttcagtt

SEQ ID NO: 1707314 - DNA, 25 bp, Homo sapien
ggaaggggccttaatcagaggtctc

SEQ ID NO: 1707315 - DNA, 25 bp, Homo sapien
tctgtggcactgtagtgagggatgg

SEQ ID NO: 1707316 - DNA, 25 bp, Homo sapien
ggtcgttgcacccaggcctcttgtc

SEQ ID NO: 1707317 - DNA, 25 bp, Homo sapien
ggatgtggtaattttggtcgttgca

SEQ ID NO: 1707318 - DNA, 25 bp, Homo sapien
tgtagtgagggatggaactcttggg

SEQ ID NO: 1707319 - DNA, 25 bp, Homo sapien
ttgcttgaataccaatagaatttcc

SEQ ID NO: 1707320 - DNA, 25 bp, Homo sapien
cttgcttgaataccaatagaatttc

SEQ ID NO: 1707321 - DNA, 25 bp, Homo sapien
ttacttgcttgaataccaatagaat

SEQ ID NO: 1707322 - DNA, 25 bp, Homo sapien
tacttgcttgaataccaatagaatt

SEQ ID NO: 1707323 - DNA, 25 bp, Homo sapien
agatgcggcaccgatccttagccag

SEQ ID NO: 1707324 - DNA, 25 bp, Homo sapien
cgacagatgcggcaccgatccttag

SEQ ID NO: 1707325 - DNA, 25 bp, Homo sapien
acagatgcggcaccgatccttagcc

SEQ ID NO: 1707326 - DNA, 25 bp, Homo sapien
tgcggcaccgatccttagccagaga

SEQ ID NO: 1707327 - DNA, 25 bp, Homo sapien
tgggagagagcaaaggtagaatgat

SEQ ID NO: 1707328 - DNA, 25 bp, Homo sapien
gggagagagcaaaggtagaatgatc

SEQ ID NO: 1707329 - DNA, 25 bp, Homo sapien
gagagagcaaaggtagaatgatcat

SEQ ID NO: 1707330 - DNA, 25 bp, Homo sapien
ggagagagcaaaggtagaatgatca

SEQ ID NO: 1707331 - DNA, 25 bp, Homo sapien
caatagctgtggaacaccggggtcc

SEQ ID NO: 1707332 - DNA, 25 bp, Homo sapien
tgtggcaatagctgtggaacaccgg

SEQ ID NO: 1707333 - DNA, 25 bp, Homo sapien
ctgtggcaatagctgtggaacaccg

SEQ ID NO: 1707334 - DNA, 25 bp, Homo sapien
tagctgtggaacaccggggtcctgt

SEQ ID NO: 1707335 - DNA, 25 bp, Homo sapien
ggaactggcttctggttcttcaacc

SEQ ID NO: 1707336 - DNA, 25 bp, Homo sapien
aggaacagcaggaactggcttctgg

SEQ ID NO: 1707337 - DNA, 25 bp, Homo sapien
gaacagcaggaactggcttctggtt

SEQ ID NO: 1707338 - DNA, 25 bp, Homo sapien
tgccagacttctggacaggaacagc

SEQ ID NO: 1707339 - DNA, 25 bp, Homo sapien
tctcctctagttgggacatcagtcc

SEQ ID NO: 1707340 - DNA, 25 bp, Homo sapien
actgaccctttaagtcccaggctgg

SEQ ID NO: 1707341 - DNA, 25 bp, Homo sapien
taaatgcccctccagtgttgtgcgc

SEQ ID NO: 1707342 - DNA, 25 bp, Homo sapien
tccaggacacaagcacgcaagttct

SEQ ID NO: 1707343 - DNA, 25 bp, Homo sapien
tctgcttggctgcttgacagggctg

SEQ ID NO: 1707344 - DNA, 25 bp, Homo sapien
tgcttggctgcttgacagggctgct

SEQ ID NO: 1707345 - DNA, 25 bp, Homo sapien
cttggctgcttgacagggctgcttc

SEQ ID NO: 1707346 - DNA, 25 bp, Homo sapien
ctctgcttggctgcttgacagggct

SEQ ID NO: 1707347 - DNA, 25 bp, Homo sapien
tttctagcccatgaagacgttcttc

SEQ ID NO: 1707348 - DNA, 25 bp, Homo sapien
cagggctgactggacaagcatggca

SEQ ID NO: 1707349 - DNA, 25 bp, Homo sapien
gacccggcagaatacacggatgttg

SEQ ID NO: 1707350 - DNA, 25 bp, Homo sapien
gatgttgcccttgagttcctgcagc

SEQ ID NO: 1707351 - DNA, 25 bp, Homo sapien
aggagacagggacatatcgagcatt

SEQ ID NO: 1707352 - DNA, 25 bp, Homo sapien
atcgagcattggtgacagtgagctc

SEQ ID NO: 1707353 - DNA, 25 bp, Homo sapien
tgcacggcgaatctcacactcgccc

SEQ ID NO: 1707354 - DNA, 25 bp, Homo sapien
gccctgcacggcgaatctcacactc

SEQ ID NO: 1707355 - DNA, 25 bp, Homo sapien
cagttccagtgcccatgggtcctca

SEQ ID NO: 1707356 - DNA, 25 bp, Homo sapien
agttccagtgcccatgggtcctcac

SEQ ID NO: 1707357 - DNA, 25 bp, Homo sapien
ccagttccagtgcccatgggtcctc

SEQ ID NO: 1707358 - DNA, 25 bp, Homo sapien
gatgaccgttcattctgggctgtgc

SEQ ID NO: 1707359 - DNA, 25 bp, Homo sapien
gctggaatacactgtggctgcgtga

SEQ ID NO: 1707360 - DNA, 25 bp, Homo sapien
tggagtgctccccagaaatctgtag

SEQ ID NO: 1707361 - DNA, 25 bp, Homo sapien
tgttaatggcctgtgtttcccgaag

SEQ ID NO: 1707362 - DNA, 25 bp, Homo sapien
ggtaggtcagtttgctgttccggta

SEQ ID NO: 1707363 - DNA, 25 bp, Homo sapien
ctgttccggtaaggcacgtgggact

SEQ ID NO: 1707364 - DNA, 25 bp, Homo sapien
tcttagcactaccacccagagagtt

SEQ ID NO: 1707365 - DNA, 25 bp, Homo sapien
agcactaccacccagagagttctgc

SEQ ID NO: 1707366 - DNA, 25 bp, Homo sapien
ctcttccagtggagaaatgttcaca

SEQ ID NO: 1707367 - DNA, 25 bp, Homo sapien
caaagcgtagagagttgagggactc

SEQ ID NO: 1707368 - DNA, 25 bp, Homo sapien
agttgagggactcggagacgttctc

SEQ ID NO: 1707369 - DNA, 25 bp, Homo sapien
gagacgttctcttccagtggagaaa

SEQ ID NO: 1707370 - DNA, 25 bp, Homo sapien
gattggaatggagaagcctacaacc

SEQ ID NO: 1707371 - DNA, 25 bp, Homo sapien
atggagaagcctacaaccacccacg

SEQ ID NO: 1707372 - DNA, 25 bp, Homo sapien
caaggctgacgggtggtaatcgcac

SEQ ID NO: 1707373 - DNA, 25 bp, Homo sapien
caggtgagcagtgcctcagatacct

SEQ ID NO: 1707374 - DNA, 25 bp, Homo sapien
ttgcaagatagtgagggaaaccctc

SEQ ID NO: 1707375 - DNA, 25 bp, Homo sapien
catcaaagggctatacgcgcaggag

SEQ ID NO: 1707376 - DNA, 25 bp, Homo sapien
tgtacaaagttagtcaacgtggcct

SEQ ID NO: 1707377 - DNA, 25 bp, Homo sapien
tgagaattcatatagccactggctg

SEQ ID NO: 1707378 - DNA, 25 bp, Homo sapien
tctgcacactaggtttggaggaggt

SEQ ID NO: 1707379 - DNA, 25 bp, Homo sapien
tagggctgccctcagaaataccgaa

SEQ ID NO: 1707380 - DNA, 25 bp, Homo sapien
cctccaaaggctggttcaggctggt

SEQ ID NO: 1707381 - DNA, 25 bp, Homo sapien
caataccctgtactagagacctcca

SEQ ID NO: 1707382 - DNA, 25 bp, Homo sapien
gcagtaccaataacacactggttca

SEQ ID NO: 1707383 - DNA, 25 bp, Homo sapien
ccctcacccgatacatagacatagg

SEQ ID NO: 1707384 - DNA, 25 bp, Homo sapien
gtgccctccacccaataaagcaccc

SEQ ID NO: 1707385 - DNA, 25 bp, Homo sapien
ccgatacatagacatagggacacac

SEQ ID NO: 1707386 - DNA, 25 bp, Homo sapien
aataaagcaccctccagcaaccctc

SEQ ID NO: 1707387 - DNA, 25 bp, Homo sapien
aaccaaactattctttatttgatag

SEQ ID NO: 1707388 - DNA, 25 bp, Homo sapien
ccaaactattctttatttgatagcc

SEQ ID NO: 1707389 - DNA, 25 bp, Homo sapien
accaaactattctttatttgatagc

SEQ ID NO: 1707390 - DNA, 25 bp, Homo sapien
ggcggttggcgcgagggagtcggcg

SEQ ID NO: 1707391 - DNA, 25 bp, Homo sapien
gtgcgcgccgcttcccgtggacgtc

SEQ ID NO: 1707392 - DNA, 25 bp, Homo sapien
gcgcgagggagtcggcgggcgtgcg

SEQ ID NO: 1707393 - DNA, 25 bp, Homo sapien
cggccgtcggcggttggcgcgaggg

SEQ ID NO: 1707394 - DNA, 25 bp, Homo sapien
gcgtgtcccctcctgcgcgcggcac

SEQ ID NO: 1707395 - DNA, 25 bp, Homo sapien
cgaagagtcggacccggtgggagag

SEQ ID NO: 1707396 - DNA, 25 bp, Homo sapien
gccccttcctccgacctgagattcg

SEQ ID NO: 1707397 - DNA, 25 bp, Homo sapien
tcgcccttggggcacgagggaatcc

SEQ ID NO: 1707398 - DNA, 25 bp, Homo sapien
gcgccgaagaagaggctggccctcc

SEQ ID NO: 1707399 - DNA, 25 bp, Homo sapien
cccgcgcggagagggcacgtccggg

SEQ ID NO: 1707400 - DNA, 25 bp, Homo sapien
cggagagggcacgtccgggcgtggg

SEQ ID NO: 1707401 - DNA, 25 bp, Homo sapien
cggctctggggcgtatgacgcagca

SEQ ID NO: 1707402 - DNA, 25 bp, Homo sapien
tctggggcgtatgacgcagcagcca

SEQ ID NO: 1707403 - DNA, 25 bp, Homo sapien
ccgggcaggggcagacgtaggagac

SEQ ID NO: 1707404 - DNA, 25 bp, Homo sapien
cggtgacagctggggccgccgggag

SEQ ID NO: 1707405 - DNA, 25 bp, Homo sapien
agccgggcaggggcagacgtaggag

SEQ ID NO: 1707406 - DNA, 25 bp, Homo sapien
gtgacagctggggccgccgggagcc

SEQ ID NO: 1707407 - DNA, 25 bp, Homo sapien
ccaggcctgcgcgtctcattaagaa

SEQ ID NO: 1707408 - DNA, 25 bp, Homo sapien
tcataattagggtgtcctgttgccc

SEQ ID NO: 1707409 - DNA, 25 bp, Homo sapien
cctgttgcccagagacgtgttttgg

SEQ ID NO: 1707410 - DNA, 25 bp, Homo sapien
gtgccaggttatgtcaggtcaccct

SEQ ID NO: 1707411 - DNA, 25 bp, Homo sapien
gcacccatcaccagctttttgagtc

SEQ ID NO: 1707412 - DNA, 25 bp, Homo sapien
ctcctctcggtaactaacagccctc

SEQ ID NO: 1707413 - DNA, 25 bp, Homo sapien
cctcttccaactctagtgactggct

SEQ ID NO: 1707414 - DNA, 25 bp, Homo sapien
gacaccttgataggaaaccactggg

SEQ ID NO: 1707415 - DNA, 25 bp, Homo sapien
ggaggagaaggttatgaatgctgag

SEQ ID NO: 1707416 - DNA, 25 bp, Homo sapien
gaaggttatgaatgctgagaaacct

SEQ ID NO: 1707417 - DNA, 25 bp, Homo sapien
ttatgaatgctgagaaaccttcccc

SEQ ID NO: 1707418 - DNA, 25 bp, Homo sapien
gagaaggttatgaatgctgagaaac

SEQ ID NO: 1707419 - DNA, 25 bp, Homo sapien
ttgatggtacccaagtatagcagcc

SEQ ID NO: 1707420 - DNA, 25 bp, Homo sapien
ccaagtatagcagcccatcagtcca

SEQ ID NO: 1707421 - DNA, 25 bp, Homo sapien
ctttttgatggtacccaagtatagc

SEQ ID NO: 1707422 - DNA, 25 bp, Homo sapien
ggtacccaagtatagcagcccatca

SEQ ID NO: 1707423 - DNA, 25 bp, Homo sapien
gcaaacaggatgaaatgggaaccag

SEQ ID NO: 1707424 - DNA, 25 bp, Homo sapien
tggaatgggtgagcaaacaggatga

SEQ ID NO: 1707425 - DNA, 25 bp, Homo sapien
ctggaatgggtgagcaaacaggatg

SEQ ID NO: 1707426 - DNA, 25 bp, Homo sapien
ggaatgggtgagcaaacaggatgaa

SEQ ID NO: 1707427 - DNA, 25 bp, Homo sapien
agggctaatgtctttccatagaacc

SEQ ID NO: 1707428 - DNA, 25 bp, Homo sapien
aaactgcgaatcatcctcaaactgg

SEQ ID NO: 1707429 - DNA, 25 bp, Homo sapien
tccatagaaccagaaactgcgaatc

SEQ ID NO: 1707430 - DNA, 25 bp, Homo sapien
gaaccagaaactgcgaatcatcctc

SEQ ID NO: 1707431 - DNA, 25 bp, Homo sapien
gacacaacagaggagttcctctcca

SEQ ID NO: 1707432 - DNA, 25 bp, Homo sapien
gagcgacagacacaacagaggagtt

SEQ ID NO: 1707433 - DNA, 25 bp, Homo sapien
tctcagagcgacagacacaacagag

SEQ ID NO: 1707434 - DNA, 25 bp, Homo sapien
accacagtctcagagcgacagacac

SEQ ID NO: 1707435 - DNA, 25 bp, Homo sapien
tggtggcgatcgcaaagacacactg

SEQ ID NO: 1707436 - DNA, 25 bp, Homo sapien
caaagacacactggcggcataccca

SEQ ID NO: 1707437 - DNA, 25 bp, Homo sapien
cttggtggcgatcgcaaagacacac

SEQ ID NO: 1707438 - DNA, 25 bp, Homo sapien
gcggcatacccaggatgtgccctct

SEQ ID NO: 1707439 - DNA, 25 bp, Homo sapien
cggttgctcagatgtccagcatccc

SEQ ID NO: 1707440 - DNA, 25 bp, Homo sapien
atacccagcatggcccgggcatagg

SEQ ID NO: 1707441 - DNA, 25 bp, Homo sapien
gtaactctgctgtcggttgctcaga

SEQ ID NO: 1707442 - DNA, 25 bp, Homo sapien
cagtaacagtaactctgctgtcggt

SEQ ID NO: 1707443 - DNA, 25 bp, Homo sapien
cacagtctgctcccctctcattact

SEQ ID NO: 1707444 - DNA, 25 bp, Homo sapien
agtctgctcccctctcattactcac

SEQ ID NO: 1707445 - DNA, 25 bp, Homo sapien
tccaccaccacatcattcattccac

SEQ ID NO: 1707446 - DNA, 25 bp, Homo sapien
atccaccaccacatcattcattcca

SEQ ID NO: 1707447 - DNA, 25 bp, Homo sapien
tgctcagacactgggtgcaggcctc

SEQ ID NO: 1707448 - DNA, 25 bp, Homo sapien
ggcagctccggcactgcagcatttt

SEQ ID NO: 1707449 - DNA, 25 bp, Homo sapien
gcaggcctcatggaaccactgcagg

SEQ ID NO: 1707450 - DNA, 25 bp, Homo sapien
tccccatagaggaggggcttgctca

SEQ ID NO: 1707451 - DNA, 25 bp, Homo sapien
ccccgcgacacacacagcattcaaa

SEQ ID NO: 1707452 - DNA, 25 bp, Homo sapien
cagcgaagctgtagtctccggactt

SEQ ID NO: 1707453 - DNA, 25 bp, Homo sapien
tagtctccggactttctcagggccc

SEQ ID NO: 1707454 - DNA, 25 bp, Homo sapien
gaagctgtagtctccggactttctc

SEQ ID NO: 1707455 - DNA, 25 bp, Homo sapien
ggatctcacgatcaaaatcaaagta

SEQ ID NO: 1707456 - DNA, 25 bp, Homo sapien
gaaggggaggatctcacgatcaaaa

SEQ ID NO: 1707457 - DNA, 25 bp, Homo sapien
tacaggacaagatgggccacatcca

SEQ ID NO: 1707458 - DNA, 25 bp, Homo sapien
aggtgatacaggacaagatgggcca

SEQ ID NO: 1707459 - DNA, 25 bp, Homo sapien
aggagcttggaagaacgttctcctt

SEQ ID NO: 1707460 - DNA, 25 bp, Homo sapien
agaggagcttggaagaacgttctcc

SEQ ID NO: 1707461 - DNA, 25 bp, Homo sapien
gagcttggaagaacgttctcctttg

SEQ ID NO: 1707462 - DNA, 25 bp, Homo sapien
agcttggaagaacgttctcctttgg

SEQ ID NO: 1707463 - DNA, 25 bp, Homo sapien
gcatggagaccaaacaaacatttcc

SEQ ID NO: 1707464 - DNA, 25 bp, Homo sapien
tggtgagtgctccatctccagtagg

SEQ ID NO: 1707465 - DNA, 25 bp, Homo sapien
ctggtgagtgctccatctccagtag

SEQ ID NO: 1707466 - DNA, 25 bp, Homo sapien
ggaggcatccgagcatggagaccaa

SEQ ID NO: 1707467 - DNA, 25 bp, Homo sapien
taacaccctgagaatttcccccatc

SEQ ID NO: 1707468 - DNA, 25 bp, Homo sapien
tacatataccccccaggactaacac

SEQ ID NO: 1707469 - DNA, 25 bp, Homo sapien
ctaacaccctgagaatttcccccat

SEQ ID NO: 1707470 - DNA, 25 bp, Homo sapien
tatacatataccccccaggactaac

SEQ ID NO: 1707471 - DNA, 25 bp, Homo sapien
tctgcagatgagcccgctccctctg

SEQ ID NO: 1707472 - DNA, 25 bp, Homo sapien
gggctcgggctgattgcgcactgct

SEQ ID NO: 1707473 - DNA, 25 bp, Homo sapien
ttgcgcactgctgagggtggcccca

SEQ ID NO: 1707474 - DNA, 25 bp, Homo sapien
ctcgggctgattgcgcactgctgag

SEQ ID NO: 1707475 - DNA, 25 bp, Homo sapien
gccctggtaactctggttagggctg

SEQ ID NO: 1707476 - DNA, 25 bp, Homo sapien
cagcgggcatctgtgggccggaagt

SEQ ID NO: 1707477 - DNA, 25 bp, Homo sapien
tgggccggaagttgtagccgctgct

SEQ ID NO: 1707478 - DNA, 25 bp, Homo sapien
ccctggtaactctggttagggctgg

SEQ ID NO: 1707479 - DNA, 25 bp, Homo sapien
tccctgcggtgctggcagaagggtg

SEQ ID NO: 1707480 - DNA, 25 bp, Homo sapien
tggaaggaagcaaacatccggatgg

SEQ ID NO: 1707481 - DNA, 25 bp, Homo sapien
tgtctgggggtccactgtccccaga

SEQ ID NO: 1707482 - DNA, 25 bp, Homo sapien
tgtccccagaggtccctgcggtgct

SEQ ID NO: 1707483 - DNA, 25 bp, Homo sapien
gaaacagtgttagagactaagagcc

SEQ ID NO: 1707484 - DNA, 25 bp, Homo sapien
ctaagagccttgagcacatagaggg

SEQ ID NO: 1707485 - DNA, 25 bp, Homo sapien
aggcaattgtaagaaatgggcagaa

SEQ ID NO: 1707486 - DNA, 25 bp, Homo sapien
cacatgtgaatcagagaaacagtgt

SEQ ID NO: 1707487 - DNA, 25 bp, Homo sapien
aaccaatgtgaagttccaggggtga

SEQ ID NO: 1707488 - DNA, 25 bp, Homo sapien
tggggggcacttttagggatgtctg

SEQ ID NO: 1707489 - DNA, 25 bp, Homo sapien
cacttttagggatgtctgtggggaa

SEQ ID NO: 1707490 - DNA, 25 bp, Homo sapien
tgtggggaaaccaatgtgaagttcc

SEQ ID NO: 1707491 - DNA, 25 bp, Homo sapien
ggtgctgagcgtctaggaagacctg

SEQ ID NO: 1707492 - DNA, 25 bp, Homo sapien
gaagggggtgctgagcgtctaggaa

SEQ ID NO: 1707493 - DNA, 25 bp, Homo sapien
ggggtgctgagcgtctaggaagacc

SEQ ID NO: 1707494 - DNA, 25 bp, Homo sapien
tgctgagcgtctaggaagacctggg

SEQ ID NO: 1707495 - DNA, 25 bp, Homo sapien
ccaggtactgcacagagccatcagg

SEQ ID NO: 1707496 - DNA, 25 bp, Homo sapien
ccactcaaccaggtactgcacagag

SEQ ID NO: 1707497 - DNA, 25 bp, Homo sapien
cgtactctccgagcaaggacccgga

SEQ ID NO: 1707498 - DNA, 25 bp, Homo sapien
atcaggccgtactctccgagcaagg

SEQ ID NO: 1707499 - DNA, 25 bp, Homo sapien
ccaggtacatcccagctgtaggtga

SEQ ID NO: 1707500 - DNA, 25 bp, Homo sapien
tagggagaactaccccctatctctc

SEQ ID NO: 1707501 - DNA, 25 bp, Homo sapien
tcagaggtcagggtatgaaagtgcc

SEQ ID NO: 1707502 - DNA, 25 bp, Homo sapien
atcatacagagtccgggatccctta

SEQ ID NO: 1707503 - DNA, 25 bp, Homo sapien
tcacagtcctgccatgatgagccct

SEQ ID NO: 1707504 - DNA, 25 bp, Homo sapien
tttccgtacctgcagtgggtgcgcc

SEQ ID NO: 1707505 - DNA, 25 bp, Homo sapien
tacgaagtggccgaggtaattgcat

SEQ ID NO: 1707506 - DNA, 25 bp, Homo sapien
tagttctgtgcacccttacgaagtg

SEQ ID NO: 1707507 - DNA, 25 bp, Homo sapien
tctctgcctctcattggcccctctc

SEQ ID NO: 1707508 - DNA, 25 bp, Homo sapien
tctgcctctcattggcccctctctc

SEQ ID NO: 1707509 - DNA, 25 bp, Homo sapien
tgcctctcattggcccctctctcca

SEQ ID NO: 1707510 - DNA, 25 bp, Homo sapien
ctctctgcctctcattggcccctct

SEQ ID NO: 1707511 - DNA, 25 bp, Homo sapien
agaataagagccaacggcagcagcg

SEQ ID NO: 1707512 - DNA, 25 bp, Homo sapien
aggaggagaataagagccaacggca

SEQ ID NO: 1707513 - DNA, 25 bp, Homo sapien
gagaataagagccaacggcagcagc

SEQ ID NO: 1707514 - DNA, 25 bp, Homo sapien
aggaggaggagaataagagccaacg

SEQ ID NO: 1707515 - DNA, 25 bp, Homo sapien
tgctcccccgatggatggaggctcg

SEQ ID NO: 1707516 - DNA, 25 bp, Homo sapien
cccgatggatggaggctcgagacct

SEQ ID NO: 1707517 - DNA, 25 bp, Homo sapien
gaggctcgagacctgctcatcaggc

SEQ ID NO: 1707518 - DNA, 25 bp, Homo sapien
tggatggaggctcgagacctgctca

SEQ ID NO: 1707519 - DNA, 25 bp, Homo sapien
ttcggtgcatagagggtccccgtac

SEQ ID NO: 1707520 - DNA, 25 bp, Homo sapien
gcagaaccgagggttccaaccagga

SEQ ID NO: 1707521 - DNA, 25 bp, Homo sapien
gagcagctggttccccgagatgatg

SEQ ID NO: 1707522 - DNA, 25 bp, Homo sapien
gaatgaacgtattgggttcggtgca

SEQ ID NO: 1707523 - DNA, 25 bp, Homo sapien
gttgcgactggactcgctcctccgg

SEQ ID NO: 1707524 - DNA, 25 bp, Homo sapien
tccaccggcacggagactgtgcgtc

SEQ ID NO: 1707525 - DNA, 25 bp, Homo sapien
gctcctccggtcccggatcagtagg

SEQ ID NO: 1707526 - DNA, 25 bp, Homo sapien
gcagtttgttgcgactggactcgct

SEQ ID NO: 1707527 - DNA, 25 bp, Homo sapien
agcaaggccgcggactgccccacaa

SEQ ID NO: 1707528 - DNA, 25 bp, Homo sapien
gccagggatatgcatgctcagggtc

SEQ ID NO: 1707529 - DNA, 25 bp, Homo sapien
cagaggtgacatggaccagcaaggc

SEQ ID NO: 1707530 - DNA, 25 bp, Homo sapien
aagcccgtggctggcccaacagccc

SEQ ID NO: 1707531 - DNA, 25 bp, Homo sapien
gctggtgtggactttgtggcccaag

SEQ ID NO: 1707532 - DNA, 25 bp, Homo sapien
tcttgggcaatcatgtggacagcac

SEQ ID NO: 1707533 - DNA, 25 bp, Homo sapien
gtggcccaagtctcttgggcaatca

SEQ ID NO: 1707534 - DNA, 25 bp, Homo sapien
caggtgctgcatcggggcggggcca

SEQ ID NO: 1707535 - DNA, 25 bp, Homo sapien
tctccacggcaacaagaagctacag

SEQ ID NO: 1707536 - DNA, 25 bp, Homo sapien
ccatctccacggcaacaagaagcta

SEQ ID NO: 1707537 - DNA, 25 bp, Homo sapien
ctccacggcaacaagaagctacagg

SEQ ID NO: 1707538 - DNA, 25 bp, Homo sapien
tgaaggacaccaaagatccagggag

SEQ ID NO: 1707539 - DNA, 25 bp, Homo sapien
tgggaggccttaggcccatgactgg

SEQ ID NO: 1707540 - DNA, 25 bp, Homo sapien
ggttaaaggtcattgcccataggca

SEQ ID NO: 1707541 - DNA, 25 bp, Homo sapien
tggctgagagggtcagtaaaacccc

SEQ ID NO: 1707542 - DNA, 25 bp, Homo sapien
ctggcagcgggaaggagggggcaag

SEQ ID NO: 1707543 - DNA, 25 bp, Homo sapien
gaaggagggggcaaggaacctgagc

SEQ ID NO: 1707544 - DNA, 25 bp, Homo sapien
ggcaaggaacctgagcaggagcccc

SEQ ID NO: 1707545 - DNA, 25 bp, Homo sapien
aggagggggcaaggaacctgagcag

SEQ ID NO: 1707546 - DNA, 25 bp, Homo sapien
caggaagagcagcgacggcggagag

SEQ ID NO: 1707547 - DNA, 25 bp, Homo sapien
aggaagagcagcgacggcggagagg

SEQ ID NO: 1707548 - DNA, 25 bp, Homo sapien
gacactcttcctcctcgagcgaccc

SEQ ID NO: 1707549 - DNA, 25 bp, Homo sapien
ccggaagggcgcagcaggggcaccc

SEQ ID NO: 1707550 - DNA, 25 bp, Homo sapien
ctcctcgagcgacccaagtggtatt

SEQ ID NO: 1707551 - DNA, 25 bp, Homo sapien
gggcaccctccatgctgtactgctt

SEQ ID NO: 1707552 - DNA, 25 bp, Homo sapien
gttggggcagggtcagttctaccta

SEQ ID NO: 1707553 - DNA, 25 bp, Homo sapien
agctggtagagagcccctggatgaa

SEQ ID NO: 1707554 - DNA, 25 bp, Homo sapien
cagggtcagttctacctactcatcc

SEQ ID NO: 1707555 - DNA, 25 bp, Homo sapien
tcatccctcagctggtagagagccc

SEQ ID NO: 1707556 - DNA, 25 bp, Homo sapien
ttgatggagctttttagccgtcggc

SEQ ID NO: 1707557 - DNA, 25 bp, Homo sapien
ttagccgtcggctcaggaagccttg

SEQ ID NO: 1707558 - DNA, 25 bp, Homo sapien
caggatctggcgaaagctgctggtc

SEQ ID NO: 1707559 - DNA, 25 bp, Homo sapien
tgtgacttcgttcgtttgatggagc

SEQ ID NO: 1707560 - DNA, 25 bp, Homo sapien
ctcatcccacatgctccagcccctg

SEQ ID NO: 1707561 - DNA, 25 bp, Homo sapien
atcccacatgctccagcccctgtac

SEQ ID NO: 1707562 - DNA, 25 bp, Homo sapien
tcaatctcatcccacatgctccagc

SEQ ID NO: 1707563 - DNA, 25 bp, Homo sapien
atcaatctcatcccacatgctccag

SEQ ID NO: 1707564 - DNA, 25 bp, Homo sapien
tggccgggagaaccgaggtgagggc

SEQ ID NO: 1707565 - DNA, 25 bp, Homo sapien
gaggaaggccaactggagagatggc

SEQ ID NO: 1707566 - DNA, 25 bp, Homo sapien
aatacacggactagggaagaagagg

SEQ ID NO: 1707567 - DNA, 25 bp, Homo sapien
gagacaaaggtatgtgcagcaagac

SEQ ID NO: 1707568 - DNA, 25 bp, Homo sapien
cagctgcactgctaggactcagcaa

SEQ ID NO: 1707569 - DNA, 25 bp, Homo sapien
gttgagctccaatgcctcagctgca

SEQ ID NO: 1707570 - DNA, 25 bp, Homo sapien
gctgtgcactggcttgataatggaa

SEQ ID NO: 1707571 - DNA, 25 bp, Homo sapien
ctcagcaaggactcatgagagtgtg

SEQ ID NO: 1707572 - DNA, 25 bp, Homo sapien
ttgttgggctttactgcccgctgca

SEQ ID NO: 1707573 - DNA, 25 bp, Homo sapien
cagaccgacaggcaaagcattttgt

SEQ ID NO: 1707574 - DNA, 25 bp, Homo sapien
tttgtctctttcggccgcagaccga

SEQ ID NO: 1707575 - DNA, 25 bp, Homo sapien
gcagattctcaatccatttgtctct

SEQ ID NO: 1707576 - DNA, 25 bp, Homo sapien
tcccgtgttggtgcaacctttgccc

SEQ ID NO: 1707577 - DNA, 25 bp, Homo sapien
caacctttgccctgcacaggttgtg

SEQ ID NO: 1707578 - DNA, 25 bp, Homo sapien
gcacaggttgtgtcccctttattcc

SEQ ID NO: 1707579 - DNA, 25 bp, Homo sapien
aggcccccagcttcccgtgttggtg

SEQ ID NO: 1707580 - DNA, 25 bp, Homo sapien
tgtgaactagtgcactggcaacctc

SEQ ID NO: 1707581 - DNA, 25 bp, Homo sapien
tttagcacattgtctacccggcggc

SEQ ID NO: 1707582 - DNA, 25 bp, Homo sapien
cactgctctgtgaagtggcgcccag

SEQ ID NO: 1707583 - DNA, 25 bp, Homo sapien
gagtcacggtacagatgcagccgca

SEQ ID NO: 1707584 - DNA, 25 bp, Homo sapien
tcttctatggctttagtggcaagcg

SEQ ID NO: 1707585 - DNA, 25 bp, Homo sapien
gcaagcgtgttctcgcggaatatga

SEQ ID NO: 1707586 - DNA, 25 bp, Homo sapien
gcatccttgaggtatttctgaccaa

SEQ ID NO: 1707587 - DNA, 25 bp, Homo sapien
gaggtgctcccgttccatgaaccgg

SEQ ID NO: 1707588 - DNA, 25 bp, Homo sapien
ttcctcagattcatacagagcacgg

SEQ ID NO: 1707589 - DNA, 25 bp, Homo sapien
tcacagcacattcgcaggttggcct

SEQ ID NO: 1707590 - DNA, 25 bp, Homo sapien
ggtctacctcgcagttttcctcaga

SEQ ID NO: 1707591 - DNA, 25 bp, Homo sapien
tgcacagggccaactcacagcacat

SEQ ID NO: 1707592 - DNA, 25 bp, Homo sapien
tgctttgcccataaatggtgctcag

SEQ ID NO: 1707593 - DNA, 25 bp, Homo sapien
tctttcacctgtttgctctatagcg

SEQ ID NO: 1707594 - DNA, 25 bp, Homo sapien
ctctatagcgcctagaacaatgctt

SEQ ID NO: 1707595 - DNA, 25 bp, Homo sapien
gcccataaatggtgctcagtcctct

SEQ ID NO: 1707596 - DNA, 25 bp, Homo sapien
gataagcctgtctgcgatgtcctcc

SEQ ID NO: 1707597 - DNA, 25 bp, Homo sapien
gactgggcgacataatcgctgggca

SEQ ID NO: 1707598 - DNA, 25 bp, Homo sapien
tgcataagcccaaagagactgggcg

SEQ ID NO: 1707599 - DNA, 25 bp, Homo sapien
ggtctgctcatctgggtactcctgc

SEQ ID NO: 1707600 - DNA, 25 bp, Homo sapien
cctcccagagtagggcatgcagtgt

SEQ ID NO: 1707601 - DNA, 25 bp, Homo sapien
gtcgatgtaaccctcaaagctactg

SEQ ID NO: 1707602 - DNA, 25 bp, Homo sapien
gagctctcggcccaagtcgatgtaa

SEQ ID NO: 1707603 - DNA, 25 bp, Homo sapien
tagcgtgtccagattggagatctca

SEQ ID NO: 1707604 - DNA, 25 bp, Homo sapien
gtgaggctgttacctgggggctcag

SEQ ID NO: 1707605 - DNA, 25 bp, Homo sapien
gggtgaggctgttacctgggggctc

SEQ ID NO: 1707606 - DNA, 25 bp, Homo sapien
ggtgaggctgttacctgggggctca

SEQ ID NO: 1707607 - DNA, 25 bp, Homo sapien
agggtgaggctgttacctgggggct

SEQ ID NO: 1707608 - DNA, 25 bp, Homo sapien
cactctggcggcttggctgcctttg

SEQ ID NO: 1707609 - DNA, 25 bp, Homo sapien
gctgtgctgatgtcgttgaggagcc

SEQ ID NO: 1707610 - DNA, 25 bp, Homo sapien
agccggggcagtggacccagcttca

SEQ ID NO: 1707611 - DNA, 25 bp, Homo sapien
ctgttgaggtcccgcatcatgtagc

SEQ ID NO: 1707612 - DNA, 25 bp, Homo sapien
ggcctcgagccatgaaggactgaag

SEQ ID NO: 1707613 - DNA, 25 bp, Homo sapien
tcgagccatgaaggactgaaggtcg

SEQ ID NO: 1707614 - DNA, 25 bp, Homo sapien
gaggcctcgagccatgaaggactga

SEQ ID NO: 1707615 - DNA, 25 bp, Homo sapien
ccatgaaggactgaaggtcgatgga

SEQ ID NO: 1707616 - DNA, 25 bp, Homo sapien
tagaacaggtctttaccaccaccag

SEQ ID NO: 1707617 - DNA, 25 bp, Homo sapien
gacacactcttgttgacactcagca

SEQ ID NO: 1707618 - DNA, 25 bp, Homo sapien
ggtggacggcttacatagaacaggt

SEQ ID NO: 1707619 - DNA, 25 bp, Homo sapien
tcaccctgtaagtccagcatggaca

SEQ ID NO: 1707620 - DNA, 25 bp, Homo sapien
gccgtagccccaaggctgctgtcag

SEQ ID NO: 1707621 - DNA, 25 bp, Homo sapien
tgaggcgcatgccagccgccgtgat

SEQ ID NO: 1707622 - DNA, 25 bp, Homo sapien
aggcgcaggccgtagccccaaggct

SEQ ID NO: 1707623 - DNA, 25 bp, Homo sapien
ccgtgatggatgagccactcccctg

SEQ ID NO: 1707624 - DNA, 25 bp, Homo sapien
aaggagagggggattcgcagttgct

SEQ ID NO: 1707625 - DNA, 25 bp, Homo sapien
ggagagggggattcgcagttgctgg

SEQ ID NO: 1707626 - DNA, 25 bp, Homo sapien
gagagggggattcgcagttgctggg

SEQ ID NO: 1707627 - DNA, 25 bp, Homo sapien
gaaggagagggggattcgcagttgc

SEQ ID NO: 1707628 - DNA, 25 bp, Homo sapien
ggcccatcagcagccatgtggaaga

SEQ ID NO: 1707629 - DNA, 25 bp, Homo sapien
cccatcagcagccatgtggaagaga

SEQ ID NO: 1707630 - DNA, 25 bp, Homo sapien
catcagcagccatgtggaagagagg

SEQ ID NO: 1707631 - DNA, 25 bp, Homo sapien
ctggcccatcagcagccatgtggaa

SEQ ID NO: 1707632 - DNA, 25 bp, Homo sapien
gaaggtgggccatggccaccgcccc

SEQ ID NO: 1707633 - DNA, 25 bp, Homo sapien
accgccccctccatggccgcctggg

SEQ ID NO: 1707634 - DNA, 25 bp, Homo sapien
gaggaaggtgggccatggccaccgc

SEQ ID NO: 1707635 - DNA, 25 bp, Homo sapien
cgccccctccatggccgcctggggg

SEQ ID NO: 1707636 - DNA, 25 bp, Homo sapien
gaccccggaagagaggtcctcactc

SEQ ID NO: 1707637 - DNA, 25 bp, Homo sapien
agaggtcctcactcttgctatagcc

SEQ ID NO: 1707638 - DNA, 25 bp, Homo sapien
ggaagagaggtcctcactcttgcta

SEQ ID NO: 1707639 - DNA, 25 bp, Homo sapien
tgctatagccatggaatggggcaaa

SEQ ID NO: 1707640 - DNA, 25 bp, Homo sapien
tctgggctgcgctgactgtcaactg

SEQ ID NO: 1707641 - DNA, 25 bp, Homo sapien
tgaaagctgccgacgggtgaagtca

SEQ ID NO: 1707642 - DNA, 25 bp, Homo sapien
gccagagggtccaaactcatcactg

SEQ ID NO: 1707643 - DNA, 25 bp, Homo sapien
gactgcaatagattcccgctggatg

SEQ ID NO: 1707644 - DNA, 25 bp, Homo sapien
cgatgtgggcactctcgatgtcagc

SEQ ID NO: 1707645 - DNA, 25 bp, Homo sapien
agccggctctcatccatcgattttg

SEQ ID NO: 1707646 - DNA, 25 bp, Homo sapien
acaggtgaggcatgttggagaccca

SEQ ID NO: 1707647 - DNA, 25 bp, Homo sapien
gcttgtactcttcccgctcgatgtg

SEQ ID NO: 1707648 - DNA, 25 bp, Homo sapien
tatgaggggcgccccaccccaagcc

SEQ ID NO: 1707649 - DNA, 25 bp, Homo sapien
agcccaccacccagcctccatccct

SEQ ID NO: 1707650 - DNA, 25 bp, Homo sapien
ccccaagcccaccacccagcctcca

SEQ ID NO: 1707651 - DNA, 25 bp, Homo sapien
ctatgaggggcgccccaccccaagc

SEQ ID NO: 1707652 - DNA, 25 bp, Homo sapien
tgcccgccgggcacacgaccccgca

SEQ ID NO: 1707653 - DNA, 25 bp, Homo sapien
ctgcccgccgggcacacgaccccgc

SEQ ID NO: 1707654 - DNA, 25 bp, Homo sapien
aatgatgctcttgatctgggaatcc

SEQ ID NO: 1707655 - DNA, 25 bp, Homo sapien
ccagtcgggcctgatactgcatcag

SEQ ID NO: 1707656 - DNA, 25 bp, Homo sapien
tgcagccgctctttcagtgagtgaa

SEQ ID NO: 1707657 - DNA, 25 bp, Homo sapien
ttccggttggacatgtgcagccgct

SEQ ID NO: 1707658 - DNA, 25 bp, Homo sapien
cagtggggttagtggcgggcacagg

SEQ ID NO: 1707659 - DNA, 25 bp, Homo sapien
tgagcgtcgagcagcctcttcttgg

SEQ ID NO: 1707660 - DNA, 25 bp, Homo sapien
ttctggcagcggctcagccatggcg

SEQ ID NO: 1707661 - DNA, 25 bp, Homo sapien
atggcggggtggtcccggcgcagct

SEQ ID NO: 1707662 - DNA, 25 bp, Homo sapien
tcttcttgggttctggcagcggctc

SEQ ID NO: 1707663 - DNA, 25 bp, Homo sapien
caaacagcagactatgagagacaga

SEQ ID NO: 1707664 - DNA, 25 bp, Homo sapien
gacaaaggcacagacgatgggatga

SEQ ID NO: 1707665 - DNA, 25 bp, Homo sapien
tgtagtgagtgcacgaaagacagtg

SEQ ID NO: 1707666 - DNA, 25 bp, Homo sapien
gacgctgccaggagtgacaaaggca

SEQ ID NO: 1707667 - DNA, 25 bp, Homo sapien
gccaaagcggaaccaggagaattac

SEQ ID NO: 1707668 - DNA, 25 bp, Homo sapien
tgctgggcccatctagggcccaact

SEQ ID NO: 1707669 - DNA, 25 bp, Homo sapien
accaacctgcagtggtccggagtca

SEQ ID NO: 1707670 - DNA, 25 bp, Homo sapien
cccaactcttggtgttgctaaggta

SEQ ID NO: 1707671 - DNA, 25 bp, Homo sapien
aatcaacatgcctactgagcccacg

SEQ ID NO: 1707672 - DNA, 25 bp, Homo sapien
agagggaaacccaacctacctgctg

SEQ ID NO: 1707673 - DNA, 25 bp, Homo sapien
ccacgatctgatctaggaggatgtc

SEQ ID NO: 1707674 - DNA, 25 bp, Homo sapien
ccctaaggacgctctggtgaaatgg

SEQ ID NO: 1707675 - DNA, 25 bp, Homo sapien
cacacgcgggtttgttggacccaag

SEQ ID NO: 1707676 - DNA, 25 bp, Homo sapien
gccgttctccgtaatctgcagccgg

SEQ ID NO: 1707677 - DNA, 25 bp, Homo sapien
tgcggtgtttcggaactcgccgttc

SEQ ID NO: 1707678 - DNA, 25 bp, Homo sapien
tagtggtctgcggtgtttcggaact

SEQ ID NO: 1707679 - DNA, 25 bp, Homo sapien
tcccgctgttcctcggtgatgtcca

SEQ ID NO: 1707680 - DNA, 25 bp, Homo sapien
gagggcagcaccccaatgggaagga

SEQ ID NO: 1707681 - DNA, 25 bp, Homo sapien
cattcggggaggcaatcccgctgtt

SEQ ID NO: 1707682 - DNA, 25 bp, Homo sapien
caatcagtgtgcctcccagggaggc

SEQ ID NO: 1707683 - DNA, 25 bp, Homo sapien
ccagtgctcaggggaacgatgaggc

SEQ ID NO: 1707684 - DNA, 25 bp, Homo sapien
cagaggatggggatagcaccccgga

SEQ ID NO: 1707685 - DNA, 25 bp, Homo sapien
gtgagggtctgtcccccagtgctca

SEQ ID NO: 1707686 - DNA, 25 bp, Homo sapien
gatggggatagcaccccggagtgaa

SEQ ID NO: 1707687 - DNA, 25 bp, Homo sapien
ctgaagttgaaagtttggaggtgcc

SEQ ID NO: 1707688 - DNA, 25 bp, Homo sapien
gaagttgaaagtttggaggtgccac

SEQ ID NO: 1707689 - DNA, 25 bp, Homo sapien
cctgaagttgaaagtttggaggtgc

SEQ ID NO: 1707690 - DNA, 25 bp, Homo sapien
agttgaaagtttggaggtgccacac

SEQ ID NO: 1707691 - DNA, 25 bp, Homo sapien
ccagacgctcctgagaaatcaaggg

SEQ ID NO: 1707692 - DNA, 25 bp, Homo sapien
tttgtgcgtgctgagcccccccaga

SEQ ID NO: 1707693 - DNA, 25 bp, Homo sapien
gagaaggagtttgtgcgtgctgagc

SEQ ID NO: 1707694 - DNA, 25 bp, Homo sapien
gtcagctctggttactgctaaaaaa

SEQ ID NO: 1707695 - DNA, 25 bp, Homo sapien
cccgctctgggaccagccgagagca

SEQ ID NO: 1707696 - DNA, 25 bp, Homo sapien
tctgggaccagccgagagcagatca

SEQ ID NO: 1707697 - DNA, 25 bp, Homo sapien
gctctgggaccagccgagagcagat

SEQ ID NO: 1707698 - DNA, 25 bp, Homo sapien
cgctctgggaccagccgagagcaga

SEQ ID NO: 1707699 - DNA, 25 bp, Homo sapien
ataagtataaatttggccccggctg

SEQ ID NO: 1707700 - DNA, 25 bp, Homo sapien
caccgaaaaatcgtggagctggcgg

SEQ ID NO: 1707701 - DNA, 25 bp, Homo sapien
gagcaactccctacccttgaggtgg

SEQ ID NO: 1707702 - DNA, 25 bp, Homo sapien
gagtctcaataccaaacgcaaaagg

SEQ ID NO: 1707703 - DNA, 25 bp, Homo sapien
tcagatttgctaaggaaccaggcag

SEQ ID NO: 1707704 - DNA, 25 bp, Homo sapien
cgtttcccggtgattaagtgtagca

SEQ ID NO: 1707705 - DNA, 25 bp, Homo sapien
gtttggccggtgcaaaactcctgct

SEQ ID NO: 1707706 - DNA, 25 bp, Homo sapien
gatcttaccaccgtacaggtctgga

SEQ ID NO: 1707707 - DNA, 25 bp, Homo sapien
cggtgctagtaggagggcacaggcc

SEQ ID NO: 1707708 - DNA, 25 bp, Homo sapien
gaggagggcggtgctagtaggaggg

SEQ ID NO: 1707709 - DNA, 25 bp, Homo sapien
aagcctcgtgttgattggctactgc

SEQ ID NO: 1707710 - DNA, 25 bp, Homo sapien
ccagggtgtcctcgcaacgggcgtc

SEQ ID NO: 1707711 - DNA, 25 bp, Homo sapien
ggcggagctagagccgtagccaatc

SEQ ID NO: 1707712 - DNA, 25 bp, Homo sapien
tgccctcgcagttacagtgccgcta

SEQ ID NO: 1707713 - DNA, 25 bp, Homo sapien
tgcccacagaggtctgctcccggga

SEQ ID NO: 1707714 - DNA, 25 bp, Homo sapien
tagccaatcgaggaacggcagccta

SEQ ID NO: 1707715 - DNA, 25 bp, Homo sapien
cctggataaagggagccacatcttc

SEQ ID NO: 1707716 - DNA, 25 bp, Homo sapien
tccccacgagcaataactggaaact

SEQ ID NO: 1707717 - DNA, 25 bp, Homo sapien
gtcagtggcggtttctgcaaatcag

SEQ ID NO: 1707718 - DNA, 25 bp, Homo sapien
ctgtggaagataagaaggaggtcct

SEQ ID NO: 1707719 - DNA, 25 bp, Homo sapien
gggtagactccacgcgggatgaagg

SEQ ID NO: 1707720 - DNA, 25 bp, Homo sapien
ctcgaaggtgacaagaattgggaag

SEQ ID NO: 1707721 - DNA, 25 bp, Homo sapien
tcgaaggtgacaagaattgggaaga

SEQ ID NO: 1707722 - DNA, 25 bp, Homo sapien
gcttgggggtagactccacgcggga

SEQ ID NO: 1707723 - DNA, 25 bp, Homo sapien
gagacgccctgaataaatgagctgg

SEQ ID NO: 1707724 - DNA, 25 bp, Homo sapien
gagattccagcagcgacgagctatg

SEQ ID NO: 1707725 - DNA, 25 bp, Homo sapien
gctatgctgtgggaactcgatctgg

SEQ ID NO: 1707726 - DNA, 25 bp, Homo sapien
aaggcatcggcttcaatgacactcg

SEQ ID NO: 1707727 - DNA, 25 bp, Homo sapien
taattctctaagaatttctgagcac

SEQ ID NO: 1707728 - DNA, 25 bp, Homo sapien
ttctaattctctaagaatttctgag

SEQ ID NO: 1707729 - DNA, 25 bp, Homo sapien
attctctaagaatttctgagcactg

SEQ ID NO: 1707730 - DNA, 25 bp, Homo sapien
tctaattctctaagaatttctgagc

SEQ ID NO: 1707731 - DNA, 25 bp, Homo sapien
catggtaggagtttcctccacgggc

SEQ ID NO: 1707732 - DNA, 25 bp, Homo sapien
gaagggcatggtaggagtttcctcc

SEQ ID NO: 1707733 - DNA, 25 bp, Homo sapien
tgtagtggaaagaagggcatggtag

SEQ ID NO: 1707734 - DNA, 25 bp, Homo sapien
gggcatggtaggagtttcctccacg

SEQ ID NO: 1707735 - DNA, 25 bp, Homo sapien
ttccacctgaatttgcagcacttct

SEQ ID NO: 1707736 - DNA, 25 bp, Homo sapien
tctggaaaggcgaagagcgaatgca

SEQ ID NO: 1707737 - DNA, 25 bp, Homo sapien
tggaagcagggctttcagtagaagc

SEQ ID NO: 1707738 - DNA, 25 bp, Homo sapien
ggcgaagagcgaatgcaccagcctc

SEQ ID NO: 1707739 - DNA, 25 bp, Homo sapien
tttcggggagtagcagtcatgggca

SEQ ID NO: 1707740 - DNA, 25 bp, Homo sapien
ctttcggggagtagcagtcatgggc

SEQ ID NO: 1707741 - DNA, 25 bp, Homo sapien
aaaacccctgatactctctggggct

SEQ ID NO: 1707742 - DNA, 25 bp, Homo sapien
tcggggagtagcagtcatgggcagt

SEQ ID NO: 1707743 - DNA, 25 bp, Homo sapien
ggctgagttccgcttcctgatatct

SEQ ID NO: 1707744 - DNA, 25 bp, Homo sapien
gaagctcaagtggtgcactctcacc

SEQ ID NO: 1707745 - DNA, 25 bp, Homo sapien
tccttaggctcgaagggttcctgct

SEQ ID NO: 1707746 - DNA, 25 bp, Homo sapien
tgaaggcaacaagaaccctagctcc

SEQ ID NO: 1707747 - DNA, 25 bp, Homo sapien
cggtcacgctttggcttcactgcaa

SEQ ID NO: 1707748 - DNA, 25 bp, Homo sapien
ccaaaaggccgaaggctgaaggtca

SEQ ID NO: 1707749 - DNA, 25 bp, Homo sapien
tggcccttgcataggtcccggtggc

SEQ ID NO: 1707750 - DNA, 25 bp, Homo sapien
tcacttgtaagtccagtgggcagtg

SEQ ID NO: 1707751 - DNA, 25 bp, Homo sapien
ttggctagccaaaacctggagtggg

SEQ ID NO: 1707752 - DNA, 25 bp, Homo sapien
tcaaaggtagaccagaggcacaggc

SEQ ID NO: 1707753 - DNA, 25 bp, Homo sapien
ccatggcagtgagggaaaagtatcc

SEQ ID NO: 1707754 - DNA, 25 bp, Homo sapien
tgagaggcccatatctaagaacaag

SEQ ID NO: 1707755 - DNA, 25 bp, Homo sapien
taacatatggagatcgtccggtgtg

SEQ ID NO: 1707756 - DNA, 25 bp, Homo sapien
gtatacctgaggctttgggatccca

SEQ ID NO: 1707757 - DNA, 25 bp, Homo sapien
tgggcagcttcagcgtatcttgaac

SEQ ID NO: 1707758 - DNA, 25 bp, Homo sapien
caattctgccttaagtccagcgggc

SEQ ID NO: 1707759 - DNA, 25 bp, Homo sapien
ggactcaaggtgcatgccatggcgc

SEQ ID NO: 1707760 - DNA, 25 bp, Homo sapien
gattagcatgggagtcctgaccagc

SEQ ID NO: 1707761 - DNA, 25 bp, Homo sapien
ggttcacaaatgctatcccactact

SEQ ID NO: 1707762 - DNA, 25 bp, Homo sapien
cagtggttcacaaatgctatcccac

SEQ ID NO: 1707763 - DNA, 25 bp, Homo sapien
tccctcccggagcgatgccatagag

SEQ ID NO: 1707764 - DNA, 25 bp, Homo sapien
gggtcgcctccctcccggagcgatg

SEQ ID NO: 1707765 - DNA, 25 bp, Homo sapien
gctcgcgagcacaggtttaagaggc

SEQ ID NO: 1707766 - DNA, 25 bp, Homo sapien
acaggtttaagaggcccagagtgcg

SEQ ID NO: 1707767 - DNA, 25 bp, Homo sapien
cagactacagggcttaggacttggt

SEQ ID NO: 1707768 - DNA, 25 bp, Homo sapien
tgaactcacgtgtcagaagcctcca

SEQ ID NO: 1707769 - DNA, 25 bp, Homo sapien
gaaggactatcaacaccactaggaa

SEQ ID NO: 1707770 - DNA, 25 bp, Homo sapien
tctattgggcacagcctagggtctt

SEQ ID NO: 1707771 - DNA, 25 bp, Homo sapien
tccaaggtcttgactggttagatca

SEQ ID NO: 1707772 - DNA, 25 bp, Homo sapien
gaggtggggacgtcccccacagctc

SEQ ID NO: 1707773 - DNA, 25 bp, Homo sapien
ctgactccaaggtcttgactggtta

SEQ ID NO: 1707774 - DNA, 25 bp, Homo sapien
ttagatcaggactctagagggggcc

SEQ ID NO: 1707775 - DNA, 25 bp, Homo sapien
cagtcactcctctgtcatgtcacaa

SEQ ID NO: 1707776 - DNA, 25 bp, Homo sapien
cataccataccctgcctgcatgatg

SEQ ID NO: 1707777 - DNA, 25 bp, Homo sapien
tatgagtacttcaccaagattgcca

SEQ ID NO: 1707778 - DNA, 25 bp, Homo sapien
tgcagcccacggcagagaatgccta

SEQ ID NO: 1707779 - DNA, 25 bp, Homo sapien
tgaagctccttgtccaaactgtgga

SEQ ID NO: 1707780 - DNA, 25 bp, Homo sapien
aagtggttccaaggagttgcctcca

SEQ ID NO: 1707781 - DNA, 25 bp, Homo sapien
gaccttggccatggccgagttttga

SEQ ID NO: 1707782 - DNA, 25 bp, Homo sapien
ggaagtggttccaaggagttgcctc

SEQ ID NO: 1707783 - DNA, 25 bp, Homo sapien
tgaaagccttgttcggtggcgactg

SEQ ID NO: 1707784 - DNA, 25 bp, Homo sapien
tggcgactggagggcaacaatgcct

SEQ ID NO: 1707785 - DNA, 25 bp, Homo sapien
gtgtctgtggatctgaaagccttgt

SEQ ID NO: 1707786 - DNA, 25 bp, Homo sapien
actggagggcaacaatgcctgggac

SEQ ID NO: 1707787 - DNA, 25 bp, Homo sapien
tccaccacggtgatctctggccggg

SEQ ID NO: 1707788 - DNA, 25 bp, Homo sapien
gctgcctagcttccagaggcgggac

SEQ ID NO: 1707789 - DNA, 25 bp, Homo sapien
acggtgatctctggccgggtaagca

SEQ ID NO: 1707790 - DNA, 25 bp, Homo sapien
cgggactcttgctgcattcccagaa

SEQ ID NO: 1707791 - DNA, 25 bp, Homo sapien
acagattcccctatgattaccgtgg

SEQ ID NO: 1707792 - DNA, 25 bp, Homo sapien
gatatgtgtgttacaactgtggaaa

SEQ ID NO: 1707793 - DNA, 25 bp, Homo sapien
gataatgtagagttgtcatataccc

SEQ ID NO: 1707794 - DNA, 25 bp, Homo sapien
aaaaatgtgcagtgtcatgcatcca

SEQ ID NO: 1707795 - DNA, 25 bp, Homo sapien
tgttctgttccccggtgcttgggtg

SEQ ID NO: 1707796 - DNA, 25 bp, Homo sapien
tgttccccggtgcttgggtgtttgc

SEQ ID NO: 1707797 - DNA, 25 bp, Homo sapien
tctgttctgttccccggtgcttggg

SEQ ID NO: 1707798 - DNA, 25 bp, Homo sapien
tccccggtgcttgggtgtttgcttc

SEQ ID NO: 1707799 - DNA, 25 bp, Homo sapien
cgcgtacctgcagcgtagaaggagc

SEQ ID NO: 1707800 - DNA, 25 bp, Homo sapien
tgtgtacaaagagatccaacttccg

SEQ ID NO: 1707801 - DNA, 25 bp, Homo sapien
tttgcagagcaaattcgggattcat

SEQ ID NO: 1707802 - DNA, 25 bp, Homo sapien
gaggcgcgctcatccctttgcagag

SEQ ID NO: 1707803 - DNA, 25 bp, Homo sapien
ccccgatgtgaagaaagctggacat

SEQ ID NO: 1707804 - DNA, 25 bp, Homo sapien
caaagtgctgatgaagccattgacg

SEQ ID NO: 1707805 - DNA, 25 bp, Homo sapien
cagggagacgatgtccccgatgtga

SEQ ID NO: 1707806 - DNA, 25 bp, Homo sapien
attgacggagccctcggcgtacagg

SEQ ID NO: 1707807 - DNA, 25 bp, Homo sapien
agaaggaggcgagccgttcccgctc

SEQ ID NO: 1707808 - DNA, 25 bp, Homo sapien
tgtaaaagaaggaggcgagccgttc

SEQ ID NO: 1707809 - DNA, 25 bp, Homo sapien
tttctgtaaaagaaggaggcgagcc

SEQ ID NO: 1707810 - DNA, 25 bp, Homo sapien
aagaaggaggcgagccgttcccgct

SEQ ID NO: 1707811 - DNA, 25 bp, Homo sapien
ggtcaccaggatctgccccaggatc

SEQ ID NO: 1707812 - DNA, 25 bp, Homo sapien
tgccccaggatcaaggtggactgga

SEQ ID NO: 1707813 - DNA, 25 bp, Homo sapien
gaagggctttctagaggtcaccagg

SEQ ID NO: 1707814 - DNA, 25 bp, Homo sapien
tcaggagatgttggaggtgtttgca

SEQ ID NO: 1707815 - DNA, 25 bp, Homo sapien
tgcacaggccgatgctagaaagcca

SEQ ID NO: 1707816 - DNA, 25 bp, Homo sapien
acttgcttgctaaagggcgggaaca

SEQ ID NO: 1707817 - DNA, 25 bp, Homo sapien
ttctcattcagtaggacgggcacgg

SEQ ID NO: 1707818 - DNA, 25 bp, Homo sapien
tgttaatcctggcaaggtgcccagc

SEQ ID NO: 1707819 - DNA, 25 bp, Homo sapien
gcggaatgttaagagagaaacccag

SEQ ID NO: 1707820 - DNA, 25 bp, Homo sapien
tagccaaagtcacacctactaggcg

SEQ ID NO: 1707821 - DNA, 25 bp, Homo sapien
tagggctagaccctacaactggcca

SEQ ID NO: 1707822 - DNA, 25 bp, Homo sapien
aggccactccaacagcaggcactgt

SEQ ID NO: 1707823 - DNA, 25 bp, Homo sapien
tttgaagagcgcagtagatagcggt

SEQ ID NO: 1707824 - DNA, 25 bp, Homo sapien
tgaagagcgcagtagatagcggtag

SEQ ID NO: 1707825 - DNA, 25 bp, Homo sapien
ttgaagagcgcagtagatagcggta

SEQ ID NO: 1707826 - DNA, 25 bp, Homo sapien
ggcaggtgactatcaaggagcctga

SEQ ID NO: 1707827 - DNA, 25 bp, Homo sapien
aaggagcctgactcaaaacctacca

SEQ ID NO: 1707828 - DNA, 25 bp, Homo sapien
tctggaaagattagataaggaggag

SEQ ID NO: 1707829 - DNA, 25 bp, Homo sapien
ggtgggcgccatgggaaaggtagca

SEQ ID NO: 1707830 - DNA, 25 bp, Homo sapien
atggcaccgacgtccctggccttag

SEQ ID NO: 1707831 - DNA, 25 bp, Homo sapien
cgacgtccctggccttagcgcccca

SEQ ID NO: 1707832 - DNA, 25 bp, Homo sapien
gacgtccctggccttagcgccccac

SEQ ID NO: 1707833 - DNA, 25 bp, Homo sapien
ctgatggcaccgacgtccctggcct

SEQ ID NO: 1707834 - DNA, 25 bp, Homo sapien
gcagccgtctcccacgacgcgccgc

SEQ ID NO: 1707835 - DNA, 25 bp, Homo sapien
cagccgtctcccacgacgcgccgcc

SEQ ID NO: 1707836 - DNA, 25 bp, Homo sapien
tctctgtgcgtactcattaggccta

SEQ ID NO: 1707837 - DNA, 25 bp, Homo sapien
cattaggcctaagggatcccatgaa

SEQ ID NO: 1707838 - DNA, 25 bp, Homo sapien
ctgtgcgtactcattaggcctaagg

SEQ ID NO: 1707839 - DNA, 25 bp, Homo sapien
tgtctctgtgcgtactcattaggcc

SEQ ID NO: 1707840 - DNA, 25 bp, Homo sapien
ccgcgggctccaccacacagcggtc

SEQ ID NO: 1707841 - DNA, 25 bp, Homo sapien
cgcgggctccaccacacagcggtca

SEQ ID NO: 1707842 - DNA, 25 bp, Homo sapien
gccgcgggctccaccacacagcggt

SEQ ID NO: 1707843 - DNA, 25 bp, Homo sapien
gcgggctccaccacacagcggtcat

SEQ ID NO: 1707844 - DNA, 25 bp, Homo sapien
caaggggctttgttattagagcctc

SEQ ID NO: 1707845 - DNA, 25 bp, Homo sapien
ccaccaaggggctttgttattagag

SEQ ID NO: 1707846 - DNA, 25 bp, Homo sapien
caccaaggggctttgttattagagc

SEQ ID NO: 1707847 - DNA, 25 bp, Homo sapien
ccaaggggctttgttattagagcct

SEQ ID NO: 1707848 - DNA, 25 bp, Homo sapien
cacaattaaaaataagtgacttttg

SEQ ID NO: 1707849 - DNA, 25 bp, Homo sapien
aataagtgacttttgccaggcacag

SEQ ID NO: 1707850 - DNA, 25 bp, Homo sapien
aaaataagtgacttttgccaggcac

SEQ ID NO: 1707851 - DNA, 25 bp, Homo sapien
taaaaataagtgacttttgccaggc

SEQ ID NO: 1707852 - DNA, 25 bp, Homo sapien
gatgaaggggcacagggctggtgag

SEQ ID NO: 1707853 - DNA, 25 bp, Homo sapien
ctgtggatgaaggggcacagggctg

SEQ ID NO: 1707854 - DNA, 25 bp, Homo sapien
tggatgaaggggcacagggctggtg

SEQ ID NO: 1707855 - DNA, 25 bp, Homo sapien
tgtggatgaaggggcacagggctgg

SEQ ID NO: 1707856 - DNA, 25 bp, Homo sapien
gtcttctctgcttcaatcaattaaa

SEQ ID NO: 1707857 - DNA, 25 bp, Homo sapien
cttctctgcttcaatcaattaaaaa

SEQ ID NO: 1707858 - DNA, 25 bp, Homo sapien
gtaaaacagatatgtcttctctgct

SEQ ID NO: 1707859 - DNA, 25 bp, Homo sapien
ctgtaaaacagatatgtcttctctg

SEQ ID NO: 1707860 - DNA, 25 bp, Homo sapien
ggctccaggtccgacagggctgaga

SEQ ID NO: 1707861 - DNA, 25 bp, Homo sapien
ctccaggtccgacagggctgagaac

SEQ ID NO: 1707862 - DNA, 25 bp, Homo sapien
caggctccaggtccgacagggctga

SEQ ID NO: 1707863 - DNA, 25 bp, Homo sapien
tccaggtccgacagggctgagaacc

SEQ ID NO: 1707864 - DNA, 25 bp, Homo sapien
gaggaagaggttacgaggcacacaa

SEQ ID NO: 1707865 - DNA, 25 bp, Homo sapien
ggaggaagaggttacgaggcacaca

SEQ ID NO: 1707866 - DNA, 25 bp, Homo sapien
ctgtataaggaggtagggtttgatt

SEQ ID NO: 1707867 - DNA, 25 bp, Homo sapien
gccggatgcatacatcaacccagaa

SEQ ID NO: 1707868 - DNA, 25 bp, Homo sapien
atgaatctgccggatgcatacatca

SEQ ID NO: 1707869 - DNA, 25 bp, Homo sapien
tcagcatgaatctgccggatgcata

SEQ ID NO: 1707870 - DNA, 25 bp, Homo sapien
tacatcaacccagaaattacttcct

SEQ ID NO: 1707871 - DNA, 25 bp, Homo sapien
tttttgctaccctcaccagactcgg

SEQ ID NO: 1707872 - DNA, 25 bp, Homo sapien
gctaccctcaccagactcggggtgg

SEQ ID NO: 1707873 - DNA, 25 bp, Homo sapien
aaatatggatatggatagattatat

SEQ ID NO: 1707874 - DNA, 25 bp, Homo sapien
gcctggttaagctcatcactgtttc

SEQ ID NO: 1707875 - DNA, 25 bp, Homo sapien
attatcaacaggcagcaagtggtgg

SEQ ID NO: 1707876 - DNA, 25 bp, Homo sapien
aaaattatcaacaggcagcaagtgg

SEQ ID NO: 1707877 - DNA, 25 bp, Homo sapien
aaattatcaacaggcagcaagtggt

SEQ ID NO: 1707878 - DNA, 25 bp, Homo sapien
aaaaattatcaacaggcagcaagtg

SEQ ID NO: 1707879 - DNA, 25 bp, Homo sapien
gagacacggtctcactctgtagctc

SEQ ID NO: 1707880 - DNA, 25 bp, Homo sapien
tgagacacggtctcactctgtagct

SEQ ID NO: 1707881 - DNA, 25 bp, Homo sapien
gacacggtctcactctgtagctcag

SEQ ID NO: 1707882 - DNA, 25 bp, Homo sapien
tttgagacacggtctcactctgtag

SEQ ID NO: 1707883 - DNA, 25 bp, Homo sapien
tactgcttctgggccgagtagcggt

SEQ ID NO: 1707884 - DNA, 25 bp, Homo sapien
agcaacaccacatcagcgatcttct

SEQ ID NO: 1707885 - DNA, 25 bp, Homo sapien
gctgcttgtgtacccaggttcctgg

SEQ ID NO: 1707886 - DNA, 25 bp, Homo sapien
agagcccctactggctccgacaagc

SEQ ID NO: 1707887 - DNA, 25 bp, Homo sapien
ggtgtgaactgtcacgcccatacga

SEQ ID NO: 1707888 - DNA, 25 bp, Homo sapien
cgagttttagaaaccactcagctca

SEQ ID NO: 1707889 - DNA, 25 bp, Homo sapien
tcttgttctccgtgtcattttgctt

SEQ ID NO: 1707890 - DNA, 25 bp, Homo sapien
ttcttgttctccgtgtcattttgct

SEQ ID NO: 1707891 - DNA, 25 bp, Homo sapien
tctccgtgtcattttgcttctgctc

SEQ ID NO: 1707892 - DNA, 25 bp, Homo sapien
tgttctccgtgtcattttgcttctg

SEQ ID NO: 1707893 - DNA, 25 bp, Homo sapien
catacttcacgacatccccatgcac

SEQ ID NO: 1707894 - DNA, 25 bp, Homo sapien
tgccatacttcacgacatccccatg

SEQ ID NO: 1707895 - DNA, 25 bp, Homo sapien
gatcacactgccatacttcacgaca

SEQ ID NO: 1707896 - DNA, 25 bp, Homo sapien
ctggatcacactgccatacttcacg

SEQ ID NO: 1707897 - DNA, 25 bp, Homo sapien
accctcgttgcctgtggcatccaga

SEQ ID NO: 1707898 - DNA, 25 bp, Homo sapien
cagagtcacccgcatggcgttcttc

SEQ ID NO: 1707899 - DNA, 25 bp, Homo sapien
gaagagccaggaaccctcgttgcct

SEQ ID NO: 1707900 - DNA, 25 bp, Homo sapien
cagcaaggccggaagccgcttgttc

SEQ ID NO: 1707901 - DNA, 25 bp, Homo sapien
caggattcaggatcaccttgtcccc

SEQ ID NO: 1707902 - DNA, 25 bp, Homo sapien
cttgcagccggcgttgtcgctgagc

SEQ ID NO: 1707903 - DNA, 25 bp, Homo sapien
cgttgtcgctgagctcgtaattgct

SEQ ID NO: 1707904 - DNA, 25 bp, Homo sapien
ggctgcccggcattgacaggattca

SEQ ID NO: 1707905 - DNA, 25 bp, Homo sapien
ccaggtggtcccgaaactgcataaa

SEQ ID NO: 1707906 - DNA, 25 bp, Homo sapien
tccaggtggtcccgaaactgcataa

SEQ ID NO: 1707907 - DNA, 25 bp, Homo sapien
caggtggtcccgaaactgcataaac

SEQ ID NO: 1707908 - DNA, 25 bp, Homo sapien
tgggcagggcaggggttcccagtcc

SEQ ID NO: 1707909 - DNA, 25 bp, Homo sapien
gcagggcaggggttcccagtcctta

SEQ ID NO: 1707910 - DNA, 25 bp, Homo sapien
agctgggcagggcaggggttcccag

SEQ ID NO: 1707911 - DNA, 25 bp, Homo sapien
gctaggtggccagctgggcagggca

SEQ ID NO: 1707912 - DNA, 25 bp, Homo sapien
tctcctgctccgcatggaacagccg

SEQ ID NO: 1707913 - DNA, 25 bp, Homo sapien
gcagcttgcccttgtactcgtcaca

SEQ ID NO: 1707914 - DNA, 25 bp, Homo sapien
gcagactggcgcagtgtagttcgca

SEQ ID NO: 1707915 - DNA, 25 bp, Homo sapien
tcgtcacacgtcaggaacttctcct

SEQ ID NO: 1707916 - DNA, 25 bp, Homo sapien
tagccaggtgcttgaagcggtacaa

SEQ ID NO: 1707917 - DNA, 25 bp, Homo sapien
tgcttgaagcggtacaagccattcc

SEQ ID NO: 1707918 - DNA, 25 bp, Homo sapien
ttgcctgtagccaggtgcttgaagc

SEQ ID NO: 1707919 - DNA, 25 bp, Homo sapien
caggtgcttgaagcggtacaagcca

SEQ ID NO: 1707920 - DNA, 25 bp, Homo sapien
gggatctgaggcatcacctttgtaa

SEQ ID NO: 1707921 - DNA, 25 bp, Homo sapien
gatctgaggcatcacctttgtaact

SEQ ID NO: 1707922 - DNA, 25 bp, Homo sapien
ctgaggcatcacctttgtaactggg

SEQ ID NO: 1707923 - DNA, 25 bp, Homo sapien
tctgaggcatcacctttgtaactgg

SEQ ID NO: 1707924 - DNA, 25 bp, Homo sapien
aaagagtcggttttctgcaaggtgg

SEQ ID NO: 1707925 - DNA, 25 bp, Homo sapien
caggcagtacttgatcttctcccca

SEQ ID NO: 1707926 - DNA, 25 bp, Homo sapien
gctcaaagagagaggcgatgtcatt

SEQ ID NO: 1707927 - DNA, 25 bp, Homo sapien
cccagcattcctgcggcctgtgcgg

SEQ ID NO: 1707928 - DNA, 25 bp, Homo sapien
ggccgctcctcctcgatgtcaatgg

SEQ ID NO: 1707929 - DNA, 25 bp, Homo sapien
aatgggcacattggtgctctgaatc

SEQ ID NO: 1707930 - DNA, 25 bp, Homo sapien
gtgccgcagccggacgtacgagttc

SEQ ID NO: 1707931 - DNA, 25 bp, Homo sapien
agaggtgccgcagccggacgtacga

SEQ ID NO: 1707932 - DNA, 25 bp, Homo sapien
cagcatggagctggcgtcattggca

SEQ ID NO: 1707933 - DNA, 25 bp, Homo sapien
ctggctgatgaagccctcgttgagt

SEQ ID NO: 1707934 - DNA, 25 bp, Homo sapien
gttgagtttctccacggcactggcc

SEQ ID NO: 1707935 - DNA, 25 bp, Homo sapien
caggtctcggatctcagacacgggc

SEQ ID NO: 1707936 - DNA, 25 bp, Homo sapien
cccattgttggggacatcgctgaca

SEQ ID NO: 1707937 - DNA, 25 bp, Homo sapien
tgttctgctccctcatcagcttctg

SEQ ID NO: 1707938 - DNA, 25 bp, Homo sapien
tgacaaagaacaccaggtcttccag

SEQ ID NO: 1707939 - DNA, 25 bp, Homo sapien
tcccggttgggcttagtgaccatga

SEQ ID NO: 1707940 - DNA, 25 bp, Homo sapien
acacgcggtagcacaggcggaacat

SEQ ID NO: 1707941 - DNA, 25 bp, Homo sapien
agcacaggcggaacatgtgctggta

SEQ ID NO: 1707942 - DNA, 25 bp, Homo sapien
tgggaatgccgcaacacgcggtagc

SEQ ID NO: 1707943 - DNA, 25 bp, Homo sapien
ttgcggtagtcctcctgggaatgcc

SEQ ID NO: 1707944 - DNA, 25 bp, Homo sapien
tgggctcccggttcttgcgcacaag

SEQ ID NO: 1707945 - DNA, 25 bp, Homo sapien
tgcgcacaaggctgacgaaggtctc

SEQ ID NO: 1707946 - DNA, 25 bp, Homo sapien
gcttttccaggagcttgcggttgtt

SEQ ID NO: 1707947 - DNA, 25 bp, Homo sapien
tcccaaactgcttggcaatgtgctc

SEQ ID NO: 1707948 - DNA, 25 bp, Homo sapien
tggcgatgtggttggacacacacag

SEQ ID NO: 1707949 - DNA, 25 bp, Homo sapien
tcggtccggatgagaatgtcactgt

SEQ ID NO: 1707950 - DNA, 25 bp, Homo sapien
gggatggcgatgtggttggacacac

SEQ ID NO: 1707951 - DNA, 25 bp, Homo sapien
acggggatggcgatgtggttggaca

SEQ ID NO: 1707952 - DNA, 25 bp, Homo sapien
tctgagtactcgatgctcaggtact

SEQ ID NO: 1707953 - DNA, 25 bp, Homo sapien
tcaggtactcgtgggattgggccat

SEQ ID NO: 1707954 - DNA, 25 bp, Homo sapien
cacattctcgtcgtgggcgttgccg

SEQ ID NO: 1707955 - DNA, 25 bp, Homo sapien
gttattcttgtcagtccacgtgagc

SEQ ID NO: 1707956 - DNA, 25 bp, Homo sapien
tgcacaggaaaatcaggtccacgcc

SEQ ID NO: 1707957 - DNA, 25 bp, Homo sapien
agtactggcggtccaagcacatgcg

SEQ ID NO: 1707958 - DNA, 25 bp, Homo sapien
tccagagacgggcaaacttgaccgg

SEQ ID NO: 1707959 - DNA, 25 bp, Homo sapien
gatctcgtcgatggccaagtactgg

SEQ ID NO: 1707960 - DNA, 25 bp, Homo sapien
ctacattgttgaggtagtcctccac

SEQ ID NO: 1707961 - DNA, 25 bp, Homo sapien
tgtcatctcgggacgcgttgaggtt

SEQ ID NO: 1707962 - DNA, 25 bp, Homo sapien
cctccacgaactccatggtgttggc

SEQ ID NO: 1707963 - DNA, 25 bp, Homo sapien
cacggcctcgctgactacattgttg

SEQ ID NO: 1707964 - DNA, 25 bp, Homo sapien
ggggcgtggccgaggtgaggtggga

SEQ ID NO: 1707965 - DNA, 25 bp, Homo sapien
gtagatgagattgtgcgccaggctg

SEQ ID NO: 1707966 - DNA, 25 bp, Homo sapien
ctcgctgaagctgtagaagccgaag

SEQ ID NO: 1707967 - DNA, 25 bp, Homo sapien
ggggcccctgcacacagtcgatgat

SEQ ID NO: 1707968 - DNA, 25 bp, Homo sapien
agcagtgtgcgagtgagccgcagca

SEQ ID NO: 1707969 - DNA, 25 bp, Homo sapien
aggaggttgccaaggaggttgtaga

SEQ ID NO: 1707970 - DNA, 25 bp, Homo sapien
ggttgccaaggaggttgtagaggct

SEQ ID NO: 1707971 - DNA, 25 bp, Homo sapien
agaggaggttgccaaggaggttgta

SEQ ID NO: 1707972 - DNA, 25 bp, Homo sapien
tgccaaggaggttgtagaggctgta

SEQ ID NO: 1707973 - DNA, 25 bp, Homo sapien
ctgaagacggactgcttgcggctca

SEQ ID NO: 1707974 - DNA, 25 bp, Homo sapien
caaacttgcttctgtccagcggctc

SEQ ID NO: 1707975 - DNA, 25 bp, Homo sapien
agcactggccccagcagacaggctg

SEQ ID NO: 1707976 - DNA, 25 bp, Homo sapien
gcaccatggtggacatcatgtgccc

SEQ ID NO: 1707977 - DNA, 25 bp, Homo sapien
cagcaggtaggatatgcggtaatcc

SEQ ID NO: 1707978 - DNA, 25 bp, Homo sapien
tatgcggtaatccaggcggacattg

SEQ ID NO: 1707979 - DNA, 25 bp, Homo sapien
cttcttgaagacagacagcaggtag

SEQ ID NO: 1707980 - DNA, 25 bp, Homo sapien
taatccaggcggacattgaggatga

SEQ ID NO: 1707981 - DNA, 25 bp, Homo sapien
ctgctccccgatgcgatccaggttc

SEQ ID NO: 1707982 - DNA, 25 bp, Homo sapien
gctccccgatgcgatccaggttcat

SEQ ID NO: 1707983 - DNA, 25 bp, Homo sapien
ctccgcctgctccccgatgcgatcc

SEQ ID NO: 1707984 - DNA, 25 bp, Homo sapien
ccgcctgctccccgatgcgatccag

SEQ ID NO: 1707985 - DNA, 25 bp, Homo sapien
cgaccacacctagccagaaacaagg

SEQ ID NO: 1707986 - DNA, 25 bp, Homo sapien
cactgccaccatgcgggggattcat

SEQ ID NO: 1707987 - DNA, 25 bp, Homo sapien
cccactgccaccatgcgggggattc

SEQ ID NO: 1707988 - DNA, 25 bp, Homo sapien
ctgccaccatgcgggggattcatgg

SEQ ID NO: 1707989 - DNA, 25 bp, Homo sapien
tggatgagcacgcgcaggaacatgc

SEQ ID NO: 1707990 - DNA, 25 bp, Homo sapien
agggcacccgagaccagcggcgcat

SEQ ID NO: 1707991 - DNA, 25 bp, Homo sapien
ccagcggcgcatagtcgtgcatggt

SEQ ID NO: 1707992 - DNA, 25 bp, Homo sapien
gtcgtgcatggtgaggtggatgagc

SEQ ID NO: 1707993 - DNA, 25 bp, Homo sapien
cctgcgctgagatcagcagctgaac

SEQ ID NO: 1707994 - DNA, 25 bp, Homo sapien
tgacttctccaccatggtccgcagc

SEQ ID NO: 1707995 - DNA, 25 bp, Homo sapien
tgatcaccttgtagttctccacgtc

SEQ ID NO: 1707996 - DNA, 25 bp, Homo sapien
agccggtccagctccgacttgatca

SEQ ID NO: 1707997 - DNA, 25 bp, Homo sapien
gtgggtgcagaaagccctcctcgtc

SEQ ID NO: 1707998 - DNA, 25 bp, Homo sapien
tgtcataggggatctgcagcaggtc

SEQ ID NO: 1707999 - DNA, 25 bp, Homo sapien
cttgtcataggggatctgcagcagg

SEQ ID NO: 1708000 - DNA, 25 bp, Homo sapien
gtcataggggatctgcagcaggtcc

SEQ ID NO: 1708001 - DNA, 25 bp, Homo sapien
tcctcatttgctccccaaccccgca

SEQ ID NO: 1708002 - DNA, 25 bp, Homo sapien
gttccctgcacagaacttctgcagg

SEQ ID NO: 1708003 - DNA, 25 bp, Homo sapien
ctgcaggaactggtgcgtgtagcgc

SEQ ID NO: 1708004 - DNA, 25 bp, Homo sapien
gaactggtgcgtgtagcgcaggatc

SEQ ID NO: 1708005 - DNA, 25 bp, Homo sapien
ttccctgcacagaacttctgcagga

SEQ ID NO: 1708006 - DNA, 25 bp, Homo sapien
atcccccgcctcgtccaggtgctcc

SEQ ID NO: 1708007 - DNA, 25 bp, Homo sapien
cccatcccccgcctcgtccaggtgc

SEQ ID NO: 1708008 - DNA, 25 bp, Homo sapien
ccccgcctcgtccaggtgctcccag

SEQ ID NO: 1708009 - DNA, 25 bp, Homo sapien
ccgcctcgtccaggtgctcccagcc

SEQ ID NO: 1708010 - DNA, 25 bp, Homo sapien
cacttcttgacgtacttgccctcgg

SEQ ID NO: 1708011 - DNA, 25 bp, Homo sapien
gcaacacaggctcgctgatctcgga

SEQ ID NO: 1708012 - DNA, 25 bp, Homo sapien
tgccctcggccttaatgacggtgtg

SEQ ID NO: 1708013 - DNA, 25 bp, Homo sapien
gaagtccaggtactgcacatggcgc

SEQ ID NO: 1708014 - DNA, 25 bp, Homo sapien
atgcagtcctcatgcgtcaccacag

SEQ ID NO: 1708015 - DNA, 25 bp, Homo sapien
tcattgtagaacacgaccacatcgt

SEQ ID NO: 1708016 - DNA, 25 bp, Homo sapien
agtgtagacgtttttgccctcggca

SEQ ID NO: 1708017 - DNA, 25 bp, Homo sapien
ggtgggccagcgatgccttatcatt

SEQ ID NO: 1708018 - DNA, 25 bp, Homo sapien
ttcgccccatctccagccgtcttgc

SEQ ID NO: 1708019 - DNA, 25 bp, Homo sapien
gccccatctccagccgtcttgccca

SEQ ID NO: 1708020 - DNA, 25 bp, Homo sapien
ccttcgccccatctccagccgtctt

SEQ ID NO: 1708021 - DNA, 25 bp, Homo sapien
tcgccccatctccagccgtcttgcc

SEQ ID NO: 1708022 - DNA, 25 bp, Homo sapien
cacgaagttcacataggccattttc

SEQ ID NO: 1708023 - DNA, 25 bp, Homo sapien
agttctcaaagagcgtccagatgtg

SEQ ID NO: 1708024 - DNA, 25 bp, Homo sapien
cacgtagcagtggttcacgaagttc

SEQ ID NO: 1708025 - DNA, 25 bp, Homo sapien
gatgtggttgctggtgtagatctcc

SEQ ID NO: 1708026 - DNA, 25 bp, Homo sapien
gctcagcacgtacttctccaaggtg

SEQ ID NO: 1708027 - DNA, 25 bp, Homo sapien
atggtgtccagcacaacgctcagca

SEQ ID NO: 1708028 - DNA, 25 bp, Homo sapien
ctgaagaaggcgttgatggtgtcca

SEQ ID NO: 1708029 - DNA, 25 bp, Homo sapien
acgcgcttctcacgcttgctgcaga

SEQ ID NO: 1708030 - DNA, 25 bp, Homo sapien
ggccgtgggctcatagccatgttgc

SEQ ID NO: 1708031 - DNA, 25 bp, Homo sapien
aggccgtgggctcatagccatgttg

SEQ ID NO: 1708032 - DNA, 25 bp, Homo sapien
caaggccgtgggctcatagccatgt

SEQ ID NO: 1708033 - DNA, 25 bp, Homo sapien
aaggccgtgggctcatagccatgtt

SEQ ID NO: 1708034 - DNA, 25 bp, Homo sapien
gaagtcacagagcccgctgctgcag

SEQ ID NO: 1708035 - DNA, 25 bp, Homo sapien
cacagagcccgctgctgcagcccag

SEQ ID NO: 1708036 - DNA, 25 bp, Homo sapien
ctgcaagaagtcacagagcccgctg

SEQ ID NO: 1708037 - DNA, 25 bp, Homo sapien
gcaagaagtcacagagcccgctgct

SEQ ID NO: 1708038 - DNA, 25 bp, Homo sapien
tcgaggaggcgtgtggtagactgca

SEQ ID NO: 1708039 - DNA, 25 bp, Homo sapien
ccaccatggcgagggtccggatgca

SEQ ID NO: 1708040 - DNA, 25 bp, Homo sapien
gcagctgcaccacaatcgtctggtg

SEQ ID NO: 1708041 - DNA, 25 bp, Homo sapien
gacactcgaggaggcgtgtggtaga

SEQ ID NO: 1708042 - DNA, 25 bp, Homo sapien
gggagcaggagatgggcgagcttag

SEQ ID NO: 1708043 - DNA, 25 bp, Homo sapien
gatgggcgagcttagggataaagtg

SEQ ID NO: 1708044 - DNA, 25 bp, Homo sapien
caggagatgggcgagcttagggata

SEQ ID NO: 1708045 - DNA, 25 bp, Homo sapien
cgagcttagggataaagtgtttatt

SEQ ID NO: 1708046 - DNA, 25 bp, Homo sapien
tccactgctgagcatcgagctgatg

SEQ ID NO: 1708047 - DNA, 25 bp, Homo sapien
gggcagcaagatggcccggcccttg

SEQ ID NO: 1708048 - DNA, 25 bp, Homo sapien
ccttgtagctggaggcgttccgctg

SEQ ID NO: 1708049 - DNA, 25 bp, Homo sapien
aaggcccgcgtggttgccttgtagc

SEQ ID NO: 1708050 - DNA, 25 bp, Homo sapien
agcttctcaatgatgttcttgtagt

SEQ ID NO: 1708051 - DNA, 25 bp, Homo sapien
ctgcagcttctcaatgatgttcttg

SEQ ID NO: 1708052 - DNA, 25 bp, Homo sapien
cagcttctcaatgatgttcttgtag

SEQ ID NO: 1708053 - DNA, 25 bp, Homo sapien
gcagcttctcaatgatgttcttgta

SEQ ID NO: 1708054 - DNA, 25 bp, Homo sapien
tcgcagcgctggtaggcctcactgc

SEQ ID NO: 1708055 - DNA, 25 bp, Homo sapien
agctcagcctgtaccaggggcttca

SEQ ID NO: 1708056 - DNA, 25 bp, Homo sapien
aagcccccactctcgcagcgctggt

SEQ ID NO: 1708057 - DNA, 25 bp, Homo sapien
actctcgcagcgctggtaggcctca

SEQ ID NO: 1708058 - DNA, 25 bp, Homo sapien
cagcaccttgatgcacagcttctcc

SEQ ID NO: 1708059 - DNA, 25 bp, Homo sapien
agcaccttgatgcacagcttctcct

SEQ ID NO: 1708060 - DNA, 25 bp, Homo sapien
cccgtacttggtcttcttgagcagc

SEQ ID NO: 1708061 - DNA, 25 bp, Homo sapien
gtccccgtacttggtcttcttgagc

SEQ ID NO: 1708062 - DNA, 25 bp, Homo sapien
cccgcgaggtggacttccggttctg

SEQ ID NO: 1708063 - DNA, 25 bp, Homo sapien
cgaggtggacttccggttctggagg

SEQ ID NO: 1708064 - DNA, 25 bp, Homo sapien
cgcgaggtggacttccggttctgga

SEQ ID NO: 1708065 - DNA, 25 bp, Homo sapien
cagtgcctatggggtcgggaaggtc

SEQ ID NO: 1708066 - DNA, 25 bp, Homo sapien
ctggaagatcttctcgttcttggtg

SEQ ID NO: 1708067 - DNA, 25 bp, Homo sapien
ggtggctgcgattgccgaccagtct

SEQ ID NO: 1708068 - DNA, 25 bp, Homo sapien
tccttgtccagccggcactgggtgg

SEQ ID NO: 1708069 - DNA, 25 bp, Homo sapien
gatgaggtcgcataccaacttggtg

SEQ ID NO: 1708070 - DNA, 25 bp, Homo sapien
ttcagtgcccaactcaaggcccacc

SEQ ID NO: 1708071 - DNA, 25 bp, Homo sapien
tcggccttcagtgcccaactcaagg

SEQ ID NO: 1708072 - DNA, 25 bp, Homo sapien
tcctcggccttcagtgcccaactca

SEQ ID NO: 1708073 - DNA, 25 bp, Homo sapien
cttcagtgcccaactcaaggcccac

SEQ ID NO: 1708074 - DNA, 25 bp, Homo sapien
tgccaccgtggacttggtctcctgc

SEQ ID NO: 1708075 - DNA, 25 bp, Homo sapien
ctggctcgcggtcctcatgtggctg

SEQ ID NO: 1708076 - DNA, 25 bp, Homo sapien
gcttcatgcggtcgtgcagcacctt

SEQ ID NO: 1708077 - DNA, 25 bp, Homo sapien
cactcatcatcaggttgtggaagga

SEQ ID NO: 1708078 - DNA, 25 bp, Homo sapien
agccaggtatcgagaaggaggccac

SEQ ID NO: 1708079 - DNA, 25 bp, Homo sapien
gtcccggttgtggttctcacacagc

SEQ ID NO: 1708080 - DNA, 25 bp, Homo sapien
agcgagtagcgggatgaggagccag

SEQ ID NO: 1708081 - DNA, 25 bp, Homo sapien
gctgcatgatgagcacggatgtgcc

SEQ ID NO: 1708082 - DNA, 25 bp, Homo sapien
tactcagtgagggtctccaaggtct

SEQ ID NO: 1708083 - DNA, 25 bp, Homo sapien
tccaaggtctggatgacgaggccca

SEQ ID NO: 1708084 - DNA, 25 bp, Homo sapien
cagcgtctcgcataccaagttgtag

SEQ ID NO: 1708085 - DNA, 25 bp, Homo sapien
gatgtccaggaactgcagcgtctcg

SEQ ID NO: 1708086 - DNA, 25 bp, Homo sapien
tatgccattggactcgtgagtcaca

SEQ ID NO: 1708087 - DNA, 25 bp, Homo sapien
agcaccagatccatgcggtacttgc

SEQ ID NO: 1708088 - DNA, 25 bp, Homo sapien
agatccatgcggtacttgcacaggg

SEQ ID NO: 1708089 - DNA, 25 bp, Homo sapien
ggatcagtgcggtgatgatgtctat

SEQ ID NO: 1708090 - DNA, 25 bp, Homo sapien
gccgcaggctgatgaggattcgctc

SEQ ID NO: 1708091 - DNA, 25 bp, Homo sapien
tgaggattcgctcagcattttcact

SEQ ID NO: 1708092 - DNA, 25 bp, Homo sapien
attttcactgtcatgccggctctcc

SEQ ID NO: 1708093 - DNA, 25 bp, Homo sapien
tgtcatgccggctctccatcagagc

SEQ ID NO: 1708094 - DNA, 25 bp, Homo sapien
ggcagtgcctgttccaatgctctct

SEQ ID NO: 1708095 - DNA, 25 bp, Homo sapien
gaggggcagtgcctgttccaatgct

SEQ ID NO: 1708096 - DNA, 25 bp, Homo sapien
ggggcagtgcctgttccaatgctct

SEQ ID NO: 1708097 - DNA, 25 bp, Homo sapien
cagtgcctgttccaatgctctcttc

SEQ ID NO: 1708098 - DNA, 25 bp, Homo sapien
ggtaggccttcttgatgacgtccac

SEQ ID NO: 1708099 - DNA, 25 bp, Homo sapien
aggtaggccttcttgatgacgtcca

SEQ ID NO: 1708100 - DNA, 25 bp, Homo sapien
tatggcccacttcacgtgggctcac

SEQ ID NO: 1708101 - DNA, 25 bp, Homo sapien
ctgcagcgccaggatatagatgtta

SEQ ID NO: 1708102 - DNA, 25 bp, Homo sapien
ggatatagatgttatggcccacttc

SEQ ID NO: 1708103 - DNA, 25 bp, Homo sapien
gatgttatggcccacttcacgtggg

SEQ ID NO: 1708104 - DNA, 25 bp, Homo sapien
tcctcctcttgaatgcgcttcaccg

SEQ ID NO: 1708105 - DNA, 25 bp, Homo sapien
catggaagagataccctcggcctcc

SEQ ID NO: 1708106 - DNA, 25 bp, Homo sapien
ctcttgaatgcgcttcaccggcttc

SEQ ID NO: 1708107 - DNA, 25 bp, Homo sapien
tgctgcagctgtttattgtgcctgg

SEQ ID NO: 1708108 - DNA, 25 bp, Homo sapien
ctcgatctgggacgtgtggttctca

SEQ ID NO: 1708109 - DNA, 25 bp, Homo sapien
gacgtgtggttctcatagtaggcca

SEQ ID NO: 1708110 - DNA, 25 bp, Homo sapien
gctggcgctgaggacttgagcatct

SEQ ID NO: 1708111 - DNA, 25 bp, Homo sapien
tcctgtgctggcgctgaggacttga

SEQ ID NO: 1708112 - DNA, 25 bp, Homo sapien
acacagcacatggtcacgcccggcg

SEQ ID NO: 1708113 - DNA, 25 bp, Homo sapien
agcacatggtcacgcccggcgcagg

SEQ ID NO: 1708114 - DNA, 25 bp, Homo sapien
acacacagcacatggtcacgcccgg

SEQ ID NO: 1708115 - DNA, 25 bp, Homo sapien
ccggcgcaggctcccacgcccgccc

SEQ ID NO: 1708116 - DNA, 25 bp, Homo sapien
gaggactggtcgaagaagtcgctca

SEQ ID NO: 1708117 - DNA, 25 bp, Homo sapien
cactgggaacacgatctgctccatg

SEQ ID NO: 1708118 - DNA, 25 bp, Homo sapien
tgccactccatctcgttgtgcagga

SEQ ID NO: 1708119 - DNA, 25 bp, Homo sapien
gctcgtcctgctcagtagtggtgaa

SEQ ID NO: 1708120 - DNA, 25 bp, Homo sapien
cgggagaaccagtagatcagcggca

SEQ ID NO: 1708121 - DNA, 25 bp, Homo sapien
cccacagggtcatgcggcgggagaa

SEQ ID NO: 1708122 - DNA, 25 bp, Homo sapien
tgtggacgcgccctccatgtaaggg

SEQ ID NO: 1708123 - DNA, 25 bp, Homo sapien
gatgatgttgataaacacggccagg

SEQ ID NO: 1708124 - DNA, 25 bp, Homo sapien
ccgatgcccagatagtagatggagc

SEQ ID NO: 1708125 - DNA, 25 bp, Homo sapien
acagggccgcgatggagaagcagat

SEQ ID NO: 1708126 - DNA, 25 bp, Homo sapien
ccagatagtagatggagcgcaggat

SEQ ID NO: 1708127 - DNA, 25 bp, Homo sapien
cacccaggatgttgagtgtgggccc

SEQ ID NO: 1708128 - DNA, 25 bp, Homo sapien
gacactggtcaggatgtagcccacg

SEQ ID NO: 1708129 - DNA, 25 bp, Homo sapien
cacgtggtagaggaattccatgtcc

SEQ ID NO: 1708130 - DNA, 25 bp, Homo sapien
ttatagccccggatgaaggtgccac

SEQ ID NO: 1708131 - DNA, 25 bp, Homo sapien
gaagctcaccacaaacacgatcttg

SEQ ID NO: 1708132 - DNA, 25 bp, Homo sapien
ccccagcccacccagaaggcctcac

SEQ ID NO: 1708133 - DNA, 25 bp, Homo sapien
catgcccccatccagccccagccca

SEQ ID NO: 1708134 - DNA, 25 bp, Homo sapien
cagccccagcccacccagaaggcct

SEQ ID NO: 1708135 - DNA, 25 bp, Homo sapien
cccatgcccccatccagccccagcc

SEQ ID NO: 1708136 - DNA, 25 bp, Homo sapien
gggagcttctcgagaaacctggaat

SEQ ID NO: 1708137 - DNA, 25 bp, Homo sapien
ttacacagctagtagtagcccagct

SEQ ID NO: 1708138 - DNA, 25 bp, Homo sapien
cagggaggtctgcacttagtcgtat

SEQ ID NO: 1708139 - DNA, 25 bp, Homo sapien
tagtcgtatccaagctgggtgggcc

SEQ ID NO: 1708140 - DNA, 25 bp, Homo sapien
gcagccggtcgacctcgagaatgaa

SEQ ID NO: 1708141 - DNA, 25 bp, Homo sapien
cacactcttgatgacgttgaacagc

SEQ ID NO: 1708142 - DNA, 25 bp, Homo sapien
ctgtcagcaggatggagcggccatt

SEQ ID NO: 1708143 - DNA, 25 bp, Homo sapien
gttgaacagcgtctcctcgcggtag

SEQ ID NO: 1708144 - DNA, 25 bp, Homo sapien
tgcccaggagaggaagcctccaaga

SEQ ID NO: 1708145 - DNA, 25 bp, Homo sapien
ctgcccaggagaggaagcctccaag

SEQ ID NO: 1708146 - DNA, 25 bp, Homo sapien
gcccaggagaggaagcctccaagac

SEQ ID NO: 1708147 - DNA, 25 bp, Homo sapien
ttccagaaaagagcgaggcagactg

SEQ ID NO: 1708148 - DNA, 25 bp, Homo sapien
taagcgctgcaggtcctggtcctga

SEQ ID NO: 1708149 - DNA, 25 bp, Homo sapien
ggtgttagctagacgtccccagaag

SEQ ID NO: 1708150 - DNA, 25 bp, Homo sapien
tgtccagccacagtgaagggtcatc

SEQ ID NO: 1708151 - DNA, 25 bp, Homo sapien
aggacctcaggcaccgagagccctg

SEQ ID NO: 1708152 - DNA, 25 bp, Homo sapien
actgcaggtgtccacaaatgcagca

SEQ ID NO: 1708153 - DNA, 25 bp, Homo sapien
gagccctgagacacagtccatcttg

SEQ ID NO: 1708154 - DNA, 25 bp, Homo sapien
ccccactgcaggtgtccacaaatgc

SEQ ID NO: 1708155 - DNA, 25 bp, Homo sapien
cagagtgtcacaggcccgctctgtg

SEQ ID NO: 1708156 - DNA, 25 bp, Homo sapien
ggcttgcggagaatgtcgcccacgc

SEQ ID NO: 1708157 - DNA, 25 bp, Homo sapien
tagcccatggttcatgacagtgacg

SEQ ID NO: 1708158 - DNA, 25 bp, Homo sapien
gacgatgcacatcaacagagtgtca

SEQ ID NO: 1708159 - DNA, 25 bp, Homo sapien
ctgatctggacagtggcttgggccc

SEQ ID NO: 1708160 - DNA, 25 bp, Homo sapien
gacattcgggaatgtggctgcccaa

SEQ ID NO: 1708161 - DNA, 25 bp, Homo sapien
ccagggctgtgatattgaggaccca

SEQ ID NO: 1708162 - DNA, 25 bp, Homo sapien
ctgaatatctgacgcgaggccaagg

SEQ ID NO: 1708163 - DNA, 25 bp, Homo sapien
caggggatgaggcagggaggctggg

SEQ ID NO: 1708164 - DNA, 25 bp, Homo sapien
gaggctgggcccggtggtccccaca

SEQ ID NO: 1708165 - DNA, 25 bp, Homo sapien
gcagggaggctgggcccggtggtcc

SEQ ID NO: 1708166 - DNA, 25 bp, Homo sapien
ctgggcccggtggtccccacattca

SEQ ID NO: 1708167 - DNA, 25 bp, Homo sapien
gaacaggaggtcatagaccactcgg

SEQ ID NO: 1708168 - DNA, 25 bp, Homo sapien
ccaaagatgaggttcagcacaatga

SEQ ID NO: 1708169 - DNA, 25 bp, Homo sapien
tgcttctcactacgcaggtcagcga

SEQ ID NO: 1708170 - DNA, 25 bp, Homo sapien
tcagcgaaggtgtcgatgattaccc

SEQ ID NO: 1708171 - DNA, 25 bp, Homo sapien
cagcagccacttagtggagatcctg

SEQ ID NO: 1708172 - DNA, 25 bp, Homo sapien
cagcttccgggggttggaggcattt

SEQ ID NO: 1708173 - DNA, 25 bp, Homo sapien
ttctcgggatgagcgcttccaacag

SEQ ID NO: 1708174 - DNA, 25 bp, Homo sapien
ggttggaggcatttgttctcgggat

SEQ ID NO: 1708175 - DNA, 25 bp, Homo sapien
cacgcggaccagcacaatgaagtac

SEQ ID NO: 1708176 - DNA, 25 bp, Homo sapien
gaagtacaagtagttccacatgttg

SEQ ID NO: 1708177 - DNA, 25 bp, Homo sapien
gatcatctgggccacgtagctctca

SEQ ID NO: 1708178 - DNA, 25 bp, Homo sapien
tagtcggtcttgttcttcacgcgga

SEQ ID NO: 1708179 - DNA, 25 bp, Homo sapien
accatgaggcctctggtgcacagtg

SEQ ID NO: 1708180 - DNA, 25 bp, Homo sapien
aatggctggtttgggcccacaggcc

SEQ ID NO: 1708181 - DNA, 25 bp, Homo sapien
gggccaacagtcagatagggccact

SEQ ID NO: 1708182 - DNA, 25 bp, Homo sapien
gtgatgactctagaatggctggttt

SEQ ID NO: 1708183 - DNA, 25 bp, Homo sapien
ctgacctttcaacaagtgtctgcag

SEQ ID NO: 1708184 - DNA, 25 bp, Homo sapien
cctttcaacaagtgtctgcagctgt

SEQ ID NO: 1708185 - DNA, 25 bp, Homo sapien
gcagcggcttccgtgcagcccagag

SEQ ID NO: 1708186 - DNA, 25 bp, Homo sapien
tcttcggggcgcatgggtttgctgt

SEQ ID NO: 1708187 - DNA, 25 bp, Homo sapien
tattacagaaattggacagatgaca

SEQ ID NO: 1708188 - DNA, 25 bp, Homo sapien
caccgagctagaaaacactccctga

SEQ ID NO: 1708189 - DNA, 25 bp, Homo sapien
ttcagcccaggatcatctaattcag

SEQ ID NO: 1708190 - DNA, 25 bp, Homo sapien
agcatcactgcacgacaggcccagg

SEQ ID NO: 1708191 - DNA, 25 bp, Homo sapien
cctcgccctcattgctgacaaggga

SEQ ID NO: 1708192 - DNA, 25 bp, Homo sapien
ttgctgacaagggacatggcccgca

SEQ ID NO: 1708193 - DNA, 25 bp, Homo sapien
caccagcttcatggtggagttgagc

SEQ ID NO: 1708194 - DNA, 25 bp, Homo sapien
tgtcctggagaatccgaatctcatt

SEQ ID NO: 1708195 - DNA, 25 bp, Homo sapien
gttgcctgcgtttccgctgctccgt

SEQ ID NO: 1708196 - DNA, 25 bp, Homo sapien
taggcgttgcctgcgtttccgctgc

SEQ ID NO: 1708197 - DNA, 25 bp, Homo sapien
caaagcctaggcgttgcctgcgttt

SEQ ID NO: 1708198 - DNA, 25 bp, Homo sapien
catccacaaagcctaggcgttgcct

SEQ ID NO: 1708199 - DNA, 25 bp, Homo sapien
aacaagcggtcatgaaacagccacg

SEQ ID NO: 1708200 - DNA, 25 bp, Homo sapien
caggtcctgggagcaagatcgtcca

SEQ ID NO: 1708201 - DNA, 25 bp, Homo sapien
ggcattaaggtaaactgagtcccag

SEQ ID NO: 1708202 - DNA, 25 bp, Homo sapien
cactggctacagcagatctgaggca

SEQ ID NO: 1708203 - DNA, 25 bp, Homo sapien
gatgaggaacccgaagcgtagaggg

SEQ ID NO: 1708204 - DNA, 25 bp, Homo sapien
ttctttgccctcatacggagcaggg

SEQ ID NO: 1708205 - DNA, 25 bp, Homo sapien
gggctcggattcaggcccaaggcca

SEQ ID NO: 1708206 - DNA, 25 bp, Homo sapien
tgtggagcaggccaaattttgcgat

SEQ ID NO: 1708207 - DNA, 25 bp, Homo sapien
aattagatttcatggaacattagcc

SEQ ID NO: 1708208 - DNA, 25 bp, Homo sapien
ctttagacaaatggttccgtactgg

SEQ ID NO: 1708209 - DNA, 25 bp, Homo sapien
cgtgaaaatttaggctggtaaagca

SEQ ID NO: 1708210 - DNA, 25 bp, Homo sapien
caggatgctttgaaacagccttcag

SEQ ID NO: 1708211 - DNA, 25 bp, Homo sapien
ctatctccattgtccctaaggaggg

SEQ ID NO: 1708212 - DNA, 25 bp, Homo sapien
tctgtgggttagatatgagtttaac

SEQ ID NO: 1708213 - DNA, 25 bp, Homo sapien
tccgcctaagagttatgtgacccag

SEQ ID NO: 1708214 - DNA, 25 bp, Homo sapien
gagtcattgatagactctgattatc

SEQ ID NO: 1708215 - DNA, 25 bp, Homo sapien
gaaagtcttgtagaacagcccagag

SEQ ID NO: 1708216 - DNA, 25 bp, Homo sapien
aattctgaagctacagggcgcatgc

SEQ ID NO: 1708217 - DNA, 25 bp, Homo sapien
tcttgacctcgaggtggcgctgctc

SEQ ID NO: 1708218 - DNA, 25 bp, Homo sapien
cagggaggactcacgggtacattat

SEQ ID NO: 1708219 - DNA, 25 bp, Homo sapien
aatggccagtggacgagaccaaacg

SEQ ID NO: 1708220 - DNA, 25 bp, Homo sapien
gggacttgggcgcttacctgcgaca

SEQ ID NO: 1708221 - DNA, 25 bp, Homo sapien
gactgaattagctcggcttgcagag

SEQ ID NO: 1708222 - DNA, 25 bp, Homo sapien
gtagcggtgcgcctacaaagtcgcg

SEQ ID NO: 1708223 - DNA, 25 bp, Homo sapien
gctgtgaagggagtaatatctggaa

SEQ ID NO: 1708224 - DNA, 25 bp, Homo sapien
cattgagatacagccctcacccatt

SEQ ID NO: 1708225 - DNA, 25 bp, Homo sapien
caccggtggtgggagtgcaaaatgg

SEQ ID NO: 1708226 - DNA, 25 bp, Homo sapien
tgatggttactatcaaaaaaccaga

SEQ ID NO: 1708227 - DNA, 25 bp, Homo sapien
gggttcagacaagccctctatcagt

SEQ ID NO: 1708228 - DNA, 25 bp, Homo sapien
tcctctctgtcattaggagccagag

SEQ ID NO: 1708229 - DNA, 25 bp, Homo sapien
gagttcataccgcttctattccagc

SEQ ID NO: 1708230 - DNA, 25 bp, Homo sapien
tacataatggaagccacctccggag

SEQ ID NO: 1708231 - DNA, 25 bp, Homo sapien
taaaaatgtgccgacgggttgtgac

SEQ ID NO: 1708232 - DNA, 25 bp, Homo sapien
tatccgcctcggcttgatgggtggc

SEQ ID NO: 1708233 - DNA, 25 bp, Homo sapien
cattgtgtctggcatcagcgaggtc

SEQ ID NO: 1708234 - DNA, 25 bp, Homo sapien
gacaagttatgatgcccttatccgc

SEQ ID NO: 1708235 - DNA, 25 bp, Homo sapien
cagaagctgcgactctagaccaggc

SEQ ID NO: 1708236 - DNA, 25 bp, Homo sapien
gttctcataatcaggctccagccag

SEQ ID NO: 1708237 - DNA, 25 bp, Homo sapien
cacttgctgtgtgcgaagatcgcct

SEQ ID NO: 1708238 - DNA, 25 bp, Homo sapien
gccttattaagtgcgagaagcctct

SEQ ID NO: 1708239 - DNA, 25 bp, Homo sapien
tctgaggaagctgagcgactgcatc

SEQ ID NO: 1708240 - DNA, 25 bp, Homo sapien
tgttgtcttaatcaggccgtctcgt

SEQ ID NO: 1708241 - DNA, 25 bp, Homo sapien
acctaacgggagacgagatggcagc

SEQ ID NO: 1708242 - DNA, 25 bp, Homo sapien
taatggccgtcattccaagggaaag

SEQ ID NO: 1708243 - DNA, 25 bp, Homo sapien
taagtggaagagtaccactggccct

SEQ ID NO: 1708244 - DNA, 25 bp, Homo sapien
tatctgcctcgagatctgggatgga

SEQ ID NO: 1708245 - DNA, 25 bp, Homo sapien
tcaatgagcctgtgcaaaaccaagg

SEQ ID NO: 1708246 - DNA, 25 bp, Homo sapien
ttcccaaagggcaaactcaggtcgc

SEQ ID NO: 1708247 - DNA, 25 bp, Homo sapien
cctgctgggaatttgcatacagctg

SEQ ID NO: 1708248 - DNA, 25 bp, Homo sapien
tgggcgggtggtcctttcagcctgc

SEQ ID NO: 1708249 - DNA, 25 bp, Homo sapien
cctttcagcctgctgggaatttgca

SEQ ID NO: 1708250 - DNA, 25 bp, Homo sapien
cattctccgttcagctcaagctcct

SEQ ID NO: 1708251 - DNA, 25 bp, Homo sapien
gtggggaggcgctggccaagggcat

SEQ ID NO: 1708252 - DNA, 25 bp, Homo sapien
ctgtggggaggcgctggccaagggc

SEQ ID NO: 1708253 - DNA, 25 bp, Homo sapien
tgtggggaggcgctggccaagggca

SEQ ID NO: 1708254 - DNA, 25 bp, Homo sapien
catcccagccatgcttgtgggtgtg

SEQ ID NO: 1708255 - DNA, 25 bp, Homo sapien
gtaccaatttagacacccacctgca

SEQ ID NO: 1708256 - DNA, 25 bp, Homo sapien
cattccagcctatgattgtaccaca

SEQ ID NO: 1708257 - DNA, 25 bp, Homo sapien
gagggctgccatgaaaattcgatga

SEQ ID NO: 1708258 - DNA, 25 bp, Homo sapien
cctgtaatggactcaacagagaaac

SEQ ID NO: 1708259 - DNA, 25 bp, Homo sapien
taatggactcaacagagaaacagcc

SEQ ID NO: 1708260 - DNA, 25 bp, Homo sapien
tcaacagagaaacagccaggagcac

SEQ ID NO: 1708261 - DNA, 25 bp, Homo sapien
cagccaggagcacccactcatccat

SEQ ID NO: 1708262 - DNA, 25 bp, Homo sapien
tgtatctggcaaggccctgaggcct

SEQ ID NO: 1708263 - DNA, 25 bp, Homo sapien
gaacactctggtgggccacgcaggt

SEQ ID NO: 1708264 - DNA, 25 bp, Homo sapien
caaagcttggagtagccttgaaggc

SEQ ID NO: 1708265 - DNA, 25 bp, Homo sapien
gctgaagaatgaagagtgaccccgg

SEQ ID NO: 1708266 - DNA, 25 bp, Homo sapien
ggctcacgccagctcttcctgcggg

SEQ ID NO: 1708267 - DNA, 25 bp, Homo sapien
gggccctgggctcacgccagctctt

SEQ ID NO: 1708268 - DNA, 25 bp, Homo sapien
ggccctgggctcacgccagctcttc

SEQ ID NO: 1708269 - DNA, 25 bp, Homo sapien
ctgggctcacgccagctcttcctgc

SEQ ID NO: 1708270 - DNA, 25 bp, Homo sapien
tgaagtcaggccgtctcagtctcta

SEQ ID NO: 1708271 - DNA, 25 bp, Homo sapien
aagtcaagtcgtctcttccctgaag

SEQ ID NO: 1708272 - DNA, 25 bp, Homo sapien
aggcaggttgtcttccccgaagtca

SEQ ID NO: 1708273 - DNA, 25 bp, Homo sapien
tcagtctctaccaactaagtctggg

SEQ ID NO: 1708274 - DNA, 25 bp, Homo sapien
gaatcctaagtggaagctcagggca

SEQ ID NO: 1708275 - DNA, 25 bp, Homo sapien
gagttgcacttgtatagctcttcat

SEQ ID NO: 1708276 - DNA, 25 bp, Homo sapien
ggaccagaaccctcatcagtgcatt

SEQ ID NO: 1708277 - DNA, 25 bp, Homo sapien
agtgcattctccctgtagattatgg

SEQ ID NO: 1708278 - DNA, 25 bp, Homo sapien
catgggccttcctatgggcagggca

SEQ ID NO: 1708279 - DNA, 25 bp, Homo sapien
tcccgaggatctgcatgggccttcc

SEQ ID NO: 1708280 - DNA, 25 bp, Homo sapien
ttgaacagaacagagcatagtcccg

SEQ ID NO: 1708281 - DNA, 25 bp, Homo sapien
gaacagagcatagtcccgaggatct

SEQ ID NO: 1708282 - DNA, 25 bp, Homo sapien
tctggccacgcctgttaagaacaca

SEQ ID NO: 1708283 - DNA, 25 bp, Homo sapien
gatctttgacttgcacccagagcta

SEQ ID NO: 1708284 - DNA, 25 bp, Homo sapien
cctggagatagctagctcggaaagc

SEQ ID NO: 1708285 - DNA, 25 bp, Homo sapien
tccagggcgacagtctcgatccttg

SEQ ID NO: 1708286 - DNA, 25 bp, Homo sapien
gatggcaagccctggtgagattgtt

SEQ ID NO: 1708287 - DNA, 25 bp, Homo sapien
ttgtcaattgtcctgggctgatggc

SEQ ID NO: 1708288 - DNA, 25 bp, Homo sapien
ccctggtgagattgttcctggatca

SEQ ID NO: 1708289 - DNA, 25 bp, Homo sapien
ttgttcctggatcaaactgagggtc

SEQ ID NO: 1708290 - DNA, 25 bp, Homo sapien
tgtttggtttgtggcccatgctagg

SEQ ID NO: 1708291 - DNA, 25 bp, Homo sapien
tgatgtatcttcattccgtgcagaa

SEQ ID NO: 1708292 - DNA, 25 bp, Homo sapien
gagaatcgctcggttggtgtatctg

SEQ ID NO: 1708293 - DNA, 25 bp, Homo sapien
cagaaaatgagttgacggtacagtg

SEQ ID NO: 1708294 - DNA, 25 bp, Homo sapien
gcaatacaaacgctttgtcgatgaa

SEQ ID NO: 1708295 - DNA, 25 bp, Homo sapien
cgtgcaggaacgtggcatatggtga

SEQ ID NO: 1708296 - DNA, 25 bp, Homo sapien
catatggtgagccatctgcaataca

SEQ ID NO: 1708297 - DNA, 25 bp, Homo sapien
gccatctgcaatacaaacgctttgt

SEQ ID NO: 1708298 - DNA, 25 bp, Homo sapien
gtacacaccacttgttaattaagct

SEQ ID NO: 1708299 - DNA, 25 bp, Homo sapien
taaaagcagtagataattaagtaca

SEQ ID NO: 1708300 - DNA, 25 bp, Homo sapien
ttgtacacaccacttgttaattaag

SEQ ID NO: 1708301 - DNA, 25 bp, Homo sapien
acataattgtacacaccacttgtta

SEQ ID NO: 1708302 - DNA, 25 bp, Homo sapien
cagacccaggtggtgtatggttcct

SEQ ID NO: 1708303 - DNA, 25 bp, Homo sapien
tgaaagaccaggtgggttgctccat

SEQ ID NO: 1708304 - DNA, 25 bp, Homo sapien
ggttgctccattagggtcctgctgg

SEQ ID NO: 1708305 - DNA, 25 bp, Homo sapien
tttcctctgacaggtgaaagaccag

SEQ ID NO: 1708306 - DNA, 25 bp, Homo sapien
tgggggcccactgagctcagggtgg

SEQ ID NO: 1708307 - DNA, 25 bp, Homo sapien
caccatgacaaccaagcctccctca

SEQ ID NO: 1708308 - DNA, 25 bp, Homo sapien
ttgctcagtgggggggccagagggg

SEQ ID NO: 1708309 - DNA, 25 bp, Homo sapien
cagtgggggggccagaggggcaggc

SEQ ID NO: 1708310 - DNA, 25 bp, Homo sapien
ctcagtgggggggccagaggggcag

SEQ ID NO: 1708311 - DNA, 25 bp, Homo sapien
agtgggggggccagaggggcaggct

SEQ ID NO: 1708312 - DNA, 25 bp, Homo sapien
agagaatccacccagacttgatgat

SEQ ID NO: 1708313 - DNA, 25 bp, Homo sapien
acagagaatccacccagacttgatg

SEQ ID NO: 1708314 - DNA, 25 bp, Homo sapien
cagagaatccacccagacttgatga

SEQ ID NO: 1708315 - DNA, 25 bp, Homo sapien
cttctgcagtctttccatatgcatc

SEQ ID NO: 1708316 - DNA, 25 bp, Homo sapien
gccaccgccaattcgaatcccaatt

SEQ ID NO: 1708317 - DNA, 25 bp, Homo sapien
aatcttctgcagtctttccatatgc

SEQ ID NO: 1708318 - DNA, 25 bp, Homo sapien
ctagaagccaccgccaattcgaatc

SEQ ID NO: 1708319 - DNA, 25 bp, Homo sapien
cagagagggagttacggttctgcca

SEQ ID NO: 1708320 - DNA, 25 bp, Homo sapien
aggcccgtattcaccctcagagagg

SEQ ID NO: 1708321 - DNA, 25 bp, Homo sapien
ccctcagagagggagttacggttct

SEQ ID NO: 1708322 - DNA, 25 bp, Homo sapien
ggcccttctggcaatcaaggcccgt

SEQ ID NO: 1708323 - DNA, 25 bp, Homo sapien
ttagtagagagccagttaagacccc

SEQ ID NO: 1708324 - DNA, 25 bp, Homo sapien
tttcaactctaaactcggccgggca

SEQ ID NO: 1708325 - DNA, 25 bp, Homo sapien
tgggcagcttgaaacacacgaggca

SEQ ID NO: 1708326 - DNA, 25 bp, Homo sapien
taaccccgcctgtagaggtgcctgt

SEQ ID NO: 1708327 - DNA, 25 bp, Homo sapien
tcagctcaattaggtgaggtctgtc

SEQ ID NO: 1708328 - DNA, 25 bp, Homo sapien
ccagaggccgggaaagatgttcagc

SEQ ID NO: 1708329 - DNA, 25 bp, Homo sapien
tgccagaggccgggaaagatgttca

SEQ ID NO: 1708330 - DNA, 25 bp, Homo sapien
caattaggtgaggtctgtcttggag

SEQ ID NO: 1708331 - DNA, 25 bp, Homo sapien
cctcacggaaccctgtctcttggca

SEQ ID NO: 1708332 - DNA, 25 bp, Homo sapien
tggcactgtatctgctccacccgtt

SEQ ID NO: 1708333 - DNA, 25 bp, Homo sapien
tcttggcactgtatctgctccaccc

SEQ ID NO: 1708334 - DNA, 25 bp, Homo sapien
tgtctggctcctcacggaaccctgt

SEQ ID NO: 1708335 - DNA, 25 bp, Homo sapien
gccacctgcagactggaagagtaga

SEQ ID NO: 1708336 - DNA, 25 bp, Homo sapien
cattgtctcattcccatgcctcact

SEQ ID NO: 1708337 - DNA, 25 bp, Homo sapien
gcagactggaagagtagatcttcct

SEQ ID NO: 1708338 - DNA, 25 bp, Homo sapien
catgcctcacttcgtgttctccttc

SEQ ID NO: 1708339 - DNA, 25 bp, Homo sapien
gatccagcgggaaatgaggctctgc

SEQ ID NO: 1708340 - DNA, 25 bp, Homo sapien
tatgtgggccctgttctagaagctg

SEQ ID NO: 1708341 - DNA, 25 bp, Homo sapien
gagaatgaccacaaccctgcatgga

SEQ ID NO: 1708342 - DNA, 25 bp, Homo sapien
ctgggactctcgtgctaaagctgga

SEQ ID NO: 1708343 - DNA, 25 bp, Homo sapien
ccatttcctggatctagacaccgag

SEQ ID NO: 1708344 - DNA, 25 bp, Homo sapien
caattccgagcctgatggacaagag

SEQ ID NO: 1708345 - DNA, 25 bp, Homo sapien
tcgcagaggctccttgaggctcaga

SEQ ID NO: 1708346 - DNA, 25 bp, Homo sapien
gagtgaagcatccaaagtcacggct

SEQ ID NO: 1708347 - DNA, 25 bp, Homo sapien
gcaccttgttccgttggagacggta

SEQ ID NO: 1708348 - DNA, 25 bp, Homo sapien
ggaatggacccaagatcagaaacag

SEQ ID NO: 1708349 - DNA, 25 bp, Homo sapien
gaaacagggacaggacctaactggc

SEQ ID NO: 1708350 - DNA, 25 bp, Homo sapien
agaatggctggtccatgcagaggaa

SEQ ID NO: 1708351 - DNA, 25 bp, Homo sapien
cttttgatcacatgccaattgaggg

SEQ ID NO: 1708352 - DNA, 25 bp, Homo sapien
gggacagttccacagtcattttgac

SEQ ID NO: 1708353 - DNA, 25 bp, Homo sapien
tctggtctgaagttgagtcctgcct

SEQ ID NO: 1708354 - DNA, 25 bp, Homo sapien
taaccagcatgtcaagagtagcagc

SEQ ID NO: 1708355 - DNA, 25 bp, Homo sapien
gagatagtgaaaacgcagggagcca

SEQ ID NO: 1708356 - DNA, 25 bp, Homo sapien
tacctcctgggattgcagcaaaagc

SEQ ID NO: 1708357 - DNA, 25 bp, Homo sapien
tcagcctgcctatgcaaggtggcca

SEQ ID NO: 1708358 - DNA, 25 bp, Homo sapien
ggttgtagttccacgcggtccagtc

SEQ ID NO: 1708359 - DNA, 25 bp, Homo sapien
caggaaggttggtgaagccacgact

SEQ ID NO: 1708360 - DNA, 25 bp, Homo sapien
accgactctgcagtaacagcccaat

SEQ ID NO: 1708361 - DNA, 25 bp, Homo sapien
ggttggtgaagccacgactctgctc

SEQ ID NO: 1708362 - DNA, 25 bp, Homo sapien
aacagcccaatcggcaggaaggttg

SEQ ID NO: 1708363 - DNA, 25 bp, Homo sapien
ctgttaccgggcatggttcatacca

SEQ ID NO: 1708364 - DNA, 25 bp, Homo sapien
cacagtccctgttaccgggcatggt

SEQ ID NO: 1708365 - DNA, 25 bp, Homo sapien
ttcatccataggctagctgggattc

SEQ ID NO: 1708366 - DNA, 25 bp, Homo sapien
cataggctagctgggattcttcctc

SEQ ID NO: 1708367 - DNA, 25 bp, Homo sapien
tgttaatacatgagtggatcgatcc

SEQ ID NO: 1708368 - DNA, 25 bp, Homo sapien
caacaggagtttcggcggtgataaa

SEQ ID NO: 1708369 - DNA, 25 bp, Homo sapien
aacattccagctatagcagtaaggg

SEQ ID NO: 1708370 - DNA, 25 bp, Homo sapien
ctatagcagtaagggtagctggtgc

SEQ ID NO: 1708371 - DNA, 25 bp, Homo sapien
atgggggggactttcacatgtgcag

SEQ ID NO: 1708372 - DNA, 25 bp, Homo sapien
catgggggggactttcacatgtgca

SEQ ID NO: 1708373 - DNA, 25 bp, Homo sapien
ttccatgggggggactttcacatgt

SEQ ID NO: 1708374 - DNA, 25 bp, Homo sapien
ccatgggggggactttcacatgtgc

SEQ ID NO: 1708375 - DNA, 25 bp, Homo sapien
ggccccgaggagcacaccagatgct

SEQ ID NO: 1708376 - DNA, 25 bp, Homo sapien
gccccgaggagcacaccagatgctg

SEQ ID NO: 1708377 - DNA, 25 bp, Homo sapien
ccccgaggagcacaccagatgctgg

SEQ ID NO: 1708378 - DNA, 25 bp, Homo sapien
cccgtgcactcagagaggaacttct

SEQ ID NO: 1708379 - DNA, 25 bp, Homo sapien
tgtggcccccgtgcactcagagagg

SEQ ID NO: 1708380 - DNA, 25 bp, Homo sapien
agaaggcagcactccaccggcaggg

SEQ ID NO: 1708381 - DNA, 25 bp, Homo sapien
agcctttgtcccaagaaggcagcac

SEQ ID NO: 1708382 - DNA, 25 bp, Homo sapien
tgcacgagaatgatggtggctccca

SEQ ID NO: 1708383 - DNA, 25 bp, Homo sapien
taggatcaggtttgctgcacgagaa

SEQ ID NO: 1708384 - DNA, 25 bp, Homo sapien
caaggtggcagccatcggtcctgtc

SEQ ID NO: 1708385 - DNA, 25 bp, Homo sapien
tggtggtgccaacgctatctggttg

SEQ ID NO: 1708386 - DNA, 25 bp, Homo sapien
tctgcatagtaggtcttcgtcggca

SEQ ID NO: 1708387 - DNA, 25 bp, Homo sapien
ctctgcatagtaggtcttcgtcggc

SEQ ID NO: 1708388 - DNA, 25 bp, Homo sapien
ctctctgcatagtaggtcttcgtcg

SEQ ID NO: 1708389 - DNA, 25 bp, Homo sapien
tctctgcatagtaggtcttcgtcgg

SEQ ID NO: 1708390 - DNA, 25 bp, Homo sapien
catgcctctgtcctagccaccttca

SEQ ID NO: 1708391 - DNA, 25 bp, Homo sapien
tcatgcctctgtcctagccaccttc

SEQ ID NO: 1708392 - DNA, 25 bp, Homo sapien
caggcagatggcaagcctggctctg

SEQ ID NO: 1708393 - DNA, 25 bp, Homo sapien
aggcagatggcaagcctggctctga

SEQ ID NO: 1708394 - DNA, 25 bp, Homo sapien
ccaggcagatggcaagcctggctct

SEQ ID NO: 1708395 - DNA, 25 bp, Homo sapien
gccaggcagatggcaagcctggctc

SEQ ID NO: 1708396 - DNA, 25 bp, Homo sapien
gctggggcccaggtccacgtcctac

SEQ ID NO: 1708397 - DNA, 25 bp, Homo sapien
cttggcgcccaggggctggggccca

SEQ ID NO: 1708398 - DNA, 25 bp, Homo sapien
caggggctggggcccaggtccacgt

SEQ ID NO: 1708399 - DNA, 25 bp, Homo sapien
gcccaggggctggggcccaggtcca

SEQ ID NO: 1708400 - DNA, 25 bp, Homo sapien
gagggaagaactcacacccatgtcc

SEQ ID NO: 1708401 - DNA, 25 bp, Homo sapien
tccagaagctcaacaagccagagag

SEQ ID NO: 1708402 - DNA, 25 bp, Homo sapien
gggtagcctcagttggccacaaagg

SEQ ID NO: 1708403 - DNA, 25 bp, Homo sapien
tcctgctggaagagacaattgttag

SEQ ID NO: 1708404 - DNA, 25 bp, Homo sapien
tgctttagggaccaacacatcggcc

SEQ ID NO: 1708405 - DNA, 25 bp, Homo sapien
taatccaatgcttgctttagggacc

SEQ ID NO: 1708406 - DNA, 25 bp, Homo sapien
tgtgacatctaatccaatgcttgct

SEQ ID NO: 1708407 - DNA, 25 bp, Homo sapien
cccatcctgtgacatctaatccaat

SEQ ID NO: 1708408 - DNA, 25 bp, Homo sapien
tttccatggcagctcgcattttctg

SEQ ID NO: 1708409 - DNA, 25 bp, Homo sapien
gctgtgtgcgctttgcaggaatcat

SEQ ID NO: 1708410 - DNA, 25 bp, Homo sapien
caatgtttgtggagttaaggagctc

SEQ ID NO: 1708411 - DNA, 25 bp, Homo sapien
cagtaggcacccagccaatgtttgt

SEQ ID NO: 1708412 - DNA, 25 bp, Homo sapien
cttccagtgtaactacccctactct

SEQ ID NO: 1708413 - DNA, 25 bp, Homo sapien
ctgaccacctcttccagtgtaacta

SEQ ID NO: 1708414 - DNA, 25 bp, Homo sapien
tcaggtcacacctcaggtgtcacct

SEQ ID NO: 1708415 - DNA, 25 bp, Homo sapien
cctcaggtcacacctcaggtgtcac

SEQ ID NO: 1708416 - DNA, 25 bp, Homo sapien
cagtctgatgatgcctatggcctca

SEQ ID NO: 1708417 - DNA, 25 bp, Homo sapien
tcaaccctggtcttaagtctgctgc

SEQ ID NO: 1708418 - DNA, 25 bp, Homo sapien
tagaattcccttcggatctcgccag

SEQ ID NO: 1708419 - DNA, 25 bp, Homo sapien
gtgggaaacacctccgctcctgttc

SEQ ID NO: 1708420 - DNA, 25 bp, Homo sapien
tgaaggcctatgtgatgccgcgcac

SEQ ID NO: 1708421 - DNA, 25 bp, Homo sapien
tactgttgaacatactgggacgccc

SEQ ID NO: 1708422 - DNA, 25 bp, Homo sapien
tcatttgagaaaagagttttactgt

SEQ ID NO: 1708423 - DNA, 25 bp, Homo sapien
catgacagcacccatggtggacgcc

SEQ ID NO: 1708424 - DNA, 25 bp, Homo sapien
gggattgtgcccctcaggagacctg

SEQ ID NO: 1708425 - DNA, 25 bp, Homo sapien
tgtagaagagctggcgcacaactcc

SEQ ID NO: 1708426 - DNA, 25 bp, Homo sapien
ttccctatgggccgcagtttgctca

SEQ ID NO: 1708427 - DNA, 25 bp, Homo sapien
gcacaactccagctaaatccacgaa

SEQ ID NO: 1708428 - DNA, 25 bp, Homo sapien
tgaatgccccttcaaccctagactt

SEQ ID NO: 1708429 - DNA, 25 bp, Homo sapien
agacgtcgcaccctgcttcgcggtg

SEQ ID NO: 1708430 - DNA, 25 bp, Homo sapien
tatcctatattcagagggcttgctc

SEQ ID NO: 1708431 - DNA, 25 bp, Homo sapien
cgcccacgtcgtgcttgaattctca

SEQ ID NO: 1708432 - DNA, 25 bp, Homo sapien
cagagctgaagccaacgtggccaaa

SEQ ID NO: 1708433 - DNA, 25 bp, Homo sapien
attctgggtgcagctaccccctggg

SEQ ID NO: 1708434 - DNA, 25 bp, Homo sapien
ttcgcttcaaagtacacagggcagg

SEQ ID NO: 1708435 - DNA, 25 bp, Homo sapien
attatgtttttattgcgagtgaggg

SEQ ID NO: 1708436 - DNA, 25 bp, Homo sapien
ggctaccacaagaacctgcgtcttg

SEQ ID NO: 1708437 - DNA, 25 bp, Homo sapien
caaaccgggtgagcaacaggaggac

SEQ ID NO: 1708438 - DNA, 25 bp, Homo sapien
tacaccaaccatgcaatctagcgag

SEQ ID NO: 1708439 - DNA, 25 bp, Homo sapien
acccacggacgtggcttggtgctga

SEQ ID NO: 1708440 - DNA, 25 bp, Homo sapien
tgcagcaggcgtgggcccaggggca

SEQ ID NO: 1708441 - DNA, 25 bp, Homo sapien
ctgcagcaggcgtgggcccaggggc

SEQ ID NO: 1708442 - DNA, 25 bp, Homo sapien
ccaggggcaggcaggttggatgagg

SEQ ID NO: 1708443 - DNA, 25 bp, Homo sapien
gggcaggcaggttggatgaggcggt

SEQ ID NO: 1708444 - DNA, 25 bp, Homo sapien
cagagctggaaagcctcaggagttg

SEQ ID NO: 1708445 - DNA, 25 bp, Homo sapien
caaggccagctcaggtgaaagctct

SEQ ID NO: 1708446 - DNA, 25 bp, Homo sapien
aaggccagctcaggtgaaagctctg

SEQ ID NO: 1708447 - DNA, 25 bp, Homo sapien
cattcgggtgtttgtcaggagcctg

SEQ ID NO: 1708448 - DNA, 25 bp, Homo sapien
gctggcaagtggcattcgggtgttt

SEQ ID NO: 1708449 - DNA, 25 bp, Homo sapien
tggcattcgggtgtttgtcaggagc

SEQ ID NO: 1708450 - DNA, 25 bp, Homo sapien
gcaagtggcattcgggtgtttgtca

SEQ ID NO: 1708451 - DNA, 25 bp, Homo sapien
agacctgcacaaacaccactacact

SEQ ID NO: 1708452 - DNA, 25 bp, Homo sapien
acagtgtcccggccttgaccgtggc

SEQ ID NO: 1708453 - DNA, 25 bp, Homo sapien
gagtggctcctccagtatcctcagc

SEQ ID NO: 1708454 - DNA, 25 bp, Homo sapien
gggccttgtcctgtgagtggctcct

SEQ ID NO: 1708455 - DNA, 25 bp, Homo sapien
gtgagtggctcctccagtatcctca

SEQ ID NO: 1708456 - DNA, 25 bp, Homo sapien
cacagcacaaagtggaggatggcaa

SEQ ID NO: 1708457 - DNA, 25 bp, Homo sapien
cacaaagtggaggatggcaagtgcc

SEQ ID NO: 1708458 - DNA, 25 bp, Homo sapien
gagcagacgggcacgatgagcttcc

SEQ ID NO: 1708459 - DNA, 25 bp, Homo sapien
acgggcacgatgagcttccactgca

SEQ ID NO: 1708460 - DNA, 25 bp, Homo sapien
ccccggtgtgggccagcagccccat

SEQ ID NO: 1708461 - DNA, 25 bp, Homo sapien
tcctccccggtgtgggccagcagcc

SEQ ID NO: 1708462 - DNA, 25 bp, Homo sapien
atccatcttcttggtccctcctccc

SEQ ID NO: 1708463 - DNA, 25 bp, Homo sapien
ccctcctccccggtgtgggccagca

SEQ ID NO: 1708464 - DNA, 25 bp, Homo sapien
tcccattggacagggatccttccag

SEQ ID NO: 1708465 - DNA, 25 bp, Homo sapien
cccattggacagggatccttccagt

SEQ ID NO: 1708466 - DNA, 25 bp, Homo sapien
ccattggacagggatccttccagtt

SEQ ID NO: 1708467 - DNA, 25 bp, Homo sapien
gaactgtggggtgcgcctcctgcca

SEQ ID NO: 1708468 - DNA, 25 bp, Homo sapien
gcagctgcgtcaggtgaactgtggg

SEQ ID NO: 1708469 - DNA, 25 bp, Homo sapien
tgaggacagaaatccattcctggag

SEQ ID NO: 1708470 - DNA, 25 bp, Homo sapien
tccattcctggaggcataaggtagg

SEQ ID NO: 1708471 - DNA, 25 bp, Homo sapien
ctacggaggctccacggggatgagg

SEQ ID NO: 1708472 - DNA, 25 bp, Homo sapien
ggaggctccacggggatgaggtgga

SEQ ID NO: 1708473 - DNA, 25 bp, Homo sapien
tacggaggctccacggggatgaggt

SEQ ID NO: 1708474 - DNA, 25 bp, Homo sapien
acggaggctccacggggatgaggtg

SEQ ID NO: 1708475 - DNA, 25 bp, Homo sapien
gtggcatggcatggctggcagcccg

SEQ ID NO: 1708476 - DNA, 25 bp, Homo sapien
tcagcacagtggcatggcatggctg

SEQ ID NO: 1708477 - DNA, 25 bp, Homo sapien
ctgtcagcacagtggcatggcatgg

SEQ ID NO: 1708478 - DNA, 25 bp, Homo sapien
agtggcatggcatggctggcagccc

SEQ ID NO: 1708479 - DNA, 25 bp, Homo sapien
ctaaggggcttgcactggtgggcat

SEQ ID NO: 1708480 - DNA, 25 bp, Homo sapien
gtcttggcgggcctaaggggcttgc

SEQ ID NO: 1708481 - DNA, 25 bp, Homo sapien
ttggcgggcctaaggggcttgcact

SEQ ID NO: 1708482 - DNA, 25 bp, Homo sapien
gcctaaggggcttgcactggtgggc

SEQ ID NO: 1708483 - DNA, 25 bp, Homo sapien
cagactttcagtccctgtcggagga

SEQ ID NO: 1708484 - DNA, 25 bp, Homo sapien
accgactgagctgggcttgcctagc

SEQ ID NO: 1708485 - DNA, 25 bp, Homo sapien
ggtggctgcccctgtgtcaatctgg

SEQ ID NO: 1708486 - DNA, 25 bp, Homo sapien
cgtgtctctcagagcggtggctgcc

SEQ ID NO: 1708487 - DNA, 25 bp, Homo sapien
cgcgggatctgaactagagggtctc

SEQ ID NO: 1708488 - DNA, 25 bp, Homo sapien
gctaaggcaggctttccgggtgccc

SEQ ID NO: 1708489 - DNA, 25 bp, Homo sapien
ctgaactagagggtctcccctcggg

SEQ ID NO: 1708490 - DNA, 25 bp, Homo sapien
cggagggcgcgggatctgaactaga

SEQ ID NO: 1708491 - DNA, 25 bp, Homo sapien
cgcgcggtgagttgtggcccgaggg

SEQ ID NO: 1708492 - DNA, 25 bp, Homo sapien
cttaaaccttgctggcgcgcggtga

SEQ ID NO: 1708493 - DNA, 25 bp, Homo sapien
tctgggcaccgcgagaaccgtgcct

SEQ ID NO: 1708494 - DNA, 25 bp, Homo sapien
tcccgcgcttggagtgctccgagga

SEQ ID NO: 1708495 - DNA, 25 bp, Homo sapien
gccggctgcgctcgctggtcgctcc

SEQ ID NO: 1708496 - DNA, 25 bp, Homo sapien
ttgccggagcagcagccgaacgccg

SEQ ID NO: 1708497 - DNA, 25 bp, Homo sapien
gctccttccggctcggacgccgggc

SEQ ID NO: 1708498 - DNA, 25 bp, Homo sapien
gggttgccgccgatctccctctcgc

SEQ ID NO: 1708499 - DNA, 25 bp, Homo sapien
gcactttcagcgcaaacttgccgga

SEQ ID NO: 1708500 - DNA, 25 bp, Homo sapien
gattggtctcgtgcctcctcgggtg

SEQ ID NO: 1708501 - DNA, 25 bp, Homo sapien
ttaaaaggccggcagaagcgccgtg

SEQ ID NO: 1708502 - DNA, 25 bp, Homo sapien
agaagcgccgtgagcttggcccgca

SEQ ID NO: 1708503 - DNA, 25 bp, Homo sapien
tcctcctcagtgcctgcggggtgac

SEQ ID NO: 1708504 - DNA, 25 bp, Homo sapien
tagccccttgacctcagcccatggc

SEQ ID NO: 1708505 - DNA, 25 bp, Homo sapien
gggccctagccccttgacctcagcc

SEQ ID NO: 1708506 - DNA, 25 bp, Homo sapien
gtgacttacggctccctggagagcc

SEQ ID NO: 1708507 - DNA, 25 bp, Homo sapien
ttctaagtgcccttgaggtgaagga

SEQ ID NO: 1708508 - DNA, 25 bp, Homo sapien
tgtcccagcctgtcccgagcaggct

SEQ ID NO: 1708509 - DNA, 25 bp, Homo sapien
cccgagcaggctgtgggaatttcta

SEQ ID NO: 1708510 - DNA, 25 bp, Homo sapien
tgggaatttctaagtgcccttgagg

SEQ ID NO: 1708511 - DNA, 25 bp, Homo sapien
agtgcagtggagagctcggaaaaag

SEQ ID NO: 1708512 - DNA, 25 bp, Homo sapien
tgcagtggagagctcggaaaaagga

SEQ ID NO: 1708513 - DNA, 25 bp, Homo sapien
cagtggagagctcggaaaaaggatt

SEQ ID NO: 1708514 - DNA, 25 bp, Homo sapien
agagctcggaaaaaggattggaggg

SEQ ID NO: 1708515 - DNA, 25 bp, Homo sapien
accctgagtgctgtggacagtgtcc

SEQ ID NO: 1708516 - DNA, 25 bp, Homo sapien
acactggtctgttcgtggagtgtgt

SEQ ID NO: 1708517 - DNA, 25 bp, Homo sapien
cctgagtgctgtggacagtgtccac

SEQ ID NO: 1708518 - DNA, 25 bp, Homo sapien
gtccacactggtctgttcgtggagt

SEQ ID NO: 1708519 - DNA, 25 bp, Homo sapien
gaggccggcgcaaggggcctgcccg

SEQ ID NO: 1708520 - DNA, 25 bp, Homo sapien
ggaggccggcgcaaggggcctgccc

SEQ ID NO: 1708521 - DNA, 25 bp, Homo sapien
aggccggcgcaaggggcctgcccgg

SEQ ID NO: 1708522 - DNA, 25 bp, Homo sapien
gaggaggccggcgcaaggggcctgc

SEQ ID NO: 1708523 - DNA, 25 bp, Homo sapien
ctcagcgatcttgccgcgtttctgg

SEQ ID NO: 1708524 - DNA, 25 bp, Homo sapien
gcgtttctggggtggctgaactggc

SEQ ID NO: 1708525 - DNA, 25 bp, Homo sapien
tcttctcagcgatcttgccgcgttt

SEQ ID NO: 1708526 - DNA, 25 bp, Homo sapien
gttcttctcagcgatcttgccgcgt

SEQ ID NO: 1708527 - DNA, 25 bp, Homo sapien
gcgcgcgggaatcgaggctcctcac

SEQ ID NO: 1708528 - DNA, 25 bp, Homo sapien
tggtggggcgctaggctcgcgctcg

SEQ ID NO: 1708529 - DNA, 25 bp, Homo sapien
ccgctgggtgcaatgagggcgttcg

SEQ ID NO: 1708530 - DNA, 25 bp, Homo sapien
ggcggcggtgctggcccgcgatggg

SEQ ID NO: 1708531 - DNA, 25 bp, Homo sapien
tcgctttgtacttgtgggaggactg

SEQ ID NO: 1708532 - DNA, 25 bp, Homo sapien
gcttctgacctcttcgctttgtact

SEQ ID NO: 1708533 - DNA, 25 bp, Homo sapien
tgacctcttcgctttgtacttgtgg

SEQ ID NO: 1708534 - DNA, 25 bp, Homo sapien
gggcttgttgaatgattccccccag

SEQ ID NO: 1708535 - DNA, 25 bp, Homo sapien
ccgttcccgcggtggccgactgctt

SEQ ID NO: 1708536 - DNA, 25 bp, Homo sapien
cagcctcctgacttggattcgccat

SEQ ID NO: 1708537 - DNA, 25 bp, Homo sapien
tggattcgccatgtggaagacactt

SEQ ID NO: 1708538 - DNA, 25 bp, Homo sapien
ccttgggccatggaatgagaatatt

SEQ ID NO: 1708539 - DNA, 25 bp, Homo sapien
tcctccttcctaagatccctgtctt

SEQ ID NO: 1708540 - DNA, 25 bp, Homo sapien
cctaagatccctgtcttctcgagag

SEQ ID NO: 1708541 - DNA, 25 bp, Homo sapien
ccttcctaagatccctgtcttctcg

SEQ ID NO: 1708542 - DNA, 25 bp, Homo sapien
aagaaccaggccggctgagaaagca

SEQ ID NO: 1708543 - DNA, 25 bp, Homo sapien
tcagatgacagcaaaaggtccttgg

SEQ ID NO: 1708544 - DNA, 25 bp, Homo sapien
caaaaggtccttggagacccagagg

SEQ ID NO: 1708545 - DNA, 25 bp, Homo sapien
cagatgacagcaaaaggtccttgga

SEQ ID NO: 1708546 - DNA, 25 bp, Homo sapien
cagcaaaaggtccttggagacccag

SEQ ID NO: 1708547 - DNA, 25 bp, Homo sapien
ggtggtagagcgagtggtgaagctc

SEQ ID NO: 1708548 - DNA, 25 bp, Homo sapien
tgcattgagtccagggactggtagt

SEQ ID NO: 1708549 - DNA, 25 bp, Homo sapien
ggtggagaaggtggtagagcgagtg

SEQ ID NO: 1708550 - DNA, 25 bp, Homo sapien
ggagaaggtggtagagcgagtggtg

SEQ ID NO: 1708551 - DNA, 25 bp, Homo sapien
gacacagagatctgagagcctgggc

SEQ ID NO: 1708552 - DNA, 25 bp, Homo sapien
gagcctgggccctctgagagcctgg

SEQ ID NO: 1708553 - DNA, 25 bp, Homo sapien
tgggccctcagcatctgcatagacg

SEQ ID NO: 1708554 - DNA, 25 bp, Homo sapien
ctagatgtcccccatttcagccaga

SEQ ID NO: 1708555 - DNA, 25 bp, Homo sapien
caggcagccgttcaagccttgattg

SEQ ID NO: 1708556 - DNA, 25 bp, Homo sapien
caagccttgattggtctccttctgg

SEQ ID NO: 1708557 - DNA, 25 bp, Homo sapien
gcagccgttcaagccttgattggtc

SEQ ID NO: 1708558 - DNA, 25 bp, Homo sapien
cgttcaagccttgattggtctcctt

SEQ ID NO: 1708559 - DNA, 25 bp, Homo sapien
gctctgtctcatcagcggcaagatg

SEQ ID NO: 1708560 - DNA, 25 bp, Homo sapien
tctgtctcatcagcggcaagatggg

SEQ ID NO: 1708561 - DNA, 25 bp, Homo sapien
ccagctctgtctcatcagcggcaag

SEQ ID NO: 1708562 - DNA, 25 bp, Homo sapien
cagctctgtctcatcagcggcaaga

SEQ ID NO: 1708563 - DNA, 25 bp, Homo sapien
tcatctttgacctagcagagcctac

SEQ ID NO: 1708564 - DNA, 25 bp, Homo sapien
gcaattagggcttgttggcctttaa

SEQ ID NO: 1708565 - DNA, 25 bp, Homo sapien
ggcctttaacttcctcatgttattc

SEQ ID NO: 1708566 - DNA, 25 bp, Homo sapien
agttcctcctcgaaaaccttgatct

SEQ ID NO: 1708567 - DNA, 25 bp, Homo sapien
ctgtgatttgggggcatctacctcc

SEQ ID NO: 1708568 - DNA, 25 bp, Homo sapien
tgatttgggggcatctacctccacg

SEQ ID NO: 1708569 - DNA, 25 bp, Homo sapien
tgggggcatctacctccacggttaa

SEQ ID NO: 1708570 - DNA, 25 bp, Homo sapien
ggcatctacctccacggttaaccca

SEQ ID NO: 1708571 - DNA, 25 bp, Homo sapien
gggagcagtactggttcagcttctc

SEQ ID NO: 1708572 - DNA, 25 bp, Homo sapien
gtctggtgggagcagtactggttca

SEQ ID NO: 1708573 - DNA, 25 bp, Homo sapien
tggttcagcttctctcgattcttct

SEQ ID NO: 1708574 - DNA, 25 bp, Homo sapien
ctctcgattcttctgagacagcttg

SEQ ID NO: 1708575 - DNA, 25 bp, Homo sapien
tgcagggcgtagtgggccttcgcct

SEQ ID NO: 1708576 - DNA, 25 bp, Homo sapien
ctgcagggcgtagtgggccttcgcc

SEQ ID NO: 1708577 - DNA, 25 bp, Homo sapien
atctgcagggcgtagtgggccttcg

SEQ ID NO: 1708578 - DNA, 25 bp, Homo sapien
tctgcagggcgtagtgggccttcgc

SEQ ID NO: 1708579 - DNA, 25 bp, Homo sapien
tccaggtgcagcaggaccccactgg

SEQ ID NO: 1708580 - DNA, 25 bp, Homo sapien
ccaggtgcagcaggaccccactggg

SEQ ID NO: 1708581 - DNA, 25 bp, Homo sapien
ctccaggtgcagcaggaccccactg

SEQ ID NO: 1708582 - DNA, 25 bp, Homo sapien
gatggtggtcgtttgcatggaattg

SEQ ID NO: 1708583 - DNA, 25 bp, Homo sapien
tcaatgcctctgaactttggtgttg

SEQ ID NO: 1708584 - DNA, 25 bp, Homo sapien
tccactcttttcttcttcagccaac

SEQ ID NO: 1708585 - DNA, 25 bp, Homo sapien
gctctcttctccactcttttcttct

SEQ ID NO: 1708586 - DNA, 25 bp, Homo sapien
tctccactcttttcttcttcagcca

SEQ ID NO: 1708587 - DNA, 25 bp, Homo sapien
cactcttttcttcttcagccaacat

SEQ ID NO: 1708588 - DNA, 25 bp, Homo sapien
cttgggaagcggaagagtagtgcgg

SEQ ID NO: 1708589 - DNA, 25 bp, Homo sapien
cggaagagtagtgcggctggtggcc

SEQ ID NO: 1708590 - DNA, 25 bp, Homo sapien
ctggcgccccctcgcggtcgtggcc

SEQ ID NO: 1708591 - DNA, 25 bp, Homo sapien
ctgggagtctcgcgtggctgcctgg

SEQ ID NO: 1708592 - DNA, 25 bp, Homo sapien
cgtgcagcacacttgatgggccgca

SEQ ID NO: 1708593 - DNA, 25 bp, Homo sapien
tgagagggattcgacttgcagcagt

SEQ ID NO: 1708594 - DNA, 25 bp, Homo sapien
ccagtgccagtgtctttgggtccat

SEQ ID NO: 1708595 - DNA, 25 bp, Homo sapien
tttcacaatgcaggaggcgcaaggt

SEQ ID NO: 1708596 - DNA, 25 bp, Homo sapien
tttttatcccagagcactttatgtc

SEQ ID NO: 1708597 - DNA, 25 bp, Homo sapien
ctttttatcccagagcactttatgt

SEQ ID NO: 1708598 - DNA, 25 bp, Homo sapien
ctggcgcaacgaagactcccgctct

SEQ ID NO: 1708599 - DNA, 25 bp, Homo sapien
cgcaacgaagactcccgctctgaag

SEQ ID NO: 1708600 - DNA, 25 bp, Homo sapien
tggcgcaacgaagactcccgctctg

SEQ ID NO: 1708601 - DNA, 25 bp, Homo sapien
gcgcaacgaagactcccgctctgaa

SEQ ID NO: 1708602 - DNA, 25 bp, Homo sapien
acaatgtggcactgggaacgcttca

SEQ ID NO: 1708603 - DNA, 25 bp, Homo sapien
tcaacaatgtggcactgggaacgct

SEQ ID NO: 1708604 - DNA, 25 bp, Homo sapien
tttcaacaatgtggcactgggaacg

SEQ ID NO: 1708605 - DNA, 25 bp, Homo sapien
caatgtggcactgggaacgcttcat

SEQ ID NO: 1708606 - DNA, 25 bp, Homo sapien
aatggtggctatgtaagagtgtcca

SEQ ID NO: 1708607 - DNA, 25 bp, Homo sapien
gttcttaatggtggctatgtaagag

SEQ ID NO: 1708608 - DNA, 25 bp, Homo sapien
tcttaatggtggctatgtaagagtg

SEQ ID NO: 1708609 - DNA, 25 bp, Homo sapien
ttaatggtggctatgtaagagtgtc

SEQ ID NO: 1708610 - DNA, 25 bp, Homo sapien
tcttccttcttaatgccgacaaaga

SEQ ID NO: 1708611 - DNA, 25 bp, Homo sapien
gcctcttccttcttaatgccgacaa

SEQ ID NO: 1708612 - DNA, 25 bp, Homo sapien
cagcctcttccttcttaatgccgac

SEQ ID NO: 1708613 - DNA, 25 bp, Homo sapien
ctcttccttcttaatgccgacaaag

SEQ ID NO: 1708614 - DNA, 25 bp, Homo sapien
aagatgtgagaggtgttgaataatc

SEQ ID NO: 1708615 - DNA, 25 bp, Homo sapien
taagatgtgagaggtgttgaataat

SEQ ID NO: 1708616 - DNA, 25 bp, Homo sapien
gatgtgagaggtgttgaataatctt

SEQ ID NO: 1708617 - DNA, 25 bp, Homo sapien
tctgttgagcagcacccatgcagcc

SEQ ID NO: 1708618 - DNA, 25 bp, Homo sapien
tttctgttgagcagcacccatgcag

SEQ ID NO: 1708619 - DNA, 25 bp, Homo sapien
tgttgagcagcacccatgcagccga

SEQ ID NO: 1708620 - DNA, 25 bp, Homo sapien
gctttctgttgagcagcacccatgc

SEQ ID NO: 1708621 - DNA, 25 bp, Homo sapien
agccggccgggggtgtgcgtgctgc

SEQ ID NO: 1708622 - DNA, 25 bp, Homo sapien
cggccgggggtgtgcgtgctgctgt

SEQ ID NO: 1708623 - DNA, 25 bp, Homo sapien
cgtgagccggccgggggtgtgcgtg

SEQ ID NO: 1708624 - DNA, 25 bp, Homo sapien
tgagccggccgggggtgtgcgtgct

SEQ ID NO: 1708625 - DNA, 25 bp, Homo sapien
aggcccgacccgggagtgcgggcag

SEQ ID NO: 1708626 - DNA, 25 bp, Homo sapien
ccgctcgcccaaccccacagggacg

SEQ ID NO: 1708627 - DNA, 25 bp, Homo sapien
ctcgcccaaccccacagggacgcgc

SEQ ID NO: 1708628 - DNA, 25 bp, Homo sapien
gcccaaccccacagggacgcgcagg

SEQ ID NO: 1708629 - DNA, 25 bp, Homo sapien
tctgagtaacgtgcagtccacagtc

SEQ ID NO: 1708630 - DNA, 25 bp, Homo sapien
ggtaaaatgcccctaaacacaatgc

SEQ ID NO: 1708631 - DNA, 25 bp, Homo sapien
caatgttacaggatctgcaggtaaa

SEQ ID NO: 1708632 - DNA, 25 bp, Homo sapien
ttccctttggtctgagtaacgtgca

SEQ ID NO: 1708633 - DNA, 25 bp, Homo sapien
gattcctccagggtgtctcatctca

SEQ ID NO: 1708634 - DNA, 25 bp, Homo sapien
ggccaggctggcagttcaatcatgt

SEQ ID NO: 1708635 - DNA, 25 bp, Homo sapien
catgggctgcttgatgttccccagg

SEQ ID NO: 1708636 - DNA, 25 bp, Homo sapien
tcaatcatgttccagtgggcccagc

SEQ ID NO: 1708637 - DNA, 25 bp, Homo sapien
cagcgtggtacatgctgtaatgcca

SEQ ID NO: 1708638 - DNA, 25 bp, Homo sapien
caccaccaagggtgtggccttgaaa

SEQ ID NO: 1708639 - DNA, 25 bp, Homo sapien
aatgggtagctacattcctgtcctc

SEQ ID NO: 1708640 - DNA, 25 bp, Homo sapien
gatagacaagtacacaggcaattcc

SEQ ID NO: 1708641 - DNA, 25 bp, Homo sapien
ttcttcagggctaaatccccaagga

SEQ ID NO: 1708642 - DNA, 25 bp, Homo sapien
ggctaaatccccaaggaagcccagc

SEQ ID NO: 1708643 - DNA, 25 bp, Homo sapien
tcagggctaaatccccaaggaagcc

SEQ ID NO: 1708644 - DNA, 25 bp, Homo sapien
gctaaatccccaaggaagcccagct

SEQ ID NO: 1708645 - DNA, 25 bp, Homo sapien
attgtgtgtatttttgtcagccacc

SEQ ID NO: 1708646 - DNA, 25 bp, Homo sapien
atttttgtcagccacctcaaaccct

SEQ ID NO: 1708647 - DNA, 25 bp, Homo sapien
gtgtgtatttttgtcagccacctca

SEQ ID NO: 1708648 - DNA, 25 bp, Homo sapien
gtgtatttttgtcagccacctcaaa

SEQ ID NO: 1708649 - DNA, 25 bp, Homo sapien
aggctgctaggcccgggcaccgggc

SEQ ID NO: 1708650 - DNA, 25 bp, Homo sapien
tgtccgccctctctctcgggtacat

SEQ ID NO: 1708651 - DNA, 25 bp, Homo sapien
ggtgcggagagggtcctgtccgccc

SEQ ID NO: 1708652 - DNA, 25 bp, Homo sapien
tctcgggtacatctctccccgtccg

SEQ ID NO: 1708653 - DNA, 25 bp, Homo sapien
gggaattgaaatgcgctccagtgac

SEQ ID NO: 1708654 - DNA, 25 bp, Homo sapien
tgcagggaattgaaatgcgctccag

SEQ ID NO: 1708655 - DNA, 25 bp, Homo sapien
tccagtgacacacggctgtgactca

SEQ ID NO: 1708656 - DNA, 25 bp, Homo sapien
aaatgcgctccagtgacacacggct

SEQ ID NO: 1708657 - DNA, 25 bp, Homo sapien
tgttctggagatacgcaggcccact

SEQ ID NO: 1708658 - DNA, 25 bp, Homo sapien
ctggagatacgcaggcccacttggg

SEQ ID NO: 1708659 - DNA, 25 bp, Homo sapien
gttctggagatacgcaggcccactt

SEQ ID NO: 1708660 - DNA, 25 bp, Homo sapien
atggtgttctggagatacgcaggcc

SEQ ID NO: 1708661 - DNA, 25 bp, Homo sapien
gcctgggctgcgaactcgagtcgac

SEQ ID NO: 1708662 - DNA, 25 bp, Homo sapien
ggtcccagggagagtcacctctagg

SEQ ID NO: 1708663 - DNA, 25 bp, Homo sapien
tgacgggtggcggtatccttcctcc

SEQ ID NO: 1708664 - DNA, 25 bp, Homo sapien
aaggcacgcgcagaggagtcacgaa

SEQ ID NO: 1708665 - DNA, 25 bp, Homo sapien
cttaaaaagagcgacccaggggcag

SEQ ID NO: 1708666 - DNA, 25 bp, Homo sapien
attagaggagcgcagcaccggctca

SEQ ID NO: 1708667 - DNA, 25 bp, Homo sapien
gcgccagcgccagaaatagccccgg

SEQ ID NO: 1708668 - DNA, 25 bp, Homo sapien
ccggctcggagtcccaattagagga

SEQ ID NO: 1708669 - DNA, 25 bp, Homo sapien
atagccccggctcggagtcccaatt

SEQ ID NO: 1708670 - DNA, 25 bp, Homo sapien
aggaagctgggcacggcccgtgcgc

SEQ ID NO: 1708671 - DNA, 25 bp, Homo sapien
tatttatgtgtcacagccaggcggg

SEQ ID NO: 1708672 - DNA, 25 bp, Homo sapien
cccgtgcgcggcctcaataaataaa

SEQ ID NO: 1708673 - DNA, 25 bp, Homo sapien
agagcagaggcgctcagagaccgcc

SEQ ID NO: 1708674 - DNA, 25 bp, Homo sapien
cgcggccgccgctggtagcaaatgc

SEQ ID NO: 1708675 - DNA, 25 bp, Homo sapien
gcggccgccgctggtagcaaatgcg

SEQ ID NO: 1708676 - DNA, 25 bp, Homo sapien
cggccgccgctggtagcaaatgcgg

SEQ ID NO: 1708677 - DNA, 25 bp, Homo sapien
ggccgccgctggtagcaaatgcgga

SEQ ID NO: 1708678 - DNA, 25 bp, Homo sapien
gcggtgcgcgctccgggttgccggg

SEQ ID NO: 1708679 - DNA, 25 bp, Homo sapien
tgcgcgctccgggttgccgggagcg

SEQ ID NO: 1708680 - DNA, 25 bp, Homo sapien
cgcgagctcggccgccggcctgcgg

SEQ ID NO: 1708681 - DNA, 25 bp, Homo sapien
gcctgcggtgcgcgctccgggttgc

SEQ ID NO: 1708682 - DNA, 25 bp, Homo sapien
ggcgcccgaccccccactctcctgc

SEQ ID NO: 1708683 - DNA, 25 bp, Homo sapien
gagcggccgccgcgcgaggtgcgcc

SEQ ID NO: 1708684 - DNA, 25 bp, Homo sapien
gccgcgcgaggtgcgccgggctcct

SEQ ID NO: 1708685 - DNA, 25 bp, Homo sapien
cctgagctgcggggggcgcccgacc

SEQ ID NO: 1708686 - DNA, 25 bp, Homo sapien
caaatacttaaggactctgcaggaa

SEQ ID NO: 1708687 - DNA, 25 bp, Homo sapien
catcagaggcctgtcttggaggaac

SEQ ID NO: 1708688 - DNA, 25 bp, Homo sapien
cacgaactaaatgaaggcccgaggc

SEQ ID NO: 1708689 - DNA, 25 bp, Homo sapien
tcactttgtaataagcccgcttggg

SEQ ID NO: 1708690 - DNA, 25 bp, Homo sapien
gcctggacaatacggtgggactccc

SEQ ID NO: 1708691 - DNA, 25 bp, Homo sapien
ctggacaatacggtgggactcccat

SEQ ID NO: 1708692 - DNA, 25 bp, Homo sapien
tggacaatacggtgggactcccatg

SEQ ID NO: 1708693 - DNA, 25 bp, Homo sapien
cctggacaatacggtgggactccca

SEQ ID NO: 1708694 - DNA, 25 bp, Homo sapien
tctcattggaaggagggcctgcaac

SEQ ID NO: 1708695 - DNA, 25 bp, Homo sapien
tgtcagatgggtagggaattctcca

SEQ ID NO: 1708696 - DNA, 25 bp, Homo sapien
gaaagtgagcccaaagccaaaggcc

SEQ ID NO: 1708697 - DNA, 25 bp, Homo sapien
tctggcaaggtgcaagactcaggac

SEQ ID NO: 1708698 - DNA, 25 bp, Homo sapien
agcaggtggaagagtgatggctggg

SEQ ID NO: 1708699 - DNA, 25 bp, Homo sapien
aaggagcaggtggaagagtgatggc

SEQ ID NO: 1708700 - DNA, 25 bp, Homo sapien
ctaaggagcaggtggaagagtgatg

SEQ ID NO: 1708701 - DNA, 25 bp, Homo sapien
caggtggaagagtgatggctgggat

SEQ ID NO: 1708702 - DNA, 25 bp, Homo sapien
tggacttcgagctcgactcactcat

SEQ ID NO: 1708703 - DNA, 25 bp, Homo sapien
gctggacttcgagctcgactcactc

SEQ ID NO: 1708704 - DNA, 25 bp, Homo sapien
tggctggacttcgagctcgactcac

SEQ ID NO: 1708705 - DNA, 25 bp, Homo sapien
ctggctggacttcgagctcgactca

SEQ ID NO: 1708706 - DNA, 25 bp, Homo sapien
cgcggcctgccccggccccgcttct

SEQ ID NO: 1708707 - DNA, 25 bp, Homo sapien
cggaggctgcttgcgcggcctgccc

SEQ ID NO: 1708708 - DNA, 25 bp, Homo sapien
tgcgcggcctgccccggccccgctt

SEQ ID NO: 1708709 - DNA, 25 bp, Homo sapien
cggcctgccccggccccgcttctca

SEQ ID NO: 1708710 - DNA, 25 bp, Homo sapien
tccctaccagcgctgtcccgggact

SEQ ID NO: 1708711 - DNA, 25 bp, Homo sapien
ctaccagcgctgtcccgggactcac

SEQ ID NO: 1708712 - DNA, 25 bp, Homo sapien
gactccctaccagcgctgtcccggg

SEQ ID NO: 1708713 - DNA, 25 bp, Homo sapien
ctgactccctaccagcgctgtcccg

SEQ ID NO: 1708714 - DNA, 25 bp, Homo sapien
cttaggtgttggcacttcgctgggc

SEQ ID NO: 1708715 - DNA, 25 bp, Homo sapien
cggccccgaggtctcttaggtgttg

SEQ ID NO: 1708716 - DNA, 25 bp, Homo sapien
ggtctcttaggtgttggcacttcgc

SEQ ID NO: 1708717 - DNA, 25 bp, Homo sapien
ccgaggtctcttaggtgttggcact

SEQ ID NO: 1708718 - DNA, 25 bp, Homo sapien
ctagagggttagagaaaatatctcc

SEQ ID NO: 1708719 - DNA, 25 bp, Homo sapien
cagtgctcacccgatgcccaatagt

SEQ ID NO: 1708720 - DNA, 25 bp, Homo sapien
tcacccgatgcccaatagtgatggg

SEQ ID NO: 1708721 - DNA, 25 bp, Homo sapien
gctcatcagtgctcacccgatgccc

SEQ ID NO: 1708722 - DNA, 25 bp, Homo sapien
ctgccccttggtttccttcctggag

SEQ ID NO: 1708723 - DNA, 25 bp, Homo sapien
tggtttccttcctggagttgtggtg

SEQ ID NO: 1708724 - DNA, 25 bp, Homo sapien
ccttggtttccttcctggagttgtg

SEQ ID NO: 1708725 - DNA, 25 bp, Homo sapien
tctgccccttggtttccttcctgga

SEQ ID NO: 1708726 - DNA, 25 bp, Homo sapien
gggtgcatagcatcaggtactgtgt

SEQ ID NO: 1708727 - DNA, 25 bp, Homo sapien
gtgtactcaacaccctcaactcaaa

SEQ ID NO: 1708728 - DNA, 25 bp, Homo sapien
catcaggtactgtgtactcaacacc

SEQ ID NO: 1708729 - DNA, 25 bp, Homo sapien
ccatagggggtgcatagcatcaggt

SEQ ID NO: 1708730 - DNA, 25 bp, Homo sapien
ggacttctgtaaaatctgatgtccc

SEQ ID NO: 1708731 - DNA, 25 bp, Homo sapien
ctgatgtcccagcaggtcaaggaga

SEQ ID NO: 1708732 - DNA, 25 bp, Homo sapien
tgggacccctcacttctcatgggca

SEQ ID NO: 1708733 - DNA, 25 bp, Homo sapien
gatgtcccagcaggtcaaggagagc

SEQ ID NO: 1708734 - DNA, 25 bp, Homo sapien
ggacacaggctagatgacttccaag

SEQ ID NO: 1708735 - DNA, 25 bp, Homo sapien
ctccagtgcagtgtggtgggtcaca

SEQ ID NO: 1708736 - DNA, 25 bp, Homo sapien
ggacccagaattggatggtgccctc

SEQ ID NO: 1708737 - DNA, 25 bp, Homo sapien
gaggctcataggaaggacaaacctt

SEQ ID NO: 1708738 - DNA, 25 bp, Homo sapien
gagctcagggcagcaatgagcttca

SEQ ID NO: 1708739 - DNA, 25 bp, Homo sapien
gcagagctcagggcagcaatgagct

SEQ ID NO: 1708740 - DNA, 25 bp, Homo sapien
gctcagggcagcaatgagcttcagg

SEQ ID NO: 1708741 - DNA, 25 bp, Homo sapien
tgagcttcaggatgtgactgactcc

SEQ ID NO: 1708742 - DNA, 25 bp, Homo sapien
gtgagctctggcccggtccccctct

SEQ ID NO: 1708743 - DNA, 25 bp, Homo sapien
gagctctggcccggtccccctcttc

SEQ ID NO: 1708744 - DNA, 25 bp, Homo sapien
gctctggcccggtccccctcttcca

SEQ ID NO: 1708745 - DNA, 25 bp, Homo sapien
gtgtgagctctggcccggtccccct

SEQ ID NO: 1708746 - DNA, 25 bp, Homo sapien
tcctcctccgaggactcctgcgaga

SEQ ID NO: 1708747 - DNA, 25 bp, Homo sapien
cactgctcctcctccgaggactcct

SEQ ID NO: 1708748 - DNA, 25 bp, Homo sapien
actgctcctcctccgaggactcctg

SEQ ID NO: 1708749 - DNA, 25 bp, Homo sapien
tcctccgaggactcctgcgagatgc

SEQ ID NO: 1708750 - DNA, 25 bp, Homo sapien
tgggagcggagcaaagctgtccagt

SEQ ID NO: 1708751 - DNA, 25 bp, Homo sapien
ccccactcagcccatgggagccctg

SEQ ID NO: 1708752 - DNA, 25 bp, Homo sapien
ttagccttgtccaggagggcatgtg

SEQ ID NO: 1708753 - DNA, 25 bp, Homo sapien
atgtgtgtatgcgtgggtgggcggg

SEQ ID NO: 1708754 - DNA, 25 bp, Homo sapien
ctgaggccaggggaaaactgctccc

SEQ ID NO: 1708755 - DNA, 25 bp, Homo sapien
tggagtagggcgtgccaggatgaga

SEQ ID NO: 1708756 - DNA, 25 bp, Homo sapien
gatgaaaagtgagccccacgtggtg

SEQ ID NO: 1708757 - DNA, 25 bp, Homo sapien
gctgtccaacctagtacggggacta

SEQ ID NO: 1708758 - DNA, 25 bp, Homo sapien
ctcctgccttcctgtaaccgaaggg

SEQ ID NO: 1708759 - DNA, 25 bp, Homo sapien
tgggcctcacctggacaataagtga

SEQ ID NO: 1708760 - DNA, 25 bp, Homo sapien
gggcctcacctggacaataagtgac

SEQ ID NO: 1708761 - DNA, 25 bp, Homo sapien
tacttgggctgtaactgggtgctgc

SEQ ID NO: 1708762 - DNA, 25 bp, Homo sapien
ccactgctggatgtcaagacgtgac

SEQ ID NO: 1708763 - DNA, 25 bp, Homo sapien
cagccttgtggtgtggtctcctccc

SEQ ID NO: 1708764 - DNA, 25 bp, Homo sapien
gagtggctaccagcacaagcggatg

SEQ ID NO: 1708765 - DNA, 25 bp, Homo sapien
cttgccctctgatagagactcaagc

SEQ ID NO: 1708766 - DNA, 25 bp, Homo sapien
ctgggtcgcggaccttgggccatca

SEQ ID NO: 1708767 - DNA, 25 bp, Homo sapien
ctctgatagagactcaagcgaacct

SEQ ID NO: 1708768 - DNA, 25 bp, Homo sapien
actcaagcgaacctgggtcgcggac

SEQ ID NO: 1708769 - DNA, 25 bp, Homo sapien
cagagagctgtccaagaagagaggc

SEQ ID NO: 1708770 - DNA, 25 bp, Homo sapien
aattgcgattgctccacttgccctg

SEQ ID NO: 1708771 - DNA, 25 bp, Homo sapien
aaacggtagctgcatgaagagggaa

SEQ ID NO: 1708772 - DNA, 25 bp, Homo sapien
cagttttcccggctatacttggagg

SEQ ID NO: 1708773 - DNA, 25 bp, Homo sapien
agctatttagtttaattaatcccat

SEQ ID NO: 1708774 - DNA, 25 bp, Homo sapien
agtttaattaatcccatctatttat

SEQ ID NO: 1708775 - DNA, 25 bp, Homo sapien
tttatctttgcttttgttgaatctg

SEQ ID NO: 1708776 - DNA, 25 bp, Homo sapien
gtgggttgtctgtttgctgattatt

SEQ ID NO: 1708777 - DNA, 25 bp, Homo sapien
ttgtctcagatgaggctttgaactg

SEQ ID NO: 1708778 - DNA, 25 bp, Homo sapien
cttgtctcagatgaggctttgaact

SEQ ID NO: 1708779 - DNA, 25 bp, Homo sapien
tgaatctacgctctttccctcggag

SEQ ID NO: 1708780 - DNA, 25 bp, Homo sapien
gtgcggcctccaagctctctaagat

SEQ ID NO: 1708781 - DNA, 25 bp, Homo sapien
tcaaggcctgaggagcgcattgtcc

SEQ ID NO: 1708782 - DNA, 25 bp, Homo sapien
tcaaggctcgagatcttcgcgggaa

SEQ ID NO: 1708783 - DNA, 25 bp, Homo sapien
gaatccaagagttctagactggctt

SEQ ID NO: 1708784 - DNA, 25 bp, Homo sapien
tgaatccaagagttctagactggct

SEQ ID NO: 1708785 - DNA, 25 bp, Homo sapien
aatccaagagttctagactggctta

SEQ ID NO: 1708786 - DNA, 25 bp, Homo sapien
tccaagagttctagactggcttagg

SEQ ID NO: 1708787 - DNA, 25 bp, Homo sapien
tactacatcccatcagttttggtat

SEQ ID NO: 1708788 - DNA, 25 bp, Homo sapien
gatttgagatctttaggcatttaca

SEQ ID NO: 1708789 - DNA, 25 bp, Homo sapien
taagagtgtgtggtttactttccac

SEQ ID NO: 1708790 - DNA, 25 bp, Homo sapien
aattttcctctgagtactgccttta

SEQ ID NO: 1708791 - DNA, 25 bp, Homo sapien
ccattgcagctcatatcattgcggg

SEQ ID NO: 1708792 - DNA, 25 bp, Homo sapien
tgccaggtggtagcactgaccgtct

SEQ ID NO: 1708793 - DNA, 25 bp, Homo sapien
gtaactgctcatccccagtcagggt

SEQ ID NO: 1708794 - DNA, 25 bp, Homo sapien
gaaatcagcccaaaggacaccattg

SEQ ID NO: 1708795 - DNA, 25 bp, Homo sapien
taaacctcttggcaccttgtgcggg

SEQ ID NO: 1708796 - DNA, 25 bp, Homo sapien
tttagctgaggcgtaaatggccaag

SEQ ID NO: 1708797 - DNA, 25 bp, Homo sapien
tgtccaggatttaggagctacccaa

SEQ ID NO: 1708798 - DNA, 25 bp, Homo sapien
caaggagctggagtaaaattgccct

SEQ ID NO: 1708799 - DNA, 25 bp, Homo sapien
tttgtcttccatcctatccaatgac

SEQ ID NO: 1708800 - DNA, 25 bp, Homo sapien
tgtcttccatcctatccaatgacat

SEQ ID NO: 1708801 - DNA, 25 bp, Homo sapien
tcaaagactttgtcttccatcctat

SEQ ID NO: 1708802 - DNA, 25 bp, Homo sapien
aaagactttgtcttccatcctatcc

SEQ ID NO: 1708803 - DNA, 25 bp, Homo sapien
gaacccgtgttaactcagaatgctg

SEQ ID NO: 1708804 - DNA, 25 bp, Homo sapien
tttgggcacactacttgagctgagg

SEQ ID NO: 1708805 - DNA, 25 bp, Homo sapien
taagaagggataggtctgctccacg

SEQ ID NO: 1708806 - DNA, 25 bp, Homo sapien
ttttgatattaggagccagcccatg

SEQ ID NO: 1708807 - DNA, 25 bp, Homo sapien
tgaaaggtccatatgggaggccacg

SEQ ID NO: 1708808 - DNA, 25 bp, Homo sapien
catatatgccttacaccgtgctgac

SEQ ID NO: 1708809 - DNA, 25 bp, Homo sapien
ttaaccaagcaaggagcaaatggcc

SEQ ID NO: 1708810 - DNA, 25 bp, Homo sapien
aaattttgctgtctactcactgggc

SEQ ID NO: 1708811 - DNA, 25 bp, Homo sapien
tagaagacgccataaaagtgctgca

SEQ ID NO: 1708812 - DNA, 25 bp, Homo sapien
acattgaggcaaggctactcagcca

SEQ ID NO: 1708813 - DNA, 25 bp, Homo sapien
cccgtgcaggcatcatattttgaaa

SEQ ID NO: 1708814 - DNA, 25 bp, Homo sapien
tgctcagagctcgatgtcaggcatc

SEQ ID NO: 1708815 - DNA, 25 bp, Homo sapien
cgtatgtctatgtgctcattgtcac

SEQ ID NO: 1708816 - DNA, 25 bp, Homo sapien
gactgggaagattcagttaacattg

SEQ ID NO: 1708817 - DNA, 25 bp, Homo sapien
gagaggaagcacaggacgtatgtct

SEQ ID NO: 1708818 - DNA, 25 bp, Homo sapien
gctcattgtcactgaagtgctggaa

SEQ ID NO: 1708819 - DNA, 25 bp, Homo sapien
tggagtaaaagggacattgggaaga

SEQ ID NO: 1708820 - DNA, 25 bp, Homo sapien
cattgggaagattagttggaatttt

SEQ ID NO: 1708821 - DNA, 25 bp, Homo sapien
ggacattgggaagattagttggaat

SEQ ID NO: 1708822 - DNA, 25 bp, Homo sapien
ggctggagtaaaagggacattggga

SEQ ID NO: 1708823 - DNA, 25 bp, Homo sapien
ccattttcaggtgagtagttgtctc

SEQ ID NO: 1708824 - DNA, 25 bp, Homo sapien
taaacaccattttcaggtgagtagt

SEQ ID NO: 1708825 - DNA, 25 bp, Homo sapien
caggtgagtagttgtctcttgcagg

SEQ ID NO: 1708826 - DNA, 25 bp, Homo sapien
tggggaatacagttcttggtcttct

SEQ ID NO: 1708827 - DNA, 25 bp, Homo sapien
tgtcagctggactattcagatgtct

SEQ ID NO: 1708828 - DNA, 25 bp, Homo sapien
gagtgatggcaactcatacactgcc

SEQ ID NO: 1708829 - DNA, 25 bp, Homo sapien
cagctagctctgagttgagtaggca

SEQ ID NO: 1708830 - DNA, 25 bp, Homo sapien
tacaagccaaggtcaacttctggtg

SEQ ID NO: 1708831 - DNA, 25 bp, Homo sapien
ctttccttctttcgatatggggtct

SEQ ID NO: 1708832 - DNA, 25 bp, Homo sapien
cttttgtaagactggtaagatcttg

SEQ ID NO: 1708833 - DNA, 25 bp, Homo sapien
agatcttgattaatgattagcaaac

SEQ ID NO: 1708834 - DNA, 25 bp, Homo sapien
gattaatgattagcaaactcttcct

SEQ ID NO: 1708835 - DNA, 25 bp, Homo sapien
gcctcagcctcccaaagtgttggaa

SEQ ID NO: 1708836 - DNA, 25 bp, Homo sapien
ccaccgcgcttggcctaattttttg

SEQ ID NO: 1708837 - DNA, 25 bp, Homo sapien
agccaccgcgcttggcctaattttt

SEQ ID NO: 1708838 - DNA, 25 bp, Homo sapien
cctcagcctcccaaagtgttggaat

SEQ ID NO: 1708839 - DNA, 25 bp, Homo sapien
gccttcttcagtctactactttcaa

SEQ ID NO: 1708840 - DNA, 25 bp, Homo sapien
tttcaacacagtaggcaaaattatc

SEQ ID NO: 1708841 - DNA, 25 bp, Homo sapien
ctcaattccttagctacaccccctg

SEQ ID NO: 1708842 - DNA, 25 bp, Homo sapien
ccttgccttcttcagtctactactt

SEQ ID NO: 1708843 - DNA, 25 bp, Homo sapien
ctctctccacctcttaacattagat

SEQ ID NO: 1708844 - DNA, 25 bp, Homo sapien
cttaacattagatgccttgggattc

SEQ ID NO: 1708845 - DNA, 25 bp, Homo sapien
ctcttaacattagatgccttgggat

SEQ ID NO: 1708846 - DNA, 25 bp, Homo sapien
aacattagatgccttgggattcagt

SEQ ID NO: 1708847 - DNA, 25 bp, Homo sapien
tctgggcagaaatgtgaagcaatcg

SEQ ID NO: 1708848 - DNA, 25 bp, Homo sapien
tggcagagcttcagttaggtttttg

SEQ ID NO: 1708849 - DNA, 25 bp, Homo sapien
aactgattagagtgattacctctgg

SEQ ID NO: 1708850 - DNA, 25 bp, Homo sapien
gaatctggcagggaaaatattaaac

SEQ ID NO: 1708851 - DNA, 25 bp, Homo sapien
ggttagttggcaagcatgatcccat

SEQ ID NO: 1708852 - DNA, 25 bp, Homo sapien
aagataaggttagttggcaagcatg

SEQ ID NO: 1708853 - DNA, 25 bp, Homo sapien
ataaggttagttggcaagcatgatc

SEQ ID NO: 1708854 - DNA, 25 bp, Homo sapien
tgttgaagataaggttagttggcaa

SEQ ID NO: 1708855 - DNA, 25 bp, Homo sapien
taaaattatctagatgtaaattctt

SEQ ID NO: 1708856 - DNA, 25 bp, Homo sapien
gtgtagctagatgtagtttgctaaa

SEQ ID NO: 1708857 - DNA, 25 bp, Homo sapien
taaaattagaaagtgtagctagatg

SEQ ID NO: 1708858 - DNA, 25 bp, Homo sapien
caacctcttagaagatagtttttgt

SEQ ID NO: 1708859 - DNA, 25 bp, Homo sapien
ggcgtggtggttcactgtgggcgga

SEQ ID NO: 1708860 - DNA, 25 bp, Homo sapien
gtaaggggaagacccagtgtgatca

SEQ ID NO: 1708861 - DNA, 25 bp, Homo sapien
tggttcactgtgggcggaagattac

SEQ ID NO: 1708862 - DNA, 25 bp, Homo sapien
cactgtgggcggaagattacccagg

SEQ ID NO: 1708863 - DNA, 25 bp, Homo sapien
tctcttagctgtgctcagagtagtg

SEQ ID NO: 1708864 - DNA, 25 bp, Homo sapien
atcaaaactccataacatcacaagg

SEQ ID NO: 1708865 - DNA, 25 bp, Homo sapien
cttcatcaaaactccataacatcac

SEQ ID NO: 1708866 - DNA, 25 bp, Homo sapien
actgaccccgttcacttttgcttca

SEQ ID NO: 1708867 - DNA, 25 bp, Homo sapien
ttaggtgacctgataggccacactg

SEQ ID NO: 1708868 - DNA, 25 bp, Homo sapien
agcaaatagttcctgacctctaagg

SEQ ID NO: 1708869 - DNA, 25 bp, Homo sapien
tattaccgggtgatggagttgtgac

SEQ ID NO: 1708870 - DNA, 25 bp, Homo sapien
tggtaatgttaaccggcactctgtg

SEQ ID NO: 1708871 - DNA, 25 bp, Homo sapien
catacatgtgttgagttcctgggcc

SEQ ID NO: 1708872 - DNA, 25 bp, Homo sapien
caagtgtggcagcagttcgtgaagt

SEQ ID NO: 1708873 - DNA, 25 bp, Homo sapien
cagacagatggattgtccctggagg

SEQ ID NO: 1708874 - DNA, 25 bp, Homo sapien
aggtgctactcgtgagcagtagtcg

SEQ ID NO: 1708875 - DNA, 25 bp, Homo sapien
gcagtagtcgccatccagacagatg

SEQ ID NO: 1708876 - DNA, 25 bp, Homo sapien
gcccacctccatttatacatcttaa

SEQ ID NO: 1708877 - DNA, 25 bp, Homo sapien
aatctctgtacaccctggggactca

SEQ ID NO: 1708878 - DNA, 25 bp, Homo sapien
catccttagcactgccaattgcact

SEQ ID NO: 1708879 - DNA, 25 bp, Homo sapien
taaagtaaagcacctcatccttagc

SEQ ID NO: 1708880 - DNA, 25 bp, Homo sapien
gtctctacaaacaagtattagccgg

SEQ ID NO: 1708881 - DNA, 25 bp, Homo sapien
tctctacaaacaagtattagccggg

SEQ ID NO: 1708882 - DNA, 25 bp, Homo sapien
tctacaaacaagtattagccgggta

SEQ ID NO: 1708883 - DNA, 25 bp, Homo sapien
tacaaacaagtattagccgggtatg

SEQ ID NO: 1708884 - DNA, 25 bp, Homo sapien
tacttctaaaacagaatactgtctt

SEQ ID NO: 1708885 - DNA, 25 bp, Homo sapien
aataaccacaatttggccgggcgtg

SEQ ID NO: 1708886 - DNA, 25 bp, Homo sapien
ttcagtaagtacttctaaaacagaa

SEQ ID NO: 1708887 - DNA, 25 bp, Homo sapien
ctgtaatttttcagtaagtacttct

SEQ ID NO: 1708888 - DNA, 25 bp, Homo sapien
ctcccaaacacttgtaaaaccattg

SEQ ID NO: 1708889 - DNA, 25 bp, Homo sapien
caaacacttgtaaaaccattggatt

SEQ ID NO: 1708890 - DNA, 25 bp, Homo sapien
gagccgtgtagcggagaagctcccc

SEQ ID NO: 1708891 - DNA, 25 bp, Homo sapien
ctacgacggcgacggctacaagaag

SEQ ID NO: 1708892 - DNA, 25 bp, Homo sapien
cccgggcccggaggatgatgaagct

SEQ ID NO: 1708893 - DNA, 25 bp, Homo sapien
gaagcgggccgcatgcctgtgtttc

SEQ ID NO: 1708894 - DNA, 25 bp, Homo sapien
atgctggtttccaccgcgcgaactg

SEQ ID NO: 1708895 - DNA, 25 bp, Homo sapien
ttgtaatgggcgacatgcaccagcc

SEQ ID NO: 1708896 - DNA, 25 bp, Homo sapien
ggttcaggctatcaacgcaaagtgc

SEQ ID NO: 1708897 - DNA, 25 bp, Homo sapien
gtgaccttggttcatcctcggccgc

SEQ ID NO: 1708898 - DNA, 25 bp, Homo sapien
tttggtcgtggacgtggtcagccac

SEQ ID NO: 1708899 - DNA, 25 bp, Homo sapien
gaggcggatttggtcgtggacgtgg

SEQ ID NO: 1708900 - DNA, 25 bp, Homo sapien
agaggcggatttggtcgtggacgtg

SEQ ID NO: 1708901 - DNA, 25 bp, Homo sapien
ggtcgtggacgtggtcagccacctc

SEQ ID NO: 1708902 - DNA, 25 bp, Homo sapien
ggggctgggtcagcaaccgaattcc

SEQ ID NO: 1708903 - DNA, 25 bp, Homo sapien
ggctgggtcagcaaccgaattccag

SEQ ID NO: 1708904 - DNA, 25 bp, Homo sapien
ctggtgccgacaagaaagccgaggc

SEQ ID NO: 1708905 - DNA, 25 bp, Homo sapien
ctgggtcagcaaccgaattccagtt

SEQ ID NO: 1708906 - DNA, 25 bp, Homo sapien
gagatacctacagacggagtgctgt

SEQ ID NO: 1708907 - DNA, 25 bp, Homo sapien
agatacctacagacggagtgctgtg

SEQ ID NO: 1708908 - DNA, 25 bp, Homo sapien
tcaagtcccgaggctacgtgaagga

SEQ ID NO: 1708909 - DNA, 25 bp, Homo sapien
tctctcaagtcccgaggctacgtga

SEQ ID NO: 1708910 - DNA, 25 bp, Homo sapien
cgaggctacgtgaaggaacagtttg

SEQ ID NO: 1708911 - DNA, 25 bp, Homo sapien
ccgaggctacgtgaaggaacagttt

SEQ ID NO: 1708912 - DNA, 25 bp, Homo sapien
taagaagaaccggattgccatttat

SEQ ID NO: 1708913 - DNA, 25 bp, Homo sapien
aagaaggatgtccacatgcctaagc

SEQ ID NO: 1708914 - DNA, 25 bp, Homo sapien
catgcctaagcacccggagctggca

SEQ ID NO: 1708915 - DNA, 25 bp, Homo sapien
aaccggattgccatttatgaactcc

SEQ ID NO: 1708916 - DNA, 25 bp, Homo sapien
gccgaggccaccccaggctccccgc

SEQ ID NO: 1708917 - DNA, 25 bp, Homo sapien
cgccgaggccaccccaggctccccg

SEQ ID NO: 1708918 - DNA, 25 bp, Homo sapien
cgaggccaccccaggctccccgcgg

SEQ ID NO: 1708919 - DNA, 25 bp, Homo sapien
cagcaacgtgatggcctccagtata

SEQ ID NO: 1708920 - DNA, 25 bp, Homo sapien
tgatggcctccagtatagaccacct

SEQ ID NO: 1708921 - DNA, 25 bp, Homo sapien
catagacattgacagcaacgtgatg

SEQ ID NO: 1708922 - DNA, 25 bp, Homo sapien
cttgagcatagacattgacagcaac

SEQ ID NO: 1708923 - DNA, 25 bp, Homo sapien
atagggccgtatgccctgccagccc

SEQ ID NO: 1708924 - DNA, 25 bp, Homo sapien
ccgatagggccgtatgccctgccag

SEQ ID NO: 1708925 - DNA, 25 bp, Homo sapien
cgatagggccgtatgccctgccagc

SEQ ID NO: 1708926 - DNA, 25 bp, Homo sapien
caccgatagggccgtatgccctgcc

SEQ ID NO: 1708927 - DNA, 25 bp, Homo sapien
gcgcctgctctccaatttgcaaaga

SEQ ID NO: 1708928 - DNA, 25 bp, Homo sapien
caggagtgaggctcagcgcctgctc

SEQ ID NO: 1708929 - DNA, 25 bp, Homo sapien
tgaggaagtggaaccgccatatggc

SEQ ID NO: 1708930 - DNA, 25 bp, Homo sapien
catatggcatcagccttgccagtgc

SEQ ID NO: 1708931 - DNA, 25 bp, Homo sapien
tgtcctagttccagcaggaccggct

SEQ ID NO: 1708932 - DNA, 25 bp, Homo sapien
gtcgccaaagcaaactccaggccat

SEQ ID NO: 1708933 - DNA, 25 bp, Homo sapien
gttccagcaggaccggctgtcgcca

SEQ ID NO: 1708934 - DNA, 25 bp, Homo sapien
agcaggaccggctgtcgccaaagca

SEQ ID NO: 1708935 - DNA, 25 bp, Homo sapien
gccgccaccgcgtcgctctgggatc

SEQ ID NO: 1708936 - DNA, 25 bp, Homo sapien
ccgcgtcgctctgggatctcgccgg

SEQ ID NO: 1708937 - DNA, 25 bp, Homo sapien
cggcggcgactcggggcgaagcggg

SEQ ID NO: 1708938 - DNA, 25 bp, Homo sapien
gccaccgcgtcgctctgggatctcg

SEQ ID NO: 1708939 - DNA, 25 bp, Homo sapien
tgggggcaggagctccggggaccat

SEQ ID NO: 1708940 - DNA, 25 bp, Homo sapien
ctgggggcaggagctccggggacca

SEQ ID NO: 1708941 - DNA, 25 bp, Homo sapien
ccgccaggtttcaggcaccacaggc

SEQ ID NO: 1708942 - DNA, 25 bp, Homo sapien
ctgtttttgataaggtggtctggga

SEQ ID NO: 1708943 - DNA, 25 bp, Homo sapien
atgtgaacatcatgagccatgtagg

SEQ ID NO: 1708944 - DNA, 25 bp, Homo sapien
gatgataaagtagaatcaggagatg

SEQ ID NO: 1708945 - DNA, 25 bp, Homo sapien
aacattgaaagtagaggagctagca

SEQ ID NO: 1708946 - DNA, 25 bp, Homo sapien
cagtggcagcccagtgtccgatgga

SEQ ID NO: 1708947 - DNA, 25 bp, Homo sapien
gctgatgatagaggtgacaccagat

SEQ ID NO: 1708948 - DNA, 25 bp, Homo sapien
ccagtgtccgatggagctgatgata

SEQ ID NO: 1708949 - DNA, 25 bp, Homo sapien
tggagctgatgatagaggtgacacc

SEQ ID NO: 1708950 - DNA, 25 bp, Homo sapien
caggccagctggtgcaagggggagg

SEQ ID NO: 1708951 - DNA, 25 bp, Homo sapien
ccaatgacaaggggctggcaaggcg

SEQ ID NO: 1708952 - DNA, 25 bp, Homo sapien
gccaatgacaaggggctggcaaggc

SEQ ID NO: 1708953 - DNA, 25 bp, Homo sapien
caatgacaaggggctggcaaggcgg

SEQ ID NO: 1708954 - DNA, 25 bp, Homo sapien
agaggcctgagggccagggaacgag

SEQ ID NO: 1708955 - DNA, 25 bp, Homo sapien
agagaggcctgagggccagggaacg

SEQ ID NO: 1708956 - DNA, 25 bp, Homo sapien
tcagagaggcctgagggccagggaa

SEQ ID NO: 1708957 - DNA, 25 bp, Homo sapien
aggcctgagggccagggaacgaggg

SEQ ID NO: 1708958 - DNA, 25 bp, Homo sapien
tgcctttgggccccaacctgttgac

SEQ ID NO: 1708959 - DNA, 25 bp, Homo sapien
gatcgctgtgcctttgggccccaac

SEQ ID NO: 1708960 - DNA, 25 bp, Homo sapien
caggatcgctgtgcctttgggcccc

SEQ ID NO: 1708961 - DNA, 25 bp, Homo sapien
aacaggatcgctgtgcctttgggcc

SEQ ID NO: 1708962 - DNA, 25 bp, Homo sapien
caccgttgggtttacatgcagcaga

SEQ ID NO: 1708963 - DNA, 25 bp, Homo sapien
gacacgcacatgaatgcttgcagca

SEQ ID NO: 1708964 - DNA, 25 bp, Homo sapien
tgtctggaccatcagggtggctaaa

SEQ ID NO: 1708965 - DNA, 25 bp, Homo sapien
ttggcgaggatgcagagtaatcaca

SEQ ID NO: 1708966 - DNA, 25 bp, Homo sapien
caagttgacggcacagtttactgaa

SEQ ID NO: 1708967 - DNA, 25 bp, Homo sapien
ctcagagactcccaacacttgttat

SEQ ID NO: 1708968 - DNA, 25 bp, Homo sapien
ttctgcctgcgtctgtaaatggaac

SEQ ID NO: 1708969 - DNA, 25 bp, Homo sapien
cttattgacaattccacagtggctg

SEQ ID NO: 1708970 - DNA, 25 bp, Homo sapien
aagctgggggcaagtaggagcttac

SEQ ID NO: 1708971 - DNA, 25 bp, Homo sapien
gttccctccaccgctcactcaggaa

SEQ ID NO: 1708972 - DNA, 25 bp, Homo sapien
tgggggctctgtcctctagggttcc

SEQ ID NO: 1708973 - DNA, 25 bp, Homo sapien
taggagcttactgcccccgctgggc

SEQ ID NO: 1708974 - DNA, 25 bp, Homo sapien
gcagtgtcagtgcgcacaggcgaat

SEQ ID NO: 1708975 - DNA, 25 bp, Homo sapien
gggcaggcagtgtcagtgcgcacag

SEQ ID NO: 1708976 - DNA, 25 bp, Homo sapien
tcagtgcgcacaggcgaatctgcat

SEQ ID NO: 1708977 - DNA, 25 bp, Homo sapien
aaggaggagagtgcggggttcggag

SEQ ID NO: 1708978 - DNA, 25 bp, Homo sapien
cgctgacgggcaactgaggccagca

SEQ ID NO: 1708979 - DNA, 25 bp, Homo sapien
gcggccgctgacgggcaactgaggc

SEQ ID NO: 1708980 - DNA, 25 bp, Homo sapien
ccgctgacgggcaactgaggccagc

SEQ ID NO: 1708981 - DNA, 25 bp, Homo sapien
ggccgctgacgggcaactgaggcca

SEQ ID NO: 1708982 - DNA, 25 bp, Homo sapien
gcaggagagagatccctggagatga

SEQ ID NO: 1708983 - DNA, 25 bp, Homo sapien
agagagatccctggagatgagggaa

SEQ ID NO: 1708984 - DNA, 25 bp, Homo sapien
ggagatgagggaagggccttccacc

SEQ ID NO: 1708985 - DNA, 25 bp, Homo sapien
gagatgagggaagggccttccaccc

SEQ ID NO: 1708986 - DNA, 25 bp, Homo sapien
gcggttagcaggctcggctgctcat

SEQ ID NO: 1708987 - DNA, 25 bp, Homo sapien
gttagcaggctcggctgctcatgca

SEQ ID NO: 1708988 - DNA, 25 bp, Homo sapien
ggttagcaggctcggctgctcatgc

SEQ ID NO: 1708989 - DNA, 25 bp, Homo sapien
ctgcggttagcaggctcggctgctc

SEQ ID NO: 1708990 - DNA, 25 bp, Homo sapien
ggtgtagccgcagggggatggacaa

SEQ ID NO: 1708991 - DNA, 25 bp, Homo sapien
tcctctggcgccagtgaggcctcat

SEQ ID NO: 1708992 - DNA, 25 bp, Homo sapien
gaggcctcatcgtaggagctggaca

SEQ ID NO: 1708993 - DNA, 25 bp, Homo sapien
tggcgccagtgaggcctcatcgtag

SEQ ID NO: 1708994 - DNA, 25 bp, Homo sapien
gtggtctcctctggcgccagtgagg

SEQ ID NO: 1708995 - DNA, 25 bp, Homo sapien
agcgagcaccactcccgcgggttcc

SEQ ID NO: 1708996 - DNA, 25 bp, Homo sapien
acggccacgcccactgtcttccgcc

SEQ ID NO: 1708997 - DNA, 25 bp, Homo sapien
ggccaagcagcgagcaccactcccg

SEQ ID NO: 1708998 - DNA, 25 bp, Homo sapien
ccgcccgccgcatccagcacggcca

SEQ ID NO: 1708999 - DNA, 25 bp, Homo sapien
gtcgttgcatagacggtggccgtca

SEQ ID NO: 1709000 - DNA, 25 bp, Homo sapien
tgcatagacggtggccgtcatcgat

SEQ ID NO: 1709001 - DNA, 25 bp, Homo sapien
acggtggccgtcatcgatgcgcttc

SEQ ID NO: 1709002 - DNA, 25 bp, Homo sapien
caggtcgttgcatagacggtggccg

SEQ ID NO: 1709003 - DNA, 25 bp, Homo sapien
gcgccaacgcttggcccagtcggtg

SEQ ID NO: 1709004 - DNA, 25 bp, Homo sapien
ctttctcgatgagctggcgccaacg

SEQ ID NO: 1709005 - DNA, 25 bp, Homo sapien
cgcttggcccagtcggtgagctgct

SEQ ID NO: 1709006 - DNA, 25 bp, Homo sapien
atgagctggcgccaacgcttggccc

SEQ ID NO: 1709007 - DNA, 25 bp, Homo sapien
tgatctaggagggaacagcgcctga

SEQ ID NO: 1709008 - DNA, 25 bp, Homo sapien
ggcatggtgcatgcaagtagccggg

SEQ ID NO: 1709009 - DNA, 25 bp, Homo sapien
gggaacagcgcctgaaaatgtcctg

SEQ ID NO: 1709010 - DNA, 25 bp, Homo sapien
aggtaggcctggtttgatctaggag

SEQ ID NO: 1709011 - DNA, 25 bp, Homo sapien
gcctctgtcattatggcaccccagg

SEQ ID NO: 1709012 - DNA, 25 bp, Homo sapien
gcagattgttcttcacctcctggtg

SEQ ID NO: 1709013 - DNA, 25 bp, Homo sapien
ccacccatgatctgcttgtgatagg

SEQ ID NO: 1709014 - DNA, 25 bp, Homo sapien
ccatgatctgcttgtgataggcgtc

SEQ ID NO: 1709015 - DNA, 25 bp, Homo sapien
gcccgtggcagcacccactgagcac

SEQ ID NO: 1709016 - DNA, 25 bp, Homo sapien
cgcccgtggcagcacccactgagca

SEQ ID NO: 1709017 - DNA, 25 bp, Homo sapien
ccgcccgtggcagcacccactgagc

SEQ ID NO: 1709018 - DNA, 25 bp, Homo sapien
cccgcccgtggcagcacccactgag

SEQ ID NO: 1709019 - DNA, 25 bp, Homo sapien
aatgggcactgcctacccatctgtg

SEQ ID NO: 1709020 - DNA, 25 bp, Homo sapien
gggcactgcctacccatctgtgaat

SEQ ID NO: 1709021 - DNA, 25 bp, Homo sapien
tattttttcctggaaggcagtgctg

SEQ ID NO: 1709022 - DNA, 25 bp, Homo sapien
tgcctacccatctgtgaatattttt

SEQ ID NO: 1709023 - DNA, 25 bp, Homo sapien
cctcctgtcaggcagtgcagtgccc

SEQ ID NO: 1709024 - DNA, 25 bp, Homo sapien
tcaggcagtgcagtgcccgccccat

SEQ ID NO: 1709025 - DNA, 25 bp, Homo sapien
tgtcaggcagtgcagtgcccgcccc

SEQ ID NO: 1709026 - DNA, 25 bp, Homo sapien
tcctgtcaggcagtgcagtgcccgc

SEQ ID NO: 1709027 - DNA, 25 bp, Homo sapien
gattgctccgtcttgctgttcatct

SEQ ID NO: 1709028 - DNA, 25 bp, Homo sapien
tctttgcaagccaaatggtaggcct

SEQ ID NO: 1709029 - DNA, 25 bp, Homo sapien
ggtgtgaccgattgctccgtcttgc

SEQ ID NO: 1709030 - DNA, 25 bp, Homo sapien
ctctttgcaagccaaatggtaggcc

SEQ ID NO: 1709031 - DNA, 25 bp, Homo sapien
ctggggtgtggtcttgcccacatct

SEQ ID NO: 1709032 - DNA, 25 bp, Homo sapien
tggggtgtggtcttgcccacatctt

SEQ ID NO: 1709033 - DNA, 25 bp, Homo sapien
agaccagccgcttttcctcaaattg

SEQ ID NO: 1709034 - DNA, 25 bp, Homo sapien
accagccgcttttcctcaaattgct

SEQ ID NO: 1709035 - DNA, 25 bp, Homo sapien
aagaccagccgcttttcctcaaatt

SEQ ID NO: 1709036 - DNA, 25 bp, Homo sapien
gaccagccgcttttcctcaaattgc

SEQ ID NO: 1709037 - DNA, 25 bp, Homo sapien
caggttgaggtgccgtttgatgtcc

SEQ ID NO: 1709038 - DNA, 25 bp, Homo sapien
aggttgaggtgccgtttgatgtcca

SEQ ID NO: 1709039 - DNA, 25 bp, Homo sapien
ggttgaggtgccgtttgatgtccag

SEQ ID NO: 1709040 - DNA, 25 bp, Homo sapien
gcctgtgccctcggtgcctgccatg

SEQ ID NO: 1709041 - DNA, 25 bp, Homo sapien
cctgtgccctcggtgcctgccatgc

SEQ ID NO: 1709042 - DNA, 25 bp, Homo sapien
tgcctgtgccctcggtgcctgccat

SEQ ID NO: 1709043 - DNA, 25 bp, Homo sapien
ctgtgccctcggtgcctgccatgcc

SEQ ID NO: 1709044 - DNA, 25 bp, Homo sapien
agcccctgtgtttgaagcctcatcc

SEQ ID NO: 1709045 - DNA, 25 bp, Homo sapien
ttcccgtcactgtgatggagggctg

SEQ ID NO: 1709046 - DNA, 25 bp, Homo sapien
tctagagtacccagtgtgcgtcagc

SEQ ID NO: 1709047 - DNA, 25 bp, Homo sapien
agcttgcactcaacagcccctgtgt

SEQ ID NO: 1709048 - DNA, 25 bp, Homo sapien
ctgctccagctcacggtacacatgg

SEQ ID NO: 1709049 - DNA, 25 bp, Homo sapien
cagttcatgggcatgccggggccac

SEQ ID NO: 1709050 - DNA, 25 bp, Homo sapien
ctccagctcacggtacacatggatg

SEQ ID NO: 1709051 - DNA, 25 bp, Homo sapien
ggtgctgcggaaccatctgaggtct

SEQ ID NO: 1709052 - DNA, 25 bp, Homo sapien
gtggcattggtcagcgccactccct

SEQ ID NO: 1709053 - DNA, 25 bp, Homo sapien
gccttcttaggctgtttctccttct

SEQ ID NO: 1709054 - DNA, 25 bp, Homo sapien
tctaccgccccagtggcattggtca

SEQ ID NO: 1709055 - DNA, 25 bp, Homo sapien
agcctgggatgtggactctaccgcc

SEQ ID NO: 1709056 - DNA, 25 bp, Homo sapien
gtcatagtcgtagagtgcccgcacg

SEQ ID NO: 1709057 - DNA, 25 bp, Homo sapien
cgtagggctggcctctgtcgtagct

SEQ ID NO: 1709058 - DNA, 25 bp, Homo sapien
cctgctcctggccgtcatagtcgta

SEQ ID NO: 1709059 - DNA, 25 bp, Homo sapien
tctgaccactcggtggcgtagggct

SEQ ID NO: 1709060 - DNA, 25 bp, Homo sapien
tagttggcagggtagaggcccagct

SEQ ID NO: 1709061 - DNA, 25 bp, Homo sapien
tagatagcctccacgtagttggcag

SEQ ID NO: 1709062 - DNA, 25 bp, Homo sapien
agctgcccgctgtccagccgcccac

SEQ ID NO: 1709063 - DNA, 25 bp, Homo sapien
tcgcccagcttggtgagttcgtctc

SEQ ID NO: 1709064 - DNA, 25 bp, Homo sapien
tcaagatgacaatgcgcagccaggt

SEQ ID NO: 1709065 - DNA, 25 bp, Homo sapien
aaagaagggcctgcgtaacagcgtc

SEQ ID NO: 1709066 - DNA, 25 bp, Homo sapien
caggagactctttggtggaacccga

SEQ ID NO: 1709067 - DNA, 25 bp, Homo sapien
taacagcgtcttggtccctcagatg

SEQ ID NO: 1709068 - DNA, 25 bp, Homo sapien
cagagagacatctcaccagactggg

SEQ ID NO: 1709069 - DNA, 25 bp, Homo sapien
aaatgcattcagagccaggcgagac

SEQ ID NO: 1709070 - DNA, 25 bp, Homo sapien
taatgggcttgtgtgacggccctgc

SEQ ID NO: 1709071 - DNA, 25 bp, Homo sapien
aaagcagggcttcacatagaggtaa

SEQ ID NO: 1709072 - DNA, 25 bp, Homo sapien
gcatggtgcagggagacatctgcac

SEQ ID NO: 1709073 - DNA, 25 bp, Homo sapien
accacacctggcatggtgcagggag

SEQ ID NO: 1709074 - DNA, 25 bp, Homo sapien
acatctgcacccctgagttgggcag

SEQ ID NO: 1709075 - DNA, 25 bp, Homo sapien
tctgcacccctgagttgggcagcca

SEQ ID NO: 1709076 - DNA, 25 bp, Homo sapien
cacggtgtcgcggacaggcttggag

SEQ ID NO: 1709077 - DNA, 25 bp, Homo sapien
cgggtctgagcagcgtatcccccag

SEQ ID NO: 1709078 - DNA, 25 bp, Homo sapien
ctacctctcctactttgacatgctg

SEQ ID NO: 1709079 - DNA, 25 bp, Homo sapien
ctcgagagacgggactggagtccca

SEQ ID NO: 1709080 - DNA, 25 bp, Homo sapien
atgagccccgcgtagcctgtgtcct

SEQ ID NO: 1709081 - DNA, 25 bp, Homo sapien
gagccccgcgtagcctgtgtccttt

SEQ ID NO: 1709082 - DNA, 25 bp, Homo sapien
gccatgagccccgcgtagcctgtgt

SEQ ID NO: 1709083 - DNA, 25 bp, Homo sapien
aggccatgagccccgcgtagcctgt

SEQ ID NO: 1709084 - DNA, 25 bp, Homo sapien
ctcgaaggtgctcatttctaagatt

SEQ ID NO: 1709085 - DNA, 25 bp, Homo sapien
cttcccggcccctgaagttggcact

SEQ ID NO: 1709086 - DNA, 25 bp, Homo sapien
tcttcccggcccctgaagttggcac

SEQ ID NO: 1709087 - DNA, 25 bp, Homo sapien
gcgagctaggagtccttcctcaccg

SEQ ID NO: 1709088 - DNA, 25 bp, Homo sapien
ccgattacgggcctgggaaagcgag

SEQ ID NO: 1709089 - DNA, 25 bp, Homo sapien
ttcctcaccgccactgtgtgacagg

SEQ ID NO: 1709090 - DNA, 25 bp, Homo sapien
tgtgtgacaggtctgcatgaggacc

SEQ ID NO: 1709091 - DNA, 25 bp, Homo sapien
gtcctgcgtggcatccctgccatca

SEQ ID NO: 1709092 - DNA, 25 bp, Homo sapien
tcctgcgtggcatccctgccatcac

SEQ ID NO: 1709093 - DNA, 25 bp, Homo sapien
ctggcaggacatggaggaagccaaa

SEQ ID NO: 1709094 - DNA, 25 bp, Homo sapien
agggctcaaggaggtggagggtctg

SEQ ID NO: 1709095 - DNA, 25 bp, Homo sapien
gctggactgtgtggcccccgcaggg

SEQ ID NO: 1709096 - DNA, 25 bp, Homo sapien
ggcagcaagtgcttggtggtgggta

SEQ ID NO: 1709097 - DNA, 25 bp, Homo sapien
gatcctcaaccaaggtgccagtgac

SEQ ID NO: 1709098 - DNA, 25 bp, Homo sapien
aatgactgataactgatcctcaacc

SEQ ID NO: 1709099 - DNA, 25 bp, Homo sapien
tgccagtgacgataacagccaagta

SEQ ID NO: 1709100 - DNA, 25 bp, Homo sapien
caaccaaggtgccagtgacgataac

SEQ ID NO: 1709101 - DNA, 25 bp, Homo sapien
ggaaacgcagcgtgtctttctttat

SEQ ID NO: 1709102 - DNA, 25 bp, Homo sapien
gattaggagtggtcgagtgtaccat

SEQ ID NO: 1709103 - DNA, 25 bp, Homo sapien
ctttctttattgaccctggagggct

SEQ ID NO: 1709104 - DNA, 25 bp, Homo sapien
tgtaccatttcaggaccttgtgtta

SEQ ID NO: 1709105 - DNA, 25 bp, Homo sapien
tacaggaagaaacggtccatttgct

SEQ ID NO: 1709106 - DNA, 25 bp, Homo sapien
tggcactgatggaacgaggcctgaa

SEQ ID NO: 1709107 - DNA, 25 bp, Homo sapien
gaagaaacggtccatttgctcagcc

SEQ ID NO: 1709108 - DNA, 25 bp, Homo sapien
agaaacggtccatttgctcagcccc

SEQ ID NO: 1709109 - DNA, 25 bp, Homo sapien
tgagtgacacccgagatgctgggcg

SEQ ID NO: 1709110 - DNA, 25 bp, Homo sapien
tggcttctctgacatgacgcaaaag

SEQ ID NO: 1709111 - DNA, 25 bp, Homo sapien
caaaagccgtgtcaagagggcagaa

SEQ ID NO: 1709112 - DNA, 25 bp, Homo sapien
tgggcgggtcatgcttcctgcagct

SEQ ID NO: 1709113 - DNA, 25 bp, Homo sapien
tgtcccttcagccagatacacctca

SEQ ID NO: 1709114 - DNA, 25 bp, Homo sapien
ttcagccagatacacctcacccttc

SEQ ID NO: 1709115 - DNA, 25 bp, Homo sapien
cacctcacccttctgttccgagggc

SEQ ID NO: 1709116 - DNA, 25 bp, Homo sapien
agatacacctcacccttctgttccg

SEQ ID NO: 1709117 - DNA, 25 bp, Homo sapien
tgccggagaccacagtagcacgttc

SEQ ID NO: 1709118 - DNA, 25 bp, Homo sapien
tgtcctggccctatgccagctaggc

SEQ ID NO: 1709119 - DNA, 25 bp, Homo sapien
tcttccagatggcaccataaagcca

SEQ ID NO: 1709120 - DNA, 25 bp, Homo sapien
gaggtcttgagacctcggccaccct

SEQ ID NO: 1709121 - DNA, 25 bp, Homo sapien
ctatcgatagatcaggaggcatcat

SEQ ID NO: 1709122 - DNA, 25 bp, Homo sapien
ctgagccctgattgtggacatcctc

SEQ ID NO: 1709123 - DNA, 25 bp, Homo sapien
atctgagccctgattgtggacatcc

SEQ ID NO: 1709124 - DNA, 25 bp, Homo sapien
tctgagccctgattgtggacatcct

SEQ ID NO: 1709125 - DNA, 25 bp, Homo sapien
catctgagccctgattgtggacatc

SEQ ID NO: 1709126 - DNA, 25 bp, Homo sapien
ccgaccgtgtcgtctgatccctgtt

SEQ ID NO: 1709127 - DNA, 25 bp, Homo sapien
accgtgtcgtctgatccctgttcaa

SEQ ID NO: 1709128 - DNA, 25 bp, Homo sapien
tccgtgcccgaccgtgtcgtctgat

SEQ ID NO: 1709129 - DNA, 25 bp, Homo sapien
tgcccgaccgtgtcgtctgatccct

SEQ ID NO: 1709130 - DNA, 25 bp, Homo sapien
gggctgtaacctgtcaaggagtcac

SEQ ID NO: 1709131 - DNA, 25 bp, Homo sapien
ctttggggctgtaacctgtcaagga

SEQ ID NO: 1709132 - DNA, 25 bp, Homo sapien
taacctgtcaaggagtcaccaggcc

SEQ ID NO: 1709133 - DNA, 25 bp, Homo sapien
gctgtaacctgtcaaggagtcacca

SEQ ID NO: 1709134 - DNA, 25 bp, Homo sapien
aatacctccccaaattcaatctgag

SEQ ID NO: 1709135 - DNA, 25 bp, Homo sapien
gaagtgcaagctgattactcacccc

SEQ ID NO: 1709136 - DNA, 25 bp, Homo sapien
tccttgggtgaatgcaggagcagca

SEQ ID NO: 1709137 - DNA, 25 bp, Homo sapien
cagtggtgtgtgtagaaagccagct

SEQ ID NO: 1709138 - DNA, 25 bp, Homo sapien
ccatcaaagttacttccagcctgga

SEQ ID NO: 1709139 - DNA, 25 bp, Homo sapien
ccccataaggactggctgtaacctt

SEQ ID NO: 1709140 - DNA, 25 bp, Homo sapien
gagaacctcaccaaacagctggtgt

SEQ ID NO: 1709141 - DNA, 25 bp, Homo sapien
gactggctgtaaccttaagcccatc

SEQ ID NO: 1709142 - DNA, 25 bp, Homo sapien
tttctgtgcacatgggagtgctcca

SEQ ID NO: 1709143 - DNA, 25 bp, Homo sapien
tgagggcctcattaggcccagactg

SEQ ID NO: 1709144 - DNA, 25 bp, Homo sapien
gcagctgggtctgggacttcactag

SEQ ID NO: 1709145 - DNA, 25 bp, Homo sapien
tactctggagcacctattttctgtg

SEQ ID NO: 1709146 - DNA, 25 bp, Homo sapien
aagaggctgattgactggctgctca

SEQ ID NO: 1709147 - DNA, 25 bp, Homo sapien
gccctggcatcctgtagattctgag

SEQ ID NO: 1709148 - DNA, 25 bp, Homo sapien
gggtgtctgagttccaaaaaatgtg

SEQ ID NO: 1709149 - DNA, 25 bp, Homo sapien
gctgcaaggagtcatatagcctggg

SEQ ID NO: 1709150 - DNA, 25 bp, Homo sapien
gattttctaagcctgagaggtgtcc

SEQ ID NO: 1709151 - DNA, 25 bp, Homo sapien
tgcggatcagtgctacaggagtaca

SEQ ID NO: 1709152 - DNA, 25 bp, Homo sapien
ccttgaggatagatctcgggtgacg

SEQ ID NO: 1709153 - DNA, 25 bp, Homo sapien
catttgtattcgtcaaccctgtggc

SEQ ID NO: 1709154 - DNA, 25 bp, Homo sapien
tcgagtggctgggactataggagcc

SEQ ID NO: 1709155 - DNA, 25 bp, Homo sapien
gagcccgccaccatgcctggctaat

SEQ ID NO: 1709156 - DNA, 25 bp, Homo sapien
ctctcgagtggctgggactatagga

SEQ ID NO: 1709157 - DNA, 25 bp, Homo sapien
catgcctggctaatttttttttgta

SEQ ID NO: 1709158 - DNA, 25 bp, Homo sapien
ggattgtcccacttcattggattga

SEQ ID NO: 1709159 - DNA, 25 bp, Homo sapien
ttcaagggaagtggcacactacatg

SEQ ID NO: 1709160 - DNA, 25 bp, Homo sapien
tcaggctgcctgctattggattgtc

SEQ ID NO: 1709161 - DNA, 25 bp, Homo sapien
gagattgagctttgaacacaggtcc

SEQ ID NO: 1709162 - DNA, 25 bp, Homo sapien
tggcacagcaggaaccttcttctct

SEQ ID NO: 1709163 - DNA, 25 bp, Homo sapien
ctggcacagcaggaaccttcttctc

SEQ ID NO: 1709164 - DNA, 25 bp, Homo sapien
ccttcttctcttcgacaccctccat

SEQ ID NO: 1709165 - DNA, 25 bp, Homo sapien
gcaggaaccttcttctcttcgacac

SEQ ID NO: 1709166 - DNA, 25 bp, Homo sapien
ttcagctctgcaaaattccttcgct

SEQ ID NO: 1709167 - DNA, 25 bp, Homo sapien
tgcaaaattccttcgctttttctta

SEQ ID NO: 1709168 - DNA, 25 bp, Homo sapien
tctttctcaggcgattgatcttcag

SEQ ID NO: 1709169 - DNA, 25 bp, Homo sapien
caggcgattgatcttcagctctgca

SEQ ID NO: 1709170 - DNA, 25 bp, Homo sapien
tgcatctgcttatattccttgtgat

SEQ ID NO: 1709171 - DNA, 25 bp, Homo sapien
tgaatttcagttctgtgcatctgct

SEQ ID NO: 1709172 - DNA, 25 bp, Homo sapien
attccttgtgatagataagcttcct

SEQ ID NO: 1709173 - DNA, 25 bp, Homo sapien
ttgctagtttttcttgccatccttg

SEQ ID NO: 1709174 - DNA, 25 bp, Homo sapien
atcctaatgataaatgccaatttga

SEQ ID NO: 1709175 - DNA, 25 bp, Homo sapien
tcctaatgataaatgccaatttgag

SEQ ID NO: 1709176 - DNA, 25 bp, Homo sapien
aatgataaatgccaatttgagttct

SEQ ID NO: 1709177 - DNA, 25 bp, Homo sapien
ctaatgataaatgccaatttgagtt

SEQ ID NO: 1709178 - DNA, 25 bp, Homo sapien
aaagttccattaaagatttgatgaa

SEQ ID NO: 1709179 - DNA, 25 bp, Homo sapien
tccattaaagatttgatgaaggcaa

SEQ ID NO: 1709180 - DNA, 25 bp, Homo sapien
agttccattaaagatttgatgaagg

SEQ ID NO: 1709181 - DNA, 25 bp, Homo sapien
caaaagttccattaaagatttgatg

SEQ ID NO: 1709182 - DNA, 25 bp, Homo sapien
gttgtctgtcagagcaactcacttc

SEQ ID NO: 1709183 - DNA, 25 bp, Homo sapien
tattaagcgtgttgatctggtccac

SEQ ID NO: 1709184 - DNA, 25 bp, Homo sapien
attaagcgtgttgatctggtccacc

SEQ ID NO: 1709185 - DNA, 25 bp, Homo sapien
ttaagcgtgttgatctggtccaccc

SEQ ID NO: 1709186 - DNA, 25 bp, Homo sapien
ctattaagcgtgttgatctggtcca

SEQ ID NO: 1709187 - DNA, 25 bp, Homo sapien
acaagttaatggaaatcttcatttc

SEQ ID NO: 1709188 - DNA, 25 bp, Homo sapien
ttctcattggcacccccctgagata

SEQ ID NO: 1709189 - DNA, 25 bp, Homo sapien
ccccctgagataatcgggtcagaaa

SEQ ID NO: 1709190 - DNA, 25 bp, Homo sapien
tgagataatcgggtcagaaacctgg

SEQ ID NO: 1709191 - DNA, 25 bp, Homo sapien
accttatatccttctcattggcacc

SEQ ID NO: 1709192 - DNA, 25 bp, Homo sapien
tgcagcccagggtaaaggaactaag

SEQ ID NO: 1709193 - DNA, 25 bp, Homo sapien
gatgtcagcgtccagatgtgcagcc

SEQ ID NO: 1709194 - DNA, 25 bp, Homo sapien
gtgagtatgtccttgtgcagcccag

SEQ ID NO: 1709195 - DNA, 25 bp, Homo sapien
tgatggtgagatcgctagagcccca

SEQ ID NO: 1709196 - DNA, 25 bp, Homo sapien
aacacatagtttggactgacccaat

SEQ ID NO: 1709197 - DNA, 25 bp, Homo sapien
gaaagttcagtgtgtcattgaccaa

SEQ ID NO: 1709198 - DNA, 25 bp, Homo sapien
ttgtggatgactcaggacacctgtg

SEQ ID NO: 1709199 - DNA, 25 bp, Homo sapien
tctcaccttgcttgattttgcctgc

SEQ ID NO: 1709200 - DNA, 25 bp, Homo sapien
tcacttggatagctgatattacata

SEQ ID NO: 1709201 - DNA, 25 bp, Homo sapien
tacatatgtacactgcacatggcct

SEQ ID NO: 1709202 - DNA, 25 bp, Homo sapien
taggatatctgagacattaatacca

SEQ ID NO: 1709203 - DNA, 25 bp, Homo sapien
aatatgggaatttgctcaaaatggg

SEQ ID NO: 1709204 - DNA, 25 bp, Homo sapien
agggagggcacgtgtctcacataag

SEQ ID NO: 1709205 - DNA, 25 bp, Homo sapien
ggagggcacgtgtctcacataagtg

SEQ ID NO: 1709206 - DNA, 25 bp, Homo sapien
cacgtgtctcacataagtgtgaaca

SEQ ID NO: 1709207 - DNA, 25 bp, Homo sapien
gggcacgtgtctcacataagtgtga

SEQ ID NO: 1709208 - DNA, 25 bp, Homo sapien
aaagtctggtggcttttaggaatgt

SEQ ID NO: 1709209 - DNA, 25 bp, Homo sapien
tatagaaagtctggtggcttttagg

SEQ ID NO: 1709210 - DNA, 25 bp, Homo sapien
tcttatagaaagtctggtggctttt

SEQ ID NO: 1709211 - DNA, 25 bp, Homo sapien
tctggtggcttttaggaatgttcat

SEQ ID NO: 1709212 - DNA, 25 bp, Homo sapien
tttgtggggttggtgtttgccatac

SEQ ID NO: 1709213 - DNA, 25 bp, Homo sapien
ctttcttatactgtatcactttgtg

SEQ ID NO: 1709214 - DNA, 25 bp, Homo sapien
tttcttatactgtatcactttgtgg

SEQ ID NO: 1709215 - DNA, 25 bp, Homo sapien
cactttgtggggttggtgtttgcca

SEQ ID NO: 1709216 - DNA, 25 bp, Homo sapien
tggtcctttctcgtcttatcgcctc

SEQ ID NO: 1709217 - DNA, 25 bp, Homo sapien
cagttgggttccatgcactctagcc

SEQ ID NO: 1709218 - DNA, 25 bp, Homo sapien
cacttggtcctttctcgtcttatcg

SEQ ID NO: 1709219 - DNA, 25 bp, Homo sapien
tgtcttagaagctagcattctttta

SEQ ID NO: 1709220 - DNA, 25 bp, Homo sapien
gacgggtaatgtgcacgttatataa

SEQ ID NO: 1709221 - DNA, 25 bp, Homo sapien
aagattcaaggttggcacgtctcat

SEQ ID NO: 1709222 - DNA, 25 bp, Homo sapien
caatcatcacgcatctgaattacaa

SEQ ID NO: 1709223 - DNA, 25 bp, Homo sapien
ggcacgtctcatacatgcatgtaaa

SEQ ID NO: 1709224 - DNA, 25 bp, Homo sapien
tgggcaccaccgacaaggacgtgct

SEQ ID NO: 1709225 - DNA, 25 bp, Homo sapien
gacatgaccaactggtgagccggcc

SEQ ID NO: 1709226 - DNA, 25 bp, Homo sapien
gctcatctccgagttccagaggctg

SEQ ID NO: 1709227 - DNA, 25 bp, Homo sapien
gcttccagctcaatcctgccggttg

SEQ ID NO: 1709228 - DNA, 25 bp, Homo sapien
tccatcgccccgcagcggtgaggtc

SEQ ID NO: 1709229 - DNA, 25 bp, Homo sapien
tcgctccatcgccccgcagcggtga

SEQ ID NO: 1709230 - DNA, 25 bp, Homo sapien
ccatcgccccgcagcggtgaggtca

SEQ ID NO: 1709231 - DNA, 25 bp, Homo sapien
gctccatcgccccgcagcggtgagg

SEQ ID NO: 1709232 - DNA, 25 bp, Homo sapien
taacggctctccttgagggtgggga

SEQ ID NO: 1709233 - DNA, 25 bp, Homo sapien
cgcagccccaggctttaacggctct

SEQ ID NO: 1709234 - DNA, 25 bp, Homo sapien
gaaaatccctcaacttctcccgcag

SEQ ID NO: 1709235 - DNA, 25 bp, Homo sapien
ggagtaatggtctggccagaagcct

SEQ ID NO: 1709236 - DNA, 25 bp, Homo sapien
tccttcaagcgcgagtggcagactc

SEQ ID NO: 1709237 - DNA, 25 bp, Homo sapien
gaaagcagctcttcaaacacgtcct

SEQ ID NO: 1709238 - DNA, 25 bp, Homo sapien
cagggaatcaagactttaaggcagc

SEQ ID NO: 1709239 - DNA, 25 bp, Homo sapien
tatcttccggagacacgatgctacc

SEQ ID NO: 1709240 - DNA, 25 bp, Homo sapien
tcccctatgccacccggcaggaaag

SEQ ID NO: 1709241 - DNA, 25 bp, Homo sapien
ttgggatagtagttcttgttaagct

SEQ ID NO: 1709242 - DNA, 25 bp, Homo sapien
tcaggaaattgggatagtagttctt

SEQ ID NO: 1709243 - DNA, 25 bp, Homo sapien
tatgccacccggcaggaaagcagtc

SEQ ID NO: 1709244 - DNA, 25 bp, Homo sapien
tgttgtcccgttcagaaactgctgg

SEQ ID NO: 1709245 - DNA, 25 bp, Homo sapien
tgatgccaatgttgtcccgttcaga

SEQ ID NO: 1709246 - DNA, 25 bp, Homo sapien
tgccaatgttgtcccgttcagaaac

SEQ ID NO: 1709247 - DNA, 25 bp, Homo sapien
ctctgtaatgtacaggttgatgagg

SEQ ID NO: 1709248 - DNA, 25 bp, Homo sapien
ggaatggggcactggtgtgtatcca

SEQ ID NO: 1709249 - DNA, 25 bp, Homo sapien
tctccaggatgactggaatggggca

SEQ ID NO: 1709250 - DNA, 25 bp, Homo sapien
aatggggcactggtgtgtatccaag

SEQ ID NO: 1709251 - DNA, 25 bp, Homo sapien
gtgtgtatccaaggcgtgccacacc

SEQ ID NO: 1709252 - DNA, 25 bp, Homo sapien
aggatggattccttggcacagtgtc

SEQ ID NO: 1709253 - DNA, 25 bp, Homo sapien
gtttgatctgtaacttagtgggagc

SEQ ID NO: 1709254 - DNA, 25 bp, Homo sapien
ggagcaatcgattaaggtaactcac

SEQ ID NO: 1709255 - DNA, 25 bp, Homo sapien
agtgggagcaatcgattaaggtaac

SEQ ID NO: 1709256 - DNA, 25 bp, Homo sapien
cttagtgggagcaatcgattaaggt

SEQ ID NO: 1709257 - DNA, 25 bp, Homo sapien
tccgggtgcttaggcatgtggacat

SEQ ID NO: 1709258 - DNA, 25 bp, Homo sapien
atggcaatccggttcttcttaggca

SEQ ID NO: 1709259 - DNA, 25 bp, Homo sapien
caccatgactcccttcttaaaaagg

SEQ ID NO: 1709260 - DNA, 25 bp, Homo sapien
tcataaatggcaatccggttcttct

SEQ ID NO: 1709261 - DNA, 25 bp, Homo sapien
tctctggatgcctacggcgtagggt

SEQ ID NO: 1709262 - DNA, 25 bp, Homo sapien
gccagtctctggatgcctacggcgt

SEQ ID NO: 1709263 - DNA, 25 bp, Homo sapien
cagtctctggatgcctacggcgtag

SEQ ID NO: 1709264 - DNA, 25 bp, Homo sapien
tctggatgcctacggcgtagggtgg

SEQ ID NO: 1709265 - DNA, 25 bp, Homo sapien
agcttcccatcttgtgagtctcgca

SEQ ID NO: 1709266 - DNA, 25 bp, Homo sapien
cagcttcccatcttgtgagtctcgc

SEQ ID NO: 1709267 - DNA, 25 bp, Homo sapien
atcttgtgagtctcgcaggttgctc

SEQ ID NO: 1709268 - DNA, 25 bp, Homo sapien
cccatcttgtgagtctcgcaggttg

SEQ ID NO: 1709269 - DNA, 25 bp, Homo sapien
agccccagactcggctttcttgtcg

SEQ ID NO: 1709270 - DNA, 25 bp, Homo sapien
ccaggtggcacagcactctgtctgt

SEQ ID NO: 1709271 - DNA, 25 bp, Homo sapien
tatgtccacaaccaaatccgcctct

SEQ ID NO: 1709272 - DNA, 25 bp, Homo sapien
ccagactcggctttcttgtcggcac

SEQ ID NO: 1709273 - DNA, 25 bp, Homo sapien
tttggttgtaagtttattcaacgca

SEQ ID NO: 1709274 - DNA, 25 bp, Homo sapien
caacgcaaaagaatcctctccaatt

SEQ ID NO: 1709275 - DNA, 25 bp, Homo sapien
ttgtaagtttattcaacgcaaaaga

SEQ ID NO: 1709276 - DNA, 25 bp, Homo sapien
tcaacgcaaaagaatcctctccaat

SEQ ID NO: 1709277 - DNA, 25 bp, Homo sapien
tctacattctatttaacctctgggc

SEQ ID NO: 1709278 - DNA, 25 bp, Homo sapien
tcagcaagctgggacattgaagggt

SEQ ID NO: 1709279 - DNA, 25 bp, Homo sapien
ggtctattgatttgcctctaccaag

SEQ ID NO: 1709280 - DNA, 25 bp, Homo sapien
aaattcttccagtaggccgggtgtg

SEQ ID NO: 1709281 - DNA, 25 bp, Homo sapien
gggccgctacgaggttcaatccaag

SEQ ID NO: 1709282 - DNA, 25 bp, Homo sapien
taatcttgtttgtcggtgcttccgg

SEQ ID NO: 1709283 - DNA, 25 bp, Homo sapien
taatgattctctgctacgcgcctgg

SEQ ID NO: 1709284 - DNA, 25 bp, Homo sapien
gatactaaaaccaacaggagccggc

SEQ ID NO: 1709285 - DNA, 25 bp, Homo sapien
ggaaccccacgagactagcatgaag

SEQ ID NO: 1709286 - DNA, 25 bp, Homo sapien
tccgttacgtgacgcccggaaatga

SEQ ID NO: 1709287 - DNA, 25 bp, Homo sapien
agcatgaagacttccgaagccctcg

SEQ ID NO: 1709288 - DNA, 25 bp, Homo sapien
ggaaatgacgcgcacagccagcgac

SEQ ID NO: 1709289 - DNA, 25 bp, Homo sapien
tttgttgccttaagcgggatccatc

SEQ ID NO: 1709290 - DNA, 25 bp, Homo sapien
actacgatcaccctcagatttcggg

SEQ ID NO: 1709291 - DNA, 25 bp, Homo sapien
gtttcagaaaccagaacccgctctc

SEQ ID NO: 1709292 - DNA, 25 bp, Homo sapien
gcgtcgacacataaaccaggctttt

SEQ ID NO: 1709293 - DNA, 25 bp, Homo sapien
gcccatccacggaagcgctgttcat

SEQ ID NO: 1709294 - DNA, 25 bp, Homo sapien
cactgagatgcccatccacggaagc

SEQ ID NO: 1709295 - DNA, 25 bp, Homo sapien
gaagagaaaaagacgacaaccactg

SEQ ID NO: 1709296 - DNA, 25 bp, Homo sapien
gagaaaaagacgacaaccactgaga

SEQ ID NO: 1709297 - DNA, 25 bp, Homo sapien
tgtatcgcagtagtcacaataaaac

SEQ ID NO: 1709298 - DNA, 25 bp, Homo sapien
tcatgggtgaggtatgtatcgcagt

SEQ ID NO: 1709299 - DNA, 25 bp, Homo sapien
aggtatgtatcgcagtagtcacaat

SEQ ID NO: 1709300 - DNA, 25 bp, Homo sapien
tatgtatcgcagtagtcacaataaa

SEQ ID NO: 1709301 - DNA, 25 bp, Homo sapien
aactatgaatagatatgccacttac

SEQ ID NO: 1709302 - DNA, 25 bp, Homo sapien
ggaaagcacaacttgcaacttaaaa

SEQ ID NO: 1709303 - DNA, 25 bp, Homo sapien
gggaaagcacaacttgcaacttaaa

SEQ ID NO: 1709304 - DNA, 25 bp, Homo sapien
ttgaaactatgaatagatatgccac

SEQ ID NO: 1709305 - DNA, 25 bp, Homo sapien
cactgcagtgtgtctttctcacaga

SEQ ID NO: 1709306 - DNA, 25 bp, Homo sapien
tccttccactgcagtgtgtctttct

SEQ ID NO: 1709307 - DNA, 25 bp, Homo sapien
tgcagtgtgtctttctcacagatgg

SEQ ID NO: 1709308 - DNA, 25 bp, Homo sapien
ccatttctgataatagtctttcaca

SEQ ID NO: 1709309 - DNA, 25 bp, Homo sapien
tcaggctctgagcctgctcttccat

SEQ ID NO: 1709310 - DNA, 25 bp, Homo sapien
ttgttttgtcaatcaggctctgagc

SEQ ID NO: 1709311 - DNA, 25 bp, Homo sapien
gttttgtcaatcaggctctgagcct

SEQ ID NO: 1709312 - DNA, 25 bp, Homo sapien
aatcaggctctgagcctgctcttcc

SEQ ID NO: 1709313 - DNA, 25 bp, Homo sapien
cacagcagaacaagagattgaaaca

SEQ ID NO: 1709314 - DNA, 25 bp, Homo sapien
agcagaacaagagattgaaacatac

SEQ ID NO: 1709315 - DNA, 25 bp, Homo sapien
acagcagaacaagagattgaaacat

SEQ ID NO: 1709316 - DNA, 25 bp, Homo sapien
cagcagaacaagagattgaaacata

SEQ ID NO: 1709317 - DNA, 25 bp, Homo sapien
tggagtaggaggtatctttccttgt

SEQ ID NO: 1709318 - DNA, 25 bp, Homo sapien
cagagaatggagtaggaggtatctt

SEQ ID NO: 1709319 - DNA, 25 bp, Homo sapien
gaggagcagagaatggagtaggagg

SEQ ID NO: 1709320 - DNA, 25 bp, Homo sapien
taggaggtatctttccttgttgaaa

SEQ ID NO: 1709321 - DNA, 25 bp, Homo sapien
ggctggggggaggtggtatcatcgc

SEQ ID NO: 1709322 - DNA, 25 bp, Homo sapien
aaggctggggggaggtggtatcatc

SEQ ID NO: 1709323 - DNA, 25 bp, Homo sapien
gaaggctggggggaggtggtatcat

SEQ ID NO: 1709324 - DNA, 25 bp, Homo sapien
ctggggggaggtggtatcatcgccc

SEQ ID NO: 1709325 - DNA, 25 bp, Homo sapien
ccatatggggtgctggcatcatacc

SEQ ID NO: 1709326 - DNA, 25 bp, Homo sapien
ctggcatcataccagggcgaggagg

SEQ ID NO: 1709327 - DNA, 25 bp, Homo sapien
gggtgctggcatcataccagggcga

SEQ ID NO: 1709328 - DNA, 25 bp, Homo sapien
atcataccagggcgaggaggacccg

SEQ ID NO: 1709329 - DNA, 25 bp, Homo sapien
caagctttggctacacatactgact

SEQ ID NO: 1709330 - DNA, 25 bp, Homo sapien
taaacaagcaacaagaagtggctct

SEQ ID NO: 1709331 - DNA, 25 bp, Homo sapien
tagtagcacgaggtcactggacacc

SEQ ID NO: 1709332 - DNA, 25 bp, Homo sapien
gtggctctgctccaaatcaaaactg

SEQ ID NO: 1709333 - DNA, 25 bp, Homo sapien
catgctgagaacctgttagtaacca

SEQ ID NO: 1709334 - DNA, 25 bp, Homo sapien
cccatgctgagaacctgttagtaac

SEQ ID NO: 1709335 - DNA, 25 bp, Homo sapien
cactaagcgtttgttcggagttgta

SEQ ID NO: 1709336 - DNA, 25 bp, Homo sapien
tgtaggaaaggtgagcaggaggccc

SEQ ID NO: 1709337 - DNA, 25 bp, Homo sapien
agggagtcagaaaatacgatttagg

SEQ ID NO: 1709338 - DNA, 25 bp, Homo sapien
aagggagtcagaaaatacgatttag

SEQ ID NO: 1709339 - DNA, 25 bp, Homo sapien
tggtcgagtcattccgggccgagtg

SEQ ID NO: 1709340 - DNA, 25 bp, Homo sapien
ggtcgagtcattccgggccgagtgg

SEQ ID NO: 1709341 - DNA, 25 bp, Homo sapien
ctggtcgagtcattccgggccgagt

SEQ ID NO: 1709342 - DNA, 25 bp, Homo sapien
gtcgagtcattccgggccgagtggg

SEQ ID NO: 1709343 - DNA, 25 bp, Homo sapien
tttcataggacaggggagcaagtct

SEQ ID NO: 1709344 - DNA, 25 bp, Homo sapien
tctttcataggacaggggagcaagt

SEQ ID NO: 1709345 - DNA, 25 bp, Homo sapien
cgatacaataaggcctcccctctat

SEQ ID NO: 1709346 - DNA, 25 bp, Homo sapien
accgatacaataaggcctcccctct

SEQ ID NO: 1709347 - DNA, 25 bp, Homo sapien
ataatacacagagaacacagagagg

SEQ ID NO: 1709348 - DNA, 25 bp, Homo sapien
gagaacacagagaggaggaaaaagg

SEQ ID NO: 1709349 - DNA, 25 bp, Homo sapien
cagagaggaggaaaaagggaacaca

SEQ ID NO: 1709350 - DNA, 25 bp, Homo sapien
tacacagagaacacagagaggagga

SEQ ID NO: 1709351 - DNA, 25 bp, Homo sapien
ggagtggtgatgactattaacggac

SEQ ID NO: 1709352 - DNA, 25 bp, Homo sapien
gactattaacggacatgctgccttc

SEQ ID NO: 1709353 - DNA, 25 bp, Homo sapien
gatgactattaacggacatgctgcc

SEQ ID NO: 1709354 - DNA, 25 bp, Homo sapien
gtgatgactattaacggacatgctg

SEQ ID NO: 1709355 - DNA, 25 bp, Homo sapien
gcggcgtgagcaccggacacagccg

SEQ ID NO: 1709356 - DNA, 25 bp, Homo sapien
ccacccgccggccttgcttgcggcg

SEQ ID NO: 1709357 - DNA, 25 bp, Homo sapien
agagcgacgcgaagatcgcgcgcca

SEQ ID NO: 1709358 - DNA, 25 bp, Homo sapien
tcgcccctctttgggcgcctggcgc

SEQ ID NO: 1709359 - DNA, 25 bp, Homo sapien
gcagctgtggcctcctcagttgtgg

SEQ ID NO: 1709360 - DNA, 25 bp, Homo sapien
cgcggcccgcgtggaaggcgggtgg

SEQ ID NO: 1709361 - DNA, 25 bp, Homo sapien
gtggaaggcgggtgggccggcagct

SEQ ID NO: 1709362 - DNA, 25 bp, Homo sapien
cagttgtggagaagaggcggtcccc

SEQ ID NO: 1709363 - DNA, 25 bp, Homo sapien
ggatctgcttcttaatgatcccggc

SEQ ID NO: 1709364 - DNA, 25 bp, Homo sapien
tctgcttcttaatgatcccggccat

SEQ ID NO: 1709365 - DNA, 25 bp, Homo sapien
cgggacaggtgtttcaggatctgct

SEQ ID NO: 1709366 - DNA, 25 bp, Homo sapien
gggacaggtgtttcaggatctgctt

SEQ ID NO: 1709367 - DNA, 25 bp, Homo sapien
ttatttagaacgggcaggggcatag

SEQ ID NO: 1709368 - DNA, 25 bp, Homo sapien
tatttagaacgggcaggggcatagg

SEQ ID NO: 1709369 - DNA, 25 bp, Homo sapien
tttagaacgggcaggggcataggat

SEQ ID NO: 1709370 - DNA, 25 bp, Homo sapien
atttagaacgggcaggggcatagga

SEQ ID NO: 1709371 - DNA, 25 bp, Homo sapien
tggttgtgacaacctgcaatcgcaa

SEQ ID NO: 1709372 - DNA, 25 bp, Homo sapien
gcagtcactcggctacacctgaaaa

SEQ ID NO: 1709373 - DNA, 25 bp, Homo sapien
tcagtgcaagcctgggtgtcccatg

SEQ ID NO: 1709374 - DNA, 25 bp, Homo sapien
taatctgagtaaaaggtccaaaggc

SEQ ID NO: 1709375 - DNA, 25 bp, Homo sapien
acaaagcaagtatgaaactatttca

SEQ ID NO: 1709376 - DNA, 25 bp, Homo sapien
caaagcaagtatgaaactatttcat

SEQ ID NO: 1709377 - DNA, 25 bp, Homo sapien
aaaatgctatgccaatggggcaaga

SEQ ID NO: 1709378 - DNA, 25 bp, Homo sapien
caatggggcaagattacaaagcaag

SEQ ID NO: 1709379 - DNA, 25 bp, Homo sapien
gggaacaagctgagccctatctaga

SEQ ID NO: 1709380 - DNA, 25 bp, Homo sapien
tacaaaaggcctccatgatctagct

SEQ ID NO: 1709381 - DNA, 25 bp, Homo sapien
cagtatcattgttcatgcggctccc

SEQ ID NO: 1709382 - DNA, 25 bp, Homo sapien
taaagacgctaggaagctcacctgg

SEQ ID NO: 1709383 - DNA, 25 bp, Homo sapien
tttataaggtatctcagaagtggtt

SEQ ID NO: 1709384 - DNA, 25 bp, Homo sapien
aataaatttataaggtatctcagaa

SEQ ID NO: 1709385 - DNA, 25 bp, Homo sapien
aaatttataaggtatctcagaagtg

SEQ ID NO: 1709386 - DNA, 25 bp, Homo sapien
aatttataaggtatctcagaagtgg

SEQ ID NO: 1709387 - DNA, 25 bp, Homo sapien
aagaaaagaaagtgagatagacgtt

SEQ ID NO: 1709388 - DNA, 25 bp, Homo sapien
tgagaaccactaagataaactgctc

SEQ ID NO: 1709389 - DNA, 25 bp, Homo sapien
agatagacgttttcaaactgatgac

SEQ ID NO: 1709390 - DNA, 25 bp, Homo sapien
gagaaccactaagataaactgctct

SEQ ID NO: 1709391 - DNA, 25 bp, Homo sapien
gaattcttgtagaagtgagccactg

SEQ ID NO: 1709392 - DNA, 25 bp, Homo sapien
gactgcaactacatgtctcctcctg

SEQ ID NO: 1709393 - DNA, 25 bp, Homo sapien
gggaagccatatcaattcagaaatt

SEQ ID NO: 1709394 - DNA, 25 bp, Homo sapien
tgtccaaccgcacagattctgataa

SEQ ID NO: 1709395 - DNA, 25 bp, Homo sapien
aacaggcagaatgagttttgaagac

SEQ ID NO: 1709396 - DNA, 25 bp, Homo sapien
gaaaactgtaactggggttgtgatc

SEQ ID NO: 1709397 - DNA, 25 bp, Homo sapien
agaaaactgtaactggggttgtgat

SEQ ID NO: 1709398 - DNA, 25 bp, Homo sapien
tagacccgagtgatggctaaccagg

SEQ ID NO: 1709399 - DNA, 25 bp, Homo sapien
ggccctgttgcagtagacccgagtg

SEQ ID NO: 1709400 - DNA, 25 bp, Homo sapien
gatggaggccctgttgcagtagacc

SEQ ID NO: 1709401 - DNA, 25 bp, Homo sapien
gtctggggaaagattcttagtgaac

SEQ ID NO: 1709402 - DNA, 25 bp, Homo sapien
tgtggtagctgaccctccagaaagc

SEQ ID NO: 1709403 - DNA, 25 bp, Homo sapien
ctccagaaagcaggcctactggcca

SEQ ID NO: 1709404 - DNA, 25 bp, Homo sapien
aggcctactggccaaagagaacagc

SEQ ID NO: 1709405 - DNA, 25 bp, Homo sapien
aaagcaaagtctcagggctgtggta

SEQ ID NO: 1709406 - DNA, 25 bp, Homo sapien
gcaaatagggtgtgtcttcaacttt

SEQ ID NO: 1709407 - DNA, 25 bp, Homo sapien
caagcaaatagggtgtgtcttcaac

SEQ ID NO: 1709408 - DNA, 25 bp, Homo sapien
aaatagggtgtgtcttcaactttgt

SEQ ID NO: 1709409 - DNA, 25 bp, Homo sapien
gtgtcttcaactttgtccactggat

SEQ ID NO: 1709410 - DNA, 25 bp, Homo sapien
gaggatcctcacatgtcttcatctc

SEQ ID NO: 1709411 - DNA, 25 bp, Homo sapien
cattggggggccgaggatcctcaca

SEQ ID NO: 1709412 - DNA, 25 bp, Homo sapien
gggccgaggatcctcacatgtcttc

SEQ ID NO: 1709413 - DNA, 25 bp, Homo sapien
gaagcaagggcaatgggagactgtc

SEQ ID NO: 1709414 - DNA, 25 bp, Homo sapien
caccttttcggcaaagccatattca

SEQ ID NO: 1709415 - DNA, 25 bp, Homo sapien
cgggtaaggcgaaggtcactctgct

SEQ ID NO: 1709416 - DNA, 25 bp, Homo sapien
gggttgacactatagccctggagct

SEQ ID NO: 1709417 - DNA, 25 bp, Homo sapien
cgtggaaggccttggagtgaatctt

SEQ ID NO: 1709418 - DNA, 25 bp, Homo sapien
ttttgagggctatttggatcctgcc

SEQ ID NO: 1709419 - DNA, 25 bp, Homo sapien
atctgcctcaattcggagtgtttgc

SEQ ID NO: 1709420 - DNA, 25 bp, Homo sapien
gttcgtaataagcctcaatggagtg

SEQ ID NO: 1709421 - DNA, 25 bp, Homo sapien
gatcaccattgtctgtagcatctgc

SEQ ID NO: 1709422 - DNA, 25 bp, Homo sapien
tcagcttggaggatatcacattgca

SEQ ID NO: 1709423 - DNA, 25 bp, Homo sapien
gaacatcagcttggaggatatcaca

SEQ ID NO: 1709424 - DNA, 25 bp, Homo sapien
acaggaacatcagcttggaggatat

SEQ ID NO: 1709425 - DNA, 25 bp, Homo sapien
gaggatatcacattgcaatctttgg

SEQ ID NO: 1709426 - DNA, 25 bp, Homo sapien
aggctctttctttgatgggctgact

SEQ ID NO: 1709427 - DNA, 25 bp, Homo sapien
gcatacttcatcatagccttgagct

SEQ ID NO: 1709428 - DNA, 25 bp, Homo sapien
tcagtgactctgcatacttcatcat

SEQ ID NO: 1709429 - DNA, 25 bp, Homo sapien
tctttctttgatgggctgacttctc

SEQ ID NO: 1709430 - DNA, 25 bp, Homo sapien
tggtaggaggactctttcacatcaa

SEQ ID NO: 1709431 - DNA, 25 bp, Homo sapien
tgccaccaaatgcctgggcccagga

SEQ ID NO: 1709432 - DNA, 25 bp, Homo sapien
tcacaaatgtgcaggtccaggcggg

SEQ ID NO: 1709433 - DNA, 25 bp, Homo sapien
ctggctctcgggactggctatcatc

SEQ ID NO: 1709434 - DNA, 25 bp, Homo sapien
gcctggccagtgaatctagatctta

SEQ ID NO: 1709435 - DNA, 25 bp, Homo sapien
aagcctttagagaagataagccagc

SEQ ID NO: 1709436 - DNA, 25 bp, Homo sapien
tttgagcctgacaacaacttttgag

SEQ ID NO: 1709437 - DNA, 25 bp, Homo sapien
taagcatcaggattgcctaaggaac

SEQ ID NO: 1709438 - DNA, 25 bp, Homo sapien
cccgcttcagtctgagtggctggga

SEQ ID NO: 1709439 - DNA, 25 bp, Homo sapien
agagcaacctctgccaagcgatcct

SEQ ID NO: 1709440 - DNA, 25 bp, Homo sapien
ttgatttctttttggagattgggtc

SEQ ID NO: 1709441 - DNA, 25 bp, Homo sapien
gctcagagcaacctctgccaagcga

SEQ ID NO: 1709442 - DNA, 25 bp, Homo sapien
agtgctgaccccaatgaaccatcca

SEQ ID NO: 1709443 - DNA, 25 bp, Homo sapien
gatcatttcacctctaatacccagg

SEQ ID NO: 1709444 - DNA, 25 bp, Homo sapien
ccaggcggcttaggcgagaagatta

SEQ ID NO: 1709445 - DNA, 25 bp, Homo sapien
agcagttccaacatccaggtgtggc

SEQ ID NO: 1709446 - DNA, 25 bp, Homo sapien
ccagaataggcaaatatcaaaaata

SEQ ID NO: 1709447 - DNA, 25 bp, Homo sapien
tatacaaccctatgaatatatcaaa

SEQ ID NO: 1709448 - DNA, 25 bp, Homo sapien
caaaatacactgagttatatattgt

SEQ ID NO: 1709449 - DNA, 25 bp, Homo sapien
tagattattgagatcgttatacaac

SEQ ID NO: 1709450 - DNA, 25 bp, Homo sapien
accacccatgagtctgttggcagag

SEQ ID NO: 1709451 - DNA, 25 bp, Homo sapien
tcttgcggaaggtaagctgcatggc

SEQ ID NO: 1709452 - DNA, 25 bp, Homo sapien
tgcatggcaccacccatgagtctgt

SEQ ID NO: 1709453 - DNA, 25 bp, Homo sapien
tgcccaatggaaagggtaatagtca

SEQ ID NO: 1709454 - DNA, 25 bp, Homo sapien
tatgcgagaattggccccattcaga

SEQ ID NO: 1709455 - DNA, 25 bp, Homo sapien
tctggcaacctcctgttaagcggtc

SEQ ID NO: 1709456 - DNA, 25 bp, Homo sapien
agtttccagacgtcctcttgaagag

SEQ ID NO: 1709457 - DNA, 25 bp, Homo sapien
gggatatttccagcacccctctgag

SEQ ID NO: 1709458 - DNA, 25 bp, Homo sapien
gagtctactccaaggtgccagggtg

SEQ ID NO: 1709459 - DNA, 25 bp, Homo sapien
cagtggcgtacccaatgtttgcagc

SEQ ID NO: 1709460 - DNA, 25 bp, Homo sapien
cttttctccgaaagagagagtctac

SEQ ID NO: 1709461 - DNA, 25 bp, Homo sapien
gtctccatggcctcacagtggcgta

SEQ ID NO: 1709462 - DNA, 25 bp, Homo sapien
atccacccgtaccaccatgcagcta

SEQ ID NO: 1709463 - DNA, 25 bp, Homo sapien
cgtaagcggttccatgctggaggct

SEQ ID NO: 1709464 - DNA, 25 bp, Homo sapien
gaggggcttctctcaagagggttct

SEQ ID NO: 1709465 - DNA, 25 bp, Homo sapien
caccatgcagctagagcgtaagcgg

SEQ ID NO: 1709466 - DNA, 25 bp, Homo sapien
gaagtttccgactgcaggaaaggag

SEQ ID NO: 1709467 - DNA, 25 bp, Homo sapien
ggaggttgtgaagtttccgactgca

SEQ ID NO: 1709468 - DNA, 25 bp, Homo sapien
caggaaaggagtgtagatggctttt

SEQ ID NO: 1709469 - DNA, 25 bp, Homo sapien
ccgactgcaggaaaggagtgtagat

SEQ ID NO: 1709470 - DNA, 25 bp, Homo sapien
ctggaagctcctgattatctgggaa

SEQ ID NO: 1709471 - DNA, 25 bp, Homo sapien
tgaactcaatatgaatggcagagac

SEQ ID NO: 1709472 - DNA, 25 bp, Homo sapien
tactctgtgaactcaatatgaatgg

SEQ ID NO: 1709473 - DNA, 25 bp, Homo sapien
tctgggaagtaatactctgtgaact

SEQ ID NO: 1709474 - DNA, 25 bp, Homo sapien
tcaaccagaatgcatctagtcggat

SEQ ID NO: 1709475 - DNA, 25 bp, Homo sapien
caggatccatagtaaatgtcagacc

SEQ ID NO: 1709476 - DNA, 25 bp, Homo sapien
cccagagcaaactgacaggatccat

SEQ ID NO: 1709477 - DNA, 25 bp, Homo sapien
gaactgctccaagctgcggtataaa

SEQ ID NO: 1709478 - DNA, 25 bp, Homo sapien
gaggtctgaacaactacaatgtgga

SEQ ID NO: 1709479 - DNA, 25 bp, Homo sapien
tcatgcctgacgcagagaagacaag

SEQ ID NO: 1709480 - DNA, 25 bp, Homo sapien
tggaatgaaagaactcagcagcagc

SEQ ID NO: 1709481 - DNA, 25 bp, Homo sapien
cacctggaaccttaggaaagtgatc

SEQ ID NO: 1709482 - DNA, 25 bp, Homo sapien
gggagggagggtattaggctgaggc

SEQ ID NO: 1709483 - DNA, 25 bp, Homo sapien
ggagggagggtattaggctgaggca

SEQ ID NO: 1709484 - DNA, 25 bp, Homo sapien
taaagtggacagaccagagatccca

SEQ ID NO: 1709485 - DNA, 25 bp, Homo sapien
cagaggccctttgttgtccatacca

SEQ ID NO: 1709486 - DNA, 25 bp, Homo sapien
ggcaagagcctcagactggacagga

SEQ ID NO: 1709487 - DNA, 25 bp, Homo sapien
caaaagaagcttccgtgcctgggct

SEQ ID NO: 1709488 - DNA, 25 bp, Homo sapien
ggaggtcattcgatctctgcccaaa

SEQ ID NO: 1709489 - DNA, 25 bp, Homo sapien
ggcatccttagtcagggacacagct

SEQ ID NO: 1709490 - DNA, 25 bp, Homo sapien
tccatggtggcatgtagagcctcct

SEQ ID NO: 1709491 - DNA, 25 bp, Homo sapien
tcttggcctgtagggactctactgc

SEQ ID NO: 1709492 - DNA, 25 bp, Homo sapien
ccaaggcaggcagatggcttgaatc

SEQ ID NO: 1709493 - DNA, 25 bp, Homo sapien
tcatggagaaaaatcggagtcgtgc

SEQ ID NO: 1709494 - DNA, 25 bp, Homo sapien
aaatcggagtcgtgcagcacctcca

SEQ ID NO: 1709495 - DNA, 25 bp, Homo sapien
gagaaaaatcggagtcgtgcagcac

SEQ ID NO: 1709496 - DNA, 25 bp, Homo sapien
caccccctcatctgtcttggccatg

SEQ ID NO: 1709497 - DNA, 25 bp, Homo sapien
cagactccaagagcatcacaaagct

SEQ ID NO: 1709498 - DNA, 25 bp, Homo sapien
caaatgactgttgagataccgtcct

SEQ ID NO: 1709499 - DNA, 25 bp, Homo sapien
agggccactgctatccaatgagaca

SEQ ID NO: 1709500 - DNA, 25 bp, Homo sapien
actgaaatccggtcttcagggccac

SEQ ID NO: 1709501 - DNA, 25 bp, Homo sapien
aaacggttaggatggcaaatttcat

SEQ ID NO: 1709502 - DNA, 25 bp, Homo sapien
taaagtgtaatgacatttgatccca

SEQ ID NO: 1709503 - DNA, 25 bp, Homo sapien
tgaggatataccaagtggaataagc

SEQ ID NO: 1709504 - DNA, 25 bp, Homo sapien
cagagtttctgtttcgcaagaagaa

SEQ ID NO: 1709505 - DNA, 25 bp, Homo sapien
ttattcacaagagggctcccttgaa

SEQ ID NO: 1709506 - DNA, 25 bp, Homo sapien
ggtcttctccactgggtgaaactga

SEQ ID NO: 1709507 - DNA, 25 bp, Homo sapien
cccctggccataattattcacaaga

SEQ ID NO: 1709508 - DNA, 25 bp, Homo sapien
tgacccctggccataattattcaca

SEQ ID NO: 1709509 - DNA, 25 bp, Homo sapien
gcaggaactgccagagtcccacggt

SEQ ID NO: 1709510 - DNA, 25 bp, Homo sapien
tccatgcaggaactgccagagtccc

SEQ ID NO: 1709511 - DNA, 25 bp, Homo sapien
tcaatcccaaaagacacctcattca

SEQ ID NO: 1709512 - DNA, 25 bp, Homo sapien
agtcaggtcctcaccacgtacctca

SEQ ID NO: 1709513 - DNA, 25 bp, Homo sapien
tgatgtggccagtcttcaaagttga

SEQ ID NO: 1709514 - DNA, 25 bp, Homo sapien
ctgatgtggccagtcttcaaagttg

SEQ ID NO: 1709515 - DNA, 25 bp, Homo sapien
gatgtggccagtcttcaaagttgag

SEQ ID NO: 1709516 - DNA, 25 bp, Homo sapien
atgtggccagtcttcaaagttgagg

SEQ ID NO: 1709517 - DNA, 25 bp, Homo sapien
ctgagcactgaagtgagcagctcga

SEQ ID NO: 1709518 - DNA, 25 bp, Homo sapien
gggactaccaccgggatctcctcat

SEQ ID NO: 1709519 - DNA, 25 bp, Homo sapien
acctcaaagcgaaggcccacagctg

SEQ ID NO: 1709520 - DNA, 25 bp, Homo sapien
gagttcagaagctcaatctgcatgg

SEQ ID NO: 1709521 - DNA, 25 bp, Homo sapien
tcctcttcagcacaacatgttccat

SEQ ID NO: 1709522 - DNA, 25 bp, Homo sapien
tcttcagcacaacatgttccatggc

SEQ ID NO: 1709523 - DNA, 25 bp, Homo sapien
cgcctatgtggaacacaccatcatc

SEQ ID NO: 1709524 - DNA, 25 bp, Homo sapien
cctggagatgttggatagatggggg

SEQ ID NO: 1709525 - DNA, 25 bp, Homo sapien
ctgttcaaaaacctctcctgtgggc

SEQ ID NO: 1709526 - DNA, 25 bp, Homo sapien
gtacttcagctgatggtttgtcctg

SEQ ID NO: 1709527 - DNA, 25 bp, Homo sapien
tgttcaaaaacctctcctgtgggca

SEQ ID NO: 1709528 - DNA, 25 bp, Homo sapien
cttttaagtacttcagctgatggtt

SEQ ID NO: 1709529 - DNA, 25 bp, Homo sapien
gttctttttgtaggataggcagttc

SEQ ID NO: 1709530 - DNA, 25 bp, Homo sapien
tttttgtaggataggcagttctttc

SEQ ID NO: 1709531 - DNA, 25 bp, Homo sapien
taagttctttttgtaggataggcag

SEQ ID NO: 1709532 - DNA, 25 bp, Homo sapien
tctataagttctttttgtaggatag

SEQ ID NO: 1709533 - DNA, 25 bp, Homo sapien
caagtgaagtgagtgctccccagtc

SEQ ID NO: 1709534 - DNA, 25 bp, Homo sapien
gaagattccacctagtacacagagg

SEQ ID NO: 1709535 - DNA, 25 bp, Homo sapien
gaaatagctctcttatagggcaggg

SEQ ID NO: 1709536 - DNA, 25 bp, Homo sapien
gctgggaaagacaagcaggactcca

SEQ ID NO: 1709537 - DNA, 25 bp, Homo sapien
ctagtcaaatgaagtgttgagagtg

SEQ ID NO: 1709538 - DNA, 25 bp, Homo sapien
gtcaaatgaagtgttgagagtggag

SEQ ID NO: 1709539 - DNA, 25 bp, Homo sapien
aatctatgattggttgtgatcaatt

SEQ ID NO: 1709540 - DNA, 25 bp, Homo sapien
aagaaatctatgattggttgtgatc

SEQ ID NO: 1709541 - DNA, 25 bp, Homo sapien
gattgatagccatccttgcagccca

SEQ ID NO: 1709542 - DNA, 25 bp, Homo sapien
taattctctttagcaccctcagtgg

SEQ ID NO: 1709543 - DNA, 25 bp, Homo sapien
tagaaggccgtcatgcaaggattcc

SEQ ID NO: 1709544 - DNA, 25 bp, Homo sapien
tgtatattccacacacgggagccag

SEQ ID NO: 1709545 - DNA, 25 bp, Homo sapien
gattcttatcaacggatatacaaca

SEQ ID NO: 1709546 - DNA, 25 bp, Homo sapien
atttcagattcttatcaacggatat

SEQ ID NO: 1709547 - DNA, 25 bp, Homo sapien
cttatcaacggatatacaacaatca

SEQ ID NO: 1709548 - DNA, 25 bp, Homo sapien
cagattcttatcaacggatatacaa

SEQ ID NO: 1709549 - DNA, 25 bp, Homo sapien
taccctctgtttagcactggatgtg

SEQ ID NO: 1709550 - DNA, 25 bp, Homo sapien
catatgagggaagccgttagaaggt

SEQ ID NO: 1709551 - DNA, 25 bp, Homo sapien
aaaaggacagatccctaactcgaag

SEQ ID NO: 1709552 - DNA, 25 bp, Homo sapien
taacagttagctcctgggctcgggt

SEQ ID NO: 1709553 - DNA, 25 bp, Homo sapien
tctttcaagctgatccagtccatca

SEQ ID NO: 1709554 - DNA, 25 bp, Homo sapien
tgtgcttctttcaagctgatccagt

SEQ ID NO: 1709555 - DNA, 25 bp, Homo sapien
aaagccagtctttgactattgtgat

SEQ ID NO: 1709556 - DNA, 25 bp, Homo sapien
tgtgatcacggagtctttgtgcttc

SEQ ID NO: 1709557 - DNA, 25 bp, Homo sapien
gaagactcatcattacttaatcctg

SEQ ID NO: 1709558 - DNA, 25 bp, Homo sapien
aaagggaagactcatcattacttaa

SEQ ID NO: 1709559 - DNA, 25 bp, Homo sapien
ctttcatcttcccagctcgagagtc

SEQ ID NO: 1709560 - DNA, 25 bp, Homo sapien
gctcgagagtcaggatgtctcagat

SEQ ID NO: 1709561 - DNA, 25 bp, Homo sapien
tgcagatctagctacctggcaggct

SEQ ID NO: 1709562 - DNA, 25 bp, Homo sapien
ctggcaggctgacacaagaggatca

SEQ ID NO: 1709563 - DNA, 25 bp, Homo sapien
ttaacagccagaagatattgcaaat

SEQ ID NO: 1709564 - DNA, 25 bp, Homo sapien
tattgcaaataagcacctaactcaa

SEQ ID NO: 1709565 - DNA, 25 bp, Homo sapien
ccgggatccggcgtcacgcgtcacc

SEQ ID NO: 1709566 - DNA, 25 bp, Homo sapien
gggatccggcgtcacgcgtcaccgc

SEQ ID NO: 1709567 - DNA, 25 bp, Homo sapien
ttccgggatccggcgtcacgcgtca

SEQ ID NO: 1709568 - DNA, 25 bp, Homo sapien
gatccggcgtcacgcgtcaccgcgc

SEQ ID NO: 1709569 - DNA, 25 bp, Homo sapien
gagcctgctcgggctcccaaacttt

SEQ ID NO: 1709570 - DNA, 25 bp, Homo sapien
tgcagccgagcctgctcgggctccc

SEQ ID NO: 1709571 - DNA, 25 bp, Homo sapien
gccgagcctgctcgggctcccaaac

SEQ ID NO: 1709572 - DNA, 25 bp, Homo sapien
cagccgagcctgctcgggctcccaa

SEQ ID NO: 1709573 - DNA, 25 bp, Homo sapien
agccgcttcccggacagcagcttct

SEQ ID NO: 1709574 - DNA, 25 bp, Homo sapien
ggagagccgcttcccggacagcagc

SEQ ID NO: 1709575 - DNA, 25 bp, Homo sapien
ctgaggagagccgcttcccggacag

SEQ ID NO: 1709576 - DNA, 25 bp, Homo sapien
cgcttcccggacagcagcttctcca

SEQ ID NO: 1709577 - DNA, 25 bp, Homo sapien
ccttcgaagccacacaaaactgatg

SEQ ID NO: 1709578 - DNA, 25 bp, Homo sapien
tgaataagcccctggatgaatcctg

SEQ ID NO: 1709579 - DNA, 25 bp, Homo sapien
tttgaacttcaagcacaagagaggc

SEQ ID NO: 1709580 - DNA, 25 bp, Homo sapien
taatccaatgaggttcactacaagg

SEQ ID NO: 1709581 - DNA, 25 bp, Homo sapien
agaaacttctcactttagcaggata

SEQ ID NO: 1709582 - DNA, 25 bp, Homo sapien
taaacacctgtaagttgtcaggcac

SEQ ID NO: 1709583 - DNA, 25 bp, Homo sapien
cagaggcatctccaaacctgtacag

SEQ ID NO: 1709584 - DNA, 25 bp, Homo sapien
gaactgcagagtggcaaatccaggt

SEQ ID NO: 1709585 - DNA, 25 bp, Homo sapien
gttaatagcttcaaacagccgggag

SEQ ID NO: 1709586 - DNA, 25 bp, Homo sapien
cacgtacaatgtcccaggtctcaga

SEQ ID NO: 1709587 - DNA, 25 bp, Homo sapien
cagccgggaggtaggataaattatg

SEQ ID NO: 1709588 - DNA, 25 bp, Homo sapien
ggtctcagacatattttgcagtgca

SEQ ID NO: 1709589 - DNA, 25 bp, Homo sapien
gcaccagcagtaggcagaataaatg

SEQ ID NO: 1709590 - DNA, 25 bp, Homo sapien
tggaagtcaaaaagcatgtctgcat

SEQ ID NO: 1709591 - DNA, 25 bp, Homo sapien
tacttaaaacggtgactctgtcctg

SEQ ID NO: 1709592 - DNA, 25 bp, Homo sapien
ttatgatgcccctaaggtacagaga

SEQ ID NO: 1709593 - DNA, 25 bp, Homo sapien
ccaggtctgtgttttacgggagaat

SEQ ID NO: 1709594 - DNA, 25 bp, Homo sapien
taacctcaaggacggcatttttggc

SEQ ID NO: 1709595 - DNA, 25 bp, Homo sapien
gacaagttatataagcccaggtctg

SEQ ID NO: 1709596 - DNA, 25 bp, Homo sapien
tatggtgatcaaggtcagaacagtg

SEQ ID NO: 1709597 - DNA, 25 bp, Homo sapien
cagccacctgcatagctggactaaa

SEQ ID NO: 1709598 - DNA, 25 bp, Homo sapien
tcagccacctgcatagctggactaa

SEQ ID NO: 1709599 - DNA, 25 bp, Homo sapien
tataccatgtaaggtaggacgacca

SEQ ID NO: 1709600 - DNA, 25 bp, Homo sapien
tgctgccgccttaaagaacaagtag

SEQ ID NO: 1709601 - DNA, 25 bp, Homo sapien
catggaggcctacacaggatgctgg

SEQ ID NO: 1709602 - DNA, 25 bp, Homo sapien
caagtagcggtgtctgttcacagca

SEQ ID NO: 1709603 - DNA, 25 bp, Homo sapien
caagttgaatctagctacacagtgg

SEQ ID NO: 1709604 - DNA, 25 bp, Homo sapien
gcagcggagcttggtttgacttaaa

SEQ ID NO: 1709605 - DNA, 25 bp, Homo sapien
ggttagtttaacagagtgccatttc

SEQ ID NO: 1709606 - DNA, 25 bp, Homo sapien
taactgtaccttgagtcaacgctgc

SEQ ID NO: 1709607 - DNA, 25 bp, Homo sapien
tatgaatggcttcacatggccactg

SEQ ID NO: 1709608 - DNA, 25 bp, Homo sapien
aaatatgaatggcttcacatggcca

SEQ ID NO: 1709609 - DNA, 25 bp, Homo sapien
tgaatggcttcacatggccactgtt

SEQ ID NO: 1709610 - DNA, 25 bp, Homo sapien
ttagagtaaatatgaatggcttcac

SEQ ID NO: 1709611 - DNA, 25 bp, Homo sapien
gagtgttcccgcctgctacaaaggc

SEQ ID NO: 1709612 - DNA, 25 bp, Homo sapien
ccagcttccgcttgacagtcacaga

SEQ ID NO: 1709613 - DNA, 25 bp, Homo sapien
catctacagttggaggaccttcacc

SEQ ID NO: 1709614 - DNA, 25 bp, Homo sapien
agtctctacctcagtgacagtggag

SEQ ID NO: 1709615 - DNA, 25 bp, Homo sapien
ctgagggtacactgcaatggtttgc

SEQ ID NO: 1709616 - DNA, 25 bp, Homo sapien
gagagacatagatttcacagaccga

SEQ ID NO: 1709617 - DNA, 25 bp, Homo sapien
gcagagatgcatagcactgagggta

SEQ ID NO: 1709618 - DNA, 25 bp, Homo sapien
tctgtgtggtgttcaaccagaccag

SEQ ID NO: 1709619 - DNA, 25 bp, Homo sapien
cacagttcacatttggccctctcca

SEQ ID NO: 1709620 - DNA, 25 bp, Homo sapien
tcaacacagttcacatttggccctc

SEQ ID NO: 1709621 - DNA, 25 bp, Homo sapien
acagttcacatttggccctctccac

SEQ ID NO: 1709622 - DNA, 25 bp, Homo sapien
aacacagttcacatttggccctctc

SEQ ID NO: 1709623 - DNA, 25 bp, Homo sapien
aaatgaaaaggcaacgtgaaggcct

SEQ ID NO: 1709624 - DNA, 25 bp, Homo sapien
aaggcaacgtgaaggcctgggttct

SEQ ID NO: 1709625 - DNA, 25 bp, Homo sapien
gaagggtgaaggcaggaatgtagta

SEQ ID NO: 1709626 - DNA, 25 bp, Homo sapien
ggcaggaatgtagtacattgatact

SEQ ID NO: 1709627 - DNA, 25 bp, Homo sapien
accgcactatctgggcatctccttt

SEQ ID NO: 1709628 - DNA, 25 bp, Homo sapien
ctgccaaatgcagagggtagcagcc

SEQ ID NO: 1709629 - DNA, 25 bp, Homo sapien
ggtcagcgcatcgttcctcagaaga

SEQ ID NO: 1709630 - DNA, 25 bp, Homo sapien
cttgatggatgagcaaccgcactat

SEQ ID NO: 1709631 - DNA, 25 bp, Homo sapien
cttggcattgatataagggtcaaag

SEQ ID NO: 1709632 - DNA, 25 bp, Homo sapien
tgagttctttgatctcaagagcatt

SEQ ID NO: 1709633 - DNA, 25 bp, Homo sapien
tggcattgatataagggtcaaaggg

SEQ ID NO: 1709634 - DNA, 25 bp, Homo sapien
tgatataagggtcaaaggggccgta

SEQ ID NO: 1709635 - DNA, 25 bp, Homo sapien
atgtaccactatccactatgcctgg

SEQ ID NO: 1709636 - DNA, 25 bp, Homo sapien
ggcatgtaccactatccactatgcc

SEQ ID NO: 1709637 - DNA, 25 bp, Homo sapien
catgtaccactatccactatgcctg

SEQ ID NO: 1709638 - DNA, 25 bp, Homo sapien
gcatgtaccactatccactatgcct

SEQ ID NO: 1709639 - DNA, 25 bp, Homo sapien
ctggtcaaaggaggttagatttgaa

SEQ ID NO: 1709640 - DNA, 25 bp, Homo sapien
cacaatgcagggctgtctcgttgtc

SEQ ID NO: 1709641 - DNA, 25 bp, Homo sapien
agtcgcccgtacagtgctgccaggt

SEQ ID NO: 1709642 - DNA, 25 bp, Homo sapien
cttcttagtgttgcagctcaggagg

SEQ ID NO: 1709643 - DNA, 25 bp, Homo sapien
aggacctggaccacggctttgtggc

SEQ ID NO: 1709644 - DNA, 25 bp, Homo sapien
caaagcagcctcatgcaaagcactg

SEQ ID NO: 1709645 - DNA, 25 bp, Homo sapien
cacatcggtcttgccaaacaaagca

SEQ ID NO: 1709646 - DNA, 25 bp, Homo sapien
aaacaaagcagcctcatgcaaagca

SEQ ID NO: 1709647 - DNA, 25 bp, Homo sapien
agccagcaggatttgcaccacatcg

SEQ ID NO: 1709648 - DNA, 25 bp, Homo sapien
tagggcagtcagtccatggttatct

SEQ ID NO: 1709649 - DNA, 25 bp, Homo sapien
aattaatgctgctatttgctggctc

SEQ ID NO: 1709650 - DNA, 25 bp, Homo sapien
cagttcccgaacagtgtctagggca

SEQ ID NO: 1709651 - DNA, 25 bp, Homo sapien
ctcttttgagaaggcagttcccgaa

SEQ ID NO: 1709652 - DNA, 25 bp, Homo sapien
cctgagacttctgtgatatggagtc

SEQ ID NO: 1709653 - DNA, 25 bp, Homo sapien
tccatactggagatgagaggtggct

SEQ ID NO: 1709654 - DNA, 25 bp, Homo sapien
gacttctgtgatatggagtccatac

SEQ ID NO: 1709655 - DNA, 25 bp, Homo sapien
tgatatggagtccatactggagatg

SEQ ID NO: 1709656 - DNA, 25 bp, Homo sapien
catgctgtccaacgaatggcaggag

SEQ ID NO: 1709657 - DNA, 25 bp, Homo sapien
gcaggagatggcattatacagagct

SEQ ID NO: 1709658 - DNA, 25 bp, Homo sapien
gcttcgtagggaccctcttcttcag

SEQ ID NO: 1709659 - DNA, 25 bp, Homo sapien
tcttggtcagatgatcgcccgctgg

SEQ ID NO: 1709660 - DNA, 25 bp, Homo sapien
cagcccccaggaggtgtaagccccg

SEQ ID NO: 1709661 - DNA, 25 bp, Homo sapien
aacacagcccccaggaggtgtaagc

SEQ ID NO: 1709662 - DNA, 25 bp, Homo sapien
gggccagccagccaacacagccccc

SEQ ID NO: 1709663 - DNA, 25 bp, Homo sapien
caggaggtgtaagccccgggtcaca

SEQ ID NO: 1709664 - DNA, 25 bp, Homo sapien
tgcaagctgcttatactgaaactag

SEQ ID NO: 1709665 - DNA, 25 bp, Homo sapien
cagagccccatgaagaagagaataa

SEQ ID NO: 1709666 - DNA, 25 bp, Homo sapien
tccaggccccggaaacatgagctgg

SEQ ID NO: 1709667 - DNA, 25 bp, Homo sapien
gaagtcacgtaaagatgcaagctgc

SEQ ID NO: 1709668 - DNA, 25 bp, Homo sapien
tcagtgttccgactaaaggcagtgg

SEQ ID NO: 1709669 - DNA, 25 bp, Homo sapien
aaaaacagacgcttgtggactgtcg

SEQ ID NO: 1709670 - DNA, 25 bp, Homo sapien
aacagaacgctgagttacgcgagag

SEQ ID NO: 1709671 - DNA, 25 bp, Homo sapien
gatatttgccattgtacctgcaggg

SEQ ID NO: 1709672 - DNA, 25 bp, Homo sapien
aaatacttcttatctatgtggtctt

SEQ ID NO: 1709673 - DNA, 25 bp, Homo sapien
ctcttcatcgggcggtggctttgct

SEQ ID NO: 1709674 - DNA, 25 bp, Homo sapien
tcctcttcatcgggcggtggctttg

SEQ ID NO: 1709675 - DNA, 25 bp, Homo sapien
ttcctcttcatcgggcggtggcttt

SEQ ID NO: 1709676 - DNA, 25 bp, Homo sapien
catctgacaatgaccaggcttagga

SEQ ID NO: 1709677 - DNA, 25 bp, Homo sapien
tggatcatatgcaggccgtatcacc

SEQ ID NO: 1709678 - DNA, 25 bp, Homo sapien
tttaagccagtttcatgatcaggtc

SEQ ID NO: 1709679 - DNA, 25 bp, Homo sapien
cctaaaggcttctatgagtcatctg

SEQ ID NO: 1709680 - DNA, 25 bp, Homo sapien
tttagcatatctgagcacagagaag

SEQ ID NO: 1709681 - DNA, 25 bp, Homo sapien
cagtgaccaatggaatgtccagttg

SEQ ID NO: 1709682 - DNA, 25 bp, Homo sapien
actacggccagtcctgatgcagctg

SEQ ID NO: 1709683 - DNA, 25 bp, Homo sapien
cagcagctgcaacttccatgaatat

SEQ ID NO: 1709684 - DNA, 25 bp, Homo sapien
cagagaaaagctatgagcagtcacc

SEQ ID NO: 1709685 - DNA, 25 bp, Homo sapien
gcagagaaaagctatgagcagtcac

SEQ ID NO: 1709686 - DNA, 25 bp, Homo sapien
gagaaaagctatgagcagtcaccac

SEQ ID NO: 1709687 - DNA, 25 bp, Homo sapien
ctgcagagaaaagctatgagcagtc

SEQ ID NO: 1709688 - DNA, 25 bp, Homo sapien
gaatcctaggtctcatggacagaac

SEQ ID NO: 1709689 - DNA, 25 bp, Homo sapien
cagttcataagggtgttcgtcttct

SEQ ID NO: 1709690 - DNA, 25 bp, Homo sapien
ttcttcccgggctgcactcccatga

SEQ ID NO: 1709691 - DNA, 25 bp, Homo sapien
tgtctctgctgttaacaacagttca

SEQ ID NO: 1709692 - DNA, 25 bp, Homo sapien
taaaaagctccgaatggaaaccata

SEQ ID NO: 1709693 - DNA, 25 bp, Homo sapien
ggcagttatacaactccatctgtca

SEQ ID NO: 1709694 - DNA, 25 bp, Homo sapien
tgaccacaatgtctgcatgcaagag

SEQ ID NO: 1709695 - DNA, 25 bp, Homo sapien
gggccaggctcaaaaggctacagat

SEQ ID NO: 1709696 - DNA, 25 bp, Homo sapien
gtcaattatcttgtagtggttccag

SEQ ID NO: 1709697 - DNA, 25 bp, Homo sapien
tgagtcaattatcttgtagtggttc

SEQ ID NO: 1709698 - DNA, 25 bp, Homo sapien
atcttgtagtggttccagatgaaac

SEQ ID NO: 1709699 - DNA, 25 bp, Homo sapien
caattatcttgtagtggttccagat

SEQ ID NO: 1709700 - DNA, 25 bp, Homo sapien
ggcacacttggtagctaaggacacc

SEQ ID NO: 1709701 - DNA, 25 bp, Homo sapien
taaacagcaagccttgaggcaggcg

SEQ ID NO: 1709702 - DNA, 25 bp, Homo sapien
gaccagatgtgtagccaaaagtcct

SEQ ID NO: 1709703 - DNA, 25 bp, Homo sapien
gaaaccaaagcataggaggaccaga

SEQ ID NO: 1709704 - DNA, 25 bp, Homo sapien
tgtttacactgactacactgacaac

SEQ ID NO: 1709705 - DNA, 25 bp, Homo sapien
tttacactgactacactgacaacaa

SEQ ID NO: 1709706 - DNA, 25 bp, Homo sapien
ttacactgactacactgacaacaaa

SEQ ID NO: 1709707 - DNA, 25 bp, Homo sapien
cttgtttacactgactacactgaca

SEQ ID NO: 1709708 - DNA, 25 bp, Homo sapien
aaaagagctaccatggagctgactg

SEQ ID NO: 1709709 - DNA, 25 bp, Homo sapien
aagagctaccatggagctgactgga

SEQ ID NO: 1709710 - DNA, 25 bp, Homo sapien
agctaccatggagctgactggagga

SEQ ID NO: 1709711 - DNA, 25 bp, Homo sapien
aggggctgccccgcagggtgctgga

SEQ ID NO: 1709712 - DNA, 25 bp, Homo sapien
cagcaggctagtgtcttaaaatccg

SEQ ID NO: 1709713 - DNA, 25 bp, Homo sapien
agcaggctagtgtcttaaaatccga

SEQ ID NO: 1709714 - DNA, 25 bp, Homo sapien
tcagcaggctagtgtcttaaaatcc

SEQ ID NO: 1709715 - DNA, 25 bp, Homo sapien
caaatagcacgttttttgcttaaca

SEQ ID NO: 1709716 - DNA, 25 bp, Homo sapien
tactactttggccaagtattatagg

SEQ ID NO: 1709717 - DNA, 25 bp, Homo sapien
ggtaagttgctcagtttcaatgaca

SEQ ID NO: 1709718 - DNA, 25 bp, Homo sapien
tctctgctactgtcttttggttaaa

SEQ ID NO: 1709719 - DNA, 25 bp, Homo sapien
tgatatcacgcctaattcttgattt

SEQ ID NO: 1709720 - DNA, 25 bp, Homo sapien
ggtgtgtgatatcacgcctaattct

SEQ ID NO: 1709721 - DNA, 25 bp, Homo sapien
tgtgatatcacgcctaattcttgat

SEQ ID NO: 1709722 - DNA, 25 bp, Homo sapien
tgtgtgatatcacgcctaattcttg

SEQ ID NO: 1709723 - DNA, 25 bp, Homo sapien
aaccagccacgatttctaaccatgc

SEQ ID NO: 1709724 - DNA, 25 bp, Homo sapien
tgctgtctttgctccccttgatctt

SEQ ID NO: 1709725 - DNA, 25 bp, Homo sapien
gctgtctttgctccccttgatcttc

SEQ ID NO: 1709726 - DNA, 25 bp, Homo sapien
cagcttccaaccagccacgatttct

SEQ ID NO: 1709727 - DNA, 25 bp, Homo sapien
gaccaagttattcagacacttgctg

SEQ ID NO: 1709728 - DNA, 25 bp, Homo sapien
gataagacaaatagactgagagttc

SEQ ID NO: 1709729 - DNA, 25 bp, Homo sapien
ggaaggtcctgaccaagttattcag

SEQ ID NO: 1709730 - DNA, 25 bp, Homo sapien
gagttcattttggtccacggcaacc

SEQ ID NO: 1709731 - DNA, 25 bp, Homo sapien
catatagcttaaccaaggccccagg

SEQ ID NO: 1709732 - DNA, 25 bp, Homo sapien
tcaacttaaaggtcaggtcctgagc

SEQ ID NO: 1709733 - DNA, 25 bp, Homo sapien
tacagtgaggatgacacatgaccat

SEQ ID NO: 1709734 - DNA, 25 bp, Homo sapien
ggcagccagaacaaagctacccagt

SEQ ID NO: 1709735 - DNA, 25 bp, Homo sapien
tcatcagcatgcctgaaggcccaaa

SEQ ID NO: 1709736 - DNA, 25 bp, Homo sapien
atcagcatgcctgaaggcccaaagc

SEQ ID NO: 1709737 - DNA, 25 bp, Homo sapien
ccctcatcagcatgcctgaaggccc

SEQ ID NO: 1709738 - DNA, 25 bp, Homo sapien
ctcatcagcatgcctgaaggcccaa

SEQ ID NO: 1709739 - DNA, 25 bp, Homo sapien
aaatggtctaatttgtcaatgccag

SEQ ID NO: 1709740 - DNA, 25 bp, Homo sapien
ccttagttgatccactgaaaacaaa

SEQ ID NO: 1709741 - DNA, 25 bp, Homo sapien
cgagcagggagacccactcctggaa

SEQ ID NO: 1709742 - DNA, 25 bp, Homo sapien
cgcgagcagggagacccactcctgg

SEQ ID NO: 1709743 - DNA, 25 bp, Homo sapien
agcgcgagcagggagacccactcct

SEQ ID NO: 1709744 - DNA, 25 bp, Homo sapien
agcaagcgcgagcagggagacccac

SEQ ID NO: 1709745 - DNA, 25 bp, Homo sapien
tgttaacattaacgaccagaccttg

SEQ ID NO: 1709746 - DNA, 25 bp, Homo sapien
cagaccttgctatataaggcgagaa

SEQ ID NO: 1709747 - DNA, 25 bp, Homo sapien
gattaatgctatctggcagccttcc

SEQ ID NO: 1709748 - DNA, 25 bp, Homo sapien
tcaacaaagttccaatgcagcaagc

SEQ ID NO: 1709749 - DNA, 25 bp, Homo sapien
tgcagttggataaggactcactccg

SEQ ID NO: 1709750 - DNA, 25 bp, Homo sapien
tctggccagcggtacagagcagctg

SEQ ID NO: 1709751 - DNA, 25 bp, Homo sapien
caagctgcggctgagtttgagttca

SEQ ID NO: 1709752 - DNA, 25 bp, Homo sapien
tgagtcaaagtttcagggtgcgagc

SEQ ID NO: 1709753 - DNA, 25 bp, Homo sapien
tgtctccaacttccacgctaattgg

SEQ ID NO: 1709754 - DNA, 25 bp, Homo sapien
tccacgctaattggtcgaatctctc

SEQ ID NO: 1709755 - DNA, 25 bp, Homo sapien
gcttgtgatacttctccctgagatt

SEQ ID NO: 1709756 - DNA, 25 bp, Homo sapien
aaataatcctgtcacctagaactac

SEQ ID NO: 1709757 - DNA, 25 bp, Homo sapien
gctaaaaaatgcttgagcaagtctc

SEQ ID NO: 1709758 - DNA, 25 bp, Homo sapien
ctgcaaattaaggtcatagtgagtc

SEQ ID NO: 1709759 - DNA, 25 bp, Homo sapien
aaaatgcttgagcaagtctcatggg

SEQ ID NO: 1709760 - DNA, 25 bp, Homo sapien
catagtgagtcatgtagctgctaaa

SEQ ID NO: 1709761 - DNA, 25 bp, Homo sapien
cgctgaggatcccagatacgtgagt

SEQ ID NO: 1709762 - DNA, 25 bp, Homo sapien
agagaagcccaaaggcaagcaggga

SEQ ID NO: 1709763 - DNA, 25 bp, Homo sapien
caattatcagtgttcccaggatgag

SEQ ID NO: 1709764 - DNA, 25 bp, Homo sapien
caggatgagtacaccctgggaaact

SEQ ID NO: 1709765 - DNA, 25 bp, Homo sapien
tcatgtgctcacagcaaggtcgacc

SEQ ID NO: 1709766 - DNA, 25 bp, Homo sapien
tcaagacttgcagggtgttaggtcc

SEQ ID NO: 1709767 - DNA, 25 bp, Homo sapien
gaaggcactagggaactttctggga

SEQ ID NO: 1709768 - DNA, 25 bp, Homo sapien
tatagaatccatgccctacgtggtg

SEQ ID NO: 1709769 - DNA, 25 bp, Homo sapien
gactggctggctaaggaaggcacta

SEQ ID NO: 1709770 - DNA, 25 bp, Homo sapien
ctacgtggtggatattcagggattc

SEQ ID NO: 1709771 - DNA, 25 bp, Homo sapien
ctctcctctggctcgatggccttgc

SEQ ID NO: 1709772 - DNA, 25 bp, Homo sapien
tctcctctggctcgatggccttgct

SEQ ID NO: 1709773 - DNA, 25 bp, Homo sapien
gctggtgccactggcagccgaacct

SEQ ID NO: 1709774 - DNA, 25 bp, Homo sapien
gtgccactggcagccgaacctgctt

SEQ ID NO: 1709775 - DNA, 25 bp, Homo sapien
gctatcgctaatacactggtcactt

SEQ ID NO: 1709776 - DNA, 25 bp, Homo sapien
cacactggtggtgttcgatgacaaa

SEQ ID NO: 1709777 - DNA, 25 bp, Homo sapien
aaatgtttgttagctatcgctaata

SEQ ID NO: 1709778 - DNA, 25 bp, Homo sapien
tgtacacagctagcacactggtggt

SEQ ID NO: 1709779 - DNA, 25 bp, Homo sapien
caaaaagttttcaggacgactctgt

SEQ ID NO: 1709780 - DNA, 25 bp, Homo sapien
tgtttagaccgcaggattctggctg

SEQ ID NO: 1709781 - DNA, 25 bp, Homo sapien
caggttaagtgtaatggacgggcac

SEQ ID NO: 1709782 - DNA, 25 bp, Homo sapien
gaagagcgttcagacacagcagata

SEQ ID NO: 1709783 - DNA, 25 bp, Homo sapien
tggtctgcccaagccctcagcctga

SEQ ID NO: 1709784 - DNA, 25 bp, Homo sapien
tttgggcagagattggcaggtcccc

SEQ ID NO: 1709785 - DNA, 25 bp, Homo sapien
ctgtttgggcagagattggcaggtc

SEQ ID NO: 1709786 - DNA, 25 bp, Homo sapien
atggggagaagccggagctcatctt

SEQ ID NO: 1709787 - DNA, 25 bp, Homo sapien
cagcaactggaacctgtcttggtgg

SEQ ID NO: 1709788 - DNA, 25 bp, Homo sapien
taagacgacgacgacaggtaggtgc

SEQ ID NO: 1709789 - DNA, 25 bp, Homo sapien
tgagtgctccagtccagtaaaacct

SEQ ID NO: 1709790 - DNA, 25 bp, Homo sapien
tgaacagagttgagcaccctcgctg

SEQ ID NO: 1709791 - DNA, 25 bp, Homo sapien
caatcagcatccgttggtggtacaa

SEQ ID NO: 1709792 - DNA, 25 bp, Homo sapien
ctgcaaggtatcaggactctgctgc

SEQ ID NO: 1709793 - DNA, 25 bp, Homo sapien
agcaccagcctgcaaggtatcagga

SEQ ID NO: 1709794 - DNA, 25 bp, Homo sapien
agcccacagggtccgatgtactgct

SEQ ID NO: 1709795 - DNA, 25 bp, Homo sapien
cagcccacagggtccgatgtactgc

SEQ ID NO: 1709796 - DNA, 25 bp, Homo sapien
cttctgccgttcctgagaaaagtca

SEQ ID NO: 1709797 - DNA, 25 bp, Homo sapien
ttcccaataggcagcttaaaattca

SEQ ID NO: 1709798 - DNA, 25 bp, Homo sapien
gagcatgacgtggtctgaagctgac

SEQ ID NO: 1709799 - DNA, 25 bp, Homo sapien
catatgtaaaaggagtcatggctct

SEQ ID NO: 1709800 - DNA, 25 bp, Homo sapien
tattggagactgaattataggagca

SEQ ID NO: 1709801 - DNA, 25 bp, Homo sapien
ttaagagcatctcgcctgagaaagc

SEQ ID NO: 1709802 - DNA, 25 bp, Homo sapien
gacacatatgtctctagagccaaga

SEQ ID NO: 1709803 - DNA, 25 bp, Homo sapien
gatggagcctcctgagtgagcaaga

SEQ ID NO: 1709804 - DNA, 25 bp, Homo sapien
gactgacaggtcaatcctggatgga

SEQ ID NO: 1709805 - DNA, 25 bp, Homo sapien
tctgctagcacccagggaaacattg

SEQ ID NO: 1709806 - DNA, 25 bp, Homo sapien
tgacgaaaacggaccaagctcagct

SEQ ID NO: 1709807 - DNA, 25 bp, Homo sapien
gagtgtaagcaacagatcctgaaaa

SEQ ID NO: 1709808 - DNA, 25 bp, Homo sapien
tctgcagactccagcataatccaag

SEQ ID NO: 1709809 - DNA, 25 bp, Homo sapien
gagatactggtatcccaataggctg

SEQ ID NO: 1709810 - DNA, 25 bp, Homo sapien
tgctgggagatactggtatcccaat

SEQ ID NO: 1709811 - DNA, 25 bp, Homo sapien
tactggtatcccaataggctgtaga

SEQ ID NO: 1709812 - DNA, 25 bp, Homo sapien
ggtatcccaataggctgtagatgag

SEQ ID NO: 1709813 - DNA, 25 bp, Homo sapien
tccccgggtgctgattcattcttgc

SEQ ID NO: 1709814 - DNA, 25 bp, Homo sapien
ccatgaagtcaagtgtccccgggtg

SEQ ID NO: 1709815 - DNA, 25 bp, Homo sapien
tccttggttatctacaagaccctgg

SEQ ID NO: 1709816 - DNA, 25 bp, Homo sapien
cagcgctccaagatgccgagtctgg

SEQ ID NO: 1709817 - DNA, 25 bp, Homo sapien
gtagcagcggcactcagaggaagat

SEQ ID NO: 1709818 - DNA, 25 bp, Homo sapien
aatcggcagacgcttgaaaagggaa

SEQ ID NO: 1709819 - DNA, 25 bp, Homo sapien
aggaagatagatggcattgccacat

SEQ ID NO: 1709820 - DNA, 25 bp, Homo sapien
gaaaaaccattaaggcggtagcagc

SEQ ID NO: 1709821 - DNA, 25 bp, Homo sapien
gaagtggacatcgtcaaagccattc

SEQ ID NO: 1709822 - DNA, 25 bp, Homo sapien
ggacatcgtcaaagccattcagaag

SEQ ID NO: 1709823 - DNA, 25 bp, Homo sapien
tcagaagcaacttgctctcatactg

SEQ ID NO: 1709824 - DNA, 25 bp, Homo sapien
ctgctgcagcccaatcgactccagc

SEQ ID NO: 1709825 - DNA, 25 bp, Homo sapien
tgggtctacgtactgttgcagactc

SEQ ID NO: 1709826 - DNA, 25 bp, Homo sapien
ggtgtctgagtgacctcagtgagct

SEQ ID NO: 1709827 - DNA, 25 bp, Homo sapien
ctgggatttgggtctacgtactgtt

SEQ ID NO: 1709828 - DNA, 25 bp, Homo sapien
tcagtgagctttccctgggatttgg

SEQ ID NO: 1709829 - DNA, 25 bp, Homo sapien
caacacttctgtgaagggcgtcagg

SEQ ID NO: 1709830 - DNA, 25 bp, Homo sapien
aaatggaaccagctacgatgcaggt

SEQ ID NO: 1709831 - DNA, 25 bp, Homo sapien
gtgaagggcatcagacctgcgctag

SEQ ID NO: 1709832 - DNA, 25 bp, Homo sapien
cacgcccggagctacaaatttgcca

SEQ ID NO: 1709833 - DNA, 25 bp, Homo sapien
gcgggggcctatctgccacgtagca

SEQ ID NO: 1709834 - DNA, 25 bp, Homo sapien
gaagacagcgggggcctatctgcca

SEQ ID NO: 1709835 - DNA, 25 bp, Homo sapien
gacagcgggggcctatctgccacgt

SEQ ID NO: 1709836 - DNA, 25 bp, Homo sapien
acagcgggggcctatctgccacgta

SEQ ID NO: 1709837 - DNA, 25 bp, Homo sapien
ggaagcaccactccaggtccaggga

SEQ ID NO: 1709838 - DNA, 25 bp, Homo sapien
caggctccaaccttgtgagggcaca

SEQ ID NO: 1709839 - DNA, 25 bp, Homo sapien
gtggaagcaccactccaggtccagg

SEQ ID NO: 1709840 - DNA, 25 bp, Homo sapien
ccaaccttgtgagggcacatgagca

SEQ ID NO: 1709841 - DNA, 25 bp, Homo sapien
tggaccagcccaggggtgatgcact

SEQ ID NO: 1709842 - DNA, 25 bp, Homo sapien
accagcccaggggtgatgcactcac

SEQ ID NO: 1709843 - DNA, 25 bp, Homo sapien
gaccagcccaggggtgatgcactca

SEQ ID NO: 1709844 - DNA, 25 bp, Homo sapien
ctggaccagcccaggggtgatgcac

SEQ ID NO: 1709845 - DNA, 25 bp, Homo sapien
catgacaagggtcggcccgggtcgg

SEQ ID NO: 1709846 - DNA, 25 bp, Homo sapien
tgcagaaggtagctgaaagcatgga

SEQ ID NO: 1709847 - DNA, 25 bp, Homo sapien
ctgaagatgcagaaggtagctgaaa

SEQ ID NO: 1709848 - DNA, 25 bp, Homo sapien
caggcgaacggaaggagcatgacaa

SEQ ID NO: 1709849 - DNA, 25 bp, Homo sapien
ctcagtgccacatatcctcaaaggg

SEQ ID NO: 1709850 - DNA, 25 bp, Homo sapien
tctttactcagggagaagggaccac

SEQ ID NO: 1709851 - DNA, 25 bp, Homo sapien
gataccaaagcgaacggctgagctg

SEQ ID NO: 1709852 - DNA, 25 bp, Homo sapien
tcaaacctccaagaggacgtggacg

SEQ ID NO: 1709853 - DNA, 25 bp, Homo sapien
ttagtgacgccagtgctagatcccc

SEQ ID NO: 1709854 - DNA, 25 bp, Homo sapien
aatagggactattgtggccaggcgc

SEQ ID NO: 1709855 - DNA, 25 bp, Homo sapien
tatacacaggagattgttccgcagc

SEQ ID NO: 1709856 - DNA, 25 bp, Homo sapien
gctgcagcatcatctaggttaggaa

SEQ ID NO: 1709857 - DNA, 25 bp, Homo sapien
ctgtgggtcgctgatgccgatgtcc

SEQ ID NO: 1709858 - DNA, 25 bp, Homo sapien
cttgggtagggagcgtgccgcctgg

SEQ ID NO: 1709859 - DNA, 25 bp, Homo sapien
tcgctgatgccgatgtcccgcaggt

SEQ ID NO: 1709860 - DNA, 25 bp, Homo sapien
ccggtgctgtgggtcgctgatgccg

SEQ ID NO: 1709861 - DNA, 25 bp, Homo sapien
gaaggaatggacgtagtcctgcagc

SEQ ID NO: 1709862 - DNA, 25 bp, Homo sapien
gggctgttcccgtcataacccagag

SEQ ID NO: 1709863 - DNA, 25 bp, Homo sapien
tcttcacggtgtcaatggagctgta

SEQ ID NO: 1709864 - DNA, 25 bp, Homo sapien
ggagctgtaaccacttgacaagaag

SEQ ID NO: 1709865 - DNA, 25 bp, Homo sapien
atgcgcttgcgatggccgagcagct

SEQ ID NO: 1709866 - DNA, 25 bp, Homo sapien
tgcgagggaggcgatgatgcgcttg

SEQ ID NO: 1709867 - DNA, 25 bp, Homo sapien
gggcggctcctcgtacggtctgtct

SEQ ID NO: 1709868 - DNA, 25 bp, Homo sapien
cctcgtacggtctgtctgcgaggga

SEQ ID NO: 1709869 - DNA, 25 bp, Homo sapien
tggagactgtcatggcgcctcctgc

SEQ ID NO: 1709870 - DNA, 25 bp, Homo sapien
gaggcagcagcagatctgccgaccg

SEQ ID NO: 1709871 - DNA, 25 bp, Homo sapien
gaccgcccagtgcaggaatcattct

SEQ ID NO: 1709872 - DNA, 25 bp, Homo sapien
atcctgaagcgctccgctcgggagg

SEQ ID NO: 1709873 - DNA, 25 bp, Homo sapien
gagaatgctgccgaggtgaagctgc

SEQ ID NO: 1709874 - DNA, 25 bp, Homo sapien
tgctgccgaggtgaagctgcaggga

SEQ ID NO: 1709875 - DNA, 25 bp, Homo sapien
aggaggaagagaatgctgccgaggt

SEQ ID NO: 1709876 - DNA, 25 bp, Homo sapien
gaagagaatgctgccgaggtgaagc

SEQ ID NO: 1709877 - DNA, 25 bp, Homo sapien
ggggcagaccagcaattcaaacaca

SEQ ID NO: 1709878 - DNA, 25 bp, Homo sapien
gatgccagtgaccttagcaagttca

SEQ ID NO: 1709879 - DNA, 25 bp, Homo sapien
ccagtgaccttagcaagttcaaggg

SEQ ID NO: 1709880 - DNA, 25 bp, Homo sapien
ttcaagggtcgagtggagatggcag

SEQ ID NO: 1709881 - DNA, 25 bp, Homo sapien
atgagtttctctggctggtgttgcc

SEQ ID NO: 1709882 - DNA, 25 bp, Homo sapien
cacaggactcgaagatgagtttctc

SEQ ID NO: 1709883 - DNA, 25 bp, Homo sapien
attggcttcataaccacaggactcg

SEQ ID NO: 1709884 - DNA, 25 bp, Homo sapien
gctggtgttgccaactctgcactgg

SEQ ID NO: 1709885 - DNA, 25 bp, Homo sapien
gcgtcttgcgtggattctgtccctc

SEQ ID NO: 1709886 - DNA, 25 bp, Homo sapien
gattctgtccctcgcagatctttga

SEQ ID NO: 1709887 - DNA, 25 bp, Homo sapien
gcacaggcgtcttgcgtggattctg

SEQ ID NO: 1709888 - DNA, 25 bp, Homo sapien
cttggcacaggcgtcttgcgtggat

SEQ ID NO: 1709889 - DNA, 25 bp, Homo sapien
cacctttgtatgtgatggacaggat

SEQ ID NO: 1709890 - DNA, 25 bp, Homo sapien
acttgacacctttgtatgtgatgga

SEQ ID NO: 1709891 - DNA, 25 bp, Homo sapien
aggcatcgatgaacttgacaccttt

SEQ ID NO: 1709892 - DNA, 25 bp, Homo sapien
gatgaacttgacacctttgtatgtg

SEQ ID NO: 1709893 - DNA, 25 bp, Homo sapien
tagcaaagtgggaagtaataagagg

SEQ ID NO: 1709894 - DNA, 25 bp, Homo sapien
gagagacacgcctcttagcaaagtg

SEQ ID NO: 1709895 - DNA, 25 bp, Homo sapien
gaggctaacagcagtgatcactagg

SEQ ID NO: 1709896 - DNA, 25 bp, Homo sapien
aggtgtgcggccagtggagcccagg

SEQ ID NO: 1709897 - DNA, 25 bp, Homo sapien
ccctgccccagcctgttaccattgt

SEQ ID NO: 1709898 - DNA, 25 bp, Homo sapien
cctgccccagcctgttaccattgtc

SEQ ID NO: 1709899 - DNA, 25 bp, Homo sapien
aggtacagaggtcctccgggtcctg

SEQ ID NO: 1709900 - DNA, 25 bp, Homo sapien
aacacatggcaatagtggtggctgg

SEQ ID NO: 1709901 - DNA, 25 bp, Homo sapien
gaaatgttccggatctcgtgctctg

SEQ ID NO: 1709902 - DNA, 25 bp, Homo sapien
tcctgggccgcacaggaaatgttcc

SEQ ID NO: 1709903 - DNA, 25 bp, Homo sapien
gtttcaatcatctcagctgcagagg

SEQ ID NO: 1709904 - DNA, 25 bp, Homo sapien
cccagcgtcaggatgatctcgtagg

SEQ ID NO: 1709905 - DNA, 25 bp, Homo sapien
ggccaactgataggccacttcgaag

SEQ ID NO: 1709906 - DNA, 25 bp, Homo sapien
ggcctgcagggccaactgataggcc

SEQ ID NO: 1709907 - DNA, 25 bp, Homo sapien
gatggcgcagttactgggggctgcc

SEQ ID NO: 1709908 - DNA, 25 bp, Homo sapien
cacagacacagggatggcgcagtta

SEQ ID NO: 1709909 - DNA, 25 bp, Homo sapien
ctggggtgcagagcaaagcagacac

SEQ ID NO: 1709910 - DNA, 25 bp, Homo sapien
tctgcagccccttgacggccttgcc

SEQ ID NO: 1709911 - DNA, 25 bp, Homo sapien
ggagactgacacacaagacagcagg

SEQ ID NO: 1709912 - DNA, 25 bp, Homo sapien
caggactaacagatggcagcggtag

SEQ ID NO: 1709913 - DNA, 25 bp, Homo sapien
acagcaggaggcgtaaagaccttga

SEQ ID NO: 1709914 - DNA, 25 bp, Homo sapien
gacagtaacaacagcgactatcggg

SEQ ID NO: 1709915 - DNA, 25 bp, Homo sapien
acactggcatgggattgggcatctt

SEQ ID NO: 1709916 - DNA, 25 bp, Homo sapien
ggtgctgaggctccgcttagagtct

SEQ ID NO: 1709917 - DNA, 25 bp, Homo sapien
gaggctccgcttagagtctggtttg

SEQ ID NO: 1709918 - DNA, 25 bp, Homo sapien
tcttggtccatatcaggtggttcca

SEQ ID NO: 1709919 - DNA, 25 bp, Homo sapien
gaaagatcggatggcaaaggcacag

SEQ ID NO: 1709920 - DNA, 25 bp, Homo sapien
gaattcacagtgttcggtggtggta

SEQ ID NO: 1709921 - DNA, 25 bp, Homo sapien
aaggcacagtgagactagtggagac

SEQ ID NO: 1709922 - DNA, 25 bp, Homo sapien
taggtgcgagagctgcaagtgtaca

SEQ ID NO: 1709923 - DNA, 25 bp, Homo sapien
tgtgagtgttcagatacccagagcc

SEQ ID NO: 1709924 - DNA, 25 bp, Homo sapien
tcagctagctcttggcaacggtgcc

SEQ ID NO: 1709925 - DNA, 25 bp, Homo sapien
tggcgcatatcttgggccctcacag

SEQ ID NO: 1709926 - DNA, 25 bp, Homo sapien
tcacaagggcctagccatgagagtg

SEQ ID NO: 1709927 - DNA, 25 bp, Homo sapien
ggcgaagatagaggggctgtccaca

SEQ ID NO: 1709928 - DNA, 25 bp, Homo sapien
agatagaggggctgtccacacacat

SEQ ID NO: 1709929 - DNA, 25 bp, Homo sapien
aagatagaggggctgtccacacaca

SEQ ID NO: 1709930 - DNA, 25 bp, Homo sapien
cgaagatagaggggctgtccacaca

SEQ ID NO: 1709931 - DNA, 25 bp, Homo sapien
agggcacaggccgcctcctcgttgg

SEQ ID NO: 1709932 - DNA, 25 bp, Homo sapien
ggcacaggccgcctcctcgttggtt

SEQ ID NO: 1709933 - DNA, 25 bp, Homo sapien
aggccgcctcctcgttggttctacg

SEQ ID NO: 1709934 - DNA, 25 bp, Homo sapien
cgcctcctcgttggttctacggaag

SEQ ID NO: 1709935 - DNA, 25 bp, Homo sapien
cagaggacaatggaggccacttggt

SEQ ID NO: 1709936 - DNA, 25 bp, Homo sapien
tcccagaggacaatggaggccactt

SEQ ID NO: 1709937 - DNA, 25 bp, Homo sapien
gagagtgtcagaaagctcccagagg

SEQ ID NO: 1709938 - DNA, 25 bp, Homo sapien
tcagaaagctcccagaggacaatgg

SEQ ID NO: 1709939 - DNA, 25 bp, Homo sapien
tgctggacggcgctgtctatctgtg

SEQ ID NO: 1709940 - DNA, 25 bp, Homo sapien
ggacggcgctgtctatctgtgatcc

SEQ ID NO: 1709941 - DNA, 25 bp, Homo sapien
ggcatgctggacggcgctgtctatc

SEQ ID NO: 1709942 - DNA, 25 bp, Homo sapien
gctggacggcgctgtctatctgtga

SEQ ID NO: 1709943 - DNA, 25 bp, Homo sapien
gccgactggctttcctagtggactc

SEQ ID NO: 1709944 - DNA, 25 bp, Homo sapien
tctgctatgtgtgcacggctgccta

SEQ ID NO: 1709945 - DNA, 25 bp, Homo sapien
aggacccacccagtttatcgacttg

SEQ ID NO: 1709946 - DNA, 25 bp, Homo sapien
acagagcaggacagacgatccctca

SEQ ID NO: 1709947 - DNA, 25 bp, Homo sapien
tattctctgacacaacgcaggcagt

SEQ ID NO: 1709948 - DNA, 25 bp, Homo sapien
ggtttgaaaagcagacgcaccgtac

SEQ ID NO: 1709949 - DNA, 25 bp, Homo sapien
tcccatctgctagcggcctggagtg

SEQ ID NO: 1709950 - DNA, 25 bp, Homo sapien
aattggcaagtagcaaccttagctg

SEQ ID NO: 1709951 - DNA, 25 bp, Homo sapien
agagaatcaaaatgagccccaatca

SEQ ID NO: 1709952 - DNA, 25 bp, Homo sapien
gaatcaaaatgagccccaatcacac

SEQ ID NO: 1709953 - DNA, 25 bp, Homo sapien
gtcaaaccgataattcagagaatca

SEQ ID NO: 1709954 - DNA, 25 bp, Homo sapien
cagcagccaagtgtaaccgtcaaac

SEQ ID NO: 1709955 - DNA, 25 bp, Homo sapien
ttagcagatagaaacccacaaggcc

SEQ ID NO: 1709956 - DNA, 25 bp, Homo sapien
aagcttaagaagcagaggcgcaccg

SEQ ID NO: 1709957 - DNA, 25 bp, Homo sapien
tcctgggacctgattgacctatgcc

SEQ ID NO: 1709958 - DNA, 25 bp, Homo sapien
gacctatgccaggaaagctcggagc

SEQ ID NO: 1709959 - DNA, 25 bp, Homo sapien
taaacagaacccagagctagagcag

SEQ ID NO: 1709960 - DNA, 25 bp, Homo sapien
tctactctggatgctttagggttcc

SEQ ID NO: 1709961 - DNA, 25 bp, Homo sapien
tgtacagcggtagctcatgggcatc

SEQ ID NO: 1709962 - DNA, 25 bp, Homo sapien
aaagggagactacccatcccagagg

SEQ ID NO: 1709963 - DNA, 25 bp, Homo sapien
tgaagtctcccacccgaatgggctc

SEQ ID NO: 1709964 - DNA, 25 bp, Homo sapien
tgtggctgggacaggtactgagccc

SEQ ID NO: 1709965 - DNA, 25 bp, Homo sapien
ggctgggacaggtactgagcccatc

SEQ ID NO: 1709966 - DNA, 25 bp, Homo sapien
tctgaagtctcccacccgaatgggc

SEQ ID NO: 1709967 - DNA, 25 bp, Homo sapien
tcgggaaggtcttatgcgctgagca

SEQ ID NO: 1709968 - DNA, 25 bp, Homo sapien
cgcagagcctgtcgggaaggtctta

SEQ ID NO: 1709969 - DNA, 25 bp, Homo sapien
tcaaacccgagcatctcgggaactc

SEQ ID NO: 1709970 - DNA, 25 bp, Homo sapien
attagtgtctgacgctggagggccc

SEQ ID NO: 1709971 - DNA, 25 bp, Homo sapien
gttcagtccattgccacaccatgag

SEQ ID NO: 1709972 - DNA, 25 bp, Homo sapien
aagacagacccaattcagactggtt

SEQ ID NO: 1709973 - DNA, 25 bp, Homo sapien
gaggtcagtctatgttgttgcacag

SEQ ID NO: 1709974 - DNA, 25 bp, Homo sapien
caccatgagcaacaatacttctgag

SEQ ID NO: 1709975 - DNA, 25 bp, Homo sapien
tcttctgcttaggaaagagcgccat

SEQ ID NO: 1709976 - DNA, 25 bp, Homo sapien
tcttctggctgtcaggtttcttctg

SEQ ID NO: 1709977 - DNA, 25 bp, Homo sapien
gctgtcaggtttcttctgcttagga

SEQ ID NO: 1709978 - DNA, 25 bp, Homo sapien
ggtttcttctgcttaggaaagagcg

SEQ ID NO: 1709979 - DNA, 25 bp, Homo sapien
ccagtttggggttggacagtcagtt

SEQ ID NO: 1709980 - DNA, 25 bp, Homo sapien
tatgcatgagaactgtctctccagc

SEQ ID NO: 1709981 - DNA, 25 bp, Homo sapien
gggttggacagtcagttgctgagca

SEQ ID NO: 1709982 - DNA, 25 bp, Homo sapien
tgatggtctttgtgctaggttctag

SEQ ID NO: 1709983 - DNA, 25 bp, Homo sapien
taaatccaccagagaatgtcaggcg

SEQ ID NO: 1709984 - DNA, 25 bp, Homo sapien
catattatatagctggctggagcct

SEQ ID NO: 1709985 - DNA, 25 bp, Homo sapien
acctggcatgccttagcgtttgtga

SEQ ID NO: 1709986 - DNA, 25 bp, Homo sapien
taattagtcatccactagtgtctgc

SEQ ID NO: 1709987 - DNA, 25 bp, Homo sapien
tgagtgtctacccatatatccagga

SEQ ID NO: 1709988 - DNA, 25 bp, Homo sapien
tgagaagccagcaagcccttagttt

SEQ ID NO: 1709989 - DNA, 25 bp, Homo sapien
tgctgagttctatggtaatccctgc

SEQ ID NO: 1709990 - DNA, 25 bp, Homo sapien
tatggtgtaaggaacagatccagct

SEQ ID NO: 1709991 - DNA, 25 bp, Homo sapien
ccttactctcattgaagcagaactg

SEQ ID NO: 1709992 - DNA, 25 bp, Homo sapien
ggtctctattagaccttcctggagg

SEQ ID NO: 1709993 - DNA, 25 bp, Homo sapien
tggtgtgcagcggtctctattagac

SEQ ID NO: 1709994 - DNA, 25 bp, Homo sapien
tggaggccttactctcattgaagca

SEQ ID NO: 1709995 - DNA, 25 bp, Homo sapien
catcaaagcctcaagaatatgggcc

SEQ ID NO: 1709996 - DNA, 25 bp, Homo sapien
tggctgacattctccctcaagtggg

SEQ ID NO: 1709997 - DNA, 25 bp, Homo sapien
taaagaatgctgagtggatccaaga

SEQ ID NO: 1709998 - DNA, 25 bp, Homo sapien
ctaggcctgaggaagctatactgac

SEQ ID NO: 1709999 - DNA, 25 bp, Homo sapien
tgctggtggccagtagtttctccgg

SEQ ID NO: 1710000 - DNA, 25 bp, Homo sapien
gaaacgcataaccaaatccttgttg

SEQ ID NO: 1710001 - DNA, 25 bp, Homo sapien
gttaaccgtcatggcctcagtcttg

SEQ ID NO: 1710002 - DNA, 25 bp, Homo sapien
agtcccagttgcaccagttaaccgt

SEQ ID NO: 1710003 - DNA, 25 bp, Homo sapien
agcagcaggagacctcaccatgtca

SEQ ID NO: 1710004 - DNA, 25 bp, Homo sapien
atgtcacctccgacttgcccagaca

SEQ ID NO: 1710005 - DNA, 25 bp, Homo sapien
gcccctctcccaatgaggcagccaa

SEQ ID NO: 1710006 - DNA, 25 bp, Homo sapien
atgaggcagccaacaacccagagcc

SEQ ID NO: 1710007 - DNA, 25 bp, Homo sapien
gttctgggccggatgaaaatggaca

SEQ ID NO: 1710008 - DNA, 25 bp, Homo sapien
ggtgaactacactatccagagcctt

SEQ ID NO: 1710009 - DNA, 25 bp, Homo sapien
cattccattcagtatgaacgggcta

SEQ ID NO: 1710010 - DNA, 25 bp, Homo sapien
tccaggaactcctcaataagcagcc

SEQ ID NO: 1710011 - DNA, 25 bp, Homo sapien
ttacggatcctgtttggctactgag

SEQ ID NO: 1710012 - DNA, 25 bp, Homo sapien
cagaaccgcctgagaattgagattg

SEQ ID NO: 1710013 - DNA, 25 bp, Homo sapien
tacgttctcaacatgatggctttgc

SEQ ID NO: 1710014 - DNA, 25 bp, Homo sapien
tgctgtgtgcaccagttcgagatga

SEQ ID NO: 1710015 - DNA, 25 bp, Homo sapien
ggaccatcttaaagagcaactatca

SEQ ID NO: 1710016 - DNA, 25 bp, Homo sapien
aaagagcaactatcagcaactcccc

SEQ ID NO: 1710017 - DNA, 25 bp, Homo sapien
aaggcaaggtcaaggagacagtgca

SEQ ID NO: 1710018 - DNA, 25 bp, Homo sapien
ggagacagtgcacaatgccttttgg

SEQ ID NO: 1710019 - DNA, 25 bp, Homo sapien
tgattactacatggaagagaaggtt

SEQ ID NO: 1710020 - DNA, 25 bp, Homo sapien
aagagaaggttttacctccaagcag

SEQ ID NO: 1710021 - DNA, 25 bp, Homo sapien
gaagagaaggttttacctccaagca

SEQ ID NO: 1710022 - DNA, 25 bp, Homo sapien
tactacatggaagagaaggttttac

SEQ ID NO: 1710023 - DNA, 25 bp, Homo sapien
gtctgacagaaaccgttaatgaagt

SEQ ID NO: 1710024 - DNA, 25 bp, Homo sapien
tctgacagaaaccgttaatgaagtt

SEQ ID NO: 1710025 - DNA, 25 bp, Homo sapien
tgacagaaaccgttaatgaagtttc

SEQ ID NO: 1710026 - DNA, 25 bp, Homo sapien
ctgacagaaaccgttaatgaagttt

SEQ ID NO: 1710027 - DNA, 25 bp, Homo sapien
cagcaaaatgccagacgtcaaggag

SEQ ID NO: 1710028 - DNA, 25 bp, Homo sapien
gagggcaggtcctgtaagcccgaaa

SEQ ID NO: 1710029 - DNA, 25 bp, Homo sapien
caggaagacaagagcggctccgagg

SEQ ID NO: 1710030 - DNA, 25 bp, Homo sapien
cccgaaatatcctggcgactcagag

SEQ ID NO: 1710031 - DNA, 25 bp, Homo sapien
ccagtatactcgactgtacttgcat

SEQ ID NO: 1710032 - DNA, 25 bp, Homo sapien
ctttagttgactgtttatcttccag

SEQ ID NO: 1710033 - DNA, 25 bp, Homo sapien
ttatcttccagtatactcgactgta

SEQ ID NO: 1710034 - DNA, 25 bp, Homo sapien
cactttagttgactgtttatcttcc

SEQ ID NO: 1710035 - DNA, 25 bp, Homo sapien
cttagagacgctgtcggtgaaggaa

SEQ ID NO: 1710036 - DNA, 25 bp, Homo sapien
aaaggatggccacgactttccccat

SEQ ID NO: 1710037 - DNA, 25 bp, Homo sapien
ttacaaggtgaaaaaggatggccac

SEQ ID NO: 1710038 - DNA, 25 bp, Homo sapien
gcactgggaaggacttacaaggtga

SEQ ID NO: 1710039 - DNA, 25 bp, Homo sapien
gaataactactttctaacacgcagc

SEQ ID NO: 1710040 - DNA, 25 bp, Homo sapien
cgtgcccagctatgtataagggcta

SEQ ID NO: 1710041 - DNA, 25 bp, Homo sapien
cacgctctgagcttatattaggttc

SEQ ID NO: 1710042 - DNA, 25 bp, Homo sapien
tacatgataaggtatctctccgtgc

SEQ ID NO: 1710043 - DNA, 25 bp, Homo sapien
gtgtcctgttctccgacttgaaccg

SEQ ID NO: 1710044 - DNA, 25 bp, Homo sapien
gttttatttagctggatccttctgg

SEQ ID NO: 1710045 - DNA, 25 bp, Homo sapien
ttgaaccgggcgtggcatcagagcc

SEQ ID NO: 1710046 - DNA, 25 bp, Homo sapien
catttctatcatcaactgacgctga

SEQ ID NO: 1710047 - DNA, 25 bp, Homo sapien
gaagggcctgaaccccaagattcca

SEQ ID NO: 1710048 - DNA, 25 bp, Homo sapien
tggaaggatgcacaagatttggctg

SEQ ID NO: 1710049 - DNA, 25 bp, Homo sapien
ccacaagaattaagctagaagtcaa

SEQ ID NO: 1710050 - DNA, 25 bp, Homo sapien
aagtcaaagtgttatgcaagccaga

SEQ ID NO: 1710051 - DNA, 25 bp, Homo sapien
atcactgtggccgtaggcctcacag

SEQ ID NO: 1710052 - DNA, 25 bp, Homo sapien
ggagcaggtagaaggacaagatcac

SEQ ID NO: 1710053 - DNA, 25 bp, Homo sapien
gacaagatcactgtggccgtaggcc

SEQ ID NO: 1710054 - DNA, 25 bp, Homo sapien
gaaggacaagatcactgtggccgta

SEQ ID NO: 1710055 - DNA, 25 bp, Homo sapien
tctggtcagcaaccctggctagagg

SEQ ID NO: 1710056 - DNA, 25 bp, Homo sapien
tgtatgtacagcaaaggctcctggg

SEQ ID NO: 1710057 - DNA, 25 bp, Homo sapien
gcattaaaggagtcagtgggcacca

SEQ ID NO: 1710058 - DNA, 25 bp, Homo sapien
caaggacatgttagggtgaccaacc

SEQ ID NO: 1710059 - DNA, 25 bp, Homo sapien
caggatatctgggagcccatacact

SEQ ID NO: 1710060 - DNA, 25 bp, Homo sapien
aggatatctgggagcccatacactt

SEQ ID NO: 1710061 - DNA, 25 bp, Homo sapien
ggatatctgggagcccatacacttg

SEQ ID NO: 1710062 - DNA, 25 bp, Homo sapien
gagcgccgagttggcagcagctagc

SEQ ID NO: 1710063 - DNA, 25 bp, Homo sapien
gaggagagcgccgagttggcagcag

SEQ ID NO: 1710064 - DNA, 25 bp, Homo sapien
ggagagcgccgagttggcagcagct

SEQ ID NO: 1710065 - DNA, 25 bp, Homo sapien
agggaggagagcgccgagttggcag

SEQ ID NO: 1710066 - DNA, 25 bp, Homo sapien
tgtgtagccaggatgtcgtgctggg

SEQ ID NO: 1710067 - DNA, 25 bp, Homo sapien
cctgtgtagccaggatgtcgtgctg

SEQ ID NO: 1710068 - DNA, 25 bp, Homo sapien
gtagccaggatgtcgtgctgggctg

SEQ ID NO: 1710069 - DNA, 25 bp, Homo sapien
gcctgtgtagccaggatgtcgtgct

SEQ ID NO: 1710070 - DNA, 25 bp, Homo sapien
acaatgtgaggcgagtttgtttggt

SEQ ID NO: 1710071 - DNA, 25 bp, Homo sapien
ttttccaggcaaacgacctctggct

SEQ ID NO: 1710072 - DNA, 25 bp, Homo sapien
tggcttcttgccctggccaaccaca

SEQ ID NO: 1710073 - DNA, 25 bp, Homo sapien
ggccaaccacagaggacaatgtgag

SEQ ID NO: 1710074 - DNA, 25 bp, Homo sapien
ggcggggctgctccgtgtaatccca

SEQ ID NO: 1710075 - DNA, 25 bp, Homo sapien
gtaatcccacccaattcccagcttc

SEQ ID NO: 1710076 - DNA, 25 bp, Homo sapien
gcgaggctcccgatgctaccggctc

SEQ ID NO: 1710077 - DNA, 25 bp, Homo sapien
agcgaggcggagagtgcgacgaggc

SEQ ID NO: 1710078 - DNA, 25 bp, Homo sapien
ctttgctgtactgggcggcgcgggc

SEQ ID NO: 1710079 - DNA, 25 bp, Homo sapien
cgggcgtggaccagcaggacaagca

SEQ ID NO: 1710080 - DNA, 25 bp, Homo sapien
gcagagcccgggtacgcgccccgag

SEQ ID NO: 1710081 - DNA, 25 bp, Homo sapien
gcggcgcgggcgtggaccagcagga

SEQ ID NO: 1710082 - DNA, 25 bp, Homo sapien
taggcatggtgtctacctgctggcc

SEQ ID NO: 1710083 - DNA, 25 bp, Homo sapien
ctcgctcaggctccataggcatggt

SEQ ID NO: 1710084 - DNA, 25 bp, Homo sapien
tccataggcatggtgtctacctgct

SEQ ID NO: 1710085 - DNA, 25 bp, Homo sapien
cataggcatggtgtctacctgctgg

SEQ ID NO: 1710086 - DNA, 25 bp, Homo sapien
gtcccctgtgtagccagacttgcag

SEQ ID NO: 1710087 - DNA, 25 bp, Homo sapien
ctttgcagtgtttgccgtcccctgt

SEQ ID NO: 1710088 - DNA, 25 bp, Homo sapien
gtttgccgtcccctgtgtagccaga

SEQ ID NO: 1710089 - DNA, 25 bp, Homo sapien
gatgcacttgtatgacctcggggtg

SEQ ID NO: 1710090 - DNA, 25 bp, Homo sapien
tgtgccaggtggaatccatcatagc

SEQ ID NO: 1710091 - DNA, 25 bp, Homo sapien
cagggatgttgacacagtcatgcac

SEQ ID NO: 1710092 - DNA, 25 bp, Homo sapien
ccagacagttgtgtccgtcatgtgc

SEQ ID NO: 1710093 - DNA, 25 bp, Homo sapien
tcatagcaggtacaccggtaattgc

SEQ ID NO: 1710094 - DNA, 25 bp, Homo sapien
cttctggccgctggatacaggtatg

SEQ ID NO: 1710095 - DNA, 25 bp, Homo sapien
agccttcccggcagtggcactcata

SEQ ID NO: 1710096 - DNA, 25 bp, Homo sapien
tcatagctgcccatcatgttgacac

SEQ ID NO: 1710097 - DNA, 25 bp, Homo sapien
gctctgctgacagccgccgttgccc

SEQ ID NO: 1710098 - DNA, 25 bp, Homo sapien
gtgaatgctctgtacccctggatgt

SEQ ID NO: 1710099 - DNA, 25 bp, Homo sapien
cttgggtgtctcccggcaaatgtgg

SEQ ID NO: 1710100 - DNA, 25 bp, Homo sapien
cagtcccgttggttcttggtaagct

SEQ ID NO: 1710101 - DNA, 25 bp, Homo sapien
taagctcaaagccaggacggcattc

SEQ ID NO: 1710102 - DNA, 25 bp, Homo sapien
cacagccgtggttcttgttcatgca

SEQ ID NO: 1710103 - DNA, 25 bp, Homo sapien
ctctgtgtcatcacacgtgtgctgg

SEQ ID NO: 1710104 - DNA, 25 bp, Homo sapien
tggcagccgccgttaccatagttgc

SEQ ID NO: 1710105 - DNA, 25 bp, Homo sapien
caaacttgatatggcagccgcaccg

SEQ ID NO: 1710106 - DNA, 25 bp, Homo sapien
cgtcggtatggagcacaaacttgat

SEQ ID NO: 1710107 - DNA, 25 bp, Homo sapien
gagtggggatgtgctgctctagccg

SEQ ID NO: 1710108 - DNA, 25 bp, Homo sapien
tggggatgtgctgctctagccgcct

SEQ ID NO: 1710109 - DNA, 25 bp, Homo sapien
gggatgtgctgctctagccgccttt

SEQ ID NO: 1710110 - DNA, 25 bp, Homo sapien
gatgtgctgctctagccgcctttcc

SEQ ID NO: 1710111 - DNA, 25 bp, Homo sapien
ggggatggtaatgaggttacaagcc

SEQ ID NO: 1710112 - DNA, 25 bp, Homo sapien
tgggggatggtaatgaggttacaag

SEQ ID NO: 1710113 - DNA, 25 bp, Homo sapien
agtgggggatggtaatgaggttaca

SEQ ID NO: 1710114 - DNA, 25 bp, Homo sapien
ggatggtaatgaggttacaagcctg

SEQ ID NO: 1710115 - DNA, 25 bp, Homo sapien
ggacaccagtcgctgcatcatggca

SEQ ID NO: 1710116 - DNA, 25 bp, Homo sapien
aggtgcagtggacaccagtcgctgc

SEQ ID NO: 1710117 - DNA, 25 bp, Homo sapien
tcgctgcatcatggcacttactgtc

SEQ ID NO: 1710118 - DNA, 25 bp, Homo sapien
agcccccgttgttgacagcacaggt

SEQ ID NO: 1710119 - DNA, 25 bp, Homo sapien
gcttatagcctttcttgcaactgca

SEQ ID NO: 1710120 - DNA, 25 bp, Homo sapien
tcacagcccccgttgtttaagcggc

SEQ ID NO: 1710121 - DNA, 25 bp, Homo sapien
cttgcaactgcattcgaagctgccc

SEQ ID NO: 1710122 - DNA, 25 bp, Homo sapien
tgtgttgcggcaaatatggtcacag

SEQ ID NO: 1710123 - DNA, 25 bp, Homo sapien
ggttcgatcaaaggaacactcgtct

SEQ ID NO: 1710124 - DNA, 25 bp, Homo sapien
actggaagcttcctggtgtgttgac

SEQ ID NO: 1710125 - DNA, 25 bp, Homo sapien
ccccacagtgggtgataccatacaa

SEQ ID NO: 1710126 - DNA, 25 bp, Homo sapien
tgtggtcacaggttcgatcaaagga

SEQ ID NO: 1710127 - DNA, 25 bp, Homo sapien
gccaggagtgttgatgcagccaaag

SEQ ID NO: 1710128 - DNA, 25 bp, Homo sapien
cctccccggttgatgctgcattcat

SEQ ID NO: 1710129 - DNA, 25 bp, Homo sapien
caaagcggcaacctccccggttgat

SEQ ID NO: 1710130 - DNA, 25 bp, Homo sapien
ttgccattccagtgcagccgaccct

SEQ ID NO: 1710131 - DNA, 25 bp, Homo sapien
gcagtgtcatctttggccagcagag

SEQ ID NO: 1710132 - DNA, 25 bp, Homo sapien
tgctccctgaaatggcagtgtcatc

SEQ ID NO: 1710133 - DNA, 25 bp, Homo sapien
gatactctatgctttccagaacccc

SEQ ID NO: 1710134 - DNA, 25 bp, Homo sapien
tttccccaatgtgatactctatgct

SEQ ID NO: 1710135 - DNA, 25 bp, Homo sapien
agggacaggtcagggcacaggtgtc

SEQ ID NO: 1710136 - DNA, 25 bp, Homo sapien
aggtgtccttcttgccagaccggtt

SEQ ID NO: 1710137 - DNA, 25 bp, Homo sapien
tgtccttcttgccagaccggttgca

SEQ ID NO: 1710138 - DNA, 25 bp, Homo sapien
ggtgtccttcttgccagaccggttg

SEQ ID NO: 1710139 - DNA, 25 bp, Homo sapien
gaaggagctgcctgaacggccagtc

SEQ ID NO: 1710140 - DNA, 25 bp, Homo sapien
gagctgcctgaacggccagtccttc

SEQ ID NO: 1710141 - DNA, 25 bp, Homo sapien
acccccgctggctggaggaatccag

SEQ ID NO: 1710142 - DNA, 25 bp, Homo sapien
ctgaacggccagtccttcctctttt

SEQ ID NO: 1710143 - DNA, 25 bp, Homo sapien
acagctcaccgtgaagccattctca

SEQ ID NO: 1710144 - DNA, 25 bp, Homo sapien
tgttcccattgtggccagctcgggc

SEQ ID NO: 1710145 - DNA, 25 bp, Homo sapien
tgctgttcccattgtggccagctcg

SEQ ID NO: 1710146 - DNA, 25 bp, Homo sapien
tggtgctgttcccattgtggccagc

SEQ ID NO: 1710147 - DNA, 25 bp, Homo sapien
gaggcccgttgtttaatggacagca

SEQ ID NO: 1710148 - DNA, 25 bp, Homo sapien
tgatcttgaaggaggcccgttgttt

SEQ ID NO: 1710149 - DNA, 25 bp, Homo sapien
caaacggcatttggcatccttgatc

SEQ ID NO: 1710150 - DNA, 25 bp, Homo sapien
gttttgcctttgtttcgcaggtgca

SEQ ID NO: 1710151 - DNA, 25 bp, Homo sapien
tgagccttgtgacctctttgcctgg

SEQ ID NO: 1710152 - DNA, 25 bp, Homo sapien
gcccttgcccttccgagaggagtca

SEQ ID NO: 1710153 - DNA, 25 bp, Homo sapien
gcccttccgagaggagtcacactta

SEQ ID NO: 1710154 - DNA, 25 bp, Homo sapien
gatgaaggtgacctggcattcagag

SEQ ID NO: 1710155 - DNA, 25 bp, Homo sapien
tgtgagcaggagggcaggggagcaa

SEQ ID NO: 1710156 - DNA, 25 bp, Homo sapien
gagggcaggggagcaaagctgggag

SEQ ID NO: 1710157 - DNA, 25 bp, Homo sapien
aggagggcaggggagcaaagctggg

SEQ ID NO: 1710158 - DNA, 25 bp, Homo sapien
gagcaggagggcaggggagcaaagc

SEQ ID NO: 1710159 - DNA, 25 bp, Homo sapien
gtggatggccgtgtgtatcagggag

SEQ ID NO: 1710160 - DNA, 25 bp, Homo sapien
ctggtggtggatggccgtgtgtatc

SEQ ID NO: 1710161 - DNA, 25 bp, Homo sapien
tggccgtgtgtatcagggaggagaa

SEQ ID NO: 1710162 - DNA, 25 bp, Homo sapien
ccgtgtgtatcagggaggagaaaga

SEQ ID NO: 1710163 - DNA, 25 bp, Homo sapien
ctgtcggaggcagggcagcccacag

SEQ ID NO: 1710164 - DNA, 25 bp, Homo sapien
tacaggactccatcggctctgctcg

SEQ ID NO: 1710165 - DNA, 25 bp, Homo sapien
tcttcagggatcctttcagccgccg

SEQ ID NO: 1710166 - DNA, 25 bp, Homo sapien
acacttggtcccagcacggtgctgc

SEQ ID NO: 1710167 - DNA, 25 bp, Homo sapien
cctggttgatggactttctgagcat

SEQ ID NO: 1710168 - DNA, 25 bp, Homo sapien
acactgctccgtctggccgtggtaa

SEQ ID NO: 1710169 - DNA, 25 bp, Homo sapien
ctgcacacgtggtgacgttggtggc

SEQ ID NO: 1710170 - DNA, 25 bp, Homo sapien
gaaggtgcccgctgggcatggcaca

SEQ ID NO: 1710171 - DNA, 25 bp, Homo sapien
ggcaaaggtcgcaggagagctgccc

SEQ ID NO: 1710172 - DNA, 25 bp, Homo sapien
tctgtattgtttgttcccctggcac

SEQ ID NO: 1710173 - DNA, 25 bp, Homo sapien
cccactctgtattgtttgttcccct

SEQ ID NO: 1710174 - DNA, 25 bp, Homo sapien
ctctgtattgtttgttcccctggca

SEQ ID NO: 1710175 - DNA, 25 bp, Homo sapien
cactctgtattgtttgttcccctgg

SEQ ID NO: 1710176 - DNA, 25 bp, Homo sapien
tgccctttgggaaatcccatgccca

SEQ ID NO: 1710177 - DNA, 25 bp, Homo sapien
atgggcatcccagtgcccaccctac

SEQ ID NO: 1710178 - DNA, 25 bp, Homo sapien
gggaaatcccatgcccatgggcatc

SEQ ID NO: 1710179 - DNA, 25 bp, Homo sapien
tgggcctgccctttgggaaatccca

SEQ ID NO: 1710180 - DNA, 25 bp, Homo sapien
ctacagagtgttggccaggtgggca

SEQ ID NO: 1710181 - DNA, 25 bp, Homo sapien
cagagtgttggccaggtgggcactg

SEQ ID NO: 1710182 - DNA, 25 bp, Homo sapien
gagtgttggccaggtgggcactgac

SEQ ID NO: 1710183 - DNA, 25 bp, Homo sapien
tacagagtgttggccaggtgggcac

SEQ ID NO: 1710184 - DNA, 25 bp, Homo sapien
caccacaagggaagcatagggtccg

SEQ ID NO: 1710185 - DNA, 25 bp, Homo sapien
agcatagggtccgtcctgcttcagg

SEQ ID NO: 1710186 - DNA, 25 bp, Homo sapien
cacagtcttggaaggaaatggcccc

SEQ ID NO: 1710187 - DNA, 25 bp, Homo sapien
tcaggttggtaggtgccacgtgggc

SEQ ID NO: 1710188 - DNA, 25 bp, Homo sapien
agttctgacggaagtcgggctgata

SEQ ID NO: 1710189 - DNA, 25 bp, Homo sapien
ctggtagagccatcaaagtctgtgc

SEQ ID NO: 1710190 - DNA, 25 bp, Homo sapien
cacagcgaatacagcggtggatgct

SEQ ID NO: 1710191 - DNA, 25 bp, Homo sapien
tgcattgggccacactggtagagcc

SEQ ID NO: 1710192 - DNA, 25 bp, Homo sapien
ccccagtggataaaacaagacagag

SEQ ID NO: 1710193 - DNA, 25 bp, Homo sapien
tgcagccaaaccccagtggataaaa

SEQ ID NO: 1710194 - DNA, 25 bp, Homo sapien
ccagtggataaaacaagacagagaa

SEQ ID NO: 1710195 - DNA, 25 bp, Homo sapien
acaagacagagaagggaagtcagtg

SEQ ID NO: 1710196 - DNA, 25 bp, Homo sapien
tctggtaccacgataaggatcttgc

SEQ ID NO: 1710197 - DNA, 25 bp, Homo sapien
atgacgaggacgtccccacactcat

SEQ ID NO: 1710198 - DNA, 25 bp, Homo sapien
caccagctgggtagttgcccgggta

SEQ ID NO: 1710199 - DNA, 25 bp, Homo sapien
gggactcaatatagccagtgaactc

SEQ ID NO: 1710200 - DNA, 25 bp, Homo sapien
catttcttcctgtatcagtctctct

SEQ ID NO: 1710201 - DNA, 25 bp, Homo sapien
taaccagatttggactgcccttccc

SEQ ID NO: 1710202 - DNA, 25 bp, Homo sapien
tagatccctaacttcactgccccat

SEQ ID NO: 1710203 - DNA, 25 bp, Homo sapien
tgttctccgccttaaccagatttgg

SEQ ID NO: 1710204 - DNA, 25 bp, Homo sapien
tgtaacgccattggagttctagccc

SEQ ID NO: 1710205 - DNA, 25 bp, Homo sapien
ctgggcactcacatagtgtaataaa

SEQ ID NO: 1710206 - DNA, 25 bp, Homo sapien
gaatggcaaaaatgctaggatagga

SEQ ID NO: 1710207 - DNA, 25 bp, Homo sapien
gataggaaagtgatacatgtaacgc

SEQ ID NO: 1710208 - DNA, 25 bp, Homo sapien
caatgggacgctcgtaggtctggca

SEQ ID NO: 1710209 - DNA, 25 bp, Homo sapien
cagagcttcctggaacgggcagtga

SEQ ID NO: 1710210 - DNA, 25 bp, Homo sapien
cgcttgtcttgaagttgatccagag

SEQ ID NO: 1710211 - DNA, 25 bp, Homo sapien
taacatagggaatctggaagccacg

SEQ ID NO: 1710212 - DNA, 25 bp, Homo sapien
ccccttctcacccacctccttggct

SEQ ID NO: 1710213 - DNA, 25 bp, Homo sapien
cttctcacccacctccttggcttac

SEQ ID NO: 1710214 - DNA, 25 bp, Homo sapien
ccttctcacccacctccttggctta

SEQ ID NO: 1710215 - DNA, 25 bp, Homo sapien
ctccccttctcacccacctccttgg

SEQ ID NO: 1710216 - DNA, 25 bp, Homo sapien
tgtcttctaccagctgctcatagtc

SEQ ID NO: 1710217 - DNA, 25 bp, Homo sapien
ggccatctcgcacaatgtcttctac

SEQ ID NO: 1710218 - DNA, 25 bp, Homo sapien
tcttctaccagctgctcatagtcct

SEQ ID NO: 1710219 - DNA, 25 bp, Homo sapien
catagagccggccatctcgcacaat

SEQ ID NO: 1710220 - DNA, 25 bp, Homo sapien
cttgatgaaggattttggcagcatc

SEQ ID NO: 1710221 - DNA, 25 bp, Homo sapien
gctagcacctcaaagaaggccttga

SEQ ID NO: 1710222 - DNA, 25 bp, Homo sapien
tagttctgggggtgggctagcacct

SEQ ID NO: 1710223 - DNA, 25 bp, Homo sapien
gcagcttgatgaaggattttggcag

SEQ ID NO: 1710224 - DNA, 25 bp, Homo sapien
aattgggtctctgagcctagggtta

SEQ ID NO: 1710225 - DNA, 25 bp, Homo sapien
ggcttaaaaaattgggtctctgagc

SEQ ID NO: 1710226 - DNA, 25 bp, Homo sapien
ttaaaaaattgggtctctgagccta

SEQ ID NO: 1710227 - DNA, 25 bp, Homo sapien
aaaaattgggtctctgagcctaggg

SEQ ID NO: 1710228 - DNA, 25 bp, Homo sapien
ggaagtccagagctcaaaccatgtg

SEQ ID NO: 1710229 - DNA, 25 bp, Homo sapien
aggaccctgggctgttagaatcacc

SEQ ID NO: 1710230 - DNA, 25 bp, Homo sapien
gatgcctctgcgcaattaccctgga

SEQ ID NO: 1710231 - DNA, 25 bp, Homo sapien
cattttggcccctgactagcaaggc

SEQ ID NO: 1710232 - DNA, 25 bp, Homo sapien
tctctagggccaaagaccaggactg

SEQ ID NO: 1710233 - DNA, 25 bp, Homo sapien
taaagacctagaatgtccctgagcg

SEQ ID NO: 1710234 - DNA, 25 bp, Homo sapien
tggctttccaagagacgcaaaacgg

SEQ ID NO: 1710235 - DNA, 25 bp, Homo sapien
tcagaaagttatcctaggctgggcg

SEQ ID NO: 1710236 - DNA, 25 bp, Homo sapien
aggattcggtccagcagaagcgtga

SEQ ID NO: 1710237 - DNA, 25 bp, Homo sapien
cattccaaggattcggtccagcaga

SEQ ID NO: 1710238 - DNA, 25 bp, Homo sapien
tgtccattccaaggattcggtccag

SEQ ID NO: 1710239 - DNA, 25 bp, Homo sapien
tccaaggattcggtccagcagaagc

SEQ ID NO: 1710240 - DNA, 25 bp, Homo sapien
tcctttcctcttggcgcgcctctac

SEQ ID NO: 1710241 - DNA, 25 bp, Homo sapien
cggccgggatctgaaccgagctctt

SEQ ID NO: 1710242 - DNA, 25 bp, Homo sapien
tatagaaaataccgggcacggtcca

SEQ ID NO: 1710243 - DNA, 25 bp, Homo sapien
gcggcagccatccaacttatcctgg

SEQ ID NO: 1710244 - DNA, 25 bp, Homo sapien
tccgccgacagaccgccatgcaccg

SEQ ID NO: 1710245 - DNA, 25 bp, Homo sapien
ccccgagggcgactccgccgacaga

SEQ ID NO: 1710246 - DNA, 25 bp, Homo sapien
cacaacccgcctgcgccatagcccg

SEQ ID NO: 1710247 - DNA, 25 bp, Homo sapien
agcgccggccccacaacccgcctgc

SEQ ID NO: 1710248 - DNA, 25 bp, Homo sapien
cagtaggtattcagcaagccaatcg

SEQ ID NO: 1710249 - DNA, 25 bp, Homo sapien
taaatccctagcactcaggacagag

SEQ ID NO: 1710250 - DNA, 25 bp, Homo sapien
taccaaaagtcccatagctgaaggg

SEQ ID NO: 1710251 - DNA, 25 bp, Homo sapien
caacataatgcaaggtatgggccac

SEQ ID NO: 1710252 - DNA, 25 bp, Homo sapien
aattatcaagattggtgaggtgagg

SEQ ID NO: 1710253 - DNA, 25 bp, Homo sapien
tcaattatcaagattggtgaggtga

SEQ ID NO: 1710254 - DNA, 25 bp, Homo sapien
tatcaagattggtgaggtgaggatg

SEQ ID NO: 1710255 - DNA, 25 bp, Homo sapien
ttatcaagattggtgaggtgaggat

SEQ ID NO: 1710256 - DNA, 25 bp, Homo sapien
tccaggacaaaatttccccattcca

SEQ ID NO: 1710257 - DNA, 25 bp, Homo sapien
tcctctaaactaattttgtgggtga

SEQ ID NO: 1710258 - DNA, 25 bp, Homo sapien
tgtcaattaggatgagctatatctt

SEQ ID NO: 1710259 - DNA, 25 bp, Homo sapien
cgtggtagatgttgactatgtctcc

SEQ ID NO: 1710260 - DNA, 25 bp, Homo sapien
tttaatgcagtagtcttcaaactgt

SEQ ID NO: 1710261 - DNA, 25 bp, Homo sapien
ttaatgcagtagtcttcaaactgtt

SEQ ID NO: 1710262 - DNA, 25 bp, Homo sapien
ttttaatgcagtagtcttcaaactg

SEQ ID NO: 1710263 - DNA, 25 bp, Homo sapien
taatgcagtagtcttcaaactgttt

SEQ ID NO: 1710264 - DNA, 25 bp, Homo sapien
tcaggtctgggttttaatccaggct

SEQ ID NO: 1710265 - DNA, 25 bp, Homo sapien
cagacataggttgaaaagggattgc

SEQ ID NO: 1710266 - DNA, 25 bp, Homo sapien
tcacctctgtcaaatactcacatgg

SEQ ID NO: 1710267 - DNA, 25 bp, Homo sapien
ggtttaactgagcacaactgcactc

SEQ ID NO: 1710268 - DNA, 25 bp, Homo sapien
gaagttggcttctggccagcaccaa

SEQ ID NO: 1710269 - DNA, 25 bp, Homo sapien
gcactcagacatgaagttggcttct

SEQ ID NO: 1710270 - DNA, 25 bp, Homo sapien
gtgcactcagacatgaagttggctt

SEQ ID NO: 1710271 - DNA, 25 bp, Homo sapien
tgaagttggcttctggccagcacca

SEQ ID NO: 1710272 - DNA, 25 bp, Homo sapien
gacgtaggctgttgtcccatcacta

SEQ ID NO: 1710273 - DNA, 25 bp, Homo sapien
tcactaagggtcaccgtgtgcagcc

SEQ ID NO: 1710274 - DNA, 25 bp, Homo sapien
ctttgacagcttgctggacgtaggc

SEQ ID NO: 1710275 - DNA, 25 bp, Homo sapien
gggtcaccgtgtgcagccccaagct

SEQ ID NO: 1710276 - DNA, 25 bp, Homo sapien
aaagcactaaaaaactgtgacaggg

SEQ ID NO: 1710277 - DNA, 25 bp, Homo sapien
tgcttagtagtttgaatgtttgaat

SEQ ID NO: 1710278 - DNA, 25 bp, Homo sapien
cttaaaagagcatcttgtacatggc

SEQ ID NO: 1710279 - DNA, 25 bp, Homo sapien
gctgctgcacccagattattatttt

SEQ ID NO: 1710280 - DNA, 25 bp, Homo sapien
aaggaaaagtgtccctggcctgcag

SEQ ID NO: 1710281 - DNA, 25 bp, Homo sapien
aagacacgaatgctatctggctgcc

SEQ ID NO: 1710282 - DNA, 25 bp, Homo sapien
cagtaggaacaaggcagtatttgcc

SEQ ID NO: 1710283 - DNA, 25 bp, Homo sapien
gacagtgacaatcatggagtccaga

SEQ ID NO: 1710284 - DNA, 25 bp, Homo sapien
cgagctggatcacctgcccttcaag

SEQ ID NO: 1710285 - DNA, 25 bp, Homo sapien
cacctggtgaatgtatgcggtggtc

SEQ ID NO: 1710286 - DNA, 25 bp, Homo sapien
ctttctgtaccgtcacctggtgaat

SEQ ID NO: 1710287 - DNA, 25 bp, Homo sapien
ggtggtcccatcctcgagctggatc

SEQ ID NO: 1710288 - DNA, 25 bp, Homo sapien
caggcttccctcgacaaggcatggt

SEQ ID NO: 1710289 - DNA, 25 bp, Homo sapien
gcatggtgtgttggggtgccctcac

SEQ ID NO: 1710290 - DNA, 25 bp, Homo sapien
gcttccctcgacaaggcatggtgtg

SEQ ID NO: 1710291 - DNA, 25 bp, Homo sapien
taacgagagcaatgcctgcctttcc

SEQ ID NO: 1710292 - DNA, 25 bp, Homo sapien
ctctgggtgtgcggtgtatgtaagc

SEQ ID NO: 1710293 - DNA, 25 bp, Homo sapien
ctgggtgtgcggtgtatgtaagcca

SEQ ID NO: 1710294 - DNA, 25 bp, Homo sapien
gctgcacaggctgaccatcctcaaa

SEQ ID NO: 1710295 - DNA, 25 bp, Homo sapien
ggtgtgcggtgtatgtaagccatgc

SEQ ID NO: 1710296 - DNA, 25 bp, Homo sapien
cacagccacagggtggtgaatgtag

SEQ ID NO: 1710297 - DNA, 25 bp, Homo sapien
tggagccatcttccagttggacggc

SEQ ID NO: 1710298 - DNA, 25 bp, Homo sapien
ggatggtgctctccgatggcacagc

SEQ ID NO: 1710299 - DNA, 25 bp, Homo sapien
tgcgtctgcactgaagccctcatca

SEQ ID NO: 1710300 - DNA, 25 bp, Homo sapien
tcattgcagtcaccgcctcctgatc

SEQ ID NO: 1710301 - DNA, 25 bp, Homo sapien
agtcacactggtttcattataaata

SEQ ID NO: 1710302 - DNA, 25 bp, Homo sapien
cggtggtgtagagacgcccacagcc

SEQ ID NO: 1710303 - DNA, 25 bp, Homo sapien
acagcccttgtagccacagcggaat

SEQ ID NO: 1710304 - DNA, 25 bp, Homo sapien
cattacggggaatctggctgtcatg

SEQ ID NO: 1710305 - DNA, 25 bp, Homo sapien
aacttgctgcccttttccattacgg

SEQ ID NO: 1710306 - DNA, 25 bp, Homo sapien
aagtcacatctgtatggacggtcac

SEQ ID NO: 1710307 - DNA, 25 bp, Homo sapien
ctggggaagtcacatctgtatggac

SEQ ID NO: 1710308 - DNA, 25 bp, Homo sapien
gggaagtcacatctgtatggacggt

SEQ ID NO: 1710309 - DNA, 25 bp, Homo sapien
agctggggaagtcacatctgtatgg

SEQ ID NO: 1710310 - DNA, 25 bp, Homo sapien
agtgtgggtacggacatgcttctgc

SEQ ID NO: 1710311 - DNA, 25 bp, Homo sapien
agctcctctgggcacttgtatggtt

SEQ ID NO: 1710312 - DNA, 25 bp, Homo sapien
cagtgtgggtacgaacgtggctctt

SEQ ID NO: 1710313 - DNA, 25 bp, Homo sapien
tgggtacggacatgcttctgcaggt

SEQ ID NO: 1710314 - DNA, 25 bp, Homo sapien
gaggggtgtgggaaagagggccatg

SEQ ID NO: 1710315 - DNA, 25 bp, Homo sapien
tgtgaggaggggtgtgggaaagagg

SEQ ID NO: 1710316 - DNA, 25 bp, Homo sapien
ctatgcaaatggtgggatgtgagga

SEQ ID NO: 1710317 - DNA, 25 bp, Homo sapien
tgcaaatggtgggatgtgaggaggg

SEQ ID NO: 1710318 - DNA, 25 bp, Homo sapien
gcacatgtaccttgcggatgttaga

SEQ ID NO: 1710319 - DNA, 25 bp, Homo sapien
gatgtggtgaaggagcggccacagc

SEQ ID NO: 1710320 - DNA, 25 bp, Homo sapien
gattcttatagttggtggcgctggt

SEQ ID NO: 1710321 - DNA, 25 bp, Homo sapien
gcctgtgtgggtgcgcacatgtacc

SEQ ID NO: 1710322 - DNA, 25 bp, Homo sapien
gggacacacatgctgagacacaaca

SEQ ID NO: 1710323 - DNA, 25 bp, Homo sapien
tacacaggagtcatggacggcggat

SEQ ID NO: 1710324 - DNA, 25 bp, Homo sapien
tgagacctgagactctgaatggaca

SEQ ID NO: 1710325 - DNA, 25 bp, Homo sapien
tgtcttagatgggaagcctacagta

SEQ ID NO: 1710326 - DNA, 25 bp, Homo sapien
tgggctgtgaggggggtgggaactg

SEQ ID NO: 1710327 - DNA, 25 bp, Homo sapien
tgggaactggggctggcaaggggga

SEQ ID NO: 1710328 - DNA, 25 bp, Homo sapien
ctgggctgtgaggggggtgggaact

SEQ ID NO: 1710329 - DNA, 25 bp, Homo sapien
gcaccgtgcaaacgtatggcttctc

SEQ ID NO: 1710330 - DNA, 25 bp, Homo sapien
accgtgcaaacgtatggcttctccc

SEQ ID NO: 1710331 - DNA, 25 bp, Homo sapien
ctggcaccgtgcaaacgtatggctt

SEQ ID NO: 1710332 - DNA, 25 bp, Homo sapien
tggcaccgtgcaaacgtatggcttc

SEQ ID NO: 1710333 - DNA, 25 bp, Homo sapien
agtactcggtgaagcgtttcccgca

SEQ ID NO: 1710334 - DNA, 25 bp, Homo sapien
tacaagctcgagtactcggtgaagc

SEQ ID NO: 1710335 - DNA, 25 bp, Homo sapien
gtgcttatacaagctcgagtactcg

SEQ ID NO: 1710336 - DNA, 25 bp, Homo sapien
tgcagtgtgtgtgcaccacgtggtg

SEQ ID NO: 1710337 - DNA, 25 bp, Homo sapien
tggccaaggtggaggtctgccggta

SEQ ID NO: 1710338 - DNA, 25 bp, Homo sapien
cactgcgcttgtgcatggccaaggt

SEQ ID NO: 1710339 - DNA, 25 bp, Homo sapien
tccagctcgccgtgggcactgcgct

SEQ ID NO: 1710340 - DNA, 25 bp, Homo sapien
aggtctgccggtaggtcttgccgca

SEQ ID NO: 1710341 - DNA, 25 bp, Homo sapien
agtcaccatcgccacctgggctggg

SEQ ID NO: 1710342 - DNA, 25 bp, Homo sapien
tcacctccgaaaggtaagctatccg

SEQ ID NO: 1710343 - DNA, 25 bp, Homo sapien
tgggctgggatgtcatctctctctt

SEQ ID NO: 1710344 - DNA, 25 bp, Homo sapien
tcctgagtgatcagagccacctggg

SEQ ID NO: 1710345 - DNA, 25 bp, Homo sapien
tgaccatactgatggcactccccag

SEQ ID NO: 1710346 - DNA, 25 bp, Homo sapien
ggctgcgtctgggtgccatcggcgc

SEQ ID NO: 1710347 - DNA, 25 bp, Homo sapien
tgctgggtgaccatactgatggcac

SEQ ID NO: 1710348 - DNA, 25 bp, Homo sapien
tgccatcggcgctgaccatggtgac

SEQ ID NO: 1710349 - DNA, 25 bp, Homo sapien
cagtgccacctgttgatgacgaaga

SEQ ID NO: 1710350 - DNA, 25 bp, Homo sapien
tggctgtggccaacagtgccacctg

SEQ ID NO: 1710351 - DNA, 25 bp, Homo sapien
tgcactgcaatgtgcgttccgttgg

SEQ ID NO: 1710352 - DNA, 25 bp, Homo sapien
gatgctacacttgagtcctcagcca

SEQ ID NO: 1710353 - DNA, 25 bp, Homo sapien
cacacgctgagcacttagtagggct

SEQ ID NO: 1710354 - DNA, 25 bp, Homo sapien
gagacccacttgctcacggaggaag

SEQ ID NO: 1710355 - DNA, 25 bp, Homo sapien
caagagcgagcctgagacagatgca

SEQ ID NO: 1710356 - DNA, 25 bp, Homo sapien
ccatcggagttatcctgaaggccag

SEQ ID NO: 1710357 - DNA, 25 bp, Homo sapien
cagccactctccgacactgttgtct

SEQ ID NO: 1710358 - DNA, 25 bp, Homo sapien
ctctccgacactgttgtctccaggg

SEQ ID NO: 1710359 - DNA, 25 bp, Homo sapien
agccccttgctgcatggccgcagtg

SEQ ID NO: 1710360 - DNA, 25 bp, Homo sapien
tcctctaaggtctgctgttcctcca

SEQ ID NO: 1710361 - DNA, 25 bp, Homo sapien
ccagcagtctatgtacagggccact

SEQ ID NO: 1710362 - DNA, 25 bp, Homo sapien
tgtcagctcccgaggatgatgcact

SEQ ID NO: 1710363 - DNA, 25 bp, Homo sapien
tgtggctcaaccctacagggccagt

SEQ ID NO: 1710364 - DNA, 25 bp, Homo sapien
tccactgctactgggctgaagagct

SEQ ID NO: 1710365 - DNA, 25 bp, Homo sapien
tgaggcgcccgcccggctgggggcg

SEQ ID NO: 1710366 - DNA, 25 bp, Homo sapien
ggctgaggcgcccgcccggctgggg

SEQ ID NO: 1710367 - DNA, 25 bp, Homo sapien
cccggctgggggcggctctgacact

SEQ ID NO: 1710368 - DNA, 25 bp, Homo sapien
cgcccggctgggggcggctctgaca

SEQ ID NO: 1710369 - DNA, 25 bp, Homo sapien
cgtccagcgcggtaaaggcgtacca

SEQ ID NO: 1710370 - DNA, 25 bp, Homo sapien
gacttgagcagttccttgcgcaggg

SEQ ID NO: 1710371 - DNA, 25 bp, Homo sapien
cggtaaaggcgtaccagatggactt

SEQ ID NO: 1710372 - DNA, 25 bp, Homo sapien
taccagatggacttgagcagttcct

SEQ ID NO: 1710373 - DNA, 25 bp, Homo sapien
gaaagtcttgcctaacacatctgtg

SEQ ID NO: 1710374 - DNA, 25 bp, Homo sapien
taggaggcaggagctagcactgtct

SEQ ID NO: 1710375 - DNA, 25 bp, Homo sapien
gggtgaccacctcaagagaataatg

SEQ ID NO: 1710376 - DNA, 25 bp, Homo sapien
aatgcctagcacttaaaacccaggg

SEQ ID NO: 1710377 - DNA, 25 bp, Homo sapien
gccacggggtcatgggggatgtgca

SEQ ID NO: 1710378 - DNA, 25 bp, Homo sapien
cagggccacggggtcatgggggatg

SEQ ID NO: 1710379 - DNA, 25 bp, Homo sapien
gggggatgtgcaggaccgtgtacag

SEQ ID NO: 1710380 - DNA, 25 bp, Homo sapien
gtgcaggaccgtgtacaggttgtgg

SEQ ID NO: 1710381 - DNA, 25 bp, Homo sapien
ggacacagggccgtcatcatcatct

SEQ ID NO: 1710382 - DNA, 25 bp, Homo sapien
tgtacttgttgaggtagggcatgta

SEQ ID NO: 1710383 - DNA, 25 bp, Homo sapien
cacagggccgtcatcatcatctcgg

SEQ ID NO: 1710384 - DNA, 25 bp, Homo sapien
gggcatgtatccctggctggacaca

SEQ ID NO: 1710385 - DNA, 25 bp, Homo sapien
agtggcaaggtattaggctgctggc

SEQ ID NO: 1710386 - DNA, 25 bp, Homo sapien
gaggttacagatgctccctacaagc

SEQ ID NO: 1710387 - DNA, 25 bp, Homo sapien
gggagaggttacagatgctccctac

SEQ ID NO: 1710388 - DNA, 25 bp, Homo sapien
tacagatgctccctacaagctgggc

SEQ ID NO: 1710389 - DNA, 25 bp, Homo sapien
gccgtcagcgtccagcacagctcat

SEQ ID NO: 1710390 - DNA, 25 bp, Homo sapien
tgttcccgttgctatctgcccgata

SEQ ID NO: 1710391 - DNA, 25 bp, Homo sapien
ctgattggagagcatactgttcccg

SEQ ID NO: 1710392 - DNA, 25 bp, Homo sapien
tatctgcccgatagttcttcttggc

SEQ ID NO: 1710393 - DNA, 25 bp, Homo sapien
catgatcagagggtacttgtcctca

SEQ ID NO: 1710394 - DNA, 25 bp, Homo sapien
accatgatcagagggtacttgtcct

SEQ ID NO: 1710395 - DNA, 25 bp, Homo sapien
tgatcagagggtacttgtcctcaga

SEQ ID NO: 1710396 - DNA, 25 bp, Homo sapien
atgatcagagggtacttgtcctcag

SEQ ID NO: 1710397 - DNA, 25 bp, Homo sapien
tctaaagacctaaagtcaccctggc

SEQ ID NO: 1710398 - DNA, 25 bp, Homo sapien
tcttgtaagtacagaagccccctct

SEQ ID NO: 1710399 - DNA, 25 bp, Homo sapien
tggagcttgacatgctagggcttct

SEQ ID NO: 1710400 - DNA, 25 bp, Homo sapien
aggacaaatgtgagtggagcttgac

SEQ ID NO: 1710401 - DNA, 25 bp, Homo sapien
gtgtttagtagagggcactggttca

SEQ ID NO: 1710402 - DNA, 25 bp, Homo sapien
tgtttgggtgtttagtagagggcac

SEQ ID NO: 1710403 - DNA, 25 bp, Homo sapien
cagggctcgggtggttcccttcatc

SEQ ID NO: 1710404 - DNA, 25 bp, Homo sapien
gctttttgggacactctgtttagga

SEQ ID NO: 1710405 - DNA, 25 bp, Homo sapien
caccagggagtgctctatctggctc

SEQ ID NO: 1710406 - DNA, 25 bp, Homo sapien
caacaccagggagtgctctatctgg

SEQ ID NO: 1710407 - DNA, 25 bp, Homo sapien
cagggagtgctctatctggctccca

SEQ ID NO: 1710408 - DNA, 25 bp, Homo sapien
aacaccagggagtgctctatctggc

SEQ ID NO: 1710409 - DNA, 25 bp, Homo sapien
tccaagctcatgctgctgagtacct

SEQ ID NO: 1710410 - DNA, 25 bp, Homo sapien
gcggcccgaattgaagagctccagg

SEQ ID NO: 1710411 - DNA, 25 bp, Homo sapien
tggtagacctcgtggatggccatgc

SEQ ID NO: 1710412 - DNA, 25 bp, Homo sapien
cttcaggacatcttggatgagctcc

SEQ ID NO: 1710413 - DNA, 25 bp, Homo sapien
tggaaccagcgttcggcccagttcc

SEQ ID NO: 1710414 - DNA, 25 bp, Homo sapien
tccagcgggataatgccccttttct

SEQ ID NO: 1710415 - DNA, 25 bp, Homo sapien
aggtgccctcgcttccacaggtagc

SEQ ID NO: 1710416 - DNA, 25 bp, Homo sapien
tccacgcagcagtgtgcatccagcg

SEQ ID NO: 1710417 - DNA, 25 bp, Homo sapien
gacctaggattcaatagatcagtag

SEQ ID NO: 1710418 - DNA, 25 bp, Homo sapien
gagagtatattagtggtaccagagg

SEQ ID NO: 1710419 - DNA, 25 bp, Homo sapien
ttcaatagatcagtagggtggctac

SEQ ID NO: 1710420 - DNA, 25 bp, Homo sapien
taggattcaatagatcagtagggtg

SEQ ID NO: 1710421 - DNA, 25 bp, Homo sapien
catagccctgcttgttaagagttca

SEQ ID NO: 1710422 - DNA, 25 bp, Homo sapien
gtaacagggtcctcactatccatga

SEQ ID NO: 1710423 - DNA, 25 bp, Homo sapien
gatcacgcttgaacactgccagtaa

SEQ ID NO: 1710424 - DNA, 25 bp, Homo sapien
gacttaagtccccacaactctgtag

SEQ ID NO: 1710425 - DNA, 25 bp, Homo sapien
agcgctttccgtcgcggtctggcag

SEQ ID NO: 1710426 - DNA, 25 bp, Homo sapien
acatgcagcgctttccgtcgcggtc

SEQ ID NO: 1710427 - DNA, 25 bp, Homo sapien
atgcagcgctttccgtcgcggtctg

SEQ ID NO: 1710428 - DNA, 25 bp, Homo sapien
gaacatgcagcgctttccgtcgcgg

SEQ ID NO: 1710429 - DNA, 25 bp, Homo sapien
gcgcgtgtctgaggcgctcatctca

SEQ ID NO: 1710430 - DNA, 25 bp, Homo sapien
ctggcgcgtgtctgaggcgctcatc

SEQ ID NO: 1710431 - DNA, 25 bp, Homo sapien
tggcgctggcgcgtgtctgaggcgc

SEQ ID NO: 1710432 - DNA, 25 bp, Homo sapien
cgctggcgcgtgtctgaggcgctca

SEQ ID NO: 1710433 - DNA, 25 bp, Homo sapien
tcggcctgcagccggatcgccatct

SEQ ID NO: 1710434 - DNA, 25 bp, Homo sapien
ctgcagccggatcgccatctggatg

SEQ ID NO: 1710435 - DNA, 25 bp, Homo sapien
cctgcagccggatcgccatctggat

SEQ ID NO: 1710436 - DNA, 25 bp, Homo sapien
ggcctgcagccggatcgccatctgg

SEQ ID NO: 1710437 - DNA, 25 bp, Homo sapien
tgctcgcgccgtttctgcttcaggt

SEQ ID NO: 1710438 - DNA, 25 bp, Homo sapien
gctgctcgcgccgtttctgcttcag

SEQ ID NO: 1710439 - DNA, 25 bp, Homo sapien
tcccgctgctcgcgccgtttctgct

SEQ ID NO: 1710440 - DNA, 25 bp, Homo sapien
tcgcgccgtttctgcttcaggtcct

SEQ ID NO: 1710441 - DNA, 25 bp, Homo sapien
ctcctcttccttggccgcccggcgc

SEQ ID NO: 1710442 - DNA, 25 bp, Homo sapien
agctcctcttccttggccgcccggc

SEQ ID NO: 1710443 - DNA, 25 bp, Homo sapien
cctcttccttggccgcccggcgccg

SEQ ID NO: 1710444 - DNA, 25 bp, Homo sapien
agctcctgcagcttccgctccttct

SEQ ID NO: 1710445 - DNA, 25 bp, Homo sapien
cagcagccgctcggcctgccgctgc

SEQ ID NO: 1710446 - DNA, 25 bp, Homo sapien
tgcggcgccgttcctcctcctcctg

SEQ ID NO: 1710447 - DNA, 25 bp, Homo sapien
gcagccgctcggcctgccgctgcgc

SEQ ID NO: 1710448 - DNA, 25 bp, Homo sapien
ctgcagcagccgctcggcctgccgc

SEQ ID NO: 1710449 - DNA, 25 bp, Homo sapien
cctcgcgcagttggccctcgagcgc

SEQ ID NO: 1710450 - DNA, 25 bp, Homo sapien
ccgcctcgcgcagttggccctcgag

SEQ ID NO: 1710451 - DNA, 25 bp, Homo sapien
ctgctccgcctcgcgcagttggccc

SEQ ID NO: 1710452 - DNA, 25 bp, Homo sapien
ctccgcctcgcgcagttggccctcg

SEQ ID NO: 1710453 - DNA, 25 bp, Homo sapien
gaatctacgtgtttctgactccaga

SEQ ID NO: 1710454 - DNA, 25 bp, Homo sapien
gagcaaagttctattagcattagca

SEQ ID NO: 1710455 - DNA, 25 bp, Homo sapien
gctgatgctaggaaggatgtgacta

SEQ ID NO: 1710456 - DNA, 25 bp, Homo sapien
tgtaaacttagttcaagtctagtcc

SEQ ID NO: 1710457 - DNA, 25 bp, Homo sapien
tcacctctagttgcagggcctcctg

SEQ ID NO: 1710458 - DNA, 25 bp, Homo sapien
cagattcttcatctcgccgagcttt

SEQ ID NO: 1710459 - DNA, 25 bp, Homo sapien
ctcgccgagctttcacctctagttg

SEQ ID NO: 1710460 - DNA, 25 bp, Homo sapien
ctggtctgagcgattcgcacagatt

SEQ ID NO: 1710461 - DNA, 25 bp, Homo sapien
tgctgcgcccgttcgatgtagcgct

SEQ ID NO: 1710462 - DNA, 25 bp, Homo sapien
acatcctcgtcagccctctgccggt

SEQ ID NO: 1710463 - DNA, 25 bp, Homo sapien
gcccgttcgatgtagcgctcctgct

SEQ ID NO: 1710464 - DNA, 25 bp, Homo sapien
tctcctgctgcgcccgttcgatgta

SEQ ID NO: 1710465 - DNA, 25 bp, Homo sapien
tgcatcagccggttcatctggacat

SEQ ID NO: 1710466 - DNA, 25 bp, Homo sapien
aggctcaattggatgcatcagccgg

SEQ ID NO: 1710467 - DNA, 25 bp, Homo sapien
ctggcctggcgcagttttctctggg

SEQ ID NO: 1710468 - DNA, 25 bp, Homo sapien
ccagtgtttcacgttggtgctggcc

SEQ ID NO: 1710469 - DNA, 25 bp, Homo sapien
gctcattgctgttgggcgagggggt

SEQ ID NO: 1710470 - DNA, 25 bp, Homo sapien
aggagtcacggtgggcaagcagagg

SEQ ID NO: 1710471 - DNA, 25 bp, Homo sapien
cgggtcaggcgctttagggaggagt

SEQ ID NO: 1710472 - DNA, 25 bp, Homo sapien
ggcgctttagggaggagtcacggtg

SEQ ID NO: 1710473 - DNA, 25 bp, Homo sapien
tggtgctggatccagtttatcttcc

SEQ ID NO: 1710474 - DNA, 25 bp, Homo sapien
ctaattttctggtgctggatccagt

SEQ ID NO: 1710475 - DNA, 25 bp, Homo sapien
tttctggtgctggatccagtttatc

SEQ ID NO: 1710476 - DNA, 25 bp, Homo sapien
gtgctggatccagtttatcttcctg

SEQ ID NO: 1710477 - DNA, 25 bp, Homo sapien
caggtcctggtggatatgacattgg

SEQ ID NO: 1710478 - DNA, 25 bp, Homo sapien
tctttcctagcccaagaatcgggtc

SEQ ID NO: 1710479 - DNA, 25 bp, Homo sapien
tgggtctaaagcacagggccaagtt

SEQ ID NO: 1710480 - DNA, 25 bp, Homo sapien
tggtatgaagggtgaaccaggttcc

SEQ ID NO: 1710481 - DNA, 25 bp, Homo sapien
tgggaaggctggattgcctctgaat

SEQ ID NO: 1710482 - DNA, 25 bp, Homo sapien
gtgggaaggctggattgcctctgaa

SEQ ID NO: 1710483 - DNA, 25 bp, Homo sapien
agtgggaaggctggattgcctctga

SEQ ID NO: 1710484 - DNA, 25 bp, Homo sapien
gctgggaggcaatctggtggaagaa

SEQ ID NO: 1710485 - DNA, 25 bp, Homo sapien
gatgtaccacaggaaactacctagc

SEQ ID NO: 1710486 - DNA, 25 bp, Homo sapien
ggaaactacctagcagctgggaggc

SEQ ID NO: 1710487 - DNA, 25 bp, Homo sapien
cgcttaagatgtaccacaggaaact

SEQ ID NO: 1710488 - DNA, 25 bp, Homo sapien
tagaaaaggtacgtgacttgcagtg

SEQ ID NO: 1710489 - DNA, 25 bp, Homo sapien
gccaggtccagtagaacaagtccag

SEQ ID NO: 1710490 - DNA, 25 bp, Homo sapien
tggagactcccctaattctgcctct

SEQ ID NO: 1710491 - DNA, 25 bp, Homo sapien
ccagtgaagaaacttagtcctagaa

SEQ ID NO: 1710492 - DNA, 25 bp, Homo sapien
tcccattaatccccaggtccgcggc

SEQ ID NO: 1710493 - DNA, 25 bp, Homo sapien
cattaatccccaggtccgcggcggc

SEQ ID NO: 1710494 - DNA, 25 bp, Homo sapien
ctccgcagaattctcccgctcctgc

SEQ ID NO: 1710495 - DNA, 25 bp, Homo sapien
taatccccaggtccgcggcggccgc

SEQ ID NO: 1710496 - DNA, 25 bp, Homo sapien
ctgtcccggctgcctacggcgccac

SEQ ID NO: 1710497 - DNA, 25 bp, Homo sapien
tgtcccggctgcctacggcgccacc

SEQ ID NO: 1710498 - DNA, 25 bp, Homo sapien
tgaccgcttctctcgtctcggactg

SEQ ID NO: 1710499 - DNA, 25 bp, Homo sapien
accgcttctctcgtctcggactgac

SEQ ID NO: 1710500 - DNA, 25 bp, Homo sapien
gaccgcttctctcgtctcggactga

SEQ ID NO: 1710501 - DNA, 25 bp, Homo sapien
ctgaccgcttctctcgtctcggact

SEQ ID NO: 1710502 - DNA, 25 bp, Homo sapien
ggagcgggccggagcatcaggaagc

SEQ ID NO: 1710503 - DNA, 25 bp, Homo sapien
ccggagcatcaggaagccgccgtga

SEQ ID NO: 1710504 - DNA, 25 bp, Homo sapien
aggaagccgccgtgacgctgtccgc

SEQ ID NO: 1710505 - DNA, 25 bp, Homo sapien
acgctgtccgcggaccccggcagct

SEQ ID NO: 1710506 - DNA, 25 bp, Homo sapien
ggagcaaggcaccactgttcagctt

SEQ ID NO: 1710507 - DNA, 25 bp, Homo sapien
actggagcaaggcaccactgttcag

SEQ ID NO: 1710508 - DNA, 25 bp, Homo sapien
gagcaaggcaccactgttcagcttc

SEQ ID NO: 1710509 - DNA, 25 bp, Homo sapien
tggagcaaggcaccactgttcagct

SEQ ID NO: 1710510 - DNA, 25 bp, Homo sapien
tatcacgtgcatgcccaaaacactg

SEQ ID NO: 1710511 - DNA, 25 bp, Homo sapien
cgtgcatgcccaaaacactgtacaa

SEQ ID NO: 1710512 - DNA, 25 bp, Homo sapien
agaagccactgtgtgagtatcacgt

SEQ ID NO: 1710513 - DNA, 25 bp, Homo sapien
tgtgagtatcacgtgcatgcccaaa

SEQ ID NO: 1710514 - DNA, 25 bp, Homo sapien
gagagtttataaaacctgccaggca

SEQ ID NO: 1710515 - DNA, 25 bp, Homo sapien
tatggccagctctcatatataccag

SEQ ID NO: 1710516 - DNA, 25 bp, Homo sapien
cattgttcagactcttggtgagaac

SEQ ID NO: 1710517 - DNA, 25 bp, Homo sapien
tatataccagcaaaccacagaccca

SEQ ID NO: 1710518 - DNA, 25 bp, Homo sapien
gaaaagtagtagctggtctccaagg

SEQ ID NO: 1710519 - DNA, 25 bp, Homo sapien
tctcctcagtgaatcacgcctctta

SEQ ID NO: 1710520 - DNA, 25 bp, Homo sapien
aaggatgctgaaaagtagtagctgg

SEQ ID NO: 1710521 - DNA, 25 bp, Homo sapien
ctcagtgaatcacgcctcttagtat

SEQ ID NO: 1710522 - DNA, 25 bp, Homo sapien
ttccttacatttagaccactgcagt

SEQ ID NO: 1710523 - DNA, 25 bp, Homo sapien
tagggatgggttattccaccctggc

SEQ ID NO: 1710524 - DNA, 25 bp, Homo sapien
tgtgaactcttaatctctcctgtgc

SEQ ID NO: 1710525 - DNA, 25 bp, Homo sapien
ctgtgcatcaacagccctaaatgga

SEQ ID NO: 1710526 - DNA, 25 bp, Homo sapien
gaggtgaccatgaggctgggtagaa

SEQ ID NO: 1710527 - DNA, 25 bp, Homo sapien
tgaccatgaggctgggtagaagtta

SEQ ID NO: 1710528 - DNA, 25 bp, Homo sapien
cattagctgtggagaacttagtaac

SEQ ID NO: 1710529 - DNA, 25 bp, Homo sapien
agaacttagtaacggtctcaggaga

SEQ ID NO: 1710530 - DNA, 25 bp, Homo sapien
caaagagagtcaacagctatgagca

SEQ ID NO: 1710531 - DNA, 25 bp, Homo sapien
tctgcctctgcgatcaactcttgga

SEQ ID NO: 1710532 - DNA, 25 bp, Homo sapien
tgatgtgaggttcgccagtggaccc

SEQ ID NO: 1710533 - DNA, 25 bp, Homo sapien
cactggactggtggcaaggaactct

SEQ ID NO: 1710534 - DNA, 25 bp, Homo sapien
tagcttaccaccaaggaagcaagct

SEQ ID NO: 1710535 - DNA, 25 bp, Homo sapien
tgctgcagtagtcacattgcctcct

SEQ ID NO: 1710536 - DNA, 25 bp, Homo sapien
tacgttcgttgcatttttggccttc

SEQ ID NO: 1710537 - DNA, 25 bp, Homo sapien
ggccactatttagcttaccaccaag

SEQ ID NO: 1710538 - DNA, 25 bp, Homo sapien
cagaggtggagggtctacagttatc

SEQ ID NO: 1710539 - DNA, 25 bp, Homo sapien
tcatcattcagtgagtgcctcctct

SEQ ID NO: 1710540 - DNA, 25 bp, Homo sapien
tgggtgctgagggtctaaagacact

SEQ ID NO: 1710541 - DNA, 25 bp, Homo sapien
gactggcatccacctatggtgctgg

SEQ ID NO: 1710542 - DNA, 25 bp, Homo sapien
cctactgccagagaccccattttat

SEQ ID NO: 1710543 - DNA, 25 bp, Homo sapien
gcctactgccagagaccccatttta

SEQ ID NO: 1710544 - DNA, 25 bp, Homo sapien
ctactgccagagaccccattttatt

SEQ ID NO: 1710545 - DNA, 25 bp, Homo sapien
gccggaaagaggcgctcctcacctc

SEQ ID NO: 1710546 - DNA, 25 bp, Homo sapien
cctccttcctagatgtgatggcggc

SEQ ID NO: 1710547 - DNA, 25 bp, Homo sapien
agacgctcctccttcctagatgtga

SEQ ID NO: 1710548 - DNA, 25 bp, Homo sapien
tgatggcggccggaaagaggcgctc

SEQ ID NO: 1710549 - DNA, 25 bp, Homo sapien
gggctgaacctacctccctccctga

SEQ ID NO: 1710550 - DNA, 25 bp, Homo sapien
cggacggggccgctggccgggcaga

SEQ ID NO: 1710551 - DNA, 25 bp, Homo sapien
ctgaacctacctccctccctgacgg

SEQ ID NO: 1710552 - DNA, 25 bp, Homo sapien
acggggccgctggccgggcagaggg

SEQ ID NO: 1710553 - DNA, 25 bp, Homo sapien
aagagcaacaactgatgcaactcca

SEQ ID NO: 1710554 - DNA, 25 bp, Homo sapien
ggtagccaaaacctgagagctcaga

SEQ ID NO: 1710555 - DNA, 25 bp, Homo sapien
ccttttgcttggtagccaaaacctg

SEQ ID NO: 1710556 - DNA, 25 bp, Homo sapien
acaactgatgcaactccaccttttg

SEQ ID NO: 1710557 - DNA, 25 bp, Homo sapien
aaaccaccaaaccacgcatttaatg

SEQ ID NO: 1710558 - DNA, 25 bp, Homo sapien
ccaaaccacgcatttaatgttacat

SEQ ID NO: 1710559 - DNA, 25 bp, Homo sapien
caccaaaccacgcatttaatgttac

SEQ ID NO: 1710560 - DNA, 25 bp, Homo sapien
accaccaaaccacgcatttaatgtt

SEQ ID NO: 1710561 - DNA, 25 bp, Homo sapien
gcgcatccgcgacacactcattttg

SEQ ID NO: 1710562 - DNA, 25 bp, Homo sapien
gaaaccagtctaagaacaggaggga

SEQ ID NO: 1710563 - DNA, 25 bp, Homo sapien
tttgtttaagacactgatgcagagc

SEQ ID NO: 1710564 - DNA, 25 bp, Homo sapien
gcaggatggccgtgacatacagccg

SEQ ID NO: 1710565 - DNA, 25 bp, Homo sapien
tgctgtgtctagtaagcaagttttt

SEQ ID NO: 1710566 - DNA, 25 bp, Homo sapien
tgtgctgtgtctagtaagcaagttt

SEQ ID NO: 1710567 - DNA, 25 bp, Homo sapien
catgtgctgtgtctagtaagcaagt

SEQ ID NO: 1710568 - DNA, 25 bp, Homo sapien
gtgctgtgtctagtaagcaagtttt

SEQ ID NO: 1710569 - DNA, 25 bp, Homo sapien
ttcagggcgaaagataagaccagtc

SEQ ID NO: 1710570 - DNA, 25 bp, Homo sapien
tggtggagagcgaatctagaagcct

SEQ ID NO: 1710571 - DNA, 25 bp, Homo sapien
tactattactcagtggagggaggcc

SEQ ID NO: 1710572 - DNA, 25 bp, Homo sapien
tgctaatctgccaagtgacgttggg

SEQ ID NO: 1710573 - DNA, 25 bp, Homo sapien
tgaagcagtcctgtagagatcactg

SEQ ID NO: 1710574 - DNA, 25 bp, Homo sapien
ttgaagcagtcctgtagagatcact

SEQ ID NO: 1710575 - DNA, 25 bp, Homo sapien
cttgaagcagtcctgtagagatcac

SEQ ID NO: 1710576 - DNA, 25 bp, Homo sapien
ggagcaactggcataattgcaaaaa

SEQ ID NO: 1710577 - DNA, 25 bp, Homo sapien
gagcaactggcataattgcaaaaag

SEQ ID NO: 1710578 - DNA, 25 bp, Homo sapien
cttgaacccacctcaagttatccgc

SEQ ID NO: 1710579 - DNA, 25 bp, Homo sapien
gaacccacctcaagttatccgccta

SEQ ID NO: 1710580 - DNA, 25 bp, Homo sapien
tagtcttgaacccacctcaagttat

SEQ ID NO: 1710581 - DNA, 25 bp, Homo sapien
ctacagacatgcgtcaccacgcccg

SEQ ID NO: 1710582 - DNA, 25 bp, Homo sapien
gccatcccctccactagctaaaacc

SEQ ID NO: 1710583 - DNA, 25 bp, Homo sapien
tctccttcgcgacctgtctgcacct

SEQ ID NO: 1710584 - DNA, 25 bp, Homo sapien
tctctccttcgcgacctgtctgcac

SEQ ID NO: 1710585 - DNA, 25 bp, Homo sapien
aaccttctctccttcgcgacctgtc

SEQ ID NO: 1710586 - DNA, 25 bp, Homo sapien
ttagaagcttaacccaaatggccca

SEQ ID NO: 1710587 - DNA, 25 bp, Homo sapien
tgtctggccccaagaagaaactcag

SEQ ID NO: 1710588 - DNA, 25 bp, Homo sapien
aagtgcctcgtactcctcgtggtga

SEQ ID NO: 1710589 - DNA, 25 bp, Homo sapien
tgtacggtgtgggaacacttctgcc

SEQ ID NO: 1710590 - DNA, 25 bp, Homo sapien
ctgaacgcagatggacctctacagg

SEQ ID NO: 1710591 - DNA, 25 bp, Homo sapien
aacgcagatggacctctacagggtg

SEQ ID NO: 1710592 - DNA, 25 bp, Homo sapien
cagatggacctctacagggtggttc

SEQ ID NO: 1710593 - DNA, 25 bp, Homo sapien
cgcagatggacctctacagggtggt

SEQ ID NO: 1710594 - DNA, 25 bp, Homo sapien
cagtcatagctctggcatcgtctgg

SEQ ID NO: 1710595 - DNA, 25 bp, Homo sapien
agtcatagctctggcatcgtctggg

SEQ ID NO: 1710596 - DNA, 25 bp, Homo sapien
tcccctcggcgccacacctgcaggc

SEQ ID NO: 1710597 - DNA, 25 bp, Homo sapien
ctgatctcccctcggcgccacacct

SEQ ID NO: 1710598 - DNA, 25 bp, Homo sapien
atgctgtggtcccccattgagctct

SEQ ID NO: 1710599 - DNA, 25 bp, Homo sapien
gcatgctgtggtcccccattgagct

SEQ ID NO: 1710600 - DNA, 25 bp, Homo sapien
catgctgtggtcccccattgagctc

SEQ ID NO: 1710601 - DNA, 25 bp, Homo sapien
tagtctgggcaacagaaggagactt

SEQ ID NO: 1710602 - DNA, 25 bp, Homo sapien
actctagtctgggcaacagaaggag

SEQ ID NO: 1710603 - DNA, 25 bp, Homo sapien
ctagtctgggcaacagaaggagact

SEQ ID NO: 1710604 - DNA, 25 bp, Homo sapien
tctgggcaacagaaggagactttgt

SEQ ID NO: 1710605 - DNA, 25 bp, Homo sapien
tcccagcagtatatccttatgaccc

SEQ ID NO: 1710606 - DNA, 25 bp, Homo sapien
cagggtgtctactcccagcagtata

SEQ ID NO: 1710607 - DNA, 25 bp, Homo sapien
agcagcgagtgcagggtgtctactc

SEQ ID NO: 1710608 - DNA, 25 bp, Homo sapien
tatatccttatgaccctgagttccc

SEQ ID NO: 1710609 - DNA, 25 bp, Homo sapien
tgagcaagtacttacacaggacacg

SEQ ID NO: 1710610 - DNA, 25 bp, Homo sapien
aatgggatccccaacttgtcaggaa

SEQ ID NO: 1710611 - DNA, 25 bp, Homo sapien
gactcttccggtgccttctatgaaa

SEQ ID NO: 1710612 - DNA, 25 bp, Homo sapien
tagcccctgagtccttcggtataga

SEQ ID NO: 1710613 - DNA, 25 bp, Homo sapien
acatgagacagagtggagcaacgcc

SEQ ID NO: 1710614 - DNA, 25 bp, Homo sapien
ccgcatcatgatgtcctgggtagag

SEQ ID NO: 1710615 - DNA, 25 bp, Homo sapien
gaaggagccatcactcacgcatgtg

SEQ ID NO: 1710616 - DNA, 25 bp, Homo sapien
ggctgggttctgaaggttccaccac

SEQ ID NO: 1710617 - DNA, 25 bp, Homo sapien
catattgattaagcaacacactgaa

SEQ ID NO: 1710618 - DNA, 25 bp, Homo sapien
tagaacagcttaggtatcagtcata

SEQ ID NO: 1710619 - DNA, 25 bp, Homo sapien
tgaaaacttcttgagtagaacagct

SEQ ID NO: 1710620 - DNA, 25 bp, Homo sapien
tattcttgcatagactccagggatg

SEQ ID NO: 1710621 - DNA, 25 bp, Homo sapien
tgcggacacacgatggaggggcagc

SEQ ID NO: 1710622 - DNA, 25 bp, Homo sapien
ctgcggacacacgatggaggggcag

SEQ ID NO: 1710623 - DNA, 25 bp, Homo sapien
gcggacacacgatggaggggcagct

SEQ ID NO: 1710624 - DNA, 25 bp, Homo sapien
cccatctgcagttggtccagcagtg

SEQ ID NO: 1710625 - DNA, 25 bp, Homo sapien
catgttgaggctgccgcatgaggcc

SEQ ID NO: 1710626 - DNA, 25 bp, Homo sapien
gcacacccggcactccatgttgagg

SEQ ID NO: 1710627 - DNA, 25 bp, Homo sapien
acatgcatgaacaccgtagtggaag

SEQ ID NO: 1710628 - DNA, 25 bp, Homo sapien
gtggaggttgcagtcagccaagatc

SEQ ID NO: 1710629 - DNA, 25 bp, Homo sapien
caggggaatcgcttgaacccgggag

SEQ ID NO: 1710630 - DNA, 25 bp, Homo sapien
tgggtgtagtggcacacccctgtaa

SEQ ID NO: 1710631 - DNA, 25 bp, Homo sapien
tcccagctactcaggaggctgaggc

SEQ ID NO: 1710632 - DNA, 25 bp, Homo sapien
ggtgaggaaaggccaccaggaggtg

SEQ ID NO: 1710633 - DNA, 25 bp, Homo sapien
tgaggaaaggccaccaggaggtggg

SEQ ID NO: 1710634 - DNA, 25 bp, Homo sapien
ctgaagcaccaagaacaggtgagga

SEQ ID NO: 1710635 - DNA, 25 bp, Homo sapien
gaagcaccaagaacaggtgaggaaa

SEQ ID NO: 1710636 - DNA, 25 bp, Homo sapien
tgcgctcacacttctcgtactccag

SEQ ID NO: 1710637 - DNA, 25 bp, Homo sapien
cagcttcatgcggatcgtacgacgg

SEQ ID NO: 1710638 - DNA, 25 bp, Homo sapien
cacttgttgcggttcttcttctgaa

SEQ ID NO: 1710639 - DNA, 25 bp, Homo sapien
ttctgaatcttgcagctgcgctcac

SEQ ID NO: 1710640 - DNA, 25 bp, Homo sapien
gatacgaattcgacttctcctggag

SEQ ID NO: 1710641 - DNA, 25 bp, Homo sapien
gtgggtgacctccaagaaacttctg

SEQ ID NO: 1710642 - DNA, 25 bp, Homo sapien
gcatccctgggtaaaagctggccaa

SEQ ID NO: 1710643 - DNA, 25 bp, Homo sapien
cattacccaggagagccgcaaatgg

SEQ ID NO: 1710644 - DNA, 25 bp, Homo sapien
agttccagctcagcagtttactagc

SEQ ID NO: 1710645 - DNA, 25 bp, Homo sapien
gcacacaaggactctaacttactga

SEQ ID NO: 1710646 - DNA, 25 bp, Homo sapien
tgacatccccatccctttacaggtg

SEQ ID NO: 1710647 - DNA, 25 bp, Homo sapien
gatcgcaagctccacaagatgtgat

SEQ ID NO: 1710648 - DNA, 25 bp, Homo sapien
tcggccacctgtgggttgtactggc

SEQ ID NO: 1710649 - DNA, 25 bp, Homo sapien
tccggcatccgaccaaaacggatag

SEQ ID NO: 1710650 - DNA, 25 bp, Homo sapien
ttgtagatgtgcttggagaaggcct

SEQ ID NO: 1710651 - DNA, 25 bp, Homo sapien
gagaaggccttcaggtcggccacct

SEQ ID NO: 1710652 - DNA, 25 bp, Homo sapien
ctgaaaaccaggccccgttagagat

SEQ ID NO: 1710653 - DNA, 25 bp, Homo sapien
aaccaggccccgttagagatcaggc

SEQ ID NO: 1710654 - DNA, 25 bp, Homo sapien
tagagatcaggcctcgggagacccc

SEQ ID NO: 1710655 - DNA, 25 bp, Homo sapien
ttagagatcaggcctcgggagaccc

SEQ ID NO: 1710656 - DNA, 25 bp, Homo sapien
tcgtgcacgccatacttgagaaggg

SEQ ID NO: 1710657 - DNA, 25 bp, Homo sapien
cactggcagcggtagaagacgtgca

SEQ ID NO: 1710658 - DNA, 25 bp, Homo sapien
gacgtgcacgctgatctccttgtag

SEQ ID NO: 1710659 - DNA, 25 bp, Homo sapien
tccagggcgttgaacttgacagcaa

SEQ ID NO: 1710660 - DNA, 25 bp, Homo sapien
agtgccttgcatgttccactgccaa

SEQ ID NO: 1710661 - DNA, 25 bp, Homo sapien
cacattaacatgacagcatactgcc

SEQ ID NO: 1710662 - DNA, 25 bp, Homo sapien
gtacataatgagatggagctgatcc

SEQ ID NO: 1710663 - DNA, 25 bp, Homo sapien
tgccaagatcacagggacacttccc

SEQ ID NO: 1710664 - DNA, 25 bp, Homo sapien
aggatggtgtcctggatagcctcca

SEQ ID NO: 1710665 - DNA, 25 bp, Homo sapien
tactgggcatcagggtggttggcct

SEQ ID NO: 1710666 - DNA, 25 bp, Homo sapien
cctgcaggtggaattcgagggcacg

SEQ ID NO: 1710667 - DNA, 25 bp, Homo sapien
cgtggaacgttcatgaggcctggcc

SEQ ID NO: 1710668 - DNA, 25 bp, Homo sapien
ttcttgatccgctgcatcatctggg

SEQ ID NO: 1710669 - DNA, 25 bp, Homo sapien
agcgaggtctcggtttcggtcttct

SEQ ID NO: 1710670 - DNA, 25 bp, Homo sapien
tcatctgggcgtgctcggtgaccag

SEQ ID NO: 1710671 - DNA, 25 bp, Homo sapien
gtttcggtcttcttgatccgctgca

SEQ ID NO: 1710672 - DNA, 25 bp, Homo sapien
aaagtcatgtgggtgggcccctcca

SEQ ID NO: 1710673 - DNA, 25 bp, Homo sapien
gtcatgtgggtgggcccctccagtg

SEQ ID NO: 1710674 - DNA, 25 bp, Homo sapien
ccagtgctggccccattggagtctg

SEQ ID NO: 1710675 - DNA, 25 bp, Homo sapien
gaaaagtcatgtgggtgggcccctc

SEQ ID NO: 1710676 - DNA, 25 bp, Homo sapien
tctgagggcgatcgtgggactctgc

SEQ ID NO: 1710677 - DNA, 25 bp, Homo sapien
gagccagaggccgtgggtgtcatgt

SEQ ID NO: 1710678 - DNA, 25 bp, Homo sapien
tcatgtgtctgagggcgatcgtggg

SEQ ID NO: 1710679 - DNA, 25 bp, Homo sapien
tccaggccgggtgctcaagggctgg

SEQ ID NO: 1710680 - DNA, 25 bp, Homo sapien
ggagacagaagtgaggacctaagcc

SEQ ID NO: 1710681 - DNA, 25 bp, Homo sapien
gcttagtgtttctttggatggctca

SEQ ID NO: 1710682 - DNA, 25 bp, Homo sapien
ctatgctgctggtgaaataatacaa

SEQ ID NO: 1710683 - DNA, 25 bp, Homo sapien
cagaggtcctgttctatgctgctgg

SEQ ID NO: 1710684 - DNA, 25 bp, Homo sapien
cacctggagggaaccctgcctactt

SEQ ID NO: 1710685 - DNA, 25 bp, Homo sapien
tgaactcccgtggagccagctagag

SEQ ID NO: 1710686 - DNA, 25 bp, Homo sapien
ttccaagctgggagagtgccgtcca

SEQ ID NO: 1710687 - DNA, 25 bp, Homo sapien
ctgacacaatgtgggcggctgctac

SEQ ID NO: 1710688 - DNA, 25 bp, Homo sapien
catagccttggcctgaaaggaagca

SEQ ID NO: 1710689 - DNA, 25 bp, Homo sapien
gtgagcgcacctcaacctgggagca

SEQ ID NO: 1710690 - DNA, 25 bp, Homo sapien
ggctcagtttatcccgggaagctcc

SEQ ID NO: 1710691 - DNA, 25 bp, Homo sapien
aggtccccggacactagaggctgtg

SEQ ID NO: 1710692 - DNA, 25 bp, Homo sapien
tagtgaccatcccttagctgtgggc

SEQ ID NO: 1710693 - DNA, 25 bp, Homo sapien
tgagatgaaccatatgggacctgac

SEQ ID NO: 1710694 - DNA, 25 bp, Homo sapien
tgcagacgcttggttcagttcccac

SEQ ID NO: 1710695 - DNA, 25 bp, Homo sapien
tcagagatgccctggttccaagcac

SEQ ID NO: 1710696 - DNA, 25 bp, Homo sapien
tgcattgatctccacgatgtccagg

SEQ ID NO: 1710697 - DNA, 25 bp, Homo sapien
cttgctggaagtacttgcagacctg

SEQ ID NO: 1710698 - DNA, 25 bp, Homo sapien
gaagtacttgcagacctgggacacc

SEQ ID NO: 1710699 - DNA, 25 bp, Homo sapien
ctgcattgatctccacgatgtccag

SEQ ID NO: 1710700 - DNA, 25 bp, Homo sapien
ggctcggatcccctgcgggccagtc

SEQ ID NO: 1710701 - DNA, 25 bp, Homo sapien
gtgggctcggatcccctgcgggcca

SEQ ID NO: 1710702 - DNA, 25 bp, Homo sapien
ggagctgccgccaacctcctcagcc

SEQ ID NO: 1710703 - DNA, 25 bp, Homo sapien
ggtgggctcggatcccctgcgggcc

SEQ ID NO: 1710704 - DNA, 25 bp, Homo sapien
catgagctctcggacaaggtggaac

SEQ ID NO: 1710705 - DNA, 25 bp, Homo sapien
ccaggctctgaagtggcgccatgag

SEQ ID NO: 1710706 - DNA, 25 bp, Homo sapien
gggagtggccgtgatccctgtcagc

SEQ ID NO: 1710707 - DNA, 25 bp, Homo sapien
caaggtggaactttggcagagactc

SEQ ID NO: 1710708 - DNA, 25 bp, Homo sapien
tgcagttgggcaggatgccgaagac

SEQ ID NO: 1710709 - DNA, 25 bp, Homo sapien
aggatgccgaagacccgctgggcct

SEQ ID NO: 1710710 - DNA, 25 bp, Homo sapien
tgccggttcttccgccaggtgcgca

SEQ ID NO: 1710711 - DNA, 25 bp, Homo sapien
tggcttgtcccacactttgtccatg

SEQ ID NO: 1710712 - DNA, 25 bp, Homo sapien
tgtttccctccatccctgttgggac

SEQ ID NO: 1710713 - DNA, 25 bp, Homo sapien
ctgttgggacccccatgacactgac

SEQ ID NO: 1710714 - DNA, 25 bp, Homo sapien
catccctgttgggacccccatgaca

SEQ ID NO: 1710715 - DNA, 25 bp, Homo sapien
tccctgttgggacccccatgacact

SEQ ID NO: 1710716 - DNA, 25 bp, Homo sapien
ctggaatggacacggcactgtggac

SEQ ID NO: 1710717 - DNA, 25 bp, Homo sapien
atggacacggcactgtggacacgcc

SEQ ID NO: 1710718 - DNA, 25 bp, Homo sapien
tggaatggacacggcactgtggaca

SEQ ID NO: 1710719 - DNA, 25 bp, Homo sapien
gaatggacacggcactgtggacacg

SEQ ID NO: 1710720 - DNA, 25 bp, Homo sapien
ctggtccgagccttgaagttcctga

SEQ ID NO: 1710721 - DNA, 25 bp, Homo sapien
tcacccagaacttgtgggggatgat

SEQ ID NO: 1710722 - DNA, 25 bp, Homo sapien
ttgaagttcctgatgagttgctcct

SEQ ID NO: 1710723 - DNA, 25 bp, Homo sapien
aagttcctgatgagttgctccttct

SEQ ID NO: 1710724 - DNA, 25 bp, Homo sapien
ccagaggccagttgcactctctcag

SEQ ID NO: 1710725 - DNA, 25 bp, Homo sapien
ctggtgcaggtagatacactcagat

SEQ ID NO: 1710726 - DNA, 25 bp, Homo sapien
ggtagatacactcagatttgaaggg

SEQ ID NO: 1710727 - DNA, 25 bp, Homo sapien
attccctcgcacgaagaaccggcat

SEQ ID NO: 1710728 - DNA, 25 bp, Homo sapien
cagggcaccgtctgtgaagagcaca

SEQ ID NO: 1710729 - DNA, 25 bp, Homo sapien
ggctcagcaccccttaggaacaatg

SEQ ID NO: 1710730 - DNA, 25 bp, Homo sapien
tctgaaccccagaaggtcatggcca

SEQ ID NO: 1710731 - DNA, 25 bp, Homo sapien
cagaaggccatggtaagaactgttg

SEQ ID NO: 1710732 - DNA, 25 bp, Homo sapien
gactccagcgccgtccctgacgcgg

SEQ ID NO: 1710733 - DNA, 25 bp, Homo sapien
agcgcctgttacaagctctcctcgg

SEQ ID NO: 1710734 - DNA, 25 bp, Homo sapien
gaggctgaggggaacggaggactcc

SEQ ID NO: 1710735 - DNA, 25 bp, Homo sapien
ttacaagctctcctcggcgttggga

SEQ ID NO: 1710736 - DNA, 25 bp, Homo sapien
agggcgccggctccacgccctcagc

SEQ ID NO: 1710737 - DNA, 25 bp, Homo sapien
tccagctgcgcccagggcgccggct

SEQ ID NO: 1710738 - DNA, 25 bp, Homo sapien
cagccccagggagccccgcgtccgg

SEQ ID NO: 1710739 - DNA, 25 bp, Homo sapien
ggagccccgcgtccggtgtcgccat

SEQ ID NO: 1710740 - DNA, 25 bp, Homo sapien
agcaagcgaccccagtcgaagggct

SEQ ID NO: 1710741 - DNA, 25 bp, Homo sapien
ccggcacagggcctcgagcaagcga

SEQ ID NO: 1710742 - DNA, 25 bp, Homo sapien
agggcctcgagcaagcgaccccagt

SEQ ID NO: 1710743 - DNA, 25 bp, Homo sapien
agacggccgtcaggcccctgcacga

SEQ ID NO: 1710744 - DNA, 25 bp, Homo sapien
gttgtcctcacaaataagcacgtgg

SEQ ID NO: 1710745 - DNA, 25 bp, Homo sapien
taggaatccttcgtcagccacagag

SEQ ID NO: 1710746 - DNA, 25 bp, Homo sapien
cattcttagagaaagcaatcttgcc

SEQ ID NO: 1710747 - DNA, 25 bp, Homo sapien
tggccccactaggagctgaacatgg

SEQ ID NO: 1710748 - DNA, 25 bp, Homo sapien
cagcagggacatcaggttcctctgg

SEQ ID NO: 1710749 - DNA, 25 bp, Homo sapien
atcaggttcctctggcatatccggg

SEQ ID NO: 1710750 - DNA, 25 bp, Homo sapien
aggagcccactttccggcagcgatg

SEQ ID NO: 1710751 - DNA, 25 bp, Homo sapien
gggcaatcgcagcaacagtggtttc

SEQ ID NO: 1710752 - DNA, 25 bp, Homo sapien
ccagggcacggagccaggcatctgg

SEQ ID NO: 1710753 - DNA, 25 bp, Homo sapien
atctgggtcaggggctaggtcctgc

SEQ ID NO: 1710754 - DNA, 25 bp, Homo sapien
ctaggtcctgctgggcaatctgcag

SEQ ID NO: 1710755 - DNA, 25 bp, Homo sapien
gggcacggagccaggcatctgggtc

SEQ ID NO: 1710756 - DNA, 25 bp, Homo sapien
ccagccccctacatagactttggag

SEQ ID NO: 1710757 - DNA, 25 bp, Homo sapien
tctggcatctttcagacagtggaga

SEQ ID NO: 1710758 - DNA, 25 bp, Homo sapien
agacagtggagaagctccctccatg

SEQ ID NO: 1710759 - DNA, 25 bp, Homo sapien
tttggagctgtctctggcatctttc

SEQ ID NO: 1710760 - DNA, 25 bp, Homo sapien
tagcatcatccagattcgaaccgtc

SEQ ID NO: 1710761 - DNA, 25 bp, Homo sapien
tctcagccagacctttagcatcatc

SEQ ID NO: 1710762 - DNA, 25 bp, Homo sapien
gccagtcttaactgccatgacaggc

SEQ ID NO: 1710763 - DNA, 25 bp, Homo sapien
gattccagtgacttatgttcgggtc

SEQ ID NO: 1710764 - DNA, 25 bp, Homo sapien
gcagctgctgcagcctgggaagctg

SEQ ID NO: 1710765 - DNA, 25 bp, Homo sapien
ctcctccaaggtcttcagcagctgc

SEQ ID NO: 1710766 - DNA, 25 bp, Homo sapien
gctgctgcagcctgggaagctggtc

SEQ ID NO: 1710767 - DNA, 25 bp, Homo sapien
tcctccaaggtcttcagcagctgct

SEQ ID NO: 1710768 - DNA, 25 bp, Homo sapien
ggggggcatcctccaatccctctaa

SEQ ID NO: 1710769 - DNA, 25 bp, Homo sapien
ctggctgggactacattcgtgaaga

SEQ ID NO: 1710770 - DNA, 25 bp, Homo sapien
gtgaagaagctgtagctcaactggg

SEQ ID NO: 1710771 - DNA, 25 bp, Homo sapien
tacattcgtgaagaagctgtagctc

SEQ ID NO: 1710772 - DNA, 25 bp, Homo sapien
agagcagggcaaagatactccaggg

SEQ ID NO: 1710773 - DNA, 25 bp, Homo sapien
gcaaagatactccagggcaaagaaa

SEQ ID NO: 1710774 - DNA, 25 bp, Homo sapien
aaagatactacacagggtgacccct

SEQ ID NO: 1710775 - DNA, 25 bp, Homo sapien
ctaggctgtctcaagcaactggaca

SEQ ID NO: 1710776 - DNA, 25 bp, Homo sapien
aagaggcttctggtcagcacagtag

SEQ ID NO: 1710777 - DNA, 25 bp, Homo sapien
gtgcagagccgcaggagaccgaggt

SEQ ID NO: 1710778 - DNA, 25 bp, Homo sapien
agaaagaggcttctggtcagcacag

SEQ ID NO: 1710779 - DNA, 25 bp, Homo sapien
gcttctggtcagcacagtagcattg

SEQ ID NO: 1710780 - DNA, 25 bp, Homo sapien
gcgctgcagacagggtatgtatatt

SEQ ID NO: 1710781 - DNA, 25 bp, Homo sapien
gaggtcagggcagttgtaagcaggc

SEQ ID NO: 1710782 - DNA, 25 bp, Homo sapien
ggcagttgtaagcaggcgggaggct

SEQ ID NO: 1710783 - DNA, 25 bp, Homo sapien
cagggtatgtatatttggcacagaa

SEQ ID NO: 1710784 - DNA, 25 bp, Homo sapien
tgggtagaggacagcagaaggggaa

SEQ ID NO: 1710785 - DNA, 25 bp, Homo sapien
gggtagaggacagcagaaggggaag

SEQ ID NO: 1710786 - DNA, 25 bp, Homo sapien
ctgggtagaggacagcagaagggga

SEQ ID NO: 1710787 - DNA, 25 bp, Homo sapien
ggtagaggacagcagaaggggaagt

SEQ ID NO: 1710788 - DNA, 25 bp, Homo sapien
agggactccatcttcacaaggcaac

SEQ ID NO: 1710789 - DNA, 25 bp, Homo sapien
cagggactccatcttcacaaggcaa

SEQ ID NO: 1710790 - DNA, 25 bp, Homo sapien
gctctaggagtgactgcaacaccaa

SEQ ID NO: 1710791 - DNA, 25 bp, Homo sapien
caccaagaaagtttcctccttccag

SEQ ID NO: 1710792 - DNA, 25 bp, Homo sapien
ctgccgctctaggagtgactgcaac

SEQ ID NO: 1710793 - DNA, 25 bp, Homo sapien
tgcaacaccaagaaagtttcctcct

SEQ ID NO: 1710794 - DNA, 25 bp, Homo sapien
tagcctgatacttggtcatcactgt

SEQ ID NO: 1710795 - DNA, 25 bp, Homo sapien
tcactgtcagcatgagcttggcata

SEQ ID NO: 1710796 - DNA, 25 bp, Homo sapien
ctgtcagcatgagcttggcataggc

SEQ ID NO: 1710797 - DNA, 25 bp, Homo sapien
ttctccattaagacactgaacttct

SEQ ID NO: 1710798 - DNA, 25 bp, Homo sapien
ttcaaggcggccttcagggacttcc

SEQ ID NO: 1710799 - DNA, 25 bp, Homo sapien
gcccaaatgtttcaaggcggccttc

SEQ ID NO: 1710800 - DNA, 25 bp, Homo sapien
caaatgtttcaaggcggccttcagg

SEQ ID NO: 1710801 - DNA, 25 bp, Homo sapien
ttaggttctagggccatagccaggc

SEQ ID NO: 1710802 - DNA, 25 bp, Homo sapien
tcaggctagggctcaagacaaggtg

SEQ ID NO: 1710803 - DNA, 25 bp, Homo sapien
tgagccctatcggaaagtttgtccc

SEQ ID NO: 1710804 - DNA, 25 bp, Homo sapien
tctgggtcggcttgatcctactgag

SEQ ID NO: 1710805 - DNA, 25 bp, Homo sapien
cctgtaacagggaggcagttgcaat

SEQ ID NO: 1710806 - DNA, 25 bp, Homo sapien
catgctagtctcttttccggttagc

SEQ ID NO: 1710807 - DNA, 25 bp, Homo sapien
ctcttttccggttagcgcggcgtga

SEQ ID NO: 1710808 - DNA, 25 bp, Homo sapien
gctagtctcttttccggttagcgcg

SEQ ID NO: 1710809 - DNA, 25 bp, Homo sapien
ctagtctcttttccggttagcgcgg

SEQ ID NO: 1710810 - DNA, 25 bp, Homo sapien
tctcttttccggttagcgcggcgtg

SEQ ID NO: 1710811 - DNA, 25 bp, Homo sapien
acatgctagtctcttttccggttag

SEQ ID NO: 1710812 - DNA, 25 bp, Homo sapien
cgctaaccggaaaagagactagcat

SEQ ID NO: 1710813 - DNA, 25 bp, Homo sapien
tcacgccgcgctaaccggaaaagag

SEQ ID NO: 1710814 - DNA, 25 bp, Homo sapien
ctaaccggaaaagagactagcatgt

SEQ ID NO: 1710815 - DNA, 25 bp, Homo sapien
cacgccgcgctaaccggaaaagaga

SEQ ID NO: 1710816 - DNA, 25 bp, Homo sapien
gcgctaaccggaaaagagactagca

SEQ ID NO: 1710817 - DNA, 25 bp, Homo sapien
ccgcgctaaccggaaaagagactag

SEQ ID NO: 1710818 - DNA, 25 bp, Homo sapien
tgaaagccctatccgcgttcatccg

SEQ ID NO: 1710819 - DNA, 25 bp, Homo sapien
agccctatccgcgttcatccgcgcc

SEQ ID NO: 1710820 - DNA, 25 bp, Homo sapien
cctatccgcgttcatccgcgccttc

SEQ ID NO: 1710821 - DNA, 25 bp, Homo sapien
ccctatccgcgttcatccgcgcctt

SEQ ID NO: 1710822 - DNA, 25 bp, Homo sapien
tatccgcgttcatccgcgccttcag

SEQ ID NO: 1710823 - DNA, 25 bp, Homo sapien
gccctatccgcgttcatccgcgcct

SEQ ID NO: 1710824 - DNA, 25 bp, Homo sapien
ggcgcggatgaacgcggatagggct

SEQ ID NO: 1710825 - DNA, 25 bp, Homo sapien
aggcgcggatgaacgcggatagggc

SEQ ID NO: 1710826 - DNA, 25 bp, Homo sapien
ctgaaggcgcggatgaacgcggata

SEQ ID NO: 1710827 - DNA, 25 bp, Homo sapien
tgaaggcgcggatgaacgcggatag

SEQ ID NO: 1710828 - DNA, 25 bp, Homo sapien
gaaggcgcggatgaacgcggatagg

SEQ ID NO: 1710829 - DNA, 25 bp, Homo sapien
cggatgaacgcggatagggctttca

SEQ ID NO: 1710830 - DNA, 25 bp, Homo sapien
tgagttggtcctgaaagccctatcc

SEQ ID NO: 1710831 - DNA, 25 bp, Homo sapien
gtgagttggtcctgaaagccctatc

SEQ ID NO: 1710832 - DNA, 25 bp, Homo sapien
agttggtcctgaaagccctatccgc

SEQ ID NO: 1710833 - DNA, 25 bp, Homo sapien
gagttggtcctgaaagccctatccg

SEQ ID NO: 1710834 - DNA, 25 bp, Homo sapien
tatccgcgttcatccgcgccttcag

SEQ ID NO: 1710835 - DNA, 25 bp, Homo sapien
tgaaagccctatccgcgttcatccg

SEQ ID NO: 1710836 - DNA, 25 bp, Homo sapien
ggcgcggatgaacgcggatagggct

SEQ ID NO: 1710837 - DNA, 25 bp, Homo sapien
gcggatagggctttcaggaccaact

SEQ ID NO: 1710838 - DNA, 25 bp, Homo sapien
ctgaaggcgcggatgaacgcggata

SEQ ID NO: 1710839 - DNA, 25 bp, Homo sapien
ggatagggctttcaggaccaactca

SEQ ID NO: 1710840 - DNA, 25 bp, Homo sapien
cggatgaacgcggatagggctttca

SEQ ID NO: 1710841 - DNA, 25 bp, Homo sapien
gatagggctttcaggaccaactcac

SEQ ID NO: 1710842 - DNA, 25 bp, Homo sapien
tgcgccgcggggcatttctcaaggc

SEQ ID NO: 1710843 - DNA, 25 bp, Homo sapien
ggcatttctcaaggcgggtcggcct

SEQ ID NO: 1710844 - DNA, 25 bp, Homo sapien
gttcggatcctgtaggccgcgccgc

SEQ ID NO: 1710845 - DNA, 25 bp, Homo sapien
tctcaaggcgggtcggcctgcgggt

SEQ ID NO: 1710846 - DNA, 25 bp, Homo sapien
gtcggcctgcgggtcgcccttccta

SEQ ID NO: 1710847 - DNA, 25 bp, Homo sapien
ttcggatcctgtaggccgcgccgcg

SEQ ID NO: 1710848 - DNA, 25 bp, Homo sapien
gcaggccgacccgccttgagaaatg

SEQ ID NO: 1710849 - DNA, 25 bp, Homo sapien
gcgcaggtggcgcaagggtccgcgg

SEQ ID NO: 1710850 - DNA, 25 bp, Homo sapien
gcggcgcggcctacaggatccgaac

SEQ ID NO: 1710851 - DNA, 25 bp, Homo sapien
gccttgagaaatgccccgcggcgca

SEQ ID NO: 1710852 - DNA, 25 bp, Homo sapien
aggccgacccgccttgagaaatgcc

SEQ ID NO: 1710853 - DNA, 25 bp, Homo sapien
gtaggaagggcgacccgcaggccga

SEQ ID NO: 1710854 - DNA, 25 bp, Homo sapien
tctgagctcccgtcgctctacttgg

SEQ ID NO: 1710855 - DNA, 25 bp, Homo sapien
tctacttggtgtccggaatctacgg

SEQ ID NO: 1710856 - DNA, 25 bp, Homo sapien
ggtctgggtctgagctcccgtcgct

SEQ ID NO: 1710857 - DNA, 25 bp, Homo sapien
cgctctacttggtgtccggaatcta

SEQ ID NO: 1710858 - DNA, 25 bp, Homo sapien
gtccgatcactgagagcctccctct

SEQ ID NO: 1710859 - DNA, 25 bp, Homo sapien
cgtcgctctacttggtgtccggaat

SEQ ID NO: 1710860 - DNA, 25 bp, Homo sapien
ccgtagattccggacaccaagtaga

SEQ ID NO: 1710861 - DNA, 25 bp, Homo sapien
agagggaggctctcagtgatcggac

SEQ ID NO: 1710862 - DNA, 25 bp, Homo sapien
tagattccggacaccaagtagagcg

SEQ ID NO: 1710863 - DNA, 25 bp, Homo sapien
agagcgacgggagctcagacccaga

SEQ ID NO: 1710864 - DNA, 25 bp, Homo sapien
cagacccaagccccggtggaagagg

SEQ ID NO: 1710865 - DNA, 25 bp, Homo sapien
gacaccaagtagagcgacgggagct

SEQ ID NO: 1710866 - DNA, 25 bp, Homo sapien
gtccgagcgtgtggactccgcggcc

SEQ ID NO: 1710867 - DNA, 25 bp, Homo sapien
gagcgtgtggactccgcggccctga

SEQ ID NO: 1710868 - DNA, 25 bp, Homo sapien
cagtccgagcgtgtggactccgcgg

SEQ ID NO: 1710869 - DNA, 25 bp, Homo sapien
cgtgtggactccgcggccctgagcg

SEQ ID NO: 1710870 - DNA, 25 bp, Homo sapien
agtccgagcgtgtggactccgcggc

SEQ ID NO: 1710871 - DNA, 25 bp, Homo sapien
gcagtccgagcgtgtggactccgcg

SEQ ID NO: 1710872 - DNA, 25 bp, Homo sapien
cgcggagtccacacgctcggactgc

SEQ ID NO: 1710873 - DNA, 25 bp, Homo sapien
ccgcggagtccacacgctcggactg

SEQ ID NO: 1710874 - DNA, 25 bp, Homo sapien
tcagggccgcggagtccacacgctc

SEQ ID NO: 1710875 - DNA, 25 bp, Homo sapien
gggccgcggagtccacacgctcgga

SEQ ID NO: 1710876 - DNA, 25 bp, Homo sapien
gccgcggagtccacacgctcggact

SEQ ID NO: 1710877 - DNA, 25 bp, Homo sapien
cgctcagggccgcggagtccacacg

SEQ ID NO: 1710878 - DNA, 25 bp, Homo sapien
gcgccctgtcgcttctctcccgcag

SEQ ID NO: 1710879 - DNA, 25 bp, Homo sapien
gtccgagcgtgtggactccgcggcc

SEQ ID NO: 1710880 - DNA, 25 bp, Homo sapien
gagcgtgtggactccgcggccctga

SEQ ID NO: 1710881 - DNA, 25 bp, Homo sapien
cagtccgagcgtgtggactccgcgg

SEQ ID NO: 1710882 - DNA, 25 bp, Homo sapien
gcagtccgagcgtgtggactccgcg

SEQ ID NO: 1710883 - DNA, 25 bp, Homo sapien
gccctgagcgccctgtcgcttctct

SEQ ID NO: 1710884 - DNA, 25 bp, Homo sapien
ctgcgggagagaagcgacagggcgc

SEQ ID NO: 1710885 - DNA, 25 bp, Homo sapien
agagaagcgacagggcgctcagggc

SEQ ID NO: 1710886 - DNA, 25 bp, Homo sapien
cgcggagtccacacgctcggactgc

SEQ ID NO: 1710887 - DNA, 25 bp, Homo sapien
tcagggccgcggagtccacacgctc

SEQ ID NO: 1710888 - DNA, 25 bp, Homo sapien
gggccgcggagtccacacgctcgga

SEQ ID NO: 1710889 - DNA, 25 bp, Homo sapien
gccgcggagtccacacgctcggact

SEQ ID NO: 1710890 - DNA, 25 bp, Homo sapien
acgggaaccagcgcaagcgccgcaa

SEQ ID NO: 1710891 - DNA, 25 bp, Homo sapien
tctcgcgacaccctgtacgaggcgg

SEQ ID NO: 1710892 - DNA, 25 bp, Homo sapien
cgcgacaccctgtacgaggcggtgc

SEQ ID NO: 1710893 - DNA, 25 bp, Homo sapien
tgcacgggaaccagcgcaagcgccg

SEQ ID NO: 1710894 - DNA, 25 bp, Homo sapien
tcgcgacaccctgtacgaggcggtg

SEQ ID NO: 1710895 - DNA, 25 bp, Homo sapien
tgcgggaagtcctgcacgggaacca

SEQ ID NO: 1710896 - DNA, 25 bp, Homo sapien
gcaccgcctcgtacagggtgtcgcg

SEQ ID NO: 1710897 - DNA, 25 bp, Homo sapien
ttgcggcgcttgcgctggttcccgt

SEQ ID NO: 1710898 - DNA, 25 bp, Homo sapien
tggttcccgtgcaggacttcccgca

SEQ ID NO: 1710899 - DNA, 25 bp, Homo sapien
cggcgcttgcgctggttcccgtgca

SEQ ID NO: 1710900 - DNA, 25 bp, Homo sapien
ccgcctcgtacagggtgtcgcgaga

SEQ ID NO: 1710901 - DNA, 25 bp, Homo sapien
cgtacagggtgtcgcgagagacttt

SEQ ID NO: 1710902 - DNA, 25 bp, Homo sapien
ctggggcacggcgcgggtggcgagg

SEQ ID NO: 1710903 - DNA, 25 bp, Homo sapien
gcacggcgcgggtggcgagggccgg

SEQ ID NO: 1710904 - DNA, 25 bp, Homo sapien
cgcgggtggcgagggccggcgggtg

SEQ ID NO: 1710905 - DNA, 25 bp, Homo sapien
gcgggtggcgagggccggcgggtgc

SEQ ID NO: 1710906 - DNA, 25 bp, Homo sapien
ggcacggcgcgggtggcgagggccg

SEQ ID NO: 1710907 - DNA, 25 bp, Homo sapien
cacggcgcgggtggcgagggccggc

SEQ ID NO: 1710908 - DNA, 25 bp, Homo sapien
cacccgccggccctcgccacccgcg

SEQ ID NO: 1710909 - DNA, 25 bp, Homo sapien
gccggccctcgccacccgcgccgtg

SEQ ID NO: 1710910 - DNA, 25 bp, Homo sapien
ccggccctcgccacccgcgccgtgc

SEQ ID NO: 1710911 - DNA, 25 bp, Homo sapien
cggccctcgccacccgcgccgtgcc

SEQ ID NO: 1710912 - DNA, 25 bp, Homo sapien
gcacccgccggccctcgccacccgc

SEQ ID NO: 1710913 - DNA, 25 bp, Homo sapien
cctcgccacccgcgccgtgccccag

SEQ ID NO: 1710914 - DNA, 25 bp, Homo sapien
cgcgggtggcgagggccggcgggtg

SEQ ID NO: 1710915 - DNA, 25 bp, Homo sapien
tgagtgccgaccctggggcacggcg

SEQ ID NO: 1710916 - DNA, 25 bp, Homo sapien
tgcttaacccccctcctctctcgaa

SEQ ID NO: 1710917 - DNA, 25 bp, Homo sapien
ggcacggcgcgggtggcgagggccg

SEQ ID NO: 1710918 - DNA, 25 bp, Homo sapien
cacggcgcgggtggcgagggccggc

SEQ ID NO: 1710919 - DNA, 25 bp, Homo sapien
tggcgagggccggcgggtgcttaac

SEQ ID NO: 1710920 - DNA, 25 bp, Homo sapien
gccggccctcgccacccgcgccgtg

SEQ ID NO: 1710921 - DNA, 25 bp, Homo sapien
gttaagcacccgccggccctcgcca

SEQ ID NO: 1710922 - DNA, 25 bp, Homo sapien
ttcgagagaggaggggggttaagca

SEQ ID NO: 1710923 - DNA, 25 bp, Homo sapien
cgcgccgtgccccagggtcggcact

SEQ ID NO: 1710924 - DNA, 25 bp, Homo sapien
cgccgtgccccagggtcggcactca

SEQ ID NO: 1710925 - DNA, 25 bp, Homo sapien
cacccgcgccgtgccccagggtcgg

SEQ ID NO: 1710926 - DNA, 25 bp, Homo sapien
gaagaactatgatccccagaaggac

SEQ ID NO: 1710927 - DNA, 25 bp, Homo sapien
gcttgaagaactatgatccccagaa

SEQ ID NO: 1710928 - DNA, 25 bp, Homo sapien
tcagcttgaagaactatgatcccca

SEQ ID NO: 1710929 - DNA, 25 bp, Homo sapien
aggacaagcgcttctcgggcaccgt

SEQ ID NO: 1710930 - DNA, 25 bp, Homo sapien
cctggagacggtggagttgcagatc

SEQ ID NO: 1710931 - DNA, 25 bp, Homo sapien
cggtggagttgcagatcagcttgaa

SEQ ID NO: 1710932 - DNA, 25 bp, Homo sapien
aagctgatctgcaactccaccgtct

SEQ ID NO: 1710933 - DNA, 25 bp, Homo sapien
gggatcatagttcttcaagctgatc

SEQ ID NO: 1710934 - DNA, 25 bp, Homo sapien
tgacggtgcccgagaagcgcttgtc

SEQ ID NO: 1710935 - DNA, 25 bp, Homo sapien
ccttctggggatcatagttcttcaa

SEQ ID NO: 1710936 - DNA, 25 bp, Homo sapien
ttcaagctgatctgcaactccaccg

SEQ ID NO: 1710937 - DNA, 25 bp, Homo sapien
tctgcaactccaccgtctccaggaa

SEQ ID NO: 1710938 - DNA, 25 bp, Homo sapien
gatgtgctagggtagttcagacccc

SEQ ID NO: 1710939 - DNA, 25 bp, Homo sapien
gaggcgtgggtaggcctcggccgag

SEQ ID NO: 1710940 - DNA, 25 bp, Homo sapien
gttggcaccgttctgatcccaccca

SEQ ID NO: 1710941 - DNA, 25 bp, Homo sapien
cgggcacgtcggtactgatgtgcta

SEQ ID NO: 1710942 - DNA, 25 bp, Homo sapien
cacgtcggtactgatgtgctagggt

SEQ ID NO: 1710943 - DNA, 25 bp, Homo sapien
tggctgctggtgaatgtgaacgctc

SEQ ID NO: 1710944 - DNA, 25 bp, Homo sapien
gagcgttcacattcaccagcagcca

SEQ ID NO: 1710945 - DNA, 25 bp, Homo sapien
gaactaccctagcacatcagtaccg

SEQ ID NO: 1710946 - DNA, 25 bp, Homo sapien
gggtctgaactaccctagcacatca

SEQ ID NO: 1710947 - DNA, 25 bp, Homo sapien
tgggtgggatcagaacggtgccaac

SEQ ID NO: 1710948 - DNA, 25 bp, Homo sapien
ctcccctcatgttttaagacccagg

SEQ ID NO: 1710949 - DNA, 25 bp, Homo sapien
tagcacatcagtaccgacgtgcccg

SEQ ID NO: 1710950 - DNA, 25 bp, Homo sapien
ggctcggtggctgctgcggtcccag

SEQ ID NO: 1710951 - DNA, 25 bp, Homo sapien
aaggctcggtggctgctgcggtccc

SEQ ID NO: 1710952 - DNA, 25 bp, Homo sapien
aggctcggtggctgctgcggtccca

SEQ ID NO: 1710953 - DNA, 25 bp, Homo sapien
taaggctcggtggctgctgcggtcc

SEQ ID NO: 1710954 - DNA, 25 bp, Homo sapien
gtaaggctcggtggctgctgcggtc

SEQ ID NO: 1710955 - DNA, 25 bp, Homo sapien
ctgggaccgcagcagccaccgagcc

SEQ ID NO: 1710956 - DNA, 25 bp, Homo sapien
gggaccgcagcagccaccgagcctt

SEQ ID NO: 1710957 - DNA, 25 bp, Homo sapien
gaccgcagcagccaccgagccttac

SEQ ID NO: 1710958 - DNA, 25 bp, Homo sapien
tgggaccgcagcagccaccgagcct

SEQ ID NO: 1710959 - DNA, 25 bp, Homo sapien
ggaccgcagcagccaccgagcctta

SEQ ID NO: 1710960 - DNA, 25 bp, Homo sapien
gctaggcgtaacctgttggtgctgt

SEQ ID NO: 1710961 - DNA, 25 bp, Homo sapien
agggctaggcgtaacctgttggtgc

SEQ ID NO: 1710962 - DNA, 25 bp, Homo sapien
gggctaggcgtaacctgttggtgct

SEQ ID NO: 1710963 - DNA, 25 bp, Homo sapien
cagggctaggcgtaacctgttggtg

SEQ ID NO: 1710964 - DNA, 25 bp, Homo sapien
ccagggctaggcgtaacctgttggt

SEQ ID NO: 1710965 - DNA, 25 bp, Homo sapien
gttggtgctgtcccccaaaacgcag

SEQ ID NO: 1710966 - DNA, 25 bp, Homo sapien
gcaccaacaggttacgcctagccct

SEQ ID NO: 1710967 - DNA, 25 bp, Homo sapien
accaacaggttacgcctagccctgg

SEQ ID NO: 1710968 - DNA, 25 bp, Homo sapien
acagcaccaacaggttacgcctagc

SEQ ID NO: 1710969 - DNA, 25 bp, Homo sapien
agcaccaacaggttacgcctagccc

SEQ ID NO: 1710970 - DNA, 25 bp, Homo sapien
ctgcgttttgggggacagcaccaac

SEQ ID NO: 1710971 - DNA, 25 bp, Homo sapien
caccaacaggttacgcctagccctg

SEQ ID NO: 1710972 - DNA, 25 bp, Homo sapien
ggacagcaccaacaggttacgccta

SEQ ID NO: 1710973 - DNA, 25 bp, Homo sapien
tgcgttttgggggacagcaccaaca

SEQ ID NO: 1710974 - DNA, 25 bp, Homo sapien
gacagcaccaacaggttacgcctag

SEQ ID NO: 1710975 - DNA, 25 bp, Homo sapien
accaacaggttacgcctagccctgg

SEQ ID NO: 1710976 - DNA, 25 bp, Homo sapien
acagcaccaacaggttacgcctagc

SEQ ID NO: 1710977 - DNA, 25 bp, Homo sapien
gggacagcaccaacaggttacgcct

SEQ ID NO: 1710978 - DNA, 25 bp, Homo sapien
cgccctaagttctctgtgtgtgtcc

SEQ ID NO: 1710979 - DNA, 25 bp, Homo sapien
tccccgccctaagttctctgtgtgt

SEQ ID NO: 1710980 - DNA, 25 bp, Homo sapien
ccagcagcactgtgacgaggctaag

SEQ ID NO: 1710981 - DNA, 25 bp, Homo sapien
ccccgccctaagttctctgtgtgtg

SEQ ID NO: 1710982 - DNA, 25 bp, Homo sapien
cccgccctaagttctctgtgtgtgt

SEQ ID NO: 1710983 - DNA, 25 bp, Homo sapien
ggaccagcagcactgtgacgaggct

SEQ ID NO: 1710984 - DNA, 25 bp, Homo sapien
tagcctcgtcacagtgctgctggtc

SEQ ID NO: 1710985 - DNA, 25 bp, Homo sapien
ggacacacacagagaacttagggcg

SEQ ID NO: 1710986 - DNA, 25 bp, Homo sapien
cttagcctcgtcacagtgctgctgg

SEQ ID NO: 1710987 - DNA, 25 bp, Homo sapien
acacacacagagaacttagggcggg

SEQ ID NO: 1710988 - DNA, 25 bp, Homo sapien
ccaggacacacacagagaacttagg

SEQ ID NO: 1710989 - DNA, 25 bp, Homo sapien
gacacacacagagaacttagggcgg

SEQ ID NO: 1710990 - DNA, 25 bp, Homo sapien
tggatatcccccacatggacatcga

SEQ ID NO: 1710991 - DNA, 25 bp, Homo sapien
gccgtggatatcccccacatggaca

SEQ ID NO: 1710992 - DNA, 25 bp, Homo sapien
ccgtggatatcccccacatggacat

SEQ ID NO: 1710993 - DNA, 25 bp, Homo sapien
cgtggatatcccccacatggacatc

SEQ ID NO: 1710994 - DNA, 25 bp, Homo sapien
gtggatatcccccacatggacatcg

SEQ ID NO: 1710995 - DNA, 25 bp, Homo sapien
ggatatcccccacatggacatcgag

SEQ ID NO: 1710996 - DNA, 25 bp, Homo sapien
cgatgtccatgtgggggatatccac

SEQ ID NO: 1710997 - DNA, 25 bp, Homo sapien
gatgtccatgtgggggatatccacg

SEQ ID NO: 1710998 - DNA, 25 bp, Homo sapien
tgtccatgtgggggatatccacggc

SEQ ID NO: 1710999 - DNA, 25 bp, Homo sapien
ctcgatgtccatgtgggggatatcc

SEQ ID NO: 1711000 - DNA, 25 bp, Homo sapien
tcgatgtccatgtgggggatatcca

SEQ ID NO: 1711001 - DNA, 25 bp, Homo sapien
atgtccatgtgggggatatccacgg

SEQ ID NO: 1711002 - DNA, 25 bp, Homo sapien
gctgaaaaaactcaacaagaataaa

SEQ ID NO: 1711003 - DNA, 25 bp, Homo sapien
cgctgaaaaaactcaacaagaataa

SEQ ID NO: 1711004 - DNA, 25 bp, Homo sapien
gcgctgaaaaaactcaacaagaata

SEQ ID NO: 1711005 - DNA, 25 bp, Homo sapien
ttattcttgttgagttttttcagcg

SEQ ID NO: 1711006 - DNA, 25 bp, Homo sapien
tttattcttgttgagttttttcagc

SEQ ID NO: 1711007 - DNA, 25 bp, Homo sapien
tattcttgttgagttttttcagcgc

SEQ ID NO: 1711008 - DNA, 25 bp, Homo sapien
cctagaatagcaaaggatcggcggt

SEQ ID NO: 1711009 - DNA, 25 bp, Homo sapien
tgagtccggccgctgtggttttgca

SEQ ID NO: 1711010 - DNA, 25 bp, Homo sapien
tttacaggtaggaagcagacattcc

SEQ ID NO: 1711011 - DNA, 25 bp, Homo sapien
cggtggttgcctagcttgcctgagt

SEQ ID NO: 1711012 - DNA, 25 bp, Homo sapien
gcattgtaagttgaccagccaggtg

SEQ ID NO: 1711013 - DNA, 25 bp, Homo sapien
cattcccagttgtcacgtgtccagg

SEQ ID NO: 1711014 - DNA, 25 bp, Homo sapien
taatgccactgcctaaacaacgcag

SEQ ID NO: 1711015 - DNA, 25 bp, Homo sapien
gaatgtctgcttcctacctgtaaaa

SEQ ID NO: 1711016 - DNA, 25 bp, Homo sapien
cctggacacgtgacaactgggaatg

SEQ ID NO: 1711017 - DNA, 25 bp, Homo sapien
caaatcatagttcaccagcacctgg

SEQ ID NO: 1711018 - DNA, 25 bp, Homo sapien
agcactcaggcaagctaggcaacca

SEQ ID NO: 1711019 - DNA, 25 bp, Homo sapien
tggtcaacttacaatgcctggcctc

SEQ ID NO: 1711020 - DNA, 25 bp, Homo sapien
tacagcggttatgccatggatcatg

SEQ ID NO: 1711021 - DNA, 25 bp, Homo sapien
gattgattcaagtgcgtttctggcc

SEQ ID NO: 1711022 - DNA, 25 bp, Homo sapien
tgaccagagcatccgttgtacagcg

SEQ ID NO: 1711023 - DNA, 25 bp, Homo sapien
acatttgaggtgtgccttggtgacc

SEQ ID NO: 1711024 - DNA, 25 bp, Homo sapien
tgctgcttggaggtcacttacatga

SEQ ID NO: 1711025 - DNA, 25 bp, Homo sapien
ggtgaccaggttctaagcaatgcca

SEQ ID NO: 1711026 - DNA, 25 bp, Homo sapien
ggccagaaacgcacttgaatcaatc

SEQ ID NO: 1711027 - DNA, 25 bp, Homo sapien
catgatccatggcataaccgctgta

SEQ ID NO: 1711028 - DNA, 25 bp, Homo sapien
tcatgtaagtgacctccaagcagca

SEQ ID NO: 1711029 - DNA, 25 bp, Homo sapien
ggtcaccaaggcacacctcaaatgt

SEQ ID NO: 1711030 - DNA, 25 bp, Homo sapien
ggcattgcttagaacctggtcacca

SEQ ID NO: 1711031 - DNA, 25 bp, Homo sapien
tacaacggatgctctggtcaagact

SEQ ID NO: 1711032 - DNA, 25 bp, Homo sapien
aagtatgatgcgtttttggcctcag

SEQ ID NO: 1711033 - DNA, 25 bp, Homo sapien
ctgaggccaaaaacgcatcatactt

SEQ ID NO: 1711034 - DNA, 25 bp, Homo sapien
attccacgaatcctcggcccaggtt

SEQ ID NO: 1711035 - DNA, 25 bp, Homo sapien
caacgaaaacatggtggccaaagtg

SEQ ID NO: 1711036 - DNA, 25 bp, Homo sapien
cctgctcacacacaacgaaaacatg

SEQ ID NO: 1711037 - DNA, 25 bp, Homo sapien
ctcggcccaggtttaaataaggcag

SEQ ID NO: 1711038 - DNA, 25 bp, Homo sapien
gtccacaatcaagttccaaatgaag

SEQ ID NO: 1711039 - DNA, 25 bp, Homo sapien
tccacgaatcctcggcccaggttta

SEQ ID NO: 1711040 - DNA, 25 bp, Homo sapien
cttcatttggaacttgattgtggac

SEQ ID NO: 1711041 - DNA, 25 bp, Homo sapien
ctgccttatttaaacctgggccgag

SEQ ID NO: 1711042 - DNA, 25 bp, Homo sapien
taaacctgggccgaggattcgtgga

SEQ ID NO: 1711043 - DNA, 25 bp, Homo sapien
catgttttcgttgtgtgtgagcagg

SEQ ID NO: 1711044 - DNA, 25 bp, Homo sapien
cactttggccaccatgttttcgttg

SEQ ID NO: 1711045 - DNA, 25 bp, Homo sapien
aacctgggccgaggattcgtggaat

SEQ ID NO: 1711046 - DNA, 25 bp, Homo sapien
atctgctattcgtccaccaacctga

SEQ ID NO: 1711047 - DNA, 25 bp, Homo sapien
tgttggcagggtctaaatcttatcc

SEQ ID NO: 1711048 - DNA, 25 bp, Homo sapien
gacaggccatctgctattcgtccac

SEQ ID NO: 1711049 - DNA, 25 bp, Homo sapien
ttggcccgggtccaagtacctgctc

SEQ ID NO: 1711050 - DNA, 25 bp, Homo sapien
ccaagtctctaaatatgccagtaag

SEQ ID NO: 1711051 - DNA, 25 bp, Homo sapien
gggtctaaatcttatccaagtctct

SEQ ID NO: 1711052 - DNA, 25 bp, Homo sapien
gataagatttagaccctgccaacac

SEQ ID NO: 1711053 - DNA, 25 bp, Homo sapien
agcaggtacttggacccgggccaag

SEQ ID NO: 1711054 - DNA, 25 bp, Homo sapien
tggacgaatagcagatggcctgtcc

SEQ ID NO: 1711055 - DNA, 25 bp, Homo sapien
cttactggcatatttagagacttgg

SEQ ID NO: 1711056 - DNA, 25 bp, Homo sapien
tcaggttggtggacgaatagcagat

SEQ ID NO: 1711057 - DNA, 25 bp, Homo sapien
gagacttggataagatttagaccct

SEQ ID NO: 1711058 - DNA, 25 bp, Homo sapien
tcaacttcttggtgtcattgctcaa

SEQ ID NO: 1711059 - DNA, 25 bp, Homo sapien
acgatgagcttgtgtataacattca

SEQ ID NO: 1711060 - DNA, 25 bp, Homo sapien
tatgtctggctgtagctgttggtca

SEQ ID NO: 1711061 - DNA, 25 bp, Homo sapien
gtctggctgtagctgttggtcacgt

SEQ ID NO: 1711062 - DNA, 25 bp, Homo sapien
cagacgatgagcttgtgtataacat

SEQ ID NO: 1711063 - DNA, 25 bp, Homo sapien
ttggtgtcattgctcaagaaaaact

SEQ ID NO: 1711064 - DNA, 25 bp, Homo sapien
acgtgaccaacagctacagccagac

SEQ ID NO: 1711065 - DNA, 25 bp, Homo sapien
tgaatgttatacacaagctcatcgt

SEQ ID NO: 1711066 - DNA, 25 bp, Homo sapien
tgagcaatgacaccaagaagttgac

SEQ ID NO: 1711067 - DNA, 25 bp, Homo sapien
agtttttcttgagcaatgacaccaa

SEQ ID NO: 1711068 - DNA, 25 bp, Homo sapien
gaccaacagctacagccagacataa

SEQ ID NO: 1711069 - DNA, 25 bp, Homo sapien
atgttatacacaagctcatcgtctg

SEQ ID NO: 1711070 - DNA, 25 bp, Homo sapien
catgggcaagccccagcgcctatat

SEQ ID NO: 1711071 - DNA, 25 bp, Homo sapien
ccatgggcaagccccagcgcctata

SEQ ID NO: 1711072 - DNA, 25 bp, Homo sapien
tgggcaagccccagcgcctatatta

SEQ ID NO: 1711073 - DNA, 25 bp, Homo sapien
gggcaagccccagcgcctatattaa

SEQ ID NO: 1711074 - DNA, 25 bp, Homo sapien
atgggcaagccccagcgcctatatt

SEQ ID NO: 1711075 - DNA, 25 bp, Homo sapien
tataggcgctggggcttgcccatgg

SEQ ID NO: 1711076 - DNA, 25 bp, Homo sapien
ttaatataggcgctggggcttgccc

SEQ ID NO: 1711077 - DNA, 25 bp, Homo sapien
atataggcgctggggcttgcccatg

SEQ ID NO: 1711078 - DNA, 25 bp, Homo sapien
aatataggcgctggggcttgcccat

SEQ ID NO: 1711079 - DNA, 25 bp, Homo sapien
taatataggcgctggggcttgccca

SEQ ID NO: 1711080 - DNA, 25 bp, Homo sapien
agtgacacatcttgacacaggccgc

SEQ ID NO: 1711081 - DNA, 25 bp, Homo sapien
acaggccgccagtgtaggaggcaca

SEQ ID NO: 1711082 - DNA, 25 bp, Homo sapien
gaggcggtcagtgctgccttcctgt

SEQ ID NO: 1711083 - DNA, 25 bp, Homo sapien
caggcacaaggacatggcgacatgc

SEQ ID NO: 1711084 - DNA, 25 bp, Homo sapien
aaatcccttcaacgtccctgtgaag

SEQ ID NO: 1711085 - DNA, 25 bp, Homo sapien
caggattttacagataactgaatca

SEQ ID NO: 1711086 - DNA, 25 bp, Homo sapien
tcattaaatcccttcaacgtccctg

SEQ ID NO: 1711087 - DNA, 25 bp, Homo sapien
taactgaatcattaaatcccttcaa

SEQ ID NO: 1711088 - DNA, 25 bp, Homo sapien
tgtttgggcccagtaagaaatgcct

SEQ ID NO: 1711089 - DNA, 25 bp, Homo sapien
tgtctgtctcctaagaccacctggg

SEQ ID NO: 1711090 - DNA, 25 bp, Homo sapien
catggagcgcctatgtgccagatgc

SEQ ID NO: 1711091 - DNA, 25 bp, Homo sapien
tctaatccatgaacgtgagcaggcg

SEQ ID NO: 1711092 - DNA, 25 bp, Homo sapien
gtcagtcccgtgctctgctctttag

SEQ ID NO: 1711093 - DNA, 25 bp, Homo sapien
ctggagagacgtgtcagtcccgtgc

SEQ ID NO: 1711094 - DNA, 25 bp, Homo sapien
tgctctttagcactgcaggtccagt

SEQ ID NO: 1711095 - DNA, 25 bp, Homo sapien
tgtgagtttaagatggagagatgtt

SEQ ID NO: 1711096 - DNA, 25 bp, Homo sapien
tcgacctcctggcttcaaacagtgc

SEQ ID NO: 1711097 - DNA, 25 bp, Homo sapien
ctcctggcttcaaacagtgctgctt

SEQ ID NO: 1711098 - DNA, 25 bp, Homo sapien
ctggcttcaaacagtgctgcttcct

SEQ ID NO: 1711099 - DNA, 25 bp, Homo sapien
cgacctcctggcttcaaacagtgct

SEQ ID NO: 1711100 - DNA, 25 bp, Homo sapien
gtcctctggctccggccctcatcca

SEQ ID NO: 1711101 - DNA, 25 bp, Homo sapien
ctgtcctctggctccggccctcatc

SEQ ID NO: 1711102 - DNA, 25 bp, Homo sapien
tgtcctctggctccggccctcatcc

SEQ ID NO: 1711103 - DNA, 25 bp, Homo sapien
gtttgcacacgagctgaaaggcatc

SEQ ID NO: 1711104 - DNA, 25 bp, Homo sapien
caggagaagcttgtggtttgcacac

SEQ ID NO: 1711105 - DNA, 25 bp, Homo sapien
aattccacctgtcaggagaagcttg

SEQ ID NO: 1711106 - DNA, 25 bp, Homo sapien
gaagcttgtggtttgcacacgagct

SEQ ID NO: 1711107 - DNA, 25 bp, Homo sapien
ccagatggcgtcctcgagatggaga

SEQ ID NO: 1711108 - DNA, 25 bp, Homo sapien
cctcgagatggagaggcgatgccat

SEQ ID NO: 1711109 - DNA, 25 bp, Homo sapien
cctccagatggcgtcctcgagatgg

SEQ ID NO: 1711110 - DNA, 25 bp, Homo sapien
tcctcgagatggagaggcgatgcca

SEQ ID NO: 1711111 - DNA, 25 bp, Homo sapien
tcacagggctggggcctgcagggga

SEQ ID NO: 1711112 - DNA, 25 bp, Homo sapien
tgatcttaaggttcacatcactttt

SEQ ID NO: 1711113 - DNA, 25 bp, Homo sapien
ggctgagttgagattgtagaaaatc

SEQ ID NO: 1711114 - DNA, 25 bp, Homo sapien
aaatcaactccagcataaggagcag

SEQ ID NO: 1711115 - DNA, 25 bp, Homo sapien
gatgaagaagatacccttggttccc

SEQ ID NO: 1711116 - DNA, 25 bp, Homo sapien
caaatctttagggacctactctcca

SEQ ID NO: 1711117 - DNA, 25 bp, Homo sapien
cactaaatgcagaagtatgttgtac

SEQ ID NO: 1711118 - DNA, 25 bp, Homo sapien
attttccgaattagcttccatgtag

SEQ ID NO: 1711119 - DNA, 25 bp, Homo sapien
tacaatcacttctatacactctgtg

SEQ ID NO: 1711120 - DNA, 25 bp, Homo sapien
atctatttaagaggctagggcaggc

SEQ ID NO: 1711121 - DNA, 25 bp, Homo sapien
ttatggatttgggatgggattacag

SEQ ID NO: 1711122 - DNA, 25 bp, Homo sapien
atttatggatttgggatgggattac

SEQ ID NO: 1711123 - DNA, 25 bp, Homo sapien
tgggaggtctaggcacaacaatcac

SEQ ID NO: 1711124 - DNA, 25 bp, Homo sapien
cggccaggacgttcacgcacaccat

SEQ ID NO: 1711125 - DNA, 25 bp, Homo sapien
gagagcatcggccaggacgttcacg

SEQ ID NO: 1711126 - DNA, 25 bp, Homo sapien
gcatcggccaggacgttcacgcaca

SEQ ID NO: 1711127 - DNA, 25 bp, Homo sapien
gagcatcggccaggacgttcacgca

SEQ ID NO: 1711128 - DNA, 25 bp, Homo sapien
cctaataagcactgggcgtttgcct

SEQ ID NO: 1711129 - DNA, 25 bp, Homo sapien
gcacggcctaataagcactgggcgt

SEQ ID NO: 1711130 - DNA, 25 bp, Homo sapien
aaccggacgatgagtttggagcacg

SEQ ID NO: 1711131 - DNA, 25 bp, Homo sapien
cggcctaataagcactgggcgtttg

SEQ ID NO: 1711132 - DNA, 25 bp, Homo sapien
cgaatctggggctgatcactccaca

SEQ ID NO: 1711133 - DNA, 25 bp, Homo sapien
gaatctggggctgatcactccacac

SEQ ID NO: 1711134 - DNA, 25 bp, Homo sapien
aaaccaaactggtgggatggaagca

SEQ ID NO: 1711135 - DNA, 25 bp, Homo sapien
agcagattattctgccattttctag

SEQ ID NO: 1711136 - DNA, 25 bp, Homo sapien
gtgggatggaagcagattattctgc

SEQ ID NO: 1711137 - DNA, 25 bp, Homo sapien
gtacaatgaaaccaaactggtggga

SEQ ID NO: 1711138 - DNA, 25 bp, Homo sapien
tatatgtattacatccctagaaaaa

SEQ ID NO: 1711139 - DNA, 25 bp, Homo sapien
aaatatatgtattacatccctagaa

SEQ ID NO: 1711140 - DNA, 25 bp, Homo sapien
ttttccatgagacattttatttgta

SEQ ID NO: 1711141 - DNA, 25 bp, Homo sapien
tttccatgagacattttatttgtaa

SEQ ID NO: 1711142 - DNA, 25 bp, Homo sapien
gcggcacccaggcttgaatacagtg

SEQ ID NO: 1711143 - DNA, 25 bp, Homo sapien
gttagcgacgtggagcatctcttca

SEQ ID NO: 1711144 - DNA, 25 bp, Homo sapien
tgtgtatcacctccagagaaatgtc

SEQ ID NO: 1711145 - DNA, 25 bp, Homo sapien
tgcatttgcctggaagttagcgacg

SEQ ID NO: 1711146 - DNA, 25 bp, Homo sapien
cctgggctgagcgactcgcagacaa

SEQ ID NO: 1711147 - DNA, 25 bp, Homo sapien
gactcgcagacaagtgaaaaatgag

SEQ ID NO: 1711148 - DNA, 25 bp, Homo sapien
cccaaacatttacggcccatctgtt

SEQ ID NO: 1711149 - DNA, 25 bp, Homo sapien
tctgttgtgaactgggtactgttcc

SEQ ID NO: 1711150 - DNA, 25 bp, Homo sapien
cattagccagcggatatttcacctt

SEQ ID NO: 1711151 - DNA, 25 bp, Homo sapien
cagaaaatcggcaatggacagtatc

SEQ ID NO: 1711152 - DNA, 25 bp, Homo sapien
gattttaaggtaggctcgacttgca

SEQ ID NO: 1711153 - DNA, 25 bp, Homo sapien
gcatcgttgctaaaaagaaccaagt

SEQ ID NO: 1711154 - DNA, 25 bp, Homo sapien
tacttgagctgaccattgaactagg

SEQ ID NO: 1711155 - DNA, 25 bp, Homo sapien
aactgttgggaaagctctgtagagc

SEQ ID NO: 1711156 - DNA, 25 bp, Homo sapien
tacgggtaaacagattgagcatggc

SEQ ID NO: 1711157 - DNA, 25 bp, Homo sapien
tattccaagactcagatgatgccag

SEQ ID NO: 1711158 - DNA, 25 bp, Homo sapien
ccaactcaggacagaacagtgttta

SEQ ID NO: 1711159 - DNA, 25 bp, Homo sapien
gagtgagccagcagcttaagtccag

SEQ ID NO: 1711160 - DNA, 25 bp, Homo sapien
caagtatccaattcagggtccctgg

SEQ ID NO: 1711161 - DNA, 25 bp, Homo sapien
cacagacgtgaaagccagaacctca

SEQ ID NO: 1711162 - DNA, 25 bp, Homo sapien
atatggttgatctagaatttacttt

SEQ ID NO: 1711163 - DNA, 25 bp, Homo sapien
aatatggttgatctagaatttactt

SEQ ID NO: 1711164 - DNA, 25 bp, Homo sapien
tgggcgtcctcatgttctcggtcac

SEQ ID NO: 1711165 - DNA, 25 bp, Homo sapien
gtcctcatgttctcggtcaccttgt

SEQ ID NO: 1711166 - DNA, 25 bp, Homo sapien
tgtgcctgggcgtcctcatgttctc

SEQ ID NO: 1711167 - DNA, 25 bp, Homo sapien
tgcctgggcgtcctcatgttctcgg

SEQ ID NO: 1711168 - DNA, 25 bp, Homo sapien
aactccatggtgcaccgctcgtatg

SEQ ID NO: 1711169 - DNA, 25 bp, Homo sapien
ctccatggtgcaccgctcgtatggg

SEQ ID NO: 1711170 - DNA, 25 bp, Homo sapien
caccgctcgtatggggtgaagccac

SEQ ID NO: 1711171 - DNA, 25 bp, Homo sapien
tgcaccgctcgtatggggtgaagcc

SEQ ID NO: 1711172 - DNA, 25 bp, Homo sapien
ggtgcatccccacccttgtcttgat

SEQ ID NO: 1711173 - DNA, 25 bp, Homo sapien
cttggtgcatccccacccttgtctt

SEQ ID NO: 1711174 - DNA, 25 bp, Homo sapien
gatgaacttgagggcccatttgtcc

SEQ ID NO: 1711175 - DNA, 25 bp, Homo sapien
tgagggcccatttgtccttggagac

SEQ ID NO: 1711176 - DNA, 25 bp, Homo sapien
tcagtccttggcagcggcttttgtc

SEQ ID NO: 1711177 - DNA, 25 bp, Homo sapien
cagcggcttttgtcatggtggccag

SEQ ID NO: 1711178 - DNA, 25 bp, Homo sapien
ccttggcagcggcttttgtcatggt

SEQ ID NO: 1711179 - DNA, 25 bp, Homo sapien
ttttgtcatggtggccaggacattg

SEQ ID NO: 1711180 - DNA, 25 bp, Homo sapien
acgcccagctgattttttttgtatt

SEQ ID NO: 1711181 - DNA, 25 bp, Homo sapien
ctatagtgcagtggcgcggtcttgg

SEQ ID NO: 1711182 - DNA, 25 bp, Homo sapien
cgcccagctgattttttttgtattt

SEQ ID NO: 1711183 - DNA, 25 bp, Homo sapien
ctcaggctatagtgcagtggcgcgg

SEQ ID NO: 1711184 - DNA, 25 bp, Homo sapien
tctgagtgctaggtttgctcctgct

SEQ ID NO: 1711185 - DNA, 25 bp, Homo sapien
ctagacccacttagcagacagagag

SEQ ID NO: 1711186 - DNA, 25 bp, Homo sapien
tctggtaccacaagacactcatggc

SEQ ID NO: 1711187 - DNA, 25 bp, Homo sapien
gggatatcatcattcctagacccac

SEQ ID NO: 1711188 - DNA, 25 bp, Homo sapien
tatttatcgagtgcctgatatacag

SEQ ID NO: 1711189 - DNA, 25 bp, Homo sapien
aattgcccaaggctatacagtaagt

SEQ ID NO: 1711190 - DNA, 25 bp, Homo sapien
aggtcctggttagcagtatttatcg

SEQ ID NO: 1711191 - DNA, 25 bp, Homo sapien
ggtacagaaatgaagtaggtcctgg

SEQ ID NO: 1711192 - DNA, 25 bp, Homo sapien
ttttgcacctaaccataagtctttg

SEQ ID NO: 1711193 - DNA, 25 bp, Homo sapien
gatttattttttgcacctaaccata

SEQ ID NO: 1711194 - DNA, 25 bp, Homo sapien
gcacctaaccataagtctttgtcca

SEQ ID NO: 1711195 - DNA, 25 bp, Homo sapien
tattttttgcacctaaccataagtc

SEQ ID NO: 1711196 - DNA, 25 bp, Homo sapien
tacacatccttctcggctgacagga

SEQ ID NO: 1711197 - DNA, 25 bp, Homo sapien
gggtcctgagacgatacacatcctt

SEQ ID NO: 1711198 - DNA, 25 bp, Homo sapien
gtgtacttaacgcaattattacagg

SEQ ID NO: 1711199 - DNA, 25 bp, Homo sapien
gagacgatacacatccttctcggct

SEQ ID NO: 1711200 - DNA, 25 bp, Homo sapien
caaaaagccatcatatgtatcgtca

SEQ ID NO: 1711201 - DNA, 25 bp, Homo sapien
tcattcctaagcgatgacactcaag

SEQ ID NO: 1711202 - DNA, 25 bp, Homo sapien
tgttctcaagataactccattaaaa

SEQ ID NO: 1711203 - DNA, 25 bp, Homo sapien
tatgtatcgtcaatatgaaattgga

SEQ ID NO: 1711204 - DNA, 25 bp, Homo sapien
taaggggtctcttgtcttggtacag

SEQ ID NO: 1711205 - DNA, 25 bp, Homo sapien
tgtacctttgagctaaggggtctct

SEQ ID NO: 1711206 - DNA, 25 bp, Homo sapien
gctggatacagcttatgagagataa

SEQ ID NO: 1711207 - DNA, 25 bp, Homo sapien
caaaaaaggcaatgcataaagtcaa

SEQ ID NO: 1711208 - DNA, 25 bp, Homo sapien
acacccttgccggttgaaagtatgc

SEQ ID NO: 1711209 - DNA, 25 bp, Homo sapien
tgccggttgaaagtatgcctatcca

SEQ ID NO: 1711210 - DNA, 25 bp, Homo sapien
agtatgcctatccagctcagacact

SEQ ID NO: 1711211 - DNA, 25 bp, Homo sapien
ggttgaaagtatgcctatccagctc

SEQ ID NO: 1711212 - DNA, 25 bp, Homo sapien
ttcttcctccgggagtggcatgtca

SEQ ID NO: 1711213 - DNA, 25 bp, Homo sapien
ggcatgtcagaaaatttgatgatta

SEQ ID NO: 1711214 - DNA, 25 bp, Homo sapien
tcctccgggagtggcatgtcagaaa

SEQ ID NO: 1711215 - DNA, 25 bp, Homo sapien
ccgggagtggcatgtcagaaaattt

SEQ ID NO: 1711216 - DNA, 25 bp, Homo sapien
actgtgcatgagatactgtatttgc

SEQ ID NO: 1711217 - DNA, 25 bp, Homo sapien
tactgtgcatgagatactgtatttg

SEQ ID NO: 1711218 - DNA, 25 bp, Homo sapien
ctgtgcatgagatactgtatttgct

SEQ ID NO: 1711219 - DNA, 25 bp, Homo sapien
ttactgtgcatgagatactgtattt

SEQ ID NO: 1711220 - DNA, 25 bp, Homo sapien
taattatgctattaagcgagaagat

SEQ ID NO: 1711221 - DNA, 25 bp, Homo sapien
aagcgagaagatagtggccggtcac

SEQ ID NO: 1711222 - DNA, 25 bp, Homo sapien
gatagtggccggtcacggtcgctca

SEQ ID NO: 1711223 - DNA, 25 bp, Homo sapien
tgctattaagcgagaagatagtggc

SEQ ID NO: 1711224 - DNA, 25 bp, Homo sapien
ttagctgctttttgtcaattcatag

SEQ ID NO: 1711225 - DNA, 25 bp, Homo sapien
tagctgctttttgtcaattcatagc

SEQ ID NO: 1711226 - DNA, 25 bp, Homo sapien
cgggacaagcgttggggaaccgcat

SEQ ID NO: 1711227 - DNA, 25 bp, Homo sapien
tcgggacaagcgttggggaaccgca

SEQ ID NO: 1711228 - DNA, 25 bp, Homo sapien
cctcatttgcatggacggcgcgcgg

SEQ ID NO: 1711229 - DNA, 25 bp, Homo sapien
tctatggcccccacaaagggcaagg

SEQ ID NO: 1711230 - DNA, 25 bp, Homo sapien
ggcaagggccagacacgtgggctgg

SEQ ID NO: 1711231 - DNA, 25 bp, Homo sapien
gcggccaccaatccggacaggcgga

SEQ ID NO: 1711232 - DNA, 25 bp, Homo sapien
caggtatctgcagccatagcgcatg

SEQ ID NO: 1711233 - DNA, 25 bp, Homo sapien
atccaggtatctgcagccatagcgc

SEQ ID NO: 1711234 - DNA, 25 bp, Homo sapien
tccaggtatctgcagccatagcgca

SEQ ID NO: 1711235 - DNA, 25 bp, Homo sapien
ccaggtatctgcagccatagcgcat

SEQ ID NO: 1711236 - DNA, 25 bp, Homo sapien
ttttaattagcccagtgcgattgta

SEQ ID NO: 1711237 - DNA, 25 bp, Homo sapien
ctttacatgcgcataatttacttat

SEQ ID NO: 1711238 - DNA, 25 bp, Homo sapien
cagtgcgattgtacacacctgtagt

SEQ ID NO: 1711239 - DNA, 25 bp, Homo sapien
aggcttaagtaggaggatcatgagc

SEQ ID NO: 1711240 - DNA, 25 bp, Homo sapien
tagcaaaccataagggtctcaatgc

SEQ ID NO: 1711241 - DNA, 25 bp, Homo sapien
gcaagctattttctagaaaatacag

SEQ ID NO: 1711242 - DNA, 25 bp, Homo sapien
ggcccaactagctcttccttagcaa

SEQ ID NO: 1711243 - DNA, 25 bp, Homo sapien
aagagagcgggtaacaaacaattat

SEQ ID NO: 1711244 - DNA, 25 bp, Homo sapien
tatccaactggaatcttttctatta

SEQ ID NO: 1711245 - DNA, 25 bp, Homo sapien
gtatccaactggaatcttttctatt

SEQ ID NO: 1711246 - DNA, 25 bp, Homo sapien
ttgtatccaactggaatcttttcta

SEQ ID NO: 1711247 - DNA, 25 bp, Homo sapien
ctttgtatccaactggaatcttttc

SEQ ID NO: 1711248 - DNA, 25 bp, Homo sapien
tgtcatccaggtctccactactaga

SEQ ID NO: 1711249 - DNA, 25 bp, Homo sapien
tctgttttgccagccaccgttggag

SEQ ID NO: 1711250 - DNA, 25 bp, Homo sapien
caagacattgtgctttctgctggcc

SEQ ID NO: 1711251 - DNA, 25 bp, Homo sapien
gccccttttcaatgttcagagactg

SEQ ID NO: 1711252 - DNA, 25 bp, Homo sapien
ggaactcctgtatcctttgtcctgc

SEQ ID NO: 1711253 - DNA, 25 bp, Homo sapien
gtttggaactcctgtatcctttgtc

SEQ ID NO: 1711254 - DNA, 25 bp, Homo sapien
aggtttggaactcctgtatcctttg

SEQ ID NO: 1711255 - DNA, 25 bp, Homo sapien
tggaactcctgtatcctttgtcctg

SEQ ID NO: 1711256 - DNA, 25 bp, Homo sapien
agggcaccaggagacgatggagaga

SEQ ID NO: 1711257 - DNA, 25 bp, Homo sapien
ctccccccaggttcggatgcggagg

SEQ ID NO: 1711258 - DNA, 25 bp, Homo sapien
cctcgcgacgtcactgatgtcaagg

SEQ ID NO: 1711259 - DNA, 25 bp, Homo sapien
atggagagaggccacgcccctcgcg

SEQ ID NO: 1711260 - DNA, 25 bp, Homo sapien
ggtcctctacgaaaagacaccgcca

SEQ ID NO: 1711261 - DNA, 25 bp, Homo sapien
cacttgtgcgcatagaagctaaggg

SEQ ID NO: 1711262 - DNA, 25 bp, Homo sapien
tacctaaatgaggaacaggagccct

SEQ ID NO: 1711263 - DNA, 25 bp, Homo sapien
tgaaaagccctttgcagtccgacag

SEQ ID NO: 1711264 - DNA, 25 bp, Homo sapien
gagttactacctgccttacccagga

SEQ ID NO: 1711265 - DNA, 25 bp, Homo sapien
gctgcaactctttatgggaacctgg

SEQ ID NO: 1711266 - DNA, 25 bp, Homo sapien
gatcgtaggtatgttctccatgccc

SEQ ID NO: 1711267 - DNA, 25 bp, Homo sapien
aaaaggacatgagctgcccaagcac

SEQ ID NO: 1711268 - DNA, 25 bp, Homo sapien
ctggccctgatccctttttgggaga

SEQ ID NO: 1711269 - DNA, 25 bp, Homo sapien
ttgtagagcaggtagatcgccccgg

SEQ ID NO: 1711270 - DNA, 25 bp, Homo sapien
tgtggccaggctgactacgcttttg

SEQ ID NO: 1711271 - DNA, 25 bp, Homo sapien
tacgcttttgcggatgtccagttgc

SEQ ID NO: 1711272 - DNA, 25 bp, Homo sapien
gccagccttgatggccttgtagagc

SEQ ID NO: 1711273 - DNA, 25 bp, Homo sapien
cagcagaggcctcgggagcaggtgc

SEQ ID NO: 1711274 - DNA, 25 bp, Homo sapien
acagcagaggcctcgggagcaggtg

SEQ ID NO: 1711275 - DNA, 25 bp, Homo sapien
ctctccccagggcccggacactcac

SEQ ID NO: 1711276 - DNA, 25 bp, Homo sapien
cagaggcctcgggagcaggtgcctc

SEQ ID NO: 1711277 - DNA, 25 bp, Homo sapien
gaccctgagctagcatctctggcag

SEQ ID NO: 1711278 - DNA, 25 bp, Homo sapien
aatgtagtatttggagacctgccag

SEQ ID NO: 1711279 - DNA, 25 bp, Homo sapien
cttgagtgagatccagggaccctga

SEQ ID NO: 1711280 - DNA, 25 bp, Homo sapien
gagtctgaggatccacttgagtgag

SEQ ID NO: 1711281 - DNA, 25 bp, Homo sapien
accccagcccagttcaggctgtgga

SEQ ID NO: 1711282 - DNA, 25 bp, Homo sapien
caccccagcccagttcaggctgtgg

SEQ ID NO: 1711283 - DNA, 25 bp, Homo sapien
agccaccccagcccagttcaggctg

SEQ ID NO: 1711284 - DNA, 25 bp, Homo sapien
gacagccaccccagcccagttcagg

SEQ ID NO: 1711285 - DNA, 25 bp, Homo sapien
catgctcttggcatactcatcctgt

SEQ ID NO: 1711286 - DNA, 25 bp, Homo sapien
tccagcaagtacacacagcgagtga

SEQ ID NO: 1711287 - DNA, 25 bp, Homo sapien
ggagctcacctgagtcccgcccgtg

SEQ ID NO: 1711288 - DNA, 25 bp, Homo sapien
gtgccgctctcgctcgactgccagg

SEQ ID NO: 1711289 - DNA, 25 bp, Homo sapien
ttttgagcctgaattttctgatgcc

SEQ ID NO: 1711290 - DNA, 25 bp, Homo sapien
tgtagcccagcaacacgatgtcatc

SEQ ID NO: 1711291 - DNA, 25 bp, Homo sapien
ggattttgagcctgaattttctgat

SEQ ID NO: 1711292 - DNA, 25 bp, Homo sapien
tgtcatccgtagtacaagcagaggc

SEQ ID NO: 1711293 - DNA, 25 bp, Homo sapien
gccaggatgtagtctgactgcagga

SEQ ID NO: 1711294 - DNA, 25 bp, Homo sapien
tctgaggcccgcaatgtgcagttcc

SEQ ID NO: 1711295 - DNA, 25 bp, Homo sapien
atcaaggcaggcatcacccgtcgca

SEQ ID NO: 1711296 - DNA, 25 bp, Homo sapien
ctgtggatgcacatagtcgggcagt

SEQ ID NO: 1711297 - DNA, 25 bp, Homo sapien
tggcagttgagaatgtcatagagaa

SEQ ID NO: 1711298 - DNA, 25 bp, Homo sapien
atagagaaggtcattcttctgtgcc

SEQ ID NO: 1711299 - DNA, 25 bp, Homo sapien
tagctcagcagtcgtacggcttgca

SEQ ID NO: 1711300 - DNA, 25 bp, Homo sapien
gccaggtagctcagcagtcgtacgg

SEQ ID NO: 1711301 - DNA, 25 bp, Homo sapien
ctggaacaggtttaggaagttggag

SEQ ID NO: 1711302 - DNA, 25 bp, Homo sapien
gaacaggtttaggaagttggagtga

SEQ ID NO: 1711303 - DNA, 25 bp, Homo sapien
ccaaagagggattcatgcagggact

SEQ ID NO: 1711304 - DNA, 25 bp, Homo sapien
aacatcttcctcagggtggatgacc

SEQ ID NO: 1711305 - DNA, 25 bp, Homo sapien
caagtagtcggtctgccagtcggga

SEQ ID NO: 1711306 - DNA, 25 bp, Homo sapien
tgcaggcctggatctgaacatcttc

SEQ ID NO: 1711307 - DNA, 25 bp, Homo sapien
aggagggccgggctctcaagtcctg

SEQ ID NO: 1711308 - DNA, 25 bp, Homo sapien
ctcaagtcctggggatactgcaggc

SEQ ID NO: 1711309 - DNA, 25 bp, Homo sapien
tctcaagtcctggggatactgcagg

SEQ ID NO: 1711310 - DNA, 25 bp, Homo sapien
gaggagggccgggctctcaagtcct

SEQ ID NO: 1711311 - DNA, 25 bp, Homo sapien
gcccatgctgtaccacactctggag

SEQ ID NO: 1711312 - DNA, 25 bp, Homo sapien
gttttgagagataagcccatgctgt

SEQ ID NO: 1711313 - DNA, 25 bp, Homo sapien
aacagacattcgagcttcaagaaac

SEQ ID NO: 1711314 - DNA, 25 bp, Homo sapien
cccaaacatagaagtggggatgtgt

SEQ ID NO: 1711315 - DNA, 25 bp, Homo sapien
caatatatagttccttgcagcatca

SEQ ID NO: 1711316 - DNA, 25 bp, Homo sapien
tgtaaaccgagatcatacctgtcag

SEQ ID NO: 1711317 - DNA, 25 bp, Homo sapien
aataacttaaggtctgccaactggt

SEQ ID NO: 1711318 - DNA, 25 bp, Homo sapien
tacctgtcagaaagacgtatcattt

SEQ ID NO: 1711319 - DNA, 25 bp, Homo sapien
gcggtgtgggaaaggggcgggctgc

SEQ ID NO: 1711320 - DNA, 25 bp, Homo sapien
acctcggagctcagagggctgacag

SEQ ID NO: 1711321 - DNA, 25 bp, Homo sapien
tcagcctgcaccgcacctcggagct

SEQ ID NO: 1711322 - DNA, 25 bp, Homo sapien
tcagagggctgacaggtgcggcgtg

SEQ ID NO: 1711323 - DNA, 25 bp, Homo sapien
cagcgaagaatcggccggcaggtct

SEQ ID NO: 1711324 - DNA, 25 bp, Homo sapien
gcggcttcatgagaccgggagggca

SEQ ID NO: 1711325 - DNA, 25 bp, Homo sapien
gaccgccgtggacaaacacgaccag

SEQ ID NO: 1711326 - DNA, 25 bp, Homo sapien
catcatgaagtaactctcctgcaga

SEQ ID NO: 1711327 - DNA, 25 bp, Homo sapien
ttatctccactggtcccatgtttcc

SEQ ID NO: 1711328 - DNA, 25 bp, Homo sapien
cactggtcccatgtttccttcttta

SEQ ID NO: 1711329 - DNA, 25 bp, Homo sapien
tccttctttaatgtaattttcagtg

SEQ ID NO: 1711330 - DNA, 25 bp, Homo sapien
atctccactggtcccatgtttcctt

SEQ ID NO: 1711331 - DNA, 25 bp, Homo sapien
ccatccatcgatcaaagatgtactc

SEQ ID NO: 1711332 - DNA, 25 bp, Homo sapien
ggaaacccatccatcgatcaaagat

SEQ ID NO: 1711333 - DNA, 25 bp, Homo sapien
caaagatgtactcttttgagcactg

SEQ ID NO: 1711334 - DNA, 25 bp, Homo sapien
ctcttttgagcactgacagccattg

SEQ ID NO: 1711335 - DNA, 25 bp, Homo sapien
tgttgtcatcactcctaccgctact

SEQ ID NO: 1711336 - DNA, 25 bp, Homo sapien
caaaaacttaatcaacagattggga

SEQ ID NO: 1711337 - DNA, 25 bp, Homo sapien
tgggtctcaattctctttctcaagc

SEQ ID NO: 1711338 - DNA, 25 bp, Homo sapien
ctttgttgactgaagatgggtctca

SEQ ID NO: 1711339 - DNA, 25 bp, Homo sapien
cacacctaggtctaccactctagtg

SEQ ID NO: 1711340 - DNA, 25 bp, Homo sapien
ccactctagtgtttagctttcctgc

SEQ ID NO: 1711341 - DNA, 25 bp, Homo sapien
gcatgtgatcagcaatcacacctag

SEQ ID NO: 1711342 - DNA, 25 bp, Homo sapien
ctccatgaagattaggctttaggca

SEQ ID NO: 1711343 - DNA, 25 bp, Homo sapien
tcccctcctctgacagtctctaacg

SEQ ID NO: 1711344 - DNA, 25 bp, Homo sapien
tcctctgacagtctctaacgtctca

SEQ ID NO: 1711345 - DNA, 25 bp, Homo sapien
ttctggtggtgcaagtggtggtttc

SEQ ID NO: 1711346 - DNA, 25 bp, Homo sapien
tggtggtgcaagtggtggtttccat

SEQ ID NO: 1711347 - DNA, 25 bp, Homo sapien
ggagtaggaacaagatcaccagggt

SEQ ID NO: 1711348 - DNA, 25 bp, Homo sapien
agggtctccagcgccgggaatccct

SEQ ID NO: 1711349 - DNA, 25 bp, Homo sapien
ggaacaagatcaccagggtctccag

SEQ ID NO: 1711350 - DNA, 25 bp, Homo sapien
cgggggagtaggaacaagatcacca

SEQ ID NO: 1711351 - DNA, 25 bp, Homo sapien
atggcctgccagcaccggtcacagg

SEQ ID NO: 1711352 - DNA, 25 bp, Homo sapien
accggtcacaggcacatgtccaggg

SEQ ID NO: 1711353 - DNA, 25 bp, Homo sapien
gccagcaccggtcacaggcacatgt

SEQ ID NO: 1711354 - DNA, 25 bp, Homo sapien
ggtcacaggcacatgtccagggtac

SEQ ID NO: 1711355 - DNA, 25 bp, Homo sapien
cggcagagcagcggcggggttccga

SEQ ID NO: 1711356 - DNA, 25 bp, Homo sapien
cagagcagcggcggggttccgaggg

SEQ ID NO: 1711357 - DNA, 25 bp, Homo sapien
gcagagcagcggcggggttccgagg

SEQ ID NO: 1711358 - DNA, 25 bp, Homo sapien
agagcagcggcggggttccgagggg

SEQ ID NO: 1711359 - DNA, 25 bp, Homo sapien
ccacgagcgccagggctgcggccat

SEQ ID NO: 1711360 - DNA, 25 bp, Homo sapien
gccacgagcgccagggctgcggcca

SEQ ID NO: 1711361 - DNA, 25 bp, Homo sapien
ccccgccacgagcgccagggctgcg

SEQ ID NO: 1711362 - DNA, 25 bp, Homo sapien
ccgccacgagcgccagggctgcggc

SEQ ID NO: 1711363 - DNA, 25 bp, Homo sapien
tttatattgcggaagcgcgctccag

SEQ ID NO: 1711364 - DNA, 25 bp, Homo sapien
ctttttatattgcggaagcgcgctc

SEQ ID NO: 1711365 - DNA, 25 bp, Homo sapien
tatattgcggaagcgcgctccagag

SEQ ID NO: 1711366 - DNA, 25 bp, Homo sapien
ttttatattgcggaagcgcgctcca

SEQ ID NO: 1711367 - DNA, 25 bp, Homo sapien
caccctctcctgcggtcgcggccgg

SEQ ID NO: 1711368 - DNA, 25 bp, Homo sapien
aggctgcccggcgccttcgggctcc

SEQ ID NO: 1711369 - DNA, 25 bp, Homo sapien
ggctgcccggcgccttcgggctcca

SEQ ID NO: 1711370 - DNA, 25 bp, Homo sapien
cactcagagtggtggaagcacctgt

SEQ ID NO: 1711371 - DNA, 25 bp, Homo sapien
tagcactcagagtggtggaagcacc

SEQ ID NO: 1711372 - DNA, 25 bp, Homo sapien
tgtagcactcagagtggtggaagca

SEQ ID NO: 1711373 - DNA, 25 bp, Homo sapien
cagagtggtggaagcacctgtctgt

SEQ ID NO: 1711374 - DNA, 25 bp, Homo sapien
acagaaggctccaccggagtccaag

SEQ ID NO: 1711375 - DNA, 25 bp, Homo sapien
cagatcatggttattctggccctgg

SEQ ID NO: 1711376 - DNA, 25 bp, Homo sapien
aaggctccaccggagtccaagtcca

SEQ ID NO: 1711377 - DNA, 25 bp, Homo sapien
gggcaagcagatcatggttattctg

SEQ ID NO: 1711378 - DNA, 25 bp, Homo sapien
atatgatgcgatccctgcccttgaa

SEQ ID NO: 1711379 - DNA, 25 bp, Homo sapien
agatgaatatgatgcgatccctgcc

SEQ ID NO: 1711380 - DNA, 25 bp, Homo sapien
gaatatgatgcgatccctgcccttg

SEQ ID NO: 1711381 - DNA, 25 bp, Homo sapien
tactaagctgggggtaggtgcttca

SEQ ID NO: 1711382 - DNA, 25 bp, Homo sapien
acgtcaagcccatccggcaagggca

SEQ ID NO: 1711383 - DNA, 25 bp, Homo sapien
taaatcatatggcaccggcgggaac

SEQ ID NO: 1711384 - DNA, 25 bp, Homo sapien
catcaagtccttggatatgcacgtc

SEQ ID NO: 1711385 - DNA, 25 bp, Homo sapien
caagggcagatgatgttggtagctc

SEQ ID NO: 1711386 - DNA, 25 bp, Homo sapien
caagttggtggcaaccagggcctat

SEQ ID NO: 1711387 - DNA, 25 bp, Homo sapien
ggagcagtgaccagcctgcatcttc

SEQ ID NO: 1711388 - DNA, 25 bp, Homo sapien
accagggcctatggccccaagggag

SEQ ID NO: 1711389 - DNA, 25 bp, Homo sapien
caggagctggatttggagcaagttg

SEQ ID NO: 1711390 - DNA, 25 bp, Homo sapien
ttttgttggagaaagtgagcccctg

SEQ ID NO: 1711391 - DNA, 25 bp, Homo sapien
tttgttggagaaagtgagcccctgg

SEQ ID NO: 1711392 - DNA, 25 bp, Homo sapien
ttctccgcgcagtgcgactcgcaat

SEQ ID NO: 1711393 - DNA, 25 bp, Homo sapien
caattgtctggagcacgttggcagc

SEQ ID NO: 1711394 - DNA, 25 bp, Homo sapien
tccggatgcaagactccttgagctc

SEQ ID NO: 1711395 - DNA, 25 bp, Homo sapien
agtctcgcagtcctggttccggatg

SEQ ID NO: 1711396 - DNA, 25 bp, Homo sapien
ccccaggaatctgggcccgccctgg

SEQ ID NO: 1711397 - DNA, 25 bp, Homo sapien
tccccaggaatctgggcccgccctg

SEQ ID NO: 1711398 - DNA, 25 bp, Homo sapien
ctccccaggaatctgggcccgccct

SEQ ID NO: 1711399 - DNA, 25 bp, Homo sapien
tatacaagtcaggttccgcaggcag

SEQ ID NO: 1711400 - DNA, 25 bp, Homo sapien
ctttgaatatatacaagtcaggttc

SEQ ID NO: 1711401 - DNA, 25 bp, Homo sapien
cagggacacgctctatattggccaa

SEQ ID NO: 1711402 - DNA, 25 bp, Homo sapien
cgcaggcagggacacgctctatatt

SEQ ID NO: 1711403 - DNA, 25 bp, Homo sapien
ctagaagaacattttcttagccaac

SEQ ID NO: 1711404 - DNA, 25 bp, Homo sapien
ccttccaattttctgacaacggcca

SEQ ID NO: 1711405 - DNA, 25 bp, Homo sapien
aacattttcttagccaacttctgcc

SEQ ID NO: 1711406 - DNA, 25 bp, Homo sapien
taggcgatgctaagccatttctcat

SEQ ID NO: 1711407 - DNA, 25 bp, Homo sapien
cagagctctgggtagggaggagagc

SEQ ID NO: 1711408 - DNA, 25 bp, Homo sapien
gaaaaagctctttatttcaatcact

SEQ ID NO: 1711409 - DNA, 25 bp, Homo sapien
ggaacagggtgaacacagagctctg

SEQ ID NO: 1711410 - DNA, 25 bp, Homo sapien
acttccctccactcatggtggaggc

SEQ ID NO: 1711411 - DNA, 25 bp, Homo sapien
tgctcctgtagactctcaatttctg

SEQ ID NO: 1711412 - DNA, 25 bp, Homo sapien
ccagtgctcctgtagactctcaatt

SEQ ID NO: 1711413 - DNA, 25 bp, Homo sapien
agtgctcctgtagactctcaatttc

SEQ ID NO: 1711414 - DNA, 25 bp, Homo sapien
gccagtgctcctgtagactctcaat

SEQ ID NO: 1711415 - DNA, 25 bp, Homo sapien
cgttctcaccgtattcgaaggcagg

SEQ ID NO: 1711416 - DNA, 25 bp, Homo sapien
tctcaccgtattcgaaggcaggaag

SEQ ID NO: 1711417 - DNA, 25 bp, Homo sapien
cacgttctcaccgtattcgaaggca

SEQ ID NO: 1711418 - DNA, 25 bp, Homo sapien
gttctcaccgtattcgaaggcagga

SEQ ID NO: 1711419 - DNA, 25 bp, Homo sapien
gcaaataggaacgtatatttctcat

SEQ ID NO: 1711420 - DNA, 25 bp, Homo sapien
aagcaaataggaacgtatatttctc

SEQ ID NO: 1711421 - DNA, 25 bp, Homo sapien
aaataggaacgtatatttctcatga

SEQ ID NO: 1711422 - DNA, 25 bp, Homo sapien
gaagcaaataggaacgtatatttct

SEQ ID NO: 1711423 - DNA, 25 bp, Homo sapien
tggacgctccaagcagtgagactgc

SEQ ID NO: 1711424 - DNA, 25 bp, Homo sapien
ggccactaggcgcaggggcatctct

SEQ ID NO: 1711425 - DNA, 25 bp, Homo sapien
acctagcccagaatgctgtaggcca

SEQ ID NO: 1711426 - DNA, 25 bp, Homo sapien
ctgccatgacgctggacgctccaag

SEQ ID NO: 1711427 - DNA, 25 bp, Homo sapien
caaccttgatttggtcaaggaaagc

SEQ ID NO: 1711428 - DNA, 25 bp, Homo sapien
gaggcttaataggacaaggacaacc

SEQ ID NO: 1711429 - DNA, 25 bp, Homo sapien
tgtgtccgctctagccgaggctgtc

SEQ ID NO: 1711430 - DNA, 25 bp, Homo sapien
tcagggcaccaggtgaggtcccttc

SEQ ID NO: 1711431 - DNA, 25 bp, Homo sapien
ggctgcaagtccgtagctttgtgga

SEQ ID NO: 1711432 - DNA, 25 bp, Homo sapien
tgcaagtccgtagctttgtggatgg

SEQ ID NO: 1711433 - DNA, 25 bp, Homo sapien
gtcccgtgggctgcaagtccgtagc

SEQ ID NO: 1711434 - DNA, 25 bp, Homo sapien
cgtgggctgcaagtccgtagctttg

SEQ ID NO: 1711435 - DNA, 25 bp, Homo sapien
agagggccatgaccagtacggagaa

SEQ ID NO: 1711436 - DNA, 25 bp, Homo sapien
agcacgttacccacgcagtaggaga

SEQ ID NO: 1711437 - DNA, 25 bp, Homo sapien
aaaaggccgaagtagcctgcctgcg

SEQ ID NO: 1711438 - DNA, 25 bp, Homo sapien
tcttatagactgtggccgtgttgca

SEQ ID NO: 1711439 - DNA, 25 bp, Homo sapien
cggcctctctcttatcatacagaga

SEQ ID NO: 1711440 - DNA, 25 bp, Homo sapien
cccggcctctctcttatcatacaga

SEQ ID NO: 1711441 - DNA, 25 bp, Homo sapien
gcctctctcttatcatacagagaga

SEQ ID NO: 1711442 - DNA, 25 bp, Homo sapien
tgccccggcctctctcttatcatac

SEQ ID NO: 1711443 - DNA, 25 bp, Homo sapien
tctgactcatagcagcactgtgagg

SEQ ID NO: 1711444 - DNA, 25 bp, Homo sapien
catttacagaaaacgcttactatga

SEQ ID NO: 1711445 - DNA, 25 bp, Homo sapien
gaaagtggccaattaatgttagtca

SEQ ID NO: 1711446 - DNA, 25 bp, Homo sapien
gatgtcttgtacatggaaagtggcc

SEQ ID NO: 1711447 - DNA, 25 bp, Homo sapien
ccttgtagtcgtcagggaggagctt

SEQ ID NO: 1711448 - DNA, 25 bp, Homo sapien
ggtagaccaggcagccaatcattag

SEQ ID NO: 1711449 - DNA, 25 bp, Homo sapien
tgaggatggccagcatgaaggccca

SEQ ID NO: 1711450 - DNA, 25 bp, Homo sapien
acttgagtcccaaccatcagggtag

SEQ ID NO: 1711451 - DNA, 25 bp, Homo sapien
aatccaagggctaatgtgaagacag

SEQ ID NO: 1711452 - DNA, 25 bp, Homo sapien
ctaatccaagggctaatgtgaagac

SEQ ID NO: 1711453 - DNA, 25 bp, Homo sapien
cttctaatccaagggctaatgtgaa

SEQ ID NO: 1711454 - DNA, 25 bp, Homo sapien
tgcttctaatccaagggctaatgtg

SEQ ID NO: 1711455 - DNA, 25 bp, Homo sapien
agtgagggtctcagaggccaaatag

SEQ ID NO: 1711456 - DNA, 25 bp, Homo sapien
cagtggggtgttggtcctctctccc

SEQ ID NO: 1711457 - DNA, 25 bp, Homo sapien
cagcctttctaagggcacgcagacc

SEQ ID NO: 1711458 - DNA, 25 bp, Homo sapien
tctcagaggccaaatagctcctgcc

SEQ ID NO: 1711459 - DNA, 25 bp, Homo sapien
ttttagctgaggacttgggcatcca

SEQ ID NO: 1711460 - DNA, 25 bp, Homo sapien
tatgctatcagacacagacctggga

SEQ ID NO: 1711461 - DNA, 25 bp, Homo sapien
gcttccccagaaagagtacagtagg

SEQ ID NO: 1711462 - DNA, 25 bp, Homo sapien
tcgctttacagaggagaggcttcaa

SEQ ID NO: 1711463 - DNA, 25 bp, Homo sapien
ggacacttgagataatgttaagtgt

SEQ ID NO: 1711464 - DNA, 25 bp, Homo sapien
caagagaaatatcccagtttaaagg

SEQ ID NO: 1711465 - DNA, 25 bp, Homo sapien
cacactaagtccttatgatacaaga

SEQ ID NO: 1711466 - DNA, 25 bp, Homo sapien
tatgcatttatctttaagtcctcgc

SEQ ID NO: 1711467 - DNA, 25 bp, Homo sapien
taccccatgtacctttattgagctt

SEQ ID NO: 1711468 - DNA, 25 bp, Homo sapien
tctttctactgagggcattgtctgt

SEQ ID NO: 1711469 - DNA, 25 bp, Homo sapien
caaattgccacgatctcactaaagg

SEQ ID NO: 1711470 - DNA, 25 bp, Homo sapien
tcccctatttaaggagccagatgga

SEQ ID NO: 1711471 - DNA, 25 bp, Homo sapien
ttttaagttaggctttctatgcacc

SEQ ID NO: 1711472 - DNA, 25 bp, Homo sapien
tcaagagaatagattgtatcaaaca

SEQ ID NO: 1711473 - DNA, 25 bp, Homo sapien
tatgcacctatcaagaatcaagaga

SEQ ID NO: 1711474 - DNA, 25 bp, Homo sapien
aacaacggcagggaaatccttcagc

SEQ ID NO: 1711475 - DNA, 25 bp, Homo sapien
cgttctcgaagtggctgtaggactc

SEQ ID NO: 1711476 - DNA, 25 bp, Homo sapien
taaacttgctgtgtccgggctgcat

SEQ ID NO: 1711477 - DNA, 25 bp, Homo sapien
gctctgctagcaagccaccagtgag

SEQ ID NO: 1711478 - DNA, 25 bp, Homo sapien
gaaagccacagaggtgcaacttgag

SEQ ID NO: 1711479 - DNA, 25 bp, Homo sapien
ccttagtcttgttagtgtgcaaaac

SEQ ID NO: 1711480 - DNA, 25 bp, Homo sapien
ggtgagtccccttaaccatggatgt

SEQ ID NO: 1711481 - DNA, 25 bp, Homo sapien
catttgttagtaccgaagagcctta

SEQ ID NO: 1711482 - DNA, 25 bp, Homo sapien
tacactcgagatgaaggtgagtccc

SEQ ID NO: 1711483 - DNA, 25 bp, Homo sapien
ctataaacctcggaacaactcaggg

SEQ ID NO: 1711484 - DNA, 25 bp, Homo sapien
tgtggtctccctctggacggtagta

SEQ ID NO: 1711485 - DNA, 25 bp, Homo sapien
tgagccaccaggacctaaacttggg

SEQ ID NO: 1711486 - DNA, 25 bp, Homo sapien
acaggcgtatagcactgccgcggct

SEQ ID NO: 1711487 - DNA, 25 bp, Homo sapien
tggtactgctagatcatgtggtagt

SEQ ID NO: 1711488 - DNA, 25 bp, Homo sapien
tattgcctgatgaatgccagaattc

SEQ ID NO: 1711489 - DNA, 25 bp, Homo sapien
agtcagtactgctccccagcctaaa

SEQ ID NO: 1711490 - DNA, 25 bp, Homo sapien
ggtagagtgttttatctgagcctta

SEQ ID NO: 1711491 - DNA, 25 bp, Homo sapien
aaaaacaatagttttctctgcaatg

SEQ ID NO: 1711492 - DNA, 25 bp, Homo sapien
tcaggttaaccgtgtttgtcaagca

SEQ ID NO: 1711493 - DNA, 25 bp, Homo sapien
cattggtggtagtaagtttgatcac

SEQ ID NO: 1711494 - DNA, 25 bp, Homo sapien
tgcattagaaggcacatggtgtgaa

SEQ ID NO: 1711495 - DNA, 25 bp, Homo sapien
ggaatgatattttgacactgtgaca

SEQ ID NO: 1711496 - DNA, 25 bp, Homo sapien
catctggcggctgctcaaggttgga

SEQ ID NO: 1711497 - DNA, 25 bp, Homo sapien
gatagtatttaacccacagaggaac

SEQ ID NO: 1711498 - DNA, 25 bp, Homo sapien
ctgctgactcatctggcggctgctc

SEQ ID NO: 1711499 - DNA, 25 bp, Homo sapien
aagattatgttatattctaagtccc

SEQ ID NO: 1711500 - DNA, 25 bp, Homo sapien
tccgacgtcttcacggtaggcctta

SEQ ID NO: 1711501 - DNA, 25 bp, Homo sapien
tcttaacttgcctccgacgtcttca

SEQ ID NO: 1711502 - DNA, 25 bp, Homo sapien
ttgcctccgacgtcttcacggtagg

SEQ ID NO: 1711503 - DNA, 25 bp, Homo sapien
caacgtcttaacttgcctccgacgt

SEQ ID NO: 1711504 - DNA, 25 bp, Homo sapien
gcataacaaacataagggagactcc

SEQ ID NO: 1711505 - DNA, 25 bp, Homo sapien
actgtgagggtgagagtcctgactc

SEQ ID NO: 1711506 - DNA, 25 bp, Homo sapien
tagttgcctgatcccgactgtgagg

SEQ ID NO: 1711507 - DNA, 25 bp, Homo sapien
cagttatttacacacctaggtgcag

SEQ ID NO: 1711508 - DNA, 25 bp, Homo sapien
gagtctgggaggtttacacactgct

SEQ ID NO: 1711509 - DNA, 25 bp, Homo sapien
ggatttaacattgcatagccagtag

SEQ ID NO: 1711510 - DNA, 25 bp, Homo sapien
tcctaaattgacttcagtgtgcccc

SEQ ID NO: 1711511 - DNA, 25 bp, Homo sapien
tcaagggtcacgtaagagtctggga

SEQ ID NO: 1711512 - DNA, 25 bp, Homo sapien
ggagtgagccacagcactgggccta

SEQ ID NO: 1711513 - DNA, 25 bp, Homo sapien
agtgagccacagcactgggcctaat

SEQ ID NO: 1711514 - DNA, 25 bp, Homo sapien
agccacagcactgggcctaattttt

SEQ ID NO: 1711515 - DNA, 25 bp, Homo sapien
tgagccacagcactgggcctaattt

SEQ ID NO: 1711516 - DNA, 25 bp, Homo sapien
tgagtatccttcaccctatgagagg

SEQ ID NO: 1711517 - DNA, 25 bp, Homo sapien
gcttccatagtcagggcatttgaga

SEQ ID NO: 1711518 - DNA, 25 bp, Homo sapien
gatgaatccgagacagtgatacggg

SEQ ID NO: 1711519 - DNA, 25 bp, Homo sapien
taggctcctctgagttaagcatcga

SEQ ID NO: 1711520 - DNA, 25 bp, Homo sapien
tagcatcgttgcaagtccttccggc

SEQ ID NO: 1711521 - DNA, 25 bp, Homo sapien
gactgcctgatgtggcggaaagcca

SEQ ID NO: 1711522 - DNA, 25 bp, Homo sapien
cattttgagagcatgaacacaagcc

SEQ ID NO: 1711523 - DNA, 25 bp, Homo sapien
acagtatcgtccgtgtctcagaaaa

SEQ ID NO: 1711524 - DNA, 25 bp, Homo sapien
agatgttttaagtctggctcactgg

SEQ ID NO: 1711525 - DNA, 25 bp, Homo sapien
cactgggacagtgatgaacatcaga

SEQ ID NO: 1711526 - DNA, 25 bp, Homo sapien
tgagacaagggactgatgggaaaaa

SEQ ID NO: 1711527 - DNA, 25 bp, Homo sapien
taggcactggagactaactaggacc

SEQ ID NO: 1711528 - DNA, 25 bp, Homo sapien
ctggtaggcgcaggtgtgatgctgc

SEQ ID NO: 1711529 - DNA, 25 bp, Homo sapien
catctctggtaggcgcaggtgtgat

SEQ ID NO: 1711530 - DNA, 25 bp, Homo sapien
ctctggtaggcgcaggtgtgatgct

SEQ ID NO: 1711531 - DNA, 25 bp, Homo sapien
ttgcatctctggtaggcgcaggtgt

SEQ ID NO: 1711532 - DNA, 25 bp, Homo sapien
ttggtgtcagagtatattgaatttt

SEQ ID NO: 1711533 - DNA, 25 bp, Homo sapien
gttttggtgtcagagtatattgaat

SEQ ID NO: 1711534 - DNA, 25 bp, Homo sapien
ttttggtgtcagagtatattgaatt

SEQ ID NO: 1711535 - DNA, 25 bp, Homo sapien
ggttttggtgtcagagtatattgaa

SEQ ID NO: 1711536 - DNA, 25 bp, Homo sapien
caggcgagagccgtgtgggatccca

SEQ ID NO: 1711537 - DNA, 25 bp, Homo sapien
gccggtatccgcgtccgcagcgccg

SEQ ID NO: 1711538 - DNA, 25 bp, Homo sapien
gctaggccacaacggctcgggaacc

SEQ ID NO: 1711539 - DNA, 25 bp, Homo sapien
gcccgcgggctaggccacaacggct

SEQ ID NO: 1711540 - DNA, 25 bp, Homo sapien
gggctgcgtcgcagtactcccgttc

SEQ ID NO: 1711541 - DNA, 25 bp, Homo sapien
agtactctcgcgagaacagctcccg

SEQ ID NO: 1711542 - DNA, 25 bp, Homo sapien
tgcgcccgctaaggctccagtggtc

SEQ ID NO: 1711543 - DNA, 25 bp, Homo sapien
gttccaagagccagcaaacgggagc

SEQ ID NO: 1711544 - DNA, 25 bp, Homo sapien
acacagagccataggcgccagagcc

SEQ ID NO: 1711545 - DNA, 25 bp, Homo sapien
tcctgccggtagaacgtgggcctct

SEQ ID NO: 1711546 - DNA, 25 bp, Homo sapien
gacaggttctggtaacgctcgggca

SEQ ID NO: 1711547 - DNA, 25 bp, Homo sapien
ggcacctcccagattgtcttgttca

SEQ ID NO: 1711548 - DNA, 25 bp, Homo sapien
taaatgcagataactagataactcc

SEQ ID NO: 1711549 - DNA, 25 bp, Homo sapien
taactagataactccctgcaagctc

SEQ ID NO: 1711550 - DNA, 25 bp, Homo sapien
tcaggccataaatgcagataactag

SEQ ID NO: 1711551 - DNA, 25 bp, Homo sapien
tgcagataactagataactccctgc

SEQ ID NO: 1711552 - DNA, 25 bp, Homo sapien
cacagaaaagtataccactaaagaa

SEQ ID NO: 1711553 - DNA, 25 bp, Homo sapien
ataccacagaaaagtataccactaa

SEQ ID NO: 1711554 - DNA, 25 bp, Homo sapien
taatggtacttcactgtaaatctga

SEQ ID NO: 1711555 - DNA, 25 bp, Homo sapien
cacccggcccactgagtacctttgt

SEQ ID NO: 1711556 - DNA, 25 bp, Homo sapien
cacttctctgtacacatcaatacct

SEQ ID NO: 1711557 - DNA, 25 bp, Homo sapien
acttctctgtacacatcaatacctt

SEQ ID NO: 1711558 - DNA, 25 bp, Homo sapien
ttctctgtacacatcaataccttca

SEQ ID NO: 1711559 - DNA, 25 bp, Homo sapien
ccacttctctgtacacatcaatacc

SEQ ID NO: 1711560 - DNA, 25 bp, Homo sapien
tgtgccaccaagcttcgctaattat

SEQ ID NO: 1711561 - DNA, 25 bp, Homo sapien
caccatgttcggctgtcaactgagc

SEQ ID NO: 1711562 - DNA, 25 bp, Homo sapien
gataagctccatattcttcagacaa

SEQ ID NO: 1711563 - DNA, 25 bp, Homo sapien
aagatgactggagctatcaatgagc

SEQ ID NO: 1711564 - DNA, 25 bp, Homo sapien
tcttttcgcatgaatgatggactga

SEQ ID NO: 1711565 - DNA, 25 bp, Homo sapien
ccccgtttttgtgtcaaaagcagca

SEQ ID NO: 1711566 - DNA, 25 bp, Homo sapien
tatgtttaagtaaccgcagttctct

SEQ ID NO: 1711567 - DNA, 25 bp, Homo sapien
gactgaaatggtctggagagcttct

SEQ ID NO: 1711568 - DNA, 25 bp, Homo sapien
tgtaaaaacgtccaacagaccaatc

SEQ ID NO: 1711569 - DNA, 25 bp, Homo sapien
gcaggtgtaaaaacgtccaacagac

SEQ ID NO: 1711570 - DNA, 25 bp, Homo sapien
tgcaggtgtaaaaacgtccaacaga

SEQ ID NO: 1711571 - DNA, 25 bp, Homo sapien
taaaaacgtccaacagaccaatcac

SEQ ID NO: 1711572 - DNA, 25 bp, Homo sapien
cgttaagccctctgtgtatacattt

SEQ ID NO: 1711573 - DNA, 25 bp, Homo sapien
tttccaactctccttcatccgttaa

SEQ ID NO: 1711574 - DNA, 25 bp, Homo sapien
ccttcatccgttaagccctctgtgt

SEQ ID NO: 1711575 - DNA, 25 bp, Homo sapien
atccgttaagccctctgtgtataca

SEQ ID NO: 1711576 - DNA, 25 bp, Homo sapien
cagaaaagtcttatatccatttcag

SEQ ID NO: 1711577 - DNA, 25 bp, Homo sapien
tcacacactatggaatgtgtttgtg

SEQ ID NO: 1711578 - DNA, 25 bp, Homo sapien
gagagttgtaactatgtcatcccac

SEQ ID NO: 1711579 - DNA, 25 bp, Homo sapien
gattttcaactagtatgctcatcca

SEQ ID NO: 1711580 - DNA, 25 bp, Homo sapien
tgcatgtttatacggccttgaggaa

SEQ ID NO: 1711581 - DNA, 25 bp, Homo sapien
tcaacacaacataaccaaaggcact

SEQ ID NO: 1711582 - DNA, 25 bp, Homo sapien
gagacagaataaggataagccatct

SEQ ID NO: 1711583 - DNA, 25 bp, Homo sapien
cattcctattcctgagattgggtaa

SEQ ID NO: 1711584 - DNA, 25 bp, Homo sapien
cggagaatttggtagataaggaact

SEQ ID NO: 1711585 - DNA, 25 bp, Homo sapien
gataaggaactgaacatggtcatct

SEQ ID NO: 1711586 - DNA, 25 bp, Homo sapien
tggtcatctgtaagcttctgacatt

SEQ ID NO: 1711587 - DNA, 25 bp, Homo sapien
aggaactgaacatggtcatctgtaa

SEQ ID NO: 1711588 - DNA, 25 bp, Homo sapien
ctgtgattttatgtgtttgaatttt

SEQ ID NO: 1711589 - DNA, 25 bp, Homo sapien
tatgtgtttgaattttccattagaa

SEQ ID NO: 1711590 - DNA, 25 bp, Homo sapien
tgattttatgtgtttgaattttcca

SEQ ID NO: 1711591 - DNA, 25 bp, Homo sapien
ttatgtgtttgaattttccattaga

SEQ ID NO: 1711592 - DNA, 25 bp, Homo sapien
gaattatgtcagctgaatgtatata

SEQ ID NO: 1711593 - DNA, 25 bp, Homo sapien
cctgtgaattatgtcagctgaatgt

SEQ ID NO: 1711594 - DNA, 25 bp, Homo sapien
ctgtgaattatgtcagctgaatgta

SEQ ID NO: 1711595 - DNA, 25 bp, Homo sapien
gtgaattatgtcagctgaatgtata

SEQ ID NO: 1711596 - DNA, 25 bp, Homo sapien
ttcacagctagattactaggtttta

SEQ ID NO: 1711597 - DNA, 25 bp, Homo sapien
cacagctagattactaggttttagg

SEQ ID NO: 1711598 - DNA, 25 bp, Homo sapien
cagctagattactaggttttaggtc

SEQ ID NO: 1711599 - DNA, 25 bp, Homo sapien
tcacagctagattactaggttttag

SEQ ID NO: 1711600 - DNA, 25 bp, Homo sapien
tagaagcagatccatagttgcctgg

SEQ ID NO: 1711601 - DNA, 25 bp, Homo sapien
tgagaacttacgtccatacaaaggt

SEQ ID NO: 1711602 - DNA, 25 bp, Homo sapien
tgactaggaagggacacaataaact

SEQ ID NO: 1711603 - DNA, 25 bp, Homo sapien
cgaatcattacaccaagcaaaggcc

SEQ ID NO: 1711604 - DNA, 25 bp, Homo sapien
catcatctgtgtgccgagccagtcc

SEQ ID NO: 1711605 - DNA, 25 bp, Homo sapien
ggagccctgtaccacctagtggcca

SEQ ID NO: 1711606 - DNA, 25 bp, Homo sapien
ggccacgtagcctgtcatttcatca

SEQ ID NO: 1711607 - DNA, 25 bp, Homo sapien
gccgagccagtccaaaatccagaat

SEQ ID NO: 1711608 - DNA, 25 bp, Homo sapien
caaatgcatccaacatggaattaaa

SEQ ID NO: 1711609 - DNA, 25 bp, Homo sapien
cccaaatgcatccaacatggaatta

SEQ ID NO: 1711610 - DNA, 25 bp, Homo sapien
aaatgcatccaacatggaattaaat

SEQ ID NO: 1711611 - DNA, 25 bp, Homo sapien
ccaaatgcatccaacatggaattaa

SEQ ID NO: 1711612 - DNA, 25 bp, Homo sapien
ggtctgtaccaggaaacaatgttct

SEQ ID NO: 1711613 - DNA, 25 bp, Homo sapien
cagtcaacagctcggccattatgca

SEQ ID NO: 1711614 - DNA, 25 bp, Homo sapien
gaaacaatgttcttccagtcaacag

SEQ ID NO: 1711615 - DNA, 25 bp, Homo sapien
gctcggccattatgcatcccactga

SEQ ID NO: 1711616 - DNA, 25 bp, Homo sapien
taaaaggagtatacacccatggaca

SEQ ID NO: 1711617 - DNA, 25 bp, Homo sapien
ttggcaaggcaagctactcagtttg

SEQ ID NO: 1711618 - DNA, 25 bp, Homo sapien
gatgggtttttcaacttatgaggaa

SEQ ID NO: 1711619 - DNA, 25 bp, Homo sapien
gtttgaagaaagacctcataatgca

SEQ ID NO: 1711620 - DNA, 25 bp, Homo sapien
cactagtctgccaaggagttccatc

SEQ ID NO: 1711621 - DNA, 25 bp, Homo sapien
aacatttactggcaggctcgtctca

SEQ ID NO: 1711622 - DNA, 25 bp, Homo sapien
tgtctacaccggcatggaggtctgt

SEQ ID NO: 1711623 - DNA, 25 bp, Homo sapien
tgcaaggccattactgaacatgatg

SEQ ID NO: 1711624 - DNA, 25 bp, Homo sapien
caatgagtaccttctagagcaagct

SEQ ID NO: 1711625 - DNA, 25 bp, Homo sapien
agagcaagcttttccaacccagggc

SEQ ID NO: 1711626 - DNA, 25 bp, Homo sapien
gacaggtgcatgtctttcaggctga

SEQ ID NO: 1711627 - DNA, 25 bp, Homo sapien
aattgtggcctatgtgacaggtagc

SEQ ID NO: 1711628 - DNA, 25 bp, Homo sapien
ttgaaggtgttagggtcttggatcc

SEQ ID NO: 1711629 - DNA, 25 bp, Homo sapien
aatgcataaaccaataccactagcc

SEQ ID NO: 1711630 - DNA, 25 bp, Homo sapien
taacttgaagggatctaaaaatgca

SEQ ID NO: 1711631 - DNA, 25 bp, Homo sapien
tactcagaaaactgtgaacagaagg

SEQ ID NO: 1711632 - DNA, 25 bp, Homo sapien
tctgtagtggccagtaagtttttcc

SEQ ID NO: 1711633 - DNA, 25 bp, Homo sapien
tctgagcctttgtatgtctttgcat

SEQ ID NO: 1711634 - DNA, 25 bp, Homo sapien
cagacttgttgaggtaactgcttca

SEQ ID NO: 1711635 - DNA, 25 bp, Homo sapien
cttcatagtgttactggtaaaagaa

SEQ ID NO: 1711636 - DNA, 25 bp, Homo sapien
tagctatagttctgggtattttatt

SEQ ID NO: 1711637 - DNA, 25 bp, Homo sapien
aatagctatagttctgggtatttta

SEQ ID NO: 1711638 - DNA, 25 bp, Homo sapien
agctatagttctgggtattttattc

SEQ ID NO: 1711639 - DNA, 25 bp, Homo sapien
ttaatagctatagttctgggtattt

SEQ ID NO: 1711640 - DNA, 25 bp, Homo sapien
tttcgccaaattagtcaggatgatc

SEQ ID NO: 1711641 - DNA, 25 bp, Homo sapien
gggtttcgccaaattagtcaggatg

SEQ ID NO: 1711642 - DNA, 25 bp, Homo sapien
ccaaattagtcaggatgatctcgat

SEQ ID NO: 1711643 - DNA, 25 bp, Homo sapien
gccaaattagtcaggatgatctcga

SEQ ID NO: 1711644 - DNA, 25 bp, Homo sapien
gttacccaagaatgacctgctgcag

SEQ ID NO: 1711645 - DNA, 25 bp, Homo sapien
gatgtcttgagtcgtgacaccggcg

SEQ ID NO: 1711646 - DNA, 25 bp, Homo sapien
tgcagagaacgcttcactacgagtg

SEQ ID NO: 1711647 - DNA, 25 bp, Homo sapien
tgaaacagtcctgaccaccaatggg

SEQ ID NO: 1711648 - DNA, 25 bp, Homo sapien
gaatatatttaactgggtagccacc

SEQ ID NO: 1711649 - DNA, 25 bp, Homo sapien
aatatcaggcctgaagaatcaagcc

SEQ ID NO: 1711650 - DNA, 25 bp, Homo sapien
ggatggatactgtcttgctctaaaa

SEQ ID NO: 1711651 - DNA, 25 bp, Homo sapien
gaatcaagcctagtttgactctggc

SEQ ID NO: 1711652 - DNA, 25 bp, Homo sapien
tcgcatgttcctttaggagcgccat

SEQ ID NO: 1711653 - DNA, 25 bp, Homo sapien
gctatagcaggcactatgagggaga

SEQ ID NO: 1711654 - DNA, 25 bp, Homo sapien
actatgagggagagtcgccagcaga

SEQ ID NO: 1711655 - DNA, 25 bp, Homo sapien
ctctggaaagggaagcctcgcctct

SEQ ID NO: 1711656 - DNA, 25 bp, Homo sapien
taaaatgagcttcaactgatcaata

SEQ ID NO: 1711657 - DNA, 25 bp, Homo sapien
tccaacgagtcttaaaatgagcttc

SEQ ID NO: 1711658 - DNA, 25 bp, Homo sapien
ggttccaacgagtcttaaaatgagc

SEQ ID NO: 1711659 - DNA, 25 bp, Homo sapien
ttaaaatgagcttcaactgatcaat

SEQ ID NO: 1711660 - DNA, 25 bp, Homo sapien
tgaccaagagcaggaaatcatagca

SEQ ID NO: 1711661 - DNA, 25 bp, Homo sapien
gctctagagcatacgtgaaacttct

SEQ ID NO: 1711662 - DNA, 25 bp, Homo sapien
tcatagcaaaagtaagccagactca

SEQ ID NO: 1711663 - DNA, 25 bp, Homo sapien
gcaacagtgtgcagacaatgtacat

SEQ ID NO: 1711664 - DNA, 25 bp, Homo sapien
agctgttggctatttactgcactcc

SEQ ID NO: 1711665 - DNA, 25 bp, Homo sapien
cacagagagacctccattattaggc

SEQ ID NO: 1711666 - DNA, 25 bp, Homo sapien
tagcacgtatctatagggcagatgg

SEQ ID NO: 1711667 - DNA, 25 bp, Homo sapien
taaacaggtacttgggccgtgtcac

SEQ ID NO: 1711668 - DNA, 25 bp, Homo sapien
gcatcctgttaatgagataagcggg

SEQ ID NO: 1711669 - DNA, 25 bp, Homo sapien
cttggcatcctgttaatgagataag

SEQ ID NO: 1711670 - DNA, 25 bp, Homo sapien
gggtgttcctgtcagacgcataatc

SEQ ID NO: 1711671 - DNA, 25 bp, Homo sapien
tcagacgcataatctgctgaagctg

SEQ ID NO: 1711672 - DNA, 25 bp, Homo sapien
tagcacaccctagctacaggcagag

SEQ ID NO: 1711673 - DNA, 25 bp, Homo sapien
taaaggtcacgatagtagcacaccc

SEQ ID NO: 1711674 - DNA, 25 bp, Homo sapien
tcttgcaatagcacataggcaggcc

SEQ ID NO: 1711675 - DNA, 25 bp, Homo sapien
gcagagcacctagaaagaaaccgcc

SEQ ID NO: 1711676 - DNA, 25 bp, Homo sapien
tgaatacataaatggctgtaatccc

SEQ ID NO: 1711677 - DNA, 25 bp, Homo sapien
agagaactatctcattcagagaaca

SEQ ID NO: 1711678 - DNA, 25 bp, Homo sapien
gagagaactatctcattcagagaac

SEQ ID NO: 1711679 - DNA, 25 bp, Homo sapien
cacagtacttggttccaagtgacag

SEQ ID NO: 1711680 - DNA, 25 bp, Homo sapien
caaagtctgctgtctatcttaacca

SEQ ID NO: 1711681 - DNA, 25 bp, Homo sapien
tacagtccaacagtaaaagtatgta

SEQ ID NO: 1711682 - DNA, 25 bp, Homo sapien
gattagagataacaaacctagtact

SEQ ID NO: 1711683 - DNA, 25 bp, Homo sapien
tgttcaataatgttactgctctcaa

SEQ ID NO: 1711684 - DNA, 25 bp, Homo sapien
gaacgagtgttaactgacaaagtcc

SEQ ID NO: 1711685 - DNA, 25 bp, Homo sapien
gatagaacttctcccttactgccat

SEQ ID NO: 1711686 - DNA, 25 bp, Homo sapien
gaatcttggtcctgctaaggaacga

SEQ ID NO: 1711687 - DNA, 25 bp, Homo sapien
tcaaagactgaatatagtttcttgc

SEQ ID NO: 1711688 - DNA, 25 bp, Homo sapien
gagtcaaagactgaatatagtttct

SEQ ID NO: 1711689 - DNA, 25 bp, Homo sapien
ctgagtcaaagactgaatatagttt

SEQ ID NO: 1711690 - DNA, 25 bp, Homo sapien
gtcaaagactgaatatagtttcttg

SEQ ID NO: 1711691 - DNA, 25 bp, Homo sapien
actcgttagcgtcggacgaccgcca

SEQ ID NO: 1711692 - DNA, 25 bp, Homo sapien
tggcggtcgtccgacgctaacgagt

SEQ ID NO: 1711693 - DNA, 25 bp, Homo sapien
ggcaccaataaatacattcgcaaag

SEQ ID NO: 1711694 - DNA, 25 bp, Homo sapien
gcaccaataaatacattcgcaaagt

SEQ ID NO: 1711695 - DNA, 25 bp, Homo sapien
accaataaatacattcgcaaagttc

SEQ ID NO: 1711696 - DNA, 25 bp, Homo sapien
tggcaccaataaatacattcgcaaa

SEQ ID NO: 1711697 - DNA, 25 bp, Homo sapien
aattcaatatccatgaggtgaggat

SEQ ID NO: 1711698 - DNA, 25 bp, Homo sapien
ttatatcataaccaattcaatatcc

SEQ ID NO: 1711699 - DNA, 25 bp, Homo sapien
gaggtgaggatatatggtcaactta

SEQ ID NO: 1711700 - DNA, 25 bp, Homo sapien
tcaatatccatgaggtgaggatata

SEQ ID NO: 1711701 - DNA, 25 bp, Homo sapien
tggtcaaaaggagaaactcttcttc

SEQ ID NO: 1711702 - DNA, 25 bp, Homo sapien
ggagaaactcttcttcaaatcccca

SEQ ID NO: 1711703 - DNA, 25 bp, Homo sapien
tcaaaaggagaaactcttcttcaaa

SEQ ID NO: 1711704 - DNA, 25 bp, Homo sapien
agaaactcttcttcaaatccccaat

SEQ ID NO: 1711705 - DNA, 25 bp, Homo sapien
tcgaggttatcatgaaccgtgactg

SEQ ID NO: 1711706 - DNA, 25 bp, Homo sapien
ttatcatgaaccgtgactgtgccac

SEQ ID NO: 1711707 - DNA, 25 bp, Homo sapien
aagagttcgaggttatcatgaaccg

SEQ ID NO: 1711708 - DNA, 25 bp, Homo sapien
aatacatacactaacatcaaggggt

SEQ ID NO: 1711709 - DNA, 25 bp, Homo sapien
taacctacaataggtaggcagggct

SEQ ID NO: 1711710 - DNA, 25 bp, Homo sapien
gaacaggcttttgtggaccgtcaat

SEQ ID NO: 1711711 - DNA, 25 bp, Homo sapien
cgtcaatgtcaaactgctaccagtg

SEQ ID NO: 1711712 - DNA, 25 bp, Homo sapien
ttgttacatgggtctcaccacggac

SEQ ID NO: 1711713 - DNA, 25 bp, Homo sapien
caaagtaggcatgtgcaagggcttg

SEQ ID NO: 1711714 - DNA, 25 bp, Homo sapien
gatcataaggatcggccactggttc

SEQ ID NO: 1711715 - DNA, 25 bp, Homo sapien
gcttgggccgctgtaattctcttat

SEQ ID NO: 1711716 - DNA, 25 bp, Homo sapien
catcaggatcgtggtactgagcaaa

SEQ ID NO: 1711717 - DNA, 25 bp, Homo sapien
aaagctgatgacttcatcataggtc

SEQ ID NO: 1711718 - DNA, 25 bp, Homo sapien
tccatctcttcttggtcaaggggtg

SEQ ID NO: 1711719 - DNA, 25 bp, Homo sapien
atctcttcttggtcaaggggtggtg

SEQ ID NO: 1711720 - DNA, 25 bp, Homo sapien
aagctgatgacttcatcataggtca

SEQ ID NO: 1711721 - DNA, 25 bp, Homo sapien
tgaaggctgcctgattactccgggc

SEQ ID NO: 1711722 - DNA, 25 bp, Homo sapien
ttggctgtacgtatcactgagggac

SEQ ID NO: 1711723 - DNA, 25 bp, Homo sapien
tgttcaacacagaatagcactaggg

SEQ ID NO: 1711724 - DNA, 25 bp, Homo sapien
tcagctgaggtgacatgggatctaa

SEQ ID NO: 1711725 - DNA, 25 bp, Homo sapien
caatgttaagctgccaagaagaccc

SEQ ID NO: 1711726 - DNA, 25 bp, Homo sapien
tcccgggtgagagggaatcgccatc

SEQ ID NO: 1711727 - DNA, 25 bp, Homo sapien
gaagacccttttccataggagtgga

SEQ ID NO: 1711728 - DNA, 25 bp, Homo sapien
tggagtacatgtatcactgcactga

SEQ ID NO: 1711729 - DNA, 25 bp, Homo sapien
cagagcatgcagcctcctaacacgt

SEQ ID NO: 1711730 - DNA, 25 bp, Homo sapien
agcatgcagcctcctaacacgtatg

SEQ ID NO: 1711731 - DNA, 25 bp, Homo sapien
gagcatgcagcctcctaacacgtat

SEQ ID NO: 1711732 - DNA, 25 bp, Homo sapien
tccagagcatgcagcctcctaacac

SEQ ID NO: 1711733 - DNA, 25 bp, Homo sapien
taaccagtggtattgtctgacatcc

SEQ ID NO: 1711734 - DNA, 25 bp, Homo sapien
catcctatacggcataactgattac

SEQ ID NO: 1711735 - DNA, 25 bp, Homo sapien
gattacagccaagttcatgaataca

SEQ ID NO: 1711736 - DNA, 25 bp, Homo sapien
gagcattatgctcagaaaccgaaga

SEQ ID NO: 1711737 - DNA, 25 bp, Homo sapien
tatgccaggtcacagtttaaaggat

SEQ ID NO: 1711738 - DNA, 25 bp, Homo sapien
tcgagtgtagataagacaggcccca

SEQ ID NO: 1711739 - DNA, 25 bp, Homo sapien
gatctgtcagacaagtatgccaggt

SEQ ID NO: 1711740 - DNA, 25 bp, Homo sapien
tcttagcaggctacaccaaacaggt

SEQ ID NO: 1711741 - DNA, 25 bp, Homo sapien
taacaggagctaaaggaccccatgt

SEQ ID NO: 1711742 - DNA, 25 bp, Homo sapien
taatgtagagtcaagagtccccagc

SEQ ID NO: 1711743 - DNA, 25 bp, Homo sapien
gaaaggagactatgcttggtctgcc

SEQ ID NO: 1711744 - DNA, 25 bp, Homo sapien
tattttcaaggaccgtagccagcta

SEQ ID NO: 1711745 - DNA, 25 bp, Homo sapien
gctaggatactacagtttgccactg

SEQ ID NO: 1711746 - DNA, 25 bp, Homo sapien
gctggatggtattccactgcacaga

SEQ ID NO: 1711747 - DNA, 25 bp, Homo sapien
tgttgcacatctatccatgcctagc

SEQ ID NO: 1711748 - DNA, 25 bp, Homo sapien
tcatagatatgtgggttacttccag

SEQ ID NO: 1711749 - DNA, 25 bp, Homo sapien
cactgtgcagagtgggattcttaac

SEQ ID NO: 1711750 - DNA, 25 bp, Homo sapien
tactgatatgagcatgcacgggcca

SEQ ID NO: 1711751 - DNA, 25 bp, Homo sapien
tctcagcgggtgcactgaaatctct

SEQ ID NO: 1711752 - DNA, 25 bp, Homo sapien
tccaggtgtcccagagtcatttgat

SEQ ID NO: 1711753 - DNA, 25 bp, Homo sapien
tagagagagggactatcacgcacaa

SEQ ID NO: 1711754 - DNA, 25 bp, Homo sapien
taaagcagtgtaatcagtgccacca

SEQ ID NO: 1711755 - DNA, 25 bp, Homo sapien
gactttgtcccattagagcactgct

SEQ ID NO: 1711756 - DNA, 25 bp, Homo sapien
tctaggacatacaaagcgagtgctg

SEQ ID NO: 1711757 - DNA, 25 bp, Homo sapien
tgctgtgcagccaacttgaattaca

SEQ ID NO: 1711758 - DNA, 25 bp, Homo sapien
ttatctagattatggccatcagcca

SEQ ID NO: 1711759 - DNA, 25 bp, Homo sapien
tgagggtgcaagacaccataatgcc

SEQ ID NO: 1711760 - DNA, 25 bp, Homo sapien
tttcttaggcaaggcagataacccc

SEQ ID NO: 1711761 - DNA, 25 bp, Homo sapien
agctctacagtttttgcacgggcaa

SEQ ID NO: 1711762 - DNA, 25 bp, Homo sapien
ttttgcacgggcaaattcatttgcc

SEQ ID NO: 1711763 - DNA, 25 bp, Homo sapien
aatggacgccaatgtatgaaagctc

SEQ ID NO: 1711764 - DNA, 25 bp, Homo sapien
tgaatcctgccaaatggacgccaat

SEQ ID NO: 1711765 - DNA, 25 bp, Homo sapien
ctccacaggctttgtgacgtccaca

SEQ ID NO: 1711766 - DNA, 25 bp, Homo sapien
ggctttgtgacgtccacattcttga

SEQ ID NO: 1711767 - DNA, 25 bp, Homo sapien
ccacattcttgaagcgtgcttgtac

SEQ ID NO: 1711768 - DNA, 25 bp, Homo sapien
cacattcttgaagcgtgcttgtact

SEQ ID NO: 1711769 - DNA, 25 bp, Homo sapien
aaccctgtgcatatccctctcccca

SEQ ID NO: 1711770 - DNA, 25 bp, Homo sapien
ctaaccctgtgcatatccctctccc

SEQ ID NO: 1711771 - DNA, 25 bp, Homo sapien
tgtgcatatccctctccccaagacc

SEQ ID NO: 1711772 - DNA, 25 bp, Homo sapien
ccctgtgcatatccctctccccaag

SEQ ID NO: 1711773 - DNA, 25 bp, Homo sapien
ggattataggcatggccagctaatt

SEQ ID NO: 1711774 - DNA, 25 bp, Homo sapien
gggattataggcatggccagctaat

SEQ ID NO: 1711775 - DNA, 25 bp, Homo sapien
tgggattataggcatggccagctaa

SEQ ID NO: 1711776 - DNA, 25 bp, Homo sapien
tctctgctgcacgtcttaaacacct

SEQ ID NO: 1711777 - DNA, 25 bp, Homo sapien
atccagtaaggaaaggggctaggat

SEQ ID NO: 1711778 - DNA, 25 bp, Homo sapien
gcgcctctctgctgcacgtcttaaa

SEQ ID NO: 1711779 - DNA, 25 bp, Homo sapien
tctggtttgaggatccagtaaggaa

SEQ ID NO: 1711780 - DNA, 25 bp, Homo sapien
ccagccctgcgctcccgcgcttccg

SEQ ID NO: 1711781 - DNA, 25 bp, Homo sapien
gcgttcgcggcccaacgggctccca

SEQ ID NO: 1711782 - DNA, 25 bp, Homo sapien
gggcacccgatctcggcggccccag

SEQ ID NO: 1711783 - DNA, 25 bp, Homo sapien
cacctgccggctcgcccaggtgcgc

SEQ ID NO: 1711784 - DNA, 25 bp, Homo sapien
cttgtagaagccctttttccggatg

SEQ ID NO: 1711785 - DNA, 25 bp, Homo sapien
tgtagaagccctttttccggatgag

SEQ ID NO: 1711786 - DNA, 25 bp, Homo sapien
tagaagccctttttccggatgaggc

SEQ ID NO: 1711787 - DNA, 25 bp, Homo sapien
gaagccctttttccggatgaggctc

SEQ ID NO: 1711788 - DNA, 25 bp, Homo sapien
cggggacacgtaggtcttgggcagc

SEQ ID NO: 1711789 - DNA, 25 bp, Homo sapien
ggagccataggccccgctgccgacg

SEQ ID NO: 1711790 - DNA, 25 bp, Homo sapien
ataggccccgctgccgacgtgcgtc

SEQ ID NO: 1711791 - DNA, 25 bp, Homo sapien
acgtgcgtcggggacacgtaggtct

SEQ ID NO: 1711792 - DNA, 25 bp, Homo sapien
tccacggcagggcgggagtctcact

SEQ ID NO: 1711793 - DNA, 25 bp, Homo sapien
gtctcattgcgacgggatccacggc

SEQ ID NO: 1711794 - DNA, 25 bp, Homo sapien
gggtcttgcaagtgtacagtcctgg

SEQ ID NO: 1711795 - DNA, 25 bp, Homo sapien
tcggtgtactcgtctgtaacagtga

SEQ ID NO: 1711796 - DNA, 25 bp, Homo sapien
tcccctgaccgcttgtcgatggccg

SEQ ID NO: 1711797 - DNA, 25 bp, Homo sapien
cgcttggcgaagatctcggactgaa

SEQ ID NO: 1711798 - DNA, 25 bp, Homo sapien
gcgaagatctcggactgaaagggtc

SEQ ID NO: 1711799 - DNA, 25 bp, Homo sapien
gactgaaagggtcggctcagcttct

SEQ ID NO: 1711800 - DNA, 25 bp, Homo sapien
tgaagacatccaggagcccaatgac

SEQ ID NO: 1711801 - DNA, 25 bp, Homo sapien
gtcatagaagttgcgcagggaggag

SEQ ID NO: 1711802 - DNA, 25 bp, Homo sapien
aagtcatagaagttgcgcagggagg

SEQ ID NO: 1711803 - DNA, 25 bp, Homo sapien
tagaagttgcgcagggaggaggctg

SEQ ID NO: 1711804 - DNA, 25 bp, Homo sapien
ctgcagatccgtctgcatgaagggc

SEQ ID NO: 1711805 - DNA, 25 bp, Homo sapien
catctgatacaccaggtactggatc

SEQ ID NO: 1711806 - DNA, 25 bp, Homo sapien
tccgtctgcatgaagggcatcacca

SEQ ID NO: 1711807 - DNA, 25 bp, Homo sapien
ggtactggatcttctcctcactgaa

SEQ ID NO: 1711808 - DNA, 25 bp, Homo sapien
tgtgcacgaccccagcagagtggat

SEQ ID NO: 1711809 - DNA, 25 bp, Homo sapien
gcacgaccccagcagagtggatgta

SEQ ID NO: 1711810 - DNA, 25 bp, Homo sapien
tgcacgaccccagcagagtggatgt

SEQ ID NO: 1711811 - DNA, 25 bp, Homo sapien
cctgtgcacgaccccagcagagtgg

SEQ ID NO: 1711812 - DNA, 25 bp, Homo sapien
ctcattcacagccaggttgcctggc

SEQ ID NO: 1711813 - DNA, 25 bp, Homo sapien
attcacagccaggttgcctggcttc

SEQ ID NO: 1711814 - DNA, 25 bp, Homo sapien
cttcagttcacagtcctcattcaca

SEQ ID NO: 1711815 - DNA, 25 bp, Homo sapien
cacagccaggttgcctggcttcagg

SEQ ID NO: 1711816 - DNA, 25 bp, Homo sapien
tctcggcgtctgcatgtcgcgccag

SEQ ID NO: 1711817 - DNA, 25 bp, Homo sapien
accacgtagccagtcatctcggcgt

SEQ ID NO: 1711818 - DNA, 25 bp, Homo sapien
tggttgtagtgcatccagctgagga

SEQ ID NO: 1711819 - DNA, 25 bp, Homo sapien
gggctcggtaccagcgggtcaccac

SEQ ID NO: 1711820 - DNA, 25 bp, Homo sapien
tcagtcagcaccgagtgaccagatg

SEQ ID NO: 1711821 - DNA, 25 bp, Homo sapien
agatggccccaggaccgccctctca

SEQ ID NO: 1711822 - DNA, 25 bp, Homo sapien
cagtcagtcagcaccgagtgaccag

SEQ ID NO: 1711823 - DNA, 25 bp, Homo sapien
agtcagcaccgagtgaccagatggc

SEQ ID NO: 1711824 - DNA, 25 bp, Homo sapien
agcatctctgccatgatacagccca

SEQ ID NO: 1711825 - DNA, 25 bp, Homo sapien
gcatctctgccatgatacagcccac

SEQ ID NO: 1711826 - DNA, 25 bp, Homo sapien
ggtcactttcaggatctgggtcagc

SEQ ID NO: 1711827 - DNA, 25 bp, Homo sapien
ctccgtgccaggcaccccggtcact

SEQ ID NO: 1711828 - DNA, 25 bp, Homo sapien
ccggtcactttcaggatctgggtca

SEQ ID NO: 1711829 - DNA, 25 bp, Homo sapien
tccgtgccaggcaccccggtcactt

SEQ ID NO: 1711830 - DNA, 25 bp, Homo sapien
gctgagtgaaatccttcctgggggt

SEQ ID NO: 1711831 - DNA, 25 bp, Homo sapien
ggctggcccgtgggaacagctgagt

SEQ ID NO: 1711832 - DNA, 25 bp, Homo sapien
gcagggactggatgtaggatttggc

SEQ ID NO: 1711833 - DNA, 25 bp, Homo sapien
ccctctgggatacgctgagaggccc

SEQ ID NO: 1711834 - DNA, 25 bp, Homo sapien
cccgccctctgggatacgctgagag

SEQ ID NO: 1711835 - DNA, 25 bp, Homo sapien
tctgggatacgctgagaggcccctg

SEQ ID NO: 1711836 - DNA, 25 bp, Homo sapien
ggagagcccgccctctgggatacgc

SEQ ID NO: 1711837 - DNA, 25 bp, Homo sapien
atgggtgagggcctgcgcggccgtc

SEQ ID NO: 1711838 - DNA, 25 bp, Homo sapien
gcttgtccacgtctagctccagcat

SEQ ID NO: 1711839 - DNA, 25 bp, Homo sapien
cactgtgagtttctcgtgttctaag

SEQ ID NO: 1711840 - DNA, 25 bp, Homo sapien
taaggaatcatcaaacggctgctgg

SEQ ID NO: 1711841 - DNA, 25 bp, Homo sapien
aggagacaatgcccaccaagaagga

SEQ ID NO: 1711842 - DNA, 25 bp, Homo sapien
tttaaggtgcgtaaagaggtgctgt

SEQ ID NO: 1711843 - DNA, 25 bp, Homo sapien
gacagcatggagagcgaagtcagct

SEQ ID NO: 1711844 - DNA, 25 bp, Homo sapien
gtgctgtggcgagaaagtccacccc

SEQ ID NO: 1711845 - DNA, 25 bp, Homo sapien
tccggcgccgtgagtccttccgggc

SEQ ID NO: 1711846 - DNA, 25 bp, Homo sapien
atggggctgaagttcacaatctcct

SEQ ID NO: 1711847 - DNA, 25 bp, Homo sapien
ccttccgggcaatggggctgaagtt

SEQ ID NO: 1711848 - DNA, 25 bp, Homo sapien
gcgccgtgagtccttccgggcaatg

SEQ ID NO: 1711849 - DNA, 25 bp, Homo sapien
tcccacataaggagaaggacccttc

SEQ ID NO: 1711850 - DNA, 25 bp, Homo sapien
ttgaattctgcatctactaggccca

SEQ ID NO: 1711851 - DNA, 25 bp, Homo sapien
ccggcggtgccatgcaagatgagtc

SEQ ID NO: 1711852 - DNA, 25 bp, Homo sapien
aagggctgagtttggtagtgacaaa

SEQ ID NO: 1711853 - DNA, 25 bp, Homo sapien
ggcgattctccagatgggcagttta

SEQ ID NO: 1711854 - DNA, 25 bp, Homo sapien
tgcaggcgattctccagatgggcag

SEQ ID NO: 1711855 - DNA, 25 bp, Homo sapien
ctccagatgggcagtttaacgtggc

SEQ ID NO: 1711856 - DNA, 25 bp, Homo sapien
gattctccagatgggcagtttaacg

SEQ ID NO: 1711857 - DNA, 25 bp, Homo sapien
atcactgccataggcccccggcctg

SEQ ID NO: 1711858 - DNA, 25 bp, Homo sapien
actcagccccactctggcgggaagg

SEQ ID NO: 1711859 - DNA, 25 bp, Homo sapien
taggaaaccaacacagcatcactgc

SEQ ID NO: 1711860 - DNA, 25 bp, Homo sapien
cggcctggctcagcgcccactcagc

SEQ ID NO: 1711861 - DNA, 25 bp, Homo sapien
ctgtaagggaatcaagttctgctgt

SEQ ID NO: 1711862 - DNA, 25 bp, Homo sapien
cgccacaagctaaaaagagccaagg

SEQ ID NO: 1711863 - DNA, 25 bp, Homo sapien
ccactgccgccacaagctaaaaaga

SEQ ID NO: 1711864 - DNA, 25 bp, Homo sapien
gttctgctgtttcaatccaccaggt

SEQ ID NO: 1711865 - DNA, 25 bp, Homo sapien
atgcagcaataagctggggaatgcc

SEQ ID NO: 1711866 - DNA, 25 bp, Homo sapien
tagagtatttgcaggtttaattaat

SEQ ID NO: 1711867 - DNA, 25 bp, Homo sapien
taataaggatcaagataagatcaca

SEQ ID NO: 1711868 - DNA, 25 bp, Homo sapien
caagataagatcacacaggattagg

SEQ ID NO: 1711869 - DNA, 25 bp, Homo sapien
tcccaaagggagcagaacggtttgc

SEQ ID NO: 1711870 - DNA, 25 bp, Homo sapien
taacaagtcccctggtgcacaagga

SEQ ID NO: 1711871 - DNA, 25 bp, Homo sapien
ggaaatttgagacccactgtgcccg

SEQ ID NO: 1711872 - DNA, 25 bp, Homo sapien
aatcactaggcttgggtcagggcga

SEQ ID NO: 1711873 - DNA, 25 bp, Homo sapien
tttaattagccacctgcagtcctgg

SEQ ID NO: 1711874 - DNA, 25 bp, Homo sapien
caaatgcacaataggtatccaccat

SEQ ID NO: 1711875 - DNA, 25 bp, Homo sapien
cactctgtgttatccagtcctacag

SEQ ID NO: 1711876 - DNA, 25 bp, Homo sapien
tggtagaaagtatagaggttcccac

SEQ ID NO: 1711877 - DNA, 25 bp, Homo sapien
tcctacagatggtaacaaatgcaca

SEQ ID NO: 1711878 - DNA, 25 bp, Homo sapien
tctcaggaggcttagagggatgtag

SEQ ID NO: 1711879 - DNA, 25 bp, Homo sapien
ctcaggaggcttagagggatgtaga

SEQ ID NO: 1711880 - DNA, 25 bp, Homo sapien
ctgggcttgcccttacgggggctat

SEQ ID NO: 1711881 - DNA, 25 bp, Homo sapien
tgcccttacgggggctattcctcca

SEQ ID NO: 1711882 - DNA, 25 bp, Homo sapien
attttgagaagcgatccatggcaca

SEQ ID NO: 1711883 - DNA, 25 bp, Homo sapien
ttgctccagtacacacccatgggtg

SEQ ID NO: 1711884 - DNA, 25 bp, Homo sapien
gggagcctcccagcattagatctta

SEQ ID NO: 1711885 - DNA, 25 bp, Homo sapien
cagtttgatggaatggccttaggcc

SEQ ID NO: 1711886 - DNA, 25 bp, Homo sapien
tcagcagtgccaatagaaattacag

SEQ ID NO: 1711887 - DNA, 25 bp, Homo sapien
tagcaaagtgcagttgtatcagcag

SEQ ID NO: 1711888 - DNA, 25 bp, Homo sapien
cattgtttaataggcctaccctcga

SEQ ID NO: 1711889 - DNA, 25 bp, Homo sapien
cagtttgccacaggtatctatctta

SEQ ID NO: 1711890 - DNA, 25 bp, Homo sapien
tagccaatattgaagatacctcctc

SEQ ID NO: 1711891 - DNA, 25 bp, Homo sapien
cacatgatgccttaaggtgaaaaga

SEQ ID NO: 1711892 - DNA, 25 bp, Homo sapien
tctctacgatgcattacctgagtcc

SEQ ID NO: 1711893 - DNA, 25 bp, Homo sapien
gctcaactcagtcctatgcctaaaa

SEQ ID NO: 1711894 - DNA, 25 bp, Homo sapien
tgacatgtgtcagtagttaattcct

SEQ ID NO: 1711895 - DNA, 25 bp, Homo sapien
tacttggtataaaatcatctgcaca

SEQ ID NO: 1711896 - DNA, 25 bp, Homo sapien
gaacatacagtcacctccaaaagct

SEQ ID NO: 1711897 - DNA, 25 bp, Homo sapien
cagtttatgcattcacctgtggatg

SEQ ID NO: 1711898 - DNA, 25 bp, Homo sapien
agtctttgcacgctggcttcagcag

SEQ ID NO: 1711899 - DNA, 25 bp, Homo sapien
ccagtcagcttgtccagagattctg

SEQ ID NO: 1711900 - DNA, 25 bp, Homo sapien
tgcgtttgaagaagtaggcatctct

SEQ ID NO: 1711901 - DNA, 25 bp, Homo sapien
cctgattattcgtgatcctcattgc

SEQ ID NO: 1711902 - DNA, 25 bp, Homo sapien
ccgggaagcggagcgcggtcttctc

SEQ ID NO: 1711903 - DNA, 25 bp, Homo sapien
aagcggagcgcggtcttctcccgcg

SEQ ID NO: 1711904 - DNA, 25 bp, Homo sapien
gcgggcaggccgccgagcaggtcgg

SEQ ID NO: 1711905 - DNA, 25 bp, Homo sapien
gcaggccgccgagcaggtcggcgcg

SEQ ID NO: 1711906 - DNA, 25 bp, Homo sapien
aaaggagggaaataacatctcctca

SEQ ID NO: 1711907 - DNA, 25 bp, Homo sapien
ttccagaagaatcttgacccctcgg

SEQ ID NO: 1711908 - DNA, 25 bp, Homo sapien
gaagaatcttgacccctcggagaag

SEQ ID NO: 1711909 - DNA, 25 bp, Homo sapien
agggaaataacatctcctcagaggg

SEQ ID NO: 1711910 - DNA, 25 bp, Homo sapien
catcgatgagtgactgttgggcccc

SEQ ID NO: 1711911 - DNA, 25 bp, Homo sapien
gaacacggtgttagcaaagcagact

SEQ ID NO: 1711912 - DNA, 25 bp, Homo sapien
tatagcaggttagtttccagcgggc

SEQ ID NO: 1711913 - DNA, 25 bp, Homo sapien
tgagtccaccatacggaagctgggc

SEQ ID NO: 1711914 - DNA, 25 bp, Homo sapien
atgcttctaggggagtcgcccttcc

SEQ ID NO: 1711915 - DNA, 25 bp, Homo sapien
gcttctaggggagtcgcccttcctc

SEQ ID NO: 1711916 - DNA, 25 bp, Homo sapien
tgatgcttctaggggagtcgccctt

SEQ ID NO: 1711917 - DNA, 25 bp, Homo sapien
cccttcctcctagcagtggccgcac

SEQ ID NO: 1711918 - DNA, 25 bp, Homo sapien
ccttcagcccttcctcatcgccagt

SEQ ID NO: 1711919 - DNA, 25 bp, Homo sapien
tcagcccttcctcatcgccagtctc

SEQ ID NO: 1711920 - DNA, 25 bp, Homo sapien
agcccttcctcatcgccagtctcac

SEQ ID NO: 1711921 - DNA, 25 bp, Homo sapien
ttcagcccttcctcatcgccagtct

SEQ ID NO: 1711922 - DNA, 25 bp, Homo sapien
tcctcttcttcctcctctccatcac

SEQ ID NO: 1711923 - DNA, 25 bp, Homo sapien
tcttcctcttcttcctcctctccat

SEQ ID NO: 1711924 - DNA, 25 bp, Homo sapien
cttgagcttcctgctcttcttcctc

SEQ ID NO: 1711925 - DNA, 25 bp, Homo sapien
tcttcctccacctcttcctcttctt

SEQ ID NO: 1711926 - DNA, 25 bp, Homo sapien
ggagagtggagggtgtgtcttggcc

SEQ ID NO: 1711927 - DNA, 25 bp, Homo sapien
gacagcaagcatggggagagtggag

SEQ ID NO: 1711928 - DNA, 25 bp, Homo sapien
gtggagggtgtgtcttggcctgctt

SEQ ID NO: 1711929 - DNA, 25 bp, Homo sapien
gagtggagggtgtgtcttggcctgc

SEQ ID NO: 1711930 - DNA, 25 bp, Homo sapien
gattacagcctgtgcatcctatcca

SEQ ID NO: 1711931 - DNA, 25 bp, Homo sapien
tgtgcatcctatccagacctggttc

SEQ ID NO: 1711932 - DNA, 25 bp, Homo sapien
gtgggcagcccagattacagcctgt

SEQ ID NO: 1711933 - DNA, 25 bp, Homo sapien
aagtgaaagacaaggtcagtgggca

SEQ ID NO: 1711934 - DNA, 25 bp, Homo sapien
aaaggagagaccactacagatcttg

SEQ ID NO: 1711935 - DNA, 25 bp, Homo sapien
gagagaccactacagatcttgttca

SEQ ID NO: 1711936 - DNA, 25 bp, Homo sapien
ggagagaccactacagatcttgttc

SEQ ID NO: 1711937 - DNA, 25 bp, Homo sapien
gagaccactacagatcttgttcaac

SEQ ID NO: 1711938 - DNA, 25 bp, Homo sapien
tgcaagcgccggataagagggacac

SEQ ID NO: 1711939 - DNA, 25 bp, Homo sapien
gtgcctgccgcttcaacagccaata

SEQ ID NO: 1711940 - DNA, 25 bp, Homo sapien
taagagggacaccattccgtgcctg

SEQ ID NO: 1711941 - DNA, 25 bp, Homo sapien
cagcgtttctttgggactgcagatg

SEQ ID NO: 1711942 - DNA, 25 bp, Homo sapien
ttctctctcttccgaatcagctcaa

SEQ ID NO: 1711943 - DNA, 25 bp, Homo sapien
aagtcatgccggagcttctgccaat

SEQ ID NO: 1711944 - DNA, 25 bp, Homo sapien
gcttctctctcttccgaatcagctc

SEQ ID NO: 1711945 - DNA, 25 bp, Homo sapien
cttctctctcttccgaatcagctca

SEQ ID NO: 1711946 - DNA, 25 bp, Homo sapien
tgcgaagatgtgtgcaggatccttc

SEQ ID NO: 1711947 - DNA, 25 bp, Homo sapien
agcaggtccagtgttgtcctcaaca

SEQ ID NO: 1711948 - DNA, 25 bp, Homo sapien
tcaagttgactggttctgcgaagat

SEQ ID NO: 1711949 - DNA, 25 bp, Homo sapien
cagtgttgtcctcaacagaacattg

SEQ ID NO: 1711950 - DNA, 25 bp, Homo sapien
tccagttcaagaagaatttactact

SEQ ID NO: 1711951 - DNA, 25 bp, Homo sapien
gttcaagaagaatttactacttgga

SEQ ID NO: 1711952 - DNA, 25 bp, Homo sapien
cctgttccagttcaagaagaattta

SEQ ID NO: 1711953 - DNA, 25 bp, Homo sapien
caagaagaatttactacttggaaag

SEQ ID NO: 1711954 - DNA, 25 bp, Homo sapien
cagctgctcggtggaaaattgtgtc

SEQ ID NO: 1711955 - DNA, 25 bp, Homo sapien
tccaatttgggtgactcgggcaggt

SEQ ID NO: 1711956 - DNA, 25 bp, Homo sapien
ggtcatagccgatgttctctgcctg

SEQ ID NO: 1711957 - DNA, 25 bp, Homo sapien
ccagcttccgcctcatagtagaaaa

SEQ ID NO: 1711958 - DNA, 25 bp, Homo sapien
cgctcaccaggtccagtttctccag

SEQ ID NO: 1711959 - DNA, 25 bp, Homo sapien
aaatgggcccggttctctgggatga

SEQ ID NO: 1711960 - DNA, 25 bp, Homo sapien
gacaaatgggcccggttctctggga

SEQ ID NO: 1711961 - DNA, 25 bp, Homo sapien
tgcacctctggggacaaatgggccc

SEQ ID NO: 1711962 - DNA, 25 bp, Homo sapien
gggtgcgggccccactggaccgcat

SEQ ID NO: 1711963 - DNA, 25 bp, Homo sapien
aagggcattgatctcccggcgtagc

SEQ ID NO: 1711964 - DNA, 25 bp, Homo sapien
ccccattggatactgtcttgttgag

SEQ ID NO: 1711965 - DNA, 25 bp, Homo sapien
gcaggcggacacgacgggtgcgggc

SEQ ID NO: 1711966 - DNA, 25 bp, Homo sapien
caatacggctgtatcaggtgcaaaa

SEQ ID NO: 1711967 - DNA, 25 bp, Homo sapien
ccaagctataggctcggatccgaag

SEQ ID NO: 1711968 - DNA, 25 bp, Homo sapien
gagtctctccacgtgatgttacaag

SEQ ID NO: 1711969 - DNA, 25 bp, Homo sapien
tttcgactgtgtgcgtgacaggccc

SEQ ID NO: 1711970 - DNA, 25 bp, Homo sapien
cttggaggtttgctatcattaatgg

SEQ ID NO: 1711971 - DNA, 25 bp, Homo sapien
tctgggctttaggaacctgcttgga

SEQ ID NO: 1711972 - DNA, 25 bp, Homo sapien
atcattaatgggtttcagagtaggg

SEQ ID NO: 1711973 - DNA, 25 bp, Homo sapien
gctcagacaaggaaggtgcaggccc

SEQ ID NO: 1711974 - DNA, 25 bp, Homo sapien
aagaggactgatgtgcggcgaccca

SEQ ID NO: 1711975 - DNA, 25 bp, Homo sapien
ccatgagggatagtctgttgatgcc

SEQ ID NO: 1711976 - DNA, 25 bp, Homo sapien
tctgtagcttaaccccattcttggc

SEQ ID NO: 1711977 - DNA, 25 bp, Homo sapien
gagtggcgctcttcctcgatgctgg

SEQ ID NO: 1711978 - DNA, 25 bp, Homo sapien
gagatgggaaggtattgttgaaaac

SEQ ID NO: 1711979 - DNA, 25 bp, Homo sapien
cctaacacagaaaagttttggccag

SEQ ID NO: 1711980 - DNA, 25 bp, Homo sapien
tatataccaacttactcccctaaca

SEQ ID NO: 1711981 - DNA, 25 bp, Homo sapien
aagttttggccagacgagatgggaa

SEQ ID NO: 1711982 - DNA, 25 bp, Homo sapien
catgaatgagccctatgcccagcta

SEQ ID NO: 1711983 - DNA, 25 bp, Homo sapien
caagtccctcctataagagcaggtg

SEQ ID NO: 1711984 - DNA, 25 bp, Homo sapien
gtatagaagtatccctgagtgccag

SEQ ID NO: 1711985 - DNA, 25 bp, Homo sapien
tcttgggtgcctcacttacgaagga

SEQ ID NO: 1711986 - DNA, 25 bp, Homo sapien
actacattcagagtcagacccgctt

SEQ ID NO: 1711987 - DNA, 25 bp, Homo sapien
tcagacccgctttcggtgtgttttc

SEQ ID NO: 1711988 - DNA, 25 bp, Homo sapien
gagtcagacccgctttcggtgtgtt

SEQ ID NO: 1711989 - DNA, 25 bp, Homo sapien
cattcagagtcagacccgctttcgg

SEQ ID NO: 1711990 - DNA, 25 bp, Homo sapien
gggcactcgagacagggctggcttc

SEQ ID NO: 1711991 - DNA, 25 bp, Homo sapien
ccgttcacaccttccaggaagggca

SEQ ID NO: 1711992 - DNA, 25 bp, Homo sapien
gtagtcagagtctccgttcacacct

SEQ ID NO: 1711993 - DNA, 25 bp, Homo sapien
ccacggctgcgtttggggggcgtca

SEQ ID NO: 1711994 - DNA, 25 bp, Homo sapien
gggcaacccaggaatgagtcacaac

SEQ ID NO: 1711995 - DNA, 25 bp, Homo sapien
cgacctctgaactagaaccctaaga

SEQ ID NO: 1711996 - DNA, 25 bp, Homo sapien
catcctcatggccttagggagaagg

SEQ ID NO: 1711997 - DNA, 25 bp, Homo sapien
gaagggccataatccagcttgggca

SEQ ID NO: 1711998 - DNA, 25 bp, Homo sapien
tccaggtctccgcggtcttcaaagg

SEQ ID NO: 1711999 - DNA, 25 bp, Homo sapien
aggtctccgcggtcttcaaagggca

SEQ ID NO: 1712000 - DNA, 25 bp, Homo sapien
caggtctccgcggtcttcaaagggc

SEQ ID NO: 1712001 - DNA, 25 bp, Homo sapien
gtctccgcggtcttcaaagggcagc

SEQ ID NO: 1712002 - DNA, 25 bp, Homo sapien
gagataggagggtggcgtctggggc

SEQ ID NO: 1712003 - DNA, 25 bp, Homo sapien
agggtggcgtctggggcagactcac

SEQ ID NO: 1712004 - DNA, 25 bp, Homo sapien
agataggagggtggcgtctggggca

SEQ ID NO: 1712005 - DNA, 25 bp, Homo sapien
taggagggtggcgtctggggcagac

SEQ ID NO: 1712006 - DNA, 25 bp, Homo sapien
tcccagcttcagcacgtccagcggg

SEQ ID NO: 1712007 - DNA, 25 bp, Homo sapien
acagggatgggaacgccattgtgca

SEQ ID NO: 1712008 - DNA, 25 bp, Homo sapien
tcccggggcatcttgggatcgatga

SEQ ID NO: 1712009 - DNA, 25 bp, Homo sapien
cttcagcacgtccagcggggggaca

SEQ ID NO: 1712010 - DNA, 25 bp, Homo sapien
gaataactagttggcacagggcaaa

SEQ ID NO: 1712011 - DNA, 25 bp, Homo sapien
tccagatgtgcccagtggatgagct

SEQ ID NO: 1712012 - DNA, 25 bp, Homo sapien
tgatgcaagtctcgacctcagagtg

SEQ ID NO: 1712013 - DNA, 25 bp, Homo sapien
taacatgccaagtgcaggcctgttg

SEQ ID NO: 1712014 - DNA, 25 bp, Homo sapien
taagggtccataggctaagaaaggc

SEQ ID NO: 1712015 - DNA, 25 bp, Homo sapien
gctccccgggtgaatataacatgtg

SEQ ID NO: 1712016 - DNA, 25 bp, Homo sapien
ggaggccaccaagaacctagcaggt

SEQ ID NO: 1712017 - DNA, 25 bp, Homo sapien
tgagcctcgccttgcgttggagaat

SEQ ID NO: 1712018 - DNA, 25 bp, Homo sapien
catcttgagcttgtccacggtgtct

SEQ ID NO: 1712019 - DNA, 25 bp, Homo sapien
ataggccacctgcactgacttgcgg

SEQ ID NO: 1712020 - DNA, 25 bp, Homo sapien
gactctgctcaggtggatcatcgca

SEQ ID NO: 1712021 - DNA, 25 bp, Homo sapien
cttgcggatgctggtcttgcggcct

SEQ ID NO: 1712022 - DNA, 25 bp, Homo sapien
gagggggaagctgccggccatacat

SEQ ID NO: 1712023 - DNA, 25 bp, Homo sapien
gctgccggccatacatctggcaggg

SEQ ID NO: 1712024 - DNA, 25 bp, Homo sapien
gggaagctgccggccatacatctgg

SEQ ID NO: 1712025 - DNA, 25 bp, Homo sapien
gaagctgccggccatacatctggca

SEQ ID NO: 1712026 - DNA, 25 bp, Homo sapien
caaaactggggccttgcccttagtg

SEQ ID NO: 1712027 - DNA, 25 bp, Homo sapien
gccttgcccttagtggggagaaagc

SEQ ID NO: 1712028 - DNA, 25 bp, Homo sapien
ccaggagaaccatgcgattggtcaa

SEQ ID NO: 1712029 - DNA, 25 bp, Homo sapien
aaccatgcgattggtcaaaactggg

SEQ ID NO: 1712030 - DNA, 25 bp, Homo sapien
gctgtttctacttctaactggttct

SEQ ID NO: 1712031 - DNA, 25 bp, Homo sapien
tcttcagtgaaatatcccctgaggg

SEQ ID NO: 1712032 - DNA, 25 bp, Homo sapien
gtgaaatatcccctgagggaccttg

SEQ ID NO: 1712033 - DNA, 25 bp, Homo sapien
gccatctgggcaatctcctaagctg

SEQ ID NO: 1712034 - DNA, 25 bp, Homo sapien
gatctgagccgtttcccgttctaaa

SEQ ID NO: 1712035 - DNA, 25 bp, Homo sapien
tctgggatcagtgtcggaacctcac

SEQ ID NO: 1712036 - DNA, 25 bp, Homo sapien
tttaaatcaacgacactgtgtggcc

SEQ ID NO: 1712037 - DNA, 25 bp, Homo sapien
tgcaactggccctgcgactttggtg

SEQ ID NO: 1712038 - DNA, 25 bp, Homo sapien
aaataagtttcagacagtcatatta

SEQ ID NO: 1712039 - DNA, 25 bp, Homo sapien
cagacagtcatattatagtaggtaa

SEQ ID NO: 1712040 - DNA, 25 bp, Homo sapien
gtttcagacagtcatattatagtag

SEQ ID NO: 1712041 - DNA, 25 bp, Homo sapien
catattatagtaggtaaaattaact

SEQ ID NO: 1712042 - DNA, 25 bp, Homo sapien
ggtgtgtccaaagggtcactctcct

SEQ ID NO: 1712043 - DNA, 25 bp, Homo sapien
caagcttggtaagtcaggtgtgtcc

SEQ ID NO: 1712044 - DNA, 25 bp, Homo sapien
caagttcagcaagcttggtaagtca

SEQ ID NO: 1712045 - DNA, 25 bp, Homo sapien
atccttgagtctcaagttcagcaag

SEQ ID NO: 1712046 - DNA, 25 bp, Homo sapien
acactcaggtgctaatggcatctaa

SEQ ID NO: 1712047 - DNA, 25 bp, Homo sapien
taaaagtgaaactcagagcctagcc

SEQ ID NO: 1712048 - DNA, 25 bp, Homo sapien
gggattctctattccgagagtcaga

SEQ ID NO: 1712049 - DNA, 25 bp, Homo sapien
tatattaatggaagcagccaagctg

SEQ ID NO: 1712050 - DNA, 25 bp, Homo sapien
gactgccctccaatgtgggctcccc

SEQ ID NO: 1712051 - DNA, 25 bp, Homo sapien
gtggactgccctccaatgtgggctc

SEQ ID NO: 1712052 - DNA, 25 bp, Homo sapien
tggactgccctccaatgtgggctcc

SEQ ID NO: 1712053 - DNA, 25 bp, Homo sapien
tgtggactgccctccaatgtgggct

SEQ ID NO: 1712054 - DNA, 25 bp, Homo sapien
tagaagcagctcaatcatctcctcc

SEQ ID NO: 1712055 - DNA, 25 bp, Homo sapien
cttagtagaagcagctcaatcatct

SEQ ID NO: 1712056 - DNA, 25 bp, Homo sapien
atctcctcctccaagaagccttcca

SEQ ID NO: 1712057 - DNA, 25 bp, Homo sapien
tctcctcctccaagaagccttccat

SEQ ID NO: 1712058 - DNA, 25 bp, Homo sapien
cccaggcaccagtccatggcactcc

SEQ ID NO: 1712059 - DNA, 25 bp, Homo sapien
gcaccagtccatggcactccctatg

SEQ ID NO: 1712060 - DNA, 25 bp, Homo sapien
caggcaccagtccatggcactccct

SEQ ID NO: 1712061 - DNA, 25 bp, Homo sapien
gcaattccccaggcaccagtccatg

SEQ ID NO: 1712062 - DNA, 25 bp, Homo sapien
cagggcgcattcactgctccccagc

SEQ ID NO: 1712063 - DNA, 25 bp, Homo sapien
cattcactgctccccagcacagggc

SEQ ID NO: 1712064 - DNA, 25 bp, Homo sapien
tcactgctccccagcacagggccat

SEQ ID NO: 1712065 - DNA, 25 bp, Homo sapien
agggcgcattcactgctccccagca

SEQ ID NO: 1712066 - DNA, 25 bp, Homo sapien
cccccttgaacacctgttcttccat

SEQ ID NO: 1712067 - DNA, 25 bp, Homo sapien
agatggagtgaggggtgtccgggtc

SEQ ID NO: 1712068 - DNA, 25 bp, Homo sapien
tcccccttgaacacctgttcttcca

SEQ ID NO: 1712069 - DNA, 25 bp, Homo sapien
ctgcccgagaaggagatggagtgag

SEQ ID NO: 1712070 - DNA, 25 bp, Homo sapien
ggccagggcggcgatcacagcacct

SEQ ID NO: 1712071 - DNA, 25 bp, Homo sapien
ggcgatcacagcacctgccgatgtc

SEQ ID NO: 1712072 - DNA, 25 bp, Homo sapien
tgccgatgtccccgcaaagcggtgg

SEQ ID NO: 1712073 - DNA, 25 bp, Homo sapien
agggcggcgatcacagcacctgccg

SEQ ID NO: 1712074 - DNA, 25 bp, Homo sapien
tggaatcccccaagagacttcccag

SEQ ID NO: 1712075 - DNA, 25 bp, Homo sapien
ctgtctctgtggaatcccccaagag

SEQ ID NO: 1712076 - DNA, 25 bp, Homo sapien
tgtggaatcccccaagagacttccc

SEQ ID NO: 1712077 - DNA, 25 bp, Homo sapien
tctctgtggaatcccccaagagact

SEQ ID NO: 1712078 - DNA, 25 bp, Homo sapien
gtgtagcagttcttctcgctgaggc

SEQ ID NO: 1712079 - DNA, 25 bp, Homo sapien
tgctgtccgggacagtgtttctctc

SEQ ID NO: 1712080 - DNA, 25 bp, Homo sapien
gctagatgcatctgctgtccgggac

SEQ ID NO: 1712081 - DNA, 25 bp, Homo sapien
tctctctgggttagcagtgtagcag

SEQ ID NO: 1712082 - DNA, 25 bp, Homo sapien
cacacccacgttgaggactctgaga

SEQ ID NO: 1712083 - DNA, 25 bp, Homo sapien
cacccacgttgaggactctgagata

SEQ ID NO: 1712084 - DNA, 25 bp, Homo sapien
ggccacacccacgttgaggactctg

SEQ ID NO: 1712085 - DNA, 25 bp, Homo sapien
cacgttgaggactctgagatactca

SEQ ID NO: 1712086 - DNA, 25 bp, Homo sapien
agcttccccgtggtgaccttgtagg

SEQ ID NO: 1712087 - DNA, 25 bp, Homo sapien
ttgtaggagtcctcgggcaggaccc

SEQ ID NO: 1712088 - DNA, 25 bp, Homo sapien
cccgtggtgaccttgtaggagtcct

SEQ ID NO: 1712089 - DNA, 25 bp, Homo sapien
tccccgtggtgaccttgtaggagtc

SEQ ID NO: 1712090 - DNA, 25 bp, Homo sapien
caccacattctccccgtccgttaag

SEQ ID NO: 1712091 - DNA, 25 bp, Homo sapien
cgtccgttaagcgggtgaggctcac

SEQ ID NO: 1712092 - DNA, 25 bp, Homo sapien
ccgtccgttaagcgggtgaggctca

SEQ ID NO: 1712093 - DNA, 25 bp, Homo sapien
cacattctccccgtccgttaagcgg

SEQ ID NO: 1712094 - DNA, 25 bp, Homo sapien
ctcctccttggacgtgaactctgaa

SEQ ID NO: 1712095 - DNA, 25 bp, Homo sapien
gctcctccttggacgtgaactctga

SEQ ID NO: 1712096 - DNA, 25 bp, Homo sapien
gagctcctccttggacgtgaactct

SEQ ID NO: 1712097 - DNA, 25 bp, Homo sapien
tgagctcctccttggacgtgaactc

SEQ ID NO: 1712098 - DNA, 25 bp, Homo sapien
tggcggtcaagcctggttcgtcctg

SEQ ID NO: 1712099 - DNA, 25 bp, Homo sapien
ggatggatgtgaaggccgaagcatt

SEQ ID NO: 1712100 - DNA, 25 bp, Homo sapien
ccgaagcattgagggtggcggtcaa

SEQ ID NO: 1712101 - DNA, 25 bp, Homo sapien
aagcctggttcgtcctgggcttctg

SEQ ID NO: 1712102 - DNA, 25 bp, Homo sapien
tgagcaagtgggtgacggtgcagtg

SEQ ID NO: 1712103 - DNA, 25 bp, Homo sapien
tttgggagtgccctatgagagggag

SEQ ID NO: 1712104 - DNA, 25 bp, Homo sapien
cctatgagagggagtgagcaagtgg

SEQ ID NO: 1712105 - DNA, 25 bp, Homo sapien
gagtgccctatgagagggagtgagc

SEQ ID NO: 1712106 - DNA, 25 bp, Homo sapien
tgtgcggagagaacagggctgagat

SEQ ID NO: 1712107 - DNA, 25 bp, Homo sapien
gtgcggagagaacagggctgagatg

SEQ ID NO: 1712108 - DNA, 25 bp, Homo sapien
ctgtgcggagagaacagggctgaga

SEQ ID NO: 1712109 - DNA, 25 bp, Homo sapien
gtacaccgggacgaagcagctgcag

SEQ ID NO: 1712110 - DNA, 25 bp, Homo sapien
ggccacagtacaccgggacgaagca

SEQ ID NO: 1712111 - DNA, 25 bp, Homo sapien
acagtacaccgggacgaagcagctg

SEQ ID NO: 1712112 - DNA, 25 bp, Homo sapien
aggccacagtacaccgggacgaagc

SEQ ID NO: 1712113 - DNA, 25 bp, Homo sapien
tggtgatggcgtcggtccagaaggc

SEQ ID NO: 1712114 - DNA, 25 bp, Homo sapien
gggaacaatgcgtgggtcatcctgg

SEQ ID NO: 1712115 - DNA, 25 bp, Homo sapien
gagcagttgaacatgcggaagtcgt

SEQ ID NO: 1712116 - DNA, 25 bp, Homo sapien
tcatcctggcgatgttctccaggga

SEQ ID NO: 1712117 - DNA, 25 bp, Homo sapien
aaaactgcatcctcgtaccctcggt

SEQ ID NO: 1712118 - DNA, 25 bp, Homo sapien
cgtaccctcggtagtagtaatcgtg

SEQ ID NO: 1712119 - DNA, 25 bp, Homo sapien
ctcggtagtagtaatcgtgcaggat

SEQ ID NO: 1712120 - DNA, 25 bp, Homo sapien
tgcatcctcgtaccctcggtagtag

SEQ ID NO: 1712121 - DNA, 25 bp, Homo sapien
cttggaggaagaattaagataaaca

SEQ ID NO: 1712122 - DNA, 25 bp, Homo sapien
ggaggaagaattaagataaacagca

SEQ ID NO: 1712123 - DNA, 25 bp, Homo sapien
gaggaagaattaagataaacagcat

SEQ ID NO: 1712124 - DNA, 25 bp, Homo sapien
tggaggaagaattaagataaacagc

SEQ ID NO: 1712125 - DNA, 25 bp, Homo sapien
caagggcgagttctatctggcagta

SEQ ID NO: 1712126 - DNA, 25 bp, Homo sapien
actcattgccaagggcgagttctat

SEQ ID NO: 1712127 - DNA, 25 bp, Homo sapien
ggcgagttctatctggcagtacact

SEQ ID NO: 1712128 - DNA, 25 bp, Homo sapien
attgccaagggcgagttctatctgg

SEQ ID NO: 1712129 - DNA, 25 bp, Homo sapien
tgccgtgctcgaaggcttggttgac

SEQ ID NO: 1712130 - DNA, 25 bp, Homo sapien
cctgccgtgctcgaaggcttggttg

SEQ ID NO: 1712131 - DNA, 25 bp, Homo sapien
tgtgaggttgtgtggctccttccag

SEQ ID NO: 1712132 - DNA, 25 bp, Homo sapien
tggcctgccgtgctcgaaggcttgg

SEQ ID NO: 1712133 - DNA, 25 bp, Homo sapien
catggctgccccttccatccccttt

SEQ ID NO: 1712134 - DNA, 25 bp, Homo sapien
gctgccccttccatcccctttggga

SEQ ID NO: 1712135 - DNA, 25 bp, Homo sapien
atggctgccccttccatcccctttg

SEQ ID NO: 1712136 - DNA, 25 bp, Homo sapien
tggctgccccttccatcccctttgg

SEQ ID NO: 1712137 - DNA, 25 bp, Homo sapien
tgctgaaacaggtgactcgcatgtg

SEQ ID NO: 1712138 - DNA, 25 bp, Homo sapien
tgggaatgatacaggtggcatgcca

SEQ ID NO: 1712139 - DNA, 25 bp, Homo sapien
cgcatgtgaattcaagtgtctgcac

SEQ ID NO: 1712140 - DNA, 25 bp, Homo sapien
ctgctcaagtggagagactggtgct

SEQ ID NO: 1712141 - DNA, 25 bp, Homo sapien
tgggcagtgatgaaccaggtgtgga

SEQ ID NO: 1712142 - DNA, 25 bp, Homo sapien
gatctggctggtgatccagacggtt

SEQ ID NO: 1712143 - DNA, 25 bp, Homo sapien
tgatccagacggttgtacctgctgc

SEQ ID NO: 1712144 - DNA, 25 bp, Homo sapien
ggttgtacctgctgctgaggtgaca

SEQ ID NO: 1712145 - DNA, 25 bp, Homo sapien
gaaggctgaaagagaacttcggggc

SEQ ID NO: 1712146 - DNA, 25 bp, Homo sapien
acttcggggcagtgtttgaggtgcc

SEQ ID NO: 1712147 - DNA, 25 bp, Homo sapien
gctgttcttggcctagttcctccac

SEQ ID NO: 1712148 - DNA, 25 bp, Homo sapien
ttggcctagttcctccacaggtggc

SEQ ID NO: 1712149 - DNA, 25 bp, Homo sapien
gacggtttccttcacatgaaccaga

SEQ ID NO: 1712150 - DNA, 25 bp, Homo sapien
cgctttttggttttgaagagacaag

SEQ ID NO: 1712151 - DNA, 25 bp, Homo sapien
tacataaggcttgctgacggtttcc

SEQ ID NO: 1712152 - DNA, 25 bp, Homo sapien
gaaccagaggcacggcgctttttgg

SEQ ID NO: 1712153 - DNA, 25 bp, Homo sapien
ggatcccgaatgtcttgggaagcct

SEQ ID NO: 1712154 - DNA, 25 bp, Homo sapien
tttttggatcccgaatgtcttggga

SEQ ID NO: 1712155 - DNA, 25 bp, Homo sapien
ccagtttgagtcttcagcagggctc

SEQ ID NO: 1712156 - DNA, 25 bp, Homo sapien
gaagaccttattcacccagtttgag

SEQ ID NO: 1712157 - DNA, 25 bp, Homo sapien
gtcacgtaggcactcacttgtctag

SEQ ID NO: 1712158 - DNA, 25 bp, Homo sapien
tctccgtgggatttaaggaacatta

SEQ ID NO: 1712159 - DNA, 25 bp, Homo sapien
gaagcaggcctacattgactagggc

SEQ ID NO: 1712160 - DNA, 25 bp, Homo sapien
gagagcaagtgtcccaaccatgatc

SEQ ID NO: 1712161 - DNA, 25 bp, Homo sapien
tcccaaggccgaacgtgaccatgag

SEQ ID NO: 1712162 - DNA, 25 bp, Homo sapien
ggcttcccaaggccgaacgtgacca

SEQ ID NO: 1712163 - DNA, 25 bp, Homo sapien
caaggccgaacgtgaccatgagctc

SEQ ID NO: 1712164 - DNA, 25 bp, Homo sapien
cttcccaaggccgaacgtgaccatg

SEQ ID NO: 1712165 - DNA, 25 bp, Homo sapien
ttccaggcctctccgctacctccat

SEQ ID NO: 1712166 - DNA, 25 bp, Homo sapien
tcacttccaggcctctccgctacct

SEQ ID NO: 1712167 - DNA, 25 bp, Homo sapien
cacttccaggcctctccgctacctc

SEQ ID NO: 1712168 - DNA, 25 bp, Homo sapien
acttccaggcctctccgctacctcc

SEQ ID NO: 1712169 - DNA, 25 bp, Homo sapien
gatgaggtctgtaggtgacccaaac

SEQ ID NO: 1712170 - DNA, 25 bp, Homo sapien
gcagcattcctggatccggctggga

SEQ ID NO: 1712171 - DNA, 25 bp, Homo sapien
tgtaggtgacccaaactgtctcaga

SEQ ID NO: 1712172 - DNA, 25 bp, Homo sapien
gcattcctggatccggctgggatga

SEQ ID NO: 1712173 - DNA, 25 bp, Homo sapien
cgttctctctctcggctcacagctt

SEQ ID NO: 1712174 - DNA, 25 bp, Homo sapien
ccgttctctctctcggctcacagct

SEQ ID NO: 1712175 - DNA, 25 bp, Homo sapien
gagtgtgccggacagcagtgagaag

SEQ ID NO: 1712176 - DNA, 25 bp, Homo sapien
gtcaggggagtgtgccggacagcag

SEQ ID NO: 1712177 - DNA, 25 bp, Homo sapien
tggaagggaaacagatcttgtgcac

SEQ ID NO: 1712178 - DNA, 25 bp, Homo sapien
catcggggctgggaataggtgttgc

SEQ ID NO: 1712179 - DNA, 25 bp, Homo sapien
aacagatcttgtgcaccatcggggc

SEQ ID NO: 1712180 - DNA, 25 bp, Homo sapien
tcttgtgcaccatcggggctgggaa

SEQ ID NO: 1712181 - DNA, 25 bp, Homo sapien
ttgaaaggatcgcaggaagctgaga

SEQ ID NO: 1712182 - DNA, 25 bp, Homo sapien
ccatgagtgccgatcagtgctggca

SEQ ID NO: 1712183 - DNA, 25 bp, Homo sapien
ccaaggttgagaggaaggtccatga

SEQ ID NO: 1712184 - DNA, 25 bp, Homo sapien
aaaggatcgcaggaagctgagatgc

SEQ ID NO: 1712185 - DNA, 25 bp, Homo sapien
tgattaagttcgagtcttccttggg

SEQ ID NO: 1712186 - DNA, 25 bp, Homo sapien
gggcgggcctctctagtcagtctcc

SEQ ID NO: 1712187 - DNA, 25 bp, Homo sapien
actcctggaagaaaggcctgcggcc

SEQ ID NO: 1712188 - DNA, 25 bp, Homo sapien
taattgacattaagagcatctgggc

SEQ ID NO: 1712189 - DNA, 25 bp, Homo sapien
gctaactgtgtggaatgcacaaatg

SEQ ID NO: 1712190 - DNA, 25 bp, Homo sapien
caatatgaatatagggcaccctgtg

SEQ ID NO: 1712191 - DNA, 25 bp, Homo sapien
cttactatgtaccagctctgatgct

SEQ ID NO: 1712192 - DNA, 25 bp, Homo sapien
cccactggttatggggcttttgtgc

SEQ ID NO: 1712193 - DNA, 25 bp, Homo sapien
ccgatttttccaagtagttgcacca

SEQ ID NO: 1712194 - DNA, 25 bp, Homo sapien
tagatattgccagccgatttttcca

SEQ ID NO: 1712195 - DNA, 25 bp, Homo sapien
gtatgagaattctgtttgccccaca

SEQ ID NO: 1712196 - DNA, 25 bp, Homo sapien
tttgttcagctttgatagatattgc

SEQ ID NO: 1712197 - DNA, 25 bp, Homo sapien
gagtagacaaagagcctcctgcaag

SEQ ID NO: 1712198 - DNA, 25 bp, Homo sapien
tgcaagcctccttggcaagtccgag

SEQ ID NO: 1712199 - DNA, 25 bp, Homo sapien
gcaagtccgaggcaagtcctgtgcc

SEQ ID NO: 1712200 - DNA, 25 bp, Homo sapien
ggacagaggagtagacaaagagcct

SEQ ID NO: 1712201 - DNA, 25 bp, Homo sapien
tttaactttggattattctatcact

SEQ ID NO: 1712202 - DNA, 25 bp, Homo sapien
gtttgcagcatggattgaattaata

SEQ ID NO: 1712203 - DNA, 25 bp, Homo sapien
ctttagaagagttcaggtgttgctg

SEQ ID NO: 1712204 - DNA, 25 bp, Homo sapien
agttcaggtgttgctgcattttttc

SEQ ID NO: 1712205 - DNA, 25 bp, Homo sapien
tgatctccccatgcgtggagcgagg

SEQ ID NO: 1712206 - DNA, 25 bp, Homo sapien
gttggaggtagcgtagtaagaatac

SEQ ID NO: 1712207 - DNA, 25 bp, Homo sapien
gaatactggagttgcttaaacgcat

SEQ ID NO: 1712208 - DNA, 25 bp, Homo sapien
tgctcgaaagtcactaccctggata

SEQ ID NO: 1712209 - DNA, 25 bp, Homo sapien
gagttgcgcataccctctcaattat

SEQ ID NO: 1712210 - DNA, 25 bp, Homo sapien
caattattaaaggttgcagacggaa

SEQ ID NO: 1712211 - DNA, 25 bp, Homo sapien
gtaaatgggtgtcgcctttcctcca

SEQ ID NO: 1712212 - DNA, 25 bp, Homo sapien
gtcacccagcgcttcacgttaagag

SEQ ID NO: 1712213 - DNA, 25 bp, Homo sapien
cagaaaaaccgcgtctgcaaatgtt

SEQ ID NO: 1712214 - DNA, 25 bp, Homo sapien
tcgccattcctctccggcgggatga

SEQ ID NO: 1712215 - DNA, 25 bp, Homo sapien
tccggcgggatgaaccacccgaggc

SEQ ID NO: 1712216 - DNA, 25 bp, Homo sapien
taatggagccaattaattgccagaa

SEQ ID NO: 1712217 - DNA, 25 bp, Homo sapien
gctgaaaagaccgagcaaaatgcgc

SEQ ID NO: 1712218 - DNA, 25 bp, Homo sapien
cacggatgaaagctggcaatttgcg

SEQ ID NO: 1712219 - DNA, 25 bp, Homo sapien
gaagacgcggaaacagggctgaaaa

SEQ ID NO: 1712220 - DNA, 25 bp, Homo sapien
tccagagttcaggaggaagtcccca

SEQ ID NO: 1712221 - DNA, 25 bp, Homo sapien
gtgagctacagcacccaccatgaaa

SEQ ID NO: 1712222 - DNA, 25 bp, Homo sapien
agctacagcacccaccatgaaataa

SEQ ID NO: 1712223 - DNA, 25 bp, Homo sapien
tgagctacagcacccaccatgaaat

SEQ ID NO: 1712224 - DNA, 25 bp, Homo sapien
gctacagcacccaccatgaaataaa

SEQ ID NO: 1712225 - DNA, 25 bp, Homo sapien
tcccaactacttgggcaaggctgac

SEQ ID NO: 1712226 - DNA, 25 bp, Homo sapien
gaggactgcttaagcccggaggtca

SEQ ID NO: 1712227 - DNA, 25 bp, Homo sapien
caactacttgggcaaggctgacgtg

SEQ ID NO: 1712228 - DNA, 25 bp, Homo sapien
ggaggactgcttaagcccggaggtc

SEQ ID NO: 1712229 - DNA, 25 bp, Homo sapien
aagatagcgacattgcactgcagct

SEQ ID NO: 1712230 - DNA, 25 bp, Homo sapien
gcagtagaatcgcttcgggaagcgg

SEQ ID NO: 1712231 - DNA, 25 bp, Homo sapien
ccaggcagtagtggcacgcgtctgt

SEQ ID NO: 1712232 - DNA, 25 bp, Homo sapien
aaaagaaaacacaagctcaactgag

SEQ ID NO: 1712233 - DNA, 25 bp, Homo sapien
aatcaataaagccaaaagttggctt

SEQ ID NO: 1712234 - DNA, 25 bp, Homo sapien
gaaataagggcagaaattaatgtaa

SEQ ID NO: 1712235 - DNA, 25 bp, Homo sapien
tacccaaaagagagttggtgaagct

SEQ ID NO: 1712236 - DNA, 25 bp, Homo sapien
aaactacacaagcttggcaaggcag

SEQ ID NO: 1712237 - DNA, 25 bp, Homo sapien
tatctgtggacaggactatttctgc

SEQ ID NO: 1712238 - DNA, 25 bp, Homo sapien
gactacgaagggttgttatcatcat

SEQ ID NO: 1712239 - DNA, 25 bp, Homo sapien
tttatatcgataggaatcaggctga

SEQ ID NO: 1712240 - DNA, 25 bp, Homo sapien
ggaattccatggtatgaaagcaaaa

SEQ ID NO: 1712241 - DNA, 25 bp, Homo sapien
caggctgatttaaatggtctttatc

SEQ ID NO: 1712242 - DNA, 25 bp, Homo sapien
gcagataaacttgttaccagggaat

SEQ ID NO: 1712243 - DNA, 25 bp, Homo sapien
agattctgagtcctgaactgtccgt

SEQ ID NO: 1712244 - DNA, 25 bp, Homo sapien
gagtcctgaactgtccgtttgatca

SEQ ID NO: 1712245 - DNA, 25 bp, Homo sapien
ctgtccgtttgatcagagagaaatc

SEQ ID NO: 1712246 - DNA, 25 bp, Homo sapien
tgaactgtccgtttgatcagagaga

SEQ ID NO: 1712247 - DNA, 25 bp, Homo sapien
aagtatcatccactaagcagctggc

SEQ ID NO: 1712248 - DNA, 25 bp, Homo sapien
ctgccgcaataacctgtcactgtca

SEQ ID NO: 1712249 - DNA, 25 bp, Homo sapien
tttcttgggctacagctaaagtatc

SEQ ID NO: 1712250 - DNA, 25 bp, Homo sapien
ctgggacctagaggataagtaagat

SEQ ID NO: 1712251 - DNA, 25 bp, Homo sapien
tgagggaactgaagatttgctggct

SEQ ID NO: 1712252 - DNA, 25 bp, Homo sapien
tgagaggcatagtcaagtgagaggt

SEQ ID NO: 1712253 - DNA, 25 bp, Homo sapien
ctgagaggcatagtcaagtgagagg

SEQ ID NO: 1712254 - DNA, 25 bp, Homo sapien
tgtgagggaactgaagatttgctgg

SEQ ID NO: 1712255 - DNA, 25 bp, Homo sapien
gagcaataaaaggttcatggttccg

SEQ ID NO: 1712256 - DNA, 25 bp, Homo sapien
cccactttggaagcaagaacctttg

SEQ ID NO: 1712257 - DNA, 25 bp, Homo sapien
cgtgtgccatctacaagaagcgtca

SEQ ID NO: 1712258 - DNA, 25 bp, Homo sapien
tgtggattcacaacaaaacgtgtgc

SEQ ID NO: 1712259 - DNA, 25 bp, Homo sapien
tgtaaatgaagtactctccccaccc

SEQ ID NO: 1712260 - DNA, 25 bp, Homo sapien
ggctcattttactatactggctttg

SEQ ID NO: 1712261 - DNA, 25 bp, Homo sapien
ttgtagaggagcagagaatgagatt

SEQ ID NO: 1712262 - DNA, 25 bp, Homo sapien
tattaggcttttaccagcttgccct

SEQ ID NO: 1712263 - DNA, 25 bp, Homo sapien
tcccttctcattgggccgagtgaag

SEQ ID NO: 1712264 - DNA, 25 bp, Homo sapien
ggccgagtgaagttgtactctcttc

SEQ ID NO: 1712265 - DNA, 25 bp, Homo sapien
cagcactgtgcgaaatacagttgca

SEQ ID NO: 1712266 - DNA, 25 bp, Homo sapien
aatacagttgcactgatgccttcag

SEQ ID NO: 1712267 - DNA, 25 bp, Homo sapien
acatagttgatggaactctcaaggc

SEQ ID NO: 1712268 - DNA, 25 bp, Homo sapien
ccctgaggaagagaatgtaacaaaa

SEQ ID NO: 1712269 - DNA, 25 bp, Homo sapien
tattgatcacacatgcccctgagga

SEQ ID NO: 1712270 - DNA, 25 bp, Homo sapien
gaccctaaagtcaataacatagttg

SEQ ID NO: 1712271 - DNA, 25 bp, Homo sapien
gccatcaggacaattgatgataccg

SEQ ID NO: 1712272 - DNA, 25 bp, Homo sapien
gatctgggatagagatgccatcagg

SEQ ID NO: 1712273 - DNA, 25 bp, Homo sapien
cacaagtatctctaagatctgggat

SEQ ID NO: 1712274 - DNA, 25 bp, Homo sapien
tcagatcttgacatcggatagtgtt

SEQ ID NO: 1712275 - DNA, 25 bp, Homo sapien
tcaggaagcccaggtaataagagca

SEQ ID NO: 1712276 - DNA, 25 bp, Homo sapien
tcatcctggccttaatgcctagagc

SEQ ID NO: 1712277 - DNA, 25 bp, Homo sapien
ttggtgacaccaaaggacttactct

SEQ ID NO: 1712278 - DNA, 25 bp, Homo sapien
gggctttcatgcaacatgcagggaa

SEQ ID NO: 1712279 - DNA, 25 bp, Homo sapien
attactggagtgaaaaagactatga

SEQ ID NO: 1712280 - DNA, 25 bp, Homo sapien
ttatcattgatgaggttcagagaag

SEQ ID NO: 1712281 - DNA, 25 bp, Homo sapien
gcctaaatgcacatattactggagt

SEQ ID NO: 1712282 - DNA, 25 bp, Homo sapien
aatgtaggtgaacatgctttctgcc

SEQ ID NO: 1712283 - DNA, 25 bp, Homo sapien
gagctcttcgaggtagtgatcaaac

SEQ ID NO: 1712284 - DNA, 25 bp, Homo sapien
gcaccgtcattagacagttcatgga

SEQ ID NO: 1712285 - DNA, 25 bp, Homo sapien
tcatccgtcagcacaacaatgtggc

SEQ ID NO: 1712286 - DNA, 25 bp, Homo sapien
cattggtggagggtggtcttcatcc

SEQ ID NO: 1712287 - DNA, 25 bp, Homo sapien
tatcttacacagtacgagacaccag

SEQ ID NO: 1712288 - DNA, 25 bp, Homo sapien
tgaaaacatctacgccatgccagaa

SEQ ID NO: 1712289 - DNA, 25 bp, Homo sapien
cattggttctaggatcaagctgcta

SEQ ID NO: 1712290 - DNA, 25 bp, Homo sapien
gcataaaggctagacctgcgtcact

SEQ ID NO: 1712291 - DNA, 25 bp, Homo sapien
catgagccacgacgcccagctaatt

SEQ ID NO: 1712292 - DNA, 25 bp, Homo sapien
atgggccaccatgcccggttaatct

SEQ ID NO: 1712293 - DNA, 25 bp, Homo sapien
gcctctcagcctcctgagtagctgg

SEQ ID NO: 1712294 - DNA, 25 bp, Homo sapien
tgggccaccatgcccggttaatctt

SEQ ID NO: 1712295 - DNA, 25 bp, Homo sapien
tgggtacaacattaaacctagaagc

SEQ ID NO: 1712296 - DNA, 25 bp, Homo sapien
tagggttagccatggagtaaagacc

SEQ ID NO: 1712297 - DNA, 25 bp, Homo sapien
gaaatacaacatctctgcatagcct

SEQ ID NO: 1712298 - DNA, 25 bp, Homo sapien
gaaagagctgccacaaatagagctt

SEQ ID NO: 1712299 - DNA, 25 bp, Homo sapien
caatgcgaatgttttttaggccccg

SEQ ID NO: 1712300 - DNA, 25 bp, Homo sapien
caattccaatgcgaatgttttttag

SEQ ID NO: 1712301 - DNA, 25 bp, Homo sapien
ctgtagagcttggagctataaagaa

SEQ ID NO: 1712302 - DNA, 25 bp, Homo sapien
tatttgaagaatctgtagagcttgg

SEQ ID NO: 1712303 - DNA, 25 bp, Homo sapien
gagggatttgcttcgaacacactgg

SEQ ID NO: 1712304 - DNA, 25 bp, Homo sapien
gcatttagccggtcaagttcatcca

SEQ ID NO: 1712305 - DNA, 25 bp, Homo sapien
tccagcagctaccagattcgtgagg

SEQ ID NO: 1712306 - DNA, 25 bp, Homo sapien
ttatagatgacttcagaccggccgc

SEQ ID NO: 1712307 - DNA, 25 bp, Homo sapien
caaatttttcaagttaccagggctg

SEQ ID NO: 1712308 - DNA, 25 bp, Homo sapien
taagcacgaggcaacaggagtcttg

SEQ ID NO: 1712309 - DNA, 25 bp, Homo sapien
tattcctacccaatgtgtgagcagc

SEQ ID NO: 1712310 - DNA, 25 bp, Homo sapien
gagaccctagttctttccagatgca

SEQ ID NO: 1712311 - DNA, 25 bp, Homo sapien
aaaatgtaatgttctcctgcactag

SEQ ID NO: 1712312 - DNA, 25 bp, Homo sapien
gaatacattactacaaacccttgac

SEQ ID NO: 1712313 - DNA, 25 bp, Homo sapien
ttgcaaagtgatggcaagaagtggc

SEQ ID NO: 1712314 - DNA, 25 bp, Homo sapien
tgcactagtgatcccacccagaaca

SEQ ID NO: 1712315 - DNA, 25 bp, Homo sapien
cagatactgcatttgatcttagcaa

SEQ ID NO: 1712316 - DNA, 25 bp, Homo sapien
atacgtggtgtgatttattaaactg

SEQ ID NO: 1712317 - DNA, 25 bp, Homo sapien
ggaaatacgtggtgtgatttattaa

SEQ ID NO: 1712318 - DNA, 25 bp, Homo sapien
tcttagcaaaaaggctgagagggga

SEQ ID NO: 1712319 - DNA, 25 bp, Homo sapien
gagagaccctctgaattttagcaca

SEQ ID NO: 1712320 - DNA, 25 bp, Homo sapien
tcctgggaacctaacgaggagagcc

SEQ ID NO: 1712321 - DNA, 25 bp, Homo sapien
aagacagatcttgccgtggactagc

SEQ ID NO: 1712322 - DNA, 25 bp, Homo sapien
gcaacttaggcggattgggtctctc

SEQ ID NO: 1712323 - DNA, 25 bp, Homo sapien
tatatccttggtggttccgggtgag

SEQ ID NO: 1712324 - DNA, 25 bp, Homo sapien
ggagggatggccatacagagtaatc

SEQ ID NO: 1712325 - DNA, 25 bp, Homo sapien
tattagctgacttcctagtggtacc

SEQ ID NO: 1712326 - DNA, 25 bp, Homo sapien
tccgggtgagtctatctggctgctt

SEQ ID NO: 1712327 - DNA, 25 bp, Homo sapien
gaatatgtgctcaaccctacttgaa

SEQ ID NO: 1712328 - DNA, 25 bp, Homo sapien
aatatgtgctcaaccctacttgaaa

SEQ ID NO: 1712329 - DNA, 25 bp, Homo sapien
aaaggatctgaataggaattcataa

SEQ ID NO: 1712330 - DNA, 25 bp, Homo sapien
ggatccctaccttacagtatatgca

SEQ ID NO: 1712331 - DNA, 25 bp, Homo sapien
tggagagggcctaatccacatgtca

SEQ ID NO: 1712332 - DNA, 25 bp, Homo sapien
tacagggcaatatctttatgacctc

SEQ ID NO: 1712333 - DNA, 25 bp, Homo sapien
ttcatctttggtagagtaaacctca

SEQ ID NO: 1712334 - DNA, 25 bp, Homo sapien
taaggccctgatgctatggttaagg

SEQ ID NO: 1712335 - DNA, 25 bp, Homo sapien
tatgtcgtcctgtataaccttaggc

SEQ ID NO: 1712336 - DNA, 25 bp, Homo sapien
taaatttactgctctaggttaagcc

SEQ ID NO: 1712337 - DNA, 25 bp, Homo sapien
tctttgatgtgtacccaagggtcat

SEQ ID NO: 1712338 - DNA, 25 bp, Homo sapien
tggagtagaatagtggacatcaaag

SEQ ID NO: 1712339 - DNA, 25 bp, Homo sapien
gagtagaatagtggacatcaaaggc

SEQ ID NO: 1712340 - DNA, 25 bp, Homo sapien
tagaatagtggacatcaaaggctag

SEQ ID NO: 1712341 - DNA, 25 bp, Homo sapien
aagtggagtagaatagtggacatca

SEQ ID NO: 1712342 - DNA, 25 bp, Homo sapien
tgcaccatagctcataactcctgag

SEQ ID NO: 1712343 - DNA, 25 bp, Homo sapien
atgcaccatagctcataactcctga

SEQ ID NO: 1712344 - DNA, 25 bp, Homo sapien
aatgcaccatagctcataactcctg

SEQ ID NO: 1712345 - DNA, 25 bp, Homo sapien
gcaccatagctcataactcctgagc

SEQ ID NO: 1712346 - DNA, 25 bp, Homo sapien
cctatgttccaatttggctgaggag

SEQ ID NO: 1712347 - DNA, 25 bp, Homo sapien
ctcttgatgacattgtattatctcc

SEQ ID NO: 1712348 - DNA, 25 bp, Homo sapien
actcagcctatgttccaatttggct

SEQ ID NO: 1712349 - DNA, 25 bp, Homo sapien
tcttgatgacattgtattatctcct

SEQ ID NO: 1712350 - DNA, 25 bp, Homo sapien
caactcctttataacctcatgggag

SEQ ID NO: 1712351 - DNA, 25 bp, Homo sapien
gagccatagcgccaggcatgctact

SEQ ID NO: 1712352 - DNA, 25 bp, Homo sapien
cagcctcgaacccttggggtcaagg

SEQ ID NO: 1712353 - DNA, 25 bp, Homo sapien
gcatgtaccaacaggccaagctaat

SEQ ID NO: 1712354 - DNA, 25 bp, Homo sapien
gacgtatggctacaaacgcagcgag

SEQ ID NO: 1712355 - DNA, 25 bp, Homo sapien
taagagcatcgcgtttacaaacagg

SEQ ID NO: 1712356 - DNA, 25 bp, Homo sapien
gaatcacatgattggacgggctccc

SEQ ID NO: 1712357 - DNA, 25 bp, Homo sapien
caaacactaataggagccgttggcc

SEQ ID NO: 1712358 - DNA, 25 bp, Homo sapien
caagactaggaaaccctccgatggg

SEQ ID NO: 1712359 - DNA, 25 bp, Homo sapien
tggaatacaactcggctatcggctc

SEQ ID NO: 1712360 - DNA, 25 bp, Homo sapien
caccgccccgtgctgaacgtcacaa

SEQ ID NO: 1712361 - DNA, 25 bp, Homo sapien
ctccaagactaggaaaccctccgat

SEQ ID NO: 1712362 - DNA, 25 bp, Homo sapien
tgcccaggagtaagttctaagacca

SEQ ID NO: 1712363 - DNA, 25 bp, Homo sapien
tacatgaaagtaaggtgactacggg

SEQ ID NO: 1712364 - DNA, 25 bp, Homo sapien
taatatgaactgaaaggtccggtct

SEQ ID NO: 1712365 - DNA, 25 bp, Homo sapien
tgagaagcttcccaattaaatgagg

SEQ ID NO: 1712366 - DNA, 25 bp, Homo sapien
agctctcggactgcatcagctgcat

SEQ ID NO: 1712367 - DNA, 25 bp, Homo sapien
tagctctcggactgcatcagctgca

SEQ ID NO: 1712368 - DNA, 25 bp, Homo sapien
gtaggcagaggttacaacgagccaa

SEQ ID NO: 1712369 - DNA, 25 bp, Homo sapien
gataatcatctcgagggcgacgacc

SEQ ID NO: 1712370 - DNA, 25 bp, Homo sapien
gacagttccactcttacacggcagc

SEQ ID NO: 1712371 - DNA, 25 bp, Homo sapien
ttttttcaccattcgacagttccac

SEQ ID NO: 1712372 - DNA, 25 bp, Homo sapien
tggaggactcctcctacgataatca

SEQ ID NO: 1712373 - DNA, 25 bp, Homo sapien
tactgcctggtccaagaatgatgcc

SEQ ID NO: 1712374 - DNA, 25 bp, Homo sapien
gagaaatacctgctcctactagcta

SEQ ID NO: 1712375 - DNA, 25 bp, Homo sapien
gttagcacccagacaatactgcctg

SEQ ID NO: 1712376 - DNA, 25 bp, Homo sapien
tctgaggagatgtggagttagcacc

SEQ ID NO: 1712377 - DNA, 25 bp, Homo sapien
tggtgagaagagacatgatggtgac

SEQ ID NO: 1712378 - DNA, 25 bp, Homo sapien
gggtggtgagaagagacatgatggt

SEQ ID NO: 1712379 - DNA, 25 bp, Homo sapien
tcagagggtggtgagaagagacatg

SEQ ID NO: 1712380 - DNA, 25 bp, Homo sapien
ggtgagaagagacatgatggtgact

SEQ ID NO: 1712381 - DNA, 25 bp, Homo sapien
agggctagttgactggctaatgcag

SEQ ID NO: 1712382 - DNA, 25 bp, Homo sapien
tgaaagggctagttgactggctaat

SEQ ID NO: 1712383 - DNA, 25 bp, Homo sapien
ctgaaagggctagttgactggctaa

SEQ ID NO: 1712384 - DNA, 25 bp, Homo sapien
aaagggctagttgactggctaatgc

SEQ ID NO: 1712385 - DNA, 25 bp, Homo sapien
aaccaaagggcggtgcaacctgacg

SEQ ID NO: 1712386 - DNA, 25 bp, Homo sapien
aacgacaccagccaagctgaatggg

SEQ ID NO: 1712387 - DNA, 25 bp, Homo sapien
gaaaacagcatgctcgggaaccaaa

SEQ ID NO: 1712388 - DNA, 25 bp, Homo sapien
tgggtcatgtgaaacgacaccagcc

SEQ ID NO: 1712389 - DNA, 25 bp, Homo sapien
tcctgcttttttgttagccgaaggc

SEQ ID NO: 1712390 - DNA, 25 bp, Homo sapien
ctgctgctgtagttgttgtgaagac

SEQ ID NO: 1712391 - DNA, 25 bp, Homo sapien
tggctgctgccgatttggttaaggt

SEQ ID NO: 1712392 - DNA, 25 bp, Homo sapien
aaaggttttgccagatgttgcgttg

SEQ ID NO: 1712393 - DNA, 25 bp, Homo sapien
tcaacaagctagaaatggtgaggtg

SEQ ID NO: 1712394 - DNA, 25 bp, Homo sapien
acaagctagaaatggtgaggtgagg

SEQ ID NO: 1712395 - DNA, 25 bp, Homo sapien
caagctagaaatggtgaggtgaggc

SEQ ID NO: 1712396 - DNA, 25 bp, Homo sapien
aagctagaaatggtgaggtgaggct

SEQ ID NO: 1712397 - DNA, 25 bp, Homo sapien
tatttatggcgtgaggcatttccca

SEQ ID NO: 1712398 - DNA, 25 bp, Homo sapien
ggcccagtgaatgtgccgaagaact

SEQ ID NO: 1712399 - DNA, 25 bp, Homo sapien
gaaaagcaggtattccaaccatgga

SEQ ID NO: 1712400 - DNA, 25 bp, Homo sapien
cgcggtaggtgtaaatattgatgcc

SEQ ID NO: 1712401 - DNA, 25 bp, Homo sapien
ctgctccggctgcgagagaagcttc

SEQ ID NO: 1712402 - DNA, 25 bp, Homo sapien
agagaagcttctccttcttggagat

SEQ ID NO: 1712403 - DNA, 25 bp, Homo sapien
tgcgagagaagcttctccttcttgg

SEQ ID NO: 1712404 - DNA, 25 bp, Homo sapien
cgagagaagcttctccttcttggag

SEQ ID NO: 1712405 - DNA, 25 bp, Homo sapien
aaaaacattaggaccaatgaggtat

SEQ ID NO: 1712406 - DNA, 25 bp, Homo sapien
cattaggaccaatgaggtatgataa

SEQ ID NO: 1712407 - DNA, 25 bp, Homo sapien
taggaccaatgaggtatgataaaat

SEQ ID NO: 1712408 - DNA, 25 bp, Homo sapien
aaacattaggaccaatgaggtatga

SEQ ID NO: 1712409 - DNA, 25 bp, Homo sapien
tgtgatttctctcccgagacagcga

SEQ ID NO: 1712410 - DNA, 25 bp, Homo sapien
cccgagacagcgatctctctcttct

SEQ ID NO: 1712411 - DNA, 25 bp, Homo sapien
acctagagaaggatcgggacggctt

SEQ ID NO: 1712412 - DNA, 25 bp, Homo sapien
ttctctcccgagacagcgatctctc

SEQ ID NO: 1712413 - DNA, 25 bp, Homo sapien
acattacatctgtaacttggtgaca

SEQ ID NO: 1712414 - DNA, 25 bp, Homo sapien
gacaggccttagcatactatgtatg

SEQ ID NO: 1712415 - DNA, 25 bp, Homo sapien
cactttagtgacatatcgaaataga

SEQ ID NO: 1712416 - DNA, 25 bp, Homo sapien
aagtcttaaatacaagttatcaaag

SEQ ID NO: 1712417 - DNA, 25 bp, Homo sapien
cagtctgtgcataactaaaagttca

SEQ ID NO: 1712418 - DNA, 25 bp, Homo sapien
ttattatcagtctgtgcataactaa

SEQ ID NO: 1712419 - DNA, 25 bp, Homo sapien
ttatcagtctgtgcataactaaaag

SEQ ID NO: 1712420 - DNA, 25 bp, Homo sapien
tcagtctgtgcataactaaaagttc

SEQ ID NO: 1712421 - DNA, 25 bp, Homo sapien
gttttccctgatggcctgtgtttca

SEQ ID NO: 1712422 - DNA, 25 bp, Homo sapien
aaacctctaatttaatagtgcagca

SEQ ID NO: 1712423 - DNA, 25 bp, Homo sapien
taaagactgcttgttcaactatagc

SEQ ID NO: 1712424 - DNA, 25 bp, Homo sapien
cagcctatatcccagctatggaaaa

SEQ ID NO: 1712425 - DNA, 25 bp, Homo sapien
ggcttccaataggaatgttatacct

SEQ ID NO: 1712426 - DNA, 25 bp, Homo sapien
acagatttgagtttgcaaggaaaaa

SEQ ID NO: 1712427 - DNA, 25 bp, Homo sapien
tggacttggtaccaagctcacagat

SEQ ID NO: 1712428 - DNA, 25 bp, Homo sapien
taggaatgttatacctggacttggt

SEQ ID NO: 1712429 - DNA, 25 bp, Homo sapien
gtgtaaccaactgcttcccatggga

SEQ ID NO: 1712430 - DNA, 25 bp, Homo sapien
ttctaagaggaaggttatgcatgcc

SEQ ID NO: 1712431 - DNA, 25 bp, Homo sapien
tcatgatggatcagcttagaattcc

SEQ ID NO: 1712432 - DNA, 25 bp, Homo sapien
taaatattatggaccctgaactggc

SEQ ID NO: 1712433 - DNA, 25 bp, Homo sapien
taattgacatattgcatggcttccg

SEQ ID NO: 1712434 - DNA, 25 bp, Homo sapien
taaagtaactgccaactgggactgt

SEQ ID NO: 1712435 - DNA, 25 bp, Homo sapien
caaccctgaatatggacaagaccgg

SEQ ID NO: 1712436 - DNA, 25 bp, Homo sapien
caagaccggttagtgtgacctgtta

SEQ ID NO: 1712437 - DNA, 25 bp, Homo sapien
tggaggtcagaagcaacccacaatg

SEQ ID NO: 1712438 - DNA, 25 bp, Homo sapien
tgaaaaactaagtcaatgagcctgg

SEQ ID NO: 1712439 - DNA, 25 bp, Homo sapien
ctcaaatggtagacacagggtacct

SEQ ID NO: 1712440 - DNA, 25 bp, Homo sapien
tgtcatggacgctgacgggatcacg

SEQ ID NO: 1712441 - DNA, 25 bp, Homo sapien
aattatcttcaggtacccgatgaat

SEQ ID NO: 1712442 - DNA, 25 bp, Homo sapien
ttatcttcaggtacccgatgaatcc

SEQ ID NO: 1712443 - DNA, 25 bp, Homo sapien
gaattatcttcaggtacccgatgaa

SEQ ID NO: 1712444 - DNA, 25 bp, Homo sapien
atcttcaggtacccgatgaatcccc

SEQ ID NO: 1712445 - DNA, 25 bp, Homo sapien
cacttgctcaagacacatgtactaa

SEQ ID NO: 1712446 - DNA, 25 bp, Homo sapien
caggacattccaaatgattagggag

SEQ ID NO: 1712447 - DNA, 25 bp, Homo sapien
tacaatgccttacatcagaaatgag

SEQ ID NO: 1712448 - DNA, 25 bp, Homo sapien
gggtaccttcatcaaatcgacagag

SEQ ID NO: 1712449 - DNA, 25 bp, Homo sapien
tcatctggctgttcggtgacaccaa

SEQ ID NO: 1712450 - DNA, 25 bp, Homo sapien
ggttgaagactgcagcctgagacac

SEQ ID NO: 1712451 - DNA, 25 bp, Homo sapien
caaggtagcttatttgggccaaggt

SEQ ID NO: 1712452 - DNA, 25 bp, Homo sapien
ggagataattccaacgtcacaaggt

SEQ ID NO: 1712453 - DNA, 25 bp, Homo sapien
caatcccagcggagttcaggagttt

SEQ ID NO: 1712454 - DNA, 25 bp, Homo sapien
tcctcaacgagttagcctgggcggg

SEQ ID NO: 1712455 - DNA, 25 bp, Homo sapien
taagggtcttgggaatttcagaaca

SEQ ID NO: 1712456 - DNA, 25 bp, Homo sapien
caggcttcgttccatttatagggca

SEQ ID NO: 1712457 - DNA, 25 bp, Homo sapien
tctttgtcccaacaagcctgaaagg

SEQ ID NO: 1712458 - DNA, 25 bp, Homo sapien
ccaggaaggcgcatacagatgtgtg

SEQ ID NO: 1712459 - DNA, 25 bp, Homo sapien
tgaggttcccgaaggagtcaagccc

SEQ ID NO: 1712460 - DNA, 25 bp, Homo sapien
tgcaactctgagaaagcggagcctc

SEQ ID NO: 1712461 - DNA, 25 bp, Homo sapien
ggctaccaggagatagggacgccat

SEQ ID NO: 1712462 - DNA, 25 bp, Homo sapien
cgcctcagggctaccaggagatagg

SEQ ID NO: 1712463 - DNA, 25 bp, Homo sapien
ctcgcctcagggctaccaggagata

SEQ ID NO: 1712464 - DNA, 25 bp, Homo sapien
ctcagggctaccaggagatagggac

SEQ ID NO: 1712465 - DNA, 25 bp, Homo sapien
tgctcgtaggcaacagatagcgcat

SEQ ID NO: 1712466 - DNA, 25 bp, Homo sapien
tgtggtaccactccaagcaagtact

SEQ ID NO: 1712467 - DNA, 25 bp, Homo sapien
tctagccgctcagagctctgtggta

SEQ ID NO: 1712468 - DNA, 25 bp, Homo sapien
gaaatgtagctgttccctgtgccct

SEQ ID NO: 1712469 - DNA, 25 bp, Homo sapien
gcagtgggtctcagtcttatgcccc

SEQ ID NO: 1712470 - DNA, 25 bp, Homo sapien
tagcgtgccgttcagaatgaagatc

SEQ ID NO: 1712471 - DNA, 25 bp, Homo sapien
cataggaccctctagacatgagacc

SEQ ID NO: 1712472 - DNA, 25 bp, Homo sapien
aagatctctgggtatccataggacc

SEQ ID NO: 1712473 - DNA, 25 bp, Homo sapien
tgcctggcattgaactgcaccctgt

SEQ ID NO: 1712474 - DNA, 25 bp, Homo sapien
tgacccttgtcagcaggtcgacaaa

SEQ ID NO: 1712475 - DNA, 25 bp, Homo sapien
gattctgtgcactttgtgcctggca

SEQ ID NO: 1712476 - DNA, 25 bp, Homo sapien
ggatgtcgccctcaagtcatttaca

SEQ ID NO: 1712477 - DNA, 25 bp, Homo sapien
agcaggtttgccagcatgggtttcc

SEQ ID NO: 1712478 - DNA, 25 bp, Homo sapien
cctccaggaattcctgatattctac

SEQ ID NO: 1712479 - DNA, 25 bp, Homo sapien
cctgcttggaagcaggtttgccagc

SEQ ID NO: 1712480 - DNA, 25 bp, Homo sapien
gtttctggattgtaagtcctccagg

SEQ ID NO: 1712481 - DNA, 25 bp, Homo sapien
gagacaaagtgtcttaggcagagac

SEQ ID NO: 1712482 - DNA, 25 bp, Homo sapien
aagcggtaggttccatgtgtgaccc

SEQ ID NO: 1712483 - DNA, 25 bp, Homo sapien
ggtgactgagtgtttacccgttaga

SEQ ID NO: 1712484 - DNA, 25 bp, Homo sapien
ccgcgcccagcagggaatgaatatt

SEQ ID NO: 1712485 - DNA, 25 bp, Homo sapien
ctgtgtgtgtggctgaataaagatc

SEQ ID NO: 1712486 - DNA, 25 bp, Homo sapien
taaagatcagggaagtagcggtctc

SEQ ID NO: 1712487 - DNA, 25 bp, Homo sapien
gatcagggaagtagcggtctctggg

SEQ ID NO: 1712488 - DNA, 25 bp, Homo sapien
tgtgtgtgtggctgaataaagatca

SEQ ID NO: 1712489 - DNA, 25 bp, Homo sapien
tgtgtggtggggctgaagtttatgc

SEQ ID NO: 1712490 - DNA, 25 bp, Homo sapien
agaagatccatccatgtgtggtggg

SEQ ID NO: 1712491 - DNA, 25 bp, Homo sapien
accaagagaagatccatccatgtgt

SEQ ID NO: 1712492 - DNA, 25 bp, Homo sapien
tgtggtggggctgaagtttatgcaa

SEQ ID NO: 1712493 - DNA, 25 bp, Homo sapien
ccgtggaaatctgaattgggagccc

SEQ ID NO: 1712494 - DNA, 25 bp, Homo sapien
ctagatttcagctgatggggccgtg

SEQ ID NO: 1712495 - DNA, 25 bp, Homo sapien
gggccgtggaaatctgaattgggag

SEQ ID NO: 1712496 - DNA, 25 bp, Homo sapien
tgatggggccgtggaaatctgaatt

SEQ ID NO: 1712497 - DNA, 25 bp, Homo sapien
ggtgaccagatccagttaatgaaag

SEQ ID NO: 1712498 - DNA, 25 bp, Homo sapien
catccacctacatcacgaagagtca

SEQ ID NO: 1712499 - DNA, 25 bp, Homo sapien
tatatctatatacaggctcatgtgg

SEQ ID NO: 1712500 - DNA, 25 bp, Homo sapien
cgaagagtcactcccattcagaatg

SEQ ID NO: 1712501 - DNA, 25 bp, Homo sapien
tcccgaaacatctcacggccagacg

SEQ ID NO: 1712502 - DNA, 25 bp, Homo sapien
agagaccccggctcccgaaacatct

SEQ ID NO: 1712503 - DNA, 25 bp, Homo sapien
ctgcagcggagagaccccggctccc

SEQ ID NO: 1712504 - DNA, 25 bp, Homo sapien
ccggctcccgaaacatctcacggcc

SEQ ID NO: 1712505 - DNA, 25 bp, Homo sapien
acttgtgaactgtggcacatcatct

SEQ ID NO: 1712506 - DNA, 25 bp, Homo sapien
tgccagttttcctgttcgtcgattc

SEQ ID NO: 1712507 - DNA, 25 bp, Homo sapien
gcctttttgccgaggccaactagca

SEQ ID NO: 1712508 - DNA, 25 bp, Homo sapien
gctttaggtcatcgtattcatagag

SEQ ID NO: 1712509 - DNA, 25 bp, Homo sapien
gcaaacaggactcctttctgccagg

SEQ ID NO: 1712510 - DNA, 25 bp, Homo sapien
caagacctgggtctgatatgaaact

SEQ ID NO: 1712511 - DNA, 25 bp, Homo sapien
aatctggttggcatcatctcgctgg

SEQ ID NO: 1712512 - DNA, 25 bp, Homo sapien
ttaatgggcaaactgagatttgcag

SEQ ID NO: 1712513 - DNA, 25 bp, Homo sapien
gcatcatctcgctggctggcgtctc

SEQ ID NO: 1712514 - DNA, 25 bp, Homo sapien
tctatgacacctgttaaggtggtgg

SEQ ID NO: 1712515 - DNA, 25 bp, Homo sapien
aatgtgtgcacgtaacagagcgcat

SEQ ID NO: 1712516 - DNA, 25 bp, Homo sapien
gacacctgttaaggtggtggcattg

SEQ ID NO: 1712517 - DNA, 25 bp, Homo sapien
tggcctcgaagagcttgttccagag

SEQ ID NO: 1712518 - DNA, 25 bp, Homo sapien
gaatgccgcagatgtacatgctccc

SEQ ID NO: 1712519 - DNA, 25 bp, Homo sapien
tgccgcagatgtacatgctcccgca

SEQ ID NO: 1712520 - DNA, 25 bp, Homo sapien
aatgccgcagatgtacatgctcccg

SEQ ID NO: 1712521 - DNA, 25 bp, Homo sapien
cgcagatgtacatgctcccgcagat

SEQ ID NO: 1712522 - DNA, 25 bp, Homo sapien
taagcattgtcttgactgaaacgaa

SEQ ID NO: 1712523 - DNA, 25 bp, Homo sapien
ctaagcattgtcttgactgaaacga

SEQ ID NO: 1712524 - DNA, 25 bp, Homo sapien
gcattgtcttgactgaaacgaagta

SEQ ID NO: 1712525 - DNA, 25 bp, Homo sapien
aagcattgtcttgactgaaacgaag

SEQ ID NO: 1712526 - DNA, 25 bp, Homo sapien
tggggtctttagaggtctcctgtct

SEQ ID NO: 1712527 - DNA, 25 bp, Homo sapien
ctggggtctttagaggtctcctgtc

SEQ ID NO: 1712528 - DNA, 25 bp, Homo sapien
aaagaaatgactatagttggaacac

SEQ ID NO: 1712529 - DNA, 25 bp, Homo sapien
tgactatagttggaacacaggactt

SEQ ID NO: 1712530 - DNA, 25 bp, Homo sapien
tatagttggaacacaggacttttgc

SEQ ID NO: 1712531 - DNA, 25 bp, Homo sapien
gaacacaggacttttgcctcctgcc

SEQ ID NO: 1712532 - DNA, 25 bp, Homo sapien
cacatagcccgtatacactgctggg

SEQ ID NO: 1712533 - DNA, 25 bp, Homo sapien
ttgacgagtgagttgtctgtctcct

SEQ ID NO: 1712534 - DNA, 25 bp, Homo sapien
ggatttgacgagtgagttgtctgtc

SEQ ID NO: 1712535 - DNA, 25 bp, Homo sapien
tgtctcctgaatactccccacatag

SEQ ID NO: 1712536 - DNA, 25 bp, Homo sapien
cagaagaaatccctgtggttgcagc

SEQ ID NO: 1712537 - DNA, 25 bp, Homo sapien
ctgaacagaagaaatccctgtggtt

SEQ ID NO: 1712538 - DNA, 25 bp, Homo sapien
gaacagaagaaatccctgtggttgc

SEQ ID NO: 1712539 - DNA, 25 bp, Homo sapien
gaagaaatccctgtggttgcagcag

SEQ ID NO: 1712540 - DNA, 25 bp, Homo sapien
ggcaggcaaggatttacccaatgca

SEQ ID NO: 1712541 - DNA, 25 bp, Homo sapien
ctggcaggcaaggatttacccaatg

SEQ ID NO: 1712542 - DNA, 25 bp, Homo sapien
tggcaggcaaggatttacccaatgc

SEQ ID NO: 1712543 - DNA, 25 bp, Homo sapien
gcaggcaaggatttacccaatgcag

SEQ ID NO: 1712544 - DNA, 25 bp, Homo sapien
tcagcgcggccctgatatacaaccg

SEQ ID NO: 1712545 - DNA, 25 bp, Homo sapien
caaggaactgacttcggcagctgct

SEQ ID NO: 1712546 - DNA, 25 bp, Homo sapien
gctccacaaggaactgacttcggca

SEQ ID NO: 1712547 - DNA, 25 bp, Homo sapien
ctcagctggcgcagctcagcgcggc

SEQ ID NO: 1712548 - DNA, 25 bp, Homo sapien
cctcggtgcctcggcgaatccgcgc

SEQ ID NO: 1712549 - DNA, 25 bp, Homo sapien
ggtgcctcggcgaatccgcgcccag

SEQ ID NO: 1712550 - DNA, 25 bp, Homo sapien
cggtgcctcggcgaatccgcgccca

SEQ ID NO: 1712551 - DNA, 25 bp, Homo sapien
tgcctcggcgaatccgcgcccagct

SEQ ID NO: 1712552 - DNA, 25 bp, Homo sapien
cgcagggacacacgcgggcacgctt

SEQ ID NO: 1712553 - DNA, 25 bp, Homo sapien
gcgaacacgcatcctcgcggacacg

SEQ ID NO: 1712554 - DNA, 25 bp, Homo sapien
gggcacgcttggctcggctctgggc

SEQ ID NO: 1712555 - DNA, 25 bp, Homo sapien
tcccctgttgtctgccgccgctctc

SEQ ID NO: 1712556 - DNA, 25 bp, Homo sapien
gccgcagaaacacctgtgaacgcag

SEQ ID NO: 1712557 - DNA, 25 bp, Homo sapien
cagaaacacctgtgaacgcagcaca

SEQ ID NO: 1712558 - DNA, 25 bp, Homo sapien
gaaacacctgtgaacgcagcacaca

SEQ ID NO: 1712559 - DNA, 25 bp, Homo sapien
ctgccgcagaaacacctgtgaacgc

SEQ ID NO: 1712560 - DNA, 25 bp, Homo sapien
cgtgtgcgcaagccgagcgcgcacc

SEQ ID NO: 1712561 - DNA, 25 bp, Homo sapien
caagccgagcgcgcaccgacccacg

SEQ ID NO: 1712562 - DNA, 25 bp, Homo sapien
tgtgcgcaagccgagcgcgcaccga

SEQ ID NO: 1712563 - DNA, 25 bp, Homo sapien
agccgagcgcgcaccgacccacgcc

SEQ ID NO: 1712564 - DNA, 25 bp, Homo sapien
ccctccagggacacggacttcatcc

SEQ ID NO: 1712565 - DNA, 25 bp, Homo sapien
acgccgcgagcaaactgcgcctggg

SEQ ID NO: 1712566 - DNA, 25 bp, Homo sapien
tccccacgccgcgagcaaactgcgc

SEQ ID NO: 1712567 - DNA, 25 bp, Homo sapien
agggacacggacttcatccccacgc

SEQ ID NO: 1712568 - DNA, 25 bp, Homo sapien
actccgcgggaaagcctgtgtgcta

SEQ ID NO: 1712569 - DNA, 25 bp, Homo sapien
tactgttgaacctaaggagtgctcc

SEQ ID NO: 1712570 - DNA, 25 bp, Homo sapien
gatctcggatgagcccaggagtagc

SEQ ID NO: 1712571 - DNA, 25 bp, Homo sapien
gcctccaggaaatcacgcgcggagt

SEQ ID NO: 1712572 - DNA, 25 bp, Homo sapien
gaggtttcttaaccagagaggccca

SEQ ID NO: 1712573 - DNA, 25 bp, Homo sapien
gagaggcccatcacaatcacttggg

SEQ ID NO: 1712574 - DNA, 25 bp, Homo sapien
ctccctctctaattttgaggtttct

SEQ ID NO: 1712575 - DNA, 25 bp, Homo sapien
gctgtagtattgaaccccactccct

SEQ ID NO: 1712576 - DNA, 25 bp, Homo sapien
ctagggacaagtcccaacttgcagt

SEQ ID NO: 1712577 - DNA, 25 bp, Homo sapien
tagggacaagtcccaacttgcagtt

SEQ ID NO: 1712578 - DNA, 25 bp, Homo sapien
agggacaagtcccaacttgcagttt

SEQ ID NO: 1712579 - DNA, 25 bp, Homo sapien
agtgactgcacgaccttggcagcaa

SEQ ID NO: 1712580 - DNA, 25 bp, Homo sapien
tgagtgactgcacgaccttggcagc

SEQ ID NO: 1712581 - DNA, 25 bp, Homo sapien
tgactgcacgaccttggcagcaact

SEQ ID NO: 1712582 - DNA, 25 bp, Homo sapien
actgcacgaccttggcagcaactgg

SEQ ID NO: 1712583 - DNA, 25 bp, Homo sapien
taatgtcaacaaaggcaagtctatt

SEQ ID NO: 1712584 - DNA, 25 bp, Homo sapien
aatgtcaacaaaggcaagtctattg

SEQ ID NO: 1712585 - DNA, 25 bp, Homo sapien
aggcaagtctattgcaagagcaagg

SEQ ID NO: 1712586 - DNA, 25 bp, Homo sapien
cccccaccagcagagctcagccagc

SEQ ID NO: 1712587 - DNA, 25 bp, Homo sapien
cagccagcctggcacaccaaggtca

SEQ ID NO: 1712588 - DNA, 25 bp, Homo sapien
cccaccagcagagctcagccagcct

SEQ ID NO: 1712589 - DNA, 25 bp, Homo sapien
cagcctggcacaccaaggtcactgg

SEQ ID NO: 1712590 - DNA, 25 bp, Homo sapien
acctcaggtgacgtcttcctaccag

SEQ ID NO: 1712591 - DNA, 25 bp, Homo sapien
cctcaggtgacgtcttcctaccaga

SEQ ID NO: 1712592 - DNA, 25 bp, Homo sapien
gaaggccctggtcacggcggagatt

SEQ ID NO: 1712593 - DNA, 25 bp, Homo sapien
gccctggtcacggcggagattagac

SEQ ID NO: 1712594 - DNA, 25 bp, Homo sapien
aaggccctggtcacggcggagatta

SEQ ID NO: 1712595 - DNA, 25 bp, Homo sapien
aggccctggtcacggcggagattag

SEQ ID NO: 1712596 - DNA, 25 bp, Homo sapien
cattagcgcatcacagtcgcggctc

SEQ ID NO: 1712597 - DNA, 25 bp, Homo sapien
aagtcgaagttccatcgctcacggg

SEQ ID NO: 1712598 - DNA, 25 bp, Homo sapien
tgccgccgttttcgaccctgagagt

SEQ ID NO: 1712599 - DNA, 25 bp, Homo sapien
ccctccagtggtgtctcggtgacaa

SEQ ID NO: 1712600 - DNA, 25 bp, Homo sapien
aagtccttccgtgcacatgtccgca

SEQ ID NO: 1712601 - DNA, 25 bp, Homo sapien
agtccttccgtgcacatgtccgcac

SEQ ID NO: 1712602 - DNA, 25 bp, Homo sapien
aaagtccttccgtgcacatgtccgc

SEQ ID NO: 1712603 - DNA, 25 bp, Homo sapien
tccagtctggccaacagagttaaga

SEQ ID NO: 1712604 - DNA, 25 bp, Homo sapien
agtctggccaacagagttaagacac

SEQ ID NO: 1712605 - DNA, 25 bp, Homo sapien
cagtctggccaacagagttaagaca

SEQ ID NO: 1712606 - DNA, 25 bp, Homo sapien
ctccagtctggccaacagagttaag

SEQ ID NO: 1712607 - DNA, 25 bp, Homo sapien
tataattagtcttgacccaacggca

SEQ ID NO: 1712608 - DNA, 25 bp, Homo sapien
tgtcaaatgcacaacagccgtatgt

SEQ ID NO: 1712609 - DNA, 25 bp, Homo sapien
aatgccgggcccatataaacgtcag

SEQ ID NO: 1712610 - DNA, 25 bp, Homo sapien
gaggaaccactactagctctgtgtg

SEQ ID NO: 1712611 - DNA, 25 bp, Homo sapien
tggagaagatcagccggcgtttgga

SEQ ID NO: 1712612 - DNA, 25 bp, Homo sapien
cagccggcgtttggagtggtagaaa

SEQ ID NO: 1712613 - DNA, 25 bp, Homo sapien
ttggagaagatcagccggcgtttgg

SEQ ID NO: 1712614 - DNA, 25 bp, Homo sapien
agatcagccggcgtttggagtggta

SEQ ID NO: 1712615 - DNA, 25 bp, Homo sapien
cagtccaggccagtatgttacagga

SEQ ID NO: 1712616 - DNA, 25 bp, Homo sapien
gaaaaggctcaacactgagacgggc

SEQ ID NO: 1712617 - DNA, 25 bp, Homo sapien
acagaacagtacagggtgtggtccc

SEQ ID NO: 1712618 - DNA, 25 bp, Homo sapien
cctgaggtagaactagggtgccctt

SEQ ID NO: 1712619 - DNA, 25 bp, Homo sapien
tttatttgagatgaatctcactgtc

SEQ ID NO: 1712620 - DNA, 25 bp, Homo sapien
ctcactgtcaccctggaagaggctg

SEQ ID NO: 1712621 - DNA, 25 bp, Homo sapien
ttatttgagatgaatctcactgtca

SEQ ID NO: 1712622 - DNA, 25 bp, Homo sapien
gatgaatctcactgtcaccctggaa

SEQ ID NO: 1712623 - DNA, 25 bp, Homo sapien
cctgcggagcccacgagctctagaa

SEQ ID NO: 1712624 - DNA, 25 bp, Homo sapien
gaactgttaacagtcttgtcttgct

SEQ ID NO: 1712625 - DNA, 25 bp, Homo sapien
gttccccagcgagccaatctcctgt

SEQ ID NO: 1712626 - DNA, 25 bp, Homo sapien
tgtcttgcttaatctccctttccgt

SEQ ID NO: 1712627 - DNA, 25 bp, Homo sapien
aaagggcgctcagaactgggtctgc

SEQ ID NO: 1712628 - DNA, 25 bp, Homo sapien
gcgctcagaactgggtctgctctcc

SEQ ID NO: 1712629 - DNA, 25 bp, Homo sapien
ggcgctcagaactgggtctgctctc

SEQ ID NO: 1712630 - DNA, 25 bp, Homo sapien
agggcgctcagaactgggtctgctc

SEQ ID NO: 1712631 - DNA, 25 bp, Homo sapien
cttgcttaggatatgtactgggctc

SEQ ID NO: 1712632 - DNA, 25 bp, Homo sapien
taggatatgtactgggctctcaacc

SEQ ID NO: 1712633 - DNA, 25 bp, Homo sapien
ttaggatatgtactgggctctcaac

SEQ ID NO: 1712634 - DNA, 25 bp, Homo sapien
gcttaggatatgtactgggctctca

SEQ ID NO: 1712635 - DNA, 25 bp, Homo sapien
caggtcctcgcgggtgacaaagccc

SEQ ID NO: 1712636 - DNA, 25 bp, Homo sapien
gcaccacagtcctggaagaaggcct

SEQ ID NO: 1712637 - DNA, 25 bp, Homo sapien
tgcctgagaggaccaagactctggc

SEQ ID NO: 1712638 - DNA, 25 bp, Homo sapien
gcccagcttccggacttttcgagat

SEQ ID NO: 1712639 - DNA, 25 bp, Homo sapien
cacccagtcgaagatcatctctgac

SEQ ID NO: 1712640 - DNA, 25 bp, Homo sapien
ccacccagtcgaagatcatctctga

SEQ ID NO: 1712641 - DNA, 25 bp, Homo sapien
cccagtcgaagatcatctctgactc

SEQ ID NO: 1712642 - DNA, 25 bp, Homo sapien
acccagtcgaagatcatctctgact

SEQ ID NO: 1712643 - DNA, 25 bp, Homo sapien
cagagctgaattcttcaagggacag

SEQ ID NO: 1712644 - DNA, 25 bp, Homo sapien
agagctgaattcttcaagggacagg

SEQ ID NO: 1712645 - DNA, 25 bp, Homo sapien
gagctgaattcttcaagggacaggt

SEQ ID NO: 1712646 - DNA, 25 bp, Homo sapien
gcccagaggccctccaaagacagac

SEQ ID NO: 1712647 - DNA, 25 bp, Homo sapien
ctgggtgcccagaggccctccaaag

SEQ ID NO: 1712648 - DNA, 25 bp, Homo sapien
agaggccctccaaagacagacatac

SEQ ID NO: 1712649 - DNA, 25 bp, Homo sapien
tgggtgcccagaggccctccaaaga

SEQ ID NO: 1712650 - DNA, 25 bp, Homo sapien
gaagctggtggtagcagatacccgc

SEQ ID NO: 1712651 - DNA, 25 bp, Homo sapien
tggtagcagatacccgcttagaggg

SEQ ID NO: 1712652 - DNA, 25 bp, Homo sapien
ttagagggcagtggcttccttctgc

SEQ ID NO: 1712653 - DNA, 25 bp, Homo sapien
catgaaggcaaggaacgcctccttc

SEQ ID NO: 1712654 - DNA, 25 bp, Homo sapien
ggcggctggtcatcttggccagaaa

SEQ ID NO: 1712655 - DNA, 25 bp, Homo sapien
gccagaaagcctgccaggttgcctg

SEQ ID NO: 1712656 - DNA, 25 bp, Homo sapien
tgcaggcggctggtcatcttggcca

SEQ ID NO: 1712657 - DNA, 25 bp, Homo sapien
gtcatcttggccagaaagcctgcca

SEQ ID NO: 1712658 - DNA, 25 bp, Homo sapien
cttctcctggcggatctgctgctcc

SEQ ID NO: 1712659 - DNA, 25 bp, Homo sapien
agctgctggacctcgcggtggtggt

SEQ ID NO: 1712660 - DNA, 25 bp, Homo sapien
ctggacctcgcggtggtggtcagag

SEQ ID NO: 1712661 - DNA, 25 bp, Homo sapien
acctcgcggtggtggtcagagtcac

SEQ ID NO: 1712662 - DNA, 25 bp, Homo sapien
ctcagctagtcgctgcacctcgcgc

SEQ ID NO: 1712663 - DNA, 25 bp, Homo sapien
tggccctcagctagtcgctgcacct

SEQ ID NO: 1712664 - DNA, 25 bp, Homo sapien
ctctggccctcagctagtcgctgca

SEQ ID NO: 1712665 - DNA, 25 bp, Homo sapien
gccctcagctagtcgctgcacctcg

SEQ ID NO: 1712666 - DNA, 25 bp, Homo sapien
cctcctgatgtgtgctcctgaggtg

SEQ ID NO: 1712667 - DNA, 25 bp, Homo sapien
ccagccaggtcacgcttggcctcct

SEQ ID NO: 1712668 - DNA, 25 bp, Homo sapien
ctccacctgccaggacacccggccc

SEQ ID NO: 1712669 - DNA, 25 bp, Homo sapien
cggcgtccaggcgccccctggtcac

SEQ ID NO: 1712670 - DNA, 25 bp, Homo sapien
cacccggcccctggcggcgtccagg

SEQ ID NO: 1712671 - DNA, 25 bp, Homo sapien
gcccctggcggcgtccaggcgcccc

SEQ ID NO: 1712672 - DNA, 25 bp, Homo sapien
agatccttagagaactcagagttcc

SEQ ID NO: 1712673 - DNA, 25 bp, Homo sapien
ctagatccttagagaactcagagtt

SEQ ID NO: 1712674 - DNA, 25 bp, Homo sapien
tagatccttagagaactcagagttc

SEQ ID NO: 1712675 - DNA, 25 bp, Homo sapien
tggggtcttctcacccgctccagga

SEQ ID NO: 1712676 - DNA, 25 bp, Homo sapien
ggtcttctcacccgctccaggaaaa

SEQ ID NO: 1712677 - DNA, 25 bp, Homo sapien
gggtctggggtcttctcacccgctc

SEQ ID NO: 1712678 - DNA, 25 bp, Homo sapien
gagggtctggggtcttctcacccgc

SEQ ID NO: 1712679 - DNA, 25 bp, Homo sapien
gccaaagttgctcagtagctggtcc

SEQ ID NO: 1712680 - DNA, 25 bp, Homo sapien
agagctgcagggctccgtgcggagg

SEQ ID NO: 1712681 - DNA, 25 bp, Homo sapien
tagctggtcccagtcatcgttgtcc

SEQ ID NO: 1712682 - DNA, 25 bp, Homo sapien
ccagtcatcgttgtccccaaatagc

SEQ ID NO: 1712683 - DNA, 25 bp, Homo sapien
actttgaatgcaggtgccaccaggc

SEQ ID NO: 1712684 - DNA, 25 bp, Homo sapien
tgaggcctggatctgtttgctggac

SEQ ID NO: 1712685 - DNA, 25 bp, Homo sapien
gtcgtgcggttcaacaggctgctct

SEQ ID NO: 1712686 - DNA, 25 bp, Homo sapien
ttggcgctgaaagtcaccccaggtg

SEQ ID NO: 1712687 - DNA, 25 bp, Homo sapien
cctcagacctgggttcctcttccag

SEQ ID NO: 1712688 - DNA, 25 bp, Homo sapien
cttgttttccttcctcagacctggg

SEQ ID NO: 1712689 - DNA, 25 bp, Homo sapien
ccttcctcagacctgggttcctctt

SEQ ID NO: 1712690 - DNA, 25 bp, Homo sapien
tcagacctgggttcctcttccagct

SEQ ID NO: 1712691 - DNA, 25 bp, Homo sapien
cgtgagcagtcgtgagggatggcct

SEQ ID NO: 1712692 - DNA, 25 bp, Homo sapien
gggagttccgaatgcgcagtttcta

SEQ ID NO: 1712693 - DNA, 25 bp, Homo sapien
gagccccttggaggtgccgattttc

SEQ ID NO: 1712694 - DNA, 25 bp, Homo sapien
ttctaggccgtgagcctcaaccgac

SEQ ID NO: 1712695 - DNA, 25 bp, Homo sapien
ccttggttccctggagtgaggcggg

SEQ ID NO: 1712696 - DNA, 25 bp, Homo sapien
ctggagtgaggcgggccttgttctt

SEQ ID NO: 1712697 - DNA, 25 bp, Homo sapien
ctgcccttggttccctggagtgagg

SEQ ID NO: 1712698 - DNA, 25 bp, Homo sapien
tgcccttggttccctggagtgaggc

SEQ ID NO: 1712699 - DNA, 25 bp, Homo sapien
agcttccctggagtccattcctgga

SEQ ID NO: 1712700 - DNA, 25 bp, Homo sapien
ccctccagccatggggtctcccggg

SEQ ID NO: 1712701 - DNA, 25 bp, Homo sapien
gtctcccggggatggggtcagccca

SEQ ID NO: 1712702 - DNA, 25 bp, Homo sapien
tccattcctggatcttcaagcctgc

SEQ ID NO: 1712703 - DNA, 25 bp, Homo sapien
gacatggaagaggtaatcagggttg

SEQ ID NO: 1712704 - DNA, 25 bp, Homo sapien
ctcccagaaagatgacatggaagag

SEQ ID NO: 1712705 - DNA, 25 bp, Homo sapien
catggaagaggtaatcagggttggc

SEQ ID NO: 1712706 - DNA, 25 bp, Homo sapien
cccagaaagatgacatggaagaggt

SEQ ID NO: 1712707 - DNA, 25 bp, Homo sapien
gaaggatgttttgcccacgttggag

SEQ ID NO: 1712708 - DNA, 25 bp, Homo sapien
caatccggtggcgaaagaattctgg

SEQ ID NO: 1712709 - DNA, 25 bp, Homo sapien
cacggtagctgtcaatccggtggcg

SEQ ID NO: 1712710 - DNA, 25 bp, Homo sapien
gtggcgaaagaattctggtgcagca

SEQ ID NO: 1712711 - DNA, 25 bp, Homo sapien
ctaggacacatagagaggggtgaag

SEQ ID NO: 1712712 - DNA, 25 bp, Homo sapien
agcacaaagcacttgttgtccacca

SEQ ID NO: 1712713 - DNA, 25 bp, Homo sapien
gcacaaagcacttgttgtccaccag

SEQ ID NO: 1712714 - DNA, 25 bp, Homo sapien
aaagcacttgttgtccaccagcaag

SEQ ID NO: 1712715 - DNA, 25 bp, Homo sapien
acaaagcacttgttgtccaccagca

SEQ ID NO: 1712716 - DNA, 25 bp, Homo sapien
aggcatccagaccccaggccctggc

SEQ ID NO: 1712717 - DNA, 25 bp, Homo sapien
gcatgaggccacaccaggcatccag

SEQ ID NO: 1712718 - DNA, 25 bp, Homo sapien
gcatccagaccccaggccctggcct

SEQ ID NO: 1712719 - DNA, 25 bp, Homo sapien
ctgcatgaggccacaccaggcatcc

SEQ ID NO: 1712720 - DNA, 25 bp, Homo sapien
cagtagcgcacgtgggcaaagctct

SEQ ID NO: 1712721 - DNA, 25 bp, Homo sapien
gtgatgtcgtacatgagcaccaccc

SEQ ID NO: 1712722 - DNA, 25 bp, Homo sapien
cccgtcagccttgcggagcagctgt

SEQ ID NO: 1712723 - DNA, 25 bp, Homo sapien
tggagacagtctagccagtagcgca

SEQ ID NO: 1712724 - DNA, 25 bp, Homo sapien
cagcttccacggacacttgccgttc

SEQ ID NO: 1712725 - DNA, 25 bp, Homo sapien
ttgctgcccagcttccacggacact

SEQ ID NO: 1712726 - DNA, 25 bp, Homo sapien
gcccagcttccacggacacttgccg

SEQ ID NO: 1712727 - DNA, 25 bp, Homo sapien
tccacggacacttgccgttcctcct

SEQ ID NO: 1712728 - DNA, 25 bp, Homo sapien
ctccaggatgttgtgacccaaggcg

SEQ ID NO: 1712729 - DNA, 25 bp, Homo sapien
gttgtgacccaaggcggcactgcac

SEQ ID NO: 1712730 - DNA, 25 bp, Homo sapien
ctggccaggtttactacaggctcca

SEQ ID NO: 1712731 - DNA, 25 bp, Homo sapien
ccaggtttactacaggctccaggat

SEQ ID NO: 1712732 - DNA, 25 bp, Homo sapien
tctcccctcagactggtgagcccag

SEQ ID NO: 1712733 - DNA, 25 bp, Homo sapien
gagcccaggtctttaactaggtgct

SEQ ID NO: 1712734 - DNA, 25 bp, Homo sapien
gaagagagacactccttttctcagc

SEQ ID NO: 1712735 - DNA, 25 bp, Homo sapien
gagtgattcagcgaacgggaagggc

SEQ ID NO: 1712736 - DNA, 25 bp, Homo sapien
gggcagcacggatgggcccatgggt

SEQ ID NO: 1712737 - DNA, 25 bp, Homo sapien
ggcagcacggatgggcccatgggtg

SEQ ID NO: 1712738 - DNA, 25 bp, Homo sapien
ctcctacgggcagcacggatgggcc

SEQ ID NO: 1712739 - DNA, 25 bp, Homo sapien
ctacgggcagcacggatgggcccat

SEQ ID NO: 1712740 - DNA, 25 bp, Homo sapien
tcaggagcaacagccgaatctcttg

SEQ ID NO: 1712741 - DNA, 25 bp, Homo sapien
ggagcaacagccgaatctcttgggc

SEQ ID NO: 1712742 - DNA, 25 bp, Homo sapien
caacagccgaatctcttgggcggcc

SEQ ID NO: 1712743 - DNA, 25 bp, Homo sapien
agcaacagccgaatctcttgggcgg

SEQ ID NO: 1712744 - DNA, 25 bp, Homo sapien
atgggtgtccatcctacccaggaca

SEQ ID NO: 1712745 - DNA, 25 bp, Homo sapien
ctgagggacaggaaaccccatgggt

SEQ ID NO: 1712746 - DNA, 25 bp, Homo sapien
ccatcctacccaggacaggacaggt

SEQ ID NO: 1712747 - DNA, 25 bp, Homo sapien
gaaaccccatgggtgtccatcctac

SEQ ID NO: 1712748 - DNA, 25 bp, Homo sapien
aagctggtcctctgtgtcgttgctg

SEQ ID NO: 1712749 - DNA, 25 bp, Homo sapien
tggtcctctgtgtcgttgctgtcca

SEQ ID NO: 1712750 - DNA, 25 bp, Homo sapien
gctggtcctctgtgtcgttgctgtc

SEQ ID NO: 1712751 - DNA, 25 bp, Homo sapien
caagctggtcctctgtgtcgttgct

SEQ ID NO: 1712752 - DNA, 25 bp, Homo sapien
tgggatccgagtcctgagttgagaa

SEQ ID NO: 1712753 - DNA, 25 bp, Homo sapien
aaagccctcctttggagtgtgaaag

SEQ ID NO: 1712754 - DNA, 25 bp, Homo sapien
tgaaaggcagaggtgatgcggccct

SEQ ID NO: 1712755 - DNA, 25 bp, Homo sapien
gccctgctctgggatccgagtcctg

SEQ ID NO: 1712756 - DNA, 25 bp, Homo sapien
caaatagaaatagcgagggagacca

SEQ ID NO: 1712757 - DNA, 25 bp, Homo sapien
catacaaacgaagaccatggccgtc

SEQ ID NO: 1712758 - DNA, 25 bp, Homo sapien
aaattttacacccacagatgtgcgg

SEQ ID NO: 1712759 - DNA, 25 bp, Homo sapien
tctaaagcaagctctccgagggcac

SEQ ID NO: 1712760 - DNA, 25 bp, Homo sapien
gcccagcaggtggatccggcccaag

SEQ ID NO: 1712761 - DNA, 25 bp, Homo sapien
cagcaggtggatccggcccaagaaa

SEQ ID NO: 1712762 - DNA, 25 bp, Homo sapien
gggcagtgtggagttcctcccagaa

SEQ ID NO: 1712763 - DNA, 25 bp, Homo sapien
tgggcagtgtggagttcctcccaga

SEQ ID NO: 1712764 - DNA, 25 bp, Homo sapien
tccctggcttgtgagccctttgaca

SEQ ID NO: 1712765 - DNA, 25 bp, Homo sapien
cctggcttgtgagccctttgacagc

SEQ ID NO: 1712766 - DNA, 25 bp, Homo sapien
ctgtcgttgcctactttgtgctgct

SEQ ID NO: 1712767 - DNA, 25 bp, Homo sapien
gctgctgtcgttgcctactttgtgc

SEQ ID NO: 1712768 - DNA, 25 bp, Homo sapien
gtgggtcagggagtggagcgggtgg

SEQ ID NO: 1712769 - DNA, 25 bp, Homo sapien
aggtgtggccgtgagctgcgtggtg

SEQ ID NO: 1712770 - DNA, 25 bp, Homo sapien
tggtgaacgtagcattgggctccat

SEQ ID NO: 1712771 - DNA, 25 bp, Homo sapien
ccagcagagatgagtcggagcagtc

SEQ ID NO: 1712772 - DNA, 25 bp, Homo sapien
cccacgtggctgaaagagcagccca

SEQ ID NO: 1712773 - DNA, 25 bp, Homo sapien
tgtggccaccatgctatagaagatg

SEQ ID NO: 1712774 - DNA, 25 bp, Homo sapien
cagccaccagttgtgctgcaggaag

SEQ ID NO: 1712775 - DNA, 25 bp, Homo sapien
ggtcagatggcgtgatgttcatcat

SEQ ID NO: 1712776 - DNA, 25 bp, Homo sapien
ctggatgctctctcccatgggacct

SEQ ID NO: 1712777 - DNA, 25 bp, Homo sapien
ttaatgctcctggatgctctctccc

SEQ ID NO: 1712778 - DNA, 25 bp, Homo sapien
gaccttggggctgggtccacaggag

SEQ ID NO: 1712779 - DNA, 25 bp, Homo sapien
gctctctcccatgggaccttggggc

SEQ ID NO: 1712780 - DNA, 25 bp, Homo sapien
cctgcagaagaggtccctgagtcct

SEQ ID NO: 1712781 - DNA, 25 bp, Homo sapien
gggatgcctggccatcatcggcctg

SEQ ID NO: 1712782 - DNA, 25 bp, Homo sapien
acagcgcaattggagtaggccagga

SEQ ID NO: 1712783 - DNA, 25 bp, Homo sapien
cagaggatagggctgacagcgcaat

SEQ ID NO: 1712784 - DNA, 25 bp, Homo sapien
tcacccgggatgcagaaagcttgct

SEQ ID NO: 1712785 - DNA, 25 bp, Homo sapien
cctagagagggcatgcgatttgtcc

SEQ ID NO: 1712786 - DNA, 25 bp, Homo sapien
tcttcatcgcgaaaaatcacccggg

SEQ ID NO: 1712787 - DNA, 25 bp, Homo sapien
gcttgctgaaatacagacgcccagg

SEQ ID NO: 1712788 - DNA, 25 bp, Homo sapien
tggagatggcgtttgaaggtagtga

SEQ ID NO: 1712789 - DNA, 25 bp, Homo sapien
cacaaagatggaagcggaggagaga

SEQ ID NO: 1712790 - DNA, 25 bp, Homo sapien
gaggtttcgtggagatggcgtttga

SEQ ID NO: 1712791 - DNA, 25 bp, Homo sapien
tagtgacagaccatgagcagaataa

SEQ ID NO: 1712792 - DNA, 25 bp, Homo sapien
tagctaagactacatgtgcccagct

SEQ ID NO: 1712793 - DNA, 25 bp, Homo sapien
tcctttagcacctgccaagggctct

SEQ ID NO: 1712794 - DNA, 25 bp, Homo sapien
ccccagatgggaggtgttaccctgt

SEQ ID NO: 1712795 - DNA, 25 bp, Homo sapien
cctccttggagtcccgagtagctaa

SEQ ID NO: 1712796 - DNA, 25 bp, Homo sapien
tttctaatctggctgccaggcacag

SEQ ID NO: 1712797 - DNA, 25 bp, Homo sapien
ggcacagacggcacgtctgcagcac

SEQ ID NO: 1712798 - DNA, 25 bp, Homo sapien
gagggacgagtggtagttatgtggc

SEQ ID NO: 1712799 - DNA, 25 bp, Homo sapien
gttatgtggcgggtgggccagggcc

SEQ ID NO: 1712800 - DNA, 25 bp, Homo sapien
gaagcagaagcattgaccatttttt

SEQ ID NO: 1712801 - DNA, 25 bp, Homo sapien
caatcaagtttctaagaaggtgtca

SEQ ID NO: 1712802 - DNA, 25 bp, Homo sapien
tactctcagaaaggagaagcgccac

SEQ ID NO: 1712803 - DNA, 25 bp, Homo sapien
agacatcccacgcaaagccacattg

SEQ ID NO: 1712804 - DNA, 25 bp, Homo sapien
catgaagcttaggaggcctggcatc

SEQ ID NO: 1712805 - DNA, 25 bp, Homo sapien
ccctgtggacgacgtgaagatcatt

SEQ ID NO: 1712806 - DNA, 25 bp, Homo sapien
gatcattaaggcatacccttctggg

SEQ ID NO: 1712807 - DNA, 25 bp, Homo sapien
ccatttttggccgagtgtgtcaggg

SEQ ID NO: 1712808 - DNA, 25 bp, Homo sapien
cgaggtggcactttgaatcatgacc

SEQ ID NO: 1712809 - DNA, 25 bp, Homo sapien
cagagaaaatgctcgggttacctca

SEQ ID NO: 1712810 - DNA, 25 bp, Homo sapien
gctcttcatcactgacactactgtg

SEQ ID NO: 1712811 - DNA, 25 bp, Homo sapien
tcatggacagcttattcacacagtg

SEQ ID NO: 1712812 - DNA, 25 bp, Homo sapien
gaagcatgctccaaagacctgtaag

SEQ ID NO: 1712813 - DNA, 25 bp, Homo sapien
gaactttgctgagttggctcgtcga

SEQ ID NO: 1712814 - DNA, 25 bp, Homo sapien
cctctgcagcatgggaatcattgtg

SEQ ID NO: 1712815 - DNA, 25 bp, Homo sapien
tcgtcgaggttactacaatggcaca

SEQ ID NO: 1712816 - DNA, 25 bp, Homo sapien
cctggagcagttccataatactcct

SEQ ID NO: 1712817 - DNA, 25 bp, Homo sapien
agcagttccataatactcctgtctg

SEQ ID NO: 1712818 - DNA, 25 bp, Homo sapien
gagcagttccataatactcctgtct

SEQ ID NO: 1712819 - DNA, 25 bp, Homo sapien
tggagcagttccataatactcctgt

SEQ ID NO: 1712820 - DNA, 25 bp, Homo sapien
gcatgaaatccagtggttatcacaa

SEQ ID NO: 1712821 - DNA, 25 bp, Homo sapien
ctgagcatgaaatccagtggttatc

SEQ ID NO: 1712822 - DNA, 25 bp, Homo sapien
ttgctgagcatgaaatccagtggtt

SEQ ID NO: 1712823 - DNA, 25 bp, Homo sapien
gagcatgaaatccagtggttatcac

SEQ ID NO: 1712824 - DNA, 25 bp, Homo sapien
tagtattagaattttgagttctcca

SEQ ID NO: 1712825 - DNA, 25 bp, Homo sapien
ggtttcagataatcagatatagcta

SEQ ID NO: 1712826 - DNA, 25 bp, Homo sapien
gataatgggtgtttatgttacttgc

SEQ ID NO: 1712827 - DNA, 25 bp, Homo sapien
gaagtacccagaacacctgcgtgtt

SEQ ID NO: 1712828 - DNA, 25 bp, Homo sapien
tacaaaaattctttactggcatctc

SEQ ID NO: 1712829 - DNA, 25 bp, Homo sapien
caagcactgtgtacatcgtacagcg

SEQ ID NO: 1712830 - DNA, 25 bp, Homo sapien
ctcagactcctcgtctttggattct

SEQ ID NO: 1712831 - DNA, 25 bp, Homo sapien
attaactgccgagtctattttcaga

SEQ ID NO: 1712832 - DNA, 25 bp, Homo sapien
ccttgcatgttcactcagtgctcct

SEQ ID NO: 1712833 - DNA, 25 bp, Homo sapien
cattcattcaaccatttgcacagag

SEQ ID NO: 1712834 - DNA, 25 bp, Homo sapien
agagagaagccaaaaatctgactgg

SEQ ID NO: 1712835 - DNA, 25 bp, Homo sapien
cattcaaccatttgcacagagagag

SEQ ID NO: 1712836 - DNA, 25 bp, Homo sapien
gaagccaaaaatctgactggtaaga

SEQ ID NO: 1712837 - DNA, 25 bp, Homo sapien
tggtgttctcagacgatccaatctg

SEQ ID NO: 1712838 - DNA, 25 bp, Homo sapien
ggtgttctcagacgatccaatctgc

SEQ ID NO: 1712839 - DNA, 25 bp, Homo sapien
gtgttctcagacgatccaatctgca

SEQ ID NO: 1712840 - DNA, 25 bp, Homo sapien
tatgaacccaaggtttaaagctcca

SEQ ID NO: 1712841 - DNA, 25 bp, Homo sapien
gagtaattcctcctctcgtccagcg

SEQ ID NO: 1712842 - DNA, 25 bp, Homo sapien
gccttgtaccctagagtaattcctc

SEQ ID NO: 1712843 - DNA, 25 bp, Homo sapien
ttccgggagcgcgacccggaagcaa

SEQ ID NO: 1712844 - DNA, 25 bp, Homo sapien
cctgggcgaggccttgtaccctaga

SEQ ID NO: 1712845 - DNA, 25 bp, Homo sapien
agcctgattctaacagtggcataga

SEQ ID NO: 1712846 - DNA, 25 bp, Homo sapien
aagttctgaagagttagcctgattc

SEQ ID NO: 1712847 - DNA, 25 bp, Homo sapien
gcctgattctaacagtggcatagac

SEQ ID NO: 1712848 - DNA, 25 bp, Homo sapien
agctttgctacagggggaagttctg

SEQ ID NO: 1712849 - DNA, 25 bp, Homo sapien
tcggaaaccacgtgtcccttgatca

SEQ ID NO: 1712850 - DNA, 25 bp, Homo sapien
aactggaaaatgattgactacaatg

SEQ ID NO: 1712851 - DNA, 25 bp, Homo sapien
acaactgagcggctgagaactggaa

SEQ ID NO: 1712852 - DNA, 25 bp, Homo sapien
tattttcctattctgagctggcagt

SEQ ID NO: 1712853 - DNA, 25 bp, Homo sapien
ctgggagacagaacgagatcccatc

SEQ ID NO: 1712854 - DNA, 25 bp, Homo sapien
cctgggagacagaacgagatcccat

SEQ ID NO: 1712855 - DNA, 25 bp, Homo sapien
gcctgggagacagaacgagatccca

SEQ ID NO: 1712856 - DNA, 25 bp, Homo sapien
tgggagacagaacgagatcccatct

SEQ ID NO: 1712857 - DNA, 25 bp, Homo sapien
caactataaggagaggatactgcgg

SEQ ID NO: 1712858 - DNA, 25 bp, Homo sapien
ttgtcataaatgctgatctcgttgg

SEQ ID NO: 1712859 - DNA, 25 bp, Homo sapien
catgccacactgatggccggtctgt

SEQ ID NO: 1712860 - DNA, 25 bp, Homo sapien
gctgatctcgttggcagcaagatcc

SEQ ID NO: 1712861 - DNA, 25 bp, Homo sapien
taggcagtgagcaagattaatccca

SEQ ID NO: 1712862 - DNA, 25 bp, Homo sapien
agattaatcccaaggttgcgagaac

SEQ ID NO: 1712863 - DNA, 25 bp, Homo sapien
gtgagcaagattaatcccaaggttg

SEQ ID NO: 1712864 - DNA, 25 bp, Homo sapien
caagattaatcccaaggttgcgaga

SEQ ID NO: 1712865 - DNA, 25 bp, Homo sapien
taatgtgatggatgagtgagcgcca

SEQ ID NO: 1712866 - DNA, 25 bp, Homo sapien
atggatgagtgagcgccaggtgtga

SEQ ID NO: 1712867 - DNA, 25 bp, Homo sapien
cagcctaatgtgatggatgagtgag

SEQ ID NO: 1712868 - DNA, 25 bp, Homo sapien
cctaatgtgatggatgagtgagcgc

SEQ ID NO: 1712869 - DNA, 25 bp, Homo sapien
tcttcatcacccccatgcagaggaa

SEQ ID NO: 1712870 - DNA, 25 bp, Homo sapien
tgtcttcatcacccccatgcagagg

SEQ ID NO: 1712871 - DNA, 25 bp, Homo sapien
ttcatcacccccatgcagaggaact

SEQ ID NO: 1712872 - DNA, 25 bp, Homo sapien
gacatgtacttcttggcaatgggca

SEQ ID NO: 1712873 - DNA, 25 bp, Homo sapien
tgtagacaaccataacatatcctgg

SEQ ID NO: 1712874 - DNA, 25 bp, Homo sapien
cagaaaaatggatgggccagcgtct

SEQ ID NO: 1712875 - DNA, 25 bp, Homo sapien
ccttgaagtcaacgtgcagagacca

SEQ ID NO: 1712876 - DNA, 25 bp, Homo sapien
cttaggctggttctctgtagacaac

SEQ ID NO: 1712877 - DNA, 25 bp, Homo sapien
aatgcaacttgaaatgagatactat

SEQ ID NO: 1712878 - DNA, 25 bp, Homo sapien
tgaacaaggaattcacagaaaagta

SEQ ID NO: 1712879 - DNA, 25 bp, Homo sapien
caaggaattcacagaaaagtattat

SEQ ID NO: 1712880 - DNA, 25 bp, Homo sapien
aaagacatgcaatttgactaataat

SEQ ID NO: 1712881 - DNA, 25 bp, Homo sapien
agtggatggagcctctcaaatttcc

SEQ ID NO: 1712882 - DNA, 25 bp, Homo sapien
gctcacagtcgtttgtccaccaggg

SEQ ID NO: 1712883 - DNA, 25 bp, Homo sapien
cagttggcaggaatgggctctgact

SEQ ID NO: 1712884 - DNA, 25 bp, Homo sapien
gggcgtcttccaggagcatcacctt

SEQ ID NO: 1712885 - DNA, 25 bp, Homo sapien
acaaaaaatgctgaatctcttcctc

SEQ ID NO: 1712886 - DNA, 25 bp, Homo sapien
caccacttggcgaaaaacccttcag

SEQ ID NO: 1712887 - DNA, 25 bp, Homo sapien
ccacttggcgaaaaacccttcagag

SEQ ID NO: 1712888 - DNA, 25 bp, Homo sapien
cagcgccaccacttggcgaaaaacc

SEQ ID NO: 1712889 - DNA, 25 bp, Homo sapien
cacttggcgaaaaacccttcagaga

SEQ ID NO: 1712890 - DNA, 25 bp, Homo sapien
gctcacgtaacatttgtgatctgtt

SEQ ID NO: 1712891 - DNA, 25 bp, Homo sapien
tgaaaacaggaaaaagctcacgtaa

SEQ ID NO: 1712892 - DNA, 25 bp, Homo sapien
ttgtgatctgttcagaggtctcctc

SEQ ID NO: 1712893 - DNA, 25 bp, Homo sapien
ggtgaagaaaggagcacttgtttaa

SEQ ID NO: 1712894 - DNA, 25 bp, Homo sapien
tctaagccaatatgcagggaaggcc

SEQ ID NO: 1712895 - DNA, 25 bp, Homo sapien
gaaaagtagtttgcctcaggtgtta

SEQ ID NO: 1712896 - DNA, 25 bp, Homo sapien
taggaaagccagactaattgcaccc

SEQ ID NO: 1712897 - DNA, 25 bp, Homo sapien
tgagcgaccaccgatcatggctgct

SEQ ID NO: 1712898 - DNA, 25 bp, Homo sapien
gccaatgataaataggtcaggcatc

SEQ ID NO: 1712899 - DNA, 25 bp, Homo sapien
ctgccaatgataaataggtcaggca

SEQ ID NO: 1712900 - DNA, 25 bp, Homo sapien
caatgataaataggtcaggcatctt

SEQ ID NO: 1712901 - DNA, 25 bp, Homo sapien
gataaataggtcaggcatcttatgc

SEQ ID NO: 1712902 - DNA, 25 bp, Homo sapien
gaagggagggatgagctgcaacatg

SEQ ID NO: 1712903 - DNA, 25 bp, Homo sapien
cgatatcccctggctctattggcat

SEQ ID NO: 1712904 - DNA, 25 bp, Homo sapien
gatatcccctggctctattggcatg

SEQ ID NO: 1712905 - DNA, 25 bp, Homo sapien
taaaaagatccattgaccctgccct

SEQ ID NO: 1712906 - DNA, 25 bp, Homo sapien
cttttgtgaaggcagtatgtgattc

SEQ ID NO: 1712907 - DNA, 25 bp, Homo sapien
tgatcaatagacacacgcattctat

SEQ ID NO: 1712908 - DNA, 25 bp, Homo sapien
tcatctataaaacgagggattggtc

SEQ ID NO: 1712909 - DNA, 25 bp, Homo sapien
gccagagagattttcgcaatagtca

SEQ ID NO: 1712910 - DNA, 25 bp, Homo sapien
gattcagaacgatttccatacaaga

SEQ ID NO: 1712911 - DNA, 25 bp, Homo sapien
taaattaagacttggcatagcttgc

SEQ ID NO: 1712912 - DNA, 25 bp, Homo sapien
taagagtcactccattacaggaaaa

SEQ ID NO: 1712913 - DNA, 25 bp, Homo sapien
tgtggtttcattacagaacatccag

SEQ ID NO: 1712914 - DNA, 25 bp, Homo sapien
cacccagggaactgtgaatcacaat

SEQ ID NO: 1712915 - DNA, 25 bp, Homo sapien
caggcttacaaaggcaggatgctct

SEQ ID NO: 1712916 - DNA, 25 bp, Homo sapien
gggacacaagacctactagccaatt

SEQ ID NO: 1712917 - DNA, 25 bp, Homo sapien
ctataacgtagaccttccagtgggt

SEQ ID NO: 1712918 - DNA, 25 bp, Homo sapien
accttccagtgggtggtgtcgacat

SEQ ID NO: 1712919 - DNA, 25 bp, Homo sapien
ataacgtagaccttccagtgggtgg

SEQ ID NO: 1712920 - DNA, 25 bp, Homo sapien
agaccttccagtgggtggtgtcgac

SEQ ID NO: 1712921 - DNA, 25 bp, Homo sapien
gagaaagcggttccatcgcagatga

SEQ ID NO: 1712922 - DNA, 25 bp, Homo sapien
aagcggttccatcgcagatgaccaa

SEQ ID NO: 1712923 - DNA, 25 bp, Homo sapien
ttccatcgcagatgaccaaaggctg

SEQ ID NO: 1712924 - DNA, 25 bp, Homo sapien
tctgagaaagcggttccatcgcaga

SEQ ID NO: 1712925 - DNA, 25 bp, Homo sapien
tttcaacctggttttcggctctgga

SEQ ID NO: 1712926 - DNA, 25 bp, Homo sapien
caacctggttttcggctctggaagc

SEQ ID NO: 1712927 - DNA, 25 bp, Homo sapien
tcaacctggttttcggctctggaag

SEQ ID NO: 1712928 - DNA, 25 bp, Homo sapien
cctttcaacctggttttcggctctg

SEQ ID NO: 1712929 - DNA, 25 bp, Homo sapien
tcagaaagggactggctggcaaccc

SEQ ID NO: 1712930 - DNA, 25 bp, Homo sapien
tcatagtgtccaaaggcccggaaga

SEQ ID NO: 1712931 - DNA, 25 bp, Homo sapien
gacatttcgcagtctccagggagag

SEQ ID NO: 1712932 - DNA, 25 bp, Homo sapien
cgcatctctgtagtgggaggccaca

SEQ ID NO: 1712933 - DNA, 25 bp, Homo sapien
ccaactccccagtttctgtctgaaa

SEQ ID NO: 1712934 - DNA, 25 bp, Homo sapien
tttctgtctgaaactcagacctcgg

SEQ ID NO: 1712935 - DNA, 25 bp, Homo sapien
ctccacacagtgcttgccgccatgg

SEQ ID NO: 1712936 - DNA, 25 bp, Homo sapien
tcagacctcggctgggttcctttct

SEQ ID NO: 1712937 - DNA, 25 bp, Homo sapien
ggcattggttactgacccttcccca

SEQ ID NO: 1712938 - DNA, 25 bp, Homo sapien
ggagcactgcgctgagtccctgtct

SEQ ID NO: 1712939 - DNA, 25 bp, Homo sapien
tccccgatgatggcgggagcactgc

SEQ ID NO: 1712940 - DNA, 25 bp, Homo sapien
ctactgtgagtaagggtggctgcac

SEQ ID NO: 1712941 - DNA, 25 bp, Homo sapien
tctgctccctgggaccatccagggc

SEQ ID NO: 1712942 - DNA, 25 bp, Homo sapien
ctctgctccctgggaccatccaggg

SEQ ID NO: 1712943 - DNA, 25 bp, Homo sapien
tgctccctgggaccatccagggcca

SEQ ID NO: 1712944 - DNA, 25 bp, Homo sapien
ctccctgggaccatccagggccacc

SEQ ID NO: 1712945 - DNA, 25 bp, Homo sapien
cattcagagccgctgtggctgtgac

SEQ ID NO: 1712946 - DNA, 25 bp, Homo sapien
tctttaccagtttgtagtatcctgc

SEQ ID NO: 1712947 - DNA, 25 bp, Homo sapien
agtttgtagtatcctgcacttgaac

SEQ ID NO: 1712948 - DNA, 25 bp, Homo sapien
catggtggaagtctttaccagtttg

SEQ ID NO: 1712949 - DNA, 25 bp, Homo sapien
tatgtctgggatcctcacagagact

SEQ ID NO: 1712950 - DNA, 25 bp, Homo sapien
ttcctggattgtcgagcggctccct

SEQ ID NO: 1712951 - DNA, 25 bp, Homo sapien
tttgtattcggagctacagccttgc

SEQ ID NO: 1712952 - DNA, 25 bp, Homo sapien
gacacctgttcatggaaaccctgtg

SEQ ID NO: 1712953 - DNA, 25 bp, Homo sapien
taaaggacagacaagtgcctcagat

SEQ ID NO: 1712954 - DNA, 25 bp, Homo sapien
gatagcatcagagaacaatgcctaa

SEQ ID NO: 1712955 - DNA, 25 bp, Homo sapien
gaaaataggtcgttctgagcaaggg

SEQ ID NO: 1712956 - DNA, 25 bp, Homo sapien
gagaagaaagtaccagccctccatt

SEQ ID NO: 1712957 - DNA, 25 bp, Homo sapien
tagacaacccactcatgtggcctgg

SEQ ID NO: 1712958 - DNA, 25 bp, Homo sapien
ggaaatagccttagcagtcaggtgc

SEQ ID NO: 1712959 - DNA, 25 bp, Homo sapien
ggacccctgtgctctaactatgtag

SEQ ID NO: 1712960 - DNA, 25 bp, Homo sapien
tcacaggactagagggaagattcaa

SEQ ID NO: 1712961 - DNA, 25 bp, Homo sapien
cagcagaagcatcaggaaactgcag

SEQ ID NO: 1712962 - DNA, 25 bp, Homo sapien
aagcatcaggaaactgcaggagccg

SEQ ID NO: 1712963 - DNA, 25 bp, Homo sapien
agtagcggcagcagaagcatcagga

SEQ ID NO: 1712964 - DNA, 25 bp, Homo sapien
tcaggaaactgcaggagccgtgcat

SEQ ID NO: 1712965 - DNA, 25 bp, Homo sapien
atgtctgaggccgtcggggatacct

SEQ ID NO: 1712966 - DNA, 25 bp, Homo sapien
cctgggcccggtagaggttgtgcag

SEQ ID NO: 1712967 - DNA, 25 bp, Homo sapien
catgtgcagcatgtctgaggccgtc

SEQ ID NO: 1712968 - DNA, 25 bp, Homo sapien
tacctgggcccggtagaggttgtgc

SEQ ID NO: 1712969 - DNA, 25 bp, Homo sapien
gttcggggcctttgcgattgtgtcc

SEQ ID NO: 1712970 - DNA, 25 bp, Homo sapien
gggcctactttcagagccttggtaa

SEQ ID NO: 1712971 - DNA, 25 bp, Homo sapien
tggtaacccactgtcagaccccagt

SEQ ID NO: 1712972 - DNA, 25 bp, Homo sapien
accccagtgacagtgttctccagtg

SEQ ID NO: 1712973 - DNA, 25 bp, Homo sapien
gatggcgaacagattctcgccgcgg

SEQ ID NO: 1712974 - DNA, 25 bp, Homo sapien
tagtgctcacgctcgtggtgccact

SEQ ID NO: 1712975 - DNA, 25 bp, Homo sapien
actgccgtgcgtaggccttggcgaa

SEQ ID NO: 1712976 - DNA, 25 bp, Homo sapien
catgccctcgtctgtgatggcgaac

SEQ ID NO: 1712977 - DNA, 25 bp, Homo sapien
gcttggagtgaagcccgcctacttg

SEQ ID NO: 1712978 - DNA, 25 bp, Homo sapien
taggagcagccgactccgtcagagt

SEQ ID NO: 1712979 - DNA, 25 bp, Homo sapien
tcagagtcttagacagcgtattagc

SEQ ID NO: 1712980 - DNA, 25 bp, Homo sapien
tacttgcagcgaggacgcttaggag

SEQ ID NO: 1712981 - DNA, 25 bp, Homo sapien
ggccatgcaggttcaggacaaaact

SEQ ID NO: 1712982 - DNA, 25 bp, Homo sapien
agagaagaggcaccctatagcctgt

SEQ ID NO: 1712983 - DNA, 25 bp, Homo sapien
aggccatgcaggttcaggacaaaac

SEQ ID NO: 1712984 - DNA, 25 bp, Homo sapien
caccctatagcctgtgacatccacg

SEQ ID NO: 1712985 - DNA, 25 bp, Homo sapien
gatcctctctgtcttggcccatacc

SEQ ID NO: 1712986 - DNA, 25 bp, Homo sapien
ctcaacaccctggagcttctcacag

SEQ ID NO: 1712987 - DNA, 25 bp, Homo sapien
ggaggctcatagttgcacaccagta

SEQ ID NO: 1712988 - DNA, 25 bp, Homo sapien
cacaccagtaattcgatgttggtct

SEQ ID NO: 1712989 - DNA, 25 bp, Homo sapien
ggagcacggagtcccctcctggtag

SEQ ID NO: 1712990 - DNA, 25 bp, Homo sapien
attgggagcacggagtcccctcctg

SEQ ID NO: 1712991 - DNA, 25 bp, Homo sapien
ggacattgggagcacggagtcccct

SEQ ID NO: 1712992 - DNA, 25 bp, Homo sapien
acattgggagcacggagtcccctcc

SEQ ID NO: 1712993 - DNA, 25 bp, Homo sapien
cccggtggtcgcatcccaccaggct

SEQ ID NO: 1712994 - DNA, 25 bp, Homo sapien
cagtctgcatcgcatcatttccaca

SEQ ID NO: 1712995 - DNA, 25 bp, Homo sapien
ccagggaggctcttagaccatccag

SEQ ID NO: 1712996 - DNA, 25 bp, Homo sapien
ccatccagtctgcatcgcatcattt

SEQ ID NO: 1712997 - DNA, 25 bp, Homo sapien
cttggaacgacagggcgccaaagtg

SEQ ID NO: 1712998 - DNA, 25 bp, Homo sapien
gaagccgccagactttctaacatcc

SEQ ID NO: 1712999 - DNA, 25 bp, Homo sapien
tgaagggttgaaatccggccacttg

SEQ ID NO: 1713000 - DNA, 25 bp, Homo sapien
ccgaagccgccagactttctaacat

SEQ ID NO: 1713001 - DNA, 25 bp, Homo sapien
gtttgaagccttctgaccacgccca

SEQ ID NO: 1713002 - DNA, 25 bp, Homo sapien
cgctcctcgagaccctaaagtgtgg

SEQ ID NO: 1713003 - DNA, 25 bp, Homo sapien
gaccctaaagtgtggcgacacccac

SEQ ID NO: 1713004 - DNA, 25 bp, Homo sapien
agcaagactggcctcgcccgtttga

SEQ ID NO: 1713005 - DNA, 25 bp, Homo sapien
tctggtgattgacacagttgctcct

SEQ ID NO: 1713006 - DNA, 25 bp, Homo sapien
gttgctcctctagccacctcctggt

SEQ ID NO: 1713007 - DNA, 25 bp, Homo sapien
tacttctggtgattgacacagttgc

SEQ ID NO: 1713008 - DNA, 25 bp, Homo sapien
gattgacacagttgctcctctagcc

SEQ ID NO: 1713009 - DNA, 25 bp, Homo sapien
gacgcgaccaaatgtcctaccagga

SEQ ID NO: 1713010 - DNA, 25 bp, Homo sapien
cgcgaccaaatgtcctaccaggaca

SEQ ID NO: 1713011 - DNA, 25 bp, Homo sapien
caagtgacgcgaccaaatgtcctac

SEQ ID NO: 1713012 - DNA, 25 bp, Homo sapien
acttctccagctgatatgcccctca

SEQ ID NO: 1713013 - DNA, 25 bp, Homo sapien
taagacagacgagaacgggcatgag

SEQ ID NO: 1713014 - DNA, 25 bp, Homo sapien
ctgataagacagacgagaacgggca

SEQ ID NO: 1713015 - DNA, 25 bp, Homo sapien
acgagaacgggcatgagtgctgcaa

SEQ ID NO: 1713016 - DNA, 25 bp, Homo sapien
agaacgggcatgagtgctgcaagca

SEQ ID NO: 1713017 - DNA, 25 bp, Homo sapien
gagcatcttccgggcttccgatggg

SEQ ID NO: 1713018 - DNA, 25 bp, Homo sapien
cctgagcatcttccgggcttccgat

SEQ ID NO: 1713019 - DNA, 25 bp, Homo sapien
gcatcttccgggcttccgatgggtt

SEQ ID NO: 1713020 - DNA, 25 bp, Homo sapien
atcctgagcatcttccgggcttccg

SEQ ID NO: 1713021 - DNA, 25 bp, Homo sapien
tgatgcttcagtcgcccggaaggat

SEQ ID NO: 1713022 - DNA, 25 bp, Homo sapien
tctgatgcttcagtcgcccggaagg

SEQ ID NO: 1713023 - DNA, 25 bp, Homo sapien
tcctagagtctgatgcttcagtcgc

SEQ ID NO: 1713024 - DNA, 25 bp, Homo sapien
gagtctgatgcttcagtcgcccgga

SEQ ID NO: 1713025 - DNA, 25 bp, Homo sapien
gaagggacctcagttgttacgcaag

SEQ ID NO: 1713026 - DNA, 25 bp, Homo sapien
gggaaggtaactggctcctcatcca

SEQ ID NO: 1713027 - DNA, 25 bp, Homo sapien
tacgcaaggtggagcctctgttgcc

SEQ ID NO: 1713028 - DNA, 25 bp, Homo sapien
gacctctgttaccaagaaagccgga

SEQ ID NO: 1713029 - DNA, 25 bp, Homo sapien
gcaaggacgactgcagagccagggc

SEQ ID NO: 1713030 - DNA, 25 bp, Homo sapien
agggcacgcccacccgtggcattag

SEQ ID NO: 1713031 - DNA, 25 bp, Homo sapien
cacccgtggcattagcggtggcaga

SEQ ID NO: 1713032 - DNA, 25 bp, Homo sapien
gaggtgtgccccgtgtggtccagtg

SEQ ID NO: 1713033 - DNA, 25 bp, Homo sapien
ccaccccaccatgcaaggaggtggg

SEQ ID NO: 1713034 - DNA, 25 bp, Homo sapien
ctcagagggtgcatgccccaccatg

SEQ ID NO: 1713035 - DNA, 25 bp, Homo sapien
ccatgctcataccacctatgctggg

SEQ ID NO: 1713036 - DNA, 25 bp, Homo sapien
gggaggaagctcctactcagagggt

SEQ ID NO: 1713037 - DNA, 25 bp, Homo sapien
tcagccctgacacgacgctaggctt

SEQ ID NO: 1713038 - DNA, 25 bp, Homo sapien
agggcccgagttcagccctgacacg

SEQ ID NO: 1713039 - DNA, 25 bp, Homo sapien
tcagaagattccagccaacaccaga

SEQ ID NO: 1713040 - DNA, 25 bp, Homo sapien
cacgacgctaggcttgtcagggccc

SEQ ID NO: 1713041 - DNA, 25 bp, Homo sapien
caggacaacctgagagtgggcacat

SEQ ID NO: 1713042 - DNA, 25 bp, Homo sapien
actcagatggctcaaggaagaggcc

SEQ ID NO: 1713043 - DNA, 25 bp, Homo sapien
gaagcctgagatcctctgtctggga

SEQ ID NO: 1713044 - DNA, 25 bp, Homo sapien
tgtaaataccgctcagaacagtctg

SEQ ID NO: 1713045 - DNA, 25 bp, Homo sapien
gatggtgtgatgaggcacatgcccc

SEQ ID NO: 1713046 - DNA, 25 bp, Homo sapien
agcgcacatgctgtgtgggcagaca

SEQ ID NO: 1713047 - DNA, 25 bp, Homo sapien
gggcttgtccttcatctgcccctag

SEQ ID NO: 1713048 - DNA, 25 bp, Homo sapien
tattggagagtcaggagttactttc

SEQ ID NO: 1713049 - DNA, 25 bp, Homo sapien
aagtccttcctgttggtgtgagaag

SEQ ID NO: 1713050 - DNA, 25 bp, Homo sapien
caagtccttcctgttggtgtgagaa

SEQ ID NO: 1713051 - DNA, 25 bp, Homo sapien
agtccttcctgttggtgtgagaagg

SEQ ID NO: 1713052 - DNA, 25 bp, Homo sapien
tccttcctgttggtgtgagaagggg

SEQ ID NO: 1713053 - DNA, 25 bp, Homo sapien
taatggtgatgcctcgcgtacagga

SEQ ID NO: 1713054 - DNA, 25 bp, Homo sapien
taggaggcaaatggccaggctctgc

SEQ ID NO: 1713055 - DNA, 25 bp, Homo sapien
gcacctgcctctgaatgggaaatca

SEQ ID NO: 1713056 - DNA, 25 bp, Homo sapien
catgtctaggcctatgctaggaggc

SEQ ID NO: 1713057 - DNA, 25 bp, Homo sapien
cagcctgcttttccgccgggtgtca

SEQ ID NO: 1713058 - DNA, 25 bp, Homo sapien
tgcttttccgccgggtgtcatcagg

SEQ ID NO: 1713059 - DNA, 25 bp, Homo sapien
tttccgccgggtgtcatcaggatca

SEQ ID NO: 1713060 - DNA, 25 bp, Homo sapien
ccagcctgcttttccgccgggtgtc

SEQ ID NO: 1713061 - DNA, 25 bp, Homo sapien
aaatgcgatcggacaaagaggctgg

SEQ ID NO: 1713062 - DNA, 25 bp, Homo sapien
agtgtcgggcacgtttacaaacagg

SEQ ID NO: 1713063 - DNA, 25 bp, Homo sapien
taagaatcaactacaggcgcctagc

SEQ ID NO: 1713064 - DNA, 25 bp, Homo sapien
aattttacaaccacggactctgagg

SEQ ID NO: 1713065 - DNA, 25 bp, Homo sapien
ggacagataggctaaatcacccatg

SEQ ID NO: 1713066 - DNA, 25 bp, Homo sapien
tcacccatgaatctgttctgatctt

SEQ ID NO: 1713067 - DNA, 25 bp, Homo sapien
cagctaccctcgaagcagagagaga

SEQ ID NO: 1713068 - DNA, 25 bp, Homo sapien
gtttccggggtggatctcagctacc

SEQ ID NO: 1713069 - DNA, 25 bp, Homo sapien
cagtgaccaggttggacacagatgc

SEQ ID NO: 1713070 - DNA, 25 bp, Homo sapien
aacacagtgaccaggttggacacag

SEQ ID NO: 1713071 - DNA, 25 bp, Homo sapien
cacagtgaccaggttggacacagat

SEQ ID NO: 1713072 - DNA, 25 bp, Homo sapien
agtgaccaggttggacacagatgcc

SEQ ID NO: 1713073 - DNA, 25 bp, Homo sapien
ccgacactctcccatgctccaagga

SEQ ID NO: 1713074 - DNA, 25 bp, Homo sapien
tctcccatgctccaaggaatccgtg

SEQ ID NO: 1713075 - DNA, 25 bp, Homo sapien
aaggaatccgtgaccgaggaacgcg

SEQ ID NO: 1713076 - DNA, 25 bp, Homo sapien
ccaaggaatccgtgaccgaggaacg

SEQ ID NO: 1713077 - DNA, 25 bp, Homo sapien
aggagaagagacagacctgagggct

SEQ ID NO: 1713078 - DNA, 25 bp, Homo sapien
gagaagagacagacctgagggcttc

SEQ ID NO: 1713079 - DNA, 25 bp, Homo sapien
aagagacagacctgagggcttcctc

SEQ ID NO: 1713080 - DNA, 25 bp, Homo sapien
agagacagacctgagggcttcctcc

SEQ ID NO: 1713081 - DNA, 25 bp, Homo sapien
gcactcagggcggtgatgcacgtcc

SEQ ID NO: 1713082 - DNA, 25 bp, Homo sapien
cattcgtcttctcccgtggtcctgg

SEQ ID NO: 1713083 - DNA, 25 bp, Homo sapien
gtgatgcacgtcctctagcctctgg

SEQ ID NO: 1713084 - DNA, 25 bp, Homo sapien
acggcctccccgacattcgtcttct

SEQ ID NO: 1713085 - DNA, 25 bp, Homo sapien
ggacagcttgttcttcagggagttc

SEQ ID NO: 1713086 - DNA, 25 bp, Homo sapien
gttcttcagggagttcaggtacctc

SEQ ID NO: 1713087 - DNA, 25 bp, Homo sapien
ccaggcttcgctggacagcttgttc

SEQ ID NO: 1713088 - DNA, 25 bp, Homo sapien
ttcagggagttcaggtacctcctgc

SEQ ID NO: 1713089 - DNA, 25 bp, Homo sapien
gggtcacaggctggcaagatttcct

SEQ ID NO: 1713090 - DNA, 25 bp, Homo sapien
gtccccgatcctgagagggtcacag

SEQ ID NO: 1713091 - DNA, 25 bp, Homo sapien
cccgatcctgagagggtcacaggct

SEQ ID NO: 1713092 - DNA, 25 bp, Homo sapien
ctgcgtccccgatcctgagagggtc

SEQ ID NO: 1713093 - DNA, 25 bp, Homo sapien
tagtctaagggcaggacagttcaca

SEQ ID NO: 1713094 - DNA, 25 bp, Homo sapien
gaggccccacctgagaagagtatta

SEQ ID NO: 1713095 - DNA, 25 bp, Homo sapien
gcgaagtaatccagcacggtgcgta

SEQ ID NO: 1713096 - DNA, 25 bp, Homo sapien
gctacttgagagatcccgctgggaa

SEQ ID NO: 1713097 - DNA, 25 bp, Homo sapien
tggaggcgcgccacataggcctgct

SEQ ID NO: 1713098 - DNA, 25 bp, Homo sapien
ctcctggacgatcttcttctctggc

SEQ ID NO: 1713099 - DNA, 25 bp, Homo sapien
tagcaggtggaggcgcgccacatag

SEQ ID NO: 1713100 - DNA, 25 bp, Homo sapien
cagctcctggacgatcttcttctct

SEQ ID NO: 1713101 - DNA, 25 bp, Homo sapien
tgtagccgccacgacaggtcactca

SEQ ID NO: 1713102 - DNA, 25 bp, Homo sapien
ctgtagccgccacgacaggtcactc

SEQ ID NO: 1713103 - DNA, 25 bp, Homo sapien
gaactgagaatggaactgatagatg

SEQ ID NO: 1713104 - DNA, 25 bp, Homo sapien
gaagaactgagaatggaactgatag

SEQ ID NO: 1713105 - DNA, 25 bp, Homo sapien
ctgagaatggaactgatagatggag

SEQ ID NO: 1713106 - DNA, 25 bp, Homo sapien
aactgagaatggaactgatagatgg

SEQ ID NO: 1713107 - DNA, 25 bp, Homo sapien
tgcagacagaccgagccccagggag

SEQ ID NO: 1713108 - DNA, 25 bp, Homo sapien
gcatggccacacaataagggcctgg

SEQ ID NO: 1713109 - DNA, 25 bp, Homo sapien
gcctgggcctaggaggctgaaccta

SEQ ID NO: 1713110 - DNA, 25 bp, Homo sapien
taggaggctgaacctagcgccctgg

SEQ ID NO: 1713111 - DNA, 25 bp, Homo sapien
ccgaacctggctattattatcttaa

SEQ ID NO: 1713112 - DNA, 25 bp, Homo sapien
ccatgatgccgtcatcacacagcag

SEQ ID NO: 1713113 - DNA, 25 bp, Homo sapien
cacacagcaggctgatgtgaagatt

SEQ ID NO: 1713114 - DNA, 25 bp, Homo sapien
taaaggacatcctagacttcgtggc

SEQ ID NO: 1713115 - DNA, 25 bp, Homo sapien
taacgagggctacctaccaagcact

SEQ ID NO: 1713116 - DNA, 25 bp, Homo sapien
tctcgactctagatagggccaggtg

SEQ ID NO: 1713117 - DNA, 25 bp, Homo sapien
tactccttagactgtgagcctcctg

SEQ ID NO: 1713118 - DNA, 25 bp, Homo sapien
gcactacccaggacatgatgcatgt

SEQ ID NO: 1713119 - DNA, 25 bp, Homo sapien
ttctggatcacgtcaccgatgcggg

SEQ ID NO: 1713120 - DNA, 25 bp, Homo sapien
gtgagaacctcctggaagagtggag

SEQ ID NO: 1713121 - DNA, 25 bp, Homo sapien
gcttctggatcacgtcaccgatgcg

SEQ ID NO: 1713122 - DNA, 25 bp, Homo sapien
ggagacttgtcggtccaggtggcca

SEQ ID NO: 1713123 - DNA, 25 bp, Homo sapien
gctgggagtggcaatgctgactcca

SEQ ID NO: 1713124 - DNA, 25 bp, Homo sapien
tcctgagggccggacgagtaggcag

SEQ ID NO: 1713125 - DNA, 25 bp, Homo sapien
ccggaatcactcaaggcaacctgag

SEQ ID NO: 1713126 - DNA, 25 bp, Homo sapien
agcctgggagatgcccggaatcact

SEQ ID NO: 1713127 - DNA, 25 bp, Homo sapien
gcttctggatgtactccttgagcag

SEQ ID NO: 1713128 - DNA, 25 bp, Homo sapien
cttctggatgtactccttgagcagc

SEQ ID NO: 1713129 - DNA, 25 bp, Homo sapien
gcagctcgtaacgtggaattctctg

SEQ ID NO: 1713130 - DNA, 25 bp, Homo sapien
gagcagcagctcgtaacgtggaatt

SEQ ID NO: 1713131 - DNA, 25 bp, Homo sapien
tagccattaggtgtttggctttggt

SEQ ID NO: 1713132 - DNA, 25 bp, Homo sapien
gaagccactgaacgttagccattag

SEQ ID NO: 1713133 - DNA, 25 bp, Homo sapien
gggtgtctgaatggcgggagccccc

SEQ ID NO: 1713134 - DNA, 25 bp, Homo sapien
gaacgttagccattaggtgtttggc

SEQ ID NO: 1713135 - DNA, 25 bp, Homo sapien
ggcagggccggagtttattccctga

SEQ ID NO: 1713136 - DNA, 25 bp, Homo sapien
ccctgagaatctagggctggtggct

SEQ ID NO: 1713137 - DNA, 25 bp, Homo sapien
gagtttattccctgagaatctaggg

SEQ ID NO: 1713138 - DNA, 25 bp, Homo sapien
ggccggagtttattccctgagaatc

SEQ ID NO: 1713139 - DNA, 25 bp, Homo sapien
cagctgagaagatcatgtccagggc

SEQ ID NO: 1713140 - DNA, 25 bp, Homo sapien
cagtgatggctgcattggagtgctg

SEQ ID NO: 1713141 - DNA, 25 bp, Homo sapien
tgggcagctgagaagatcatgtcca

SEQ ID NO: 1713142 - DNA, 25 bp, Homo sapien
gatggctgcattggagtgctgggca

SEQ ID NO: 1713143 - DNA, 25 bp, Homo sapien
ccctcacggagcagggtgttagagg

SEQ ID NO: 1713144 - DNA, 25 bp, Homo sapien
gggtctactatgtcgtcctcgaggc

SEQ ID NO: 1713145 - DNA, 25 bp, Homo sapien
aaaaggtagcgctccatggggtcgt

SEQ ID NO: 1713146 - DNA, 25 bp, Homo sapien
agatcttgaggaccgggccctcacg

SEQ ID NO: 1713147 - DNA, 25 bp, Homo sapien
ctgggcacacagtagagcagcatgt

SEQ ID NO: 1713148 - DNA, 25 bp, Homo sapien
acacagtagagcagcatgttgttga

SEQ ID NO: 1713149 - DNA, 25 bp, Homo sapien
gggcacacagtagagcagcatgttg

SEQ ID NO: 1713150 - DNA, 25 bp, Homo sapien
gcacacagtagagcagcatgttgtt

SEQ ID NO: 1713151 - DNA, 25 bp, Homo sapien
catcgatgcgggtcctcacctggaa

SEQ ID NO: 1713152 - DNA, 25 bp, Homo sapien
tcatcccggccacatcgatgcgggt

SEQ ID NO: 1713153 - DNA, 25 bp, Homo sapien
cttcatcccggccacatcgatgcgg

SEQ ID NO: 1713154 - DNA, 25 bp, Homo sapien
cctggaactgggcgcccacctggat

SEQ ID NO: 1713155 - DNA, 25 bp, Homo sapien
agtgtctctcagcagaagactggtt

SEQ ID NO: 1713156 - DNA, 25 bp, Homo sapien
actggttgaagaaattccggtgcat

SEQ ID NO: 1713157 - DNA, 25 bp, Homo sapien
tgctgacaactgaaaacaatctaag

SEQ ID NO: 1713158 - DNA, 25 bp, Homo sapien
actgcagcctcatttgcagctgctg

SEQ ID NO: 1713159 - DNA, 25 bp, Homo sapien
tgctgtgaactaggcctccctgaca

SEQ ID NO: 1713160 - DNA, 25 bp, Homo sapien
cttggagagaatcagctgctgtgaa

SEQ ID NO: 1713161 - DNA, 25 bp, Homo sapien
gaatcagctgctgtgaactaggcct

SEQ ID NO: 1713162 - DNA, 25 bp, Homo sapien
agctgctgtgaactaggcctccctg

SEQ ID NO: 1713163 - DNA, 25 bp, Homo sapien
agggtgcgctgcttcccggacacca

SEQ ID NO: 1713164 - DNA, 25 bp, Homo sapien
gctccagggtgcgctgcttcccgga

SEQ ID NO: 1713165 - DNA, 25 bp, Homo sapien
tccagggtgcgctgcttcccggaca

SEQ ID NO: 1713166 - DNA, 25 bp, Homo sapien
cagctccagggtgcgctgcttcccg

SEQ ID NO: 1713167 - DNA, 25 bp, Homo sapien
ctgcatccaggaaatcatttcctcc

SEQ ID NO: 1713168 - DNA, 25 bp, Homo sapien
tgaaggtttcattccgcttctcgat

SEQ ID NO: 1713169 - DNA, 25 bp, Homo sapien
cagccttgaaggtttcattccgctt

SEQ ID NO: 1713170 - DNA, 25 bp, Homo sapien
cccctgggccgcagccttgaaggtt

SEQ ID NO: 1713171 - DNA, 25 bp, Homo sapien
tccgcttctcgatttggtcaatggc

SEQ ID NO: 1713172 - DNA, 25 bp, Homo sapien
agctctatttgggttggtggctcca

SEQ ID NO: 1713173 - DNA, 25 bp, Homo sapien
tgcagacaggctctcaaaggaagtt

SEQ ID NO: 1713174 - DNA, 25 bp, Homo sapien
ggtggctccagcaagggatgaaaaa

SEQ ID NO: 1713175 - DNA, 25 bp, Homo sapien
gcaagctgactgacctgatcgagac

SEQ ID NO: 1713176 - DNA, 25 bp, Homo sapien
tggcgacggcgcgtcagagcgttga

SEQ ID NO: 1713177 - DNA, 25 bp, Homo sapien
cgcgtcagagcgttgaagggctcct

SEQ ID NO: 1713178 - DNA, 25 bp, Homo sapien
gcgcatgcacatggtcaccatcttg

SEQ ID NO: 1713179 - DNA, 25 bp, Homo sapien
tcccggacccactgcggtgcccgga

SEQ ID NO: 1713180 - DNA, 25 bp, Homo sapien
tagatgcccctccactagaactggg

SEQ ID NO: 1713181 - DNA, 25 bp, Homo sapien
cccatggcggagttaaggagactga

SEQ ID NO: 1713182 - DNA, 25 bp, Homo sapien
tcaaagactgaggttgcaaagggct

SEQ ID NO: 1713183 - DNA, 25 bp, Homo sapien
ggtaggtttcacgatccccatggcg

SEQ ID NO: 1713184 - DNA, 25 bp, Homo sapien
ctgacatggatcatgccgggaggct

SEQ ID NO: 1713185 - DNA, 25 bp, Homo sapien
acaaggattcccgtctggcaggcag

SEQ ID NO: 1713186 - DNA, 25 bp, Homo sapien
gactttgtattctgcgccatcatgg

SEQ ID NO: 1713187 - DNA, 25 bp, Homo sapien
tttacatgggtactctgtggagcgg

SEQ ID NO: 1713188 - DNA, 25 bp, Homo sapien
ggcctgttgtcgtcgtatttcagtt

SEQ ID NO: 1713189 - DNA, 25 bp, Homo sapien
aggcagactcggttgggcctgttgt

SEQ ID NO: 1713190 - DNA, 25 bp, Homo sapien
aatgcgtagcagtggaggcagactc

SEQ ID NO: 1713191 - DNA, 25 bp, Homo sapien
cagttcggcccggtagtcggagcac

SEQ ID NO: 1713192 - DNA, 25 bp, Homo sapien
acagaggacggatggtgagcgcggg

SEQ ID NO: 1713193 - DNA, 25 bp, Homo sapien
tccctgaacagaggacggatggtga

SEQ ID NO: 1713194 - DNA, 25 bp, Homo sapien
attccctgaacagaggacggatggt

SEQ ID NO: 1713195 - DNA, 25 bp, Homo sapien
gaacagaggacggatggtgagcgcg

SEQ ID NO: 1713196 - DNA, 25 bp, Homo sapien
agtgtcagcccagcatggttgccgg

SEQ ID NO: 1713197 - DNA, 25 bp, Homo sapien
agcccagcatggttgccgggcacac

SEQ ID NO: 1713198 - DNA, 25 bp, Homo sapien
tgtcagcccagcatggttgccgggc

SEQ ID NO: 1713199 - DNA, 25 bp, Homo sapien
ggacagtgtcagcccagcatggttg

SEQ ID NO: 1713200 - DNA, 25 bp, Homo sapien
ccaaagggtgcctccatttggtgac

SEQ ID NO: 1713201 - DNA, 25 bp, Homo sapien
gccaaagggtgcctccatttggtga

SEQ ID NO: 1713202 - DNA, 25 bp, Homo sapien
gcagaagaatgtggacgacagcctg

SEQ ID NO: 1713203 - DNA, 25 bp, Homo sapien
atgtggacgacagcctgcagccaaa

SEQ ID NO: 1713204 - DNA, 25 bp, Homo sapien
aatggagtctccaatctgtctgacc

SEQ ID NO: 1713205 - DNA, 25 bp, Homo sapien
gacgtgaacatgagctgtccagagg

SEQ ID NO: 1713206 - DNA, 25 bp, Homo sapien
gacctggagcgtcagtgttcccatc

SEQ ID NO: 1713207 - DNA, 25 bp, Homo sapien
tccatgggataagaccgactggccc

SEQ ID NO: 1713208 - DNA, 25 bp, Homo sapien
tgcctagctgagcacagttgtaccc

SEQ ID NO: 1713209 - DNA, 25 bp, Homo sapien
ctggttgacattgtatttgtgctgc

SEQ ID NO: 1713210 - DNA, 25 bp, Homo sapien
tgtcaacctggccttcgtgagggag

SEQ ID NO: 1713211 - DNA, 25 bp, Homo sapien
tcccagggacggtgggatgtcaacc

SEQ ID NO: 1713212 - DNA, 25 bp, Homo sapien
tcccgcctggccaaaagaggccaac

SEQ ID NO: 1713213 - DNA, 25 bp, Homo sapien
cttcccgcctggccaaaagaggcca

SEQ ID NO: 1713214 - DNA, 25 bp, Homo sapien
ttcccgcctggccaaaagaggccaa

SEQ ID NO: 1713215 - DNA, 25 bp, Homo sapien
caaaagaggccaacttgaacctggg

SEQ ID NO: 1713216 - DNA, 25 bp, Homo sapien
aggctgtgttgcctagtggtcaggg

SEQ ID NO: 1713217 - DNA, 25 bp, Homo sapien
tgcctagtggtcagggggtcctggg

SEQ ID NO: 1713218 - DNA, 25 bp, Homo sapien
gggcaggctgtgttgcctagtggtc

SEQ ID NO: 1713219 - DNA, 25 bp, Homo sapien
tgtcgcgtgtgtgcccacaaggggc

SEQ ID NO: 1713220 - DNA, 25 bp, Homo sapien
gcatagacatagagcacgagggggt

SEQ ID NO: 1713221 - DNA, 25 bp, Homo sapien
ggtcaggcgtggctgaggacccttt

SEQ ID NO: 1713222 - DNA, 25 bp, Homo sapien
gtcatcccgagggatcacacaccag

SEQ ID NO: 1713223 - DNA, 25 bp, Homo sapien
ctcttgccccacttgtccccgatga

SEQ ID NO: 1713224 - DNA, 25 bp, Homo sapien
gcaaagcagtggtgacctagagtca

SEQ ID NO: 1713225 - DNA, 25 bp, Homo sapien
ccctatctgacatatggagctagca

SEQ ID NO: 1713226 - DNA, 25 bp, Homo sapien
gatagccatcgtgaaggcaacagcc

SEQ ID NO: 1713227 - DNA, 25 bp, Homo sapien
gataccatatcctcattgggcctca

SEQ ID NO: 1713228 - DNA, 25 bp, Homo sapien
tcacccagcggcccttcagctcctc

SEQ ID NO: 1713229 - DNA, 25 bp, Homo sapien
tgaaggtgtagagctggcctgactg

SEQ ID NO: 1713230 - DNA, 25 bp, Homo sapien
gaaggtgtagagctggcctgactgc

SEQ ID NO: 1713231 - DNA, 25 bp, Homo sapien
aggtccccatcgttgggccagctgg

SEQ ID NO: 1713232 - DNA, 25 bp, Homo sapien
gagaggtgggcaggagagcggctgg

SEQ ID NO: 1713233 - DNA, 25 bp, Homo sapien
gggcaggagagcggctggcagtggc

SEQ ID NO: 1713234 - DNA, 25 bp, Homo sapien
gtgggcaggagagcggctggcagtg

SEQ ID NO: 1713235 - DNA, 25 bp, Homo sapien
aggtgggcaggagagcggctggcag

SEQ ID NO: 1713236 - DNA, 25 bp, Homo sapien
taaatcggtggtggtacttcagtac

SEQ ID NO: 1713237 - DNA, 25 bp, Homo sapien
tagcactggaagtcccatggcccag

SEQ ID NO: 1713238 - DNA, 25 bp, Homo sapien
tctaatcccagatcgggacacgtgg

SEQ ID NO: 1713239 - DNA, 25 bp, Homo sapien
ttaaaaaatatgcatgcgccaggta

SEQ ID NO: 1713240 - DNA, 25 bp, Homo sapien
gacggctacctcattttgctccaca

SEQ ID NO: 1713241 - DNA, 25 bp, Homo sapien
tggtggtagctgtatgactgtactc

SEQ ID NO: 1713242 - DNA, 25 bp, Homo sapien
tcccactcagattaaacccctggaa

SEQ ID NO: 1713243 - DNA, 25 bp, Homo sapien
taacaatgacagcacaaaggttgtg

SEQ ID NO: 1713244 - DNA, 25 bp, Homo sapien
gaaagcagaaacgtccatgaagagc

SEQ ID NO: 1713245 - DNA, 25 bp, Homo sapien
agagatatcacagtggccgggccaa

SEQ ID NO: 1713246 - DNA, 25 bp, Homo sapien
taaccccatgctactggagggctgg

SEQ ID NO: 1713247 - DNA, 25 bp, Homo sapien
tccgtctgtgggctaggagctttcc

SEQ ID NO: 1713248 - DNA, 25 bp, Homo sapien
ggagcgcaccaccacaccgagctaa

SEQ ID NO: 1713249 - DNA, 25 bp, Homo sapien
ttacaggagcgcaccaccacaccga

SEQ ID NO: 1713250 - DNA, 25 bp, Homo sapien
gggattacaggagcgcaccaccaca

SEQ ID NO: 1713251 - DNA, 25 bp, Homo sapien
gattacaggagcgcaccaccacacc

SEQ ID NO: 1713252 - DNA, 25 bp, Homo sapien
ttttgatctggactgccgcagcgcc

SEQ ID NO: 1713253 - DNA, 25 bp, Homo sapien
gatctggactgccgcagcgccgcaa

SEQ ID NO: 1713254 - DNA, 25 bp, Homo sapien
ttgatctggactgccgcagcgccgc

SEQ ID NO: 1713255 - DNA, 25 bp, Homo sapien
tttgatctggactgccgcagcgccg

SEQ ID NO: 1713256 - DNA, 25 bp, Homo sapien
gcgggaccgacccagcagccgagaa

SEQ ID NO: 1713257 - DNA, 25 bp, Homo sapien
tgggcgggaccgacccagcagccga

SEQ ID NO: 1713258 - DNA, 25 bp, Homo sapien
agctgtgggcgggaccgacccagca

SEQ ID NO: 1713259 - DNA, 25 bp, Homo sapien
gggaccgacccagcagccgagaaac

SEQ ID NO: 1713260 - DNA, 25 bp, Homo sapien
acattcagcatgctgactgccaccc

SEQ ID NO: 1713261 - DNA, 25 bp, Homo sapien
attcagcatgctgactgccaccccg

SEQ ID NO: 1713262 - DNA, 25 bp, Homo sapien
cccggggagcgcgacgaagaaggtg

SEQ ID NO: 1713263 - DNA, 25 bp, Homo sapien
agcatgctgactgccaccccgggga

SEQ ID NO: 1713264 - DNA, 25 bp, Homo sapien
cgggtctctcgtgctctccgtggtg

SEQ ID NO: 1713265 - DNA, 25 bp, Homo sapien
tattcatcttcgtagccagttggaa

SEQ ID NO: 1713266 - DNA, 25 bp, Homo sapien
ggtaggcgatgaactcgggtctctc

SEQ ID NO: 1713267 - DNA, 25 bp, Homo sapien
agtggattcacatgagggttatgga

SEQ ID NO: 1713268 - DNA, 25 bp, Homo sapien
gggatgggagaccagtataccagtc

SEQ ID NO: 1713269 - DNA, 25 bp, Homo sapien
ccagtataccagtcatcatttgata

SEQ ID NO: 1713270 - DNA, 25 bp, Homo sapien
tggtgcccgggtagtggtccagatt

SEQ ID NO: 1713271 - DNA, 25 bp, Homo sapien
aggtgagcttaaggtcccatatact

SEQ ID NO: 1713272 - DNA, 25 bp, Homo sapien
atttatttaagccatctcccgccac

SEQ ID NO: 1713273 - DNA, 25 bp, Homo sapien
tatttaagccatctcccgccacaag

SEQ ID NO: 1713274 - DNA, 25 bp, Homo sapien
tttatttaagccatctcccgccaca

SEQ ID NO: 1713275 - DNA, 25 bp, Homo sapien
tttaagccatctcccgccacaagca

SEQ ID NO: 1713276 - DNA, 25 bp, Homo sapien
cttggatatatcagggatgaggaga

SEQ ID NO: 1713277 - DNA, 25 bp, Homo sapien
tgcccttggatatatcagggatgag

SEQ ID NO: 1713278 - DNA, 25 bp, Homo sapien
gcagctgcccttggatatatcaggg

SEQ ID NO: 1713279 - DNA, 25 bp, Homo sapien
gctgcccttggatatatcagggatg

SEQ ID NO: 1713280 - DNA, 25 bp, Homo sapien
taagaccaacggacgcaaagatggt

SEQ ID NO: 1713281 - DNA, 25 bp, Homo sapien
catcagatgtcccaggagcactcct

SEQ ID NO: 1713282 - DNA, 25 bp, Homo sapien
tcatactcatacatccatagctttc

SEQ ID NO: 1713283 - DNA, 25 bp, Homo sapien
acaaatgtacttggccagtcatcag

SEQ ID NO: 1713284 - DNA, 25 bp, Homo sapien
ggacggtttatagcccgtgcagaac

SEQ ID NO: 1713285 - DNA, 25 bp, Homo sapien
gaaataagacgctggtgagggtcac

SEQ ID NO: 1713286 - DNA, 25 bp, Homo sapien
gagtcgcctaggatttgccaagtca

SEQ ID NO: 1713287 - DNA, 25 bp, Homo sapien
gatggcccttgatccccgggtgttg

SEQ ID NO: 1713288 - DNA, 25 bp, Homo sapien
tcctgttcccgttacagttatttga

SEQ ID NO: 1713289 - DNA, 25 bp, Homo sapien
aggatcgcactggtaaaagccctgt

SEQ ID NO: 1713290 - DNA, 25 bp, Homo sapien
tcatctcctgttcccgttacagtta

SEQ ID NO: 1713291 - DNA, 25 bp, Homo sapien
ttttgctctgactttcacctcttgg

SEQ ID NO: 1713292 - DNA, 25 bp, Homo sapien
gctggcagaggccttttaggctgaa

SEQ ID NO: 1713293 - DNA, 25 bp, Homo sapien
tggacctcattaagagccgccagca

SEQ ID NO: 1713294 - DNA, 25 bp, Homo sapien
ggtactcaggactccaagcacagtg

SEQ ID NO: 1713295 - DNA, 25 bp, Homo sapien
tctggatgcagcagagtcgtgccct

SEQ ID NO: 1713296 - DNA, 25 bp, Homo sapien
attctggaccgccgaagaaagttgc

SEQ ID NO: 1713297 - DNA, 25 bp, Homo sapien
ttctggaccgccgaagaaagttgca

SEQ ID NO: 1713298 - DNA, 25 bp, Homo sapien
agattctggaccgccgaagaaagtt

SEQ ID NO: 1713299 - DNA, 25 bp, Homo sapien
gattctggaccgccgaagaaagttg

SEQ ID NO: 1713300 - DNA, 25 bp, Homo sapien
tctcgctggggttgaacttcggcca

SEQ ID NO: 1713301 - DNA, 25 bp, Homo sapien
atctcgctggggttgaacttcggcc

SEQ ID NO: 1713302 - DNA, 25 bp, Homo sapien
aaagatcggtgccgcatccgtggag

SEQ ID NO: 1713303 - DNA, 25 bp, Homo sapien
ctaaagatcggtgccgcatccgtgg

SEQ ID NO: 1713304 - DNA, 25 bp, Homo sapien
taaagatcggtgccgcatccgtgga

SEQ ID NO: 1713305 - DNA, 25 bp, Homo sapien
agatcggtgccgcatccgtggagca

SEQ ID NO: 1713306 - DNA, 25 bp, Homo sapien
ttaactagctgggcattccacagca

SEQ ID NO: 1713307 - DNA, 25 bp, Homo sapien
taactagctgggcattccacagcac

SEQ ID NO: 1713308 - DNA, 25 bp, Homo sapien
aaatgatcctttattgaaatatttt

SEQ ID NO: 1713309 - DNA, 25 bp, Homo sapien
ttttgttttgtttgtcaaatgatcc

SEQ ID NO: 1713310 - DNA, 25 bp, Homo sapien
tttgttttgtttgtcaaatgatcct

SEQ ID NO: 1713311 - DNA, 25 bp, Homo sapien
tttattgaaatattttcctttgtgc

SEQ ID NO: 1713312 - DNA, 25 bp, Homo sapien
tcttaagtgggtacggtctgtaaca

SEQ ID NO: 1713313 - DNA, 25 bp, Homo sapien
aaagcggtattggaagagacccaca

SEQ ID NO: 1713314 - DNA, 25 bp, Homo sapien
gagacccacaaggtcagggttctga

SEQ ID NO: 1713315 - DNA, 25 bp, Homo sapien
taagccaatgctctaatatgtttgt

SEQ ID NO: 1713316 - DNA, 25 bp, Homo sapien
agctataaactggtaaactggactc

SEQ ID NO: 1713317 - DNA, 25 bp, Homo sapien
tagattcctggtttcaaatgttcca

SEQ ID NO: 1713318 - DNA, 25 bp, Homo sapien
ggatccttctgggatatagattcct

SEQ ID NO: 1713319 - DNA, 25 bp, Homo sapien
gatgtatttaggagtaactgagtca

SEQ ID NO: 1713320 - DNA, 25 bp, Homo sapien
ttttgaccatgctcattctcgctgc

SEQ ID NO: 1713321 - DNA, 25 bp, Homo sapien
gagcagacttgggactgagacctgt

SEQ ID NO: 1713322 - DNA, 25 bp, Homo sapien
cactcaggttattaagacttcagca

SEQ ID NO: 1713323 - DNA, 25 bp, Homo sapien
gaattattgcatggcagtcactcag

SEQ ID NO: 1713324 - DNA, 25 bp, Homo sapien
ttgacaggacaaaattgagacacat

SEQ ID NO: 1713325 - DNA, 25 bp, Homo sapien
agttgacaggacaaaattgagacac

SEQ ID NO: 1713326 - DNA, 25 bp, Homo sapien
cagttgacaggacaaaattgagaca

SEQ ID NO: 1713327 - DNA, 25 bp, Homo sapien
gttgacaggacaaaattgagacaca

SEQ ID NO: 1713328 - DNA, 25 bp, Homo sapien
tttcgtagattccagggatctgcca

SEQ ID NO: 1713329 - DNA, 25 bp, Homo sapien
tgccaggaaagacaattctcgaaga

SEQ ID NO: 1713330 - DNA, 25 bp, Homo sapien
cctgttttcgtagattccagggatc

SEQ ID NO: 1713331 - DNA, 25 bp, Homo sapien
aagacaattctcgaagaggtgccat

SEQ ID NO: 1713332 - DNA, 25 bp, Homo sapien
ccttatttatccctgtggcgctgcc

SEQ ID NO: 1713333 - DNA, 25 bp, Homo sapien
cagaagcccgggcaacacttgtggt

SEQ ID NO: 1713334 - DNA, 25 bp, Homo sapien
tgtaaggtgcggttgttggccttat

SEQ ID NO: 1713335 - DNA, 25 bp, Homo sapien
cagaagtctgcgtaatcctcgggat

SEQ ID NO: 1713336 - DNA, 25 bp, Homo sapien
catatacttcctcttttccaactct

SEQ ID NO: 1713337 - DNA, 25 bp, Homo sapien
aacatatacttcctcttttccaact

SEQ ID NO: 1713338 - DNA, 25 bp, Homo sapien
tatacttcctcttttccaactctgt

SEQ ID NO: 1713339 - DNA, 25 bp, Homo sapien
atatacttcctcttttccaactctg

SEQ ID NO: 1713340 - DNA, 25 bp, Homo sapien
gagtcggaggacaactgagggcgct

SEQ ID NO: 1713341 - DNA, 25 bp, Homo sapien
gtcgggcagcgctgagaacggcggg

SEQ ID NO: 1713342 - DNA, 25 bp, Homo sapien
gcggaaggccgagggcgagtcggag

SEQ ID NO: 1713343 - DNA, 25 bp, Homo sapien
ctgtggctgcgggtggcgttgcggc

SEQ ID NO: 1713344 - DNA, 25 bp, Homo sapien
gagccggagccggggctgtgccgaa

SEQ ID NO: 1713345 - DNA, 25 bp, Homo sapien
caggagccggagccggggctgtgcc

SEQ ID NO: 1713346 - DNA, 25 bp, Homo sapien
gccggagccggggctgtgccgaagg

SEQ ID NO: 1713347 - DNA, 25 bp, Homo sapien
aggagccggagccggggctgtgccg

SEQ ID NO: 1713348 - DNA, 25 bp, Homo sapien
caacctccaggatgtcggcgcaggg

SEQ ID NO: 1713349 - DNA, 25 bp, Homo sapien
tcggcgcagggacggtgcccagagg

SEQ ID NO: 1713350 - DNA, 25 bp, Homo sapien
cccaacctccaggatgtcggcgcag

SEQ ID NO: 1713351 - DNA, 25 bp, Homo sapien
acctccaggatgtcggcgcagggac

SEQ ID NO: 1713352 - DNA, 25 bp, Homo sapien
gtgcaggtcgttgcagggcgcggcg

SEQ ID NO: 1713353 - DNA, 25 bp, Homo sapien
cgggcgccagcttggtggcgtgcag

SEQ ID NO: 1713354 - DNA, 25 bp, Homo sapien
cggcgcgcaggtgggcaagcgagtt

SEQ ID NO: 1713355 - DNA, 25 bp, Homo sapien
caagcgagttgattttggacaagag

SEQ ID NO: 1713356 - DNA, 25 bp, Homo sapien
gtagaccgagccgaagccgccgctg

SEQ ID NO: 1713357 - DNA, 25 bp, Homo sapien
cagtagcgggcccacctggtactgc

SEQ ID NO: 1713358 - DNA, 25 bp, Homo sapien
caagttgtcggagacgcggatgcct

SEQ ID NO: 1713359 - DNA, 25 bp, Homo sapien
agcgggcccacctggtactgcgact

SEQ ID NO: 1713360 - DNA, 25 bp, Homo sapien
gaagcccagggtctccgtcaggttc

SEQ ID NO: 1713361 - DNA, 25 bp, Homo sapien
ccagggtctccgtcaggttccctcg

SEQ ID NO: 1713362 - DNA, 25 bp, Homo sapien
ctggaagcccagggtctccgtcagg

SEQ ID NO: 1713363 - DNA, 25 bp, Homo sapien
cagggtctccgtcaggttccctcgt

SEQ ID NO: 1713364 - DNA, 25 bp, Homo sapien
cggaaatccggtccttctccacgtg

SEQ ID NO: 1713365 - DNA, 25 bp, Homo sapien
cagtcggaaatccggtccttctcca

SEQ ID NO: 1713366 - DNA, 25 bp, Homo sapien
gctctccccagtcggaaatccggtc

SEQ ID NO: 1713367 - DNA, 25 bp, Homo sapien
aggagcctaatgacgccggagaaac

SEQ ID NO: 1713368 - DNA, 25 bp, Homo sapien
cagggctcccctttccgtgatgaag

SEQ ID NO: 1713369 - DNA, 25 bp, Homo sapien
tcgaagagatcttgcaccggctcgg

SEQ ID NO: 1713370 - DNA, 25 bp, Homo sapien
tctccaggatcaggacgaaactgtc

SEQ ID NO: 1713371 - DNA, 25 bp, Homo sapien
gctggctgaaaatccccggctttac

SEQ ID NO: 1713372 - DNA, 25 bp, Homo sapien
gctttactacgctgggaggctctcc

SEQ ID NO: 1713373 - DNA, 25 bp, Homo sapien
ttcatcgggaaagcctggaactaac

SEQ ID NO: 1713374 - DNA, 25 bp, Homo sapien
caggcggcccaatgacctttacaaa

SEQ ID NO: 1713375 - DNA, 25 bp, Homo sapien
ccaggagcccgggtgagattctcat

SEQ ID NO: 1713376 - DNA, 25 bp, Homo sapien
ccacccgatgcaagcaggagcagac

SEQ ID NO: 1713377 - DNA, 25 bp, Homo sapien
ttctcatggccgacaggatccaagc

SEQ ID NO: 1713378 - DNA, 25 bp, Homo sapien
tccaagcaaggatgcttgcacaaca

SEQ ID NO: 1713379 - DNA, 25 bp, Homo sapien
tgtctgcacaaccaagaaaggtatc

SEQ ID NO: 1713380 - DNA, 25 bp, Homo sapien
tctgctagcccaaaccataaactga

SEQ ID NO: 1713381 - DNA, 25 bp, Homo sapien
aaggatgaagggatgcatgtctgca

SEQ ID NO: 1713382 - DNA, 25 bp, Homo sapien
gcaggaccgcctgcgaaggatgaag

SEQ ID NO: 1713383 - DNA, 25 bp, Homo sapien
aggagctaggtgaactccatttttc

SEQ ID NO: 1713384 - DNA, 25 bp, Homo sapien
gaagctgggtggtatatataactct

SEQ ID NO: 1713385 - DNA, 25 bp, Homo sapien
tggaggcgcaccttacggcatctct

SEQ ID NO: 1713386 - DNA, 25 bp, Homo sapien
tctgggctaaggagagtggaggcgc

SEQ ID NO: 1713387 - DNA, 25 bp, Homo sapien
cgatggtagcggatccactctggag

SEQ ID NO: 1713388 - DNA, 25 bp, Homo sapien
ccatggtagcgatggtagcggatcc

SEQ ID NO: 1713389 - DNA, 25 bp, Homo sapien
gtagcgatggtagcggatccactct

SEQ ID NO: 1713390 - DNA, 25 bp, Homo sapien
tggtagcgatggtagcggatccact

SEQ ID NO: 1713391 - DNA, 25 bp, Homo sapien
tcgtcatgctcgaaaggaatatctc

SEQ ID NO: 1713392 - DNA, 25 bp, Homo sapien
gaaaggaatatctccacacaccata

SEQ ID NO: 1713393 - DNA, 25 bp, Homo sapien
accatatcatacagcaggatcccca

SEQ ID NO: 1713394 - DNA, 25 bp, Homo sapien
gatctcttcgtcatgctcgaaagga

SEQ ID NO: 1713395 - DNA, 25 bp, Homo sapien
ttttacactgcaaaggtcttcccca

SEQ ID NO: 1713396 - DNA, 25 bp, Homo sapien
cagggaggccaagcattttctagaa

SEQ ID NO: 1713397 - DNA, 25 bp, Homo sapien
tgctgggtacccttcaataggaagg

SEQ ID NO: 1713398 - DNA, 25 bp, Homo sapien
tagacgaggttatgaatgactcaac

SEQ ID NO: 1713399 - DNA, 25 bp, Homo sapien
gaggtggatctcagcagtttcctgg

SEQ ID NO: 1713400 - DNA, 25 bp, Homo sapien
tcgaaggttggcctatctgatggtc

SEQ ID NO: 1713401 - DNA, 25 bp, Homo sapien
ggagaacatcttgcatccatggatg

SEQ ID NO: 1713402 - DNA, 25 bp, Homo sapien
gtctcagggccaagcaccatctaat

SEQ ID NO: 1713403 - DNA, 25 bp, Homo sapien
tgacctccaggttagaatgcgcatc

SEQ ID NO: 1713404 - DNA, 25 bp, Homo sapien
tcgcggcattcagcagaactcatga

SEQ ID NO: 1713405 - DNA, 25 bp, Homo sapien
gacgtgtcactggtactcgggaagc

SEQ ID NO: 1713406 - DNA, 25 bp, Homo sapien
agttccatggcagggttctgaccca

SEQ ID NO: 1713407 - DNA, 25 bp, Homo sapien
tattcccctgtacagtatttcactc

SEQ ID NO: 1713408 - DNA, 25 bp, Homo sapien
gaggatctggaaggcacaccatcca

SEQ ID NO: 1713409 - DNA, 25 bp, Homo sapien
agcaggctacctgctgctcaaaaca

SEQ ID NO: 1713410 - DNA, 25 bp, Homo sapien
gataaaaccagcaggctacctgctg

SEQ ID NO: 1713411 - DNA, 25 bp, Homo sapien
tcttaaggaaggactcacgacttgc

SEQ ID NO: 1713412 - DNA, 25 bp, Homo sapien
gctaaacataagaggttctaaagta

SEQ ID NO: 1713413 - DNA, 25 bp, Homo sapien
tgtcatgtgtccaaagctagctgca

SEQ ID NO: 1713414 - DNA, 25 bp, Homo sapien
ggactgcctaaggtaaggagtttga

SEQ ID NO: 1713415 - DNA, 25 bp, Homo sapien
ggtggtggaaacgttctgtatcctg

SEQ ID NO: 1713416 - DNA, 25 bp, Homo sapien
attgtggtcatggttacaggggcct

SEQ ID NO: 1713417 - DNA, 25 bp, Homo sapien
agattgaatgcaaagggcccgggaa

SEQ ID NO: 1713418 - DNA, 25 bp, Homo sapien
taaaatcctacaacaggcaaaccta

SEQ ID NO: 1713419 - DNA, 25 bp, Homo sapien
tgtgctgtactctgtagtgtgaaca

SEQ ID NO: 1713420 - DNA, 25 bp, Homo sapien
gtgtgaacactgtactgaacattgt

SEQ ID NO: 1713421 - DNA, 25 bp, Homo sapien
tgtcaaggagtgtgaaaggcacttc

SEQ ID NO: 1713422 - DNA, 25 bp, Homo sapien
tgtgtaagatatgaatgactatgag

SEQ ID NO: 1713423 - DNA, 25 bp, Homo sapien
tcttaaaggtatcctctgaattgtc

SEQ ID NO: 1713424 - DNA, 25 bp, Homo sapien
tgtgagctgccatacactcatccat

SEQ ID NO: 1713425 - DNA, 25 bp, Homo sapien
ctgaattgtctttccctatgtgagc

SEQ ID NO: 1713426 - DNA, 25 bp, Homo sapien
aaccagcagttcagagttcattgtc

SEQ ID NO: 1713427 - DNA, 25 bp, Homo sapien
tcctggggacgccatcttggatgtg

SEQ ID NO: 1713428 - DNA, 25 bp, Homo sapien
gtttgcccggcgagatgcccccaga

SEQ ID NO: 1713429 - DNA, 25 bp, Homo sapien
ctctggccgggggaagtccttgtag

SEQ ID NO: 1713430 - DNA, 25 bp, Homo sapien
ggccaagggtttgcccggcgagatg

SEQ ID NO: 1713431 - DNA, 25 bp, Homo sapien
actgcttgctgttctcagcggccat

SEQ ID NO: 1713432 - DNA, 25 bp, Homo sapien
aaactgcttgctgttctcagcggcc

SEQ ID NO: 1713433 - DNA, 25 bp, Homo sapien
aaaactgcttgctgttctcagcggc

SEQ ID NO: 1713434 - DNA, 25 bp, Homo sapien
aactgcttgctgttctcagcggcca

SEQ ID NO: 1713435 - DNA, 25 bp, Homo sapien
taaaagcattacgtacaatagccca

SEQ ID NO: 1713436 - DNA, 25 bp, Homo sapien
gatacatactacagcgtggacaagc

SEQ ID NO: 1713437 - DNA, 25 bp, Homo sapien
tcttctaggcattaatacaatgacc

SEQ ID NO: 1713438 - DNA, 25 bp, Homo sapien
taaaagatgcttagttccaccaagt

SEQ ID NO: 1713439 - DNA, 25 bp, Homo sapien
ttcatcattactcatggtagggagc

SEQ ID NO: 1713440 - DNA, 25 bp, Homo sapien
tcatggtagggagccaacaggtact

SEQ ID NO: 1713441 - DNA, 25 bp, Homo sapien
cattactcatggtagggagccaaca

SEQ ID NO: 1713442 - DNA, 25 bp, Homo sapien
ttactcatggtagggagccaacagg

SEQ ID NO: 1713443 - DNA, 25 bp, Homo sapien
ggtgagccgtgggtcaagaggagga

SEQ ID NO: 1713444 - DNA, 25 bp, Homo sapien
ttttggtgagccgtgggtcaagagg

SEQ ID NO: 1713445 - DNA, 25 bp, Homo sapien
ccgtgggtcaagaggaggatgctgt

SEQ ID NO: 1713446 - DNA, 25 bp, Homo sapien
gagccgtgggtcaagaggaggatgc

SEQ ID NO: 1713447 - DNA, 25 bp, Homo sapien
cacatgctgttctagaggctatggg

SEQ ID NO: 1713448 - DNA, 25 bp, Homo sapien
cagtcatgcttcctcagtaattcag

SEQ ID NO: 1713449 - DNA, 25 bp, Homo sapien
ccttgcagacaagaacagcagtcat

SEQ ID NO: 1713450 - DNA, 25 bp, Homo sapien
tgcatgccagcctcaatagagcgac

SEQ ID NO: 1713451 - DNA, 25 bp, Homo sapien
taggtaaccagtaatgcctgcctca

SEQ ID NO: 1713452 - DNA, 25 bp, Homo sapien
ccagaaccaatgagatgagaccagt

SEQ ID NO: 1713453 - DNA, 25 bp, Homo sapien
ccaggagactttctttgattggcca

SEQ ID NO: 1713454 - DNA, 25 bp, Homo sapien
tctatttaatgggacgatcacacag

SEQ ID NO: 1713455 - DNA, 25 bp, Homo sapien
tgcagtaccacctcaggggattcgc

SEQ ID NO: 1713456 - DNA, 25 bp, Homo sapien
tgatctaccacctgcagtaccacct

SEQ ID NO: 1713457 - DNA, 25 bp, Homo sapien
gggattcgctgtcgagaacaaacat

SEQ ID NO: 1713458 - DNA, 25 bp, Homo sapien
tgtaaaaggggacctgatctaccac

SEQ ID NO: 1713459 - DNA, 25 bp, Homo sapien
cttgtagttggcagggacgtccgat

SEQ ID NO: 1713460 - DNA, 25 bp, Homo sapien
tcatcatcgccaatgtcccaagcat

SEQ ID NO: 1713461 - DNA, 25 bp, Homo sapien
tggtattccgtgcaaactcatgaaa

SEQ ID NO: 1713462 - DNA, 25 bp, Homo sapien
tccgatgtcgttgactgggaccgtt

SEQ ID NO: 1713463 - DNA, 25 bp, Homo sapien
ggccccagaagcgttctgatccgag

SEQ ID NO: 1713464 - DNA, 25 bp, Homo sapien
aagtcagtgttctggctggagagaa

SEQ ID NO: 1713465 - DNA, 25 bp, Homo sapien
cgggttttctcccggacagtcattg

SEQ ID NO: 1713466 - DNA, 25 bp, Homo sapien
tctgatccgagatccgggcaacgag

SEQ ID NO: 1713467 - DNA, 25 bp, Homo sapien
ggagtctccaggttataggtcgaac

SEQ ID NO: 1713468 - DNA, 25 bp, Homo sapien
ggccagctacacttcctcagttcat

SEQ ID NO: 1713469 - DNA, 25 bp, Homo sapien
cgacaggagtctccaggttataggt

SEQ ID NO: 1713470 - DNA, 25 bp, Homo sapien
caggttataggtcgaacctccctgg

SEQ ID NO: 1713471 - DNA, 25 bp, Homo sapien
tttctctacacagtgggtagaactc

SEQ ID NO: 1713472 - DNA, 25 bp, Homo sapien
catttctctacacagtgggtagaac

SEQ ID NO: 1713473 - DNA, 25 bp, Homo sapien
cacatttctctacacagtgggtaga

SEQ ID NO: 1713474 - DNA, 25 bp, Homo sapien
tcacatttctctacacagtgggtag

SEQ ID NO: 1713475 - DNA, 25 bp, Homo sapien
agtcataatactgttcaatgaagcc

SEQ ID NO: 1713476 - DNA, 25 bp, Homo sapien
cctggtgatgttcctcgtttcgaga

SEQ ID NO: 1713477 - DNA, 25 bp, Homo sapien
tcataatactgttcaatgaagccaa

SEQ ID NO: 1713478 - DNA, 25 bp, Homo sapien
tcctcgtttcgagagtcataatact

SEQ ID NO: 1713479 - DNA, 25 bp, Homo sapien
ctcctgtacaagtggttgctggaac

SEQ ID NO: 1713480 - DNA, 25 bp, Homo sapien
aacaacggaatgagaggattcgtcc

SEQ ID NO: 1713481 - DNA, 25 bp, Homo sapien
caagtggttgctggaacaacggaat

SEQ ID NO: 1713482 - DNA, 25 bp, Homo sapien
tcgtccttggaatgtcaatgtgaat

SEQ ID NO: 1713483 - DNA, 25 bp, Homo sapien
catagatcgttgtgcctacagcggg

SEQ ID NO: 1713484 - DNA, 25 bp, Homo sapien
aagaggccctctcaagcaggtggaa

SEQ ID NO: 1713485 - DNA, 25 bp, Homo sapien
tagagacataaaggatgcttcccag

SEQ ID NO: 1713486 - DNA, 25 bp, Homo sapien
cactgcatcagattgaagaggccct

SEQ ID NO: 1713487 - DNA, 25 bp, Homo sapien
gcaggaagtcagttcacatatcagg

SEQ ID NO: 1713488 - DNA, 25 bp, Homo sapien
ttaattctaacccagcctgactagg

SEQ ID NO: 1713489 - DNA, 25 bp, Homo sapien
cctatggactcctatagctgggaat

SEQ ID NO: 1713490 - DNA, 25 bp, Homo sapien
cctgactaggaccaagtgacagact

SEQ ID NO: 1713491 - DNA, 25 bp, Homo sapien
gcggatggcccaaataaatagaatt

SEQ ID NO: 1713492 - DNA, 25 bp, Homo sapien
atattctgagaggaagacgacaaag

SEQ ID NO: 1713493 - DNA, 25 bp, Homo sapien
attccctggacatacccactggcag

SEQ ID NO: 1713494 - DNA, 25 bp, Homo sapien
agacgacaaagaatggagtgaccag

SEQ ID NO: 1713495 - DNA, 25 bp, Homo sapien
gaagccagacattgactactcccct

SEQ ID NO: 1713496 - DNA, 25 bp, Homo sapien
cagaacagacgctgtgttggcaggt

SEQ ID NO: 1713497 - DNA, 25 bp, Homo sapien
cagagctctcaggtgtctaggttca

SEQ ID NO: 1713498 - DNA, 25 bp, Homo sapien
gcaagaggtctcaacagtggcctca

SEQ ID NO: 1713499 - DNA, 25 bp, Homo sapien
caggctttgaaagcttgctatatga

SEQ ID NO: 1713500 - DNA, 25 bp, Homo sapien
gaaaaacaatgtatgcagctccatc

SEQ ID NO: 1713501 - DNA, 25 bp, Homo sapien
tcatttttctgaacccagtaaagaa

SEQ ID NO: 1713502 - DNA, 25 bp, Homo sapien
taacaactgtagttatcttggaggt

SEQ ID NO: 1713503 - DNA, 25 bp, Homo sapien
gcactgtcaccactagacccagaca

SEQ ID NO: 1713504 - DNA, 25 bp, Homo sapien
tgcagaggacccacttttacaggag

SEQ ID NO: 1713505 - DNA, 25 bp, Homo sapien
gaggacccacttttacaggagcagc

SEQ ID NO: 1713506 - DNA, 25 bp, Homo sapien
cagaggacccacttttacaggagca

SEQ ID NO: 1713507 - DNA, 25 bp, Homo sapien
cataagttggtaaggtgccatgctc

SEQ ID NO: 1713508 - DNA, 25 bp, Homo sapien
caaactgttagccatctagggagca

SEQ ID NO: 1713509 - DNA, 25 bp, Homo sapien
cagccagtgagatagttccccagca

SEQ ID NO: 1713510 - DNA, 25 bp, Homo sapien
ttcagaaggatcattaagcgtccac

SEQ ID NO: 1713511 - DNA, 25 bp, Homo sapien
aagtggtaatatcagtactagtgtc

SEQ ID NO: 1713512 - DNA, 25 bp, Homo sapien
taatatcagtactagtgtcatagga

SEQ ID NO: 1713513 - DNA, 25 bp, Homo sapien
gtcataggatattttatggattaaa

SEQ ID NO: 1713514 - DNA, 25 bp, Homo sapien
gttaaagtggtaatatcagtactag

SEQ ID NO: 1713515 - DNA, 25 bp, Homo sapien
catgaccataaacaatgccccaagg

SEQ ID NO: 1713516 - DNA, 25 bp, Homo sapien
tagttcattgctgcatggtgcgcct

SEQ ID NO: 1713517 - DNA, 25 bp, Homo sapien
gactagcctcacaacggtgcacaag

SEQ ID NO: 1713518 - DNA, 25 bp, Homo sapien
cagggatggatatacccaggttgcc

SEQ ID NO: 1713519 - DNA, 25 bp, Homo sapien
tgtaaaacaacactaagcttgcaga

SEQ ID NO: 1713520 - DNA, 25 bp, Homo sapien
ttgtaacgacataaaaaagcatgcc

SEQ ID NO: 1713521 - DNA, 25 bp, Homo sapien
ccccaggtggtacgaatgaaggatt

SEQ ID NO: 1713522 - DNA, 25 bp, Homo sapien
gagccacaattgactacatctgcct

SEQ ID NO: 1713523 - DNA, 25 bp, Homo sapien
ccaagtgaggaccaggctaacctga

SEQ ID NO: 1713524 - DNA, 25 bp, Homo sapien
gatctcactacaacactggacaggc

SEQ ID NO: 1713525 - DNA, 25 bp, Homo sapien
tgctagtcccatcaggtccaacata

SEQ ID NO: 1713526 - DNA, 25 bp, Homo sapien
tcaggtgggcaaatatgtcccttca

SEQ ID NO: 1713527 - DNA, 25 bp, Homo sapien
cagcatgtcttgagacaagttggtc

SEQ ID NO: 1713528 - DNA, 25 bp, Homo sapien
ttggtcacgtcaaagttctccacat

SEQ ID NO: 1713529 - DNA, 25 bp, Homo sapien
tgtcagcctcaatgcttcgcagcat

SEQ ID NO: 1713530 - DNA, 25 bp, Homo sapien
tgctcatgcaccaaaagctgtcagc

SEQ ID NO: 1713531 - DNA, 25 bp, Homo sapien
cggctgacaagctcttccagtgcct

SEQ ID NO: 1713532 - DNA, 25 bp, Homo sapien
ctggttgtgcaaaggtgtagttatc

SEQ ID NO: 1713533 - DNA, 25 bp, Homo sapien
tcttctggattcctggttgtgcaaa

SEQ ID NO: 1713534 - DNA, 25 bp, Homo sapien
catcaatccggctgacaagctcttc

SEQ ID NO: 1713535 - DNA, 25 bp, Homo sapien
gtattctacctcgtacctcctgaag

SEQ ID NO: 1713536 - DNA, 25 bp, Homo sapien
aggaagctcccgcataagcaggttg

SEQ ID NO: 1713537 - DNA, 25 bp, Homo sapien
aactgcaggtattctacctcgtacc

SEQ ID NO: 1713538 - DNA, 25 bp, Homo sapien
cacaggcggatggtgcagcgaagag

SEQ ID NO: 1713539 - DNA, 25 bp, Homo sapien
cacttgatcaagaaggctgcacaca

SEQ ID NO: 1713540 - DNA, 25 bp, Homo sapien
gatcaagaaggctgcacacacgtag

SEQ ID NO: 1713541 - DNA, 25 bp, Homo sapien
tgcacacacgtagagatgaaagtgg

SEQ ID NO: 1713542 - DNA, 25 bp, Homo sapien
cgtagagatgaaagtgggagaaccc

SEQ ID NO: 1713543 - DNA, 25 bp, Homo sapien
ctttgcccagcggtctcaggaagga

SEQ ID NO: 1713544 - DNA, 25 bp, Homo sapien
gcttccaggactcgtgaatacacta

SEQ ID NO: 1713545 - DNA, 25 bp, Homo sapien
gctcccagagtactatgtgcaaatg

SEQ ID NO: 1713546 - DNA, 25 bp, Homo sapien
ggaaggaaacctctcagtgtgatct

SEQ ID NO: 1713547 - DNA, 25 bp, Homo sapien
tattgctagcccagatggccctgtc

SEQ ID NO: 1713548 - DNA, 25 bp, Homo sapien
tttctaggaccagagtggcaacagg

SEQ ID NO: 1713549 - DNA, 25 bp, Homo sapien
gctgggtaacagaagctccattcac

SEQ ID NO: 1713550 - DNA, 25 bp, Homo sapien
tttggtaggtaggttcgagcgctct

SEQ ID NO: 1713551 - DNA, 25 bp, Homo sapien
tgtcccgaggtctgacattaatctg

SEQ ID NO: 1713552 - DNA, 25 bp, Homo sapien
agtctgacaactgcaacctgccttg

SEQ ID NO: 1713553 - DNA, 25 bp, Homo sapien
tgacttctggaggtgttcccctgct

SEQ ID NO: 1713554 - DNA, 25 bp, Homo sapien
gctcgtctacacgtgcagtgaattt

SEQ ID NO: 1713555 - DNA, 25 bp, Homo sapien
gacccagctggtgactaagagttga

SEQ ID NO: 1713556 - DNA, 25 bp, Homo sapien
tagactatatactgcctgccctggt

SEQ ID NO: 1713557 - DNA, 25 bp, Homo sapien
tagtgctagccagggatttgagccc

SEQ ID NO: 1713558 - DNA, 25 bp, Homo sapien
tttactctgcaataagggctggcac

SEQ ID NO: 1713559 - DNA, 25 bp, Homo sapien
gggctgtctggtgaaccccatcaat

SEQ ID NO: 1713560 - DNA, 25 bp, Homo sapien
tctgtaccttagactcttgggctgt

SEQ ID NO: 1713561 - DNA, 25 bp, Homo sapien
tgaccttggaccatactacatgccc

SEQ ID NO: 1713562 - DNA, 25 bp, Homo sapien
taggcaggctctctttataatggtc

SEQ ID NO: 1713563 - DNA, 25 bp, Homo sapien
tacttgagtctgtatgcctcggcga

SEQ ID NO: 1713564 - DNA, 25 bp, Homo sapien
gggcatcggcaaacatgtacttgag

SEQ ID NO: 1713565 - DNA, 25 bp, Homo sapien
tattgtaggtaggttctgtagcagc

SEQ ID NO: 1713566 - DNA, 25 bp, Homo sapien
caatttcttcgttgccccagtgtat

SEQ ID NO: 1713567 - DNA, 25 bp, Homo sapien
gatgcttatacacttggtcactggg

SEQ ID NO: 1713568 - DNA, 25 bp, Homo sapien
aaaacacatagagagggcttgcccg

SEQ ID NO: 1713569 - DNA, 25 bp, Homo sapien
tccagagttacaagcatcagtgcct

SEQ ID NO: 1713570 - DNA, 25 bp, Homo sapien
tccacgcggcatggaatactgacag

SEQ ID NO: 1713571 - DNA, 25 bp, Homo sapien
ctcagcttccatatctaaataacag

SEQ ID NO: 1713572 - DNA, 25 bp, Homo sapien
agacagaagcaatcgccacacgctc

SEQ ID NO: 1713573 - DNA, 25 bp, Homo sapien
gagaccctgacctaggttctggctg

SEQ ID NO: 1713574 - DNA, 25 bp, Homo sapien
gcgatcgctgcgaaagcaggctccg

SEQ ID NO: 1713575 - DNA, 25 bp, Homo sapien
cggcgcggtctcctgtgacgaagaa

SEQ ID NO: 1713576 - DNA, 25 bp, Homo sapien
tccggccaccggcgcggtctcctgt

SEQ ID NO: 1713577 - DNA, 25 bp, Homo sapien
caccggcgcggtctcctgtgacgaa

SEQ ID NO: 1713578 - DNA, 25 bp, Homo sapien
gccaccggcgcggtctcctgtgacg

SEQ ID NO: 1713579 - DNA, 25 bp, Homo sapien
gcagccacccggcgctcatccccac

SEQ ID NO: 1713580 - DNA, 25 bp, Homo sapien
gcatctcctcacgttccctgcgcgt

SEQ ID NO: 1713581 - DNA, 25 bp, Homo sapien
tgtgcgccctaaacgggatctggcc

SEQ ID NO: 1713582 - DNA, 25 bp, Homo sapien
aactcgagaaagttcaggcgccggg

SEQ ID NO: 1713583 - DNA, 25 bp, Homo sapien
tttctacgtgaaagtttgattgctt

SEQ ID NO: 1713584 - DNA, 25 bp, Homo sapien
gcctataagaccctgaatgtcctga

SEQ ID NO: 1713585 - DNA, 25 bp, Homo sapien
tcagatcttgcacaggctccttatc

SEQ ID NO: 1713586 - DNA, 25 bp, Homo sapien
tacctgagggtcttttcacttagcc

SEQ ID NO: 1713587 - DNA, 25 bp, Homo sapien
tagtgccaacactagctgctccagc

SEQ ID NO: 1713588 - DNA, 25 bp, Homo sapien
gccagttataattcaaccaaaagtc

SEQ ID NO: 1713589 - DNA, 25 bp, Homo sapien
caagaacagcttgagagcttccgga

SEQ ID NO: 1713590 - DNA, 25 bp, Homo sapien
ccaaaagtctttgcattggagtaca

SEQ ID NO: 1713591 - DNA, 25 bp, Homo sapien
tacatattctctgtcttatccacaa

SEQ ID NO: 1713592 - DNA, 25 bp, Homo sapien
tgacaccaaatcctcgtcctacagt

SEQ ID NO: 1713593 - DNA, 25 bp, Homo sapien
tgataccagttggtatgtgacacca

SEQ ID NO: 1713594 - DNA, 25 bp, Homo sapien
tccataattgtccattggccctcag

SEQ ID NO: 1713595 - DNA, 25 bp, Homo sapien
cagtggtttcgagaaatcatcaggg

SEQ ID NO: 1713596 - DNA, 25 bp, Homo sapien
ccgaacttaaggcagacaccagaat

SEQ ID NO: 1713597 - DNA, 25 bp, Homo sapien
acactataacccagaattcatgggc

SEQ ID NO: 1713598 - DNA, 25 bp, Homo sapien
gcaatccctttgttgatgagcacag

SEQ ID NO: 1713599 - DNA, 25 bp, Homo sapien
aaggcagacaccagaatggcatagc

SEQ ID NO: 1713600 - DNA, 25 bp, Homo sapien
gatgaatggaatagacccttaaagg

SEQ ID NO: 1713601 - DNA, 25 bp, Homo sapien
taaaggttccagacgcgctctgttc

SEQ ID NO: 1713602 - DNA, 25 bp, Homo sapien
tccagacgcgctctgttcagccaaa

SEQ ID NO: 1713603 - DNA, 25 bp, Homo sapien
cccttaaaggttccagacgcgctct

SEQ ID NO: 1713604 - DNA, 25 bp, Homo sapien
tttggtcattctttggggaaagaca

SEQ ID NO: 1713605 - DNA, 25 bp, Homo sapien
gcactccaagttggatgtagtctcc

SEQ ID NO: 1713606 - DNA, 25 bp, Homo sapien
attctccttattttccagaggcact

SEQ ID NO: 1713607 - DNA, 25 bp, Homo sapien
acttcatattcatactccgcattct

SEQ ID NO: 1713608 - DNA, 25 bp, Homo sapien
gctgaccagattcacaagacacttt

SEQ ID NO: 1713609 - DNA, 25 bp, Homo sapien
tcagagggtgtactggccacttcac

SEQ ID NO: 1713610 - DNA, 25 bp, Homo sapien
aagggcagtcaacttaggatccaaa

SEQ ID NO: 1713611 - DNA, 25 bp, Homo sapien
caacttaggatccaaattgtcagag

SEQ ID NO: 1713612 - DNA, 25 bp, Homo sapien
taaatgggagcccctgtggtcttac

SEQ ID NO: 1713613 - DNA, 25 bp, Homo sapien
aagccagggtaaatgggagcccctg

SEQ ID NO: 1713614 - DNA, 25 bp, Homo sapien
tggggaagccagggtaaatgggagc

SEQ ID NO: 1713615 - DNA, 25 bp, Homo sapien
cagggtaaatgggagcccctgtggt

SEQ ID NO: 1713616 - DNA, 25 bp, Homo sapien
ttctgctcatgatgaacctctgtga

SEQ ID NO: 1713617 - DNA, 25 bp, Homo sapien
ctgaagagtttgaggctttctgctc

SEQ ID NO: 1713618 - DNA, 25 bp, Homo sapien
agtttgaggctttctgctcatgatg

SEQ ID NO: 1713619 - DNA, 25 bp, Homo sapien
gaggctttctgctcatgatgaacct

SEQ ID NO: 1713620 - DNA, 25 bp, Homo sapien
ggaaagtcttctctagttgctccac

SEQ ID NO: 1713621 - DNA, 25 bp, Homo sapien
ttcacattcataacggcttcatgtt

SEQ ID NO: 1713622 - DNA, 25 bp, Homo sapien
caccttaaacatctgtaagcttctc

SEQ ID NO: 1713623 - DNA, 25 bp, Homo sapien
gcatctgtattttgagcctcagaat

SEQ ID NO: 1713624 - DNA, 25 bp, Homo sapien
ctgaagaccactcttgcccttccct

SEQ ID NO: 1713625 - DNA, 25 bp, Homo sapien
ccctgaagaccactcttgcccttcc

SEQ ID NO: 1713626 - DNA, 25 bp, Homo sapien
ctcttgcccttcccttctgtgtggt

SEQ ID NO: 1713627 - DNA, 25 bp, Homo sapien
cttgcccttcccttctgtgtggtac

SEQ ID NO: 1713628 - DNA, 25 bp, Homo sapien
tccttttctccttgggctatctcca

SEQ ID NO: 1713629 - DNA, 25 bp, Homo sapien
gctgttgcttcaggtccttttctcc

SEQ ID NO: 1713630 - DNA, 25 bp, Homo sapien
tttctccttgggctatctccaaacc

SEQ ID NO: 1713631 - DNA, 25 bp, Homo sapien
gggccagctgttgcttcaggtcctt

SEQ ID NO: 1713632 - DNA, 25 bp, Homo sapien
gctgaatgtcaagaggttccacata

SEQ ID NO: 1713633 - DNA, 25 bp, Homo sapien
gctattcagaactggaagcagcttt

SEQ ID NO: 1713634 - DNA, 25 bp, Homo sapien
gagctaacagctcattcattgtgac

SEQ ID NO: 1713635 - DNA, 25 bp, Homo sapien
ttaaagccacccaagtgattctggg

SEQ ID NO: 1713636 - DNA, 25 bp, Homo sapien
ttagctcttccattagagcccaatg

SEQ ID NO: 1713637 - DNA, 25 bp, Homo sapien
taattctttgttcttggcttgaatg

SEQ ID NO: 1713638 - DNA, 25 bp, Homo sapien
cttggtctgctctaattctttgttc

SEQ ID NO: 1713639 - DNA, 25 bp, Homo sapien
gttcttggcttgaatgattgcttca

SEQ ID NO: 1713640 - DNA, 25 bp, Homo sapien
ttggcttgaatgattgcttcaaagt

SEQ ID NO: 1713641 - DNA, 25 bp, Homo sapien
taatacattggagctcattctctag

SEQ ID NO: 1713642 - DNA, 25 bp, Homo sapien
tacattggagctcattctctagcac

SEQ ID NO: 1713643 - DNA, 25 bp, Homo sapien
catgtggctaagaacttcttccttc

SEQ ID NO: 1713644 - DNA, 25 bp, Homo sapien
ttctctagcacatcattcatgtggc

SEQ ID NO: 1713645 - DNA, 25 bp, Homo sapien
tatgataggctaacaaatggtagag

SEQ ID NO: 1713646 - DNA, 25 bp, Homo sapien
ggttgcactataagcatattctcgg

SEQ ID NO: 1713647 - DNA, 25 bp, Homo sapien
taaaggagtctgaatagcactgtca

SEQ ID NO: 1713648 - DNA, 25 bp, Homo sapien
taagccagtgcaaaaatatgatagg

SEQ ID NO: 1713649 - DNA, 25 bp, Homo sapien
cagtaggagcagaaactgtgggcac

SEQ ID NO: 1713650 - DNA, 25 bp, Homo sapien
tgtgggcacagttcaaggtgacagc

SEQ ID NO: 1713651 - DNA, 25 bp, Homo sapien
gttccctaatgagaacaattcgtcg

SEQ ID NO: 1713652 - DNA, 25 bp, Homo sapien
gacttaatgtccttccgacaaatgg

SEQ ID NO: 1713653 - DNA, 25 bp, Homo sapien
tgatgtcctcaggtgccttaaactt

SEQ ID NO: 1713654 - DNA, 25 bp, Homo sapien
gaaaactaaatttgtctgctccaac

SEQ ID NO: 1713655 - DNA, 25 bp, Homo sapien
tggattctacctccttaactacctc

SEQ ID NO: 1713656 - DNA, 25 bp, Homo sapien
aactcaggtgccccaatagaaagaa

SEQ ID NO: 1713657 - DNA, 25 bp, Homo sapien
gaatctcaacttggcctgtccttca

SEQ ID NO: 1713658 - DNA, 25 bp, Homo sapien
catggctcatgatccccaaacctag

SEQ ID NO: 1713659 - DNA, 25 bp, Homo sapien
cagagacggtaacagtggttcatcc

SEQ ID NO: 1713660 - DNA, 25 bp, Homo sapien
tgtttctcatggctaagaacttgcc

SEQ ID NO: 1713661 - DNA, 25 bp, Homo sapien
ccaatagtccgcttccttgtgggaa

SEQ ID NO: 1713662 - DNA, 25 bp, Homo sapien
caggcttttccaatagtccgcttcc

SEQ ID NO: 1713663 - DNA, 25 bp, Homo sapien
gcttttccaatagtccgcttccttg

SEQ ID NO: 1713664 - DNA, 25 bp, Homo sapien
ttttccaatagtccgcttccttgtg

SEQ ID NO: 1713665 - DNA, 25 bp, Homo sapien
cacagcagccatagcgaactgagaa

SEQ ID NO: 1713666 - DNA, 25 bp, Homo sapien
tacatggcagcatggccacctcctt

SEQ ID NO: 1713667 - DNA, 25 bp, Homo sapien
agagcttccctcaaatagttcctgc

SEQ ID NO: 1713668 - DNA, 25 bp, Homo sapien
tacaaggccctacaaaatctgcgtc

SEQ ID NO: 1713669 - DNA, 25 bp, Homo sapien
tcacggctagagagaatcctccaga

SEQ ID NO: 1713670 - DNA, 25 bp, Homo sapien
ttcaaatgcccttagagcacggtct

SEQ ID NO: 1713671 - DNA, 25 bp, Homo sapien
tcagagcagcggagtcacggctaga

SEQ ID NO: 1713672 - DNA, 25 bp, Homo sapien
gctcgcactacctggcagtctttca

SEQ ID NO: 1713673 - DNA, 25 bp, Homo sapien
gggcttcctaactcaagtctctgtc

SEQ ID NO: 1713674 - DNA, 25 bp, Homo sapien
agtctctgtcccacaagacttctca

SEQ ID NO: 1713675 - DNA, 25 bp, Homo sapien
cctgaagcagttgggtgccgtgaat

SEQ ID NO: 1713676 - DNA, 25 bp, Homo sapien
ctgaagcagttgggtgccgtgaatc

SEQ ID NO: 1713677 - DNA, 25 bp, Homo sapien
tgaagcagttgggtgccgtgaatcc

SEQ ID NO: 1713678 - DNA, 25 bp, Homo sapien
caactgtcaacggaggtgtttccga

SEQ ID NO: 1713679 - DNA, 25 bp, Homo sapien
taactctttcgacatgtagtgaggc

SEQ ID NO: 1713680 - DNA, 25 bp, Homo sapien
ttcacaaagaagaggtaagccatcc

SEQ ID NO: 1713681 - DNA, 25 bp, Homo sapien
caaaatagacactgccttcagaggc

SEQ ID NO: 1713682 - DNA, 25 bp, Homo sapien
gaaggtaaatacaccaaagcccagc

SEQ ID NO: 1713683 - DNA, 25 bp, Homo sapien
cgacagtcaggaggttaacagagct

SEQ ID NO: 1713684 - DNA, 25 bp, Homo sapien
gatgggtatccagctatgcaatcca

SEQ ID NO: 1713685 - DNA, 25 bp, Homo sapien
catgcctagaggtagagtgagccct

SEQ ID NO: 1713686 - DNA, 25 bp, Homo sapien
aaagtgcttcatatagctggctgca

SEQ ID NO: 1713687 - DNA, 25 bp, Homo sapien
cagagatagtggctctggaaattgg

SEQ ID NO: 1713688 - DNA, 25 bp, Homo sapien
gaagtattcacagagcctgaaggaa

SEQ ID NO: 1713689 - DNA, 25 bp, Homo sapien
tcaggtagcccatcactggtacatt

SEQ ID NO: 1713690 - DNA, 25 bp, Homo sapien
caggagatactgcttggcgactaga

SEQ ID NO: 1713691 - DNA, 25 bp, Homo sapien
gaatacatgcagagtacaaacggcc

SEQ ID NO: 1713692 - DNA, 25 bp, Homo sapien
tacatgcagagtacaaacggcccca

SEQ ID NO: 1713693 - DNA, 25 bp, Homo sapien
catgcagagtacaaacggccccaaa

SEQ ID NO: 1713694 - DNA, 25 bp, Homo sapien
aatacatgcagagtacaaacggccc

SEQ ID NO: 1713695 - DNA, 25 bp, Homo sapien
acctcagtaggtagcagtgcgtaac

SEQ ID NO: 1713696 - DNA, 25 bp, Homo sapien
ctagaacatcagctcacaatggttg

SEQ ID NO: 1713697 - DNA, 25 bp, Homo sapien
gaaacacccaacattgctacctcag

SEQ ID NO: 1713698 - DNA, 25 bp, Homo sapien
tcattgccataccaaacacctagag

SEQ ID NO: 1713699 - DNA, 25 bp, Homo sapien
tgggccagcgtagcctgctggatct

SEQ ID NO: 1713700 - DNA, 25 bp, Homo sapien
tcctagagatgtgaaacgccagttc

SEQ ID NO: 1713701 - DNA, 25 bp, Homo sapien
ctgcaaaggcttgggctacccaggt

SEQ ID NO: 1713702 - DNA, 25 bp, Homo sapien
cagttctggatcttgggatgggcca

SEQ ID NO: 1713703 - DNA, 25 bp, Homo sapien
ctgaagtacctgaggcttccacaga

SEQ ID NO: 1713704 - DNA, 25 bp, Homo sapien
ggctgaagtacctgaggcttccaca

SEQ ID NO: 1713705 - DNA, 25 bp, Homo sapien
tggctgaagtacctgaggcttccac

SEQ ID NO: 1713706 - DNA, 25 bp, Homo sapien
cttggctgaagtacctgaggcttcc

SEQ ID NO: 1713707 - DNA, 25 bp, Homo sapien
ggttctgcatccatagatacaactg

SEQ ID NO: 1713708 - DNA, 25 bp, Homo sapien
tatccgtaagacaaatatagccaca

SEQ ID NO: 1713709 - DNA, 25 bp, Homo sapien
gatacaactgagtgaggaccaaaaa

SEQ ID NO: 1713710 - DNA, 25 bp, Homo sapien
gaatatgccatgtgtcaagtactat

SEQ ID NO: 1713711 - DNA, 25 bp, Homo sapien
cagctgaggtttggcccgctccacc

SEQ ID NO: 1713712 - DNA, 25 bp, Homo sapien
gggtcaggccgacactgtcgccgcc

SEQ ID NO: 1713713 - DNA, 25 bp, Homo sapien
agcctgatgacgtcacggacagcgc

SEQ ID NO: 1713714 - DNA, 25 bp, Homo sapien
cgtcgcgctcgggtccagtactgcg

SEQ ID NO: 1713715 - DNA, 25 bp, Homo sapien
gaggttcatcatcggacgtggagct

SEQ ID NO: 1713716 - DNA, 25 bp, Homo sapien
tcatcggacgtggagctgaggctca

SEQ ID NO: 1713717 - DNA, 25 bp, Homo sapien
tctgtttcttgatgggggcagtgca

SEQ ID NO: 1713718 - DNA, 25 bp, Homo sapien
cagaggagggaggttcatcatcgga

SEQ ID NO: 1713719 - DNA, 25 bp, Homo sapien
cagaaagcatctatggaaactgtga

SEQ ID NO: 1713720 - DNA, 25 bp, Homo sapien
cttgaggtatttgaggcaagctccc

SEQ ID NO: 1713721 - DNA, 25 bp, Homo sapien
aggcaagctcccagacattttacca

SEQ ID NO: 1713722 - DNA, 25 bp, Homo sapien
tcagaaagcatctatggaaactgtg

SEQ ID NO: 1713723 - DNA, 25 bp, Homo sapien
cactatcagacccactaaggcttgt

SEQ ID NO: 1713724 - DNA, 25 bp, Homo sapien
aagaagttccttccacaagagagtc

SEQ ID NO: 1713725 - DNA, 25 bp, Homo sapien
tctgggagacgctattatacatgga

SEQ ID NO: 1713726 - DNA, 25 bp, Homo sapien
tgcatcgtcaaaagagtcagagctg

SEQ ID NO: 1713727 - DNA, 25 bp, Homo sapien
caagcctcttcgacctttctgactg

SEQ ID NO: 1713728 - DNA, 25 bp, Homo sapien
ggctcatctcgccagtccacgttca

SEQ ID NO: 1713729 - DNA, 25 bp, Homo sapien
tttctgactggaagcctcaacgatg

SEQ ID NO: 1713730 - DNA, 25 bp, Homo sapien
gctcctggtcaaagccccggagtgt

SEQ ID NO: 1713731 - DNA, 25 bp, Homo sapien
atttcagtggtacattctggaaacc

SEQ ID NO: 1713732 - DNA, 25 bp, Homo sapien
tccaatcgctcatttcctgagtgtc

SEQ ID NO: 1713733 - DNA, 25 bp, Homo sapien
gtcaggaatttcagtggtacattct

SEQ ID NO: 1713734 - DNA, 25 bp, Homo sapien
accatccaatcgctcatttcctgag

SEQ ID NO: 1713735 - DNA, 25 bp, Homo sapien
ttccccacaaaactctgtttcatct

SEQ ID NO: 1713736 - DNA, 25 bp, Homo sapien
cttacactgcaacacactgtgaagc

SEQ ID NO: 1713737 - DNA, 25 bp, Homo sapien
ttacactgcaacacactgtgaagca

SEQ ID NO: 1713738 - DNA, 25 bp, Homo sapien
tccccacaaaactctgtttcatctt

SEQ ID NO: 1713739 - DNA, 25 bp, Homo sapien
cttatggatattcccaaccctatgc

SEQ ID NO: 1713740 - DNA, 25 bp, Homo sapien
tcccctgaccaatttcctctctaga

SEQ ID NO: 1713741 - DNA, 25 bp, Homo sapien
agctccagtcaccttatggatattc

SEQ ID NO: 1713742 - DNA, 25 bp, Homo sapien
cagtcaccttatggatattcccaac

SEQ ID NO: 1713743 - DNA, 25 bp, Homo sapien
ccccatccaagacatcaaacacgct

SEQ ID NO: 1713744 - DNA, 25 bp, Homo sapien
gatcatctcatagggattggcccga

SEQ ID NO: 1713745 - DNA, 25 bp, Homo sapien
cgagtccgagctcgccgcatctctt

SEQ ID NO: 1713746 - DNA, 25 bp, Homo sapien
ctgtttagaaagaagactcctcgga

SEQ ID NO: 1713747 - DNA, 25 bp, Homo sapien
ccgcggatttgtgaacatgcgatca

SEQ ID NO: 1713748 - DNA, 25 bp, Homo sapien
cccataagagtcccgcggatttgtg

SEQ ID NO: 1713749 - DNA, 25 bp, Homo sapien
catgttagccatcttcattgctgcc

SEQ ID NO: 1713750 - DNA, 25 bp, Homo sapien
tgtgaacatgcgatcaaatacaaaa

SEQ ID NO: 1713751 - DNA, 25 bp, Homo sapien
agcctagctttatctcttaacctca

SEQ ID NO: 1713752 - DNA, 25 bp, Homo sapien
atctcttaacctcacatttatgctg

SEQ ID NO: 1713753 - DNA, 25 bp, Homo sapien
ttatgctgaacccagtactggacca

SEQ ID NO: 1713754 - DNA, 25 bp, Homo sapien
cacatttatgctgaacccagtactg

SEQ ID NO: 1713755 - DNA, 25 bp, Homo sapien
caaagccctttgcatgccacttctt

SEQ ID NO: 1713756 - DNA, 25 bp, Homo sapien
ggttcgaagagttcactggaagcag

SEQ ID NO: 1713757 - DNA, 25 bp, Homo sapien
ggcctgcgcagacatcagcaaagta

SEQ ID NO: 1713758 - DNA, 25 bp, Homo sapien
ccagcttgaagtcattagggccctt

SEQ ID NO: 1713759 - DNA, 25 bp, Homo sapien
tgaagtccccatagaggggctgtcc

SEQ ID NO: 1713760 - DNA, 25 bp, Homo sapien
catagaggggctgtccctcatacct

SEQ ID NO: 1713761 - DNA, 25 bp, Homo sapien
aagtccccatagaggggctgtccct

SEQ ID NO: 1713762 - DNA, 25 bp, Homo sapien
gggctgtccctcatacctcctagta

SEQ ID NO: 1713763 - DNA, 25 bp, Homo sapien
gggaaccaagattctgacatgaact

SEQ ID NO: 1713764 - DNA, 25 bp, Homo sapien
gaaccaagattctgacatgaactgt

SEQ ID NO: 1713765 - DNA, 25 bp, Homo sapien
aagattctgacatgaactgtgaagc

SEQ ID NO: 1713766 - DNA, 25 bp, Homo sapien
cagagggaaccaagattctgacatg

SEQ ID NO: 1713767 - DNA, 25 bp, Homo sapien
gacaaaattccgaaaagcagagatg

SEQ ID NO: 1713768 - DNA, 25 bp, Homo sapien
tctgggcgggtgatatctccatctc

SEQ ID NO: 1713769 - DNA, 25 bp, Homo sapien
cacccttgcgatctgtgttatccag

SEQ ID NO: 1713770 - DNA, 25 bp, Homo sapien
cagaaaatggacacccttgcgatct

SEQ ID NO: 1713771 - DNA, 25 bp, Homo sapien
tcttcatcgagagttcttgaagtgt

SEQ ID NO: 1713772 - DNA, 25 bp, Homo sapien
atcttcatcgagagttcttgaagtg

SEQ ID NO: 1713773 - DNA, 25 bp, Homo sapien
catcttcatcgagagttcttgaagt

SEQ ID NO: 1713774 - DNA, 25 bp, Homo sapien
ctgtccggacaatggacagcgccat

SEQ ID NO: 1713775 - DNA, 25 bp, Homo sapien
cagcgccatgaggaactgacacaga

SEQ ID NO: 1713776 - DNA, 25 bp, Homo sapien
ggacaatggacagcgccatgaggaa

SEQ ID NO: 1713777 - DNA, 25 bp, Homo sapien
tggacagcgccatgaggaactgaca

SEQ ID NO: 1713778 - DNA, 25 bp, Homo sapien
aatagggcctctaagtgggtcctgg

SEQ ID NO: 1713779 - DNA, 25 bp, Homo sapien
caatagggcctctaagtgggtcctg

SEQ ID NO: 1713780 - DNA, 25 bp, Homo sapien
ccaatagggcctctaagtgggtcct

SEQ ID NO: 1713781 - DNA, 25 bp, Homo sapien
gcagccaatgggtctattccaagag

SEQ ID NO: 1713782 - DNA, 25 bp, Homo sapien
gactttgaggattccacagcccttt

SEQ ID NO: 1713783 - DNA, 25 bp, Homo sapien
gctacctgtcctctaatataagcag

SEQ ID NO: 1713784 - DNA, 25 bp, Homo sapien
cagcacctgggtctgttaaaactca

SEQ ID NO: 1713785 - DNA, 25 bp, Homo sapien
ctggtaataggcttgaagagacaaa

SEQ ID NO: 1713786 - DNA, 25 bp, Homo sapien
aactcgttcaaagcagcagtacagc

SEQ ID NO: 1713787 - DNA, 25 bp, Homo sapien
tctctgagttggcaggacggctggt

SEQ ID NO: 1713788 - DNA, 25 bp, Homo sapien
acagcaggtagacaagccccacact

SEQ ID NO: 1713789 - DNA, 25 bp, Homo sapien
cgtgttccgcagctgattgagttta

SEQ ID NO: 1713790 - DNA, 25 bp, Homo sapien
caccaagttgacgtcggaatccgtg

SEQ ID NO: 1713791 - DNA, 25 bp, Homo sapien
tagtcagtaaattcatggtctccct

SEQ ID NO: 1713792 - DNA, 25 bp, Homo sapien
tattcactgcgaagaggtaatcccg

SEQ ID NO: 1713793 - DNA, 25 bp, Homo sapien
aaaatgagggcgcttatatggcagt

SEQ ID NO: 1713794 - DNA, 25 bp, Homo sapien
agggcgcttatatggcagtactgtg

SEQ ID NO: 1713795 - DNA, 25 bp, Homo sapien
cattgctatcaaaatgagggcgctt

SEQ ID NO: 1713796 - DNA, 25 bp, Homo sapien
tgctatcaaaatgagggcgcttata

SEQ ID NO: 1713797 - DNA, 25 bp, Homo sapien
tcataaagacaaaggtagaaggaca

SEQ ID NO: 1713798 - DNA, 25 bp, Homo sapien
ctttcagacaaggagtattactgga

SEQ ID NO: 1713799 - DNA, 25 bp, Homo sapien
cacagacagctcaataatcatagtt

SEQ ID NO: 1713800 - DNA, 25 bp, Homo sapien
gcttatgtggctatactaatgtcag

SEQ ID NO: 1713801 - DNA, 25 bp, Homo sapien
ggcatggattttcgccagagctttg

SEQ ID NO: 1713802 - DNA, 25 bp, Homo sapien
aacaaaggcatggattttcgccaga

SEQ ID NO: 1713803 - DNA, 25 bp, Homo sapien
caaaggcatggattttcgccagagc

SEQ ID NO: 1713804 - DNA, 25 bp, Homo sapien
ggattttcgccagagctttgatctg

SEQ ID NO: 1713805 - DNA, 25 bp, Homo sapien
ggcactccttccgtatctctgcctg

SEQ ID NO: 1713806 - DNA, 25 bp, Homo sapien
actccttccgtatctctgcctgtcg

SEQ ID NO: 1713807 - DNA, 25 bp, Homo sapien
tccttccgtatctctgcctgtcgag

SEQ ID NO: 1713808 - DNA, 25 bp, Homo sapien
ttccgtatctctgcctgtcgaggct

SEQ ID NO: 1713809 - DNA, 25 bp, Homo sapien
ctggattagctcaaagaacttcgat

SEQ ID NO: 1713810 - DNA, 25 bp, Homo sapien
tagctcaaagaacttcgatttaggg

SEQ ID NO: 1713811 - DNA, 25 bp, Homo sapien
gattagctcaaagaacttcgattta

SEQ ID NO: 1713812 - DNA, 25 bp, Homo sapien
ctcaaagaacttcgatttagggtcg

SEQ ID NO: 1713813 - DNA, 25 bp, Homo sapien
ctgcagccacgagtcagagaaaaca

SEQ ID NO: 1713814 - DNA, 25 bp, Homo sapien
ccatgcagcggtagtcaaacacagg

SEQ ID NO: 1713815 - DNA, 25 bp, Homo sapien
gcttgtagctgaagatgtcaatctc

SEQ ID NO: 1713816 - DNA, 25 bp, Homo sapien
ggtgagcagtgtgggcttgtagctg

SEQ ID NO: 1713817 - DNA, 25 bp, Homo sapien
tctccagggttttagaggtgagcag

SEQ ID NO: 1713818 - DNA, 25 bp, Homo sapien
cccaggccgatgaggaacttctgct

SEQ ID NO: 1713819 - DNA, 25 bp, Homo sapien
ccccaggccgatgaggaacttctgc

SEQ ID NO: 1713820 - DNA, 25 bp, Homo sapien
caggccgatgaggaacttctgctca

SEQ ID NO: 1713821 - DNA, 25 bp, Homo sapien
aggccgatgaggaacttctgctcac

SEQ ID NO: 1713822 - DNA, 25 bp, Homo sapien
tgatccagcggtctgactggcggcc

SEQ ID NO: 1713823 - DNA, 25 bp, Homo sapien
gctcatgcacaatttccacagatag

SEQ ID NO: 1713824 - DNA, 25 bp, Homo sapien
tcaggtctagcttgatccagcggtc

SEQ ID NO: 1713825 - DNA, 25 bp, Homo sapien
ggccatcccatgtgtagatctggga

SEQ ID NO: 1713826 - DNA, 25 bp, Homo sapien
ttcagcacaaggacatcgaggatgt

SEQ ID NO: 1713827 - DNA, 25 bp, Homo sapien
tggttaaagtgctgctcccgaacgt

SEQ ID NO: 1713828 - DNA, 25 bp, Homo sapien
cacaaggacatcgaggatgtggatg

SEQ ID NO: 1713829 - DNA, 25 bp, Homo sapien
tcccgaacgtcggtgccattcagca

SEQ ID NO: 1713830 - DNA, 25 bp, Homo sapien
cctcgggaggccgctgtcctcccaa

SEQ ID NO: 1713831 - DNA, 25 bp, Homo sapien
gccacacctcgggaggccgctgtcc

SEQ ID NO: 1713832 - DNA, 25 bp, Homo sapien
aggggccacacctcgggaggccgct

SEQ ID NO: 1713833 - DNA, 25 bp, Homo sapien
tcgggaggccgctgtcctcccaagc

SEQ ID NO: 1713834 - DNA, 25 bp, Homo sapien
aaatgggaccactcaagcacaggat

SEQ ID NO: 1713835 - DNA, 25 bp, Homo sapien
gaaactctcaggatgtcaacaagca

SEQ ID NO: 1713836 - DNA, 25 bp, Homo sapien
caaagcatggaaactacagtgcacc

SEQ ID NO: 1713837 - DNA, 25 bp, Homo sapien
tcagatgagcaacttaaatgggacc

SEQ ID NO: 1713838 - DNA, 25 bp, Homo sapien
aatctgcggcaagactgctctaaga

SEQ ID NO: 1713839 - DNA, 25 bp, Homo sapien
ctgaatctgcggcaagactgctcta

SEQ ID NO: 1713840 - DNA, 25 bp, Homo sapien
aaccttctgaatctgcggcaagact

SEQ ID NO: 1713841 - DNA, 25 bp, Homo sapien
ccttctgaatctgcggcaagactgc

SEQ ID NO: 1713842 - DNA, 25 bp, Homo sapien
tgggattcatgtcgggccgactagg

SEQ ID NO: 1713843 - DNA, 25 bp, Homo sapien
gactaggcttggaaacggctttcac

SEQ ID NO: 1713844 - DNA, 25 bp, Homo sapien
tgtcgggccgactaggcttggaaac

SEQ ID NO: 1713845 - DNA, 25 bp, Homo sapien
taggcttggaaacggctttcacaaa

SEQ ID NO: 1713846 - DNA, 25 bp, Homo sapien
tcttccagtctgtacacctccttca

SEQ ID NO: 1713847 - DNA, 25 bp, Homo sapien
ttccagtctgtacacctccttcacc

SEQ ID NO: 1713848 - DNA, 25 bp, Homo sapien
ctgacaaaaatcttctccatctctt

SEQ ID NO: 1713849 - DNA, 25 bp, Homo sapien
tccatctcttccagtctgtacacct

SEQ ID NO: 1713850 - DNA, 25 bp, Homo sapien
gtgccactggagcccttgatgatct

SEQ ID NO: 1713851 - DNA, 25 bp, Homo sapien
cacgccctgtgtagctgagctttgg

SEQ ID NO: 1713852 - DNA, 25 bp, Homo sapien
gcccatgggtacaaagtgccggtca

SEQ ID NO: 1713853 - DNA, 25 bp, Homo sapien
tcctgacgatgtagaggcccatggg

SEQ ID NO: 1713854 - DNA, 25 bp, Homo sapien
tttgctgaatcccatagtccagggc

SEQ ID NO: 1713855 - DNA, 25 bp, Homo sapien
ttgctgaatcccatagtccagggct

SEQ ID NO: 1713856 - DNA, 25 bp, Homo sapien
gaaatggggcaatggagtctgcagg

SEQ ID NO: 1713857 - DNA, 25 bp, Homo sapien
tgaaatggggcaatggagtctgcag

SEQ ID NO: 1713858 - DNA, 25 bp, Homo sapien
aatggggcaatggagtctgcaggga

SEQ ID NO: 1713859 - DNA, 25 bp, Homo sapien
aaatggggcaatggagtctgcaggg

SEQ ID NO: 1713860 - DNA, 25 bp, Homo sapien
gagtcatgcacacgaatgccatccc

SEQ ID NO: 1713861 - DNA, 25 bp, Homo sapien
gaagagccggccatagtagcaaatg

SEQ ID NO: 1713862 - DNA, 25 bp, Homo sapien
tctgggagtcatgcacacgaatgcc

SEQ ID NO: 1713863 - DNA, 25 bp, Homo sapien
actcccagaagagccggccatagta

SEQ ID NO: 1713864 - DNA, 25 bp, Homo sapien
gccctgtgcatctggatgaaggaga

SEQ ID NO: 1713865 - DNA, 25 bp, Homo sapien
ttaggccctgtgcatctggatgaag

SEQ ID NO: 1713866 - DNA, 25 bp, Homo sapien
cctgtgcatctggatgaaggagagg

SEQ ID NO: 1713867 - DNA, 25 bp, Homo sapien
tgtgcatctggatgaaggagaggac

SEQ ID NO: 1713868 - DNA, 25 bp, Homo sapien
tctgccaagaccctagagcggctat

SEQ ID NO: 1713869 - DNA, 25 bp, Homo sapien
ggtgtcccagaaggaacatgagtgt

SEQ ID NO: 1713870 - DNA, 25 bp, Homo sapien
tcagtacgaaaagagggctcccagg

SEQ ID NO: 1713871 - DNA, 25 bp, Homo sapien
gatggcacctaggatggctctacaa

SEQ ID NO: 1713872 - DNA, 25 bp, Homo sapien
gggagtgaccacttaacgacaaaca

SEQ ID NO: 1713873 - DNA, 25 bp, Homo sapien
catggtgaagtcgattccaacctca

SEQ ID NO: 1713874 - DNA, 25 bp, Homo sapien
tagggagcctgcatgaacatctctg

SEQ ID NO: 1713875 - DNA, 25 bp, Homo sapien
gatccaagattctgcaagacacact

SEQ ID NO: 1713876 - DNA, 25 bp, Homo sapien
atcttcgacaggcaggcaaggctgg

SEQ ID NO: 1713877 - DNA, 25 bp, Homo sapien
atccatcttcgacaggcaggcaagg

SEQ ID NO: 1713878 - DNA, 25 bp, Homo sapien
ttaatccatcttcgacaggcaggca

SEQ ID NO: 1713879 - DNA, 25 bp, Homo sapien
ccatcttcgacaggcaggcaaggct

SEQ ID NO: 1713880 - DNA, 25 bp, Homo sapien
gcagcagacattgtgccacctgtcc

SEQ ID NO: 1713881 - DNA, 25 bp, Homo sapien
cactttccaagccaaatagtgggag

SEQ ID NO: 1713882 - DNA, 25 bp, Homo sapien
cttgaagtggtcatgtggcgatccc

SEQ ID NO: 1713883 - DNA, 25 bp, Homo sapien
tagtgggagttacttccagggctcg

SEQ ID NO: 1713884 - DNA, 25 bp, Homo sapien
tgtgtacccactcgttggagaggca

SEQ ID NO: 1713885 - DNA, 25 bp, Homo sapien
cctcccagagaaggaactgaagttt

SEQ ID NO: 1713886 - DNA, 25 bp, Homo sapien
caagagaaccggaagaacatgctgc

SEQ ID NO: 1713887 - DNA, 25 bp, Homo sapien
tcaggatcaagcaggcacttcaagc

SEQ ID NO: 1713888 - DNA, 25 bp, Homo sapien
cagagggtttgggtccctgacatct

SEQ ID NO: 1713889 - DNA, 25 bp, Homo sapien
tgccgccgaacaagacccaagccct

SEQ ID NO: 1713890 - DNA, 25 bp, Homo sapien
tggcatgccagctgcccctcgggtg

SEQ ID NO: 1713891 - DNA, 25 bp, Homo sapien
gacatcttagcttcagtgcacaccc

SEQ ID NO: 1713892 - DNA, 25 bp, Homo sapien
gaagctgtcccagtgtcggagagac

SEQ ID NO: 1713893 - DNA, 25 bp, Homo sapien
gaggccaggtaatgctcctgcccag

SEQ ID NO: 1713894 - DNA, 25 bp, Homo sapien
gagagacctggaggccgtgaactcc

SEQ ID NO: 1713895 - DNA, 25 bp, Homo sapien
tttgtttcagatcgatgggctagag

SEQ ID NO: 1713896 - DNA, 25 bp, Homo sapien
tgtccaagaagactcccggaggccc

SEQ ID NO: 1713897 - DNA, 25 bp, Homo sapien
gaacacctgtccaagaagactcccg

SEQ ID NO: 1713898 - DNA, 25 bp, Homo sapien
gccctgccctgccaaaacgaatggg

SEQ ID NO: 1713899 - DNA, 25 bp, Homo sapien
atggggggaacacctgtccaagaag

SEQ ID NO: 1713900 - DNA, 25 bp, Homo sapien
tgcagttcagagctgaaccacgtgg

SEQ ID NO: 1713901 - DNA, 25 bp, Homo sapien
gcagttcagagctgaaccacgtgga

SEQ ID NO: 1713902 - DNA, 25 bp, Homo sapien
tgtgcagttcagagctgaaccacgt

SEQ ID NO: 1713903 - DNA, 25 bp, Homo sapien
cctgtgcagttcagagctgaaccac

SEQ ID NO: 1713904 - DNA, 25 bp, Homo sapien
tggttgctcctgttgtgcgcccaac

SEQ ID NO: 1713905 - DNA, 25 bp, Homo sapien
aggtgcatgccgtgttcagggttct

SEQ ID NO: 1713906 - DNA, 25 bp, Homo sapien
cacacgtgtggagtgtttggaagcc

SEQ ID NO: 1713907 - DNA, 25 bp, Homo sapien
tgcccctagatgtctaatcacccgg

SEQ ID NO: 1713908 - DNA, 25 bp, Homo sapien
catttcctcagatgcccactgatgc

SEQ ID NO: 1713909 - DNA, 25 bp, Homo sapien
acatttcctcagatgcccactgatg

SEQ ID NO: 1713910 - DNA, 25 bp, Homo sapien
cacatttcctcagatgcccactgat

SEQ ID NO: 1713911 - DNA, 25 bp, Homo sapien
gtctccccaccttgcttctcagttg

SEQ ID NO: 1713912 - DNA, 25 bp, Homo sapien
ttgcttctcagttgcccccagcggg

SEQ ID NO: 1713913 - DNA, 25 bp, Homo sapien
tgcttctcagttgcccccagcgggt

SEQ ID NO: 1713914 - DNA, 25 bp, Homo sapien
ccccaccttgcttctcagttgcccc

SEQ ID NO: 1713915 - DNA, 25 bp, Homo sapien
cctctccataccacggtagatgttt

SEQ ID NO: 1713916 - DNA, 25 bp, Homo sapien
agtttactttttgcttggatattcg

SEQ ID NO: 1713917 - DNA, 25 bp, Homo sapien
gatttgacatctgtaaccgtgtgcc

SEQ ID NO: 1713918 - DNA, 25 bp, Homo sapien
tctgtaaccgtgtgccttggaaaaa

SEQ ID NO: 1713919 - DNA, 25 bp, Homo sapien
tgagcatgcgcacatagcgacttgg

SEQ ID NO: 1713920 - DNA, 25 bp, Homo sapien
tggtgggcgcgtccagtgatgactg

SEQ ID NO: 1713921 - DNA, 25 bp, Homo sapien
cccgctgactcggtggccaatgagg

SEQ ID NO: 1713922 - DNA, 25 bp, Homo sapien
agggagaagcacgaagacttgagca

SEQ ID NO: 1713923 - DNA, 25 bp, Homo sapien
gaacaaagtgggaaacatgatcagt

SEQ ID NO: 1713924 - DNA, 25 bp, Homo sapien
tctcatcaagaggataccgcagggt

SEQ ID NO: 1713925 - DNA, 25 bp, Homo sapien
gcttagctcagcaccaatgtctggt

SEQ ID NO: 1713926 - DNA, 25 bp, Homo sapien
tgggccagactcgatggttcatgcc

SEQ ID NO: 1713927 - DNA, 25 bp, Homo sapien
tgctctcgaaggacaatcaagggtt

SEQ ID NO: 1713928 - DNA, 25 bp, Homo sapien
caacctttggatggcatgagtctgg

SEQ ID NO: 1713929 - DNA, 25 bp, Homo sapien
gaagacgtctttgctgccagtcagc

SEQ ID NO: 1713930 - DNA, 25 bp, Homo sapien
ctgaaaaatccatgggaagacgtct

SEQ ID NO: 1713931 - DNA, 25 bp, Homo sapien
tcaggactagaaacacggtggtgcg

SEQ ID NO: 1713932 - DNA, 25 bp, Homo sapien
tcgactctccctcacttgctctagt

SEQ ID NO: 1713933 - DNA, 25 bp, Homo sapien
atcactctcaggactagaaacacgg

SEQ ID NO: 1713934 - DNA, 25 bp, Homo sapien
agcagcacgggacaggctgttgtct

SEQ ID NO: 1713935 - DNA, 25 bp, Homo sapien
gcactgtctctaggtctgcccgctg

SEQ ID NO: 1713936 - DNA, 25 bp, Homo sapien
ccagtccatcctccgggagttttgc

SEQ ID NO: 1713937 - DNA, 25 bp, Homo sapien
tcaaacctgagtctgacggatggct

SEQ ID NO: 1713938 - DNA, 25 bp, Homo sapien
cgctgcaggccttgtggcatcttaa

SEQ ID NO: 1713939 - DNA, 25 bp, Homo sapien
cagaggtttcccgtgacgtgggact

SEQ ID NO: 1713940 - DNA, 25 bp, Homo sapien
tttcattgctaaaactgggcagtac

SEQ ID NO: 1713941 - DNA, 25 bp, Homo sapien
catcttgatttgtccaggactcaga

SEQ ID NO: 1713942 - DNA, 25 bp, Homo sapien
tccaggactcagaggtttcccgtga

SEQ ID NO: 1713943 - DNA, 25 bp, Homo sapien
atgcttgcatatgcatagaaaatgt

SEQ ID NO: 1713944 - DNA, 25 bp, Homo sapien
taacttcttgatgggagccagctgg

SEQ ID NO: 1713945 - DNA, 25 bp, Homo sapien
tgttatctatccagacccagcgaga

SEQ ID NO: 1713946 - DNA, 25 bp, Homo sapien
gagaaaagcgatgtcactgcgagca

SEQ ID NO: 1713947 - DNA, 25 bp, Homo sapien
gagtattaatattcctgcccagggc

SEQ ID NO: 1713948 - DNA, 25 bp, Homo sapien
taaggaccgctttggataaaagcag

SEQ ID NO: 1713949 - DNA, 25 bp, Homo sapien
gagccacggcgccaattgactggat

SEQ ID NO: 1713950 - DNA, 25 bp, Homo sapien
agaactccatctcccttaaggaccg

SEQ ID NO: 1713951 - DNA, 25 bp, Homo sapien
gaagtaacctgcaatctagatgctg

SEQ ID NO: 1713952 - DNA, 25 bp, Homo sapien
gcatccgctaaagtcctcgcagcag

SEQ ID NO: 1713953 - DNA, 25 bp, Homo sapien
gcctacgagtaacaggaactagtcc

SEQ ID NO: 1713954 - DNA, 25 bp, Homo sapien
gaaggagagcggatttccctccagg

SEQ ID NO: 1713955 - DNA, 25 bp, Homo sapien
tggttccatcaatcccagggagctg

SEQ ID NO: 1713956 - DNA, 25 bp, Homo sapien
ccagctcctgatgggctgttaacaa

SEQ ID NO: 1713957 - DNA, 25 bp, Homo sapien
agctcctgatgggctgttaacaaga

SEQ ID NO: 1713958 - DNA, 25 bp, Homo sapien
tccagctcctgatgggctgttaaca

SEQ ID NO: 1713959 - DNA, 25 bp, Homo sapien
cctccagctcctgatgggctgttaa

SEQ ID NO: 1713960 - DNA, 25 bp, Homo sapien
tctcaggcaggtcccaaagtggatg

SEQ ID NO: 1713961 - DNA, 25 bp, Homo sapien
caagcccaagagtcagtccgtgatg

SEQ ID NO: 1713962 - DNA, 25 bp, Homo sapien
tgttaggatccttaccaagcccaag

SEQ ID NO: 1713963 - DNA, 25 bp, Homo sapien
cattcccgggaatgcttctggtctc

SEQ ID NO: 1713964 - DNA, 25 bp, Homo sapien
tcggagcacccagtagtcccacagt

SEQ ID NO: 1713965 - DNA, 25 bp, Homo sapien
cggagcaggcaccagcgccatcgga

SEQ ID NO: 1713966 - DNA, 25 bp, Homo sapien
gagcaggcaccagcgccatcggagc

SEQ ID NO: 1713967 - DNA, 25 bp, Homo sapien
cagcgccatcggagcacccagtagt

SEQ ID NO: 1713968 - DNA, 25 bp, Homo sapien
taactccgctaaggcaagggacagg

SEQ ID NO: 1713969 - DNA, 25 bp, Homo sapien
cctatggtgcctgccgataatacct

SEQ ID NO: 1713970 - DNA, 25 bp, Homo sapien
tgatcactctagcaaagatgcaggg

SEQ ID NO: 1713971 - DNA, 25 bp, Homo sapien
ccttaaagatcatcccactgggtgc

SEQ ID NO: 1713972 - DNA, 25 bp, Homo sapien
tccttggcgtagcagatggcctagg

SEQ ID NO: 1713973 - DNA, 25 bp, Homo sapien
agcagatggcctaggggcaggacca

SEQ ID NO: 1713974 - DNA, 25 bp, Homo sapien
gcagatggcctaggggcaggaccag

SEQ ID NO: 1713975 - DNA, 25 bp, Homo sapien
cagggtctccttggcgtagcagatg

SEQ ID NO: 1713976 - DNA, 25 bp, Homo sapien
tgtggtgcaggttctaagacgcagg

SEQ ID NO: 1713977 - DNA, 25 bp, Homo sapien
cattgacttgcaccgtcctctgagg

SEQ ID NO: 1713978 - DNA, 25 bp, Homo sapien
ggttatcagctcattacttccatta

SEQ ID NO: 1713979 - DNA, 25 bp, Homo sapien
cagggtgtcttccagataagaatcc

SEQ ID NO: 1713980 - DNA, 25 bp, Homo sapien
gaattaccctaaccagctgcaaaga

SEQ ID NO: 1713981 - DNA, 25 bp, Homo sapien
ggaccaattctgatgcctcccagga

SEQ ID NO: 1713982 - DNA, 25 bp, Homo sapien
ccagaggtggcaaatcaccgaatta

SEQ ID NO: 1713983 - DNA, 25 bp, Homo sapien
gaaacactcatggagccagaggtgg

SEQ ID NO: 1713984 - DNA, 25 bp, Homo sapien
tggtccgccagttcctgctgcaagt

SEQ ID NO: 1713985 - DNA, 25 bp, Homo sapien
tgaggttatgggtgctacggagctc

SEQ ID NO: 1713986 - DNA, 25 bp, Homo sapien
aagtcaccgctgttcactcaccaag

SEQ ID NO: 1713987 - DNA, 25 bp, Homo sapien
tcactcaccaagaaacaagttggtc

SEQ ID NO: 1713988 - DNA, 25 bp, Homo sapien
acatctgaggacacaccacaaccag

SEQ ID NO: 1713989 - DNA, 25 bp, Homo sapien
tctgaggacacaccacaaccagtcc

SEQ ID NO: 1713990 - DNA, 25 bp, Homo sapien
ctgcagacccagatgcagacatctg

SEQ ID NO: 1713991 - DNA, 25 bp, Homo sapien
gcagacccagatgcagacatctgag

SEQ ID NO: 1713992 - DNA, 25 bp, Homo sapien
tggcaggagccagaacgagctccct

SEQ ID NO: 1713993 - DNA, 25 bp, Homo sapien
cattcaaattactggctgtgggacc

SEQ ID NO: 1713994 - DNA, 25 bp, Homo sapien
aacgagctccctgacctgtgcagtc

SEQ ID NO: 1713995 - DNA, 25 bp, Homo sapien
tccttggtttgactgcctgcattca

SEQ ID NO: 1713996 - DNA, 25 bp, Homo sapien
cagtgtccgttgtgtagcccagtgc

SEQ ID NO: 1713997 - DNA, 25 bp, Homo sapien
agccccattgccaatccagtcagtg

SEQ ID NO: 1713998 - DNA, 25 bp, Homo sapien
cagtgacttctaggatgatgtcatc

SEQ ID NO: 1713999 - DNA, 25 bp, Homo sapien
tcagtgtccgttgtgtagcccagtg

SEQ ID NO: 1714000 - DNA, 25 bp, Homo sapien
gcccaaggtcatgcatcgtgcaggg

SEQ ID NO: 1714001 - DNA, 25 bp, Homo sapien
tgggaagtgagtcctattattatcc

SEQ ID NO: 1714002 - DNA, 25 bp, Homo sapien
ttatccccaatttactgacaaggca

SEQ ID NO: 1714003 - DNA, 25 bp, Homo sapien
catcgtgcagggttgtctatggaaa

SEQ ID NO: 1714004 - DNA, 25 bp, Homo sapien
tccggtaccagcatccactgtatac

SEQ ID NO: 1714005 - DNA, 25 bp, Homo sapien
aggagcctggatttgtaacggactg

SEQ ID NO: 1714006 - DNA, 25 bp, Homo sapien
ccactgtatacctcttctgggctgg

SEQ ID NO: 1714007 - DNA, 25 bp, Homo sapien
actgtgggccaggtctgcctccggt

SEQ ID NO: 1714008 - DNA, 25 bp, Homo sapien
cagcatcccctagggaggacctgga

SEQ ID NO: 1714009 - DNA, 25 bp, Homo sapien
aagacataggcgtctgtgccacagc

SEQ ID NO: 1714010 - DNA, 25 bp, Homo sapien
tctggctgtgcttctattcggagga

SEQ ID NO: 1714011 - DNA, 25 bp, Homo sapien
cacagcatcccctagggaggacctg

SEQ ID NO: 1714012 - DNA, 25 bp, Homo sapien
gactgtgggcttgattttagggaca

SEQ ID NO: 1714013 - DNA, 25 bp, Homo sapien
tgagagacacgagtggtgtccacgc

SEQ ID NO: 1714014 - DNA, 25 bp, Homo sapien
tttagggacaatggtgagagacacg

SEQ ID NO: 1714015 - DNA, 25 bp, Homo sapien
gcttgggcactactccaaggtgagc

SEQ ID NO: 1714016 - DNA, 25 bp, Homo sapien
cagctctgcctgcagcaaagggacc

SEQ ID NO: 1714017 - DNA, 25 bp, Homo sapien
tccagctctgcctgcagcaaaggga

SEQ ID NO: 1714018 - DNA, 25 bp, Homo sapien
agctccagctctgcctgcagcaaag

SEQ ID NO: 1714019 - DNA, 25 bp, Homo sapien
tcagccacacttctgctccagctcc

SEQ ID NO: 1714020 - DNA, 25 bp, Homo sapien
gggggctgctgtgagtaggaaaaca

SEQ ID NO: 1714021 - DNA, 25 bp, Homo sapien
cagctggcccaatgcataggccgtc

SEQ ID NO: 1714022 - DNA, 25 bp, Homo sapien
aggaatgatctagggctcagctggc

SEQ ID NO: 1714023 - DNA, 25 bp, Homo sapien
tctggtcaaagaggaactctctgta

SEQ ID NO: 1714024 - DNA, 25 bp, Homo sapien
tagagaagcgaggagataaggtgga

SEQ ID NO: 1714025 - DNA, 25 bp, Homo sapien
cagctcatggatgggagtctggagg

SEQ ID NO: 1714026 - DNA, 25 bp, Homo sapien
ccttcctactgggatgatctccaag

SEQ ID NO: 1714027 - DNA, 25 bp, Homo sapien
tcctactgggatgatctccaaggac

SEQ ID NO: 1714028 - DNA, 25 bp, Homo sapien
ctactgggatgatctccaaggacat

SEQ ID NO: 1714029 - DNA, 25 bp, Homo sapien
ctgtgttggccaggacttgatggga

SEQ ID NO: 1714030 - DNA, 25 bp, Homo sapien
gccaggacttgatgggaaacaaatg

SEQ ID NO: 1714031 - DNA, 25 bp, Homo sapien
tgttggccaggacttgatgggaaac

SEQ ID NO: 1714032 - DNA, 25 bp, Homo sapien
tggccaggacttgatgggaaacaaa

SEQ ID NO: 1714033 - DNA, 25 bp, Homo sapien
ggaagtttgtgccttgtcacgggca

SEQ ID NO: 1714034 - DNA, 25 bp, Homo sapien
ccttgagcagtctgaagaatggagt

SEQ ID NO: 1714035 - DNA, 25 bp, Homo sapien
cagtagccgatcagacaggaagcca

SEQ ID NO: 1714036 - DNA, 25 bp, Homo sapien
taggaagcacttttaggagaggctc

SEQ ID NO: 1714037 - DNA, 25 bp, Homo sapien
ccacctggatgtgagccaatgggta

SEQ ID NO: 1714038 - DNA, 25 bp, Homo sapien
gatgactgaagtctgtggccctcag

SEQ ID NO: 1714039 - DNA, 25 bp, Homo sapien
gcctttcctggctggtgagaatcca

SEQ ID NO: 1714040 - DNA, 25 bp, Homo sapien
gctggcagagatgactgaagtctgt

SEQ ID NO: 1714041 - DNA, 25 bp, Homo sapien
tgagaatccaatcagtttcgagatg

SEQ ID NO: 1714042 - DNA, 25 bp, Homo sapien
ggtggtgggcatggcgcagtccatc

SEQ ID NO: 1714043 - DNA, 25 bp, Homo sapien
tgggcatggcgcagtccatccagaa

SEQ ID NO: 1714044 - DNA, 25 bp, Homo sapien
tggtgggcatggcgcagtccatcca

SEQ ID NO: 1714045 - DNA, 25 bp, Homo sapien
gtgggcatggcgcagtccatccaga

SEQ ID NO: 1714046 - DNA, 25 bp, Homo sapien
aagccctgtccagccaggaccctct

SEQ ID NO: 1714047 - DNA, 25 bp, Homo sapien
ttagaaaagccctgtccagccagga

SEQ ID NO: 1714048 - DNA, 25 bp, Homo sapien
agaaaagccctgtccagccaggacc

SEQ ID NO: 1714049 - DNA, 25 bp, Homo sapien
gccctgtccagccaggaccctctac

SEQ ID NO: 1714050 - DNA, 25 bp, Homo sapien
ctgaggcagggggtcttagcgaggt

SEQ ID NO: 1714051 - DNA, 25 bp, Homo sapien
aggcagggggtcttagcgaggtggg

SEQ ID NO: 1714052 - DNA, 25 bp, Homo sapien
tgaggcagggggtcttagcgaggtg

SEQ ID NO: 1714053 - DNA, 25 bp, Homo sapien
gaggcagggggtcttagcgaggtgg

SEQ ID NO: 1714054 - DNA, 25 bp, Homo sapien
gcaccagcggcgtcggccggaagat

SEQ ID NO: 1714055 - DNA, 25 bp, Homo sapien
aagatgagcgggatctggctgcatc

SEQ ID NO: 1714056 - DNA, 25 bp, Homo sapien
cggcgtcggccggaagatgagcggg

SEQ ID NO: 1714057 - DNA, 25 bp, Homo sapien
tcggccggaagatgagcgggatctg

SEQ ID NO: 1714058 - DNA, 25 bp, Homo sapien
atttgcctctctttcacctccaagc

SEQ ID NO: 1714059 - DNA, 25 bp, Homo sapien
ccccaaatgtaacctctagttgcgg

SEQ ID NO: 1714060 - DNA, 25 bp, Homo sapien
gagaaaagccaaaactcctcatgcc

SEQ ID NO: 1714061 - DNA, 25 bp, Homo sapien
gttgcggacgcggttgttctatcaa

SEQ ID NO: 1714062 - DNA, 25 bp, Homo sapien
catacacttccatcgcgtctgtcgg

SEQ ID NO: 1714063 - DNA, 25 bp, Homo sapien
ccattgccccaactagactgtgagc

SEQ ID NO: 1714064 - DNA, 25 bp, Homo sapien
tgatgcccaatcagcacggctgcct

SEQ ID NO: 1714065 - DNA, 25 bp, Homo sapien
tgtctgaaatgagtcgctccaggtt

SEQ ID NO: 1714066 - DNA, 25 bp, Homo sapien
tagaacaggaggtactcaccctggc

SEQ ID NO: 1714067 - DNA, 25 bp, Homo sapien
tacctgcctgggatgaaatgagttg

SEQ ID NO: 1714068 - DNA, 25 bp, Homo sapien
gagcacattgaagtttcccggcatg

SEQ ID NO: 1714069 - DNA, 25 bp, Homo sapien
tgtgccagcacccagtagaacagga

SEQ ID NO: 1714070 - DNA, 25 bp, Homo sapien
tgaacgtgcagtgtgagtccaccac

SEQ ID NO: 1714071 - DNA, 25 bp, Homo sapien
tgatacccctaatgctccttgacag

SEQ ID NO: 1714072 - DNA, 25 bp, Homo sapien
ctataatggcttcaacgtgcgcccc

SEQ ID NO: 1714073 - DNA, 25 bp, Homo sapien
gacagccccatgctgtaggacacgg

SEQ ID NO: 1714074 - DNA, 25 bp, Homo sapien
tgtgccccacgtgcgcttgtgaaaa

SEQ ID NO: 1714075 - DNA, 25 bp, Homo sapien
tacattacatataggaccaagcccc

SEQ ID NO: 1714076 - DNA, 25 bp, Homo sapien
gctactactgcaaggctgagaacgg

SEQ ID NO: 1714077 - DNA, 25 bp, Homo sapien
ggtgttcaacgagacgctgcgcatc

SEQ ID NO: 1714078 - DNA, 25 bp, Homo sapien
tcagagatgttcaatggctcccctt

SEQ ID NO: 1714079 - DNA, 25 bp, Homo sapien
catttaccagattcattcaagctcc

SEQ ID NO: 1714080 - DNA, 25 bp, Homo sapien
tgcactttgctaccagaatgataac

SEQ ID NO: 1714081 - DNA, 25 bp, Homo sapien
gaatgataacccctgttgtgctaca

SEQ ID NO: 1714082 - DNA, 25 bp, Homo sapien
ggaacatcatccctggcagaaggag

SEQ ID NO: 1714083 - DNA, 25 bp, Homo sapien
ttggaacatcatccctggcagaagg

SEQ ID NO: 1714084 - DNA, 25 bp, Homo sapien
ggcttggaacatcatccctggcaga

SEQ ID NO: 1714085 - DNA, 25 bp, Homo sapien
gcttggaacatcatccctggcagaa

SEQ ID NO: 1714086 - DNA, 25 bp, Homo sapien
gaagggtcaggcaagtgatcccgca

SEQ ID NO: 1714087 - DNA, 25 bp, Homo sapien
caggcaagtgatcccgcacagctca

SEQ ID NO: 1714088 - DNA, 25 bp, Homo sapien
tctgggaagggtcaggcaagtgatc

SEQ ID NO: 1714089 - DNA, 25 bp, Homo sapien
ggcacaggcctccacagaggtggtg

SEQ ID NO: 1714090 - DNA, 25 bp, Homo sapien
gcatccagcaccctgggtcatcagt

SEQ ID NO: 1714091 - DNA, 25 bp, Homo sapien
tctgggtccacctttatctcgctgc

SEQ ID NO: 1714092 - DNA, 25 bp, Homo sapien
tatgtccagcctgggtatggccccc

SEQ ID NO: 1714093 - DNA, 25 bp, Homo sapien
catcagtcagggacttatgtccagc

SEQ ID NO: 1714094 - DNA, 25 bp, Homo sapien
gcctttccttgagaaggaatggtga

SEQ ID NO: 1714095 - DNA, 25 bp, Homo sapien
ggcctttccttgagaaggaatggtg

SEQ ID NO: 1714096 - DNA, 25 bp, Homo sapien
taccgtggcatatgctggtggtgcc

SEQ ID NO: 1714097 - DNA, 25 bp, Homo sapien
tgtcctgatatctgtaagccaagcc

SEQ ID NO: 1714098 - DNA, 25 bp, Homo sapien
gccgagtaacagtgccagtgagccc

SEQ ID NO: 1714099 - DNA, 25 bp, Homo sapien
gatgactgtcgtcgccaggttgccg

SEQ ID NO: 1714100 - DNA, 25 bp, Homo sapien
ggtgtatagtcgtcctccagcaatg

SEQ ID NO: 1714101 - DNA, 25 bp, Homo sapien
tccagcaatggattggtaaaggaga

SEQ ID NO: 1714102 - DNA, 25 bp, Homo sapien
acagctcaggccctcatcaggcaat

SEQ ID NO: 1714103 - DNA, 25 bp, Homo sapien
tgccttgaactggtggacagctcag

SEQ ID NO: 1714104 - DNA, 25 bp, Homo sapien
tccatcccaacttgggccagcagaa

SEQ ID NO: 1714105 - DNA, 25 bp, Homo sapien
ttctgtttccccattgcagctccat

SEQ ID NO: 1714106 - DNA, 25 bp, Homo sapien
ccagcttccggggtaggaaaatgag

SEQ ID NO: 1714107 - DNA, 25 bp, Homo sapien
tcctttgaggacacgaatcctgtct

SEQ ID NO: 1714108 - DNA, 25 bp, Homo sapien
aaaaacagacaagcagctgggcatg

SEQ ID NO: 1714109 - DNA, 25 bp, Homo sapien
aaaaaacagacaagcagctgggcat

SEQ ID NO: 1714110 - DNA, 25 bp, Homo sapien
ttaaaaaaacagacaagcagctggg

SEQ ID NO: 1714111 - DNA, 25 bp, Homo sapien
aggcttggtggcacactactgtaat

SEQ ID NO: 1714112 - DNA, 25 bp, Homo sapien
ttgaggtttccctcccaaatcagga

SEQ ID NO: 1714113 - DNA, 25 bp, Homo sapien
gatgatgttctagacacaaagtgca

SEQ ID NO: 1714114 - DNA, 25 bp, Homo sapien
gaatatcagtctcatgaagcccagg

SEQ ID NO: 1714115 - DNA, 25 bp, Homo sapien
cataggagctctatcagtgatcccc

SEQ ID NO: 1714116 - DNA, 25 bp, Homo sapien
caggcctttcttgtcagggtccgtg

SEQ ID NO: 1714117 - DNA, 25 bp, Homo sapien
tcttgtcagggtccgtggagttgtc

SEQ ID NO: 1714118 - DNA, 25 bp, Homo sapien
tttctggagctattatccagggcca

SEQ ID NO: 1714119 - DNA, 25 bp, Homo sapien
ttctggagctattatccagggccag

SEQ ID NO: 1714120 - DNA, 25 bp, Homo sapien
tgacaatgaatttgcccagggagag

SEQ ID NO: 1714121 - DNA, 25 bp, Homo sapien
cagaacattccagtttacgcagagg

SEQ ID NO: 1714122 - DNA, 25 bp, Homo sapien
caaagcctgagcctagacatacaac

SEQ ID NO: 1714123 - DNA, 25 bp, Homo sapien
gaaacgatcctgtgactttaactct

SEQ ID NO: 1714124 - DNA, 25 bp, Homo sapien
tcctcacgttcatgaagcaattgct

SEQ ID NO: 1714125 - DNA, 25 bp, Homo sapien
catgttcctcacgttcatgaagcaa

SEQ ID NO: 1714126 - DNA, 25 bp, Homo sapien
gttcatgaagcaattgctgatttcc

SEQ ID NO: 1714127 - DNA, 25 bp, Homo sapien
gtcccatgttcctcacgttcatgaa

SEQ ID NO: 1714128 - DNA, 25 bp, Homo sapien
gggagcaatgccaaacgcggaagtg

SEQ ID NO: 1714129 - DNA, 25 bp, Homo sapien
gcgtcggagtcaaggtccctggagc

SEQ ID NO: 1714130 - DNA, 25 bp, Homo sapien
tgccaaacgcggaagtggagctctg

SEQ ID NO: 1714131 - DNA, 25 bp, Homo sapien
gggcgtcggagtcaaggtccctgga

SEQ ID NO: 1714132 - DNA, 25 bp, Homo sapien
agagagatgtcctgtgcggtggcgc

SEQ ID NO: 1714133 - DNA, 25 bp, Homo sapien
ggacacagacgccctcggcgggtct

SEQ ID NO: 1714134 - DNA, 25 bp, Homo sapien
ggcgtgcggacgcaccgaggaccgc

SEQ ID NO: 1714135 - DNA, 25 bp, Homo sapien
gtggcgcagggaaggaccggagccc

SEQ ID NO: 1714136 - DNA, 25 bp, Homo sapien
ctggaggcgggccgcaccactcggc

SEQ ID NO: 1714137 - DNA, 25 bp, Homo sapien
gctggaggcgggccgcaccactcgg

SEQ ID NO: 1714138 - DNA, 25 bp, Homo sapien
agctggaggcgggccgcaccactcg

SEQ ID NO: 1714139 - DNA, 25 bp, Homo sapien
tcagctggaggcgggccgcaccact

SEQ ID NO: 1714140 - DNA, 25 bp, Homo sapien
cgggcgcgagtccggggctcggagc

SEQ ID NO: 1714141 - DNA, 25 bp, Homo sapien
gcgagtccggggctcggagccggga

SEQ ID NO: 1714142 - DNA, 25 bp, Homo sapien
gcgggcgcgagtccggggctcggag

SEQ ID NO: 1714143 - DNA, 25 bp, Homo sapien
gcgcgagtccggggctcggagccgg

SEQ ID NO: 1714144 - DNA, 25 bp, Homo sapien
caggctgggcgctttgctgcgctcg

SEQ ID NO: 1714145 - DNA, 25 bp, Homo sapien
gctgggcgctttgctgcgctcgctc

SEQ ID NO: 1714146 - DNA, 25 bp, Homo sapien
gcggcaggctgggcgctttgctgcg

SEQ ID NO: 1714147 - DNA, 25 bp, Homo sapien
tgcgctcgctcccagcgtctcccat

SEQ ID NO: 1714148 - DNA, 25 bp, Homo sapien
tgacagcaattcactaagcctgggc

SEQ ID NO: 1714149 - DNA, 25 bp, Homo sapien
tccacacactatgaggagccaagca

SEQ ID NO: 1714150 - DNA, 25 bp, Homo sapien
catgttacaattgggagactgagac

SEQ ID NO: 1714151 - DNA, 25 bp, Homo sapien
gaggcaaaatgagtgtgaagtccac

SEQ ID NO: 1714152 - DNA, 25 bp, Homo sapien
taatcttgttacacagggacccagc

SEQ ID NO: 1714153 - DNA, 25 bp, Homo sapien
gagcaggatcgctgttcctcagaaa

SEQ ID NO: 1714154 - DNA, 25 bp, Homo sapien
tacatcactttgcatggacagaacc

SEQ ID NO: 1714155 - DNA, 25 bp, Homo sapien
taagtactgcattacaagtgctggg

SEQ ID NO: 1714156 - DNA, 25 bp, Homo sapien
tgccgaaagcatcctagaaagggct

SEQ ID NO: 1714157 - DNA, 25 bp, Homo sapien
agaagaaatcggcttgaatccggga

SEQ ID NO: 1714158 - DNA, 25 bp, Homo sapien
tgccagtacatttttctgccgaaag

SEQ ID NO: 1714159 - DNA, 25 bp, Homo sapien
agaataataccatccaggccgggca

SEQ ID NO: 1714160 - DNA, 25 bp, Homo sapien
attgtaagtaatctgtgatggtaca

SEQ ID NO: 1714161 - DNA, 25 bp, Homo sapien
tgatggtacaagttgggatagtgat

SEQ ID NO: 1714162 - DNA, 25 bp, Homo sapien
tttaatctaccaaagtacacacttg

SEQ ID NO: 1714163 - DNA, 25 bp, Homo sapien
tacacacttgaaatgtttgcagtaa

SEQ ID NO: 1714164 - DNA, 25 bp, Homo sapien
tgctctggaaaacagggtggtagtt

SEQ ID NO: 1714165 - DNA, 25 bp, Homo sapien
cagagttaccatatcatcccgaaat

SEQ ID NO: 1714166 - DNA, 25 bp, Homo sapien
aactggagtcttcatacattgctgg

SEQ ID NO: 1714167 - DNA, 25 bp, Homo sapien
tcccctcctaggtattcaaataaga

SEQ ID NO: 1714168 - DNA, 25 bp, Homo sapien
attttacaacttatggccgggtgcg

SEQ ID NO: 1714169 - DNA, 25 bp, Homo sapien
catagggccagggtatctcccaaac

SEQ ID NO: 1714170 - DNA, 25 bp, Homo sapien
tttaaaagatcatcctgtagcagaa

SEQ ID NO: 1714171 - DNA, 25 bp, Homo sapien
cctgtagcagaaatcacaacataat

SEQ ID NO: 1714172 - DNA, 25 bp, Homo sapien
tgagattatttaacattgggatgct

SEQ ID NO: 1714173 - DNA, 25 bp, Homo sapien
tgtggaccgcatagttctcaaaaca

SEQ ID NO: 1714174 - DNA, 25 bp, Homo sapien
caggcccaagccattaagcaaacac

SEQ ID NO: 1714175 - DNA, 25 bp, Homo sapien
aactgtataacaagcaaagacagga

SEQ ID NO: 1714176 - DNA, 25 bp, Homo sapien
gaaaaagaggtctcatttaccaatg

SEQ ID NO: 1714177 - DNA, 25 bp, Homo sapien
ccataactgctttgaccacggaata

SEQ ID NO: 1714178 - DNA, 25 bp, Homo sapien
tgagcccatcaactgtgagagatga

SEQ ID NO: 1714179 - DNA, 25 bp, Homo sapien
tgatgctatgccagtctccaactga

SEQ ID NO: 1714180 - DNA, 25 bp, Homo sapien
ggctccataactgctttgaccacgg

SEQ ID NO: 1714181 - DNA, 25 bp, Homo sapien
aatgcagtgtgtctatggtcctccc

SEQ ID NO: 1714182 - DNA, 25 bp, Homo sapien
gatgagcagcaggaatatagaatcc

SEQ ID NO: 1714183 - DNA, 25 bp, Homo sapien
gggagctctcgcttgagaatgcagt

SEQ ID NO: 1714184 - DNA, 25 bp, Homo sapien
gaagacactattggcttataagcct

SEQ ID NO: 1714185 - DNA, 25 bp, Homo sapien
gggaagacaggtgtttatgaattac

SEQ ID NO: 1714186 - DNA, 25 bp, Homo sapien
tcatctggggaagacaggtgtttat

SEQ ID NO: 1714187 - DNA, 25 bp, Homo sapien
agacaggtgtttatgaattacttac

SEQ ID NO: 1714188 - DNA, 25 bp, Homo sapien
ttcatctggggaagacaggtgttta

SEQ ID NO: 1714189 - DNA, 25 bp, Homo sapien
taatggtccactgctcaacttgctg

SEQ ID NO: 1714190 - DNA, 25 bp, Homo sapien
gccattttataggtacccgcagcaa

SEQ ID NO: 1714191 - DNA, 25 bp, Homo sapien
taataaacctactagggctgtgccc

SEQ ID NO: 1714192 - DNA, 25 bp, Homo sapien
tactcaagggctacaagacagacct

SEQ ID NO: 1714193 - DNA, 25 bp, Homo sapien
taaactaagcccaaaagcactggtc

SEQ ID NO: 1714194 - DNA, 25 bp, Homo sapien
tgctacagtcgcacagcctagtttg

SEQ ID NO: 1714195 - DNA, 25 bp, Homo sapien
attaggtagacttatggagccaggc

SEQ ID NO: 1714196 - DNA, 25 bp, Homo sapien
gacattgtcacatgctcccttggaa

SEQ ID NO: 1714197 - DNA, 25 bp, Homo sapien
aaatatacataaaggctgggcatgg

SEQ ID NO: 1714198 - DNA, 25 bp, Homo sapien
gtaccaaaccttctcacaaagacat

SEQ ID NO: 1714199 - DNA, 25 bp, Homo sapien
agtaccaaaccttctcacaaagaca

SEQ ID NO: 1714200 - DNA, 25 bp, Homo sapien
ccaagcctgatcttccatgatgcaa

SEQ ID NO: 1714201 - DNA, 25 bp, Homo sapien
gacattattgacctacaagggcacc

SEQ ID NO: 1714202 - DNA, 25 bp, Homo sapien
taatcctaacatggagcatccgacc

SEQ ID NO: 1714203 - DNA, 25 bp, Homo sapien
gggcaccagtcgcaatcagcttttc

SEQ ID NO: 1714204 - DNA, 25 bp, Homo sapien
caaacggacaattataaccatgcat

SEQ ID NO: 1714205 - DNA, 25 bp, Homo sapien
tgaggagtttagaacttaaagacaa

SEQ ID NO: 1714206 - DNA, 25 bp, Homo sapien
gtattaggcacagtatcaagagaac

SEQ ID NO: 1714207 - DNA, 25 bp, Homo sapien
caaaatcaaattgtgccttgaggag

SEQ ID NO: 1714208 - DNA, 25 bp, Homo sapien
caaaaagtaaaaaggccagacatgg

SEQ ID NO: 1714209 - DNA, 25 bp, Homo sapien
ttataaagcatatctgaacgtgggc

SEQ ID NO: 1714210 - DNA, 25 bp, Homo sapien
taaaaaggacagctatacatggtga

SEQ ID NO: 1714211 - DNA, 25 bp, Homo sapien
acatggtggcgtttgtcagtggtcc

SEQ ID NO: 1714212 - DNA, 25 bp, Homo sapien
taatttttagctcatgaccataaga

SEQ ID NO: 1714213 - DNA, 25 bp, Homo sapien
aaggccagtcccacaatatttgcaa

SEQ ID NO: 1714214 - DNA, 25 bp, Homo sapien
tacacaaactgattgaggtacaagg

SEQ ID NO: 1714215 - DNA, 25 bp, Homo sapien
aagtctctggtgacaactacagaca

SEQ ID NO: 1714216 - DNA, 25 bp, Homo sapien
tgaatgaggccgtctactgtaccat

SEQ ID NO: 1714217 - DNA, 25 bp, Homo sapien
tctttctttgaattcttaggcatgg

SEQ ID NO: 1714218 - DNA, 25 bp, Homo sapien
taggctatttcctctttgagcacat

SEQ ID NO: 1714219 - DNA, 25 bp, Homo sapien
aaaataattctgaagtcatagccca

SEQ ID NO: 1714220 - DNA, 25 bp, Homo sapien
taattgccactagacttagtccagc

SEQ ID NO: 1714221 - DNA, 25 bp, Homo sapien
tcttaactggtcaaggcatgatgca

SEQ ID NO: 1714222 - DNA, 25 bp, Homo sapien
tatcctggtcctcggtaatacagag

SEQ ID NO: 1714223 - DNA, 25 bp, Homo sapien
tggagcttagcgtatgccatcaacc

SEQ ID NO: 1714224 - DNA, 25 bp, Homo sapien
cagtggcacgctatcggcgcactga

SEQ ID NO: 1714225 - DNA, 25 bp, Homo sapien
taaatatagagtgagagtgtgcgtg

SEQ ID NO: 1714226 - DNA, 25 bp, Homo sapien
cgctatcggcgcactgaaacctcca

SEQ ID NO: 1714227 - DNA, 25 bp, Homo sapien
catcctcggatttggtatctacagg

SEQ ID NO: 1714228 - DNA, 25 bp, Homo sapien
gtcagtgaccacagagctatctctc

SEQ ID NO: 1714229 - DNA, 25 bp, Homo sapien
gccttaacatgactactttctggat

SEQ ID NO: 1714230 - DNA, 25 bp, Homo sapien
caaaggtcactggataatacactac

SEQ ID NO: 1714231 - DNA, 25 bp, Homo sapien
tctttgggagtgtcctgtgaaaacc

SEQ ID NO: 1714232 - DNA, 25 bp, Homo sapien
caaaatactgcactaacaaatggag

SEQ ID NO: 1714233 - DNA, 25 bp, Homo sapien
gaccaagtgacgtttatcacaggaa

SEQ ID NO: 1714234 - DNA, 25 bp, Homo sapien
cgcgctacagtcacatctctaggta

SEQ ID NO: 1714235 - DNA, 25 bp, Homo sapien
caactgattttgaggcaagcataac

SEQ ID NO: 1714236 - DNA, 25 bp, Homo sapien
ggctgaagcagatcactgaagccca

SEQ ID NO: 1714237 - DNA, 25 bp, Homo sapien
cagtggaaggtcatgttaagtgctc

SEQ ID NO: 1714238 - DNA, 25 bp, Homo sapien
taactaaggccaaaagacagtggaa

SEQ ID NO: 1714239 - DNA, 25 bp, Homo sapien
cattcattcacaaaagaattactaa

SEQ ID NO: 1714240 - DNA, 25 bp, Homo sapien
catagtcaaatggtcaacaacgaaa

SEQ ID NO: 1714241 - DNA, 25 bp, Homo sapien
gcagctactataactatgctcaagg

SEQ ID NO: 1714242 - DNA, 25 bp, Homo sapien
gagatcaatgaaacataagcaggac

SEQ ID NO: 1714243 - DNA, 25 bp, Homo sapien
tcccaaacggagtacaagatggaaa

SEQ ID NO: 1714244 - DNA, 25 bp, Homo sapien
taaaattcgacaggctctagcaagc

SEQ ID NO: 1714245 - DNA, 25 bp, Homo sapien
tccctggaccatcaatctgttaagt

SEQ ID NO: 1714246 - DNA, 25 bp, Homo sapien
gttaagtccactactgtcagcaaga

SEQ ID NO: 1714247 - DNA, 25 bp, Homo sapien
tccaagaatcacaaccgcataaatg

SEQ ID NO: 1714248 - DNA, 25 bp, Homo sapien
aaaaatgaattaacagaacagcaac

SEQ ID NO: 1714249 - DNA, 25 bp, Homo sapien
taagttgctgataacagatttatct

SEQ ID NO: 1714250 - DNA, 25 bp, Homo sapien
gagttctgggatgctctttaagtag

SEQ ID NO: 1714251 - DNA, 25 bp, Homo sapien
taaagcaaattactgctgggcctgt

SEQ ID NO: 1714252 - DNA, 25 bp, Homo sapien
gcagggctatgccaagcgggaggga

SEQ ID NO: 1714253 - DNA, 25 bp, Homo sapien
cagagctacatcaagcgctggggag

SEQ ID NO: 1714254 - DNA, 25 bp, Homo sapien
tacatcaagcgctggggagcctaca

SEQ ID NO: 1714255 - DNA, 25 bp, Homo sapien
gggagggatctaggccctgcctcac

SEQ ID NO: 1714256 - DNA, 25 bp, Homo sapien
ggtgatttaatcacgaacttttcag

SEQ ID NO: 1714257 - DNA, 25 bp, Homo sapien
tgctagcacacaacagtaggtgatt

SEQ ID NO: 1714258 - DNA, 25 bp, Homo sapien
catttgtgattcagaactatacagc

SEQ ID NO: 1714259 - DNA, 25 bp, Homo sapien
tcagaatatacacgatagcacaatc

SEQ ID NO: 1714260 - DNA, 25 bp, Homo sapien
tggtatttgggtattaatggcctca

SEQ ID NO: 1714261 - DNA, 25 bp, Homo sapien
tcacttgaaggcagactgtcatacg

SEQ ID NO: 1714262 - DNA, 25 bp, Homo sapien
taaaccaaccttatactcctgagat

SEQ ID NO: 1714263 - DNA, 25 bp, Homo sapien
gaggaagttccactcgattcatagt

SEQ ID NO: 1714264 - DNA, 25 bp, Homo sapien
gaattggtagtaagaaaacattgat

SEQ ID NO: 1714265 - DNA, 25 bp, Homo sapien
cactgtgattggaatggtgattaaa

SEQ ID NO: 1714266 - DNA, 25 bp, Homo sapien
ctgggccttttccagtatagcaaat

SEQ ID NO: 1714267 - DNA, 25 bp, Homo sapien
tggtgattaaatgcatcatgttaaa

SEQ ID NO: 1714268 - DNA, 25 bp, Homo sapien
catggaatcaggcatcaggctaagc

SEQ ID NO: 1714269 - DNA, 25 bp, Homo sapien
taggaagtggctcctcaatgggtac

SEQ ID NO: 1714270 - DNA, 25 bp, Homo sapien
taaaagtccaagtggtcagcccagt

SEQ ID NO: 1714271 - DNA, 25 bp, Homo sapien
tacacaacatgtagcagggttcctg

SEQ ID NO: 1714272 - DNA, 25 bp, Homo sapien
ctaaaatgtacacaacttcacctta

SEQ ID NO: 1714273 - DNA, 25 bp, Homo sapien
tgtacacaacttcaccttaaaatta

SEQ ID NO: 1714274 - DNA, 25 bp, Homo sapien
gtgctaaaatgtacacaacttcacc

SEQ ID NO: 1714275 - DNA, 25 bp, Homo sapien
tgctaaaatgtacacaacttcacct

SEQ ID NO: 1714276 - DNA, 25 bp, Homo sapien
catggcacatgtgatcaaacttttc

SEQ ID NO: 1714277 - DNA, 25 bp, Homo sapien
ttccaagccttcctgagtgggccac

SEQ ID NO: 1714278 - DNA, 25 bp, Homo sapien
gctatcaggaagctccctaattatt

SEQ ID NO: 1714279 - DNA, 25 bp, Homo sapien
gacattatgttcacactaatggcaa

SEQ ID NO: 1714280 - DNA, 25 bp, Homo sapien
tgaataagagacttctgatgtacat

SEQ ID NO: 1714281 - DNA, 25 bp, Homo sapien
ataagagacttctgatgtacatttc

SEQ ID NO: 1714282 - DNA, 25 bp, Homo sapien
aataagagacttctgatgtacattt

SEQ ID NO: 1714283 - DNA, 25 bp, Homo sapien
gaataagagacttctgatgtacatt

SEQ ID NO: 1714284 - DNA, 25 bp, Homo sapien
caatgctgggcttcaacgtttcaaa

SEQ ID NO: 1714285 - DNA, 25 bp, Homo sapien
cttaagaattatgggtcacacctgg

SEQ ID NO: 1714286 - DNA, 25 bp, Homo sapien
tcttatgccagttagccaggttgtg

SEQ ID NO: 1714287 - DNA, 25 bp, Homo sapien
gccagtgatcagctactattccaaa

SEQ ID NO: 1714288 - DNA, 25 bp, Homo sapien
ggggagagtgcaaacgcagcctccc

SEQ ID NO: 1714289 - DNA, 25 bp, Homo sapien
tcaccctaggcaaacacgaaaaaga

SEQ ID NO: 1714290 - DNA, 25 bp, Homo sapien
gcaggtctctgactagtgagctcaa

SEQ ID NO: 1714291 - DNA, 25 bp, Homo sapien
taccagcacgtaagtataccaagct

SEQ ID NO: 1714292 - DNA, 25 bp, Homo sapien
gacatcctagctggcaatgacaaag

SEQ ID NO: 1714293 - DNA, 25 bp, Homo sapien
atttcatttatgagacaaggcctgg

SEQ ID NO: 1714294 - DNA, 25 bp, Homo sapien
tgtgtgttgctctgtgacaatccat

SEQ ID NO: 1714295 - DNA, 25 bp, Homo sapien
taagactgattctgagaaggagacc

SEQ ID NO: 1714296 - DNA, 25 bp, Homo sapien
gaaggagaccttactagatgaaaaa

SEQ ID NO: 1714297 - DNA, 25 bp, Homo sapien
gatggccaccattaactctcaccta

SEQ ID NO: 1714298 - DNA, 25 bp, Homo sapien
gattcccgtccttcctgtagtctta

SEQ ID NO: 1714299 - DNA, 25 bp, Homo sapien
cagatacaacactcagcaagatgca

SEQ ID NO: 1714300 - DNA, 25 bp, Homo sapien
tctccttgtgatctgactatgccta

SEQ ID NO: 1714301 - DNA, 25 bp, Homo sapien
cagcaaagcatttggaacagagatt

SEQ ID NO: 1714302 - DNA, 25 bp, Homo sapien
gcaaagcatttggaacagagattca

SEQ ID NO: 1714303 - DNA, 25 bp, Homo sapien
agcaaagcatttggaacagagattc

SEQ ID NO: 1714304 - DNA, 25 bp, Homo sapien
caaagcatttggaacagagattcat

SEQ ID NO: 1714305 - DNA, 25 bp, Homo sapien
tcacagtgtcagctaacaggcacag

SEQ ID NO: 1714306 - DNA, 25 bp, Homo sapien
aagagattacgtgacttacccgagg

SEQ ID NO: 1714307 - DNA, 25 bp, Homo sapien
gccagcatctgaagataggccctaa

SEQ ID NO: 1714308 - DNA, 25 bp, Homo sapien
tcaaggttacctccctaggatgacc

SEQ ID NO: 1714309 - DNA, 25 bp, Homo sapien
gtaacggtctaaagcttacaccatg

SEQ ID NO: 1714310 - DNA, 25 bp, Homo sapien
aaagctgtcagcttccccaattctt

SEQ ID NO: 1714311 - DNA, 25 bp, Homo sapien
tgattacttccttgcccaaatagca

SEQ ID NO: 1714312 - DNA, 25 bp, Homo sapien
ccatctaacccctagtttaggcaca

SEQ ID NO: 1714313 - DNA, 25 bp, Homo sapien
aaattgtctacccactaatgagtga

SEQ ID NO: 1714314 - DNA, 25 bp, Homo sapien
tcaactcaatgcaagtcaaacaaag

SEQ ID NO: 1714315 - DNA, 25 bp, Homo sapien
taatgagtgacaatacccagtttga

SEQ ID NO: 1714316 - DNA, 25 bp, Homo sapien
ttttaaatactaatcatgacccatt

SEQ ID NO: 1714317 - DNA, 25 bp, Homo sapien
gctttaatgatagctggccttcagt

SEQ ID NO: 1714318 - DNA, 25 bp, Homo sapien
cagtatgctagaacaagaggtcatc

SEQ ID NO: 1714319 - DNA, 25 bp, Homo sapien
cattagtagaggagttacttcagtc

SEQ ID NO: 1714320 - DNA, 25 bp, Homo sapien
gcatctgtcatcagagctactccaa

SEQ ID NO: 1714321 - DNA, 25 bp, Homo sapien
attacaggcatgagccactgtgcct

SEQ ID NO: 1714322 - DNA, 25 bp, Homo sapien
ggattacaggcatgagccactgtgc

SEQ ID NO: 1714323 - DNA, 25 bp, Homo sapien
tggagtacagcagcgtgatctcggc

SEQ ID NO: 1714324 - DNA, 25 bp, Homo sapien
taggattacaggcatgagccactgt

SEQ ID NO: 1714325 - DNA, 25 bp, Homo sapien
aaagaggccaactgtatccaaccca

SEQ ID NO: 1714326 - DNA, 25 bp, Homo sapien
gactgaatgatgcaccctgtccctg

SEQ ID NO: 1714327 - DNA, 25 bp, Homo sapien
gataatccgggataagactgagcca

SEQ ID NO: 1714328 - DNA, 25 bp, Homo sapien
cacagagggtcgtctaattacatga

SEQ ID NO: 1714329 - DNA, 25 bp, Homo sapien
cgagactagaccatcaagaagacca

SEQ ID NO: 1714330 - DNA, 25 bp, Homo sapien
aagaatatttcccaccgagactaga

SEQ ID NO: 1714331 - DNA, 25 bp, Homo sapien
tgtagtacacgtcaaagcaacactc

SEQ ID NO: 1714332 - DNA, 25 bp, Homo sapien
caagatgggcaactagacatagcca

SEQ ID NO: 1714333 - DNA, 25 bp, Homo sapien
tccaatgcaacgagacaaaatacag

SEQ ID NO: 1714334 - DNA, 25 bp, Homo sapien
tattctgtgtgcaaaaagctagacg

SEQ ID NO: 1714335 - DNA, 25 bp, Homo sapien
caattcatgggacactgttgagtac

SEQ ID NO: 1714336 - DNA, 25 bp, Homo sapien
caggagacatcttgcctcaaaagca

SEQ ID NO: 1714337 - DNA, 25 bp, Homo sapien
agtgacggcagaaatacagcattat

SEQ ID NO: 1714338 - DNA, 25 bp, Homo sapien
tactcatcccaagcttaattgctat

SEQ ID NO: 1714339 - DNA, 25 bp, Homo sapien
caggattgctaattagagtgacggc

SEQ ID NO: 1714340 - DNA, 25 bp, Homo sapien
caaggtacattttgtccgtcggtgg

SEQ ID NO: 1714341 - DNA, 25 bp, Homo sapien
tttatttataaacggaaggcacaca

SEQ ID NO: 1714342 - DNA, 25 bp, Homo sapien
acttggagatgagtaaaaactgtga

SEQ ID NO: 1714343 - DNA, 25 bp, Homo sapien
aaatgcgaaggtagctacaggattc

SEQ ID NO: 1714344 - DNA, 25 bp, Homo sapien
gatgaatgtcatttaacttggagat

SEQ ID NO: 1714345 - DNA, 25 bp, Homo sapien
catgtatttctgctcgtatctttac

SEQ ID NO: 1714346 - DNA, 25 bp, Homo sapien
ttctatgtaggcactaatagctatg

SEQ ID NO: 1714347 - DNA, 25 bp, Homo sapien
tatgtaggcactaatagctatgaac

SEQ ID NO: 1714348 - DNA, 25 bp, Homo sapien
gtatttctgctcgtatctttacttt

SEQ ID NO: 1714349 - DNA, 25 bp, Homo sapien
tagtgagacactggccaacctagga

SEQ ID NO: 1714350 - DNA, 25 bp, Homo sapien
ggcgcccggcctgatactaaattaa

SEQ ID NO: 1714351 - DNA, 25 bp, Homo sapien
gcagattactggacacactcgggtg

SEQ ID NO: 1714352 - DNA, 25 bp, Homo sapien
taaatttacttgagagcccacatgg

SEQ ID NO: 1714353 - DNA, 25 bp, Homo sapien
agtataaactttgagtggctgacaa

SEQ ID NO: 1714354 - DNA, 25 bp, Homo sapien
caattccatatacctacaagagtcc

SEQ ID NO: 1714355 - DNA, 25 bp, Homo sapien
caaaaactactgaggagccatatct

SEQ ID NO: 1714356 - DNA, 25 bp, Homo sapien
gactgggttggtgaattaatgctct

SEQ ID NO: 1714357 - DNA, 25 bp, Homo sapien
tttgacaaatgaactcgagggaggg

SEQ ID NO: 1714358 - DNA, 25 bp, Homo sapien
tcccagtttacagccaatagtgaag

SEQ ID NO: 1714359 - DNA, 25 bp, Homo sapien
tatcaacctagaatggagcatagaa

SEQ ID NO: 1714360 - DNA, 25 bp, Homo sapien
tatgggactcaaagttgttctgccc

SEQ ID NO: 1714361 - DNA, 25 bp, Homo sapien
caacctctacttccggggctcaagt

SEQ ID NO: 1714362 - DNA, 25 bp, Homo sapien
tagctgggactataggtgtgtgcca

SEQ ID NO: 1714363 - DNA, 25 bp, Homo sapien
ggtgtgtgccaccattcccagataa

SEQ ID NO: 1714364 - DNA, 25 bp, Homo sapien
gattcttccacctcagcctcccaag

SEQ ID NO: 1714365 - DNA, 25 bp, Homo sapien
gaagaagagaattgtcctcacccat

SEQ ID NO: 1714366 - DNA, 25 bp, Homo sapien
aattgtactgcaaggggatgtattg

SEQ ID NO: 1714367 - DNA, 25 bp, Homo sapien
tgcacaaatgccgatcaaattgtac

SEQ ID NO: 1714368 - DNA, 25 bp, Homo sapien
gggatgtattgtgcaggaggtggaa

SEQ ID NO: 1714369 - DNA, 25 bp, Homo sapien
tagcctaagtcaacacagggtaagg

SEQ ID NO: 1714370 - DNA, 25 bp, Homo sapien
ggtatagagctatcatctccagtga

SEQ ID NO: 1714371 - DNA, 25 bp, Homo sapien
aatacctcccgaaggagttgcctga

SEQ ID NO: 1714372 - DNA, 25 bp, Homo sapien
cattatcaagcactatgtggtgtac

SEQ ID NO: 1714373 - DNA, 25 bp, Homo sapien
caggtactggtagtggcttactgaa

SEQ ID NO: 1714374 - DNA, 25 bp, Homo sapien
tggttagttcttcactccccaagga

SEQ ID NO: 1714375 - DNA, 25 bp, Homo sapien
gctggtgaatcccatgagagctcag

SEQ ID NO: 1714376 - DNA, 25 bp, Homo sapien
aaatactcacctaggtaacagctgg

SEQ ID NO: 1714377 - DNA, 25 bp, Homo sapien
caatagccagcatgtaatcttggac

SEQ ID NO: 1714378 - DNA, 25 bp, Homo sapien
ggctgttcctgaacccatcttggaa

SEQ ID NO: 1714379 - DNA, 25 bp, Homo sapien
tcatggcccttgcaattggtgtcac

SEQ ID NO: 1714380 - DNA, 25 bp, Homo sapien
tcaccaggaacccaacaatagccag

SEQ ID NO: 1714381 - DNA, 25 bp, Homo sapien
aatcaggcggagttattccttagac

SEQ ID NO: 1714382 - DNA, 25 bp, Homo sapien
gaaaatgcctgtccaatgagtcaag

SEQ ID NO: 1714383 - DNA, 25 bp, Homo sapien
ttctggaaaccaatgttagcacacg

SEQ ID NO: 1714384 - DNA, 25 bp, Homo sapien
gagtcaagacgctgagttctggaaa

SEQ ID NO: 1714385 - DNA, 25 bp, Homo sapien
aacagactttgatcaaggcttagac

SEQ ID NO: 1714386 - DNA, 25 bp, Homo sapien
tctggtggtcatcaacttaagtaca

SEQ ID NO: 1714387 - DNA, 25 bp, Homo sapien
gagattgaactcaccagattacaca

SEQ ID NO: 1714388 - DNA, 25 bp, Homo sapien
gcaataccaagagaagcacaatctg

SEQ ID NO: 1714389 - DNA, 25 bp, Homo sapien
acagtgcccggccaagtctcactgt

SEQ ID NO: 1714390 - DNA, 25 bp, Homo sapien
cagtgcccggccaagtctcactgtt

SEQ ID NO: 1714391 - DNA, 25 bp, Homo sapien
agtgcccggccaagtctcactgttt

SEQ ID NO: 1714392 - DNA, 25 bp, Homo sapien
ccacagtggcgttctcatgctcaaa

SEQ ID NO: 1714393 - DNA, 25 bp, Homo sapien
caatcctgcgtaaggatagggaaca

SEQ ID NO: 1714394 - DNA, 25 bp, Homo sapien
tcaactaggtcttacaagtgagcca

SEQ ID NO: 1714395 - DNA, 25 bp, Homo sapien
caagccctttagatacagccatgca

SEQ ID NO: 1714396 - DNA, 25 bp, Homo sapien
agtgactgtgagtgcgccctgcaat

SEQ ID NO: 1714397 - DNA, 25 bp, Homo sapien
gtctatatggttcacaccttctccc

SEQ ID NO: 1714398 - DNA, 25 bp, Homo sapien
tcccaaagctatgcatgctaggttc

SEQ ID NO: 1714399 - DNA, 25 bp, Homo sapien
taaacggttccagaatgagtgactg

SEQ ID NO: 1714400 - DNA, 25 bp, Homo sapien
caaataactacaacagacggcagta

SEQ ID NO: 1714401 - DNA, 25 bp, Homo sapien
caaagctaggaaataggcaatacac

SEQ ID NO: 1714402 - DNA, 25 bp, Homo sapien
aaccagtatttcagggcttaggcac

SEQ ID NO: 1714403 - DNA, 25 bp, Homo sapien
gcttaggcacctacacaccatttga

SEQ ID NO: 1714404 - DNA, 25 bp, Homo sapien
ctgggagatgctggatgaagatgct

SEQ ID NO: 1714405 - DNA, 25 bp, Homo sapien
ttccacacatgatcaattcactggg

SEQ ID NO: 1714406 - DNA, 25 bp, Homo sapien
cacacatgatcaattcactgggaga

SEQ ID NO: 1714407 - DNA, 25 bp, Homo sapien
atgatcaattcactgggagatgctg

SEQ ID NO: 1714408 - DNA, 25 bp, Homo sapien
taagataactggcacctcaactgtg

SEQ ID NO: 1714409 - DNA, 25 bp, Homo sapien
gaatgtgtagtatcagtgggcccct

SEQ ID NO: 1714410 - DNA, 25 bp, Homo sapien
gagctgatcctcaaagtccgcaaaa

SEQ ID NO: 1714411 - DNA, 25 bp, Homo sapien
ctgggaacctaggaaaaggcatact

SEQ ID NO: 1714412 - DNA, 25 bp, Homo sapien
tgcctatgccaaaaagtcagattac

SEQ ID NO: 1714413 - DNA, 25 bp, Homo sapien
aaatgtctcatgctaagctgttggg

SEQ ID NO: 1714414 - DNA, 25 bp, Homo sapien
ctgagtaaggaagcggaaataccac

SEQ ID NO: 1714415 - DNA, 25 bp, Homo sapien
caggtagcttagaggcaggacattc

SEQ ID NO: 1714416 - DNA, 25 bp, Homo sapien
gactataggcacccagccactaagc

SEQ ID NO: 1714417 - DNA, 25 bp, Homo sapien
atatgtacttttttatacacctgtt

SEQ ID NO: 1714418 - DNA, 25 bp, Homo sapien
ataggcacccagccactaagcctgg

SEQ ID NO: 1714419 - DNA, 25 bp, Homo sapien
cccacacctggccatatatgtactt

SEQ ID NO: 1714420 - DNA, 25 bp, Homo sapien
acagccccaaaactcccatttcatg

SEQ ID NO: 1714421 - DNA, 25 bp, Homo sapien
tttgcatcttcgcaaaaatatcttc

SEQ ID NO: 1714422 - DNA, 25 bp, Homo sapien
agccccaaaactcccatttcatgaa

SEQ ID NO: 1714423 - DNA, 25 bp, Homo sapien
caaaaatatcttccgcacaaacagc

SEQ ID NO: 1714424 - DNA, 25 bp, Homo sapien
ggccagaagtcgtatttcaaacata

SEQ ID NO: 1714425 - DNA, 25 bp, Homo sapien
cctggccagaagtcgtatttcaaac

SEQ ID NO: 1714426 - DNA, 25 bp, Homo sapien
atttcaaacatatagccattactaa

SEQ ID NO: 1714427 - DNA, 25 bp, Homo sapien
ttcaaacatatagccattactaatt

SEQ ID NO: 1714428 - DNA, 25 bp, Homo sapien
attggctcccaaaagcatatcctga

SEQ ID NO: 1714429 - DNA, 25 bp, Homo sapien
tacaggtaacattagattggctccc

SEQ ID NO: 1714430 - DNA, 25 bp, Homo sapien
tgaaatgtgtcttgcaaaaacaggc

SEQ ID NO: 1714431 - DNA, 25 bp, Homo sapien
aactactcagaggtgtgaactagca

SEQ ID NO: 1714432 - DNA, 25 bp, Homo sapien
ggaagtccttaagattacccataga

SEQ ID NO: 1714433 - DNA, 25 bp, Homo sapien
tgctttaatcatgacacgtgggaga

SEQ ID NO: 1714434 - DNA, 25 bp, Homo sapien
cccggcggtcaacatggagtgcttt

SEQ ID NO: 1714435 - DNA, 25 bp, Homo sapien
aagcaagagtgctcctacctacagg

SEQ ID NO: 1714436 - DNA, 25 bp, Homo sapien
ttagaacttagaaccagctactagc

SEQ ID NO: 1714437 - DNA, 25 bp, Homo sapien
gtctgatctactctccacaaagcaa

SEQ ID NO: 1714438 - DNA, 25 bp, Homo sapien
ctgagttcaagcctcttcggttcaa

SEQ ID NO: 1714439 - DNA, 25 bp, Homo sapien
tccagaatcctaaccatggcttaga

SEQ ID NO: 1714440 - DNA, 25 bp, Homo sapien
cacacctctacctgtatatatccta

SEQ ID NO: 1714441 - DNA, 25 bp, Homo sapien
accatgctcagcctatgtcctttca

SEQ ID NO: 1714442 - DNA, 25 bp, Homo sapien
ccatgctcagcctatgtcctttcaa

SEQ ID NO: 1714443 - DNA, 25 bp, Homo sapien
tacctgtatatatcctaatgatgat

SEQ ID NO: 1714444 - DNA, 25 bp, Homo sapien
gcgcctgtggccttaaaccttttca

SEQ ID NO: 1714445 - DNA, 25 bp, Homo sapien
tggtgagaggcacacaaaaatatcc

SEQ ID NO: 1714446 - DNA, 25 bp, Homo sapien
tcagaatagcagttaaatctcagat

SEQ ID NO: 1714447 - DNA, 25 bp, Homo sapien
tcaaagcccctgaatattagcgtaa

SEQ ID NO: 1714448 - DNA, 25 bp, Homo sapien
tacttggagcggaatcatcgtctgg

SEQ ID NO: 1714449 - DNA, 25 bp, Homo sapien
gattggctgttacttgtacttggag

SEQ ID NO: 1714450 - DNA, 25 bp, Homo sapien
tacattcagttctgtcggaagcggc

SEQ ID NO: 1714451 - DNA, 25 bp, Homo sapien
tctcttcggaaaacaaatctgattg

SEQ ID NO: 1714452 - DNA, 25 bp, Homo sapien
cagctgagatggtacaaccgcactc

SEQ ID NO: 1714453 - DNA, 25 bp, Homo sapien
gtcagctgagatggtacaaccgcac

SEQ ID NO: 1714454 - DNA, 25 bp, Homo sapien
tcagctgagatggtacaaccgcact

SEQ ID NO: 1714455 - DNA, 25 bp, Homo sapien
tatgtgatgcaggacatttagcagc

SEQ ID NO: 1714456 - DNA, 25 bp, Homo sapien
taatacataaggaccaacatgggtg

SEQ ID NO: 1714457 - DNA, 25 bp, Homo sapien
aaaaaggccaggtctcacaaggctg

SEQ ID NO: 1714458 - DNA, 25 bp, Homo sapien
catgtatcagggtttgtcaagctca

SEQ ID NO: 1714459 - DNA, 25 bp, Homo sapien
ctttcattctcttccacaaatggcc

SEQ ID NO: 1714460 - DNA, 25 bp, Homo sapien
ccttccagccttgtctttcattctc

SEQ ID NO: 1714461 - DNA, 25 bp, Homo sapien
cttccagccttgtctttcattctct

SEQ ID NO: 1714462 - DNA, 25 bp, Homo sapien
tgtctttcattctcttccacaaatg

SEQ ID NO: 1714463 - DNA, 25 bp, Homo sapien
tgctccttaagtgcagaagtttcac

SEQ ID NO: 1714464 - DNA, 25 bp, Homo sapien
taaaagcacctaccctaataggcta

SEQ ID NO: 1714465 - DNA, 25 bp, Homo sapien
tgttaccgcatctaaagaactttga

SEQ ID NO: 1714466 - DNA, 25 bp, Homo sapien
tgaacctctctaagttttaatgtcc

SEQ ID NO: 1714467 - DNA, 25 bp, Homo sapien
taggccattgggtctccacagcaac

SEQ ID NO: 1714468 - DNA, 25 bp, Homo sapien
gaatatttgccctacctatgctgca

SEQ ID NO: 1714469 - DNA, 25 bp, Homo sapien
tatagatgcaaaaggcccagagttc

SEQ ID NO: 1714470 - DNA, 25 bp, Homo sapien
aaccagagtcccgtattatagatgc

SEQ ID NO: 1714471 - DNA, 25 bp, Homo sapien
tgcagaaccagctttgggatgaatg

SEQ ID NO: 1714472 - DNA, 25 bp, Homo sapien
agaacacagccctaataaaagcagc

SEQ ID NO: 1714473 - DNA, 25 bp, Homo sapien
gcagaaccagctttgggatgaatga

SEQ ID NO: 1714474 - DNA, 25 bp, Homo sapien
aaacatgtacacagctgcatagaaa

SEQ ID NO: 1714475 - DNA, 25 bp, Homo sapien
agcacccagccaagataaaatcttg

SEQ ID NO: 1714476 - DNA, 25 bp, Homo sapien
tacaacccataatgaataaacagcg

SEQ ID NO: 1714477 - DNA, 25 bp, Homo sapien
tggtgattgatggtggtgacgttag

SEQ ID NO: 1714478 - DNA, 25 bp, Homo sapien
gagcctttcccatagctagctgtac

SEQ ID NO: 1714479 - DNA, 25 bp, Homo sapien
aaaagacatctattcaggccacagg

SEQ ID NO: 1714480 - DNA, 25 bp, Homo sapien
gactggtgcatgttcttcctaagag

SEQ ID NO: 1714481 - DNA, 25 bp, Homo sapien
ccacagctggaatatgatgagtgac

SEQ ID NO: 1714482 - DNA, 25 bp, Homo sapien
gattacccctaactcggtatctggc

SEQ ID NO: 1714483 - DNA, 25 bp, Homo sapien
taagttcccataacaccatgagctg

SEQ ID NO: 1714484 - DNA, 25 bp, Homo sapien
tatctggccaagatcactaagttcc

SEQ ID NO: 1714485 - DNA, 25 bp, Homo sapien
gaacttaaatgtacatcctgaggga

SEQ ID NO: 1714486 - DNA, 25 bp, Homo sapien
ttgttggtgtgattaatgagacatg

SEQ ID NO: 1714487 - DNA, 25 bp, Homo sapien
tttgttggtgtgattaatgagacat

SEQ ID NO: 1714488 - DNA, 25 bp, Homo sapien
ttttgttggtgtgattaatgagaca

SEQ ID NO: 1714489 - DNA, 25 bp, Homo sapien
tgttggtgtgattaatgagacatga

SEQ ID NO: 1714490 - DNA, 25 bp, Homo sapien
taaggatgaattcacataagaatga

SEQ ID NO: 1714491 - DNA, 25 bp, Homo sapien
tgctacctgaacatagtggtagtgc

SEQ ID NO: 1714492 - DNA, 25 bp, Homo sapien
ccagtgtgttcaaggttcaactcct

SEQ ID NO: 1714493 - DNA, 25 bp, Homo sapien
catagtggtagtgcttaacagtaaa

SEQ ID NO: 1714494 - DNA, 25 bp, Homo sapien
ggtagtgcttaacagtaaagccttc

SEQ ID NO: 1714495 - DNA, 25 bp, Homo sapien
tatgactgagagctcaatgcctgtc

SEQ ID NO: 1714496 - DNA, 25 bp, Homo sapien
ttaaagatccgtgtccaagtcttgg

SEQ ID NO: 1714497 - DNA, 25 bp, Homo sapien
aatgcctgtcatttcactaacggag

SEQ ID NO: 1714498 - DNA, 25 bp, Homo sapien
aaaactgagtacagcaaagaatgcc

SEQ ID NO: 1714499 - DNA, 25 bp, Homo sapien
gcatagtcctatctaactggccatg

SEQ ID NO: 1714500 - DNA, 25 bp, Homo sapien
tataaactgcatgtatgggctgagc

SEQ ID NO: 1714501 - DNA, 25 bp, Homo sapien
tgcaatctgcttcgtagactcacag

SEQ ID NO: 1714502 - DNA, 25 bp, Homo sapien
taataatgggtctaatgctaatcct

SEQ ID NO: 1714503 - DNA, 25 bp, Homo sapien
catcagcgcaagtcccagacacttt

SEQ ID NO: 1714504 - DNA, 25 bp, Homo sapien
tctattagccctcgctgcatcagcg

SEQ ID NO: 1714505 - DNA, 25 bp, Homo sapien
gcagtaataaggcctccatgcctca

SEQ ID NO: 1714506 - DNA, 25 bp, Homo sapien
tgtttataattgctgatgagcagta

SEQ ID NO: 1714507 - DNA, 25 bp, Homo sapien
gaaattctaggatgtcaccgcgggc

SEQ ID NO: 1714508 - DNA, 25 bp, Homo sapien
cctgacagggaacgtttacagagtc

SEQ ID NO: 1714509 - DNA, 25 bp, Homo sapien
gatttgcttctggttacagcctgac

SEQ ID NO: 1714510 - DNA, 25 bp, Homo sapien
tcttagcatgtatcacggtggcctg

SEQ ID NO: 1714511 - DNA, 25 bp, Homo sapien
tgattgtagacacaaagcctcacca

SEQ ID NO: 1714512 - DNA, 25 bp, Homo sapien
ctttcatccgagaattgttactcaa

SEQ ID NO: 1714513 - DNA, 25 bp, Homo sapien
tctgacttcttagtagtaacatgga

SEQ ID NO: 1714514 - DNA, 25 bp, Homo sapien
accgtgtctggctgaagcaatgact

SEQ ID NO: 1714515 - DNA, 25 bp, Homo sapien
tgtgctggtgcaggactgtggttcc

SEQ ID NO: 1714516 - DNA, 25 bp, Homo sapien
taattctgccagttaatacctatac

SEQ ID NO: 1714517 - DNA, 25 bp, Homo sapien
ttctcacataacaaagagatatagt

SEQ ID NO: 1714518 - DNA, 25 bp, Homo sapien
gagatatagtagaaaacagtcctag

SEQ ID NO: 1714519 - DNA, 25 bp, Homo sapien
tctgcccgcctcgaaatttagtctt

SEQ ID NO: 1714520 - DNA, 25 bp, Homo sapien
gactcactgctctcaagacaaatcc

SEQ ID NO: 1714521 - DNA, 25 bp, Homo sapien
catgtgatgtgatgctaaatgaacc

SEQ ID NO: 1714522 - DNA, 25 bp, Homo sapien
tggtatattatgacacagagtgccc

SEQ ID NO: 1714523 - DNA, 25 bp, Homo sapien
tattccccagcttacggaaggctta

SEQ ID NO: 1714524 - DNA, 25 bp, Homo sapien
gattcttcggcctttagactctgga

SEQ ID NO: 1714525 - DNA, 25 bp, Homo sapien
gaaggcttatcatggaacttcacct

SEQ ID NO: 1714526 - DNA, 25 bp, Homo sapien
caggctaaagcgtgtactgtcagct

SEQ ID NO: 1714527 - DNA, 25 bp, Homo sapien
tgtcattcttgtctttattactcat

SEQ ID NO: 1714528 - DNA, 25 bp, Homo sapien
tctgttagatgctctctaatgctcc

SEQ ID NO: 1714529 - DNA, 25 bp, Homo sapien
gatgaagatctgttagatgctctct

SEQ ID NO: 1714530 - DNA, 25 bp, Homo sapien
cttccctagatgaagatctgttaga

SEQ ID NO: 1714531 - DNA, 25 bp, Homo sapien
ccctagatgaagatctgttagatgc

SEQ ID NO: 1714532 - DNA, 25 bp, Homo sapien
ggtttggcactggaagcaccgacgt

SEQ ID NO: 1714533 - DNA, 25 bp, Homo sapien
gccgttttactggtgaagcctcatt

SEQ ID NO: 1714534 - DNA, 25 bp, Homo sapien
tctcaagtagtcgtggccgttttac

SEQ ID NO: 1714535 - DNA, 25 bp, Homo sapien
cggaccgttccgtattctcaagtag

SEQ ID NO: 1714536 - DNA, 25 bp, Homo sapien
tgttaaggatatagtctccatcacg

SEQ ID NO: 1714537 - DNA, 25 bp, Homo sapien
gcaaacttacagtactcagaagaag

SEQ ID NO: 1714538 - DNA, 25 bp, Homo sapien
gatatagtctccatcacgccactgg

SEQ ID NO: 1714539 - DNA, 25 bp, Homo sapien
agaagaacgaaagacttcagccact

SEQ ID NO: 1714540 - DNA, 25 bp, Homo sapien
aagtacaggaaactgtaaatcagcc

SEQ ID NO: 1714541 - DNA, 25 bp, Homo sapien
tattacactacagaatacagaagga

SEQ ID NO: 1714542 - DNA, 25 bp, Homo sapien
attccactgtgggtaggcatccctg

SEQ ID NO: 1714543 - DNA, 25 bp, Homo sapien
caatttcgttcctatgtgtcatgat

SEQ ID NO: 1714544 - DNA, 25 bp, Homo sapien
taggagttccaacgtagtttctatg

SEQ ID NO: 1714545 - DNA, 25 bp, Homo sapien
cagataattgaggaaccgtagcagc

SEQ ID NO: 1714546 - DNA, 25 bp, Homo sapien
caaaggctgccgcttcagaagatag

SEQ ID NO: 1714547 - DNA, 25 bp, Homo sapien
ggagtaccgcatacaccagaatgtg

SEQ ID NO: 1714548 - DNA, 25 bp, Homo sapien
ggtaggctcacaacactggtaacag

SEQ ID NO: 1714549 - DNA, 25 bp, Homo sapien
gatccgctatggcaaatcctgtgta

SEQ ID NO: 1714550 - DNA, 25 bp, Homo sapien
tacctgggccatactgcgtgcatga

SEQ ID NO: 1714551 - DNA, 25 bp, Homo sapien
gcctggcagggttgatcgaaatagc

SEQ ID NO: 1714552 - DNA, 25 bp, Homo sapien
ttagatctcagtgctaaattgtgaa

SEQ ID NO: 1714553 - DNA, 25 bp, Homo sapien
ctaaattgtgaaatctcctgtttgc

SEQ ID NO: 1714554 - DNA, 25 bp, Homo sapien
gtgctaaattgtgaaatctcctgtt

SEQ ID NO: 1714555 - DNA, 25 bp, Homo sapien
tagatctcagtgctaaattgtgaaa

SEQ ID NO: 1714556 - DNA, 25 bp, Homo sapien
aaattaggtagtctgcgtcaaagct

SEQ ID NO: 1714557 - DNA, 25 bp, Homo sapien
ctgaagggtaaactaggagacctgg

SEQ ID NO: 1714558 - DNA, 25 bp, Homo sapien
gatgctaagaccttaggaaattagg

SEQ ID NO: 1714559 - DNA, 25 bp, Homo sapien
taggtagtctgcgtcaaagctgaag

SEQ ID NO: 1714560 - DNA, 25 bp, Homo sapien
tcactggcagtgtttggacgacagc

SEQ ID NO: 1714561 - DNA, 25 bp, Homo sapien
cactggcagtgtttggacgacagcc

SEQ ID NO: 1714562 - DNA, 25 bp, Homo sapien
aaagcccacatatccaaagcaagtc

SEQ ID NO: 1714563 - DNA, 25 bp, Homo sapien
cagtgcaattctcatcaaagtacca

SEQ ID NO: 1714564 - DNA, 25 bp, Homo sapien
ataacaaaaggcacacagacgaacg

SEQ ID NO: 1714565 - DNA, 25 bp, Homo sapien
aaacccgaatacttagagtcaactg

SEQ ID NO: 1714566 - DNA, 25 bp, Homo sapien
gtgactggaaccaatatgaaacctc

SEQ ID NO: 1714567 - DNA, 25 bp, Homo sapien
gaaggactctaaagcgctgggctga

SEQ ID NO: 1714568 - DNA, 25 bp, Homo sapien
ggaggaaggtatgtgttacacaccc

SEQ ID NO: 1714569 - DNA, 25 bp, Homo sapien
gaagagattacaactgacaacacag

SEQ ID NO: 1714570 - DNA, 25 bp, Homo sapien
taggcaggaatcagagactagtgcg

SEQ ID NO: 1714571 - DNA, 25 bp, Homo sapien
tagtgcggttacacacagtaggtct

SEQ ID NO: 1714572 - DNA, 25 bp, Homo sapien
gaatcgcaagtttgttaggcaggaa

SEQ ID NO: 1714573 - DNA, 25 bp, Homo sapien
tgtgacctccgaagaacccatgtat

SEQ ID NO: 1714574 - DNA, 25 bp, Homo sapien
ggttctcacagtcaggtacatacat

SEQ ID NO: 1714575 - DNA, 25 bp, Homo sapien
tacagcgggagaccaaaaggtgacc

SEQ ID NO: 1714576 - DNA, 25 bp, Homo sapien
cttatctagatgtggcattcgggac

SEQ ID NO: 1714577 - DNA, 25 bp, Homo sapien
ttcgggacacaacaaaacacagtgc

SEQ ID NO: 1714578 - DNA, 25 bp, Homo sapien
gcacgtgtcctgatgacccttacag

SEQ ID NO: 1714579 - DNA, 25 bp, Homo sapien
acagcacgtgtcctgatgaccctta

SEQ ID NO: 1714580 - DNA, 25 bp, Homo sapien
agcacgtgtcctgatgacccttaca

SEQ ID NO: 1714581 - DNA, 25 bp, Homo sapien
acgtgtcctgatgacccttacagtc

SEQ ID NO: 1714582 - DNA, 25 bp, Homo sapien
cctcccgcaacgcactgtgctctgg

SEQ ID NO: 1714583 - DNA, 25 bp, Homo sapien
tttgcaaagacatgcaagcccccga

SEQ ID NO: 1714584 - DNA, 25 bp, Homo sapien
ttatgttcagctcagctttcatgtc

SEQ ID NO: 1714585 - DNA, 25 bp, Homo sapien
tcttcctcagatacaccaagtttgt

SEQ ID NO: 1714586 - DNA, 25 bp, Homo sapien
cacacatctctctccagagaaacac

SEQ ID NO: 1714587 - DNA, 25 bp, Homo sapien
ataaatgccacacatctctctccag

SEQ ID NO: 1714588 - DNA, 25 bp, Homo sapien
ctataaatgccacacatctctctcc

SEQ ID NO: 1714589 - DNA, 25 bp, Homo sapien
aaatgccacacatctctctccagag

SEQ ID NO: 1714590 - DNA, 25 bp, Homo sapien
agaatgtccgagtggcaacgtggtc

SEQ ID NO: 1714591 - DNA, 25 bp, Homo sapien
ccgagtggcaacgtggtcagggggc

SEQ ID NO: 1714592 - DNA, 25 bp, Homo sapien
tgtccgagtggcaacgtggtcaggg

SEQ ID NO: 1714593 - DNA, 25 bp, Homo sapien
aatgtccgagtggcaacgtggtcag

SEQ ID NO: 1714594 - DNA, 25 bp, Homo sapien
tgcagatccctcacttggaagctcc

SEQ ID NO: 1714595 - DNA, 25 bp, Homo sapien
tcacaaaagttgagcccctgacatt

SEQ ID NO: 1714596 - DNA, 25 bp, Homo sapien
caatcggtgccagacagaaatgtta

SEQ ID NO: 1714597 - DNA, 25 bp, Homo sapien
gacagctctggatacttttggacta

SEQ ID NO: 1714598 - DNA, 25 bp, Homo sapien
gacaggtatttcaatggaagccact

SEQ ID NO: 1714599 - DNA, 25 bp, Homo sapien
tgtgccacataaacctgaagatgcc

SEQ ID NO: 1714600 - DNA, 25 bp, Homo sapien
tcactcacccggaatagagaggcag

SEQ ID NO: 1714601 - DNA, 25 bp, Homo sapien
tgactgttgctaccaaagacacaag

SEQ ID NO: 1714602 - DNA, 25 bp, Homo sapien
attttgggagcagcgctggtagcaa

SEQ ID NO: 1714603 - DNA, 25 bp, Homo sapien
tggattgctgggattagaaggcacc

SEQ ID NO: 1714604 - DNA, 25 bp, Homo sapien
aatatatggcactgtaattcactgg

SEQ ID NO: 1714605 - DNA, 25 bp, Homo sapien
gaatgctttcaaaaatccacgccca

SEQ ID NO: 1714606 - DNA, 25 bp, Homo sapien
tccccagtagcgcaactacaagcac

SEQ ID NO: 1714607 - DNA, 25 bp, Homo sapien
cagtagcgcaactacaagcacacat

SEQ ID NO: 1714608 - DNA, 25 bp, Homo sapien
ttgccttccgccagctagtgagcag

SEQ ID NO: 1714609 - DNA, 25 bp, Homo sapien
caaagcctacctggtgagggagaac

SEQ ID NO: 1714610 - DNA, 25 bp, Homo sapien
tcctaaaggattttgcagcagaggc

SEQ ID NO: 1714611 - DNA, 25 bp, Homo sapien
ctttctgatgaatggtgctggctga

SEQ ID NO: 1714612 - DNA, 25 bp, Homo sapien
aagcaaacactctccttacttgttt

SEQ ID NO: 1714613 - DNA, 25 bp, Homo sapien
caagcaaacactctccttacttgtt

SEQ ID NO: 1714614 - DNA, 25 bp, Homo sapien
ttccaggtaaatctagatccattcc

SEQ ID NO: 1714615 - DNA, 25 bp, Homo sapien
ggtaaatctagatccattcctaaac

SEQ ID NO: 1714616 - DNA, 25 bp, Homo sapien
cctaaacctgttctccctgtctgga

SEQ ID NO: 1714617 - DNA, 25 bp, Homo sapien
ccacaggagcaagcttccaggtaaa

SEQ ID NO: 1714618 - DNA, 25 bp, Homo sapien
tgtccttgcaaatgagtgggctctg

SEQ ID NO: 1714619 - DNA, 25 bp, Homo sapien
caagagggtcagcactttgcattcc

SEQ ID NO: 1714620 - DNA, 25 bp, Homo sapien
caattgcctttgtccagaggatgga

SEQ ID NO: 1714621 - DNA, 25 bp, Homo sapien
aaccctaagttgatggctgcgagac

SEQ ID NO: 1714622 - DNA, 25 bp, Homo sapien
ccggccacggcccatgtggtcgaat

SEQ ID NO: 1714623 - DNA, 25 bp, Homo sapien
cacggcccatgtggtcgaatgtgca

SEQ ID NO: 1714624 - DNA, 25 bp, Homo sapien
ccatgtggtcgaatgtgcagtcgtg

SEQ ID NO: 1714625 - DNA, 25 bp, Homo sapien
tgctcggggaggcgatgtaacatac

SEQ ID NO: 1714626 - DNA, 25 bp, Homo sapien
ccccgatgcgctggcaggagcgccc

SEQ ID NO: 1714627 - DNA, 25 bp, Homo sapien
ctccccgatgcgctggcaggagcgc

SEQ ID NO: 1714628 - DNA, 25 bp, Homo sapien
ccctccccgatgcgctggcaggagc

SEQ ID NO: 1714629 - DNA, 25 bp, Homo sapien
ccgatgcgctggcaggagcgcccca

SEQ ID NO: 1714630 - DNA, 25 bp, Homo sapien
taaagaaaggaaacggactggctgc

SEQ ID NO: 1714631 - DNA, 25 bp, Homo sapien
gacgcgtgcccagtacaaggtgtct

SEQ ID NO: 1714632 - DNA, 25 bp, Homo sapien
taagaacagcgtcacgtggtggcca

SEQ ID NO: 1714633 - DNA, 25 bp, Homo sapien
tttatacaatggctagcaggcacct

SEQ ID NO: 1714634 - DNA, 25 bp, Homo sapien
tcctgtgtagaaaaggcgggtctcg

SEQ ID NO: 1714635 - DNA, 25 bp, Homo sapien
tctggcaaagccatgtgcgtcgtgg

SEQ ID NO: 1714636 - DNA, 25 bp, Homo sapien
caaggcacacgtggccatcaggtat

SEQ ID NO: 1714637 - DNA, 25 bp, Homo sapien
caggtatcctggctactgggactaa

SEQ ID NO: 1714638 - DNA, 25 bp, Homo sapien
taaacttgctatatggtagatgtgg

SEQ ID NO: 1714639 - DNA, 25 bp, Homo sapien
agaatggaggccacgacatcatcct

SEQ ID NO: 1714640 - DNA, 25 bp, Homo sapien
gcatagaaacgagaatggaggccac

SEQ ID NO: 1714641 - DNA, 25 bp, Homo sapien
gggctgcatagaaacgagaatggag

SEQ ID NO: 1714642 - DNA, 25 bp, Homo sapien
gagaaatgtaccctcaggccctcac

SEQ ID NO: 1714643 - DNA, 25 bp, Homo sapien
agccacaaaccgctgttctagacag

SEQ ID NO: 1714644 - DNA, 25 bp, Homo sapien
gcaaatatcactctcggagctgggc

SEQ ID NO: 1714645 - DNA, 25 bp, Homo sapien
ctgtccctgggacgtatgctgcctt

SEQ ID NO: 1714646 - DNA, 25 bp, Homo sapien
gcgtgcgcagttgcagctgctgaaa

SEQ ID NO: 1714647 - DNA, 25 bp, Homo sapien
ggcgtgcgcagttgcagctgctgaa

SEQ ID NO: 1714648 - DNA, 25 bp, Homo sapien
tggcgtgcgcagttgcagctgctga

SEQ ID NO: 1714649 - DNA, 25 bp, Homo sapien
ctggcgtgcgcagttgcagctgctg

SEQ ID NO: 1714650 - DNA, 25 bp, Homo sapien
tcttcgggaccagagcttggcggaa

SEQ ID NO: 1714651 - DNA, 25 bp, Homo sapien
agcagtggtaaacgctgggcagacc

SEQ ID NO: 1714652 - DNA, 25 bp, Homo sapien
tctaagtcaggaagcgaacatgggc

SEQ ID NO: 1714653 - DNA, 25 bp, Homo sapien
ccggtctgggtcctgaagcaagaat

SEQ ID NO: 1714654 - DNA, 25 bp, Homo sapien
gaagcggctgtttagcctggacact

SEQ ID NO: 1714655 - DNA, 25 bp, Homo sapien
tgcagacggtctctgcacacaggcc

SEQ ID NO: 1714656 - DNA, 25 bp, Homo sapien
ccagggagatgggtcagttttccca

SEQ ID NO: 1714657 - DNA, 25 bp, Homo sapien
ctggacgagtgcctccaagtactgc

SEQ ID NO: 1714658 - DNA, 25 bp, Homo sapien
tgtttctcacgccacccagcaggaa

SEQ ID NO: 1714659 - DNA, 25 bp, Homo sapien
cctgaatgtgctgctgatggctccc

SEQ ID NO: 1714660 - DNA, 25 bp, Homo sapien
gaggattttcatcacgctcatgaca

SEQ ID NO: 1714661 - DNA, 25 bp, Homo sapien
gctctgtgaagcaatcaggaaggag

SEQ ID NO: 1714662 - DNA, 25 bp, Homo sapien
gcagctctgatcaaaaccaacactc

SEQ ID NO: 1714663 - DNA, 25 bp, Homo sapien
agtgctggcattataagctcaagcc

SEQ ID NO: 1714664 - DNA, 25 bp, Homo sapien
cactttcagagaacagtaaggcagg

SEQ ID NO: 1714665 - DNA, 25 bp, Homo sapien
catgtgctgtgttgtgatgtgccag

SEQ ID NO: 1714666 - DNA, 25 bp, Homo sapien
ccacgttgagccctgggtagccaag

SEQ ID NO: 1714667 - DNA, 25 bp, Homo sapien
ttagaaccaagagcctagaggaggg

SEQ ID NO: 1714668 - DNA, 25 bp, Homo sapien
ggcatctccggtgtttagaaccaag

SEQ ID NO: 1714669 - DNA, 25 bp, Homo sapien
ttgagccctgggtagccaagcagct

SEQ ID NO: 1714670 - DNA, 25 bp, Homo sapien
ttccagggagcagacaccagcgtca

SEQ ID NO: 1714671 - DNA, 25 bp, Homo sapien
cttccagggagcagacaccagcgtc

SEQ ID NO: 1714672 - DNA, 25 bp, Homo sapien
gtaaagatgtgtgtacctcccaggc

SEQ ID NO: 1714673 - DNA, 25 bp, Homo sapien
gaaacccctgagtccatgtgtgtga

SEQ ID NO: 1714674 - DNA, 25 bp, Homo sapien
gattcaccagagaacaagagcctcc

SEQ ID NO: 1714675 - DNA, 25 bp, Homo sapien
ttttgcagagcaacctaagcgggca

SEQ ID NO: 1714676 - DNA, 25 bp, Homo sapien
aggcccctcaatcagctgcttccag

SEQ ID NO: 1714677 - DNA, 25 bp, Homo sapien
tgctgccagtaaggtcctcagggag

SEQ ID NO: 1714678 - DNA, 25 bp, Homo sapien
gctgccagtaaggtcctcagggagc

SEQ ID NO: 1714679 - DNA, 25 bp, Homo sapien
ggcccctcaatcagctgcttccagg

SEQ ID NO: 1714680 - DNA, 25 bp, Homo sapien
gacaggtgcatggaagagccgcccc

SEQ ID NO: 1714681 - DNA, 25 bp, Homo sapien
ccacggccttccagctaggattttc

SEQ ID NO: 1714682 - DNA, 25 bp, Homo sapien
acaggtgcatggaagagccgcccca

SEQ ID NO: 1714683 - DNA, 25 bp, Homo sapien
gccccacggccttccagctaggatt

SEQ ID NO: 1714684 - DNA, 25 bp, Homo sapien
gtctgcagcgatgccgtggcagagg

SEQ ID NO: 1714685 - DNA, 25 bp, Homo sapien
aggtgggcatactccatttgttttg

SEQ ID NO: 1714686 - DNA, 25 bp, Homo sapien
gcgatgccgtggcagaggtgggcat

SEQ ID NO: 1714687 - DNA, 25 bp, Homo sapien
tcctccgagcgatgcccaggtcggg

SEQ ID NO: 1714688 - DNA, 25 bp, Homo sapien
gccgttgtgagcactttggacttga

SEQ ID NO: 1714689 - DNA, 25 bp, Homo sapien
tagaaaggcaacttcattggagctt

SEQ ID NO: 1714690 - DNA, 25 bp, Homo sapien
tcaaagtcaccttctggcagctctg

SEQ ID NO: 1714691 - DNA, 25 bp, Homo sapien
agcagctgtgtccatgcagccagca

SEQ ID NO: 1714692 - DNA, 25 bp, Homo sapien
gggcaggaactcttttcgtgtgtcc

SEQ ID NO: 1714693 - DNA, 25 bp, Homo sapien
tggaggggtactgcccttccctgag

SEQ ID NO: 1714694 - DNA, 25 bp, Homo sapien
tggactccaaaaggacacgggttca

SEQ ID NO: 1714695 - DNA, 25 bp, Homo sapien
actcttttcgtgtgtccagctgggc

SEQ ID NO: 1714696 - DNA, 25 bp, Homo sapien
ccgggaacgagatagcagcttggca

SEQ ID NO: 1714697 - DNA, 25 bp, Homo sapien
cctgtgctccgggaacgagatagca

SEQ ID NO: 1714698 - DNA, 25 bp, Homo sapien
acagagcacgcagagccctcctgtg

SEQ ID NO: 1714699 - DNA, 25 bp, Homo sapien
gctccgggaacgagatagcagcttg

SEQ ID NO: 1714700 - DNA, 25 bp, Homo sapien
gcacgtgagcagcactgcagtcctt

SEQ ID NO: 1714701 - DNA, 25 bp, Homo sapien
actgcagtccttgggtcttcggcgc

SEQ ID NO: 1714702 - DNA, 25 bp, Homo sapien
agagctccggcctctgtcgccatca

SEQ ID NO: 1714703 - DNA, 25 bp, Homo sapien
ggtaactgcgcacaacattgcctgc

SEQ ID NO: 1714704 - DNA, 25 bp, Homo sapien
gaagcacgttgtctactctccaggt

SEQ ID NO: 1714705 - DNA, 25 bp, Homo sapien
gagccacatgaggttgaagtccact

SEQ ID NO: 1714706 - DNA, 25 bp, Homo sapien
cagggtctgtgctcaaccattgcag

SEQ ID NO: 1714707 - DNA, 25 bp, Homo sapien
cattcacatgcactcagactgggac

SEQ ID NO: 1714708 - DNA, 25 bp, Homo sapien
tgtgtataaaaagcactgccgcctc

SEQ ID NO: 1714709 - DNA, 25 bp, Homo sapien
tgtgagcagcggcaatcaaacaggc

SEQ ID NO: 1714710 - DNA, 25 bp, Homo sapien
taaatgagtagtgcggctctgccca

SEQ ID NO: 1714711 - DNA, 25 bp, Homo sapien
gatccagaggccattgaagacggtt

SEQ ID NO: 1714712 - DNA, 25 bp, Homo sapien
tggcagacagatgtcggtgtgtctt

SEQ ID NO: 1714713 - DNA, 25 bp, Homo sapien
tcccatgctcagcactagatggcag

SEQ ID NO: 1714714 - DNA, 25 bp, Homo sapien
gatgtcggtgtgtctttcagcacat

SEQ ID NO: 1714715 - DNA, 25 bp, Homo sapien
tcagcactagatggcagacagatgt

SEQ ID NO: 1714716 - DNA, 25 bp, Homo sapien
tgagcaccgcagcaacgaattcatt

SEQ ID NO: 1714717 - DNA, 25 bp, Homo sapien
ttgtgagcaccgcagcaacgaattc

SEQ ID NO: 1714718 - DNA, 25 bp, Homo sapien
tgtgagcaccgcagcaacgaattca

SEQ ID NO: 1714719 - DNA, 25 bp, Homo sapien
agcaccgcagcaacgaattcattta

SEQ ID NO: 1714720 - DNA, 25 bp, Homo sapien
ctctgggaagtgtacgtctgctgct

SEQ ID NO: 1714721 - DNA, 25 bp, Homo sapien
tgggaagtgtacgtctgctgctggc

SEQ ID NO: 1714722 - DNA, 25 bp, Homo sapien
ggaagtgtacgtctgctgctggcat

SEQ ID NO: 1714723 - DNA, 25 bp, Homo sapien
gaagtgtacgtctgctgctggcatc

SEQ ID NO: 1714724 - DNA, 25 bp, Homo sapien
tgatttcctgcggcattccatccct

SEQ ID NO: 1714725 - DNA, 25 bp, Homo sapien
tgacagtggcctcggcagtctgaga

SEQ ID NO: 1714726 - DNA, 25 bp, Homo sapien
aaaggctcagtctccgtctgctgca

SEQ ID NO: 1714727 - DNA, 25 bp, Homo sapien
gctctggcacgcttctgatttcctg

SEQ ID NO: 1714728 - DNA, 25 bp, Homo sapien
gcggacagcaggcagtgcgtggaag

SEQ ID NO: 1714729 - DNA, 25 bp, Homo sapien
caggcagtgcgtggaagcaggcccc

SEQ ID NO: 1714730 - DNA, 25 bp, Homo sapien
agcaggcagtgcgtggaagcaggcc

SEQ ID NO: 1714731 - DNA, 25 bp, Homo sapien
gacagcaggcagtgcgtggaagcag

SEQ ID NO: 1714732 - DNA, 25 bp, Homo sapien
cagggaccatggaaactgccccgaa

SEQ ID NO: 1714733 - DNA, 25 bp, Homo sapien
agtgggttgatagctctgcaacagg

SEQ ID NO: 1714734 - DNA, 25 bp, Homo sapien
tgggttgatagctctgcaacaggga

SEQ ID NO: 1714735 - DNA, 25 bp, Homo sapien
caacagggaccatggaaactgcccc

SEQ ID NO: 1714736 - DNA, 25 bp, Homo sapien
ccccatcaagagagaggcgggcaga

SEQ ID NO: 1714737 - DNA, 25 bp, Homo sapien
taagtagcagctagcagagcagctg

SEQ ID NO: 1714738 - DNA, 25 bp, Homo sapien
gctttgccgaatggcccaggtaggc

SEQ ID NO: 1714739 - DNA, 25 bp, Homo sapien
agctggctgtttagagagacctgaa

SEQ ID NO: 1714740 - DNA, 25 bp, Homo sapien
tccactgcttggctcgcaagagaca

SEQ ID NO: 1714741 - DNA, 25 bp, Homo sapien
gcaagagacagctaggcctgtggaa

SEQ ID NO: 1714742 - DNA, 25 bp, Homo sapien
ggaaggacatgagtgtgtggtcagt

SEQ ID NO: 1714743 - DNA, 25 bp, Homo sapien
tgcttggctcgcaagagacagctag

SEQ ID NO: 1714744 - DNA, 25 bp, Homo sapien
actctcagagccacacgcatgttgt

SEQ ID NO: 1714745 - DNA, 25 bp, Homo sapien
aaacctcctctacatcttggaggga

SEQ ID NO: 1714746 - DNA, 25 bp, Homo sapien
tgttgaggactaagagcttccaact

SEQ ID NO: 1714747 - DNA, 25 bp, Homo sapien
accacagggccgtgattctgggcct

SEQ ID NO: 1714748 - DNA, 25 bp, Homo sapien
agcaccacctgcgagatccacactg

SEQ ID NO: 1714749 - DNA, 25 bp, Homo sapien
gcagcaccacctgcgagatccacac

SEQ ID NO: 1714750 - DNA, 25 bp, Homo sapien
ccagcagcaccacctgcgagatcca

SEQ ID NO: 1714751 - DNA, 25 bp, Homo sapien
agcagcaccacctgcgagatccaca

SEQ ID NO: 1714752 - DNA, 25 bp, Homo sapien
ctttctctcgtcacttatgggcctg

SEQ ID NO: 1714753 - DNA, 25 bp, Homo sapien
tgctgatggcgaccgtacattcctc

SEQ ID NO: 1714754 - DNA, 25 bp, Homo sapien
tatgggcctgtgcagtgtccttatc

SEQ ID NO: 1714755 - DNA, 25 bp, Homo sapien
gcttctttccgatggtgacacagct

SEQ ID NO: 1714756 - DNA, 25 bp, Homo sapien
aattttagaactcatatcaactctg

SEQ ID NO: 1714757 - DNA, 25 bp, Homo sapien
tagaactcatatcaactctggattc

SEQ ID NO: 1714758 - DNA, 25 bp, Homo sapien
agaactcatatcaactctggattca

SEQ ID NO: 1714759 - DNA, 25 bp, Homo sapien
ttttagaactcatatcaactctgga

SEQ ID NO: 1714760 - DNA, 25 bp, Homo sapien
tagtcattcaaaccgccatggacgc

SEQ ID NO: 1714761 - DNA, 25 bp, Homo sapien
cagcgttagaatatgaggagctggc

SEQ ID NO: 1714762 - DNA, 25 bp, Homo sapien
tgccgctctctgtgagaggcaaccc

SEQ ID NO: 1714763 - DNA, 25 bp, Homo sapien
ctgtagctgccacagcgttagaata

SEQ ID NO: 1714764 - DNA, 25 bp, Homo sapien
agtccttgctacactctggcactgg

SEQ ID NO: 1714765 - DNA, 25 bp, Homo sapien
taggtcagtccttgctacactctgg

SEQ ID NO: 1714766 - DNA, 25 bp, Homo sapien
cactctggcactggcataatgccac

SEQ ID NO: 1714767 - DNA, 25 bp, Homo sapien
gagccagcgggctaggtcagtcctt

SEQ ID NO: 1714768 - DNA, 25 bp, Homo sapien
aactatttgcttagcgagcccggag

SEQ ID NO: 1714769 - DNA, 25 bp, Homo sapien
taacagggccttcattagcagctct

SEQ ID NO: 1714770 - DNA, 25 bp, Homo sapien
gcccggaggccgacattgaagcttg

SEQ ID NO: 1714771 - DNA, 25 bp, Homo sapien
actcgcgcgtgggtaaactatttgc

SEQ ID NO: 1714772 - DNA, 25 bp, Homo sapien
ccacagatcctgtaccagtctgctg

SEQ ID NO: 1714773 - DNA, 25 bp, Homo sapien
tggtccacaggtctgtctgctaatt

SEQ ID NO: 1714774 - DNA, 25 bp, Homo sapien
ggtccacaggtctgtctgctaattg

SEQ ID NO: 1714775 - DNA, 25 bp, Homo sapien
gaggagtgctccacagatcctgtac

SEQ ID NO: 1714776 - DNA, 25 bp, Homo sapien
gaagccctggactagagcatcactg

SEQ ID NO: 1714777 - DNA, 25 bp, Homo sapien
cagaaggtggttgctgtattcctca

SEQ ID NO: 1714778 - DNA, 25 bp, Homo sapien
cgatgggaagccctggactagagca

SEQ ID NO: 1714779 - DNA, 25 bp, Homo sapien
cagctgcaacacagttcattgtata

SEQ ID NO: 1714780 - DNA, 25 bp, Homo sapien
taggacccaactacacaaccagaac

SEQ ID NO: 1714781 - DNA, 25 bp, Homo sapien
tacacaaccagaacgggatccagaa

SEQ ID NO: 1714782 - DNA, 25 bp, Homo sapien
ggctcacgtgactgctgagctagtt

SEQ ID NO: 1714783 - DNA, 25 bp, Homo sapien
tgagctagttcccatattcctcctt

SEQ ID NO: 1714784 - DNA, 25 bp, Homo sapien
gctcattaagacccacattcaccat

SEQ ID NO: 1714785 - DNA, 25 bp, Homo sapien
catggtaagtgcccctttcatagga

SEQ ID NO: 1714786 - DNA, 25 bp, Homo sapien
tccttgcctactcttcagttgtgtg

SEQ ID NO: 1714787 - DNA, 25 bp, Homo sapien
ttactgtaagagctgctgagtcctg

SEQ ID NO: 1714788 - DNA, 25 bp, Homo sapien
gtcatcactgtagtgctctgttcag

SEQ ID NO: 1714789 - DNA, 25 bp, Homo sapien
ggcagaacagccagactcatctcag

SEQ ID NO: 1714790 - DNA, 25 bp, Homo sapien
tgtcagtcacatgatcccaaggtag

SEQ ID NO: 1714791 - DNA, 25 bp, Homo sapien
ggcaccacagtaacagtcagcatgg

SEQ ID NO: 1714792 - DNA, 25 bp, Homo sapien
tgggtgtacagacaagggacctgct

SEQ ID NO: 1714793 - DNA, 25 bp, Homo sapien
taggtaagcaaactgagcagcgggc

SEQ ID NO: 1714794 - DNA, 25 bp, Homo sapien
taagaacaggaccaaggtaatcaat

SEQ ID NO: 1714795 - DNA, 25 bp, Homo sapien
tatttgcctatatctccaaatcaga

SEQ ID NO: 1714796 - DNA, 25 bp, Homo sapien
aagttcttatctgggcagaaaaggg

SEQ ID NO: 1714797 - DNA, 25 bp, Homo sapien
ccactgttctgattcctgtcaccaa

SEQ ID NO: 1714798 - DNA, 25 bp, Homo sapien
ccctcacctttacagctgccgcatc

SEQ ID NO: 1714799 - DNA, 25 bp, Homo sapien
cctcacctttacagctgccgcatct

SEQ ID NO: 1714800 - DNA, 25 bp, Homo sapien
gcagctcttctcagctggaccttgc

SEQ ID NO: 1714801 - DNA, 25 bp, Homo sapien
cttgttgctttggaattaagcttca

SEQ ID NO: 1714802 - DNA, 25 bp, Homo sapien
tctaaatatagtccacttctgtttc

SEQ ID NO: 1714803 - DNA, 25 bp, Homo sapien
ctgtccttacaggtaatttcaccgg

SEQ ID NO: 1714804 - DNA, 25 bp, Homo sapien
ttacttgttgctttggaattaagct

SEQ ID NO: 1714805 - DNA, 25 bp, Homo sapien
aaccagtgacaaaaaacacatgatt

SEQ ID NO: 1714806 - DNA, 25 bp, Homo sapien
tagacgcagaaaaggccttagataa

SEQ ID NO: 1714807 - DNA, 25 bp, Homo sapien
acagaaccagtgacaaaaaacacat

SEQ ID NO: 1714808 - DNA, 25 bp, Homo sapien
aatagacgcagaaaaggccttagat

SEQ ID NO: 1714809 - DNA, 25 bp, Homo sapien
ggagaggtggtcaggactgaattct

SEQ ID NO: 1714810 - DNA, 25 bp, Homo sapien
gcctgttttccacccatgggcttca

SEQ ID NO: 1714811 - DNA, 25 bp, Homo sapien
atagcctgttttccacccatgggct

SEQ ID NO: 1714812 - DNA, 25 bp, Homo sapien
gttttccacccatgggcttcaccca

SEQ ID NO: 1714813 - DNA, 25 bp, Homo sapien
agctggcttccttggctcttctttc

SEQ ID NO: 1714814 - DNA, 25 bp, Homo sapien
tccttggctcttctttccttcccca

SEQ ID NO: 1714815 - DNA, 25 bp, Homo sapien
ccttggctcttctttccttccccat

SEQ ID NO: 1714816 - DNA, 25 bp, Homo sapien
acccagctggcttccttggctcttc

SEQ ID NO: 1714817 - DNA, 25 bp, Homo sapien
cagtgagaaggatcttagaaaccaa

SEQ ID NO: 1714818 - DNA, 25 bp, Homo sapien
tctataggctgtacagaattgtggt

SEQ ID NO: 1714819 - DNA, 25 bp, Homo sapien
caagtttgaagcattacctgatatt

SEQ ID NO: 1714820 - DNA, 25 bp, Homo sapien
tgtaggcctcactgtatatctgact

SEQ ID NO: 1714821 - DNA, 25 bp, Homo sapien
ggtgaagcccctcacaccaagggat

SEQ ID NO: 1714822 - DNA, 25 bp, Homo sapien
gactctggttgatttaaatgcctta

SEQ ID NO: 1714823 - DNA, 25 bp, Homo sapien
tcttaatcagttctaaggactctgg

SEQ ID NO: 1714824 - DNA, 25 bp, Homo sapien
ctaggtgacatagggaatggcttac

SEQ ID NO: 1714825 - DNA, 25 bp, Homo sapien
aaggttgaatctgatgggatgtcca

SEQ ID NO: 1714826 - DNA, 25 bp, Homo sapien
aggttgaatctgatgggatgtccat

SEQ ID NO: 1714827 - DNA, 25 bp, Homo sapien
taggaccttctagcaccagatgggt

SEQ ID NO: 1714828 - DNA, 25 bp, Homo sapien
accagatgggtaggccacggtctca

SEQ ID NO: 1714829 - DNA, 25 bp, Homo sapien
gctgaaaacgacaagaacatagccc

SEQ ID NO: 1714830 - DNA, 25 bp, Homo sapien
gccacggtctcagtgctgaaaacga

SEQ ID NO: 1714831 - DNA, 25 bp, Homo sapien
tgctgccagcctgccaaaggaagat

SEQ ID NO: 1714832 - DNA, 25 bp, Homo sapien
ggttttcccaccgagccctatgctg

SEQ ID NO: 1714833 - DNA, 25 bp, Homo sapien
gcagcttgtcagctatccaatacaa

SEQ ID NO: 1714834 - DNA, 25 bp, Homo sapien
actgaggaggagtgcgtattcccat

SEQ ID NO: 1714835 - DNA, 25 bp, Homo sapien
gccacaaatgtctgacaccctgtga

SEQ ID NO: 1714836 - DNA, 25 bp, Homo sapien
gattctgcatggatgtatttggcat

SEQ ID NO: 1714837 - DNA, 25 bp, Homo sapien
aatttatctattggcagatttctcc

SEQ ID NO: 1714838 - DNA, 25 bp, Homo sapien
ttcccaagaatttatctattggcag

SEQ ID NO: 1714839 - DNA, 25 bp, Homo sapien
tctgctgacgtcatagctcattaac

SEQ ID NO: 1714840 - DNA, 25 bp, Homo sapien
ttgttgatttctgaagcacccacat

SEQ ID NO: 1714841 - DNA, 25 bp, Homo sapien
catcctgtccactgttgttgatttc

SEQ ID NO: 1714842 - DNA, 25 bp, Homo sapien
tgacgtcatagctcattaacatcct

SEQ ID NO: 1714843 - DNA, 25 bp, Homo sapien
gcctaaagatgggagtggtcaattc

SEQ ID NO: 1714844 - DNA, 25 bp, Homo sapien
gctaacatgctaacatagagttgtg

SEQ ID NO: 1714845 - DNA, 25 bp, Homo sapien
gggcattaatagagcaagtgctaac

SEQ ID NO: 1714846 - DNA, 25 bp, Homo sapien
caaccagggtgctattctattgcaa

SEQ ID NO: 1714847 - DNA, 25 bp, Homo sapien
gaccccaactggattatcgatctaa

SEQ ID NO: 1714848 - DNA, 25 bp, Homo sapien
aacctagaggtagacccgcacaatt

SEQ ID NO: 1714849 - DNA, 25 bp, Homo sapien
tgtattatagacaaaaattgacccc

SEQ ID NO: 1714850 - DNA, 25 bp, Homo sapien
cgcacaattatggacaactgctttt

SEQ ID NO: 1714851 - DNA, 25 bp, Homo sapien
gctgcgcatgctttagatggctcat

SEQ ID NO: 1714852 - DNA, 25 bp, Homo sapien
cagagtgctgcgcatgctttagatg

SEQ ID NO: 1714853 - DNA, 25 bp, Homo sapien
ctcttctgaaggcagactaagtgtg

SEQ ID NO: 1714854 - DNA, 25 bp, Homo sapien
tgtgaagggtgctttatcagcagag

SEQ ID NO: 1714855 - DNA, 25 bp, Homo sapien
ttggtaatgaagagacataattcca

SEQ ID NO: 1714856 - DNA, 25 bp, Homo sapien
ggtaatgaagagacataattccaag

SEQ ID NO: 1714857 - DNA, 25 bp, Homo sapien
tgaagagacataattccaagtaatg

SEQ ID NO: 1714858 - DNA, 25 bp, Homo sapien
gacataattccaagtaatgacattt

SEQ ID NO: 1714859 - DNA, 25 bp, Homo sapien
tcagtccgtggttcaaactgggaag

SEQ ID NO: 1714860 - DNA, 25 bp, Homo sapien
cctgccctatcagtccgtggttcaa

SEQ ID NO: 1714861 - DNA, 25 bp, Homo sapien
cctatcagtccgtggttcaaactgg

SEQ ID NO: 1714862 - DNA, 25 bp, Homo sapien
cagtgttcatttcaggggttgagct

SEQ ID NO: 1714863 - DNA, 25 bp, Homo sapien
atcctcactgccggccatgtaattc

SEQ ID NO: 1714864 - DNA, 25 bp, Homo sapien
tcctcactgccggccatgtaattct

SEQ ID NO: 1714865 - DNA, 25 bp, Homo sapien
caaattcaatgatgcagaaagggtc

SEQ ID NO: 1714866 - DNA, 25 bp, Homo sapien
ggaaagtatctatctgtgaatgtac

SEQ ID NO: 1714867 - DNA, 25 bp, Homo sapien
tgtacttgaatcttccaggttatat

SEQ ID NO: 1714868 - DNA, 25 bp, Homo sapien
ttttgcctctccctactcaatggga

SEQ ID NO: 1714869 - DNA, 25 bp, Homo sapien
tcatcatgggctcctctcacgttag

SEQ ID NO: 1714870 - DNA, 25 bp, Homo sapien
ctgctgttgaacttgggagctttct

SEQ ID NO: 1714871 - DNA, 25 bp, Homo sapien
gtcctcactgcatgaccctaggtca

SEQ ID NO: 1714872 - DNA, 25 bp, Homo sapien
aatggtgctgccagcctcattaggg

SEQ ID NO: 1714873 - DNA, 25 bp, Homo sapien
aaatggtgctgccagcctcattagg

SEQ ID NO: 1714874 - DNA, 25 bp, Homo sapien
tcagttgagcatgtgtagcacttct

SEQ ID NO: 1714875 - DNA, 25 bp, Homo sapien
cagttgagcatgtgtagcacttctc

SEQ ID NO: 1714876 - DNA, 25 bp, Homo sapien
gacttgtgcccaaacgagtgagaac

SEQ ID NO: 1714877 - DNA, 25 bp, Homo sapien
ggcttcgggcaagagtaaatgttaa

SEQ ID NO: 1714878 - DNA, 25 bp, Homo sapien
taacagcccctttcagtagggacga

SEQ ID NO: 1714879 - DNA, 25 bp, Homo sapien
gagatggcttaagcagacttgtgcc

SEQ ID NO: 1714880 - DNA, 25 bp, Homo sapien
tgctgcctttgactttccagatcat

SEQ ID NO: 1714881 - DNA, 25 bp, Homo sapien
tctatgcactagaagtaagcccttt

SEQ ID NO: 1714882 - DNA, 25 bp, Homo sapien
gcactagaagtaagccctttttcag

SEQ ID NO: 1714883 - DNA, 25 bp, Homo sapien
aaaaatctatgcactagaagtaagc

SEQ ID NO: 1714884 - DNA, 25 bp, Homo sapien
tgtgactccatacctgctaactctg

SEQ ID NO: 1714885 - DNA, 25 bp, Homo sapien
tccatacctgctaactctggttcca

SEQ ID NO: 1714886 - DNA, 25 bp, Homo sapien
ggagaagagaactaacattctttga

SEQ ID NO: 1714887 - DNA, 25 bp, Homo sapien
cttttgttggtaagaatagatggag

SEQ ID NO: 1714888 - DNA, 25 bp, Homo sapien
gaggaggtcactttcacatcaggcc

SEQ ID NO: 1714889 - DNA, 25 bp, Homo sapien
ttcacggtcacaacgggcagaaagc

SEQ ID NO: 1714890 - DNA, 25 bp, Homo sapien
tgcttgccccaagtgtttttcctgt

SEQ ID NO: 1714891 - DNA, 25 bp, Homo sapien
tgctttgttttcacggtcacaacgg

SEQ ID NO: 1714892 - DNA, 25 bp, Homo sapien
actcatgtctctttgataaacttac

SEQ ID NO: 1714893 - DNA, 25 bp, Homo sapien
agtgacagcctgagaaggatgccct

SEQ ID NO: 1714894 - DNA, 25 bp, Homo sapien
aactcatgtctctttgataaactta

SEQ ID NO: 1714895 - DNA, 25 bp, Homo sapien
atgtcgcctatgacccacaagttgg

SEQ ID NO: 1714896 - DNA, 25 bp, Homo sapien
cccacaagttgggaactgaattcac

SEQ ID NO: 1714897 - DNA, 25 bp, Homo sapien
tgccatgtcgcctatgacccacaag

SEQ ID NO: 1714898 - DNA, 25 bp, Homo sapien
caagttgggaactgaattcactcat

SEQ ID NO: 1714899 - DNA, 25 bp, Homo sapien
agctgctgagagtagggcgatgggg

SEQ ID NO: 1714900 - DNA, 25 bp, Homo sapien
gattgggtaggagacatgagaggaa

SEQ ID NO: 1714901 - DNA, 25 bp, Homo sapien
gcgatgggggattgggtaggagaca

SEQ ID NO: 1714902 - DNA, 25 bp, Homo sapien
gggttgttggctagaggctgcccct

SEQ ID NO: 1714903 - DNA, 25 bp, Homo sapien
aaattcagttgcatgggggattttt

SEQ ID NO: 1714904 - DNA, 25 bp, Homo sapien
ctgcacctagcccaagagttctctt

SEQ ID NO: 1714905 - DNA, 25 bp, Homo sapien
attcagttgcatgggggattttttt

SEQ ID NO: 1714906 - DNA, 25 bp, Homo sapien
aattcagttgcatgggggatttttt

SEQ ID NO: 1714907 - DNA, 25 bp, Homo sapien
ccagaagtgacagcacatatcagta

SEQ ID NO: 1714908 - DNA, 25 bp, Homo sapien
gtgtaagaacatggagtaggtataa

SEQ ID NO: 1714909 - DNA, 25 bp, Homo sapien
caccagaagtgacagcacatatcag

SEQ ID NO: 1714910 - DNA, 25 bp, Homo sapien
gaagtgacagcacatatcagtagga

SEQ ID NO: 1714911 - DNA, 25 bp, Homo sapien
tccttctgttttatcttggatttcg

SEQ ID NO: 1714912 - DNA, 25 bp, Homo sapien
tgttttatcttggatttcgttgagc

SEQ ID NO: 1714913 - DNA, 25 bp, Homo sapien
tgtttcctttgattgtatactttca

SEQ ID NO: 1714914 - DNA, 25 bp, Homo sapien
cttggatttcgttgagcttcctcaa

SEQ ID NO: 1714915 - DNA, 25 bp, Homo sapien
tcctaagccaaatgttccagtccag

SEQ ID NO: 1714916 - DNA, 25 bp, Homo sapien
catctctatagcttggaccttgcag

SEQ ID NO: 1714917 - DNA, 25 bp, Homo sapien
gaaacccaagatccatagcacagag

SEQ ID NO: 1714918 - DNA, 25 bp, Homo sapien
gaattggacttaagatagaggccct

SEQ ID NO: 1714919 - DNA, 25 bp, Homo sapien
gtgtgtgaggcttcaaagattaaaa

SEQ ID NO: 1714920 - DNA, 25 bp, Homo sapien
tcatctctgtttatcatcttgtggt

SEQ ID NO: 1714921 - DNA, 25 bp, Homo sapien
ctgtttatcatcttgtggtattatc

SEQ ID NO: 1714922 - DNA, 25 bp, Homo sapien
ttttaaacacacagtgctgtctttt

SEQ ID NO: 1714923 - DNA, 25 bp, Homo sapien
caaagagtagaataaggatttcgat

SEQ ID NO: 1714924 - DNA, 25 bp, Homo sapien
agaagtggacaaagagtagaataag

SEQ ID NO: 1714925 - DNA, 25 bp, Homo sapien
gacaaagagtagaataaggatttcg

SEQ ID NO: 1714926 - DNA, 25 bp, Homo sapien
gtggacaaagagtagaataaggatt

SEQ ID NO: 1714927 - DNA, 25 bp, Homo sapien
acattacgcagaagttttcccctga

SEQ ID NO: 1714928 - DNA, 25 bp, Homo sapien
catgattaccttcccacttaggtcc

SEQ ID NO: 1714929 - DNA, 25 bp, Homo sapien
ttcaacattacgcagaagttttccc

SEQ ID NO: 1714930 - DNA, 25 bp, Homo sapien
tatgaataggaatttttggaatatc

SEQ ID NO: 1714931 - DNA, 25 bp, Homo sapien
aattgttataagatcgtcatctgca

SEQ ID NO: 1714932 - DNA, 25 bp, Homo sapien
ttgttataagatcgtcatctgcatc

SEQ ID NO: 1714933 - DNA, 25 bp, Homo sapien
attgttataagatcgtcatctgcat

SEQ ID NO: 1714934 - DNA, 25 bp, Homo sapien
cgttggccattaacaaataatgtca

SEQ ID NO: 1714935 - DNA, 25 bp, Homo sapien
aataatgtcaatttcagtgtcctac

SEQ ID NO: 1714936 - DNA, 25 bp, Homo sapien
ggtcttcgttggccattaacaaata

SEQ ID NO: 1714937 - DNA, 25 bp, Homo sapien
ttgattcaaggggtcttcgttggcc

SEQ ID NO: 1714938 - DNA, 25 bp, Homo sapien
tctcgacagagatatttcacctgac

SEQ ID NO: 1714939 - DNA, 25 bp, Homo sapien
ctgtcagttctcgacagagatattt

SEQ ID NO: 1714940 - DNA, 25 bp, Homo sapien
gttctgtcagttctcgacagagata

SEQ ID NO: 1714941 - DNA, 25 bp, Homo sapien
ttcaaagttctgtcagttctcgaca

SEQ ID NO: 1714942 - DNA, 25 bp, Homo sapien
caggaatattagtggaaggtcctgg

SEQ ID NO: 1714943 - DNA, 25 bp, Homo sapien
ttttcaggaatattagtggaaggtc

SEQ ID NO: 1714944 - DNA, 25 bp, Homo sapien
ctaccattcacagtaacattttcag

SEQ ID NO: 1714945 - DNA, 25 bp, Homo sapien
ccattcacagtaacattttcaggaa

SEQ ID NO: 1714946 - DNA, 25 bp, Homo sapien
cagaagaatccgaagaagcaggctt

SEQ ID NO: 1714947 - DNA, 25 bp, Homo sapien
aagaatccgaagaagcaggcttttc

SEQ ID NO: 1714948 - DNA, 25 bp, Homo sapien
ccagaagaatccgaagaagcaggct

SEQ ID NO: 1714949 - DNA, 25 bp, Homo sapien
gaagaatccgaagaagcaggctttt

SEQ ID NO: 1714950 - DNA, 25 bp, Homo sapien
ttaaaagggtcaaaagctgacatac

SEQ ID NO: 1714951 - DNA, 25 bp, Homo sapien
caaatgccgacgtaacattattttt

SEQ ID NO: 1714952 - DNA, 25 bp, Homo sapien
ctgttaagccaaatgccgacgtaac

SEQ ID NO: 1714953 - DNA, 25 bp, Homo sapien
aagccaaatgccgacgtaacattat

SEQ ID NO: 1714954 - DNA, 25 bp, Homo sapien
gttaagccaaatgccgacgtaacat

SEQ ID NO: 1714955 - DNA, 25 bp, Homo sapien
gaggcggcaatgctgtcagatgttc

SEQ ID NO: 1714956 - DNA, 25 bp, Homo sapien
gatgttcctgaacagtcttctgcag

SEQ ID NO: 1714957 - DNA, 25 bp, Homo sapien
ctgcttgtatcttagcttctgtata

SEQ ID NO: 1714958 - DNA, 25 bp, Homo sapien
cttagcttctgtatatggtggttgc

SEQ ID NO: 1714959 - DNA, 25 bp, Homo sapien
tattgatacagctgactttcagtct

SEQ ID NO: 1714960 - DNA, 25 bp, Homo sapien
tgatacagctgactttcagtctgac

SEQ ID NO: 1714961 - DNA, 25 bp, Homo sapien
ctattgatacagctgactttcagtc

SEQ ID NO: 1714962 - DNA, 25 bp, Homo sapien
ttgatacagctgactttcagtctga

SEQ ID NO: 1714963 - DNA, 25 bp, Homo sapien
cgcagacacggtgcaccatagctag

SEQ ID NO: 1714964 - DNA, 25 bp, Homo sapien
cacggtgcaccatagctagcctgtt

SEQ ID NO: 1714965 - DNA, 25 bp, Homo sapien
agcccgcagacacggtgcaccatag

SEQ ID NO: 1714966 - DNA, 25 bp, Homo sapien
ggtagagcccgcagacacggtgcac

SEQ ID NO: 1714967 - DNA, 25 bp, Homo sapien
tgaggttgtttggagtccagtctgc

SEQ ID NO: 1714968 - DNA, 25 bp, Homo sapien
gttgtttggagtccagtctgctgac

SEQ ID NO: 1714969 - DNA, 25 bp, Homo sapien
tccagtctgctgactctggcttttt

SEQ ID NO: 1714970 - DNA, 25 bp, Homo sapien
ccagtctgctgactctggctttttg

SEQ ID NO: 1714971 - DNA, 25 bp, Homo sapien
ggataattgcttgcctggtactgtg

SEQ ID NO: 1714972 - DNA, 25 bp, Homo sapien
ggtagtataaatttgtgcaggataa

SEQ ID NO: 1714973 - DNA, 25 bp, Homo sapien
gcttgcctggtactgtgtggcagct

SEQ ID NO: 1714974 - DNA, 25 bp, Homo sapien
taggctgaaaagtttgggtagtata

SEQ ID NO: 1714975 - DNA, 25 bp, Homo sapien
ttgatcttggtctataggccccagg

SEQ ID NO: 1714976 - DNA, 25 bp, Homo sapien
atcttggtctataggccccaggttg

SEQ ID NO: 1714977 - DNA, 25 bp, Homo sapien
tgatcttggtctataggccccaggt

SEQ ID NO: 1714978 - DNA, 25 bp, Homo sapien
acttgatcttggtctataggcccca

SEQ ID NO: 1714979 - DNA, 25 bp, Homo sapien
gaccaaagggaggacatataaggat

SEQ ID NO: 1714980 - DNA, 25 bp, Homo sapien
aagggaggacatataaggattaggc

SEQ ID NO: 1714981 - DNA, 25 bp, Homo sapien
gggaggacatataaggattaggccc

SEQ ID NO: 1714982 - DNA, 25 bp, Homo sapien
ccaaagggaggacatataaggatta

SEQ ID NO: 1714983 - DNA, 25 bp, Homo sapien
ttatcgataaccaggtccaggtttg

SEQ ID NO: 1714984 - DNA, 25 bp, Homo sapien
gataaccaggtccaggtttggtata

SEQ ID NO: 1714985 - DNA, 25 bp, Homo sapien
tcgataaccaggtccaggtttggta

SEQ ID NO: 1714986 - DNA, 25 bp, Homo sapien
taaccaggtccaggtttggtatagc

SEQ ID NO: 1714987 - DNA, 25 bp, Homo sapien
gaagctgcttaatactgtcctggtg

SEQ ID NO: 1714988 - DNA, 25 bp, Homo sapien
ctttgaagctgcttaatactgtcct

SEQ ID NO: 1714989 - DNA, 25 bp, Homo sapien
gctgcttaatactgtcctggtgcat

SEQ ID NO: 1714990 - DNA, 25 bp, Homo sapien
ttgaagctgcttaatactgtcctgg

SEQ ID NO: 1714991 - DNA, 25 bp, Homo sapien
ctctgaggtttgtctttactgctga

SEQ ID NO: 1714992 - DNA, 25 bp, Homo sapien
aatagtcatccagtcacactcagtg

SEQ ID NO: 1714993 - DNA, 25 bp, Homo sapien
tcacactcagtgacatagttttgct

SEQ ID NO: 1714994 - DNA, 25 bp, Homo sapien
tttgcttgggattatctctctgagg

SEQ ID NO: 1714995 - DNA, 25 bp, Homo sapien
tgacgtgtggtgactcgacttaccc

SEQ ID NO: 1714996 - DNA, 25 bp, Homo sapien
ggtgactcgacttacccggagccag

SEQ ID NO: 1714997 - DNA, 25 bp, Homo sapien
acagtgacgtgtggtgactcgactt

SEQ ID NO: 1714998 - DNA, 25 bp, Homo sapien
tgtggtgactcgacttacccggagc

SEQ ID NO: 1714999 - DNA, 25 bp, Homo sapien
tagcagcctcgacattaaccgcgct

SEQ ID NO: 1715000 - DNA, 25 bp, Homo sapien
ggtctggacgaggtcactccacagg

SEQ ID NO: 1715001 - DNA, 25 bp, Homo sapien
catccgtagtgacgtgcgccggtga

SEQ ID NO: 1715002 - DNA, 25 bp, Homo sapien
caagaacttgccgatcgggtctgcg

SEQ ID NO: 1715003 - DNA, 25 bp, Homo sapien
tacagtcagacctgcacccggattt

SEQ ID NO: 1715004 - DNA, 25 bp, Homo sapien
ggataactgactttcctacaccagc

SEQ ID NO: 1715005 - DNA, 25 bp, Homo sapien
cagcgtaggctggaccggtattatt

SEQ ID NO: 1715006 - DNA, 25 bp, Homo sapien
gcaatggcctaaaaatgggtctccc

SEQ ID NO: 1715007 - DNA, 25 bp, Homo sapien
caagtgagtctgatatgaaattggg

SEQ ID NO: 1715008 - DNA, 25 bp, Homo sapien
tctctctctccaaattgtgagttcc

SEQ ID NO: 1715009 - DNA, 25 bp, Homo sapien
tagccatagtatctaggacagaagc

SEQ ID NO: 1715010 - DNA, 25 bp, Homo sapien
gtctgagaaggatttgaagtgtgct

SEQ ID NO: 1715011 - DNA, 25 bp, Homo sapien
tcctcagtataagggaaagggtaca

SEQ ID NO: 1715012 - DNA, 25 bp, Homo sapien
catcagttactcaagggtagccaaa

SEQ ID NO: 1715013 - DNA, 25 bp, Homo sapien
tatttcatgacttgtggctcagaga

SEQ ID NO: 1715014 - DNA, 25 bp, Homo sapien
tacagatatgcaggccaattcaccc

SEQ ID NO: 1715015 - DNA, 25 bp, Homo sapien
tgagactgctggctctttgatcctt

SEQ ID NO: 1715016 - DNA, 25 bp, Homo sapien
ttctacaccagggtctactgcccgg

SEQ ID NO: 1715017 - DNA, 25 bp, Homo sapien
cagatgtgtccctttgcctatatca

SEQ ID NO: 1715018 - DNA, 25 bp, Homo sapien
ggcccttcaggtagcattggactga

SEQ ID NO: 1715019 - DNA, 25 bp, Homo sapien
tcgctggtcaagattagtgttcaca

SEQ ID NO: 1715020 - DNA, 25 bp, Homo sapien
tcaatggcctactctgcacagatgg

SEQ ID NO: 1715021 - DNA, 25 bp, Homo sapien
tatgctacagtaacaatgatccccg

SEQ ID NO: 1715022 - DNA, 25 bp, Homo sapien
gatccccgaaatcagtggcttacaa

SEQ ID NO: 1715023 - DNA, 25 bp, Homo sapien
catgcggtcttcatcttgtagtgca

SEQ ID NO: 1715024 - DNA, 25 bp, Homo sapien
aggagacttccgtcttgctgctcca

SEQ ID NO: 1715025 - DNA, 25 bp, Homo sapien
catgtctactagcagtgttgaagag

SEQ ID NO: 1715026 - DNA, 25 bp, Homo sapien
tgttggccagcacttagtcacctga

SEQ ID NO: 1715027 - DNA, 25 bp, Homo sapien
gataggttttctggccacacataga

SEQ ID NO: 1715028 - DNA, 25 bp, Homo sapien
tgagtttccaatgacaccagtgcca

SEQ ID NO: 1715029 - DNA, 25 bp, Homo sapien
tggagtacagagcaaccactgagtt

SEQ ID NO: 1715030 - DNA, 25 bp, Homo sapien
catgttttgccatcagctctggagt

SEQ ID NO: 1715031 - DNA, 25 bp, Homo sapien
tttctggagggtcaagcccctggca

SEQ ID NO: 1715032 - DNA, 25 bp, Homo sapien
tagtctgcatagctcacctgatgga

SEQ ID NO: 1715033 - DNA, 25 bp, Homo sapien
caagaagacagataacctggccagt

SEQ ID NO: 1715034 - DNA, 25 bp, Homo sapien
taagcgtattactaactggccactg

SEQ ID NO: 1715035 - DNA, 25 bp, Homo sapien
taaaaatcttacattagtgtgggac

SEQ ID NO: 1715036 - DNA, 25 bp, Homo sapien
gaaaccacattccatttagtcacca

SEQ ID NO: 1715037 - DNA, 25 bp, Homo sapien
gacagctttgaggagtactcactag

SEQ ID NO: 1715038 - DNA, 25 bp, Homo sapien
ccttaggctactccagactgtgaca

SEQ ID NO: 1715039 - DNA, 25 bp, Homo sapien
ggacacctggtgattcctacacaag

SEQ ID NO: 1715040 - DNA, 25 bp, Homo sapien
tttggaaaggccatgccaaccgtgc

SEQ ID NO: 1715041 - DNA, 25 bp, Homo sapien
tagactctagtggaagacctttgga

SEQ ID NO: 1715042 - DNA, 25 bp, Homo sapien
tatcccaaggtcttcatgatgccag

SEQ ID NO: 1715043 - DNA, 25 bp, Homo sapien
ccttgggccatgatcatcccatgca

SEQ ID NO: 1715044 - DNA, 25 bp, Homo sapien
ttgggccatgatcatcccatgcact

SEQ ID NO: 1715045 - DNA, 25 bp, Homo sapien
tgggccatgatcatcccatgcactc

SEQ ID NO: 1715046 - DNA, 25 bp, Homo sapien
gccttgggccatgatcatcccatgc

SEQ ID NO: 1715047 - DNA, 25 bp, Homo sapien
cattttccatctatgttcctctagg

SEQ ID NO: 1715048 - DNA, 25 bp, Homo sapien
taaaagggtttgtatgacccaagca

SEQ ID NO: 1715049 - DNA, 25 bp, Homo sapien
cagctctgacatactagactctcaa

SEQ ID NO: 1715050 - DNA, 25 bp, Homo sapien
gagaaagactctcgcagagcttggg

SEQ ID NO: 1715051 - DNA, 25 bp, Homo sapien
acatgcctgtagtctgtatgcctag

SEQ ID NO: 1715052 - DNA, 25 bp, Homo sapien
tgcctgtagtctgtatgcctagcta

SEQ ID NO: 1715053 - DNA, 25 bp, Homo sapien
tgtagtctgtatgcctagctactcg

SEQ ID NO: 1715054 - DNA, 25 bp, Homo sapien
tagtctgtatgcctagctactcggg

SEQ ID NO: 1715055 - DNA, 25 bp, Homo sapien
ctaattttcgcttagtttgcttaat

SEQ ID NO: 1715056 - DNA, 25 bp, Homo sapien
caatataagcttatgggagcaaggg

SEQ ID NO: 1715057 - DNA, 25 bp, Homo sapien
tgccgaaatgcaagacctacctacc

SEQ ID NO: 1715058 - DNA, 25 bp, Homo sapien
tatccttgctgactgtgccgaaatg

SEQ ID NO: 1715059 - DNA, 25 bp, Homo sapien
ggactgaaaggtctgtcaactgaaa

SEQ ID NO: 1715060 - DNA, 25 bp, Homo sapien
ggaagtggcatcagatgtgctcagc

SEQ ID NO: 1715061 - DNA, 25 bp, Homo sapien
tgctccaaagcttaggtacaggtgg

SEQ ID NO: 1715062 - DNA, 25 bp, Homo sapien
gaggcatgagttaggatcctggaac

SEQ ID NO: 1715063 - DNA, 25 bp, Homo sapien
gattgcaatccggagagtctttcag

SEQ ID NO: 1715064 - DNA, 25 bp, Homo sapien
gcttgggaggattcccgcgtatacg

SEQ ID NO: 1715065 - DNA, 25 bp, Homo sapien
cttgggaggattcccgcgtatacgt

SEQ ID NO: 1715066 - DNA, 25 bp, Homo sapien
ttgggaggattcccgcgtatacgtg

SEQ ID NO: 1715067 - DNA, 25 bp, Homo sapien
cccgaggactgaaacattgtttagg

SEQ ID NO: 1715068 - DNA, 25 bp, Homo sapien
cattgtttaggggaccccaggcact

SEQ ID NO: 1715069 - DNA, 25 bp, Homo sapien
cgagcccgaggactgaaacattgtt

SEQ ID NO: 1715070 - DNA, 25 bp, Homo sapien
gagcccgaggactgaaacattgttt

SEQ ID NO: 1715071 - DNA, 25 bp, Homo sapien
accactcagcccactgaggccggcc

SEQ ID NO: 1715072 - DNA, 25 bp, Homo sapien
gaacgaggctgacggttgggagtcc

SEQ ID NO: 1715073 - DNA, 25 bp, Homo sapien
cccgcgctccccaataaaggatgca

SEQ ID NO: 1715074 - DNA, 25 bp, Homo sapien
cgcagtgcgcagctccctacgggga

SEQ ID NO: 1715075 - DNA, 25 bp, Homo sapien
ctaacagaggtggaggactgaactg

SEQ ID NO: 1715076 - DNA, 25 bp, Homo sapien
gaggactgaactgtagcgtggattc

SEQ ID NO: 1715077 - DNA, 25 bp, Homo sapien
tccctgggttcaactaacagaggtg

SEQ ID NO: 1715078 - DNA, 25 bp, Homo sapien
gactgaactgtagcgtggattccag

SEQ ID NO: 1715079 - DNA, 25 bp, Homo sapien
gctgggtacagccaattcaaccaca

SEQ ID NO: 1715080 - DNA, 25 bp, Homo sapien
cacaagatggtcaatgtcaatgaca

SEQ ID NO: 1715081 - DNA, 25 bp, Homo sapien
gacaggtgaattaacgaagggctaa

SEQ ID NO: 1715082 - DNA, 25 bp, Homo sapien
ggccactgtggctacataaaagact

SEQ ID NO: 1715083 - DNA, 25 bp, Homo sapien
cgtgcggaatgctttatacttcgaa

SEQ ID NO: 1715084 - DNA, 25 bp, Homo sapien
tgcggaatgctttatacttcgaaac

SEQ ID NO: 1715085 - DNA, 25 bp, Homo sapien
ccccgtcgtgcggaatgctttatac

SEQ ID NO: 1715086 - DNA, 25 bp, Homo sapien
cgtcgtgcggaatgctttatacttc

SEQ ID NO: 1715087 - DNA, 25 bp, Homo sapien
tctggaagaactatcccttcttcag

SEQ ID NO: 1715088 - DNA, 25 bp, Homo sapien
gaaggaatgagatcccgataatcca

SEQ ID NO: 1715089 - DNA, 25 bp, Homo sapien
attcagatccgcttcatgatcatct

SEQ ID NO: 1715090 - DNA, 25 bp, Homo sapien
cagcctcttccgtagagggaggagc

SEQ ID NO: 1715091 - DNA, 25 bp, Homo sapien
gggaagacggcaaggacagcacttc

SEQ ID NO: 1715092 - DNA, 25 bp, Homo sapien
gaaatcactgactgaaccggtcgcg

SEQ ID NO: 1715093 - DNA, 25 bp, Homo sapien
catactccggcggtatctggaggac

SEQ ID NO: 1715094 - DNA, 25 bp, Homo sapien
gattgggaaggccactcatactccg

SEQ ID NO: 1715095 - DNA, 25 bp, Homo sapien
gtccaggccaagattttctgctaga

SEQ ID NO: 1715096 - DNA, 25 bp, Homo sapien
taattcttcaacagttactatgtcc

SEQ ID NO: 1715097 - DNA, 25 bp, Homo sapien
caacagttactatgtccaggccaag

SEQ ID NO: 1715098 - DNA, 25 bp, Homo sapien
caattttcagtcttcggctttccct

SEQ ID NO: 1715099 - DNA, 25 bp, Homo sapien
ttctggcataccagcccagtccact

SEQ ID NO: 1715100 - DNA, 25 bp, Homo sapien
tctttctggcataccagcccagtcc

SEQ ID NO: 1715101 - DNA, 25 bp, Homo sapien
cagtccactcctagggttcagaaaa

SEQ ID NO: 1715102 - DNA, 25 bp, Homo sapien
tcaccagcagtctgcacctgctcac

SEQ ID NO: 1715103 - DNA, 25 bp, Homo sapien
ttcttggtacaaaaatttcagtgtc

SEQ ID NO: 1715104 - DNA, 25 bp, Homo sapien
ccttcttggtacaaaaatttcagtg

SEQ ID NO: 1715105 - DNA, 25 bp, Homo sapien
tctccttcttggtacaaaaatttca

SEQ ID NO: 1715106 - DNA, 25 bp, Homo sapien
ctccttcttggtacaaaaatttcag

SEQ ID NO: 1715107 - DNA, 25 bp, Homo sapien
gctatgggttggaacaccctgggaa

SEQ ID NO: 1715108 - DNA, 25 bp, Homo sapien
gctttctccaactgagtggaactgt

SEQ ID NO: 1715109 - DNA, 25 bp, Homo sapien
gaagagtaggagatcagactagaca

SEQ ID NO: 1715110 - DNA, 25 bp, Homo sapien
tgcgtgtccagatgacagcaggcct

SEQ ID NO: 1715111 - DNA, 25 bp, Homo sapien
ttgctccagcaatagttcgaccaca

SEQ ID NO: 1715112 - DNA, 25 bp, Homo sapien
gttgctccagcaatagttcgaccac

SEQ ID NO: 1715113 - DNA, 25 bp, Homo sapien
gctccagcaatagttcgaccacatt

SEQ ID NO: 1715114 - DNA, 25 bp, Homo sapien
tgctccagcaatagttcgaccacat

SEQ ID NO: 1715115 - DNA, 25 bp, Homo sapien
aaaaaatatgcacagtccttttagt

SEQ ID NO: 1715116 - DNA, 25 bp, Homo sapien
tgcacagtccttttagtttatccgg

SEQ ID NO: 1715117 - DNA, 25 bp, Homo sapien
ttacggcaacgaacaaaaaatatgc

SEQ ID NO: 1715118 - DNA, 25 bp, Homo sapien
tagcaacatcattacggcaacgaac

SEQ ID NO: 1715119 - DNA, 25 bp, Homo sapien
taagagtcctttcgacgcatccaga

SEQ ID NO: 1715120 - DNA, 25 bp, Homo sapien
gtttttcagattctccctgcttgga

SEQ ID NO: 1715121 - DNA, 25 bp, Homo sapien
gcttggactggtttaaagcacccca

SEQ ID NO: 1715122 - DNA, 25 bp, Homo sapien
cccagttgtttgttgcaagaacagc

SEQ ID NO: 1715123 - DNA, 25 bp, Homo sapien
acttcttcaaaggtgtgcagtttgg

SEQ ID NO: 1715124 - DNA, 25 bp, Homo sapien
taacattgtctattgtctttaactt

SEQ ID NO: 1715125 - DNA, 25 bp, Homo sapien
ttgtctattgtctttaacttcactg

SEQ ID NO: 1715126 - DNA, 25 bp, Homo sapien
cttcaaaggtgtgcagtttggaaaa

SEQ ID NO: 1715127 - DNA, 25 bp, Homo sapien
tcacataactgaagattttcttgtt

SEQ ID NO: 1715128 - DNA, 25 bp, Homo sapien
tagggcaattatgtaatatccgatt

SEQ ID NO: 1715129 - DNA, 25 bp, Homo sapien
cctctttctgtttagggcaattatg

SEQ ID NO: 1715130 - DNA, 25 bp, Homo sapien
tcctagaatcctctttctgtttagg

SEQ ID NO: 1715131 - DNA, 25 bp, Homo sapien
gccctttaatctgctcaatgatata

SEQ ID NO: 1715132 - DNA, 25 bp, Homo sapien
gctgacatgcgtttccagtgttcca

SEQ ID NO: 1715133 - DNA, 25 bp, Homo sapien
atatagttgaacttggctgacatgc

SEQ ID NO: 1715134 - DNA, 25 bp, Homo sapien
tatgacagccttacaacttggccct

SEQ ID NO: 1715135 - DNA, 25 bp, Homo sapien
cagtttggagtgtgcaacatttagc

SEQ ID NO: 1715136 - DNA, 25 bp, Homo sapien
ctttagcagtttggagtgtgcaaca

SEQ ID NO: 1715137 - DNA, 25 bp, Homo sapien
tagcagtttggagtgtgcaacattt

SEQ ID NO: 1715138 - DNA, 25 bp, Homo sapien
gtttggagtgtgcaacatttagcac

SEQ ID NO: 1715139 - DNA, 25 bp, Homo sapien
ctacagctcaaaattcttgagttca

SEQ ID NO: 1715140 - DNA, 25 bp, Homo sapien
ctctccttaggcaccctcatcaccc

SEQ ID NO: 1715141 - DNA, 25 bp, Homo sapien
tgtttctgaccctgatcagttcacc

SEQ ID NO: 1715142 - DNA, 25 bp, Homo sapien
agctcaaaattcttgagttcaagca

SEQ ID NO: 1715143 - DNA, 25 bp, Homo sapien
tacaaatatctgacattatctttgg

SEQ ID NO: 1715144 - DNA, 25 bp, Homo sapien
tagagaggttgacacactttttcca

SEQ ID NO: 1715145 - DNA, 25 bp, Homo sapien
catttgctgtatcagtgattcttgc

SEQ ID NO: 1715146 - DNA, 25 bp, Homo sapien
ttcttgcatccaaatcacgccaatt

SEQ ID NO: 1715147 - DNA, 25 bp, Homo sapien
tattataataccttgacacaccgtg

SEQ ID NO: 1715148 - DNA, 25 bp, Homo sapien
ggcattaatcaaattttgtattcca

SEQ ID NO: 1715149 - DNA, 25 bp, Homo sapien
caatgaggtcattctctctgaggta

SEQ ID NO: 1715150 - DNA, 25 bp, Homo sapien
gacacaccgtgaatcattctgatgg

SEQ ID NO: 1715151 - DNA, 25 bp, Homo sapien
ataaattaggtattgatgggatgta

SEQ ID NO: 1715152 - DNA, 25 bp, Homo sapien
aaattaggtattgatgggatgtatc

SEQ ID NO: 1715153 - DNA, 25 bp, Homo sapien
attaggtattgatgggatgtatctc

SEQ ID NO: 1715154 - DNA, 25 bp, Homo sapien
aatatcatactgaatagacaaaaac

SEQ ID NO: 1715155 - DNA, 25 bp, Homo sapien
catggtttaatcctccatcagtaat

SEQ ID NO: 1715156 - DNA, 25 bp, Homo sapien
tctttagtacaactggcgtttcctg

SEQ ID NO: 1715157 - DNA, 25 bp, Homo sapien
cctccatcagtaatatatgctttac

SEQ ID NO: 1715158 - DNA, 25 bp, Homo sapien
gtttcctgatcccatacatggttta

SEQ ID NO: 1715159 - DNA, 25 bp, Homo sapien
agcatgagaaacactaactgcaatt

SEQ ID NO: 1715160 - DNA, 25 bp, Homo sapien
ctgcataatgatcctgattcttcca

SEQ ID NO: 1715161 - DNA, 25 bp, Homo sapien
tttgtatcttacatggctaagtcca

SEQ ID NO: 1715162 - DNA, 25 bp, Homo sapien
ggctgctttccatgatgttttaaaa

SEQ ID NO: 1715163 - DNA, 25 bp, Homo sapien
gtgtagctttgtatcttacatggct

SEQ ID NO: 1715164 - DNA, 25 bp, Homo sapien
tcttccgtttttaggagagcagcca

SEQ ID NO: 1715165 - DNA, 25 bp, Homo sapien
tagtaactgcagaccaatgctcctc

SEQ ID NO: 1715166 - DNA, 25 bp, Homo sapien
tcaggtacatctgaaggaggcctac

SEQ ID NO: 1715167 - DNA, 25 bp, Homo sapien
tgaggtcctcttttgtcctgccagg

SEQ ID NO: 1715168 - DNA, 25 bp, Homo sapien
tctccagtcttttgcaaaaagcttc

SEQ ID NO: 1715169 - DNA, 25 bp, Homo sapien
cctgaggattctgaaatcagtttcc

SEQ ID NO: 1715170 - DNA, 25 bp, Homo sapien
gcttcaaattttccaaatatataca

SEQ ID NO: 1715171 - DNA, 25 bp, Homo sapien
gttttatgaaaagatgcctgatatt

SEQ ID NO: 1715172 - DNA, 25 bp, Homo sapien
ttaaccccttggtatatatttctga

SEQ ID NO: 1715173 - DNA, 25 bp, Homo sapien
gaaatctaagaaatctgtgtcaaat

SEQ ID NO: 1715174 - DNA, 25 bp, Homo sapien
tgtgtcaaattctgtccttcttgga

SEQ ID NO: 1715175 - DNA, 25 bp, Homo sapien
taatatctattccttctatggtaga

SEQ ID NO: 1715176 - DNA, 25 bp, Homo sapien
ctttgaagtagctgaagagcctgct

SEQ ID NO: 1715177 - DNA, 25 bp, Homo sapien
ttcccaaaactactgttcataaatg

SEQ ID NO: 1715178 - DNA, 25 bp, Homo sapien
agagcctgctgagaagataagattt

SEQ ID NO: 1715179 - DNA, 25 bp, Homo sapien
ctgttcataaatgcctgtatttgta

SEQ ID NO: 1715180 - DNA, 25 bp, Homo sapien
gacagggaatgttcagcttctgaaa

SEQ ID NO: 1715181 - DNA, 25 bp, Homo sapien
caagttcagccacatagtactgaag

SEQ ID NO: 1715182 - DNA, 25 bp, Homo sapien
cttcttagtagcatcaagttcagcc

SEQ ID NO: 1715183 - DNA, 25 bp, Homo sapien
gaagaatacgctctattgtgtggtt

SEQ ID NO: 1715184 - DNA, 25 bp, Homo sapien
ttatccggcgatagagctgcctcac

SEQ ID NO: 1715185 - DNA, 25 bp, Homo sapien
taattgatgggctcacttatccggc

SEQ ID NO: 1715186 - DNA, 25 bp, Homo sapien
tcacccagagtatttttcctgctat

SEQ ID NO: 1715187 - DNA, 25 bp, Homo sapien
aagaggggggtcatctttctgagaa

SEQ ID NO: 1715188 - DNA, 25 bp, Homo sapien
cagctttaccgtccggacttgataa

SEQ ID NO: 1715189 - DNA, 25 bp, Homo sapien
gatccaggctgtgtgatagaccacc

SEQ ID NO: 1715190 - DNA, 25 bp, Homo sapien
gatcttgttatactgacggatgaca

SEQ ID NO: 1715191 - DNA, 25 bp, Homo sapien
tccaccagcacataggagatcttgt

SEQ ID NO: 1715192 - DNA, 25 bp, Homo sapien
cactgtcctctaggatgcaggtatg

SEQ ID NO: 1715193 - DNA, 25 bp, Homo sapien
tcctgttagggacgacaccctgcgg

SEQ ID NO: 1715194 - DNA, 25 bp, Homo sapien
gttcctgttagggacgacaccctgc

SEQ ID NO: 1715195 - DNA, 25 bp, Homo sapien
ctgttagggacgacaccctgcgggg

SEQ ID NO: 1715196 - DNA, 25 bp, Homo sapien
cgaaattaaccagcaacttccctgt

SEQ ID NO: 1715197 - DNA, 25 bp, Homo sapien
tcatacacttagtttcccgaacaac

SEQ ID NO: 1715198 - DNA, 25 bp, Homo sapien
tctggatgtcgcacaaaaagcgtgg

SEQ ID NO: 1715199 - DNA, 25 bp, Homo sapien
gcctgttctggtacatccaacttca

SEQ ID NO: 1715200 - DNA, 25 bp, Homo sapien
gcacttcctgacataactcatcata

SEQ ID NO: 1715201 - DNA, 25 bp, Homo sapien
actcatcataatattgcagaagacc

SEQ ID NO: 1715202 - DNA, 25 bp, Homo sapien
aaacacagaaggcacttcctgacat

SEQ ID NO: 1715203 - DNA, 25 bp, Homo sapien
gaaggcacttcctgacataactcat

SEQ ID NO: 1715204 - DNA, 25 bp, Homo sapien
accatgttaacactgtgagtccttg

SEQ ID NO: 1715205 - DNA, 25 bp, Homo sapien
caaaactaattcgacttcttgaaag

SEQ ID NO: 1715206 - DNA, 25 bp, Homo sapien
agctttccagtgttaaagacgacca

SEQ ID NO: 1715207 - DNA, 25 bp, Homo sapien
ctttaaaagttgattgaacatatcc

SEQ ID NO: 1715208 - DNA, 25 bp, Homo sapien
ccttcagaactgtatcaatatgcat

SEQ ID NO: 1715209 - DNA, 25 bp, Homo sapien
tcaacacagttttggctatctcctt

SEQ ID NO: 1715210 - DNA, 25 bp, Homo sapien
ctcattgagggtcaacatatcttct

SEQ ID NO: 1715211 - DNA, 25 bp, Homo sapien
acatatcttctactttggtagcacc

SEQ ID NO: 1715212 - DNA, 25 bp, Homo sapien
tcataaatctgctcaaatattgata

SEQ ID NO: 1715213 - DNA, 25 bp, Homo sapien
gaatgtcagcccattcttttgtgta

SEQ ID NO: 1715214 - DNA, 25 bp, Homo sapien
tttgtggtttagaatgtcagcccat

SEQ ID NO: 1715215 - DNA, 25 bp, Homo sapien
atattgatataagttctctgacagc

SEQ ID NO: 1715216 - DNA, 25 bp, Homo sapien
ttcctactttcccagtgtatttcac

SEQ ID NO: 1715217 - DNA, 25 bp, Homo sapien
ctgttttcctactttcccagtgtat

SEQ ID NO: 1715218 - DNA, 25 bp, Homo sapien
tttcctactttcccagtgtatttca

SEQ ID NO: 1715219 - DNA, 25 bp, Homo sapien
ctgactgttttcctactttcccagt

SEQ ID NO: 1715220 - DNA, 25 bp, Homo sapien
agcttcatagtcattgttttcaccc

SEQ ID NO: 1715221 - DNA, 25 bp, Homo sapien
tattagcttcatagtcattgttttc

SEQ ID NO: 1715222 - DNA, 25 bp, Homo sapien
cacaatattagcttcatagtcattg

SEQ ID NO: 1715223 - DNA, 25 bp, Homo sapien
tctttatcatgagtatcaaactcat

SEQ ID NO: 1715224 - DNA, 25 bp, Homo sapien
ttctgtgaattgcatgaagttgttc

SEQ ID NO: 1715225 - DNA, 25 bp, Homo sapien
attctgtgaattgcatgaagttgtt

SEQ ID NO: 1715226 - DNA, 25 bp, Homo sapien
gataaccgtgtagctttttgaagac

SEQ ID NO: 1715227 - DNA, 25 bp, Homo sapien
tgtgtccagagataaccgtgtagct

SEQ ID NO: 1715228 - DNA, 25 bp, Homo sapien
cagagataaccgtgtagctttttga

SEQ ID NO: 1715229 - DNA, 25 bp, Homo sapien
tcattgtgtccagagataaccgtgt

SEQ ID NO: 1715230 - DNA, 25 bp, Homo sapien
ctgcagctatggcttttccaggaga

SEQ ID NO: 1715231 - DNA, 25 bp, Homo sapien
tatggcttttccaggagatgcagac

SEQ ID NO: 1715232 - DNA, 25 bp, Homo sapien
ttcctgcagctatggcttttccagg

SEQ ID NO: 1715233 - DNA, 25 bp, Homo sapien
tgcagctatggcttttccaggagat

SEQ ID NO: 1715234 - DNA, 25 bp, Homo sapien
aggaattgcaagatgtacttcactt

SEQ ID NO: 1715235 - DNA, 25 bp, Homo sapien
gaattgcaagatgtacttcactttt

SEQ ID NO: 1715236 - DNA, 25 bp, Homo sapien
attgcaagatgtacttcacttttta

SEQ ID NO: 1715237 - DNA, 25 bp, Homo sapien
ggaattgcaagatgtacttcacttt

SEQ ID NO: 1715238 - DNA, 25 bp, Homo sapien
gtgtttgaggtagggatctggacaa

SEQ ID NO: 1715239 - DNA, 25 bp, Homo sapien
aatggcttgttgaatgtcatccaaa

SEQ ID NO: 1715240 - DNA, 25 bp, Homo sapien
ggacggatttgctgttgcccccagt

SEQ ID NO: 1715241 - DNA, 25 bp, Homo sapien
atgggacggatttgctgttgccccc

SEQ ID NO: 1715242 - DNA, 25 bp, Homo sapien
ggatcatacggttaatggcttgttg

SEQ ID NO: 1715243 - DNA, 25 bp, Homo sapien
gtgttttgatgggtcacgtcagtag

SEQ ID NO: 1715244 - DNA, 25 bp, Homo sapien
tttgatgggtcacgtcagtagtggt

SEQ ID NO: 1715245 - DNA, 25 bp, Homo sapien
cctgtgttttgatgggtcacgtcag

SEQ ID NO: 1715246 - DNA, 25 bp, Homo sapien
tcctgtgttttgatgggtcacgtca

SEQ ID NO: 1715247 - DNA, 25 bp, Homo sapien
tcatgagctgcctttcttagggaat

SEQ ID NO: 1715248 - DNA, 25 bp, Homo sapien
ttcactttcacatcgcggtcctctg

SEQ ID NO: 1715249 - DNA, 25 bp, Homo sapien
gaaatatccttgtgctccgctaccc

SEQ ID NO: 1715250 - DNA, 25 bp, Homo sapien
gagcaggaccaacttagaaatatcc

SEQ ID NO: 1715251 - DNA, 25 bp, Homo sapien
ctgatctgatttcagtcagagaggg

SEQ ID NO: 1715252 - DNA, 25 bp, Homo sapien
tcaactcatcaatctcctgttcaaa

SEQ ID NO: 1715253 - DNA, 25 bp, Homo sapien
aaagtagcatagtgtagaatttctg

SEQ ID NO: 1715254 - DNA, 25 bp, Homo sapien
aacaataataggcttcaactcatca

SEQ ID NO: 1715255 - DNA, 25 bp, Homo sapien
ctgtatgtaattcaagtgctcctac

SEQ ID NO: 1715256 - DNA, 25 bp, Homo sapien
tcatctaaatcacgaataggtctag

SEQ ID NO: 1715257 - DNA, 25 bp, Homo sapien
tcacgtatgcaagacaaggcttcca

SEQ ID NO: 1715258 - DNA, 25 bp, Homo sapien
catgccttggcctcgatggataagg

SEQ ID NO: 1715259 - DNA, 25 bp, Homo sapien
tcattcagatatcgacagagtaaca

SEQ ID NO: 1715260 - DNA, 25 bp, Homo sapien
tatcttaaggtatcaactgcttctg

SEQ ID NO: 1715261 - DNA, 25 bp, Homo sapien
tcttaaggtatcaactgcttctgat

SEQ ID NO: 1715262 - DNA, 25 bp, Homo sapien
gaatatcttaaggtatcaactgctt

SEQ ID NO: 1715263 - DNA, 25 bp, Homo sapien
tgaaagaatatcttaaggtatcaac

SEQ ID NO: 1715264 - DNA, 25 bp, Homo sapien
caatggtcctgaaatactctgctta

SEQ ID NO: 1715265 - DNA, 25 bp, Homo sapien
tctctaataaggtcacatgcctgca

SEQ ID NO: 1715266 - DNA, 25 bp, Homo sapien
caagattcaaaacctggctgtgtag

SEQ ID NO: 1715267 - DNA, 25 bp, Homo sapien
taacccaaatgaacctacaggagac

SEQ ID NO: 1715268 - DNA, 25 bp, Homo sapien
gcaaagtttatcacgtcctcacgaa

SEQ ID NO: 1715269 - DNA, 25 bp, Homo sapien
taaactttggctgcacttgaactag

SEQ ID NO: 1715270 - DNA, 25 bp, Homo sapien
cttccacagactcaagtagattgct

SEQ ID NO: 1715271 - DNA, 25 bp, Homo sapien
gaactaggtcctcttgtactgaaac

SEQ ID NO: 1715272 - DNA, 25 bp, Homo sapien
aatatctgtagcctgttgctagctt

SEQ ID NO: 1715273 - DNA, 25 bp, Homo sapien
gtatatttggaaccataggtccttc

SEQ ID NO: 1715274 - DNA, 25 bp, Homo sapien
gaaatatctgtagcctgttgctagc

SEQ ID NO: 1715275 - DNA, 25 bp, Homo sapien
ctgaaatatctgtagcctgttgcta

SEQ ID NO: 1715276 - DNA, 25 bp, Homo sapien
tacgtaacaaatttcctccacagat

SEQ ID NO: 1715277 - DNA, 25 bp, Homo sapien
aaaagttgttcaccagatgaatacg

SEQ ID NO: 1715278 - DNA, 25 bp, Homo sapien
ttcctccacagatcatcgaaactgg

SEQ ID NO: 1715279 - DNA, 25 bp, Homo sapien
tcaccagatgaatacgtaacaaatt

SEQ ID NO: 1715280 - DNA, 25 bp, Homo sapien
cggtgtcatacaatccatacagctt

SEQ ID NO: 1715281 - DNA, 25 bp, Homo sapien
gctcattacggtgtcatacaatcca

SEQ ID NO: 1715282 - DNA, 25 bp, Homo sapien
atttcataataaccactaatactgc

SEQ ID NO: 1715283 - DNA, 25 bp, Homo sapien
taatactgctcattacggtgtcata

SEQ ID NO: 1715284 - DNA, 25 bp, Homo sapien
ggccttattggtcatcatttccagt

SEQ ID NO: 1715285 - DNA, 25 bp, Homo sapien
tttccagtagaggacatgactcact

SEQ ID NO: 1715286 - DNA, 25 bp, Homo sapien
agttaactcggagattctatcccag

SEQ ID NO: 1715287 - DNA, 25 bp, Homo sapien
aaagcttgccaatctttaagtcctt

SEQ ID NO: 1715288 - DNA, 25 bp, Homo sapien
tccttatgtttaaggagtggtgctt

SEQ ID NO: 1715289 - DNA, 25 bp, Homo sapien
cttatgtttaaggagtggtgcttcc

SEQ ID NO: 1715290 - DNA, 25 bp, Homo sapien
ccttatgtttaaggagtggtgcttc

SEQ ID NO: 1715291 - DNA, 25 bp, Homo sapien
catccttatgtttaaggagtggtgc

SEQ ID NO: 1715292 - DNA, 25 bp, Homo sapien
cctgagtcagcttggcttcgatatc

SEQ ID NO: 1715293 - DNA, 25 bp, Homo sapien
ggttggtccaattctcaatcacctg

SEQ ID NO: 1715294 - DNA, 25 bp, Homo sapien
tgttgctgagtaaagaccctaagac

SEQ ID NO: 1715295 - DNA, 25 bp, Homo sapien
tcccgattcggttcctttgagcagg

SEQ ID NO: 1715296 - DNA, 25 bp, Homo sapien
gaggcagctgtttggcaatatctcc

SEQ ID NO: 1715297 - DNA, 25 bp, Homo sapien
caatatctccacctacaaagacggc

SEQ ID NO: 1715298 - DNA, 25 bp, Homo sapien
caaaggttctgtactacgagccact

SEQ ID NO: 1715299 - DNA, 25 bp, Homo sapien
caaagacggcttcaagataaaccca

SEQ ID NO: 1715300 - DNA, 25 bp, Homo sapien
ttccaactgctcatgtaaatgaggt

SEQ ID NO: 1715301 - DNA, 25 bp, Homo sapien
aattaatcacattgggattctcatg

SEQ ID NO: 1715302 - DNA, 25 bp, Homo sapien
taaaagttgtcccatggtttcatct

SEQ ID NO: 1715303 - DNA, 25 bp, Homo sapien
ggattctcatgagctcgctgcatta

SEQ ID NO: 1715304 - DNA, 25 bp, Homo sapien
ccaggagaactggatcagatacaaa

SEQ ID NO: 1715305 - DNA, 25 bp, Homo sapien
tggcttgtccaagaatttccaggag

SEQ ID NO: 1715306 - DNA, 25 bp, Homo sapien
ggaatcactggcttgtccaagaatt

SEQ ID NO: 1715307 - DNA, 25 bp, Homo sapien
acagtaatcgtttcttctccaaata

SEQ ID NO: 1715308 - DNA, 25 bp, Homo sapien
tgatgttgtcagatactgcagggag

SEQ ID NO: 1715309 - DNA, 25 bp, Homo sapien
ttgatgttgtcagatactgcaggga

SEQ ID NO: 1715310 - DNA, 25 bp, Homo sapien
ctcattgatgttgtcagatactgca

SEQ ID NO: 1715311 - DNA, 25 bp, Homo sapien
cattgatgttgtcagatactgcagg

SEQ ID NO: 1715312 - DNA, 25 bp, Homo sapien
gacggccatgatgcgatcatagtct

SEQ ID NO: 1715313 - DNA, 25 bp, Homo sapien
tctccttctcttgatatgacggcca

SEQ ID NO: 1715314 - DNA, 25 bp, Homo sapien
catgatgcgatcatagtcttttgca

SEQ ID NO: 1715315 - DNA, 25 bp, Homo sapien
tctcttgatatgacggccatgatgc

SEQ ID NO: 1715316 - DNA, 25 bp, Homo sapien
tcactgatttgatagaaagcggatc

SEQ ID NO: 1715317 - DNA, 25 bp, Homo sapien
aaatctccacaggacctttggccat

SEQ ID NO: 1715318 - DNA, 25 bp, Homo sapien
taacaaatccagtagccaaatctcc

SEQ ID NO: 1715319 - DNA, 25 bp, Homo sapien
taagagttgaaatcctgaatcactg

SEQ ID NO: 1715320 - DNA, 25 bp, Homo sapien
cacatggatggtaattagagtctcg

SEQ ID NO: 1715321 - DNA, 25 bp, Homo sapien
tcgaacttcactctatcaaacttgc

SEQ ID NO: 1715322 - DNA, 25 bp, Homo sapien
gcctcttctgaatcgtgtgtccaca

SEQ ID NO: 1715323 - DNA, 25 bp, Homo sapien
tttgcattacgtaaagcctcttctg

SEQ ID NO: 1715324 - DNA, 25 bp, Homo sapien
gagagtgctctgaagcctgattccg

SEQ ID NO: 1715325 - DNA, 25 bp, Homo sapien
caatcgacccagcatagcttatgac

SEQ ID NO: 1715326 - DNA, 25 bp, Homo sapien
tgaagcctgattccgttccatctgt

SEQ ID NO: 1715327 - DNA, 25 bp, Homo sapien
tcaactggacgaacagccgtgagag

SEQ ID NO: 1715328 - DNA, 25 bp, Homo sapien
tctgtaatagacaccacagtttgat

SEQ ID NO: 1715329 - DNA, 25 bp, Homo sapien
taacaagacgatcagtacatcccag

SEQ ID NO: 1715330 - DNA, 25 bp, Homo sapien
aaatctactctgttttagccattca

SEQ ID NO: 1715331 - DNA, 25 bp, Homo sapien
tctgttaatggagtgataacaagac

SEQ ID NO: 1715332 - DNA, 25 bp, Homo sapien
ggcctgagctaacgtgatatagcat

SEQ ID NO: 1715333 - DNA, 25 bp, Homo sapien
ccaaggcctgagctaacgtgatata

SEQ ID NO: 1715334 - DNA, 25 bp, Homo sapien
atgttcatgcccaaggcctgagcta

SEQ ID NO: 1715335 - DNA, 25 bp, Homo sapien
atgcccaaggcctgagctaacgtga

SEQ ID NO: 1715336 - DNA, 25 bp, Homo sapien
aatccatttgatctgagcaattgaa

SEQ ID NO: 1715337 - DNA, 25 bp, Homo sapien
ttgaacacgaccacatattttccca

SEQ ID NO: 1715338 - DNA, 25 bp, Homo sapien
gcaattgaacacgaccacatatttt

SEQ ID NO: 1715339 - DNA, 25 bp, Homo sapien
ctgagcaattgaacacgaccacata

SEQ ID NO: 1715340 - DNA, 25 bp, Homo sapien
ttcaggattttctcaaaattttcca

SEQ ID NO: 1715341 - DNA, 25 bp, Homo sapien
tcaggattttctcaaaattttccat

SEQ ID NO: 1715342 - DNA, 25 bp, Homo sapien
ttgtgctgccactgataatacaggc

SEQ ID NO: 1715343 - DNA, 25 bp, Homo sapien
tataaatttgttgtgctgccactga

SEQ ID NO: 1715344 - DNA, 25 bp, Homo sapien
gccccaggaacccgactgtgcaaga

SEQ ID NO: 1715345 - DNA, 25 bp, Homo sapien
ttgttgtgctgccactgataataca

SEQ ID NO: 1715346 - DNA, 25 bp, Homo sapien
catcgttaagaagattccaaattct

SEQ ID NO: 1715347 - DNA, 25 bp, Homo sapien
taggttttctggtagttcctggcgc

SEQ ID NO: 1715348 - DNA, 25 bp, Homo sapien
cctggcgcccagcatatccagggtt

SEQ ID NO: 1715349 - DNA, 25 bp, Homo sapien
catagcaacagttctaaactggatt

SEQ ID NO: 1715350 - DNA, 25 bp, Homo sapien
tatcaggaaccatcatagcaacagt

SEQ ID NO: 1715351 - DNA, 25 bp, Homo sapien
ctgaaaattaatatagtgagttttt

SEQ ID NO: 1715352 - DNA, 25 bp, Homo sapien
gcttgcaagtttaactctcataatg

SEQ ID NO: 1715353 - DNA, 25 bp, Homo sapien
gtttagtaagttgctcttcacagag

SEQ ID NO: 1715354 - DNA, 25 bp, Homo sapien
gaaaaccacagcttgcaagtttaac

SEQ ID NO: 1715355 - DNA, 25 bp, Homo sapien
tcacagagtttgtaaagaacgtaaa

SEQ ID NO: 1715356 - DNA, 25 bp, Homo sapien
catgacaatgcttaattcactatct

SEQ ID NO: 1715357 - DNA, 25 bp, Homo sapien
gtttggaaaggttcatatctcttag

SEQ ID NO: 1715358 - DNA, 25 bp, Homo sapien
caagagtcctcaatacagacagaat

SEQ ID NO: 1715359 - DNA, 25 bp, Homo sapien
gtctggctcttttttgagatccaag

SEQ ID NO: 1715360 - DNA, 25 bp, Homo sapien
acctgatgggctactgcgttttgca

SEQ ID NO: 1715361 - DNA, 25 bp, Homo sapien
cataagtattactatccagttgcag

SEQ ID NO: 1715362 - DNA, 25 bp, Homo sapien
cctgggaacaggtcattgattaagc

SEQ ID NO: 1715363 - DNA, 25 bp, Homo sapien
caaaccctctatctgaacctgatgg

SEQ ID NO: 1715364 - DNA, 25 bp, Homo sapien
gcatttctctatgaggccttccgca

SEQ ID NO: 1715365 - DNA, 25 bp, Homo sapien
tgataacggttgtctttccagaacc

SEQ ID NO: 1715366 - DNA, 25 bp, Homo sapien
caaacatctgaggtgcagtaatggc

SEQ ID NO: 1715367 - DNA, 25 bp, Homo sapien
caagagtcatcaagccatgccgtac

SEQ ID NO: 1715368 - DNA, 25 bp, Homo sapien
gagaggcgttctcgatattgtggac

SEQ ID NO: 1715369 - DNA, 25 bp, Homo sapien
ttcaaacagaagcttacaactaggg

SEQ ID NO: 1715370 - DNA, 25 bp, Homo sapien
gagctgctgatatagaccatgccca

SEQ ID NO: 1715371 - DNA, 25 bp, Homo sapien
tcctagaaaccgtggcaggagaggc

SEQ ID NO: 1715372 - DNA, 25 bp, Homo sapien
agagctgcattttgggattgagatt

SEQ ID NO: 1715373 - DNA, 25 bp, Homo sapien
gtgcagtgcgtttcttcaaccatgc

SEQ ID NO: 1715374 - DNA, 25 bp, Homo sapien
ggattgagatttagcttcatatatg

SEQ ID NO: 1715375 - DNA, 25 bp, Homo sapien
cctgtgcagtgcgtttcttcaacca

SEQ ID NO: 1715376 - DNA, 25 bp, Homo sapien
cagagcttttacagccacatcatca

SEQ ID NO: 1715377 - DNA, 25 bp, Homo sapien
tcaaaatcgaagtagtaaatgtaca

SEQ ID NO: 1715378 - DNA, 25 bp, Homo sapien
aatgatttttatggactgtctgaac

SEQ ID NO: 1715379 - DNA, 25 bp, Homo sapien
ctgtaaactgcaactgagtgaaaaa

SEQ ID NO: 1715380 - DNA, 25 bp, Homo sapien
tttcatgctgccgtaagaaggcttc

SEQ ID NO: 1715381 - DNA, 25 bp, Homo sapien
gaagggctcctaaactccacattag

SEQ ID NO: 1715382 - DNA, 25 bp, Homo sapien
tatgaagatgttcgacacaggaaac

SEQ ID NO: 1715383 - DNA, 25 bp, Homo sapien
gaaggcttcaagcttttctctgctt

SEQ ID NO: 1715384 - DNA, 25 bp, Homo sapien
ccaaaattgatgaatattccggaat

SEQ ID NO: 1715385 - DNA, 25 bp, Homo sapien
ccggaatactgtcagttggataata

SEQ ID NO: 1715386 - DNA, 25 bp, Homo sapien
gttttgcaatggtgtctatcaaaaa

SEQ ID NO: 1715387 - DNA, 25 bp, Homo sapien
ttatgttgttttgcaatggtgtcta

SEQ ID NO: 1715388 - DNA, 25 bp, Homo sapien
agacttttggatagctgtacttcag

SEQ ID NO: 1715389 - DNA, 25 bp, Homo sapien
cattggttctgtggcagatgaaaag

SEQ ID NO: 1715390 - DNA, 25 bp, Homo sapien
cagtttttgcagttccctgctctcc

SEQ ID NO: 1715391 - DNA, 25 bp, Homo sapien
tcaaataggccttaaccatgacagt

SEQ ID NO: 1715392 - DNA, 25 bp, Homo sapien
gctaaacagctgaatgccaagtgca

SEQ ID NO: 1715393 - DNA, 25 bp, Homo sapien
tcagctgcagtctcaatattaggtc

SEQ ID NO: 1715394 - DNA, 25 bp, Homo sapien
tattaggtcaaagtatgctatttgg

SEQ ID NO: 1715395 - DNA, 25 bp, Homo sapien
cagtagatatgctccaaagttcagc

SEQ ID NO: 1715396 - DNA, 25 bp, Homo sapien
gcttccaattcgcttatccacgtag

SEQ ID NO: 1715397 - DNA, 25 bp, Homo sapien
tatccacgtagctttcaattgttct

SEQ ID NO: 1715398 - DNA, 25 bp, Homo sapien
cgcttatccacgtagctttcaattg

SEQ ID NO: 1715399 - DNA, 25 bp, Homo sapien
gtggcccatatgtgcttccaattcg

SEQ ID NO: 1715400 - DNA, 25 bp, Homo sapien
caacaatagtagtgaagtctccagg

SEQ ID NO: 1715401 - DNA, 25 bp, Homo sapien
agtctccaggcttgtccaagctgta

SEQ ID NO: 1715402 - DNA, 25 bp, Homo sapien
gatcattgctgctatgagctgcaca

SEQ ID NO: 1715403 - DNA, 25 bp, Homo sapien
aatatcatttcgaccacctccaggg

SEQ ID NO: 1715404 - DNA, 25 bp, Homo sapien
tacccactgagactaaattcacaat

SEQ ID NO: 1715405 - DNA, 25 bp, Homo sapien
acaatcatctcacatatttgaggct

SEQ ID NO: 1715406 - DNA, 25 bp, Homo sapien
tctacaaggatcaaagtatccacat

SEQ ID NO: 1715407 - DNA, 25 bp, Homo sapien
gaggcttgaaacttctacaaggatc

SEQ ID NO: 1715408 - DNA, 25 bp, Homo sapien
tctggaaagatctcgaagattgaag

SEQ ID NO: 1715409 - DNA, 25 bp, Homo sapien
gcactcgtgtttgaaaagggacagg

SEQ ID NO: 1715410 - DNA, 25 bp, Homo sapien
tgcaattactctgctgcactcgtgt

SEQ ID NO: 1715411 - DNA, 25 bp, Homo sapien
gattgaagcgcactcctcagctttt

SEQ ID NO: 1715412 - DNA, 25 bp, Homo sapien
ggttcatcaccagttggttctggca

SEQ ID NO: 1715413 - DNA, 25 bp, Homo sapien
cacgacgctgcatcagagccaatat

SEQ ID NO: 1715414 - DNA, 25 bp, Homo sapien
tcttcaactgcacgagtaagatgtg

SEQ ID NO: 1715415 - DNA, 25 bp, Homo sapien
tggttcaggaagaatacacgacgct

SEQ ID NO: 1715416 - DNA, 25 bp, Homo sapien
caagagatgttcctctaatgatttc

SEQ ID NO: 1715417 - DNA, 25 bp, Homo sapien
tcctctaatgatttcattgaactgt

SEQ ID NO: 1715418 - DNA, 25 bp, Homo sapien
cttaataagatgagtcattgcatct

SEQ ID NO: 1715419 - DNA, 25 bp, Homo sapien
aaaacaccagatcaagagatgttcc

SEQ ID NO: 1715420 - DNA, 25 bp, Homo sapien
atatcagtaaataggcaatagttag

SEQ ID NO: 1715421 - DNA, 25 bp, Homo sapien
ttatatcagtaaataggcaatagtt

SEQ ID NO: 1715422 - DNA, 25 bp, Homo sapien
tcagtaaataggcaatagttaggac

SEQ ID NO: 1715423 - DNA, 25 bp, Homo sapien
tatcagtaaataggcaatagttagg

SEQ ID NO: 1715424 - DNA, 25 bp, Homo sapien
cacgacgttcgaattattcgtgaaa

SEQ ID NO: 1715425 - DNA, 25 bp, Homo sapien
gccagcaataaaagaggccaatctt

SEQ ID NO: 1715426 - DNA, 25 bp, Homo sapien
tatttgatagccagcaataaaagag

SEQ ID NO: 1715427 - DNA, 25 bp, Homo sapien
accagcaatgcatttccacacgacg

SEQ ID NO: 1715428 - DNA, 25 bp, Homo sapien
aatgcaatgtggcttgtgcacccat

SEQ ID NO: 1715429 - DNA, 25 bp, Homo sapien
tcctaatgcaatgtggcttgtgcac

SEQ ID NO: 1715430 - DNA, 25 bp, Homo sapien
ctcttcctaatgcaatgtggcttgt

SEQ ID NO: 1715431 - DNA, 25 bp, Homo sapien
aatgtggcttgtgcacccatccact

SEQ ID NO: 1715432 - DNA, 25 bp, Homo sapien
gcaagttgttaaggtattctagaaa

SEQ ID NO: 1715433 - DNA, 25 bp, Homo sapien
tgaagatagcaagttgttaaggtat

SEQ ID NO: 1715434 - DNA, 25 bp, Homo sapien
tgttagattagtcacattgtaagac

SEQ ID NO: 1715435 - DNA, 25 bp, Homo sapien
tgttaaggtattctagaaatgcctc

SEQ ID NO: 1715436 - DNA, 25 bp, Homo sapien
aacatgtaagttcttccttgatctt

SEQ ID NO: 1715437 - DNA, 25 bp, Homo sapien
tccatctcatctcgtgcaaacaagt

SEQ ID NO: 1715438 - DNA, 25 bp, Homo sapien
gaggatggcgaggtagctccctctt

SEQ ID NO: 1715439 - DNA, 25 bp, Homo sapien
ttcatcactgaaatcagaccttggg

SEQ ID NO: 1715440 - DNA, 25 bp, Homo sapien
tccatagtgcaacctgatatcaagc

SEQ ID NO: 1715441 - DNA, 25 bp, Homo sapien
cagcggctgaaccagtccatagtgc

SEQ ID NO: 1715442 - DNA, 25 bp, Homo sapien
tcaaagaacgggcacggaacttctc

SEQ ID NO: 1715443 - DNA, 25 bp, Homo sapien
agtaggaggccacagcaatcagagc

SEQ ID NO: 1715444 - DNA, 25 bp, Homo sapien
catttataaatgagaggtaagattt

SEQ ID NO: 1715445 - DNA, 25 bp, Homo sapien
gcctgttcattaatgaacttcacct

SEQ ID NO: 1715446 - DNA, 25 bp, Homo sapien
caatattcatacgttcagcctgttc

SEQ ID NO: 1715447 - DNA, 25 bp, Homo sapien
gagtcacatgtgctcttcggcggta

SEQ ID NO: 1715448 - DNA, 25 bp, Homo sapien
gagtttagcaacagattcacttgcc

SEQ ID NO: 1715449 - DNA, 25 bp, Homo sapien
caagatcctgagagagtttagcaac

SEQ ID NO: 1715450 - DNA, 25 bp, Homo sapien
cacttgcctccattagtttatcaag

SEQ ID NO: 1715451 - DNA, 25 bp, Homo sapien
actgcaagatcctgagagagtttag

SEQ ID NO: 1715452 - DNA, 25 bp, Homo sapien
gaagcctgagcgcttactgtgactt

SEQ ID NO: 1715453 - DNA, 25 bp, Homo sapien
ttgtcctttacctcctgtacttcat

SEQ ID NO: 1715454 - DNA, 25 bp, Homo sapien
ggtttagctgcctcaagcttgcttt

SEQ ID NO: 1715455 - DNA, 25 bp, Homo sapien
tgcttcttccagtgcaggtttagct

SEQ ID NO: 1715456 - DNA, 25 bp, Homo sapien
tgattctcataataagatgtggtgg

SEQ ID NO: 1715457 - DNA, 25 bp, Homo sapien
tgaaatagtaacagaacacagtcca

SEQ ID NO: 1715458 - DNA, 25 bp, Homo sapien
ctggatccatagtaacagggtcaat

SEQ ID NO: 1715459 - DNA, 25 bp, Homo sapien
tggcaatatcatttggcttgatagt

SEQ ID NO: 1715460 - DNA, 25 bp, Homo sapien
agtattataacctgtaagttctgga

SEQ ID NO: 1715461 - DNA, 25 bp, Homo sapien
atactttcttcctgagttaatatgt

SEQ ID NO: 1715462 - DNA, 25 bp, Homo sapien
gaggcaacacttctctattgatgcc

SEQ ID NO: 1715463 - DNA, 25 bp, Homo sapien
catttatagtgtccttagggaactg

SEQ ID NO: 1715464 - DNA, 25 bp, Homo sapien
agtgtccaagacaggagaccagcca

SEQ ID NO: 1715465 - DNA, 25 bp, Homo sapien
tgctgaaggctccacaggaatcctg

SEQ ID NO: 1715466 - DNA, 25 bp, Homo sapien
tagcaactgctaaccggccttcctg

SEQ ID NO: 1715467 - DNA, 25 bp, Homo sapien
atccagcagggcttgtgccttccct

SEQ ID NO: 1715468 - DNA, 25 bp, Homo sapien
tgtgccttccctaactcagcattag

SEQ ID NO: 1715469 - DNA, 25 bp, Homo sapien
tcagcattagcaactgctaaccggc

SEQ ID NO: 1715470 - DNA, 25 bp, Homo sapien
ctttactttgctgggtccaccggat

SEQ ID NO: 1715471 - DNA, 25 bp, Homo sapien
tcagcccatcgatgagagtggaggc

SEQ ID NO: 1715472 - DNA, 25 bp, Homo sapien
tctttttccggcacgtatcagcgtc

SEQ ID NO: 1715473 - DNA, 25 bp, Homo sapien
tccaccggattttttctccactcag

SEQ ID NO: 1715474 - DNA, 25 bp, Homo sapien
gaattttccgtgctctcaactccat

SEQ ID NO: 1715475 - DNA, 25 bp, Homo sapien
aaggaatcccgtgcacagcagaata

SEQ ID NO: 1715476 - DNA, 25 bp, Homo sapien
tctgtgaaaggaattttccgtgctc

SEQ ID NO: 1715477 - DNA, 25 bp, Homo sapien
agttggaggatccaccaacattgaa

SEQ ID NO: 1715478 - DNA, 25 bp, Homo sapien
taatgccattctgaattgagagatc

SEQ ID NO: 1715479 - DNA, 25 bp, Homo sapien
tgccttgagtttgtgggtctatgag

SEQ ID NO: 1715480 - DNA, 25 bp, Homo sapien
gagagatcatctcctggtaatccct

SEQ ID NO: 1715481 - DNA, 25 bp, Homo sapien
tgggtatctggtggcctttgtcaca

SEQ ID NO: 1715482 - DNA, 25 bp, Homo sapien
ttgaaggtagccttggcaaagctgc

SEQ ID NO: 1715483 - DNA, 25 bp, Homo sapien
gacttggtaaatacatcctctttcc

SEQ ID NO: 1715484 - DNA, 25 bp, Homo sapien
tctttccacaagtcagagctgtagg

SEQ ID NO: 1715485 - DNA, 25 bp, Homo sapien
ctttacaaggtgaccagtgaattcc

SEQ ID NO: 1715486 - DNA, 25 bp, Homo sapien
ttctaatacattatccaaggctgga

SEQ ID NO: 1715487 - DNA, 25 bp, Homo sapien
tgtcctccaagtgtgtgcgaaaata

SEQ ID NO: 1715488 - DNA, 25 bp, Homo sapien
aatatttatggttcagagatgtcac

SEQ ID NO: 1715489 - DNA, 25 bp, Homo sapien
ttcatgaatgtcctcaatgagaagg

SEQ ID NO: 1715490 - DNA, 25 bp, Homo sapien
gaaatcaatgactgacgttttagca

SEQ ID NO: 1715491 - DNA, 25 bp, Homo sapien
tagaatgactctccttagtaactga

SEQ ID NO: 1715492 - DNA, 25 bp, Homo sapien
tagtaactgattctcaagtcctttc

SEQ ID NO: 1715493 - DNA, 25 bp, Homo sapien
gcaggatttggtaacttcgtagtaa

SEQ ID NO: 1715494 - DNA, 25 bp, Homo sapien
gaggaggttatcttcaagttctttc

SEQ ID NO: 1715495 - DNA, 25 bp, Homo sapien
agtttaaccctctcagcctctaact

SEQ ID NO: 1715496 - DNA, 25 bp, Homo sapien
tcttccgcttattaaaagtaacatc

SEQ ID NO: 1715497 - DNA, 25 bp, Homo sapien
tgtagcacttaatttatagaggagg

SEQ ID NO: 1715498 - DNA, 25 bp, Homo sapien
gatgtactgagctaacagtccccat

SEQ ID NO: 1715499 - DNA, 25 bp, Homo sapien
cctagagttcgggatggcagacaag

SEQ ID NO: 1715500 - DNA, 25 bp, Homo sapien
ggctgtgttactccaacgggtatgc

SEQ ID NO: 1715501 - DNA, 25 bp, Homo sapien
cagttcccatatctgcgaacagcag

SEQ ID NO: 1715502 - DNA, 25 bp, Homo sapien
gaactcctcctgagccgcgttgatc

SEQ ID NO: 1715503 - DNA, 25 bp, Homo sapien
gaagtacaccaatgagagattcgtc

SEQ ID NO: 1715504 - DNA, 25 bp, Homo sapien
catggactggtcaaataacttcaag

SEQ ID NO: 1715505 - DNA, 25 bp, Homo sapien
tctgcttggtagttcgaagtacacc

SEQ ID NO: 1715506 - DNA, 25 bp, Homo sapien
ctctgacagagtatgtaaaaacttc

SEQ ID NO: 1715507 - DNA, 25 bp, Homo sapien
aaaaacttcatatgtcaggtactcg

SEQ ID NO: 1715508 - DNA, 25 bp, Homo sapien
ggttttcgtataggcctctgacaga

SEQ ID NO: 1715509 - DNA, 25 bp, Homo sapien
caatctttaaggtcatgaggagtac

SEQ ID NO: 1715510 - DNA, 25 bp, Homo sapien
tttcaggtagtagctctggtctgcc

SEQ ID NO: 1715511 - DNA, 25 bp, Homo sapien
ctttcaggtagtagctctggtctgc

SEQ ID NO: 1715512 - DNA, 25 bp, Homo sapien
ctctttcaggtagtagctctggtct

SEQ ID NO: 1715513 - DNA, 25 bp, Homo sapien
tcaggtagtagctctggtctgcctg

SEQ ID NO: 1715514 - DNA, 25 bp, Homo sapien
tgtcaaggatccagcgatagggttt

SEQ ID NO: 1715515 - DNA, 25 bp, Homo sapien
tccacaagattcagccaagtcatgt

SEQ ID NO: 1715516 - DNA, 25 bp, Homo sapien
cataatttctgcaaattgtggaagt

SEQ ID NO: 1715517 - DNA, 25 bp, Homo sapien
gtttactcagctccacaagattcag

SEQ ID NO: 1715518 - DNA, 25 bp, Homo sapien
ggcaggtatctagtgaatcattata

SEQ ID NO: 1715519 - DNA, 25 bp, Homo sapien
ctgataagtaaaagtttatggcagg

SEQ ID NO: 1715520 - DNA, 25 bp, Homo sapien
tatccatcagggataatttcctcct

SEQ ID NO: 1715521 - DNA, 25 bp, Homo sapien
tttccaccccttctcattacgagat

SEQ ID NO: 1715522 - DNA, 25 bp, Homo sapien
gaaccaatatgccaaagatgcccaa

SEQ ID NO: 1715523 - DNA, 25 bp, Homo sapien
tttcagaggaggaaccaatatgcca

SEQ ID NO: 1715524 - DNA, 25 bp, Homo sapien
cataccatttgtgtagtgcacacca

SEQ ID NO: 1715525 - DNA, 25 bp, Homo sapien
caaagtaagtgggtcagcaagcatt

SEQ ID NO: 1715526 - DNA, 25 bp, Homo sapien
gatttaagataactggttctgtgta

SEQ ID NO: 1715527 - DNA, 25 bp, Homo sapien
aaaacagtacggtctgggcaccaag

SEQ ID NO: 1715528 - DNA, 25 bp, Homo sapien
tttcagtttcttggccaatgcatca

SEQ ID NO: 1715529 - DNA, 25 bp, Homo sapien
catatcagaggtgtccgggtatcac

SEQ ID NO: 1715530 - DNA, 25 bp, Homo sapien
tccccctctgtgagaaacacccaag

SEQ ID NO: 1715531 - DNA, 25 bp, Homo sapien
cccctctgtgagaaacacccaagaa

SEQ ID NO: 1715532 - DNA, 25 bp, Homo sapien
caaatccccctctgtgagaaacacc

SEQ ID NO: 1715533 - DNA, 25 bp, Homo sapien
aatccccctctgtgagaaacaccca

SEQ ID NO: 1715534 - DNA, 25 bp, Homo sapien
cctgggacagttgttgcttgatcca

SEQ ID NO: 1715535 - DNA, 25 bp, Homo sapien
tattgggtcaagaggcgatttagag

SEQ ID NO: 1715536 - DNA, 25 bp, Homo sapien
tctagttttcgttcaggtggccctg

SEQ ID NO: 1715537 - DNA, 25 bp, Homo sapien
cttgatccaggtattgggtcaagag

SEQ ID NO: 1715538 - DNA, 25 bp, Homo sapien
ctgctgcattgacatctgaatcagc

SEQ ID NO: 1715539 - DNA, 25 bp, Homo sapien
gaatcagctttcgagcatgtacttc

SEQ ID NO: 1715540 - DNA, 25 bp, Homo sapien
tgccccattgagatagttctacatt

SEQ ID NO: 1715541 - DNA, 25 bp, Homo sapien
tccttgccccattgagatagttcta

SEQ ID NO: 1715542 - DNA, 25 bp, Homo sapien
gcaggagcagtctcttgtcacatac

SEQ ID NO: 1715543 - DNA, 25 bp, Homo sapien
gcagcaggagcagtctcttgtcaca

SEQ ID NO: 1715544 - DNA, 25 bp, Homo sapien
cagcaggagcagtctcttgtcacat

SEQ ID NO: 1715545 - DNA, 25 bp, Homo sapien
tgcagcaggagcagtctcttgtcac

SEQ ID NO: 1715546 - DNA, 25 bp, Homo sapien
aatcagaaggtgtgtctcccaaatc

SEQ ID NO: 1715547 - DNA, 25 bp, Homo sapien
catgaaattccaagactgctagaga

SEQ ID NO: 1715548 - DNA, 25 bp, Homo sapien
gctttccatgcgaatatcaggagga

SEQ ID NO: 1715549 - DNA, 25 bp, Homo sapien
gaaaaaccaggattgagcatcacga

SEQ ID NO: 1715550 - DNA, 25 bp, Homo sapien
gcaattttgtagtaatacccaacca

SEQ ID NO: 1715551 - DNA, 25 bp, Homo sapien
aattccaggccaaggtggcaatttt

SEQ ID NO: 1715552 - DNA, 25 bp, Homo sapien
ggccaaggtggcaattttgtagtaa

SEQ ID NO: 1715553 - DNA, 25 bp, Homo sapien
ggtggcaattttgtagtaataccca

SEQ ID NO: 1715554 - DNA, 25 bp, Homo sapien
ggcttcagtggtaattagcgtctct

SEQ ID NO: 1715555 - DNA, 25 bp, Homo sapien
gggctccgtagttatccatactcgg

SEQ ID NO: 1715556 - DNA, 25 bp, Homo sapien
gaagcaatgtaattggaaatcgatc

SEQ ID NO: 1715557 - DNA, 25 bp, Homo sapien
tactcggaaagaatcatcactggct

SEQ ID NO: 1715558 - DNA, 25 bp, Homo sapien
tcttttcaaacctgcgcgtacacct

SEQ ID NO: 1715559 - DNA, 25 bp, Homo sapien
tgtgtaaagcatcggcttccacatg

SEQ ID NO: 1715560 - DNA, 25 bp, Homo sapien
ggtggctcattagtgaatttgagag

SEQ ID NO: 1715561 - DNA, 25 bp, Homo sapien
attactgatgtccagaaggtcttga

SEQ ID NO: 1715562 - DNA, 25 bp, Homo sapien
agaagggccactggcaaaagcagag

SEQ ID NO: 1715563 - DNA, 25 bp, Homo sapien
caccaaagaaaagtaagtattgcat

SEQ ID NO: 1715564 - DNA, 25 bp, Homo sapien
acaccaaagaaaagtaagtattgca

SEQ ID NO: 1715565 - DNA, 25 bp, Homo sapien
tatcgcattcatcaaggtgattctg

SEQ ID NO: 1715566 - DNA, 25 bp, Homo sapien
ggaatattccatcctaaggggccaa

SEQ ID NO: 1715567 - DNA, 25 bp, Homo sapien
tgaaaagtcagcagaattgaattcg

SEQ ID NO: 1715568 - DNA, 25 bp, Homo sapien
ttcttaatatcgcattcatcaaggt

SEQ ID NO: 1715569 - DNA, 25 bp, Homo sapien
tcattataaacatttcgggtctttc

SEQ ID NO: 1715570 - DNA, 25 bp, Homo sapien
gattattaattgtcaacccaaacac

SEQ ID NO: 1715571 - DNA, 25 bp, Homo sapien
tattaattgtcaacccaaacacatc

SEQ ID NO: 1715572 - DNA, 25 bp, Homo sapien
ggattattaattgtcaacccaaaca

SEQ ID NO: 1715573 - DNA, 25 bp, Homo sapien
tctgcctccatattgtacttctccg

SEQ ID NO: 1715574 - DNA, 25 bp, Homo sapien
taagtagacgtttgtcaaagtcatc

SEQ ID NO: 1715575 - DNA, 25 bp, Homo sapien
taccgaaccgtattccatgatacac

SEQ ID NO: 1715576 - DNA, 25 bp, Homo sapien
tctggcaaagcaattaagtagacgt

SEQ ID NO: 1715577 - DNA, 25 bp, Homo sapien
tgcgtgtgtgtaagcgcacacatgc

SEQ ID NO: 1715578 - DNA, 25 bp, Homo sapien
gcagcagctctgctgtatgcttgag

SEQ ID NO: 1715579 - DNA, 25 bp, Homo sapien
gtgtgtaagcgcacacatgcatttg

SEQ ID NO: 1715580 - DNA, 25 bp, Homo sapien
tttggcagacctattacaaacaaaa

SEQ ID NO: 1715581 - DNA, 25 bp, Homo sapien
acttcagggttatctagggatggca

SEQ ID NO: 1715582 - DNA, 25 bp, Homo sapien
actggtctaaggttttgcataaggg

SEQ ID NO: 1715583 - DNA, 25 bp, Homo sapien
gcagaatgacggttcaaacatcttc

SEQ ID NO: 1715584 - DNA, 25 bp, Homo sapien
gatatcagcattagggtgaagccca

SEQ ID NO: 1715585 - DNA, 25 bp, Homo sapien
tgcggtccattccaaaggattccag

SEQ ID NO: 1715586 - DNA, 25 bp, Homo sapien
tttcctgaatgtaaaccttgtgact

SEQ ID NO: 1715587 - DNA, 25 bp, Homo sapien
gctgcagaggacatgcggtccattc

SEQ ID NO: 1715588 - DNA, 25 bp, Homo sapien
tctgccagaggagtcttggtttctt

SEQ ID NO: 1715589 - DNA, 25 bp, Homo sapien
ggtacccgaggtgtcgattagtcat

SEQ ID NO: 1715590 - DNA, 25 bp, Homo sapien
gggtacccgaggtgtcgattagtca

SEQ ID NO: 1715591 - DNA, 25 bp, Homo sapien
cagggtacccgaggtgtcgattagt

SEQ ID NO: 1715592 - DNA, 25 bp, Homo sapien
cacagggtacccgaggtgtcgatta

SEQ ID NO: 1715593 - DNA, 25 bp, Homo sapien
ggaaccagaaatgggctaagacatg

SEQ ID NO: 1715594 - DNA, 25 bp, Homo sapien
atagactggtcataagagtctatca

SEQ ID NO: 1715595 - DNA, 25 bp, Homo sapien
tatagactggtcataagagtctatc

SEQ ID NO: 1715596 - DNA, 25 bp, Homo sapien
taatcaggagggagtttactcagca

SEQ ID NO: 1715597 - DNA, 25 bp, Homo sapien
ctcatgaggaatgtaatcaggaggg

SEQ ID NO: 1715598 - DNA, 25 bp, Homo sapien
ccacctccactctctttgggttgaa

SEQ ID NO: 1715599 - DNA, 25 bp, Homo sapien
ataaacaatagcctcccgggtctct

SEQ ID NO: 1715600 - DNA, 25 bp, Homo sapien
gctactgcggagtattgaaatgact

SEQ ID NO: 1715601 - DNA, 25 bp, Homo sapien
cataatgattgttccttcaatggcc

SEQ ID NO: 1715602 - DNA, 25 bp, Homo sapien
ttttagatcactcaggctactgcgg

SEQ ID NO: 1715603 - DNA, 25 bp, Homo sapien
ccatctttatcaaacgagatttcac

SEQ ID NO: 1715604 - DNA, 25 bp, Homo sapien
tgcctactgatgtaataacagctca

SEQ ID NO: 1715605 - DNA, 25 bp, Homo sapien
cagaagcccagtgtggacgaatccc

SEQ ID NO: 1715606 - DNA, 25 bp, Homo sapien
caaatatccacgtagaaaactgagc

SEQ ID NO: 1715607 - DNA, 25 bp, Homo sapien
tacgagcatcatacatgttgtccag

SEQ ID NO: 1715608 - DNA, 25 bp, Homo sapien
tccagagctgaggtatacgagcatc

SEQ ID NO: 1715609 - DNA, 25 bp, Homo sapien
aagccattaactttctcagtaaaca

SEQ ID NO: 1715610 - DNA, 25 bp, Homo sapien
atgacatcaagccattaactttctc

SEQ ID NO: 1715611 - DNA, 25 bp, Homo sapien
atcaagccattaactttctcagtaa

SEQ ID NO: 1715612 - DNA, 25 bp, Homo sapien
ctatgacatcaagccattaactttc

SEQ ID NO: 1715613 - DNA, 25 bp, Homo sapien
cttgaggtagcacggacctcaaagt

SEQ ID NO: 1715614 - DNA, 25 bp, Homo sapien
ttgtccttgaggtagcacggacctc

SEQ ID NO: 1715615 - DNA, 25 bp, Homo sapien
gaggtagcacggacctcaaagtcac

SEQ ID NO: 1715616 - DNA, 25 bp, Homo sapien
gtccttgaggtagcacggacctcaa

SEQ ID NO: 1715617 - DNA, 25 bp, Homo sapien
gaccaggggcaagcaaggcatgtca

SEQ ID NO: 1715618 - DNA, 25 bp, Homo sapien
accaggggcaagcaaggcatgtcac

SEQ ID NO: 1715619 - DNA, 25 bp, Homo sapien
ggtctgtctcagaacttcattgtgg

SEQ ID NO: 1715620 - DNA, 25 bp, Homo sapien
tgtgggcacgggtcacttcttgcct

SEQ ID NO: 1715621 - DNA, 25 bp, Homo sapien
cagaacttcattgtggatggtcaca

SEQ ID NO: 1715622 - DNA, 25 bp, Homo sapien
cagtgcccagcctttgtgggcacgg

SEQ ID NO: 1715623 - DNA, 25 bp, Homo sapien
gctggagtgctcaggagcctctgta

SEQ ID NO: 1715624 - DNA, 25 bp, Homo sapien
ggatggccttgatgggccttgatgg

SEQ ID NO: 1715625 - DNA, 25 bp, Homo sapien
ccttgatgggccttgatgggcttgc

SEQ ID NO: 1715626 - DNA, 25 bp, Homo sapien
tgttactggtggtgcccggtgaact

SEQ ID NO: 1715627 - DNA, 25 bp, Homo sapien
ctctatagggaggtgaaagtctctg

SEQ ID NO: 1715628 - DNA, 25 bp, Homo sapien
caggatctagagctgctgtcaggtg

SEQ ID NO: 1715629 - DNA, 25 bp, Homo sapien
ccggccaaccaacctgtgtctcaac

SEQ ID NO: 1715630 - DNA, 25 bp, Homo sapien
agaggtctggtttgagttggtggaa

SEQ ID NO: 1715631 - DNA, 25 bp, Homo sapien
agggagaaagcaccaccgggtacat

SEQ ID NO: 1715632 - DNA, 25 bp, Homo sapien
gcaccaccgggtacattgcattcgt

SEQ ID NO: 1715633 - DNA, 25 bp, Homo sapien
cctgcagcctgtgttgaggctatga

SEQ ID NO: 1715634 - DNA, 25 bp, Homo sapien
cattgcattcgtgaaatactgagcc

SEQ ID NO: 1715635 - DNA, 25 bp, Homo sapien
gtaaataggacacacatacagcttg

SEQ ID NO: 1715636 - DNA, 25 bp, Homo sapien
gcaaagatgtggagcacgggtaact

SEQ ID NO: 1715637 - DNA, 25 bp, Homo sapien
tgatgtcacacaaaagggccactcc

SEQ ID NO: 1715638 - DNA, 25 bp, Homo sapien
gtaactgcgtgaagagtaccttggg

SEQ ID NO: 1715639 - DNA, 25 bp, Homo sapien
cacatcactgagtccctcaatagca

SEQ ID NO: 1715640 - DNA, 25 bp, Homo sapien
caatagcacaggctgtctatgtggg

SEQ ID NO: 1715641 - DNA, 25 bp, Homo sapien
tctatgtgggttctggtgccctgag

SEQ ID NO: 1715642 - DNA, 25 bp, Homo sapien
aatgtagaaagagtaattaaggaat

SEQ ID NO: 1715643 - DNA, 25 bp, Homo sapien
gcttccaaagtgttctaacatccaa

SEQ ID NO: 1715644 - DNA, 25 bp, Homo sapien
gtaattatagtgaaatatgatttcc

SEQ ID NO: 1715645 - DNA, 25 bp, Homo sapien
actaggctctttttaggatgtcaca

SEQ ID NO: 1715646 - DNA, 25 bp, Homo sapien
tctaacatccaaacagggttttatc

SEQ ID NO: 1715647 - DNA, 25 bp, Homo sapien
gaagctcatgcatttagctgtgggc

SEQ ID NO: 1715648 - DNA, 25 bp, Homo sapien
gagagggaaacaaggcaacttgaaa

SEQ ID NO: 1715649 - DNA, 25 bp, Homo sapien
tgggcaggcacaaggattctagatg

SEQ ID NO: 1715650 - DNA, 25 bp, Homo sapien
tcagcatctctgatcaaggtggcag

SEQ ID NO: 1715651 - DNA, 25 bp, Homo sapien
gccagaaacgcccacggatttgtca

SEQ ID NO: 1715652 - DNA, 25 bp, Homo sapien
ttccagtgccagaaacgcccacgga

SEQ ID NO: 1715653 - DNA, 25 bp, Homo sapien
gggacagagccctcgcattcatagc

SEQ ID NO: 1715654 - DNA, 25 bp, Homo sapien
cacggatttgtcatcttggagatag

SEQ ID NO: 1715655 - DNA, 25 bp, Homo sapien
gacacaggttgacatccccactcac

SEQ ID NO: 1715656 - DNA, 25 bp, Homo sapien
tctgtccatcaaggagtttgaggtc

SEQ ID NO: 1715657 - DNA, 25 bp, Homo sapien
gcccctcaaggacaaggttctgaag

SEQ ID NO: 1715658 - DNA, 25 bp, Homo sapien
ggttctgaagctcatgtttgtgcaa

SEQ ID NO: 1715659 - DNA, 25 bp, Homo sapien
gccggcggatcaggttcaaagtgat

SEQ ID NO: 1715660 - DNA, 25 bp, Homo sapien
tgggcggatgcagcacgctgttttt

SEQ ID NO: 1715661 - DNA, 25 bp, Homo sapien
ccagctcccaacagtcagctgtgga

SEQ ID NO: 1715662 - DNA, 25 bp, Homo sapien
caacctcttgagctacagtgattac

SEQ ID NO: 1715663 - DNA, 25 bp, Homo sapien
tacagtgattactgctctcgtgggc

SEQ ID NO: 1715664 - DNA, 25 bp, Homo sapien
tgccacctgcggaaccgcgtgcgga

SEQ ID NO: 1715665 - DNA, 25 bp, Homo sapien
gcggagactgatcccgggctggtgg

SEQ ID NO: 1715666 - DNA, 25 bp, Homo sapien
aggactgggccatcgctgccacctg

SEQ ID NO: 1715667 - DNA, 25 bp, Homo sapien
gaaccgcgtgcggagactgatcccg

SEQ ID NO: 1715668 - DNA, 25 bp, Homo sapien
ccgagcagcagcagcgcaaggcgca

SEQ ID NO: 1715669 - DNA, 25 bp, Homo sapien
gcagcagcgcaaggcgcagcgggcc

SEQ ID NO: 1715670 - DNA, 25 bp, Homo sapien
gagcagcagcagcgcaaggcgcagc

SEQ ID NO: 1715671 - DNA, 25 bp, Homo sapien
gcagcagcagcgcaaggcgcagcgg

SEQ ID NO: 1715672 - DNA, 25 bp, Homo sapien
tactccccccgaggctttcggatgc

SEQ ID NO: 1715673 - DNA, 25 bp, Homo sapien
gcggtctcggagtttcgttcaagtc

SEQ ID NO: 1715674 - DNA, 25 bp, Homo sapien
ctccaccaggacactgcgcctgcag

SEQ ID NO: 1715675 - DNA, 25 bp, Homo sapien
cccgccagcggtctcggagtttcgt

SEQ ID NO: 1715676 - DNA, 25 bp, Homo sapien
aatcctctgtagtccaagccctcac

SEQ ID NO: 1715677 - DNA, 25 bp, Homo sapien
gagggagtccgggaggatgccgggc

SEQ ID NO: 1715678 - DNA, 25 bp, Homo sapien
gggtctgggtcagactgtggggcag

SEQ ID NO: 1715679 - DNA, 25 bp, Homo sapien
gggtctttgagcaggtggattgtct

SEQ ID NO: 1715680 - DNA, 25 bp, Homo sapien
cagggccgctgacacggtttagaag

SEQ ID NO: 1715681 - DNA, 25 bp, Homo sapien
cttgcgtgtcccagtatgccttctc

SEQ ID NO: 1715682 - DNA, 25 bp, Homo sapien
cagtgcaggatgagaatgggaggtc

SEQ ID NO: 1715683 - DNA, 25 bp, Homo sapien
ccaggtgttcttgcgtgtcccagta

SEQ ID NO: 1715684 - DNA, 25 bp, Homo sapien
ggagcccaggtgttcttgcgtgtcc

SEQ ID NO: 1715685 - DNA, 25 bp, Homo sapien
tgtgggttctgggtagcgggaagga

SEQ ID NO: 1715686 - DNA, 25 bp, Homo sapien
caacataagtccctgctgcaagcct

SEQ ID NO: 1715687 - DNA, 25 bp, Homo sapien
gaaggatgcaatccagatgtccctg

SEQ ID NO: 1715688 - DNA, 25 bp, Homo sapien
cctcccacaacataagtccctgctg

SEQ ID NO: 1715689 - DNA, 25 bp, Homo sapien
ctccgggtaaagggctcttccatgc

SEQ ID NO: 1715690 - DNA, 25 bp, Homo sapien
tccgggtaaagggctcttccatgct

SEQ ID NO: 1715691 - DNA, 25 bp, Homo sapien
tctccgggtaaagggctcttccatg

SEQ ID NO: 1715692 - DNA, 25 bp, Homo sapien
tattctcgccatttctgcaccgtct

SEQ ID NO: 1715693 - DNA, 25 bp, Homo sapien
caggaggtggatcctcagtcaggga

SEQ ID NO: 1715694 - DNA, 25 bp, Homo sapien
gcaccgtctcccagagggacacagt

SEQ ID NO: 1715695 - DNA, 25 bp, Homo sapien
agcgctggcactggcgtcggtattc

SEQ ID NO: 1715696 - DNA, 25 bp, Homo sapien
attcacgaacgagcctggctcccca

SEQ ID NO: 1715697 - DNA, 25 bp, Homo sapien
tcgaaggtccggttgcagaacaagt

SEQ ID NO: 1715698 - DNA, 25 bp, Homo sapien
tggccagcaggcgtattcatcgaag

SEQ ID NO: 1715699 - DNA, 25 bp, Homo sapien
tccccatctggccagcaggcgtatt

SEQ ID NO: 1715700 - DNA, 25 bp, Homo sapien
agggcaggtaccaggggcagctgac

SEQ ID NO: 1715701 - DNA, 25 bp, Homo sapien
tggcccagggcaggtaccaggggca

SEQ ID NO: 1715702 - DNA, 25 bp, Homo sapien
gcccagggcaggtaccaggggcagc

SEQ ID NO: 1715703 - DNA, 25 bp, Homo sapien
ccagggcaggtaccaggggcagctg

SEQ ID NO: 1715704 - DNA, 25 bp, Homo sapien
ggggagggggttcaccactgctggc

SEQ ID NO: 1715705 - DNA, 25 bp, Homo sapien
ccagggcaggtaccaggtcggggag

SEQ ID NO: 1715706 - DNA, 25 bp, Homo sapien
gagggggttcaccactgctggccca

SEQ ID NO: 1715707 - DNA, 25 bp, Homo sapien
tcggggagggggttcaccactgctg

SEQ ID NO: 1715708 - DNA, 25 bp, Homo sapien
gggggtcagggaagcctccgctgcc

SEQ ID NO: 1715709 - DNA, 25 bp, Homo sapien
gggtcagggaagcctccgctgccaa

SEQ ID NO: 1715710 - DNA, 25 bp, Homo sapien
ggtcagggaagcctccgctgccaac

SEQ ID NO: 1715711 - DNA, 25 bp, Homo sapien
gtgggggtcagggaagcctccgctg

SEQ ID NO: 1715712 - DNA, 25 bp, Homo sapien
caaaagcagtgatggggacctgagc

SEQ ID NO: 1715713 - DNA, 25 bp, Homo sapien
actccatgcggaatgagatggtgtc

SEQ ID NO: 1715714 - DNA, 25 bp, Homo sapien
ccccaaaagcagtgatggggacctg

SEQ ID NO: 1715715 - DNA, 25 bp, Homo sapien
tgagctgactccatgcggaatgaga

SEQ ID NO: 1715716 - DNA, 25 bp, Homo sapien
tctcttatctgctgcatggatgcct

SEQ ID NO: 1715717 - DNA, 25 bp, Homo sapien
tgattttagcaacgcgaagggcccc

SEQ ID NO: 1715718 - DNA, 25 bp, Homo sapien
ccaagtcttctgacgtgaggcaaaa

SEQ ID NO: 1715719 - DNA, 25 bp, Homo sapien
tcaagcccacaaatgcctctcttat

SEQ ID NO: 1715720 - DNA, 25 bp, Homo sapien
gggcaagtcagcttgcagcatgact

SEQ ID NO: 1715721 - DNA, 25 bp, Homo sapien
cagtggggcaagtcagcttgcagca

SEQ ID NO: 1715722 - DNA, 25 bp, Homo sapien
gcaagtcagcttgcagcatgactcc

SEQ ID NO: 1715723 - DNA, 25 bp, Homo sapien
ggtaacacagtggggcaagtcagct

SEQ ID NO: 1715724 - DNA, 25 bp, Homo sapien
cagctcctttcccaaacaaaccctg

SEQ ID NO: 1715725 - DNA, 25 bp, Homo sapien
caggtcccccttcaagacacagaaa

SEQ ID NO: 1715726 - DNA, 25 bp, Homo sapien
gaaccaggtcccccttcaagacaca

SEQ ID NO: 1715727 - DNA, 25 bp, Homo sapien
tcccccttcaagacacagaaattat

SEQ ID NO: 1715728 - DNA, 25 bp, Homo sapien
caccagggccaatgaacttgggaca

SEQ ID NO: 1715729 - DNA, 25 bp, Homo sapien
gtttgacaccagggccaatgaactt

SEQ ID NO: 1715730 - DNA, 25 bp, Homo sapien
tctgtaggggaacttaagtttgaca

SEQ ID NO: 1715731 - DNA, 25 bp, Homo sapien
cttgggacaaaagggcacaatgaga

SEQ ID NO: 1715732 - DNA, 25 bp, Homo sapien
ttggactcctcgcactccgacaagt

SEQ ID NO: 1715733 - DNA, 25 bp, Homo sapien
tctttcccctcgcttggactcctcg

SEQ ID NO: 1715734 - DNA, 25 bp, Homo sapien
aaccggtacacgtggccctgcggca

SEQ ID NO: 1715735 - DNA, 25 bp, Homo sapien
ttcagctgtgcagaaccggtacacg

SEQ ID NO: 1715736 - DNA, 25 bp, Homo sapien
acctacggcgatggttcttggatat

SEQ ID NO: 1715737 - DNA, 25 bp, Homo sapien
gtaacctacggcgatggttcttgga

SEQ ID NO: 1715738 - DNA, 25 bp, Homo sapien
ccgtaacctacggcgatggttcttg

SEQ ID NO: 1715739 - DNA, 25 bp, Homo sapien
agaataaccgtaacctacggcgatg

SEQ ID NO: 1715740 - DNA, 25 bp, Homo sapien
tgaagccgaggaggatcgcagaggc

SEQ ID NO: 1715741 - DNA, 25 bp, Homo sapien
aggcgataaccagagcagagaagga

SEQ ID NO: 1715742 - DNA, 25 bp, Homo sapien
gatcgcagaggcgataaccagagca

SEQ ID NO: 1715743 - DNA, 25 bp, Homo sapien
aggagagtgcgtagcccaccgtgta

SEQ ID NO: 1715744 - DNA, 25 bp, Homo sapien
ggacaagaacttactagacatggaa

SEQ ID NO: 1715745 - DNA, 25 bp, Homo sapien
taccttataagagacctgagggtgt

SEQ ID NO: 1715746 - DNA, 25 bp, Homo sapien
aaaagaggcacattcagggcttacc

SEQ ID NO: 1715747 - DNA, 25 bp, Homo sapien
ttctatagctactcacaaatgtggt

SEQ ID NO: 1715748 - DNA, 25 bp, Homo sapien
aggatgaaggatgcaaacaggttca

SEQ ID NO: 1715749 - DNA, 25 bp, Homo sapien
gctgggcggctgtgctatacatcca

SEQ ID NO: 1715750 - DNA, 25 bp, Homo sapien
tgatgaagacggacaatgctcgcag

SEQ ID NO: 1715751 - DNA, 25 bp, Homo sapien
tcagggctgcgtccttgatgaagac

SEQ ID NO: 1715752 - DNA, 25 bp, Homo sapien
gccagtagtaattggccgccacaca

SEQ ID NO: 1715753 - DNA, 25 bp, Homo sapien
tgtgtacaggtacacgccctccacc

SEQ ID NO: 1715754 - DNA, 25 bp, Homo sapien
tactgcatgagcagaaacaccaggc

SEQ ID NO: 1715755 - DNA, 25 bp, Homo sapien
tagagcctgaagatccattgctcag

SEQ ID NO: 1715756 - DNA, 25 bp, Homo sapien
gaccataaccccctacggcatctta

SEQ ID NO: 1715757 - DNA, 25 bp, Homo sapien
ggccacatgcggtggaggcttccat

SEQ ID NO: 1715758 - DNA, 25 bp, Homo sapien
agggtggtgtttggccacatgcggt

SEQ ID NO: 1715759 - DNA, 25 bp, Homo sapien
cctacggcatcttaacagcaccggg

SEQ ID NO: 1715760 - DNA, 25 bp, Homo sapien
gcctgctcaggggtgctgcagggga

SEQ ID NO: 1715761 - DNA, 25 bp, Homo sapien
tgcagaggcctgagcctgctcaggg

SEQ ID NO: 1715762 - DNA, 25 bp, Homo sapien
gagcctgctcaggggtgctgcaggg

SEQ ID NO: 1715763 - DNA, 25 bp, Homo sapien
ctgtgcagaggcctgagcctgctca

SEQ ID NO: 1715764 - DNA, 25 bp, Homo sapien
agctgccctcgatggcctccctcct

SEQ ID NO: 1715765 - DNA, 25 bp, Homo sapien
caggaggaagaagcctcggggagaa

SEQ ID NO: 1715766 - DNA, 25 bp, Homo sapien
cctcctgctctagcaggaggaagaa

SEQ ID NO: 1715767 - DNA, 25 bp, Homo sapien
ctgaagacagccttccctgagctgc

SEQ ID NO: 1715768 - DNA, 25 bp, Homo sapien
attgttcctgccctcgggtcgccat

SEQ ID NO: 1715769 - DNA, 25 bp, Homo sapien
tttcctagaatggacagacaccgtc

SEQ ID NO: 1715770 - DNA, 25 bp, Homo sapien
ctgatgctatttcctagaatggaca

SEQ ID NO: 1715771 - DNA, 25 bp, Homo sapien
tggtgacaggcactaacagcgctga

SEQ ID NO: 1715772 - DNA, 25 bp, Homo sapien
catagaggtacttgacaatgcccca

SEQ ID NO: 1715773 - DNA, 25 bp, Homo sapien
tagaggtacttgacaatgccccagg

SEQ ID NO: 1715774 - DNA, 25 bp, Homo sapien
agaggtacttgacaatgccccaggg

SEQ ID NO: 1715775 - DNA, 25 bp, Homo sapien
ggtacttgacaatgccccaggggac

SEQ ID NO: 1715776 - DNA, 25 bp, Homo sapien
tgggcagccggataatgagccagta

SEQ ID NO: 1715777 - DNA, 25 bp, Homo sapien
agagaatgggcagccggataatgag

SEQ ID NO: 1715778 - DNA, 25 bp, Homo sapien
tagttcatgttggagttcctggtcc

SEQ ID NO: 1715779 - DNA, 25 bp, Homo sapien
cggataatgagccagtagttcatgt

SEQ ID NO: 1715780 - DNA, 25 bp, Homo sapien
cagatgacccgaacaaagatgagga

SEQ ID NO: 1715781 - DNA, 25 bp, Homo sapien
ttcagtttggataccacgatgcaga

SEQ ID NO: 1715782 - DNA, 25 bp, Homo sapien
tgagattggccttcagtttggatac

SEQ ID NO: 1715783 - DNA, 25 bp, Homo sapien
accacgatgcagatgacccgaacaa

SEQ ID NO: 1715784 - DNA, 25 bp, Homo sapien
ccgggcgtgctcgtccatcacaaag

SEQ ID NO: 1715785 - DNA, 25 bp, Homo sapien
gctcgtccatcacaaaggcaaagat

SEQ ID NO: 1715786 - DNA, 25 bp, Homo sapien
caaagatgacctcatgagtccccag

SEQ ID NO: 1715787 - DNA, 25 bp, Homo sapien
tctgtaaacagcttgatgaagcgca

SEQ ID NO: 1715788 - DNA, 25 bp, Homo sapien
ctcattgttgacaaagcagtataat

SEQ ID NO: 1715789 - DNA, 25 bp, Homo sapien
cattgttgacaaagcagtataatat

SEQ ID NO: 1715790 - DNA, 25 bp, Homo sapien
ttgttgacaaagcagtataatatgg

SEQ ID NO: 1715791 - DNA, 25 bp, Homo sapien
tcattgttgacaaagcagtataata

SEQ ID NO: 1715792 - DNA, 25 bp, Homo sapien
tcttttgtggcccagtgacaatgat

SEQ ID NO: 1715793 - DNA, 25 bp, Homo sapien
gacagaggccttagccccagagcca

SEQ ID NO: 1715794 - DNA, 25 bp, Homo sapien
gtcttttgtggcccagtgacaatga

SEQ ID NO: 1715795 - DNA, 25 bp, Homo sapien
ccaggcttgtttcatagcccttccg

SEQ ID NO: 1715796 - DNA, 25 bp, Homo sapien
aggaggccaggcttgtttcatagcc

SEQ ID NO: 1715797 - DNA, 25 bp, Homo sapien
gaggccaggcttgtttcatagccct

SEQ ID NO: 1715798 - DNA, 25 bp, Homo sapien
ccaggaggccaggcttgtttcatag

SEQ ID NO: 1715799 - DNA, 25 bp, Homo sapien
cctgcccggctgagtctttgtgaag

SEQ ID NO: 1715800 - DNA, 25 bp, Homo sapien
gccagtgtcccatgcagcgtcatga

SEQ ID NO: 1715801 - DNA, 25 bp, Homo sapien
cactgagtagagttgagatggccca

SEQ ID NO: 1715802 - DNA, 25 bp, Homo sapien
tttgtgaagggagcgcatgctgaca

SEQ ID NO: 1715803 - DNA, 25 bp, Homo sapien
tcagcttggatgcttgagaaggggg

SEQ ID NO: 1715804 - DNA, 25 bp, Homo sapien
ttggatgcttgagaagggggacggc

SEQ ID NO: 1715805 - DNA, 25 bp, Homo sapien
tacagcagacccttctaaactccct

SEQ ID NO: 1715806 - DNA, 25 bp, Homo sapien
cagccttcctggtgtctacagcaga

SEQ ID NO: 1715807 - DNA, 25 bp, Homo sapien
tgctgcccgccgtggctccactgct

SEQ ID NO: 1715808 - DNA, 25 bp, Homo sapien
atgtgcaagtgctcaagccgccagc

SEQ ID NO: 1715809 - DNA, 25 bp, Homo sapien
ctggtgggacacttgaggggcttca

SEQ ID NO: 1715810 - DNA, 25 bp, Homo sapien
cagctcttccgaaattccagctgga

SEQ ID NO: 1715811 - DNA, 25 bp, Homo sapien
ggccacccggcctgcagcaaggacc

SEQ ID NO: 1715812 - DNA, 25 bp, Homo sapien
tcccttgtccctgggagtgtctctc

SEQ ID NO: 1715813 - DNA, 25 bp, Homo sapien
tgtgtccatggtcccaggaggcact

SEQ ID NO: 1715814 - DNA, 25 bp, Homo sapien
caggaggcactgcccatttacctgt

SEQ ID NO: 1715815 - DNA, 25 bp, Homo sapien
gaaaatgtgtccatggtcccaggag

SEQ ID NO: 1715816 - DNA, 25 bp, Homo sapien
gagaaaatgtgtccatggtcccagg

SEQ ID NO: 1715817 - DNA, 25 bp, Homo sapien
gaagtatatacaagctcccaagtgg

SEQ ID NO: 1715818 - DNA, 25 bp, Homo sapien
cactgtgatcaaattaggaggctgc

SEQ ID NO: 1715819 - DNA, 25 bp, Homo sapien
ggtgaccccaagtgatgcaagcaga

SEQ ID NO: 1715820 - DNA, 25 bp, Homo sapien
cgtgtccctagatgaaccccagagg

SEQ ID NO: 1715821 - DNA, 25 bp, Homo sapien
gaaagcttggaaagagtgcagtgcc

SEQ ID NO: 1715822 - DNA, 25 bp, Homo sapien
tctcagcaagttccaggcgtatggc

SEQ ID NO: 1715823 - DNA, 25 bp, Homo sapien
caatagttcccagacctgttggagc

SEQ ID NO: 1715824 - DNA, 25 bp, Homo sapien
acagaggcagccgagagttctcagc

SEQ ID NO: 1715825 - DNA, 25 bp, Homo sapien
tgagcacgtcgcaggcattagcaaa

SEQ ID NO: 1715826 - DNA, 25 bp, Homo sapien
tatgacctgcacagcgggtgtgatg

SEQ ID NO: 1715827 - DNA, 25 bp, Homo sapien
gagccaaaagcagggtaagcactgt

SEQ ID NO: 1715828 - DNA, 25 bp, Homo sapien
caaccctgatgagagtggccaagac

SEQ ID NO: 1715829 - DNA, 25 bp, Homo sapien
ccccaagagcactgaagatagaaat

SEQ ID NO: 1715830 - DNA, 25 bp, Homo sapien
cacattcgctacctatagaagctgg

SEQ ID NO: 1715831 - DNA, 25 bp, Homo sapien
atcaaatccctccagaaccgatggg

SEQ ID NO: 1715832 - DNA, 25 bp, Homo sapien
taaacactcatgaggagcaaacatc

SEQ ID NO: 1715833 - DNA, 25 bp, Homo sapien
gggacactcagttcgactccttcct

SEQ ID NO: 1715834 - DNA, 25 bp, Homo sapien
tcagttcgactccttccttgtagtc

SEQ ID NO: 1715835 - DNA, 25 bp, Homo sapien
cttgtagtcacacaatattggatct

SEQ ID NO: 1715836 - DNA, 25 bp, Homo sapien
cacaatattggatctctgttcccat

SEQ ID NO: 1715837 - DNA, 25 bp, Homo sapien
cacacatatgagctcctgcatagga

SEQ ID NO: 1715838 - DNA, 25 bp, Homo sapien
gagctcctgcataggatgagcgtcc

SEQ ID NO: 1715839 - DNA, 25 bp, Homo sapien
gggacacacacatatgagctcctgc

SEQ ID NO: 1715840 - DNA, 25 bp, Homo sapien
cataggatgagcgtccctaagagcc

SEQ ID NO: 1715841 - DNA, 25 bp, Homo sapien
ttgttctattggatgtacgtcggga

SEQ ID NO: 1715842 - DNA, 25 bp, Homo sapien
tattggatgtacgtcgggacacgag

SEQ ID NO: 1715843 - DNA, 25 bp, Homo sapien
ttgtggaactggaatttggcctggc

SEQ ID NO: 1715844 - DNA, 25 bp, Homo sapien
ctgggactgtttgtggaactggaat

SEQ ID NO: 1715845 - DNA, 25 bp, Homo sapien
agccattcctctgccgtcgtgctgg

SEQ ID NO: 1715846 - DNA, 25 bp, Homo sapien
attcctctgccgtcgtgctgggacc

SEQ ID NO: 1715847 - DNA, 25 bp, Homo sapien
tgggaccagtctttcctgaccaata

SEQ ID NO: 1715848 - DNA, 25 bp, Homo sapien
tctgccgtcgtgctgggaccagtct

SEQ ID NO: 1715849 - DNA, 25 bp, Homo sapien
agggctgacagttcatgaacggtgc

SEQ ID NO: 1715850 - DNA, 25 bp, Homo sapien
gctgacagttcatgaacggtgcttg

SEQ ID NO: 1715851 - DNA, 25 bp, Homo sapien
ctgacagttcatgaacggtgcttgc

SEQ ID NO: 1715852 - DNA, 25 bp, Homo sapien
tctggcactttcagttcacctggag

SEQ ID NO: 1715853 - DNA, 25 bp, Homo sapien
tgtttcatttgtcaccaatgtcagt

SEQ ID NO: 1715854 - DNA, 25 bp, Homo sapien
gccaaatgtaaagcagtcgtgttca

SEQ ID NO: 1715855 - DNA, 25 bp, Homo sapien
aggccaaatgtaaagcagtcgtgtt

SEQ ID NO: 1715856 - DNA, 25 bp, Homo sapien
gatgacacaaatctcttcttggcaa

SEQ ID NO: 1715857 - DNA, 25 bp, Homo sapien
caatgtacagccttcatcaaaggca

SEQ ID NO: 1715858 - DNA, 25 bp, Homo sapien
ctagcagaatgatgacacaaatctc

SEQ ID NO: 1715859 - DNA, 25 bp, Homo sapien
aatgtacagccttcatcaaaggcat

SEQ ID NO: 1715860 - DNA, 25 bp, Homo sapien
tttctgccagtagtgtattctcatt

SEQ ID NO: 1715861 - DNA, 25 bp, Homo sapien
catccataagatctgggttggtgcc

SEQ ID NO: 1715862 - DNA, 25 bp, Homo sapien
gcattgttgctatagacatccataa

SEQ ID NO: 1715863 - DNA, 25 bp, Homo sapien
tcagtattcacatggtgtgagggca

SEQ ID NO: 1715864 - DNA, 25 bp, Homo sapien
taggccatgagtcaacacacagttt

SEQ ID NO: 1715865 - DNA, 25 bp, Homo sapien
tgtgagtgcttgtcagaccaccaga

SEQ ID NO: 1715866 - DNA, 25 bp, Homo sapien
gaaacactctcagggatacactgct

SEQ ID NO: 1715867 - DNA, 25 bp, Homo sapien
taatgtacaacaggcatgagagctg

SEQ ID NO: 1715868 - DNA, 25 bp, Homo sapien
tgatgtcacttgtacttcttgttct

SEQ ID NO: 1715869 - DNA, 25 bp, Homo sapien
cctctgatgtcacttgtacttcttg

SEQ ID NO: 1715870 - DNA, 25 bp, Homo sapien
tctggacttccattaggatacgaga

SEQ ID NO: 1715871 - DNA, 25 bp, Homo sapien
cagagggccgagttaagtcatcagg

SEQ ID NO: 1715872 - DNA, 25 bp, Homo sapien
ccttcctaggaaatcgctgatggta

SEQ ID NO: 1715873 - DNA, 25 bp, Homo sapien
tagtgatccgatagtcagtttaagc

SEQ ID NO: 1715874 - DNA, 25 bp, Homo sapien
cagttttatagtctcttgaaggtca

SEQ ID NO: 1715875 - DNA, 25 bp, Homo sapien
tcagttttatagtctcttgaaggtc

SEQ ID NO: 1715876 - DNA, 25 bp, Homo sapien
tccattcagttttatagtctcttga

SEQ ID NO: 1715877 - DNA, 25 bp, Homo sapien
ttttatagtctcttgaaggtcatca

SEQ ID NO: 1715878 - DNA, 25 bp, Homo sapien
cagttttgaggtcgttaagctgttg

SEQ ID NO: 1715879 - DNA, 25 bp, Homo sapien
ttctcagttttgaggtcgttaagct

SEQ ID NO: 1715880 - DNA, 25 bp, Homo sapien
tttgaggtcgttaagctgttgacca

SEQ ID NO: 1715881 - DNA, 25 bp, Homo sapien
tgaggtcgttaagctgttgaccata

SEQ ID NO: 1715882 - DNA, 25 bp, Homo sapien
atagcagcagccagtctagcatgga

SEQ ID NO: 1715883 - DNA, 25 bp, Homo sapien
gcagcagccagtctagcatggaatg

SEQ ID NO: 1715884 - DNA, 25 bp, Homo sapien
agcagccagtctagcatggaatgac

SEQ ID NO: 1715885 - DNA, 25 bp, Homo sapien
tagcagcagccagtctagcatggaa

SEQ ID NO: 1715886 - DNA, 25 bp, Homo sapien
tgtaaagaaacgtcttgtgctctct

SEQ ID NO: 1715887 - DNA, 25 bp, Homo sapien
tcttgtaaagaaacgtcttgtgctc

SEQ ID NO: 1715888 - DNA, 25 bp, Homo sapien
cttgtaaagaaacgtcttgtgctct

SEQ ID NO: 1715889 - DNA, 25 bp, Homo sapien
gttttcacactttgatcacactcac

SEQ ID NO: 1715890 - DNA, 25 bp, Homo sapien
gatattctctcctctacgtagtccc

SEQ ID NO: 1715891 - DNA, 25 bp, Homo sapien
ctttttagggtattgaattcgagct

SEQ ID NO: 1715892 - DNA, 25 bp, Homo sapien
gcttcggaaagttgctcagttaaaa

SEQ ID NO: 1715893 - DNA, 25 bp, Homo sapien
catctagttgttgaagcaacagatt

SEQ ID NO: 1715894 - DNA, 25 bp, Homo sapien
ctccttctgctttctctttttcata

SEQ ID NO: 1715895 - DNA, 25 bp, Homo sapien
tctccttctgctttctctttttcat

SEQ ID NO: 1715896 - DNA, 25 bp, Homo sapien
ttctccttctgctttctctttttca

SEQ ID NO: 1715897 - DNA, 25 bp, Homo sapien
tgaaaatatttatcttttttgatac

SEQ ID NO: 1715898 - DNA, 25 bp, Homo sapien
gcggctgctaacttgttctctagat

SEQ ID NO: 1715899 - DNA, 25 bp, Homo sapien
tcgccctcccagattttcttgtctg

SEQ ID NO: 1715900 - DNA, 25 bp, Homo sapien
tctgcctggcaggtaacttcacatt

SEQ ID NO: 1715901 - DNA, 25 bp, Homo sapien
cgtctagaaagattcacttggtagt

SEQ ID NO: 1715902 - DNA, 25 bp, Homo sapien
agcagctagagcaaagggtggggcc

SEQ ID NO: 1715903 - DNA, 25 bp, Homo sapien
cagagaacttgagcgaagctcaagc

SEQ ID NO: 1715904 - DNA, 25 bp, Homo sapien
cttctcaactcaaggggtgggcagg

SEQ ID NO: 1715905 - DNA, 25 bp, Homo sapien
acttgagcgaagctcaagccttctc

SEQ ID NO: 1715906 - DNA, 25 bp, Homo sapien
aaatgtagagcctgagcgtgggcac

SEQ ID NO: 1715907 - DNA, 25 bp, Homo sapien
tgcaactcaattgggcctttttcgg

SEQ ID NO: 1715908 - DNA, 25 bp, Homo sapien
ccatgtccccaagcagaggtggaga

SEQ ID NO: 1715909 - DNA, 25 bp, Homo sapien
aggattgggagatctagtgtctgcc

SEQ ID NO: 1715910 - DNA, 25 bp, Homo sapien
gacctcatccaaggccatgatgtca

SEQ ID NO: 1715911 - DNA, 25 bp, Homo sapien
tgccagtctttcgaatcttgctagg

SEQ ID NO: 1715912 - DNA, 25 bp, Homo sapien
caggttctgacaccaaagtactgct

SEQ ID NO: 1715913 - DNA, 25 bp, Homo sapien
tagaggctgccgtatcctaaattgc

SEQ ID NO: 1715914 - DNA, 25 bp, Homo sapien
tagttagtggcctgaacccaggccc

SEQ ID NO: 1715915 - DNA, 25 bp, Homo sapien
gaaggagcagaagtatttgcagggt

SEQ ID NO: 1715916 - DNA, 25 bp, Homo sapien
ggagcagaagtatttgcagggtgtt

SEQ ID NO: 1715917 - DNA, 25 bp, Homo sapien
aaggagcagaagtatttgcagggtg

SEQ ID NO: 1715918 - DNA, 25 bp, Homo sapien
gggaaggagcagaagtatttgcagg

SEQ ID NO: 1715919 - DNA, 25 bp, Homo sapien
gagtctgtttatctccaggagcccc

SEQ ID NO: 1715920 - DNA, 25 bp, Homo sapien
cctgcctgagtctgtttatctccag

SEQ ID NO: 1715921 - DNA, 25 bp, Homo sapien
cttgttccatcaacttttcccgaat

SEQ ID NO: 1715922 - DNA, 25 bp, Homo sapien
tgttccatcaacttttcccgaattc

SEQ ID NO: 1715923 - DNA, 25 bp, Homo sapien
tgtactccggtttatgctgtgtgcc

SEQ ID NO: 1715924 - DNA, 25 bp, Homo sapien
gcagaaaactgattctaacctgtgt

SEQ ID NO: 1715925 - DNA, 25 bp, Homo sapien
cctcatctgaactactgtgtagcag

SEQ ID NO: 1715926 - DNA, 25 bp, Homo sapien
cctgtgttctacttttacctgtact

SEQ ID NO: 1715927 - DNA, 25 bp, Homo sapien
ccatttgtctgagtgcttctgtgct

SEQ ID NO: 1715928 - DNA, 25 bp, Homo sapien
agctgtgcagctggtagcaggaccc

SEQ ID NO: 1715929 - DNA, 25 bp, Homo sapien
caacggtgtagtctccagtcctgca

SEQ ID NO: 1715930 - DNA, 25 bp, Homo sapien
ctttgttcaacggtgtagtctccag

SEQ ID NO: 1715931 - DNA, 25 bp, Homo sapien
tcaggcttcgaggatctgtcgctca

SEQ ID NO: 1715932 - DNA, 25 bp, Homo sapien
gagagcgtgtctcatcatgggtcag

SEQ ID NO: 1715933 - DNA, 25 bp, Homo sapien
gggcgctgaaaggaagaccccttca

SEQ ID NO: 1715934 - DNA, 25 bp, Homo sapien
tcttcgaagtgctggaggagccaca

SEQ ID NO: 1715935 - DNA, 25 bp, Homo sapien
gatgcagtatcaggaaatctggggc

SEQ ID NO: 1715936 - DNA, 25 bp, Homo sapien
agggatgcagtatcaggaaatctgg

SEQ ID NO: 1715937 - DNA, 25 bp, Homo sapien
cagtatcaggaaatctggggctccc

SEQ ID NO: 1715938 - DNA, 25 bp, Homo sapien
tgcagtatcaggaaatctggggctc

SEQ ID NO: 1715939 - DNA, 25 bp, Homo sapien
acaaacagggtgaactccatccaga

SEQ ID NO: 1715940 - DNA, 25 bp, Homo sapien
acagggtgaactccatccagagagg

SEQ ID NO: 1715941 - DNA, 25 bp, Homo sapien
tccggaacccatgcttggtttccat

SEQ ID NO: 1715942 - DNA, 25 bp, Homo sapien
ggatccggaacccatgcttggtttc

SEQ ID NO: 1715943 - DNA, 25 bp, Homo sapien
agcgctgtgctataaccccaaacct

SEQ ID NO: 1715944 - DNA, 25 bp, Homo sapien
caatcagcgctgtgctataacccca

SEQ ID NO: 1715945 - DNA, 25 bp, Homo sapien
tccctcatcaatcagcgctgtgcta

SEQ ID NO: 1715946 - DNA, 25 bp, Homo sapien
catcaatcagcgctgtgctataacc

SEQ ID NO: 1715947 - DNA, 25 bp, Homo sapien
tcttcttatcctcaaagatcctgtc

SEQ ID NO: 1715948 - DNA, 25 bp, Homo sapien
gcaattgtccccactgaccatttct

SEQ ID NO: 1715949 - DNA, 25 bp, Homo sapien
aagtgcaattgtccccactgaccat

SEQ ID NO: 1715950 - DNA, 25 bp, Homo sapien
tgccaagtgcaattgtccccactga

SEQ ID NO: 1715951 - DNA, 25 bp, Homo sapien
gaagggtcaggagggcatatgctgg

SEQ ID NO: 1715952 - DNA, 25 bp, Homo sapien
atatttctcatgaagcacaagggag

SEQ ID NO: 1715953 - DNA, 25 bp, Homo sapien
tgtgatatttctcatgaagcacaag

SEQ ID NO: 1715954 - DNA, 25 bp, Homo sapien
ttctcatgaagcacaagggaggaag

SEQ ID NO: 1715955 - DNA, 25 bp, Homo sapien
gctctgaagagagccatagctgcta

SEQ ID NO: 1715956 - DNA, 25 bp, Homo sapien
agagccatagctgctatcatcttgg

SEQ ID NO: 1715957 - DNA, 25 bp, Homo sapien
tctgggatcaggtcacatccttgtc

SEQ ID NO: 1715958 - DNA, 25 bp, Homo sapien
gaagagagccatagctgctatcatc

SEQ ID NO: 1715959 - DNA, 25 bp, Homo sapien
ttagagggttagtccagttctctcc

SEQ ID NO: 1715960 - DNA, 25 bp, Homo sapien
tagagggttagtccagttctctcca

SEQ ID NO: 1715961 - DNA, 25 bp, Homo sapien
ctgaatctttgttaatcgaatcctc

SEQ ID NO: 1715962 - DNA, 25 bp, Homo sapien
gactcataggcccatttcggagcaa

SEQ ID NO: 1715963 - DNA, 25 bp, Homo sapien
tgttaatcgaatcctctttcccagt

SEQ ID NO: 1715964 - DNA, 25 bp, Homo sapien
cacccggaatgagaagtggttccag

SEQ ID NO: 1715965 - DNA, 25 bp, Homo sapien
cctccctggccccttcatctcttag

SEQ ID NO: 1715966 - DNA, 25 bp, Homo sapien
ctccccctccctggccccttcatct

SEQ ID NO: 1715967 - DNA, 25 bp, Homo sapien
ccccctccctggccccttcatctct

SEQ ID NO: 1715968 - DNA, 25 bp, Homo sapien
ccctccctggccccttcatctctta

SEQ ID NO: 1715969 - DNA, 25 bp, Homo sapien
ctgtgagtcactcaactgtctccag

SEQ ID NO: 1715970 - DNA, 25 bp, Homo sapien
ttcttaggtcaagtgcggggctgac

SEQ ID NO: 1715971 - DNA, 25 bp, Homo sapien
ggggttcatcacgttcctcagacat

SEQ ID NO: 1715972 - DNA, 25 bp, Homo sapien
agccctcgtggggttcatcacgttc

SEQ ID NO: 1715973 - DNA, 25 bp, Homo sapien
caagtgcggggctgactgtccagcc

SEQ ID NO: 1715974 - DNA, 25 bp, Homo sapien
aatgagcgaggagggctcatgcaat

SEQ ID NO: 1715975 - DNA, 25 bp, Homo sapien
tcagtgtggtcaagccgagtctggc

SEQ ID NO: 1715976 - DNA, 25 bp, Homo sapien
tgagtaagaagccagaatgagcgag

SEQ ID NO: 1715977 - DNA, 25 bp, Homo sapien
ccgagtctggcagggcatttccatg

SEQ ID NO: 1715978 - DNA, 25 bp, Homo sapien
tgtggcccagggaaagctatgcttt

SEQ ID NO: 1715979 - DNA, 25 bp, Homo sapien
tatgcaagcactcggaacattccag

SEQ ID NO: 1715980 - DNA, 25 bp, Homo sapien
gcaaacactgagctacctggatccc

SEQ ID NO: 1715981 - DNA, 25 bp, Homo sapien
tcaccatgagggctggtagcttctg

SEQ ID NO: 1715982 - DNA, 25 bp, Homo sapien
cacaggcagctcctgtacggacaga

SEQ ID NO: 1715983 - DNA, 25 bp, Homo sapien
agctcctgtacggacagaggcaatg

SEQ ID NO: 1715984 - DNA, 25 bp, Homo sapien
caggcagctcctgtacggacagagg

SEQ ID NO: 1715985 - DNA, 25 bp, Homo sapien
ctcctgtacggacagaggcaatggg

SEQ ID NO: 1715986 - DNA, 25 bp, Homo sapien
ggattgcagccaaggagagtccagg

SEQ ID NO: 1715987 - DNA, 25 bp, Homo sapien
ccatggcagcgcaagtcagttctct

SEQ ID NO: 1715988 - DNA, 25 bp, Homo sapien
gttcctgtcacctatcctgccatgg

SEQ ID NO: 1715989 - DNA, 25 bp, Homo sapien
aagtcagttctctctagccggcagc

SEQ ID NO: 1715990 - DNA, 25 bp, Homo sapien
tctcagaagcaaggagtggacaagc

SEQ ID NO: 1715991 - DNA, 25 bp, Homo sapien
gagatttagaccactccatcccggg

SEQ ID NO: 1715992 - DNA, 25 bp, Homo sapien
aagtgagctccatgaacgtctggcc

SEQ ID NO: 1715993 - DNA, 25 bp, Homo sapien
tcatggacaagtggcaatcagctgg

SEQ ID NO: 1715994 - DNA, 25 bp, Homo sapien
agatatgcccactctgctgtcagga

SEQ ID NO: 1715995 - DNA, 25 bp, Homo sapien
catgcagggccaagattatgatccc

SEQ ID NO: 1715996 - DNA, 25 bp, Homo sapien
tcttaggcttcaccaagggccagga

SEQ ID NO: 1715997 - DNA, 25 bp, Homo sapien
tctggaaaggaaccatggtgcgacc

SEQ ID NO: 1715998 - DNA, 25 bp, Homo sapien
gttctctgttcccaaagtcagctgt

SEQ ID NO: 1715999 - DNA, 25 bp, Homo sapien
tctgttcccaaagtcagctgtctcc

SEQ ID NO: 1716000 - DNA, 25 bp, Homo sapien
ttgttctctgttcccaaagtcagct

SEQ ID NO: 1716001 - DNA, 25 bp, Homo sapien
tctctgttcccaaagtcagctgtct

SEQ ID NO: 1716002 - DNA, 25 bp, Homo sapien
gcaatgtaagtgcacctccctcggt

SEQ ID NO: 1716003 - DNA, 25 bp, Homo sapien
aagcaatgtaagtgcacctccctcg

SEQ ID NO: 1716004 - DNA, 25 bp, Homo sapien
ggacatcatcgccttcatcaaggcc

SEQ ID NO: 1716005 - DNA, 25 bp, Homo sapien
gagacagccagacggactcggacat

SEQ ID NO: 1716006 - DNA, 25 bp, Homo sapien
ggatggacggaaagttggcaaggcc

SEQ ID NO: 1716007 - DNA, 25 bp, Homo sapien
aggccaggcaagtgtactgctctga

SEQ ID NO: 1716008 - DNA, 25 bp, Homo sapien
tgccttctaaggaagtggctaccac

SEQ ID NO: 1716009 - DNA, 25 bp, Homo sapien
aggcaagtgtactgctctgagtttg

SEQ ID NO: 1716010 - DNA, 25 bp, Homo sapien
tggtcttctcctgttatgcctgtga

SEQ ID NO: 1716011 - DNA, 25 bp, Homo sapien
tggaatctctcacacaggccaactc

SEQ ID NO: 1716012 - DNA, 25 bp, Homo sapien
gttttgcagtgatgtgaatgccagg

SEQ ID NO: 1716013 - DNA, 25 bp, Homo sapien
cctgtgttgggcagagttgtttcat

SEQ ID NO: 1716014 - DNA, 25 bp, Homo sapien
gggagcaaatgtccacgtgaccgtt

SEQ ID NO: 1716015 - DNA, 25 bp, Homo sapien
catctatcaatctgggcttggaccc

SEQ ID NO: 1716016 - DNA, 25 bp, Homo sapien
tgtgccctcagtagcagtcctgctg

SEQ ID NO: 1716017 - DNA, 25 bp, Homo sapien
cagggctaagctatgttgcaacagg

SEQ ID NO: 1716018 - DNA, 25 bp, Homo sapien
ggccagcaaacatgcgaggcactga

SEQ ID NO: 1716019 - DNA, 25 bp, Homo sapien
gcaaacatgcgaggcactgagtcac

SEQ ID NO: 1716020 - DNA, 25 bp, Homo sapien
cagcaaacatgcgaggcactgagtc

SEQ ID NO: 1716021 - DNA, 25 bp, Homo sapien
ggcaaggccagcaaacatgcgaggc

SEQ ID NO: 1716022 - DNA, 25 bp, Homo sapien
attgtttgtccattgaaagtcctac

SEQ ID NO: 1716023 - DNA, 25 bp, Homo sapien
aggaattgtttgtccattgaaagtc

SEQ ID NO: 1716024 - DNA, 25 bp, Homo sapien
gaattgtttgtccattgaaagtcct

SEQ ID NO: 1716025 - DNA, 25 bp, Homo sapien
taaaaaggaattgtttgtccattga

SEQ ID NO: 1716026 - DNA, 25 bp, Homo sapien
tctctcacgtactgggcttgcagca

SEQ ID NO: 1716027 - DNA, 25 bp, Homo sapien
gcttgcagcaggacgtctagccagt

SEQ ID NO: 1716028 - DNA, 25 bp, Homo sapien
ttctgctgtctgttcaccaaggcct

SEQ ID NO: 1716029 - DNA, 25 bp, Homo sapien
gactgcctcttctggccgggtgaga

SEQ ID NO: 1716030 - DNA, 25 bp, Homo sapien
cagatgaacagtgtgacctcgcagg

SEQ ID NO: 1716031 - DNA, 25 bp, Homo sapien
taaggtcagcctgggactgtgcgtc

SEQ ID NO: 1716032 - DNA, 25 bp, Homo sapien
gccactcggcactgtgagctcctgt

SEQ ID NO: 1716033 - DNA, 25 bp, Homo sapien
tgtccttgaaaggagggctccctgt

SEQ ID NO: 1716034 - DNA, 25 bp, Homo sapien
tgcttgtgaatatagggccatcctc

SEQ ID NO: 1716035 - DNA, 25 bp, Homo sapien
catgaggtccttagccgaatttcca

SEQ ID NO: 1716036 - DNA, 25 bp, Homo sapien
ggtttaaggctcctgcaccaaccat

SEQ ID NO: 1716037 - DNA, 25 bp, Homo sapien
ttcccaactgccaagggttcagacc

SEQ ID NO: 1716038 - DNA, 25 bp, Homo sapien
ggctccctgtttcactgcgttgttc

SEQ ID NO: 1716039 - DNA, 25 bp, Homo sapien
gggattgccactggctggtgtttca

SEQ ID NO: 1716040 - DNA, 25 bp, Homo sapien
tggtgtttcactacctgacccggga

SEQ ID NO: 1716041 - DNA, 25 bp, Homo sapien
cattcgactgtgatgccacgtggag

SEQ ID NO: 1716042 - DNA, 25 bp, Homo sapien
tggctgagattcccccacgaatact

SEQ ID NO: 1716043 - DNA, 25 bp, Homo sapien
atggctgagattcccccacgaatac

SEQ ID NO: 1716044 - DNA, 25 bp, Homo sapien
ggatatggagttgtccccaagggct

SEQ ID NO: 1716045 - DNA, 25 bp, Homo sapien
gatatggagttgtccccaagggctg

SEQ ID NO: 1716046 - DNA, 25 bp, Homo sapien
ccccacatggaataagggtgcaatt

SEQ ID NO: 1716047 - DNA, 25 bp, Homo sapien
ctggctcaggtgtcaagtcattttc

SEQ ID NO: 1716048 - DNA, 25 bp, Homo sapien
gatgtttgacctccataaagggcaa

SEQ ID NO: 1716049 - DNA, 25 bp, Homo sapien
cgaggtattacctaaggactggtga

SEQ ID NO: 1716050 - DNA, 25 bp, Homo sapien
tatggacaataagggtcaaattgca

SEQ ID NO: 1716051 - DNA, 25 bp, Homo sapien
cagcagccttatgtccccaacttct

SEQ ID NO: 1716052 - DNA, 25 bp, Homo sapien
tactctgcttatatggacaataagg

SEQ ID NO: 1716053 - DNA, 25 bp, Homo sapien
gcttatatggacaataagggtcaaa

SEQ ID NO: 1716054 - DNA, 25 bp, Homo sapien
tactaattatggacactcctgcagg

SEQ ID NO: 1716055 - DNA, 25 bp, Homo sapien
tacccagtcatatgagaggctcgtg

SEQ ID NO: 1716056 - DNA, 25 bp, Homo sapien
gaacttggtcgttccaataggcgct

SEQ ID NO: 1716057 - DNA, 25 bp, Homo sapien
accgtggtaatgacagcaagctgca

SEQ ID NO: 1716058 - DNA, 25 bp, Homo sapien
ttaaggtcacccgtctcctctggag

SEQ ID NO: 1716059 - DNA, 25 bp, Homo sapien
gtctcctctggagctttcccgtgga

SEQ ID NO: 1716060 - DNA, 25 bp, Homo sapien
cctgctcgcggtcatatttaaggtc

SEQ ID NO: 1716061 - DNA, 25 bp, Homo sapien
cccgtggattgctgtaagctctgct

SEQ ID NO: 1716062 - DNA, 25 bp, Homo sapien
gccgttggtccagcacttaaaagaa

SEQ ID NO: 1716063 - DNA, 25 bp, Homo sapien
cagccaagcagcgttcacgtgaata

SEQ ID NO: 1716064 - DNA, 25 bp, Homo sapien
gaataatctcaaactagcatgcgtg

SEQ ID NO: 1716065 - DNA, 25 bp, Homo sapien
tgaggcacagcatcccagaaattgc

SEQ ID NO: 1716066 - DNA, 25 bp, Homo sapien
tggagtgactgctccgtaacagtac

SEQ ID NO: 1716067 - DNA, 25 bp, Homo sapien
taacagtactggagatgagcagacc

SEQ ID NO: 1716068 - DNA, 25 bp, Homo sapien
ccaatccagaatcaactccagtaaa

SEQ ID NO: 1716069 - DNA, 25 bp, Homo sapien
gctccgtaacagtactggagatgag

SEQ ID NO: 1716070 - DNA, 25 bp, Homo sapien
tcgaatgctggaaaatctcaactgc

SEQ ID NO: 1716071 - DNA, 25 bp, Homo sapien
ggcctgcgggtggtaaatgctcttt

SEQ ID NO: 1716072 - DNA, 25 bp, Homo sapien
agtgggcggtcatctaagttcctcc

SEQ ID NO: 1716073 - DNA, 25 bp, Homo sapien
agtcacttgcaggaggttacacagt

SEQ ID NO: 1716074 - DNA, 25 bp, Homo sapien
attggcatgagttaggaatataatc

SEQ ID NO: 1716075 - DNA, 25 bp, Homo sapien
agcagtttgtgagttaggattggca

SEQ ID NO: 1716076 - DNA, 25 bp, Homo sapien
agctttcttgcctcttgctcgcctt

SEQ ID NO: 1716077 - DNA, 25 bp, Homo sapien
ttgcctcttgctcgcctttataagc

SEQ ID NO: 1716078 - DNA, 25 bp, Homo sapien
taaacaggcccatagacccaggatt

SEQ ID NO: 1716079 - DNA, 25 bp, Homo sapien
tctaggatgagtcctcgaaacggct

SEQ ID NO: 1716080 - DNA, 25 bp, Homo sapien
cactgcaagtttctgccgggcacag

SEQ ID NO: 1716081 - DNA, 25 bp, Homo sapien
tccattgccccaagtagaagctgaa

SEQ ID NO: 1716082 - DNA, 25 bp, Homo sapien
ggtggccttagagcccagcgttctg

SEQ ID NO: 1716083 - DNA, 25 bp, Homo sapien
gatcataagatctgaggcccctcca

SEQ ID NO: 1716084 - DNA, 25 bp, Homo sapien
caagctgtaataggagctggaacca

SEQ ID NO: 1716085 - DNA, 25 bp, Homo sapien
gtctgctcttgtaaccggctggccc

SEQ ID NO: 1716086 - DNA, 25 bp, Homo sapien
ggtccacgacctggctaggagaaca

SEQ ID NO: 1716087 - DNA, 25 bp, Homo sapien
gacagagtagtcttgccttagtgag

SEQ ID NO: 1716088 - DNA, 25 bp, Homo sapien
atgctgacccatgcccgtcaaatgg

SEQ ID NO: 1716089 - DNA, 25 bp, Homo sapien
taggagaacagaggaatgctgaccc

SEQ ID NO: 1716090 - DNA, 25 bp, Homo sapien
ctcctgcatgtctgcttcttgtaac

SEQ ID NO: 1716091 - DNA, 25 bp, Homo sapien
tgcatgtctgcttcttgtaacttat

SEQ ID NO: 1716092 - DNA, 25 bp, Homo sapien
cctgcatgtctgcttcttgtaactt

SEQ ID NO: 1716093 - DNA, 25 bp, Homo sapien
gcatgtctgcttcttgtaacttatc

SEQ ID NO: 1716094 - DNA, 25 bp, Homo sapien
ctgttccatatacaagatcattcgg

SEQ ID NO: 1716095 - DNA, 25 bp, Homo sapien
tacaagatcattcggctgcttttct

SEQ ID NO: 1716096 - DNA, 25 bp, Homo sapien
gggtttcgcacatgttcatttacac

SEQ ID NO: 1716097 - DNA, 25 bp, Homo sapien
tcttcacatgggctggggtttcgca

SEQ ID NO: 1716098 - DNA, 25 bp, Homo sapien
cactgtgagtgccccctttaatttt

SEQ ID NO: 1716099 - DNA, 25 bp, Homo sapien
agcagttactggctcacagctggcc

SEQ ID NO: 1716100 - DNA, 25 bp, Homo sapien
cagttactggctcacagctggcccg

SEQ ID NO: 1716101 - DNA, 25 bp, Homo sapien
cgctgggtctctcttactaccccct

SEQ ID NO: 1716102 - DNA, 25 bp, Homo sapien
gttactggctcacagctggcccgct

SEQ ID NO: 1716103 - DNA, 25 bp, Homo sapien
gagagaacatacataatctacgatg

SEQ ID NO: 1716104 - DNA, 25 bp, Homo sapien
gtctgaattgcatcaagtggaactg

SEQ ID NO: 1716105 - DNA, 25 bp, Homo sapien
catcatgtaaatgtctgaattgcat

SEQ ID NO: 1716106 - DNA, 25 bp, Homo sapien
ataatctacgatgagcctgaacagc

SEQ ID NO: 1716107 - DNA, 25 bp, Homo sapien
tattttccttattccgaagagtcta

SEQ ID NO: 1716108 - DNA, 25 bp, Homo sapien
ggcagcactgcggtggaaagtcctt

SEQ ID NO: 1716109 - DNA, 25 bp, Homo sapien
tattccgaagagtctaaagcttcca

SEQ ID NO: 1716110 - DNA, 25 bp, Homo sapien
actgcggtggaaagtccttcttctg

SEQ ID NO: 1716111 - DNA, 25 bp, Homo sapien
taacgtcagattcaccctcaattcc

SEQ ID NO: 1716112 - DNA, 25 bp, Homo sapien
tcttggaagttaacgtcagattcac

SEQ ID NO: 1716113 - DNA, 25 bp, Homo sapien
tctggaactgatcttggaagttaac

SEQ ID NO: 1716114 - DNA, 25 bp, Homo sapien
gaactgatcttggaagttaacgtca

SEQ ID NO: 1716115 - DNA, 25 bp, Homo sapien
atgacagagcatctggttgcagagg

SEQ ID NO: 1716116 - DNA, 25 bp, Homo sapien
gtggctgctgaacgaacaccagccc

SEQ ID NO: 1716117 - DNA, 25 bp, Homo sapien
tgacagagcatctggttgcagaggc

SEQ ID NO: 1716118 - DNA, 25 bp, Homo sapien
ggactgagtggctgctgaacgaaca

SEQ ID NO: 1716119 - DNA, 25 bp, Homo sapien
gggagcaatttggagatcccccaag

SEQ ID NO: 1716120 - DNA, 25 bp, Homo sapien
ctcccctgcgggggggagcaatttg

SEQ ID NO: 1716121 - DNA, 25 bp, Homo sapien
agcaatttggagatcccccaagcag

SEQ ID NO: 1716122 - DNA, 25 bp, Homo sapien
ctctgttggtggaaggctgctcatc

SEQ ID NO: 1716123 - DNA, 25 bp, Homo sapien
cagtgcattgtaagttctcccagga

SEQ ID NO: 1716124 - DNA, 25 bp, Homo sapien
ccaatggttgctcagtgcattgtaa

SEQ ID NO: 1716125 - DNA, 25 bp, Homo sapien
cgtgggctctggagtggtcctttcc

SEQ ID NO: 1716126 - DNA, 25 bp, Homo sapien
ccaggagtggctgccgccacagtgc

SEQ ID NO: 1716127 - DNA, 25 bp, Homo sapien
tgtggtcaccacaatcaaagaactc

SEQ ID NO: 1716128 - DNA, 25 bp, Homo sapien
catacagtgcatgctcagggacggg

SEQ ID NO: 1716129 - DNA, 25 bp, Homo sapien
gacgggaactgccataggagaaaga

SEQ ID NO: 1716130 - DNA, 25 bp, Homo sapien
tattagtgcaatccaaaggagctgc

SEQ ID NO: 1716131 - DNA, 25 bp, Homo sapien
gctgggctacaccaggccctttaaa

SEQ ID NO: 1716132 - DNA, 25 bp, Homo sapien
gtcagcagaaccgtgacagatggct

SEQ ID NO: 1716133 - DNA, 25 bp, Homo sapien
cagatggctctgcttactgtggtga

SEQ ID NO: 1716134 - DNA, 25 bp, Homo sapien
agcaacccctcaaattgtagctggg

SEQ ID NO: 1716135 - DNA, 25 bp, Homo sapien
taatggaaacgttgctggcctccag

SEQ ID NO: 1716136 - DNA, 25 bp, Homo sapien
tggcctccagatgcctaagctggct

SEQ ID NO: 1716137 - DNA, 25 bp, Homo sapien
tgtccacggatttctgtaacagccc

SEQ ID NO: 1716138 - DNA, 25 bp, Homo sapien
caaactcagtgcctgcgtctgtcca

SEQ ID NO: 1716139 - DNA, 25 bp, Homo sapien
ttttagaccatctccagtcacaggg

SEQ ID NO: 1716140 - DNA, 25 bp, Homo sapien
cacagggaaaccacagctagttaag

SEQ ID NO: 1716141 - DNA, 25 bp, Homo sapien
tgttaagatcacagcaggaatctcc

SEQ ID NO: 1716142 - DNA, 25 bp, Homo sapien
catttgccctctgcttgttttagac

SEQ ID NO: 1716143 - DNA, 25 bp, Homo sapien
gctggagttagaagcttgagtttct

SEQ ID NO: 1716144 - DNA, 25 bp, Homo sapien
tcattggctggagttagaagcttga

SEQ ID NO: 1716145 - DNA, 25 bp, Homo sapien
ttggctggagttagaagcttgagtt

SEQ ID NO: 1716146 - DNA, 25 bp, Homo sapien
ttctgttgtttctgtatgctctcac

SEQ ID NO: 1716147 - DNA, 25 bp, Homo sapien
tttctcttagggctgatatcctgga

SEQ ID NO: 1716148 - DNA, 25 bp, Homo sapien
tatagtaacagtccttgaggttctc

SEQ ID NO: 1716149 - DNA, 25 bp, Homo sapien
catttactgatcctgaaatgctggt

SEQ ID NO: 1716150 - DNA, 25 bp, Homo sapien
aatgctggtaggctttcttccattt

SEQ ID NO: 1716151 - DNA, 25 bp, Homo sapien
tcttgcttctattaaaccagtcact

SEQ ID NO: 1716152 - DNA, 25 bp, Homo sapien
ttctattaaaccagtcactggggga

SEQ ID NO: 1716153 - DNA, 25 bp, Homo sapien
ctccttagcagctgttttcttgctt

SEQ ID NO: 1716154 - DNA, 25 bp, Homo sapien
tgcttctattaaaccagtcactggg

SEQ ID NO: 1716155 - DNA, 25 bp, Homo sapien
taaacccaacatcatgtgtctgccc

SEQ ID NO: 1716156 - DNA, 25 bp, Homo sapien
cctgctgccttgtttgtaccaagtg

SEQ ID NO: 1716157 - DNA, 25 bp, Homo sapien
cactctcgctgctgcaaatcgctaa

SEQ ID NO: 1716158 - DNA, 25 bp, Homo sapien
tcttccagggacacgcggacatatg

SEQ ID NO: 1716159 - DNA, 25 bp, Homo sapien
taatgtagaacgagcagttttccac

SEQ ID NO: 1716160 - DNA, 25 bp, Homo sapien
acgagcagttttccacttttagtgg

SEQ ID NO: 1716161 - DNA, 25 bp, Homo sapien
tgcacatggccacacggctcctgca

SEQ ID NO: 1716162 - DNA, 25 bp, Homo sapien
tgcgaaagagagtctaatgtagaac

SEQ ID NO: 1716163 - DNA, 25 bp, Homo sapien
catgaagtggaacagaacaggggat

SEQ ID NO: 1716164 - DNA, 25 bp, Homo sapien
gaaacatgaagtggaacagaacagg

SEQ ID NO: 1716165 - DNA, 25 bp, Homo sapien
aaacatgaagtggaacagaacaggg

SEQ ID NO: 1716166 - DNA, 25 bp, Homo sapien
tgaagtggaacagaacaggggatgg

SEQ ID NO: 1716167 - DNA, 25 bp, Homo sapien
aaaagctgaaaccaattttgctatc

SEQ ID NO: 1716168 - DNA, 25 bp, Homo sapien
aaagctgaaaccaattttgctatct

SEQ ID NO: 1716169 - DNA, 25 bp, Homo sapien
gaatgcatcaaggtctgttaaactg

SEQ ID NO: 1716170 - DNA, 25 bp, Homo sapien
tgttttgataatgtcctacgaggag

SEQ ID NO: 1716171 - DNA, 25 bp, Homo sapien
gttctgtaaacataagcaggaccag

SEQ ID NO: 1716172 - DNA, 25 bp, Homo sapien
tctcaccaaggctcaagatattgtt

SEQ ID NO: 1716173 - DNA, 25 bp, Homo sapien
tactgtatgttttaaagggccacat

SEQ ID NO: 1716174 - DNA, 25 bp, Homo sapien
tgctatctcaatactgtatgtttta

SEQ ID NO: 1716175 - DNA, 25 bp, Homo sapien
ctgctatctcaatactgtatgtttt

SEQ ID NO: 1716176 - DNA, 25 bp, Homo sapien
tcaatactgtatgttttaaagggcc

SEQ ID NO: 1716177 - DNA, 25 bp, Homo sapien
gcacacagataggatgtcagctgcc

SEQ ID NO: 1716178 - DNA, 25 bp, Homo sapien
tacttctcgtatcccacttaaggtc

SEQ ID NO: 1716179 - DNA, 25 bp, Homo sapien
cttggcctcctacagaagtggtggg

SEQ ID NO: 1716180 - DNA, 25 bp, Homo sapien
tggtgagagtctcaaatacttctcg

SEQ ID NO: 1716181 - DNA, 25 bp, Homo sapien
tcagtcagcttgtctgcaatctcca

SEQ ID NO: 1716182 - DNA, 25 bp, Homo sapien
aatctccagccctattgcagccagg

SEQ ID NO: 1716183 - DNA, 25 bp, Homo sapien
tgtgctggtccggtttttgctcttg

SEQ ID NO: 1716184 - DNA, 25 bp, Homo sapien
cattggtaatgctgtaaacctgcgg

SEQ ID NO: 1716185 - DNA, 25 bp, Homo sapien
tatgatgttccagatgttctgcttc

SEQ ID NO: 1716186 - DNA, 25 bp, Homo sapien
catgagtcacataggccaagcagct

SEQ ID NO: 1716187 - DNA, 25 bp, Homo sapien
cacataggccaagcagctatgatgt

SEQ ID NO: 1716188 - DNA, 25 bp, Homo sapien
tcctcatgagtcacataggccaagc

SEQ ID NO: 1716189 - DNA, 25 bp, Homo sapien
tgtgggctgctaccagacagggtct

SEQ ID NO: 1716190 - DNA, 25 bp, Homo sapien
tgcctgtgggctgctaccagacagg

SEQ ID NO: 1716191 - DNA, 25 bp, Homo sapien
ggtctgtgtggccagtatggtagga

SEQ ID NO: 1716192 - DNA, 25 bp, Homo sapien
agggtgtctccagcaaagcctctac

SEQ ID NO: 1716193 - DNA, 25 bp, Homo sapien
cttgaaggggccagtcaggctgttc

SEQ ID NO: 1716194 - DNA, 25 bp, Homo sapien
caggctgttcaggtgaatctcttac

SEQ ID NO: 1716195 - DNA, 25 bp, Homo sapien
ggccagtcaggctgttcaggtgaat

SEQ ID NO: 1716196 - DNA, 25 bp, Homo sapien
tgttcaccagccttgaaggggccag

SEQ ID NO: 1716197 - DNA, 25 bp, Homo sapien
gacacagccacaggtggtgagctcc

SEQ ID NO: 1716198 - DNA, 25 bp, Homo sapien
catgtgaggtttcctggagatggaa

SEQ ID NO: 1716199 - DNA, 25 bp, Homo sapien
ctggagatggaacagggaaggcttg

SEQ ID NO: 1716200 - DNA, 25 bp, Homo sapien
ctctggagggtgacggcatagacac

SEQ ID NO: 1716201 - DNA, 25 bp, Homo sapien
gaggtaaggggtggtcaactgagtc

SEQ ID NO: 1716202 - DNA, 25 bp, Homo sapien
cagggggccagtgtctcatgctgcc

SEQ ID NO: 1716203 - DNA, 25 bp, Homo sapien
agggggccagtgtctcatgctgccg

SEQ ID NO: 1716204 - DNA, 25 bp, Homo sapien
gcagggggccagtgtctcatgctgc

SEQ ID NO: 1716205 - DNA, 25 bp, Homo sapien
tgcattggtatcattgctgcagctg

SEQ ID NO: 1716206 - DNA, 25 bp, Homo sapien
cttgaggggttcaaaggagatagcg

SEQ ID NO: 1716207 - DNA, 25 bp, Homo sapien
gatagcggggttgggttctgatgca

SEQ ID NO: 1716208 - DNA, 25 bp, Homo sapien
gctgctgctatccagcaggaaagaa

SEQ ID NO: 1716209 - DNA, 25 bp, Homo sapien
catccaggttgtaggtgtaaccatg

SEQ ID NO: 1716210 - DNA, 25 bp, Homo sapien
catgatcttggcagatggagaaaga

SEQ ID NO: 1716211 - DNA, 25 bp, Homo sapien
tctgagctcatgtgttcttgtgtga

SEQ ID NO: 1716212 - DNA, 25 bp, Homo sapien
tatttctgagaacatcaatgcctcc

SEQ ID NO: 1716213 - DNA, 25 bp, Homo sapien
cagaggctgagaatagacacatcaa

SEQ ID NO: 1716214 - DNA, 25 bp, Homo sapien
ggaggagccgtaaggccagagggtg

SEQ ID NO: 1716215 - DNA, 25 bp, Homo sapien
gaggtccaggaggagccgtaaggcc

SEQ ID NO: 1716216 - DNA, 25 bp, Homo sapien
gggcccagcagggtagcatacacaa

SEQ ID NO: 1716217 - DNA, 25 bp, Homo sapien
gggtagcatacacaagaggtccagg

SEQ ID NO: 1716218 - DNA, 25 bp, Homo sapien
aagatacctcatgaaactatccccc

SEQ ID NO: 1716219 - DNA, 25 bp, Homo sapien
gatacctcatgaaactatcccccat

SEQ ID NO: 1716220 - DNA, 25 bp, Homo sapien
agatacctcatgaaactatccccca

SEQ ID NO: 1716221 - DNA, 25 bp, Homo sapien
taagatacctcatgaaactatcccc

SEQ ID NO: 1716222 - DNA, 25 bp, Homo sapien
cctgggcttgcggaaaatggagatt

SEQ ID NO: 1716223 - DNA, 25 bp, Homo sapien
aatggagatttggatctgtcctgag

SEQ ID NO: 1716224 - DNA, 25 bp, Homo sapien
ccttgaggattattgagcaccagca

SEQ ID NO: 1716225 - DNA, 25 bp, Homo sapien
tgtcctgaggccttaattatcagtc

SEQ ID NO: 1716226 - DNA, 25 bp, Homo sapien
ccacatactccctgaataggagatg

SEQ ID NO: 1716227 - DNA, 25 bp, Homo sapien
tactccctgaataggagatgtttgc

SEQ ID NO: 1716228 - DNA, 25 bp, Homo sapien
gagttccacatactccctgaatagg

SEQ ID NO: 1716229 - DNA, 25 bp, Homo sapien
ctgaataggagatgtttgccgaaac

SEQ ID NO: 1716230 - DNA, 25 bp, Homo sapien
tccacaagttctgtgacatgacaag

SEQ ID NO: 1716231 - DNA, 25 bp, Homo sapien
gtgacatgacaagccctccggattg

SEQ ID NO: 1716232 - DNA, 25 bp, Homo sapien
atgacaagccctccggattgcactc

SEQ ID NO: 1716233 - DNA, 25 bp, Homo sapien
ttctgtgacatgacaagccctccgg

SEQ ID NO: 1716234 - DNA, 25 bp, Homo sapien
gacacacacgctctttgctgatgcc

SEQ ID NO: 1716235 - DNA, 25 bp, Homo sapien
gggaagatgtccagacacacacgct

SEQ ID NO: 1716236 - DNA, 25 bp, Homo sapien
tttgctgatgcccacctgctgtgat

SEQ ID NO: 1716237 - DNA, 25 bp, Homo sapien
ctgtgatagacagctggtagagatg

SEQ ID NO: 1716238 - DNA, 25 bp, Homo sapien
tattcaaggactcatatgcaggaac

SEQ ID NO: 1716239 - DNA, 25 bp, Homo sapien
tcctatttccctagtgccattgaca

SEQ ID NO: 1716240 - DNA, 25 bp, Homo sapien
gaactttccagaattgtcctcttcc

SEQ ID NO: 1716241 - DNA, 25 bp, Homo sapien
gtctgcagaatgaagtataagttcc

SEQ ID NO: 1716242 - DNA, 25 bp, Homo sapien
cccattggccactcttcttgagctg

SEQ ID NO: 1716243 - DNA, 25 bp, Homo sapien
ctgcagtcccccattggccactctt

SEQ ID NO: 1716244 - DNA, 25 bp, Homo sapien
cattggccactcttcttgagctgtc

SEQ ID NO: 1716245 - DNA, 25 bp, Homo sapien
ttggccactcttcttgagctgtctc

SEQ ID NO: 1716246 - DNA, 25 bp, Homo sapien
gaactatgttgtgatcctgtgacac

SEQ ID NO: 1716247 - DNA, 25 bp, Homo sapien
gatcctgtgacactgtcgtctgcag

SEQ ID NO: 1716248 - DNA, 25 bp, Homo sapien
gttgtgatcctgtgacactgtcgtc

SEQ ID NO: 1716249 - DNA, 25 bp, Homo sapien
tatgttgtgatcctgtgacactgtc

SEQ ID NO: 1716250 - DNA, 25 bp, Homo sapien
gacaacttttgcacatgagctcttg

SEQ ID NO: 1716251 - DNA, 25 bp, Homo sapien
gctgataatgccgtgggttgcctag

SEQ ID NO: 1716252 - DNA, 25 bp, Homo sapien
atccaaccagagaagagatcctgct

SEQ ID NO: 1716253 - DNA, 25 bp, Homo sapien
ggttgcctagcacacccagttctgc

SEQ ID NO: 1716254 - DNA, 25 bp, Homo sapien
tacgcgaccgacagccaggccactc

SEQ ID NO: 1716255 - DNA, 25 bp, Homo sapien
aggccactcctacctggcacagcgc

SEQ ID NO: 1716256 - DNA, 25 bp, Homo sapien
cccgcgcactgctgtcagctacgcg

SEQ ID NO: 1716257 - DNA, 25 bp, Homo sapien
ccactcctacctggcacagcgcaga

SEQ ID NO: 1716258 - DNA, 25 bp, Homo sapien
tagttggggcactagtctccagttc

SEQ ID NO: 1716259 - DNA, 25 bp, Homo sapien
tttatttaggcagtactgtgctgta

SEQ ID NO: 1716260 - DNA, 25 bp, Homo sapien
tgaagtatggtcctgcaaatgtgct

SEQ ID NO: 1716261 - DNA, 25 bp, Homo sapien
aaatgtgctttatttaggcagtact

SEQ ID NO: 1716262 - DNA, 25 bp, Homo sapien
ccatgaaatcctcaatcagggacac

SEQ ID NO: 1716263 - DNA, 25 bp, Homo sapien
caggaatcatacagtgcccaaagtc

SEQ ID NO: 1716264 - DNA, 25 bp, Homo sapien
agtctcctccgcagaaaatatgttt

SEQ ID NO: 1716265 - DNA, 25 bp, Homo sapien
ggatttctgatgaaagtctcctccg

SEQ ID NO: 1716266 - DNA, 25 bp, Homo sapien
tattagaggatccttctggtactga

SEQ ID NO: 1716267 - DNA, 25 bp, Homo sapien
ttcttagactgcctggtattagagg

SEQ ID NO: 1716268 - DNA, 25 bp, Homo sapien
attagaggatccttctggtactgac

SEQ ID NO: 1716269 - DNA, 25 bp, Homo sapien
tagactgcctggtattagaggatcc

SEQ ID NO: 1716270 - DNA, 25 bp, Homo sapien
atgttgttcttcagggggagctcca

SEQ ID NO: 1716271 - DNA, 25 bp, Homo sapien
agcctgggctgtaattccatatggc

SEQ ID NO: 1716272 - DNA, 25 bp, Homo sapien
ctataatccggcaagagcctgggct

SEQ ID NO: 1716273 - DNA, 25 bp, Homo sapien
gttgttcttcagggggagctccagg

SEQ ID NO: 1716274 - DNA, 25 bp, Homo sapien
cattctgtgatattttaggctcttt

SEQ ID NO: 1716275 - DNA, 25 bp, Homo sapien
tatcagtgtctcaggtaaagccagc

SEQ ID NO: 1716276 - DNA, 25 bp, Homo sapien
tacaggacattctgtgatattttag

SEQ ID NO: 1716277 - DNA, 25 bp, Homo sapien
atcagtgtctcaggtaaagccagca

SEQ ID NO: 1716278 - DNA, 25 bp, Homo sapien
tatagcctctgtagtgttgcacaat

SEQ ID NO: 1716279 - DNA, 25 bp, Homo sapien
tctcattcatacaaggattcctggg

SEQ ID NO: 1716280 - DNA, 25 bp, Homo sapien
tcctgggcacactgttatagcctct

SEQ ID NO: 1716281 - DNA, 25 bp, Homo sapien
gatgaagcagaggaagcctttgttc

SEQ ID NO: 1716282 - DNA, 25 bp, Homo sapien
taaagaaacccctctaccagcacag

SEQ ID NO: 1716283 - DNA, 25 bp, Homo sapien
tgctactaaagaaacccctctacca

SEQ ID NO: 1716284 - DNA, 25 bp, Homo sapien
aaacccctctaccagcacagttgag

SEQ ID NO: 1716285 - DNA, 25 bp, Homo sapien
tcagctgtctcttgctactaaagaa

SEQ ID NO: 1716286 - DNA, 25 bp, Homo sapien
ggcaaggattccaaatcaggttgat

SEQ ID NO: 1716287 - DNA, 25 bp, Homo sapien
gcaaggattccaaatcaggttgatg

SEQ ID NO: 1716288 - DNA, 25 bp, Homo sapien
aaggattccaaatcaggttgatgaa

SEQ ID NO: 1716289 - DNA, 25 bp, Homo sapien
ggattccaaatcaggttgatgaaat

SEQ ID NO: 1716290 - DNA, 25 bp, Homo sapien
tctgatatttcatgcgcagcaggag

SEQ ID NO: 1716291 - DNA, 25 bp, Homo sapien
caggaggttcatgggacctgaatcg

SEQ ID NO: 1716292 - DNA, 25 bp, Homo sapien
catcactggaactttgtgtaagatg

SEQ ID NO: 1716293 - DNA, 25 bp, Homo sapien
ggatccatttgcaccatctcgtctg

SEQ ID NO: 1716294 - DNA, 25 bp, Homo sapien
agaaggatccatttgcaccatctcg

SEQ ID NO: 1716295 - DNA, 25 bp, Homo sapien
gaactttgtgtaagatggctggcag

SEQ ID NO: 1716296 - DNA, 25 bp, Homo sapien
taagctgcggagtctttatgacacc

SEQ ID NO: 1716297 - DNA, 25 bp, Homo sapien
tgactggtgagggaaacaaagctgt

SEQ ID NO: 1716298 - DNA, 25 bp, Homo sapien
tccaaagccgctgtgaagtgtctag

SEQ ID NO: 1716299 - DNA, 25 bp, Homo sapien
tataagccattacatcgaggactgg

SEQ ID NO: 1716300 - DNA, 25 bp, Homo sapien
caaatcatgagtgagagtcctttca

SEQ ID NO: 1716301 - DNA, 25 bp, Homo sapien
cttggtgtatatccaggacccacaa

SEQ ID NO: 1716302 - DNA, 25 bp, Homo sapien
gataaagccctgttgtgttccccac

SEQ ID NO: 1716303 - DNA, 25 bp, Homo sapien
gacccacaatgaggcccttggagga

SEQ ID NO: 1716304 - DNA, 25 bp, Homo sapien
gctgctgcgtgctccgcgctatccc

SEQ ID NO: 1716305 - DNA, 25 bp, Homo sapien
cccgcagcccgaggtacggcgccgc

SEQ ID NO: 1716306 - DNA, 25 bp, Homo sapien
gctccgcgctatccccgggaagccg

SEQ ID NO: 1716307 - DNA, 25 bp, Homo sapien
gcgctccgctcgctgctgcgtgctc

SEQ ID NO: 1716308 - DNA, 25 bp, Homo sapien
gcatgaggttggtttgcgaccgcag

SEQ ID NO: 1716309 - DNA, 25 bp, Homo sapien
tcattccccggttaagtcagagtcc

SEQ ID NO: 1716310 - DNA, 25 bp, Homo sapien
tttgcgaccgcaggtgctgagagcc

SEQ ID NO: 1716311 - DNA, 25 bp, Homo sapien
cctggtaaagtcagggcatgaggtt

SEQ ID NO: 1716312 - DNA, 25 bp, Homo sapien
tgaccaaagagctggccagaagatt

SEQ ID NO: 1716313 - DNA, 25 bp, Homo sapien
tgtctcctagtacaagcccagaagc

SEQ ID NO: 1716314 - DNA, 25 bp, Homo sapien
tcatcccggccatagtgaaatgtct

SEQ ID NO: 1716315 - DNA, 25 bp, Homo sapien
gggtcatccgctatcaaagccaagg

SEQ ID NO: 1716316 - DNA, 25 bp, Homo sapien
tagcataacgctgcacaggttccaa

SEQ ID NO: 1716317 - DNA, 25 bp, Homo sapien
cccaggccatggttaaagagagagc

SEQ ID NO: 1716318 - DNA, 25 bp, Homo sapien
gaagttgaccactggttgagcctct

SEQ ID NO: 1716319 - DNA, 25 bp, Homo sapien
caagagtgaggaattcactgacccc

SEQ ID NO: 1716320 - DNA, 25 bp, Homo sapien
gaacatatgcatgctgaaggctcta

SEQ ID NO: 1716321 - DNA, 25 bp, Homo sapien
tgtatatcactgtcaagcctctgca

SEQ ID NO: 1716322 - DNA, 25 bp, Homo sapien
tgtgaacgtctcaggaatccctgta

SEQ ID NO: 1716323 - DNA, 25 bp, Homo sapien
ggactactacgcaacaatgagaatg

SEQ ID NO: 1716324 - DNA, 25 bp, Homo sapien
cttgttgtcattgtctaggagcagc

SEQ ID NO: 1716325 - DNA, 25 bp, Homo sapien
tgcatcctggctatgagacagggat

SEQ ID NO: 1716326 - DNA, 25 bp, Homo sapien
gggaagactcccttttgcatcctgg

SEQ ID NO: 1716327 - DNA, 25 bp, Homo sapien
tgattccaagtcaggttaagcatct

SEQ ID NO: 1716328 - DNA, 25 bp, Homo sapien
tctccaagtgttgtttgtggccagg

SEQ ID NO: 1716329 - DNA, 25 bp, Homo sapien
tcctctctaccaaacagtggccatg

SEQ ID NO: 1716330 - DNA, 25 bp, Homo sapien
cctgggaaggcagattctccaagtg

SEQ ID NO: 1716331 - DNA, 25 bp, Homo sapien
tcccacagggtatcagctggtcttt

SEQ ID NO: 1716332 - DNA, 25 bp, Homo sapien
caaaaaacacagagcgacagctggc

SEQ ID NO: 1716333 - DNA, 25 bp, Homo sapien
gaaaaccctgttatacatccctgag

SEQ ID NO: 1716334 - DNA, 25 bp, Homo sapien
cacactcaggagaggcttgtcagaa

SEQ ID NO: 1716335 - DNA, 25 bp, Homo sapien
gattccgatccaagcaagaaaaagg

SEQ ID NO: 1716336 - DNA, 25 bp, Homo sapien
caggctccagctatgttcagatgtc

SEQ ID NO: 1716337 - DNA, 25 bp, Homo sapien
cagcaaggtatctagcaagggaggc

SEQ ID NO: 1716338 - DNA, 25 bp, Homo sapien
gctttgcccgttgctatggactgaa

SEQ ID NO: 1716339 - DNA, 25 bp, Homo sapien
tcaatcaagacgagactagagcgag

SEQ ID NO: 1716340 - DNA, 25 bp, Homo sapien
aatccaaggagacaacgcagatttc

SEQ ID NO: 1716341 - DNA, 25 bp, Homo sapien
gtaacaggccctccattcttccctg

SEQ ID NO: 1716342 - DNA, 25 bp, Homo sapien
ggatgctggctgagcccatccccct

SEQ ID NO: 1716343 - DNA, 25 bp, Homo sapien
actacgacactgtccgctgctgctc

SEQ ID NO: 1716344 - DNA, 25 bp, Homo sapien
tctgatttggaaaccctcgggtgag

SEQ ID NO: 1716345 - DNA, 25 bp, Homo sapien
tcattttaggaaaccactcggtgcc

SEQ ID NO: 1716346 - DNA, 25 bp, Homo sapien
aaactgtacctgagcattcaaggcc

SEQ ID NO: 1716347 - DNA, 25 bp, Homo sapien
cacacagtgtagagcccagtttgag

SEQ ID NO: 1716348 - DNA, 25 bp, Homo sapien
atttctccaatttctcgcaatgccc

SEQ ID NO: 1716349 - DNA, 25 bp, Homo sapien
gcaacttctctgagagtcatgcctc

SEQ ID NO: 1716350 - DNA, 25 bp, Homo sapien
ccatgacggacccagaaaaagatga

SEQ ID NO: 1716351 - DNA, 25 bp, Homo sapien
gcaatgccccagcttttcagcaact

SEQ ID NO: 1716352 - DNA, 25 bp, Homo sapien
cctgctgtgtgtcacctttttccat

SEQ ID NO: 1716353 - DNA, 25 bp, Homo sapien
gtgcctgctgtgtgtcacctttttc

SEQ ID NO: 1716354 - DNA, 25 bp, Homo sapien
cacctcatcctggaaagtgcctgct

SEQ ID NO: 1716355 - DNA, 25 bp, Homo sapien
ccacctcatcctggaaagtgcctgc

SEQ ID NO: 1716356 - DNA, 25 bp, Homo sapien
aatgatgtgcttctcgagttattct

SEQ ID NO: 1716357 - DNA, 25 bp, Homo sapien
gcttctcgagttattctgcattcct

SEQ ID NO: 1716358 - DNA, 25 bp, Homo sapien
gatgtgcttctcgagttattctgca

SEQ ID NO: 1716359 - DNA, 25 bp, Homo sapien
cgagttattctgcattcctgagttc

SEQ ID NO: 1716360 - DNA, 25 bp, Homo sapien
atcccgtgctgagaccagggccaac

SEQ ID NO: 1716361 - DNA, 25 bp, Homo sapien
aggctccaaaccagccccacgtgat

SEQ ID NO: 1716362 - DNA, 25 bp, Homo sapien
ccacgtgatcccgtgctgagaccag

SEQ ID NO: 1716363 - DNA, 25 bp, Homo sapien
gtgatcccgtgctgagaccagggcc

SEQ ID NO: 1716364 - DNA, 25 bp, Homo sapien
tcagaaggacgctaggtatgaacct

SEQ ID NO: 1716365 - DNA, 25 bp, Homo sapien
taagcacacgctctttccaggattg

SEQ ID NO: 1716366 - DNA, 25 bp, Homo sapien
tatgaacctaggaactcaaaccagg

SEQ ID NO: 1716367 - DNA, 25 bp, Homo sapien
gagctattcttagcagccgcctaaa

SEQ ID NO: 1716368 - DNA, 25 bp, Homo sapien
tttctctccatgaaaacttccccag

SEQ ID NO: 1716369 - DNA, 25 bp, Homo sapien
tccatgaaaacttccccagcgccag

SEQ ID NO: 1716370 - DNA, 25 bp, Homo sapien
ccacttttctctccatgaaaacttc

SEQ ID NO: 1716371 - DNA, 25 bp, Homo sapien
ccatgaaaacttccccagcgccagc

SEQ ID NO: 1716372 - DNA, 25 bp, Homo sapien
ccttggcacagtcttacaccggctg

SEQ ID NO: 1716373 - DNA, 25 bp, Homo sapien
gcaggggtggcatatagctggtgca

SEQ ID NO: 1716374 - DNA, 25 bp, Homo sapien
cacagtcttacaccggctgtttaca

SEQ ID NO: 1716375 - DNA, 25 bp, Homo sapien
gcaccttggcacagtcttacaccgg

SEQ ID NO: 1716376 - DNA, 25 bp, Homo sapien
tggctctactagaggaatcagacat

SEQ ID NO: 1716377 - DNA, 25 bp, Homo sapien
ttcttggctctactagaggaatcag

SEQ ID NO: 1716378 - DNA, 25 bp, Homo sapien
cttggctctactagaggaatcagac

SEQ ID NO: 1716379 - DNA, 25 bp, Homo sapien
ctttcttggctctactagaggaatc

SEQ ID NO: 1716380 - DNA, 25 bp, Homo sapien
tcacttgattcatttccgggtctgg

SEQ ID NO: 1716381 - DNA, 25 bp, Homo sapien
gacagatgccctaggtcctcattgt

SEQ ID NO: 1716382 - DNA, 25 bp, Homo sapien
acagatgccctaggtcctcattgtg

SEQ ID NO: 1716383 - DNA, 25 bp, Homo sapien
agacagatgccctaggtcctcattg

SEQ ID NO: 1716384 - DNA, 25 bp, Homo sapien
ttgagctcctctgcgttcgggatgg

SEQ ID NO: 1716385 - DNA, 25 bp, Homo sapien
ccagctctgcaaagcggatgttgag

SEQ ID NO: 1716386 - DNA, 25 bp, Homo sapien
catggtggctcctcttgcggggggc

SEQ ID NO: 1716387 - DNA, 25 bp, Homo sapien
tgcagagggtggttgtcccggaggt

SEQ ID NO: 1716388 - DNA, 25 bp, Homo sapien
tgtgcctcggacattaaaagatccc

SEQ ID NO: 1716389 - DNA, 25 bp, Homo sapien
tctacaatccaatgcagagaggagg

SEQ ID NO: 1716390 - DNA, 25 bp, Homo sapien
ttatgctgtccatcccagtgagaga

SEQ ID NO: 1716391 - DNA, 25 bp, Homo sapien
gataacctaattactgcaccatgtg

SEQ ID NO: 1716392 - DNA, 25 bp, Homo sapien
ccacactcagcataggccctagcac

SEQ ID NO: 1716393 - DNA, 25 bp, Homo sapien
ccccacactcagcataggccctagc

SEQ ID NO: 1716394 - DNA, 25 bp, Homo sapien
gctcccccacactcagcataggccc

SEQ ID NO: 1716395 - DNA, 25 bp, Homo sapien
acactcagcataggccctagcacag

SEQ ID NO: 1716396 - DNA, 25 bp, Homo sapien
ttttgtcagtgagatccaattcatc

SEQ ID NO: 1716397 - DNA, 25 bp, Homo sapien
gcagtgcaaacatagcctctcggtt

SEQ ID NO: 1716398 - DNA, 25 bp, Homo sapien
cagggggcagtgcaaacatagcctc

SEQ ID NO: 1716399 - DNA, 25 bp, Homo sapien
aacatagcctctcggtttttgtcag

SEQ ID NO: 1716400 - DNA, 25 bp, Homo sapien
cccatgccatgaaccctgagatgtg

SEQ ID NO: 1716401 - DNA, 25 bp, Homo sapien
tgccatgaaccctgagatgtggcca

SEQ ID NO: 1716402 - DNA, 25 bp, Homo sapien
ccatgaaccctgagatgtggccaga

SEQ ID NO: 1716403 - DNA, 25 bp, Homo sapien
tggccagaggggtcagagagggcac

SEQ ID NO: 1716404 - DNA, 25 bp, Homo sapien
atcaggtgaatgcatgagcatgcca

SEQ ID NO: 1716405 - DNA, 25 bp, Homo sapien
aacatcaggtgaatgcatgagcatg

SEQ ID NO: 1716406 - DNA, 25 bp, Homo sapien
catcaggtgaatgcatgagcatgcc

SEQ ID NO: 1716407 - DNA, 25 bp, Homo sapien
acatcaggtgaatgcatgagcatgc

SEQ ID NO: 1716408 - DNA, 25 bp, Homo sapien
tgttcctccaacacctagaacaggg

SEQ ID NO: 1716409 - DNA, 25 bp, Homo sapien
ctgttgttcctccaacacctagaac

SEQ ID NO: 1716410 - DNA, 25 bp, Homo sapien
cactgttgttcctccaacacctaga

SEQ ID NO: 1716411 - DNA, 25 bp, Homo sapien
ttattcactgttgttcctccaacac

SEQ ID NO: 1716412 - DNA, 25 bp, Homo sapien
caggtcctgctttaagcgtttttga

SEQ ID NO: 1716413 - DNA, 25 bp, Homo sapien
ctatttctttgagtgtaagctccag

SEQ ID NO: 1716414 - DNA, 25 bp, Homo sapien
tctcaggttctagcaatgggcagcc

SEQ ID NO: 1716415 - DNA, 25 bp, Homo sapien
taagcctcaggcgtgggaatagcca

SEQ ID NO: 1716416 - DNA, 25 bp, Homo sapien
tgagactgcatcgacactgtgtggt

SEQ ID NO: 1716417 - DNA, 25 bp, Homo sapien
gatgtgtgagccctagcctgggaca

SEQ ID NO: 1716418 - DNA, 25 bp, Homo sapien
cgatgtaatagtcaggccagctggt

SEQ ID NO: 1716419 - DNA, 25 bp, Homo sapien
cagccatggaattgatgcggtcgat

SEQ ID NO: 1716420 - DNA, 25 bp, Homo sapien
tcgatgtaatagtcaggccagctgg

SEQ ID NO: 1716421 - DNA, 25 bp, Homo sapien
gaattgatgcggtcgatgtaatagt

SEQ ID NO: 1716422 - DNA, 25 bp, Homo sapien
acgacttggttcctcatctccgtct

SEQ ID NO: 1716423 - DNA, 25 bp, Homo sapien
tcatcaaacgcgtacagactctgca

SEQ ID NO: 1716424 - DNA, 25 bp, Homo sapien
tgtccggagggctgtcttcaggtct

SEQ ID NO: 1716425 - DNA, 25 bp, Homo sapien
gtctcctcctcatcaaacgcgtaca

SEQ ID NO: 1716426 - DNA, 25 bp, Homo sapien
ctatggtactaatggcctcaggctg

SEQ ID NO: 1716427 - DNA, 25 bp, Homo sapien
ccagctcaatgaagcgggtcacaaa

SEQ ID NO: 1716428 - DNA, 25 bp, Homo sapien
ccgcccctgggagttgttcatcaat

SEQ ID NO: 1716429 - DNA, 25 bp, Homo sapien
gaaatttagcagacaggtcaagccc

SEQ ID NO: 1716430 - DNA, 25 bp, Homo sapien
ctgcatacacctggtagtgcagcat

SEQ ID NO: 1716431 - DNA, 25 bp, Homo sapien
gtggccaccaggcacgaggcacaca

SEQ ID NO: 1716432 - DNA, 25 bp, Homo sapien
cgctctgctgcatacacctggtagt

SEQ ID NO: 1716433 - DNA, 25 bp, Homo sapien
ctggaagcgggttcgctctgctgca

SEQ ID NO: 1716434 - DNA, 25 bp, Homo sapien
agattcacttcatcccggtaccggc

SEQ ID NO: 1716435 - DNA, 25 bp, Homo sapien
taccggcccagacttcggtctagct

SEQ ID NO: 1716436 - DNA, 25 bp, Homo sapien
ttcggtctagctcgttcagcagggt

SEQ ID NO: 1716437 - DNA, 25 bp, Homo sapien
cccagacttcggtctagctcgttca

SEQ ID NO: 1716438 - DNA, 25 bp, Homo sapien
catgttgccggagcttgtcaatcac

SEQ ID NO: 1716439 - DNA, 25 bp, Homo sapien
taccgtagatgtaggcggaactcca

SEQ ID NO: 1716440 - DNA, 25 bp, Homo sapien
agcatcaggaattcataccgtagat

SEQ ID NO: 1716441 - DNA, 25 bp, Homo sapien
acaggctgtatacccagcatcagga

SEQ ID NO: 1716442 - DNA, 25 bp, Homo sapien
catgtcaaacctcctggctagctcc

SEQ ID NO: 1716443 - DNA, 25 bp, Homo sapien
tccgcaccatctcgaagaagtctaa

SEQ ID NO: 1716444 - DNA, 25 bp, Homo sapien
cattccgcaccatctcgaagaagtc

SEQ ID NO: 1716445 - DNA, 25 bp, Homo sapien
gcaccatctcgaagaagtctaaatg

SEQ ID NO: 1716446 - DNA, 25 bp, Homo sapien
gcaggggtaggcctccgtgtacttc

SEQ ID NO: 1716447 - DNA, 25 bp, Homo sapien
aggggtaggcctccgtgtacttcag

SEQ ID NO: 1716448 - DNA, 25 bp, Homo sapien
gtaggcctccgtgtacttcagcttc

SEQ ID NO: 1716449 - DNA, 25 bp, Homo sapien
gggtaggcctccgtgtacttcagct

SEQ ID NO: 1716450 - DNA, 25 bp, Homo sapien
tgctggaagtagccaccgttccgtt

SEQ ID NO: 1716451 - DNA, 25 bp, Homo sapien
ccgctcatcctggaggacaatctgc

SEQ ID NO: 1716452 - DNA, 25 bp, Homo sapien
ctggaagtagccaccgttccgtttg

SEQ ID NO: 1716453 - DNA, 25 bp, Homo sapien
ccacaccccgctcatcctggaggac

SEQ ID NO: 1716454 - DNA, 25 bp, Homo sapien
actgtttcacttcattctcgttgat

SEQ ID NO: 1716455 - DNA, 25 bp, Homo sapien
ctgtttcacttcattctcgttgatg

SEQ ID NO: 1716456 - DNA, 25 bp, Homo sapien
gtttcacttcattctcgttgatgag

SEQ ID NO: 1716457 - DNA, 25 bp, Homo sapien
tttcacttcattctcgttgatgagc

SEQ ID NO: 1716458 - DNA, 25 bp, Homo sapien
ctccagacggctcacaagctccatg

SEQ ID NO: 1716459 - DNA, 25 bp, Homo sapien
aatgtctttgtctcgcattcccgct

SEQ ID NO: 1716460 - DNA, 25 bp, Homo sapien
gtccttcattttgttcagcgtccgc

SEQ ID NO: 1716461 - DNA, 25 bp, Homo sapien
tttgttcagcgtccgcatcatctct

SEQ ID NO: 1716462 - DNA, 25 bp, Homo sapien
tatgtaaagggggagatgcttgcat

SEQ ID NO: 1716463 - DNA, 25 bp, Homo sapien
ggtcttggctcaactatgtaaaggg

SEQ ID NO: 1716464 - DNA, 25 bp, Homo sapien
ccagggtcttggctcaactatgtaa

SEQ ID NO: 1716465 - DNA, 25 bp, Homo sapien
gggtccttggcctctccgacacctg

SEQ ID NO: 1716466 - DNA, 25 bp, Homo sapien
tatttttctaacacaaagatgccac

SEQ ID NO: 1716467 - DNA, 25 bp, Homo sapien
ttatttttctaacacaaagatgcca

SEQ ID NO: 1716468 - DNA, 25 bp, Homo sapien
catgccgaggcaaggtggggcacct

SEQ ID NO: 1716469 - DNA, 25 bp, Homo sapien
gttgtcattgaggaagacaaggtga

SEQ ID NO: 1716470 - DNA, 25 bp, Homo sapien
cccatgccgaggcaaggtggggcac

SEQ ID NO: 1716471 - DNA, 25 bp, Homo sapien
attggttgtcattgaggaagacaag

SEQ ID NO: 1716472 - DNA, 25 bp, Homo sapien
tcagcttcacccagttgaaggactt

SEQ ID NO: 1716473 - DNA, 25 bp, Homo sapien
tgggggacacgctttttcctgagtg

SEQ ID NO: 1716474 - DNA, 25 bp, Homo sapien
ccagttgaaggacttcagtgggtga

SEQ ID NO: 1716475 - DNA, 25 bp, Homo sapien
aggctgggggacacgctttttcctg

SEQ ID NO: 1716476 - DNA, 25 bp, Homo sapien
ttccacctagattataaagccagag

SEQ ID NO: 1716477 - DNA, 25 bp, Homo sapien
gagatgttatcagaggcccgggaaa

SEQ ID NO: 1716478 - DNA, 25 bp, Homo sapien
cacgttctgcagagcggttggccta

SEQ ID NO: 1716479 - DNA, 25 bp, Homo sapien
cccgggaaactacaaatggactgtg

SEQ ID NO: 1716480 - DNA, 25 bp, Homo sapien
gtcagtcactgttccaagtactttg

SEQ ID NO: 1716481 - DNA, 25 bp, Homo sapien
gagtgcagcatgtagcggtgcaatc

SEQ ID NO: 1716482 - DNA, 25 bp, Homo sapien
ttatatgaagactttctatgtgtca

SEQ ID NO: 1716483 - DNA, 25 bp, Homo sapien
tcactgttccaagtactttgtatgt

SEQ ID NO: 1716484 - DNA, 25 bp, Homo sapien
aaacatcttttcaaaatcctctagg

SEQ ID NO: 1716485 - DNA, 25 bp, Homo sapien
tccgaaatacctgcatgtcatcaat

SEQ ID NO: 1716486 - DNA, 25 bp, Homo sapien
attccatacggtgccagggacacgc

SEQ ID NO: 1716487 - DNA, 25 bp, Homo sapien
tctaggtccaggatccgaaatacct

SEQ ID NO: 1716488 - DNA, 25 bp, Homo sapien
tcatctcccgaatcacattccagga

SEQ ID NO: 1716489 - DNA, 25 bp, Homo sapien
acctcaggaacaccctgcgctctgc

SEQ ID NO: 1716490 - DNA, 25 bp, Homo sapien
tgactggaagaccagactgctggca

SEQ ID NO: 1716491 - DNA, 25 bp, Homo sapien
tactcggcacagtttcagattccca

SEQ ID NO: 1716492 - DNA, 25 bp, Homo sapien
gtggaagctactgactcaaaactcg

SEQ ID NO: 1716493 - DNA, 25 bp, Homo sapien
gctactgactcaaaactcgcatggg

SEQ ID NO: 1716494 - DNA, 25 bp, Homo sapien
ctctgttctccctgacgccgatgga

SEQ ID NO: 1716495 - DNA, 25 bp, Homo sapien
cgccgatggagtggaagctactgac

SEQ ID NO: 1716496 - DNA, 25 bp, Homo sapien
tcacaaatgaactcgatctggaagc

SEQ ID NO: 1716497 - DNA, 25 bp, Homo sapien
ctaaatagaggaggagtcacaaatg

SEQ ID NO: 1716498 - DNA, 25 bp, Homo sapien
gaggaggagtcacaaatgaactcga

SEQ ID NO: 1716499 - DNA, 25 bp, Homo sapien
aatgaactcgatctggaagctccag

SEQ ID NO: 1716500 - DNA, 25 bp, Homo sapien
tctgctgaaaacctgcagagagggt

SEQ ID NO: 1716501 - DNA, 25 bp, Homo sapien
ttcctccatcctgggatgagttcac

SEQ ID NO: 1716502 - DNA, 25 bp, Homo sapien
aggacattcctccatcctgggatga

SEQ ID NO: 1716503 - DNA, 25 bp, Homo sapien
agagggtggaggacattcctccatc

SEQ ID NO: 1716504 - DNA, 25 bp, Homo sapien
caaacgaagcggagatcaggcagct

SEQ ID NO: 1716505 - DNA, 25 bp, Homo sapien
tgtagacaggcacccataagtggca

SEQ ID NO: 1716506 - DNA, 25 bp, Homo sapien
gacatgcactcacggagaagccaaa

SEQ ID NO: 1716507 - DNA, 25 bp, Homo sapien
taagtggcactagacaggagctgct

SEQ ID NO: 1716508 - DNA, 25 bp, Homo sapien
tgctgagaaggattagttatcagct

SEQ ID NO: 1716509 - DNA, 25 bp, Homo sapien
gctgagaaggattagttatcagctc

SEQ ID NO: 1716510 - DNA, 25 bp, Homo sapien
ctgctgagaaggattagttatcagc

SEQ ID NO: 1716511 - DNA, 25 bp, Homo sapien
gcagcccgggacagcagttaaaagt

SEQ ID NO: 1716512 - DNA, 25 bp, Homo sapien
taaaagttggagtggtcagagcccc

SEQ ID NO: 1716513 - DNA, 25 bp, Homo sapien
tagagagcatccacaagttcagagg

SEQ ID NO: 1716514 - DNA, 25 bp, Homo sapien
tgtgaattgtgtcgtgcctaccctg

SEQ ID NO: 1716515 - DNA, 25 bp, Homo sapien
cttgcgggaagccaggtagatgtct

SEQ ID NO: 1716516 - DNA, 25 bp, Homo sapien
ggccatcaatgaccgacagctcttt

SEQ ID NO: 1716517 - DNA, 25 bp, Homo sapien
agaaggatgatgcagttttgggccc

SEQ ID NO: 1716518 - DNA, 25 bp, Homo sapien
gacagctctttgaccttgcgggaag

SEQ ID NO: 1716519 - DNA, 25 bp, Homo sapien
tcttcaatgtagaccaaagggacag

SEQ ID NO: 1716520 - DNA, 25 bp, Homo sapien
tccgtgggcttagagcaactcagct

SEQ ID NO: 1716521 - DNA, 25 bp, Homo sapien
ttatcggcaagccactaagagggca

SEQ ID NO: 1716522 - DNA, 25 bp, Homo sapien
cgagagacagttccagatcaatgcc

SEQ ID NO: 1716523 - DNA, 25 bp, Homo sapien
gatctcctcgttagaaagcttcaac

SEQ ID NO: 1716524 - DNA, 25 bp, Homo sapien
ccatcttcaagatggcctgccggat

SEQ ID NO: 1716525 - DNA, 25 bp, Homo sapien
gtccttagcaaggtcctcctgctca

SEQ ID NO: 1716526 - DNA, 25 bp, Homo sapien
atggcctgccggatctcctcgttag

SEQ ID NO: 1716527 - DNA, 25 bp, Homo sapien
taaccatgcccttgatgaacagaag

SEQ ID NO: 1716528 - DNA, 25 bp, Homo sapien
tgactcctggagaacacttagcctt

SEQ ID NO: 1716529 - DNA, 25 bp, Homo sapien
tccctggagttatacctaagagtgg

SEQ ID NO: 1716530 - DNA, 25 bp, Homo sapien
tcctcgtcagcacatggcattgtca

SEQ ID NO: 1716531 - DNA, 25 bp, Homo sapien
ctgcaaagagcaggcgcaagtcaca

SEQ ID NO: 1716532 - DNA, 25 bp, Homo sapien
ctgtactgacttgggtcaagatggg

SEQ ID NO: 1716533 - DNA, 25 bp, Homo sapien
caagtcacacaagcaactggtgagc

SEQ ID NO: 1716534 - DNA, 25 bp, Homo sapien
tgtgagaagctgtactgacttgggt

SEQ ID NO: 1716535 - DNA, 25 bp, Homo sapien
aagcggtcagcacgggccatccgct

SEQ ID NO: 1716536 - DNA, 25 bp, Homo sapien
tgctcatttcatagaggaagcggtc

SEQ ID NO: 1716537 - DNA, 25 bp, Homo sapien
ggccatccgctcaatttcatgcttg

SEQ ID NO: 1716538 - DNA, 25 bp, Homo sapien
caatttcatgcttgtgctcctccag

SEQ ID NO: 1716539 - DNA, 25 bp, Homo sapien
tgcttgaatccccaccatgcccatg

SEQ ID NO: 1716540 - DNA, 25 bp, Homo sapien
ctgcttgaatccccaccatgcccat

SEQ ID NO: 1716541 - DNA, 25 bp, Homo sapien
tgaatccccaccatgcccatggccc

SEQ ID NO: 1716542 - DNA, 25 bp, Homo sapien
atccccaccatgcccatggcccaac

SEQ ID NO: 1716543 - DNA, 25 bp, Homo sapien
tcttgaagaagagggcttgcagtcg

SEQ ID NO: 1716544 - DNA, 25 bp, Homo sapien
ttgggctttgcctcagccagccgct

SEQ ID NO: 1716545 - DNA, 25 bp, Homo sapien
cagtcgctgctggtagtggtcaatc

SEQ ID NO: 1716546 - DNA, 25 bp, Homo sapien
cgctcctggaatttcttcttgaaga

SEQ ID NO: 1716547 - DNA, 25 bp, Homo sapien
gtgaagaagataaggattcacccat

SEQ ID NO: 1716548 - DNA, 25 bp, Homo sapien
gcaggatgaaagaaagttgtgaaga

SEQ ID NO: 1716549 - DNA, 25 bp, Homo sapien
gaagataaggattcacccatcacca

SEQ ID NO: 1716550 - DNA, 25 bp, Homo sapien
gataaggattcacccatcaccaggg

SEQ ID NO: 1716551 - DNA, 25 bp, Homo sapien
gcctccactgactaattcttaggct

SEQ ID NO: 1716552 - DNA, 25 bp, Homo sapien
cagctccgcctcctgggttcatgcc

SEQ ID NO: 1716553 - DNA, 25 bp, Homo sapien
gtggttccatgtcggctcactgcca

SEQ ID NO: 1716554 - DNA, 25 bp, Homo sapien
gccagagtggtctcaatctcctgac

SEQ ID NO: 1716555 - DNA, 25 bp, Homo sapien
agtggttccatgtcggctcactgcc

SEQ ID NO: 1716556 - DNA, 25 bp, Homo sapien
aatgaataccccactgctacatgta

SEQ ID NO: 1716557 - DNA, 25 bp, Homo sapien
gctacatgtaacagcagggacaacc

SEQ ID NO: 1716558 - DNA, 25 bp, Homo sapien
ccacattattcttggtgggtatttg

SEQ ID NO: 1716559 - DNA, 25 bp, Homo sapien
tactctataacctaaaagccacatt

SEQ ID NO: 1716560 - DNA, 25 bp, Homo sapien
cttgctgcggaccagctcccgggag

SEQ ID NO: 1716561 - DNA, 25 bp, Homo sapien
tgcctatggctaggatgacctctag

SEQ ID NO: 1716562 - DNA, 25 bp, Homo sapien
ggtgtcagcgatcttgttgaggctg

SEQ ID NO: 1716563 - DNA, 25 bp, Homo sapien
catctgtctaagacgcttgctgcgg

SEQ ID NO: 1716564 - DNA, 25 bp, Homo sapien
tgatcaggtaatggagcagagagat

SEQ ID NO: 1716565 - DNA, 25 bp, Homo sapien
gctctgaaggcatgtttagaatatc

SEQ ID NO: 1716566 - DNA, 25 bp, Homo sapien
tcaggcccctcctgaggttgcccac

SEQ ID NO: 1716567 - DNA, 25 bp, Homo sapien
ccaccgctctcaggcccctcctgag

SEQ ID NO: 1716568 - DNA, 25 bp, Homo sapien
cacctccaccgctctcaggcccctc

SEQ ID NO: 1716569 - DNA, 25 bp, Homo sapien
ctctcaggcccctcctgaggttgcc

SEQ ID NO: 1716570 - DNA, 25 bp, Homo sapien
ccaggtaggcactgacaaggtactc

SEQ ID NO: 1716571 - DNA, 25 bp, Homo sapien
caggtaggcactgacaaggtactca

SEQ ID NO: 1716572 - DNA, 25 bp, Homo sapien
aggtaggcactgacaaggtactcac

SEQ ID NO: 1716573 - DNA, 25 bp, Homo sapien
tcgctcatgacagggacaaacttgt

SEQ ID NO: 1716574 - DNA, 25 bp, Homo sapien
tgtcactgggctcccgtacctggcg

SEQ ID NO: 1716575 - DNA, 25 bp, Homo sapien
acaaacttgtcactgggctcccgta

SEQ ID NO: 1716576 - DNA, 25 bp, Homo sapien
ctgaagctggacaccgtgatgaagt

SEQ ID NO: 1716577 - DNA, 25 bp, Homo sapien
gaaggcctgcaagaaggtatcaaag

SEQ ID NO: 1716578 - DNA, 25 bp, Homo sapien
aagaattcgtctggctgcatcttgc

SEQ ID NO: 1716579 - DNA, 25 bp, Homo sapien
ctagatcctgccgggcctctgagaa

SEQ ID NO: 1716580 - DNA, 25 bp, Homo sapien
tcttgctgtcatgctccccgaagtg

SEQ ID NO: 1716581 - DNA, 25 bp, Homo sapien
agggccgacaccaggtcatcgaact

SEQ ID NO: 1716582 - DNA, 25 bp, Homo sapien
taagtccttgtcgaagacctcccca

SEQ ID NO: 1716583 - DNA, 25 bp, Homo sapien
gcggctgcgcttgagcttgcataag

SEQ ID NO: 1716584 - DNA, 25 bp, Homo sapien
tccctgatcgcttgcggctgcgctt

SEQ ID NO: 1716585 - DNA, 25 bp, Homo sapien
tctgttgagcctccccttgagagaa

SEQ ID NO: 1716586 - DNA, 25 bp, Homo sapien
caaggcaacatttgaggtcactgtc

SEQ ID NO: 1716587 - DNA, 25 bp, Homo sapien
tagtgagccatagctgtggaaaccc

SEQ ID NO: 1716588 - DNA, 25 bp, Homo sapien
cagaggacttgtgacatgggaaaca

SEQ ID NO: 1716589 - DNA, 25 bp, Homo sapien
agtggacacatggttccaagtggcc

SEQ ID NO: 1716590 - DNA, 25 bp, Homo sapien
gggccacccttagagacagcatgtt

SEQ ID NO: 1716591 - DNA, 25 bp, Homo sapien
tccccaacgccagtggacacatggt

SEQ ID NO: 1716592 - DNA, 25 bp, Homo sapien
tctgccttgaagctagtgttagaga

SEQ ID NO: 1716593 - DNA, 25 bp, Homo sapien
caggtgatgtgctccccagaggata

SEQ ID NO: 1716594 - DNA, 25 bp, Homo sapien
gatgaaaggccaactcggaacgtgg

SEQ ID NO: 1716595 - DNA, 25 bp, Homo sapien
tatgagtccatggtccaaggcactg

SEQ ID NO: 1716596 - DNA, 25 bp, Homo sapien
ggctgagctctggaacaacgtattt

SEQ ID NO: 1716597 - DNA, 25 bp, Homo sapien
gaggagcccactttgaggagagcaa

SEQ ID NO: 1716598 - DNA, 25 bp, Homo sapien
tctgaaacaggatgtgcacacatgg

SEQ ID NO: 1716599 - DNA, 25 bp, Homo sapien
tcagcttaacagttgcccggtcctg

SEQ ID NO: 1716600 - DNA, 25 bp, Homo sapien
caagcttgcctgaagaatggatccc

SEQ ID NO: 1716601 - DNA, 25 bp, Homo sapien
catgataaacttgaactggtaactc

SEQ ID NO: 1716602 - DNA, 25 bp, Homo sapien
gctaaaaatgtttggctagccagag

SEQ ID NO: 1716603 - DNA, 25 bp, Homo sapien
tggtaactctcaaaaactgtaatgg

SEQ ID NO: 1716604 - DNA, 25 bp, Homo sapien
cccggagttgtacaatgtggaggcc

SEQ ID NO: 1716605 - DNA, 25 bp, Homo sapien
caacgaaagtcataccgcagaaaag

SEQ ID NO: 1716606 - DNA, 25 bp, Homo sapien
acttgtggccctggattgcgtccag

SEQ ID NO: 1716607 - DNA, 25 bp, Homo sapien
tgcgtccagtgctggcagcattgca

SEQ ID NO: 1716608 - DNA, 25 bp, Homo sapien
ccagcagtggttattcgacaacgaa

SEQ ID NO: 1716609 - DNA, 25 bp, Homo sapien
ggtactgccaggaaggatgaatatt

SEQ ID NO: 1716610 - DNA, 25 bp, Homo sapien
tttggtgcttccttacagtctggcc

SEQ ID NO: 1716611 - DNA, 25 bp, Homo sapien
ggagacttgaatatgttagcgcagt

SEQ ID NO: 1716612 - DNA, 25 bp, Homo sapien
gggacgaccaaaactctgctttagc

SEQ ID NO: 1716613 - DNA, 25 bp, Homo sapien
ctggttctacaacctgctctggcct

SEQ ID NO: 1716614 - DNA, 25 bp, Homo sapien
tggttctacaacctgctctggcctg

SEQ ID NO: 1716615 - DNA, 25 bp, Homo sapien
aacaaatgacccacgaccacaaagg

SEQ ID NO: 1716616 - DNA, 25 bp, Homo sapien
aatgacccacgaccacaaagggcat

SEQ ID NO: 1716617 - DNA, 25 bp, Homo sapien
agacaatttgtaccgaaacaaatga

SEQ ID NO: 1716618 - DNA, 25 bp, Homo sapien
aagacaatttgtaccgaaacaaatg

SEQ ID NO: 1716619 - DNA, 25 bp, Homo sapien
cactgggtcctggaaaaggggcagc

SEQ ID NO: 1716620 - DNA, 25 bp, Homo sapien
tctgctccagactccgggctcactg

SEQ ID NO: 1716621 - DNA, 25 bp, Homo sapien
gctcactgggtcctggaaaaggggc

SEQ ID NO: 1716622 - DNA, 25 bp, Homo sapien
tgctccagactccgggctcactggg

SEQ ID NO: 1716623 - DNA, 25 bp, Homo sapien
ccttcacatcctacaaacagctttt

SEQ ID NO: 1716624 - DNA, 25 bp, Homo sapien
ccttgaccaggtcccacagtatttc

SEQ ID NO: 1716625 - DNA, 25 bp, Homo sapien
tgaccaggtcccacagtatttcttt

SEQ ID NO: 1716626 - DNA, 25 bp, Homo sapien
cctccactcagcctttacggggtag

SEQ ID NO: 1716627 - DNA, 25 bp, Homo sapien
cgcatcttgatcctgccaccagttt

SEQ ID NO: 1716628 - DNA, 25 bp, Homo sapien
tattataaccaataaagtggccgca

SEQ ID NO: 1716629 - DNA, 25 bp, Homo sapien
ttctatctccctcaggtggcctgat

SEQ ID NO: 1716630 - DNA, 25 bp, Homo sapien
tttttgggcaacatcaggcaaggtt

SEQ ID NO: 1716631 - DNA, 25 bp, Homo sapien
taatctggatcttctatgcaaaact

SEQ ID NO: 1716632 - DNA, 25 bp, Homo sapien
ttaatctggatcttctatgcaaaac

SEQ ID NO: 1716633 - DNA, 25 bp, Homo sapien
ctgtatgctatgttcagcctggaac

SEQ ID NO: 1716634 - DNA, 25 bp, Homo sapien
cacttgctgtatgctatgttcagcc

SEQ ID NO: 1716635 - DNA, 25 bp, Homo sapien
tgtatgctatgttcagcctggaaca

SEQ ID NO: 1716636 - DNA, 25 bp, Homo sapien
tcatccacttgctgtatgctatgtt

SEQ ID NO: 1716637 - DNA, 25 bp, Homo sapien
tctctgcttggtctctcagtgactg

SEQ ID NO: 1716638 - DNA, 25 bp, Homo sapien
tccactgccatgcacatgaacatag

SEQ ID NO: 1716639 - DNA, 25 bp, Homo sapien
tcagtgactgtctctttgaccccag

SEQ ID NO: 1716640 - DNA, 25 bp, Homo sapien
tgcacagcttctataaaagacagaa

SEQ ID NO: 1716641 - DNA, 25 bp, Homo sapien
ggacaataaacctgagctcacagtt

SEQ ID NO: 1716642 - DNA, 25 bp, Homo sapien
cctggttgactatagccttgagtga

SEQ ID NO: 1716643 - DNA, 25 bp, Homo sapien
tgaaggagcaggtctcattcctggt

SEQ ID NO: 1716644 - DNA, 25 bp, Homo sapien
gccttgagtgaggacaataaacctg

SEQ ID NO: 1716645 - DNA, 25 bp, Homo sapien
tgatggtggggtcaatgccatgttc

SEQ ID NO: 1716646 - DNA, 25 bp, Homo sapien
catcatggatcacttccaagaattt

SEQ ID NO: 1716647 - DNA, 25 bp, Homo sapien
tcactgtcaccatggtaggtgatgg

SEQ ID NO: 1716648 - DNA, 25 bp, Homo sapien
aagaatttgacactgatctggttgc

SEQ ID NO: 1716649 - DNA, 25 bp, Homo sapien
aggatggtatgaagaacatgtttgc

SEQ ID NO: 1716650 - DNA, 25 bp, Homo sapien
caggatggtatgaagaacatgtttg

SEQ ID NO: 1716651 - DNA, 25 bp, Homo sapien
tcagcaaacagagtccatggtccca

SEQ ID NO: 1716652 - DNA, 25 bp, Homo sapien
agcaaacagagtccatggtcccagg

SEQ ID NO: 1716653 - DNA, 25 bp, Homo sapien
gtccatggtcccaggttctagatct

SEQ ID NO: 1716654 - DNA, 25 bp, Homo sapien
ccatggtcccaggttctagatctac

SEQ ID NO: 1716655 - DNA, 25 bp, Homo sapien
ctgaccagaaacaaagttgtctcat

SEQ ID NO: 1716656 - DNA, 25 bp, Homo sapien
catctaaagatctggccaaaaggac

SEQ ID NO: 1716657 - DNA, 25 bp, Homo sapien
gaaacaaagttgtctcatctaaaga

SEQ ID NO: 1716658 - DNA, 25 bp, Homo sapien
tcatctaaagatctggccaaaagga

SEQ ID NO: 1716659 - DNA, 25 bp, Homo sapien
ctcagccccttctgtgtagtggcct

SEQ ID NO: 1716660 - DNA, 25 bp, Homo sapien
agctcagccccttctgtgtagtggc

SEQ ID NO: 1716661 - DNA, 25 bp, Homo sapien
tccaggacagaatcaaccagctcag

SEQ ID NO: 1716662 - DNA, 25 bp, Homo sapien
agaatcaaccagctcagccccttct

SEQ ID NO: 1716663 - DNA, 25 bp, Homo sapien
ctgcaggcagtcacagttctctgtc

SEQ ID NO: 1716664 - DNA, 25 bp, Homo sapien
gtcacagttctctgtctccttccat

SEQ ID NO: 1716665 - DNA, 25 bp, Homo sapien
caggcagtcacagttctctgtctcc

SEQ ID NO: 1716666 - DNA, 25 bp, Homo sapien
agtcacagttctctgtctccttcca

SEQ ID NO: 1716667 - DNA, 25 bp, Homo sapien
ccagtgagtgggtcacctagaagac

SEQ ID NO: 1716668 - DNA, 25 bp, Homo sapien
tgttcacaatgcaatcagggtactc

SEQ ID NO: 1716669 - DNA, 25 bp, Homo sapien
tcttgctaatgagagtgcccattcc

SEQ ID NO: 1716670 - DNA, 25 bp, Homo sapien
tcttctcagatcttgctaatgagag

SEQ ID NO: 1716671 - DNA, 25 bp, Homo sapien
cgaccttggtgtcactttgggtgaa

SEQ ID NO: 1716672 - DNA, 25 bp, Homo sapien
ctcgaccttggtgtcactttgggtg

SEQ ID NO: 1716673 - DNA, 25 bp, Homo sapien
tgtcactttgggtgaaggcactaca

SEQ ID NO: 1716674 - DNA, 25 bp, Homo sapien
accttggtgtcactttgggtgaagg

SEQ ID NO: 1716675 - DNA, 25 bp, Homo sapien
actgttcatggttgctgagacgagg

SEQ ID NO: 1716676 - DNA, 25 bp, Homo sapien
gggttcatatccctgtaggttggtg

SEQ ID NO: 1716677 - DNA, 25 bp, Homo sapien
tgggagcagatgttatacagggctt

SEQ ID NO: 1716678 - DNA, 25 bp, Homo sapien
cattgtcaatggaatacgtctcatc

SEQ ID NO: 1716679 - DNA, 25 bp, Homo sapien
aagagccaggcataaagaaatggag

SEQ ID NO: 1716680 - DNA, 25 bp, Homo sapien
agccaggcataaagaaatggagatg

SEQ ID NO: 1716681 - DNA, 25 bp, Homo sapien
ggtgagaggggaagagccaggcata

SEQ ID NO: 1716682 - DNA, 25 bp, Homo sapien
ggaagagccaggcataaagaaatgg

SEQ ID NO: 1716683 - DNA, 25 bp, Homo sapien
tgaattcagacactgtgagcttgat

SEQ ID NO: 1716684 - DNA, 25 bp, Homo sapien
gggtgaattcagacactgtgagctt

SEQ ID NO: 1716685 - DNA, 25 bp, Homo sapien
ggtgaattcagacactgtgagcttg

SEQ ID NO: 1716686 - DNA, 25 bp, Homo sapien
gaattcagacactgtgagcttgata

SEQ ID NO: 1716687 - DNA, 25 bp, Homo sapien
ggatatctgaccagtgaagacagca

SEQ ID NO: 1716688 - DNA, 25 bp, Homo sapien
agtataagccatggcggggttcaca

SEQ ID NO: 1716689 - DNA, 25 bp, Homo sapien
cttcatggatatctgaccagtgaag

SEQ ID NO: 1716690 - DNA, 25 bp, Homo sapien
catggatatctgaccagtgaagaca

SEQ ID NO: 1716691 - DNA, 25 bp, Homo sapien
tgcgatgtacttgaagagcttctgg

SEQ ID NO: 1716692 - DNA, 25 bp, Homo sapien
gatgaccatgttgacaataccagtg

SEQ ID NO: 1716693 - DNA, 25 bp, Homo sapien
ttttcaggccatgagatgggatgtc

SEQ ID NO: 1716694 - DNA, 25 bp, Homo sapien
cagactgttcttgacgttgttggag

SEQ ID NO: 1716695 - DNA, 25 bp, Homo sapien
tcttaccccagataaatagcagcaa

SEQ ID NO: 1716696 - DNA, 25 bp, Homo sapien
tcctgaacatacacaacctgccaag

SEQ ID NO: 1716697 - DNA, 25 bp, Homo sapien
taatgacattgaagccataaagtcc

SEQ ID NO: 1716698 - DNA, 25 bp, Homo sapien
cctgccaagattgaagcatctagaa

SEQ ID NO: 1716699 - DNA, 25 bp, Homo sapien
cagtatgggactgaacagcctcggg

SEQ ID NO: 1716700 - DNA, 25 bp, Homo sapien
tctctcaaggagtacaggcagacct

SEQ ID NO: 1716701 - DNA, 25 bp, Homo sapien
cccactttagtcagatgcagaggat

SEQ ID NO: 1716702 - DNA, 25 bp, Homo sapien
gctggacaccccatgcagctgatgg

SEQ ID NO: 1716703 - DNA, 25 bp, Homo sapien
ctcgctgaccgagcactcagggtgg

SEQ ID NO: 1716704 - DNA, 25 bp, Homo sapien
tgtttggtgcccttgccatacagag

SEQ ID NO: 1716705 - DNA, 25 bp, Homo sapien
gtgccctcgctgaccgagcactcag

SEQ ID NO: 1716706 - DNA, 25 bp, Homo sapien
ggctgctgtttggtgcccttgccat

SEQ ID NO: 1716707 - DNA, 25 bp, Homo sapien
cagttgcagattctgttcctctccc

SEQ ID NO: 1716708 - DNA, 25 bp, Homo sapien
gcccacacagttgcagattctgttc

SEQ ID NO: 1716709 - DNA, 25 bp, Homo sapien
ctggagcccacacagttgcagattc

SEQ ID NO: 1716710 - DNA, 25 bp, Homo sapien
cacacagttgcagattctgttcctc

SEQ ID NO: 1716711 - DNA, 25 bp, Homo sapien
ggtcacaaactgtgatacagtcata

SEQ ID NO: 1716712 - DNA, 25 bp, Homo sapien
tcattccaggacttaagagattttc

SEQ ID NO: 1716713 - DNA, 25 bp, Homo sapien
taccctctgtaagccggtaagccaa

SEQ ID NO: 1716714 - DNA, 25 bp, Homo sapien
taagccaagactgtggagcagggtc

SEQ ID NO: 1716715 - DNA, 25 bp, Homo sapien
ttgtcagtttatcagtggagacgca

SEQ ID NO: 1716716 - DNA, 25 bp, Homo sapien
aaaaagacgtacataagctgcttag

SEQ ID NO: 1716717 - DNA, 25 bp, Homo sapien
taaacctaatcaaaggagatgtgtg

SEQ ID NO: 1716718 - DNA, 25 bp, Homo sapien
gatattacaatctggaaggcatgga

SEQ ID NO: 1716719 - DNA, 25 bp, Homo sapien
ggcaaattggttctccacgtggtag

SEQ ID NO: 1716720 - DNA, 25 bp, Homo sapien
cgtggtagatatagcaccaccaaaa

SEQ ID NO: 1716721 - DNA, 25 bp, Homo sapien
acgcttggcaaattggttctccacg

SEQ ID NO: 1716722 - DNA, 25 bp, Homo sapien
cttgcaaaagcaggtttcacgcttg

SEQ ID NO: 1716723 - DNA, 25 bp, Homo sapien
cttgccaaaacatacaaagtgagag

SEQ ID NO: 1716724 - DNA, 25 bp, Homo sapien
tgccaaaacatacaaagtgagagct

SEQ ID NO: 1716725 - DNA, 25 bp, Homo sapien
ccttgccaaaacatacaaagtgaga

SEQ ID NO: 1716726 - DNA, 25 bp, Homo sapien
gccaaaacatacaaagtgagagctg

SEQ ID NO: 1716727 - DNA, 25 bp, Homo sapien
actggctgctggttcttgttttatc

SEQ ID NO: 1716728 - DNA, 25 bp, Homo sapien
ctgctgactggctgctggttcttgt

SEQ ID NO: 1716729 - DNA, 25 bp, Homo sapien
gctggttcttgttttatcacaagga

SEQ ID NO: 1716730 - DNA, 25 bp, Homo sapien
ctggttcttgttttatcacaaggaa

SEQ ID NO: 1716731 - DNA, 25 bp, Homo sapien
tccagagttctagatagttggtgtg

SEQ ID NO: 1716732 - DNA, 25 bp, Homo sapien
tctagatagttggtgtgttgttcca

SEQ ID NO: 1716733 - DNA, 25 bp, Homo sapien
caaaatgataccacagccctgaaac

SEQ ID NO: 1716734 - DNA, 25 bp, Homo sapien
ttgttccacgatcaggcctgggtga

SEQ ID NO: 1716735 - DNA, 25 bp, Homo sapien
tggcagcacttatcgcagaaagaat

SEQ ID NO: 1716736 - DNA, 25 bp, Homo sapien
gcacttatcgcagaaagaatcagga

SEQ ID NO: 1716737 - DNA, 25 bp, Homo sapien
cctggcagcacttatcgcagaaaga

SEQ ID NO: 1716738 - DNA, 25 bp, Homo sapien
ttatcgcagaaagaatcaggaagcc

SEQ ID NO: 1716739 - DNA, 25 bp, Homo sapien
agcaggggctatcaccttctcttcc

SEQ ID NO: 1716740 - DNA, 25 bp, Homo sapien
cttctccagtggcatggatggtctc

SEQ ID NO: 1716741 - DNA, 25 bp, Homo sapien
gtttcctcttgagtgaatcgttcat

SEQ ID NO: 1716742 - DNA, 25 bp, Homo sapien
gagtgaatcgttcatttcacacagc

SEQ ID NO: 1716743 - DNA, 25 bp, Homo sapien
ccgagccttctccagtggcatggat

SEQ ID NO: 1716744 - DNA, 25 bp, Homo sapien
tcaaccacctgggccaggaatcctc

SEQ ID NO: 1716745 - DNA, 25 bp, Homo sapien
caaccacctgggccaggaatcctcc

SEQ ID NO: 1716746 - DNA, 25 bp, Homo sapien
ccaatcaggcatgaaagatggtgag

SEQ ID NO: 1716747 - DNA, 25 bp, Homo sapien
ggtgagacttcccatgcatgctcaa

SEQ ID NO: 1716748 - DNA, 25 bp, Homo sapien
gaggacaaaccatagccaatcaggc

SEQ ID NO: 1716749 - DNA, 25 bp, Homo sapien
gctcaaccataaagggtggcgactt

SEQ ID NO: 1716750 - DNA, 25 bp, Homo sapien
gagcagggtggcagatcagcttcca

SEQ ID NO: 1716751 - DNA, 25 bp, Homo sapien
ttccagggtaggctgttttcttggc

SEQ ID NO: 1716752 - DNA, 25 bp, Homo sapien
cagggtaggctgttttcttggcaag

SEQ ID NO: 1716753 - DNA, 25 bp, Homo sapien
agcagggtggcagatcagcttccag

SEQ ID NO: 1716754 - DNA, 25 bp, Homo sapien
cttttgtgtatgccttgatgtcccc

SEQ ID NO: 1716755 - DNA, 25 bp, Homo sapien
gggccagcccttttgtgtatgcctt

SEQ ID NO: 1716756 - DNA, 25 bp, Homo sapien
ctcatctgttggacagctgcctacc

SEQ ID NO: 1716757 - DNA, 25 bp, Homo sapien
gcctaccagctgctctctagcctct

SEQ ID NO: 1716758 - DNA, 25 bp, Homo sapien
ctgttggacagctgcctaccagctg

SEQ ID NO: 1716759 - DNA, 25 bp, Homo sapien
catctgttggacagctgcctaccag

SEQ ID NO: 1716760 - DNA, 25 bp, Homo sapien
cagttgctatagctccatgggctct

SEQ ID NO: 1716761 - DNA, 25 bp, Homo sapien
gggctctatccaaacacgtctgttg

SEQ ID NO: 1716762 - DNA, 25 bp, Homo sapien
taaaagatgcccagttgctatagct

SEQ ID NO: 1716763 - DNA, 25 bp, Homo sapien
actgctcttatttcccgcttctgcc

SEQ ID NO: 1716764 - DNA, 25 bp, Homo sapien
gcaccttcagggacaccaccctcat

SEQ ID NO: 1716765 - DNA, 25 bp, Homo sapien
ggctgtgtcctccacatcggccctt

SEQ ID NO: 1716766 - DNA, 25 bp, Homo sapien
gtcctccacatcggcccttggccat

SEQ ID NO: 1716767 - DNA, 25 bp, Homo sapien
cttccaaagggctgtgtcctccaca

SEQ ID NO: 1716768 - DNA, 25 bp, Homo sapien
tgtgtcctccacatcggcccttggc

SEQ ID NO: 1716769 - DNA, 25 bp, Homo sapien
cattattcaggctccaattgcaggg

SEQ ID NO: 1716770 - DNA, 25 bp, Homo sapien
gctgagcatgtaaccaaaattggct

SEQ ID NO: 1716771 - DNA, 25 bp, Homo sapien
taaatgatgccctaatacccagatc

SEQ ID NO: 1716772 - DNA, 25 bp, Homo sapien
tgtaatggcaaactaaatgatgccc

SEQ ID NO: 1716773 - DNA, 25 bp, Homo sapien
cagatccctgaagactgcaccgttc

SEQ ID NO: 1716774 - DNA, 25 bp, Homo sapien
tcactgcacatgaaaatgacctgca

SEQ ID NO: 1716775 - DNA, 25 bp, Homo sapien
gggtacaaatcctgtagccgtctgc

SEQ ID NO: 1716776 - DNA, 25 bp, Homo sapien
ctcctgtgggtaccggcagatggtc

SEQ ID NO: 1716777 - DNA, 25 bp, Homo sapien
cataacttggtttatgaagcactgg

SEQ ID NO: 1716778 - DNA, 25 bp, Homo sapien
gagcaggtgaagtgaaaggctttaa

SEQ ID NO: 1716779 - DNA, 25 bp, Homo sapien
agtgggttgaagagggctttgctgg

SEQ ID NO: 1716780 - DNA, 25 bp, Homo sapien
ggcctgctgactccagtgggttgaa

SEQ ID NO: 1716781 - DNA, 25 bp, Homo sapien
cacatcctaggccaagtaagttctt

SEQ ID NO: 1716782 - DNA, 25 bp, Homo sapien
tccaggaacagatgaaggttgcgaa

SEQ ID NO: 1716783 - DNA, 25 bp, Homo sapien
ggcaggctacgggtatcttccagga

SEQ ID NO: 1716784 - DNA, 25 bp, Homo sapien
tgccaggtaagtgaaagtgcgctcc

SEQ ID NO: 1716785 - DNA, 25 bp, Homo sapien
aagaggctaaagagggtcctcggcg

SEQ ID NO: 1716786 - DNA, 25 bp, Homo sapien
aaaatacggaggtgaagaagagcag

SEQ ID NO: 1716787 - DNA, 25 bp, Homo sapien
gggcgagtaccagactgcagctgca

SEQ ID NO: 1716788 - DNA, 25 bp, Homo sapien
agaagagcagaatgggcgagtacca

SEQ ID NO: 1716789 - DNA, 25 bp, Homo sapien
ttcagagatgggctggcgctggcga

SEQ ID NO: 1716790 - DNA, 25 bp, Homo sapien
ggcgctggcgaaggcaggtctgcca

SEQ ID NO: 1716791 - DNA, 25 bp, Homo sapien
gtcctgggctctttcgtggcacgca

SEQ ID NO: 1716792 - DNA, 25 bp, Homo sapien
aggtctgccagtgacgtatttgtcc

SEQ ID NO: 1716793 - DNA, 25 bp, Homo sapien
cattgtagcttgatcctgcgcagtg

SEQ ID NO: 1716794 - DNA, 25 bp, Homo sapien
tacctacgtgaggagccaagtttcc

SEQ ID NO: 1716795 - DNA, 25 bp, Homo sapien
ttcctagaaaatggcggtgcgcgca

SEQ ID NO: 1716796 - DNA, 25 bp, Homo sapien
ggtcaagtctactccctgaaggtgg

SEQ ID NO: 1716797 - DNA, 25 bp, Homo sapien
gacctctgcatggttccagttttaa

SEQ ID NO: 1716798 - DNA, 25 bp, Homo sapien
ctctgcatggttccagttttaatgg

SEQ ID NO: 1716799 - DNA, 25 bp, Homo sapien
acctctgcatggttccagttttaat

SEQ ID NO: 1716800 - DNA, 25 bp, Homo sapien
cctctgcatggttccagttttaatg

SEQ ID NO: 1716801 - DNA, 25 bp, Homo sapien
gtgggcattgtgttttctcagatgc

SEQ ID NO: 1716802 - DNA, 25 bp, Homo sapien
gttttctcagatgcacccagcccat

SEQ ID NO: 1716803 - DNA, 25 bp, Homo sapien
ggcattgtgttttctcagatgcacc

SEQ ID NO: 1716804 - DNA, 25 bp, Homo sapien
gaaggagtgggcattgtgttttctc

SEQ ID NO: 1716805 - DNA, 25 bp, Homo sapien
ttggatgtgaatagtgaggacagca

SEQ ID NO: 1716806 - DNA, 25 bp, Homo sapien
ggtgcctgtgttggatgtgaatagt

SEQ ID NO: 1716807 - DNA, 25 bp, Homo sapien
atgtgaatagtgaggacagcagcag

SEQ ID NO: 1716808 - DNA, 25 bp, Homo sapien
tggtgttcccctggaggtgggtcca

SEQ ID NO: 1716809 - DNA, 25 bp, Homo sapien
ctggggaggaagccaaataagagaa

SEQ ID NO: 1716810 - DNA, 25 bp, Homo sapien
ggaggaagccaaataagagaaactg

SEQ ID NO: 1716811 - DNA, 25 bp, Homo sapien
aagccaaataagagaaactgaaggg

SEQ ID NO: 1716812 - DNA, 25 bp, Homo sapien
ggaagccaaataagagaaactgaag

SEQ ID NO: 1716813 - DNA, 25 bp, Homo sapien
tgtcttgacctggaaacacctatcc

SEQ ID NO: 1716814 - DNA, 25 bp, Homo sapien
gaatcgaccaattgtcttgacctgg

SEQ ID NO: 1716815 - DNA, 25 bp, Homo sapien
tttgatggaatcgaccaattgtctt

SEQ ID NO: 1716816 - DNA, 25 bp, Homo sapien
gaccaattgtcttgacctggaaaca

SEQ ID NO: 1716817 - DNA, 25 bp, Homo sapien
accatggcgctaaagagctttgcct

SEQ ID NO: 1716818 - DNA, 25 bp, Homo sapien
caccatggcgctaaagagctttgcc

SEQ ID NO: 1716819 - DNA, 25 bp, Homo sapien
tggaagccattagggtgccaccaac

SEQ ID NO: 1716820 - DNA, 25 bp, Homo sapien
ttccccaagaagtgctgtgacccca

SEQ ID NO: 1716821 - DNA, 25 bp, Homo sapien
ggaagccattagggtgccaccaact

SEQ ID NO: 1716822 - DNA, 25 bp, Homo sapien
cttccccaagaagtgctgtgacccc

SEQ ID NO: 1716823 - DNA, 25 bp, Homo sapien
tctgctgatttatctctgtccaggg

SEQ ID NO: 1716824 - DNA, 25 bp, Homo sapien
ggagtttatcttgtcactagctgca

SEQ ID NO: 1716825 - DNA, 25 bp, Homo sapien
gaattcttctctatgagagggcatt

SEQ ID NO: 1716826 - DNA, 25 bp, Homo sapien
ttcagagccttgctgtcgatgttgg

SEQ ID NO: 1716827 - DNA, 25 bp, Homo sapien
cgaggccacgggcaactgtcccctc

SEQ ID NO: 1716828 - DNA, 25 bp, Homo sapien
taggctcgtagtcttcacctctgcc

SEQ ID NO: 1716829 - DNA, 25 bp, Homo sapien
agatctaggctcgtagtcttcacct

SEQ ID NO: 1716830 - DNA, 25 bp, Homo sapien
gtcccctccaaagatctaggctcgt

SEQ ID NO: 1716831 - DNA, 25 bp, Homo sapien
tggtcttgcgggcaaagttccaggg

SEQ ID NO: 1716832 - DNA, 25 bp, Homo sapien
tcttgcgggcaaagttccagggcca

SEQ ID NO: 1716833 - DNA, 25 bp, Homo sapien
gtcttgcgggcaaagttccagggcc

SEQ ID NO: 1716834 - DNA, 25 bp, Homo sapien
gtggtcttgcgggcaaagttccagg

SEQ ID NO: 1716835 - DNA, 25 bp, Homo sapien
gcacagtgtctttctaacattctca

SEQ ID NO: 1716836 - DNA, 25 bp, Homo sapien
ctcactcaggctggacccattggct

SEQ ID NO: 1716837 - DNA, 25 bp, Homo sapien
cccattggcttctgcatcgctgagc

SEQ ID NO: 1716838 - DNA, 25 bp, Homo sapien
tccccacctgactccatactgggcc

SEQ ID NO: 1716839 - DNA, 25 bp, Homo sapien
tcacatgcagctggccattgaccat

SEQ ID NO: 1716840 - DNA, 25 bp, Homo sapien
gcagctggccattgaccatgaactt

SEQ ID NO: 1716841 - DNA, 25 bp, Homo sapien
tctgcttgaagcagaacctccggtg

SEQ ID NO: 1716842 - DNA, 25 bp, Homo sapien
ctccggtgactggtcacatgcagct

SEQ ID NO: 1716843 - DNA, 25 bp, Homo sapien
gctggttatggttggttgtgactgg

SEQ ID NO: 1716844 - DNA, 25 bp, Homo sapien
gggggcacacgcagaacctgtggcc

SEQ ID NO: 1716845 - DNA, 25 bp, Homo sapien
ggtgctggttatggttggttgtgac

SEQ ID NO: 1716846 - DNA, 25 bp, Homo sapien
ggctggtgctggttatggttggttg

SEQ ID NO: 1716847 - DNA, 25 bp, Homo sapien
ttcccgctcaggatttgacccataa

SEQ ID NO: 1716848 - DNA, 25 bp, Homo sapien
ctttttgctgatacaaaagatgccc

SEQ ID NO: 1716849 - DNA, 25 bp, Homo sapien
tgacccataattataatccctttcc

SEQ ID NO: 1716850 - DNA, 25 bp, Homo sapien
tcagcatgctgctaggatgcctagc

SEQ ID NO: 1716851 - DNA, 25 bp, Homo sapien
catcagaggcttcatctcttaccat

SEQ ID NO: 1716852 - DNA, 25 bp, Homo sapien
tccccccaatatcatcagaggcttc

SEQ ID NO: 1716853 - DNA, 25 bp, Homo sapien
ccatcctccccccaatatcatcaga

SEQ ID NO: 1716854 - DNA, 25 bp, Homo sapien
ccacccagcggccatccatcctccc

SEQ ID NO: 1716855 - DNA, 25 bp, Homo sapien
tgccccatgatggtgcggtccatca

SEQ ID NO: 1716856 - DNA, 25 bp, Homo sapien
ggtctttggcctcaactgggcttcc

SEQ ID NO: 1716857 - DNA, 25 bp, Homo sapien
tttctgaatatgttgggtctttggc

SEQ ID NO: 1716858 - DNA, 25 bp, Homo sapien
acctctgccccatgatggtgcggtc

SEQ ID NO: 1716859 - DNA, 25 bp, Homo sapien
aaggagctcattggcccggcagctg

SEQ ID NO: 1716860 - DNA, 25 bp, Homo sapien
ggcagaaggagctcattggcccggc

SEQ ID NO: 1716861 - DNA, 25 bp, Homo sapien
cattggcccggcagctgtccctgct

SEQ ID NO: 1716862 - DNA, 25 bp, Homo sapien
cagaaggagctcattggcccggcag

SEQ ID NO: 1716863 - DNA, 25 bp, Homo sapien
cacactgcattcaggcgaggggtca

SEQ ID NO: 1716864 - DNA, 25 bp, Homo sapien
gataagttcaggactggccttccca

SEQ ID NO: 1716865 - DNA, 25 bp, Homo sapien
tgatgatagctgataagttcaggac

SEQ ID NO: 1716866 - DNA, 25 bp, Homo sapien
tcaggcgaggggtcacaagaatctt

SEQ ID NO: 1716867 - DNA, 25 bp, Homo sapien
gatttacgagtccatgatccagcct

SEQ ID NO: 1716868 - DNA, 25 bp, Homo sapien
tgcagcggaacctagaatgagctct

SEQ ID NO: 1716869 - DNA, 25 bp, Homo sapien
tagaggtcctcctatagcacaaggc

SEQ ID NO: 1716870 - DNA, 25 bp, Homo sapien
gacatctctgcggagccatctaggc

SEQ ID NO: 1716871 - DNA, 25 bp, Homo sapien
gcgtctttgcgatcccgggtgtccg

SEQ ID NO: 1716872 - DNA, 25 bp, Homo sapien
tcgcccaggtgagtggtcgccggcg

SEQ ID NO: 1716873 - DNA, 25 bp, Homo sapien
tcctaggtgctcatgcggacacccc

SEQ ID NO: 1716874 - DNA, 25 bp, Homo sapien
gaagactccccgcatcctaggtgct

SEQ ID NO: 1716875 - DNA, 25 bp, Homo sapien
atctgcctgcattcgccggagccgc

SEQ ID NO: 1716876 - DNA, 25 bp, Homo sapien
aataagcggctcagggctttccccg

SEQ ID NO: 1716877 - DNA, 25 bp, Homo sapien
ccgccggagggtttagctcgagtct

SEQ ID NO: 1716878 - DNA, 25 bp, Homo sapien
ctaaatgccatggatataactgaat

SEQ ID NO: 1716879 - DNA, 25 bp, Homo sapien
ccgcagcagcgcaggactgtctccc

SEQ ID NO: 1716880 - DNA, 25 bp, Homo sapien
tgttgtgacgaacaatccaactcag

SEQ ID NO: 1716881 - DNA, 25 bp, Homo sapien
tcttcaaggacctctctcactagca

SEQ ID NO: 1716882 - DNA, 25 bp, Homo sapien
cataatgtgttgtgacgaacaatcc

SEQ ID NO: 1716883 - DNA, 25 bp, Homo sapien
gccactgcaaaccacccttgtcaca

SEQ ID NO: 1716884 - DNA, 25 bp, Homo sapien
cactgtggtttgttgtcatcatgga

SEQ ID NO: 1716885 - DNA, 25 bp, Homo sapien
gagcactcactgtagtttgctatca

SEQ ID NO: 1716886 - DNA, 25 bp, Homo sapien
gcactcactgtggtttgttgtcatc

SEQ ID NO: 1716887 - DNA, 25 bp, Homo sapien
ggtttgttgtcattgtggagcactc

SEQ ID NO: 1716888 - DNA, 25 bp, Homo sapien
cgtagtttgttgtcattgtggagta

SEQ ID NO: 1716889 - DNA, 25 bp, Homo sapien
cattgtggagtactcactgtagttt

SEQ ID NO: 1716890 - DNA, 25 bp, Homo sapien
gagcactcactgtagtttgctatca

SEQ ID NO: 1716891 - DNA, 25 bp, Homo sapien
agtttgttgtcatcatggagcactc

SEQ ID NO: 1716892 - DNA, 25 bp, Homo sapien
agagaagtagaaagctctggaatag

SEQ ID NO: 1716893 - DNA, 25 bp, Homo sapien
ggtcaaagatctgccagaagtaaga

SEQ ID NO: 1716894 - DNA, 25 bp, Homo sapien
ttctgggtcaaagatctgccagaag

SEQ ID NO: 1716895 - DNA, 25 bp, Homo sapien
ctctggaatagtggactctgtaggg

SEQ ID NO: 1716896 - DNA, 25 bp, Homo sapien
ccggcaggattgtctgagaggatca

SEQ ID NO: 1716897 - DNA, 25 bp, Homo sapien
tcttcacccttcgtaatttctgtcc

SEQ ID NO: 1716898 - DNA, 25 bp, Homo sapien
caaccaaccagttggccctgctggt

SEQ ID NO: 1716899 - DNA, 25 bp, Homo sapien
ggtctgatcgccctccacagatggg

SEQ ID NO: 1716900 - DNA, 25 bp, Homo sapien
tcagggccacccaaggtctgtgggc

SEQ ID NO: 1716901 - DNA, 25 bp, Homo sapien
ctgctgatccaagggagagggcaat

SEQ ID NO: 1716902 - DNA, 25 bp, Homo sapien
ttgtccgagcaaccaccctgctgat

SEQ ID NO: 1716903 - DNA, 25 bp, Homo sapien
gagggcaatgcttctccaacgagga

SEQ ID NO: 1716904 - DNA, 25 bp, Homo sapien
cataaatgccgatggtgtgccgtgg

SEQ ID NO: 1716905 - DNA, 25 bp, Homo sapien
catacagtccctggcgggcagagat

SEQ ID NO: 1716906 - DNA, 25 bp, Homo sapien
cagagatgctccacgtctgtatcat

SEQ ID NO: 1716907 - DNA, 25 bp, Homo sapien
gggaggagcttttggaagatgtaac

SEQ ID NO: 1716908 - DNA, 25 bp, Homo sapien
agggccttgtggaagaagcttctta

SEQ ID NO: 1716909 - DNA, 25 bp, Homo sapien
tgcctgtcattatctccacttggaa

SEQ ID NO: 1716910 - DNA, 25 bp, Homo sapien
gcttcttaacgttctgcctgtcatt

SEQ ID NO: 1716911 - DNA, 25 bp, Homo sapien
gaagcttcttaacgttctgcctgtc

SEQ ID NO: 1716912 - DNA, 25 bp, Homo sapien
gaggctcctattggctctgattccc

SEQ ID NO: 1716913 - DNA, 25 bp, Homo sapien
gggatgaggctcctattggctctga

SEQ ID NO: 1716914 - DNA, 25 bp, Homo sapien
gctcctattggctctgattccctgg

SEQ ID NO: 1716915 - DNA, 25 bp, Homo sapien
ccacacggatctgcaggcccatggc

SEQ ID NO: 1716916 - DNA, 25 bp, Homo sapien
actggatcgaagtggaggggcctcc

SEQ ID NO: 1716917 - DNA, 25 bp, Homo sapien
atcagagcaacaatcttctccttct

SEQ ID NO: 1716918 - DNA, 25 bp, Homo sapien
cctgtcactggatcgaagtggaggg

SEQ ID NO: 1716919 - DNA, 25 bp, Homo sapien
ccatcagagcaacaatcttctcctt

SEQ ID NO: 1716920 - DNA, 25 bp, Homo sapien
atttctgtcggatgatatcagagac

SEQ ID NO: 1716921 - DNA, 25 bp, Homo sapien
aacggatttctgtcggatgatatca

SEQ ID NO: 1716922 - DNA, 25 bp, Homo sapien
taagaacggatttctgtcggatgat

SEQ ID NO: 1716923 - DNA, 25 bp, Homo sapien
cacttaagaacggatttctgtcgga

SEQ ID NO: 1716924 - DNA, 25 bp, Homo sapien
atgaagctgtctccagattcacacc

SEQ ID NO: 1716925 - DNA, 25 bp, Homo sapien
tcatgaagctgtctccagattcaca

SEQ ID NO: 1716926 - DNA, 25 bp, Homo sapien
agctgtctccagattcacaccacat

SEQ ID NO: 1716927 - DNA, 25 bp, Homo sapien
ttctcatgaagctgtctccagattc

SEQ ID NO: 1716928 - DNA, 25 bp, Homo sapien
ggaaatggcttcaaatcttaaagta

SEQ ID NO: 1716929 - DNA, 25 bp, Homo sapien
ttcttcctgctcctgttggaaggaa

SEQ ID NO: 1716930 - DNA, 25 bp, Homo sapien
gaaatggcttcaaatcttaaagtag

SEQ ID NO: 1716931 - DNA, 25 bp, Homo sapien
tgctcctgttggaaggaaatggctt

SEQ ID NO: 1716932 - DNA, 25 bp, Homo sapien
gataacctatttgcgagaagagata

SEQ ID NO: 1716933 - DNA, 25 bp, Homo sapien
ctttgtgactgataacctatttgcg

SEQ ID NO: 1716934 - DNA, 25 bp, Homo sapien
tctgggcccctttgtgactgataac

SEQ ID NO: 1716935 - DNA, 25 bp, Homo sapien
gactgataacctatttgcgagaaga

SEQ ID NO: 1716936 - DNA, 25 bp, Homo sapien
caggtgggtaactggatggccacat

SEQ ID NO: 1716937 - DNA, 25 bp, Homo sapien
ggacaggtgggtaactggatggcca

SEQ ID NO: 1716938 - DNA, 25 bp, Homo sapien
tcagtataatgaaactcatagggtt

SEQ ID NO: 1716939 - DNA, 25 bp, Homo sapien
aggtataactctggctgatttttct

SEQ ID NO: 1716940 - DNA, 25 bp, Homo sapien
tgtgtccttgtccggagtgtcctcc

SEQ ID NO: 1716941 - DNA, 25 bp, Homo sapien
gccgtagggacctccatgctccatt

SEQ ID NO: 1716942 - DNA, 25 bp, Homo sapien
actgctctgcttggcgacatgatgg

SEQ ID NO: 1716943 - DNA, 25 bp, Homo sapien
tggtactgctctgcttggcgacatg

SEQ ID NO: 1716944 - DNA, 25 bp, Homo sapien
atggtgctgatgaacttgaaaggat

SEQ ID NO: 1716945 - DNA, 25 bp, Homo sapien
taggcactgagacctttttggctgt

SEQ ID NO: 1716946 - DNA, 25 bp, Homo sapien
ttttggctgtggtgatagatggtgc

SEQ ID NO: 1716947 - DNA, 25 bp, Homo sapien
ctcagggagcaggaataggcactga

SEQ ID NO: 1716948 - DNA, 25 bp, Homo sapien
ggtctgggtaaaggcctgcttgatt

SEQ ID NO: 1716949 - DNA, 25 bp, Homo sapien
acgcttccaagcaacaggggtctgg

SEQ ID NO: 1716950 - DNA, 25 bp, Homo sapien
ggtaaaggcctgcttgattgccctt

SEQ ID NO: 1716951 - DNA, 25 bp, Homo sapien
tgcttgattgccctttcccgtaaca

SEQ ID NO: 1716952 - DNA, 25 bp, Homo sapien
cttgaggccacatgtacccttccct

SEQ ID NO: 1716953 - DNA, 25 bp, Homo sapien
ctccagtgccatccaagcctctcac

SEQ ID NO: 1716954 - DNA, 25 bp, Homo sapien
aagtactgcttgaggccacatgtac

SEQ ID NO: 1716955 - DNA, 25 bp, Homo sapien
cttccctccagtgccatccaagcct

SEQ ID NO: 1716956 - DNA, 25 bp, Homo sapien
ttgctgggcaccaatccacacatac

SEQ ID NO: 1716957 - DNA, 25 bp, Homo sapien
tcatcttgctgggcaccaatccaca

SEQ ID NO: 1716958 - DNA, 25 bp, Homo sapien
cctcatcttgctgggcaccaatcca

SEQ ID NO: 1716959 - DNA, 25 bp, Homo sapien
tcttgctgggcaccaatccacacat

SEQ ID NO: 1716960 - DNA, 25 bp, Homo sapien
gacctgttccatatgggagtaccag

SEQ ID NO: 1716961 - DNA, 25 bp, Homo sapien
tgagagtttcccagagttcagagaa

SEQ ID NO: 1716962 - DNA, 25 bp, Homo sapien
acctcagagggtcttcagcatcatc

SEQ ID NO: 1716963 - DNA, 25 bp, Homo sapien
caagagtcagaatgggacctgttcc

SEQ ID NO: 1716964 - DNA, 25 bp, Homo sapien
ttggtttctgcatgtctatgatgga

SEQ ID NO: 1716965 - DNA, 25 bp, Homo sapien
ggtttctgcatgtctatgatggagc

SEQ ID NO: 1716966 - DNA, 25 bp, Homo sapien
tttctgcatgtctatgatggagccc

SEQ ID NO: 1716967 - DNA, 25 bp, Homo sapien
gtttctgcatgtctatgatggagcc

SEQ ID NO: 1716968 - DNA, 25 bp, Homo sapien
catcctcctggcttctctggctgtg

SEQ ID NO: 1716969 - DNA, 25 bp, Homo sapien
tcctcctggcttctctggctgtggg

SEQ ID NO: 1716970 - DNA, 25 bp, Homo sapien
atcctcctggcttctctggctgtgg

SEQ ID NO: 1716971 - DNA, 25 bp, Homo sapien
tcatcctcctggcttctctggctgt

SEQ ID NO: 1716972 - DNA, 25 bp, Homo sapien
ctctctctggtgcttttcgggacag

SEQ ID NO: 1716973 - DNA, 25 bp, Homo sapien
tctggtgcttttcgggacagaaggc

SEQ ID NO: 1716974 - DNA, 25 bp, Homo sapien
aacgggaagaatccccgcagcccag

SEQ ID NO: 1716975 - DNA, 25 bp, Homo sapien
ttccctgcctaagaggtgcctgggg

SEQ ID NO: 1716976 - DNA, 25 bp, Homo sapien
tgtgtctctctgtcataccgaggct

SEQ ID NO: 1716977 - DNA, 25 bp, Homo sapien
ttgacatgaagttgtgtctctctgt

SEQ ID NO: 1716978 - DNA, 25 bp, Homo sapien
tcattcttcaccctgtccctaggag

SEQ ID NO: 1716979 - DNA, 25 bp, Homo sapien
tctgtcataccgaggctgatcagct

SEQ ID NO: 1716980 - DNA, 25 bp, Homo sapien
tttgtaccaaatctgttctttcttc

SEQ ID NO: 1716981 - DNA, 25 bp, Homo sapien
gctttgtaccaaatctgttctttct

SEQ ID NO: 1716982 - DNA, 25 bp, Homo sapien
gtaccaaatctgttctttcttccat

SEQ ID NO: 1716983 - DNA, 25 bp, Homo sapien
tgtaccaaatctgttctttcttcca

SEQ ID NO: 1716984 - DNA, 25 bp, Homo sapien
cagcccaaggtgggaatcttttctg

SEQ ID NO: 1716985 - DNA, 25 bp, Homo sapien
agcccaaggtgggaatcttttctgg

SEQ ID NO: 1716986 - DNA, 25 bp, Homo sapien
gcccaaggtgggaatcttttctgga

SEQ ID NO: 1716987 - DNA, 25 bp, Homo sapien
tggtttcctttaccagggtagcagc

SEQ ID NO: 1716988 - DNA, 25 bp, Homo sapien
tttaccagggtagcagcttgccacc

SEQ ID NO: 1716989 - DNA, 25 bp, Homo sapien
ggtgcccttgatgtattcctgtggt

SEQ ID NO: 1716990 - DNA, 25 bp, Homo sapien
aatgcaagtacattatctaggtgcc

SEQ ID NO: 1716991 - DNA, 25 bp, Homo sapien
cattcacattgaagattttttgctt

SEQ ID NO: 1716992 - DNA, 25 bp, Homo sapien
tgaagattttttgctttcctctgct

SEQ ID NO: 1716993 - DNA, 25 bp, Homo sapien
cattgaagattttttgctttcctct

SEQ ID NO: 1716994 - DNA, 25 bp, Homo sapien
tcattcacattgaagattttttgct

SEQ ID NO: 1716995 - DNA, 25 bp, Homo sapien
gattttggcatcaggccagtcaagt

SEQ ID NO: 1716996 - DNA, 25 bp, Homo sapien
ggcatcaggccagtcaagtttccag

SEQ ID NO: 1716997 - DNA, 25 bp, Homo sapien
tgtcactgacaatggataacaatga

SEQ ID NO: 1716998 - DNA, 25 bp, Homo sapien
cttcagattataatgggattttggc

SEQ ID NO: 1716999 - DNA, 25 bp, Homo sapien
gatgccaaggcctaactagactgag

SEQ ID NO: 1717000 - DNA, 25 bp, Homo sapien
ttaaaccagttgataccaggatgcc

SEQ ID NO: 1717001 - DNA, 25 bp, Homo sapien
tccagacagtgggatacacggcagt

SEQ ID NO: 1717002 - DNA, 25 bp, Homo sapien
cagtgctttggaatctcggcaggca

SEQ ID NO: 1717003 - DNA, 25 bp, Homo sapien
ttccttgtctttgacttctgagctg

SEQ ID NO: 1717004 - DNA, 25 bp, Homo sapien
tatttccttgtctttgacttctgag

SEQ ID NO: 1717005 - DNA, 25 bp, Homo sapien
ctctatttccttgtctttgacttct

SEQ ID NO: 1717006 - DNA, 25 bp, Homo sapien
ttgtctttgacttctgagctggtca

SEQ ID NO: 1717007 - DNA, 25 bp, Homo sapien
ggatagaaaacagccagcaggagcc

SEQ ID NO: 1717008 - DNA, 25 bp, Homo sapien
aatggatagaaaacagccagcagga

SEQ ID NO: 1717009 - DNA, 25 bp, Homo sapien
tggatagaaaacagccagcaggagc

SEQ ID NO: 1717010 - DNA, 25 bp, Homo sapien
ctaaatggatagaaaacagccagca

SEQ ID NO: 1717011 - DNA, 25 bp, Homo sapien
accttatgctgttcagtggctttca

SEQ ID NO: 1717012 - DNA, 25 bp, Homo sapien
tctcaatatggtcactatcataacc

SEQ ID NO: 1717013 - DNA, 25 bp, Homo sapien
tatcataaccttatgctgttcagtg

SEQ ID NO: 1717014 - DNA, 25 bp, Homo sapien
tggtcactatcataaccttatgctg

SEQ ID NO: 1717015 - DNA, 25 bp, Homo sapien
taactgtgccagcttgttctttcag

SEQ ID NO: 1717016 - DNA, 25 bp, Homo sapien
agcaataactgtgccagcttgttct

SEQ ID NO: 1717017 - DNA, 25 bp, Homo sapien
ataactgtgccagcttgttctttca

SEQ ID NO: 1717018 - DNA, 25 bp, Homo sapien
caataactgtgccagcttgttcttt

SEQ ID NO: 1717019 - DNA, 25 bp, Homo sapien
caacatgcgtgtcttgaggccaaaa

SEQ ID NO: 1717020 - DNA, 25 bp, Homo sapien
atgaacttcaacatgcgtgtcttga

SEQ ID NO: 1717021 - DNA, 25 bp, Homo sapien
cagtctttcgaatgctcccgcattt

SEQ ID NO: 1717022 - DNA, 25 bp, Homo sapien
aatgctcccgcatttgggatgatga

SEQ ID NO: 1717023 - DNA, 25 bp, Homo sapien
cagatcaggagtagaatcccaggca

SEQ ID NO: 1717024 - DNA, 25 bp, Homo sapien
ttaggatccaccaagcagctgtagt

SEQ ID NO: 1717025 - DNA, 25 bp, Homo sapien
gcagatgtcagataccgcagcttcc

SEQ ID NO: 1717026 - DNA, 25 bp, Homo sapien
catttacttggccagtgggtgtcac

SEQ ID NO: 1717027 - DNA, 25 bp, Homo sapien
gcagcctcagctgcaaatcaagact

SEQ ID NO: 1717028 - DNA, 25 bp, Homo sapien
gcctcagctgcaaatcaagactgcc

SEQ ID NO: 1717029 - DNA, 25 bp, Homo sapien
tgaaccatgacagcttcccaaacag

SEQ ID NO: 1717030 - DNA, 25 bp, Homo sapien
ccctgaagaaaagcctctgaaccat

SEQ ID NO: 1717031 - DNA, 25 bp, Homo sapien
tcatgcttgattgccagatgggatc

SEQ ID NO: 1717032 - DNA, 25 bp, Homo sapien
cttgaagtgtctggccaagtcctgt

SEQ ID NO: 1717033 - DNA, 25 bp, Homo sapien
tgactcatagatccggaatttcagg

SEQ ID NO: 1717034 - DNA, 25 bp, Homo sapien
tggaccagcagtgatcagaaacctt

SEQ ID NO: 1717035 - DNA, 25 bp, Homo sapien
gctttcaccacagttgggcttcttg

SEQ ID NO: 1717036 - DNA, 25 bp, Homo sapien
tggctaggtggcagaagcggaccat

SEQ ID NO: 1717037 - DNA, 25 bp, Homo sapien
caggctttcaccacagttgggcttc

SEQ ID NO: 1717038 - DNA, 25 bp, Homo sapien
ctgaggagaccatctgtggctaggt

SEQ ID NO: 1717039 - DNA, 25 bp, Homo sapien
acgtctacacttcctcctgctggat

SEQ ID NO: 1717040 - DNA, 25 bp, Homo sapien
ttgcagaggcccacgtctacacttc

SEQ ID NO: 1717041 - DNA, 25 bp, Homo sapien
tcacatgttgcagaggcccacgtct

SEQ ID NO: 1717042 - DNA, 25 bp, Homo sapien
cgtctacacttcctcctgctggatt

SEQ ID NO: 1717043 - DNA, 25 bp, Homo sapien
gacctgcacagtctaagaccggatt

SEQ ID NO: 1717044 - DNA, 25 bp, Homo sapien
gaaatacagccagtcccaagtgagc

SEQ ID NO: 1717045 - DNA, 25 bp, Homo sapien
tcattagtacacgtggctactgggc

SEQ ID NO: 1717046 - DNA, 25 bp, Homo sapien
cacatggatttcaaagactgggtat

SEQ ID NO: 1717047 - DNA, 25 bp, Homo sapien
caggcggggggcctgatgacatatg

SEQ ID NO: 1717048 - DNA, 25 bp, Homo sapien
aggcggggggcctgatgacatatga

SEQ ID NO: 1717049 - DNA, 25 bp, Homo sapien
tgaacttttagctctcttctacccc

SEQ ID NO: 1717050 - DNA, 25 bp, Homo sapien
ccagagtgtcaggatgtaagcacaa

SEQ ID NO: 1717051 - DNA, 25 bp, Homo sapien
aaacttggcctgttgacaccgtgga

SEQ ID NO: 1717052 - DNA, 25 bp, Homo sapien
gcatccaggtttcttgtggcctgac

SEQ ID NO: 1717053 - DNA, 25 bp, Homo sapien
tagctggccctcaccgagaactgtt

SEQ ID NO: 1717054 - DNA, 25 bp, Homo sapien
gagaactgttctacctaagctgatc

SEQ ID NO: 1717055 - DNA, 25 bp, Homo sapien
gcttctaagtgaataggccttcctc

SEQ ID NO: 1717056 - DNA, 25 bp, Homo sapien
cctggaaagttcacaatctgaaggc

SEQ ID NO: 1717057 - DNA, 25 bp, Homo sapien
caaagatagccccttgaagccgcat

SEQ ID NO: 1717058 - DNA, 25 bp, Homo sapien
cccacgacagagtagatggctgtct

SEQ ID NO: 1717059 - DNA, 25 bp, Homo sapien
tgtgatcacgagtgaacagccagac

SEQ ID NO: 1717060 - DNA, 25 bp, Homo sapien
tggctgtctgtacaagcaataagac

SEQ ID NO: 1717061 - DNA, 25 bp, Homo sapien
cagaccagggttgtggactgtgaaa

SEQ ID NO: 1717062 - DNA, 25 bp, Homo sapien
tggtgagctgaacagcatagaggcc

SEQ ID NO: 1717063 - DNA, 25 bp, Homo sapien
ccagggttgtggactgtgaaaaaga

SEQ ID NO: 1717064 - DNA, 25 bp, Homo sapien
ccttccacaccaggtaggaggcata

SEQ ID NO: 1717065 - DNA, 25 bp, Homo sapien
acctttctgcagtacccagcccagc

SEQ ID NO: 1717066 - DNA, 25 bp, Homo sapien
tcagctggctgcccgagaaccagca

SEQ ID NO: 1717067 - DNA, 25 bp, Homo sapien
tggctgcccgagaaccagcacctcc

SEQ ID NO: 1717068 - DNA, 25 bp, Homo sapien
ccagcaacgagctcagtccctgggg

SEQ ID NO: 1717069 - DNA, 25 bp, Homo sapien
aagtcacggtgagccaggctaggta

SEQ ID NO: 1717070 - DNA, 25 bp, Homo sapien
gctgaagtcacggtgagccaggcta

SEQ ID NO: 1717071 - DNA, 25 bp, Homo sapien
agccagtttgttgatgggatgccag

SEQ ID NO: 1717072 - DNA, 25 bp, Homo sapien
ggctggtgcactggacaaaggctgt

SEQ ID NO: 1717073 - DNA, 25 bp, Homo sapien
cattggggtgaaccctaactccaca

SEQ ID NO: 1717074 - DNA, 25 bp, Homo sapien
tctgatttctaaggaaaaacggcac

SEQ ID NO: 1717075 - DNA, 25 bp, Homo sapien
tggggtgaaccctaactccacagcc

SEQ ID NO: 1717076 - DNA, 25 bp, Homo sapien
ttggggtgaaccctaactccacagc

SEQ ID NO: 1717077 - DNA, 25 bp, Homo sapien
cctatgttccaggtgcggtggtaaa

SEQ ID NO: 1717078 - DNA, 25 bp, Homo sapien
gcaaagaatgttgttatcacacaaa

SEQ ID NO: 1717079 - DNA, 25 bp, Homo sapien
cactgagtagagataatagtgcctg

SEQ ID NO: 1717080 - DNA, 25 bp, Homo sapien
gtcaacatttatcagaggttcctat

SEQ ID NO: 1717081 - DNA, 25 bp, Homo sapien
cctggcggcagagtcccaagcagct

SEQ ID NO: 1717082 - DNA, 25 bp, Homo sapien
gcggcagagtcccaagcagctgtca

SEQ ID NO: 1717083 - DNA, 25 bp, Homo sapien
agctgtcagcagctaaatctggctg

SEQ ID NO: 1717084 - DNA, 25 bp, Homo sapien
cagctgtcagcagctaaatctggct

SEQ ID NO: 1717085 - DNA, 25 bp, Homo sapien
tgacaatctcaaagggcggcagctc

SEQ ID NO: 1717086 - DNA, 25 bp, Homo sapien
acaatctcaaagggcggcagctcaa

SEQ ID NO: 1717087 - DNA, 25 bp, Homo sapien
gacaatctcaaagggcggcagctca

SEQ ID NO: 1717088 - DNA, 25 bp, Homo sapien
tgcctgccccaagagatacctatgg

SEQ ID NO: 1717089 - DNA, 25 bp, Homo sapien
gatgagtaccagctagaaagattca

SEQ ID NO: 1717090 - DNA, 25 bp, Homo sapien
ctgcctagggatgagcagcagatgc

SEQ ID NO: 1717091 - DNA, 25 bp, Homo sapien
gaatccctggtatcccagggccttg

SEQ ID NO: 1717092 - DNA, 25 bp, Homo sapien
ttcaaccacatagcagaggaaggtc

SEQ ID NO: 1717093 - DNA, 25 bp, Homo sapien
agagtcgacccaccagaatgagcag

SEQ ID NO: 1717094 - DNA, 25 bp, Homo sapien
taccaggtgacattgtaccgcaggg

SEQ ID NO: 1717095 - DNA, 25 bp, Homo sapien
tcatgatgcgcagtttacagccagc

SEQ ID NO: 1717096 - DNA, 25 bp, Homo sapien
tcctgagggtaattagcctgtttct

SEQ ID NO: 1717097 - DNA, 25 bp, Homo sapien
taccctcagcaagaggccaaattgg

SEQ ID NO: 1717098 - DNA, 25 bp, Homo sapien
tcctgcatggactagcttgttgcta

SEQ ID NO: 1717099 - DNA, 25 bp, Homo sapien
tgagctgctgcctactttacaaatg

SEQ ID NO: 1717100 - DNA, 25 bp, Homo sapien
gacagggaagcatgttaatgggtcc

SEQ ID NO: 1717101 - DNA, 25 bp, Homo sapien
tttatattctcagagggcaccctca

SEQ ID NO: 1717102 - DNA, 25 bp, Homo sapien
tgagcagagtaccacacagtatacc

SEQ ID NO: 1717103 - DNA, 25 bp, Homo sapien
tctaaggacttgctagttaggcacc

SEQ ID NO: 1717104 - DNA, 25 bp, Homo sapien
tggccccgaacaatgactagtttct

SEQ ID NO: 1717105 - DNA, 25 bp, Homo sapien
tttgaactaaggtttctgtgtgccc

SEQ ID NO: 1717106 - DNA, 25 bp, Homo sapien
ctgctggccccgaacaatgactagt

SEQ ID NO: 1717107 - DNA, 25 bp, Homo sapien
ctttttgaactaaggtttctgtgtg

SEQ ID NO: 1717108 - DNA, 25 bp, Homo sapien
aggtcactttcgtccttcccgagag

SEQ ID NO: 1717109 - DNA, 25 bp, Homo sapien
ggtgtcaaatgttgtccagctccaa

SEQ ID NO: 1717110 - DNA, 25 bp, Homo sapien
gcattagagagagagtcacagccta

SEQ ID NO: 1717111 - DNA, 25 bp, Homo sapien
ggtgagcaattaggaccttcagtcc

SEQ ID NO: 1717112 - DNA, 25 bp, Homo sapien
tccctgtgtctggactagctcgctt

SEQ ID NO: 1717113 - DNA, 25 bp, Homo sapien
tctgcattgtctaggcaagtcttgg

SEQ ID NO: 1717114 - DNA, 25 bp, Homo sapien
tagctcgcttgtctgtggcaacttc

SEQ ID NO: 1717115 - DNA, 25 bp, Homo sapien
aaggccctcacttgattgtcgtaag

SEQ ID NO: 1717116 - DNA, 25 bp, Homo sapien
gactttgggtctgtcacaggacttg

SEQ ID NO: 1717117 - DNA, 25 bp, Homo sapien
ttttcttccgaagctgcaaagacca

SEQ ID NO: 1717118 - DNA, 25 bp, Homo sapien
agaagatttggatgtgcagccagct

SEQ ID NO: 1717119 - DNA, 25 bp, Homo sapien
tcagtatcagagctattcgggaaac

SEQ ID NO: 1717120 - DNA, 25 bp, Homo sapien
tacttagcacagactagtgacccaa

SEQ ID NO: 1717121 - DNA, 25 bp, Homo sapien
ggtaatggagggttcacctgcaact

SEQ ID NO: 1717122 - DNA, 25 bp, Homo sapien
taaatgcctggcagagtacttagca

SEQ ID NO: 1717123 - DNA, 25 bp, Homo sapien
ttatgtcatcagattcctcctaggg

SEQ ID NO: 1717124 - DNA, 25 bp, Homo sapien
tgacccgccctagggtaggagacag

SEQ ID NO: 1717125 - DNA, 25 bp, Homo sapien
tacactctgtggttgcggcttaacg

SEQ ID NO: 1717126 - DNA, 25 bp, Homo sapien
tgaacgttccttgagaggccgcctt

SEQ ID NO: 1717127 - DNA, 25 bp, Homo sapien
cagagaatgggaggcttcaatagac

SEQ ID NO: 1717128 - DNA, 25 bp, Homo sapien
gccactgccgctgcctagcaaaatg

SEQ ID NO: 1717129 - DNA, 25 bp, Homo sapien
ccggttcgctgcccgcgctgattgg

SEQ ID NO: 1717130 - DNA, 25 bp, Homo sapien
attggctccagtaccggactccgaa

SEQ ID NO: 1717131 - DNA, 25 bp, Homo sapien
agcaaaatggcgaacccgaacaaag

SEQ ID NO: 1717132 - DNA, 25 bp, Homo sapien
tcagcgagacccgccaatcggggcg

SEQ ID NO: 1717133 - DNA, 25 bp, Homo sapien
ggccgctggatattggctcctcaca

SEQ ID NO: 1717134 - DNA, 25 bp, Homo sapien
gctggatattggctcctcacactca

SEQ ID NO: 1717135 - DNA, 25 bp, Homo sapien
gctctgggccgctggatattggctc

SEQ ID NO: 1717136 - DNA, 25 bp, Homo sapien
ggcgcgcatgtgtcccctagtgtag

SEQ ID NO: 1717137 - DNA, 25 bp, Homo sapien
ctagtgtagggccattcgtggcccc

SEQ ID NO: 1717138 - DNA, 25 bp, Homo sapien
gcaggtttaagtttgcggccagaac

SEQ ID NO: 1717139 - DNA, 25 bp, Homo sapien
ggaacagggacgcattcccaactgg

SEQ ID NO: 1717140 - DNA, 25 bp, Homo sapien
cagactggtggaagcttgtaaggta

SEQ ID NO: 1717141 - DNA, 25 bp, Homo sapien
gaagtactacaaatcaagagagcat

SEQ ID NO: 1717142 - DNA, 25 bp, Homo sapien
ttttgaagtgaccagaacataccta

SEQ ID NO: 1717143 - DNA, 25 bp, Homo sapien
tctttgctatcagaggcctgcagga

SEQ ID NO: 1717144 - DNA, 25 bp, Homo sapien
taaaaattcccagcattggctcact

SEQ ID NO: 1717145 - DNA, 25 bp, Homo sapien
gacgcttgatgaaagactagactac

SEQ ID NO: 1717146 - DNA, 25 bp, Homo sapien
caacaagtgggtcctgatagacgct

SEQ ID NO: 1717147 - DNA, 25 bp, Homo sapien
gactacaacaaagggctgtccagct

SEQ ID NO: 1717148 - DNA, 25 bp, Homo sapien
tcctagaaggctgtgaggtacactc

SEQ ID NO: 1717149 - DNA, 25 bp, Homo sapien
tctggagatcctagaaggctgtgag

SEQ ID NO: 1717150 - DNA, 25 bp, Homo sapien
ggtccctccaagtgagattcctgtc

SEQ ID NO: 1717151 - DNA, 25 bp, Homo sapien
ccactctggagatcctagaaggctg

SEQ ID NO: 1717152 - DNA, 25 bp, Homo sapien
tgctgtttgctgtatactgctccat

SEQ ID NO: 1717153 - DNA, 25 bp, Homo sapien
tctgctctgtcgaactattgctgtt

SEQ ID NO: 1717154 - DNA, 25 bp, Homo sapien
attgctgtttgctgtatactgctcc

SEQ ID NO: 1717155 - DNA, 25 bp, Homo sapien
ctggacaacaatctgctctgtcgaa

SEQ ID NO: 1717156 - DNA, 25 bp, Homo sapien
gagtagattctaagtggtcatgggc

SEQ ID NO: 1717157 - DNA, 25 bp, Homo sapien
cagcacaagccatcagacccaatat

SEQ ID NO: 1717158 - DNA, 25 bp, Homo sapien
gaggcaatttactataaccaggcac

SEQ ID NO: 1717159 - DNA, 25 bp, Homo sapien
tcacaagttagctcaaacaagaaga

SEQ ID NO: 1717160 - DNA, 25 bp, Homo sapien
tgggcttaagccaaccttcctgtct

SEQ ID NO: 1717161 - DNA, 25 bp, Homo sapien
tcattagacgggaaaaactcatcat

SEQ ID NO: 1717162 - DNA, 25 bp, Homo sapien
taagattatttctacccaactggac

SEQ ID NO: 1717163 - DNA, 25 bp, Homo sapien
cactggtgtgaatggagggcccttt

SEQ ID NO: 1717164 - DNA, 25 bp, Homo sapien
cagtctgcaactgcacagcagtgac

SEQ ID NO: 1717165 - DNA, 25 bp, Homo sapien
gtctgcaactgcacagcagtgacac

SEQ ID NO: 1717166 - DNA, 25 bp, Homo sapien
agtctgcaactgcacagcagtgaca

SEQ ID NO: 1717167 - DNA, 25 bp, Homo sapien
cactgacctgcaccattaatggctg

SEQ ID NO: 1717168 - DNA, 25 bp, Homo sapien
agggacagcctggaccatgatgggt

SEQ ID NO: 1717169 - DNA, 25 bp, Homo sapien
agttgatgtgattagctggcctcca

SEQ ID NO: 1717170 - DNA, 25 bp, Homo sapien
accatgatgggttggccagttgatg

SEQ ID NO: 1717171 - DNA, 25 bp, Homo sapien
tgctgcaaaccctgtgttccagaaa

SEQ ID NO: 1717172 - DNA, 25 bp, Homo sapien
ttgctgcaaaccctgtgttccagaa

SEQ ID NO: 1717173 - DNA, 25 bp, Homo sapien
gctgcaaaccctgtgttccagaaac

SEQ ID NO: 1717174 - DNA, 25 bp, Homo sapien
ggagtgtcgctctgtggctcaggct

SEQ ID NO: 1717175 - DNA, 25 bp, Homo sapien
ggagtgcagtggtgtgatcttggct

SEQ ID NO: 1717176 - DNA, 25 bp, Homo sapien
gtccgccatcacgcctggcttaatt

SEQ ID NO: 1717177 - DNA, 25 bp, Homo sapien
ggcgtccgccatcacgcctggctta

SEQ ID NO: 1717178 - DNA, 25 bp, Homo sapien
agcctgtccaccctggatctggatc

SEQ ID NO: 1717179 - DNA, 25 bp, Homo sapien
tctgtccaggtgggaccaactgtat

SEQ ID NO: 1717180 - DNA, 25 bp, Homo sapien
gatctgtccaggtgggaccaactgt

SEQ ID NO: 1717181 - DNA, 25 bp, Homo sapien
acagcctgtccaccctggatctgga

SEQ ID NO: 1717182 - DNA, 25 bp, Homo sapien
actggttgatagacgatggtctgcc

SEQ ID NO: 1717183 - DNA, 25 bp, Homo sapien
gatagacgatggtctgcccttcagc

SEQ ID NO: 1717184 - DNA, 25 bp, Homo sapien
atctgcattaactggttgatagacg

SEQ ID NO: 1717185 - DNA, 25 bp, Homo sapien
gcattaactggttgatagacgatgg

SEQ ID NO: 1717186 - DNA, 25 bp, Homo sapien
tcctagggaagcttatgggtacact

SEQ ID NO: 1717187 - DNA, 25 bp, Homo sapien
caagttcaccactcaaattctaaag

SEQ ID NO: 1717188 - DNA, 25 bp, Homo sapien
tgtcagttgtctaagggacaaaaaa

SEQ ID NO: 1717189 - DNA, 25 bp, Homo sapien
ctaaagatgtcagttgtctaaggga

SEQ ID NO: 1717190 - DNA, 25 bp, Homo sapien
gttggtattggctcctgtttgaaca

SEQ ID NO: 1717191 - DNA, 25 bp, Homo sapien
atgaccatccctcctgaattgacca

SEQ ID NO: 1717192 - DNA, 25 bp, Homo sapien
gccactggtagtgtcacagtgacag

SEQ ID NO: 1717193 - DNA, 25 bp, Homo sapien
gaacaatctgtgctcctgccaaact

SEQ ID NO: 1717194 - DNA, 25 bp, Homo sapien
tctttggatagcaggcacagagcca

SEQ ID NO: 1717195 - DNA, 25 bp, Homo sapien
tctagtttagctcgggcttgcctcc

SEQ ID NO: 1717196 - DNA, 25 bp, Homo sapien
tggcattcacgtagagaggctcttc

SEQ ID NO: 1717197 - DNA, 25 bp, Homo sapien
gcctcctcttaagaatacggtggta

SEQ ID NO: 1717198 - DNA, 25 bp, Homo sapien
agagaaaaatcgtccaccttcacca

SEQ ID NO: 1717199 - DNA, 25 bp, Homo sapien
gcatatggggactatccttttcctt

SEQ ID NO: 1717200 - DNA, 25 bp, Homo sapien
gccatggcatgacggtgccgagact

SEQ ID NO: 1717201 - DNA, 25 bp, Homo sapien
accacgcttccgtgccatggcatga

SEQ ID NO: 1717202 - DNA, 25 bp, Homo sapien
tcggatgatctgtgtcattgcttct

SEQ ID NO: 1717203 - DNA, 25 bp, Homo sapien
atctgtgtcattgcttcttcatcgg

SEQ ID NO: 1717204 - DNA, 25 bp, Homo sapien
gatctgtgtcattgcttcttcatcg

SEQ ID NO: 1717205 - DNA, 25 bp, Homo sapien
ggacactcggatgatctgtgtcatt

SEQ ID NO: 1717206 - DNA, 25 bp, Homo sapien
catcaacagtctgaaataggtcctg

SEQ ID NO: 1717207 - DNA, 25 bp, Homo sapien
gatcagctccatcacatggcgtggg

SEQ ID NO: 1717208 - DNA, 25 bp, Homo sapien
catgtgtctccttgcatcatccgaa

SEQ ID NO: 1717209 - DNA, 25 bp, Homo sapien
gccaggcatcgctgcaattgtaata

SEQ ID NO: 1717210 - DNA, 25 bp, Homo sapien
gaaatatcaacctaccatctgggca

SEQ ID NO: 1717211 - DNA, 25 bp, Homo sapien
gagggacaagcaggccacaactttt

SEQ ID NO: 1717212 - DNA, 25 bp, Homo sapien
tagaagtagccacagcaagtacgat

SEQ ID NO: 1717213 - DNA, 25 bp, Homo sapien
aaaatgctcgctttctagggccagc

SEQ ID NO: 1717214 - DNA, 25 bp, Homo sapien
tctagtgagcttaccaaaggatcag

SEQ ID NO: 1717215 - DNA, 25 bp, Homo sapien
taaaaaattcagcaacaaggctggc

SEQ ID NO: 1717216 - DNA, 25 bp, Homo sapien
gaagccaggagcgattaccagatcc

SEQ ID NO: 1717217 - DNA, 25 bp, Homo sapien
caaaatgctctgttggtccagtggc

SEQ ID NO: 1717218 - DNA, 25 bp, Homo sapien
gacgctcctacgataaagccgttgg

SEQ ID NO: 1717219 - DNA, 25 bp, Homo sapien
gaggcttccgaaagaccagtaggtc

SEQ ID NO: 1717220 - DNA, 25 bp, Homo sapien
tagattcccagcgaccgtaaggtaa

SEQ ID NO: 1717221 - DNA, 25 bp, Homo sapien
gaaaaaatctcctcaacagggtgga

SEQ ID NO: 1717222 - DNA, 25 bp, Homo sapien
ttaaactgtgccttagctcgcggga

SEQ ID NO: 1717223 - DNA, 25 bp, Homo sapien
acttaagtgcaagtgccggccgtcg

SEQ ID NO: 1717224 - DNA, 25 bp, Homo sapien
gactgagccggttcatcccaaaaga

SEQ ID NO: 1717225 - DNA, 25 bp, Homo sapien
tttgttaaatgaacgactcgcggag

SEQ ID NO: 1717226 - DNA, 25 bp, Homo sapien
gctccacgatgtcactaatgtaata

SEQ ID NO: 1717227 - DNA, 25 bp, Homo sapien
gggtgaacctgtccattaatgctgt

SEQ ID NO: 1717228 - DNA, 25 bp, Homo sapien
tcacgttccgacttgtaggtcaggg

SEQ ID NO: 1717229 - DNA, 25 bp, Homo sapien
gatatgggccagtttgtccatgtca

SEQ ID NO: 1717230 - DNA, 25 bp, Homo sapien
gaatgtgagactgggtagattagca

SEQ ID NO: 1717231 - DNA, 25 bp, Homo sapien
gtgcaaaggaaattagctcctcctg

SEQ ID NO: 1717232 - DNA, 25 bp, Homo sapien
gattagcagataataggcaaaggtc

SEQ ID NO: 1717233 - DNA, 25 bp, Homo sapien
gtggcaacttgaagaaaccaaagat

SEQ ID NO: 1717234 - DNA, 25 bp, Homo sapien
gcattcaatctccacaaggtagcca

SEQ ID NO: 1717235 - DNA, 25 bp, Homo sapien
tgatggacggaagcatacagggcac

SEQ ID NO: 1717236 - DNA, 25 bp, Homo sapien
ccatgtcacagggtaggtactcaaa

SEQ ID NO: 1717237 - DNA, 25 bp, Homo sapien
tcttcactatggactacagagcgtg

SEQ ID NO: 1717238 - DNA, 25 bp, Homo sapien
ttaggatatcccctccaaaacagag

SEQ ID NO: 1717239 - DNA, 25 bp, Homo sapien
taggatatcccctccaaaacagaga

SEQ ID NO: 1717240 - DNA, 25 bp, Homo sapien
tttaggatatcccctccaaaacaga

SEQ ID NO: 1717241 - DNA, 25 bp, Homo sapien
tatttaggatatcccctccaaaaca

SEQ ID NO: 1717242 - DNA, 25 bp, Homo sapien
taaataagaagacaggccaactccg

SEQ ID NO: 1717243 - DNA, 25 bp, Homo sapien
caccagtatactaacagaggaggag

SEQ ID NO: 1717244 - DNA, 25 bp, Homo sapien
tatctagacttacttggtccagggc

SEQ ID NO: 1717245 - DNA, 25 bp, Homo sapien
cagacacacaggataggctgatggg

SEQ ID NO: 1717246 - DNA, 25 bp, Homo sapien
ctggccttccctggtatgatagatc

SEQ ID NO: 1717247 - DNA, 25 bp, Homo sapien
tcactcagttgattttgttctactc

SEQ ID NO: 1717248 - DNA, 25 bp, Homo sapien
ctatctttaactgcaggtcctggcc

SEQ ID NO: 1717249 - DNA, 25 bp, Homo sapien
gcattttgccaccaaggtaatgatg

SEQ ID NO: 1717250 - DNA, 25 bp, Homo sapien
gagcaattcaccctttgtctatatg

SEQ ID NO: 1717251 - DNA, 25 bp, Homo sapien
tacaatttactcatgtcctttgtcc

SEQ ID NO: 1717252 - DNA, 25 bp, Homo sapien
agtgctctttccctagtagagcaat

SEQ ID NO: 1717253 - DNA, 25 bp, Homo sapien
ctttttacgtgttaaaagacatgca

SEQ ID NO: 1717254 - DNA, 25 bp, Homo sapien
aagaaaaagctcattcctcagactc

SEQ ID NO: 1717255 - DNA, 25 bp, Homo sapien
ctcagactcaccaaagagtacattg

SEQ ID NO: 1717256 - DNA, 25 bp, Homo sapien
cttataccgttgttcactcacagta

SEQ ID NO: 1717257 - DNA, 25 bp, Homo sapien
tataccgttgttcactcacagtaag

SEQ ID NO: 1717258 - DNA, 25 bp, Homo sapien
tagatgtccagaaggattgctaggt

SEQ ID NO: 1717259 - DNA, 25 bp, Homo sapien
caatcaataaccttgcacatgcaac

SEQ ID NO: 1717260 - DNA, 25 bp, Homo sapien
gagatactgccatatcaagacatct

SEQ ID NO: 1717261 - DNA, 25 bp, Homo sapien
cagatgtgtgaacgtatacctatag

SEQ ID NO: 1717262 - DNA, 25 bp, Homo sapien
gctcatctccaacaataacctggga

SEQ ID NO: 1717263 - DNA, 25 bp, Homo sapien
caacaataacctgggaaatccgact

SEQ ID NO: 1717264 - DNA, 25 bp, Homo sapien
ctgcccaatcaccaagaggtattgc

SEQ ID NO: 1717265 - DNA, 25 bp, Homo sapien
ccaagaggtattgctgccgctcatc

SEQ ID NO: 1717266 - DNA, 25 bp, Homo sapien
ttcaaacatatactgcttgcaaagc

SEQ ID NO: 1717267 - DNA, 25 bp, Homo sapien
acagcttcatcctccctcatgattg

SEQ ID NO: 1717268 - DNA, 25 bp, Homo sapien
ggacaatttcattcgcctgagccaa

SEQ ID NO: 1717269 - DNA, 25 bp, Homo sapien
caaacgctgagctaactggacatca

SEQ ID NO: 1717270 - DNA, 25 bp, Homo sapien
cattgcgctgtgtactaggaaggcc

SEQ ID NO: 1717271 - DNA, 25 bp, Homo sapien
ggcagtacaggaagctagcctccta

SEQ ID NO: 1717272 - DNA, 25 bp, Homo sapien
tttggccaggcaatatgtgaacact

SEQ ID NO: 1717273 - DNA, 25 bp, Homo sapien
tgtgaacactaccagagcattgcgc

SEQ ID NO: 1717274 - DNA, 25 bp, Homo sapien
cactcgtacggtaatgtggtagata

SEQ ID NO: 1717275 - DNA, 25 bp, Homo sapien
gcactcgtacggtaatgtggtagat

SEQ ID NO: 1717276 - DNA, 25 bp, Homo sapien
cagcactcgtacggtaatgtggtag

SEQ ID NO: 1717277 - DNA, 25 bp, Homo sapien
actcgtacggtaatgtggtagataa

SEQ ID NO: 1717278 - DNA, 25 bp, Homo sapien
gccatgtggaaaattaatgtttaaa

SEQ ID NO: 1717279 - DNA, 25 bp, Homo sapien
ctggccatgtggaaaattaatgttt

SEQ ID NO: 1717280 - DNA, 25 bp, Homo sapien
catgtggaaaattaatgtttaaaat

SEQ ID NO: 1717281 - DNA, 25 bp, Homo sapien
tggccatgtggaaaattaatgttta

SEQ ID NO: 1717282 - DNA, 25 bp, Homo sapien
ttctgcagcttttggtcaagttcag

SEQ ID NO: 1717283 - DNA, 25 bp, Homo sapien
tgcttctgcagcttttggtcaagtt

SEQ ID NO: 1717284 - DNA, 25 bp, Homo sapien
tcaagttcagagtgtggatccaatt

SEQ ID NO: 1717285 - DNA, 25 bp, Homo sapien
gagtgtggatccaattccagtgcag

SEQ ID NO: 1717286 - DNA, 25 bp, Homo sapien
ggttgctggagattaactggataaa

SEQ ID NO: 1717287 - DNA, 25 bp, Homo sapien
caaatatggcttctactttctagga

SEQ ID NO: 1717288 - DNA, 25 bp, Homo sapien
cacagtattatgttggcacagatgg

SEQ ID NO: 1717289 - DNA, 25 bp, Homo sapien
gctggaattacaatgggttgctgga

SEQ ID NO: 1717290 - DNA, 25 bp, Homo sapien
catacactctatacccttcttacag

SEQ ID NO: 1717291 - DNA, 25 bp, Homo sapien
tatatatacaatcagtcaacttata

SEQ ID NO: 1717292 - DNA, 25 bp, Homo sapien
ttaccaaacatacactctataccct

SEQ ID NO: 1717293 - DNA, 25 bp, Homo sapien
cactctatacccttcttacagtgta

SEQ ID NO: 1717294 - DNA, 25 bp, Homo sapien
tagaagatatacaaaccaatgaact

SEQ ID NO: 1717295 - DNA, 25 bp, Homo sapien
catggtatgtatgagaaaacaactt

SEQ ID NO: 1717296 - DNA, 25 bp, Homo sapien
caactatcaacatcatgttcaggca

SEQ ID NO: 1717297 - DNA, 25 bp, Homo sapien
aaagacacattgagttacctacctg

SEQ ID NO: 1717298 - DNA, 25 bp, Homo sapien
gtcatcgtacggaattcagatacat

SEQ ID NO: 1717299 - DNA, 25 bp, Homo sapien
ctaggctgaccaaaaccagagtcat

SEQ ID NO: 1717300 - DNA, 25 bp, Homo sapien
tcagatacatactctataggctggc

SEQ ID NO: 1717301 - DNA, 25 bp, Homo sapien
aaaaccagagtcatcgtacggaatt

SEQ ID NO: 1717302 - DNA, 25 bp, Homo sapien
aatgcaacatccacgctgtcctgtg

SEQ ID NO: 1717303 - DNA, 25 bp, Homo sapien
ctggataagatgacacaaatgcaac

SEQ ID NO: 1717304 - DNA, 25 bp, Homo sapien
gacacaaatgcaacatccacgctgt

SEQ ID NO: 1717305 - DNA, 25 bp, Homo sapien
gatgacacaaatgcaacatccacgc

SEQ ID NO: 1717306 - DNA, 25 bp, Homo sapien
caatgactgtggagatgtataaggc

SEQ ID NO: 1717307 - DNA, 25 bp, Homo sapien
gccccctttctcaatgactgtggag

SEQ ID NO: 1717308 - DNA, 25 bp, Homo sapien
taaagatccgactcagctggccgcc

SEQ ID NO: 1717309 - DNA, 25 bp, Homo sapien
gctggccgccccctttctcaatgac

SEQ ID NO: 1717310 - DNA, 25 bp, Homo sapien
gctgatgggtcaagttcccttgtac

SEQ ID NO: 1717311 - DNA, 25 bp, Homo sapien
aatgctgatgggtcaagttcccttg

SEQ ID NO: 1717312 - DNA, 25 bp, Homo sapien
gatgggtcaagttcccttgtactta

SEQ ID NO: 1717313 - DNA, 25 bp, Homo sapien
taatgctgatgggtcaagttccctt

SEQ ID NO: 1717314 - DNA, 25 bp, Homo sapien
gcacactcgtctggcttcttatcac

SEQ ID NO: 1717315 - DNA, 25 bp, Homo sapien
gatgctgaaggagctctccagggca

SEQ ID NO: 1717316 - DNA, 25 bp, Homo sapien
accaggaaggccgaaaacacagagg

SEQ ID NO: 1717317 - DNA, 25 bp, Homo sapien
catgtgcacactcgtctggcttctt

SEQ ID NO: 1717318 - DNA, 25 bp, Homo sapien
tgtgaaatgagcgagacaggcctag

SEQ ID NO: 1717319 - DNA, 25 bp, Homo sapien
gttaacatgtatttgccttgggcag

SEQ ID NO: 1717320 - DNA, 25 bp, Homo sapien
tgcagatcccaccaaacctgaaaga

SEQ ID NO: 1717321 - DNA, 25 bp, Homo sapien
ttccaccctggagataagattggga

SEQ ID NO: 1717322 - DNA, 25 bp, Homo sapien
tcgtgtcttgctactgctccaacca

SEQ ID NO: 1717323 - DNA, 25 bp, Homo sapien
tccaaccacgccacagaatactggt

SEQ ID NO: 1717324 - DNA, 25 bp, Homo sapien
cattagtgatactgatggaaacaaa

SEQ ID NO: 1717325 - DNA, 25 bp, Homo sapien
gaatactggtccattagtgatactg

SEQ ID NO: 1717326 - DNA, 25 bp, Homo sapien
gacaggtggagaatttttgggccat

SEQ ID NO: 1717327 - DNA, 25 bp, Homo sapien
cagttatcattctggccgcaagact

SEQ ID NO: 1717328 - DNA, 25 bp, Homo sapien
ggacaccaaacctggataagcagtt

SEQ ID NO: 1717329 - DNA, 25 bp, Homo sapien
gcaagactcacttttgggccaataa

SEQ ID NO: 1717330 - DNA, 25 bp, Homo sapien
tagatatgttacctcatcacaggac

SEQ ID NO: 1717331 - DNA, 25 bp, Homo sapien
ttgtttctctttcttgccaaatgtc

SEQ ID NO: 1717332 - DNA, 25 bp, Homo sapien
tctctttcttgccaaatgtcttttt

SEQ ID NO: 1717333 - DNA, 25 bp, Homo sapien
gtttctctttcttgccaaatgtctt

SEQ ID NO: 1717334 - DNA, 25 bp, Homo sapien
tctttcttgccaaatgtctttttcc

SEQ ID NO: 1717335 - DNA, 25 bp, Homo sapien
gagagacagggagcacctaacactc

SEQ ID NO: 1717336 - DNA, 25 bp, Homo sapien
tagagagacagggagcacctaacac

SEQ ID NO: 1717337 - DNA, 25 bp, Homo sapien
ctgtagagagacagggagcacctaa

SEQ ID NO: 1717338 - DNA, 25 bp, Homo sapien
tgtagagagacagggagcacctaac

SEQ ID NO: 1717339 - DNA, 25 bp, Homo sapien
tcagccaacagctggctttttccat

SEQ ID NO: 1717340 - DNA, 25 bp, Homo sapien
ttttccaccttcatacagaactgct

SEQ ID NO: 1717341 - DNA, 25 bp, Homo sapien
ccttcttctggtgcaaacacccttg

SEQ ID NO: 1717342 - DNA, 25 bp, Homo sapien
aacacccttgctgtgccatttggaa

SEQ ID NO: 1717343 - DNA, 25 bp, Homo sapien
cttcaccggtccaagaatgctgaat

SEQ ID NO: 1717344 - DNA, 25 bp, Homo sapien
gtacgacacataggttactaacttc

SEQ ID NO: 1717345 - DNA, 25 bp, Homo sapien
ctgtacgacacataggttactaact

SEQ ID NO: 1717346 - DNA, 25 bp, Homo sapien
tactaacttcaccggtccaagaatg

SEQ ID NO: 1717347 - DNA, 25 bp, Homo sapien
tgaatatgactatggtcatcaggag

SEQ ID NO: 1717348 - DNA, 25 bp, Homo sapien
gtgaatatgactatggtcatcagga

SEQ ID NO: 1717349 - DNA, 25 bp, Homo sapien
tatgactatggtcatcaggagtccc

SEQ ID NO: 1717350 - DNA, 25 bp, Homo sapien
aatatgactatggtcatcaggagtc

SEQ ID NO: 1717351 - DNA, 25 bp, Homo sapien
agctgtctttgtaggcactcttgcc

SEQ ID NO: 1717352 - DNA, 25 bp, Homo sapien
taggctgggcatgtatcaatctcaa

SEQ ID NO: 1717353 - DNA, 25 bp, Homo sapien
gaagttgttcttccactatcccaca

SEQ ID NO: 1717354 - DNA, 25 bp, Homo sapien
cactcttgccggtaataggctgggc

SEQ ID NO: 1717355 - DNA, 25 bp, Homo sapien
ctcaagaacacgtggatataattcc

SEQ ID NO: 1717356 - DNA, 25 bp, Homo sapien
aaccaactcaagaacacgtggatat

SEQ ID NO: 1717357 - DNA, 25 bp, Homo sapien
caactcaagaacacgtggatataat

SEQ ID NO: 1717358 - DNA, 25 bp, Homo sapien
caagaacacgtggatataattcctg

SEQ ID NO: 1717359 - DNA, 25 bp, Homo sapien
tctgaaggcttttgagatccagatg

SEQ ID NO: 1717360 - DNA, 25 bp, Homo sapien
aggcttttgagatccagatgctggt

SEQ ID NO: 1717361 - DNA, 25 bp, Homo sapien
cagatgctggtttcaaatgatatat

SEQ ID NO: 1717362 - DNA, 25 bp, Homo sapien
gaaggcttttgagatccagatgctg

SEQ ID NO: 1717363 - DNA, 25 bp, Homo sapien
gaatttttagcttgttcactactgg

SEQ ID NO: 1717364 - DNA, 25 bp, Homo sapien
ttttagcttgttcactactggaaac

SEQ ID NO: 1717365 - DNA, 25 bp, Homo sapien
aatttttagcttgttcactactgga

SEQ ID NO: 1717366 - DNA, 25 bp, Homo sapien
tttttagcttgttcactactggaaa

SEQ ID NO: 1717367 - DNA, 25 bp, Homo sapien
gaggataaataaaacaaattgtgga

SEQ ID NO: 1717368 - DNA, 25 bp, Homo sapien
agaggataaataaaacaaattgtgg

SEQ ID NO: 1717369 - DNA, 25 bp, Homo sapien
cagggtgggtagattaggagaagtg

SEQ ID NO: 1717370 - DNA, 25 bp, Homo sapien
gcagggtgggtagattaggagaagt

SEQ ID NO: 1717371 - DNA, 25 bp, Homo sapien
agggtgggtagattaggagaagtga

SEQ ID NO: 1717372 - DNA, 25 bp, Homo sapien
gggtgggtagattaggagaagtgac

SEQ ID NO: 1717373 - DNA, 25 bp, Homo sapien
cagaacaagatgcaacacacatcac

SEQ ID NO: 1717374 - DNA, 25 bp, Homo sapien
gttattccaagtataccaggatgaa

SEQ ID NO: 1717375 - DNA, 25 bp, Homo sapien
cccagttattccaagtataccagga

SEQ ID NO: 1717376 - DNA, 25 bp, Homo sapien
tgaacttagcaatgacagtttgggc

SEQ ID NO: 1717377 - DNA, 25 bp, Homo sapien
ttatgactaaggagtaaatgacagg

SEQ ID NO: 1717378 - DNA, 25 bp, Homo sapien
cctcgaaattcatgaagggttagag

SEQ ID NO: 1717379 - DNA, 25 bp, Homo sapien
gccaacctcgaaattcatgaagggt

SEQ ID NO: 1717380 - DNA, 25 bp, Homo sapien
ttaggggagccaacctcgaaattca

SEQ ID NO: 1717381 - DNA, 25 bp, Homo sapien
gaaattcatgaagggttagagacag

SEQ ID NO: 1717382 - DNA, 25 bp, Homo sapien
agggattgcacattagagatgacca

SEQ ID NO: 1717383 - DNA, 25 bp, Homo sapien
ctgcagggaggtaagtaagggattg

SEQ ID NO: 1717384 - DNA, 25 bp, Homo sapien
ggaggtaagtaagggattgcacatt

SEQ ID NO: 1717385 - DNA, 25 bp, Homo sapien
taagtaagggattgcacattagaga

SEQ ID NO: 1717386 - DNA, 25 bp, Homo sapien
gcataggacctcacaataaagtggg

SEQ ID NO: 1717387 - DNA, 25 bp, Homo sapien
ataggacctcacaataaagtgggtt

SEQ ID NO: 1717388 - DNA, 25 bp, Homo sapien
cataggacctcacaataaagtgggt

SEQ ID NO: 1717389 - DNA, 25 bp, Homo sapien
gacctcacaataaagtgggtttcca

SEQ ID NO: 1717390 - DNA, 25 bp, Homo sapien
tgtaggacatgaaagagcaacacgt

SEQ ID NO: 1717391 - DNA, 25 bp, Homo sapien
gaaagagcaacacgtccttagagag

SEQ ID NO: 1717392 - DNA, 25 bp, Homo sapien
gcaacacgtccttagagagaaggtc

SEQ ID NO: 1717393 - DNA, 25 bp, Homo sapien
cctccttttgtaggacatgaaagag

SEQ ID NO: 1717394 - DNA, 25 bp, Homo sapien
aaggccaagtaatgtcatgttggag

SEQ ID NO: 1717395 - DNA, 25 bp, Homo sapien
ctggaccagggtagaactctgggaa

SEQ ID NO: 1717396 - DNA, 25 bp, Homo sapien
gtcatgttggagaatgagcttcagc

SEQ ID NO: 1717397 - DNA, 25 bp, Homo sapien
cagctggaccagggtagaactctgg

SEQ ID NO: 1717398 - DNA, 25 bp, Homo sapien
gatttgtacagtgtgcttatctggg

SEQ ID NO: 1717399 - DNA, 25 bp, Homo sapien
cttatctgggaaggcctagtgtggc

SEQ ID NO: 1717400 - DNA, 25 bp, Homo sapien
ggaaggcctagtgtggcccacaatg

SEQ ID NO: 1717401 - DNA, 25 bp, Homo sapien
ggcccacaatgttagcaaggaaaag

SEQ ID NO: 1717402 - DNA, 25 bp, Homo sapien
gttggcaggagaaatactatacatt

SEQ ID NO: 1717403 - DNA, 25 bp, Homo sapien
catcatccttgactgtgcagacata

SEQ ID NO: 1717404 - DNA, 25 bp, Homo sapien
aagggtaggagaagtactgtatcca

SEQ ID NO: 1717405 - DNA, 25 bp, Homo sapien
gaagtactgtatccaagttcacatc

SEQ ID NO: 1717406 - DNA, 25 bp, Homo sapien
gctatgtgcataacattgtatcttc

SEQ ID NO: 1717407 - DNA, 25 bp, Homo sapien
tatggcatcagtcattctactttgc

SEQ ID NO: 1717408 - DNA, 25 bp, Homo sapien
tattaaactcttgctatgtgcataa

SEQ ID NO: 1717409 - DNA, 25 bp, Homo sapien
cactaacaccatggattttcttaaa

SEQ ID NO: 1717410 - DNA, 25 bp, Homo sapien
ctccacttagccaaacttctttgct

SEQ ID NO: 1717411 - DNA, 25 bp, Homo sapien
tcttgtcagaccagcagagcacatg

SEQ ID NO: 1717412 - DNA, 25 bp, Homo sapien
caagagctctcaagacctgaagtag

SEQ ID NO: 1717413 - DNA, 25 bp, Homo sapien
cagcaactgttcctctgggctcagt

SEQ ID NO: 1717414 - DNA, 25 bp, Homo sapien
gcaaatctatatggaaggagtgacc

SEQ ID NO: 1717415 - DNA, 25 bp, Homo sapien
tgtggataattcgagattgcaagct

SEQ ID NO: 1717416 - DNA, 25 bp, Homo sapien
tgtgcttcaatatggcaaactccca

SEQ ID NO: 1717417 - DNA, 25 bp, Homo sapien
tctatgtgctttgggtagtccatgc

SEQ ID NO: 1717418 - DNA, 25 bp, Homo sapien
tctctgttcaaatatagggcccaaa

SEQ ID NO: 1717419 - DNA, 25 bp, Homo sapien
ctgagaagagaggctgacccaccat

SEQ ID NO: 1717420 - DNA, 25 bp, Homo sapien
tcccacagcggcaggccaaaacttg

SEQ ID NO: 1717421 - DNA, 25 bp, Homo sapien
aagcagctgcccgtagcagaggcac

SEQ ID NO: 1717422 - DNA, 25 bp, Homo sapien
gagaaagcaggcacattcaaggtgc

SEQ ID NO: 1717423 - DNA, 25 bp, Homo sapien
ggacaaagtctcctccatggcagct

SEQ ID NO: 1717424 - DNA, 25 bp, Homo sapien
taagtacagaatcgagaggtcccct

SEQ ID NO: 1717425 - DNA, 25 bp, Homo sapien
tctctgtaagtacagaatcgagagg

SEQ ID NO: 1717426 - DNA, 25 bp, Homo sapien
cttgtgttagcactgagccagtatc

SEQ ID NO: 1717427 - DNA, 25 bp, Homo sapien
tttctgtgatcacttgtgttagcac

SEQ ID NO: 1717428 - DNA, 25 bp, Homo sapien
gaagaactccaagtacacgaatacc

SEQ ID NO: 1717429 - DNA, 25 bp, Homo sapien
cacgaatacccatgtattctttctg

SEQ ID NO: 1717430 - DNA, 25 bp, Homo sapien
aactccaagtacacgaatacccatg

SEQ ID NO: 1717431 - DNA, 25 bp, Homo sapien
tccaagtacacgaatacccatgtat

SEQ ID NO: 1717432 - DNA, 25 bp, Homo sapien
gcattcacttgagaaggcctcctga

SEQ ID NO: 1717433 - DNA, 25 bp, Homo sapien
agaaaatgaaaaactgagagtggcc

SEQ ID NO: 1717434 - DNA, 25 bp, Homo sapien
aagaaaatgaaaaactgagagtggc

SEQ ID NO: 1717435 - DNA, 25 bp, Homo sapien
gaaaatgaaaaactgagagtggcca

SEQ ID NO: 1717436 - DNA, 25 bp, Homo sapien
cacttgatctaggaactcttcctct

SEQ ID NO: 1717437 - DNA, 25 bp, Homo sapien
ctcttcacttgatctaggaactctt

SEQ ID NO: 1717438 - DNA, 25 bp, Homo sapien
tcacttgatctaggaactcttcctc

SEQ ID NO: 1717439 - DNA, 25 bp, Homo sapien
cttcacttgatctaggaactcttcc

SEQ ID NO: 1717440 - DNA, 25 bp, Homo sapien
gacaaggctttgtggtcaacaggtc

SEQ ID NO: 1717441 - DNA, 25 bp, Homo sapien
aaggctttgtggtcaacaggtcttt

SEQ ID NO: 1717442 - DNA, 25 bp, Homo sapien
agtgacaaggctttgtggtcaacag

SEQ ID NO: 1717443 - DNA, 25 bp, Homo sapien
ggctttgtggtcaacaggtctttct

SEQ ID NO: 1717444 - DNA, 25 bp, Homo sapien
aataaaatgcacaggtggtttctcc

SEQ ID NO: 1717445 - DNA, 25 bp, Homo sapien
caggtggtttctccaacgaccaagc

SEQ ID NO: 1717446 - DNA, 25 bp, Homo sapien
ccaacgaccaagcaatgctgggtga

SEQ ID NO: 1717447 - DNA, 25 bp, Homo sapien
tgaggggtaagagcactaacttcag

SEQ ID NO: 1717448 - DNA, 25 bp, Homo sapien
tgagggttggcccagaagactgctt

SEQ ID NO: 1717449 - DNA, 25 bp, Homo sapien
ctctgacagaagacggcagaaagtg

SEQ ID NO: 1717450 - DNA, 25 bp, Homo sapien
ctcaaactgacagatcttcaccttc

SEQ ID NO: 1717451 - DNA, 25 bp, Homo sapien
gaaagtggcctcctcaaactgacag

SEQ ID NO: 1717452 - DNA, 25 bp, Homo sapien
gtgatacgtcccatgttgaaacaga

SEQ ID NO: 1717453 - DNA, 25 bp, Homo sapien
aattccttttcagcagtcgaagggc

SEQ ID NO: 1717454 - DNA, 25 bp, Homo sapien
gctcagggtacaggaatgccaatac

SEQ ID NO: 1717455 - DNA, 25 bp, Homo sapien
caggaatgtctggaaaaggacacca

SEQ ID NO: 1717456 - DNA, 25 bp, Homo sapien
tcaaaaaggcaaagctcaggctagt

SEQ ID NO: 1717457 - DNA, 25 bp, Homo sapien
cacttgatcgggaaaagttcagaga

SEQ ID NO: 1717458 - DNA, 25 bp, Homo sapien
gaaatagtccttggatcccactact

SEQ ID NO: 1717459 - DNA, 25 bp, Homo sapien
gaggcacagggtggttagcacaccc

SEQ ID NO: 1717460 - DNA, 25 bp, Homo sapien
gcaggcaaacctgtagctactggct

SEQ ID NO: 1717461 - DNA, 25 bp, Homo sapien
agagtagggagaggcaatgcacctg

SEQ ID NO: 1717462 - DNA, 25 bp, Homo sapien
gctgcaggactgccaaattcttctt

SEQ ID NO: 1717463 - DNA, 25 bp, Homo sapien
aactcatcagctgaattcttctgca

SEQ ID NO: 1717464 - DNA, 25 bp, Homo sapien
caaaggtaaagcaaggacttgctta

SEQ ID NO: 1717465 - DNA, 25 bp, Homo sapien
ttctgagtgaggtccaaaggtaaag

SEQ ID NO: 1717466 - DNA, 25 bp, Homo sapien
tccaaaggtaaagcaaggacttgct

SEQ ID NO: 1717467 - DNA, 25 bp, Homo sapien
tctgagtgaggtccaaaggtaaagc

SEQ ID NO: 1717468 - DNA, 25 bp, Homo sapien
tgctcacccagtctaaactcctggt

SEQ ID NO: 1717469 - DNA, 25 bp, Homo sapien
tgtaagagcctattatggtgccctg

SEQ ID NO: 1717470 - DNA, 25 bp, Homo sapien
taattggatcattctcactgcatgt

SEQ ID NO: 1717471 - DNA, 25 bp, Homo sapien
acttgcctccaacccagctagaaaa

SEQ ID NO: 1717472 - DNA, 25 bp, Homo sapien
ctgagagagctccacataggtagag

SEQ ID NO: 1717473 - DNA, 25 bp, Homo sapien
gagagagctccacataggtagagac

SEQ ID NO: 1717474 - DNA, 25 bp, Homo sapien
agagctccacataggtagagacaac

SEQ ID NO: 1717475 - DNA, 25 bp, Homo sapien
gagagctccacataggtagagacaa

SEQ ID NO: 1717476 - DNA, 25 bp, Homo sapien
cctggagaaccaacataaactgctt

SEQ ID NO: 1717477 - DNA, 25 bp, Homo sapien
tgctcacagtgcagccacttgtcct

SEQ ID NO: 1717478 - DNA, 25 bp, Homo sapien
ccagcttgatggagaagtcaagatg

SEQ ID NO: 1717479 - DNA, 25 bp, Homo sapien
cctccctggagaaccaacataaact

SEQ ID NO: 1717480 - DNA, 25 bp, Homo sapien
gaggtctagctgtgaacatgtactc

SEQ ID NO: 1717481 - DNA, 25 bp, Homo sapien
tgaacatgtactctctaaaagccct

SEQ ID NO: 1717482 - DNA, 25 bp, Homo sapien
catgtgaggtctagctgtgaacatg

SEQ ID NO: 1717483 - DNA, 25 bp, Homo sapien
tgtactctctaaaagccctagaccc

SEQ ID NO: 1717484 - DNA, 25 bp, Homo sapien
tcagaaatgcagatctgaagagaac

SEQ ID NO: 1717485 - DNA, 25 bp, Homo sapien
actgagagaatcagattctccagag

SEQ ID NO: 1717486 - DNA, 25 bp, Homo sapien
agctggtttctggaggtgtctgcat

SEQ ID NO: 1717487 - DNA, 25 bp, Homo sapien
gaaatgcagatctgaagagaactga

SEQ ID NO: 1717488 - DNA, 25 bp, Homo sapien
tatacacacccctcttaggaaacaa

SEQ ID NO: 1717489 - DNA, 25 bp, Homo sapien
ccaagggaaggatatcccagggtgt

SEQ ID NO: 1717490 - DNA, 25 bp, Homo sapien
aaggatatcccagggtgtggaaatg

SEQ ID NO: 1717491 - DNA, 25 bp, Homo sapien
ttccacacttaagataatgtgtctg

SEQ ID NO: 1717492 - DNA, 25 bp, Homo sapien
atgtgtctggagtggccaagggaag

SEQ ID NO: 1717493 - DNA, 25 bp, Homo sapien
gaatatatagtagctctgactctgc

SEQ ID NO: 1717494 - DNA, 25 bp, Homo sapien
gaatatctaagcctgggatcagacc

SEQ ID NO: 1717495 - DNA, 25 bp, Homo sapien
ggatcagacccatctctaggcaaag

SEQ ID NO: 1717496 - DNA, 25 bp, Homo sapien
tttgtccatgagacccaagtactga

SEQ ID NO: 1717497 - DNA, 25 bp, Homo sapien
ctgccgagagagagagccactggga

SEQ ID NO: 1717498 - DNA, 25 bp, Homo sapien
cgagagagagagccactgggaccag

SEQ ID NO: 1717499 - DNA, 25 bp, Homo sapien
tgccgagagagagagccactgggac

SEQ ID NO: 1717500 - DNA, 25 bp, Homo sapien
ccgagagagagagccactgggacca

SEQ ID NO: 1717501 - DNA, 25 bp, Homo sapien
gaaatgagcgcccactgactctcca

SEQ ID NO: 1717502 - DNA, 25 bp, Homo sapien
gccaaggacatcataactctgagaa

SEQ ID NO: 1717503 - DNA, 25 bp, Homo sapien
gactctccagtacatggacacacag

SEQ ID NO: 1717504 - DNA, 25 bp, Homo sapien
caaggacatcataactctgagaaat

SEQ ID NO: 1717505 - DNA, 25 bp, Homo sapien
tattccaaacctagagccccatctg

SEQ ID NO: 1717506 - DNA, 25 bp, Homo sapien
tggacagagaaggtaaccacgctag

SEQ ID NO: 1717507 - DNA, 25 bp, Homo sapien
catggttcccagactttaaggagcc

SEQ ID NO: 1717508 - DNA, 25 bp, Homo sapien
ctgaatccctcaggagtacagcaga

SEQ ID NO: 1717509 - DNA, 25 bp, Homo sapien
gttagaacacggctgtgctcgtaga

SEQ ID NO: 1717510 - DNA, 25 bp, Homo sapien
agtggacccccagcatgacattgct

SEQ ID NO: 1717511 - DNA, 25 bp, Homo sapien
agacactcactaaagggccgacaca

SEQ ID NO: 1717512 - DNA, 25 bp, Homo sapien
tagacttgaacgaaacgcagacact

SEQ ID NO: 1717513 - DNA, 25 bp, Homo sapien
cctgttaaaggacaagagcccttct

SEQ ID NO: 1717514 - DNA, 25 bp, Homo sapien
ggctctaagacctcatggacaatca

SEQ ID NO: 1717515 - DNA, 25 bp, Homo sapien
caaggctactaactcacatacaagg

SEQ ID NO: 1717516 - DNA, 25 bp, Homo sapien
tcagccttgctatgggttactctag

SEQ ID NO: 1717517 - DNA, 25 bp, Homo sapien
gaatatgcatgaagataccctctgg

SEQ ID NO: 1717518 - DNA, 25 bp, Homo sapien
gccatgtgcaccaaatagcgaggca

SEQ ID NO: 1717519 - DNA, 25 bp, Homo sapien
gagaaatagtgcttaaacaggtccc

SEQ ID NO: 1717520 - DNA, 25 bp, Homo sapien
taggaatcggacaaagccatgtgca

SEQ ID NO: 1717521 - DNA, 25 bp, Homo sapien
gactacaggtccattgagcaaggct

SEQ ID NO: 1717522 - DNA, 25 bp, Homo sapien
tgttttagactcagaagggctggag

SEQ ID NO: 1717523 - DNA, 25 bp, Homo sapien
gctggagggagctgtatcaaattat

SEQ ID NO: 1717524 - DNA, 25 bp, Homo sapien
ccatagggtagaactaagtgaatca

SEQ ID NO: 1717525 - DNA, 25 bp, Homo sapien
ggaaggagttactgatggcaaaata

SEQ ID NO: 1717526 - DNA, 25 bp, Homo sapien
cattcagcatattcactcatggctg

SEQ ID NO: 1717527 - DNA, 25 bp, Homo sapien
gaacaggaaggagttactgatggca

SEQ ID NO: 1717528 - DNA, 25 bp, Homo sapien
ttcagcatattcactcatggctggg

SEQ ID NO: 1717529 - DNA, 25 bp, Homo sapien
ttctcctaacatgctacttcatcag

SEQ ID NO: 1717530 - DNA, 25 bp, Homo sapien
aacatgctacttcatcagaacttac

SEQ ID NO: 1717531 - DNA, 25 bp, Homo sapien
ggaaggtccattagctctgggatta

SEQ ID NO: 1717532 - DNA, 25 bp, Homo sapien
aaggaaaggaaggtccattagctct

SEQ ID NO: 1717533 - DNA, 25 bp, Homo sapien
acagggcaggtcacacattgagaga

SEQ ID NO: 1717534 - DNA, 25 bp, Homo sapien
tatccaaatcctggtcaagcaggtg

SEQ ID NO: 1717535 - DNA, 25 bp, Homo sapien
gatacccactggtgatagacagggc

SEQ ID NO: 1717536 - DNA, 25 bp, Homo sapien
gaggccttaagctcagatacccact

SEQ ID NO: 1717537 - DNA, 25 bp, Homo sapien
gcctttgactgcttgtgagtaagaa

SEQ ID NO: 1717538 - DNA, 25 bp, Homo sapien
cagcctttgactgcttgtgagtaag

SEQ ID NO: 1717539 - DNA, 25 bp, Homo sapien
tgcagcctttgactgcttgtgagta

SEQ ID NO: 1717540 - DNA, 25 bp, Homo sapien
gcaaggactaactccttacatctgt

SEQ ID NO: 1717541 - DNA, 25 bp, Homo sapien
aaggctagtatacttaatatgtaca

SEQ ID NO: 1717542 - DNA, 25 bp, Homo sapien
catgtagatagcagtaactataaag

SEQ ID NO: 1717543 - DNA, 25 bp, Homo sapien
acaataacagaatcatggtcccttc

SEQ ID NO: 1717544 - DNA, 25 bp, Homo sapien
tattttgataaacatgtagatagca

SEQ ID NO: 1717545 - DNA, 25 bp, Homo sapien
ctaggagagaacttaacccacctgg

SEQ ID NO: 1717546 - DNA, 25 bp, Homo sapien
ggaccaggataccactctgtcactg

SEQ ID NO: 1717547 - DNA, 25 bp, Homo sapien
ttctccctatcatgacggtgtagcc

SEQ ID NO: 1717548 - DNA, 25 bp, Homo sapien
caagagctggcaccagtaccactga

SEQ ID NO: 1717549 - DNA, 25 bp, Homo sapien
gggggaatctgcactgagctcctca

SEQ ID NO: 1717550 - DNA, 25 bp, Homo sapien
ctgctcgtggctgctgggggaatct

SEQ ID NO: 1717551 - DNA, 25 bp, Homo sapien
ggggaatctgcactgagctcctcat

SEQ ID NO: 1717552 - DNA, 25 bp, Homo sapien
tcattcctcctgctcgtggctgctg

SEQ ID NO: 1717553 - DNA, 25 bp, Homo sapien
agacgctgggtctgattctgcccca

SEQ ID NO: 1717554 - DNA, 25 bp, Homo sapien
ctgtttctgacagcggaggagagga

SEQ ID NO: 1717555 - DNA, 25 bp, Homo sapien
gaggagaaaaaagggagccctctca

SEQ ID NO: 1717556 - DNA, 25 bp, Homo sapien
agccctctcaggaggagtcagacgc

SEQ ID NO: 1717557 - DNA, 25 bp, Homo sapien
aggtgtggaccccaccccaggccat

SEQ ID NO: 1717558 - DNA, 25 bp, Homo sapien
gcagcaggtgtggaccccaccccag

SEQ ID NO: 1717559 - DNA, 25 bp, Homo sapien
gcagcacaggtggaagcagcaggtg

SEQ ID NO: 1717560 - DNA, 25 bp, Homo sapien
agcaggtgtggaccccaccccaggc

SEQ ID NO: 1717561 - DNA, 25 bp, Homo sapien
gtttgtgaagttcttcaggcacagc

SEQ ID NO: 1717562 - DNA, 25 bp, Homo sapien
tgcaggaggagggtctgtcctgggt

SEQ ID NO: 1717563 - DNA, 25 bp, Homo sapien
gtctgtcctgggtgtttgtgaagtt

SEQ ID NO: 1717564 - DNA, 25 bp, Homo sapien
cttgggtgagtactggcattgcagg

SEQ ID NO: 1717565 - DNA, 25 bp, Homo sapien
gctggtgacaagtaaggtacaccga

SEQ ID NO: 1717566 - DNA, 25 bp, Homo sapien
tcccagattgtgtaatgagacttct

SEQ ID NO: 1717567 - DNA, 25 bp, Homo sapien
tgacaagtaaggtacaccgacttgg

SEQ ID NO: 1717568 - DNA, 25 bp, Homo sapien
tgtaatgagacttctgaactgctgt

SEQ ID NO: 1717569 - DNA, 25 bp, Homo sapien
atgttttcggaagcgttgtagattc

SEQ ID NO: 1717570 - DNA, 25 bp, Homo sapien
cacaccagtagaatcccgagtcatt

SEQ ID NO: 1717571 - DNA, 25 bp, Homo sapien
gaatcccgagtcattctgtgtcagc

SEQ ID NO: 1717572 - DNA, 25 bp, Homo sapien
gcgttgtagattccacaccagtaga

SEQ ID NO: 1717573 - DNA, 25 bp, Homo sapien
agggggtgcatgacatttccttcag

SEQ ID NO: 1717574 - DNA, 25 bp, Homo sapien
ggggtggcacagaggtatttcctca

SEQ ID NO: 1717575 - DNA, 25 bp, Homo sapien
gaggtatttcctcaagaaaagagct

SEQ ID NO: 1717576 - DNA, 25 bp, Homo sapien
tgatagaggcatgggagggggtgca

SEQ ID NO: 1717577 - DNA, 25 bp, Homo sapien
ttcccaacaattgaggccaggatgt

SEQ ID NO: 1717578 - DNA, 25 bp, Homo sapien
cttcccaacaattgaggccaggatg

SEQ ID NO: 1717579 - DNA, 25 bp, Homo sapien
ggatgtaccgggtggaggagaggtg

SEQ ID NO: 1717580 - DNA, 25 bp, Homo sapien
gccaggatgtaccgggtggaggaga

SEQ ID NO: 1717581 - DNA, 25 bp, Homo sapien
tgggagccagggaagagtccacata

SEQ ID NO: 1717582 - DNA, 25 bp, Homo sapien
gagccagggaagagtccacatagga

SEQ ID NO: 1717583 - DNA, 25 bp, Homo sapien
gaagagtccacataggagacgtggt

SEQ ID NO: 1717584 - DNA, 25 bp, Homo sapien
cagggaagagtccacataggagacg

SEQ ID NO: 1717585 - DNA, 25 bp, Homo sapien
ctcagagccattgatggagggatgg

SEQ ID NO: 1717586 - DNA, 25 bp, Homo sapien
gtctcagagccattgatggagggat

SEQ ID NO: 1717587 - DNA, 25 bp, Homo sapien
gaggtcccctctggagaagtgatca

SEQ ID NO: 1717588 - DNA, 25 bp, Homo sapien
cagaggtcccctctggagaagtgat

SEQ ID NO: 1717589 - DNA, 25 bp, Homo sapien
aaggggaggccgtcatggcctcaaa

SEQ ID NO: 1717590 - DNA, 25 bp, Homo sapien
aggggaggccgtcatggcctcaaaa

SEQ ID NO: 1717591 - DNA, 25 bp, Homo sapien
ggggaggccgtcatggcctcaaaac

SEQ ID NO: 1717592 - DNA, 25 bp, Homo sapien
ttcaatgaccatgaatgtattttct

SEQ ID NO: 1717593 - DNA, 25 bp, Homo sapien
gtcttctgcgaagccagtctctggt

SEQ ID NO: 1717594 - DNA, 25 bp, Homo sapien
ttctgcgaagccagtctctggtgcc

SEQ ID NO: 1717595 - DNA, 25 bp, Homo sapien
aaattgtcttctgcgaagccagtct

SEQ ID NO: 1717596 - DNA, 25 bp, Homo sapien
atagcaccaagaccaggaatctggg

SEQ ID NO: 1717597 - DNA, 25 bp, Homo sapien
cacatagcaccaagaccaggaatct

SEQ ID NO: 1717598 - DNA, 25 bp, Homo sapien
catagcaccaagaccaggaatctgg

SEQ ID NO: 1717599 - DNA, 25 bp, Homo sapien
gtccacatagcaccaagaccaggaa

SEQ ID NO: 1717600 - DNA, 25 bp, Homo sapien
tgcagatcaggagcactaacaggac

SEQ ID NO: 1717601 - DNA, 25 bp, Homo sapien
tgtgctgggacaatcagaaacctcg

SEQ ID NO: 1717602 - DNA, 25 bp, Homo sapien
tagcgctagcctttcctcacaagga

SEQ ID NO: 1717603 - DNA, 25 bp, Homo sapien
ttcataggactctagggcagaccac

SEQ ID NO: 1717604 - DNA, 25 bp, Homo sapien
gctcagagaacgacagagtgctgga

SEQ ID NO: 1717605 - DNA, 25 bp, Homo sapien
agatgtctgagatcccacaacccag

SEQ ID NO: 1717606 - DNA, 25 bp, Homo sapien
tatggtggtcttttacagggctggc

SEQ ID NO: 1717607 - DNA, 25 bp, Homo sapien
ttggttcaggcaacacaagctggca

SEQ ID NO: 1717608 - DNA, 25 bp, Homo sapien
caaaagcgatgcctctcacagatag

SEQ ID NO: 1717609 - DNA, 25 bp, Homo sapien
cctccctgagatgcggccctgtggc

SEQ ID NO: 1717610 - DNA, 25 bp, Homo sapien
tccctgagatgcggccctgtggcca

SEQ ID NO: 1717611 - DNA, 25 bp, Homo sapien
tgagatgcggccctgtggccacagc

SEQ ID NO: 1717612 - DNA, 25 bp, Homo sapien
tcccctccctgagatgcggccctgt

SEQ ID NO: 1717613 - DNA, 25 bp, Homo sapien
tggagacaagacttgttgaataagg

SEQ ID NO: 1717614 - DNA, 25 bp, Homo sapien
ggagacaagacttgttgaataaggt

SEQ ID NO: 1717615 - DNA, 25 bp, Homo sapien
tgtggagacaagacttgttgaataa

SEQ ID NO: 1717616 - DNA, 25 bp, Homo sapien
ctgtggagacaagacttgttgaata

SEQ ID NO: 1717617 - DNA, 25 bp, Homo sapien
ctcacttttgtgtatgcgctcccag

SEQ ID NO: 1717618 - DNA, 25 bp, Homo sapien
ttgtgtatgcgctcccagcagaggg

SEQ ID NO: 1717619 - DNA, 25 bp, Homo sapien
tttgtgtatgcgctcccagcagagg

SEQ ID NO: 1717620 - DNA, 25 bp, Homo sapien
acttttgtgtatgcgctcccagcag

SEQ ID NO: 1717621 - DNA, 25 bp, Homo sapien
ttgggtgaaaccaggctcacacttc

SEQ ID NO: 1717622 - DNA, 25 bp, Homo sapien
gacttgggtgaaaccaggctcacac

SEQ ID NO: 1717623 - DNA, 25 bp, Homo sapien
ccagacttgggtgaaaccaggctca

SEQ ID NO: 1717624 - DNA, 25 bp, Homo sapien
cagacttgggtgaaaccaggctcac

SEQ ID NO: 1717625 - DNA, 25 bp, Homo sapien
cttggatgaagtatcgagggtccca

SEQ ID NO: 1717626 - DNA, 25 bp, Homo sapien
aagtatcgagggtcccaggccgctg

SEQ ID NO: 1717627 - DNA, 25 bp, Homo sapien
gatgaagtatcgagggtcccaggcc

SEQ ID NO: 1717628 - DNA, 25 bp, Homo sapien
tatcgagggtcccaggccgctgtcc

SEQ ID NO: 1717629 - DNA, 25 bp, Homo sapien
ccaaggcctctactctgagctcagt

SEQ ID NO: 1717630 - DNA, 25 bp, Homo sapien
cggtgaagacgccatagaagcgatc

SEQ ID NO: 1717631 - DNA, 25 bp, Homo sapien
gattctgacaatagagatctcaggg

SEQ ID NO: 1717632 - DNA, 25 bp, Homo sapien
tctgagctcagtcatggtgacggtg

SEQ ID NO: 1717633 - DNA, 25 bp, Homo sapien
ggaatctgaggcatgttctgggtag

SEQ ID NO: 1717634 - DNA, 25 bp, Homo sapien
ctgaggcatgttctgggtaggatta

SEQ ID NO: 1717635 - DNA, 25 bp, Homo sapien
acagtgggctcagggccttagtggt

SEQ ID NO: 1717636 - DNA, 25 bp, Homo sapien
ttctgggtaggattaacattggagg

SEQ ID NO: 1717637 - DNA, 25 bp, Homo sapien
taggtcaagtcacgtgcctgcagca

SEQ ID NO: 1717638 - DNA, 25 bp, Homo sapien
aggtcaagtcacgtgcctgcagcac

SEQ ID NO: 1717639 - DNA, 25 bp, Homo sapien
ttaggtcaagtcacgtgcctgcagc

SEQ ID NO: 1717640 - DNA, 25 bp, Homo sapien
gtcaagtcacgtgcctgcagcacag

SEQ ID NO: 1717641 - DNA, 25 bp, Homo sapien
gctggctgcaatagcagcctctggc

SEQ ID NO: 1717642 - DNA, 25 bp, Homo sapien
tgtgcacgctggctgcaatagcagc

SEQ ID NO: 1717643 - DNA, 25 bp, Homo sapien
gcgtgtgcacgctggctgcaatagc

SEQ ID NO: 1717644 - DNA, 25 bp, Homo sapien
cacgctggctgcaatagcagcctct

SEQ ID NO: 1717645 - DNA, 25 bp, Homo sapien
cagagaggagaccagggaagaatca

SEQ ID NO: 1717646 - DNA, 25 bp, Homo sapien
gaatcagagaaactgcaggtggctg

SEQ ID NO: 1717647 - DNA, 25 bp, Homo sapien
tgcaggtggctgaagatgcgcgcac

SEQ ID NO: 1717648 - DNA, 25 bp, Homo sapien
gaccagggaagaatcagagaaactg

SEQ ID NO: 1717649 - DNA, 25 bp, Homo sapien
tagagtgtgcgaaggtgttctggcg

SEQ ID NO: 1717650 - DNA, 25 bp, Homo sapien
agtgtgcgaaggtgttctggcgaca

SEQ ID NO: 1717651 - DNA, 25 bp, Homo sapien
agaatagagtgtgcgaaggtgttct

SEQ ID NO: 1717652 - DNA, 25 bp, Homo sapien
aaagaatagagtgtgcgaaggtgtt

SEQ ID NO: 1717653 - DNA, 25 bp, Homo sapien
gcttgtccagctgccttcagacgca

SEQ ID NO: 1717654 - DNA, 25 bp, Homo sapien
gtctgggcttgtccagctgccttca

SEQ ID NO: 1717655 - DNA, 25 bp, Homo sapien
tgggcttgtccagctgccttcagac

SEQ ID NO: 1717656 - DNA, 25 bp, Homo sapien
gggcttgtccagctgccttcagacg

SEQ ID NO: 1717657 - DNA, 25 bp, Homo sapien
gggaattgggagctgggcctgattc

SEQ ID NO: 1717658 - DNA, 25 bp, Homo sapien
gaagactggggagagggaattggga

SEQ ID NO: 1717659 - DNA, 25 bp, Homo sapien
gagggaattgggagctgggcctgat

SEQ ID NO: 1717660 - DNA, 25 bp, Homo sapien
gagaagactggggagagggaattgg

SEQ ID NO: 1717661 - DNA, 25 bp, Homo sapien
tttcctgtgcgctcatgggagggga

SEQ ID NO: 1717662 - DNA, 25 bp, Homo sapien
cttttcctgtgcgctcatgggaggg

SEQ ID NO: 1717663 - DNA, 25 bp, Homo sapien
gtggtccttttcctgtgcgctcatg

SEQ ID NO: 1717664 - DNA, 25 bp, Homo sapien
gtccttttcctgtgcgctcatggga

SEQ ID NO: 1717665 - DNA, 25 bp, Homo sapien
tagcagtgggtgtagggctcgccag

SEQ ID NO: 1717666 - DNA, 25 bp, Homo sapien
gtgggtgtagggctcgccaggccat

SEQ ID NO: 1717667 - DNA, 25 bp, Homo sapien
gcagtgggtgtagggctcgccaggc

SEQ ID NO: 1717668 - DNA, 25 bp, Homo sapien
agtgggtgtagggctcgccaggcca

SEQ ID NO: 1717669 - DNA, 25 bp, Homo sapien
tacctgagccttggattgtgcctga

SEQ ID NO: 1717670 - DNA, 25 bp, Homo sapien
ggtactggcatctcacggttagcgt

SEQ ID NO: 1717671 - DNA, 25 bp, Homo sapien
tcagaagggcggtagattctacacc

SEQ ID NO: 1717672 - DNA, 25 bp, Homo sapien
tgaagaagccagcatcagggtcgtc

SEQ ID NO: 1717673 - DNA, 25 bp, Homo sapien
tgtgaagagaccaggtcgcggggag

SEQ ID NO: 1717674 - DNA, 25 bp, Homo sapien
aagagaccaggtcgcggggagtcca

SEQ ID NO: 1717675 - DNA, 25 bp, Homo sapien
cagggatggtagatggagactcagg

SEQ ID NO: 1717676 - DNA, 25 bp, Homo sapien
agggacagggatggtagatggagac

SEQ ID NO: 1717677 - DNA, 25 bp, Homo sapien
ggaaggcagagggacaggaagggga

SEQ ID NO: 1717678 - DNA, 25 bp, Homo sapien
agagggacaggaaggggagaggacg

SEQ ID NO: 1717679 - DNA, 25 bp, Homo sapien
tggaaggcagagggacaggaagggg

SEQ ID NO: 1717680 - DNA, 25 bp, Homo sapien
ctggaaggcagagggacaggaaggg

SEQ ID NO: 1717681 - DNA, 25 bp, Homo sapien
agggcggagcgtggagttctgtggc

SEQ ID NO: 1717682 - DNA, 25 bp, Homo sapien
agggccagggcggagcgtggagttc

SEQ ID NO: 1717683 - DNA, 25 bp, Homo sapien
ggccagggcggagcgtggagttctg

SEQ ID NO: 1717684 - DNA, 25 bp, Homo sapien
ccagggcggagcgtggagttctgtg

SEQ ID NO: 1717685 - DNA, 25 bp, Homo sapien
tggctacgaggagtccacagaacac

SEQ ID NO: 1717686 - DNA, 25 bp, Homo sapien
tacgaggagtccacagaacacaggc

SEQ ID NO: 1717687 - DNA, 25 bp, Homo sapien
caggctcttggctacgaggagtcca

SEQ ID NO: 1717688 - DNA, 25 bp, Homo sapien
tcttggctacgaggagtccacagaa

SEQ ID NO: 1717689 - DNA, 25 bp, Homo sapien
gctgcatgtgccgattccttaaaac

SEQ ID NO: 1717690 - DNA, 25 bp, Homo sapien
agagacctcccttgatgctgcatgt

SEQ ID NO: 1717691 - DNA, 25 bp, Homo sapien
ccctgtggctcagtgggaagtgtct

SEQ ID NO: 1717692 - DNA, 25 bp, Homo sapien
ctgtggctcagtgggaagtgtctat

SEQ ID NO: 1717693 - DNA, 25 bp, Homo sapien
gtcatgacatacaacccgggaagat

SEQ ID NO: 1717694 - DNA, 25 bp, Homo sapien
caactcactggaggtgtttcaagga

SEQ ID NO: 1717695 - DNA, 25 bp, Homo sapien
cagaggacaataagataatggagca

SEQ ID NO: 1717696 - DNA, 25 bp, Homo sapien
tggtgcagccagtcctttcatgggc

SEQ ID NO: 1717697 - DNA, 25 bp, Homo sapien
ggacctcatcctgacgccataatgg

SEQ ID NO: 1717698 - DNA, 25 bp, Homo sapien
tgactgtactgcattggacattggg

SEQ ID NO: 1717699 - DNA, 25 bp, Homo sapien
taacttgtctctagctcacaggtct

SEQ ID NO: 1717700 - DNA, 25 bp, Homo sapien
tccacacctggacctggtttaaatg

SEQ ID NO: 1717701 - DNA, 25 bp, Homo sapien
catggttttccaccatatgtccccc

SEQ ID NO: 1717702 - DNA, 25 bp, Homo sapien
tccagggaaggtccgtgacctgttg

SEQ ID NO: 1717703 - DNA, 25 bp, Homo sapien
aacagtgtgatataatatttctctc

SEQ ID NO: 1717704 - DNA, 25 bp, Homo sapien
tatcttagtccttgcaacagtgtga

SEQ ID NO: 1717705 - DNA, 25 bp, Homo sapien
tttttgggtatccaggctcctgagc

SEQ ID NO: 1717706 - DNA, 25 bp, Homo sapien
ggctgtgttggctgttatcccataa

SEQ ID NO: 1717707 - DNA, 25 bp, Homo sapien
agggctgcaccaagatttgagcacc

SEQ ID NO: 1717708 - DNA, 25 bp, Homo sapien
acctcgctgagactgtggactctgc

SEQ ID NO: 1717709 - DNA, 25 bp, Homo sapien
tatcccataaccacaggaagtccct

SEQ ID NO: 1717710 - DNA, 25 bp, Homo sapien
gaggagagggtcctcccaaccaagc

SEQ ID NO: 1717711 - DNA, 25 bp, Homo sapien
tggtgaccgaggaatcctcagagag

SEQ ID NO: 1717712 - DNA, 25 bp, Homo sapien
gagctcttggggtggtgaccgagga

SEQ ID NO: 1717713 - DNA, 25 bp, Homo sapien
tcttggggtggtgaccgaggaatcc

SEQ ID NO: 1717714 - DNA, 25 bp, Homo sapien
tttaccaacagctgtcactatcacg

SEQ ID NO: 1717715 - DNA, 25 bp, Homo sapien
caatacatattgaattaaatttacc

SEQ ID NO: 1717716 - DNA, 25 bp, Homo sapien
cagtaggcacaaaataagcgcacaa

SEQ ID NO: 1717717 - DNA, 25 bp, Homo sapien
aacagctgtcactatcacgatcctt

SEQ ID NO: 1717718 - DNA, 25 bp, Homo sapien
tgctgccgtattctcttcaccacaa

SEQ ID NO: 1717719 - DNA, 25 bp, Homo sapien
ctgctgccgtattctcttcaccaca

SEQ ID NO: 1717720 - DNA, 25 bp, Homo sapien
gcgcaatcgcacacttgttacacga

SEQ ID NO: 1717721 - DNA, 25 bp, Homo sapien
gcacacttgttacacgactgctcaa

SEQ ID NO: 1717722 - DNA, 25 bp, Homo sapien
ttgttacacgactgctcaagccggg

SEQ ID NO: 1717723 - DNA, 25 bp, Homo sapien
agtcgcacgcgcaatcgcacacttg

SEQ ID NO: 1717724 - DNA, 25 bp, Homo sapien
gcttgggttgaaaggaatcgccttc

SEQ ID NO: 1717725 - DNA, 25 bp, Homo sapien
ctccggccgtaccccgctgtttgca

SEQ ID NO: 1717726 - DNA, 25 bp, Homo sapien
gcggcccgaccctgccacccgcagc

SEQ ID NO: 1717727 - DNA, 25 bp, Homo sapien
cggccgtaccccgctgtttgcattt

SEQ ID NO: 1717728 - DNA, 25 bp, Homo sapien
acggtggccacaccgtgccggatca

SEQ ID NO: 1717729 - DNA, 25 bp, Homo sapien
gtgccggatcaggtcaggccttccg

SEQ ID NO: 1717730 - DNA, 25 bp, Homo sapien
gccttccgcagtggcgcccgtagtt

SEQ ID NO: 1717731 - DNA, 25 bp, Homo sapien
cagtggcgcccgtagttgtcccggc

SEQ ID NO: 1717732 - DNA, 25 bp, Homo sapien
gcgtagctaccccatctccagtggt

SEQ ID NO: 1717733 - DNA, 25 bp, Homo sapien
gatccagggaaaactagctcccgca

SEQ ID NO: 1717734 - DNA, 25 bp, Homo sapien
ttctctgccgcggaagatccaggga

SEQ ID NO: 1717735 - DNA, 25 bp, Homo sapien
ttcgcgcagccgtacaaacgagggt

SEQ ID NO: 1717736 - DNA, 25 bp, Homo sapien
gcaggaattcggaggaagcgggtgc

SEQ ID NO: 1717737 - DNA, 25 bp, Homo sapien
gaggctcgagcaccctcatccccag

SEQ ID NO: 1717738 - DNA, 25 bp, Homo sapien
cagcgttgcgatgcaggaattcgga

SEQ ID NO: 1717739 - DNA, 25 bp, Homo sapien
cttcggtgcggcccagcgttgcgat

SEQ ID NO: 1717740 - DNA, 25 bp, Homo sapien
cagggagactgcacttaagccgtca

SEQ ID NO: 1717741 - DNA, 25 bp, Homo sapien
tcacgaaagtgcgagaagggaatct

SEQ ID NO: 1717742 - DNA, 25 bp, Homo sapien
cggccccgtactgagctggtattga

SEQ ID NO: 1717743 - DNA, 25 bp, Homo sapien
gggaatctctaatgcggtgtatacg

SEQ ID NO: 1717744 - DNA, 25 bp, Homo sapien
tcatttcaatataatgggaccttct

SEQ ID NO: 1717745 - DNA, 25 bp, Homo sapien
catttcaatataatgggaccttctt

SEQ ID NO: 1717746 - DNA, 25 bp, Homo sapien
tggcagtagggacaggggttccagg

SEQ ID NO: 1717747 - DNA, 25 bp, Homo sapien
ttggcagtagggacaggggttccag

SEQ ID NO: 1717748 - DNA, 25 bp, Homo sapien
ctaggggaagtcaaagtgaggggct

SEQ ID NO: 1717749 - DNA, 25 bp, Homo sapien
ggctcctcttggcacgtcttgccat

SEQ ID NO: 1717750 - DNA, 25 bp, Homo sapien
gtcttgccatcagcccctactgcca

SEQ ID NO: 1717751 - DNA, 25 bp, Homo sapien
ccctactgccattgtgtcactgtca

SEQ ID NO: 1717752 - DNA, 25 bp, Homo sapien
cttttttggctacctcaggagggtg

SEQ ID NO: 1717753 - DNA, 25 bp, Homo sapien
tggagcctgcccacatagctgaggt

SEQ ID NO: 1717754 - DNA, 25 bp, Homo sapien
caggagccaaaatagaggcccgaga

SEQ ID NO: 1717755 - DNA, 25 bp, Homo sapien
aggcccgagattcctggtggctggc

SEQ ID NO: 1717756 - DNA, 25 bp, Homo sapien
ttctggatctgagagacgcatccag

SEQ ID NO: 1717757 - DNA, 25 bp, Homo sapien
tctgagagacgcatccagcagggag

SEQ ID NO: 1717758 - DNA, 25 bp, Homo sapien
tctagcccctctagcatcagacatg

SEQ ID NO: 1717759 - DNA, 25 bp, Homo sapien
ctctagcccctctagcatcagacat

SEQ ID NO: 1717760 - DNA, 25 bp, Homo sapien
aagacattttgcattgtggatagaa

SEQ ID NO: 1717761 - DNA, 25 bp, Homo sapien
gacattttgcattgtggatagaatt

SEQ ID NO: 1717762 - DNA, 25 bp, Homo sapien
cattttgcattgtggatagaattct

SEQ ID NO: 1717763 - DNA, 25 bp, Homo sapien
ccaagacattttgcattgtggatag

SEQ ID NO: 1717764 - DNA, 25 bp, Homo sapien
gacagggtggacacaagtaactggt

SEQ ID NO: 1717765 - DNA, 25 bp, Homo sapien
tagcacccggtgtgaacagagacca

SEQ ID NO: 1717766 - DNA, 25 bp, Homo sapien
taggccctcatttggctccggatta

SEQ ID NO: 1717767 - DNA, 25 bp, Homo sapien
gaggaactgttaactagcagctgac

SEQ ID NO: 1717768 - DNA, 25 bp, Homo sapien
gaagtgcttgagattccgccgtgag

SEQ ID NO: 1717769 - DNA, 25 bp, Homo sapien
tccttctttaagacgccagggctgt

SEQ ID NO: 1717770 - DNA, 25 bp, Homo sapien
tgcggcccaggaatccgaattctag

SEQ ID NO: 1717771 - DNA, 25 bp, Homo sapien
tattagggcttcgtcctgaggtcaa

SEQ ID NO: 1717772 - DNA, 25 bp, Homo sapien
gaatggaactgcgtcccaaaggcag

SEQ ID NO: 1717773 - DNA, 25 bp, Homo sapien
ttcccggaatctgcagcgaagagcg

SEQ ID NO: 1717774 - DNA, 25 bp, Homo sapien
tttcagagccaaattactgccaggg

SEQ ID NO: 1717775 - DNA, 25 bp, Homo sapien
gtttgcgcctccagagttcccggaa

SEQ ID NO: 1717776 - DNA, 25 bp, Homo sapien
tgctgagagccgaggtctttgcctt

SEQ ID NO: 1717777 - DNA, 25 bp, Homo sapien
tgagagccgaggtctttgccttgaa

SEQ ID NO: 1717778 - DNA, 25 bp, Homo sapien
gtctttgccttgaagagtcctcgga

SEQ ID NO: 1717779 - DNA, 25 bp, Homo sapien
tgccttgaagagtcctcggatctcc

SEQ ID NO: 1717780 - DNA, 25 bp, Homo sapien
cggcccggggttaatggcatgacat

SEQ ID NO: 1717781 - DNA, 25 bp, Homo sapien
cagtctgcccgatgggcttctgatg

SEQ ID NO: 1717782 - DNA, 25 bp, Homo sapien
ttctgatgccttttctaatttggtg

SEQ ID NO: 1717783 - DNA, 25 bp, Homo sapien
aatggcatgacatccctgcggcagt

SEQ ID NO: 1717784 - DNA, 25 bp, Homo sapien
tagctggttcactgtcagatgcaga

SEQ ID NO: 1717785 - DNA, 25 bp, Homo sapien
gatgcagactgatcagttaaaacct

SEQ ID NO: 1717786 - DNA, 25 bp, Homo sapien
gagcacagctttgaatgttcgtttg

SEQ ID NO: 1717787 - DNA, 25 bp, Homo sapien
tttaagagattaatcccctcagccc

SEQ ID NO: 1717788 - DNA, 25 bp, Homo sapien
ccaaatggacaaaaggtcatgggac

SEQ ID NO: 1717789 - DNA, 25 bp, Homo sapien
tggacaaaaggtcatgggacccacc

SEQ ID NO: 1717790 - DNA, 25 bp, Homo sapien
aatggacaaaaggtcatgggaccca

SEQ ID NO: 1717791 - DNA, 25 bp, Homo sapien
tgggacccaccccatttcatcctac

SEQ ID NO: 1717792 - DNA, 25 bp, Homo sapien
gatggggtctcacacacaggtttgg

SEQ ID NO: 1717793 - DNA, 25 bp, Homo sapien
gaggtggagctcacccaacgttcct

SEQ ID NO: 1717794 - DNA, 25 bp, Homo sapien
tctgctgatggggtctcacacacag

SEQ ID NO: 1717795 - DNA, 25 bp, Homo sapien
ggtttggaggtggagctcacccaac

SEQ ID NO: 1717796 - DNA, 25 bp, Homo sapien
ggtggagcatcacctttgtcctcag

SEQ ID NO: 1717797 - DNA, 25 bp, Homo sapien
cagccccccataccgactcctgcct

SEQ ID NO: 1717798 - DNA, 25 bp, Homo sapien
ctcaggctgtactcacagagggagg

SEQ ID NO: 1717799 - DNA, 25 bp, Homo sapien
gggggtggagcatcacctttgtcct

SEQ ID NO: 1717800 - DNA, 25 bp, Homo sapien
ggatgacaaggaggggaagtcttga

SEQ ID NO: 1717801 - DNA, 25 bp, Homo sapien
tgacaaggaggggaagtcttgaggg

SEQ ID NO: 1717802 - DNA, 25 bp, Homo sapien
ttggatgacaaggaggggaagtctt

SEQ ID NO: 1717803 - DNA, 25 bp, Homo sapien
ctttggatgacaaggaggggaagtc

SEQ ID NO: 1717804 - DNA, 25 bp, Homo sapien
cttggcagagggtgcatgtcgctct

SEQ ID NO: 1717805 - DNA, 25 bp, Homo sapien
caaattgtcattggggccagctgtt

SEQ ID NO: 1717806 - DNA, 25 bp, Homo sapien
catgtcgctctttgagaggtgagct

SEQ ID NO: 1717807 - DNA, 25 bp, Homo sapien
gataataatcggaggccaaattgtc

SEQ ID NO: 1717808 - DNA, 25 bp, Homo sapien
aagtggggtaaggggtggtcacatg

SEQ ID NO: 1717809 - DNA, 25 bp, Homo sapien
gtggggtaaggggtggtcacatgca

SEQ ID NO: 1717810 - DNA, 25 bp, Homo sapien
agtggggtaaggggtggtcacatgc

SEQ ID NO: 1717811 - DNA, 25 bp, Homo sapien
tggggtaaggggtggtcacatgcac

SEQ ID NO: 1717812 - DNA, 25 bp, Homo sapien
gttgctaacttctgctgacactggc

SEQ ID NO: 1717813 - DNA, 25 bp, Homo sapien
ctcggagcatggagcaggttgctaa

SEQ ID NO: 1717814 - DNA, 25 bp, Homo sapien
catggagcaggttgctaacttctgc

SEQ ID NO: 1717815 - DNA, 25 bp, Homo sapien
ctggctcggagcatggagcaggttg

SEQ ID NO: 1717816 - DNA, 25 bp, Homo sapien
agggaaatgtcctcgcactcaaaca

SEQ ID NO: 1717817 - DNA, 25 bp, Homo sapien
cgcagttccatagccccgcggagag

SEQ ID NO: 1717818 - DNA, 25 bp, Homo sapien
gaaatgtcctcgcactcaaacacaa

SEQ ID NO: 1717819 - DNA, 25 bp, Homo sapien
aaccaccacgcagcgcagttccata

SEQ ID NO: 1717820 - DNA, 25 bp, Homo sapien
ctccatagcaacaggtggcaatgtg

SEQ ID NO: 1717821 - DNA, 25 bp, Homo sapien
gctgtttacccagtgtttgcgataa

SEQ ID NO: 1717822 - DNA, 25 bp, Homo sapien
acaggtggcaatgtgcagctctcgg

SEQ ID NO: 1717823 - DNA, 25 bp, Homo sapien
agcagctgtttacccagtgtttgcg

SEQ ID NO: 1717824 - DNA, 25 bp, Homo sapien
aactctccggggaagccaattccag

SEQ ID NO: 1717825 - DNA, 25 bp, Homo sapien
aatgggcgataatctagatttctgc

SEQ ID NO: 1717826 - DNA, 25 bp, Homo sapien
gggctgagcaatggcaactctccgg

SEQ ID NO: 1717827 - DNA, 25 bp, Homo sapien
cagcttcattaaatgggcgataatc

SEQ ID NO: 1717828 - DNA, 25 bp, Homo sapien
ggctttaatggcccgcctcacctcc

SEQ ID NO: 1717829 - DNA, 25 bp, Homo sapien
aagaggctttaatggcccgcctcac

SEQ ID NO: 1717830 - DNA, 25 bp, Homo sapien
aaatgatcacatccattctgaaggc

SEQ ID NO: 1717831 - DNA, 25 bp, Homo sapien
gaggctttaatggcccgcctcacct

SEQ ID NO: 1717832 - DNA, 25 bp, Homo sapien
gtccagtccggcttagcagctcgct

SEQ ID NO: 1717833 - DNA, 25 bp, Homo sapien
cctcttcccgagctcgagcagggag

SEQ ID NO: 1717834 - DNA, 25 bp, Homo sapien
gcaggttgagcaactagccggcgct

SEQ ID NO: 1717835 - DNA, 25 bp, Homo sapien
gccgagtgactaatccagcaggttg

SEQ ID NO: 1717836 - DNA, 25 bp, Homo sapien
tcacacccagatgtaggagcgggcg

SEQ ID NO: 1717837 - DNA, 25 bp, Homo sapien
gctgcagctcgcctttcacacccag

SEQ ID NO: 1717838 - DNA, 25 bp, Homo sapien
tttcacacccagatgtaggagcggg

SEQ ID NO: 1717839 - DNA, 25 bp, Homo sapien
gcccgggctcctgatcccacagaga

SEQ ID NO: 1717840 - DNA, 25 bp, Homo sapien
ccctgtcacagatcctgatcagaag

SEQ ID NO: 1717841 - DNA, 25 bp, Homo sapien
gagaatggccaggaatcgggaggtc

SEQ ID NO: 1717842 - DNA, 25 bp, Homo sapien
caggaatcgggaggtcagcccaacc

SEQ ID NO: 1717843 - DNA, 25 bp, Homo sapien
cacagatcctgatcagaagatcact

SEQ ID NO: 1717844 - DNA, 25 bp, Homo sapien
ctacaacggagcagagaaggtttga

SEQ ID NO: 1717845 - DNA, 25 bp, Homo sapien
gagcagagaaggtttgaaggtgtcc

SEQ ID NO: 1717846 - DNA, 25 bp, Homo sapien
gagaaggtttgaaggtgtcctcagg

SEQ ID NO: 1717847 - DNA, 25 bp, Homo sapien
acaacggagcagagaaggtttgaag

SEQ ID NO: 1717848 - DNA, 25 bp, Homo sapien
tcctctcctaaactttggagcccaa

SEQ ID NO: 1717849 - DNA, 25 bp, Homo sapien
gagcccaaggcatagccttttgtcc

SEQ ID NO: 1717850 - DNA, 25 bp, Homo sapien
cctctcctaaactttggagcccaag

SEQ ID NO: 1717851 - DNA, 25 bp, Homo sapien
tttggagcccaaggcatagcctttt

SEQ ID NO: 1717852 - DNA, 25 bp, Homo sapien
ggtgttgtcatcctcgtacctggca

SEQ ID NO: 1717853 - DNA, 25 bp, Homo sapien
ctaggtgttgtcatcctcgtacctg

SEQ ID NO: 1717854 - DNA, 25 bp, Homo sapien
atcctcgtacctggcactgcctggt

SEQ ID NO: 1717855 - DNA, 25 bp, Homo sapien
ttgtcatcctcgtacctggcactgc

SEQ ID NO: 1717856 - DNA, 25 bp, Homo sapien
tcgcgccgcgcgctaattgggccgc

SEQ ID NO: 1717857 - DNA, 25 bp, Homo sapien
ctctgtcagcgccagtaaggccctg

SEQ ID NO: 1717858 - DNA, 25 bp, Homo sapien
cagactaaacaatcggccttggccg

SEQ ID NO: 1717859 - DNA, 25 bp, Homo sapien
ccttggccgtgagcgcagcgcaatt

SEQ ID NO: 1717860 - DNA, 25 bp, Homo sapien
ggaggcaagttgataacatggaccc

SEQ ID NO: 1717861 - DNA, 25 bp, Homo sapien
gtgctgtggaggcaagttgataaca

SEQ ID NO: 1717862 - DNA, 25 bp, Homo sapien
ataacatggaccctccgaaagctgc

SEQ ID NO: 1717863 - DNA, 25 bp, Homo sapien
aacatggaccctccgaaagctgcca

SEQ ID NO: 1717864 - DNA, 25 bp, Homo sapien
ctgggcttttatagctagaagccac

SEQ ID NO: 1717865 - DNA, 25 bp, Homo sapien
gggcttttatagctagaagccactc

SEQ ID NO: 1717866 - DNA, 25 bp, Homo sapien
tgggcttttatagctagaagccact

SEQ ID NO: 1717867 - DNA, 25 bp, Homo sapien
ctttctctccacttggcagggagaa

SEQ ID NO: 1717868 - DNA, 25 bp, Homo sapien
tttctctccacttggcagggagaag

SEQ ID NO: 1717869 - DNA, 25 bp, Homo sapien
cctttctctccacttggcagggaga

SEQ ID NO: 1717870 - DNA, 25 bp, Homo sapien
ctttaagttgacagatccaagaccc

SEQ ID NO: 1717871 - DNA, 25 bp, Homo sapien
gactaatgtgttaatctgtgaccac

SEQ ID NO: 1717872 - DNA, 25 bp, Homo sapien
caaatttagcatggatgcatctctc

SEQ ID NO: 1717873 - DNA, 25 bp, Homo sapien
gatgcatctctcagatgtgctggcc

SEQ ID NO: 1717874 - DNA, 25 bp, Homo sapien
tggttggagaacctcgaagtgtctc

SEQ ID NO: 1717875 - DNA, 25 bp, Homo sapien
ctcgaagtgtctcgctgccagagta

SEQ ID NO: 1717876 - DNA, 25 bp, Homo sapien
gaaatcatgagtttccgtgaatggg

SEQ ID NO: 1717877 - DNA, 25 bp, Homo sapien
ctccgagtggttggagaacctcgaa

SEQ ID NO: 1717878 - DNA, 25 bp, Homo sapien
catggcctgggtgctgccacggcca

SEQ ID NO: 1717879 - DNA, 25 bp, Homo sapien
ccacggccaccgccttcatactcac

SEQ ID NO: 1717880 - DNA, 25 bp, Homo sapien
gctgccacggccaccgccttcatac

SEQ ID NO: 1717881 - DNA, 25 bp, Homo sapien
cctgggtgctgccacggccaccgcc

SEQ ID NO: 1717882 - DNA, 25 bp, Homo sapien
gacaaaaagctcgatgacagctcca

SEQ ID NO: 1717883 - DNA, 25 bp, Homo sapien
caaaaagctcgatgacagctccagg

SEQ ID NO: 1717884 - DNA, 25 bp, Homo sapien
ggagacaaaaagctcgatgacagct

SEQ ID NO: 1717885 - DNA, 25 bp, Homo sapien
aaggagacaaaaagctcgatgacag

SEQ ID NO: 1717886 - DNA, 25 bp, Homo sapien
ccgtgtctgctggacaatgttgcgg

SEQ ID NO: 1717887 - DNA, 25 bp, Homo sapien
gctccccatacagtggcctcctccg

SEQ ID NO: 1717888 - DNA, 25 bp, Homo sapien
ctggacaatgttgcggcagctccca

SEQ ID NO: 1717889 - DNA, 25 bp, Homo sapien
tgtctgctggacaatgttgcggcag

SEQ ID NO: 1717890 - DNA, 25 bp, Homo sapien
ctggctgctttgactttttgacatt

SEQ ID NO: 1717891 - DNA, 25 bp, Homo sapien
tctttctgagcatttgcagtacaca

SEQ ID NO: 1717892 - DNA, 25 bp, Homo sapien
tcaggggtacaaggcgagggcgggc

SEQ ID NO: 1717893 - DNA, 25 bp, Homo sapien
ctgagcatttgcagtacacagcagc

SEQ ID NO: 1717894 - DNA, 25 bp, Homo sapien
tttctgagcatttgcagtacacagc

SEQ ID NO: 1717895 - DNA, 25 bp, Homo sapien
tttgtgggctgcttggctcgctccg

SEQ ID NO: 1717896 - DNA, 25 bp, Homo sapien
ggtccttccgcgacgctcgtcagct

SEQ ID NO: 1717897 - DNA, 25 bp, Homo sapien
ctccggctccgctcttccttcccgg

SEQ ID NO: 1717898 - DNA, 25 bp, Homo sapien
ccggccgcactgtccggtccgcagg

SEQ ID NO: 1717899 - DNA, 25 bp, Homo sapien
agccctggccctacaagtaactgca

SEQ ID NO: 1717900 - DNA, 25 bp, Homo sapien
ccttccagggttgcagtggtatcaa

SEQ ID NO: 1717901 - DNA, 25 bp, Homo sapien
tgcaggatgcttcccaatccaaagt

SEQ ID NO: 1717902 - DNA, 25 bp, Homo sapien
ggcttttcagagcaacgagccctgg

SEQ ID NO: 1717903 - DNA, 25 bp, Homo sapien
ccattgctgtctgcacccgtggtca

SEQ ID NO: 1717904 - DNA, 25 bp, Homo sapien
cgtgccacttgcagttgtccctgtg

SEQ ID NO: 1717905 - DNA, 25 bp, Homo sapien
ccagatggagccgacctgattgtct

SEQ ID NO: 1717906 - DNA, 25 bp, Homo sapien
tgctgccatcggcttgcccagagag

SEQ ID NO: 1717907 - DNA, 25 bp, Homo sapien
ggcctctgcctgcttctagcaatga

SEQ ID NO: 1717908 - DNA, 25 bp, Homo sapien
cctctgcctgcttctagcaatgatg

SEQ ID NO: 1717909 - DNA, 25 bp, Homo sapien
gcctctgcctgcttctagcaatgat

SEQ ID NO: 1717910 - DNA, 25 bp, Homo sapien
ctgcagcaggaactgccgggccact

SEQ ID NO: 1717911 - DNA, 25 bp, Homo sapien
gcagcaggaactgccgggccacttg

SEQ ID NO: 1717912 - DNA, 25 bp, Homo sapien
tgctgtcattgttccctggggagct

SEQ ID NO: 1717913 - DNA, 25 bp, Homo sapien
gcagaggcagactgtttgctgtcat

SEQ ID NO: 1717914 - DNA, 25 bp, Homo sapien
tactgttaaggctgcacatctgttg

SEQ ID NO: 1717915 - DNA, 25 bp, Homo sapien
ttaaggctgcacatctgttgggcac

SEQ ID NO: 1717916 - DNA, 25 bp, Homo sapien
tgttaaggctgcacatctgttgggc

SEQ ID NO: 1717917 - DNA, 25 bp, Homo sapien
taaggctgcacatctgttgggcacc

SEQ ID NO: 1717918 - DNA, 25 bp, Homo sapien
gcaggattcggcccgttagccctgt

SEQ ID NO: 1717919 - DNA, 25 bp, Homo sapien
caggattcggcccgttagccctgtc

SEQ ID NO: 1717920 - DNA, 25 bp, Homo sapien
tgcaggattcggcccgttagccctg

SEQ ID NO: 1717921 - DNA, 25 bp, Homo sapien
agcatctgcggcgacatcatggcca

SEQ ID NO: 1717922 - DNA, 25 bp, Homo sapien
gctgcatctgttgcggggtaagcat

SEQ ID NO: 1717923 - DNA, 25 bp, Homo sapien
cggggtaagcatctgcggcgacatc

SEQ ID NO: 1717924 - DNA, 25 bp, Homo sapien
tgcggcgacatcatggccaccgaca

SEQ ID NO: 1717925 - DNA, 25 bp, Homo sapien
cttggtgaggtgtaaacagggtggg

SEQ ID NO: 1717926 - DNA, 25 bp, Homo sapien
tagaggaatgcagatcagtctggcc

SEQ ID NO: 1717927 - DNA, 25 bp, Homo sapien
cctgagcaggtcacaggggacaacg

SEQ ID NO: 1717928 - DNA, 25 bp, Homo sapien
gggacaacgtgccagaatgttccag

SEQ ID NO: 1717929 - DNA, 25 bp, Homo sapien
cagggtctgggtgcggagggaggga

SEQ ID NO: 1717930 - DNA, 25 bp, Homo sapien
gaggagtttcattcccacagctctg

SEQ ID NO: 1717931 - DNA, 25 bp, Homo sapien
agggttaccactggcagggtactgc

SEQ ID NO: 1717932 - DNA, 25 bp, Homo sapien
tggaggagggttaccactggcaggg

SEQ ID NO: 1717933 - DNA, 25 bp, Homo sapien
accactggcagggtactgctatccc

SEQ ID NO: 1717934 - DNA, 25 bp, Homo sapien
cactggcagggtactgctatcccca

SEQ ID NO: 1717935 - DNA, 25 bp, Homo sapien
tgctgggtgaggagctgcaggtgga

SEQ ID NO: 1717936 - DNA, 25 bp, Homo sapien
gctcctgctgcttcttgtagtactc

SEQ ID NO: 1717937 - DNA, 25 bp, Homo sapien
ctctttgggctgcggtttcccagcc

SEQ ID NO: 1717938 - DNA, 25 bp, Homo sapien
ctttgggctgcggtttcccagcctg

SEQ ID NO: 1717939 - DNA, 25 bp, Homo sapien
aggcaattccctcctgaccagctct

SEQ ID NO: 1717940 - DNA, 25 bp, Homo sapien
ggcaattccctcctgaccagctctg

SEQ ID NO: 1717941 - DNA, 25 bp, Homo sapien
agatttttctactattcctgcaagg

SEQ ID NO: 1717942 - DNA, 25 bp, Homo sapien
atttttctactattcctgcaaggca

SEQ ID NO: 1717943 - DNA, 25 bp, Homo sapien
tcagcttcaggcatgccatctggcc

SEQ ID NO: 1717944 - DNA, 25 bp, Homo sapien
tcctcgcagtaaacacacgcatgca

SEQ ID NO: 1717945 - DNA, 25 bp, Homo sapien
agctgtcgttgtggcgtctgcagct

SEQ ID NO: 1717946 - DNA, 25 bp, Homo sapien
gggtgccatcagcttcaggcatgcc

SEQ ID NO: 1717947 - DNA, 25 bp, Homo sapien
gctgctgcaactgttgcatttgcag

SEQ ID NO: 1717948 - DNA, 25 bp, Homo sapien
cctctgcaggttgagcaggtgctgc

SEQ ID NO: 1717949 - DNA, 25 bp, Homo sapien
gaaggccagctgcttgttccccagt

SEQ ID NO: 1717950 - DNA, 25 bp, Homo sapien
gcttggttgggctgcaggctgacca

SEQ ID NO: 1717951 - DNA, 25 bp, Homo sapien
gcggtggcggccgtgccagtgaggt

SEQ ID NO: 1717952 - DNA, 25 bp, Homo sapien
tgtctctccgagatgtgagcacagt

SEQ ID NO: 1717953 - DNA, 25 bp, Homo sapien
agcggcaaacgaggtagcggtggcg

SEQ ID NO: 1717954 - DNA, 25 bp, Homo sapien
agcacagtaggctgtccgttgggca

SEQ ID NO: 1717955 - DNA, 25 bp, Homo sapien
gataaactggcccaggtcttcacac

SEQ ID NO: 1717956 - DNA, 25 bp, Homo sapien
ttgcactctccgtgtccgtacaggg

SEQ ID NO: 1717957 - DNA, 25 bp, Homo sapien
ctggccacttgcactctccgtgtcc

SEQ ID NO: 1717958 - DNA, 25 bp, Homo sapien
caggtcttcacacagggtctcacag

SEQ ID NO: 1717959 - DNA, 25 bp, Homo sapien
ccggcactgggctgtactccggtca

SEQ ID NO: 1717960 - DNA, 25 bp, Homo sapien
actgggctgtactccggtcatccag

SEQ ID NO: 1717961 - DNA, 25 bp, Homo sapien
acctgcatctgtacccggcactggg

SEQ ID NO: 1717962 - DNA, 25 bp, Homo sapien
ctgtactccggtcatccagggcgtg

SEQ ID NO: 1717963 - DNA, 25 bp, Homo sapien
ctggctgaagggcttgggctccgag

SEQ ID NO: 1717964 - DNA, 25 bp, Homo sapien
ccgcatgtgcaggtgggccatcatg

SEQ ID NO: 1717965 - DNA, 25 bp, Homo sapien
ctccgagggccgcatgtgcaggtgg

SEQ ID NO: 1717966 - DNA, 25 bp, Homo sapien
gcagccgctcgctctccttggcgag

SEQ ID NO: 1717967 - DNA, 25 bp, Homo sapien
cttggagaatgaggaggagccgggg

SEQ ID NO: 1717968 - DNA, 25 bp, Homo sapien
gagaatgaggaggagccggggaccg

SEQ ID NO: 1717969 - DNA, 25 bp, Homo sapien
tggagaatgaggaggagccggggac

SEQ ID NO: 1717970 - DNA, 25 bp, Homo sapien
agaatgaggaggagccggggaccgg

SEQ ID NO: 1717971 - DNA, 25 bp, Homo sapien
ggtgcacgagaccatctgggaatga

SEQ ID NO: 1717972 - DNA, 25 bp, Homo sapien
aatgagtctgctgcagagacggtca

SEQ ID NO: 1717973 - DNA, 25 bp, Homo sapien
cttgtcactgcttctccgacgggct

SEQ ID NO: 1717974 - DNA, 25 bp, Homo sapien
gtcactgcttctccgacgggctggg

SEQ ID NO: 1717975 - DNA, 25 bp, Homo sapien
cggacgtcggcgttcttgtagaact

SEQ ID NO: 1717976 - DNA, 25 bp, Homo sapien
gccggacgtcggcgttcttgtagaa

SEQ ID NO: 1717977 - DNA, 25 bp, Homo sapien
gacgtcggcgttcttgtagaactca

SEQ ID NO: 1717978 - DNA, 25 bp, Homo sapien
tcggcgttcttgtagaactcatgat

SEQ ID NO: 1717979 - DNA, 25 bp, Homo sapien
agctgcctgtcaggggtttccagga

SEQ ID NO: 1717980 - DNA, 25 bp, Homo sapien
tggcagtgtttctgcggaaataggc

SEQ ID NO: 1717981 - DNA, 25 bp, Homo sapien
gttatagatctcattcagggtcagc

SEQ ID NO: 1717982 - DNA, 25 bp, Homo sapien
ggaaataggcgaacatcctggtgaa

SEQ ID NO: 1717983 - DNA, 25 bp, Homo sapien
agaaggtggaaggggcctgcttcac

SEQ ID NO: 1717984 - DNA, 25 bp, Homo sapien
ggcccagaaggtggaaggggcctgc

SEQ ID NO: 1717985 - DNA, 25 bp, Homo sapien
cagaaggtggaaggggcctgcttca

SEQ ID NO: 1717986 - DNA, 25 bp, Homo sapien
cccagaaggtggaaggggcctgctt

SEQ ID NO: 1717987 - DNA, 25 bp, Homo sapien
gggtgtaccctagagaaggattgct

SEQ ID NO: 1717988 - DNA, 25 bp, Homo sapien
ggggtgtaccctagagaaggattgc

SEQ ID NO: 1717989 - DNA, 25 bp, Homo sapien
ggtgtaccctagagaaggattgctt

SEQ ID NO: 1717990 - DNA, 25 bp, Homo sapien
gaactgacttggaggttggagactg

SEQ ID NO: 1717991 - DNA, 25 bp, Homo sapien
tgtttgtaggactctatcatttata

SEQ ID NO: 1717992 - DNA, 25 bp, Homo sapien
ttgggaattgggtatgagcatatga

SEQ ID NO: 1717993 - DNA, 25 bp, Homo sapien
caggaatgtggttggcagaaaatga

SEQ ID NO: 1717994 - DNA, 25 bp, Homo sapien
tccctcatttcgaagcctgattcgt

SEQ ID NO: 1717995 - DNA, 25 bp, Homo sapien
cgctttgcaaatgagaatgacccca

SEQ ID NO: 1717996 - DNA, 25 bp, Homo sapien
tcgtgatgagagactaattcgttac

SEQ ID NO: 1717997 - DNA, 25 bp, Homo sapien
aatttccgaggatggcctcaccggg

SEQ ID NO: 1717998 - DNA, 25 bp, Homo sapien
ccccagctcagggatgagcagggga

SEQ ID NO: 1717999 - DNA, 25 bp, Homo sapien
cttccccagctcagggatgagcagg

SEQ ID NO: 1718000 - DNA, 25 bp, Homo sapien
cagctcagggatgagcaggggaggg

SEQ ID NO: 1718001 - DNA, 25 bp, Homo sapien
ttccccagctcagggatgagcaggg

SEQ ID NO: 1718002 - DNA, 25 bp, Homo sapien
cagtccacacggcacccttgacgtt

SEQ ID NO: 1718003 - DNA, 25 bp, Homo sapien
cggacgaagcacttgtgcaggctga

SEQ ID NO: 1718004 - DNA, 25 bp, Homo sapien
cttgacgttctccacgcggacgaag

SEQ ID NO: 1718005 - DNA, 25 bp, Homo sapien
cctgtcatctttggcggtctccgct

SEQ ID NO: 1718006 - DNA, 25 bp, Homo sapien
tggcattaagtgctccatagctgag

SEQ ID NO: 1718007 - DNA, 25 bp, Homo sapien
attaagtgctccatagctgaggcca

SEQ ID NO: 1718008 - DNA, 25 bp, Homo sapien
cattaagtgctccatagctgaggcc

SEQ ID NO: 1718009 - DNA, 25 bp, Homo sapien
gcattaagtgctccatagctgaggc

SEQ ID NO: 1718010 - DNA, 25 bp, Homo sapien
gcacccacgtcatcgtggctgaggg

SEQ ID NO: 1718011 - DNA, 25 bp, Homo sapien
ccagggctgttgaggagggggaagc

SEQ ID NO: 1718012 - DNA, 25 bp, Homo sapien
tgctggcggagccagggttcagcat

SEQ ID NO: 1718013 - DNA, 25 bp, Homo sapien
aggctgctggcggagccagggttca

SEQ ID NO: 1718014 - DNA, 25 bp, Homo sapien
tactggggcggggagaggcgaggag

SEQ ID NO: 1718015 - DNA, 25 bp, Homo sapien
tgtactggggcggggagaggcgagg

SEQ ID NO: 1718016 - DNA, 25 bp, Homo sapien
ctggggcggggagaggcgaggaggg

SEQ ID NO: 1718017 - DNA, 25 bp, Homo sapien
ctgtactggggcggggagaggcgag

SEQ ID NO: 1718018 - DNA, 25 bp, Homo sapien
aggcgctggggttaggggcgcccag

SEQ ID NO: 1718019 - DNA, 25 bp, Homo sapien
gtcttccggaggccccgaggcgctg

SEQ ID NO: 1718020 - DNA, 25 bp, Homo sapien
gaggcgctggggttaggggcgccca

SEQ ID NO: 1718021 - DNA, 25 bp, Homo sapien
cctgtcttccggaggccccgaggcg

SEQ ID NO: 1718022 - DNA, 25 bp, Homo sapien
ttcacagtacggaaaagaaggcgga

SEQ ID NO: 1718023 - DNA, 25 bp, Homo sapien
tgagtcctggacttgccttgaggct

SEQ ID NO: 1718024 - DNA, 25 bp, Homo sapien
ccctacgtgtttttgtcaggtcaca

SEQ ID NO: 1718025 - DNA, 25 bp, Homo sapien
tgaaccctccgtgtcctctactggt

SEQ ID NO: 1718026 - DNA, 25 bp, Homo sapien
gagccggggtccagcctggccttcc

SEQ ID NO: 1718027 - DNA, 25 bp, Homo sapien
tgcagagaggcctgcaggctggatg

SEQ ID NO: 1718028 - DNA, 25 bp, Homo sapien
ggtgtggagccggggtccagcctgg

SEQ ID NO: 1718029 - DNA, 25 bp, Homo sapien
aggcctgcaggctggatgtgggtgt

SEQ ID NO: 1718030 - DNA, 25 bp, Homo sapien
tccggcataagaaaggtctttggtc

SEQ ID NO: 1718031 - DNA, 25 bp, Homo sapien
aggtctttggtcatccgtttaactg

SEQ ID NO: 1718032 - DNA, 25 bp, Homo sapien
ctttggtcatccgtttaactggtgg

SEQ ID NO: 1718033 - DNA, 25 bp, Homo sapien
ttggtttttgcttccggcataagaa

SEQ ID NO: 1718034 - DNA, 25 bp, Homo sapien
tccagcctggggccggggtgggaga

SEQ ID NO: 1718035 - DNA, 25 bp, Homo sapien
taagtggagggagggcttccagcct

SEQ ID NO: 1718036 - DNA, 25 bp, Homo sapien
gccggggtgggagactgggagggca

SEQ ID NO: 1718037 - DNA, 25 bp, Homo sapien
ttaagtggagggagggcttccagcc

SEQ ID NO: 1718038 - DNA, 25 bp, Homo sapien
tgttatgagcatccgatacgcccag

SEQ ID NO: 1718039 - DNA, 25 bp, Homo sapien
tcttggccaccaacagacactgtaa

SEQ ID NO: 1718040 - DNA, 25 bp, Homo sapien
tatttctgtgctggtcaaacggaac

SEQ ID NO: 1718041 - DNA, 25 bp, Homo sapien
cagcacgacgggtgacttggtccta

SEQ ID NO: 1718042 - DNA, 25 bp, Homo sapien
ctccccgagcagagcgatctttcag

SEQ ID NO: 1718043 - DNA, 25 bp, Homo sapien
cagagcgatctttcagctttaatgc

SEQ ID NO: 1718044 - DNA, 25 bp, Homo sapien
gatctttcagctttaatgctcctcc

SEQ ID NO: 1718045 - DNA, 25 bp, Homo sapien
cccgagcagagcgatctttcagctt

SEQ ID NO: 1718046 - DNA, 25 bp, Homo sapien
ttaacacgggataagaggtgcaggc

SEQ ID NO: 1718047 - DNA, 25 bp, Homo sapien
tgaatgatcccgtttccgccgtgag

SEQ ID NO: 1718048 - DNA, 25 bp, Homo sapien
ccttgaagacgtggacaatgggcct

SEQ ID NO: 1718049 - DNA, 25 bp, Homo sapien
tacacaagcgtccagaggattaggg

SEQ ID NO: 1718050 - DNA, 25 bp, Homo sapien
tcagcaatgctaagaccaggacaag

SEQ ID NO: 1718051 - DNA, 25 bp, Homo sapien
ggagagaagctacatacccagcatg

SEQ ID NO: 1718052 - DNA, 25 bp, Homo sapien
tactgagtctataagcccaatgcac

SEQ ID NO: 1718053 - DNA, 25 bp, Homo sapien
tgccccatgtaggatgtcagatcag

SEQ ID NO: 1718054 - DNA, 25 bp, Homo sapien
gagtgtgaagtctattgtgacctgt

SEQ ID NO: 1718055 - DNA, 25 bp, Homo sapien
tgacaagggagcataaccacccgag

SEQ ID NO: 1718056 - DNA, 25 bp, Homo sapien
cagctcccaggcctcgaattttggg

SEQ ID NO: 1718057 - DNA, 25 bp, Homo sapien
gaaactattctgtcctagggcatca

SEQ ID NO: 1718058 - DNA, 25 bp, Homo sapien
tctccaatgcggaagcaaagtcagg

SEQ ID NO: 1718059 - DNA, 25 bp, Homo sapien
tgcgcccggacaacctatcagtgtt

SEQ ID NO: 1718060 - DNA, 25 bp, Homo sapien
cttagcaggtctaacaggcaggcca

SEQ ID NO: 1718061 - DNA, 25 bp, Homo sapien
tgtcttaactattgaggagcccctg

SEQ ID NO: 1718062 - DNA, 25 bp, Homo sapien
caagttacacgttccagggaggtgt

SEQ ID NO: 1718063 - DNA, 25 bp, Homo sapien
gtgtttctttgaccccgtgagctcc

SEQ ID NO: 1718064 - DNA, 25 bp, Homo sapien
tggcccatggcccagcgacaagtta

SEQ ID NO: 1718065 - DNA, 25 bp, Homo sapien
gaggtgtgtttctttgaccccgtga

SEQ ID NO: 1718066 - DNA, 25 bp, Homo sapien
tcttacatgtggttagacacatatg

SEQ ID NO: 1718067 - DNA, 25 bp, Homo sapien
tgtggttagacacatatgactgtcc

SEQ ID NO: 1718068 - DNA, 25 bp, Homo sapien
tacatgtggttagacacatatgact

SEQ ID NO: 1718069 - DNA, 25 bp, Homo sapien
aagttcttacatgtggttagacaca

SEQ ID NO: 1718070 - DNA, 25 bp, Homo sapien
aagccatgacgttgatgcctttttc

SEQ ID NO: 1718071 - DNA, 25 bp, Homo sapien
aactataagccatgacgttgatgcc

SEQ ID NO: 1718072 - DNA, 25 bp, Homo sapien
tggctgccccaagcaaactataagc

SEQ ID NO: 1718073 - DNA, 25 bp, Homo sapien
ggatctggctgccccaagcaaacta

SEQ ID NO: 1718074 - DNA, 25 bp, Homo sapien
caggaccgggatggcccccacggcg

SEQ ID NO: 1718075 - DNA, 25 bp, Homo sapien
cacccgcggccacgtcccagcgatg

SEQ ID NO: 1718076 - DNA, 25 bp, Homo sapien
tcggcacccgcggccacgtcccagc

SEQ ID NO: 1718077 - DNA, 25 bp, Homo sapien
cccgcggccacgtcccagcgatggg

SEQ ID NO: 1718078 - DNA, 25 bp, Homo sapien
cacccgcccacagcgccagagttgt

SEQ ID NO: 1718079 - DNA, 25 bp, Homo sapien
agatccgcgggctgcacgttttcct

SEQ ID NO: 1718080 - DNA, 25 bp, Homo sapien
gctctcggagcggggcctcagtctc

SEQ ID NO: 1718081 - DNA, 25 bp, Homo sapien
caggagccggacacgtctgtccgcg

SEQ ID NO: 1718082 - DNA, 25 bp, Homo sapien
tctcagtcgcccctctgcgggtccc

SEQ ID NO: 1718083 - DNA, 25 bp, Homo sapien
cggcgccagctcacgccgttcgccc

SEQ ID NO: 1718084 - DNA, 25 bp, Homo sapien
tcggcgccagctcacgccgttcgcc

SEQ ID NO: 1718085 - DNA, 25 bp, Homo sapien
ttcggcgccagctcacgccgttcgc

SEQ ID NO: 1718086 - DNA, 25 bp, Homo sapien
gctacgctctcttccagccggatcc

SEQ ID NO: 1718087 - DNA, 25 bp, Homo sapien
ccgggtgctcgcctggcgccccttc

SEQ ID NO: 1718088 - DNA, 25 bp, Homo sapien
tcgtgcgagccgtgctacgctctct

SEQ ID NO: 1718089 - DNA, 25 bp, Homo sapien
gctcccgggtgctcgcctggcgccc

SEQ ID NO: 1718090 - DNA, 25 bp, Homo sapien
tccatagggcgcgtcgcagccagag

SEQ ID NO: 1718091 - DNA, 25 bp, Homo sapien
ctccatagggcgcgtcgcagccaga

SEQ ID NO: 1718092 - DNA, 25 bp, Homo sapien
gctccatagggcgcgtcgcagccag

SEQ ID NO: 1718093 - DNA, 25 bp, Homo sapien
gccccggttgtgtgcagttagccct

SEQ ID NO: 1718094 - DNA, 25 bp, Homo sapien
agcaggctcattctcccaaggcggt

SEQ ID NO: 1718095 - DNA, 25 bp, Homo sapien
gaagccttgagttatgaaagccgca

SEQ ID NO: 1718096 - DNA, 25 bp, Homo sapien
gaaccatgaacaggaatgtgacgcc

SEQ ID NO: 1718097 - DNA, 25 bp, Homo sapien
ggagtggtgtccatattcatctctg

SEQ ID NO: 1718098 - DNA, 25 bp, Homo sapien
cccagggggcactcggcaaatgcct

SEQ ID NO: 1718099 - DNA, 25 bp, Homo sapien
ttggagtggtgtccatattcatctc

SEQ ID NO: 1718100 - DNA, 25 bp, Homo sapien
atgcctactggggagtactttctgg

SEQ ID NO: 1718101 - DNA, 25 bp, Homo sapien
ctgcccagggaaaaaccacagggct

SEQ ID NO: 1718102 - DNA, 25 bp, Homo sapien
tgatgatagaggagtcagaggaacc

SEQ ID NO: 1718103 - DNA, 25 bp, Homo sapien
tctaaagagggtggccttccacctg

SEQ ID NO: 1718104 - DNA, 25 bp, Homo sapien
gacctcagcctatgcagttagttgg

SEQ ID NO: 1718105 - DNA, 25 bp, Homo sapien
gaggtgaaccgcagccacatgtaat

SEQ ID NO: 1718106 - DNA, 25 bp, Homo sapien
cagggtgagtggatcctgttactac

SEQ ID NO: 1718107 - DNA, 25 bp, Homo sapien
gggacgtcgaggtcagtgctgtcca

SEQ ID NO: 1718108 - DNA, 25 bp, Homo sapien
tgcctccgcagggtgagtggatcct

SEQ ID NO: 1718109 - DNA, 25 bp, Homo sapien
gagtggatcctgttactacctccag

SEQ ID NO: 1718110 - DNA, 25 bp, Homo sapien
gagttccctagtgcaaccctacatg

SEQ ID NO: 1718111 - DNA, 25 bp, Homo sapien
tagtaagcctgacttccagggagtc

SEQ ID NO: 1718112 - DNA, 25 bp, Homo sapien
tcactttgcagtggaggtcttcccc

SEQ ID NO: 1718113 - DNA, 25 bp, Homo sapien
taaaatgggcttcgcagtagccatc

SEQ ID NO: 1718114 - DNA, 25 bp, Homo sapien
cagagggcgggagtgtgtggtgagc

SEQ ID NO: 1718115 - DNA, 25 bp, Homo sapien
cgggagtgtgtggtgagctgaagga

SEQ ID NO: 1718116 - DNA, 25 bp, Homo sapien
agctgaaggatctgggcgacgtgga

SEQ ID NO: 1718117 - DNA, 25 bp, Homo sapien
gatctgggcgacgtggacagacaca

SEQ ID NO: 1718118 - DNA, 25 bp, Homo sapien
tctgccgaaacatgggcacactgac

SEQ ID NO: 1718119 - DNA, 25 bp, Homo sapien
ccttggccagcttcggtgccccttg

SEQ ID NO: 1718120 - DNA, 25 bp, Homo sapien
gcttcggtgccccttgcccttctgc

SEQ ID NO: 1718121 - DNA, 25 bp, Homo sapien
gccccttgcccttctgccgaaacat

SEQ ID NO: 1718122 - DNA, 25 bp, Homo sapien
gcagcttctttaggcatcgcaatag

SEQ ID NO: 1718123 - DNA, 25 bp, Homo sapien
tacaggcgtgagtaggtggagcagc

SEQ ID NO: 1718124 - DNA, 25 bp, Homo sapien
taggcatcgcaatagatctactact

SEQ ID NO: 1718125 - DNA, 25 bp, Homo sapien
tagatctactactggccccatttca

SEQ ID NO: 1718126 - DNA, 25 bp, Homo sapien
gtgtgtctgcaacttccggtgggcc

SEQ ID NO: 1718127 - DNA, 25 bp, Homo sapien
cgcccgtctggtgccgcccagctct

SEQ ID NO: 1718128 - DNA, 25 bp, Homo sapien
gggtggccagagtcattcggcagaa

SEQ ID NO: 1718129 - DNA, 25 bp, Homo sapien
cagggcaccattccccgcccgtctg

SEQ ID NO: 1718130 - DNA, 25 bp, Homo sapien
tgcatctctaagtaacagcctggtg

SEQ ID NO: 1718131 - DNA, 25 bp, Homo sapien
catgcgtcatgcttcgaggaacccg

SEQ ID NO: 1718132 - DNA, 25 bp, Homo sapien
agatttggtcatgcgtcaggttccc

SEQ ID NO: 1718133 - DNA, 25 bp, Homo sapien
gggcttgttaagctccaccagagat

SEQ ID NO: 1718134 - DNA, 25 bp, Homo sapien
gtcgcagtcggcacactcgccagag

SEQ ID NO: 1718135 - DNA, 25 bp, Homo sapien
cagtccaggacgatgttgcacagcg

SEQ ID NO: 1718136 - DNA, 25 bp, Homo sapien
gcgtcaggaactcgcagaacaggca

SEQ ID NO: 1718137 - DNA, 25 bp, Homo sapien
tccaggatgccgcagtccaggtcgc

SEQ ID NO: 1718138 - DNA, 25 bp, Homo sapien
tctcaagccttgtgtgacagtcctg

SEQ ID NO: 1718139 - DNA, 25 bp, Homo sapien
gcttctcaagccttgtgtgacagtc

SEQ ID NO: 1718140 - DNA, 25 bp, Homo sapien
tggccccactcagagggaccctgct

SEQ ID NO: 1718141 - DNA, 25 bp, Homo sapien
aagccttgtgtgacagtcctgggcc

SEQ ID NO: 1718142 - DNA, 25 bp, Homo sapien
cagcaatgtatgaacctggtaaccc

SEQ ID NO: 1718143 - DNA, 25 bp, Homo sapien
tgcccctaggttgtcctgtcaggtc

SEQ ID NO: 1718144 - DNA, 25 bp, Homo sapien
tggtaacccagtaaagagttcaggc

SEQ ID NO: 1718145 - DNA, 25 bp, Homo sapien
aagtaactttcacagtgttccccag

SEQ ID NO: 1718146 - DNA, 25 bp, Homo sapien
tccccttccagtcttttccatactg

SEQ ID NO: 1718147 - DNA, 25 bp, Homo sapien
gtgggtggggcgtctcttcacattt

SEQ ID NO: 1718148 - DNA, 25 bp, Homo sapien
ccaggctctcgcctagccctgccct

SEQ ID NO: 1718149 - DNA, 25 bp, Homo sapien
gtcactgcgtgggttaggcccccaa

SEQ ID NO: 1718150 - DNA, 25 bp, Homo sapien
taaagataactggtctcatcttcat

SEQ ID NO: 1718151 - DNA, 25 bp, Homo sapien
cttcatcattatccgccttaaaatg

SEQ ID NO: 1718152 - DNA, 25 bp, Homo sapien
atcttcatcattatccgccttaaaa

SEQ ID NO: 1718153 - DNA, 25 bp, Homo sapien
ttaactgactgttcttaaagataac

SEQ ID NO: 1718154 - DNA, 25 bp, Homo sapien
atgtgcaattcatcctttgctccag

SEQ ID NO: 1718155 - DNA, 25 bp, Homo sapien
aattggactgcctttgtaattcatg

SEQ ID NO: 1718156 - DNA, 25 bp, Homo sapien
ggactgcctttgtaattcatggcct

SEQ ID NO: 1718157 - DNA, 25 bp, Homo sapien
gtgcaattcatcctttgctccagcc

SEQ ID NO: 1718158 - DNA, 25 bp, Homo sapien
cacttcaaccataaggccactagtg

SEQ ID NO: 1718159 - DNA, 25 bp, Homo sapien
acttcaaccataaggccactagtgg

SEQ ID NO: 1718160 - DNA, 25 bp, Homo sapien
cacttccaggggcagactgctttcc

SEQ ID NO: 1718161 - DNA, 25 bp, Homo sapien
acttccaggggcagactgctttcca

SEQ ID NO: 1718162 - DNA, 25 bp, Homo sapien
ggggcagactgctttccagatgtac

SEQ ID NO: 1718163 - DNA, 25 bp, Homo sapien
ccaggggcagactgctttccagatg

SEQ ID NO: 1718164 - DNA, 25 bp, Homo sapien
gtttcctcatcatcaaaatcatctt

SEQ ID NO: 1718165 - DNA, 25 bp, Homo sapien
tcactggcgcttcttcagtttcctc

SEQ ID NO: 1718166 - DNA, 25 bp, Homo sapien
tcatcttcatcagcagcaagtttta

SEQ ID NO: 1718167 - DNA, 25 bp, Homo sapien
tagatttcttcactggcgcttcttc

SEQ ID NO: 1718168 - DNA, 25 bp, Homo sapien
gggcttaatttaccagtagtgccca

SEQ ID NO: 1718169 - DNA, 25 bp, Homo sapien
taccagtagtgcccaggactgttcc

SEQ ID NO: 1718170 - DNA, 25 bp, Homo sapien
tgcccaggactgttccatgtgcttt

SEQ ID NO: 1718171 - DNA, 25 bp, Homo sapien
gcttaatttaccagtagtgcccagg

SEQ ID NO: 1718172 - DNA, 25 bp, Homo sapien
ccctcctctcagagggatgtttcca

SEQ ID NO: 1718173 - DNA, 25 bp, Homo sapien
ctacttctctgagttcccccaatca

SEQ ID NO: 1718174 - DNA, 25 bp, Homo sapien
tcctctcctgtccagagtgcctatc

SEQ ID NO: 1718175 - DNA, 25 bp, Homo sapien
agaccaaaatggctccccgtcatcg

SEQ ID NO: 1718176 - DNA, 25 bp, Homo sapien
cagagaccaaaatggctccccgtca

SEQ ID NO: 1718177 - DNA, 25 bp, Homo sapien
acagtcagggttcgactggcggctg

SEQ ID NO: 1718178 - DNA, 25 bp, Homo sapien
gactggcggctgctcgagccccggt

SEQ ID NO: 1718179 - DNA, 25 bp, Homo sapien
cagcgaacgggaggattcaacccag

SEQ ID NO: 1718180 - DNA, 25 bp, Homo sapien
tttgtgcctttagtaaacactgtgc

SEQ ID NO: 1718181 - DNA, 25 bp, Homo sapien
tctctttggagtgggtctagggctg

SEQ ID NO: 1718182 - DNA, 25 bp, Homo sapien
tgtacttgctggtcctgtctctttg

SEQ ID NO: 1718183 - DNA, 25 bp, Homo sapien
cgttggcccctgtttggacttagtg

SEQ ID NO: 1718184 - DNA, 25 bp, Homo sapien
cgagcccctcattaccagtgaagga

SEQ ID NO: 1718185 - DNA, 25 bp, Homo sapien
cctctcccggagatggaatcgcggg

SEQ ID NO: 1718186 - DNA, 25 bp, Homo sapien
gggcagccctcttgactggcgcagt

SEQ ID NO: 1718187 - DNA, 25 bp, Homo sapien
ccccacgactgagagtgtaacagac

SEQ ID NO: 1718188 - DNA, 25 bp, Homo sapien
tctttccccaggactgaccgggcag

SEQ ID NO: 1718189 - DNA, 25 bp, Homo sapien
aggaagcttttgtttagcggtcagt

SEQ ID NO: 1718190 - DNA, 25 bp, Homo sapien
acttcttccgaccacagaggtgcag

SEQ ID NO: 1718191 - DNA, 25 bp, Homo sapien
gaccacatcctgcatgacagccttt

SEQ ID NO: 1718192 - DNA, 25 bp, Homo sapien
tatactgaagaccacatcctgcatg

SEQ ID NO: 1718193 - DNA, 25 bp, Homo sapien
catgaaatatactgaagaccacatc

SEQ ID NO: 1718194 - DNA, 25 bp, Homo sapien
tgaagaccacatcctgcatgacagc

SEQ ID NO: 1718195 - DNA, 25 bp, Homo sapien
taggctgacgtagcatccatgaaaa

SEQ ID NO: 1718196 - DNA, 25 bp, Homo sapien
ggagggacctcattgaccacatagg

SEQ ID NO: 1718197 - DNA, 25 bp, Homo sapien
accacataggctgacgtagcatcca

SEQ ID NO: 1718198 - DNA, 25 bp, Homo sapien
gagggacctcattgaccacataggc

SEQ ID NO: 1718199 - DNA, 25 bp, Homo sapien
gactttacagctgtcccgtgtgagt

SEQ ID NO: 1718200 - DNA, 25 bp, Homo sapien
gagtgtacatgggagtgggcacagg

SEQ ID NO: 1718201 - DNA, 25 bp, Homo sapien
ccttcagaagctgtgtcgttgggaa

SEQ ID NO: 1718202 - DNA, 25 bp, Homo sapien
ggccttgcggtatggctgcctctca

SEQ ID NO: 1718203 - DNA, 25 bp, Homo sapien
ttggacttgctgagagatgggtact

SEQ ID NO: 1718204 - DNA, 25 bp, Homo sapien
tctggaataggagttgggtggagtt

SEQ ID NO: 1718205 - DNA, 25 bp, Homo sapien
gagttggacttgctgagagatgggt

SEQ ID NO: 1718206 - DNA, 25 bp, Homo sapien
cttgctgagagatgggtactggcat

SEQ ID NO: 1718207 - DNA, 25 bp, Homo sapien
tgtccgagtgtcctctacctggagc

SEQ ID NO: 1718208 - DNA, 25 bp, Homo sapien
ccagagggccatgtccgagtgtcct

SEQ ID NO: 1718209 - DNA, 25 bp, Homo sapien
agggccatgtccgagtgtcctctac

SEQ ID NO: 1718210 - DNA, 25 bp, Homo sapien
cacagcggtggggacgttgagccca

SEQ ID NO: 1718211 - DNA, 25 bp, Homo sapien
ctgcatgtataccattcccacccac

SEQ ID NO: 1718212 - DNA, 25 bp, Homo sapien
ctccattctgctggcgctcattttc

SEQ ID NO: 1718213 - DNA, 25 bp, Homo sapien
ttctgctggcgctcattttcctgca

SEQ ID NO: 1718214 - DNA, 25 bp, Homo sapien
tttcctgcatgtataccattcccac

SEQ ID NO: 1718215 - DNA, 25 bp, Homo sapien
gtgatgggccagggggtaggccagg

SEQ ID NO: 1718216 - DNA, 25 bp, Homo sapien
agtgatgggccagggggtaggccag

SEQ ID NO: 1718217 - DNA, 25 bp, Homo sapien
ctgagtgatgggccagggggtaggc

SEQ ID NO: 1718218 - DNA, 25 bp, Homo sapien
gagtgatgggccagggggtaggcca

SEQ ID NO: 1718219 - DNA, 25 bp, Homo sapien
ttgtgatgtagggtgcacgcgggca

SEQ ID NO: 1718220 - DNA, 25 bp, Homo sapien
gggcatgccgatgcctccatcaaca

SEQ ID NO: 1718221 - DNA, 25 bp, Homo sapien
agttaggttcgaaatgctccaggtc

SEQ ID NO: 1718222 - DNA, 25 bp, Homo sapien
tcaacacagcagttaggttcgaaat

SEQ ID NO: 1718223 - DNA, 25 bp, Homo sapien
tgcagatatccatgagtctgacagt

SEQ ID NO: 1718224 - DNA, 25 bp, Homo sapien
gatatccatgagtctgacagttctt

SEQ ID NO: 1718225 - DNA, 25 bp, Homo sapien
atatgcagatatccatgagtctgac

SEQ ID NO: 1718226 - DNA, 25 bp, Homo sapien
tccatgagtctgacagttcttataa

SEQ ID NO: 1718227 - DNA, 25 bp, Homo sapien
ccactatttagatccctgccctggg

SEQ ID NO: 1718228 - DNA, 25 bp, Homo sapien
tcagcttgagccctatccagaagcc

SEQ ID NO: 1718229 - DNA, 25 bp, Homo sapien
gacctattgtggatgaaccggctgc

SEQ ID NO: 1718230 - DNA, 25 bp, Homo sapien
gaagtgcttggcctagtcaggacct

SEQ ID NO: 1718231 - DNA, 25 bp, Homo sapien
tcaggtgaccgctgtgaacctcagt

SEQ ID NO: 1718232 - DNA, 25 bp, Homo sapien
caggtgaccgctgtgaacctcagtc

SEQ ID NO: 1718233 - DNA, 25 bp, Homo sapien
gtgaccgctgtgaacctcagtcctg

SEQ ID NO: 1718234 - DNA, 25 bp, Homo sapien
ggctgtgaggcgcttcccccacagt

SEQ ID NO: 1718235 - DNA, 25 bp, Homo sapien
cctgcacccgccctggccgagattc

SEQ ID NO: 1718236 - DNA, 25 bp, Homo sapien
cccgccctggccgagattccattgg

SEQ ID NO: 1718237 - DNA, 25 bp, Homo sapien
tgcacccgccctggccgagattcca

SEQ ID NO: 1718238 - DNA, 25 bp, Homo sapien
gccctggccgagattccattggccc

SEQ ID NO: 1718239 - DNA, 25 bp, Homo sapien
aattttcctctcgagggaaggacag

SEQ ID NO: 1718240 - DNA, 25 bp, Homo sapien
catgtttgccgagtgctgggttctc

SEQ ID NO: 1718241 - DNA, 25 bp, Homo sapien
tcatcatccaaagatcatcaccagc

SEQ ID NO: 1718242 - DNA, 25 bp, Homo sapien
agcgatgcccaggagggtaactgcc

SEQ ID NO: 1718243 - DNA, 25 bp, Homo sapien
aaatgcttccactgcccggaaattc

SEQ ID NO: 1718244 - DNA, 25 bp, Homo sapien
ccaaatgcttccactgcccggaaat

SEQ ID NO: 1718245 - DNA, 25 bp, Homo sapien
tgcccggaaattcctaggatccctc

SEQ ID NO: 1718246 - DNA, 25 bp, Homo sapien
cccggaaattcctaggatccctcat

SEQ ID NO: 1718247 - DNA, 25 bp, Homo sapien
cattcgctgaatggaaacgcctcgc

SEQ ID NO: 1718248 - DNA, 25 bp, Homo sapien
gagccgcgtttacgctgggttttca

SEQ ID NO: 1718249 - DNA, 25 bp, Homo sapien
tggaaatgtgcgggctccatggcct

SEQ ID NO: 1718250 - DNA, 25 bp, Homo sapien
aggcatccagcagacgccgggagcc

SEQ ID NO: 1718251 - DNA, 25 bp, Homo sapien
tccgggcagttctggaccgactctg

SEQ ID NO: 1718252 - DNA, 25 bp, Homo sapien
gcccgccctaatagcgcggcccttc

SEQ ID NO: 1718253 - DNA, 25 bp, Homo sapien
gttctggaccgactctgccgtcagg

SEQ ID NO: 1718254 - DNA, 25 bp, Homo sapien
tcgctgtccgggcagttctggaccg

SEQ ID NO: 1718255 - DNA, 25 bp, Homo sapien
cttgtcttgcctccgtgcagagcct

SEQ ID NO: 1718256 - DNA, 25 bp, Homo sapien
tgccctctcgatagatccccagagt

SEQ ID NO: 1718257 - DNA, 25 bp, Homo sapien
ctccgtgcaagagggctcaggagct

SEQ ID NO: 1718258 - DNA, 25 bp, Homo sapien
tgcatagaattgtccaacacagaaa

SEQ ID NO: 1718259 - DNA, 25 bp, Homo sapien
gccccaggaggggacttgcaccctc

SEQ ID NO: 1718260 - DNA, 25 bp, Homo sapien
aggagtagccactaacagcactgcc

SEQ ID NO: 1718261 - DNA, 25 bp, Homo sapien
accaggagtagccactaacagcact

SEQ ID NO: 1718262 - DNA, 25 bp, Homo sapien
tcacaccaggagtagccactaacag

SEQ ID NO: 1718263 - DNA, 25 bp, Homo sapien
acaccaggagtagccactaacagca

SEQ ID NO: 1718264 - DNA, 25 bp, Homo sapien
gagcatgggtatcctcagggtcctc

SEQ ID NO: 1718265 - DNA, 25 bp, Homo sapien
tgagcatgggtatcctcagggtcct

SEQ ID NO: 1718266 - DNA, 25 bp, Homo sapien
ccccggcaggtggcctgagtcactg

SEQ ID NO: 1718267 - DNA, 25 bp, Homo sapien
cagaggaagggcacgactctactac

SEQ ID NO: 1718268 - DNA, 25 bp, Homo sapien
tggccactccacaggatagaggaca

SEQ ID NO: 1718269 - DNA, 25 bp, Homo sapien
gatagaggacatgttggtctcagag

SEQ ID NO: 1718270 - DNA, 25 bp, Homo sapien
tcagaggaagggcacgactctacta

SEQ ID NO: 1718271 - DNA, 25 bp, Homo sapien
agaaaaaggcaacaagagattaggc

SEQ ID NO: 1718272 - DNA, 25 bp, Homo sapien
aaggcaacaagagattaggcacgaa

SEQ ID NO: 1718273 - DNA, 25 bp, Homo sapien
ggcaacaagagattaggcacgaagt

SEQ ID NO: 1718274 - DNA, 25 bp, Homo sapien
aaaaggcaacaagagattaggcacg

SEQ ID NO: 1718275 - DNA, 25 bp, Homo sapien
aaagcccctagagtctggtttgaca

SEQ ID NO: 1718276 - DNA, 25 bp, Homo sapien
tgcagatcctcactgagtgcaagga

SEQ ID NO: 1718277 - DNA, 25 bp, Homo sapien
ggatagctgactgatgcctgcatgt

SEQ ID NO: 1718278 - DNA, 25 bp, Homo sapien
ccccatgttctaagcaggtgcagag

SEQ ID NO: 1718279 - DNA, 25 bp, Homo sapien
gcaaagggaacccaagctcagaact

SEQ ID NO: 1718280 - DNA, 25 bp, Homo sapien
agggaacccaagctcagaactgcag

SEQ ID NO: 1718281 - DNA, 25 bp, Homo sapien
caggagggtctgaagtccagtccag

SEQ ID NO: 1718282 - DNA, 25 bp, Homo sapien
aaagggaacccaagctcagaactgc

SEQ ID NO: 1718283 - DNA, 25 bp, Homo sapien
gatgccagagataatggcatagaag

SEQ ID NO: 1718284 - DNA, 25 bp, Homo sapien
gggagatgccagagataatggcata

SEQ ID NO: 1718285 - DNA, 25 bp, Homo sapien
cagggagatgccagagataatggca

SEQ ID NO: 1718286 - DNA, 25 bp, Homo sapien
ctcagggagatgccagagataatgg

SEQ ID NO: 1718287 - DNA, 25 bp, Homo sapien
acattgagcattggttggaggaaaa

SEQ ID NO: 1718288 - DNA, 25 bp, Homo sapien
ccagcagaaaacattgagcattggt

SEQ ID NO: 1718289 - DNA, 25 bp, Homo sapien
tgcagaaacagtcctctacaattac

SEQ ID NO: 1718290 - DNA, 25 bp, Homo sapien
gaaacagtcctctacaattactggg

SEQ ID NO: 1718291 - DNA, 25 bp, Homo sapien
gtgtccttcaagcttgggaagtacc

SEQ ID NO: 1718292 - DNA, 25 bp, Homo sapien
ttcaagcttgggaagtaccaggcgg

SEQ ID NO: 1718293 - DNA, 25 bp, Homo sapien
tccttcaagcttgggaagtaccagg

SEQ ID NO: 1718294 - DNA, 25 bp, Homo sapien
tcctgcttccgcctggcacagaaga

SEQ ID NO: 1718295 - DNA, 25 bp, Homo sapien
gaagtagatgaggtttatcagggcc

SEQ ID NO: 1718296 - DNA, 25 bp, Homo sapien
gatgacggccgcagtagagttgtcc

SEQ ID NO: 1718297 - DNA, 25 bp, Homo sapien
cgcgggcgcagcaactctgcatgat

SEQ ID NO: 1718298 - DNA, 25 bp, Homo sapien
gagttgtccatcatggtagaagtag

SEQ ID NO: 1718299 - DNA, 25 bp, Homo sapien
agtggttctcatgccagcgctgtcc

SEQ ID NO: 1718300 - DNA, 25 bp, Homo sapien
tcgagcctgcatccgagtagcggtt

SEQ ID NO: 1718301 - DNA, 25 bp, Homo sapien
cagctcgagcctgcatccgagtagc

SEQ ID NO: 1718302 - DNA, 25 bp, Homo sapien
cgagtagcggttctcgaagcagctg

SEQ ID NO: 1718303 - DNA, 25 bp, Homo sapien
cctgcatccgagtagcggttctcga

SEQ ID NO: 1718304 - DNA, 25 bp, Homo sapien
gcccaagctccctcccgctttgctc

SEQ ID NO: 1718305 - DNA, 25 bp, Homo sapien
agcccaagctccctcccgctttgct

SEQ ID NO: 1718306 - DNA, 25 bp, Homo sapien
cccaagctccctcccgctttgctct

SEQ ID NO: 1718307 - DNA, 25 bp, Homo sapien
ccagcccaagctccctcccgctttg

SEQ ID NO: 1718308 - DNA, 25 bp, Homo sapien
ggcggcccttggaacgctccggcca

SEQ ID NO: 1718309 - DNA, 25 bp, Homo sapien
accgcagctagtgggggtgaggccc

SEQ ID NO: 1718310 - DNA, 25 bp, Homo sapien
gggagggagtctggcgccgcaaccc

SEQ ID NO: 1718311 - DNA, 25 bp, Homo sapien
tccggccagggatgcgcggtgagag

SEQ ID NO: 1718312 - DNA, 25 bp, Homo sapien
gaaacgctggtctcagagccgcgga

SEQ ID NO: 1718313 - DNA, 25 bp, Homo sapien
tcggaaacgctggtctcagagccgc

SEQ ID NO: 1718314 - DNA, 25 bp, Homo sapien
acgctggtctcagagccgcggagct

SEQ ID NO: 1718315 - DNA, 25 bp, Homo sapien
ccgggtcggaaacgctggtctcaga

SEQ ID NO: 1718316 - DNA, 25 bp, Homo sapien
cagagttcaccgaggtttggtccct

SEQ ID NO: 1718317 - DNA, 25 bp, Homo sapien
gaatagtctccaggcggcattgctc

SEQ ID NO: 1718318 - DNA, 25 bp, Homo sapien
tgtccttgggatcacgaatagtctc

SEQ ID NO: 1718319 - DNA, 25 bp, Homo sapien
aatccttcaggttccgagtcagagg

SEQ ID NO: 1718320 - DNA, 25 bp, Homo sapien
tcttagaggcgttgctgtcctctgc

SEQ ID NO: 1718321 - DNA, 25 bp, Homo sapien
tgcagtgcgtcttagaggcgttgct

SEQ ID NO: 1718322 - DNA, 25 bp, Homo sapien
tcttccaggactggggaaggcgctc

SEQ ID NO: 1718323 - DNA, 25 bp, Homo sapien
tagcacatggtgcagtgcgtcttag

SEQ ID NO: 1718324 - DNA, 25 bp, Homo sapien
ctcttgcgggcgtgcgcctgactgc

SEQ ID NO: 1718325 - DNA, 25 bp, Homo sapien
tcttagaacgcgcagtactgaaggg

SEQ ID NO: 1718326 - DNA, 25 bp, Homo sapien
gcgtctcagtctaggattgttaggg

SEQ ID NO: 1718327 - DNA, 25 bp, Homo sapien
ccaagaaagtctccgccaaaagtct

SEQ ID NO: 1718328 - DNA, 25 bp, Homo sapien
cggtaactgtcacgcgtgctgtgat

SEQ ID NO: 1718329 - DNA, 25 bp, Homo sapien
actgtcacgcgtgctgtgatcattt

SEQ ID NO: 1718330 - DNA, 25 bp, Homo sapien
tctccagccggtaactgtcacgcgt

SEQ ID NO: 1718331 - DNA, 25 bp, Homo sapien
ccagccggtaactgtcacgcgtgct

SEQ ID NO: 1718332 - DNA, 25 bp, Homo sapien
agagggacggccctctgctgcgcct

SEQ ID NO: 1718333 - DNA, 25 bp, Homo sapien
tccggaagagggacggccctctgct

SEQ ID NO: 1718334 - DNA, 25 bp, Homo sapien
gcttagtccgacatccggaagaggg

SEQ ID NO: 1718335 - DNA, 25 bp, Homo sapien
gggcgctgttcgcttagtccgacat

SEQ ID NO: 1718336 - DNA, 25 bp, Homo sapien
tcggcgtcgccggtgaatgacgcac

SEQ ID NO: 1718337 - DNA, 25 bp, Homo sapien
tcggtggaggaaccgtatcggcgtc

SEQ ID NO: 1718338 - DNA, 25 bp, Homo sapien
ggtgaatgacgcacctccggtctgg

SEQ ID NO: 1718339 - DNA, 25 bp, Homo sapien
aaccgtatcggcgtcgccggtgaat

SEQ ID NO: 1718340 - DNA, 25 bp, Homo sapien
atctcccacgttgtccggtatttcg

SEQ ID NO: 1718341 - DNA, 25 bp, Homo sapien
agccaatctcccacgttgtccggta

SEQ ID NO: 1718342 - DNA, 25 bp, Homo sapien
gtatttcgggagtttcattagccga

SEQ ID NO: 1718343 - DNA, 25 bp, Homo sapien
aagcggtagacgccccgaagccaat

SEQ ID NO: 1718344 - DNA, 25 bp, Homo sapien
taaagcactagtccagggccgaaaa

SEQ ID NO: 1718345 - DNA, 25 bp, Homo sapien
gaaaaagcctgtttacgtgctagca

SEQ ID NO: 1718346 - DNA, 25 bp, Homo sapien
gaaagatcgcttttgccacacggga

SEQ ID NO: 1718347 - DNA, 25 bp, Homo sapien
tgtaagatcaaacgcaaagcccagc

SEQ ID NO: 1718348 - DNA, 25 bp, Homo sapien
ccttcccgaggcgttgatacgtggt

SEQ ID NO: 1718349 - DNA, 25 bp, Homo sapien
cactgagtcagttgtacagttaacg

SEQ ID NO: 1718350 - DNA, 25 bp, Homo sapien
cccacgtgggaatttggagttcatt

SEQ ID NO: 1718351 - DNA, 25 bp, Homo sapien
tgacggcaggttgctcaagacccac

SEQ ID NO: 1718352 - DNA, 25 bp, Homo sapien
aaagagtcccaaatttagtatcaag

SEQ ID NO: 1718353 - DNA, 25 bp, Homo sapien
aacattgcttcacccagtctctagg

SEQ ID NO: 1718354 - DNA, 25 bp, Homo sapien
tagttaagggttttacatcacattc

SEQ ID NO: 1718355 - DNA, 25 bp, Homo sapien
gagggaaactggtaagagatactta

SEQ ID NO: 1718356 - DNA, 25 bp, Homo sapien
tttgtacatttcatgaatacttgac

SEQ ID NO: 1718357 - DNA, 25 bp, Homo sapien
ctgcaatcagatgataagacgacag

SEQ ID NO: 1718358 - DNA, 25 bp, Homo sapien
gcaatcagatgataagacgacaggt

SEQ ID NO: 1718359 - DNA, 25 bp, Homo sapien
tgataagacgacaggtggcattaga

SEQ ID NO: 1718360 - DNA, 25 bp, Homo sapien
tcagatgataagacgacaggtggca

SEQ ID NO: 1718361 - DNA, 25 bp, Homo sapien
ggtggtcacagattgtaggctgttt

SEQ ID NO: 1718362 - DNA, 25 bp, Homo sapien
tggtcacagattgtaggctgttttt

SEQ ID NO: 1718363 - DNA, 25 bp, Homo sapien
gtggtcacagattgtaggctgtttt

SEQ ID NO: 1718364 - DNA, 25 bp, Homo sapien
ttttttggaagattcgggttcagca

SEQ ID NO: 1718365 - DNA, 25 bp, Homo sapien
gaatagaggcaatactttagcttaa

SEQ ID NO: 1718366 - DNA, 25 bp, Homo sapien
actttacagaatagaggcaatactt

SEQ ID NO: 1718367 - DNA, 25 bp, Homo sapien
tcaggacaagagcaaaaatcacccc

SEQ ID NO: 1718368 - DNA, 25 bp, Homo sapien
tttaaaacagcactgttatttctca

SEQ ID NO: 1718369 - DNA, 25 bp, Homo sapien
gcaatgatgcctccctggtgtctgg

SEQ ID NO: 1718370 - DNA, 25 bp, Homo sapien
tttaatgcctagtaaactggccaga

SEQ ID NO: 1718371 - DNA, 25 bp, Homo sapien
ccctggacagtagcactaccatgaa

SEQ ID NO: 1718372 - DNA, 25 bp, Homo sapien
aaatgctatgcaacaccaaatggct

SEQ ID NO: 1718373 - DNA, 25 bp, Homo sapien
acctctcagagtcaacccagtgtag

SEQ ID NO: 1718374 - DNA, 25 bp, Homo sapien
caccatttgggaggtgatggcttca

SEQ ID NO: 1718375 - DNA, 25 bp, Homo sapien
tcatgagtatatcaggtagcagcct

SEQ ID NO: 1718376 - DNA, 25 bp, Homo sapien
ggatgcagttggctagcacctgtaa

SEQ ID NO: 1718377 - DNA, 25 bp, Homo sapien
tgttacctgtgcaaggactacgtgc

SEQ ID NO: 1718378 - DNA, 25 bp, Homo sapien
cgctagccatggaagtccgggatct

SEQ ID NO: 1718379 - DNA, 25 bp, Homo sapien
tgctcacggctctgtggtaccggcg

SEQ ID NO: 1718380 - DNA, 25 bp, Homo sapien
tacgtgctcaatgataacccagagg

SEQ ID NO: 1718381 - DNA, 25 bp, Homo sapien
ggcatgcacctatgatctcatctac

SEQ ID NO: 1718382 - DNA, 25 bp, Homo sapien
taggacaggtctatgttggctaggc

SEQ ID NO: 1718383 - DNA, 25 bp, Homo sapien
tcccgaagtgtgcaagccacggtgc

SEQ ID NO: 1718384 - DNA, 25 bp, Homo sapien
taaaatagttgtatagcagcctggc

SEQ ID NO: 1718385 - DNA, 25 bp, Homo sapien
tttgggtactaggtgcctgtcacac

SEQ ID NO: 1718386 - DNA, 25 bp, Homo sapien
tatcagttttgggtactaggtgcct

SEQ ID NO: 1718387 - DNA, 25 bp, Homo sapien
ggtactaggtgcctgtcacactgga

SEQ ID NO: 1718388 - DNA, 25 bp, Homo sapien
taggtgcctgtcacactggatgatg

SEQ ID NO: 1718389 - DNA, 25 bp, Homo sapien
ttcaatttgtggtcaggcagtcctc

SEQ ID NO: 1718390 - DNA, 25 bp, Homo sapien
cttcaatttgtggtcaggcagtcct

SEQ ID NO: 1718391 - DNA, 25 bp, Homo sapien
tatggcactgatctttggacaccca

SEQ ID NO: 1718392 - DNA, 25 bp, Homo sapien
tttggacacccagcaggaataaact

SEQ ID NO: 1718393 - DNA, 25 bp, Homo sapien
tcagtgatgctagatactgaatttc

SEQ ID NO: 1718394 - DNA, 25 bp, Homo sapien
caagaaaatcagtgatgctagatac

SEQ ID NO: 1718395 - DNA, 25 bp, Homo sapien
gggcagaattcagcaacagcttcgt

SEQ ID NO: 1718396 - DNA, 25 bp, Homo sapien
gaattcagcaacagcttcgtagata

SEQ ID NO: 1718397 - DNA, 25 bp, Homo sapien
aagggcagaattcagcaacagcttc

SEQ ID NO: 1718398 - DNA, 25 bp, Homo sapien
cagaattcagcaacagcttcgtaga

SEQ ID NO: 1718399 - DNA, 25 bp, Homo sapien
ggtgtgtgagcaacctataatgcaa

SEQ ID NO: 1718400 - DNA, 25 bp, Homo sapien
gatgcatttttaaacggaactgtgc

SEQ ID NO: 1718401 - DNA, 25 bp, Homo sapien
tagggattatgattagcactggtgt

SEQ ID NO: 1718402 - DNA, 25 bp, Homo sapien
aagtaacatgctacagctaccctgc

SEQ ID NO: 1718403 - DNA, 25 bp, Homo sapien
tctagttttggctgacaggaagctc

SEQ ID NO: 1718404 - DNA, 25 bp, Homo sapien
caggaagctcagttcagtaccataa

SEQ ID NO: 1718405 - DNA, 25 bp, Homo sapien
aagtcaggtggtggtcatgtttccc

SEQ ID NO: 1718406 - DNA, 25 bp, Homo sapien
agtaccataactacagaacctgtca

SEQ ID NO: 1718407 - DNA, 25 bp, Homo sapien
tagaatacttgaccctgatacctgc

SEQ ID NO: 1718408 - DNA, 25 bp, Homo sapien
gagatgctgggacatagaacctctt

SEQ ID NO: 1718409 - DNA, 25 bp, Homo sapien
cactgtggccacactttgctgaaag

SEQ ID NO: 1718410 - DNA, 25 bp, Homo sapien
cagagccgctttgagctaagttgga

SEQ ID NO: 1718411 - DNA, 25 bp, Homo sapien
gagtgtcgctctcctagcttcatgg

SEQ ID NO: 1718412 - DNA, 25 bp, Homo sapien
aaaagttgccgggaaggatcgcacg

SEQ ID NO: 1718413 - DNA, 25 bp, Homo sapien
gagtgctcagccaaacgggaatgtc

SEQ ID NO: 1718414 - DNA, 25 bp, Homo sapien
aatgtctggatttagaaacctcggg

SEQ ID NO: 1718415 - DNA, 25 bp, Homo sapien
ggccaggggcgcatgtttttcctga

SEQ ID NO: 1718416 - DNA, 25 bp, Homo sapien
ccagtcccatgctcggcctcgagtt

SEQ ID NO: 1718417 - DNA, 25 bp, Homo sapien
gctgccgtgcttgctgcaaaatccg

SEQ ID NO: 1718418 - DNA, 25 bp, Homo sapien
tgcaaaatccgtcggctcagccggg

SEQ ID NO: 1718419 - DNA, 25 bp, Homo sapien
catctgatccatcctgaggcattct

SEQ ID NO: 1718420 - DNA, 25 bp, Homo sapien
gatccatcctgaggcattcttggac

SEQ ID NO: 1718421 - DNA, 25 bp, Homo sapien
tctgatccatcctgaggcattcttg

SEQ ID NO: 1718422 - DNA, 25 bp, Homo sapien
tgatccatcctgaggcattcttgga

SEQ ID NO: 1718423 - DNA, 25 bp, Homo sapien
tctatggcacgctcatcctcagggt

SEQ ID NO: 1718424 - DNA, 25 bp, Homo sapien
gaacatctctatggcacgctcatcc

SEQ ID NO: 1718425 - DNA, 25 bp, Homo sapien
atcctcagggtccacaaccacctct

SEQ ID NO: 1718426 - DNA, 25 bp, Homo sapien
acaaccacctctgcatgatggcccg

SEQ ID NO: 1718427 - DNA, 25 bp, Homo sapien
tgacatgactgtctcaacctctgtc

SEQ ID NO: 1718428 - DNA, 25 bp, Homo sapien
agcccgacacctctgacatgactgt

SEQ ID NO: 1718429 - DNA, 25 bp, Homo sapien
gggcatagggaagcccgacacctct

SEQ ID NO: 1718430 - DNA, 25 bp, Homo sapien
tctgacatgactgtctcaacctctg

SEQ ID NO: 1718431 - DNA, 25 bp, Homo sapien
ggatgatcttaaatgccttgggcag

SEQ ID NO: 1718432 - DNA, 25 bp, Homo sapien
gcctccggctctgtgacgtagagga

SEQ ID NO: 1718433 - DNA, 25 bp, Homo sapien
cagttttccactgcggtacttagat

SEQ ID NO: 1718434 - DNA, 25 bp, Homo sapien
gatttgctcccagttggagagtgca

SEQ ID NO: 1718435 - DNA, 25 bp, Homo sapien
gccttcttgagagccatgtagagat

SEQ ID NO: 1718436 - DNA, 25 bp, Homo sapien
tctcgtactcgagggagcaggacaa

SEQ ID NO: 1718437 - DNA, 25 bp, Homo sapien
gcgttccttcaggttagaggcaaaa

SEQ ID NO: 1718438 - DNA, 25 bp, Homo sapien
tgaaccaggctccaggtttgaaaag

SEQ ID NO: 1718439 - DNA, 25 bp, Homo sapien
ctggagtgcaacacagggatggagc

SEQ ID NO: 1718440 - DNA, 25 bp, Homo sapien
cagactcgcacagtggaatcaggat

SEQ ID NO: 1718441 - DNA, 25 bp, Homo sapien
gccagactcgcacagtggaatcagg

SEQ ID NO: 1718442 - DNA, 25 bp, Homo sapien
tgccagactcgcacagtggaatcag

SEQ ID NO: 1718443 - DNA, 25 bp, Homo sapien
tagcgctggaccaaagtcaggaggc

SEQ ID NO: 1718444 - DNA, 25 bp, Homo sapien
gcagttcacgcttctctgtccggaa

SEQ ID NO: 1718445 - DNA, 25 bp, Homo sapien
tacttcttatccagcagcagtcgca

SEQ ID NO: 1718446 - DNA, 25 bp, Homo sapien
cacccggtaaggcagtgcatacttc

SEQ ID NO: 1718447 - DNA, 25 bp, Homo sapien
gtgacctgacacaatagccatagaa

SEQ ID NO: 1718448 - DNA, 25 bp, Homo sapien
gacaagaatgtcctccgtcctccaa

SEQ ID NO: 1718449 - DNA, 25 bp, Homo sapien
gcatatggtatctcaagttggctct

SEQ ID NO: 1718450 - DNA, 25 bp, Homo sapien
gggtcttcagccattaaagctcagt

SEQ ID NO: 1718451 - DNA, 25 bp, Homo sapien
agcctgtttgatgctagctctgatc

SEQ ID NO: 1718452 - DNA, 25 bp, Homo sapien
gtttactagtcactagtctaaagct

SEQ ID NO: 1718453 - DNA, 25 bp, Homo sapien
gtttgatgctagctctgatctaacc

SEQ ID NO: 1718454 - DNA, 25 bp, Homo sapien
ctggccctagtttactagtcactag

SEQ ID NO: 1718455 - DNA, 25 bp, Homo sapien
ttaaatgggttggaacaaatgcgca

SEQ ID NO: 1718456 - DNA, 25 bp, Homo sapien
cacacaagcaaacatgaagtctgcg

SEQ ID NO: 1718457 - DNA, 25 bp, Homo sapien
ttggttcagctagatacagtttccc

SEQ ID NO: 1718458 - DNA, 25 bp, Homo sapien
gacgtcggaagggttgctcaacaca

SEQ ID NO: 1718459 - DNA, 25 bp, Homo sapien
tctgcatttcggtggctagtcaagc

SEQ ID NO: 1718460 - DNA, 25 bp, Homo sapien
tctcagtactttggaggcccctatg

SEQ ID NO: 1718461 - DNA, 25 bp, Homo sapien
gaatagtctagatggctcctctcag

SEQ ID NO: 1718462 - DNA, 25 bp, Homo sapien
tatgtagtccgtgctgacagctgct

SEQ ID NO: 1718463 - DNA, 25 bp, Homo sapien
gagtttggcctcctgtgtcaaggac

SEQ ID NO: 1718464 - DNA, 25 bp, Homo sapien
acctccccctctgattggagtttgg

SEQ ID NO: 1718465 - DNA, 25 bp, Homo sapien
tgtgggacacagtagctgccttagc

SEQ ID NO: 1718466 - DNA, 25 bp, Homo sapien
gcaagtggttccacgttcaccacct

SEQ ID NO: 1718467 - DNA, 25 bp, Homo sapien
gcagtaagcagcatcgctgtcttcc

SEQ ID NO: 1718468 - DNA, 25 bp, Homo sapien
tagtgtgtggggacgtctctatgac

SEQ ID NO: 1718469 - DNA, 25 bp, Homo sapien
ccccacgtggaagcgcatgggtgta

SEQ ID NO: 1718470 - DNA, 25 bp, Homo sapien
actttccccacgtggaagcgcatgg

SEQ ID NO: 1718471 - DNA, 25 bp, Homo sapien
cagttgggcacccattcgactttcc

SEQ ID NO: 1718472 - DNA, 25 bp, Homo sapien
tgcttggatgaactcctgaagtgtt

SEQ ID NO: 1718473 - DNA, 25 bp, Homo sapien
cattggatccttgtgaaatgaccga

SEQ ID NO: 1718474 - DNA, 25 bp, Homo sapien
gaaatgaccgattgactgcttggat

SEQ ID NO: 1718475 - DNA, 25 bp, Homo sapien
ttgaaagccttcattggatccttgt

SEQ ID NO: 1718476 - DNA, 25 bp, Homo sapien
tctgaagctcacaggctgattggga

SEQ ID NO: 1718477 - DNA, 25 bp, Homo sapien
acacttctgttttgggctaggtcca

SEQ ID NO: 1718478 - DNA, 25 bp, Homo sapien
cagtagtggatcttgtgctggatgc

SEQ ID NO: 1718479 - DNA, 25 bp, Homo sapien
cacttagtgcaatacatggcagtag

SEQ ID NO: 1718480 - DNA, 25 bp, Homo sapien
catcatcccaagtgtctagatctgg

SEQ ID NO: 1718481 - DNA, 25 bp, Homo sapien
tggaaccatacagagtccttccggg

SEQ ID NO: 1718482 - DNA, 25 bp, Homo sapien
gagggcatgtggatgaaggctggaa

SEQ ID NO: 1718483 - DNA, 25 bp, Homo sapien
cttccggggacctgatcaacacagt

SEQ ID NO: 1718484 - DNA, 25 bp, Homo sapien
ctgattctccttcgccttgaccaga

SEQ ID NO: 1718485 - DNA, 25 bp, Homo sapien
tctccttcgccttgaccagaggccc

SEQ ID NO: 1718486 - DNA, 25 bp, Homo sapien
gattctccttcgccttgaccagagg

SEQ ID NO: 1718487 - DNA, 25 bp, Homo sapien
attctccttcgccttgaccagaggc

SEQ ID NO: 1718488 - DNA, 25 bp, Homo sapien
cctgggccaccagtaaagttgtgaa

SEQ ID NO: 1718489 - DNA, 25 bp, Homo sapien
taaagttggcaggaaggagtacagt

SEQ ID NO: 1718490 - DNA, 25 bp, Homo sapien
ccggctcccgttgtcatggcagtta

SEQ ID NO: 1718491 - DNA, 25 bp, Homo sapien
aaggcccagagaagtaccctgtgag

SEQ ID NO: 1718492 - DNA, 25 bp, Homo sapien
gacggccctgcgagccagcagggta

SEQ ID NO: 1718493 - DNA, 25 bp, Homo sapien
cttcagagggcatgacacctgtgtc

SEQ ID NO: 1718494 - DNA, 25 bp, Homo sapien
cagggtagctaatgtggcatggcct

SEQ ID NO: 1718495 - DNA, 25 bp, Homo sapien
agagagggacccgtgtgcccagagc

SEQ ID NO: 1718496 - DNA, 25 bp, Homo sapien
catcaccagctgtttacacaccggg

SEQ ID NO: 1718497 - DNA, 25 bp, Homo sapien
tagtccctgatcgtccaccaggtgg

SEQ ID NO: 1718498 - DNA, 25 bp, Homo sapien
cgctgactggtttcagggagcctct

SEQ ID NO: 1718499 - DNA, 25 bp, Homo sapien
tgccgggttcttcaggcgctgactg

SEQ ID NO: 1718500 - DNA, 25 bp, Homo sapien
ctggcgtagtgtgcgcgagcgcggg

SEQ ID NO: 1718501 - DNA, 25 bp, Homo sapien
cttgttctggcgtagtgtgcgcgag

SEQ ID NO: 1718502 - DNA, 25 bp, Homo sapien
tgttctggcgtagtgtgcgcgagcg

SEQ ID NO: 1718503 - DNA, 25 bp, Homo sapien
ttctggcgtagtgtgcgcgagcgcg

SEQ ID NO: 1718504 - DNA, 25 bp, Homo sapien
gttccggagccaccggccccagctg

SEQ ID NO: 1718505 - DNA, 25 bp, Homo sapien
cagctgtggccgccgcgtcggccat

SEQ ID NO: 1718506 - DNA, 25 bp, Homo sapien
ccccagctgtggccgccgcgtcggc

SEQ ID NO: 1718507 - DNA, 25 bp, Homo sapien
cgttccggagccaccggccccagct

SEQ ID NO: 1718508 - DNA, 25 bp, Homo sapien
tcttcacaccatttcattgaaaggg

SEQ ID NO: 1718509 - DNA, 25 bp, Homo sapien
gacgtgtcccgcagaaaaaacagga

SEQ ID NO: 1718510 - DNA, 25 bp, Homo sapien
tcccaatgagataaaatagcaggtc

SEQ ID NO: 1718511 - DNA, 25 bp, Homo sapien
gcatgatgggattaagacgtgtccc

SEQ ID NO: 1718512 - DNA, 25 bp, Homo sapien
atagttatcggcagggttagtggac

SEQ ID NO: 1718513 - DNA, 25 bp, Homo sapien
tctgtcagcgtttccacggatgctt

SEQ ID NO: 1718514 - DNA, 25 bp, Homo sapien
ggagctcacaaccacctgcagggtt

SEQ ID NO: 1718515 - DNA, 25 bp, Homo sapien
cctccgggccagatgatagttatcg

SEQ ID NO: 1718516 - DNA, 25 bp, Homo sapien
aatcctctcaaacactatcacaaag

SEQ ID NO: 1718517 - DNA, 25 bp, Homo sapien
tttgtttcttaaatcctctcaaaca

SEQ ID NO: 1718518 - DNA, 25 bp, Homo sapien
cagaactgatgttggggttgactcc

SEQ ID NO: 1718519 - DNA, 25 bp, Homo sapien
ccacgctcggcccattgtgctgttt

SEQ ID NO: 1718520 - DNA, 25 bp, Homo sapien
ccacgatatcggacagtgtgggctg

SEQ ID NO: 1718521 - DNA, 25 bp, Homo sapien
cacagtaagacttggcacttctccc

SEQ ID NO: 1718522 - DNA, 25 bp, Homo sapien
ccatctcaacaagtgtgaccacgat

SEQ ID NO: 1718523 - DNA, 25 bp, Homo sapien
tgctcacagtaagacttggcacttc

SEQ ID NO: 1718524 - DNA, 25 bp, Homo sapien
gagaccgttttgcataagcagggag

SEQ ID NO: 1718525 - DNA, 25 bp, Homo sapien
gaccgttttgcataagcagggagag

SEQ ID NO: 1718526 - DNA, 25 bp, Homo sapien
tcctctgagaccgttttgcataagc

SEQ ID NO: 1718527 - DNA, 25 bp, Homo sapien
tctgagaccgttttgcataagcagg

SEQ ID NO: 1718528 - DNA, 25 bp, Homo sapien
cggagttttgatgtaggtgtgggga

SEQ ID NO: 1718529 - DNA, 25 bp, Homo sapien
gggggtcactggctgattggtcacc

SEQ ID NO: 1718530 - DNA, 25 bp, Homo sapien
gagttttgaaccactctttcatcaa

SEQ ID NO: 1718531 - DNA, 25 bp, Homo sapien
agcttttggactggactctgccacg

SEQ ID NO: 1718532 - DNA, 25 bp, Homo sapien
gccacgtgacagtcagtaggaactg

SEQ ID NO: 1718533 - DNA, 25 bp, Homo sapien
gaaccactctttcatcaacaagctt

SEQ ID NO: 1718534 - DNA, 25 bp, Homo sapien
cctatactgttcctaagatcagtgt

SEQ ID NO: 1718535 - DNA, 25 bp, Homo sapien
actgttcctaagatcagtgttgaga

SEQ ID NO: 1718536 - DNA, 25 bp, Homo sapien
cctccatcttgcctggagactagat

SEQ ID NO: 1718537 - DNA, 25 bp, Homo sapien
aaagaagacctccatcttgcctgga

SEQ ID NO: 1718538 - DNA, 25 bp, Homo sapien
acgaatgacttatggtgacctggga

SEQ ID NO: 1718539 - DNA, 25 bp, Homo sapien
aatgatttggcttatctgatacaaa

SEQ ID NO: 1718540 - DNA, 25 bp, Homo sapien
ttttggctaaacgaatgacttatgg

SEQ ID NO: 1718541 - DNA, 25 bp, Homo sapien
gaagagacagattcagttggcctca

SEQ ID NO: 1718542 - DNA, 25 bp, Homo sapien
ggccaaggtgcaaagactacttaag

SEQ ID NO: 1718543 - DNA, 25 bp, Homo sapien
ataaaaagcagaggcaattgctccc

SEQ ID NO: 1718544 - DNA, 25 bp, Homo sapien
ggagtatgtacccatgcctgggtga

SEQ ID NO: 1718545 - DNA, 25 bp, Homo sapien
ttgctcccgctagaaaaggttatag

SEQ ID NO: 1718546 - DNA, 25 bp, Homo sapien
ctgtcttggccatgaaacgggtaag

SEQ ID NO: 1718547 - DNA, 25 bp, Homo sapien
gacctggtagtctgacacgggctca

SEQ ID NO: 1718548 - DNA, 25 bp, Homo sapien
tgtgctgacgtcatctttgaaaaga

SEQ ID NO: 1718549 - DNA, 25 bp, Homo sapien
gactctgagtctcgcctgtcttggc

SEQ ID NO: 1718550 - DNA, 25 bp, Homo sapien
ggtccacacagtggggcaactctca

SEQ ID NO: 1718551 - DNA, 25 bp, Homo sapien
gtccacacagtggggcaactctcac

SEQ ID NO: 1718552 - DNA, 25 bp, Homo sapien
agcgggcgttccacaggagcttgct

SEQ ID NO: 1718553 - DNA, 25 bp, Homo sapien
gaacatcacgatgggcaactggccc

SEQ ID NO: 1718554 - DNA, 25 bp, Homo sapien
gccaagttaaatgaggtgggaccta

SEQ ID NO: 1718555 - DNA, 25 bp, Homo sapien
tatctggcacttaacaaccggcagc

SEQ ID NO: 1718556 - DNA, 25 bp, Homo sapien
gatggtgaaaggtctggcagcaatc

SEQ ID NO: 1718557 - DNA, 25 bp, Homo sapien
tcatcctgctccgaggaatctgtct

SEQ ID NO: 1718558 - DNA, 25 bp, Homo sapien
tcagacggaagaagagctgtcaggt

SEQ ID NO: 1718559 - DNA, 25 bp, Homo sapien
tgttgcatctccagttcagacggaa

SEQ ID NO: 1718560 - DNA, 25 bp, Homo sapien
tttttagacacgacctacaggctgc

SEQ ID NO: 1718561 - DNA, 25 bp, Homo sapien
cagtgggtccaccttactgagtaaa

SEQ ID NO: 1718562 - DNA, 25 bp, Homo sapien
tttaagacacgaacatcaactcctg

SEQ ID NO: 1718563 - DNA, 25 bp, Homo sapien
taagaccctgtaagatctgactccc

SEQ ID NO: 1718564 - DNA, 25 bp, Homo sapien
tctagaaggctacataagaggctgg

SEQ ID NO: 1718565 - DNA, 25 bp, Homo sapien
ggttagatagcctaaaacagcaggg

SEQ ID NO: 1718566 - DNA, 25 bp, Homo sapien
taaggcgtaaagtaacacaatcacg

SEQ ID NO: 1718567 - DNA, 25 bp, Homo sapien
tgccaggcacctgatagataccagc

SEQ ID NO: 1718568 - DNA, 25 bp, Homo sapien
tagtccgttcttaccgagccatcag

SEQ ID NO: 1718569 - DNA, 25 bp, Homo sapien
caagtgactgcaactatgggcatgc

SEQ ID NO: 1718570 - DNA, 25 bp, Homo sapien
taggctatagcgacagcttcctgac

SEQ ID NO: 1718571 - DNA, 25 bp, Homo sapien
tgtggcaaccactctacttgggccc

SEQ ID NO: 1718572 - DNA, 25 bp, Homo sapien
tattttccacgtttggtcgggctgc

SEQ ID NO: 1718573 - DNA, 25 bp, Homo sapien
tctgcaacttgaggctaaagaggcc

SEQ ID NO: 1718574 - DNA, 25 bp, Homo sapien
tgctgtcaaaacagacagaggatgc

SEQ ID NO: 1718575 - DNA, 25 bp, Homo sapien
ccatgaccggatggcatgaaataaa

SEQ ID NO: 1718576 - DNA, 25 bp, Homo sapien
aagggttatcgatgatgttctcctc

SEQ ID NO: 1718577 - DNA, 25 bp, Homo sapien
tcttcctgcggatcttgggcttctt

SEQ ID NO: 1718578 - DNA, 25 bp, Homo sapien
gcaggacagaggtgttctccttctc

SEQ ID NO: 1718579 - DNA, 25 bp, Homo sapien
ccattccggctacccgacaaggagg

SEQ ID NO: 1718580 - DNA, 25 bp, Homo sapien
aacaagagctatgtacgggagccaa

SEQ ID NO: 1718581 - DNA, 25 bp, Homo sapien
ggggaaaactgctccagtgctgtga

SEQ ID NO: 1718582 - DNA, 25 bp, Homo sapien
agggttggtccctagactgcaggac

SEQ ID NO: 1718583 - DNA, 25 bp, Homo sapien
gactgcaggacactcaaccactaag

SEQ ID NO: 1718584 - DNA, 25 bp, Homo sapien
tcaagtcccagcataatagagccga

SEQ ID NO: 1718585 - DNA, 25 bp, Homo sapien
cctgtttccgacacgttgagggagt

SEQ ID NO: 1718586 - DNA, 25 bp, Homo sapien
gataatgaacgaagtcactggctgc

SEQ ID NO: 1718587 - DNA, 25 bp, Homo sapien
tcagggagctttcgtcaaatgccga

SEQ ID NO: 1718588 - DNA, 25 bp, Homo sapien
acaaattggttggacagactcagac

SEQ ID NO: 1718589 - DNA, 25 bp, Homo sapien
gaaaagctatcagcatgcccagcat

SEQ ID NO: 1718590 - DNA, 25 bp, Homo sapien
gggaaacaagcttattcatccagtg

SEQ ID NO: 1718591 - DNA, 25 bp, Homo sapien
gcagaacgcctcagcttggctcact

SEQ ID NO: 1718592 - DNA, 25 bp, Homo sapien
ttagccgagaattgtggtaggtgcc

SEQ ID NO: 1718593 - DNA, 25 bp, Homo sapien
aagactaagagatgggctgggcacc

SEQ ID NO: 1718594 - DNA, 25 bp, Homo sapien
tataagagtatagcctctgaggcca

SEQ ID NO: 1718595 - DNA, 25 bp, Homo sapien
gaacagctgggattggccacggctt

SEQ ID NO: 1718596 - DNA, 25 bp, Homo sapien
aatggagatgaggtaggccacacgc

SEQ ID NO: 1718597 - DNA, 25 bp, Homo sapien
cgccagggtccatggtaaagctcta

SEQ ID NO: 1718598 - DNA, 25 bp, Homo sapien
ctgatacacacaaccacctagatgg

SEQ ID NO: 1718599 - DNA, 25 bp, Homo sapien
tgcagaactgaaaaagccaacgtca

SEQ ID NO: 1718600 - DNA, 25 bp, Homo sapien
gggagctgcttgtgatgatttaaaa

SEQ ID NO: 1718601 - DNA, 25 bp, Homo sapien
tctatttggattgtcaggagagggt

SEQ ID NO: 1718602 - DNA, 25 bp, Homo sapien
aaaaaaccgctttgctcattctatt

SEQ ID NO: 1718603 - DNA, 25 bp, Homo sapien
gctcattctatttggattgtcagga

SEQ ID NO: 1718604 - DNA, 25 bp, Homo sapien
tatttcagagggcacggcagaactc

SEQ ID NO: 1718605 - DNA, 25 bp, Homo sapien
cagggtctacatcctctgggttggc

SEQ ID NO: 1718606 - DNA, 25 bp, Homo sapien
cacctgggcgatctgacaagcttgt

SEQ ID NO: 1718607 - DNA, 25 bp, Homo sapien
gacatggtgcactcaggctctcgag

SEQ ID NO: 1718608 - DNA, 25 bp, Homo sapien
tggatctcttctgtgccgtagaaag

SEQ ID NO: 1718609 - DNA, 25 bp, Homo sapien
gatctcttctgtgccgtagaaagct

SEQ ID NO: 1718610 - DNA, 25 bp, Homo sapien
ggatctcttctgtgccgtagaaagc

SEQ ID NO: 1718611 - DNA, 25 bp, Homo sapien
cttctttatcctcaggcttcagctc

SEQ ID NO: 1718612 - DNA, 25 bp, Homo sapien
tcccacttctgtggcaggctcttct

SEQ ID NO: 1718613 - DNA, 25 bp, Homo sapien
tctcccacttctgtggcaggctctt

SEQ ID NO: 1718614 - DNA, 25 bp, Homo sapien
aggctcttctttatcctcaggcttc

SEQ ID NO: 1718615 - DNA, 25 bp, Homo sapien
tcagctgtatgggaagggtggacac

SEQ ID NO: 1718616 - DNA, 25 bp, Homo sapien
ggtggacactggcacccatcagaga

SEQ ID NO: 1718617 - DNA, 25 bp, Homo sapien
gcctctgggatgctttttgccagca

SEQ ID NO: 1718618 - DNA, 25 bp, Homo sapien
ttttgccagcaatgtgagaaaaggt

SEQ ID NO: 1718619 - DNA, 25 bp, Homo sapien
gttttacaagcacggcctactgagc

SEQ ID NO: 1718620 - DNA, 25 bp, Homo sapien
ggaaccattaaggacctgggcgctg

SEQ ID NO: 1718621 - DNA, 25 bp, Homo sapien
gcactgactgaactggaacccatcg

SEQ ID NO: 1718622 - DNA, 25 bp, Homo sapien
gatagctgtgattgcctgtcaggcc

SEQ ID NO: 1718623 - DNA, 25 bp, Homo sapien
taagcccagcataggatctctgccc

SEQ ID NO: 1718624 - DNA, 25 bp, Homo sapien
aagactctccaactcccagtgtgcg

SEQ ID NO: 1718625 - DNA, 25 bp, Homo sapien
aggctaagcccagcataggatctct

SEQ ID NO: 1718626 - DNA, 25 bp, Homo sapien
cagatccggaatgagctggaggccc

SEQ ID NO: 1718627 - DNA, 25 bp, Homo sapien
tgtgtcacagcaccgcaagcatggt

SEQ ID NO: 1718628 - DNA, 25 bp, Homo sapien
tgttacaagccgctccagagatgga

SEQ ID NO: 1718629 - DNA, 25 bp, Homo sapien
caacgtttcaacacattgggcaggc

SEQ ID NO: 1718630 - DNA, 25 bp, Homo sapien
ggaaattcagcacccatggagatgg

SEQ ID NO: 1718631 - DNA, 25 bp, Homo sapien
tcagttcagcatgcaggttgccaca

SEQ ID NO: 1718632 - DNA, 25 bp, Homo sapien
tgtgtctctgcaggcctctaaaagc

SEQ ID NO: 1718633 - DNA, 25 bp, Homo sapien
ggaaggtcacccatcactgctttag

SEQ ID NO: 1718634 - DNA, 25 bp, Homo sapien
tctctgggctaagaccgaggagcca

SEQ ID NO: 1718635 - DNA, 25 bp, Homo sapien
cctgtctcccggatctcagtggaat

SEQ ID NO: 1718636 - DNA, 25 bp, Homo sapien
gctgttctctgtttagcatctccat

SEQ ID NO: 1718637 - DNA, 25 bp, Homo sapien
tctgcagcctctcatggtctctgtt

SEQ ID NO: 1718638 - DNA, 25 bp, Homo sapien
tgttgaattgacatggctcttctgc

SEQ ID NO: 1718639 - DNA, 25 bp, Homo sapien
tgcaaggtgaccttgtagacacctg

SEQ ID NO: 1718640 - DNA, 25 bp, Homo sapien
ggtcagggaggactcttggcaggat

SEQ ID NO: 1718641 - DNA, 25 bp, Homo sapien
gtcagggaggactcttggcaggata

SEQ ID NO: 1718642 - DNA, 25 bp, Homo sapien
tccccagccctgtgatttcatcaca

SEQ ID NO: 1718643 - DNA, 25 bp, Homo sapien
cttccccagccctgtgatttcatca

SEQ ID NO: 1718644 - DNA, 25 bp, Homo sapien
ccccagccctgtgatttcatcacac

SEQ ID NO: 1718645 - DNA, 25 bp, Homo sapien
ttccccagccctgtgatttcatcac

SEQ ID NO: 1718646 - DNA, 25 bp, Homo sapien
aggcttcttgtgaccccgagctgac

SEQ ID NO: 1718647 - DNA, 25 bp, Homo sapien
tctttcctgcccatcaggcttcttg

SEQ ID NO: 1718648 - DNA, 25 bp, Homo sapien
gctggctggggctttcatgctcttt

SEQ ID NO: 1718649 - DNA, 25 bp, Homo sapien
catcaggcttcttgtgaccccgagc

SEQ ID NO: 1718650 - DNA, 25 bp, Homo sapien
agggtccccggaacatccagggatg

SEQ ID NO: 1718651 - DNA, 25 bp, Homo sapien
gctgctgctgcaacatacaggactc

SEQ ID NO: 1718652 - DNA, 25 bp, Homo sapien
ccccggaacatccagggatgaagcc

SEQ ID NO: 1718653 - DNA, 25 bp, Homo sapien
gctgctgcaacatacaggactctgg

SEQ ID NO: 1718654 - DNA, 25 bp, Homo sapien
atttagagaaagcttgataaatgct

SEQ ID NO: 1718655 - DNA, 25 bp, Homo sapien
ccttgacataacagcctccaaaatc

SEQ ID NO: 1718656 - DNA, 25 bp, Homo sapien
cttgacataacagcctccaaaatcc

SEQ ID NO: 1718657 - DNA, 25 bp, Homo sapien
ccctcctgtgcactagggaaattct

SEQ ID NO: 1718658 - DNA, 25 bp, Homo sapien
ctccctcctgtgcactagggaaatt

SEQ ID NO: 1718659 - DNA, 25 bp, Homo sapien
tctgtctttcccattagagtttcag

SEQ ID NO: 1718660 - DNA, 25 bp, Homo sapien
ctgtgcactagggaaattctgtctt

SEQ ID NO: 1718661 - DNA, 25 bp, Homo sapien
ccatgactgggtacagagggtttct

SEQ ID NO: 1718662 - DNA, 25 bp, Homo sapien
acaacgaccggcacataggctgctg

SEQ ID NO: 1718663 - DNA, 25 bp, Homo sapien
gagcttgtccggattctgcccctta

SEQ ID NO: 1718664 - DNA, 25 bp, Homo sapien
gacggtgtctttggcccatgactgg

SEQ ID NO: 1718665 - DNA, 25 bp, Homo sapien
catcaaagcgcttgcgggtgtggtc

SEQ ID NO: 1718666 - DNA, 25 bp, Homo sapien
gtgtggtcagtgtcccggcggtaca

SEQ ID NO: 1718667 - DNA, 25 bp, Homo sapien
accaagttggcaggaggcacatcaa

SEQ ID NO: 1718668 - DNA, 25 bp, Homo sapien
ggtacaggtagccacaggtaggctt

SEQ ID NO: 1718669 - DNA, 25 bp, Homo sapien
cacccattcagatgccagggaaagg

SEQ ID NO: 1718670 - DNA, 25 bp, Homo sapien
tgctgagaagagagacctcccttta

SEQ ID NO: 1718671 - DNA, 25 bp, Homo sapien
gaatataggtcactcctcctgcagt

SEQ ID NO: 1718672 - DNA, 25 bp, Homo sapien
gcatggcacagctgtcttagcccga

SEQ ID NO: 1718673 - DNA, 25 bp, Homo sapien
agttgaaaatagaacaaggcttaga

SEQ ID NO: 1718674 - DNA, 25 bp, Homo sapien
aagagttgaaaatagaacaaggctt

SEQ ID NO: 1718675 - DNA, 25 bp, Homo sapien
tggagaaaagagttgaaaatagaac

SEQ ID NO: 1718676 - DNA, 25 bp, Homo sapien
aaaatagaacaaggcttagagaagc

SEQ ID NO: 1718677 - DNA, 25 bp, Homo sapien
gccagagaactggtgttaagagtct

SEQ ID NO: 1718678 - DNA, 25 bp, Homo sapien
caaaggtgtcttggccgacaacggg

SEQ ID NO: 1718679 - DNA, 25 bp, Homo sapien
ggtgttaagagtctccactaaatcc

SEQ ID NO: 1718680 - DNA, 25 bp, Homo sapien
tgatggatcagatggtaccgggaaa

SEQ ID NO: 1718681 - DNA, 25 bp, Homo sapien
tcttgaggccgaagaactggcggaa

SEQ ID NO: 1718682 - DNA, 25 bp, Homo sapien
ctggccgacgggctcaggttcttga

SEQ ID NO: 1718683 - DNA, 25 bp, Homo sapien
tcttgtaccactggtggcactcggt

SEQ ID NO: 1718684 - DNA, 25 bp, Homo sapien
aaaagtctcaaacatctgttccacg

SEQ ID NO: 1718685 - DNA, 25 bp, Homo sapien
tataaatgaagttgctccccagcgg

SEQ ID NO: 1718686 - DNA, 25 bp, Homo sapien
gccattggattcagcctcggattac

SEQ ID NO: 1718687 - DNA, 25 bp, Homo sapien
gcacatcgcaggtgttcaatgacca

SEQ ID NO: 1718688 - DNA, 25 bp, Homo sapien
gcaaaagcaccacgtataggaccag

SEQ ID NO: 1718689 - DNA, 25 bp, Homo sapien
tacagtacaggtggtgctcgcatgg

SEQ ID NO: 1718690 - DNA, 25 bp, Homo sapien
catctgggttttagcgagcgctgcc

SEQ ID NO: 1718691 - DNA, 25 bp, Homo sapien
gttttaaatagccactgagccccag

SEQ ID NO: 1718692 - DNA, 25 bp, Homo sapien
cattaagacatggttggctcagcgt

SEQ ID NO: 1718693 - DNA, 25 bp, Homo sapien
accttccccttgaggaccaagctga

SEQ ID NO: 1718694 - DNA, 25 bp, Homo sapien
caccttccccttgaggaccaagctg

SEQ ID NO: 1718695 - DNA, 25 bp, Homo sapien
ctgccacgtactccatgaaatcaat

SEQ ID NO: 1718696 - DNA, 25 bp, Homo sapien
tcgcggtcaatgcagccgttgccat

SEQ ID NO: 1718697 - DNA, 25 bp, Homo sapien
caatgcagccgttgccatctacatc

SEQ ID NO: 1718698 - DNA, 25 bp, Homo sapien
catctacatcatagagcttgaagta

SEQ ID NO: 1718699 - DNA, 25 bp, Homo sapien
tgatggtgagcagctcatcgcggtc

SEQ ID NO: 1718700 - DNA, 25 bp, Homo sapien
gagaacactgtatcggtgaactcct

SEQ ID NO: 1718701 - DNA, 25 bp, Homo sapien
tccccgttgacgtcaatcttggaga

SEQ ID NO: 1718702 - DNA, 25 bp, Homo sapien
gacgtcaatcttggagaacactgta

SEQ ID NO: 1718703 - DNA, 25 bp, Homo sapien
tgtatcggtgaactcctctgcagtc

SEQ ID NO: 1718704 - DNA, 25 bp, Homo sapien
cctccgctggggagcccctcctcgg

SEQ ID NO: 1718705 - DNA, 25 bp, Homo sapien
ctccgctggggagcccctcctcggc

SEQ ID NO: 1718706 - DNA, 25 bp, Homo sapien
tccgctggggagcccctcctcggcc

SEQ ID NO: 1718707 - DNA, 25 bp, Homo sapien
ccctccgctggggagcccctcctcg

SEQ ID NO: 1718708 - DNA, 25 bp, Homo sapien
cctggtgaccccacatccatggtga

SEQ ID NO: 1718709 - DNA, 25 bp, Homo sapien
cttccacccctggtgaccccacatc

SEQ ID NO: 1718710 - DNA, 25 bp, Homo sapien
cccctggtgaccccacatccatggt

SEQ ID NO: 1718711 - DNA, 25 bp, Homo sapien
tccacccctggtgaccccacatcca

SEQ ID NO: 1718712 - DNA, 25 bp, Homo sapien
gacgccctctataaactcttccagg

SEQ ID NO: 1718713 - DNA, 25 bp, Homo sapien
tccaggcttcgtgtcagtgtgtcca

SEQ ID NO: 1718714 - DNA, 25 bp, Homo sapien
cctgcgcacgatgcgggtaaggtcc

SEQ ID NO: 1718715 - DNA, 25 bp, Homo sapien
tgctcgccattctggagcctgcgca

SEQ ID NO: 1718716 - DNA, 25 bp, Homo sapien
cattagcctatgagttcctagagga

SEQ ID NO: 1718717 - DNA, 25 bp, Homo sapien
agagtccacgtccagaagagcatgg

SEQ ID NO: 1718718 - DNA, 25 bp, Homo sapien
catggaccctaaagaggcgagctaa

SEQ ID NO: 1718719 - DNA, 25 bp, Homo sapien
aatgcaaagcgcacaagtaggctcc

SEQ ID NO: 1718720 - DNA, 25 bp, Homo sapien
agctgaagaaagcctgccggcgaga

SEQ ID NO: 1718721 - DNA, 25 bp, Homo sapien
gctgaagaaagcctgccggcgagag

SEQ ID NO: 1718722 - DNA, 25 bp, Homo sapien
cagctgaagaaagcctgccggcgag

SEQ ID NO: 1718723 - DNA, 25 bp, Homo sapien
gactgcaagttcttccgacgtgatg

SEQ ID NO: 1718724 - DNA, 25 bp, Homo sapien
gatgcactggaggagatgcatgcct

SEQ ID NO: 1718725 - DNA, 25 bp, Homo sapien
gcttaataagtaacaactactcgag

SEQ ID NO: 1718726 - DNA, 25 bp, Homo sapien
caaccattgctaagtgtctacccta

SEQ ID NO: 1718727 - DNA, 25 bp, Homo sapien
gatgtgatgttgtgtcctcggttca

SEQ ID NO: 1718728 - DNA, 25 bp, Homo sapien
aggacagcccacaactggcgtttgt

SEQ ID NO: 1718729 - DNA, 25 bp, Homo sapien
ggtagaattgccactgatgtgatgt

SEQ ID NO: 1718730 - DNA, 25 bp, Homo sapien
tgaagactgcagctgagttatgttg

SEQ ID NO: 1718731 - DNA, 25 bp, Homo sapien
caggtcatgggcaactgacccacat

SEQ ID NO: 1718732 - DNA, 25 bp, Homo sapien
cggccagaggttaaatcaagttata

SEQ ID NO: 1718733 - DNA, 25 bp, Homo sapien
tgaattttaaattcctcggccagag

SEQ ID NO: 1718734 - DNA, 25 bp, Homo sapien
tatttataactcagtagctcagcga

SEQ ID NO: 1718735 - DNA, 25 bp, Homo sapien
tgacatgctatcaggtatcagtgtg

SEQ ID NO: 1718736 - DNA, 25 bp, Homo sapien
ctttggagtagttatgacttctcag

SEQ ID NO: 1718737 - DNA, 25 bp, Homo sapien
gtttcctgcacatctttggagtagt

SEQ ID NO: 1718738 - DNA, 25 bp, Homo sapien
tgcttgtgtatcagacttacgttac

SEQ ID NO: 1718739 - DNA, 25 bp, Homo sapien
gaacatctaactggaagcacagcag

SEQ ID NO: 1718740 - DNA, 25 bp, Homo sapien
tagttagaacatctaactggaagca

SEQ ID NO: 1718741 - DNA, 25 bp, Homo sapien
ggaagcacagcagatgtctacttgg

SEQ ID NO: 1718742 - DNA, 25 bp, Homo sapien
gaagcacagcagatgtctacttgga

SEQ ID NO: 1718743 - DNA, 25 bp, Homo sapien
aatagagcgatttactcttctccaa

SEQ ID NO: 1718744 - DNA, 25 bp, Homo sapien
gttcagtatgaaatgagaacacttt

SEQ ID NO: 1718745 - DNA, 25 bp, Homo sapien
tgcatatttacaagaagcacagagt

SEQ ID NO: 1718746 - DNA, 25 bp, Homo sapien
catgaacctccaaggaaaatagagc

SEQ ID NO: 1718747 - DNA, 25 bp, Homo sapien
gacatattatataagcgcctctcgg

SEQ ID NO: 1718748 - DNA, 25 bp, Homo sapien
tgctaaagaacttggtatctctatt

SEQ ID NO: 1718749 - DNA, 25 bp, Homo sapien
ggctgtattggacagttatgaatat

SEQ ID NO: 1718750 - DNA, 25 bp, Homo sapien
gaaaggtcacgataaggctgtattg

SEQ ID NO: 1718751 - DNA, 25 bp, Homo sapien
tttggcccgttcacaggaatggagt

SEQ ID NO: 1718752 - DNA, 25 bp, Homo sapien
gcaaagcaagccctcgtgttacacg

SEQ ID NO: 1718753 - DNA, 25 bp, Homo sapien
cacgacatgtgaggagatgaccaaa

SEQ ID NO: 1718754 - DNA, 25 bp, Homo sapien
tgaactgactagagacccatctgga

SEQ ID NO: 1718755 - DNA, 25 bp, Homo sapien
tgccccttgtgggtgtgccaagacc

SEQ ID NO: 1718756 - DNA, 25 bp, Homo sapien
cactatgccggtaggttgccaggag

SEQ ID NO: 1718757 - DNA, 25 bp, Homo sapien
gaaatgctgctactgcggaagcctg

SEQ ID NO: 1718758 - DNA, 25 bp, Homo sapien
tagcaatggataacaccggttctgt

SEQ ID NO: 1718759 - DNA, 25 bp, Homo sapien
gtttttcttcatcgtggcatgctgt

SEQ ID NO: 1718760 - DNA, 25 bp, Homo sapien
ccatggacttgcctctcaaggacat

SEQ ID NO: 1718761 - DNA, 25 bp, Homo sapien
tgtttttcttcatcgtggcatgctg

SEQ ID NO: 1718762 - DNA, 25 bp, Homo sapien
ctgcagctcccatggacttgcctct

SEQ ID NO: 1718763 - DNA, 25 bp, Homo sapien
acctttagctaggatttggtcctca

SEQ ID NO: 1718764 - DNA, 25 bp, Homo sapien
tgtttccaacaaacagaagtatgcg

SEQ ID NO: 1718765 - DNA, 25 bp, Homo sapien
gctaggatttggtcctcacactctc

SEQ ID NO: 1718766 - DNA, 25 bp, Homo sapien
tgtctgggcctgtaaaacctttagc

SEQ ID NO: 1718767 - DNA, 25 bp, Homo sapien
tgtactacggcatagactttctctc

SEQ ID NO: 1718768 - DNA, 25 bp, Homo sapien
cagccagattcatgggacgtgcctg

SEQ ID NO: 1718769 - DNA, 25 bp, Homo sapien
ggagctgacagccagattcatggga

SEQ ID NO: 1718770 - DNA, 25 bp, Homo sapien
atgggacgtgcctgtactacggcat

SEQ ID NO: 1718771 - DNA, 25 bp, Homo sapien
gccagtcatgtgcatgtttgcattc

SEQ ID NO: 1718772 - DNA, 25 bp, Homo sapien
cagtgtagacttgtaggcctctctc

SEQ ID NO: 1718773 - DNA, 25 bp, Homo sapien
ttcctgcaaggatgagccagtcatg

SEQ ID NO: 1718774 - DNA, 25 bp, Homo sapien
tgctgtcagtgaacaattctactga

SEQ ID NO: 1718775 - DNA, 25 bp, Homo sapien
cttttgcaccccttgaattgcactg

SEQ ID NO: 1718776 - DNA, 25 bp, Homo sapien
ctcttttgcaccccttgaattgcac

SEQ ID NO: 1718777 - DNA, 25 bp, Homo sapien
tcttttgcaccccttgaattgcact

SEQ ID NO: 1718778 - DNA, 25 bp, Homo sapien
ttttgcaccccttgaattgcactga

SEQ ID NO: 1718779 - DNA, 25 bp, Homo sapien
tcctgtgactgtcccgtgaagaggg

SEQ ID NO: 1718780 - DNA, 25 bp, Homo sapien
ccgtgaagagggagataatctgtgt

SEQ ID NO: 1718781 - DNA, 25 bp, Homo sapien
atgtttagatttcctgtgactgtcc

SEQ ID NO: 1718782 - DNA, 25 bp, Homo sapien
aaaatgtttagatttcctgtgactg

SEQ ID NO: 1718783 - DNA, 25 bp, Homo sapien
agattggccgttggctccttctcac

SEQ ID NO: 1718784 - DNA, 25 bp, Homo sapien
gagattggccgttggctccttctca

SEQ ID NO: 1718785 - DNA, 25 bp, Homo sapien
ggagattggccgttggctccttctc

SEQ ID NO: 1718786 - DNA, 25 bp, Homo sapien
catgaaagcagcatgattggccgac

SEQ ID NO: 1718787 - DNA, 25 bp, Homo sapien
attggccgaccgcaggagaagcccc

SEQ ID NO: 1718788 - DNA, 25 bp, Homo sapien
aagcagcatgattggccgaccgcag

SEQ ID NO: 1718789 - DNA, 25 bp, Homo sapien
gcatgattggccgaccgcaggagaa

SEQ ID NO: 1718790 - DNA, 25 bp, Homo sapien
ttatccagggcctattaggagcagg

SEQ ID NO: 1718791 - DNA, 25 bp, Homo sapien
gcagcgtgctcagtgagggacctac

SEQ ID NO: 1718792 - DNA, 25 bp, Homo sapien
tatccagggcctattaggagcaggg

SEQ ID NO: 1718793 - DNA, 25 bp, Homo sapien
gggacctacgctctcactgatctgc

SEQ ID NO: 1718794 - DNA, 25 bp, Homo sapien
atcctgtggcccttaggatgaacgt

SEQ ID NO: 1718795 - DNA, 25 bp, Homo sapien
ggcccttaggatgaacgtgataaac

SEQ ID NO: 1718796 - DNA, 25 bp, Homo sapien
tgtggcccttaggatgaacgtgata

SEQ ID NO: 1718797 - DNA, 25 bp, Homo sapien
cctgtggcccttaggatgaacgtga

SEQ ID NO: 1718798 - DNA, 25 bp, Homo sapien
cttggaaggagtatgataggaaggt

SEQ ID NO: 1718799 - DNA, 25 bp, Homo sapien
aggaaggttccattcagactgctct

SEQ ID NO: 1718800 - DNA, 25 bp, Homo sapien
tggaaggagtatgataggaaggttc

SEQ ID NO: 1718801 - DNA, 25 bp, Homo sapien
ggaaggagtatgataggaaggttcc

SEQ ID NO: 1718802 - DNA, 25 bp, Homo sapien
tcagcagaaacaatcaggcctgctt

SEQ ID NO: 1718803 - DNA, 25 bp, Homo sapien
cagaaacaatcaggcctgcttccca

SEQ ID NO: 1718804 - DNA, 25 bp, Homo sapien
tcctgcttcagcagaaacaatcagg

SEQ ID NO: 1718805 - DNA, 25 bp, Homo sapien
cttcagcagaaacaatcaggcctgc

SEQ ID NO: 1718806 - DNA, 25 bp, Homo sapien
cacatgcgtgtgtgcgggcgtgcat

SEQ ID NO: 1718807 - DNA, 25 bp, Homo sapien
gcacatgcgtgtgtgcgggcgtgca

SEQ ID NO: 1718808 - DNA, 25 bp, Homo sapien
gagccgtcataaatcctgaaggact

SEQ ID NO: 1718809 - DNA, 25 bp, Homo sapien
gcagggagagccgtcataaatcctg

SEQ ID NO: 1718810 - DNA, 25 bp, Homo sapien
gttgattactaccaagatctggatg

SEQ ID NO: 1718811 - DNA, 25 bp, Homo sapien
ctagccacatggttgattactacca

SEQ ID NO: 1718812 - DNA, 25 bp, Homo sapien
gggtgctaacgagcaatgacagttc

SEQ ID NO: 1718813 - DNA, 25 bp, Homo sapien
gacagttccacaaaggatgggagaa

SEQ ID NO: 1718814 - DNA, 25 bp, Homo sapien
agcaatgacagttccacaaaggatg

SEQ ID NO: 1718815 - DNA, 25 bp, Homo sapien
tccattggccccaggggtgctaacg

SEQ ID NO: 1718816 - DNA, 25 bp, Homo sapien
acagctgaagttagatttgatgccc

SEQ ID NO: 1718817 - DNA, 25 bp, Homo sapien
atagtgtggacagctgaagttagat

SEQ ID NO: 1718818 - DNA, 25 bp, Homo sapien
ggacagctgaagttagatttgatgc

SEQ ID NO: 1718819 - DNA, 25 bp, Homo sapien
tcatagtgtggacagctgaagttag

SEQ ID NO: 1718820 - DNA, 25 bp, Homo sapien
agttatggagtgttcttctaacaga

SEQ ID NO: 1718821 - DNA, 25 bp, Homo sapien
tacgtggatcgtccccggtaattca

SEQ ID NO: 1718822 - DNA, 25 bp, Homo sapien
tctgagttatggagtgttcttctaa

SEQ ID NO: 1718823 - DNA, 25 bp, Homo sapien
gaaatttgtttagcttgagggtaga

SEQ ID NO: 1718824 - DNA, 25 bp, Homo sapien
ttgctccacggcagacgacattgtg

SEQ ID NO: 1718825 - DNA, 25 bp, Homo sapien
gcagacgacattgtgctttttgaca

SEQ ID NO: 1718826 - DNA, 25 bp, Homo sapien
tttctctcaaggcatatcttgctcc

SEQ ID NO: 1718827 - DNA, 25 bp, Homo sapien
gcatatcttgctccacggcagacga

SEQ ID NO: 1718828 - DNA, 25 bp, Homo sapien
gatgagcactggttgactccaaatt

SEQ ID NO: 1718829 - DNA, 25 bp, Homo sapien
ccattttgatacctagatgagcact

SEQ ID NO: 1718830 - DNA, 25 bp, Homo sapien
gaagattgcctggacccagaaagca

SEQ ID NO: 1718831 - DNA, 25 bp, Homo sapien
gacttccgtcttctgtaggttgtta

SEQ ID NO: 1718832 - DNA, 25 bp, Homo sapien
tggaggggtgagcatgtagggtgca

SEQ ID NO: 1718833 - DNA, 25 bp, Homo sapien
cagattaacggtgcggagagcactg

SEQ ID NO: 1718834 - DNA, 25 bp, Homo sapien
aggaggaggctttgacgatggaggg

SEQ ID NO: 1718835 - DNA, 25 bp, Homo sapien
ggttcccagattaacggtgcggaga

SEQ ID NO: 1718836 - DNA, 25 bp, Homo sapien
cacatcctgttggaagcagttagca

SEQ ID NO: 1718837 - DNA, 25 bp, Homo sapien
tgatctgagtcaagcgcttagccca

SEQ ID NO: 1718838 - DNA, 25 bp, Homo sapien
gcttagcccagtggatagcccaata

SEQ ID NO: 1718839 - DNA, 25 bp, Homo sapien
gaaatagaacttgggagccgcagct

SEQ ID NO: 1718840 - DNA, 25 bp, Homo sapien
ccatgctgaagccagatgtcctgac

SEQ ID NO: 1718841 - DNA, 25 bp, Homo sapien
tgaagccagatgtcctgactgtgct

SEQ ID NO: 1718842 - DNA, 25 bp, Homo sapien
tgctgaagccagatgtcctgactgt

SEQ ID NO: 1718843 - DNA, 25 bp, Homo sapien
gaagccagatgtcctgactgtgctc

SEQ ID NO: 1718844 - DNA, 25 bp, Homo sapien
tgggtcctcgtcctgggtgggccca

SEQ ID NO: 1718845 - DNA, 25 bp, Homo sapien
caggtcactcctccgacctctccct

SEQ ID NO: 1718846 - DNA, 25 bp, Homo sapien
cgacctctccctgattgatactcac

SEQ ID NO: 1718847 - DNA, 25 bp, Homo sapien
agcctttgctgggtcctcgtcctgg

SEQ ID NO: 1718848 - DNA, 25 bp, Homo sapien
gtcttggtctcctaagtcctcttct

SEQ ID NO: 1718849 - DNA, 25 bp, Homo sapien
tcttggtctcctaagtcctcttctc

SEQ ID NO: 1718850 - DNA, 25 bp, Homo sapien
ttggtctcctaagtcctcttctccc

SEQ ID NO: 1718851 - DNA, 25 bp, Homo sapien
tggtctcctaagtcctcttctcccc

SEQ ID NO: 1718852 - DNA, 25 bp, Homo sapien
ggatttgatcgcaggcctgactcca

SEQ ID NO: 1718853 - DNA, 25 bp, Homo sapien
tggctgacgaggtcaggatttgatc

SEQ ID NO: 1718854 - DNA, 25 bp, Homo sapien
aggatttgatcgcaggcctgactcc

SEQ ID NO: 1718855 - DNA, 25 bp, Homo sapien
ctgacgaggtcaggatttgatcgca

SEQ ID NO: 1718856 - DNA, 25 bp, Homo sapien
cttgtttctgttagtaagagtggag

SEQ ID NO: 1718857 - DNA, 25 bp, Homo sapien
gtttctttgcggacttctgccatcc

SEQ ID NO: 1718858 - DNA, 25 bp, Homo sapien
ctttgcggacttctgccatccttct

SEQ ID NO: 1718859 - DNA, 25 bp, Homo sapien
catccttctttgcaaaccttcttgc

SEQ ID NO: 1718860 - DNA, 25 bp, Homo sapien
cctgagccactgtgcgtttggaaaa

SEQ ID NO: 1718861 - DNA, 25 bp, Homo sapien
tgagattcagggctgctatcctgag

SEQ ID NO: 1718862 - DNA, 25 bp, Homo sapien
tgagccactgtgcgtttggaaaatc

SEQ ID NO: 1718863 - DNA, 25 bp, Homo sapien
ctgagccactgtgcgtttggaaaat

SEQ ID NO: 1718864 - DNA, 25 bp, Homo sapien
cgaacccaacttcatgttagtattt

SEQ ID NO: 1718865 - DNA, 25 bp, Homo sapien
gagactgtgtaagtgtgctgagctc

SEQ ID NO: 1718866 - DNA, 25 bp, Homo sapien
aactgtgcggacttgatgccaggcc

SEQ ID NO: 1718867 - DNA, 25 bp, Homo sapien
tcagctttctatggcagctgtacca

SEQ ID NO: 1718868 - DNA, 25 bp, Homo sapien
gttttgaaggttgggcaccatctac

SEQ ID NO: 1718869 - DNA, 25 bp, Homo sapien
aatagaatgtctctctagggccagc

SEQ ID NO: 1718870 - DNA, 25 bp, Homo sapien
tggtctgtagcctggcaatagaatg

SEQ ID NO: 1718871 - DNA, 25 bp, Homo sapien
tctagggccagctttcccttgtcca

SEQ ID NO: 1718872 - DNA, 25 bp, Homo sapien
ttgtccagggcacatcctgacccgg

SEQ ID NO: 1718873 - DNA, 25 bp, Homo sapien
cacatagctctctcaaatggttggg

SEQ ID NO: 1718874 - DNA, 25 bp, Homo sapien
aaatggttgtgcctcttatgaggcc

SEQ ID NO: 1718875 - DNA, 25 bp, Homo sapien
tgtgaaacaagtttggggaagatgt

SEQ ID NO: 1718876 - DNA, 25 bp, Homo sapien
cctgtggagagaatgagtagtgagt

SEQ ID NO: 1718877 - DNA, 25 bp, Homo sapien
agtccgagtgggcaaaatctctccg

SEQ ID NO: 1718878 - DNA, 25 bp, Homo sapien
gactcagagtttgttgagtccgagt

SEQ ID NO: 1718879 - DNA, 25 bp, Homo sapien
agtttgttgagtccgagtgggcaaa

SEQ ID NO: 1718880 - DNA, 25 bp, Homo sapien
gtgggcaaaatctctccgatcttgc

SEQ ID NO: 1718881 - DNA, 25 bp, Homo sapien
cttggcatgtgtttgcatgctgggc

SEQ ID NO: 1718882 - DNA, 25 bp, Homo sapien
tgctgggctgcgcagctgtcatcag

SEQ ID NO: 1718883 - DNA, 25 bp, Homo sapien
tgtatcacatggagccgtacgagac

SEQ ID NO: 1718884 - DNA, 25 bp, Homo sapien
cgtacgagacccctgtgcttggttc

SEQ ID NO: 1718885 - DNA, 25 bp, Homo sapien
gcgtgacaacagagacgggcagaca

SEQ ID NO: 1718886 - DNA, 25 bp, Homo sapien
tgacaacagagacgggcagacagac

SEQ ID NO: 1718887 - DNA, 25 bp, Homo sapien
gatccaggactagcgtgacaacaga

SEQ ID NO: 1718888 - DNA, 25 bp, Homo sapien
tgtctgtagtttgggggcagatcca

SEQ ID NO: 1718889 - DNA, 25 bp, Homo sapien
ggcttatttgatgtacttttgatta

SEQ ID NO: 1718890 - DNA, 25 bp, Homo sapien
cttatttgatgtacttttgattagg

SEQ ID NO: 1718891 - DNA, 25 bp, Homo sapien
gcttatttgatgtacttttgattag

SEQ ID NO: 1718892 - DNA, 25 bp, Homo sapien
tctgtgcgcacacgtccataagaat

SEQ ID NO: 1718893 - DNA, 25 bp, Homo sapien
tgacctggtaaatatctgtgcgcac

SEQ ID NO: 1718894 - DNA, 25 bp, Homo sapien
gtaaatatctgtgcgcacacgtcca

SEQ ID NO: 1718895 - DNA, 25 bp, Homo sapien
gctgatgatgacctggtaaatatct

SEQ ID NO: 1718896 - DNA, 25 bp, Homo sapien
gagttcttggcgcagctagccattt

SEQ ID NO: 1718897 - DNA, 25 bp, Homo sapien
tgctgtgtcatgtccaaacctcttg

SEQ ID NO: 1718898 - DNA, 25 bp, Homo sapien
aagtctggcatcatagactgttggg

SEQ ID NO: 1718899 - DNA, 25 bp, Homo sapien
tgtgttccaggtttatctggcccct

SEQ ID NO: 1718900 - DNA, 25 bp, Homo sapien
acttttctctggcacgggccatcct

SEQ ID NO: 1718901 - DNA, 25 bp, Homo sapien
tatgggattctcactggttaagtgc

SEQ ID NO: 1718902 - DNA, 25 bp, Homo sapien
tgacccgggttgtaacgtagcttga

SEQ ID NO: 1718903 - DNA, 25 bp, Homo sapien
taacgtagcttgactgatggcctca

SEQ ID NO: 1718904 - DNA, 25 bp, Homo sapien
tcaggttcctggaccagcccatcct

SEQ ID NO: 1718905 - DNA, 25 bp, Homo sapien
aggttcctggaccagcccatcctcc

SEQ ID NO: 1718906 - DNA, 25 bp, Homo sapien
caggttcctggaccagcccatcctc

SEQ ID NO: 1718907 - DNA, 25 bp, Homo sapien
gaattctaggctaagcattagatca

SEQ ID NO: 1718908 - DNA, 25 bp, Homo sapien
actttgtgggccgtatctctgtcct

SEQ ID NO: 1718909 - DNA, 25 bp, Homo sapien
taagtattattccagtatatgcaga

SEQ ID NO: 1718910 - DNA, 25 bp, Homo sapien
agcattagatcaaagattggcaaac

SEQ ID NO: 1718911 - DNA, 25 bp, Homo sapien
tctggtatgcgcttgcctcagggcc

SEQ ID NO: 1718912 - DNA, 25 bp, Homo sapien
gagtccatacagtagtccttagccc

SEQ ID NO: 1718913 - DNA, 25 bp, Homo sapien
agaagtctgagagggctttgagcca

SEQ ID NO: 1718914 - DNA, 25 bp, Homo sapien
tgatatcaagggagattaccaggaa

SEQ ID NO: 1718915 - DNA, 25 bp, Homo sapien
ggcaggccgtatgctgtgtcctccc

SEQ ID NO: 1718916 - DNA, 25 bp, Homo sapien
cccttcagggcaggccgtatgctgt

SEQ ID NO: 1718917 - DNA, 25 bp, Homo sapien
tcccttcagggcaggccgtatgctg

SEQ ID NO: 1718918 - DNA, 25 bp, Homo sapien
tcagggcaggccgtatgctgtgtcc

SEQ ID NO: 1718919 - DNA, 25 bp, Homo sapien
tctccaatcagtttgtaacctttta

SEQ ID NO: 1718920 - DNA, 25 bp, Homo sapien
gaagtaaatgctgcgtgcagaaaaa

SEQ ID NO: 1718921 - DNA, 25 bp, Homo sapien
tacgtaagatttctgatagaggcgg

SEQ ID NO: 1718922 - DNA, 25 bp, Homo sapien
cccctttgagcaactctacgtaaga

SEQ ID NO: 1718923 - DNA, 25 bp, Homo sapien
tgtagagggctttgacttgtagcaa

SEQ ID NO: 1718924 - DNA, 25 bp, Homo sapien
tagaaggcagtatggaattcaaacc

SEQ ID NO: 1718925 - DNA, 25 bp, Homo sapien
cgcaaacgctcattccttaagtctt

SEQ ID NO: 1718926 - DNA, 25 bp, Homo sapien
tgagcttctttagaaggcagtatgg

SEQ ID NO: 1718927 - DNA, 25 bp, Homo sapien
ggaattcaaacctcgcaaacgctca

SEQ ID NO: 1718928 - DNA, 25 bp, Homo sapien
tctctgggctccgcccttttaggca

SEQ ID NO: 1718929 - DNA, 25 bp, Homo sapien
ctgggctccgcccttttaggcatgt

SEQ ID NO: 1718930 - DNA, 25 bp, Homo sapien
gctccgcccttttaggcatgtccat

SEQ ID NO: 1718931 - DNA, 25 bp, Homo sapien
tgggctccgcccttttaggcatgtc

SEQ ID NO: 1718932 - DNA, 25 bp, Homo sapien
tcctgcactggtccgggtttaaggc

SEQ ID NO: 1718933 - DNA, 25 bp, Homo sapien
gattttccggccatgccggagggtc

SEQ ID NO: 1718934 - DNA, 25 bp, Homo sapien
tgcaaagcgtgttacaataaccggg

SEQ ID NO: 1718935 - DNA, 25 bp, Homo sapien
ggacggctacgcaggaagcaatcct

SEQ ID NO: 1718936 - DNA, 25 bp, Homo sapien
tgggtgcagcggtttcccccgcaga

SEQ ID NO: 1718937 - DNA, 25 bp, Homo sapien
aggagacagcgcgagggagcgactc

SEQ ID NO: 1718938 - DNA, 25 bp, Homo sapien
gggtttccgcaccaatgccgagcag

SEQ ID NO: 1718939 - DNA, 25 bp, Homo sapien
cagctgctcccggtttgggtgcagc

SEQ ID NO: 1718940 - DNA, 25 bp, Homo sapien
gcaatgaacagagcgggccaagcgt

SEQ ID NO: 1718941 - DNA, 25 bp, Homo sapien
tgtagccgcaaatcccaaatccttc

SEQ ID NO: 1718942 - DNA, 25 bp, Homo sapien
cgggccaagcgtgtagggtgtaggg

SEQ ID NO: 1718943 - DNA, 25 bp, Homo sapien
gacaaaagcgtccttggctgtgtag

SEQ ID NO: 1718944 - DNA, 25 bp, Homo sapien
taagattgggactttttcagcctga

SEQ ID NO: 1718945 - DNA, 25 bp, Homo sapien
gggcttcagtcatgcaggacaggtt

SEQ ID NO: 1718946 - DNA, 25 bp, Homo sapien
cagacccagcgctcatggacttggt

SEQ ID NO: 1718947 - DNA, 25 bp, Homo sapien
ttcaacctgtggattgccttcaaga

SEQ ID NO: 1718948 - DNA, 25 bp, Homo sapien
agtatctcttcctttcttttatgtt

SEQ ID NO: 1718949 - DNA, 25 bp, Homo sapien
ggagtatctcttcctttcttttatg

SEQ ID NO: 1718950 - DNA, 25 bp, Homo sapien
tatctcttcctttcttttatgtttg

SEQ ID NO: 1718951 - DNA, 25 bp, Homo sapien
aggagtatctcttcctttcttttat

SEQ ID NO: 1718952 - DNA, 25 bp, Homo sapien
gagcagatctgctctgggcaggacc

SEQ ID NO: 1718953 - DNA, 25 bp, Homo sapien
gcagatctgctctgggcaggaccat

SEQ ID NO: 1718954 - DNA, 25 bp, Homo sapien
cagagcagatctgctctgggcagga

SEQ ID NO: 1718955 - DNA, 25 bp, Homo sapien
ctgagcagaagccccaaggctgggc

SEQ ID NO: 1718956 - DNA, 25 bp, Homo sapien
tttgaagtcaaccatggcatgatta

SEQ ID NO: 1718957 - DNA, 25 bp, Homo sapien
gatgacaggagaaacttttacattc

SEQ ID NO: 1718958 - DNA, 25 bp, Homo sapien
gaagtcaaccatggcatgattatga

SEQ ID NO: 1718959 - DNA, 25 bp, Homo sapien
ctagatgacaggagaaacttttaca

SEQ ID NO: 1718960 - DNA, 25 bp, Homo sapien
ctatagaagacaggatccagctccc

SEQ ID NO: 1718961 - DNA, 25 bp, Homo sapien
ccaacattcacctagtgaaggattc

SEQ ID NO: 1718962 - DNA, 25 bp, Homo sapien
tttgctatagaagacaggatccagc

SEQ ID NO: 1718963 - DNA, 25 bp, Homo sapien
ctcctttgctatagaagacaggatc

SEQ ID NO: 1718964 - DNA, 25 bp, Homo sapien
aatgctcgcatatcttaatagccag

SEQ ID NO: 1718965 - DNA, 25 bp, Homo sapien
tccactgagttttaggaacactcac

SEQ ID NO: 1718966 - DNA, 25 bp, Homo sapien
ttttccctgggcatatagacaattc

SEQ ID NO: 1718967 - DNA, 25 bp, Homo sapien
cactcacaatgtttgcaggagcatt

SEQ ID NO: 1718968 - DNA, 25 bp, Homo sapien
cccaaatcaggaggtcttcctccat

SEQ ID NO: 1718969 - DNA, 25 bp, Homo sapien
ctcccaaatcaggaggtcttcctcc

SEQ ID NO: 1718970 - DNA, 25 bp, Homo sapien
caaatcaggaggtcttcctccatcc

SEQ ID NO: 1718971 - DNA, 25 bp, Homo sapien
aatcaggaggtcttcctccatccat

SEQ ID NO: 1718972 - DNA, 25 bp, Homo sapien
taaactcagcaactcttgggacaat

SEQ ID NO: 1718973 - DNA, 25 bp, Homo sapien
ttataaaggtaaactcagcaactct

SEQ ID NO: 1718974 - DNA, 25 bp, Homo sapien
tcagcaactcttgggacaatcaagg

SEQ ID NO: 1718975 - DNA, 25 bp, Homo sapien
ctctggactctaaaacggttgttat

SEQ ID NO: 1718976 - DNA, 25 bp, Homo sapien
cacattaaagtgtgaggctcactgc

SEQ ID NO: 1718977 - DNA, 25 bp, Homo sapien
caagatctccacgtgattggtgtgc

SEQ ID NO: 1718978 - DNA, 25 bp, Homo sapien
tgtctgtgggtaaagactggcacca

SEQ ID NO: 1718979 - DNA, 25 bp, Homo sapien
catctatgtatacctaagggcctgg

SEQ ID NO: 1718980 - DNA, 25 bp, Homo sapien
gtcatcagcagttaaggagacacac

SEQ ID NO: 1718981 - DNA, 25 bp, Homo sapien
tcccagaaggctccggtcatcagca

SEQ ID NO: 1718982 - DNA, 25 bp, Homo sapien
ccggtcatcagcagttaaggagaca

SEQ ID NO: 1718983 - DNA, 25 bp, Homo sapien
tcaggactagaagccacaggctaag

SEQ ID NO: 1718984 - DNA, 25 bp, Homo sapien
tgttatacagcttgggaccccgaag

SEQ ID NO: 1718985 - DNA, 25 bp, Homo sapien
ggtaactgacattcaaagggagcat

SEQ ID NO: 1718986 - DNA, 25 bp, Homo sapien
tgtcttagcttccataagcagctgg

SEQ ID NO: 1718987 - DNA, 25 bp, Homo sapien
ggagctagcttttgtttgaacgtga

SEQ ID NO: 1718988 - DNA, 25 bp, Homo sapien
attttcatcagattggtcaccatca

SEQ ID NO: 1718989 - DNA, 25 bp, Homo sapien
gattttcatcagattggtcaccatc

SEQ ID NO: 1718990 - DNA, 25 bp, Homo sapien
cttagcgcccaagagtcaagtcact

SEQ ID NO: 1718991 - DNA, 25 bp, Homo sapien
ggcctgacactctcgctggccacta

SEQ ID NO: 1718992 - DNA, 25 bp, Homo sapien
tgacgtgaaccggaaaggaaggaca

SEQ ID NO: 1718993 - DNA, 25 bp, Homo sapien
aatcagtcccggagccgtccaagtg

SEQ ID NO: 1718994 - DNA, 25 bp, Homo sapien
ctcctcggccgaacattccagcaag

SEQ ID NO: 1718995 - DNA, 25 bp, Homo sapien
cccgcaatctcctcggccgaacatt

SEQ ID NO: 1718996 - DNA, 25 bp, Homo sapien
aagctccggtcgatggcctgcacct

SEQ ID NO: 1718997 - DNA, 25 bp, Homo sapien
tgcacctctggctctagctccgacg

SEQ ID NO: 1718998 - DNA, 25 bp, Homo sapien
ccaagtctgggtcgggctgctccag

SEQ ID NO: 1718999 - DNA, 25 bp, Homo sapien
caggacgtccaggagtcggttcctc

SEQ ID NO: 1719000 - DNA, 25 bp, Homo sapien
ccacaaggcgagggccggcacagct

SEQ ID NO: 1719001 - DNA, 25 bp, Homo sapien
ctccaggacgtccaggagtcggttc

SEQ ID NO: 1719002 - DNA, 25 bp, Homo sapien
gagaggggcaggatcggtggcctcc

SEQ ID NO: 1719003 - DNA, 25 bp, Homo sapien
gatcggtggcctccccgggctatta

SEQ ID NO: 1719004 - DNA, 25 bp, Homo sapien
ttagtgcacagcgcagctctggcag

SEQ ID NO: 1719005 - DNA, 25 bp, Homo sapien
tagtgcacagcgcagctctggcagc

SEQ ID NO: 1719006 - DNA, 25 bp, Homo sapien
caaaaattagtagttgattagacct

SEQ ID NO: 1719007 - DNA, 25 bp, Homo sapien
agttgattagacctcaggagtttag

SEQ ID NO: 1719008 - DNA, 25 bp, Homo sapien
tagtagttgattagacctcaggagt

SEQ ID NO: 1719009 - DNA, 25 bp, Homo sapien
aattagtagttgattagacctcagg

SEQ ID NO: 1719010 - DNA, 25 bp, Homo sapien
gcatgcatatgctccccatttttca

SEQ ID NO: 1719011 - DNA, 25 bp, Homo sapien
aaatctttactactcctgggcacag

SEQ ID NO: 1719012 - DNA, 25 bp, Homo sapien
caagacttaaaagtctggtccaaga

SEQ ID NO: 1719013 - DNA, 25 bp, Homo sapien
taaaagtctggtccaagaaaggcat

SEQ ID NO: 1719014 - DNA, 25 bp, Homo sapien
ttcagaggttcgagtctagcttggg

SEQ ID NO: 1719015 - DNA, 25 bp, Homo sapien
gactacaggctagcatggatgcttt

SEQ ID NO: 1719016 - DNA, 25 bp, Homo sapien
caaaaattcagacgctagtatcagc

SEQ ID NO: 1719017 - DNA, 25 bp, Homo sapien
tatgcagtctagtaactgtaacgag

SEQ ID NO: 1719018 - DNA, 25 bp, Homo sapien
caaaggtaccattccattggtccca

SEQ ID NO: 1719019 - DNA, 25 bp, Homo sapien
gctggtacacttctctagtgaggtc

SEQ ID NO: 1719020 - DNA, 25 bp, Homo sapien
tgggacccctgcagtagattttggg

SEQ ID NO: 1719021 - DNA, 25 bp, Homo sapien
ttgggtacatagtgggctaaatgct

SEQ ID NO: 1719022 - DNA, 25 bp, Homo sapien
gaatatgtaggctctcctactttaa

SEQ ID NO: 1719023 - DNA, 25 bp, Homo sapien
aaacaactcgaatgttcatcaacag

SEQ ID NO: 1719024 - DNA, 25 bp, Homo sapien
ggaaccaacttctaataatcattac

SEQ ID NO: 1719025 - DNA, 25 bp, Homo sapien
acagattgtaggcaactgtggcaca

SEQ ID NO: 1719026 - DNA, 25 bp, Homo sapien
cattacatcatggataaatctgaca

SEQ ID NO: 1719027 - DNA, 25 bp, Homo sapien
aaaagcactccatgcacaaaacaca

SEQ ID NO: 1719028 - DNA, 25 bp, Homo sapien
gaatacttcccaaaaagcactccat

SEQ ID NO: 1719029 - DNA, 25 bp, Homo sapien
acacaagttggatcaactgcacagt

SEQ ID NO: 1719030 - DNA, 25 bp, Homo sapien
cctatatcgatgatctctgtgaata

SEQ ID NO: 1719031 - DNA, 25 bp, Homo sapien
tgcgcatggttattatttggacatt

SEQ ID NO: 1719032 - DNA, 25 bp, Homo sapien
cgcatggttattatttggacattac

SEQ ID NO: 1719033 - DNA, 25 bp, Homo sapien
catggttattatttggacattacta

SEQ ID NO: 1719034 - DNA, 25 bp, Homo sapien
tggttattatttggacattactaac

SEQ ID NO: 1719035 - DNA, 25 bp, Homo sapien
atggtatttaaataaacacactgtt

SEQ ID NO: 1719036 - DNA, 25 bp, Homo sapien
aggaaaagttctgacccagatgggc

SEQ ID NO: 1719037 - DNA, 25 bp, Homo sapien
cggccccgtagctgttttagttcat

SEQ ID NO: 1719038 - DNA, 25 bp, Homo sapien
tgaactcctgggtagagtaaataaa

SEQ ID NO: 1719039 - DNA, 25 bp, Homo sapien
cattattatgaactcctgggtagag

SEQ ID NO: 1719040 - DNA, 25 bp, Homo sapien
ttcatgtttttgacagtaaggaccc

SEQ ID NO: 1719041 - DNA, 25 bp, Homo sapien
ggcttcagtatcaccacagtcacag

SEQ ID NO: 1719042 - DNA, 25 bp, Homo sapien
catgtttttgacagtaaggaccctc

SEQ ID NO: 1719043 - DNA, 25 bp, Homo sapien
tctttccaggcttcagtatcaccac

SEQ ID NO: 1719044 - DNA, 25 bp, Homo sapien
ccacaggttggctaacggatacaag

SEQ ID NO: 1719045 - DNA, 25 bp, Homo sapien
gactattgatgtccacttgccccaa

SEQ ID NO: 1719046 - DNA, 25 bp, Homo sapien
tacttgagtgtacctattcccctgc

SEQ ID NO: 1719047 - DNA, 25 bp, Homo sapien
cctatggctcaagcggatcccactt

SEQ ID NO: 1719048 - DNA, 25 bp, Homo sapien
ctggctttggtgatccccttacctc

SEQ ID NO: 1719049 - DNA, 25 bp, Homo sapien
tggctttggtgatccccttacctca

SEQ ID NO: 1719050 - DNA, 25 bp, Homo sapien
tcaaatgggagaggtacatctcacc

SEQ ID NO: 1719051 - DNA, 25 bp, Homo sapien
ttcacacagctactacaggcaggct

SEQ ID NO: 1719052 - DNA, 25 bp, Homo sapien
gaagacctgtggaactcctgcatag

SEQ ID NO: 1719053 - DNA, 25 bp, Homo sapien
ggccatttgcaaacctagctgggca

SEQ ID NO: 1719054 - DNA, 25 bp, Homo sapien
tgaggcaggcctagacagattcttc

SEQ ID NO: 1719055 - DNA, 25 bp, Homo sapien
gatcagcctagcagggtatgtgcct

SEQ ID NO: 1719056 - DNA, 25 bp, Homo sapien
aaaaacaattctagctaggcgtggt

SEQ ID NO: 1719057 - DNA, 25 bp, Homo sapien
gatgctacagctgtacaagtctacg

SEQ ID NO: 1719058 - DNA, 25 bp, Homo sapien
aaaaaagggcaatcatgtacattaa

SEQ ID NO: 1719059 - DNA, 25 bp, Homo sapien
aatagtatagtaaaaagttgactgg

SEQ ID NO: 1719060 - DNA, 25 bp, Homo sapien
tatagtaaaaagttgactggtcttc

SEQ ID NO: 1719061 - DNA, 25 bp, Homo sapien
agtaaaaagttgactggtcttccag

SEQ ID NO: 1719062 - DNA, 25 bp, Homo sapien
aaatgttataagttcttgctatcac

SEQ ID NO: 1719063 - DNA, 25 bp, Homo sapien
cataccgaaacgtaatagcaaaaat

SEQ ID NO: 1719064 - DNA, 25 bp, Homo sapien
atatttctactgcataccgaaacgt

SEQ ID NO: 1719065 - DNA, 25 bp, Homo sapien
tgctatcacatcttctgataaatga

SEQ ID NO: 1719066 - DNA, 25 bp, Homo sapien
tagaggcggggtcttactatgctgc

SEQ ID NO: 1719067 - DNA, 25 bp, Homo sapien
tgtagaggcggggtcttactatgct

SEQ ID NO: 1719068 - DNA, 25 bp, Homo sapien
caaccacccaggttcaattgatcct

SEQ ID NO: 1719069 - DNA, 25 bp, Homo sapien
gcctcaaccacccaggttcaattga

SEQ ID NO: 1719070 - DNA, 25 bp, Homo sapien
tataaataacttgttcataggtgtg

SEQ ID NO: 1719071 - DNA, 25 bp, Homo sapien
tgtgtacagttaacagctttctgaa

SEQ ID NO: 1719072 - DNA, 25 bp, Homo sapien
tctactgtagttgcaaaaccaatag

SEQ ID NO: 1719073 - DNA, 25 bp, Homo sapien
ggtgtgaacctcatcattaaacagc

SEQ ID NO: 1719074 - DNA, 25 bp, Homo sapien
ctgaaaatctccatatcgaacagac

SEQ ID NO: 1719075 - DNA, 25 bp, Homo sapien
tttgcttgctcacaatactgaaaat

SEQ ID NO: 1719076 - DNA, 25 bp, Homo sapien
caatactgaaaatctccatatcgaa

SEQ ID NO: 1719077 - DNA, 25 bp, Homo sapien
tactgaaaatctccatatcgaacag

SEQ ID NO: 1719078 - DNA, 25 bp, Homo sapien
tagagtgtactcgtgtaatcaaagc

SEQ ID NO: 1719079 - DNA, 25 bp, Homo sapien
gctagagtgtactcgtgtaatcaaa

SEQ ID NO: 1719080 - DNA, 25 bp, Homo sapien
aggctagagtgtactcgtgtaatca

SEQ ID NO: 1719081 - DNA, 25 bp, Homo sapien
gagtgtactcgtgtaatcaaagctc

SEQ ID NO: 1719082 - DNA, 25 bp, Homo sapien
tcctaggtgaggtaaagctttaaca

SEQ ID NO: 1719083 - DNA, 25 bp, Homo sapien
gagtgagccgatgtgcttggccaac

SEQ ID NO: 1719084 - DNA, 25 bp, Homo sapien
tgtatacacacttactggtacttgt

SEQ ID NO: 1719085 - DNA, 25 bp, Homo sapien
tattaaaacatccttcagagaaggg

SEQ ID NO: 1719086 - DNA, 25 bp, Homo sapien
tctgctgtaccaataataaatgatt

SEQ ID NO: 1719087 - DNA, 25 bp, Homo sapien
tctgaatctttagtcctatatttga

SEQ ID NO: 1719088 - DNA, 25 bp, Homo sapien
gcgcctgaccagtaatctgaatctt

SEQ ID NO: 1719089 - DNA, 25 bp, Homo sapien
tgaaaatctgctgtaccaataataa

SEQ ID NO: 1719090 - DNA, 25 bp, Homo sapien
gacgaatgcataacttgaactttga

SEQ ID NO: 1719091 - DNA, 25 bp, Homo sapien
aaattctgatgtgcgacaatagacg

SEQ ID NO: 1719092 - DNA, 25 bp, Homo sapien
gaatatccaataatacttcccagcc

SEQ ID NO: 1719093 - DNA, 25 bp, Homo sapien
tgaactttgagtggctttgtctgtc

SEQ ID NO: 1719094 - DNA, 25 bp, Homo sapien
aagctgtcaaacagaaatcctttaa

SEQ ID NO: 1719095 - DNA, 25 bp, Homo sapien
gcacctggccccatacttcataatt

SEQ ID NO: 1719096 - DNA, 25 bp, Homo sapien
gcaggacattacttccattatactc

SEQ ID NO: 1719097 - DNA, 25 bp, Homo sapien
ggctaaagacctatgtaagtattaa

SEQ ID NO: 1719098 - DNA, 25 bp, Homo sapien
acttgacataaaatccggcgaaggc

SEQ ID NO: 1719099 - DNA, 25 bp, Homo sapien
caacttgacataaaatccggcgaag

SEQ ID NO: 1719100 - DNA, 25 bp, Homo sapien
gcccttcttgtaaaccaacttgaca

SEQ ID NO: 1719101 - DNA, 25 bp, Homo sapien
ttgacataaaatccggcgaaggcca

SEQ ID NO: 1719102 - DNA, 25 bp, Homo sapien
ccataatttggaatcactaagcatc

SEQ ID NO: 1719103 - DNA, 25 bp, Homo sapien
tttggaatcactaagcatcagtctg

SEQ ID NO: 1719104 - DNA, 25 bp, Homo sapien
taagcatcagtctgtccactagaga

SEQ ID NO: 1719105 - DNA, 25 bp, Homo sapien
gaatcactaagcatcagtctgtcca

SEQ ID NO: 1719106 - DNA, 25 bp, Homo sapien
acaactgatgatatacactcctagc

SEQ ID NO: 1719107 - DNA, 25 bp, Homo sapien
aactgatgatatacactcctagcac

SEQ ID NO: 1719108 - DNA, 25 bp, Homo sapien
aacaactgatgatatacactcctag

SEQ ID NO: 1719109 - DNA, 25 bp, Homo sapien
caactgatgatatacactcctagca

SEQ ID NO: 1719110 - DNA, 25 bp, Homo sapien
ttgcaaatcgaacagcaaatagttt

SEQ ID NO: 1719111 - DNA, 25 bp, Homo sapien
tttgcaaatcgaacagcaaatagtt

SEQ ID NO: 1719112 - DNA, 25 bp, Homo sapien
tgcaaatcgaacagcaaatagtttc

SEQ ID NO: 1719113 - DNA, 25 bp, Homo sapien
ttttgcaaatcgaacagcaaatagt

SEQ ID NO: 1719114 - DNA, 25 bp, Homo sapien
tataatgaaaagtcagtgctggagg

SEQ ID NO: 1719115 - DNA, 25 bp, Homo sapien
tgctggaggaagtcaagaagataac

SEQ ID NO: 1719116 - DNA, 25 bp, Homo sapien
caagaagataacactgctatgagaa

SEQ ID NO: 1719117 - DNA, 25 bp, Homo sapien
ctctaatccacaatgaccaaatgtt

SEQ ID NO: 1719118 - DNA, 25 bp, Homo sapien
tgctcgctcgtgatcatcctccata

SEQ ID NO: 1719119 - DNA, 25 bp, Homo sapien
acagatagagcagtcaccgacactg

SEQ ID NO: 1719120 - DNA, 25 bp, Homo sapien
tcatcctccataaaatctctctgca

SEQ ID NO: 1719121 - DNA, 25 bp, Homo sapien
gagtaggtgcggtgaagaactggac

SEQ ID NO: 1719122 - DNA, 25 bp, Homo sapien
ccgtgaatatctgaaccgagaggtc

SEQ ID NO: 1719123 - DNA, 25 bp, Homo sapien
tctgtcgtggtcatctgtcacataa

SEQ ID NO: 1719124 - DNA, 25 bp, Homo sapien
taatcactctgcaaacgctcatagt

SEQ ID NO: 1719125 - DNA, 25 bp, Homo sapien
tgcgactgaaaactctctgtcgtgg

SEQ ID NO: 1719126 - DNA, 25 bp, Homo sapien
cactgcgcccagcagagatagagaa

SEQ ID NO: 1719127 - DNA, 25 bp, Homo sapien
ccactgcgcccagcagagatagaga

SEQ ID NO: 1719128 - DNA, 25 bp, Homo sapien
tacatacatatccagatagaccaga

SEQ ID NO: 1719129 - DNA, 25 bp, Homo sapien
ggagtatatccaaatgccaataaac

SEQ ID NO: 1719130 - DNA, 25 bp, Homo sapien
tggagcaactatcactttcatacgt

SEQ ID NO: 1719131 - DNA, 25 bp, Homo sapien
tagaccagacagatataagatggac

SEQ ID NO: 1719132 - DNA, 25 bp, Homo sapien
tccaacaagaacaactagaaacgct

SEQ ID NO: 1719133 - DNA, 25 bp, Homo sapien
atgaagtagcttgaggatgaccaac

SEQ ID NO: 1719134 - DNA, 25 bp, Homo sapien
aagtttgaaatcactagagagctgc

SEQ ID NO: 1719135 - DNA, 25 bp, Homo sapien
tgctgagacaaggactccaggagat

SEQ ID NO: 1719136 - DNA, 25 bp, Homo sapien
gccagtactgggtcttgaccaaact

SEQ ID NO: 1719137 - DNA, 25 bp, Homo sapien
cctggccagtactgggtcttgacca

SEQ ID NO: 1719138 - DNA, 25 bp, Homo sapien
tggccagtactgggtcttgaccaaa

SEQ ID NO: 1719139 - DNA, 25 bp, Homo sapien
cagtactgggtcttgaccaaactaa

SEQ ID NO: 1719140 - DNA, 25 bp, Homo sapien
tgcaacagggagtctcctagctcct

SEQ ID NO: 1719141 - DNA, 25 bp, Homo sapien
ggacaatgtcccatatcagttcata

SEQ ID NO: 1719142 - DNA, 25 bp, Homo sapien
tagccaagcttttactggtcagaca

SEQ ID NO: 1719143 - DNA, 25 bp, Homo sapien
tgtttccacaaagaggctcaacaat

SEQ ID NO: 1719144 - DNA, 25 bp, Homo sapien
cttaatgataatgctcattaagttt

SEQ ID NO: 1719145 - DNA, 25 bp, Homo sapien
agtcttaatgataatgctcattaag

SEQ ID NO: 1719146 - DNA, 25 bp, Homo sapien
gtcttaatgataatgctcattaagt

SEQ ID NO: 1719147 - DNA, 25 bp, Homo sapien
gccctgggcatctcgatgtctcaaa

SEQ ID NO: 1719148 - DNA, 25 bp, Homo sapien
gtactctcctaaatttgaaggcttg

SEQ ID NO: 1719149 - DNA, 25 bp, Homo sapien
gatctaaaataaggctctgtactct

SEQ ID NO: 1719150 - DNA, 25 bp, Homo sapien
tgtaaagcagtgtatcgttcaaact

SEQ ID NO: 1719151 - DNA, 25 bp, Homo sapien
ttctgcctcagctcatctgaccatt

SEQ ID NO: 1719152 - DNA, 25 bp, Homo sapien
tctgcctcagctcatctgaccattc

SEQ ID NO: 1719153 - DNA, 25 bp, Homo sapien
tctgttttgtatatagggatgtttc

SEQ ID NO: 1719154 - DNA, 25 bp, Homo sapien
ctagattctgttttgtatataggga

SEQ ID NO: 1719155 - DNA, 25 bp, Homo sapien
ttctagattctgttttgtatatagg

SEQ ID NO: 1719156 - DNA, 25 bp, Homo sapien
tctagattctgttttgtatataggg

SEQ ID NO: 1719157 - DNA, 25 bp, Homo sapien
gaagcacaccagtcctgcatcattg

SEQ ID NO: 1719158 - DNA, 25 bp, Homo sapien
atttcatttgtagtgtgaaggctgc

SEQ ID NO: 1719159 - DNA, 25 bp, Homo sapien
atatgttgtcctacttgacgtgtaa

SEQ ID NO: 1719160 - DNA, 25 bp, Homo sapien
gcatcattgaaatgacatgtgttaa

SEQ ID NO: 1719161 - DNA, 25 bp, Homo sapien
agtataaccaccatgacactgcatc

SEQ ID NO: 1719162 - DNA, 25 bp, Homo sapien
tgcatcagtacagcgagacatttct

SEQ ID NO: 1719163 - DNA, 25 bp, Homo sapien
gattggctgttcaccatcagtataa

SEQ ID NO: 1719164 - DNA, 25 bp, Homo sapien
ctgcaagtaagcgagaaactgggag

SEQ ID NO: 1719165 - DNA, 25 bp, Homo sapien
tgaaacaaactctctacaatctcct

SEQ ID NO: 1719166 - DNA, 25 bp, Homo sapien
aaacataccctcacatcacattaag

SEQ ID NO: 1719167 - DNA, 25 bp, Homo sapien
taaacaggcccgtatctattaaaga

SEQ ID NO: 1719168 - DNA, 25 bp, Homo sapien
gctactgagccacaaacttaacata

SEQ ID NO: 1719169 - DNA, 25 bp, Homo sapien
ggagctctggaaatttatatgccac

SEQ ID NO: 1719170 - DNA, 25 bp, Homo sapien
tctggaaatttatatgccacttcac

SEQ ID NO: 1719171 - DNA, 25 bp, Homo sapien
aggtaggagctctggaaatttatat

SEQ ID NO: 1719172 - DNA, 25 bp, Homo sapien
gccacttcacttttgcttaataata

SEQ ID NO: 1719173 - DNA, 25 bp, Homo sapien
tatcaacatgggtgggctaagttca

SEQ ID NO: 1719174 - DNA, 25 bp, Homo sapien
cagaacaagacatctaagagggtgt

SEQ ID NO: 1719175 - DNA, 25 bp, Homo sapien
tggtttactagagagaacccatttc

SEQ ID NO: 1719176 - DNA, 25 bp, Homo sapien
ttccggcatgtacttgggcacacag

SEQ ID NO: 1719177 - DNA, 25 bp, Homo sapien
aaaagtaattatattgagtaaatag

SEQ ID NO: 1719178 - DNA, 25 bp, Homo sapien
aaagtaattatattgagtaaatagt

SEQ ID NO: 1719179 - DNA, 25 bp, Homo sapien
tgtcaaacatctcacgtctgcattt

SEQ ID NO: 1719180 - DNA, 25 bp, Homo sapien
gcattactacatccttgtcaaacat

SEQ ID NO: 1719181 - DNA, 25 bp, Homo sapien
gaagcattactacatccttgtcaaa

SEQ ID NO: 1719182 - DNA, 25 bp, Homo sapien
gcatttcacattatggtagtaataa

SEQ ID NO: 1719183 - DNA, 25 bp, Homo sapien
gctaggctggagttgtagatttggg

SEQ ID NO: 1719184 - DNA, 25 bp, Homo sapien
gatttgggagtgatcacaagtgact

SEQ ID NO: 1719185 - DNA, 25 bp, Homo sapien
tccccacaacctttaagttcaatgc

SEQ ID NO: 1719186 - DNA, 25 bp, Homo sapien
caagtgactgaattctatggaaata

SEQ ID NO: 1719187 - DNA, 25 bp, Homo sapien
catgctagggtcctcacaaaaggga

SEQ ID NO: 1719188 - DNA, 25 bp, Homo sapien
caagttttagtgtgtcagggaaggc

SEQ ID NO: 1719189 - DNA, 25 bp, Homo sapien
agtgctacggcagggttaaatacca

SEQ ID NO: 1719190 - DNA, 25 bp, Homo sapien
gtaaacagtaatcacagtccagggt

SEQ ID NO: 1719191 - DNA, 25 bp, Homo sapien
caatccttacttgtggtagcaggca

SEQ ID NO: 1719192 - DNA, 25 bp, Homo sapien
tgatcaccgtttggacttggaaatg

SEQ ID NO: 1719193 - DNA, 25 bp, Homo sapien
tagcaggcaagtgtggaaaggaatc

SEQ ID NO: 1719194 - DNA, 25 bp, Homo sapien
ccagcacagtaacacagactatgag

SEQ ID NO: 1719195 - DNA, 25 bp, Homo sapien
tttccatagtctggagtactgaaaa

SEQ ID NO: 1719196 - DNA, 25 bp, Homo sapien
aatctgataaagttcaaagcggctg

SEQ ID NO: 1719197 - DNA, 25 bp, Homo sapien
agttcaaagcggctgagcatgatca

SEQ ID NO: 1719198 - DNA, 25 bp, Homo sapien
gctgagcatgatcatcaggaaatga

SEQ ID NO: 1719199 - DNA, 25 bp, Homo sapien
atttcttctattagagtattgttct

SEQ ID NO: 1719200 - DNA, 25 bp, Homo sapien
ttcttctattagagtattgttctgc

SEQ ID NO: 1719201 - DNA, 25 bp, Homo sapien
gagtattgttctgctgaacaacatc

SEQ ID NO: 1719202 - DNA, 25 bp, Homo sapien
ttaccaattcactatgagccatagg

SEQ ID NO: 1719203 - DNA, 25 bp, Homo sapien
tactcaactgatggataatctctcg

SEQ ID NO: 1719204 - DNA, 25 bp, Homo sapien
ttacctgtccaactccaggactaaa

SEQ ID NO: 1719205 - DNA, 25 bp, Homo sapien
gagccataggcttgatactcaactg

SEQ ID NO: 1719206 - DNA, 25 bp, Homo sapien
ttgaaatgggcaactgcttcgatta

SEQ ID NO: 1719207 - DNA, 25 bp, Homo sapien
ctctccatgccagtctccttgttct

SEQ ID NO: 1719208 - DNA, 25 bp, Homo sapien
tgggcaactgcttcgattacactct

SEQ ID NO: 1719209 - DNA, 25 bp, Homo sapien
aactgcttcgattacactctccatg

SEQ ID NO: 1719210 - DNA, 25 bp, Homo sapien
aagcagagctctcatatactgctgg

SEQ ID NO: 1719211 - DNA, 25 bp, Homo sapien
gggttgatttggcagtctaaatccg

SEQ ID NO: 1719212 - DNA, 25 bp, Homo sapien
taaatccgagttctacatgcatctg

SEQ ID NO: 1719213 - DNA, 25 bp, Homo sapien
ggtgttaagctacaactattttcag

SEQ ID NO: 1719214 - DNA, 25 bp, Homo sapien
gcctcgtcctgttaatccaggtttc

SEQ ID NO: 1719215 - DNA, 25 bp, Homo sapien
catacatgcctcgtcctgttaatcc

SEQ ID NO: 1719216 - DNA, 25 bp, Homo sapien
gttcatacatgcctcgtcctgttaa

SEQ ID NO: 1719217 - DNA, 25 bp, Homo sapien
catgcctcgtcctgttaatccaggt

SEQ ID NO: 1719218 - DNA, 25 bp, Homo sapien
ctgggacgagaagtgcatgacacca

SEQ ID NO: 1719219 - DNA, 25 bp, Homo sapien
gtagctgggacgagaagtgcatgac

SEQ ID NO: 1719220 - DNA, 25 bp, Homo sapien
taagtttgaactctatgacttcatc

SEQ ID NO: 1719221 - DNA, 25 bp, Homo sapien
gtttgaactctatgacttcatcaaa

SEQ ID NO: 1719222 - DNA, 25 bp, Homo sapien
tcttttcaatttccgttgcgcttct

SEQ ID NO: 1719223 - DNA, 25 bp, Homo sapien
cttttcaatttccgttgcgcttctt

SEQ ID NO: 1719224 - DNA, 25 bp, Homo sapien
gtcttttcaatttccgttgcgcttc

SEQ ID NO: 1719225 - DNA, 25 bp, Homo sapien
ttttcaatttccgttgcgcttcttc

SEQ ID NO: 1719226 - DNA, 25 bp, Homo sapien
cccctagaaaggtcttaagatctga

SEQ ID NO: 1719227 - DNA, 25 bp, Homo sapien
caacccagaggacttagcacaaact

SEQ ID NO: 1719228 - DNA, 25 bp, Homo sapien
taaaaagagccacgaaagtagcagc

SEQ ID NO: 1719229 - DNA, 25 bp, Homo sapien
gcagcagtacagaagaaagtctatc

SEQ ID NO: 1719230 - DNA, 25 bp, Homo sapien
ggaggcaacaccggaggtgggagtg

SEQ ID NO: 1719231 - DNA, 25 bp, Homo sapien
tggaggcaacaccggaggtgggagt

SEQ ID NO: 1719232 - DNA, 25 bp, Homo sapien
tgcaaaatgttaaccaggcttgcaa

SEQ ID NO: 1719233 - DNA, 25 bp, Homo sapien
ctgcaaaatgttaaccaggcttgca

SEQ ID NO: 1719234 - DNA, 25 bp, Homo sapien
gcaaaatgttaaccaggcttgcaaa

SEQ ID NO: 1719235 - DNA, 25 bp, Homo sapien
actctgaccaggcatatccattatg

SEQ ID NO: 1719236 - DNA, 25 bp, Homo sapien
ccatgatgcacaacatgacatctga

SEQ ID NO: 1719237 - DNA, 25 bp, Homo sapien
ggcatatccattatgttccacagcc

SEQ ID NO: 1719238 - DNA, 25 bp, Homo sapien
tgttcccatgatgcacaacatgaca

SEQ ID NO: 1719239 - DNA, 25 bp, Homo sapien
tgggactgaggtaataacaaccatg

SEQ ID NO: 1719240 - DNA, 25 bp, Homo sapien
ttaactagctataggaccgtaagtc

SEQ ID NO: 1719241 - DNA, 25 bp, Homo sapien
caatctaggagagaacaactgccca

SEQ ID NO: 1719242 - DNA, 25 bp, Homo sapien
ggttccagacttgccacttaactag

SEQ ID NO: 1719243 - DNA, 25 bp, Homo sapien
tcatcatctgagaaagacaaacttt

SEQ ID NO: 1719244 - DNA, 25 bp, Homo sapien
atgcccggccttgaagtactaattt

SEQ ID NO: 1719245 - DNA, 25 bp, Homo sapien
taaaattacaccagctgtgaccagc

SEQ ID NO: 1719246 - DNA, 25 bp, Homo sapien
gacactacctaatttctctaaggac

SEQ ID NO: 1719247 - DNA, 25 bp, Homo sapien
gctcttccgtgacattctctaaatg

SEQ ID NO: 1719248 - DNA, 25 bp, Homo sapien
aaatgttactacatgctcttccgtg

SEQ ID NO: 1719249 - DNA, 25 bp, Homo sapien
ttttcttcttgtagtgccatgccaa

SEQ ID NO: 1719250 - DNA, 25 bp, Homo sapien
tagtgccatgccaattaaatgtaac

SEQ ID NO: 1719251 - DNA, 25 bp, Homo sapien
tgtcccctggtagtataattctcac

SEQ ID NO: 1719252 - DNA, 25 bp, Homo sapien
gctggaaagcgaggtggtactcaaa

SEQ ID NO: 1719253 - DNA, 25 bp, Homo sapien
taaactcccactgaccaaaatgggc

SEQ ID NO: 1719254 - DNA, 25 bp, Homo sapien
gccacaattgcaggtaactatcaga

SEQ ID NO: 1719255 - DNA, 25 bp, Homo sapien
gattttggtgctgccattctggaaa

SEQ ID NO: 1719256 - DNA, 25 bp, Homo sapien
ttttcttgattttggtgctgccatt

SEQ ID NO: 1719257 - DNA, 25 bp, Homo sapien
gctgccattctggaaaaatgtccct

SEQ ID NO: 1719258 - DNA, 25 bp, Homo sapien
tgctgccattctggaaaaatgtccc

SEQ ID NO: 1719259 - DNA, 25 bp, Homo sapien
ggagaattttttggcgcttcaccag

SEQ ID NO: 1719260 - DNA, 25 bp, Homo sapien
ccagcatagctagtatgctaggaga

SEQ ID NO: 1719261 - DNA, 25 bp, Homo sapien
ccgaatcatgtctttgtggacttct

SEQ ID NO: 1719262 - DNA, 25 bp, Homo sapien
cttcaatatccaccgaatcatgtct

SEQ ID NO: 1719263 - DNA, 25 bp, Homo sapien
cacgggactggtaggtgaactctcc

SEQ ID NO: 1719264 - DNA, 25 bp, Homo sapien
tgccacgggactggtaggtgaactc

SEQ ID NO: 1719265 - DNA, 25 bp, Homo sapien
ctggtaggtgaactctccctcatct

SEQ ID NO: 1719266 - DNA, 25 bp, Homo sapien
ggactggtaggtgaactctccctca

SEQ ID NO: 1719267 - DNA, 25 bp, Homo sapien
atttaaatgttgtgagtaactggca

SEQ ID NO: 1719268 - DNA, 25 bp, Homo sapien
gtaactggcaacttaatgtagataa

SEQ ID NO: 1719269 - DNA, 25 bp, Homo sapien
ttagatgctaaaacgcacatttttt

SEQ ID NO: 1719270 - DNA, 25 bp, Homo sapien
tccattcaattagacaattagatgc

SEQ ID NO: 1719271 - DNA, 25 bp, Homo sapien
gatcttttctctgcgcagtctggca

SEQ ID NO: 1719272 - DNA, 25 bp, Homo sapien
tcttttctctgcgcagtctggcaat

SEQ ID NO: 1719273 - DNA, 25 bp, Homo sapien
cttttctctgcgcagtctggcaatc

SEQ ID NO: 1719274 - DNA, 25 bp, Homo sapien
ttttctctgcgcagtctggcaatct

SEQ ID NO: 1719275 - DNA, 25 bp, Homo sapien
gaggcatccagttctaatgtctgct

SEQ ID NO: 1719276 - DNA, 25 bp, Homo sapien
ctatgatcaagaacagcagaggttg

SEQ ID NO: 1719277 - DNA, 25 bp, Homo sapien
aataaaatgccgctgcatttcagac

SEQ ID NO: 1719278 - DNA, 25 bp, Homo sapien
taaaatgccgctgcatttcagacat

SEQ ID NO: 1719279 - DNA, 25 bp, Homo sapien
tgctcctcttgacacaatatacatg

SEQ ID NO: 1719280 - DNA, 25 bp, Homo sapien
catgtaacgaattgtctttgttcag

SEQ ID NO: 1719281 - DNA, 25 bp, Homo sapien
gggcccagtgctgtaagtgtcatat

SEQ ID NO: 1719282 - DNA, 25 bp, Homo sapien
gctgccaagaccattgccctgcttt

SEQ ID NO: 1719283 - DNA, 25 bp, Homo sapien
ggctgccttatgtgcgttcagggca

SEQ ID NO: 1719284 - DNA, 25 bp, Homo sapien
tacagcgaataatcacatcagagcc

SEQ ID NO: 1719285 - DNA, 25 bp, Homo sapien
ttcagggcagctgggttaaaatgat

SEQ ID NO: 1719286 - DNA, 25 bp, Homo sapien
gacagactgcctaacaacactcata

SEQ ID NO: 1719287 - DNA, 25 bp, Homo sapien
atgtgcccacagctactagtgtgtg

SEQ ID NO: 1719288 - DNA, 25 bp, Homo sapien
tccacaagacagatcagggtgcatg

SEQ ID NO: 1719289 - DNA, 25 bp, Homo sapien
ccaacaatgggcatgcataatgtgc

SEQ ID NO: 1719290 - DNA, 25 bp, Homo sapien
ccacagctactagtgtgtgttccac

SEQ ID NO: 1719291 - DNA, 25 bp, Homo sapien
caccaaggtagaacaaattcaggac

SEQ ID NO: 1719292 - DNA, 25 bp, Homo sapien
catgataactgggtgagcatagttc

SEQ ID NO: 1719293 - DNA, 25 bp, Homo sapien
tcaggacatctcatcacagggagcc

SEQ ID NO: 1719294 - DNA, 25 bp, Homo sapien
ggaatcaaaagttgtccaccctgga

SEQ ID NO: 1719295 - DNA, 25 bp, Homo sapien
tcgctgttctttagcttgaacggaa

SEQ ID NO: 1719296 - DNA, 25 bp, Homo sapien
taagcgtaatctctgttgccttcgc

SEQ ID NO: 1719297 - DNA, 25 bp, Homo sapien
gaattctccgttttctacatcatag

SEQ ID NO: 1719298 - DNA, 25 bp, Homo sapien
tacatcatagctcgtatgtaagcgt

SEQ ID NO: 1719299 - DNA, 25 bp, Homo sapien
tgtgtcatccttgtgaaagagccat

SEQ ID NO: 1719300 - DNA, 25 bp, Homo sapien
tgtcatccttgtgaaagagccatgc

SEQ ID NO: 1719301 - DNA, 25 bp, Homo sapien
ccttgtgaaagagccatgcttatct

SEQ ID NO: 1719302 - DNA, 25 bp, Homo sapien
tcatccttgtgaaagagccatgctt

SEQ ID NO: 1719303 - DNA, 25 bp, Homo sapien
tctttcctaagaaactgtaatgctt

SEQ ID NO: 1719304 - DNA, 25 bp, Homo sapien
tccactgagtcagatttggttggtc

SEQ ID NO: 1719305 - DNA, 25 bp, Homo sapien
tattgttctaatccactgagtcaga

SEQ ID NO: 1719306 - DNA, 25 bp, Homo sapien
atattgttctaatccactgagtcag

SEQ ID NO: 1719307 - DNA, 25 bp, Homo sapien
ccaacagtaaggtgagttagcccac

SEQ ID NO: 1719308 - DNA, 25 bp, Homo sapien
tattgctctagttgaccaaggccct

SEQ ID NO: 1719309 - DNA, 25 bp, Homo sapien
cccacaaggtcataagtgcagtgca

SEQ ID NO: 1719310 - DNA, 25 bp, Homo sapien
catggtctatgaaacttgggaagcc

SEQ ID NO: 1719311 - DNA, 25 bp, Homo sapien
gacgaaaatcaggcctgaacccttc

SEQ ID NO: 1719312 - DNA, 25 bp, Homo sapien
ttaggacgaaaatcaggcctgaacc

SEQ ID NO: 1719313 - DNA, 25 bp, Homo sapien
aggacgaaaatcaggcctgaaccct

SEQ ID NO: 1719314 - DNA, 25 bp, Homo sapien
taggacgaaaatcaggcctgaaccc

SEQ ID NO: 1719315 - DNA, 25 bp, Homo sapien
ccaacacattatgggaacacgagga

SEQ ID NO: 1719316 - DNA, 25 bp, Homo sapien
ctttggatggtgtacgcgcagctac

SEQ ID NO: 1719317 - DNA, 25 bp, Homo sapien
ccaccttgtaggtagcagttccaaa

SEQ ID NO: 1719318 - DNA, 25 bp, Homo sapien
aacacgaggatcctcttcattggga

SEQ ID NO: 1719319 - DNA, 25 bp, Homo sapien
tgaatgcttgtgacttatagagaaa

SEQ ID NO: 1719320 - DNA, 25 bp, Homo sapien
caatgaatgcttgtgacttatagag

SEQ ID NO: 1719321 - DNA, 25 bp, Homo sapien
gcttgtgacttatagagaaacagct

SEQ ID NO: 1719322 - DNA, 25 bp, Homo sapien
tgtgacttatagagaaacagctgta

SEQ ID NO: 1719323 - DNA, 25 bp, Homo sapien
aggaccaaacaatggtttatcttca

SEQ ID NO: 1719324 - DNA, 25 bp, Homo sapien
ctgcgcccggcctcctgaagtttat

SEQ ID NO: 1719325 - DNA, 25 bp, Homo sapien
tgcgcccggcctcctgaagtttatt

SEQ ID NO: 1719326 - DNA, 25 bp, Homo sapien
cacaaacattactttttaatatcct

SEQ ID NO: 1719327 - DNA, 25 bp, Homo sapien
ctttttaatatccttacagaaaatg

SEQ ID NO: 1719328 - DNA, 25 bp, Homo sapien
acaggtacatgccacgccaccactc

SEQ ID NO: 1719329 - DNA, 25 bp, Homo sapien
tcactatactgccaggctgcaattt

SEQ ID NO: 1719330 - DNA, 25 bp, Homo sapien
caccactcctagccaattttaaaat

SEQ ID NO: 1719331 - DNA, 25 bp, Homo sapien
cactatactgccaggctgcaatttt

SEQ ID NO: 1719332 - DNA, 25 bp, Homo sapien
gaggtctctaactcacagtacatgg

SEQ ID NO: 1719333 - DNA, 25 bp, Homo sapien
gcagtgattctacaagtctggacca

SEQ ID NO: 1719334 - DNA, 25 bp, Homo sapien
gcttagggtactctaggcagaggaa

SEQ ID NO: 1719335 - DNA, 25 bp, Homo sapien
cagtacatggttcagagggctttct

SEQ ID NO: 1719336 - DNA, 25 bp, Homo sapien
tcaggaatgctagttcagagcacag

SEQ ID NO: 1719337 - DNA, 25 bp, Homo sapien
gatgcggatgcagtatttctctatg

SEQ ID NO: 1719338 - DNA, 25 bp, Homo sapien
tctcaatgacatgcctctaacacag

SEQ ID NO: 1719339 - DNA, 25 bp, Homo sapien
acactcccaagatgccagtgcaggc

SEQ ID NO: 1719340 - DNA, 25 bp, Homo sapien
gcaaatctcgtcaatgacctaagac

SEQ ID NO: 1719341 - DNA, 25 bp, Homo sapien
aaatctcgtcaatgacctaagacag

SEQ ID NO: 1719342 - DNA, 25 bp, Homo sapien
cggcaaatctcgtcaatgacctaag

SEQ ID NO: 1719343 - DNA, 25 bp, Homo sapien
atctcgtcaatgacctaagacagtc

SEQ ID NO: 1719344 - DNA, 25 bp, Homo sapien
tgagagaagctgtaccattaaaaac

SEQ ID NO: 1719345 - DNA, 25 bp, Homo sapien
agagaagctgtaccattaaaaacaa

SEQ ID NO: 1719346 - DNA, 25 bp, Homo sapien
gagagaagctgtaccattaaaaaca

SEQ ID NO: 1719347 - DNA, 25 bp, Homo sapien
tatgcatggaagttcctcatggctg

SEQ ID NO: 1719348 - DNA, 25 bp, Homo sapien
gaaacatgtcaatatctaatatgca

SEQ ID NO: 1719349 - DNA, 25 bp, Homo sapien
atgaaacatgtcaatatctaatatg

SEQ ID NO: 1719350 - DNA, 25 bp, Homo sapien
taaatgaaacatgtcaatatctaat

SEQ ID NO: 1719351 - DNA, 25 bp, Homo sapien
tgaccacagggctgtatctgccaga

SEQ ID NO: 1719352 - DNA, 25 bp, Homo sapien
tcagaggacgtctcgataaccaggt

SEQ ID NO: 1719353 - DNA, 25 bp, Homo sapien
ggtccagagaataaaggcacagcac

SEQ ID NO: 1719354 - DNA, 25 bp, Homo sapien
tctgctgctaagtagtgtgaccaca

SEQ ID NO: 1719355 - DNA, 25 bp, Homo sapien
cactgcaacgcaggaaatgcaagca

SEQ ID NO: 1719356 - DNA, 25 bp, Homo sapien
tgatgtgtgccatagtaaccagatg

SEQ ID NO: 1719357 - DNA, 25 bp, Homo sapien
cagtgccaaggctgatccctgaaaa

SEQ ID NO: 1719358 - DNA, 25 bp, Homo sapien
tgatccctgaaaaatcctgacactg

SEQ ID NO: 1719359 - DNA, 25 bp, Homo sapien
cttcccgtatactggtgaagtgttt

SEQ ID NO: 1719360 - DNA, 25 bp, Homo sapien
tcccgtatactggtgaagtgtttta

SEQ ID NO: 1719361 - DNA, 25 bp, Homo sapien
cccgtatactggtgaagtgttttat

SEQ ID NO: 1719362 - DNA, 25 bp, Homo sapien
cgtatactggtgaagtgttttatac

SEQ ID NO: 1719363 - DNA, 25 bp, Homo sapien
agatgccagccggatggtatttctt

SEQ ID NO: 1719364 - DNA, 25 bp, Homo sapien
tccacagatgccagccggatggtat

SEQ ID NO: 1719365 - DNA, 25 bp, Homo sapien
cagccggatggtatttctttcaagg

SEQ ID NO: 1719366 - DNA, 25 bp, Homo sapien
acagatgccagccggatggtatttc

SEQ ID NO: 1719367 - DNA, 25 bp, Homo sapien
tctttacgggagaagggctttgcag

SEQ ID NO: 1719368 - DNA, 25 bp, Homo sapien
ccttttcaaatctgaggaaccttgt

SEQ ID NO: 1719369 - DNA, 25 bp, Homo sapien
catttacacagaagtttaacagtca

SEQ ID NO: 1719370 - DNA, 25 bp, Homo sapien
gctggagtaaaggattactaactct

SEQ ID NO: 1719371 - DNA, 25 bp, Homo sapien
tgaggttgtttggtagggaaagata

SEQ ID NO: 1719372 - DNA, 25 bp, Homo sapien
ttgtttggtagggaaagatagctac

SEQ ID NO: 1719373 - DNA, 25 bp, Homo sapien
tttggtagggaaagatagctacata

SEQ ID NO: 1719374 - DNA, 25 bp, Homo sapien
gtagggaaagatagctacataaatg

SEQ ID NO: 1719375 - DNA, 25 bp, Homo sapien
ccttctagatatcttttaacttcac

SEQ ID NO: 1719376 - DNA, 25 bp, Homo sapien
cttctagatatcttttaacttcact

SEQ ID NO: 1719377 - DNA, 25 bp, Homo sapien
tttaacttcactgttacggcaccaa

SEQ ID NO: 1719378 - DNA, 25 bp, Homo sapien
accttctagatatcttttaacttca

SEQ ID NO: 1719379 - DNA, 25 bp, Homo sapien
ggatctggtagagcacactttacta

SEQ ID NO: 1719380 - DNA, 25 bp, Homo sapien
tgaatgacaagtatgtggagcctca

SEQ ID NO: 1719381 - DNA, 25 bp, Homo sapien
tgactggccatgatttgactgatag

SEQ ID NO: 1719382 - DNA, 25 bp, Homo sapien
tcactaaaggcttgagaagtcagtt

SEQ ID NO: 1719383 - DNA, 25 bp, Homo sapien
caaataggacagataatctctagtc

SEQ ID NO: 1719384 - DNA, 25 bp, Homo sapien
tgagccaatgtgctcggctagacag

SEQ ID NO: 1719385 - DNA, 25 bp, Homo sapien
gggacagacatgctagggctttaac

SEQ ID NO: 1719386 - DNA, 25 bp, Homo sapien
tatttctggatgtgtaaaagcaaac

SEQ ID NO: 1719387 - DNA, 25 bp, Homo sapien
ttaatttgttagattctcttggata

SEQ ID NO: 1719388 - DNA, 25 bp, Homo sapien
atcctctggaaggtttattaatttg

SEQ ID NO: 1719389 - DNA, 25 bp, Homo sapien
taatttgttagattctcttggatat

SEQ ID NO: 1719390 - DNA, 25 bp, Homo sapien
attaatttgttagattctcttggat

SEQ ID NO: 1719391 - DNA, 25 bp, Homo sapien
taaaggactacagatatgatttctc

SEQ ID NO: 1719392 - DNA, 25 bp, Homo sapien
cagggaatgttcaatgctaacagca

SEQ ID NO: 1719393 - DNA, 25 bp, Homo sapien
attctttgtagagaggtgtttccag

SEQ ID NO: 1719394 - DNA, 25 bp, Homo sapien
tgtttccagtggcagggaatgttca

SEQ ID NO: 1719395 - DNA, 25 bp, Homo sapien
tcctactcccattccatgtcttatt

SEQ ID NO: 1719396 - DNA, 25 bp, Homo sapien
tatgtagtatagagtactacagatg

SEQ ID NO: 1719397 - DNA, 25 bp, Homo sapien
gtcttattctgaaacatagtgaaat

SEQ ID NO: 1719398 - DNA, 25 bp, Homo sapien
actacagatgttattcattttttga

SEQ ID NO: 1719399 - DNA, 25 bp, Homo sapien
ttctttatgctgcttgtatgttaaa

SEQ ID NO: 1719400 - DNA, 25 bp, Homo sapien
tattattctttatgctgcttgtatg

SEQ ID NO: 1719401 - DNA, 25 bp, Homo sapien
cctcagcctcccctattatattatt

SEQ ID NO: 1719402 - DNA, 25 bp, Homo sapien
cagcctcccctattatattattctt

SEQ ID NO: 1719403 - DNA, 25 bp, Homo sapien
gataaacggtaccactgccatataa

SEQ ID NO: 1719404 - DNA, 25 bp, Homo sapien
cactcaaaagaatcagtaactggag

SEQ ID NO: 1719405 - DNA, 25 bp, Homo sapien
tctaaagagtggctaaagagctagt

SEQ ID NO: 1719406 - DNA, 25 bp, Homo sapien
aattctgcaatatcaagtaaagcca

SEQ ID NO: 1719407 - DNA, 25 bp, Homo sapien
agcagagatccgcacacaaggcaca

SEQ ID NO: 1719408 - DNA, 25 bp, Homo sapien
gggctctgctcttatcaccacctga

SEQ ID NO: 1719409 - DNA, 25 bp, Homo sapien
tcttatcaccacctgatttcgggca

SEQ ID NO: 1719410 - DNA, 25 bp, Homo sapien
gatccgcacacaaggcacagagttg

SEQ ID NO: 1719411 - DNA, 25 bp, Homo sapien
cacaggagtaggtgtgagctgtgca

SEQ ID NO: 1719412 - DNA, 25 bp, Homo sapien
ccagttcagtctggcagcagtaact

SEQ ID NO: 1719413 - DNA, 25 bp, Homo sapien
ccagagccacaggagtaggtgtgag

SEQ ID NO: 1719414 - DNA, 25 bp, Homo sapien
gagccacaggagtaggtgtgagctg

SEQ ID NO: 1719415 - DNA, 25 bp, Homo sapien
tgaaatggcttacaccttgcccaga

SEQ ID NO: 1719416 - DNA, 25 bp, Homo sapien
tagtcactaatcacaagctggcatg

SEQ ID NO: 1719417 - DNA, 25 bp, Homo sapien
agatgtgaggcgacaaggagctcca

SEQ ID NO: 1719418 - DNA, 25 bp, Homo sapien
ggatacaacctatgctccagaggag

SEQ ID NO: 1719419 - DNA, 25 bp, Homo sapien
tctccccatagtcatcaaggtaagg

SEQ ID NO: 1719420 - DNA, 25 bp, Homo sapien
aaatagcacctgacattcccgtact

SEQ ID NO: 1719421 - DNA, 25 bp, Homo sapien
aaaatagcacctgacattcccgtac

SEQ ID NO: 1719422 - DNA, 25 bp, Homo sapien
tgagtccctggtcggtctccccata

SEQ ID NO: 1719423 - DNA, 25 bp, Homo sapien
ccttggaagactccacagataacac

SEQ ID NO: 1719424 - DNA, 25 bp, Homo sapien
cgtcaccacatacggaagggcgctg

SEQ ID NO: 1719425 - DNA, 25 bp, Homo sapien
tcaggacgtcaccacatacggaagg

SEQ ID NO: 1719426 - DNA, 25 bp, Homo sapien
tagctaactcaggatgggttcttac

SEQ ID NO: 1719427 - DNA, 25 bp, Homo sapien
tcctgatgttcctcatggcattctg

SEQ ID NO: 1719428 - DNA, 25 bp, Homo sapien
aagttgcactctgtcctattctctt

SEQ ID NO: 1719429 - DNA, 25 bp, Homo sapien
tgggttgagaggctaaaactaccaa

SEQ ID NO: 1719430 - DNA, 25 bp, Homo sapien
tattggttttagactccctgcaaca

SEQ ID NO: 1719431 - DNA, 25 bp, Homo sapien
cagtctcagtgaagcaatcaaatgt

SEQ ID NO: 1719432 - DNA, 25 bp, Homo sapien
tgaccctttgccaagagcaggtaaa

SEQ ID NO: 1719433 - DNA, 25 bp, Homo sapien
tgaatcgctctttgcataaatgtaa

SEQ ID NO: 1719434 - DNA, 25 bp, Homo sapien
tctgaatcttcttgaatcgctcttt

SEQ ID NO: 1719435 - DNA, 25 bp, Homo sapien
gaatcttcttgaatcgctctttgca

SEQ ID NO: 1719436 - DNA, 25 bp, Homo sapien
ccaaccagtgtctgattggcttcct

SEQ ID NO: 1719437 - DNA, 25 bp, Homo sapien
atttatttccaaattcagcagaact

SEQ ID NO: 1719438 - DNA, 25 bp, Homo sapien
atttccaaattcagcagaacttctt

SEQ ID NO: 1719439 - DNA, 25 bp, Homo sapien
caagtttgtgttttttggtggtgca

SEQ ID NO: 1719440 - DNA, 25 bp, Homo sapien
agtttgtgttttttggtggtgcaat

SEQ ID NO: 1719441 - DNA, 25 bp, Homo sapien
gagtcagtcccacgcaagaatggcg

SEQ ID NO: 1719442 - DNA, 25 bp, Homo sapien
ttgagtcagcttcggacccacggtt

SEQ ID NO: 1719443 - DNA, 25 bp, Homo sapien
cactaagtgagccagcaaggaagca

SEQ ID NO: 1719444 - DNA, 25 bp, Homo sapien
aagtatgacccaacagaccacagag

SEQ ID NO: 1719445 - DNA, 25 bp, Homo sapien
actttttacatatgatacattccaa

SEQ ID NO: 1719446 - DNA, 25 bp, Homo sapien
aattttacaagttgtccacagatat

SEQ ID NO: 1719447 - DNA, 25 bp, Homo sapien
cagggaggacccgaatgcattcttc

SEQ ID NO: 1719448 - DNA, 25 bp, Homo sapien
gaaaatcgtggaccaagacagggct

SEQ ID NO: 1719449 - DNA, 25 bp, Homo sapien
cccagaagtctgtacaacggaatgc

SEQ ID NO: 1719450 - DNA, 25 bp, Homo sapien
tccacgactggctaaaaagatggct

SEQ ID NO: 1719451 - DNA, 25 bp, Homo sapien
tgagaaccacggtgaaagtgctgct

SEQ ID NO: 1719452 - DNA, 25 bp, Homo sapien
taggcccacaagtgtaactatgctg

SEQ ID NO: 1719453 - DNA, 25 bp, Homo sapien
tcgttgaggccaaggaatgatccat

SEQ ID NO: 1719454 - DNA, 25 bp, Homo sapien
ccaagatgtttggacaccctgtcag

SEQ ID NO: 1719455 - DNA, 25 bp, Homo sapien
caagattgacaggttggccgtttgc

SEQ ID NO: 1719456 - DNA, 25 bp, Homo sapien
catgccctcggtcactgagtctgga

SEQ ID NO: 1719457 - DNA, 25 bp, Homo sapien
tctcctgtggctcatcggtggaagc

SEQ ID NO: 1719458 - DNA, 25 bp, Homo sapien
aatcagacatgagtccaccctttgg

SEQ ID NO: 1719459 - DNA, 25 bp, Homo sapien
tttcctggtcacacggctggctaag

SEQ ID NO: 1719460 - DNA, 25 bp, Homo sapien
cacatattaaagtggcacagtatcc

SEQ ID NO: 1719461 - DNA, 25 bp, Homo sapien
ttggcaccaagtctgccacacagtg

SEQ ID NO: 1719462 - DNA, 25 bp, Homo sapien
tcactgtgctcatcaaaataatgga

SEQ ID NO: 1719463 - DNA, 25 bp, Homo sapien
gaaaatctcacacccatgaagcagt

SEQ ID NO: 1719464 - DNA, 25 bp, Homo sapien
ccctggcaactgttctctggattta

SEQ ID NO: 1719465 - DNA, 25 bp, Homo sapien
cctagttccaaaagacttccatcag

SEQ ID NO: 1719466 - DNA, 25 bp, Homo sapien
cactgcacccgaccgacaattgttt

SEQ ID NO: 1719467 - DNA, 25 bp, Homo sapien
agcgcctagaatagcagctggcagg

SEQ ID NO: 1719468 - DNA, 25 bp, Homo sapien
gaatgaatgaaaggtcaagtcagga

SEQ ID NO: 1719469 - DNA, 25 bp, Homo sapien
tatattccctattgacttggtcttg

SEQ ID NO: 1719470 - DNA, 25 bp, Homo sapien
tctaggccataagatcgaggaaggc

SEQ ID NO: 1719471 - DNA, 25 bp, Homo sapien
taaagtacctcttgcatacattcgg

SEQ ID NO: 1719472 - DNA, 25 bp, Homo sapien
catcacttctaagggaaaccttaca

SEQ ID NO: 1719473 - DNA, 25 bp, Homo sapien
tgtttcccagcgatgttaaagtacc

SEQ ID NO: 1719474 - DNA, 25 bp, Homo sapien
tattcacagtcggacaaccagcatt

SEQ ID NO: 1719475 - DNA, 25 bp, Homo sapien
ccggtcttgaccgtgccataggcag

SEQ ID NO: 1719476 - DNA, 25 bp, Homo sapien
gcgatgccggcaccggtcttgaccg

SEQ ID NO: 1719477 - DNA, 25 bp, Homo sapien
cggcaccggtcttgaccgtgccata

SEQ ID NO: 1719478 - DNA, 25 bp, Homo sapien
ggtcttgaccgtgccataggcagcg

SEQ ID NO: 1719479 - DNA, 25 bp, Homo sapien
ctgatgtcgtcattcggggagctgg

SEQ ID NO: 1719480 - DNA, 25 bp, Homo sapien
tcgtcattcggggagctggcgatga

SEQ ID NO: 1719481 - DNA, 25 bp, Homo sapien
tgtcgtcattcggggagctggcgat

SEQ ID NO: 1719482 - DNA, 25 bp, Homo sapien
gatgtcgtcattcggggagctggcg

SEQ ID NO: 1719483 - DNA, 25 bp, Homo sapien
aggccggcgctagctggaggcagct

SEQ ID NO: 1719484 - DNA, 25 bp, Homo sapien
ggccggcgctagctggaggcagctc

SEQ ID NO: 1719485 - DNA, 25 bp, Homo sapien
caggccggcgctagctggaggcagc

SEQ ID NO: 1719486 - DNA, 25 bp, Homo sapien
gatgagggcaacgacgagaccgtac

SEQ ID NO: 1719487 - DNA, 25 bp, Homo sapien
caagatgtctatggcaaagccggct

SEQ ID NO: 1719488 - DNA, 25 bp, Homo sapien
gcgtcccccaagatgtctatggcaa

SEQ ID NO: 1719489 - DNA, 25 bp, Homo sapien
aacgacgagaccgtacaggccgagc

SEQ ID NO: 1719490 - DNA, 25 bp, Homo sapien
accggcactaggacgctgcgctgcg

SEQ ID NO: 1719491 - DNA, 25 bp, Homo sapien
aagatcaactactgggggccgcggt

SEQ ID NO: 1719492 - DNA, 25 bp, Homo sapien
aggccagggcaacagacaaccggca

SEQ ID NO: 1719493 - DNA, 25 bp, Homo sapien
aactctaagtcatccgaatacacag

SEQ ID NO: 1719494 - DNA, 25 bp, Homo sapien
atctgtcccccgtggtcttccaagt

SEQ ID NO: 1719495 - DNA, 25 bp, Homo sapien
aatctgtcccccgtggtcttccaag

SEQ ID NO: 1719496 - DNA, 25 bp, Homo sapien
tgtcccccgtggtcttccaagtgct

SEQ ID NO: 1719497 - DNA, 25 bp, Homo sapien
tctgtcccccgtggtcttccaagtg

SEQ ID NO: 1719498 - DNA, 25 bp, Homo sapien
tttttaccacaatagtttgaagcag

SEQ ID NO: 1719499 - DNA, 25 bp, Homo sapien
ggagggtgattatattgctttgtaa

SEQ ID NO: 1719500 - DNA, 25 bp, Homo sapien
ccacaatagtttgaagcagtaaggg

SEQ ID NO: 1719501 - DNA, 25 bp, Homo sapien
gctttgtaatggtttgtgatacttg

SEQ ID NO: 1719502 - DNA, 25 bp, Homo sapien
tgtaatttccattaaattcgtaaca

SEQ ID NO: 1719503 - DNA, 25 bp, Homo sapien
ggtataacactaaagcatttttgct

SEQ ID NO: 1719504 - DNA, 25 bp, Homo sapien
ttttgctattttcgtcatgcctttg

SEQ ID NO: 1719505 - DNA, 25 bp, Homo sapien
tattttcgtcatgcctttgagactg

SEQ ID NO: 1719506 - DNA, 25 bp, Homo sapien
atgttaggccaatcaccggacgcgt

SEQ ID NO: 1719507 - DNA, 25 bp, Homo sapien
tctaccaaagtagacgcggctcctg

SEQ ID NO: 1719508 - DNA, 25 bp, Homo sapien
agttgaaagcatacaggactccccg

SEQ ID NO: 1719509 - DNA, 25 bp, Homo sapien
gtatggaaatcccaacaccctgcgg

SEQ ID NO: 1719510 - DNA, 25 bp, Homo sapien
ggaggcctgcgagtttctaaccttg

SEQ ID NO: 1719511 - DNA, 25 bp, Homo sapien
tgttcttataaacaaacccacatgt

SEQ ID NO: 1719512 - DNA, 25 bp, Homo sapien
aaaaccggaggcatgcaagcggctc

SEQ ID NO: 1719513 - DNA, 25 bp, Homo sapien
tagtagcggatctccggcctgtaag

SEQ ID NO: 1719514 - DNA, 25 bp, Homo sapien
tatgaactgtgctctcagcggagaa

SEQ ID NO: 1719515 - DNA, 25 bp, Homo sapien
ggaatctgccacacggtatgaactg

SEQ ID NO: 1719516 - DNA, 25 bp, Homo sapien
caatttaaacgatggaggctgggaa

SEQ ID NO: 1719517 - DNA, 25 bp, Homo sapien
cagatctgagcgaagcatgcgaggc

SEQ ID NO: 1719518 - DNA, 25 bp, Homo sapien
tttcaagatgtctacaagagagcag

SEQ ID NO: 1719519 - DNA, 25 bp, Homo sapien
gagagcagtaccttgattcacaagc

SEQ ID NO: 1719520 - DNA, 25 bp, Homo sapien
gatgcaaacacagccgggcaatgcc

SEQ ID NO: 1719521 - DNA, 25 bp, Homo sapien
aaaacaggcacttacctctgacaag

SEQ ID NO: 1719522 - DNA, 25 bp, Homo sapien
gcatataatatgtagtggtcaaatt

SEQ ID NO: 1719523 - DNA, 25 bp, Homo sapien
tattccctctatctaacttgtgcct

SEQ ID NO: 1719524 - DNA, 25 bp, Homo sapien
acattattgttaactcgaattaggc

SEQ ID NO: 1719525 - DNA, 25 bp, Homo sapien
taggctactgtgctatctgacacta

SEQ ID NO: 1719526 - DNA, 25 bp, Homo sapien
aaagtgcagcacgaatacatggaag

SEQ ID NO: 1719527 - DNA, 25 bp, Homo sapien
gcctagaacatagtgggtactccat

SEQ ID NO: 1719528 - DNA, 25 bp, Homo sapien
tggaagtgaacagacacagtgtgct

SEQ ID NO: 1719529 - DNA, 25 bp, Homo sapien
tccattgtagtgtaaatcgtaccac

SEQ ID NO: 1719530 - DNA, 25 bp, Homo sapien
cagagggcgaaacccagataggctt

SEQ ID NO: 1719531 - DNA, 25 bp, Homo sapien
gctcaagctgcagaagagatacctg

SEQ ID NO: 1719532 - DNA, 25 bp, Homo sapien
gcagcatgtgtaaagggacctacca

SEQ ID NO: 1719533 - DNA, 25 bp, Homo sapien
aggatgctgtaaagcctccacgaga

SEQ ID NO: 1719534 - DNA, 25 bp, Homo sapien
aaaattatctcatgcaacagatgaa

SEQ ID NO: 1719535 - DNA, 25 bp, Homo sapien
aattatctcatgcaacagatgaaag

SEQ ID NO: 1719536 - DNA, 25 bp, Homo sapien
taaaattatctcatgcaacagatga

SEQ ID NO: 1719537 - DNA, 25 bp, Homo sapien
ttatctcatgcaacagatgaaagaa

SEQ ID NO: 1719538 - DNA, 25 bp, Homo sapien
atcctccgatctcagccttctgtgt

SEQ ID NO: 1719539 - DNA, 25 bp, Homo sapien
agtcatcctccgatctcagccttct

SEQ ID NO: 1719540 - DNA, 25 bp, Homo sapien
tcaagtcatcctccgatctcagcct

SEQ ID NO: 1719541 - DNA, 25 bp, Homo sapien
ctcaagtcatcctccgatctcagcc

SEQ ID NO: 1719542 - DNA, 25 bp, Homo sapien
agagacgaagtatcattgttgccca

SEQ ID NO: 1719543 - DNA, 25 bp, Homo sapien
gtgtaaaaaataggagacacaacca

SEQ ID NO: 1719544 - DNA, 25 bp, Homo sapien
caggcttaagttattttactgttag

SEQ ID NO: 1719545 - DNA, 25 bp, Homo sapien
tttgtgaagacacctcatataccac

SEQ ID NO: 1719546 - DNA, 25 bp, Homo sapien
gccttgatccctgacagcctgtaga

SEQ ID NO: 1719547 - DNA, 25 bp, Homo sapien
cctaggatgtacttgaatttgcgcc

SEQ ID NO: 1719548 - DNA, 25 bp, Homo sapien
gagctaccaacaagagagcaccagg

SEQ ID NO: 1719549 - DNA, 25 bp, Homo sapien
gggcgtggcttgctcactagctcaa

SEQ ID NO: 1719550 - DNA, 25 bp, Homo sapien
tcggaggacagagtaggcaatcctg

SEQ ID NO: 1719551 - DNA, 25 bp, Homo sapien
cagtccccaggtgtcagtgaaaagc

SEQ ID NO: 1719552 - DNA, 25 bp, Homo sapien
tgtacaccgctcatttgcagcatcg

SEQ ID NO: 1719553 - DNA, 25 bp, Homo sapien
catttgtgtgatgctaatttgctcc

SEQ ID NO: 1719554 - DNA, 25 bp, Homo sapien
gcttcaacccttcagttaacagcaa

SEQ ID NO: 1719555 - DNA, 25 bp, Homo sapien
gtatctcagtacaatttaaccaagg

SEQ ID NO: 1719556 - DNA, 25 bp, Homo sapien
gctgagcctgggaattatactagct

SEQ ID NO: 1719557 - DNA, 25 bp, Homo sapien
ccacatacacgaaaaaccatcagaa

SEQ ID NO: 1719558 - DNA, 25 bp, Homo sapien
tctgtaaactatctagtatccaaag

SEQ ID NO: 1719559 - DNA, 25 bp, Homo sapien
tcttaaaagagagctagtcaatctt

SEQ ID NO: 1719560 - DNA, 25 bp, Homo sapien
tttagattatgtggcccaggccggg

SEQ ID NO: 1719561 - DNA, 25 bp, Homo sapien
cattctttggtccaagtataactac

SEQ ID NO: 1719562 - DNA, 25 bp, Homo sapien
tactaagatccacgaggtgcgtgct

SEQ ID NO: 1719563 - DNA, 25 bp, Homo sapien
ggtgcgtgctaattctcttgcaggc

SEQ ID NO: 1719564 - DNA, 25 bp, Homo sapien
ggatgttcattcgtttcctttggga

SEQ ID NO: 1719565 - DNA, 25 bp, Homo sapien
aaacaattactaagatccacgaggt

SEQ ID NO: 1719566 - DNA, 25 bp, Homo sapien
catgaaaaagcagtgccttgtcaac

SEQ ID NO: 1719567 - DNA, 25 bp, Homo sapien
tgaaaaagcagtgccttgtcaacgg

SEQ ID NO: 1719568 - DNA, 25 bp, Homo sapien
cgtcatgaaaaagcagtgccttgtc

SEQ ID NO: 1719569 - DNA, 25 bp, Homo sapien
gtgccttgtcaacggggtttctgcg

SEQ ID NO: 1719570 - DNA, 25 bp, Homo sapien
tgattcacaccctagagcttccgag

SEQ ID NO: 1719571 - DNA, 25 bp, Homo sapien
ggatcctcggcggtgcttcgaaaag

SEQ ID NO: 1719572 - DNA, 25 bp, Homo sapien
gggcgcgaacagcataacgcccgcg

SEQ ID NO: 1719573 - DNA, 25 bp, Homo sapien
gtccattttgccgagaagaaagaaa

SEQ ID NO: 1719574 - DNA, 25 bp, Homo sapien
caactagtaaatgtctcctcagggt

SEQ ID NO: 1719575 - DNA, 25 bp, Homo sapien
taccggaaggcagacagacaatgtc

SEQ ID NO: 1719576 - DNA, 25 bp, Homo sapien
cacagagaaccatgctaccggaagg

SEQ ID NO: 1719577 - DNA, 25 bp, Homo sapien
tcatcgagatgtcctcggagggcgc

SEQ ID NO: 1719578 - DNA, 25 bp, Homo sapien
tcattccccggtagacagatcataa

SEQ ID NO: 1719579 - DNA, 25 bp, Homo sapien
cagggtgggccagaatgtcaatatt

SEQ ID NO: 1719580 - DNA, 25 bp, Homo sapien
tagtacaagacagtccaaacgtgtg

SEQ ID NO: 1719581 - DNA, 25 bp, Homo sapien
catcaagaagttggagtgcctgaca

SEQ ID NO: 1719582 - DNA, 25 bp, Homo sapien
gacttcaggtaatccgcccgcctca

SEQ ID NO: 1719583 - DNA, 25 bp, Homo sapien
caccacactcggctagcttttttgt

SEQ ID NO: 1719584 - DNA, 25 bp, Homo sapien
cttcaggtaatccgcccgcctcagc

SEQ ID NO: 1719585 - DNA, 25 bp, Homo sapien
ctaactcctgacttcaggtaatccg

SEQ ID NO: 1719586 - DNA, 25 bp, Homo sapien
tgcaatggtggggtctcgggccact

SEQ ID NO: 1719587 - DNA, 25 bp, Homo sapien
cgttcttgtttcccggactggagtg

SEQ ID NO: 1719588 - DNA, 25 bp, Homo sapien
aatggtggggtctcgggccactgca

SEQ ID NO: 1719589 - DNA, 25 bp, Homo sapien
gtgcaatggtggggtctcgggccac

SEQ ID NO: 1719590 - DNA, 25 bp, Homo sapien
gaggagccttctctccagtctaaca

SEQ ID NO: 1719591 - DNA, 25 bp, Homo sapien
gcctacttaactctccgcttggatg

SEQ ID NO: 1719592 - DNA, 25 bp, Homo sapien
tactatcgatcttgggctgactaca

SEQ ID NO: 1719593 - DNA, 25 bp, Homo sapien
cctatggagtaatacaagacgacct

SEQ ID NO: 1719594 - DNA, 25 bp, Homo sapien
acactgcgttgtcttgctcccacta

SEQ ID NO: 1719595 - DNA, 25 bp, Homo sapien
tgcgttgtcttgctcccactaaagg

SEQ ID NO: 1719596 - DNA, 25 bp, Homo sapien
tcccactaaaggcaagtgttcttcc

SEQ ID NO: 1719597 - DNA, 25 bp, Homo sapien
gtcttgctcccactaaaggcaagtg

SEQ ID NO: 1719598 - DNA, 25 bp, Homo sapien
tctatctgccacaaatatttaagtg

SEQ ID NO: 1719599 - DNA, 25 bp, Homo sapien
caaataacacctctatctgccacaa

SEQ ID NO: 1719600 - DNA, 25 bp, Homo sapien
gtgacttatgcaccctcaagcttgg

SEQ ID NO: 1719601 - DNA, 25 bp, Homo sapien
catgggcccagcctaattcattttt

SEQ ID NO: 1719602 - DNA, 25 bp, Homo sapien
tcatcaagcaagagccatgccatgc

SEQ ID NO: 1719603 - DNA, 25 bp, Homo sapien
gaatgacagcagactcaaagaggaa

SEQ ID NO: 1719604 - DNA, 25 bp, Homo sapien
aaatgattttctcggcaggatgcag

SEQ ID NO: 1719605 - DNA, 25 bp, Homo sapien
catgccatgcagaaacgcatctggt

SEQ ID NO: 1719606 - DNA, 25 bp, Homo sapien
aacaaaatggagatttatctaagtc

SEQ ID NO: 1719607 - DNA, 25 bp, Homo sapien
acaaaatggagatttatctaagtca

SEQ ID NO: 1719608 - DNA, 25 bp, Homo sapien
acagaagggattgctcaccatgttg

SEQ ID NO: 1719609 - DNA, 25 bp, Homo sapien
caaaatggagatttatctaagtcat

SEQ ID NO: 1719610 - DNA, 25 bp, Homo sapien
gagtgggtggaaaagagtaaggcaa

SEQ ID NO: 1719611 - DNA, 25 bp, Homo sapien
gctgtcaaactcagcatgattggct

SEQ ID NO: 1719612 - DNA, 25 bp, Homo sapien
ctcagcatgattggctttaagtttt

SEQ ID NO: 1719613 - DNA, 25 bp, Homo sapien
tattttgtcatcagctagggcctcc

SEQ ID NO: 1719614 - DNA, 25 bp, Homo sapien
aagcagcctactggcctggagaata

SEQ ID NO: 1719615 - DNA, 25 bp, Homo sapien
gcagcctactggcctggagaataag

SEQ ID NO: 1719616 - DNA, 25 bp, Homo sapien
taaagcagcctactggcctggagaa

SEQ ID NO: 1719617 - DNA, 25 bp, Homo sapien
ttaaagcagcctactggcctggaga

SEQ ID NO: 1719618 - DNA, 25 bp, Homo sapien
ggatccatccagaatatcaaagatt

SEQ ID NO: 1719619 - DNA, 25 bp, Homo sapien
gactcatataacctctagtgagggc

SEQ ID NO: 1719620 - DNA, 25 bp, Homo sapien
ggaaatacaactagctcctaagcat

SEQ ID NO: 1719621 - DNA, 25 bp, Homo sapien
taagtgcacagatcagcttaccaag

SEQ ID NO: 1719622 - DNA, 25 bp, Homo sapien
tcaacgacataaagtgcaaagcttc

SEQ ID NO: 1719623 - DNA, 25 bp, Homo sapien
gactgacaaagtcaacgacataaag

SEQ ID NO: 1719624 - DNA, 25 bp, Homo sapien
gacataaagtgcaaagcttctgcat

SEQ ID NO: 1719625 - DNA, 25 bp, Homo sapien
aagtcaacgacataaagtgcaaagc

SEQ ID NO: 1719626 - DNA, 25 bp, Homo sapien
tcctgctacatggaaggtaacttgc

SEQ ID NO: 1719627 - DNA, 25 bp, Homo sapien
tccccttggcggctgaattcattca

SEQ ID NO: 1719628 - DNA, 25 bp, Homo sapien
tacaaaccctgtgagtagaatccag

SEQ ID NO: 1719629 - DNA, 25 bp, Homo sapien
gaatgatctgggagattacaaaccc

SEQ ID NO: 1719630 - DNA, 25 bp, Homo sapien
ggcagttggacgtaggaatgaaatc

SEQ ID NO: 1719631 - DNA, 25 bp, Homo sapien
tggaaagggcagttgtgaacggcag

SEQ ID NO: 1719632 - DNA, 25 bp, Homo sapien
aacggcagttggacgtaggaatgaa

SEQ ID NO: 1719633 - DNA, 25 bp, Homo sapien
cagttgtgaacggcagttggacgta

SEQ ID NO: 1719634 - DNA, 25 bp, Homo sapien
actagtgatccgacacctggcacac

SEQ ID NO: 1719635 - DNA, 25 bp, Homo sapien
ctagtgatccgacacctggcacaca

SEQ ID NO: 1719636 - DNA, 25 bp, Homo sapien
taagatcaaggagacacgagtcatc

SEQ ID NO: 1719637 - DNA, 25 bp, Homo sapien
aataagatcaaggagacacgagtca

SEQ ID NO: 1719638 - DNA, 25 bp, Homo sapien
ccaataagatcaaggagacacgagt

SEQ ID NO: 1719639 - DNA, 25 bp, Homo sapien
agatcaaggagacacgagtcatcat

SEQ ID NO: 1719640 - DNA, 25 bp, Homo sapien
gaaaatagttcaatgcttgtgggtc

SEQ ID NO: 1719641 - DNA, 25 bp, Homo sapien
agatttattactaggtccatgtaga

SEQ ID NO: 1719642 - DNA, 25 bp, Homo sapien
ccatgtagaaaatagttcaatgctt

SEQ ID NO: 1719643 - DNA, 25 bp, Homo sapien
tattactaggtccatgtagaaaata

SEQ ID NO: 1719644 - DNA, 25 bp, Homo sapien
tcctgcattagtcaagtcatcattg

SEQ ID NO: 1719645 - DNA, 25 bp, Homo sapien
actagagttggcgaaaattgaattt

SEQ ID NO: 1719646 - DNA, 25 bp, Homo sapien
gaatatcctgcattagtcaagtcat

SEQ ID NO: 1719647 - DNA, 25 bp, Homo sapien
tagagttggcgaaaattgaatttga

SEQ ID NO: 1719648 - DNA, 25 bp, Homo sapien
aaatgaggttaatacatgtcttggg

SEQ ID NO: 1719649 - DNA, 25 bp, Homo sapien
gaggttaatacatgtcttgggtttc

SEQ ID NO: 1719650 - DNA, 25 bp, Homo sapien
aaccacttcatggaatcattgtgaa

SEQ ID NO: 1719651 - DNA, 25 bp, Homo sapien
tgtatcttaatagaaccacttcatg

SEQ ID NO: 1719652 - DNA, 25 bp, Homo sapien
gcttacacctttgagggatgactta

SEQ ID NO: 1719653 - DNA, 25 bp, Homo sapien
gcagtccatcactgggcccttctcc

SEQ ID NO: 1719654 - DNA, 25 bp, Homo sapien
ttgagggatgacttaggatcagcat

SEQ ID NO: 1719655 - DNA, 25 bp, Homo sapien
ctggttgcttacacctttgagggat

SEQ ID NO: 1719656 - DNA, 25 bp, Homo sapien
tgtgtggaccaactactgagccctg

SEQ ID NO: 1719657 - DNA, 25 bp, Homo sapien
taaatggaacggtaacaggctgtgc

SEQ ID NO: 1719658 - DNA, 25 bp, Homo sapien
tagagttcccaaacaaggagttgcc

SEQ ID NO: 1719659 - DNA, 25 bp, Homo sapien
tatagtctggacgtggtgtaccgag

SEQ ID NO: 1719660 - DNA, 25 bp, Homo sapien
ggttcctgttccaggtgtgttactg

SEQ ID NO: 1719661 - DNA, 25 bp, Homo sapien
tgctgggttcctgttccaggtgtgt

SEQ ID NO: 1719662 - DNA, 25 bp, Homo sapien
gttactgaaggtgctggtagacttg

SEQ ID NO: 1719663 - DNA, 25 bp, Homo sapien
tgtgttactgaaggtgctggtagac

SEQ ID NO: 1719664 - DNA, 25 bp, Homo sapien
ttctataatcagccaaatatttatt

SEQ ID NO: 1719665 - DNA, 25 bp, Homo sapien
caaatatttatttgggaaagggcat

SEQ ID NO: 1719666 - DNA, 25 bp, Homo sapien
taatcagccaaatatttatttggga

SEQ ID NO: 1719667 - DNA, 25 bp, Homo sapien
cagccaaatatttatttgggaaagg

SEQ ID NO: 1719668 - DNA, 25 bp, Homo sapien
taaagcaggttgtctacccagaggg

SEQ ID NO: 1719669 - DNA, 25 bp, Homo sapien
taaagtccagggaagaagcaaccgc

SEQ ID NO: 1719670 - DNA, 25 bp, Homo sapien
cagcccctctaagtgcggagattaa

SEQ ID NO: 1719671 - DNA, 25 bp, Homo sapien
tgccaagcctaccagtaaagcaggt

SEQ ID NO: 1719672 - DNA, 25 bp, Homo sapien
tttacagcatgtcccctacaaggtg

SEQ ID NO: 1719673 - DNA, 25 bp, Homo sapien
aagggtcaacgtgaaaatcttccag

SEQ ID NO: 1719674 - DNA, 25 bp, Homo sapien
gggaagttccccatatggtggacac

SEQ ID NO: 1719675 - DNA, 25 bp, Homo sapien
gggtgaacctaaactattccaggca

SEQ ID NO: 1719676 - DNA, 25 bp, Homo sapien
tctcagctacttggcggtgctgatg

SEQ ID NO: 1719677 - DNA, 25 bp, Homo sapien
tgaagtgcagtgatgaagccactgt

SEQ ID NO: 1719678 - DNA, 25 bp, Homo sapien
cggtgctgatgtgggacaactgctt

SEQ ID NO: 1719679 - DNA, 25 bp, Homo sapien
ttggcggtgctgatgtgggacaact

SEQ ID NO: 1719680 - DNA, 25 bp, Homo sapien
aatgggggaagtctgattcagacat

SEQ ID NO: 1719681 - DNA, 25 bp, Homo sapien
atgggggaagtctgattcagacatt

SEQ ID NO: 1719682 - DNA, 25 bp, Homo sapien
tgggggaagtctgattcagacattt

SEQ ID NO: 1719683 - DNA, 25 bp, Homo sapien
gtgcttgcctcaggccgtctgtggt

SEQ ID NO: 1719684 - DNA, 25 bp, Homo sapien
tctgtgcttgcctcaggccgtctgt

SEQ ID NO: 1719685 - DNA, 25 bp, Homo sapien
gatctgtgcttgcctcaggccgtct

SEQ ID NO: 1719686 - DNA, 25 bp, Homo sapien
tgtgcttgcctcaggccgtctgtgg

SEQ ID NO: 1719687 - DNA, 25 bp, Homo sapien
ccagaaagctttcgtgcagaatgag

SEQ ID NO: 1719688 - DNA, 25 bp, Homo sapien
ggagacgagattaagccagaaagct

SEQ ID NO: 1719689 - DNA, 25 bp, Homo sapien
gctatcttagagttgatgcaacaca

SEQ ID NO: 1719690 - DNA, 25 bp, Homo sapien
cacagtatattatttgcggaaagga

SEQ ID NO: 1719691 - DNA, 25 bp, Homo sapien
gatggccaggagatgatccaactac

SEQ ID NO: 1719692 - DNA, 25 bp, Homo sapien
gatgcggatataactttgcttccag

SEQ ID NO: 1719693 - DNA, 25 bp, Homo sapien
cggttcctaaggatgcggatataac

SEQ ID NO: 1719694 - DNA, 25 bp, Homo sapien
cctgctgtggttgtgcggttcctaa

SEQ ID NO: 1719695 - DNA, 25 bp, Homo sapien
aaagctcctttcgttagctgtttcg

SEQ ID NO: 1719696 - DNA, 25 bp, Homo sapien
ttttgtcctcccgaatgactctcca

SEQ ID NO: 1719697 - DNA, 25 bp, Homo sapien
tcgcagcaggccttttttgtcctcc

SEQ ID NO: 1719698 - DNA, 25 bp, Homo sapien
tcgttagctgtttcgcagcaggcct

SEQ ID NO: 1719699 - DNA, 25 bp, Homo sapien
tggtgtcacagtgtgggcttggtcc

SEQ ID NO: 1719700 - DNA, 25 bp, Homo sapien
tcacagtgtgggcttggtccctctg

SEQ ID NO: 1719701 - DNA, 25 bp, Homo sapien
gtgtcacagtgtgggcttggtccct

SEQ ID NO: 1719702 - DNA, 25 bp, Homo sapien
cagtgtgggcttggtccctctgcaa

SEQ ID NO: 1719703 - DNA, 25 bp, Homo sapien
catcacttagtgatcggaagtgact

SEQ ID NO: 1719704 - DNA, 25 bp, Homo sapien
tcacttagtgatcggaagtgacttt

SEQ ID NO: 1719705 - DNA, 25 bp, Homo sapien
tctctgtaccgcatcacttagtgat

SEQ ID NO: 1719706 - DNA, 25 bp, Homo sapien
agtctctgtaccgcatcacttagtg

SEQ ID NO: 1719707 - DNA, 25 bp, Homo sapien
tctcaagtcttcttcagtgggcatg

SEQ ID NO: 1719708 - DNA, 25 bp, Homo sapien
caagtcttcttcagtgggcatggag

SEQ ID NO: 1719709 - DNA, 25 bp, Homo sapien
tcaagtcttcttcagtgggcatgga

SEQ ID NO: 1719710 - DNA, 25 bp, Homo sapien
agtcttcttcagtgggcatggagcc

SEQ ID NO: 1719711 - DNA, 25 bp, Homo sapien
catagcttgggtcctttttaggagc

SEQ ID NO: 1719712 - DNA, 25 bp, Homo sapien
ggcatcttctaggagcaggcatctg

SEQ ID NO: 1719713 - DNA, 25 bp, Homo sapien
caggcatctgtatttgttaagcata

SEQ ID NO: 1719714 - DNA, 25 bp, Homo sapien
catggcatcttctaggagcaggcat

SEQ ID NO: 1719715 - DNA, 25 bp, Homo sapien
gaacatcctatcgatcatcaccatc

SEQ ID NO: 1719716 - DNA, 25 bp, Homo sapien
ttgtctcgggacagggaagctcttt

SEQ ID NO: 1719717 - DNA, 25 bp, Homo sapien
ggttgaacatcctatcgatcatcac

SEQ ID NO: 1719718 - DNA, 25 bp, Homo sapien
tgccaaacgcttgtctcgggacagg

SEQ ID NO: 1719719 - DNA, 25 bp, Homo sapien
catgaggatttagaacattgagggt

SEQ ID NO: 1719720 - DNA, 25 bp, Homo sapien
gaggatttagaacattgagggtaca

SEQ ID NO: 1719721 - DNA, 25 bp, Homo sapien
tgtccatgaggatttagaacattga

SEQ ID NO: 1719722 - DNA, 25 bp, Homo sapien
aagaaatgtccatgaggatttagaa

SEQ ID NO: 1719723 - DNA, 25 bp, Homo sapien
catacaggaacatgcagaagcagga

SEQ ID NO: 1719724 - DNA, 25 bp, Homo sapien
ggaccctgatcctgagagggcatcc

SEQ ID NO: 1719725 - DNA, 25 bp, Homo sapien
aggtagatgcttgatgacaaatggg

SEQ ID NO: 1719726 - DNA, 25 bp, Homo sapien
gcatcctgtaaaggcagccaaggct

SEQ ID NO: 1719727 - DNA, 25 bp, Homo sapien
ggaaatctaactcaacagagccgct

SEQ ID NO: 1719728 - DNA, 25 bp, Homo sapien
tacaacaccttcactgtggtccggg

SEQ ID NO: 1719729 - DNA, 25 bp, Homo sapien
tgattcatgggttccgtcacaccgg

SEQ ID NO: 1719730 - DNA, 25 bp, Homo sapien
ccaagtgcgaatctgctaggatgct

SEQ ID NO: 1719731 - DNA, 25 bp, Homo sapien
taactttgacgaatgaacctgaaca

SEQ ID NO: 1719732 - DNA, 25 bp, Homo sapien
tttaccaagggccaagtatactgtg

SEQ ID NO: 1719733 - DNA, 25 bp, Homo sapien
cattaaagtgaagaccagtggctgc

SEQ ID NO: 1719734 - DNA, 25 bp, Homo sapien
tatgacccatgtgcgtagaacctaa

SEQ ID NO: 1719735 - DNA, 25 bp, Homo sapien
ttctgggaaaagtagccattcctat

SEQ ID NO: 1719736 - DNA, 25 bp, Homo sapien
ctgggaaaagtagccattcctattt

SEQ ID NO: 1719737 - DNA, 25 bp, Homo sapien
gggaaaagtagccattcctatttgc

SEQ ID NO: 1719738 - DNA, 25 bp, Homo sapien
aaaagtagccattcctatttgcaaa

SEQ ID NO: 1719739 - DNA, 25 bp, Homo sapien
tctgttctagctcacgctggaggac

SEQ ID NO: 1719740 - DNA, 25 bp, Homo sapien
taagttacagtttcatcacaagcgg

SEQ ID NO: 1719741 - DNA, 25 bp, Homo sapien
ccaaaagttgcaccgcttcttaggg

SEQ ID NO: 1719742 - DNA, 25 bp, Homo sapien
tcagcgttcacttagccgcagtgag

SEQ ID NO: 1719743 - DNA, 25 bp, Homo sapien
ctagtggtgcagctactgatcatgc

SEQ ID NO: 1719744 - DNA, 25 bp, Homo sapien
cacgctctgtttacttgaccataga

SEQ ID NO: 1719745 - DNA, 25 bp, Homo sapien
gacagcacacgctctgtttacttga

SEQ ID NO: 1719746 - DNA, 25 bp, Homo sapien
tgatcatgcgcaaccccaccacatg

SEQ ID NO: 1719747 - DNA, 25 bp, Homo sapien
tttgagggcttgataagccttcctc

SEQ ID NO: 1719748 - DNA, 25 bp, Homo sapien
ttgagggcttgataagccttcctct

SEQ ID NO: 1719749 - DNA, 25 bp, Homo sapien
aagtgcctgctttgcctgggtggct

SEQ ID NO: 1719750 - DNA, 25 bp, Homo sapien
ctccttctttgccaaaagtgcctgc

SEQ ID NO: 1719751 - DNA, 25 bp, Homo sapien
tagtccaacacatgcgggataaaac

SEQ ID NO: 1719752 - DNA, 25 bp, Homo sapien
cgttggggggagctcgtcaatacca

SEQ ID NO: 1719753 - DNA, 25 bp, Homo sapien
gctcgtcaataccaaatgtagtcca

SEQ ID NO: 1719754 - DNA, 25 bp, Homo sapien
taccaaatgtagtccaacacatgcg

SEQ ID NO: 1719755 - DNA, 25 bp, Homo sapien
tagctatcagtaatccaggccaggc

SEQ ID NO: 1719756 - DNA, 25 bp, Homo sapien
gatttaggcatctgtgggagtcctg

SEQ ID NO: 1719757 - DNA, 25 bp, Homo sapien
ccttaaggacactgagagacaacta

SEQ ID NO: 1719758 - DNA, 25 bp, Homo sapien
aagctattaagcaatccagagagga

SEQ ID NO: 1719759 - DNA, 25 bp, Homo sapien
gacgcaccttgtcacgtttctgccg

SEQ ID NO: 1719760 - DNA, 25 bp, Homo sapien
cgtctgagacgcaccttgtcacgtt

SEQ ID NO: 1719761 - DNA, 25 bp, Homo sapien
tctagtcgtctgagacgcaccttgt

SEQ ID NO: 1719762 - DNA, 25 bp, Homo sapien
cacttctagtcgtctgagacgcacc

SEQ ID NO: 1719763 - DNA, 25 bp, Homo sapien
gggcatattatctccctagaaaggg

SEQ ID NO: 1719764 - DNA, 25 bp, Homo sapien
cagcctcatgcaattagaaagacac

SEQ ID NO: 1719765 - DNA, 25 bp, Homo sapien
gctttagagagggtgtcctcaaccc

SEQ ID NO: 1719766 - DNA, 25 bp, Homo sapien
tgaaaaatctcccaacactggtgaa

SEQ ID NO: 1719767 - DNA, 25 bp, Homo sapien
atacgcagcatttttagattctggg

SEQ ID NO: 1719768 - DNA, 25 bp, Homo sapien
ctatacgcagcatttttagattctg

SEQ ID NO: 1719769 - DNA, 25 bp, Homo sapien
gcaccagtaaactcacgccgtcaat

SEQ ID NO: 1719770 - DNA, 25 bp, Homo sapien
ccactatacgcagcatttttagatt

SEQ ID NO: 1719771 - DNA, 25 bp, Homo sapien
tacagcaacatgagccctggaaagc

SEQ ID NO: 1719772 - DNA, 25 bp, Homo sapien
tgtgtccggccaggaatactactct

SEQ ID NO: 1719773 - DNA, 25 bp, Homo sapien
tactatggtattgttcagacccctc

SEQ ID NO: 1719774 - DNA, 25 bp, Homo sapien
tatgactgaaccagccctactatgg

SEQ ID NO: 1719775 - DNA, 25 bp, Homo sapien
caacgagcaagtgttctgcaatcac

SEQ ID NO: 1719776 - DNA, 25 bp, Homo sapien
tggaaatactcctgataaagaactg

SEQ ID NO: 1719777 - DNA, 25 bp, Homo sapien
agtgaccccacttacataattagaa

SEQ ID NO: 1719778 - DNA, 25 bp, Homo sapien
taaagcacggttttcaccagcacct

SEQ ID NO: 1719779 - DNA, 25 bp, Homo sapien
gtccacgtttcaaaatgagttctcg

SEQ ID NO: 1719780 - DNA, 25 bp, Homo sapien
gtttcaaaatgagttctcggacaga

SEQ ID NO: 1719781 - DNA, 25 bp, Homo sapien
aaaatgagttctcggacagacttca

SEQ ID NO: 1719782 - DNA, 25 bp, Homo sapien
cacgtttcaaaatgagttctcggac

SEQ ID NO: 1719783 - DNA, 25 bp, Homo sapien
catcaaagcttcaaagaccctggct

SEQ ID NO: 1719784 - DNA, 25 bp, Homo sapien
gctgatccctaagctgtagcactca

SEQ ID NO: 1719785 - DNA, 25 bp, Homo sapien
tatccagcatatactaagctggcca

SEQ ID NO: 1719786 - DNA, 25 bp, Homo sapien
gggccccaagaagaatacaacctga

SEQ ID NO: 1719787 - DNA, 25 bp, Homo sapien
tgcgttcaccccgatagccaggtgt

SEQ ID NO: 1719788 - DNA, 25 bp, Homo sapien
gggcacaagaaccatgagatctcct

SEQ ID NO: 1719789 - DNA, 25 bp, Homo sapien
ggtcttccaagcaaatgacgccaaa

SEQ ID NO: 1719790 - DNA, 25 bp, Homo sapien
gaaagggcacaagaaccatgagatc

SEQ ID NO: 1719791 - DNA, 25 bp, Homo sapien
gaacttgtaaagtggcaaggcatgg

SEQ ID NO: 1719792 - DNA, 25 bp, Homo sapien
taactcttaggctatgcatagcccc

SEQ ID NO: 1719793 - DNA, 25 bp, Homo sapien
gcaggtctccatctatttgtaccag

SEQ ID NO: 1719794 - DNA, 25 bp, Homo sapien
caaggcatggcctatcaaaagtcag

SEQ ID NO: 1719795 - DNA, 25 bp, Homo sapien
cactgataaaaaatttaccgcagtt

SEQ ID NO: 1719796 - DNA, 25 bp, Homo sapien
ctgataaaaaatttaccgcagtttg

SEQ ID NO: 1719797 - DNA, 25 bp, Homo sapien
tcactgataaaaaatttaccgcagt

SEQ ID NO: 1719798 - DNA, 25 bp, Homo sapien
cattaaaccctaggatacatgcaac

SEQ ID NO: 1719799 - DNA, 25 bp, Homo sapien
caacattaaaccctaggatacatgc

SEQ ID NO: 1719800 - DNA, 25 bp, Homo sapien
ttaaaccctaggatacatgcaacaa

SEQ ID NO: 1719801 - DNA, 25 bp, Homo sapien
taggatacatgcaacaaagcaggac

SEQ ID NO: 1719802 - DNA, 25 bp, Homo sapien
ttcttcctatgtgtatttcaagtct

SEQ ID NO: 1719803 - DNA, 25 bp, Homo sapien
tcttcctatgtgtatttcaagtctt

SEQ ID NO: 1719804 - DNA, 25 bp, Homo sapien
tttcttcctatgtgtatttcaagtc

SEQ ID NO: 1719805 - DNA, 25 bp, Homo sapien
caaaagccaccagatacacttagag

SEQ ID NO: 1719806 - DNA, 25 bp, Homo sapien
taagccagtttcaggttacgataca

SEQ ID NO: 1719807 - DNA, 25 bp, Homo sapien
cacaggtatctgagaagggtctaaa

SEQ ID NO: 1719808 - DNA, 25 bp, Homo sapien
gtatacatgttttcctggcgaaggg

SEQ ID NO: 1719809 - DNA, 25 bp, Homo sapien
ctcacataaggtacacaagagctgg

SEQ ID NO: 1719810 - DNA, 25 bp, Homo sapien
gattgagcaggacttcctcacataa

SEQ ID NO: 1719811 - DNA, 25 bp, Homo sapien
taaggaaccatgctgatcatcagag

SEQ ID NO: 1719812 - DNA, 25 bp, Homo sapien
gcaggacttcctcacataaggtaca

SEQ ID NO: 1719813 - DNA, 25 bp, Homo sapien
ccttttatttaccagcagtttgctc

SEQ ID NO: 1719814 - DNA, 25 bp, Homo sapien
taattacctcatacgctggcacttt

SEQ ID NO: 1719815 - DNA, 25 bp, Homo sapien
caatgttttacagtataggagtaac

SEQ ID NO: 1719816 - DNA, 25 bp, Homo sapien
cagtagggacagaatttctccatgt

SEQ ID NO: 1719817 - DNA, 25 bp, Homo sapien
tatttgtatacaattataaattaca

SEQ ID NO: 1719818 - DNA, 25 bp, Homo sapien
aacatcttttatttgtatacaatta

SEQ ID NO: 1719819 - DNA, 25 bp, Homo sapien
ttgtatacaattataaattacaaac

SEQ ID NO: 1719820 - DNA, 25 bp, Homo sapien
catcttttatttgtatacaattata

SEQ ID NO: 1719821 - DNA, 25 bp, Homo sapien
gacccgggatgccattcagttactc

SEQ ID NO: 1719822 - DNA, 25 bp, Homo sapien
ctccgaccctcaggataggaacggc

SEQ ID NO: 1719823 - DNA, 25 bp, Homo sapien
catcttttatgctttcgtcctgacc

SEQ ID NO: 1719824 - DNA, 25 bp, Homo sapien
cttggttgaggcagcgactgcgcct

SEQ ID NO: 1719825 - DNA, 25 bp, Homo sapien
gcgatccacggcgaacccacagcgt

SEQ ID NO: 1719826 - DNA, 25 bp, Homo sapien
tcccgggcctggagaaacgccacat

SEQ ID NO: 1719827 - DNA, 25 bp, Homo sapien
agaaacgccacatcgcggcgatcca

SEQ ID NO: 1719828 - DNA, 25 bp, Homo sapien
ctggagaaacgccacatcgcggcga

SEQ ID NO: 1719829 - DNA, 25 bp, Homo sapien
agtccccaatgctcggccccggcct

SEQ ID NO: 1719830 - DNA, 25 bp, Homo sapien
gacatggagcgtccccgcagtcccc

SEQ ID NO: 1719831 - DNA, 25 bp, Homo sapien
gcgacccgacatggagcgtccccgc

SEQ ID NO: 1719832 - DNA, 25 bp, Homo sapien
gagcgtccccgcagtccccaatgct

SEQ ID NO: 1719833 - DNA, 25 bp, Homo sapien
tagccttcaagttttggcacgtccg

SEQ ID NO: 1719834 - DNA, 25 bp, Homo sapien
cttctaaagcgtttctgcagggagc

SEQ ID NO: 1719835 - DNA, 25 bp, Homo sapien
tctgggccggcttggtacggtctac

SEQ ID NO: 1719836 - DNA, 25 bp, Homo sapien
ttctttggcgcgtccgttgggcact

SEQ ID NO: 1719837 - DNA, 25 bp, Homo sapien
tctgtctcccagtcggaagttgctg

SEQ ID NO: 1719838 - DNA, 25 bp, Homo sapien
tatgaacaaggtaattcccacacat

SEQ ID NO: 1719839 - DNA, 25 bp, Homo sapien
tctatttcctcaagactaggtggtg

SEQ ID NO: 1719840 - DNA, 25 bp, Homo sapien
tacacaatcttgcatctaatccagg

SEQ ID NO: 1719841 - DNA, 25 bp, Homo sapien
ccagctgcagacctgagttgcggct

SEQ ID NO: 1719842 - DNA, 25 bp, Homo sapien
ccacaagactgccttctaggccaca

SEQ ID NO: 1719843 - DNA, 25 bp, Homo sapien
tgtgggtagggctggacacccaagg

SEQ ID NO: 1719844 - DNA, 25 bp, Homo sapien
gggccaggagaagtagcagccatgt

SEQ ID NO: 1719845 - DNA, 25 bp, Homo sapien
tgggtagggctggacacccaagggc

SEQ ID NO: 1719846 - DNA, 25 bp, Homo sapien
gccaggagaagtagcagccatgtac

SEQ ID NO: 1719847 - DNA, 25 bp, Homo sapien
tgtggcagcctctggtgaggaaggg

SEQ ID NO: 1719848 - DNA, 25 bp, Homo sapien
gtggcagcctctggtgaggaaggga

SEQ ID NO: 1719849 - DNA, 25 bp, Homo sapien
gcagcctctggtgaggaagggaagg

SEQ ID NO: 1719850 - DNA, 25 bp, Homo sapien
tggcagcctctggtgaggaagggaa

SEQ ID NO: 1719851 - DNA, 25 bp, Homo sapien
ggccagggggtgcaacatcaaggac

SEQ ID NO: 1719852 - DNA, 25 bp, Homo sapien
aggaccaggcagaccaccaccatct

SEQ ID NO: 1719853 - DNA, 25 bp, Homo sapien
cagaccaccaccatctgctgctttc

SEQ ID NO: 1719854 - DNA, 25 bp, Homo sapien
caaggccagggggtgcaacatcaag

SEQ ID NO: 1719855 - DNA, 25 bp, Homo sapien
tgggccaagttggtccaggtgccat

SEQ ID NO: 1719856 - DNA, 25 bp, Homo sapien
taggtgaaggcatccagtgcactgc

SEQ ID NO: 1719857 - DNA, 25 bp, Homo sapien
ggcccagtgtggcagaccaaaggct

SEQ ID NO: 1719858 - DNA, 25 bp, Homo sapien
tgccattgccggctgagaaccagat

SEQ ID NO: 1719859 - DNA, 25 bp, Homo sapien
agatgcatgggctgtgtactcctgc

SEQ ID NO: 1719860 - DNA, 25 bp, Homo sapien
acagatgcatgggctgtgtactcct

SEQ ID NO: 1719861 - DNA, 25 bp, Homo sapien
ctgacagatgcatgggctgtgtact

SEQ ID NO: 1719862 - DNA, 25 bp, Homo sapien
gatgcatgggctgtgtactcctgct

SEQ ID NO: 1719863 - DNA, 25 bp, Homo sapien
ccagggagaagcgaatgagtctttg

SEQ ID NO: 1719864 - DNA, 25 bp, Homo sapien
agggagaagcgaatgagtctttggg

SEQ ID NO: 1719865 - DNA, 25 bp, Homo sapien
cagggagaagcgaatgagtctttgg

SEQ ID NO: 1719866 - DNA, 25 bp, Homo sapien
caggtcctggctgtagaagcctctc

SEQ ID NO: 1719867 - DNA, 25 bp, Homo sapien
gggcaggtcctggctgtagaagcct

SEQ ID NO: 1719868 - DNA, 25 bp, Homo sapien
gcaggtcctggctgtagaagcctct

SEQ ID NO: 1719869 - DNA, 25 bp, Homo sapien
gggggcaggtcctggctgtagaagc

SEQ ID NO: 1719870 - DNA, 25 bp, Homo sapien
ctgcgaggaggaaccgctcaggagc

SEQ ID NO: 1719871 - DNA, 25 bp, Homo sapien
agcagcttgaagagcagcagccgca

SEQ ID NO: 1719872 - DNA, 25 bp, Homo sapien
tcaggagcaggtcaaacagcagcag

SEQ ID NO: 1719873 - DNA, 25 bp, Homo sapien
agcagccgcaggacccccagccaca

SEQ ID NO: 1719874 - DNA, 25 bp, Homo sapien
cagccacagcgccccacccggtgtc

SEQ ID NO: 1719875 - DNA, 25 bp, Homo sapien
tcgatgggagccgagggctcgcagg

SEQ ID NO: 1719876 - DNA, 25 bp, Homo sapien
tgcgggggaaggcagcgggcccgcg

SEQ ID NO: 1719877 - DNA, 25 bp, Homo sapien
agctggtggcctctcgtcccccagt

SEQ ID NO: 1719878 - DNA, 25 bp, Homo sapien
cccccagtctccgtggccgggtgca

SEQ ID NO: 1719879 - DNA, 25 bp, Homo sapien
ccctgagggcagatcttgagcacca

SEQ ID NO: 1719880 - DNA, 25 bp, Homo sapien
agccctgagggcagatcttgagcac

SEQ ID NO: 1719881 - DNA, 25 bp, Homo sapien
gtggggtaactgctgaggtaagacc

SEQ ID NO: 1719882 - DNA, 25 bp, Homo sapien
gcctgtgctgggcaagtggggtaac

SEQ ID NO: 1719883 - DNA, 25 bp, Homo sapien
ctgggtggatcaccattctcaaggg

SEQ ID NO: 1719884 - DNA, 25 bp, Homo sapien
tgtaactgggtggatcaccattctc

SEQ ID NO: 1719885 - DNA, 25 bp, Homo sapien
cctaaatgcccctgtaactgggtgg

SEQ ID NO: 1719886 - DNA, 25 bp, Homo sapien
atctgctccctaaatgcccctgtaa

SEQ ID NO: 1719887 - DNA, 25 bp, Homo sapien
gggacgcacacgttatgctctactg

SEQ ID NO: 1719888 - DNA, 25 bp, Homo sapien
tactgtggaagcctcatacttgatc

SEQ ID NO: 1719889 - DNA, 25 bp, Homo sapien
tgtacgagagttcacatcagaccca

SEQ ID NO: 1719890 - DNA, 25 bp, Homo sapien
tattgaaaacgatcctgttccccag

SEQ ID NO: 1719891 - DNA, 25 bp, Homo sapien
tatagccgggcactcttgtaggcgc

SEQ ID NO: 1719892 - DNA, 25 bp, Homo sapien
cttaaggtgcaagcaggacgactca

SEQ ID NO: 1719893 - DNA, 25 bp, Homo sapien
gacccgagaagaagcctgcgtctgg

SEQ ID NO: 1719894 - DNA, 25 bp, Homo sapien
gactatctttttacgcccttggcca

SEQ ID NO: 1719895 - DNA, 25 bp, Homo sapien
gagcagtttcccctcgccgcttccg

SEQ ID NO: 1719896 - DNA, 25 bp, Homo sapien
aagcagaagacagcgggacgcgggc

SEQ ID NO: 1719897 - DNA, 25 bp, Homo sapien
agaagcagaagacagcgggacgcgg

SEQ ID NO: 1719898 - DNA, 25 bp, Homo sapien
gaagaagcagaagacagcgggacgc

SEQ ID NO: 1719899 - DNA, 25 bp, Homo sapien
ggaagaagcagaagacagcgggacg

SEQ ID NO: 1719900 - DNA, 25 bp, Homo sapien
gcatttgctgggcaggcgaacccag

SEQ ID NO: 1719901 - DNA, 25 bp, Homo sapien
tgctgggcaggcgaacccagtcgtt

SEQ ID NO: 1719902 - DNA, 25 bp, Homo sapien
catttgctgggcaggcgaacccagt

SEQ ID NO: 1719903 - DNA, 25 bp, Homo sapien
ggcaggcgaacccagtcgttctcct

SEQ ID NO: 1719904 - DNA, 25 bp, Homo sapien
cagatctctcgtccgccgcagcgtc

SEQ ID NO: 1719905 - DNA, 25 bp, Homo sapien
tctcgtccgccgcagcgtcccggcg

SEQ ID NO: 1719906 - DNA, 25 bp, Homo sapien
gtccgccgcagcgtcccggcgcaag

SEQ ID NO: 1719907 - DNA, 25 bp, Homo sapien
cgggaccagatctctcgtccgccgc

SEQ ID NO: 1719908 - DNA, 25 bp, Homo sapien
ctgaattatcattgcttgtttctac

SEQ ID NO: 1719909 - DNA, 25 bp, Homo sapien
tctgaattatcattgcttgtttcta

SEQ ID NO: 1719910 - DNA, 25 bp, Homo sapien
ctctgaattatcattgcttgtttct

SEQ ID NO: 1719911 - DNA, 25 bp, Homo sapien
actctgaattatcattgcttgtttc

SEQ ID NO: 1719912 - DNA, 25 bp, Homo sapien
ttacccgggcatgatggcaggtgcc

SEQ ID NO: 1719913 - DNA, 25 bp, Homo sapien
aaattacccgggcatgatggcaggt

SEQ ID NO: 1719914 - DNA, 25 bp, Homo sapien
aaaaattacccgggcatgatggcag

SEQ ID NO: 1719915 - DNA, 25 bp, Homo sapien
aattacccgggcatgatggcaggtg

SEQ ID NO: 1719916 - DNA, 25 bp, Homo sapien
gcccactgagtgcacatgagtctaa

SEQ ID NO: 1719917 - DNA, 25 bp, Homo sapien
gccagctcccagcaaaacagatcca

SEQ ID NO: 1719918 - DNA, 25 bp, Homo sapien
gagggaggtagcacagcccactgag

SEQ ID NO: 1719919 - DNA, 25 bp, Homo sapien
catgagtctaatgggaggccagctc

SEQ ID NO: 1719920 - DNA, 25 bp, Homo sapien
ttggtgtatttgactccagaggcct

SEQ ID NO: 1719921 - DNA, 25 bp, Homo sapien
tcacctccttggtcttgccggtttc

SEQ ID NO: 1719922 - DNA, 25 bp, Homo sapien
caggatgccatagcccgtgccaatc

SEQ ID NO: 1719923 - DNA, 25 bp, Homo sapien
cgtgccaatcacctccttggtcttg

SEQ ID NO: 1719924 - DNA, 25 bp, Homo sapien
tctgctgaagcataaagaagttaag

SEQ ID NO: 1719925 - DNA, 25 bp, Homo sapien
gctctgtgaaatccaagcgtctgag

SEQ ID NO: 1719926 - DNA, 25 bp, Homo sapien
caatgatatagtccaacagtcttgc

SEQ ID NO: 1719927 - DNA, 25 bp, Homo sapien
ttatgcacgtcacccaattagctgg

SEQ ID NO: 1719928 - DNA, 25 bp, Homo sapien
gatcacagctgacagaattgggttt

SEQ ID NO: 1719929 - DNA, 25 bp, Homo sapien
cacagaccagagagacaaaatttta

SEQ ID NO: 1719930 - DNA, 25 bp, Homo sapien
tttgaaaggatgatcacagctgaca

SEQ ID NO: 1719931 - DNA, 25 bp, Homo sapien
taaaaagctggtaatcctgttacta

SEQ ID NO: 1719932 - DNA, 25 bp, Homo sapien
gataggtcatctggtctgggggatc

SEQ ID NO: 1719933 - DNA, 25 bp, Homo sapien
aatgggaagtgactcagagctggaa

SEQ ID NO: 1719934 - DNA, 25 bp, Homo sapien
aaggaagataggtcatctggtctgg

SEQ ID NO: 1719935 - DNA, 25 bp, Homo sapien
ctcagagctggaaggaagataggtc

SEQ ID NO: 1719936 - DNA, 25 bp, Homo sapien
tagccgcagtgggttagtggtctgt

SEQ ID NO: 1719937 - DNA, 25 bp, Homo sapien
ccgcagtgggttagtggtctgtccc

SEQ ID NO: 1719938 - DNA, 25 bp, Homo sapien
gtgccccaacacctgcacatctcac

SEQ ID NO: 1719939 - DNA, 25 bp, Homo sapien
gggttagtggtctgtccctccagcc

SEQ ID NO: 1719940 - DNA, 25 bp, Homo sapien
caggaggatgaggaactgagttccc

SEQ ID NO: 1719941 - DNA, 25 bp, Homo sapien
gacaggaggatgaggaactgagttc

SEQ ID NO: 1719942 - DNA, 25 bp, Homo sapien
aggaggatgaggaactgagttcccc

SEQ ID NO: 1719943 - DNA, 25 bp, Homo sapien
gaggatgaggaactgagttcccctc

SEQ ID NO: 1719944 - DNA, 25 bp, Homo sapien
gattgctgccggtcctctccttgtg

SEQ ID NO: 1719945 - DNA, 25 bp, Homo sapien
cttggcaaatcgattgctgccggtc

SEQ ID NO: 1719946 - DNA, 25 bp, Homo sapien
caggagcctcttgcaaatggtctca

SEQ ID NO: 1719947 - DNA, 25 bp, Homo sapien
atccaggagcctcttgcaaatggtc

SEQ ID NO: 1719948 - DNA, 25 bp, Homo sapien
cagagcggatgaaggacaatcccga

SEQ ID NO: 1719949 - DNA, 25 bp, Homo sapien
gatgaaggacaatcccgaatccaac

SEQ ID NO: 1719950 - DNA, 25 bp, Homo sapien
ctaagatacatgcaggcctgacccc

SEQ ID NO: 1719951 - DNA, 25 bp, Homo sapien
accagcagacacactaagatacatg

SEQ ID NO: 1719952 - DNA, 25 bp, Homo sapien
ccagaccctcatgcatgtgcctgaa

SEQ ID NO: 1719953 - DNA, 25 bp, Homo sapien
cacaaacggcaatcaaagaatggga

SEQ ID NO: 1719954 - DNA, 25 bp, Homo sapien
tgaagcaggaccctcatgaacaggc

SEQ ID NO: 1719955 - DNA, 25 bp, Homo sapien
gaagaggcaatgaaggaagatccca

SEQ ID NO: 1719956 - DNA, 25 bp, Homo sapien
ctttctgcacatcgtggatcttgct

SEQ ID NO: 1719957 - DNA, 25 bp, Homo sapien
tgagttctccccgttctagtgtctt

SEQ ID NO: 1719958 - DNA, 25 bp, Homo sapien
ggatcttgctgagttctccccgttc

SEQ ID NO: 1719959 - DNA, 25 bp, Homo sapien
tctttaggttcccacgggggcagca

SEQ ID NO: 1719960 - DNA, 25 bp, Homo sapien
cgaggtgtcctctgacacctcgcct

SEQ ID NO: 1719961 - DNA, 25 bp, Homo sapien
gtcctctgacacctcgcctaaaccc

SEQ ID NO: 1719962 - DNA, 25 bp, Homo sapien
tcctctgacacctcgcctaaacccc

SEQ ID NO: 1719963 - DNA, 25 bp, Homo sapien
ggtgtcctctgacacctcgcctaaa

SEQ ID NO: 1719964 - DNA, 25 bp, Homo sapien
gagatgggactgggcagtcactccc

SEQ ID NO: 1719965 - DNA, 25 bp, Homo sapien
ggccatcacaagggcatcccagcgg

SEQ ID NO: 1719966 - DNA, 25 bp, Homo sapien
tcacaagggcatcccagcggggttg

SEQ ID NO: 1719967 - DNA, 25 bp, Homo sapien
gatgggactgggcagtcactcccac

SEQ ID NO: 1719968 - DNA, 25 bp, Homo sapien
tagagagtaagaactatgggccttg

SEQ ID NO: 1719969 - DNA, 25 bp, Homo sapien
gatgtagagagtaagaactatgggc

SEQ ID NO: 1719970 - DNA, 25 bp, Homo sapien
cagctcattctccagagagaaaagc

SEQ ID NO: 1719971 - DNA, 25 bp, Homo sapien
gagagtaagaactatgggccttgtt

SEQ ID NO: 1719972 - DNA, 25 bp, Homo sapien
ctttgctagaaggaaacttaggtag

SEQ ID NO: 1719973 - DNA, 25 bp, Homo sapien
tcccaggagtttatgaatggtatcc

SEQ ID NO: 1719974 - DNA, 25 bp, Homo sapien
gactattcccttaggtatcccagga

SEQ ID NO: 1719975 - DNA, 25 bp, Homo sapien
attactgagtgcaaaattcatacaa

SEQ ID NO: 1719976 - DNA, 25 bp, Homo sapien
gaagaagcgaccagatatggcaggc

SEQ ID NO: 1719977 - DNA, 25 bp, Homo sapien
gcctaggtcttatccccagagaaaa

SEQ ID NO: 1719978 - DNA, 25 bp, Homo sapien
taagaacccagctataagaccaatg

SEQ ID NO: 1719979 - DNA, 25 bp, Homo sapien
gcatactagtccaccaaacggctgg

SEQ ID NO: 1719980 - DNA, 25 bp, Homo sapien
ctttgtgtaccaggttgtgtaatgt

SEQ ID NO: 1719981 - DNA, 25 bp, Homo sapien
ggttgtgtaatgtctcaaaggtctc

SEQ ID NO: 1719982 - DNA, 25 bp, Homo sapien
tgtgtaccaggttgtgtaatgtctc

SEQ ID NO: 1719983 - DNA, 25 bp, Homo sapien
taccaggttgtgtaatgtctcaaag

SEQ ID NO: 1719984 - DNA, 25 bp, Homo sapien
acctctgcagaagtctcgttccaca

SEQ ID NO: 1719985 - DNA, 25 bp, Homo sapien
tctgcagaagtctcgttccacagct

SEQ ID NO: 1719986 - DNA, 25 bp, Homo sapien
cctctgcagaagtctcgttccacag

SEQ ID NO: 1719987 - DNA, 25 bp, Homo sapien
ccacctctgcagaagtctcgttcca

SEQ ID NO: 1719988 - DNA, 25 bp, Homo sapien
gggcacagcaacccttccaagggct

SEQ ID NO: 1719989 - DNA, 25 bp, Homo sapien
tggcagcggttcacctaaggaaact

SEQ ID NO: 1719990 - DNA, 25 bp, Homo sapien
aacccactgcaaggtaggcagtggc

SEQ ID NO: 1719991 - DNA, 25 bp, Homo sapien
cagcacctgactcgctcctagagga

SEQ ID NO: 1719992 - DNA, 25 bp, Homo sapien
aggagctcagctaagcctcgcaacc

SEQ ID NO: 1719993 - DNA, 25 bp, Homo sapien
gtaccagtcctcgatcacctcctca

SEQ ID NO: 1719994 - DNA, 25 bp, Homo sapien
tggttcctgtaccagtcctcgatca

SEQ ID NO: 1719995 - DNA, 25 bp, Homo sapien
cagtcctcgatcacctcctcaaact

SEQ ID NO: 1719996 - DNA, 25 bp, Homo sapien
ggttcctgtaccagtcctcgatcac

SEQ ID NO: 1719997 - DNA, 25 bp, Homo sapien
ttcccttcagcacgtggttggcgca

SEQ ID NO: 1719998 - DNA, 25 bp, Homo sapien
ccttcagcacgtggttggcgcagag

SEQ ID NO: 1719999 - DNA, 25 bp, Homo sapien
tcccttcagcacgtggttggcgcag

SEQ ID NO: 1720000 - DNA, 25 bp, Homo sapien
ttttcccttcagcacgtggttggcg

SEQ ID NO: 1720001 - DNA, 25 bp, Homo sapien
ggggatgccttctggatgccctcat

SEQ ID NO: 1720002 - DNA, 25 bp, Homo sapien
gggatgccttctggatgccctcatc

SEQ ID NO: 1720003 - DNA, 25 bp, Homo sapien
gccatcccggcctgccagagccatg

SEQ ID NO: 1720004 - DNA, 25 bp, Homo sapien
gctgcggggccatcccggcctgcca

SEQ ID NO: 1720005 - DNA, 25 bp, Homo sapien
catgcccctgactcctcagcttcaa

SEQ ID NO: 1720006 - DNA, 25 bp, Homo sapien
cctcagcttcaaaatcaggggtctc

SEQ ID NO: 1720007 - DNA, 25 bp, Homo sapien
gctgcagtcctagtaccctgttggg

SEQ ID NO: 1720008 - DNA, 25 bp, Homo sapien
ttcacactggagtccttgcagtcct

SEQ ID NO: 1720009 - DNA, 25 bp, Homo sapien
aaaggacggcgtgggctacccatga

SEQ ID NO: 1720010 - DNA, 25 bp, Homo sapien
ctgaaccctgggtcaggagagaaac

SEQ ID NO: 1720011 - DNA, 25 bp, Homo sapien
tacacaacaaatgggaggccttggg

SEQ ID NO: 1720012 - DNA, 25 bp, Homo sapien
gggagctggccaggtaaacactgca

SEQ ID NO: 1720013 - DNA, 25 bp, Homo sapien
tcaggaccaacagtcaaggccaggt

SEQ ID NO: 1720014 - DNA, 25 bp, Homo sapien
tacacaatgaggttaacagcacacc

SEQ ID NO: 1720015 - DNA, 25 bp, Homo sapien
tattcgccttttaggaatcttggtg

SEQ ID NO: 1720016 - DNA, 25 bp, Homo sapien
acagctgcttcctattcgcctttta

SEQ ID NO: 1720017 - DNA, 25 bp, Homo sapien
cagctgcttcctattcgccttttag

SEQ ID NO: 1720018 - DNA, 25 bp, Homo sapien
cacagctgcttcctattcgcctttt

SEQ ID NO: 1720019 - DNA, 25 bp, Homo sapien
atggacgcagggaggcttcagcagt

SEQ ID NO: 1720020 - DNA, 25 bp, Homo sapien
gaagtgtgaggtagagttgcagtgt

SEQ ID NO: 1720021 - DNA, 25 bp, Homo sapien
tgcaatggacgcagggaggcttcag

SEQ ID NO: 1720022 - DNA, 25 bp, Homo sapien
ctggaagtgtgaggtagagttgcag

SEQ ID NO: 1720023 - DNA, 25 bp, Homo sapien
gaggctggaccaagacagtatcatt

SEQ ID NO: 1720024 - DNA, 25 bp, Homo sapien
acctggcgtcatcctcaacagctta

SEQ ID NO: 1720025 - DNA, 25 bp, Homo sapien
gcgtcatcctcaacagcttaaggag

SEQ ID NO: 1720026 - DNA, 25 bp, Homo sapien
ctttaacagggggaacatcagtcct

SEQ ID NO: 1720027 - DNA, 25 bp, Homo sapien
caggacaagacctgcatctagactg

SEQ ID NO: 1720028 - DNA, 25 bp, Homo sapien
aaagggttaggcatggtagttcctg

SEQ ID NO: 1720029 - DNA, 25 bp, Homo sapien
gggttaggcatggtagttcctgcct

SEQ ID NO: 1720030 - DNA, 25 bp, Homo sapien
tgtaatcccagcactttgggaggcc

SEQ ID NO: 1720031 - DNA, 25 bp, Homo sapien
aaggcaggtggatcacttgaggtca

SEQ ID NO: 1720032 - DNA, 25 bp, Homo sapien
tgagcctgagaggttgaggcctgca

SEQ ID NO: 1720033 - DNA, 25 bp, Homo sapien
ctatggtcccaactattcaggagga

SEQ ID NO: 1720034 - DNA, 25 bp, Homo sapien
gtcccaactattcaggaggatcact

SEQ ID NO: 1720035 - DNA, 25 bp, Homo sapien
agcctgagaggttgaggcctgcagt

SEQ ID NO: 1720036 - DNA, 25 bp, Homo sapien
aaaataagatgtttaaattagccag

SEQ ID NO: 1720037 - DNA, 25 bp, Homo sapien
agcctccacacctggtatacaaaaa

SEQ ID NO: 1720038 - DNA, 25 bp, Homo sapien
gtgagcctccacacctggtatacaa

SEQ ID NO: 1720039 - DNA, 25 bp, Homo sapien
gtgtgagcctccacacctggtatac

SEQ ID NO: 1720040 - DNA, 25 bp, Homo sapien
aaataagaggctgaaaccaccccag

SEQ ID NO: 1720041 - DNA, 25 bp, Homo sapien
caaataagaggctgaaaccacccca

SEQ ID NO: 1720042 - DNA, 25 bp, Homo sapien
aataagaggctgaaaccaccccagg

SEQ ID NO: 1720043 - DNA, 25 bp, Homo sapien
taagaggctgaaaccaccccaggcc

SEQ ID NO: 1720044 - DNA, 25 bp, Homo sapien
tagatctttaccttgtcctacttta

SEQ ID NO: 1720045 - DNA, 25 bp, Homo sapien
tgggcgctaagccacacacctgtaa

SEQ ID NO: 1720046 - DNA, 25 bp, Homo sapien
caacgcccaagttcggaaaggcttg

SEQ ID NO: 1720047 - DNA, 25 bp, Homo sapien
ccttgggaagcagtaaccacaggtc

SEQ ID NO: 1720048 - DNA, 25 bp, Homo sapien
ggcatgcactgcacatggcttgtgt

SEQ ID NO: 1720049 - DNA, 25 bp, Homo sapien
aatcaggttaacttgagtgcaggca

SEQ ID NO: 1720050 - DNA, 25 bp, Homo sapien
ccagcaagtctgaggcaaacccaga

SEQ ID NO: 1720051 - DNA, 25 bp, Homo sapien
gaggacaagacattgacccactgta

SEQ ID NO: 1720052 - DNA, 25 bp, Homo sapien
gcttctgacaggaagacggaaatca

SEQ ID NO: 1720053 - DNA, 25 bp, Homo sapien
cgtgcctggtcatctgtggttcttt

SEQ ID NO: 1720054 - DNA, 25 bp, Homo sapien
gtctgtccatcagccctcgtggttc

SEQ ID NO: 1720055 - DNA, 25 bp, Homo sapien
accgtgcctggtcatctgtggttct

SEQ ID NO: 1720056 - DNA, 25 bp, Homo sapien
tctagttgatggaagtcttcaacag

SEQ ID NO: 1720057 - DNA, 25 bp, Homo sapien
aaggtgtgaagagcaccttttccta

SEQ ID NO: 1720058 - DNA, 25 bp, Homo sapien
ggtgtgaagagcaccttttcctaac

SEQ ID NO: 1720059 - DNA, 25 bp, Homo sapien
gcctgcctcctaggacctgcccttt

SEQ ID NO: 1720060 - DNA, 25 bp, Homo sapien
gatctatggaaatgccacccagcag

SEQ ID NO: 1720061 - DNA, 25 bp, Homo sapien
ggacagcataagtctccacactaga

SEQ ID NO: 1720062 - DNA, 25 bp, Homo sapien
taccagagctggcagtagggtccat

SEQ ID NO: 1720063 - DNA, 25 bp, Homo sapien
gggtccatctcattgaaacaagtga

SEQ ID NO: 1720064 - DNA, 25 bp, Homo sapien
cagggctgcggtcaacatctggaca

SEQ ID NO: 1720065 - DNA, 25 bp, Homo sapien
tgggaggccaaggcggacggatcac

SEQ ID NO: 1720066 - DNA, 25 bp, Homo sapien
gctcacgtctgtaatcccagcactt

SEQ ID NO: 1720067 - DNA, 25 bp, Homo sapien
gaggtcaggagatcgagaccatcct

SEQ ID NO: 1720068 - DNA, 25 bp, Homo sapien
agcagggttttggccgggcgcggtg

SEQ ID NO: 1720069 - DNA, 25 bp, Homo sapien
cacccacttggatctcctagcagaa

SEQ ID NO: 1720070 - DNA, 25 bp, Homo sapien
tgctaattggatctaccccagactg

SEQ ID NO: 1720071 - DNA, 25 bp, Homo sapien
gactgaacattgaaacacttgagga

SEQ ID NO: 1720072 - DNA, 25 bp, Homo sapien
tgatgactgccaaattccaaactct

SEQ ID NO: 1720073 - DNA, 25 bp, Homo sapien
ctgaagttagaaagactcgacgaga

SEQ ID NO: 1720074 - DNA, 25 bp, Homo sapien
tgaagttagaaagactcgacgagaa

SEQ ID NO: 1720075 - DNA, 25 bp, Homo sapien
cctgaagttagaaagactcgacgag

SEQ ID NO: 1720076 - DNA, 25 bp, Homo sapien
gaagttagaaagactcgacgagaac

SEQ ID NO: 1720077 - DNA, 25 bp, Homo sapien
gacttttcgccatcttttgtctttc

SEQ ID NO: 1720078 - DNA, 25 bp, Homo sapien
tagcgggtacaagatctaccccgga

SEQ ID NO: 1720079 - DNA, 25 bp, Homo sapien
ctttctgtggagctgtcgccatgaa

SEQ ID NO: 1720080 - DNA, 25 bp, Homo sapien
ttcttaatgcgaaatgcgagttggc

SEQ ID NO: 1720081 - DNA, 25 bp, Homo sapien
tccgcacttaaagcataagcactgc

SEQ ID NO: 1720082 - DNA, 25 bp, Homo sapien
cacttaaagcataagcactgctggc

SEQ ID NO: 1720083 - DNA, 25 bp, Homo sapien
acccgctccgcacttaaagcataag

SEQ ID NO: 1720084 - DNA, 25 bp, Homo sapien
gctccgcacttaaagcataagcact

SEQ ID NO: 1720085 - DNA, 25 bp, Homo sapien
gagcgggtccggtacacgctgtcca

SEQ ID NO: 1720086 - DNA, 25 bp, Homo sapien
catgccttgtactcggcggtgcggc

SEQ ID NO: 1720087 - DNA, 25 bp, Homo sapien
gtctccgatatacagctgccacacg

SEQ ID NO: 1720088 - DNA, 25 bp, Homo sapien
cagtgccacaggctacgtcgagcac

SEQ ID NO: 1720089 - DNA, 25 bp, Homo sapien
aggattggcaaaggccgccctgacg

SEQ ID NO: 1720090 - DNA, 25 bp, Homo sapien
tgttctgccgggcaggtacctgctc

SEQ ID NO: 1720091 - DNA, 25 bp, Homo sapien
tctgccgggcaggtacctgctcctg

SEQ ID NO: 1720092 - DNA, 25 bp, Homo sapien
cacccgttccaggattggcaaaggc

SEQ ID NO: 1720093 - DNA, 25 bp, Homo sapien
tacggccagcgaggagaggcagaga

SEQ ID NO: 1720094 - DNA, 25 bp, Homo sapien
agtacggccagcgaggagaggcaga

SEQ ID NO: 1720095 - DNA, 25 bp, Homo sapien
tgagtacggccagcgaggagaggca

SEQ ID NO: 1720096 - DNA, 25 bp, Homo sapien
ctgagtacggccagcgaggagaggc

SEQ ID NO: 1720097 - DNA, 25 bp, Homo sapien
tggcatccacactcgtcacactgaa

SEQ ID NO: 1720098 - DNA, 25 bp, Homo sapien
agtgcatacttcagcatcttgtcac

SEQ ID NO: 1720099 - DNA, 25 bp, Homo sapien
tcgaaggcgggctcgtgccgccggt

SEQ ID NO: 1720100 - DNA, 25 bp, Homo sapien
ccggttccagcgctccttaagtgca

SEQ ID NO: 1720101 - DNA, 25 bp, Homo sapien
caagtgagcgaaactgtttccaagg

SEQ ID NO: 1720102 - DNA, 25 bp, Homo sapien
tttgcagtctggcaagtgagcgaaa

SEQ ID NO: 1720103 - DNA, 25 bp, Homo sapien
agtctggcaagtgagcgaaactgtt

SEQ ID NO: 1720104 - DNA, 25 bp, Homo sapien
tggcaagtgagcgaaactgtttcca

SEQ ID NO: 1720105 - DNA, 25 bp, Homo sapien
cctcaaggcgggggccatgcccaag

SEQ ID NO: 1720106 - DNA, 25 bp, Homo sapien
caaggcgggggccatgcccaaggcc

SEQ ID NO: 1720107 - DNA, 25 bp, Homo sapien
ctgtggaagggggcctcaaggcggg

SEQ ID NO: 1720108 - DNA, 25 bp, Homo sapien
tgcccaaggccacaccctctcttac

SEQ ID NO: 1720109 - DNA, 25 bp, Homo sapien
caggcacgggcagaaagactccatc

SEQ ID NO: 1720110 - DNA, 25 bp, Homo sapien
gtgccagagccaaggcagagagtct

SEQ ID NO: 1720111 - DNA, 25 bp, Homo sapien
cacgggcagaaagactccatctgct

SEQ ID NO: 1720112 - DNA, 25 bp, Homo sapien
gagagtctgctttggcaggagagca

SEQ ID NO: 1720113 - DNA, 25 bp, Homo sapien
gcaatgtttttcagcgccagccggt

SEQ ID NO: 1720114 - DNA, 25 bp, Homo sapien
tgcccgcaccatgctcgcaatgttt

SEQ ID NO: 1720115 - DNA, 25 bp, Homo sapien
agttgcgatgatcaatgaccagtag

SEQ ID NO: 1720116 - DNA, 25 bp, Homo sapien
gatgtggtcgtagttgcgatgatca

SEQ ID NO: 1720117 - DNA, 25 bp, Homo sapien
tgttgtgacgtccttggtcaagtca

SEQ ID NO: 1720118 - DNA, 25 bp, Homo sapien
ctgcaccgtatagtccagggtcacc

SEQ ID NO: 1720119 - DNA, 25 bp, Homo sapien
ccttgttgttcactatcagcactga

SEQ ID NO: 1720120 - DNA, 25 bp, Homo sapien
ggcacctgcaccgtatagtccaggg

SEQ ID NO: 1720121 - DNA, 25 bp, Homo sapien
tgaagtcgcccaggacgctgtgctg

SEQ ID NO: 1720122 - DNA, 25 bp, Homo sapien
cagctccgtgaaggatgccagacag

SEQ ID NO: 1720123 - DNA, 25 bp, Homo sapien
cacttacctccgaaggctgcttgga

SEQ ID NO: 1720124 - DNA, 25 bp, Homo sapien
gcacgtggatgaagtagcagggaat

SEQ ID NO: 1720125 - DNA, 25 bp, Homo sapien
gcaccccagctgtagtctgctctag

SEQ ID NO: 1720126 - DNA, 25 bp, Homo sapien
tagtctgctctagaggctggccctg

SEQ ID NO: 1720127 - DNA, 25 bp, Homo sapien
tattgtttacccttccgtctgtgga

SEQ ID NO: 1720128 - DNA, 25 bp, Homo sapien
tcttccagacagagcctagcagtgc

SEQ ID NO: 1720129 - DNA, 25 bp, Homo sapien
cagcagcaacagctcaagagatatc

SEQ ID NO: 1720130 - DNA, 25 bp, Homo sapien
ggccggctctaagagaaaggcccat

SEQ ID NO: 1720131 - DNA, 25 bp, Homo sapien
agagatatctcctgcctacttgccc

SEQ ID NO: 1720132 - DNA, 25 bp, Homo sapien
cttccaggccggctctaagagaaag

SEQ ID NO: 1720133 - DNA, 25 bp, Homo sapien
cgactttgggacaaggcagtccaca

SEQ ID NO: 1720134 - DNA, 25 bp, Homo sapien
tcctcatgagctcgaggtgcctgct

SEQ ID NO: 1720135 - DNA, 25 bp, Homo sapien
ctgatgtgcagacagcatttcctca

SEQ ID NO: 1720136 - DNA, 25 bp, Homo sapien
gaactggggtagatgctcatctccc

SEQ ID NO: 1720137 - DNA, 25 bp, Homo sapien
tatggagaggtactttcaaggagga

SEQ ID NO: 1720138 - DNA, 25 bp, Homo sapien
tgtctactcacaggccctagcactt

SEQ ID NO: 1720139 - DNA, 25 bp, Homo sapien
cttgggctccacttactgaaggtga

SEQ ID NO: 1720140 - DNA, 25 bp, Homo sapien
tctctggagagtagaaccccagcta

SEQ ID NO: 1720141 - DNA, 25 bp, Homo sapien
gcagccagatgggtagttcctaatg

SEQ ID NO: 1720142 - DNA, 25 bp, Homo sapien
gtatgtcctacacaaggccaccagg

SEQ ID NO: 1720143 - DNA, 25 bp, Homo sapien
cccagggtgtgagaaaagcctgctt

SEQ ID NO: 1720144 - DNA, 25 bp, Homo sapien
tcctaatgaactggccagagtggga

SEQ ID NO: 1720145 - DNA, 25 bp, Homo sapien
ggactccgcctgcaatgagattttg

SEQ ID NO: 1720146 - DNA, 25 bp, Homo sapien
taggcaatggcaactgctgatctgc

SEQ ID NO: 1720147 - DNA, 25 bp, Homo sapien
gatccactgcttagtgcagcagcag

SEQ ID NO: 1720148 - DNA, 25 bp, Homo sapien
cagatggcattattaaggactccgc

SEQ ID NO: 1720149 - DNA, 25 bp, Homo sapien
tacataatctgtttaatccccaatt

SEQ ID NO: 1720150 - DNA, 25 bp, Homo sapien
tttattatctttggtgcctggtgtt

SEQ ID NO: 1720151 - DNA, 25 bp, Homo sapien
tctatcttgttatgattacataatc

SEQ ID NO: 1720152 - DNA, 25 bp, Homo sapien
tatatattgtaaataccttgaagga

SEQ ID NO: 1720153 - DNA, 25 bp, Homo sapien
tccggctttgctcggccgcactcgg

SEQ ID NO: 1720154 - DNA, 25 bp, Homo sapien
ggctccggctttgctcggccgcact

SEQ ID NO: 1720155 - DNA, 25 bp, Homo sapien
gcactcggcccgctcggcgtctctt

SEQ ID NO: 1720156 - DNA, 25 bp, Homo sapien
tcggcgtctcttcgccaccgcctgc

SEQ ID NO: 1720157 - DNA, 25 bp, Homo sapien
tctcctttttcagtttatagggcat

SEQ ID NO: 1720158 - DNA, 25 bp, Homo sapien
ttctcctttttcagtttatagggca

SEQ ID NO: 1720159 - DNA, 25 bp, Homo sapien
tgctaggcttggctgtgcatttggc

SEQ ID NO: 1720160 - DNA, 25 bp, Homo sapien
taggcttggctgtgcatttggcaac

SEQ ID NO: 1720161 - DNA, 25 bp, Homo sapien
gagctgctaggcttggctgtgcatt

SEQ ID NO: 1720162 - DNA, 25 bp, Homo sapien
tggctgtgcatttggcaaccttggg

SEQ ID NO: 1720163 - DNA, 25 bp, Homo sapien
ccacatctaaggctacgcctacatt

SEQ ID NO: 1720164 - DNA, 25 bp, Homo sapien
ctgcaccacatctaaggctacgcct

SEQ ID NO: 1720165 - DNA, 25 bp, Homo sapien
catctaaggctacgcctacattcat

SEQ ID NO: 1720166 - DNA, 25 bp, Homo sapien
ctaaggctacgcctacattcattac

SEQ ID NO: 1720167 - DNA, 25 bp, Homo sapien
ataataatagaagaacttgaaatcc

SEQ ID NO: 1720168 - DNA, 25 bp, Homo sapien
cataataatagaagaacttgaaatc

SEQ ID NO: 1720169 - DNA, 25 bp, Homo sapien
taataatagaagaacttgaaatcct

SEQ ID NO: 1720170 - DNA, 25 bp, Homo sapien
aggagacagaggtagccaggcaaaa

SEQ ID NO: 1720171 - DNA, 25 bp, Homo sapien
tcaggagttaatattatgtttataa

SEQ ID NO: 1720172 - DNA, 25 bp, Homo sapien
ggaatatcaggagttaatattatgt

SEQ ID NO: 1720173 - DNA, 25 bp, Homo sapien
ttcccatgtcttaggactttactag

SEQ ID NO: 1720174 - DNA, 25 bp, Homo sapien
ctgttgaaatccacttcccaagata

SEQ ID NO: 1720175 - DNA, 25 bp, Homo sapien
gttggatgacggtggctgagactgg

SEQ ID NO: 1720176 - DNA, 25 bp, Homo sapien
ttgttggatgacggtggctgagact

SEQ ID NO: 1720177 - DNA, 25 bp, Homo sapien
tgttggatgacggtggctgagactg

SEQ ID NO: 1720178 - DNA, 25 bp, Homo sapien
cttgttggatgacggtggctgagac

SEQ ID NO: 1720179 - DNA, 25 bp, Homo sapien
tggggggcggcgtgctattgctggg

SEQ ID NO: 1720180 - DNA, 25 bp, Homo sapien
gtggggggcggcgtgctattgctgg

SEQ ID NO: 1720181 - DNA, 25 bp, Homo sapien
ggggcggcgtgctattgctgggacg

SEQ ID NO: 1720182 - DNA, 25 bp, Homo sapien
ctggggcccccctgagtacttgatt

SEQ ID NO: 1720183 - DNA, 25 bp, Homo sapien
aatctggggcccccctgagtacttg

SEQ ID NO: 1720184 - DNA, 25 bp, Homo sapien
atctggggcccccctgagtacttga

SEQ ID NO: 1720185 - DNA, 25 bp, Homo sapien
tctggggcccccctgagtacttgat

SEQ ID NO: 1720186 - DNA, 25 bp, Homo sapien
gcttctgcagctcccgattcttgct

SEQ ID NO: 1720187 - DNA, 25 bp, Homo sapien
aagcgggaggagctttgccgtcgct

SEQ ID NO: 1720188 - DNA, 25 bp, Homo sapien
cagctcccgattcttgctgaggttg

SEQ ID NO: 1720189 - DNA, 25 bp, Homo sapien
ttgaagcgggaggagctttgccgtc

SEQ ID NO: 1720190 - DNA, 25 bp, Homo sapien
gggtaaatggcctcagtgacaacat

SEQ ID NO: 1720191 - DNA, 25 bp, Homo sapien
cagcactggcgtagcttctggataa

SEQ ID NO: 1720192 - DNA, 25 bp, Homo sapien
cagtgacaacatcacggctatgggt

SEQ ID NO: 1720193 - DNA, 25 bp, Homo sapien
cactgagtgggtctgacacgaagtc

SEQ ID NO: 1720194 - DNA, 25 bp, Homo sapien
gcttctccagagcccctcaccagtc

SEQ ID NO: 1720195 - DNA, 25 bp, Homo sapien
agggccagttagagctccacctggg

SEQ ID NO: 1720196 - DNA, 25 bp, Homo sapien
gtagggccagttagagctccacctg

SEQ ID NO: 1720197 - DNA, 25 bp, Homo sapien
gggtagggccagttagagctccacc

SEQ ID NO: 1720198 - DNA, 25 bp, Homo sapien
cagcccctgtgggattcgatgaagg

SEQ ID NO: 1720199 - DNA, 25 bp, Homo sapien
ctctgggtcaaactcagcccctgtg

SEQ ID NO: 1720200 - DNA, 25 bp, Homo sapien
gcgtccggaagaggttcactgaaaa

SEQ ID NO: 1720201 - DNA, 25 bp, Homo sapien
gcagcgtccggaagaggttcactga

SEQ ID NO: 1720202 - DNA, 25 bp, Homo sapien
gcaagtacaaacttctggtcgatgt

SEQ ID NO: 1720203 - DNA, 25 bp, Homo sapien
tcaggagactcaaggaaacgtaaga

SEQ ID NO: 1720204 - DNA, 25 bp, Homo sapien
cgatgtacttcttggctatgtttgg

SEQ ID NO: 1720205 - DNA, 25 bp, Homo sapien
tatgtttggctggaaatcaggagac

SEQ ID NO: 1720206 - DNA, 25 bp, Homo sapien
gaggaagtcccgctctcgaggatcc

SEQ ID NO: 1720207 - DNA, 25 bp, Homo sapien
aacttgccatagatgcgatgcaaaa

SEQ ID NO: 1720208 - DNA, 25 bp, Homo sapien
ctgtagaagatgtggttgatctgcc

SEQ ID NO: 1720209 - DNA, 25 bp, Homo sapien
tgcctacggatataagcccggagcc

SEQ ID NO: 1720210 - DNA, 25 bp, Homo sapien
gcagaaggttttgctcctaagcctg

SEQ ID NO: 1720211 - DNA, 25 bp, Homo sapien
agaaaaatggctctcttgacaaccc

SEQ ID NO: 1720212 - DNA, 25 bp, Homo sapien
ccctccagcattctgtacagtcccc

SEQ ID NO: 1720213 - DNA, 25 bp, Homo sapien
caccccacctcagtagcagaaggtt

SEQ ID NO: 1720214 - DNA, 25 bp, Homo sapien
gcaatcccgttgtgatgctccgtct

SEQ ID NO: 1720215 - DNA, 25 bp, Homo sapien
tcagcaatcccgttgtgatgctccg

SEQ ID NO: 1720216 - DNA, 25 bp, Homo sapien
aatcccgttgtgatgctccgtctcg

SEQ ID NO: 1720217 - DNA, 25 bp, Homo sapien
ctcagcaatcccgttgtgatgctcc

SEQ ID NO: 1720218 - DNA, 25 bp, Homo sapien
tgctcttctttaaggggcagggcaa

SEQ ID NO: 1720219 - DNA, 25 bp, Homo sapien
cactcagggacttgaccttgtgaag

SEQ ID NO: 1720220 - DNA, 25 bp, Homo sapien
cacggatgaggaacatcttgtgctc

SEQ ID NO: 1720221 - DNA, 25 bp, Homo sapien
aagtaggacacggatgaggaacatc

SEQ ID NO: 1720222 - DNA, 25 bp, Homo sapien
ggctcagtcagactgctctccttct

SEQ ID NO: 1720223 - DNA, 25 bp, Homo sapien
cggctcagtcagactgctctccttc

SEQ ID NO: 1720224 - DNA, 25 bp, Homo sapien
ggaattgtaccacacagtatgccag

SEQ ID NO: 1720225 - DNA, 25 bp, Homo sapien
tccaggaattgtaccacacagtatg

SEQ ID NO: 1720226 - DNA, 25 bp, Homo sapien
ggtgatctcagccagctacccgttt

SEQ ID NO: 1720227 - DNA, 25 bp, Homo sapien
ggtcaggtcacagccctcctgagtt

SEQ ID NO: 1720228 - DNA, 25 bp, Homo sapien
gagaggaaaccatgttaccggtcag

SEQ ID NO: 1720229 - DNA, 25 bp, Homo sapien
taggtacagactggcaagtgatgct

SEQ ID NO: 1720230 - DNA, 25 bp, Homo sapien
ttcaatgacgtccagaatctcctcc

SEQ ID NO: 1720231 - DNA, 25 bp, Homo sapien
agctcattcaagaacatcacctcct

SEQ ID NO: 1720232 - DNA, 25 bp, Homo sapien
tccagctcattcaagaacatcacct

SEQ ID NO: 1720233 - DNA, 25 bp, Homo sapien
tgctgaactcagaaggttcaatgac

SEQ ID NO: 1720234 - DNA, 25 bp, Homo sapien
ggaggactcgggcagcattgtcact

SEQ ID NO: 1720235 - DNA, 25 bp, Homo sapien
cgggcagcattgtcacttatcaggc

SEQ ID NO: 1720236 - DNA, 25 bp, Homo sapien
ggactcgggcagcattgtcacttat

SEQ ID NO: 1720237 - DNA, 25 bp, Homo sapien
gcagcattgtcacttatcaggctca

SEQ ID NO: 1720238 - DNA, 25 bp, Homo sapien
acaacttcagggcattatagatcag

SEQ ID NO: 1720239 - DNA, 25 bp, Homo sapien
cttcagggcattatagatcagtcca

SEQ ID NO: 1720240 - DNA, 25 bp, Homo sapien
gccttgtattgttgtgtgcagtcat

SEQ ID NO: 1720241 - DNA, 25 bp, Homo sapien
acttcagggcattatagatcagtcc

SEQ ID NO: 1720242 - DNA, 25 bp, Homo sapien
gccacatctcttccctttccttcat

SEQ ID NO: 1720243 - DNA, 25 bp, Homo sapien
ccagctcctcgattttttgccacat

SEQ ID NO: 1720244 - DNA, 25 bp, Homo sapien
ttgccacatctcttccctttccttc

SEQ ID NO: 1720245 - DNA, 25 bp, Homo sapien
tctcttccctttccttcattcggaa

SEQ ID NO: 1720246 - DNA, 25 bp, Homo sapien
ggtggaggggctcggaacatgggat

SEQ ID NO: 1720247 - DNA, 25 bp, Homo sapien
ctctgtctccatcgagtacacaggg

SEQ ID NO: 1720248 - DNA, 25 bp, Homo sapien
tccatcgagtacacagggggcagtg

SEQ ID NO: 1720249 - DNA, 25 bp, Homo sapien
gtctctgtctccatcgagtacacag

SEQ ID NO: 1720250 - DNA, 25 bp, Homo sapien
tggtgaccaattcccagtgaattct

SEQ ID NO: 1720251 - DNA, 25 bp, Homo sapien
agtgaattctattgttccgtcccct

SEQ ID NO: 1720252 - DNA, 25 bp, Homo sapien
gtgtgaatagggacaaggtgaggaa

SEQ ID NO: 1720253 - DNA, 25 bp, Homo sapien
tgaattctattgttccgtcccctta

SEQ ID NO: 1720254 - DNA, 25 bp, Homo sapien
gtgccttgatggtgtacacgtcctg

SEQ ID NO: 1720255 - DNA, 25 bp, Homo sapien
gccttgatggtgtacacgtcctggg

SEQ ID NO: 1720256 - DNA, 25 bp, Homo sapien
ttaggaactcttccgcccgcttgtg

SEQ ID NO: 1720257 - DNA, 25 bp, Homo sapien
ctcctggctggcagttaggaactct

SEQ ID NO: 1720258 - DNA, 25 bp, Homo sapien
tatgtacacagccaaaagccgcact

SEQ ID NO: 1720259 - DNA, 25 bp, Homo sapien
ccttgagtagctagagaggcgctgc

SEQ ID NO: 1720260 - DNA, 25 bp, Homo sapien
ccttagcatgtatcactctgtggag

SEQ ID NO: 1720261 - DNA, 25 bp, Homo sapien
tgctgctcaccaaagacagggcacg

SEQ ID NO: 1720262 - DNA, 25 bp, Homo sapien
tagtccccaacgagataaacacagc

SEQ ID NO: 1720263 - DNA, 25 bp, Homo sapien
agccaagctcggttcttccggcggg

SEQ ID NO: 1720264 - DNA, 25 bp, Homo sapien
cagtcgtagctaagtgccggaggca

SEQ ID NO: 1720265 - DNA, 25 bp, Homo sapien
gaggcatttcgggacttgtagtcca

SEQ ID NO: 1720266 - DNA, 25 bp, Homo sapien
tgatccaccgtcctcggtctcctga

SEQ ID NO: 1720267 - DNA, 25 bp, Homo sapien
atccaccgtcctcggtctcctgaag

SEQ ID NO: 1720268 - DNA, 25 bp, Homo sapien
ccaccgtcctcggtctcctgaagtg

SEQ ID NO: 1720269 - DNA, 25 bp, Homo sapien
caccgtcctcggtctcctgaagtgc

SEQ ID NO: 1720270 - DNA, 25 bp, Homo sapien
cccacaggcacaaggagttcctttg

SEQ ID NO: 1720271 - DNA, 25 bp, Homo sapien
agggacctccatgttaccgcggttg

SEQ ID NO: 1720272 - DNA, 25 bp, Homo sapien
ctcctgtcaagctgagttgttgtca

SEQ ID NO: 1720273 - DNA, 25 bp, Homo sapien
gttggttagcccctcacagggagct

SEQ ID NO: 1720274 - DNA, 25 bp, Homo sapien
acaaattggggccacgggatcctca

SEQ ID NO: 1720275 - DNA, 25 bp, Homo sapien
accagcctttgcctccaagtgtcac

SEQ ID NO: 1720276 - DNA, 25 bp, Homo sapien
ttgcctccaagtgtcaccctggggg

SEQ ID NO: 1720277 - DNA, 25 bp, Homo sapien
gatcctcaggcgaggcttctgccca

SEQ ID NO: 1720278 - DNA, 25 bp, Homo sapien
gcaacatgcccccccggcacggcct

SEQ ID NO: 1720279 - DNA, 25 bp, Homo sapien
ggccactggttacagcaacatgccc

SEQ ID NO: 1720280 - DNA, 25 bp, Homo sapien
cccctgggccactggttacagcaac

SEQ ID NO: 1720281 - DNA, 25 bp, Homo sapien
tgggccactggttacagcaacatgc

SEQ ID NO: 1720282 - DNA, 25 bp, Homo sapien
actgcagcatggttcaccctgcggg

SEQ ID NO: 1720283 - DNA, 25 bp, Homo sapien
aaatgtgcacatctatctgacgcag

SEQ ID NO: 1720284 - DNA, 25 bp, Homo sapien
aggagtatacccgatgcccgacagc

SEQ ID NO: 1720285 - DNA, 25 bp, Homo sapien
tagtcttcaccagagcagtaacccc

SEQ ID NO: 1720286 - DNA, 25 bp, Homo sapien
aatccccttggtcccagagaccaca

SEQ ID NO: 1720287 - DNA, 25 bp, Homo sapien
caaaccagatgtttgtccccaatcc

SEQ ID NO: 1720288 - DNA, 25 bp, Homo sapien
agagaccacagccaaacctcatcag

SEQ ID NO: 1720289 - DNA, 25 bp, Homo sapien
gctgtccacttttcccaaaccagat

SEQ ID NO: 1720290 - DNA, 25 bp, Homo sapien
gggcagctttgtccaacgcaaggac

SEQ ID NO: 1720291 - DNA, 25 bp, Homo sapien
gcttgcccacggatggcagacttca

SEQ ID NO: 1720292 - DNA, 25 bp, Homo sapien
agcgcatgtagggtaccacaggagc

SEQ ID NO: 1720293 - DNA, 25 bp, Homo sapien
atgtagggtaccacaggagcttgcc

SEQ ID NO: 1720294 - DNA, 25 bp, Homo sapien
cgcccgccccaaaggaggactgtgt

SEQ ID NO: 1720295 - DNA, 25 bp, Homo sapien
gagcacattgcaggccccttcggtg

SEQ ID NO: 1720296 - DNA, 25 bp, Homo sapien
tcgatgaggacggttgagtgtccat

SEQ ID NO: 1720297 - DNA, 25 bp, Homo sapien
caaaggaggactgtgtcgtcgatga

SEQ ID NO: 1720298 - DNA, 25 bp, Homo sapien
cggggtgtgaaccacttgtgcgtat

SEQ ID NO: 1720299 - DNA, 25 bp, Homo sapien
tgtacatgatcttgcctaggacaca

SEQ ID NO: 1720300 - DNA, 25 bp, Homo sapien
ctgctgctcgtagcccccaaaaatg

SEQ ID NO: 1720301 - DNA, 25 bp, Homo sapien
ccccaggaactgtccctgacactcg

SEQ ID NO: 1720302 - DNA, 25 bp, Homo sapien
atggtgctggtatctagcttgtgaa

SEQ ID NO: 1720303 - DNA, 25 bp, Homo sapien
gctggtatctagcttgtgaatgtca

SEQ ID NO: 1720304 - DNA, 25 bp, Homo sapien
ctttgtacagataagagtccatgtc

SEQ ID NO: 1720305 - DNA, 25 bp, Homo sapien
gataagagtccatgtcatggtgctg

SEQ ID NO: 1720306 - DNA, 25 bp, Homo sapien
gctgagtggaagtccctccagcgtg

SEQ ID NO: 1720307 - DNA, 25 bp, Homo sapien
tgttggaatggaatggcccaaagcg

SEQ ID NO: 1720308 - DNA, 25 bp, Homo sapien
caaagacatacatgtgacttcccag

SEQ ID NO: 1720309 - DNA, 25 bp, Homo sapien
gagtggaagtccctccagcgtgcag

SEQ ID NO: 1720310 - DNA, 25 bp, Homo sapien
gactcgaatgcggttgcagtaaatc

SEQ ID NO: 1720311 - DNA, 25 bp, Homo sapien
ttctggtgtcaaagactcgaatgcg

SEQ ID NO: 1720312 - DNA, 25 bp, Homo sapien
tgtcaaagactcgaatgcggttgca

SEQ ID NO: 1720313 - DNA, 25 bp, Homo sapien
gtcgggggacagtccagccaagcct

SEQ ID NO: 1720314 - DNA, 25 bp, Homo sapien
caggattaaacttccagaggtcatg

SEQ ID NO: 1720315 - DNA, 25 bp, Homo sapien
aggtcatggaagtgccggttcagcc

SEQ ID NO: 1720316 - DNA, 25 bp, Homo sapien
gccttgcattataaccaccaaagat

SEQ ID NO: 1720317 - DNA, 25 bp, Homo sapien
ggattaaacttccagaggtcatgga

SEQ ID NO: 1720318 - DNA, 25 bp, Homo sapien
aacaatacagcagcactggcgccgg

SEQ ID NO: 1720319 - DNA, 25 bp, Homo sapien
ctggtacccccaaagaggacaatct

SEQ ID NO: 1720320 - DNA, 25 bp, Homo sapien
tacccccaaagaggacaatcttgtc

SEQ ID NO: 1720321 - DNA, 25 bp, Homo sapien
caaagaggacaatcttgtcaccaac

SEQ ID NO: 1720322 - DNA, 25 bp, Homo sapien
cactctcccattagtgacttccctg

SEQ ID NO: 1720323 - DNA, 25 bp, Homo sapien
acctcccactctcccattagtgact

SEQ ID NO: 1720324 - DNA, 25 bp, Homo sapien
ctgtcgggatcaaaagagagatgaa

SEQ ID NO: 1720325 - DNA, 25 bp, Homo sapien
aagagagatgaaagtaggacaaaaa

SEQ ID NO: 1720326 - DNA, 25 bp, Homo sapien
gtgtaagtcagaatgatctataagg

SEQ ID NO: 1720327 - DNA, 25 bp, Homo sapien
cagaatgatctataaggtcaaattc

SEQ ID NO: 1720328 - DNA, 25 bp, Homo sapien
gtcagaatgatctataaggtcaaat

SEQ ID NO: 1720329 - DNA, 25 bp, Homo sapien
taagtcagaatgatctataaggtca

SEQ ID NO: 1720330 - DNA, 25 bp, Homo sapien
aggatccagtcctggatatcaccac

SEQ ID NO: 1720331 - DNA, 25 bp, Homo sapien
aaggtgaggaaaggatccagtcctg

SEQ ID NO: 1720332 - DNA, 25 bp, Homo sapien
gtcctggatatcaccacccaaagac

SEQ ID NO: 1720333 - DNA, 25 bp, Homo sapien
cagtcctggatatcaccacccaaag

SEQ ID NO: 1720334 - DNA, 25 bp, Homo sapien
acggccagtttgcacagagtcttca

SEQ ID NO: 1720335 - DNA, 25 bp, Homo sapien
tatactgaatcacggccagtttgca

SEQ ID NO: 1720336 - DNA, 25 bp, Homo sapien
ctgatatcatgaggcaaacaggact

SEQ ID NO: 1720337 - DNA, 25 bp, Homo sapien
ctaggttatactgaatcacggccag

SEQ ID NO: 1720338 - DNA, 25 bp, Homo sapien
tgttctcagcatggtcacaaaaata

SEQ ID NO: 1720339 - DNA, 25 bp, Homo sapien
caagtacactacatctccagcagaa

SEQ ID NO: 1720340 - DNA, 25 bp, Homo sapien
aaatgtctgtctcctccatactgaa

SEQ ID NO: 1720341 - DNA, 25 bp, Homo sapien
aaccaagctaatcaggtcacacctg

SEQ ID NO: 1720342 - DNA, 25 bp, Homo sapien
aagtaacatctggtggttaatttga

SEQ ID NO: 1720343 - DNA, 25 bp, Homo sapien
taacatctggtggttaattggaacc

SEQ ID NO: 1720344 - DNA, 25 bp, Homo sapien
taaactgaactgatacaaagagacg

SEQ ID NO: 1720345 - DNA, 25 bp, Homo sapien
agacgaagtatctcagaatgaccca

SEQ ID NO: 1720346 - DNA, 25 bp, Homo sapien
cagcccaagctaagggatgtttgaa

SEQ ID NO: 1720347 - DNA, 25 bp, Homo sapien
gacctactaggttgaacaatcagaa

SEQ ID NO: 1720348 - DNA, 25 bp, Homo sapien
ttgaaccaagctaaaaacacaccag

SEQ ID NO: 1720349 - DNA, 25 bp, Homo sapien
tgtatgtatattgcagtgtccaggc

SEQ ID NO: 1720350 - DNA, 25 bp, Homo sapien
acgatggggcgactgatattgctgt

SEQ ID NO: 1720351 - DNA, 25 bp, Homo sapien
tgttggtggtcatggcattcagctc

SEQ ID NO: 1720352 - DNA, 25 bp, Homo sapien
gatattgctgttggtggtcatggca

SEQ ID NO: 1720353 - DNA, 25 bp, Homo sapien
gcgactgatattgctgttggtggtc

SEQ ID NO: 1720354 - DNA, 25 bp, Homo sapien
caactccacatggaggtataccaag

SEQ ID NO: 1720355 - DNA, 25 bp, Homo sapien
agcacagagaacacctctcgcccaa

SEQ ID NO: 1720356 - DNA, 25 bp, Homo sapien
tcgcccaacaactccacatggaggt

SEQ ID NO: 1720357 - DNA, 25 bp, Homo sapien
acatggaggtataccaagtccaggg

SEQ ID NO: 1720358 - DNA, 25 bp, Homo sapien
agcagaggggaggggataggcaaag

SEQ ID NO: 1720359 - DNA, 25 bp, Homo sapien
cagaggggaggggataggcaaaggg

SEQ ID NO: 1720360 - DNA, 25 bp, Homo sapien
caagcagaggggaggggataggcaa

SEQ ID NO: 1720361 - DNA, 25 bp, Homo sapien
tcaagcagaggggaggggataggca

SEQ ID NO: 1720362 - DNA, 25 bp, Homo sapien
gagaaggaggtctcatgccaacagc

SEQ ID NO: 1720363 - DNA, 25 bp, Homo sapien
agaaggaggtctcatgccaacagct

SEQ ID NO: 1720364 - DNA, 25 bp, Homo sapien
ggtgggatttatctgctggtcccca

SEQ ID NO: 1720365 - DNA, 25 bp, Homo sapien
taaaatctgagctggctgaacttca

SEQ ID NO: 1720366 - DNA, 25 bp, Homo sapien
tacagcgacagctcaaggaagggtg

SEQ ID NO: 1720367 - DNA, 25 bp, Homo sapien
tgaacttcagagtacagcgacagct

SEQ ID NO: 1720368 - DNA, 25 bp, Homo sapien
gctggcagtagcgctcggaagacga

SEQ ID NO: 1720369 - DNA, 25 bp, Homo sapien
agctggcagtagcgctcggaagacg

SEQ ID NO: 1720370 - DNA, 25 bp, Homo sapien
cagctggcagtagcgctcggaagac

SEQ ID NO: 1720371 - DNA, 25 bp, Homo sapien
cggcgcggtagttagctcccggcat

SEQ ID NO: 1720372 - DNA, 25 bp, Homo sapien
ctcaataggtcgcgggccacggccg

SEQ ID NO: 1720373 - DNA, 25 bp, Homo sapien
ccctcaataggtcgcgggccacggc

SEQ ID NO: 1720374 - DNA, 25 bp, Homo sapien
ccggcgcggtagttagctcccggca

SEQ ID NO: 1720375 - DNA, 25 bp, Homo sapien
tgtacgtcttagtccccacttggct

SEQ ID NO: 1720376 - DNA, 25 bp, Homo sapien
gctaccaattgtttgtacgtcttag

SEQ ID NO: 1720377 - DNA, 25 bp, Homo sapien
gtttcttaggactatttccagctac

SEQ ID NO: 1720378 - DNA, 25 bp, Homo sapien
cacatgcattttggataggtggtct

SEQ ID NO: 1720379 - DNA, 25 bp, Homo sapien
taaaaatggtactcggatcttggct

SEQ ID NO: 1720380 - DNA, 25 bp, Homo sapien
caacctgacgtaaaaatggtactcg

SEQ ID NO: 1720381 - DNA, 25 bp, Homo sapien
ttactaatgggaacaacctgacgta

SEQ ID NO: 1720382 - DNA, 25 bp, Homo sapien
ggtactcggatcttggctgacattt

SEQ ID NO: 1720383 - DNA, 25 bp, Homo sapien
acagatcatcaaagcgagggtcccg

SEQ ID NO: 1720384 - DNA, 25 bp, Homo sapien
aacacctcaggattatattcccctg

SEQ ID NO: 1720385 - DNA, 25 bp, Homo sapien
cgctcggatgtcattcaagaattgg

SEQ ID NO: 1720386 - DNA, 25 bp, Homo sapien
ggtatgttttgtcaaacacctcagg

SEQ ID NO: 1720387 - DNA, 25 bp, Homo sapien
caaaattccccataaaccagtctca

SEQ ID NO: 1720388 - DNA, 25 bp, Homo sapien
tgaattggagagagttaaatctgcc

SEQ ID NO: 1720389 - DNA, 25 bp, Homo sapien
aactctctaacctgtgccctcattt

SEQ ID NO: 1720390 - DNA, 25 bp, Homo sapien
gccaggatttgaatatgaactgaat

SEQ ID NO: 1720391 - DNA, 25 bp, Homo sapien
aaatgagtatcatggttagcattct

SEQ ID NO: 1720392 - DNA, 25 bp, Homo sapien
gagtatcatggttagcattctgcaa

SEQ ID NO: 1720393 - DNA, 25 bp, Homo sapien
catggttagcattctgcaaatgtta

SEQ ID NO: 1720394 - DNA, 25 bp, Homo sapien
tatcatggttagcattctgcaaatg

SEQ ID NO: 1720395 - DNA, 25 bp, Homo sapien
agtttctcatgctcctctcctgaaa

SEQ ID NO: 1720396 - DNA, 25 bp, Homo sapien
tgctgcagtttctcatgctcctctc

SEQ ID NO: 1720397 - DNA, 25 bp, Homo sapien
ttcgctgaagcagttgctgcagttt

SEQ ID NO: 1720398 - DNA, 25 bp, Homo sapien
cattcgctgaagcagttgctgcagt

SEQ ID NO: 1720399 - DNA, 25 bp, Homo sapien
tttcaggaagtatggccgatggccc

SEQ ID NO: 1720400 - DNA, 25 bp, Homo sapien
ttcaggaagtatggccgatggccct

SEQ ID NO: 1720401 - DNA, 25 bp, Homo sapien
tgagcccgacgttcttgcttcaggg

SEQ ID NO: 1720402 - DNA, 25 bp, Homo sapien
ctgggcctgagcccgacgttcttgc

SEQ ID NO: 1720403 - DNA, 25 bp, Homo sapien
ggatcagggacaccccaacacaaga

SEQ ID NO: 1720404 - DNA, 25 bp, Homo sapien
tccctgttagcaacagttgtgccca

SEQ ID NO: 1720405 - DNA, 25 bp, Homo sapien
catgccttccttaaaggggatcagg

SEQ ID NO: 1720406 - DNA, 25 bp, Homo sapien
aacacaagactctaccaccatggcc

SEQ ID NO: 1720407 - DNA, 25 bp, Homo sapien
tgaacaaagaaggaagcccctattc

SEQ ID NO: 1720408 - DNA, 25 bp, Homo sapien
caagccattatgctggatacatgag

SEQ ID NO: 1720409 - DNA, 25 bp, Homo sapien
gagttctttaaagctcactggtgcc

SEQ ID NO: 1720410 - DNA, 25 bp, Homo sapien
cagggagaatgaaagttggtgaaca

SEQ ID NO: 1720411 - DNA, 25 bp, Homo sapien
tgcgtttcagctccttgaacttctc

SEQ ID NO: 1720412 - DNA, 25 bp, Homo sapien
tcagctagtgccaactggcgctgct

SEQ ID NO: 1720413 - DNA, 25 bp, Homo sapien
gctagtgccaactggcgctgctcag

SEQ ID NO: 1720414 - DNA, 25 bp, Homo sapien
ccaatttcttgctgcgtttcagctc

SEQ ID NO: 1720415 - DNA, 25 bp, Homo sapien
ctctttgctcaaagggagatgtctc

SEQ ID NO: 1720416 - DNA, 25 bp, Homo sapien
tcaaagggagatgtctcctgtcctt

SEQ ID NO: 1720417 - DNA, 25 bp, Homo sapien
tctttgctcaaagggagatgtctcc

SEQ ID NO: 1720418 - DNA, 25 bp, Homo sapien
ttgctcaaagggagatgtctcctgt

SEQ ID NO: 1720419 - DNA, 25 bp, Homo sapien
gatgagagaagaacacgaggacgca

SEQ ID NO: 1720420 - DNA, 25 bp, Homo sapien
tgcccttgaacggaaaccagccgtg

SEQ ID NO: 1720421 - DNA, 25 bp, Homo sapien
tcagaatccctggtttaaggcaagg

SEQ ID NO: 1720422 - DNA, 25 bp, Homo sapien
gaactattcttgtgtagccctaggg

SEQ ID NO: 1720423 - DNA, 25 bp, Homo sapien
taaactaagttatcagcctgaggat

SEQ ID NO: 1720424 - DNA, 25 bp, Homo sapien
gcccagcctacttgagactatttta

SEQ ID NO: 1720425 - DNA, 25 bp, Homo sapien
ccctggagacactatctacttgaga

SEQ ID NO: 1720426 - DNA, 25 bp, Homo sapien
tcccagttgtagatgccttaggctt

SEQ ID NO: 1720427 - DNA, 25 bp, Homo sapien
gagatagggtttcactgtactagcc

SEQ ID NO: 1720428 - DNA, 25 bp, Homo sapien
catgcctggccctacttttcatttt

SEQ ID NO: 1720429 - DNA, 25 bp, Homo sapien
ccatgcctggccctacttttcattt

SEQ ID NO: 1720430 - DNA, 25 bp, Homo sapien
ttgattgtcaagtctcacatttatc

SEQ ID NO: 1720431 - DNA, 25 bp, Homo sapien
taccctataaaagaccagatcctgg

SEQ ID NO: 1720432 - DNA, 25 bp, Homo sapien
tggctgttcacaagcgcaatcactg

SEQ ID NO: 1720433 - DNA, 25 bp, Homo sapien
tgctataaagccatgtgaccaagac

SEQ ID NO: 1720434 - DNA, 25 bp, Homo sapien
catatgtgacaacagggaccctgca

SEQ ID NO: 1720435 - DNA, 25 bp, Homo sapien
aaagcaacaatttgaaggcttagag

SEQ ID NO: 1720436 - DNA, 25 bp, Homo sapien
ctgttgaaggggaaaagcaacaatt

SEQ ID NO: 1720437 - DNA, 25 bp, Homo sapien
ttgaaggggaaaagcaacaatttga

SEQ ID NO: 1720438 - DNA, 25 bp, Homo sapien
ggaaaagcaacaatttgaaggctta

SEQ ID NO: 1720439 - DNA, 25 bp, Homo sapien
caacagctgaagctcagaggtttcc

SEQ ID NO: 1720440 - DNA, 25 bp, Homo sapien
actgaggatgactgctaaggggcat

SEQ ID NO: 1720441 - DNA, 25 bp, Homo sapien
gtatagttaagtgaactgtatctca

SEQ ID NO: 1720442 - DNA, 25 bp, Homo sapien
tgttccaaaattgtaatagttgcac

SEQ ID NO: 1720443 - DNA, 25 bp, Homo sapien
ggcatcccgaggctcgtagcccaga

SEQ ID NO: 1720444 - DNA, 25 bp, Homo sapien
gaaaggagggatgacccaggcatcc

SEQ ID NO: 1720445 - DNA, 25 bp, Homo sapien
ccaggggatcctgtgccaaaggtgc

SEQ ID NO: 1720446 - DNA, 25 bp, Homo sapien
tcgtagcccagaggtgacagaaaaa

SEQ ID NO: 1720447 - DNA, 25 bp, Homo sapien
gcaagggcacgctgagacgccatga

SEQ ID NO: 1720448 - DNA, 25 bp, Homo sapien
ggtttggtcagcagccttggtaagg

SEQ ID NO: 1720449 - DNA, 25 bp, Homo sapien
ccagagcttctctaccttccggtag

SEQ ID NO: 1720450 - DNA, 25 bp, Homo sapien
gctgtcctatgcagtccctgtgact

SEQ ID NO: 1720451 - DNA, 25 bp, Homo sapien
tcgagatgggacattgtgcggctca

SEQ ID NO: 1720452 - DNA, 25 bp, Homo sapien
tcagacgtacctgcaagctgagggt

SEQ ID NO: 1720453 - DNA, 25 bp, Homo sapien
tcaagattcgagatggcagcaagga

SEQ ID NO: 1720454 - DNA, 25 bp, Homo sapien
tccgaatcctcaaggcccatggaga

SEQ ID NO: 1720455 - DNA, 25 bp, Homo sapien
acattgaccagcagatccagggcag

SEQ ID NO: 1720456 - DNA, 25 bp, Homo sapien
gcaatgcctgcaagctgtcctgatt

SEQ ID NO: 1720457 - DNA, 25 bp, Homo sapien
ctcaggtgagtgagcagttcgcccg

SEQ ID NO: 1720458 - DNA, 25 bp, Homo sapien
gcattattaccagtgagtgtggacc

SEQ ID NO: 1720459 - DNA, 25 bp, Homo sapien
gcattcatatctactttccagaccc

SEQ ID NO: 1720460 - DNA, 25 bp, Homo sapien
aaatagttgtatgaaagcaccaacc

SEQ ID NO: 1720461 - DNA, 25 bp, Homo sapien
ccagcattcatatctactttccaga

SEQ ID NO: 1720462 - DNA, 25 bp, Homo sapien
ataaaatagttgtatgaaagcacca

SEQ ID NO: 1720463 - DNA, 25 bp, Homo sapien
tgagaaacctgacgcgctgttggcg

SEQ ID NO: 1720464 - DNA, 25 bp, Homo sapien
tcctcggcccagtgagtagtggaga

SEQ ID NO: 1720465 - DNA, 25 bp, Homo sapien
gaaacagaagccacgactggagctc

SEQ ID NO: 1720466 - DNA, 25 bp, Homo sapien
tgctggtgcatgtcgagccctgtga

SEQ ID NO: 1720467 - DNA, 25 bp, Homo sapien
cacaaatcaaaacgctctaacaagg

SEQ ID NO: 1720468 - DNA, 25 bp, Homo sapien
ggtatacactgagaattcttgctct

SEQ ID NO: 1720469 - DNA, 25 bp, Homo sapien
cacaccccttactggtaactacttg

SEQ ID NO: 1720470 - DNA, 25 bp, Homo sapien
cccgtgttcccttatgcaaatataa

SEQ ID NO: 1720471 - DNA, 25 bp, Homo sapien
gagaagcaggcattgtgttccctca

SEQ ID NO: 1720472 - DNA, 25 bp, Homo sapien
tagaagctgcaacttagagagaagc

SEQ ID NO: 1720473 - DNA, 25 bp, Homo sapien
gagagaagcaacaaacggagaagca

SEQ ID NO: 1720474 - DNA, 25 bp, Homo sapien
gaagtgatgccaccttagaagctgc

SEQ ID NO: 1720475 - DNA, 25 bp, Homo sapien
cagcgactcaatgacagtgccctca

SEQ ID NO: 1720476 - DNA, 25 bp, Homo sapien
ctagcagggaaccaagcctacccat

SEQ ID NO: 1720477 - DNA, 25 bp, Homo sapien
tcagggacctgatcaactgccatgt

SEQ ID NO: 1720478 - DNA, 25 bp, Homo sapien
tacaagaagtatgggcctgaagccc

SEQ ID NO: 1720479 - DNA, 25 bp, Homo sapien
tgagtggtgggaactcctcttcttc

SEQ ID NO: 1720480 - DNA, 25 bp, Homo sapien
tgcactggcacatgctggagatctt

SEQ ID NO: 1720481 - DNA, 25 bp, Homo sapien
cactggcacatgctggagatcttgg

SEQ ID NO: 1720482 - DNA, 25 bp, Homo sapien
tggcacatgctggagatcttgggct

SEQ ID NO: 1720483 - DNA, 25 bp, Homo sapien
ggtgcactggcacatgctggagatc

SEQ ID NO: 1720484 - DNA, 25 bp, Homo sapien
catagggcgaaattcttcagacgag

SEQ ID NO: 1720485 - DNA, 25 bp, Homo sapien
cagatcaccggttgtgcaggtttca

SEQ ID NO: 1720486 - DNA, 25 bp, Homo sapien
tgcgagtctggtcaggagtcatgca

SEQ ID NO: 1720487 - DNA, 25 bp, Homo sapien
catgcaggtccgtgaccttggataa

SEQ ID NO: 1720488 - DNA, 25 bp, Homo sapien
ttttacgttattgcggagcgacggc

SEQ ID NO: 1720489 - DNA, 25 bp, Homo sapien
cagtcaacgtcatctaggagcaccg

SEQ ID NO: 1720490 - DNA, 25 bp, Homo sapien
gattggctctcacggcgttcaggta

SEQ ID NO: 1720491 - DNA, 25 bp, Homo sapien
tagtcacgcgacattagagctgccc

SEQ ID NO: 1720492 - DNA, 25 bp, Homo sapien
gagtgcctcgggctgtcgacctgcc

SEQ ID NO: 1720493 - DNA, 25 bp, Homo sapien
tccagcgaggacgtggaggcctaac

SEQ ID NO: 1720494 - DNA, 25 bp, Homo sapien
cctaacgaccccgaggtcactgagt

SEQ ID NO: 1720495 - DNA, 25 bp, Homo sapien
gatggacgactgaggtccgcagctc

SEQ ID NO: 1720496 - DNA, 25 bp, Homo sapien
agaatgggaggtctgctgaacggct

SEQ ID NO: 1720497 - DNA, 25 bp, Homo sapien
tctgctgaacggctgccgggtcgca

SEQ ID NO: 1720498 - DNA, 25 bp, Homo sapien
gaggaatcaccgtagggtgcctcca

SEQ ID NO: 1720499 - DNA, 25 bp, Homo sapien
tccacaatgcccgatgatgcaggaa

SEQ ID NO: 1720500 - DNA, 25 bp, Homo sapien
tcactccaaacccagtcacttccat

SEQ ID NO: 1720501 - DNA, 25 bp, Homo sapien
ctggtcactccaaacccagtcactt

SEQ ID NO: 1720502 - DNA, 25 bp, Homo sapien
ggtcactccaaacccagtcacttcc

SEQ ID NO: 1720503 - DNA, 25 bp, Homo sapien
tggtcactccaaacccagtcacttc

SEQ ID NO: 1720504 - DNA, 25 bp, Homo sapien
agcaagaggcgtgtctgggaaaggg

SEQ ID NO: 1720505 - DNA, 25 bp, Homo sapien
cctcattgcaggcctagggagctac

SEQ ID NO: 1720506 - DNA, 25 bp, Homo sapien
ctagggagctactgtctcccaggaa

SEQ ID NO: 1720507 - DNA, 25 bp, Homo sapien
gagagagagacttaaccagagacct

SEQ ID NO: 1720508 - DNA, 25 bp, Homo sapien
caggtcttcaaagacgcccaattcc

SEQ ID NO: 1720509 - DNA, 25 bp, Homo sapien
ctcaggccagagcacggaagaaact

SEQ ID NO: 1720510 - DNA, 25 bp, Homo sapien
tcaggccagagcacggaagaaactg

SEQ ID NO: 1720511 - DNA, 25 bp, Homo sapien
caggccagagcacggaagaaactgt

SEQ ID NO: 1720512 - DNA, 25 bp, Homo sapien
ggccagagcacggaagaaactgttc

SEQ ID NO: 1720513 - DNA, 25 bp, Homo sapien
cctcagaggggtcttgtttctcatc

SEQ ID NO: 1720514 - DNA, 25 bp, Homo sapien
tgtgttcccacttcctcagaggggt

SEQ ID NO: 1720515 - DNA, 25 bp, Homo sapien
ttttccatagaacggcgaagctgcc

SEQ ID NO: 1720516 - DNA, 25 bp, Homo sapien
ggctttgcagcacggcctggtgttc

SEQ ID NO: 1720517 - DNA, 25 bp, Homo sapien
ggtgttcactgcgtagggcctctag

SEQ ID NO: 1720518 - DNA, 25 bp, Homo sapien
agacactcaatggtctgggacaggc

SEQ ID NO: 1720519 - DNA, 25 bp, Homo sapien
caatagtttccatctcgctcaaagt

SEQ ID NO: 1720520 - DNA, 25 bp, Homo sapien
cagtggtgctaccttcaaaacatac

SEQ ID NO: 1720521 - DNA, 25 bp, Homo sapien
tgtaacccaacaacctgatgatgcc

SEQ ID NO: 1720522 - DNA, 25 bp, Homo sapien
gagcctactgggacgtggcaagact

SEQ ID NO: 1720523 - DNA, 25 bp, Homo sapien
gggcacatcccctgagctccagatt

SEQ ID NO: 1720524 - DNA, 25 bp, Homo sapien
ctaggtgggcacatcccctgagctc

SEQ ID NO: 1720525 - DNA, 25 bp, Homo sapien
tgggcacatcccctgagctccagat

SEQ ID NO: 1720526 - DNA, 25 bp, Homo sapien
ggtgggcacatcccctgagctccag

SEQ ID NO: 1720527 - DNA, 25 bp, Homo sapien
agcttctgtttctccgactccactg

SEQ ID NO: 1720528 - DNA, 25 bp, Homo sapien
tctccgactccactgtgctcaggtg

SEQ ID NO: 1720529 - DNA, 25 bp, Homo sapien
tgtttctccgactccactgtgctca

SEQ ID NO: 1720530 - DNA, 25 bp, Homo sapien
aggtggctggctagagccagcatca

SEQ ID NO: 1720531 - DNA, 25 bp, Homo sapien
agcctgttcactgcgctgtagccgc

SEQ ID NO: 1720532 - DNA, 25 bp, Homo sapien
actggttctcctggcatagccgccg

SEQ ID NO: 1720533 - DNA, 25 bp, Homo sapien
cactgcgctgtagccgctgctgggt

SEQ ID NO: 1720534 - DNA, 25 bp, Homo sapien
atcctcatcatactgccgcagctgc

SEQ ID NO: 1720535 - DNA, 25 bp, Homo sapien
aatcacagacagatgggacctagga

SEQ ID NO: 1720536 - DNA, 25 bp, Homo sapien
cctggaaaggctagcaagtggccca

SEQ ID NO: 1720537 - DNA, 25 bp, Homo sapien
gggccaagatatccctacctagtag

SEQ ID NO: 1720538 - DNA, 25 bp, Homo sapien
cagtgacccctctaagccatgaaat

SEQ ID NO: 1720539 - DNA, 25 bp, Homo sapien
ttggtggcatcgccttctttctcct

SEQ ID NO: 1720540 - DNA, 25 bp, Homo sapien
cttggtggcatcgccttctttctcc

SEQ ID NO: 1720541 - DNA, 25 bp, Homo sapien
aatccttggtggcatcgccttcttt

SEQ ID NO: 1720542 - DNA, 25 bp, Homo sapien
agggaatccttggtggcatcgcctt

SEQ ID NO: 1720543 - DNA, 25 bp, Homo sapien
accttgggctgcgtactggatcacc

SEQ ID NO: 1720544 - DNA, 25 bp, Homo sapien
tgcaacgtccgcaaccttgctggga

SEQ ID NO: 1720545 - DNA, 25 bp, Homo sapien
acggccacctcatagcgaccttggg

SEQ ID NO: 1720546 - DNA, 25 bp, Homo sapien
aggtcctctagtgcctgcttacaga

SEQ ID NO: 1720547 - DNA, 25 bp, Homo sapien
aggatggtcaggtcccaaggtgctc

SEQ ID NO: 1720548 - DNA, 25 bp, Homo sapien
gtgctctcccggatgctaagggcat

SEQ ID NO: 1720549 - DNA, 25 bp, Homo sapien
gggcagcttccttatacttattctg

SEQ ID NO: 1720550 - DNA, 25 bp, Homo sapien
tgctctcccggatgctaagggcatc

SEQ ID NO: 1720551 - DNA, 25 bp, Homo sapien
agagaggccaaaacagcaatggtgg

SEQ ID NO: 1720552 - DNA, 25 bp, Homo sapien
ctaagagaggccaaaacagcaatgg

SEQ ID NO: 1720553 - DNA, 25 bp, Homo sapien
ccaaaacagcaatggtggggggtgc

SEQ ID NO: 1720554 - DNA, 25 bp, Homo sapien
caaaacagcaatggtggggggtgcg

SEQ ID NO: 1720555 - DNA, 25 bp, Homo sapien
gaatcattaggatcactggacagtg

SEQ ID NO: 1720556 - DNA, 25 bp, Homo sapien
tataaaaaggagtcactgagtctca

SEQ ID NO: 1720557 - DNA, 25 bp, Homo sapien
gaagaaaggacttcttatgcctcct

SEQ ID NO: 1720558 - DNA, 25 bp, Homo sapien
cagcacccttagtgagtggactgag

SEQ ID NO: 1720559 - DNA, 25 bp, Homo sapien
caatacaactactgttgttttgtat

SEQ ID NO: 1720560 - DNA, 25 bp, Homo sapien
ttttaacaaagttgtactcaataca

SEQ ID NO: 1720561 - DNA, 25 bp, Homo sapien
tactcaatacaactactgttgtttt

SEQ ID NO: 1720562 - DNA, 25 bp, Homo sapien
ttaacaaagttgtactcaatacaac

SEQ ID NO: 1720563 - DNA, 25 bp, Homo sapien
gggaattattttcacacagatcaca

SEQ ID NO: 1720564 - DNA, 25 bp, Homo sapien
tgttgttgtcaccatgaagattacc

SEQ ID NO: 1720565 - DNA, 25 bp, Homo sapien
gccagacatccaaacgctaaatgta

SEQ ID NO: 1720566 - DNA, 25 bp, Homo sapien
aaaaatagctttttggctggacgca

SEQ ID NO: 1720567 - DNA, 25 bp, Homo sapien
gagcacagccaaattgttgagtgtg

SEQ ID NO: 1720568 - DNA, 25 bp, Homo sapien
ttgccccttttgccatagagcacag

SEQ ID NO: 1720569 - DNA, 25 bp, Homo sapien
agagcacagccaaattgttgagtgt

SEQ ID NO: 1720570 - DNA, 25 bp, Homo sapien
ctccagtgcccgctggcacagaggc

SEQ ID NO: 1720571 - DNA, 25 bp, Homo sapien
tgtgcacaagcacacgtgtgtttgc

SEQ ID NO: 1720572 - DNA, 25 bp, Homo sapien
ggctatgataacatgtgtgtgcaca

SEQ ID NO: 1720573 - DNA, 25 bp, Homo sapien
gaacaaaggagtggataaatggcta

SEQ ID NO: 1720574 - DNA, 25 bp, Homo sapien
agggttagaccagaggagccatgta

SEQ ID NO: 1720575 - DNA, 25 bp, Homo sapien
ggtagtagcgttccacggcctcata

SEQ ID NO: 1720576 - DNA, 25 bp, Homo sapien
tggtccgggctacattagggttgtc

SEQ ID NO: 1720577 - DNA, 25 bp, Homo sapien
cacaagagggccaggttgttcagct

SEQ ID NO: 1720578 - DNA, 25 bp, Homo sapien
agctgcccctcgtagatggccagtg

SEQ ID NO: 1720579 - DNA, 25 bp, Homo sapien
gtgtagggtcaagggtattcccagc

SEQ ID NO: 1720580 - DNA, 25 bp, Homo sapien
aagcagatccttcatccgcaaaggc

SEQ ID NO: 1720581 - DNA, 25 bp, Homo sapien
gactctaggacccaagtggcctctc

SEQ ID NO: 1720582 - DNA, 25 bp, Homo sapien
caggctcagggagttccacttctca

SEQ ID NO: 1720583 - DNA, 25 bp, Homo sapien
ggatctctttgtatagtgtctcagc

SEQ ID NO: 1720584 - DNA, 25 bp, Homo sapien
tgtacatgggcacgggtcaggatct

SEQ ID NO: 1720585 - DNA, 25 bp, Homo sapien
acatgggcacgggtcaggatctctt

SEQ ID NO: 1720586 - DNA, 25 bp, Homo sapien
tctttgtatagtgtctcagcctcag

SEQ ID NO: 1720587 - DNA, 25 bp, Homo sapien
gcatgcatccagatgggcttgtggt

SEQ ID NO: 1720588 - DNA, 25 bp, Homo sapien
atgcatccagatgggcttgtggtca

SEQ ID NO: 1720589 - DNA, 25 bp, Homo sapien
tcccgctcctctgcatgcatccaga

SEQ ID NO: 1720590 - DNA, 25 bp, Homo sapien
ttgctcatttcctcccgctcctctg

SEQ ID NO: 1720591 - DNA, 25 bp, Homo sapien
cttgtaccagcctccatactcagca

SEQ ID NO: 1720592 - DNA, 25 bp, Homo sapien
ttgtaccagcctccatactcagcat

SEQ ID NO: 1720593 - DNA, 25 bp, Homo sapien
atactcagcatagggtgtcccaccc

SEQ ID NO: 1720594 - DNA, 25 bp, Homo sapien
tccatactcagcatagggtgtccca

SEQ ID NO: 1720595 - DNA, 25 bp, Homo sapien
tggcgcctatacagagctcccaggt

SEQ ID NO: 1720596 - DNA, 25 bp, Homo sapien
tttccctggcgcctatacagagctc

SEQ ID NO: 1720597 - DNA, 25 bp, Homo sapien
ctggcgcctatacagagctcccagg

SEQ ID NO: 1720598 - DNA, 25 bp, Homo sapien
tccagctttccctggcgcctataca

SEQ ID NO: 1720599 - DNA, 25 bp, Homo sapien
tccctcgaatttcacactgtctcca

SEQ ID NO: 1720600 - DNA, 25 bp, Homo sapien
gccctcctgggaggtccttctacca

SEQ ID NO: 1720601 - DNA, 25 bp, Homo sapien
atcttcacctccctcgaatttcaca

SEQ ID NO: 1720602 - DNA, 25 bp, Homo sapien
gggaggtccttctaccatcactctc

SEQ ID NO: 1720603 - DNA, 25 bp, Homo sapien
cccggatcttgccaagagagccact

SEQ ID NO: 1720604 - DNA, 25 bp, Homo sapien
gttcactgcttctgcggagcacatc

SEQ ID NO: 1720605 - DNA, 25 bp, Homo sapien
aagagagccactcctctgcagggtc

SEQ ID NO: 1720606 - DNA, 25 bp, Homo sapien
ttcactgcttctgcggagcacatcc

SEQ ID NO: 1720607 - DNA, 25 bp, Homo sapien
gagggccgaggctcagtcccctgga

SEQ ID NO: 1720608 - DNA, 25 bp, Homo sapien
ccgaggctcagtcccctggagcttc

SEQ ID NO: 1720609 - DNA, 25 bp, Homo sapien
gggccgaggctcagtcccctggagc

SEQ ID NO: 1720610 - DNA, 25 bp, Homo sapien
aggctcagtcccctggagcttcctc

SEQ ID NO: 1720611 - DNA, 25 bp, Homo sapien
tccatggctggcccgttgacttcct

SEQ ID NO: 1720612 - DNA, 25 bp, Homo sapien
gtttctctccgagatacttctccag

SEQ ID NO: 1720613 - DNA, 25 bp, Homo sapien
tggaaaacggaagaattgaggcctc

SEQ ID NO: 1720614 - DNA, 25 bp, Homo sapien
ctgtgggcctcttgagcactgccac

SEQ ID NO: 1720615 - DNA, 25 bp, Homo sapien
ggtgctgcactaggttggttcagat

SEQ ID NO: 1720616 - DNA, 25 bp, Homo sapien
cactaggttggttcagatagttcaa

SEQ ID NO: 1720617 - DNA, 25 bp, Homo sapien
gttcagatagttcaaggaggctgct

SEQ ID NO: 1720618 - DNA, 25 bp, Homo sapien
caaggaggctgctcgcttcatgttg

SEQ ID NO: 1720619 - DNA, 25 bp, Homo sapien
tgctggcactgaggccccgggagac

SEQ ID NO: 1720620 - DNA, 25 bp, Homo sapien
tggtgctggcactgaggccccggga

SEQ ID NO: 1720621 - DNA, 25 bp, Homo sapien
atggtgctggcactgaggccccggg

SEQ ID NO: 1720622 - DNA, 25 bp, Homo sapien
gctgcttgaagagaggtccatggtg

SEQ ID NO: 1720623 - DNA, 25 bp, Homo sapien
gccaggagcaatggggaatgctgtg

SEQ ID NO: 1720624 - DNA, 25 bp, Homo sapien
gcagacctgggggccgggttgaatg

SEQ ID NO: 1720625 - DNA, 25 bp, Homo sapien
cccagcagacctgggggccgggttg

SEQ ID NO: 1720626 - DNA, 25 bp, Homo sapien
caatggggaatgctgtgagggctgt

SEQ ID NO: 1720627 - DNA, 25 bp, Homo sapien
tcctgagggtccttcctaagaggga

SEQ ID NO: 1720628 - DNA, 25 bp, Homo sapien
gaaatacatggacctgaagtgagac

SEQ ID NO: 1720629 - DNA, 25 bp, Homo sapien
gagggccatacctgctttgtaccca

SEQ ID NO: 1720630 - DNA, 25 bp, Homo sapien
tagctactctagaggaccacagggt

SEQ ID NO: 1720631 - DNA, 25 bp, Homo sapien
agactgcgctccgcggcgggcacag

SEQ ID NO: 1720632 - DNA, 25 bp, Homo sapien
gcacaggaggcggagcgcaccggag

SEQ ID NO: 1720633 - DNA, 25 bp, Homo sapien
ggcgcacggcgggcgcgcagactgc

SEQ ID NO: 1720634 - DNA, 25 bp, Homo sapien
gcgcgcgcccagtacctccgagtcc

SEQ ID NO: 1720635 - DNA, 25 bp, Homo sapien
tgagcagaggcaaccggcggggtct

SEQ ID NO: 1720636 - DNA, 25 bp, Homo sapien
acgctgagcagaggcaaccggcggg

SEQ ID NO: 1720637 - DNA, 25 bp, Homo sapien
ggtctggccggggatccccgcgcag

SEQ ID NO: 1720638 - DNA, 25 bp, Homo sapien
cagcaggacgctgagcagaggcaac

SEQ ID NO: 1720639 - DNA, 25 bp, Homo sapien
ggcagttctcgagcaaactctcggc

SEQ ID NO: 1720640 - DNA, 25 bp, Homo sapien
gatggtcttttctcccccgacaaga

SEQ ID NO: 1720641 - DNA, 25 bp, Homo sapien
gagccagcaactctcggcagttctc

SEQ ID NO: 1720642 - DNA, 25 bp, Homo sapien
tcggctcagaccagaaaaactcagg

SEQ ID NO: 1720643 - DNA, 25 bp, Homo sapien
gtcggcgtaggtaacaaagctccgc

SEQ ID NO: 1720644 - DNA, 25 bp, Homo sapien
ctttgcgcgccgcaggtctgtccgg

SEQ ID NO: 1720645 - DNA, 25 bp, Homo sapien
gctccgcgctttgcgcgccgcaggt

SEQ ID NO: 1720646 - DNA, 25 bp, Homo sapien
aggtctgtccggcatcgggccccaa

SEQ ID NO: 1720647 - DNA, 25 bp, Homo sapien
tacccacgcacagaacttggagaaa

SEQ ID NO: 1720648 - DNA, 25 bp, Homo sapien
cagtcagcttcatacgtagcggtgc

SEQ ID NO: 1720649 - DNA, 25 bp, Homo sapien
gaggaagcaactttagcaccagttt

SEQ ID NO: 1720650 - DNA, 25 bp, Homo sapien
gtagcggtgcttacccacgcacaga

SEQ ID NO: 1720651 - DNA, 25 bp, Homo sapien
tgcagagcacaagggaagctctcca

SEQ ID NO: 1720652 - DNA, 25 bp, Homo sapien
gcaaaaggcaggaagtgcagagcac

SEQ ID NO: 1720653 - DNA, 25 bp, Homo sapien
agcagcaaaaggcaggaagtgcaga

SEQ ID NO: 1720654 - DNA, 25 bp, Homo sapien
aaaggcaggaagtgcagagcacaag

SEQ ID NO: 1720655 - DNA, 25 bp, Homo sapien
agcctgaagtgaaatccgtctttgt

SEQ ID NO: 1720656 - DNA, 25 bp, Homo sapien
tgaaatccgtctttgtgcagccggt

SEQ ID NO: 1720657 - DNA, 25 bp, Homo sapien
gaagtgaaatccgtctttgtgcagc

SEQ ID NO: 1720658 - DNA, 25 bp, Homo sapien
tccgtctttgtgcagccggtttcac

SEQ ID NO: 1720659 - DNA, 25 bp, Homo sapien
catcgagttgtaggcaacaaaaaga

SEQ ID NO: 1720660 - DNA, 25 bp, Homo sapien
gatgagttataaagggtaagccacc

SEQ ID NO: 1720661 - DNA, 25 bp, Homo sapien
tgtccatctgttccttggctctgtg

SEQ ID NO: 1720662 - DNA, 25 bp, Homo sapien
taagccacccatgcatttttgggaa

SEQ ID NO: 1720663 - DNA, 25 bp, Homo sapien
agccacctctgacgtcttatgttga

SEQ ID NO: 1720664 - DNA, 25 bp, Homo sapien
agttggaggcaagcacaccaatcaa

SEQ ID NO: 1720665 - DNA, 25 bp, Homo sapien
gagttggaggcaagcacaccaatca

SEQ ID NO: 1720666 - DNA, 25 bp, Homo sapien
ccagagttggaggcaagcacaccaa

SEQ ID NO: 1720667 - DNA, 25 bp, Homo sapien
cagagttggaggcaagcacaccaat

SEQ ID NO: 1720668 - DNA, 25 bp, Homo sapien
cattataatggtttatgcctgagca

SEQ ID NO: 1720669 - DNA, 25 bp, Homo sapien
tctaaatggttacttgctgataagc

SEQ ID NO: 1720670 - DNA, 25 bp, Homo sapien
ttatccacttcagattaaagccttg

SEQ ID NO: 1720671 - DNA, 25 bp, Homo sapien
taaagccttgttgcttgctcaacct

SEQ ID NO: 1720672 - DNA, 25 bp, Homo sapien
tcgtctgtttccaccactcctctgg

SEQ ID NO: 1720673 - DNA, 25 bp, Homo sapien
tctgggtatcctcagaacctggtca

SEQ ID NO: 1720674 - DNA, 25 bp, Homo sapien
tgtttccaccactcctctgggtatc

SEQ ID NO: 1720675 - DNA, 25 bp, Homo sapien
cagaacctggtcacatgtacatgta

SEQ ID NO: 1720676 - DNA, 25 bp, Homo sapien
tcttctccccagtagattaatgtat

SEQ ID NO: 1720677 - DNA, 25 bp, Homo sapien
tgcttcctactcgttgttcatactc

SEQ ID NO: 1720678 - DNA, 25 bp, Homo sapien
ctgcttcctactcgttgttcatact

SEQ ID NO: 1720679 - DNA, 25 bp, Homo sapien
cagtagattaatgtattgggctttt

SEQ ID NO: 1720680 - DNA, 25 bp, Homo sapien
tcagagcccacttagtaaatgcagc

SEQ ID NO: 1720681 - DNA, 25 bp, Homo sapien
gccaatcctcagagcccacttagta

SEQ ID NO: 1720682 - DNA, 25 bp, Homo sapien
ccacttagtaaatgcagcaccaggc

SEQ ID NO: 1720683 - DNA, 25 bp, Homo sapien
tcctcagagcccacttagtaaatgc

SEQ ID NO: 1720684 - DNA, 25 bp, Homo sapien
ctggttcacggggtacttctggagc

SEQ ID NO: 1720685 - DNA, 25 bp, Homo sapien
tctgaggaagcgtggggcaagaact

SEQ ID NO: 1720686 - DNA, 25 bp, Homo sapien
tcacggggtacttctggagcacctc

SEQ ID NO: 1720687 - DNA, 25 bp, Homo sapien
agaactggttcacggggtacttctg

SEQ ID NO: 1720688 - DNA, 25 bp, Homo sapien
ccatcgagcagccagtacacatgta

SEQ ID NO: 1720689 - DNA, 25 bp, Homo sapien
gcgaaacgccgctccgtgtcctgga

SEQ ID NO: 1720690 - DNA, 25 bp, Homo sapien
tgcagccggtccacagctgcaaagc

SEQ ID NO: 1720691 - DNA, 25 bp, Homo sapien
cacactggaaggtgccagagtcctg

SEQ ID NO: 1720692 - DNA, 25 bp, Homo sapien
ggtccctggcaggtcaagtctgaca

SEQ ID NO: 1720693 - DNA, 25 bp, Homo sapien
ttaccagatactaagtgcctgcctg

SEQ ID NO: 1720694 - DNA, 25 bp, Homo sapien
gcatgcagcagataaatgggtccca

SEQ ID NO: 1720695 - DNA, 25 bp, Homo sapien
tgcctggcccgtttaactggaaatg

SEQ ID NO: 1720696 - DNA, 25 bp, Homo sapien
tctcagcttccgaggctggatgctt

SEQ ID NO: 1720697 - DNA, 25 bp, Homo sapien
aatgtggcaacgaagtgtgacctgg

SEQ ID NO: 1720698 - DNA, 25 bp, Homo sapien
ctggatctcagcttccgaggctgga

SEQ ID NO: 1720699 - DNA, 25 bp, Homo sapien
cgagggtgcccatcaatgtggcaac

SEQ ID NO: 1720700 - DNA, 25 bp, Homo sapien
caatgctcaaggtgaagttctggct

SEQ ID NO: 1720701 - DNA, 25 bp, Homo sapien
tgcaagcctggccaaaagcactgtg

SEQ ID NO: 1720702 - DNA, 25 bp, Homo sapien
gcactgtgggcgcagcaggaataca

SEQ ID NO: 1720703 - DNA, 25 bp, Homo sapien
ggaatacagcccactatgctcagga

SEQ ID NO: 1720704 - DNA, 25 bp, Homo sapien
ttagtgatgggagtctcatcctcaa

SEQ ID NO: 1720705 - DNA, 25 bp, Homo sapien
atacctcgctactaccacgtcctgg

SEQ ID NO: 1720706 - DNA, 25 bp, Homo sapien
actgcggttagtgatgggagtctca

SEQ ID NO: 1720707 - DNA, 25 bp, Homo sapien
tggaacatggcctcctcatacctcg

SEQ ID NO: 1720708 - DNA, 25 bp, Homo sapien
gagagtgcaatttggagaaagtggc

SEQ ID NO: 1720709 - DNA, 25 bp, Homo sapien
ccaataggcctagttctggaaagga

SEQ ID NO: 1720710 - DNA, 25 bp, Homo sapien
ggagaaagtggccaataggcctagt

SEQ ID NO: 1720711 - DNA, 25 bp, Homo sapien
aagtggccaataggcctagttctgg

SEQ ID NO: 1720712 - DNA, 25 bp, Homo sapien
ctgcccctggccaatgcagcggtag

SEQ ID NO: 1720713 - DNA, 25 bp, Homo sapien
agcggtagatccctgcattgcgtgg

SEQ ID NO: 1720714 - DNA, 25 bp, Homo sapien
ctggccaatgcagcggtagatccct

SEQ ID NO: 1720715 - DNA, 25 bp, Homo sapien
tccctgcattgcgtggccggacctg

SEQ ID NO: 1720716 - DNA, 25 bp, Homo sapien
tcaaatagcggcatgtcttcaatct

SEQ ID NO: 1720717 - DNA, 25 bp, Homo sapien
cctgccatgggtgggcagccggact

SEQ ID NO: 1720718 - DNA, 25 bp, Homo sapien
ggcccttctggtagaccctgccatg

SEQ ID NO: 1720719 - DNA, 25 bp, Homo sapien
tgccagctgtaaacacccgtggctc

SEQ ID NO: 1720720 - DNA, 25 bp, Homo sapien
tgtgttcccctccacctctccttga

SEQ ID NO: 1720721 - DNA, 25 bp, Homo sapien
ctgtgttcccctccacctctccttg

SEQ ID NO: 1720722 - DNA, 25 bp, Homo sapien
gtgttcccctccacctctccttgac

SEQ ID NO: 1720723 - DNA, 25 bp, Homo sapien
tcccagtagtgaactgattcccaag

SEQ ID NO: 1720724 - DNA, 25 bp, Homo sapien
tacaccgactcccagtagtgaactg

SEQ ID NO: 1720725 - DNA, 25 bp, Homo sapien
agtgaactgattcccaagcctgcag

SEQ ID NO: 1720726 - DNA, 25 bp, Homo sapien
agggcccagaactgagaggacctca

SEQ ID NO: 1720727 - DNA, 25 bp, Homo sapien
gggctgtcactatttcctctggagc

SEQ ID NO: 1720728 - DNA, 25 bp, Homo sapien
tgcattgggagcatagtgggaccca

SEQ ID NO: 1720729 - DNA, 25 bp, Homo sapien
gactgaaccccagtaaggtgggtga

SEQ ID NO: 1720730 - DNA, 25 bp, Homo sapien
cgcgcccagcctgatataaagggtt

SEQ ID NO: 1720731 - DNA, 25 bp, Homo sapien
ctggtttctgtaccagacaactgta

SEQ ID NO: 1720732 - DNA, 25 bp, Homo sapien
gcaatccaagtagccgggtttgccc

SEQ ID NO: 1720733 - DNA, 25 bp, Homo sapien
caactgtaggttttggtgtggcctg

SEQ ID NO: 1720734 - DNA, 25 bp, Homo sapien
tctgtaccagacaactgtaggtttt

SEQ ID NO: 1720735 - DNA, 25 bp, Homo sapien
ccctggaggctgcctccagggtaag

SEQ ID NO: 1720736 - DNA, 25 bp, Homo sapien
ggaggctgcctccagggtaagagtg

SEQ ID NO: 1720737 - DNA, 25 bp, Homo sapien
cctggaggctgcctccagggtaaga

SEQ ID NO: 1720738 - DNA, 25 bp, Homo sapien
ctctccctggaggctgcctccaggg

SEQ ID NO: 1720739 - DNA, 25 bp, Homo sapien
agcacttggacacgggcttgcgcct

SEQ ID NO: 1720740 - DNA, 25 bp, Homo sapien
gggtgctgctcatacaacggtacca

SEQ ID NO: 1720741 - DNA, 25 bp, Homo sapien
tacacctccacgctgttgatgcgca

SEQ ID NO: 1720742 - DNA, 25 bp, Homo sapien
gatgcgcaaggtcccattcttgaag

SEQ ID NO: 1720743 - DNA, 25 bp, Homo sapien
tgtggctgaacagggcaccgtggcc

SEQ ID NO: 1720744 - DNA, 25 bp, Homo sapien
gcctgtggctgaacagggcaccgtg

SEQ ID NO: 1720745 - DNA, 25 bp, Homo sapien
tagtgggcttctctcggcctgtggc

SEQ ID NO: 1720746 - DNA, 25 bp, Homo sapien
tgcccgttcccacttaatagtgggc

SEQ ID NO: 1720747 - DNA, 25 bp, Homo sapien
gcccgttggaggcaatgcaagtgta

SEQ ID NO: 1720748 - DNA, 25 bp, Homo sapien
tagttgccagcgtcatctcgagtca

SEQ ID NO: 1720749 - DNA, 25 bp, Homo sapien
gagtcacccgggcaaaatgcagggt

SEQ ID NO: 1720750 - DNA, 25 bp, Homo sapien
gctggacatgggcacgaatctggcc

SEQ ID NO: 1720751 - DNA, 25 bp, Homo sapien
gccctggtacacagtcgtacgctct

SEQ ID NO: 1720752 - DNA, 25 bp, Homo sapien
ctttccactgaatcagcggcttggg

SEQ ID NO: 1720753 - DNA, 25 bp, Homo sapien
ctgggcctcgcactgcagtagggct

SEQ ID NO: 1720754 - DNA, 25 bp, Homo sapien
cagtcgtacgctctggttccacttt

SEQ ID NO: 1720755 - DNA, 25 bp, Homo sapien
cagcttggtggggtccaggatgcgg

SEQ ID NO: 1720756 - DNA, 25 bp, Homo sapien
ggtcccagcttggtggggtccagga

SEQ ID NO: 1720757 - DNA, 25 bp, Homo sapien
tcccagcttggtggggtccaggatg

SEQ ID NO: 1720758 - DNA, 25 bp, Homo sapien
ctgggtcccagcttggtggggtcca

SEQ ID NO: 1720759 - DNA, 25 bp, Homo sapien
cagctgttgcctgcaatgcaggtgt

SEQ ID NO: 1720760 - DNA, 25 bp, Homo sapien
caatgcaggtgtagcggcctgagtc

SEQ ID NO: 1720761 - DNA, 25 bp, Homo sapien
acgtcatggatcaccagggagccat

SEQ ID NO: 1720762 - DNA, 25 bp, Homo sapien
ccgtgtgcttgatgttgcagctgtt

SEQ ID NO: 1720763 - DNA, 25 bp, Homo sapien
gacttgataatgtgagccaggcccc

SEQ ID NO: 1720764 - DNA, 25 bp, Homo sapien
aagacaggcgacacggataagcaca

SEQ ID NO: 1720765 - DNA, 25 bp, Homo sapien
gcaacttaacagatggcccgggagg

SEQ ID NO: 1720766 - DNA, 25 bp, Homo sapien
taagtgcagggccttttacctgacc

SEQ ID NO: 1720767 - DNA, 25 bp, Homo sapien
cgttgaggcattccatctctggctc

SEQ ID NO: 1720768 - DNA, 25 bp, Homo sapien
tgcagcgcttcttgcagtagaacat

SEQ ID NO: 1720769 - DNA, 25 bp, Homo sapien
cccagcacggcaatgatgtaggcca

SEQ ID NO: 1720770 - DNA, 25 bp, Homo sapien
acaacccaatggtctggatcatctt

SEQ ID NO: 1720771 - DNA, 25 bp, Homo sapien
cgtcacgatgagacctgacactctg

SEQ ID NO: 1720772 - DNA, 25 bp, Homo sapien
cactctggccaccatggggatttct

SEQ ID NO: 1720773 - DNA, 25 bp, Homo sapien
caagagcgtcacgatgagacctgac

SEQ ID NO: 1720774 - DNA, 25 bp, Homo sapien
gaggacaagagcgtcacgatgagac

SEQ ID NO: 1720775 - DNA, 25 bp, Homo sapien
tcacttgtgctgtggcgtttgttgg

SEQ ID NO: 1720776 - DNA, 25 bp, Homo sapien
agcccaagctggtcaaggccacttc

SEQ ID NO: 1720777 - DNA, 25 bp, Homo sapien
caggctagaccgtgggaagtgcatc

SEQ ID NO: 1720778 - DNA, 25 bp, Homo sapien
gggaagtgcatcttatcacttgtgc

SEQ ID NO: 1720779 - DNA, 25 bp, Homo sapien
cacagcgggtgacttgtagttaggc

SEQ ID NO: 1720780 - DNA, 25 bp, Homo sapien
gaatgacaaaatctgcacgaagggc

SEQ ID NO: 1720781 - DNA, 25 bp, Homo sapien
ggacttcagaacactagcccgtacc

SEQ ID NO: 1720782 - DNA, 25 bp, Homo sapien
gccacactgggctagatctctacct

SEQ ID NO: 1720783 - DNA, 25 bp, Homo sapien
aacatctccaactccctccggaagt

SEQ ID NO: 1720784 - DNA, 25 bp, Homo sapien
accacgttggcgtggttcagcttcc

SEQ ID NO: 1720785 - DNA, 25 bp, Homo sapien
tattccagcaccatgtagtggggct

SEQ ID NO: 1720786 - DNA, 25 bp, Homo sapien
gcaggctcttcacaagtaccagggt

SEQ ID NO: 1720787 - DNA, 25 bp, Homo sapien
gaccaacgcccctgagatacagatg

SEQ ID NO: 1720788 - DNA, 25 bp, Homo sapien
gactgcacgagacaaggttttcacg

SEQ ID NO: 1720789 - DNA, 25 bp, Homo sapien
tgactcccacctttgtaggacactg

SEQ ID NO: 1720790 - DNA, 25 bp, Homo sapien
gaagctgagcatcataaggtgggca

SEQ ID NO: 1720791 - DNA, 25 bp, Homo sapien
gaaagactgataggactcctgcccg

SEQ ID NO: 1720792 - DNA, 25 bp, Homo sapien
gtgcccagccgcgtaagtacttgtt

SEQ ID NO: 1720793 - DNA, 25 bp, Homo sapien
agaagcagcagtttgaggaccatgg

SEQ ID NO: 1720794 - DNA, 25 bp, Homo sapien
gccgcgtaagtacttgttaatggaa

SEQ ID NO: 1720795 - DNA, 25 bp, Homo sapien
catccttgctcttggaaatcctcag

SEQ ID NO: 1720796 - DNA, 25 bp, Homo sapien
tccttgctcttggaaatcctcagga

SEQ ID NO: 1720797 - DNA, 25 bp, Homo sapien
tcatccttgctcttggaaatcctca

SEQ ID NO: 1720798 - DNA, 25 bp, Homo sapien
ttgctcttggaaatcctcaggaact

SEQ ID NO: 1720799 - DNA, 25 bp, Homo sapien
tgcttggtgctgaggggctgtgact

SEQ ID NO: 1720800 - DNA, 25 bp, Homo sapien
ttctgcttggtgctgaggggctgtg

SEQ ID NO: 1720801 - DNA, 25 bp, Homo sapien
gctgaggggctgtgacttcaatttt

SEQ ID NO: 1720802 - DNA, 25 bp, Homo sapien
ggtgctgaggggctgtgacttcaat

SEQ ID NO: 1720803 - DNA, 25 bp, Homo sapien
ctgggcagctacagcccaagggaga

SEQ ID NO: 1720804 - DNA, 25 bp, Homo sapien
cttcactgtttcaaccaaggtctgc

SEQ ID NO: 1720805 - DNA, 25 bp, Homo sapien
gggtagcaggcaagctttcccttct

SEQ ID NO: 1720806 - DNA, 25 bp, Homo sapien
caacctctgcgcaaaaggcaggagg

SEQ ID NO: 1720807 - DNA, 25 bp, Homo sapien
tgatggactgtctgcccaccagtgg

SEQ ID NO: 1720808 - DNA, 25 bp, Homo sapien
ttggtggaatataacagggctggcc

SEQ ID NO: 1720809 - DNA, 25 bp, Homo sapien
ccaatttagggaatcttagccagca

SEQ ID NO: 1720810 - DNA, 25 bp, Homo sapien
aatataaattgaagccaggcacctg

SEQ ID NO: 1720811 - DNA, 25 bp, Homo sapien
catactttaattctaatgccaatgg

SEQ ID NO: 1720812 - DNA, 25 bp, Homo sapien
ctttaattctaatgccaatgggttg

SEQ ID NO: 1720813 - DNA, 25 bp, Homo sapien
gggctattaagaacagcgttattat

SEQ ID NO: 1720814 - DNA, 25 bp, Homo sapien
tctaatgccaatgggttgtttccag

SEQ ID NO: 1720815 - DNA, 25 bp, Homo sapien
gttacgcgcagccaagtccttatgc

SEQ ID NO: 1720816 - DNA, 25 bp, Homo sapien
cttatgcacaaagcggttgttggac

SEQ ID NO: 1720817 - DNA, 25 bp, Homo sapien
agggctacctgggtgcatagggcca

SEQ ID NO: 1720818 - DNA, 25 bp, Homo sapien
actgaccaggcagttacgcgcagcc

SEQ ID NO: 1720819 - DNA, 25 bp, Homo sapien
tccaggatggcctcgggggacatcc

SEQ ID NO: 1720820 - DNA, 25 bp, Homo sapien
cccaccatggggcatctctccatgt

SEQ ID NO: 1720821 - DNA, 25 bp, Homo sapien
ggacatccagcgcagcggcacccag

SEQ ID NO: 1720822 - DNA, 25 bp, Homo sapien
atcagcacaccgaaggcccagacat

SEQ ID NO: 1720823 - DNA, 25 bp, Homo sapien
ctcgggctgaggaagtctagccttc

SEQ ID NO: 1720824 - DNA, 25 bp, Homo sapien
tcagccgatagagtttggaagggca

SEQ ID NO: 1720825 - DNA, 25 bp, Homo sapien
cagggcgctggcaatctcactgaag

SEQ ID NO: 1720826 - DNA, 25 bp, Homo sapien
ccagcagcgctgcatcagccgatag

SEQ ID NO: 1720827 - DNA, 25 bp, Homo sapien
tcaaagccctagtcgcccagtttgg

SEQ ID NO: 1720828 - DNA, 25 bp, Homo sapien
tgtgagcttccctctagagatgtcc

SEQ ID NO: 1720829 - DNA, 25 bp, Homo sapien
tcagcaatgcctgttgcactagggc

SEQ ID NO: 1720830 - DNA, 25 bp, Homo sapien
agggatcttgcccatcatgctgtga

SEQ ID NO: 1720831 - DNA, 25 bp, Homo sapien
ttacatataaaagccgcccgtggtg

SEQ ID NO: 1720832 - DNA, 25 bp, Homo sapien
cccgtggtgcatacaaaaagggcgg

SEQ ID NO: 1720833 - DNA, 25 bp, Homo sapien
ggccaagagactcattaaccctgtg

SEQ ID NO: 1720834 - DNA, 25 bp, Homo sapien
cttgctgtgtcctctataatcctgg

SEQ ID NO: 1720835 - DNA, 25 bp, Homo sapien
gaggcaaagagggtatcaattgtga

SEQ ID NO: 1720836 - DNA, 25 bp, Homo sapien
cacagaggcaaagagggtatcaatt

SEQ ID NO: 1720837 - DNA, 25 bp, Homo sapien
caaagagggtatcaattgtgatggc

SEQ ID NO: 1720838 - DNA, 25 bp, Homo sapien
agagggtatcaattgtgatggcagc

SEQ ID NO: 1720839 - DNA, 25 bp, Homo sapien
actggggggtctttggcagacatac

SEQ ID NO: 1720840 - DNA, 25 bp, Homo sapien
tggctcgaggatcttcattcatcat

SEQ ID NO: 1720841 - DNA, 25 bp, Homo sapien
ggctggctcgaggatcttcattcat

SEQ ID NO: 1720842 - DNA, 25 bp, Homo sapien
tggggggtctttggcagacatacat

SEQ ID NO: 1720843 - DNA, 25 bp, Homo sapien
tccctcgcttttgtaggcgacgaaa

SEQ ID NO: 1720844 - DNA, 25 bp, Homo sapien
ctttccctcgcttttgtaggcgacg

SEQ ID NO: 1720845 - DNA, 25 bp, Homo sapien
ctcgcttttgtaggcgacgaaactt

SEQ ID NO: 1720846 - DNA, 25 bp, Homo sapien
cctcgcttttgtaggcgacgaaact

SEQ ID NO: 1720847 - DNA, 25 bp, Homo sapien
aaccggagagcaggcacgattccgc

SEQ ID NO: 1720848 - DNA, 25 bp, Homo sapien
cttaaaggaaccggagagcaggcac

SEQ ID NO: 1720849 - DNA, 25 bp, Homo sapien
aaggaaccggagagcaggcacgatt

SEQ ID NO: 1720850 - DNA, 25 bp, Homo sapien
ggagagcaggcacgattccgcctcc

SEQ ID NO: 1720851 - DNA, 25 bp, Homo sapien
tcgttgctgtcatctcgcgtcagac

SEQ ID NO: 1720852 - DNA, 25 bp, Homo sapien
tgtcatctcgcgtcagaccgcgact

SEQ ID NO: 1720853 - DNA, 25 bp, Homo sapien
ttgctgtcatctcgcgtcagaccgc

SEQ ID NO: 1720854 - DNA, 25 bp, Homo sapien
cgaactcgttgctgtcatctcgcgt

SEQ ID NO: 1720855 - DNA, 25 bp, Homo sapien
ccccattggcccacaagagggcgct

SEQ ID NO: 1720856 - DNA, 25 bp, Homo sapien
caagagggcgcttatttgcatagac

SEQ ID NO: 1720857 - DNA, 25 bp, Homo sapien
cacaagagggcgcttatttgcatag

SEQ ID NO: 1720858 - DNA, 25 bp, Homo sapien
tccgctccccattggcccacaagag

SEQ ID NO: 1720859 - DNA, 25 bp, Homo sapien
tgctagtgccgctatcgctgccgcg

SEQ ID NO: 1720860 - DNA, 25 bp, Homo sapien
aatgtttccttttatggcgaggccg

SEQ ID NO: 1720861 - DNA, 25 bp, Homo sapien
cagtcagcgaggaatcggagccgcc

SEQ ID NO: 1720862 - DNA, 25 bp, Homo sapien
ggcgaggccgctccttatatggtga

SEQ ID NO: 1720863 - DNA, 25 bp, Homo sapien
tccggttcaggctgccccccagggc

SEQ ID NO: 1720864 - DNA, 25 bp, Homo sapien
tgtagagggcccccgcggtgggcgc

SEQ ID NO: 1720865 - DNA, 25 bp, Homo sapien
ctgtagagggcccccgcggtgggcg

SEQ ID NO: 1720866 - DNA, 25 bp, Homo sapien
gaccaccataccgatctccatctcg

SEQ ID NO: 1720867 - DNA, 25 bp, Homo sapien
tcaggctccgcttcaggccgcgccg

SEQ ID NO: 1720868 - DNA, 25 bp, Homo sapien
tcctcgcccgactccgagtcgccct

SEQ ID NO: 1720869 - DNA, 25 bp, Homo sapien
cccggtggccgctgccgacgcctcg

SEQ ID NO: 1720870 - DNA, 25 bp, Homo sapien
cagcttgttgtcgatgaactccatc

SEQ ID NO: 1720871 - DNA, 25 bp, Homo sapien
tgttgtcgatgaactccatcttgat

SEQ ID NO: 1720872 - DNA, 25 bp, Homo sapien
agcgccgcagcttgttgtcgatgaa

SEQ ID NO: 1720873 - DNA, 25 bp, Homo sapien
gtgtagcgccgcagcttgttgtcga

SEQ ID NO: 1720874 - DNA, 25 bp, Homo sapien
cttcttcatgatgcccgtcttcctc

SEQ ID NO: 1720875 - DNA, 25 bp, Homo sapien
ttcatgatgcccgtcttcctcttgc

SEQ ID NO: 1720876 - DNA, 25 bp, Homo sapien
cttcatgatgcccgtcttcctcttg

SEQ ID NO: 1720877 - DNA, 25 bp, Homo sapien
tcttcatgatgcccgtcttcctctt

SEQ ID NO: 1720878 - DNA, 25 bp, Homo sapien
gccctcttcctctctggcgccggtc

SEQ ID NO: 1720879 - DNA, 25 bp, Homo sapien
ctcttcctctctggcgccggtcact

SEQ ID NO: 1720880 - DNA, 25 bp, Homo sapien
cccttcactcagcaagggccctctt

SEQ ID NO: 1720881 - DNA, 25 bp, Homo sapien
ccttcactcagcaagggccctcttc

SEQ ID NO: 1720882 - DNA, 25 bp, Homo sapien
ggagggagatgggcaggtcagcaaa

SEQ ID NO: 1720883 - DNA, 25 bp, Homo sapien
gggagatgggcaggtcagcaaactt

SEQ ID NO: 1720884 - DNA, 25 bp, Homo sapien
cagcaaactttttatctctaccttc

SEQ ID NO: 1720885 - DNA, 25 bp, Homo sapien
tcagcaaactttttatctctacctt

SEQ ID NO: 1720886 - DNA, 25 bp, Homo sapien
tgtcagactccgacacctggtaggt

SEQ ID NO: 1720887 - DNA, 25 bp, Homo sapien
gcagttttcgggtggcaaaggtata

SEQ ID NO: 1720888 - DNA, 25 bp, Homo sapien
gccttgccggtctcactggtgatca

SEQ ID NO: 1720889 - DNA, 25 bp, Homo sapien
cagtggcactcattctctggtctgt

SEQ ID NO: 1720890 - DNA, 25 bp, Homo sapien
gccgctgctgacttgcatggtggta

SEQ ID NO: 1720891 - DNA, 25 bp, Homo sapien
gcactggggctgacactagcagaca

SEQ ID NO: 1720892 - DNA, 25 bp, Homo sapien
cagggccgctgcctgtactcttcag

SEQ ID NO: 1720893 - DNA, 25 bp, Homo sapien
tggtgactgtgaacgccggcttcag

SEQ ID NO: 1720894 - DNA, 25 bp, Homo sapien
agcaggggtctcagtgggcagaggt

SEQ ID NO: 1720895 - DNA, 25 bp, Homo sapien
aggacagcaggggtctcagtgggca

SEQ ID NO: 1720896 - DNA, 25 bp, Homo sapien
ggggtctcagtgggcagaggtatgc

SEQ ID NO: 1720897 - DNA, 25 bp, Homo sapien
acagcaggggtctcagtgggcagag

SEQ ID NO: 1720898 - DNA, 25 bp, Homo sapien
gaggtctgcgtgaggtctgtgctgc

SEQ ID NO: 1720899 - DNA, 25 bp, Homo sapien
ctggaggaggtctgcgtgaggtctg

SEQ ID NO: 1720900 - DNA, 25 bp, Homo sapien
tctgtgctgctgtcacgggagggag

SEQ ID NO: 1720901 - DNA, 25 bp, Homo sapien
gagggagacgcttgctgtggggcct

SEQ ID NO: 1720902 - DNA, 25 bp, Homo sapien
tagggtacatcatgtggccacccac

SEQ ID NO: 1720903 - DNA, 25 bp, Homo sapien
cagttgtgggcacggatgacgtcat

SEQ ID NO: 1720904 - DNA, 25 bp, Homo sapien
gcattcagcacggtgaggctgccat

SEQ ID NO: 1720905 - DNA, 25 bp, Homo sapien
gggcatacatcaccgcatgcgggct

SEQ ID NO: 1720906 - DNA, 25 bp, Homo sapien
atttgtaggcatcagtgcatatgtg

SEQ ID NO: 1720907 - DNA, 25 bp, Homo sapien
tatttgtaggcatcagtgcatatgt

SEQ ID NO: 1720908 - DNA, 25 bp, Homo sapien
aatatttgtaggcatcagtgcatat

SEQ ID NO: 1720909 - DNA, 25 bp, Homo sapien
tttgtaggcatcagtgcatatgtgt

SEQ ID NO: 1720910 - DNA, 25 bp, Homo sapien
tgcatgcgggtgtgagtgtccaagt

SEQ ID NO: 1720911 - DNA, 25 bp, Homo sapien
caagggaaagggtgccagtgtgtct

SEQ ID NO: 1720912 - DNA, 25 bp, Homo sapien
tctcagatgtaagagcccaagggaa

SEQ ID NO: 1720913 - DNA, 25 bp, Homo sapien
tgtccaagtggggtgtccaaatgtg

SEQ ID NO: 1720914 - DNA, 25 bp, Homo sapien
aggagatactcaaattgtttgttga

SEQ ID NO: 1720915 - DNA, 25 bp, Homo sapien
ggagtggtgtcaaatgcacaagtga

SEQ ID NO: 1720916 - DNA, 25 bp, Homo sapien
cagatattggaggagtggtgtcaaa

SEQ ID NO: 1720917 - DNA, 25 bp, Homo sapien
tacattggaaaaccacaggagatac

SEQ ID NO: 1720918 - DNA, 25 bp, Homo sapien
tgaaacagggatctgcactgtccca

SEQ ID NO: 1720919 - DNA, 25 bp, Homo sapien
agctgaactgctgaaacagggatct

SEQ ID NO: 1720920 - DNA, 25 bp, Homo sapien
gctcccggcctgctgccctatcaca

SEQ ID NO: 1720921 - DNA, 25 bp, Homo sapien
cctgtagctcggtgaggttgctgct

SEQ ID NO: 1720922 - DNA, 25 bp, Homo sapien
caggttcaccacctgtagctcggtg

SEQ ID NO: 1720923 - DNA, 25 bp, Homo sapien
tgtgggcggtgtccaggttcaccac

SEQ ID NO: 1720924 - DNA, 25 bp, Homo sapien
taagtggtgccatcccttgggccat

SEQ ID NO: 1720925 - DNA, 25 bp, Homo sapien
gaagccagcttgttcctactgaagg

SEQ ID NO: 1720926 - DNA, 25 bp, Homo sapien
gggcatggcccctgtacaaattaca

SEQ ID NO: 1720927 - DNA, 25 bp, Homo sapien
gaaggtaggctctgacacagggtaa

SEQ ID NO: 1720928 - DNA, 25 bp, Homo sapien
gctctgtacataggactgtgaccat

SEQ ID NO: 1720929 - DNA, 25 bp, Homo sapien
ccaggggaagtagaaaccactgaca

SEQ ID NO: 1720930 - DNA, 25 bp, Homo sapien
tgtccactattcctgggtcagcatc

SEQ ID NO: 1720931 - DNA, 25 bp, Homo sapien
tgtgaccatgtccactattcctggg

SEQ ID NO: 1720932 - DNA, 25 bp, Homo sapien
cgctgggacccagcggccggtcccg

SEQ ID NO: 1720933 - DNA, 25 bp, Homo sapien
ctcgctgggacccagcggccggtcc

SEQ ID NO: 1720934 - DNA, 25 bp, Homo sapien
tcgctgggacccagcggccggtccc

SEQ ID NO: 1720935 - DNA, 25 bp, Homo sapien
gctgggacccagcggccggtcccgc

SEQ ID NO: 1720936 - DNA, 25 bp, Homo sapien
gaataaatagctgaacatactttgg

SEQ ID NO: 1720937 - DNA, 25 bp, Homo sapien
ggtggaatcttgagacacagagaag

SEQ ID NO: 1720938 - DNA, 25 bp, Homo sapien
gctgcatggtagaatttaggaggcc

SEQ ID NO: 1720939 - DNA, 25 bp, Homo sapien
gaaatggaagagttggctgcgccca

SEQ ID NO: 1720940 - DNA, 25 bp, Homo sapien
ttcaggacactccatcggatcaggt

SEQ ID NO: 1720941 - DNA, 25 bp, Homo sapien
agcattttgcctgcactccggcgga

SEQ ID NO: 1720942 - DNA, 25 bp, Homo sapien
tcaggtattcaggatgcccgtcatg

SEQ ID NO: 1720943 - DNA, 25 bp, Homo sapien
tgaagtcccttagatagtgcccgct

SEQ ID NO: 1720944 - DNA, 25 bp, Homo sapien
tctttcttattccctgtggccccat

SEQ ID NO: 1720945 - DNA, 25 bp, Homo sapien
cttattccctgtggccccattttct

SEQ ID NO: 1720946 - DNA, 25 bp, Homo sapien
ccctgtggccccattttctccattc

SEQ ID NO: 1720947 - DNA, 25 bp, Homo sapien
tctcctctttcttattccctgtggc

SEQ ID NO: 1720948 - DNA, 25 bp, Homo sapien
gatagaaggacgtgagcccgactcc

SEQ ID NO: 1720949 - DNA, 25 bp, Homo sapien
cagtgatagaaggacgtgagcccga

SEQ ID NO: 1720950 - DNA, 25 bp, Homo sapien
gtgatagaaggacgtgagcccgact

SEQ ID NO: 1720951 - DNA, 25 bp, Homo sapien
gctcagtgatagaaggacgtgagcc

SEQ ID NO: 1720952 - DNA, 25 bp, Homo sapien
aggcagatgaatgccctcaaaggcc

SEQ ID NO: 1720953 - DNA, 25 bp, Homo sapien
ccagcaatgtatagcgactgtcaaa

SEQ ID NO: 1720954 - DNA, 25 bp, Homo sapien
actgtcaaaatccatgtgctgctcg

SEQ ID NO: 1720955 - DNA, 25 bp, Homo sapien
ccatgtgctgctcgatgccatcttg

SEQ ID NO: 1720956 - DNA, 25 bp, Homo sapien
aaatgtagggctgaaagatggaccg

SEQ ID NO: 1720957 - DNA, 25 bp, Homo sapien
caaaggtagcgcttcaccaaggaga

SEQ ID NO: 1720958 - DNA, 25 bp, Homo sapien
tgatccaggagggacgtgacacaaa

SEQ ID NO: 1720959 - DNA, 25 bp, Homo sapien
aattcagagcgctggcggaagaccc

SEQ ID NO: 1720960 - DNA, 25 bp, Homo sapien
gtgcacccagtaagtgcggcctgtc

SEQ ID NO: 1720961 - DNA, 25 bp, Homo sapien
tgcggcctgtcgactgccagaaaac

SEQ ID NO: 1720962 - DNA, 25 bp, Homo sapien
agtaagtgcggcctgtcgactgcca

SEQ ID NO: 1720963 - DNA, 25 bp, Homo sapien
tgtgcccaacacagtagcccctgcc

SEQ ID NO: 1720964 - DNA, 25 bp, Homo sapien
tacagcccatccataggattccagt

SEQ ID NO: 1720965 - DNA, 25 bp, Homo sapien
aagggtacagcccatccataggatt

SEQ ID NO: 1720966 - DNA, 25 bp, Homo sapien
catccataggattccagtcccagga

SEQ ID NO: 1720967 - DNA, 25 bp, Homo sapien
gaggtacggcaaagggtacagccca

SEQ ID NO: 1720968 - DNA, 25 bp, Homo sapien
catccaggttcttccaaagattctg

SEQ ID NO: 1720969 - DNA, 25 bp, Homo sapien
ctcatccaggttcttccaaagattc

SEQ ID NO: 1720970 - DNA, 25 bp, Homo sapien
tccaggttcttccaaagattctgga

SEQ ID NO: 1720971 - DNA, 25 bp, Homo sapien
caggttcttccaaagattctggaaa

SEQ ID NO: 1720972 - DNA, 25 bp, Homo sapien
taaacagctgagaatcactctgtgc

SEQ ID NO: 1720973 - DNA, 25 bp, Homo sapien
gcttggttcattagacagcagccca

SEQ ID NO: 1720974 - DNA, 25 bp, Homo sapien
cacagagatctcacctagggccttt

SEQ ID NO: 1720975 - DNA, 25 bp, Homo sapien
tcaaatcgactactgagaacctgca

SEQ ID NO: 1720976 - DNA, 25 bp, Homo sapien
taaacacattatcggctactgcagc

SEQ ID NO: 1720977 - DNA, 25 bp, Homo sapien
tcaaacaaaggagatgaagacaccc

SEQ ID NO: 1720978 - DNA, 25 bp, Homo sapien
gaagatggacgcatggttccaaggc

SEQ ID NO: 1720979 - DNA, 25 bp, Homo sapien
tctactgagactacccaggacttgt

SEQ ID NO: 1720980 - DNA, 25 bp, Homo sapien
tcagcgatctgtcaggacggaccag

SEQ ID NO: 1720981 - DNA, 25 bp, Homo sapien
ctgcaggtttgtgtccaagctggat

SEQ ID NO: 1720982 - DNA, 25 bp, Homo sapien
tatctgcacagtggccacgaccgct

SEQ ID NO: 1720983 - DNA, 25 bp, Homo sapien
cgctgccacatgctgatccagggag

SEQ ID NO: 1720984 - DNA, 25 bp, Homo sapien
cagtgcctggcataacagaagtgct

SEQ ID NO: 1720985 - DNA, 25 bp, Homo sapien
gtgctccaagaatacgagccattaa

SEQ ID NO: 1720986 - DNA, 25 bp, Homo sapien
taattcgtgatctcaaagctccttc

SEQ ID NO: 1720987 - DNA, 25 bp, Homo sapien
caccccaagcttttctaattcgtga

SEQ ID NO: 1720988 - DNA, 25 bp, Homo sapien
tatattcttgcatgcagaccagcac

SEQ ID NO: 1720989 - DNA, 25 bp, Homo sapien
cgtgcttggtcatgagcaggtaaag

SEQ ID NO: 1720990 - DNA, 25 bp, Homo sapien
ctcccacctggttggtcagcagctc

SEQ ID NO: 1720991 - DNA, 25 bp, Homo sapien
aagagcggccgccactcgtgcttgg

SEQ ID NO: 1720992 - DNA, 25 bp, Homo sapien
caaagagtggatagaatctcggcca

SEQ ID NO: 1720993 - DNA, 25 bp, Homo sapien
tggtcatctgagcatcaaacaaaga

SEQ ID NO: 1720994 - DNA, 25 bp, Homo sapien
ccgggcgtgtggctgagtcgatgct

SEQ ID NO: 1720995 - DNA, 25 bp, Homo sapien
tattcagcatcaggatcacggctgc

SEQ ID NO: 1720996 - DNA, 25 bp, Homo sapien
ccaaacccataaagggaagtcagtg

SEQ ID NO: 1720997 - DNA, 25 bp, Homo sapien
cttaatccggaggtgacagcgtgag

SEQ ID NO: 1720998 - DNA, 25 bp, Homo sapien
aacaacagttggcagcgccaccaat

SEQ ID NO: 1720999 - DNA, 25 bp, Homo sapien
gtggagtacatgagcctggagcaca

SEQ ID NO: 1721000 - DNA, 25 bp, Homo sapien
cacaaaagtaggttgagcaggagta

SEQ ID NO: 1721001 - DNA, 25 bp, Homo sapien
cccggcggctctgagtagcgattga

SEQ ID NO: 1721002 - DNA, 25 bp, Homo sapien
gagtaagccatttctcgctgcagaa

SEQ ID NO: 1721003 - DNA, 25 bp, Homo sapien
tccctgagtgcctaaacaacgtgtc

SEQ ID NO: 1721004 - DNA, 25 bp, Homo sapien
agagtcttgttgggccccggagcat

SEQ ID NO: 1721005 - DNA, 25 bp, Homo sapien
acagcacacgctccaagtccaggag

SEQ ID NO: 1721006 - DNA, 25 bp, Homo sapien
aaccagggatcgaatcagtagctca

SEQ ID NO: 1721007 - DNA, 25 bp, Homo sapien
tccgcagcaacaggaggaaaggctg

SEQ ID NO: 1721008 - DNA, 25 bp, Homo sapien
ggctccaagacctcgtgccagggga

SEQ ID NO: 1721009 - DNA, 25 bp, Homo sapien
gaaatccagcagtcgggttatgacc

SEQ ID NO: 1721010 - DNA, 25 bp, Homo sapien
cattgcctcagggaaatccagcagt

SEQ ID NO: 1721011 - DNA, 25 bp, Homo sapien
gggaggaccattgcctcagggaaat

SEQ ID NO: 1721012 - DNA, 25 bp, Homo sapien
aaggagttggtgccccagatgctgc

SEQ ID NO: 1721013 - DNA, 25 bp, Homo sapien
tctcttctccttgccagggttctgg

SEQ ID NO: 1721014 - DNA, 25 bp, Homo sapien
cttctccttgccagggttctggtac

SEQ ID NO: 1721015 - DNA, 25 bp, Homo sapien
cctctcttctccttgccagggttct

SEQ ID NO: 1721016 - DNA, 25 bp, Homo sapien
gcgatgtaggaagcaggtcagctcc

SEQ ID NO: 1721017 - DNA, 25 bp, Homo sapien
tccttatgcatcgaggccaggcgat

SEQ ID NO: 1721018 - DNA, 25 bp, Homo sapien
agctgagctgagtgcttgtccagga

SEQ ID NO: 1721019 - DNA, 25 bp, Homo sapien
gctatagagctgtgcgtacttctca

SEQ ID NO: 1721020 - DNA, 25 bp, Homo sapien
tgggttggtgggttcgtctgtggtc

SEQ ID NO: 1721021 - DNA, 25 bp, Homo sapien
gtgggttcgtctgtggtcttcgatc

SEQ ID NO: 1721022 - DNA, 25 bp, Homo sapien
tcgtctgtggtcttcgatctggccc

SEQ ID NO: 1721023 - DNA, 25 bp, Homo sapien
tgtggtcttcgatctggcccagcac

SEQ ID NO: 1721024 - DNA, 25 bp, Homo sapien
gggcaagtgggaaggggtggcagtc

SEQ ID NO: 1721025 - DNA, 25 bp, Homo sapien
tgggggcaagtgggaaggggtggca

SEQ ID NO: 1721026 - DNA, 25 bp, Homo sapien
aagtgggaaggggtggcagtcacag

SEQ ID NO: 1721027 - DNA, 25 bp, Homo sapien
ggcaagtgggaaggggtggcagtca

SEQ ID NO: 1721028 - DNA, 25 bp, Homo sapien
aagaacaccacggtgcatgtgcagg

SEQ ID NO: 1721029 - DNA, 25 bp, Homo sapien
gaacaccacggtgcatgtgcagggt

SEQ ID NO: 1721030 - DNA, 25 bp, Homo sapien
ctaacaagaacaccacggtgcatgt

SEQ ID NO: 1721031 - DNA, 25 bp, Homo sapien
acaagaacaccacggtgcatgtgca

SEQ ID NO: 1721032 - DNA, 25 bp, Homo sapien
catggatcctttctctactagagca

SEQ ID NO: 1721033 - DNA, 25 bp, Homo sapien
gcgcaaactcccatagttgccagag

SEQ ID NO: 1721034 - DNA, 25 bp, Homo sapien
gaaataaaacttccgtgcactcagt

SEQ ID NO: 1721035 - DNA, 25 bp, Homo sapien
gaatactgtcactgaggccttcacc

SEQ ID NO: 1721036 - DNA, 25 bp, Homo sapien
gcatgtagcttgagtcctcactggc

SEQ ID NO: 1721037 - DNA, 25 bp, Homo sapien
accctggctggcatgtagcttgagt

SEQ ID NO: 1721038 - DNA, 25 bp, Homo sapien
cgtgttgagctcagtgccgatgcag

SEQ ID NO: 1721039 - DNA, 25 bp, Homo sapien
gctggcatgtagcttgagtcctcac

SEQ ID NO: 1721040 - DNA, 25 bp, Homo sapien
ctgctggcagcgctttatgcggatc

SEQ ID NO: 1721041 - DNA, 25 bp, Homo sapien
gcagcgctttatgcggatctggatg

SEQ ID NO: 1721042 - DNA, 25 bp, Homo sapien
cgctttatgcggatctggatgatgg

SEQ ID NO: 1721043 - DNA, 25 bp, Homo sapien
gctggcagcgctttatgcggatctg

SEQ ID NO: 1721044 - DNA, 25 bp, Homo sapien
gccactaagtactaccaaagccaag

SEQ ID NO: 1721045 - DNA, 25 bp, Homo sapien
tcaggacatccccacatctctggga

SEQ ID NO: 1721046 - DNA, 25 bp, Homo sapien
tgagctccctagaactgctcaggac

SEQ ID NO: 1721047 - DNA, 25 bp, Homo sapien
gccgcttgagccactaagtactacc

SEQ ID NO: 1721048 - DNA, 25 bp, Homo sapien
tgtgcccgaattgtgtagaagagac

SEQ ID NO: 1721049 - DNA, 25 bp, Homo sapien
gaggaggcgccggtggtcctctgct

SEQ ID NO: 1721050 - DNA, 25 bp, Homo sapien
gctatgtcccggctccaggcttgtg

SEQ ID NO: 1721051 - DNA, 25 bp, Homo sapien
tagaagagacatgttcggcgacaca

SEQ ID NO: 1721052 - DNA, 25 bp, Homo sapien
ctcgtggcgcaaaaccctgttcagt

SEQ ID NO: 1721053 - DNA, 25 bp, Homo sapien
gcaaaattctgctcgtggcgcaaaa

SEQ ID NO: 1721054 - DNA, 25 bp, Homo sapien
ctgctcgtggcgcaaaaccctgttc

SEQ ID NO: 1721055 - DNA, 25 bp, Homo sapien
aattctgctcgtggcgcaaaaccct

SEQ ID NO: 1721056 - DNA, 25 bp, Homo sapien
aagagcattaactcaggtgatccct

SEQ ID NO: 1721057 - DNA, 25 bp, Homo sapien
cagggataaagacaggaaccaaaag

SEQ ID NO: 1721058 - DNA, 25 bp, Homo sapien
aggaactggttagtggggccaggtg

SEQ ID NO: 1721059 - DNA, 25 bp, Homo sapien
gagcattaactcaggtgatccctgg

SEQ ID NO: 1721060 - DNA, 25 bp, Homo sapien
caattgtacaaaaaggcttgagggg

SEQ ID NO: 1721061 - DNA, 25 bp, Homo sapien
acaggtcaggaacaggtctccatgg

SEQ ID NO: 1721062 - DNA, 25 bp, Homo sapien
gacaggtcaggaacaggtctccatg

SEQ ID NO: 1721063 - DNA, 25 bp, Homo sapien
gcaagtggcaaaggcgacgaactcg

SEQ ID NO: 1721064 - DNA, 25 bp, Homo sapien
caaaggacgctgctcgactcaaggg

SEQ ID NO: 1721065 - DNA, 25 bp, Homo sapien
gaactcgagaagcaaaggacgctgc

SEQ ID NO: 1721066 - DNA, 25 bp, Homo sapien
gttctaagtactgatccagcagcca

SEQ ID NO: 1721067 - DNA, 25 bp, Homo sapien
aaggcccaggaggaggttccacatg

SEQ ID NO: 1721068 - DNA, 25 bp, Homo sapien
ggcccaggaggaggttccacatgca

SEQ ID NO: 1721069 - DNA, 25 bp, Homo sapien
agggccgagtggatggctcaggaga

SEQ ID NO: 1721070 - DNA, 25 bp, Homo sapien
tggatggctcaggagaaggcccagg

SEQ ID NO: 1721071 - DNA, 25 bp, Homo sapien
ccagatacaccactgtccgcagagt

SEQ ID NO: 1721072 - DNA, 25 bp, Homo sapien
agccagatacaccactgtccgcaga

SEQ ID NO: 1721073 - DNA, 25 bp, Homo sapien
aggagggagccagatacaccactgt

SEQ ID NO: 1721074 - DNA, 25 bp, Homo sapien
gaggagggagccagatacaccactg

SEQ ID NO: 1721075 - DNA, 25 bp, Homo sapien
ggtcccgacccttgctgttcttgct

SEQ ID NO: 1721076 - DNA, 25 bp, Homo sapien
ccggtcccgacccttgctgttcttg

SEQ ID NO: 1721077 - DNA, 25 bp, Homo sapien
tcccgacccttgctgttcttgctga

SEQ ID NO: 1721078 - DNA, 25 bp, Homo sapien
ctccggtcccgacccttgctgttct

SEQ ID NO: 1721079 - DNA, 25 bp, Homo sapien
gaaggactgctgcagcaaggcgcca

SEQ ID NO: 1721080 - DNA, 25 bp, Homo sapien
tttacagtaacgaggcacaaagtct

SEQ ID NO: 1721081 - DNA, 25 bp, Homo sapien
aggcccaaacagctcggagcctgct

SEQ ID NO: 1721082 - DNA, 25 bp, Homo sapien
tctgcaagtgctcatagagtttaca

SEQ ID NO: 1721083 - DNA, 25 bp, Homo sapien
gagtaggagactggggagcgaaagg

SEQ ID NO: 1721084 - DNA, 25 bp, Homo sapien
gaacacaagcttatagccctgtggg

SEQ ID NO: 1721085 - DNA, 25 bp, Homo sapien
gggaaagggcatgagcaaaccatga

SEQ ID NO: 1721086 - DNA, 25 bp, Homo sapien
cttggaacacaagcttatagccctg

SEQ ID NO: 1721087 - DNA, 25 bp, Homo sapien
ggatctgttggtcaatgtacctggc

SEQ ID NO: 1721088 - DNA, 25 bp, Homo sapien
gctccaccaatcaggccaccctgga

SEQ ID NO: 1721089 - DNA, 25 bp, Homo sapien
tgatagaagtgctcaaaagttgtgg

SEQ ID NO: 1721090 - DNA, 25 bp, Homo sapien
gctcaaaagttgtggccagttccag

SEQ ID NO: 1721091 - DNA, 25 bp, Homo sapien
gaaaacagaggccaatctgctctag

SEQ ID NO: 1721092 - DNA, 25 bp, Homo sapien
ggaaaacagaggccaatctgctcta

SEQ ID NO: 1721093 - DNA, 25 bp, Homo sapien
cagccagctcgaaccaaagctcagg

SEQ ID NO: 1721094 - DNA, 25 bp, Homo sapien
tcctcatcttcctgctccaagaaca

SEQ ID NO: 1721095 - DNA, 25 bp, Homo sapien
ctcatcttcctgctccaagaacaac

SEQ ID NO: 1721096 - DNA, 25 bp, Homo sapien
tctagtctcttttcctcctcatctt

SEQ ID NO: 1721097 - DNA, 25 bp, Homo sapien
tcctcttcctctagtctcttttcct

SEQ ID NO: 1721098 - DNA, 25 bp, Homo sapien
acagaaggatttcaagggcccttgg

SEQ ID NO: 1721099 - DNA, 25 bp, Homo sapien
cagaaggatttcaagggcccttggg

SEQ ID NO: 1721100 - DNA, 25 bp, Homo sapien
gacagaaggatttcaagggcccttg

SEQ ID NO: 1721101 - DNA, 25 bp, Homo sapien
cagcttcctcttcctcctcttcctc

SEQ ID NO: 1721102 - DNA, 25 bp, Homo sapien
cgataaataattctttctcagcttc

SEQ ID NO: 1721103 - DNA, 25 bp, Homo sapien
cttcgataaataattctttctcagc

SEQ ID NO: 1721104 - DNA, 25 bp, Homo sapien
tcagcttcctcttcctcctcttcct

SEQ ID NO: 1721105 - DNA, 25 bp, Homo sapien
gaccagtatagaaatggctggactt

SEQ ID NO: 1721106 - DNA, 25 bp, Homo sapien
gggatggtacaggtagcagagtggg

SEQ ID NO: 1721107 - DNA, 25 bp, Homo sapien
agcagcgtggtgacaggaccagtat

SEQ ID NO: 1721108 - DNA, 25 bp, Homo sapien
tgacaggaccagtatagaaatggct

SEQ ID NO: 1721109 - DNA, 25 bp, Homo sapien
gagaaacggtcaagggcatcacaga

SEQ ID NO: 1721110 - DNA, 25 bp, Homo sapien
gaaactggagaaacggtcaagggca

SEQ ID NO: 1721111 - DNA, 25 bp, Homo sapien
actggagaaacggtcaagggcatca

SEQ ID NO: 1721112 - DNA, 25 bp, Homo sapien
agaaacggtcaagggcatcacagaa

SEQ ID NO: 1721113 - DNA, 25 bp, Homo sapien
ccaatttcctctccctagttcctca

SEQ ID NO: 1721114 - DNA, 25 bp, Homo sapien
caatttcctctccctagttcctcac

SEQ ID NO: 1721115 - DNA, 25 bp, Homo sapien
gacgtgtgcactttactgaatacta

SEQ ID NO: 1721116 - DNA, 25 bp, Homo sapien
gagacagccttctacgatgctggaa

SEQ ID NO: 1721117 - DNA, 25 bp, Homo sapien
gaataaccctcacagacagtatgtt

SEQ ID NO: 1721118 - DNA, 25 bp, Homo sapien
tttctcatccctcgctaggagctga

SEQ ID NO: 1721119 - DNA, 25 bp, Homo sapien
gattttagcacacctctctcagtag

SEQ ID NO: 1721120 - DNA, 25 bp, Homo sapien
tccaagtacttaattgccaccaatg

SEQ ID NO: 1721121 - DNA, 25 bp, Homo sapien
tctaccaggccataacgaagtctca

SEQ ID NO: 1721122 - DNA, 25 bp, Homo sapien
tagttcctcagttatattagccaca

SEQ ID NO: 1721123 - DNA, 25 bp, Homo sapien
caaacaatctcttggctaggttgac

SEQ ID NO: 1721124 - DNA, 25 bp, Homo sapien
tattttgcctgggaatgcataacct

SEQ ID NO: 1721125 - DNA, 25 bp, Homo sapien
aagccttgggaagtacatgcctgcc

SEQ ID NO: 1721126 - DNA, 25 bp, Homo sapien
tgtgctccagggtgtaaagccttgg

SEQ ID NO: 1721127 - DNA, 25 bp, Homo sapien
cactgcagtcgccgatgtggtccca

SEQ ID NO: 1721128 - DNA, 25 bp, Homo sapien
ctctgtctgattgaatttcagcagc

SEQ ID NO: 1721129 - DNA, 25 bp, Homo sapien
tccactgcagtcgccgatgtggtcc

SEQ ID NO: 1721130 - DNA, 25 bp, Homo sapien
actgcagtcgccgatgtggtcccat

SEQ ID NO: 1721131 - DNA, 25 bp, Homo sapien
gtgtggaaagtcctggccctcatgc

SEQ ID NO: 1721132 - DNA, 25 bp, Homo sapien
gagaggtcagaatccttcagcaagg

SEQ ID NO: 1721133 - DNA, 25 bp, Homo sapien
ggtcagaatccttcagcaaggtctc

SEQ ID NO: 1721134 - DNA, 25 bp, Homo sapien
agggtcaaagggccattccctgagg

SEQ ID NO: 1721135 - DNA, 25 bp, Homo sapien
tcccggtcaggtaccagaggaggca

SEQ ID NO: 1721136 - DNA, 25 bp, Homo sapien
ctcccggtcaggtaccagaggaggc

SEQ ID NO: 1721137 - DNA, 25 bp, Homo sapien
cgctcccggtcaggtaccagaggag

SEQ ID NO: 1721138 - DNA, 25 bp, Homo sapien
acccgctcccggtcaggtaccagag

SEQ ID NO: 1721139 - DNA, 25 bp, Homo sapien
aaccagctgatcaatgtggaggccc

SEQ ID NO: 1721140 - DNA, 25 bp, Homo sapien
tacgaacaagaagacagctcaagag

SEQ ID NO: 1721141 - DNA, 25 bp, Homo sapien
ccccatgggctttgagaatacgaac

SEQ ID NO: 1721142 - DNA, 25 bp, Homo sapien
tgttccagggttcggccttcatcct

SEQ ID NO: 1721143 - DNA, 25 bp, Homo sapien
gctctggctgccacagaaagggaca

SEQ ID NO: 1721144 - DNA, 25 bp, Homo sapien
tggagcggcatacatcaggatctgg

SEQ ID NO: 1721145 - DNA, 25 bp, Homo sapien
tagccctggcctaagaggtgcagga

SEQ ID NO: 1721146 - DNA, 25 bp, Homo sapien
atcacgccgtttcacgtagccctgg

SEQ ID NO: 1721147 - DNA, 25 bp, Homo sapien
ttcatcaacccttctacttcctggg

SEQ ID NO: 1721148 - DNA, 25 bp, Homo sapien
caaaaggtgctgagcgacatctggc

SEQ ID NO: 1721149 - DNA, 25 bp, Homo sapien
cctgcaggcagctgtagagatgcca

SEQ ID NO: 1721150 - DNA, 25 bp, Homo sapien
tggctctaagttcagcgtctcctgc

SEQ ID NO: 1721151 - DNA, 25 bp, Homo sapien
cgtacgggtacagcctgagcctggt

SEQ ID NO: 1721152 - DNA, 25 bp, Homo sapien
ggcaggtcgtcgtcacaccccaggg

SEQ ID NO: 1721153 - DNA, 25 bp, Homo sapien
agagagggcaggtcgtcgtcacacc

SEQ ID NO: 1721154 - DNA, 25 bp, Homo sapien
tggtcaggccgtacgggtacagcct

SEQ ID NO: 1721155 - DNA, 25 bp, Homo sapien
tcgatccgagttgtcaggtactcat

SEQ ID NO: 1721156 - DNA, 25 bp, Homo sapien
cgatggcacgaatgaaggctccggt

SEQ ID NO: 1721157 - DNA, 25 bp, Homo sapien
aaaacaaggttctgctcgatccgag

SEQ ID NO: 1721158 - DNA, 25 bp, Homo sapien
acctctggcgaggagacgatggcac

SEQ ID NO: 1721159 - DNA, 25 bp, Homo sapien
tcagggaagctacagttgaagcaag

SEQ ID NO: 1721160 - DNA, 25 bp, Homo sapien
tctccacatagccacgcaggagcgc

SEQ ID NO: 1721161 - DNA, 25 bp, Homo sapien
ggttggtgcaccaggtcaggttgga

SEQ ID NO: 1721162 - DNA, 25 bp, Homo sapien
ctacagttgaagcaagaggcccagc

SEQ ID NO: 1721163 - DNA, 25 bp, Homo sapien
tggccacagctagcagggtagtgtg

SEQ ID NO: 1721164 - DNA, 25 bp, Homo sapien
atggccacagctagcagggtagtgt

SEQ ID NO: 1721165 - DNA, 25 bp, Homo sapien
ggccacagctagcagggtagtgtgc

SEQ ID NO: 1721166 - DNA, 25 bp, Homo sapien
cttctcgatgggagcctgacagctg

SEQ ID NO: 1721167 - DNA, 25 bp, Homo sapien
catagtagccaccgtcgtcgaccca

SEQ ID NO: 1721168 - DNA, 25 bp, Homo sapien
ttctcgatgggagcctgacagctgg

SEQ ID NO: 1721169 - DNA, 25 bp, Homo sapien
agggcccagatgtaccgctgttgat

SEQ ID NO: 1721170 - DNA, 25 bp, Homo sapien
gtctccttagtcatacccagccctg

SEQ ID NO: 1721171 - DNA, 25 bp, Homo sapien
agccctgctgaatgcacctctgctt

SEQ ID NO: 1721172 - DNA, 25 bp, Homo sapien
gatgtaccgctgttgatgctgtggc

SEQ ID NO: 1721173 - DNA, 25 bp, Homo sapien
cagcgccagcagaatccatggttac

SEQ ID NO: 1721174 - DNA, 25 bp, Homo sapien
gcgccagcagaatccatggttacat

SEQ ID NO: 1721175 - DNA, 25 bp, Homo sapien
ggcagagcagttgtaatagtctttg

SEQ ID NO: 1721176 - DNA, 25 bp, Homo sapien
aggacttgaggcagcgccagcagaa

SEQ ID NO: 1721177 - DNA, 25 bp, Homo sapien
tcctcatgactgtgtggagtaggtc

SEQ ID NO: 1721178 - DNA, 25 bp, Homo sapien
tagaatgctgcactgcacaaggagc

SEQ ID NO: 1721179 - DNA, 25 bp, Homo sapien
tagccacctcggtatgagaagtcct

SEQ ID NO: 1721180 - DNA, 25 bp, Homo sapien
cagagccaggctctaaatgcagggt

SEQ ID NO: 1721181 - DNA, 25 bp, Homo sapien
ccgcgcctggtgatggaaagtgcac

SEQ ID NO: 1721182 - DNA, 25 bp, Homo sapien
tgcacctctcattatagtcctgaaa

SEQ ID NO: 1721183 - DNA, 25 bp, Homo sapien
cctggtgatggaaagtgcacctctc

SEQ ID NO: 1721184 - DNA, 25 bp, Homo sapien
tgaaaccgcttctcctggcgagctg

SEQ ID NO: 1721185 - DNA, 25 bp, Homo sapien
aggaaggtgtatcagtaccagcaca

SEQ ID NO: 1721186 - DNA, 25 bp, Homo sapien
ttctgcaggcatctacccgctgttt

SEQ ID NO: 1721187 - DNA, 25 bp, Homo sapien
tgcaggcatctacccgctgtttcct

SEQ ID NO: 1721188 - DNA, 25 bp, Homo sapien
taccagcacaggtggcgcagcacca

SEQ ID NO: 1721189 - DNA, 25 bp, Homo sapien
acccggttccgcaagttcacagcaa

SEQ ID NO: 1721190 - DNA, 25 bp, Homo sapien
ggatggcagacacccggttccgcaa

SEQ ID NO: 1721191 - DNA, 25 bp, Homo sapien
ttcatggatggcagacacccggttc

SEQ ID NO: 1721192 - DNA, 25 bp, Homo sapien
tgggcgggggcacttcatggatggc

SEQ ID NO: 1721193 - DNA, 25 bp, Homo sapien
acccatttggcacacccctcccctg

SEQ ID NO: 1721194 - DNA, 25 bp, Homo sapien
ttcacccaggcaagtccgatgaaag

SEQ ID NO: 1721195 - DNA, 25 bp, Homo sapien
acccaggcaagtccgatgaaagcag

SEQ ID NO: 1721196 - DNA, 25 bp, Homo sapien
cccagacccatttggcacacccctc

SEQ ID NO: 1721197 - DNA, 25 bp, Homo sapien
tgtactctgcgtcctggctgtagaa

SEQ ID NO: 1721198 - DNA, 25 bp, Homo sapien
gctgtacacgcaggcgtaggccagc

SEQ ID NO: 1721199 - DNA, 25 bp, Homo sapien
ggctgtagaagctgtacacgcaggc

SEQ ID NO: 1721200 - DNA, 25 bp, Homo sapien
cacatccatgtactctgcgtcctgg

SEQ ID NO: 1721201 - DNA, 25 bp, Homo sapien
tatggaacgtctaccaagcaccagg

SEQ ID NO: 1721202 - DNA, 25 bp, Homo sapien
gacattctcatgaagctccctaggg

SEQ ID NO: 1721203 - DNA, 25 bp, Homo sapien
taagggtgccgcttgacctgtctgg

SEQ ID NO: 1721204 - DNA, 25 bp, Homo sapien
tacaatgtaggctttcgacctgagc

SEQ ID NO: 1721205 - DNA, 25 bp, Homo sapien
gccggagcagctccatgcccgtgct

SEQ ID NO: 1721206 - DNA, 25 bp, Homo sapien
agcctctcctggatccgccggagca

SEQ ID NO: 1721207 - DNA, 25 bp, Homo sapien
ctgggcagaatgctgcaggatggca

SEQ ID NO: 1721208 - DNA, 25 bp, Homo sapien
atgcccgtgctgaggcagtcggccc

SEQ ID NO: 1721209 - DNA, 25 bp, Homo sapien
tacccttgatgtgggctagccaacc

SEQ ID NO: 1721210 - DNA, 25 bp, Homo sapien
aagtgattctgataggcacctgacc

SEQ ID NO: 1721211 - DNA, 25 bp, Homo sapien
tgaagtgatagggtccagcagcatc

SEQ ID NO: 1721212 - DNA, 25 bp, Homo sapien
caggttggcccaaaagccgggatgt

SEQ ID NO: 1721213 - DNA, 25 bp, Homo sapien
aggcatgttgggtccttttgcctcc

SEQ ID NO: 1721214 - DNA, 25 bp, Homo sapien
atgttgggtccttttgcctcccagg

SEQ ID NO: 1721215 - DNA, 25 bp, Homo sapien
ccaggcctctactgatggactctga

SEQ ID NO: 1721216 - DNA, 25 bp, Homo sapien
gactctgaagaccaacccggaaatc

SEQ ID NO: 1721217 - DNA, 25 bp, Homo sapien
ctcagcccagaggaggctgccatgt

SEQ ID NO: 1721218 - DNA, 25 bp, Homo sapien
ccagaggaggctgccatgtcccact

SEQ ID NO: 1721219 - DNA, 25 bp, Homo sapien
tcctccatggctctgcccaccccac

SEQ ID NO: 1721220 - DNA, 25 bp, Homo sapien
ctccatggctctgcccaccccactt

SEQ ID NO: 1721221 - DNA, 25 bp, Homo sapien
ctcttctgcctctggccctgaggag

SEQ ID NO: 1721222 - DNA, 25 bp, Homo sapien
tcctcttctgcctctggccctgagg

SEQ ID NO: 1721223 - DNA, 25 bp, Homo sapien
cctcctcttctgcctctggccctga

SEQ ID NO: 1721224 - DNA, 25 bp, Homo sapien
ctcgggcacatcatcctcatcgtct

SEQ ID NO: 1721225 - DNA, 25 bp, Homo sapien
tcatcgtaggagaagctgtcattgt

SEQ ID NO: 1721226 - DNA, 25 bp, Homo sapien
tctcttggtccaggttctcagactc

SEQ ID NO: 1721227 - DNA, 25 bp, Homo sapien
tctggggctgctctaggtgtttcct

SEQ ID NO: 1721228 - DNA, 25 bp, Homo sapien
cactacagacgctgggaatccccct

SEQ ID NO: 1721229 - DNA, 25 bp, Homo sapien
acagacgctgggaatccccctccct

SEQ ID NO: 1721230 - DNA, 25 bp, Homo sapien
ccctcagccccgtgactctggggct

SEQ ID NO: 1721231 - DNA, 25 bp, Homo sapien
agaaagagacctttattcagcaaac

SEQ ID NO: 1721232 - DNA, 25 bp, Homo sapien
gagaaagagacctttattcagcaaa

SEQ ID NO: 1721233 - DNA, 25 bp, Homo sapien
gaaagagacctttattcagcaaaca

SEQ ID NO: 1721234 - DNA, 25 bp, Homo sapien
aatgcaccgcgccgccagcatcagc

SEQ ID NO: 1721235 - DNA, 25 bp, Homo sapien
cggccttccgacccggatcatcccg

SEQ ID NO: 1721236 - DNA, 25 bp, Homo sapien
cggccccgatcctccttgggcgacg

SEQ ID NO: 1721237 - DNA, 25 bp, Homo sapien
ccgatcctccttgggcgacggcggc

SEQ ID NO: 1721238 - DNA, 25 bp, Homo sapien
gccttccgacccggatcatcccggc

SEQ ID NO: 1721239 - DNA, 25 bp, Homo sapien
ggcggctcagtgcggcgttgggtga

SEQ ID NO: 1721240 - DNA, 25 bp, Homo sapien
gcggctcagtgcggcgttgggtgac

SEQ ID NO: 1721241 - DNA, 25 bp, Homo sapien
gggcggctcagtgcggcgttgggtg

SEQ ID NO: 1721242 - DNA, 25 bp, Homo sapien
caccttctaattcatgatgggccat

SEQ ID NO: 1721243 - DNA, 25 bp, Homo sapien
gtggaggtgtggaaaccaccttcta

SEQ ID NO: 1721244 - DNA, 25 bp, Homo sapien
gacagggtgggacgtggaggtgtgg

SEQ ID NO: 1721245 - DNA, 25 bp, Homo sapien
accaccttctaattcatgatgggcc

SEQ ID NO: 1721246 - DNA, 25 bp, Homo sapien
ttgggatgaaataacttcccagggc

SEQ ID NO: 1721247 - DNA, 25 bp, Homo sapien
ccttgggatgaaataacttcccagg

SEQ ID NO: 1721248 - DNA, 25 bp, Homo sapien
gggatgaaataacttcccagggctc

SEQ ID NO: 1721249 - DNA, 25 bp, Homo sapien
tgggatgaaataacttcccagggct

SEQ ID NO: 1721250 - DNA, 25 bp, Homo sapien
tgtataaaggccagtgcaagggaga

SEQ ID NO: 1721251 - DNA, 25 bp, Homo sapien
ggacacacatgttgaccaatgaaga

SEQ ID NO: 1721252 - DNA, 25 bp, Homo sapien
cacaaaatgtccatggagctgtgca

SEQ ID NO: 1721253 - DNA, 25 bp, Homo sapien
gaaaatgacagtgaacaggccgagg

SEQ ID NO: 1721254 - DNA, 25 bp, Homo sapien
catgttggtttcgtccttaagggcg

SEQ ID NO: 1721255 - DNA, 25 bp, Homo sapien
cgatccttgaccacgtagttggccg

SEQ ID NO: 1721256 - DNA, 25 bp, Homo sapien
taagggcggccgctaggcactgcat

SEQ ID NO: 1721257 - DNA, 25 bp, Homo sapien
tagttggccggcaggatgtcggcct

SEQ ID NO: 1721258 - DNA, 25 bp, Homo sapien
aagcggagggacacatgctcgtcca

SEQ ID NO: 1721259 - DNA, 25 bp, Homo sapien
tgcccagacatccaaccaggagttg

SEQ ID NO: 1721260 - DNA, 25 bp, Homo sapien
ccaaggtccgtcagagaaaaagctc

SEQ ID NO: 1721261 - DNA, 25 bp, Homo sapien
tttccgtcctctgcggaagcggagg

SEQ ID NO: 1721262 - DNA, 25 bp, Homo sapien
tagatctcaccaaagcccccgcccc

SEQ ID NO: 1721263 - DNA, 25 bp, Homo sapien
tcgtagatctcaccaaagcccccgc

SEQ ID NO: 1721264 - DNA, 25 bp, Homo sapien
gcctcgtagatctcaccaaagcccc

SEQ ID NO: 1721265 - DNA, 25 bp, Homo sapien
ctcgtagatctcaccaaagcccccg

SEQ ID NO: 1721266 - DNA, 25 bp, Homo sapien
ccatcttgaggacctgcttgggctg

SEQ ID NO: 1721267 - DNA, 25 bp, Homo sapien
ttgagcacggccacctccatcttga

SEQ ID NO: 1721268 - DNA, 25 bp, Homo sapien
gactccaccttgagggccacattct

SEQ ID NO: 1721269 - DNA, 25 bp, Homo sapien
tgggctgactccaccttgagggcca

SEQ ID NO: 1721270 - DNA, 25 bp, Homo sapien
tcccatccccctgcccgaggcccga

SEQ ID NO: 1721271 - DNA, 25 bp, Homo sapien
cttagcccctggcttcatcatctct

SEQ ID NO: 1721272 - DNA, 25 bp, Homo sapien
tagcccctggcttcatcatctcttc

SEQ ID NO: 1721273 - DNA, 25 bp, Homo sapien
ctctcttagcccctggcttcatcat

SEQ ID NO: 1721274 - DNA, 25 bp, Homo sapien
gttaaacttctcgttcctgccacag

SEQ ID NO: 1721275 - DNA, 25 bp, Homo sapien
ccaatgaacctgcacacatggtcct

SEQ ID NO: 1721276 - DNA, 25 bp, Homo sapien
ctggagctgcatcactacatagtta

SEQ ID NO: 1721277 - DNA, 25 bp, Homo sapien
cacagccaatgaacctgcacacatg

SEQ ID NO: 1721278 - DNA, 25 bp, Homo sapien
gatctgcttgcccagccgcaatgtg

SEQ ID NO: 1721279 - DNA, 25 bp, Homo sapien
gccgcaatgtggtgctcagcgtgaa

SEQ ID NO: 1721280 - DNA, 25 bp, Homo sapien
gagtggatggcctcgatggactcca

SEQ ID NO: 1721281 - DNA, 25 bp, Homo sapien
ctcagcgtgaaggtgcctcgcggct

SEQ ID NO: 1721282 - DNA, 25 bp, Homo sapien
tcgcccgcaaggaaacgtcagtatt

SEQ ID NO: 1721283 - DNA, 25 bp, Homo sapien
gtgtgcatcaggtcacagcctctca

SEQ ID NO: 1721284 - DNA, 25 bp, Homo sapien
gtctgtacagctccacatttttggg

SEQ ID NO: 1721285 - DNA, 25 bp, Homo sapien
tggtgactcagccacgtctgtacag

SEQ ID NO: 1721286 - DNA, 25 bp, Homo sapien
tgttggtgtactgccgggccagccc

SEQ ID NO: 1721287 - DNA, 25 bp, Homo sapien
ggccagcccgaagtccagcatatag

SEQ ID NO: 1721288 - DNA, 25 bp, Homo sapien
tatagcacttcctgtaggtggaggg

SEQ ID NO: 1721289 - DNA, 25 bp, Homo sapien
gtccagcatatagcacttcctgtag

SEQ ID NO: 1721290 - DNA, 25 bp, Homo sapien
gactgaggcatagcgaaccgttcct

SEQ ID NO: 1721291 - DNA, 25 bp, Homo sapien
cattgactgaggcatagcgaaccgt

SEQ ID NO: 1721292 - DNA, 25 bp, Homo sapien
ctcgaaacccggccacattccgagg

SEQ ID NO: 1721293 - DNA, 25 bp, Homo sapien
ttgactgaggcatagcgaaccgttc

SEQ ID NO: 1721294 - DNA, 25 bp, Homo sapien
atcctgcatcccgggctttgccact

SEQ ID NO: 1721295 - DNA, 25 bp, Homo sapien
cacatcctgcatcccgggctttgcc

SEQ ID NO: 1721296 - DNA, 25 bp, Homo sapien
ctccacatcctgcatcccgggcttt

SEQ ID NO: 1721297 - DNA, 25 bp, Homo sapien
cctgcatcccgggctttgccactca

SEQ ID NO: 1721298 - DNA, 25 bp, Homo sapien
aagagggaccacaggtcgtcgtggc

SEQ ID NO: 1721299 - DNA, 25 bp, Homo sapien
ggaccacaggtcgtcgtggcggccc

SEQ ID NO: 1721300 - DNA, 25 bp, Homo sapien
gagggaccacaggtcgtcgtggcgg

SEQ ID NO: 1721301 - DNA, 25 bp, Homo sapien
gggaccacaggtcgtcgtggcggcc

SEQ ID NO: 1721302 - DNA, 25 bp, Homo sapien
tgaagtagtcgaggctggcaatgtg

SEQ ID NO: 1721303 - DNA, 25 bp, Homo sapien
agcatccggtgctcatacttctcct

SEQ ID NO: 1721304 - DNA, 25 bp, Homo sapien
aggctggcaatgtggtccaggaaga

SEQ ID NO: 1721305 - DNA, 25 bp, Homo sapien
aactctgacggcatgtgcttcagca

SEQ ID NO: 1721306 - DNA, 25 bp, Homo sapien
atccgggggctagccaggaggaagg

SEQ ID NO: 1721307 - DNA, 25 bp, Homo sapien
aggtgatccgggggctagccaggag

SEQ ID NO: 1721308 - DNA, 25 bp, Homo sapien
gtgatccgggggctagccaggagga

SEQ ID NO: 1721309 - DNA, 25 bp, Homo sapien
acagagaggtgatccgggggctagc

SEQ ID NO: 1721310 - DNA, 25 bp, Homo sapien
tgctcgtggacaggagggcatcggt

SEQ ID NO: 1721311 - DNA, 25 bp, Homo sapien
tcattctcggcaatgcccctctcct

SEQ ID NO: 1721312 - DNA, 25 bp, Homo sapien
gccgtctgccgggtgttctgctggg

SEQ ID NO: 1721313 - DNA, 25 bp, Homo sapien
tgttctcaaacactgacatgatcaa

SEQ ID NO: 1721314 - DNA, 25 bp, Homo sapien
tcctcggtgttctcccggagcaggt

SEQ ID NO: 1721315 - DNA, 25 bp, Homo sapien
tctccctgtagcacatcctcggtgt

SEQ ID NO: 1721316 - DNA, 25 bp, Homo sapien
caggcactggcgtcacattgaccac

SEQ ID NO: 1721317 - DNA, 25 bp, Homo sapien
tttgttccggttgacatctgtctcc

SEQ ID NO: 1721318 - DNA, 25 bp, Homo sapien
tccggtagcgcagagaacggactgg

SEQ ID NO: 1721319 - DNA, 25 bp, Homo sapien
tggacagcctttctgactcagggct

SEQ ID NO: 1721320 - DNA, 25 bp, Homo sapien
tccgccgtggacagcctttctgact

SEQ ID NO: 1721321 - DNA, 25 bp, Homo sapien
gggctgttcaccctccggtagcgca

SEQ ID NO: 1721322 - DNA, 25 bp, Homo sapien
tggcgcgagggcgagccaggcagat

SEQ ID NO: 1721323 - DNA, 25 bp, Homo sapien
ggcgcgagggcgagccaggcagatc

SEQ ID NO: 1721324 - DNA, 25 bp, Homo sapien
ctggcgcgagggcgagccaggcaga

SEQ ID NO: 1721325 - DNA, 25 bp, Homo sapien
gcgcgagggcgagccaggcagatcc

SEQ ID NO: 1721326 - DNA, 25 bp, Homo sapien
ggctgtgacgtctcggaacggccat

SEQ ID NO: 1721327 - DNA, 25 bp, Homo sapien
ggcggcaaatgctgcaggtcctcct

SEQ ID NO: 1721328 - DNA, 25 bp, Homo sapien
gatgatgacccactctttgctgtcg

SEQ ID NO: 1721329 - DNA, 25 bp, Homo sapien
gagctccgtctccttgtcgatgatg

SEQ ID NO: 1721330 - DNA, 25 bp, Homo sapien
agggagtgccccgagagtctgtcct

SEQ ID NO: 1721331 - DNA, 25 bp, Homo sapien
gggtaatgctccgtctccagcgtgg

SEQ ID NO: 1721332 - DNA, 25 bp, Homo sapien
agaacacggaggacgccagtcgtcg

SEQ ID NO: 1721333 - DNA, 25 bp, Homo sapien
cacagggctgctctcagccgagcgg

SEQ ID NO: 1721334 - DNA, 25 bp, Homo sapien
gtcttgtgggtgaaccgggcccaca

SEQ ID NO: 1721335 - DNA, 25 bp, Homo sapien
tcttgtgggtgaaccgggcccacac

SEQ ID NO: 1721336 - DNA, 25 bp, Homo sapien
gatgagccataccacaatggtggcc

SEQ ID NO: 1721337 - DNA, 25 bp, Homo sapien
tgcgcacgtgccagtcacattgagg

SEQ ID NO: 1721338 - DNA, 25 bp, Homo sapien
tacagcactgtgcaacttgcgcacg

SEQ ID NO: 1721339 - DNA, 25 bp, Homo sapien
ggtctatgtaaatggcacttcctgg

SEQ ID NO: 1721340 - DNA, 25 bp, Homo sapien
tagagtacctcagggttctggtcac

SEQ ID NO: 1721341 - DNA, 25 bp, Homo sapien
taagatcacctgttagctcagagct

SEQ ID NO: 1721342 - DNA, 25 bp, Homo sapien
agagtcaaagccaccccgaaaagat

SEQ ID NO: 1721343 - DNA, 25 bp, Homo sapien
ccaaaccatgtgaagctctgccgag

SEQ ID NO: 1721344 - DNA, 25 bp, Homo sapien
agactatgaagtgcgaaaacaccac

SEQ ID NO: 1721345 - DNA, 25 bp, Homo sapien
aagtgcttagatcgctgcctggcac

SEQ ID NO: 1721346 - DNA, 25 bp, Homo sapien
gtgacaatattgcaggctcacagca

SEQ ID NO: 1721347 - DNA, 25 bp, Homo sapien
aggctacacgctttccccaagcagg

SEQ ID NO: 1721348 - DNA, 25 bp, Homo sapien
ccgtctgtgagtctgacccctagga

SEQ ID NO: 1721349 - DNA, 25 bp, Homo sapien
acccattcggtgttcacagatgcca

SEQ ID NO: 1721350 - DNA, 25 bp, Homo sapien
ccactgaggtcaggctttggagccc

SEQ ID NO: 1721351 - DNA, 25 bp, Homo sapien
tgtacgagttggtgacacccattcg

SEQ ID NO: 1721352 - DNA, 25 bp, Homo sapien
aaaggaagcagatgttggtccctga

SEQ ID NO: 1721353 - DNA, 25 bp, Homo sapien
tcgacggagcaagtgcaaaggaagc

SEQ ID NO: 1721354 - DNA, 25 bp, Homo sapien
gctgggccccggtgctgagtttctc

SEQ ID NO: 1721355 - DNA, 25 bp, Homo sapien
tcgacactgagaactctgagggccc

SEQ ID NO: 1721356 - DNA, 25 bp, Homo sapien
ttttcgtgcatgcttccgctggcca

SEQ ID NO: 1721357 - DNA, 25 bp, Homo sapien
ctaaggaggacgcaccccggagaga

SEQ ID NO: 1721358 - DNA, 25 bp, Homo sapien
aaaaagcgtcccatcttcgtgtgcg

SEQ ID NO: 1721359 - DNA, 25 bp, Homo sapien
ggtcgggaaatagtgcaagcgtata

SEQ ID NO: 1721360 - DNA, 25 bp, Homo sapien
caagtgttggatttgtacagtactc

SEQ ID NO: 1721361 - DNA, 25 bp, Homo sapien
ccgcgcgtgtgcgtgtcggtttcaa

SEQ ID NO: 1721362 - DNA, 25 bp, Homo sapien
tttgtacagtactcgcagtctaggg

SEQ ID NO: 1721363 - DNA, 25 bp, Homo sapien
tcagtgcatgcttttctacccgggc

SEQ ID NO: 1721364 - DNA, 25 bp, Homo sapien
tcaggatttggtagtacacaagctc

SEQ ID NO: 1721365 - DNA, 25 bp, Homo sapien
aaaggcacaaaatccctcgcacagc

SEQ ID NO: 1721366 - DNA, 25 bp, Homo sapien
catacagggacttaaaaaggcacaa

SEQ ID NO: 1721367 - DNA, 25 bp, Homo sapien
gctctccggattgtctgcattaaca

SEQ ID NO: 1721368 - DNA, 25 bp, Homo sapien
gctcaagagcccagcccaagtccat

SEQ ID NO: 1721369 - DNA, 25 bp, Homo sapien
agctcaagagcccagcccaagtcca

SEQ ID NO: 1721370 - DNA, 25 bp, Homo sapien
cagctcaagagcccagcccaagtcc

SEQ ID NO: 1721371 - DNA, 25 bp, Homo sapien
tggtttggaggtcattggccccctc

SEQ ID NO: 1721372 - DNA, 25 bp, Homo sapien
aaccccagaaaagcctggatgccac

SEQ ID NO: 1721373 - DNA, 25 bp, Homo sapien
ccaaccccagaaaagcctggatgcc

SEQ ID NO: 1721374 - DNA, 25 bp, Homo sapien
ccccaaccccagaaaagcctggatg

SEQ ID NO: 1721375 - DNA, 25 bp, Homo sapien
ccgcgcccgttctcggtaatcggag

SEQ ID NO: 1721376 - DNA, 25 bp, Homo sapien
ttcacctcaaatgggggcgccacgg

SEQ ID NO: 1721377 - DNA, 25 bp, Homo sapien
ctccggaccctgttgagcaaccgcg

SEQ ID NO: 1721378 - DNA, 25 bp, Homo sapien
atcggagaggtctcttttgaagtcc

SEQ ID NO: 1721379 - DNA, 25 bp, Homo sapien
gtgagcagcatgtgcgagaagccca

SEQ ID NO: 1721380 - DNA, 25 bp, Homo sapien
tccttcccattagcctgaggctgaa

SEQ ID NO: 1721381 - DNA, 25 bp, Homo sapien
ctccttcccattagcctgaggctga

SEQ ID NO: 1721382 - DNA, 25 bp, Homo sapien
cctccttcccattagcctgaggctg

SEQ ID NO: 1721383 - DNA, 25 bp, Homo sapien
ccttcccattagcctgaggctgaac

SEQ ID NO: 1721384 - DNA, 25 bp, Homo sapien
ctggctccggtcagtgctcctctca

SEQ ID NO: 1721385 - DNA, 25 bp, Homo sapien
tccggtcagtgctcctctcactccc

SEQ ID NO: 1721386 - DNA, 25 bp, Homo sapien
ggctccggtcagtgctcctctcact

SEQ ID NO: 1721387 - DNA, 25 bp, Homo sapien
tgctggagccactacgaggccccag

SEQ ID NO: 1721388 - DNA, 25 bp, Homo sapien
gactccttctgatcgtctgccagca

SEQ ID NO: 1721389 - DNA, 25 bp, Homo sapien
tcttcatgtcgccaggagagacaag

SEQ ID NO: 1721390 - DNA, 25 bp, Homo sapien
cagtgacgggcgacttcttcatgtc

SEQ ID NO: 1721391 - DNA, 25 bp, Homo sapien
caagcaccagcgttttggagccctc

SEQ ID NO: 1721392 - DNA, 25 bp, Homo sapien
tccaccggaagacatgacgttgagg

SEQ ID NO: 1721393 - DNA, 25 bp, Homo sapien
tccgcaatgtgcacaaaggtcctct

SEQ ID NO: 1721394 - DNA, 25 bp, Homo sapien
tgaactcctcagaccgcaaggcttg

SEQ ID NO: 1721395 - DNA, 25 bp, Homo sapien
ccattgggcagtgagtttgtggcca

SEQ ID NO: 1721396 - DNA, 25 bp, Homo sapien
gagggtctcagaggcacggcgctgc

SEQ ID NO: 1721397 - DNA, 25 bp, Homo sapien
agagcccgtgcctgagagggtctca

SEQ ID NO: 1721398 - DNA, 25 bp, Homo sapien
gggcgtgtcctcctcagagcccgtg

SEQ ID NO: 1721399 - DNA, 25 bp, Homo sapien
aacaggcatgggcatgcggaggcca

SEQ ID NO: 1721400 - DNA, 25 bp, Homo sapien
ctctctctgcgggacagggactggc

SEQ ID NO: 1721401 - DNA, 25 bp, Homo sapien
tgcgcgcggcggatgtggacgcggg

SEQ ID NO: 1721402 - DNA, 25 bp, Homo sapien
caggccgcggccaggaggttgtttg

SEQ ID NO: 1721403 - DNA, 25 bp, Homo sapien
ggacgcgctggcattgcgcgcggcg

SEQ ID NO: 1721404 - DNA, 25 bp, Homo sapien
ggaccgcggagagcagcgggcgtca

SEQ ID NO: 1721405 - DNA, 25 bp, Homo sapien
ggggaccgcggagagcagcgggcgt

SEQ ID NO: 1721406 - DNA, 25 bp, Homo sapien
tgggggaccgcggagagcagcgggc

SEQ ID NO: 1721407 - DNA, 25 bp, Homo sapien
gggtgggggaccgcggagagcagcg

SEQ ID NO: 1721408 - DNA, 25 bp, Homo sapien
tgagtagaccgatgttccctgggtc

SEQ ID NO: 1721409 - DNA, 25 bp, Homo sapien
agtggagtcctcgatgaaaagtggc

SEQ ID NO: 1721410 - DNA, 25 bp, Homo sapien
cacaatggctcccagaagactgtgg

SEQ ID NO: 1721411 - DNA, 25 bp, Homo sapien
tggcagtccagaggccgtccctggc

SEQ ID NO: 1721412 - DNA, 25 bp, Homo sapien
atggagccaactttggggcaggtca

SEQ ID NO: 1721413 - DNA, 25 bp, Homo sapien
gccaactttggggcaggtcagacct

SEQ ID NO: 1721414 - DNA, 25 bp, Homo sapien
ggcaggtcagacctgccccctcaca

SEQ ID NO: 1721415 - DNA, 25 bp, Homo sapien
gtccaggatggagccaactttgggg

SEQ ID NO: 1721416 - DNA, 25 bp, Homo sapien
tcctgatggtgaagggtcctgagca

SEQ ID NO: 1721417 - DNA, 25 bp, Homo sapien
tgcccattgcgggagacgatgcctg

SEQ ID NO: 1721418 - DNA, 25 bp, Homo sapien
tccgaagggccagtgcaaagatggt

SEQ ID NO: 1721419 - DNA, 25 bp, Homo sapien
cccagatgtaggcagttgaggctca

SEQ ID NO: 1721420 - DNA, 25 bp, Homo sapien
gtggacgtcaaaggctgtccaccca

SEQ ID NO: 1721421 - DNA, 25 bp, Homo sapien
tcattcggagaagctctaggtggga

SEQ ID NO: 1721422 - DNA, 25 bp, Homo sapien
ccttgggagggcctcaagttgacaa

SEQ ID NO: 1721423 - DNA, 25 bp, Homo sapien
gcctgggcaccaggagtcatatcct

SEQ ID NO: 1721424 - DNA, 25 bp, Homo sapien
gaggtttggaatcccaagggcagac

SEQ ID NO: 1721425 - DNA, 25 bp, Homo sapien
ttttacagaggaagggctcaggacc

SEQ ID NO: 1721426 - DNA, 25 bp, Homo sapien
gggttttgcgtctctgccagctcca

SEQ ID NO: 1721427 - DNA, 25 bp, Homo sapien
tgtgatggctacttcccttccgaga

SEQ ID NO: 1721428 - DNA, 25 bp, Homo sapien
tgggcctttttaccttggatctcag

SEQ ID NO: 1721429 - DNA, 25 bp, Homo sapien
ctagagcacgctggcatccatgcca

SEQ ID NO: 1721430 - DNA, 25 bp, Homo sapien
acagcaggactttgcgagcctgggc

SEQ ID NO: 1721431 - DNA, 25 bp, Homo sapien
ccaacagaaagagtgtcccaggagc

SEQ ID NO: 1721432 - DNA, 25 bp, Homo sapien
tctttgaccacaggacaaagaaatg

SEQ ID NO: 1721433 - DNA, 25 bp, Homo sapien
gccctcacacctctctttgaccaca

SEQ ID NO: 1721434 - DNA, 25 bp, Homo sapien
tttgaccacaggacaaagaaatgtc

SEQ ID NO: 1721435 - DNA, 25 bp, Homo sapien
gcccctgccctcacacctctctttg

SEQ ID NO: 1721436 - DNA, 25 bp, Homo sapien
cttctctgatgtcattgaagaatga

SEQ ID NO: 1721437 - DNA, 25 bp, Homo sapien
aaccagaggatggatagatcaactc

SEQ ID NO: 1721438 - DNA, 25 bp, Homo sapien
tgaaatgctgagtctaaccagagga

SEQ ID NO: 1721439 - DNA, 25 bp, Homo sapien
gcaggtatgaaatgctgagtctaac

SEQ ID NO: 1721440 - DNA, 25 bp, Homo sapien
gaggtagctgggtgatggcatagga

SEQ ID NO: 1721441 - DNA, 25 bp, Homo sapien
tggcataggaggtgagcccctagcc

SEQ ID NO: 1721442 - DNA, 25 bp, Homo sapien
cagggaccaaggctaccatgatgag

SEQ ID NO: 1721443 - DNA, 25 bp, Homo sapien
ccaaggctaccatgatgaggtagct

SEQ ID NO: 1721444 - DNA, 25 bp, Homo sapien
caaatgcttcaggtgcagcctccct

SEQ ID NO: 1721445 - DNA, 25 bp, Homo sapien
tccctctagtatccagccagctcaa

SEQ ID NO: 1721446 - DNA, 25 bp, Homo sapien
aatgcttcaggtgcagcctccctct

SEQ ID NO: 1721447 - DNA, 25 bp, Homo sapien
gcttcaggtgcagcctccctctagt

SEQ ID NO: 1721448 - DNA, 25 bp, Homo sapien
agctgagcgtgccatcaggctcccg

SEQ ID NO: 1721449 - DNA, 25 bp, Homo sapien
cattccgcagttggaagggcccaaa

SEQ ID NO: 1721450 - DNA, 25 bp, Homo sapien
agggcacatcggtgggcaggcacgg

SEQ ID NO: 1721451 - DNA, 25 bp, Homo sapien
gggataggcaaagcggaggcaggag

SEQ ID NO: 1721452 - DNA, 25 bp, Homo sapien
tcagttgcaatggtagaggagaatt

SEQ ID NO: 1721453 - DNA, 25 bp, Homo sapien
agtggtcgtactcccagccctgaga

SEQ ID NO: 1721454 - DNA, 25 bp, Homo sapien
gagaattctgagtggtcgtactccc

SEQ ID NO: 1721455 - DNA, 25 bp, Homo sapien
ctcagttgcaatggtagaggagaat

SEQ ID NO: 1721456 - DNA, 25 bp, Homo sapien
tcccaacgattcacgccagcttggg

SEQ ID NO: 1721457 - DNA, 25 bp, Homo sapien
caaggaaggcctcgacctgctgcct

SEQ ID NO: 1721458 - DNA, 25 bp, Homo sapien
agggagactgcctccaccgacattc

SEQ ID NO: 1721459 - DNA, 25 bp, Homo sapien
ccagatggattatgtaaataccgac

SEQ ID NO: 1721460 - DNA, 25 bp, Homo sapien
caggcagaaagggacctcctatgaa

SEQ ID NO: 1721461 - DNA, 25 bp, Homo sapien
gccttctgaggcgaactctgccatt

SEQ ID NO: 1721462 - DNA, 25 bp, Homo sapien
ggcagaaagggacctcctatgaaca

SEQ ID NO: 1721463 - DNA, 25 bp, Homo sapien
gaaagggacctcctatgaacatcag

SEQ ID NO: 1721464 - DNA, 25 bp, Homo sapien
gaagaaagtggacgcagctctgttc

SEQ ID NO: 1721465 - DNA, 25 bp, Homo sapien
caccggcgaagaagaaagtggacgc

SEQ ID NO: 1721466 - DNA, 25 bp, Homo sapien
ctgtcggacagatatccaaaggcca

SEQ ID NO: 1721467 - DNA, 25 bp, Homo sapien
agcacaccggcgaagaagaaagtgg

SEQ ID NO: 1721468 - DNA, 25 bp, Homo sapien
ttattggcccagtgcctcaccccac

SEQ ID NO: 1721469 - DNA, 25 bp, Homo sapien
cttattggcccagtgcctcacccca

SEQ ID NO: 1721470 - DNA, 25 bp, Homo sapien
tcttattggcccagtgcctcacccc

SEQ ID NO: 1721471 - DNA, 25 bp, Homo sapien
atagctgacggaggctgcagatgcc

SEQ ID NO: 1721472 - DNA, 25 bp, Homo sapien
ggtgcgggtgatggcaaacattaca

SEQ ID NO: 1721473 - DNA, 25 bp, Homo sapien
tactcacgtaggctaccagcagcag

SEQ ID NO: 1721474 - DNA, 25 bp, Homo sapien
catcacgatgatggtaaaaccagcc

SEQ ID NO: 1721475 - DNA, 25 bp, Homo sapien
catcacgccccctgtccagaaggtg

SEQ ID NO: 1721476 - DNA, 25 bp, Homo sapien
gtgccagcagcatcacgccccctgt

SEQ ID NO: 1721477 - DNA, 25 bp, Homo sapien
catcgccagtcccgtatcaggtacc

SEQ ID NO: 1721478 - DNA, 25 bp, Homo sapien
gtatcaggtacccaaccagtgccag

SEQ ID NO: 1721479 - DNA, 25 bp, Homo sapien
tgtatctcccgctccccagctgcct

SEQ ID NO: 1721480 - DNA, 25 bp, Homo sapien
tctatcctcaaatctcaggctctga

SEQ ID NO: 1721481 - DNA, 25 bp, Homo sapien
tctcaggctctgattaatctcatct

SEQ ID NO: 1721482 - DNA, 25 bp, Homo sapien
aatctctctatcctcaaatctcagg

SEQ ID NO: 1721483 - DNA, 25 bp, Homo sapien
aaagtcatgaccctaagccacatgt

SEQ ID NO: 1721484 - DNA, 25 bp, Homo sapien
tgttcctggacatactacaggctct

SEQ ID NO: 1721485 - DNA, 25 bp, Homo sapien
tggacatactacaggctctcaactt

SEQ ID NO: 1721486 - DNA, 25 bp, Homo sapien
tccacacttgatgagctcttattca

SEQ ID NO: 1721487 - DNA, 25 bp, Homo sapien
acactggccgcccattgagcctggc

SEQ ID NO: 1721488 - DNA, 25 bp, Homo sapien
agtggagcaagtacctgtgggcctc

SEQ ID NO: 1721489 - DNA, 25 bp, Homo sapien
gccttgggtcagaagccagcgtgca

SEQ ID NO: 1721490 - DNA, 25 bp, Homo sapien
ggccgcccattgagcctggcacagt

SEQ ID NO: 1721491 - DNA, 25 bp, Homo sapien
cgaatgatggatgtggcccactgga

SEQ ID NO: 1721492 - DNA, 25 bp, Homo sapien
cagctgagacgagtgggtctcgaat

SEQ ID NO: 1721493 - DNA, 25 bp, Homo sapien
tggagccaggtaggacatcctaaag

SEQ ID NO: 1721494 - DNA, 25 bp, Homo sapien
taaagagttcggaactctctgtggg

SEQ ID NO: 1721495 - DNA, 25 bp, Homo sapien
ctggtagggaaggaggtgaggttgt

SEQ ID NO: 1721496 - DNA, 25 bp, Homo sapien
tagggaaggaggtgaggttgtaaca

SEQ ID NO: 1721497 - DNA, 25 bp, Homo sapien
tggtagggaaggaggtgaggttgta

SEQ ID NO: 1721498 - DNA, 25 bp, Homo sapien
agggaaggaggtgaggttgtaacat

SEQ ID NO: 1721499 - DNA, 25 bp, Homo sapien
cacagtgagatgtgtcggagccgtg

SEQ ID NO: 1721500 - DNA, 25 bp, Homo sapien
taggtatgaaggtcttcggaccacc

SEQ ID NO: 1721501 - DNA, 25 bp, Homo sapien
acaccaccacgcagcacagtgagat

SEQ ID NO: 1721502 - DNA, 25 bp, Homo sapien
tgtgcggaacaggtctaggtatgaa

SEQ ID NO: 1721503 - DNA, 25 bp, Homo sapien
gcaccgacaagtagaccagcagctt

SEQ ID NO: 1721504 - DNA, 25 bp, Homo sapien
actagcagtctagtgccgaacgcca

SEQ ID NO: 1721505 - DNA, 25 bp, Homo sapien
catccagactcaggccgtaatagga

SEQ ID NO: 1721506 - DNA, 25 bp, Homo sapien
agcagtgtcccagcttgcgtgaggc

SEQ ID NO: 1721507 - DNA, 25 bp, Homo sapien
ctgagcaccgtagggtacaactctg

SEQ ID NO: 1721508 - DNA, 25 bp, Homo sapien
aacaggtaggcagtggtgaaggcag

SEQ ID NO: 1721509 - DNA, 25 bp, Homo sapien
accgtagggtacaactctgaagtga

SEQ ID NO: 1721510 - DNA, 25 bp, Homo sapien
caactctgaagtgaacaggtaggca

SEQ ID NO: 1721511 - DNA, 25 bp, Homo sapien
tagtgtggagaacgagtgagaggct

SEQ ID NO: 1721512 - DNA, 25 bp, Homo sapien
gaagtgttggttaagacacgtgact

SEQ ID NO: 1721513 - DNA, 25 bp, Homo sapien
agacacgtgactaacaagccccata

SEQ ID NO: 1721514 - DNA, 25 bp, Homo sapien
tgtggtgcgtgtatgtagaagtgtt

SEQ ID NO: 1721515 - DNA, 25 bp, Homo sapien
ctctgccttccaggggtgaatggga

SEQ ID NO: 1721516 - DNA, 25 bp, Homo sapien
gacagtcctcaagggcatctctgcc

SEQ ID NO: 1721517 - DNA, 25 bp, Homo sapien
cagagaggatgtctgacgtggctca

SEQ ID NO: 1721518 - DNA, 25 bp, Homo sapien
ttgttttcttaaggaggcccagaga

SEQ ID NO: 1721519 - DNA, 25 bp, Homo sapien
ggcgatccccccataagtaagcttg

SEQ ID NO: 1721520 - DNA, 25 bp, Homo sapien
gcagctgtgcctgcctcgtctctgg

SEQ ID NO: 1721521 - DNA, 25 bp, Homo sapien
ataagtaagcttgggcagtgacagc

SEQ ID NO: 1721522 - DNA, 25 bp, Homo sapien
cagcagggcgatccccccataagta

SEQ ID NO: 1721523 - DNA, 25 bp, Homo sapien
tcacacgtacacagacacagtcctg

SEQ ID NO: 1721524 - DNA, 25 bp, Homo sapien
cgtacacagacacagtcctgtgcac

SEQ ID NO: 1721525 - DNA, 25 bp, Homo sapien
acacgtacacagacacagtcctgtg

SEQ ID NO: 1721526 - DNA, 25 bp, Homo sapien
acacagacacagtcctgtgcacaca

SEQ ID NO: 1721527 - DNA, 25 bp, Homo sapien
tcctgaacaaccttatgtatttgtg

SEQ ID NO: 1721528 - DNA, 25 bp, Homo sapien
tttgtgttcatacactcatgtacac

SEQ ID NO: 1721529 - DNA, 25 bp, Homo sapien
gagcacctgcatccatatgcatgtt

SEQ ID NO: 1721530 - DNA, 25 bp, Homo sapien
cctgtctgaatcctaaggtgtcagg

SEQ ID NO: 1721531 - DNA, 25 bp, Homo sapien
ttcctcctgaagactggttggggca

SEQ ID NO: 1721532 - DNA, 25 bp, Homo sapien
tctggacctgcttcatgggcatctc

SEQ ID NO: 1721533 - DNA, 25 bp, Homo sapien
tcttcctcctgaagactggttgggg

SEQ ID NO: 1721534 - DNA, 25 bp, Homo sapien
ttagttctggacctgcttcatgggc

SEQ ID NO: 1721535 - DNA, 25 bp, Homo sapien
tccatttgggagatgaacagactga

SEQ ID NO: 1721536 - DNA, 25 bp, Homo sapien
gagggttcgatactcccagcctgag

SEQ ID NO: 1721537 - DNA, 25 bp, Homo sapien
gaagtcaactgttcctagaagccaa

SEQ ID NO: 1721538 - DNA, 25 bp, Homo sapien
caacagatcctatggtagggcctcc

SEQ ID NO: 1721539 - DNA, 25 bp, Homo sapien
ttggcagtcctagcaccacacagtg

SEQ ID NO: 1721540 - DNA, 25 bp, Homo sapien
ggatgacatgcattgccctgcaggg

SEQ ID NO: 1721541 - DNA, 25 bp, Homo sapien
ttggtaccagaagtctcatatgcta

SEQ ID NO: 1721542 - DNA, 25 bp, Homo sapien
cttcaactcttctttgggcatgaga

SEQ ID NO: 1721543 - DNA, 25 bp, Homo sapien
aatatcctttgaagcactattgaac

SEQ ID NO: 1721544 - DNA, 25 bp, Homo sapien
tgaagcactattgaactactttttt

SEQ ID NO: 1721545 - DNA, 25 bp, Homo sapien
tatcctttgaagcactattgaacta

SEQ ID NO: 1721546 - DNA, 25 bp, Homo sapien
cctttgaagcactattgaactactt

SEQ ID NO: 1721547 - DNA, 25 bp, Homo sapien
cacagtacaaaccccttgaagtctg

SEQ ID NO: 1721548 - DNA, 25 bp, Homo sapien
cagtacaaaccccttgaagtctgcc

SEQ ID NO: 1721549 - DNA, 25 bp, Homo sapien
tcacagtacaaaccccttgaagtct

SEQ ID NO: 1721550 - DNA, 25 bp, Homo sapien
ctcacagtacaaaccccttgaagtc

SEQ ID NO: 1721551 - DNA, 25 bp, Homo sapien
tagctttctgactcttcaatacttt

SEQ ID NO: 1721552 - DNA, 25 bp, Homo sapien
gctttctgactcttcaatactttta

SEQ ID NO: 1721553 - DNA, 25 bp, Homo sapien
acgcttgatcttgtcatgaacacat

SEQ ID NO: 1721554 - DNA, 25 bp, Homo sapien
gatcttgtcatgaacacatttaaca

SEQ ID NO: 1721555 - DNA, 25 bp, Homo sapien
ggctactgcgcctcagcctggagga

SEQ ID NO: 1721556 - DNA, 25 bp, Homo sapien
gcactgaactctgattgcactattg

SEQ ID NO: 1721557 - DNA, 25 bp, Homo sapien
actgaactctgattgcactattgca

SEQ ID NO: 1721558 - DNA, 25 bp, Homo sapien
gccttgattgggctactgcgcctca

SEQ ID NO: 1721559 - DNA, 25 bp, Homo sapien
ttaaaatgccagtagaggaccaggc

SEQ ID NO: 1721560 - DNA, 25 bp, Homo sapien
taagcaaaggagactcagtgaagcg

SEQ ID NO: 1721561 - DNA, 25 bp, Homo sapien
tagtctccaatgtgcccctaagtag

SEQ ID NO: 1721562 - DNA, 25 bp, Homo sapien
gaaatgatgggtgcccttgtggcca

SEQ ID NO: 1721563 - DNA, 25 bp, Homo sapien
gacttgctcaagacaatagggctgg

SEQ ID NO: 1721564 - DNA, 25 bp, Homo sapien
cagaatccgtaccaaagccccttgg

SEQ ID NO: 1721565 - DNA, 25 bp, Homo sapien
gaagagaccaatccagaatatgcga

SEQ ID NO: 1721566 - DNA, 25 bp, Homo sapien
gattagtcaattggctgcacgcacc

SEQ ID NO: 1721567 - DNA, 25 bp, Homo sapien
taggagcttgagtcaggagctggtt

SEQ ID NO: 1721568 - DNA, 25 bp, Homo sapien
ttgccagacgaaagcgagaggaaga

SEQ ID NO: 1721569 - DNA, 25 bp, Homo sapien
gagtttcgagaactggatcttgcca

SEQ ID NO: 1721570 - DNA, 25 bp, Homo sapien
gtttctcgaccctgagtttcgagaa

SEQ ID NO: 1721571 - DNA, 25 bp, Homo sapien
gccttgcctccacgagctccgtggc

SEQ ID NO: 1721572 - DNA, 25 bp, Homo sapien
ggccttgcctccacgagctccgtgg

SEQ ID NO: 1721573 - DNA, 25 bp, Homo sapien
ttatccttggccttgcctccacgag

SEQ ID NO: 1721574 - DNA, 25 bp, Homo sapien
cttggccttgcctccacgagctccg

SEQ ID NO: 1721575 - DNA, 25 bp, Homo sapien
gccttgaaccttttcaactggccag

SEQ ID NO: 1721576 - DNA, 25 bp, Homo sapien
tgaaccttttcaactggccagtgtg

SEQ ID NO: 1721577 - DNA, 25 bp, Homo sapien
cttgaaccttttcaactggccagtg

SEQ ID NO: 1721578 - DNA, 25 bp, Homo sapien
aaccttttcaactggccagtgtggg

SEQ ID NO: 1721579 - DNA, 25 bp, Homo sapien
ttggagcacttaacacccagaccga

SEQ ID NO: 1721580 - DNA, 25 bp, Homo sapien
tggagcacttaacacccagaccgac

SEQ ID NO: 1721581 - DNA, 25 bp, Homo sapien
cttggagcacttaacacccagaccg

SEQ ID NO: 1721582 - DNA, 25 bp, Homo sapien
tgcaaggaacggtgtggggcttgtg

SEQ ID NO: 1721583 - DNA, 25 bp, Homo sapien
gaacggtgtggggcttgtggatctt

SEQ ID NO: 1721584 - DNA, 25 bp, Homo sapien
aaggaacggtgtggggcttgtggat

SEQ ID NO: 1721585 - DNA, 25 bp, Homo sapien
aacggtgtggggcttgtggatcttg

SEQ ID NO: 1721586 - DNA, 25 bp, Homo sapien
cagcacagagccgcagtagcctgtc

SEQ ID NO: 1721587 - DNA, 25 bp, Homo sapien
gcacagagccgcagtagcctgtcac

SEQ ID NO: 1721588 - DNA, 25 bp, Homo sapien
agcacagagccgcagtagcctgtca

SEQ ID NO: 1721589 - DNA, 25 bp, Homo sapien
cagtgcccttgggcgcagggatgag

SEQ ID NO: 1721590 - DNA, 25 bp, Homo sapien
gcccttgggcgcagggatgaggtgc

SEQ ID NO: 1721591 - DNA, 25 bp, Homo sapien
gtgcccttgggcgcagggatgaggt

SEQ ID NO: 1721592 - DNA, 25 bp, Homo sapien
gatgccagtgcccttgggcgcaggg

SEQ ID NO: 1721593 - DNA, 25 bp, Homo sapien
ggagacttggtgaatcctgtctcct

SEQ ID NO: 1721594 - DNA, 25 bp, Homo sapien
ggtgaatcctgtctccttccagagg

SEQ ID NO: 1721595 - DNA, 25 bp, Homo sapien
acttggtgaatcctgtctccttcca

SEQ ID NO: 1721596 - DNA, 25 bp, Homo sapien
atagggagacttggtgaatcctgtc

SEQ ID NO: 1721597 - DNA, 25 bp, Homo sapien
acacaataacggactcgggagcgca

SEQ ID NO: 1721598 - DNA, 25 bp, Homo sapien
gacccgggagcgttgacacaataac

SEQ ID NO: 1721599 - DNA, 25 bp, Homo sapien
gcgacagcggcagccgggtaatccc

SEQ ID NO: 1721600 - DNA, 25 bp, Homo sapien
tccagaccagggtcctaagcgcgaa

SEQ ID NO: 1721601 - DNA, 25 bp, Homo sapien
gatacatgcatgattgaatccacca

SEQ ID NO: 1721602 - DNA, 25 bp, Homo sapien
tacatgcatgattgaatccaccatg

SEQ ID NO: 1721603 - DNA, 25 bp, Homo sapien
tgcatgattgaatccaccatgttta

SEQ ID NO: 1721604 - DNA, 25 bp, Homo sapien
gtgatacatgcatgattgaatccac

SEQ ID NO: 1721605 - DNA, 25 bp, Homo sapien
ctcttagcacctgtcattttcttct

SEQ ID NO: 1721606 - DNA, 25 bp, Homo sapien
tcttagcacctgtcattttcttctt

SEQ ID NO: 1721607 - DNA, 25 bp, Homo sapien
tctcttagcacctgtcattttcttc

SEQ ID NO: 1721608 - DNA, 25 bp, Homo sapien
cttagcacctgtcattttcttcttc

SEQ ID NO: 1721609 - DNA, 25 bp, Homo sapien
aactggcctatttcagggttcatcc

SEQ ID NO: 1721610 - DNA, 25 bp, Homo sapien
aacatttgtcctcttataactggcc

SEQ ID NO: 1721611 - DNA, 25 bp, Homo sapien
tacacattgaacaacaactacccgt

SEQ ID NO: 1721612 - DNA, 25 bp, Homo sapien
attcctctattaactgacatttggg

SEQ ID NO: 1721613 - DNA, 25 bp, Homo sapien
gcacctggccaatgctagtcttaag

SEQ ID NO: 1721614 - DNA, 25 bp, Homo sapien
agtcttaaggctggaattaggcctg

SEQ ID NO: 1721615 - DNA, 25 bp, Homo sapien
cctggccaatgctagtcttaaggct

SEQ ID NO: 1721616 - DNA, 25 bp, Homo sapien
caatgctagtcttaaggctggaatt

SEQ ID NO: 1721617 - DNA, 25 bp, Homo sapien
tgagtcaaaggtacaagtttgtctc

SEQ ID NO: 1721618 - DNA, 25 bp, Homo sapien
tcaaaggtacaagtttgtctccttc

SEQ ID NO: 1721619 - DNA, 25 bp, Homo sapien
agtcaaaggtacaagtttgtctcct

SEQ ID NO: 1721620 - DNA, 25 bp, Homo sapien
aaaatgagtcaaaggtacaagtttg

SEQ ID NO: 1721621 - DNA, 25 bp, Homo sapien
gatcagacaagattgcgtgttttca

SEQ ID NO: 1721622 - DNA, 25 bp, Homo sapien
tcagacaagattgcgtgttttcagg

SEQ ID NO: 1721623 - DNA, 25 bp, Homo sapien
gacaagattgcgtgttttcagggtg

SEQ ID NO: 1721624 - DNA, 25 bp, Homo sapien
caagattgcgtgttttcagggtggt

SEQ ID NO: 1721625 - DNA, 25 bp, Homo sapien
ctgccccacggacaaataatgccat

SEQ ID NO: 1721626 - DNA, 25 bp, Homo sapien
agctgctgtgcaccggattccgata

SEQ ID NO: 1721627 - DNA, 25 bp, Homo sapien
caggcatccggaacctcaaacctga

SEQ ID NO: 1721628 - DNA, 25 bp, Homo sapien
gctggcaccccacctagaggttgga

SEQ ID NO: 1721629 - DNA, 25 bp, Homo sapien
gttggaagacctagccggcgctatt

SEQ ID NO: 1721630 - DNA, 25 bp, Homo sapien
cagtggatttctggacgctggtcac

SEQ ID NO: 1721631 - DNA, 25 bp, Homo sapien
cgccccgaagccagaccccgcccat

SEQ ID NO: 1721632 - DNA, 25 bp, Homo sapien
gctgtgcagggtaacagccggcttt

SEQ ID NO: 1721633 - DNA, 25 bp, Homo sapien
ctgcacttcccagccgggtctccct

SEQ ID NO: 1721634 - DNA, 25 bp, Homo sapien
gtgacggctgtgcagggtaacagcc

SEQ ID NO: 1721635 - DNA, 25 bp, Homo sapien
tgcagggtaacagccggctttgcct

SEQ ID NO: 1721636 - DNA, 25 bp, Homo sapien
agtaacaggcactgagcacggcgag

SEQ ID NO: 1721637 - DNA, 25 bp, Homo sapien
tgaagcagtggcctgtggtgtcccc

SEQ ID NO: 1721638 - DNA, 25 bp, Homo sapien
ctgagcacggcgaggagcgcgtggg

SEQ ID NO: 1721639 - DNA, 25 bp, Homo sapien
ctcggggtgcccaagtaacaggcac

SEQ ID NO: 1721640 - DNA, 25 bp, Homo sapien
tgtaggccgcgggtgagatctgcag

SEQ ID NO: 1721641 - DNA, 25 bp, Homo sapien
ggacagatgccttgcgcccgtctct

SEQ ID NO: 1721642 - DNA, 25 bp, Homo sapien
gtgagatctgcaggcacacatggac

SEQ ID NO: 1721643 - DNA, 25 bp, Homo sapien
gacagatgccttgcgcccgtctcta

SEQ ID NO: 1721644 - DNA, 25 bp, Homo sapien
ccaattcatgacagctgagtccggg

SEQ ID NO: 1721645 - DNA, 25 bp, Homo sapien
attcatgacagctgagtccgggtag

SEQ ID NO: 1721646 - DNA, 25 bp, Homo sapien
tcatcgcttttggctaaaaacgttg

SEQ ID NO: 1721647 - DNA, 25 bp, Homo sapien
catcgcttttggctaaaaacgttgt

SEQ ID NO: 1721648 - DNA, 25 bp, Homo sapien
ttagtcatctctagccatacaagaa

SEQ ID NO: 1721649 - DNA, 25 bp, Homo sapien
cactgattatagaaggtggtgtgga

SEQ ID NO: 1721650 - DNA, 25 bp, Homo sapien
agtacccttaaattcacctgaagca

SEQ ID NO: 1721651 - DNA, 25 bp, Homo sapien
taaaaatcggacttacatacagctt

SEQ ID NO: 1721652 - DNA, 25 bp, Homo sapien
ttttgcgactcctttagctaaagaa

SEQ ID NO: 1721653 - DNA, 25 bp, Homo sapien
tacgtttgctactttggtgatggga

SEQ ID NO: 1721654 - DNA, 25 bp, Homo sapien
ggaagtcttcccagatgaacctaac

SEQ ID NO: 1721655 - DNA, 25 bp, Homo sapien
cacagacattaacaattttgaggta

SEQ ID NO: 1721656 - DNA, 25 bp, Homo sapien
gagctaaccggccacctgaacctaa

SEQ ID NO: 1721657 - DNA, 25 bp, Homo sapien
acaagggggaagacaaggaggcaca

SEQ ID NO: 1721658 - DNA, 25 bp, Homo sapien
gacaagggggaagacaaggaggcac

SEQ ID NO: 1721659 - DNA, 25 bp, Homo sapien
ggacaagggggaagacaaggaggca

SEQ ID NO: 1721660 - DNA, 25 bp, Homo sapien
caagggggaagacaaggaggcacat

SEQ ID NO: 1721661 - DNA, 25 bp, Homo sapien
gcagggtaggatgtaatctggactc

SEQ ID NO: 1721662 - DNA, 25 bp, Homo sapien
actgcagggtaggatgtaatctgga

SEQ ID NO: 1721663 - DNA, 25 bp, Homo sapien
gtcggaggcgccatccaggactgca

SEQ ID NO: 1721664 - DNA, 25 bp, Homo sapien
ctgcaagtcggaggcgccatccagg

SEQ ID NO: 1721665 - DNA, 25 bp, Homo sapien
gtggcaaagcaactggaagaaggtc

SEQ ID NO: 1721666 - DNA, 25 bp, Homo sapien
tgccaacacctctagccctatgggt

SEQ ID NO: 1721667 - DNA, 25 bp, Homo sapien
gcagaagtgtgcctcgctggcaatg

SEQ ID NO: 1721668 - DNA, 25 bp, Homo sapien
tgccacaacacggtcagcactaggg

SEQ ID NO: 1721669 - DNA, 25 bp, Homo sapien
cagccaggcataggaaaagcgtgac

SEQ ID NO: 1721670 - DNA, 25 bp, Homo sapien
ctgagcccagggttctcgtggtccc

SEQ ID NO: 1721671 - DNA, 25 bp, Homo sapien
tcaggttcttgatcctcgggcagga

SEQ ID NO: 1721672 - DNA, 25 bp, Homo sapien
tgcataggccaagagtgcagccagc

SEQ ID NO: 1721673 - DNA, 25 bp, Homo sapien
gcttcagcagtccaagtgccagata

SEQ ID NO: 1721674 - DNA, 25 bp, Homo sapien
tggaagctcccagcaaagttaagca

SEQ ID NO: 1721675 - DNA, 25 bp, Homo sapien
ggctagccccagagcatagagcagg

SEQ ID NO: 1721676 - DNA, 25 bp, Homo sapien
gttaagcagccgttcagagtcagtg

SEQ ID NO: 1721677 - DNA, 25 bp, Homo sapien
caatcactttgttgacgggtaccag

SEQ ID NO: 1721678 - DNA, 25 bp, Homo sapien
taacccgcgcatccttgtgctgtag

SEQ ID NO: 1721679 - DNA, 25 bp, Homo sapien
ccatgatgcgggtggcaatcacttt

SEQ ID NO: 1721680 - DNA, 25 bp, Homo sapien
gtgccaagatgagaccacccacgaa

SEQ ID NO: 1721681 - DNA, 25 bp, Homo sapien
tccagatagctgagggaccccaagt

SEQ ID NO: 1721682 - DNA, 25 bp, Homo sapien
atagctgagggaccccaagtacccg

SEQ ID NO: 1721683 - DNA, 25 bp, Homo sapien
tgagggaccccaagtacccgctcac

SEQ ID NO: 1721684 - DNA, 25 bp, Homo sapien
gtctccagatagctgagggacccca

SEQ ID NO: 1721685 - DNA, 25 bp, Homo sapien
gacaagggagaggcgtgaagtggag

SEQ ID NO: 1721686 - DNA, 25 bp, Homo sapien
cagaacttgatgacccgaatgccac

SEQ ID NO: 1721687 - DNA, 25 bp, Homo sapien
agatgacaaccggtagggcagccca

SEQ ID NO: 1721688 - DNA, 25 bp, Homo sapien
ggcagcccacaggtatacacaggcc

SEQ ID NO: 1721689 - DNA, 25 bp, Homo sapien
ggtatttgatgacccggagtcgccc

SEQ ID NO: 1721690 - DNA, 25 bp, Homo sapien
taggcaggcctagctcattttgagt

SEQ ID NO: 1721691 - DNA, 25 bp, Homo sapien
gaacgaggatgaagagacctaaccc

SEQ ID NO: 1721692 - DNA, 25 bp, Homo sapien
tttcccttggttgagagatgaggca

SEQ ID NO: 1721693 - DNA, 25 bp, Homo sapien
ggccttggctagacccaggattgca

SEQ ID NO: 1721694 - DNA, 25 bp, Homo sapien
cattgatcacccaagggaagttgtt

SEQ ID NO: 1721695 - DNA, 25 bp, Homo sapien
tgagcattcgcaccagtgccagggc

SEQ ID NO: 1721696 - DNA, 25 bp, Homo sapien
tggcctccaggagaccattgatcac

SEQ ID NO: 1721697 - DNA, 25 bp, Homo sapien
tcgaggaaaagctggatccggtcca

SEQ ID NO: 1721698 - DNA, 25 bp, Homo sapien
gtgccaggttctgcccactagcttc

SEQ ID NO: 1721699 - DNA, 25 bp, Homo sapien
ccaggttctgcccactagcttccca

SEQ ID NO: 1721700 - DNA, 25 bp, Homo sapien
ggttctgcccactagcttcccatta

SEQ ID NO: 1721701 - DNA, 25 bp, Homo sapien
cctgtgccaggttctgcccactagc

SEQ ID NO: 1721702 - DNA, 25 bp, Homo sapien
agaagccacttgatttgggctccta

SEQ ID NO: 1721703 - DNA, 25 bp, Homo sapien
cagagaagccacttgatttgggctc

SEQ ID NO: 1721704 - DNA, 25 bp, Homo sapien
ctgaacagagaagccacttgatttg

SEQ ID NO: 1721705 - DNA, 25 bp, Homo sapien
aacagagaagccacttgatttgggc

SEQ ID NO: 1721706 - DNA, 25 bp, Homo sapien
tttttcacttcgagatgactgatga

SEQ ID NO: 1721707 - DNA, 25 bp, Homo sapien
ctttttcacttcgagatgactgatg

SEQ ID NO: 1721708 - DNA, 25 bp, Homo sapien
gctccatgcagctccaatactgtag

SEQ ID NO: 1721709 - DNA, 25 bp, Homo sapien
tgcagctccaatactgtagatggct

SEQ ID NO: 1721710 - DNA, 25 bp, Homo sapien
ctgcaaggaagccacacaagcatct

SEQ ID NO: 1721711 - DNA, 25 bp, Homo sapien
tgcaaggaagccacacaagcatctg

SEQ ID NO: 1721712 - DNA, 25 bp, Homo sapien
gccgaccttccccacgatgcccacc

SEQ ID NO: 1721713 - DNA, 25 bp, Homo sapien
ctcttcccacagccgaccttcccca

SEQ ID NO: 1721714 - DNA, 25 bp, Homo sapien
agctcttcccacagccgaccttccc

SEQ ID NO: 1721715 - DNA, 25 bp, Homo sapien
gctcttcccacagccgaccttcccc

SEQ ID NO: 1721716 - DNA, 25 bp, Homo sapien
gagccaggcgagcaatatgaggacc

SEQ ID NO: 1721717 - DNA, 25 bp, Homo sapien
cacatgactgagatggcagctcctg

SEQ ID NO: 1721718 - DNA, 25 bp, Homo sapien
ggagagtatggccaccacattgtac

SEQ ID NO: 1721719 - DNA, 25 bp, Homo sapien
ccaataaagggaccatgcgttgctc

SEQ ID NO: 1721720 - DNA, 25 bp, Homo sapien
tccttgtacagctgtgcatcaaatg

SEQ ID NO: 1721721 - DNA, 25 bp, Homo sapien
tcattgagggcgcaggcttctagca

SEQ ID NO: 1721722 - DNA, 25 bp, Homo sapien
tcccaaagaggatgttgtctcggat

SEQ ID NO: 1721723 - DNA, 25 bp, Homo sapien
gatgttgtctcggatggtggcaaac

SEQ ID NO: 1721724 - DNA, 25 bp, Homo sapien
tgggtagggtagtggtggtgacatt

SEQ ID NO: 1721725 - DNA, 25 bp, Homo sapien
agtaataaaaagaatgacagctgga

SEQ ID NO: 1721726 - DNA, 25 bp, Homo sapien
gggacagaaaaaagaccctgtctca

SEQ ID NO: 1721727 - DNA, 25 bp, Homo sapien
aaaagtaataaaaagaatgacagct

SEQ ID NO: 1721728 - DNA, 25 bp, Homo sapien
ggacagaaaaaagaccctgtctcaa

SEQ ID NO: 1721729 - DNA, 25 bp, Homo sapien
agcaagggcaatccgggcacgctgt

SEQ ID NO: 1721730 - DNA, 25 bp, Homo sapien
tgtcctccgctaagggtgacaccct

SEQ ID NO: 1721731 - DNA, 25 bp, Homo sapien
gggcacgctgtcctccgctaagggt

SEQ ID NO: 1721732 - DNA, 25 bp, Homo sapien
cacgagcaagggcaatccgggcacg

SEQ ID NO: 1721733 - DNA, 25 bp, Homo sapien
aaatattcctatcctcctaactcag

SEQ ID NO: 1721734 - DNA, 25 bp, Homo sapien
cctcctaactcagccaagttcccaa

SEQ ID NO: 1721735 - DNA, 25 bp, Homo sapien
aaaatattcctatcctcctaactca

SEQ ID NO: 1721736 - DNA, 25 bp, Homo sapien
cctaactcagccaagttcccaaggc

SEQ ID NO: 1721737 - DNA, 25 bp, Homo sapien
gggctacccctacactagcagagaa

SEQ ID NO: 1721738 - DNA, 25 bp, Homo sapien
agaaggaggtgagacctgagggtgg

SEQ ID NO: 1721739 - DNA, 25 bp, Homo sapien
gaagacagttgagagaaactctggg

SEQ ID NO: 1721740 - DNA, 25 bp, Homo sapien
agacgtgagggtaccgtgggcacca

SEQ ID NO: 1721741 - DNA, 25 bp, Homo sapien
gtcagccctctccaggtactcagtg

SEQ ID NO: 1721742 - DNA, 25 bp, Homo sapien
cagagcagccgtgtggtgtagctca

SEQ ID NO: 1721743 - DNA, 25 bp, Homo sapien
tctccaggtactcagtgcggtgggt

SEQ ID NO: 1721744 - DNA, 25 bp, Homo sapien
cagagggtcatcgaggagatagagc

SEQ ID NO: 1721745 - DNA, 25 bp, Homo sapien
tttctcagtgcgtgtgcagatccca

SEQ ID NO: 1721746 - DNA, 25 bp, Homo sapien
tagacctcgagcaggactcaagtcc

SEQ ID NO: 1721747 - DNA, 25 bp, Homo sapien
ctttaagttcccaagagcacccagt

SEQ ID NO: 1721748 - DNA, 25 bp, Homo sapien
taaaccttgattccgaccagcagag

SEQ ID NO: 1721749 - DNA, 25 bp, Homo sapien
agactcttgtccattctcagcccag

SEQ ID NO: 1721750 - DNA, 25 bp, Homo sapien
ggctttggggacagcttgtaccagt

SEQ ID NO: 1721751 - DNA, 25 bp, Homo sapien
gacagcttgtaccagtggcagaatc

SEQ ID NO: 1721752 - DNA, 25 bp, Homo sapien
gactcttgtccattctcagcccagg

SEQ ID NO: 1721753 - DNA, 25 bp, Homo sapien
ttctctgggttctgtactgactggg

SEQ ID NO: 1721754 - DNA, 25 bp, Homo sapien
tgttttctctgggttctgtactgac

SEQ ID NO: 1721755 - DNA, 25 bp, Homo sapien
ttttctctgggttctgtactgactg

SEQ ID NO: 1721756 - DNA, 25 bp, Homo sapien
ctccagcccctcctttgttttctct

SEQ ID NO: 1721757 - DNA, 25 bp, Homo sapien
ttggtacacgtgcaaggccacggcg

SEQ ID NO: 1721758 - DNA, 25 bp, Homo sapien
ggcccacggccttccagtaagcttg

SEQ ID NO: 1721759 - DNA, 25 bp, Homo sapien
cctgcagcaggcgaccagatgtgct

SEQ ID NO: 1721760 - DNA, 25 bp, Homo sapien
gaagaggatggctaaggccaagccc

SEQ ID NO: 1721761 - DNA, 25 bp, Homo sapien
agatccagtgggagagccaccagtc

SEQ ID NO: 1721762 - DNA, 25 bp, Homo sapien
cctgggagctattctcagccttcag

SEQ ID NO: 1721763 - DNA, 25 bp, Homo sapien
atccagtgggagagccaccagtcag

SEQ ID NO: 1721764 - DNA, 25 bp, Homo sapien
tccagtgggagagccaccagtcagc

SEQ ID NO: 1721765 - DNA, 25 bp, Homo sapien
gctttgggcagtgggaacactggga

SEQ ID NO: 1721766 - DNA, 25 bp, Homo sapien
ctgaggagccattgggggcagcttt

SEQ ID NO: 1721767 - DNA, 25 bp, Homo sapien
tgaggagccattgggggcagctttg

SEQ ID NO: 1721768 - DNA, 25 bp, Homo sapien
ggcagctttgggcagtgggaacact

SEQ ID NO: 1721769 - DNA, 25 bp, Homo sapien
ggtgcagagggaatttacaccagca

SEQ ID NO: 1721770 - DNA, 25 bp, Homo sapien
caatggtcgcatacacggtgaggta

SEQ ID NO: 1721771 - DNA, 25 bp, Homo sapien
tgctgcaaagagcactgcccggaga

SEQ ID NO: 1721772 - DNA, 25 bp, Homo sapien
cataaggactcgatgcagcaggcgg

SEQ ID NO: 1721773 - DNA, 25 bp, Homo sapien
ctgggagaaggacgctgattgggcc

SEQ ID NO: 1721774 - DNA, 25 bp, Homo sapien
gctgattgggccagggcagagtctg

SEQ ID NO: 1721775 - DNA, 25 bp, Homo sapien
agaaggacgctgattgggccagggc

SEQ ID NO: 1721776 - DNA, 25 bp, Homo sapien
cagggcagagtctggcagaagaggg

SEQ ID NO: 1721777 - DNA, 25 bp, Homo sapien
catgatgctcaaaggcggcagcagg

SEQ ID NO: 1721778 - DNA, 25 bp, Homo sapien
tagtggcgctgcacgtgatagtaca

SEQ ID NO: 1721779 - DNA, 25 bp, Homo sapien
gaggccagccaaggtatcggccaga

SEQ ID NO: 1721780 - DNA, 25 bp, Homo sapien
gccagatggctatacagtggagaca

SEQ ID NO: 1721781 - DNA, 25 bp, Homo sapien
gcgatgcctgcgatagcgctgacca

SEQ ID NO: 1721782 - DNA, 25 bp, Homo sapien
ggcactggtggcaaactggcacctc

SEQ ID NO: 1721783 - DNA, 25 bp, Homo sapien
tgtccagccactgcattgtggcact

SEQ ID NO: 1721784 - DNA, 25 bp, Homo sapien
ctggcacctctggtttagctcaagg

SEQ ID NO: 1721785 - DNA, 25 bp, Homo sapien
tggacaccgggacgtttgtgggaga

SEQ ID NO: 1721786 - DNA, 25 bp, Homo sapien
acgtttgtgggagactccccaggct

SEQ ID NO: 1721787 - DNA, 25 bp, Homo sapien
gacgtttgtgggagactccccaggc

SEQ ID NO: 1721788 - DNA, 25 bp, Homo sapien
gagagcttggacaccgggacgtttg

SEQ ID NO: 1721789 - DNA, 25 bp, Homo sapien
tctgtgtgaagctgctcaccaggcc

SEQ ID NO: 1721790 - DNA, 25 bp, Homo sapien
cagggacagggcataagacagcgac

SEQ ID NO: 1721791 - DNA, 25 bp, Homo sapien
agggcataagacagcgacaagccca

SEQ ID NO: 1721792 - DNA, 25 bp, Homo sapien
aggcccgagagcaggcccgtcaggg

SEQ ID NO: 1721793 - DNA, 25 bp, Homo sapien
tcttccagccgctcgacgctcacca

SEQ ID NO: 1721794 - DNA, 25 bp, Homo sapien
ccagccgctcgacgctcaccagcat

SEQ ID NO: 1721795 - DNA, 25 bp, Homo sapien
cttccagccgctcgacgctcaccag

SEQ ID NO: 1721796 - DNA, 25 bp, Homo sapien
ttccagccgctcgacgctcaccagc

SEQ ID NO: 1721797 - DNA, 25 bp, Homo sapien
cagtggctggccctggggttcctgg

SEQ ID NO: 1721798 - DNA, 25 bp, Homo sapien
tggctggccctggggttcctggggc

SEQ ID NO: 1721799 - DNA, 25 bp, Homo sapien
ctggccctggggttcctggggcagg

SEQ ID NO: 1721800 - DNA, 25 bp, Homo sapien
gccctggggttcctggggcaggtca

SEQ ID NO: 1721801 - DNA, 25 bp, Homo sapien
tcactccatccagggcattcggcag

SEQ ID NO: 1721802 - DNA, 25 bp, Homo sapien
aacagggaagacttgccggagcctg

SEQ ID NO: 1721803 - DNA, 25 bp, Homo sapien
ctgtgcggcccacgatgcccaactt

SEQ ID NO: 1721804 - DNA, 25 bp, Homo sapien
ggctgcacgcagaaggtcactccat

SEQ ID NO: 1721805 - DNA, 25 bp, Homo sapien
ctgggcactaggagttcgctgtcct

SEQ ID NO: 1721806 - DNA, 25 bp, Homo sapien
taggagttcgctgtccttgcctgct

SEQ ID NO: 1721807 - DNA, 25 bp, Homo sapien
agttcgctgtccttgcctgctcatc

SEQ ID NO: 1721808 - DNA, 25 bp, Homo sapien
ggctgctgtgagtttatataaagcc

SEQ ID NO: 1721809 - DNA, 25 bp, Homo sapien
ccactgaacaaaaagggctcctggg

SEQ ID NO: 1721810 - DNA, 25 bp, Homo sapien
ctcctgggggatgatagccaactgg

SEQ ID NO: 1721811 - DNA, 25 bp, Homo sapien
gccctgtccttatgtaggccctggg

SEQ ID NO: 1721812 - DNA, 25 bp, Homo sapien
caggttttcccgaacagtcccactg

SEQ ID NO: 1721813 - DNA, 25 bp, Homo sapien
cttggcatctgtgaggagagccctg

SEQ ID NO: 1721814 - DNA, 25 bp, Homo sapien
tgaggagagccctggccaaacacaa

SEQ ID NO: 1721815 - DNA, 25 bp, Homo sapien
tgcccaagagataagctccggcccc

SEQ ID NO: 1721816 - DNA, 25 bp, Homo sapien
gcctctgcccaagagataagctccg

SEQ ID NO: 1721817 - DNA, 25 bp, Homo sapien
tcttgttggcaaagcgtttgcagat

SEQ ID NO: 1721818 - DNA, 25 bp, Homo sapien
tcagcactgtcttgttggcaaagcg

SEQ ID NO: 1721819 - DNA, 25 bp, Homo sapien
cactgtcttgttggcaaagcgtttg

SEQ ID NO: 1721820 - DNA, 25 bp, Homo sapien
ttggcaaagcgtttgcagatggtct

SEQ ID NO: 1721821 - DNA, 25 bp, Homo sapien
gggctggttgcgcagggtggccggg

SEQ ID NO: 1721822 - DNA, 25 bp, Homo sapien
gctctaccactctccccgcttgtag

SEQ ID NO: 1721823 - DNA, 25 bp, Homo sapien
ttgtagcaccagcacccggtctgag

SEQ ID NO: 1721824 - DNA, 25 bp, Homo sapien
tcagggacctccgagtgaggcaggg

SEQ ID NO: 1721825 - DNA, 25 bp, Homo sapien
aagtgggctcctatgccagaaaaac

SEQ ID NO: 1721826 - DNA, 25 bp, Homo sapien
gctgcccaccaaggagtgatttcca

SEQ ID NO: 1721827 - DNA, 25 bp, Homo sapien
agccagcacctctgtataggcccgg

SEQ ID NO: 1721828 - DNA, 25 bp, Homo sapien
ccaaagagtaatccagggtgccctt

SEQ ID NO: 1721829 - DNA, 25 bp, Homo sapien
gcgactgctccttccgatgttttga

SEQ ID NO: 1721830 - DNA, 25 bp, Homo sapien
caaaatgaatggtacagccatgtca

SEQ ID NO: 1721831 - DNA, 25 bp, Homo sapien
gccatgtcattactcaaattcagag

SEQ ID NO: 1721832 - DNA, 25 bp, Homo sapien
gaagaggcgatcacagctgagagga

SEQ ID NO: 1721833 - DNA, 25 bp, Homo sapien
tcagacttgatcataaggaaggagc

SEQ ID NO: 1721834 - DNA, 25 bp, Homo sapien
agctgtatcctcagtggctctggta

SEQ ID NO: 1721835 - DNA, 25 bp, Homo sapien
cctaagcagccaataactagggcta

SEQ ID NO: 1721836 - DNA, 25 bp, Homo sapien
tctcaagctagtaggattgtgggtg

SEQ ID NO: 1721837 - DNA, 25 bp, Homo sapien
cctctaatggcatcaactaccttta

SEQ ID NO: 1721838 - DNA, 25 bp, Homo sapien
taagtgatacctctaatggcatcaa

SEQ ID NO: 1721839 - DNA, 25 bp, Homo sapien
acaagggggcactaagtgatacctc

SEQ ID NO: 1721840 - DNA, 25 bp, Homo sapien
gggcactaagtgatacctctaatgg

SEQ ID NO: 1721841 - DNA, 25 bp, Homo sapien
aatatggaaggctttacgaattcat

SEQ ID NO: 1721842 - DNA, 25 bp, Homo sapien
tatggaaggctttacgaattcatgt

SEQ ID NO: 1721843 - DNA, 25 bp, Homo sapien
atggaaggctttacgaattcatgta

SEQ ID NO: 1721844 - DNA, 25 bp, Homo sapien
atatggaaggctttacgaattcatg

SEQ ID NO: 1721845 - DNA, 25 bp, Homo sapien
atggttccggagaagcatctgtccc

SEQ ID NO: 1721846 - DNA, 25 bp, Homo sapien
cctctctggtgacagccggaacaat

SEQ ID NO: 1721847 - DNA, 25 bp, Homo sapien
tgtccctccataaattatccagggc

SEQ ID NO: 1721848 - DNA, 25 bp, Homo sapien
ccggaacaattgtccaggaattcca

SEQ ID NO: 1721849 - DNA, 25 bp, Homo sapien
tagtggccagggccgcgggaatccc

SEQ ID NO: 1721850 - DNA, 25 bp, Homo sapien
gtagtggccagggccgcgggaatcc

SEQ ID NO: 1721851 - DNA, 25 bp, Homo sapien
ccacgcacttggcgtgtcgcgtcat

SEQ ID NO: 1721852 - DNA, 25 bp, Homo sapien
gggaatccccacgcacttggcgtgt

SEQ ID NO: 1721853 - DNA, 25 bp, Homo sapien
tagttccctccttagcagatctgcc

SEQ ID NO: 1721854 - DNA, 25 bp, Homo sapien
gggcctgcacaacacctacttctgg

SEQ ID NO: 1721855 - DNA, 25 bp, Homo sapien
ctctggccggccagatacagtcggg

SEQ ID NO: 1721856 - DNA, 25 bp, Homo sapien
caggcttctttattcgcggctaaga

SEQ ID NO: 1721857 - DNA, 25 bp, Homo sapien
tgaaattggggcagatgctgctaac

SEQ ID NO: 1721858 - DNA, 25 bp, Homo sapien
aaattggggcagatgctgctaacag

SEQ ID NO: 1721859 - DNA, 25 bp, Homo sapien
ctgaaattggggcagatgctgctaa

SEQ ID NO: 1721860 - DNA, 25 bp, Homo sapien
gaaattggggcagatgctgctaaca

SEQ ID NO: 1721861 - DNA, 25 bp, Homo sapien
tctttccaagtaggcactgtaattt

SEQ ID NO: 1721862 - DNA, 25 bp, Homo sapien
caagtcgctatctcttcttctttcc

SEQ ID NO: 1721863 - DNA, 25 bp, Homo sapien
ttctttccaagtaggcactgtaatt

SEQ ID NO: 1721864 - DNA, 25 bp, Homo sapien
gttggactggggcaagtcgctatct

SEQ ID NO: 1721865 - DNA, 25 bp, Homo sapien
agacacacagcgagaatgaattcag

SEQ ID NO: 1721866 - DNA, 25 bp, Homo sapien
gacacacagcgagaatgaattcagg

SEQ ID NO: 1721867 - DNA, 25 bp, Homo sapien
acacacagcgagaatgaattcagga

SEQ ID NO: 1721868 - DNA, 25 bp, Homo sapien
ccctttaaggtgtgctcagtgtaga

SEQ ID NO: 1721869 - DNA, 25 bp, Homo sapien
gctcaactgctgaagctagaatgcc

SEQ ID NO: 1721870 - DNA, 25 bp, Homo sapien
caagttgaatcatgaagacagccca

SEQ ID NO: 1721871 - DNA, 25 bp, Homo sapien
tagaatgcctaggttcaaataccag

SEQ ID NO: 1721872 - DNA, 25 bp, Homo sapien
atacttttctgtatggttagcattt

SEQ ID NO: 1721873 - DNA, 25 bp, Homo sapien
tacttttctgtatggttagcatttt

SEQ ID NO: 1721874 - DNA, 25 bp, Homo sapien
ctactagaagggtacaagataaatg

SEQ ID NO: 1721875 - DNA, 25 bp, Homo sapien
actactagaagggtacaagataaat

SEQ ID NO: 1721876 - DNA, 25 bp, Homo sapien
agatggaagccaagcactccccctg

SEQ ID NO: 1721877 - DNA, 25 bp, Homo sapien
agtgccagcagagtccatcccacca

SEQ ID NO: 1721878 - DNA, 25 bp, Homo sapien
aggactctgaaagctaggctgtaag

SEQ ID NO: 1721879 - DNA, 25 bp, Homo sapien
caacagaaagagaggacggctgttg

SEQ ID NO: 1721880 - DNA, 25 bp, Homo sapien
gaggaatggcaagctgcaggatgcc

SEQ ID NO: 1721881 - DNA, 25 bp, Homo sapien
tgcccaaggggacacactgcacact

SEQ ID NO: 1721882 - DNA, 25 bp, Homo sapien
caggatgcccaaggggacacactgc

SEQ ID NO: 1721883 - DNA, 25 bp, Homo sapien
ctgatgggaagcatcgcagacttac

SEQ ID NO: 1721884 - DNA, 25 bp, Homo sapien
cctggttagtgcagttagcgacaga

SEQ ID NO: 1721885 - DNA, 25 bp, Homo sapien
cagacagcttggtttgtgagcagcc

SEQ ID NO: 1721886 - DNA, 25 bp, Homo sapien
tagcgacagactcatggcagatgcc

SEQ ID NO: 1721887 - DNA, 25 bp, Homo sapien
cctccaggcactccatataaacaga

SEQ ID NO: 1721888 - DNA, 25 bp, Homo sapien
tgatcctggagcagctagcttgccc

SEQ ID NO: 1721889 - DNA, 25 bp, Homo sapien
taatttctgaacctactacgaagcc

SEQ ID NO: 1721890 - DNA, 25 bp, Homo sapien
ggagtcaatgaacacaaccttctga

SEQ ID NO: 1721891 - DNA, 25 bp, Homo sapien
tcaaccaagcaaagtcaaacggaag

SEQ ID NO: 1721892 - DNA, 25 bp, Homo sapien
ttcccagcaagcacccataggagca

SEQ ID NO: 1721893 - DNA, 25 bp, Homo sapien
aagatgccgtcccacttcccttctg

SEQ ID NO: 1721894 - DNA, 25 bp, Homo sapien
cagcccaagagccaaagatgccgtc

SEQ ID NO: 1721895 - DNA, 25 bp, Homo sapien
cagcaaaaagtttccagcccaagag

SEQ ID NO: 1721896 - DNA, 25 bp, Homo sapien
gcttccaccgtggtggaagattgct

SEQ ID NO: 1721897 - DNA, 25 bp, Homo sapien
ctgctcccttttgtgggtacgcata

SEQ ID NO: 1721898 - DNA, 25 bp, Homo sapien
tgtgggtacgcatatttgatcaggg

SEQ ID NO: 1721899 - DNA, 25 bp, Homo sapien
ttgatcaggggcttccaccgtggtg

SEQ ID NO: 1721900 - DNA, 25 bp, Homo sapien
aagagtgagagatgcgagcagtcaa

SEQ ID NO: 1721901 - DNA, 25 bp, Homo sapien
agttggaaaacagggtatggccaga

SEQ ID NO: 1721902 - DNA, 25 bp, Homo sapien
ggtgcgtgagttggaaaacagggta

SEQ ID NO: 1721903 - DNA, 25 bp, Homo sapien
gagagatgcgagcagtcaagagctt

SEQ ID NO: 1721904 - DNA, 25 bp, Homo sapien
tctgttccgctgtccgggagttagc

SEQ ID NO: 1721905 - DNA, 25 bp, Homo sapien
agctctctctgttccgctgtccggg

SEQ ID NO: 1721906 - DNA, 25 bp, Homo sapien
tctgtttgtcggcagctctctctgt

SEQ ID NO: 1721907 - DNA, 25 bp, Homo sapien
tgtccgggagttagccctcggctct

SEQ ID NO: 1721908 - DNA, 25 bp, Homo sapien
ggcacaggcctcatcagggacatac

SEQ ID NO: 1721909 - DNA, 25 bp, Homo sapien
aggctgagggcacaggcctcatcag

SEQ ID NO: 1721910 - DNA, 25 bp, Homo sapien
gagggcacaggcctcatcagggaca

SEQ ID NO: 1721911 - DNA, 25 bp, Homo sapien
ctgcccctccccagaagagagccag

SEQ ID NO: 1721912 - DNA, 25 bp, Homo sapien
aggaggcaggctcagagatgtggcc

SEQ ID NO: 1721913 - DNA, 25 bp, Homo sapien
cagagatgtggccagaaggactctg

SEQ ID NO: 1721914 - DNA, 25 bp, Homo sapien
gctcagagatgtggccagaaggact

SEQ ID NO: 1721915 - DNA, 25 bp, Homo sapien
aggctcagagatgtggccagaagga

SEQ ID NO: 1721916 - DNA, 25 bp, Homo sapien
aggaatttccaaacgcagctcccga

SEQ ID NO: 1721917 - DNA, 25 bp, Homo sapien
tcttagcaggggcggcactagtcat

SEQ ID NO: 1721918 - DNA, 25 bp, Homo sapien
tgccttacggtagggtttcttagca

SEQ ID NO: 1721919 - DNA, 25 bp, Homo sapien
ctcaagccgggatccaggaatttcc

SEQ ID NO: 1721920 - DNA, 25 bp, Homo sapien
ctctgccggtcaggctgtgatacca

SEQ ID NO: 1721921 - DNA, 25 bp, Homo sapien
aggctgtgataccagtcttgctgac

SEQ ID NO: 1721922 - DNA, 25 bp, Homo sapien
caaagactcttatagcagaagaggg

SEQ ID NO: 1721923 - DNA, 25 bp, Homo sapien
gactcttatagcagaagagggctgc

SEQ ID NO: 1721924 - DNA, 25 bp, Homo sapien
caaatagccacaagaaggctcaggt

SEQ ID NO: 1721925 - DNA, 25 bp, Homo sapien
tgaagcccaaagactcttatagcag

SEQ ID NO: 1721926 - DNA, 25 bp, Homo sapien
tcctttctgcatcagtcaggggttc

SEQ ID NO: 1721927 - DNA, 25 bp, Homo sapien
catcctttctgcatcagtcaggggt

SEQ ID NO: 1721928 - DNA, 25 bp, Homo sapien
ttcatcctttctgcatcagtcaggg

SEQ ID NO: 1721929 - DNA, 25 bp, Homo sapien
tcatcctttctgcatcagtcagggg

SEQ ID NO: 1721930 - DNA, 25 bp, Homo sapien
aggcagggcagtatctcaggtagca

SEQ ID NO: 1721931 - DNA, 25 bp, Homo sapien
gcatatttcataggcctgctggccc

SEQ ID NO: 1721932 - DNA, 25 bp, Homo sapien
tgtaccaacagtctagcctggagct

SEQ ID NO: 1721933 - DNA, 25 bp, Homo sapien
cctaatccaagggaaagtccaactg

SEQ ID NO: 1721934 - DNA, 25 bp, Homo sapien
cagtgcgtctggtggcggaggccag

SEQ ID NO: 1721935 - DNA, 25 bp, Homo sapien
caggcgccggcgaagctcttcattc

SEQ ID NO: 1721936 - DNA, 25 bp, Homo sapien
tccagctcacgttccagggcctcag

SEQ ID NO: 1721937 - DNA, 25 bp, Homo sapien
ccaggcgccggcgaagctcttcatt

SEQ ID NO: 1721938 - DNA, 25 bp, Homo sapien
ttaaatttgtccagctcctcgcggc

SEQ ID NO: 1721939 - DNA, 25 bp, Homo sapien
gaacttatccttaaatttgtccagc

SEQ ID NO: 1721940 - DNA, 25 bp, Homo sapien
ctgcggaacttatccttaaatttgt

SEQ ID NO: 1721941 - DNA, 25 bp, Homo sapien
ttatccttaaatttgtccagctcct

SEQ ID NO: 1721942 - DNA, 25 bp, Homo sapien
taaggcatcttccagctaacctcct

SEQ ID NO: 1721943 - DNA, 25 bp, Homo sapien
ggcatcttccagctaacctcctatg

SEQ ID NO: 1721944 - DNA, 25 bp, Homo sapien
cacacctgcagaacttatccagttt

SEQ ID NO: 1721945 - DNA, 25 bp, Homo sapien
tctaaggcatcttccagctaacctc

SEQ ID NO: 1721946 - DNA, 25 bp, Homo sapien
ttggtccgctgggaagccgtgtagc

SEQ ID NO: 1721947 - DNA, 25 bp, Homo sapien
ccgctgggaagccgtgtagctgttc

SEQ ID NO: 1721948 - DNA, 25 bp, Homo sapien
ggtccgctgggaagccgtgtagctg

SEQ ID NO: 1721949 - DNA, 25 bp, Homo sapien
ctggttggtccgctgggaagccgtg

SEQ ID NO: 1721950 - DNA, 25 bp, Homo sapien
aaatccagctgtggctaagagaggc

SEQ ID NO: 1721951 - DNA, 25 bp, Homo sapien
caaaaatccagctgtggctaagaga

SEQ ID NO: 1721952 - DNA, 25 bp, Homo sapien
aaaatccagctgtggctaagagagg

SEQ ID NO: 1721953 - DNA, 25 bp, Homo sapien
tgcaaaaatccagctgtggctaaga

SEQ ID NO: 1721954 - DNA, 25 bp, Homo sapien
ggcattgacagttaaacgggcctca

SEQ ID NO: 1721955 - DNA, 25 bp, Homo sapien
acaagaggccacaggtgctagggca

SEQ ID NO: 1721956 - DNA, 25 bp, Homo sapien
gacaaatgacggacagacagaagga

SEQ ID NO: 1721957 - DNA, 25 bp, Homo sapien
ggcagctggtacctcaacggcagta

SEQ ID NO: 1721958 - DNA, 25 bp, Homo sapien
tgttggtcagctccacaatctccca

SEQ ID NO: 1721959 - DNA, 25 bp, Homo sapien
gctcttccagcttgttgatggtgtt

SEQ ID NO: 1721960 - DNA, 25 bp, Homo sapien
tccagcgtcttcctatccatctcag

SEQ ID NO: 1721961 - DNA, 25 bp, Homo sapien
ttggcatccagcagcttgttggtca

SEQ ID NO: 1721962 - DNA, 25 bp, Homo sapien
agccaggttgcagtccagccggtac

SEQ ID NO: 1721963 - DNA, 25 bp, Homo sapien
acagccaggttgcagtccagccggt

SEQ ID NO: 1721964 - DNA, 25 bp, Homo sapien
ggttgcagtccagccggtaccgctc

SEQ ID NO: 1721965 - DNA, 25 bp, Homo sapien
ccaggttgcagtccagccggtaccg

SEQ ID NO: 1721966 - DNA, 25 bp, Homo sapien
cagaaactggagttagaggagtcct

SEQ ID NO: 1721967 - DNA, 25 bp, Homo sapien
tacagtggccggaatggtctatgtg

SEQ ID NO: 1721968 - DNA, 25 bp, Homo sapien
tttgggcagatagctctgactaccc

SEQ ID NO: 1721969 - DNA, 25 bp, Homo sapien
tacacgggacaccaaccagtggcag

SEQ ID NO: 1721970 - DNA, 25 bp, Homo sapien
taacatgatcagatgggcctaatcc

SEQ ID NO: 1721971 - DNA, 25 bp, Homo sapien
tcacagacacataggcctggagagg

SEQ ID NO: 1721972 - DNA, 25 bp, Homo sapien
gatttaaacccggatctgctgctgc

SEQ ID NO: 1721973 - DNA, 25 bp, Homo sapien
gactcatggcgaaagtaatggctcc

SEQ ID NO: 1721974 - DNA, 25 bp, Homo sapien
aaatgtttccgaaccatgtcctgta

SEQ ID NO: 1721975 - DNA, 25 bp, Homo sapien
gcaaatgtttccgaaccatgtcctg

SEQ ID NO: 1721976 - DNA, 25 bp, Homo sapien
aatgtttccgaaccatgtcctgtag

SEQ ID NO: 1721977 - DNA, 25 bp, Homo sapien
tgtgcaaatgtttccgaaccatgtc

SEQ ID NO: 1721978 - DNA, 25 bp, Homo sapien
acctgggctggcggcctcttgacca

SEQ ID NO: 1721979 - DNA, 25 bp, Homo sapien
aggacctgggctggcggcctcttga

SEQ ID NO: 1721980 - DNA, 25 bp, Homo sapien
caggacctgggctggcggcctcttg

SEQ ID NO: 1721981 - DNA, 25 bp, Homo sapien
ggagcaggacctgggctggcggcct

SEQ ID NO: 1721982 - DNA, 25 bp, Homo sapien
gctgttgcgggggatccgaacctta

SEQ ID NO: 1721983 - DNA, 25 bp, Homo sapien
tgcacaaagacatcctcagccaagg

SEQ ID NO: 1721984 - DNA, 25 bp, Homo sapien
cactcgggcaatgactgaggtaggc

SEQ ID NO: 1721985 - DNA, 25 bp, Homo sapien
cttatcctcagagaactctattacc

SEQ ID NO: 1721986 - DNA, 25 bp, Homo sapien
tcagagctggcagagctagctgggg

SEQ ID NO: 1721987 - DNA, 25 bp, Homo sapien
ggtggtggagtacggtccacaaatg

SEQ ID NO: 1721988 - DNA, 25 bp, Homo sapien
gtggagtacggtccacaaatgcccg

SEQ ID NO: 1721989 - DNA, 25 bp, Homo sapien
ggtggagtacggtccacaaatgccc

SEQ ID NO: 1721990 - DNA, 25 bp, Homo sapien
tggtggagtacggtccacaaatgcc

SEQ ID NO: 1721991 - DNA, 25 bp, Homo sapien
tatgggcaaaatggcgctgcagctc

SEQ ID NO: 1721992 - DNA, 25 bp, Homo sapien
agggcatcgcgtccaaaggctgtgc

SEQ ID NO: 1721993 - DNA, 25 bp, Homo sapien
gggtagcaaaagctcactctcttcg

SEQ ID NO: 1721994 - DNA, 25 bp, Homo sapien
tcctcaggactgataggcaggttca

SEQ ID NO: 1721995 - DNA, 25 bp, Homo sapien
tcttgagacccaactgcatgttacc

SEQ ID NO: 1721996 - DNA, 25 bp, Homo sapien
gatgaatactgataaactcctcagc

SEQ ID NO: 1721997 - DNA, 25 bp, Homo sapien
caagctgctgcagtcagtcaacgca

SEQ ID NO: 1721998 - DNA, 25 bp, Homo sapien
ttgtgactatgaaaggatggaagat

SEQ ID NO: 1721999 - DNA, 25 bp, Homo sapien
tgaaaatttctcaaagcttaagagt

SEQ ID NO: 1722000 - DNA, 25 bp, Homo sapien
gggccaggcctcacacagagcccag

SEQ ID NO: 1722001 - DNA, 25 bp, Homo sapien
ttaagagtaacagtctagagccaag

SEQ ID NO: 1722002 - DNA, 25 bp, Homo sapien
gcttaagagtaacagtctagagcca

SEQ ID NO: 1722003 - DNA, 25 bp, Homo sapien
gactagaggttctatctcgcgcgtg

SEQ ID NO: 1722004 - DNA, 25 bp, Homo sapien
tcaatctctccacgagactagaggt

SEQ ID NO: 1722005 - DNA, 25 bp, Homo sapien
tatctcgcgcgtgcgtcctagtagc

SEQ ID NO: 1722006 - DNA, 25 bp, Homo sapien
tctctccacgagactagaggttcta

SEQ ID NO: 1722007 - DNA, 25 bp, Homo sapien
agaaccacgcggctccgcatttcct

SEQ ID NO: 1722008 - DNA, 25 bp, Homo sapien
aaccacgcggctccgcatttcctcc

SEQ ID NO: 1722009 - DNA, 25 bp, Homo sapien
caaactcccccagaaccacgcggct

SEQ ID NO: 1722010 - DNA, 25 bp, Homo sapien
cccagaaccacgcggctccgcattt

SEQ ID NO: 1722011 - DNA, 25 bp, Homo sapien
ttctcgaagcggtcctggtcccagg

SEQ ID NO: 1722012 - DNA, 25 bp, Homo sapien
taccgggaaagtcagtagtatggac

SEQ ID NO: 1722013 - DNA, 25 bp, Homo sapien
catcataaccggaatagttaccggg

SEQ ID NO: 1722014 - DNA, 25 bp, Homo sapien
cccaggcatcatcataaccggaata

SEQ ID NO: 1722015 - DNA, 25 bp, Homo sapien
gcaatggctgcgtcaattcccacca

SEQ ID NO: 1722016 - DNA, 25 bp, Homo sapien
gaattcgtcgaaaagcattggcaat

SEQ ID NO: 1722017 - DNA, 25 bp, Homo sapien
ctcagctagcagaattcgtcgaaaa

SEQ ID NO: 1722018 - DNA, 25 bp, Homo sapien
gcgtcaattcccaccatgtcaaact

SEQ ID NO: 1722019 - DNA, 25 bp, Homo sapien
cagtgcagttcccaaagcaactcca

SEQ ID NO: 1722020 - DNA, 25 bp, Homo sapien
tcagtgcagttcccaaagcaactcc

SEQ ID NO: 1722021 - DNA, 25 bp, Homo sapien
ggtaaaatgctcagcaaaattccag

SEQ ID NO: 1722022 - DNA, 25 bp, Homo sapien
gtaaaatgctcagcaaaattccagg

SEQ ID NO: 1722023 - DNA, 25 bp, Homo sapien
ggatcagcatgaatgggaatgagcc

SEQ ID NO: 1722024 - DNA, 25 bp, Homo sapien
gatgtattattgtacaccaggacct

SEQ ID NO: 1722025 - DNA, 25 bp, Homo sapien
gccccagacggtgagcaagaatctc

SEQ ID NO: 1722026 - DNA, 25 bp, Homo sapien
cttggttccgatactcaaaaagacg

SEQ ID NO: 1722027 - DNA, 25 bp, Homo sapien
gacaaggcaagtgttctcacagatg

SEQ ID NO: 1722028 - DNA, 25 bp, Homo sapien
taagaactagtaaacgtctgagtgc

SEQ ID NO: 1722029 - DNA, 25 bp, Homo sapien
taattatggcaaacttgggagacaa

SEQ ID NO: 1722030 - DNA, 25 bp, Homo sapien
gctgaatgctttacgtgtttcccat

SEQ ID NO: 1722031 - DNA, 25 bp, Homo sapien
tgcatctgacctggagacgaaactg

SEQ ID NO: 1722032 - DNA, 25 bp, Homo sapien
gtagagtatctatctctgtgccttc

SEQ ID NO: 1722033 - DNA, 25 bp, Homo sapien
gggttccgagtgcatctgacctgga

SEQ ID NO: 1722034 - DNA, 25 bp, Homo sapien
cctggagacgaaactgtagagtatc

SEQ ID NO: 1722035 - DNA, 25 bp, Homo sapien
tggggtcagaggaatctttagcagc

SEQ ID NO: 1722036 - DNA, 25 bp, Homo sapien
tgtggttcacgtacagttcgttggg

SEQ ID NO: 1722037 - DNA, 25 bp, Homo sapien
ctttgtggttcacgtacagttcgtt

SEQ ID NO: 1722038 - DNA, 25 bp, Homo sapien
cagttcgttggggtcagaggaatct

SEQ ID NO: 1722039 - DNA, 25 bp, Homo sapien
aaactagcagctacccacaggtggg

SEQ ID NO: 1722040 - DNA, 25 bp, Homo sapien
agaagatctcagtccctaaaactag

SEQ ID NO: 1722041 - DNA, 25 bp, Homo sapien
tcagtccctaaaactagcagctacc

SEQ ID NO: 1722042 - DNA, 25 bp, Homo sapien
cctaaaactagcagctacccacagg

SEQ ID NO: 1722043 - DNA, 25 bp, Homo sapien
ggttccccagggggatccatgtcat

SEQ ID NO: 1722044 - DNA, 25 bp, Homo sapien
gatccatgtcatatgcctggtatac

SEQ ID NO: 1722045 - DNA, 25 bp, Homo sapien
cccagggggatccatgtcatatgcc

SEQ ID NO: 1722046 - DNA, 25 bp, Homo sapien
gggatccatgtcatatgcctggtat

SEQ ID NO: 1722047 - DNA, 25 bp, Homo sapien
ccgcagctgagcgatgaggatatca

SEQ ID NO: 1722048 - DNA, 25 bp, Homo sapien
tgagcaggtcaatttcttggccagg

SEQ ID NO: 1722049 - DNA, 25 bp, Homo sapien
tggtcggatagtgccctctggaaag

SEQ ID NO: 1722050 - DNA, 25 bp, Homo sapien
tatcatcatgcactggtcggatagt

SEQ ID NO: 1722051 - DNA, 25 bp, Homo sapien
cgtgcctataggaaacccttctagg

SEQ ID NO: 1722052 - DNA, 25 bp, Homo sapien
tgccgggaatgtctcagctgagttc

SEQ ID NO: 1722053 - DNA, 25 bp, Homo sapien
tgagttccctagtcagcttgcccca

SEQ ID NO: 1722054 - DNA, 25 bp, Homo sapien
aacagcaaaagcacaaccctcttgg

SEQ ID NO: 1722055 - DNA, 25 bp, Homo sapien
gcacctcaataacaccaggtgagaa

SEQ ID NO: 1722056 - DNA, 25 bp, Homo sapien
gcagggtgatgtctggcaggagcct

SEQ ID NO: 1722057 - DNA, 25 bp, Homo sapien
cagggtgatgtctggcaggagcctg

SEQ ID NO: 1722058 - DNA, 25 bp, Homo sapien
tgcctccccttccacgggctcaagc

SEQ ID NO: 1722059 - DNA, 25 bp, Homo sapien
tttttctaatttgccacttggtagc

SEQ ID NO: 1722060 - DNA, 25 bp, Homo sapien
caggttatacttttaggagcccagg

SEQ ID NO: 1722061 - DNA, 25 bp, Homo sapien
aatttaggtcctaacttgaacagca

SEQ ID NO: 1722062 - DNA, 25 bp, Homo sapien
tttgccacttggtagcaaaccaggt

SEQ ID NO: 1722063 - DNA, 25 bp, Homo sapien
gaagatttctctgctgaaggtatcc

SEQ ID NO: 1722064 - DNA, 25 bp, Homo sapien
tctctgctgaaggtatccagccggg

SEQ ID NO: 1722065 - DNA, 25 bp, Homo sapien
ttggcaactctggccacctttttac

SEQ ID NO: 1722066 - DNA, 25 bp, Homo sapien
gtatccagccgggggttggcaactc

SEQ ID NO: 1722067 - DNA, 25 bp, Homo sapien
tataatgatctcgaacccgggcaag

SEQ ID NO: 1722068 - DNA, 25 bp, Homo sapien
aatgatctcgaacccgggcaagcct

SEQ ID NO: 1722069 - DNA, 25 bp, Homo sapien
gatataatgatctcgaacccgggca

SEQ ID NO: 1722070 - DNA, 25 bp, Homo sapien
agatataatgatctcgaacccgggc

SEQ ID NO: 1722071 - DNA, 25 bp, Homo sapien
aagagacactttagtctaggcaggg

SEQ ID NO: 1722072 - DNA, 25 bp, Homo sapien
gggcttgcctgtaaaacttactcat

SEQ ID NO: 1722073 - DNA, 25 bp, Homo sapien
aacttactcataaacttcacatcta

SEQ ID NO: 1722074 - DNA, 25 bp, Homo sapien
cactttagtctaggcagggcttgcc

SEQ ID NO: 1722075 - DNA, 25 bp, Homo sapien
ggcaacacccccgttgactcaacag

SEQ ID NO: 1722076 - DNA, 25 bp, Homo sapien
accagcacatctggtggcaacaccc

SEQ ID NO: 1722077 - DNA, 25 bp, Homo sapien
ccatcagtactttgatggcttcact

SEQ ID NO: 1722078 - DNA, 25 bp, Homo sapien
aacacccccgttgactcaacagaga

SEQ ID NO: 1722079 - DNA, 25 bp, Homo sapien
ctgaaccgcatctagttcatccaag

SEQ ID NO: 1722080 - DNA, 25 bp, Homo sapien
ccatctgaaccgcatctagttcatc

SEQ ID NO: 1722081 - DNA, 25 bp, Homo sapien
cagtccatctgaaccgcatctagtt

SEQ ID NO: 1722082 - DNA, 25 bp, Homo sapien
ctagttcatccaagaagcgccggca

SEQ ID NO: 1722083 - DNA, 25 bp, Homo sapien
cctgtagggtgggtcagtcagaacc

SEQ ID NO: 1722084 - DNA, 25 bp, Homo sapien
tcaggatccctagtcacactgggct

SEQ ID NO: 1722085 - DNA, 25 bp, Homo sapien
aaagcttcagcttgcctcagaagca

SEQ ID NO: 1722086 - DNA, 25 bp, Homo sapien
tattgattaaagctggaattgtccc

SEQ ID NO: 1722087 - DNA, 25 bp, Homo sapien
tgacaagagggtttccccgagagcc

SEQ ID NO: 1722088 - DNA, 25 bp, Homo sapien
tatagtacctccaaggaccagggct

SEQ ID NO: 1722089 - DNA, 25 bp, Homo sapien
tgtgatgagcagctagcaaagccgc

SEQ ID NO: 1722090 - DNA, 25 bp, Homo sapien
cattctagaggtcactgaaaggccc

SEQ ID NO: 1722091 - DNA, 25 bp, Homo sapien
gtctagatgtcccagatagttccca

SEQ ID NO: 1722092 - DNA, 25 bp, Homo sapien
gaatggtaactaagggtgctgtgcc

SEQ ID NO: 1722093 - DNA, 25 bp, Homo sapien
ggccctgtgcaggaccagaagtaat

SEQ ID NO: 1722094 - DNA, 25 bp, Homo sapien
ccaagaaaagctagagcagagcagc

SEQ ID NO: 1722095 - DNA, 25 bp, Homo sapien
cagcgctattaattacagccttcaa

SEQ ID NO: 1722096 - DNA, 25 bp, Homo sapien
aaaaccctccggctcctgatgtgta

SEQ ID NO: 1722097 - DNA, 25 bp, Homo sapien
gccttcaattccctggcctggaaag

SEQ ID NO: 1722098 - DNA, 25 bp, Homo sapien
tcctgttcaggatgtttgtacagcg

SEQ ID NO: 1722099 - DNA, 25 bp, Homo sapien
gtttgagataccaccttcatcaggg

SEQ ID NO: 1722100 - DNA, 25 bp, Homo sapien
tggagaacaggtatgtctagagacc

SEQ ID NO: 1722101 - DNA, 25 bp, Homo sapien
ggtgtggagtctacagaagttgtca

SEQ ID NO: 1722102 - DNA, 25 bp, Homo sapien
gaaatggcaagttatcaaccaaagg

SEQ ID NO: 1722103 - DNA, 25 bp, Homo sapien
aatggtgaaggagagtttgttacaa

SEQ ID NO: 1722104 - DNA, 25 bp, Homo sapien
cagcctgacggaaatgcagctaaac

SEQ ID NO: 1722105 - DNA, 25 bp, Homo sapien
ttattcctactttttgggccagtga

SEQ ID NO: 1722106 - DNA, 25 bp, Homo sapien
gaattcaatatcagtgccatttagg

SEQ ID NO: 1722107 - DNA, 25 bp, Homo sapien
accgcagccagcaaatctttcttac

SEQ ID NO: 1722108 - DNA, 25 bp, Homo sapien
caccgcagccagcaaatctttctta

SEQ ID NO: 1722109 - DNA, 25 bp, Homo sapien
cagcgggtatatcaagttcacagtc

SEQ ID NO: 1722110 - DNA, 25 bp, Homo sapien
tatcactggtggtcaaaaaactcct

SEQ ID NO: 1722111 - DNA, 25 bp, Homo sapien
cttaaacctgtagctaccatgcccg

SEQ ID NO: 1722112 - DNA, 25 bp, Homo sapien
gcatcttaaacgtgtagccatcagt

SEQ ID NO: 1722113 - DNA, 25 bp, Homo sapien
caccgccatactcgtctaattttta

SEQ ID NO: 1722114 - DNA, 25 bp, Homo sapien
aaacttctagaccatatttacagca

SEQ ID NO: 1722115 - DNA, 25 bp, Homo sapien
tacagcatgaggttagtgaatgact

SEQ ID NO: 1722116 - DNA, 25 bp, Homo sapien
tgcctggccagggtagcgaatgact

SEQ ID NO: 1722117 - DNA, 25 bp, Homo sapien
ggctcatgcctataatttcagcact

SEQ ID NO: 1722118 - DNA, 25 bp, Homo sapien
aagttagaaaaagatggctgggaat

SEQ ID NO: 1722119 - DNA, 25 bp, Homo sapien
ttagaaaaagatggctgggaatagt

SEQ ID NO: 1722120 - DNA, 25 bp, Homo sapien
cagggcaggaggatctcttggggcc

SEQ ID NO: 1722121 - DNA, 25 bp, Homo sapien
tacacgtgaatatgtctagaggaca

SEQ ID NO: 1722122 - DNA, 25 bp, Homo sapien
cttccgttggaacataccttggcca

SEQ ID NO: 1722123 - DNA, 25 bp, Homo sapien
cctgaggaccaaatgtaagtctcca

SEQ ID NO: 1722124 - DNA, 25 bp, Homo sapien
aagtctccacatgtttgtaagtaaa

SEQ ID NO: 1722125 - DNA, 25 bp, Homo sapien
tgcctcacgcttgtgatctcagcag

SEQ ID NO: 1722126 - DNA, 25 bp, Homo sapien
ccagacattaacagtaccaaagagg

SEQ ID NO: 1722127 - DNA, 25 bp, Homo sapien
tgtaaacatagagacgaaaatccca

SEQ ID NO: 1722128 - DNA, 25 bp, Homo sapien
taaattaggcttagcgtggtgcctc

SEQ ID NO: 1722129 - DNA, 25 bp, Homo sapien
gcttccgcagaggtttcgccagtgg

SEQ ID NO: 1722130 - DNA, 25 bp, Homo sapien
gtggcttccgcagaggtttcgccag

SEQ ID NO: 1722131 - DNA, 25 bp, Homo sapien
cgcagccgtggaccgggccggggct

SEQ ID NO: 1722132 - DNA, 25 bp, Homo sapien
tccgcagaggtttcgccagtggcat

SEQ ID NO: 1722133 - DNA, 25 bp, Homo sapien
cttttctaagagttcagtgctttta

SEQ ID NO: 1722134 - DNA, 25 bp, Homo sapien
tgatacttttctaagagttcagtgc

SEQ ID NO: 1722135 - DNA, 25 bp, Homo sapien
cctagcatgtaatgatagagtagat

SEQ ID NO: 1722136 - DNA, 25 bp, Homo sapien
cttgaatagtgtgtagctggagcta

SEQ ID NO: 1722137 - DNA, 25 bp, Homo sapien
acaagacctgttctgtctatccttt

SEQ ID NO: 1722138 - DNA, 25 bp, Homo sapien
caagacctgttctgtctatcctttc

SEQ ID NO: 1722139 - DNA, 25 bp, Homo sapien
aacaagacctgttctgtctatcctt

SEQ ID NO: 1722140 - DNA, 25 bp, Homo sapien
cctgcgtccttactaatgtctctgc

SEQ ID NO: 1722141 - DNA, 25 bp, Homo sapien
tcatcctgtcctgcgtccttactaa

SEQ ID NO: 1722142 - DNA, 25 bp, Homo sapien
tgtcctgcgtccttactaatgtctc

SEQ ID NO: 1722143 - DNA, 25 bp, Homo sapien
gtccttactaatgtctctgcactct

SEQ ID NO: 1722144 - DNA, 25 bp, Homo sapien
gatcccaaaactagcttccagatgg

SEQ ID NO: 1722145 - DNA, 25 bp, Homo sapien
tcccgagcacaacaaggagaggtga

SEQ ID NO: 1722146 - DNA, 25 bp, Homo sapien
gaggttggcatgtcgtttggatccc

SEQ ID NO: 1722147 - DNA, 25 bp, Homo sapien
gcaaagcacaagtctgcaaaacagt

SEQ ID NO: 1722148 - DNA, 25 bp, Homo sapien
tgcgctgggcaatcagctgtgtgca

SEQ ID NO: 1722149 - DNA, 25 bp, Homo sapien
tcttacaggactgctgatggaggag

SEQ ID NO: 1722150 - DNA, 25 bp, Homo sapien
cactacgtctttctgaagaggctct

SEQ ID NO: 1722151 - DNA, 25 bp, Homo sapien
gggcagtgccatacaagttattgca

SEQ ID NO: 1722152 - DNA, 25 bp, Homo sapien
gaaaatgctgggttcggtgcctact

SEQ ID NO: 1722153 - DNA, 25 bp, Homo sapien
tttcgcctttctaggagcggtccag

SEQ ID NO: 1722154 - DNA, 25 bp, Homo sapien
gatttattccctgtgacgacggaga

SEQ ID NO: 1722155 - DNA, 25 bp, Homo sapien
gatcgtaaaggatcctgcccgggca

SEQ ID NO: 1722156 - DNA, 25 bp, Homo sapien
aggatggagttcagcgggcagcaga

SEQ ID NO: 1722157 - DNA, 25 bp, Homo sapien
agcagagctgtctcagtctttgccg

SEQ ID NO: 1722158 - DNA, 25 bp, Homo sapien
ggcagcagagctgtctcagtctttg

SEQ ID NO: 1722159 - DNA, 25 bp, Homo sapien
ggaggatggagttcagcgggcagca

SEQ ID NO: 1722160 - DNA, 25 bp, Homo sapien
aactgcacaaggtttattcctcaaa

SEQ ID NO: 1722161 - DNA, 25 bp, Homo sapien
aaaacagtccatgtccacgagagca

SEQ ID NO: 1722162 - DNA, 25 bp, Homo sapien
gccgctgctccacttgaacaaaaaa

SEQ ID NO: 1722163 - DNA, 25 bp, Homo sapien
gcaaccactcgatcctgtccagtag

SEQ ID NO: 1722164 - DNA, 25 bp, Homo sapien
aatgcacgagcttcataactcactg

SEQ ID NO: 1722165 - DNA, 25 bp, Homo sapien
tccaaatgcacgagcttcataactc

SEQ ID NO: 1722166 - DNA, 25 bp, Homo sapien
acttctagtgactccaaatgcacga

SEQ ID NO: 1722167 - DNA, 25 bp, Homo sapien
cttctagtgactccaaatgcacgag

SEQ ID NO: 1722168 - DNA, 25 bp, Homo sapien
gaacttgtgccagtagaagatctgg

SEQ ID NO: 1722169 - DNA, 25 bp, Homo sapien
gactcacgaacttgtgccagtagaa

SEQ ID NO: 1722170 - DNA, 25 bp, Homo sapien
tggtgaggttagctttcccacggga

SEQ ID NO: 1722171 - DNA, 25 bp, Homo sapien
ttcccacgggactcacgaacttgtg

SEQ ID NO: 1722172 - DNA, 25 bp, Homo sapien
tccggagaggttccaaatagctgta

SEQ ID NO: 1722173 - DNA, 25 bp, Homo sapien
tcatgagtacataacggagcctccc

SEQ ID NO: 1722174 - DNA, 25 bp, Homo sapien
ggaactagagctgcacaacaccatg

SEQ ID NO: 1722175 - DNA, 25 bp, Homo sapien
gatcatgactctctggaaccacaat

SEQ ID NO: 1722176 - DNA, 25 bp, Homo sapien
gaatcacggaggcaaacatttttag

SEQ ID NO: 1722177 - DNA, 25 bp, Homo sapien
ccagagtatatggtcttccccagga

SEQ ID NO: 1722178 - DNA, 25 bp, Homo sapien
taactgaaagggtcaatcggcaggc

SEQ ID NO: 1722179 - DNA, 25 bp, Homo sapien
tacacgtaatcaagagacatgtggc

SEQ ID NO: 1722180 - DNA, 25 bp, Homo sapien
ggtcagatctacgtaagcctcatca

SEQ ID NO: 1722181 - DNA, 25 bp, Homo sapien
tcaatgctggcacgttcaatcacag

SEQ ID NO: 1722182 - DNA, 25 bp, Homo sapien
caatcacagcaaaacgagacattat

SEQ ID NO: 1722183 - DNA, 25 bp, Homo sapien
tgtagtctctcttgtacagcactgg

SEQ ID NO: 1722184 - DNA, 25 bp, Homo sapien
tcttctgccgttgtagggccttggg

SEQ ID NO: 1722185 - DNA, 25 bp, Homo sapien
tctgaacagtctcttctgccgttgt

SEQ ID NO: 1722186 - DNA, 25 bp, Homo sapien
gggcaacccttcaatgtaagtgctt

SEQ ID NO: 1722187 - DNA, 25 bp, Homo sapien
caatgtaagtgcttggcaacaagtc

SEQ ID NO: 1722188 - DNA, 25 bp, Homo sapien
gaagcagtatgatgctatggaagta

SEQ ID NO: 1722189 - DNA, 25 bp, Homo sapien
gagaatcagcatgaccaagcaaagc

SEQ ID NO: 1722190 - DNA, 25 bp, Homo sapien
ttcaattattccaaggagaatcagc

SEQ ID NO: 1722191 - DNA, 25 bp, Homo sapien
ggaagcagaagcagtatgatgctat

SEQ ID NO: 1722192 - DNA, 25 bp, Homo sapien
tcacagcttctcaacagccatatac

SEQ ID NO: 1722193 - DNA, 25 bp, Homo sapien
gagaaatttactttcatacagattt

SEQ ID NO: 1722194 - DNA, 25 bp, Homo sapien
ctgccctagttatatctaaagagaa

SEQ ID NO: 1722195 - DNA, 25 bp, Homo sapien
atttcacagcttctcaacagccata

SEQ ID NO: 1722196 - DNA, 25 bp, Homo sapien
cctcctgggtcctggttcaagcaaa

SEQ ID NO: 1722197 - DNA, 25 bp, Homo sapien
gggattagaagcgtgaatcaccgcg

SEQ ID NO: 1722198 - DNA, 25 bp, Homo sapien
cacctcctgggtcctggttcaagca

SEQ ID NO: 1722199 - DNA, 25 bp, Homo sapien
cctgggtcctggttcaagcaaatct

SEQ ID NO: 1722200 - DNA, 25 bp, Homo sapien
ggaaagacagacatctaagatatat

SEQ ID NO: 1722201 - DNA, 25 bp, Homo sapien
gaatcactcaactccctatacctga

SEQ ID NO: 1722202 - DNA, 25 bp, Homo sapien
gggccttgtgcagcccatatgtaat

SEQ ID NO: 1722203 - DNA, 25 bp, Homo sapien
aaatgtatctgtgggtacaagaggg

SEQ ID NO: 1722204 - DNA, 25 bp, Homo sapien
aaattagcagcgtgtagtggataca

SEQ ID NO: 1722205 - DNA, 25 bp, Homo sapien
gcaaccaatgaatttgtcactaggg

SEQ ID NO: 1722206 - DNA, 25 bp, Homo sapien
ggtctgtaaccatggtggatccata

SEQ ID NO: 1722207 - DNA, 25 bp, Homo sapien
ttagagcaggacattagaagcaacc

SEQ ID NO: 1722208 - DNA, 25 bp, Homo sapien
tccatatcatggattacgctgcaag

SEQ ID NO: 1722209 - DNA, 25 bp, Homo sapien
gattttgcttcctctataagtggca

SEQ ID NO: 1722210 - DNA, 25 bp, Homo sapien
aaatttctgactctggtcccagaat

SEQ ID NO: 1722211 - DNA, 25 bp, Homo sapien
catactttgcattatcaggatcaga

SEQ ID NO: 1722212 - DNA, 25 bp, Homo sapien
gatgtggtacagaaaggtaagacca

SEQ ID NO: 1722213 - DNA, 25 bp, Homo sapien
ggaacacgtccatctgagttaacat

SEQ ID NO: 1722214 - DNA, 25 bp, Homo sapien
gagttaacattcaactaccaaggaa

SEQ ID NO: 1722215 - DNA, 25 bp, Homo sapien
tcttcagccagagataatagaatgc

SEQ ID NO: 1722216 - DNA, 25 bp, Homo sapien
caaatttttcggaggccagcaaggg

SEQ ID NO: 1722217 - DNA, 25 bp, Homo sapien
tcacaggtaacatgggcaacacagt

SEQ ID NO: 1722218 - DNA, 25 bp, Homo sapien
tcaaagttgtttggctactccacat

SEQ ID NO: 1722219 - DNA, 25 bp, Homo sapien
cacttgagcatgagttcacaggtaa

SEQ ID NO: 1722220 - DNA, 25 bp, Homo sapien
tgacgtcatgattcgctcaccctgg

SEQ ID NO: 1722221 - DNA, 25 bp, Homo sapien
gtatatattagctttgggaaacaaa

SEQ ID NO: 1722222 - DNA, 25 bp, Homo sapien
aggtgaggttatcaatctgaagaga

SEQ ID NO: 1722223 - DNA, 25 bp, Homo sapien
ctgaagagaatcgagccattgaaat

SEQ ID NO: 1722224 - DNA, 25 bp, Homo sapien
agaggtgaggttatcaatctgaaga

SEQ ID NO: 1722225 - DNA, 25 bp, Homo sapien
gaagagaatcgagccattgaaataa

SEQ ID NO: 1722226 - DNA, 25 bp, Homo sapien
acaatcactgctcccacggtgagct

SEQ ID NO: 1722227 - DNA, 25 bp, Homo sapien
tgtgaaattccagctgaacactgaa

SEQ ID NO: 1722228 - DNA, 25 bp, Homo sapien
tcactgctcccacggtgagctgcag

SEQ ID NO: 1722229 - DNA, 25 bp, Homo sapien
tgaaaaccagtctccctctctatgg

SEQ ID NO: 1722230 - DNA, 25 bp, Homo sapien
ttttgcgaatgggcatttggctgaa

SEQ ID NO: 1722231 - DNA, 25 bp, Homo sapien
ggcttgtttagtccacaggccagtt

SEQ ID NO: 1722232 - DNA, 25 bp, Homo sapien
gactgacccatgtgaaaccagggtt

SEQ ID NO: 1722233 - DNA, 25 bp, Homo sapien
ttggcggttgggcttgtttagtcca

SEQ ID NO: 1722234 - DNA, 25 bp, Homo sapien
attctatccctaggatctcaatgac

SEQ ID NO: 1722235 - DNA, 25 bp, Homo sapien
gattcagtgaactgggtcagttcac

SEQ ID NO: 1722236 - DNA, 25 bp, Homo sapien
ctggagctgggattcagtgaactgg

SEQ ID NO: 1722237 - DNA, 25 bp, Homo sapien
gtattctatccctaggatctcaatg

SEQ ID NO: 1722238 - DNA, 25 bp, Homo sapien
gttgcctgggtttaactggatcatg

SEQ ID NO: 1722239 - DNA, 25 bp, Homo sapien
cagccaatggttttgggtagttgcc

SEQ ID NO: 1722240 - DNA, 25 bp, Homo sapien
gggaagttcttactacagccaatgg

SEQ ID NO: 1722241 - DNA, 25 bp, Homo sapien
tgttcccgagtagcaagagctgttt

SEQ ID NO: 1722242 - DNA, 25 bp, Homo sapien
atcatttcggtctttagtcagtctc

SEQ ID NO: 1722243 - DNA, 25 bp, Homo sapien
tcatttcggtctttagtcagtctct

SEQ ID NO: 1722244 - DNA, 25 bp, Homo sapien
atttcggtctttagtcagtctctcc

SEQ ID NO: 1722245 - DNA, 25 bp, Homo sapien
catttcggtctttagtcagtctctc

SEQ ID NO: 1722246 - DNA, 25 bp, Homo sapien
ccagctgggtggctaccctgtcatt

SEQ ID NO: 1722247 - DNA, 25 bp, Homo sapien
tacagttcttgatgacagtaaatgc

SEQ ID NO: 1722248 - DNA, 25 bp, Homo sapien
gaggcgtttgtctccttgtacacga

SEQ ID NO: 1722249 - DNA, 25 bp, Homo sapien
catcttgtgagcatcatagcgggta

SEQ ID NO: 1722250 - DNA, 25 bp, Homo sapien
aaattttgtagcacagaggaaaagc

SEQ ID NO: 1722251 - DNA, 25 bp, Homo sapien
gaaaagcattgtgagaggaggagac

SEQ ID NO: 1722252 - DNA, 25 bp, Homo sapien
gcagaggcagaaaattttgtagcac

SEQ ID NO: 1722253 - DNA, 25 bp, Homo sapien
cagaaaattttgtagcacagaggaa

SEQ ID NO: 1722254 - DNA, 25 bp, Homo sapien
cagagaacttgggtcactgctcaag

SEQ ID NO: 1722255 - DNA, 25 bp, Homo sapien
tagcttctgagctggtaactggcac

SEQ ID NO: 1722256 - DNA, 25 bp, Homo sapien
gaatgattccagagacgtggttgct

SEQ ID NO: 1722257 - DNA, 25 bp, Homo sapien
taactggcacctttggcagagaact

SEQ ID NO: 1722258 - DNA, 25 bp, Homo sapien
gaggattcttctagcttcgacaccc

SEQ ID NO: 1722259 - DNA, 25 bp, Homo sapien
agggacacaccctggatactctgtt

SEQ ID NO: 1722260 - DNA, 25 bp, Homo sapien
taaagaagggctcagttcctgtact

SEQ ID NO: 1722261 - DNA, 25 bp, Homo sapien
catctctgcaggagttgctttagag

SEQ ID NO: 1722262 - DNA, 25 bp, Homo sapien
tggggttgctttctgagtcacctcc

SEQ ID NO: 1722263 - DNA, 25 bp, Homo sapien
ttggggttgctttctgagtcacctc

SEQ ID NO: 1722264 - DNA, 25 bp, Homo sapien
cagggcacttggtcctcagcagcta

SEQ ID NO: 1722265 - DNA, 25 bp, Homo sapien
tcagcagctagaagacttggatttg

SEQ ID NO: 1722266 - DNA, 25 bp, Homo sapien
tgggatttcttttgccttgatgaga

SEQ ID NO: 1722267 - DNA, 25 bp, Homo sapien
gcaaaaaggatttctgcaactccaa

SEQ ID NO: 1722268 - DNA, 25 bp, Homo sapien
tgagatacggcagaaacaacctggg

SEQ ID NO: 1722269 - DNA, 25 bp, Homo sapien
caggcctggggcgtttattagtgca

SEQ ID NO: 1722270 - DNA, 25 bp, Homo sapien
gttaatggcttaaaaaatgattcca

SEQ ID NO: 1722271 - DNA, 25 bp, Homo sapien
aatggcttaaaaaatgattccaatg

SEQ ID NO: 1722272 - DNA, 25 bp, Homo sapien
tgttaatggcttaaaaaatgattcc

SEQ ID NO: 1722273 - DNA, 25 bp, Homo sapien
ctaatgtgttaatggcttaaaaaat

SEQ ID NO: 1722274 - DNA, 25 bp, Homo sapien
tctgtcagcagtgggattagaatcc

SEQ ID NO: 1722275 - DNA, 25 bp, Homo sapien
taaccagagctaagtttgcaaccac

SEQ ID NO: 1722276 - DNA, 25 bp, Homo sapien
aaggccctcattgcaataaccagag

SEQ ID NO: 1722277 - DNA, 25 bp, Homo sapien
ggaccgtaactcagcacctaaatgg

SEQ ID NO: 1722278 - DNA, 25 bp, Homo sapien
taactatgcaagtctcattacattt

SEQ ID NO: 1722279 - DNA, 25 bp, Homo sapien
tatgcaagtctcattacatttaaaa

SEQ ID NO: 1722280 - DNA, 25 bp, Homo sapien
ttttttaactatgcaagtctcatta

SEQ ID NO: 1722281 - DNA, 25 bp, Homo sapien
tttaactatgcaagtctcattacat

SEQ ID NO: 1722282 - DNA, 25 bp, Homo sapien
tgtaatcccagcaactttgggaggt

SEQ ID NO: 1722283 - DNA, 25 bp, Homo sapien
gggccaggatcggtggctaacatct

SEQ ID NO: 1722284 - DNA, 25 bp, Homo sapien
ggccaggatcggtggctaacatctg

SEQ ID NO: 1722285 - DNA, 25 bp, Homo sapien
ggggggccaggatcggtggctaaca

SEQ ID NO: 1722286 - DNA, 25 bp, Homo sapien
tgaactgcccgtcacagagctagag

SEQ ID NO: 1722287 - DNA, 25 bp, Homo sapien
aatctggtgaaggtattatctgaac

SEQ ID NO: 1722288 - DNA, 25 bp, Homo sapien
ggtattatctgaactgcccgtcaca

SEQ ID NO: 1722289 - DNA, 25 bp, Homo sapien
tggtgaaggtattatctgaactgcc

SEQ ID NO: 1722290 - DNA, 25 bp, Homo sapien
gccctagttaccatatcacttttag

SEQ ID NO: 1722291 - DNA, 25 bp, Homo sapien
agaaagacctgccctagttaccata

SEQ ID NO: 1722292 - DNA, 25 bp, Homo sapien
aaattcactgtttattaagtcactt

SEQ ID NO: 1722293 - DNA, 25 bp, Homo sapien
gacctgccctagttaccatatcact

SEQ ID NO: 1722294 - DNA, 25 bp, Homo sapien
gagataggccaatggttagaactga

SEQ ID NO: 1722295 - DNA, 25 bp, Homo sapien
catacttgggagtagcaatgttcta

SEQ ID NO: 1722296 - DNA, 25 bp, Homo sapien
tagaacaaaacgcaagagataggcc

SEQ ID NO: 1722297 - DNA, 25 bp, Homo sapien
gagttcctgaactagtcaagtagca

SEQ ID NO: 1722298 - DNA, 25 bp, Homo sapien
ggctgaagcacttacctcttaaatt

SEQ ID NO: 1722299 - DNA, 25 bp, Homo sapien
gatgaacaagccagtaaccctaatg

SEQ ID NO: 1722300 - DNA, 25 bp, Homo sapien
catggacaagtgcaaaaagctacat

SEQ ID NO: 1722301 - DNA, 25 bp, Homo sapien
tgtcctctacacacctggtcattag

SEQ ID NO: 1722302 - DNA, 25 bp, Homo sapien
tcacgtgaaataggtagctaccctg

SEQ ID NO: 1722303 - DNA, 25 bp, Homo sapien
tagtggtcagaatagtaaggagccc

SEQ ID NO: 1722304 - DNA, 25 bp, Homo sapien
tactcttggaacaatgagggccact

SEQ ID NO: 1722305 - DNA, 25 bp, Homo sapien
caggattagagacaagtgaaacccc

SEQ ID NO: 1722306 - DNA, 25 bp, Homo sapien
tagaaaaagaacatagcgcgaggac

SEQ ID NO: 1722307 - DNA, 25 bp, Homo sapien
caaaacctgttgtctaggatccgcg

SEQ ID NO: 1722308 - DNA, 25 bp, Homo sapien
atttaagtgaattcccaggcctggg

SEQ ID NO: 1722309 - DNA, 25 bp, Homo sapien
tcagttctgcagctctcgaggtcca

SEQ ID NO: 1722310 - DNA, 25 bp, Homo sapien
tgaattgagccctagcgtcctgact

SEQ ID NO: 1722311 - DNA, 25 bp, Homo sapien
gctggagattgcttcacaagagagt

SEQ ID NO: 1722312 - DNA, 25 bp, Homo sapien
tcttgaccgtgtatgagcacctcgc

SEQ ID NO: 1722313 - DNA, 25 bp, Homo sapien
tctgtgcactggcttatgtcgctga

SEQ ID NO: 1722314 - DNA, 25 bp, Homo sapien
tgagctgaggtcatgccattgtgct

SEQ ID NO: 1722315 - DNA, 25 bp, Homo sapien
ggtgagctgaggtcatgccattgtg

SEQ ID NO: 1722316 - DNA, 25 bp, Homo sapien
gctgaggtcatgccattgtgctcca

SEQ ID NO: 1722317 - DNA, 25 bp, Homo sapien
agctgaggtcatgccattgtgctcc

SEQ ID NO: 1722318 - DNA, 25 bp, Homo sapien
tgcggttagaataaaggtctcgcgg

SEQ ID NO: 1722319 - DNA, 25 bp, Homo sapien
cctccgctactccttgcggttagaa

SEQ ID NO: 1722320 - DNA, 25 bp, Homo sapien
ctactccttgcggttagaataaagg

SEQ ID NO: 1722321 - DNA, 25 bp, Homo sapien
tccttgcggttagaataaaggtctc

SEQ ID NO: 1722322 - DNA, 25 bp, Homo sapien
gcggctgaggacagaacctccgcct

SEQ ID NO: 1722323 - DNA, 25 bp, Homo sapien
ctgcggctgaggacagaacctccgc

SEQ ID NO: 1722324 - DNA, 25 bp, Homo sapien
gactgcggctgaggacagaacctcc

SEQ ID NO: 1722325 - DNA, 25 bp, Homo sapien
ggactgcggctgaggacagaacctc

SEQ ID NO: 1722326 - DNA, 25 bp, Homo sapien
ggcaaaaggcctccgaagcgttgag

SEQ ID NO: 1722327 - DNA, 25 bp, Homo sapien
caagtagttctatctgggaggcgtg

SEQ ID NO: 1722328 - DNA, 25 bp, Homo sapien
tcggacttctcataccactccaaat

SEQ ID NO: 1722329 - DNA, 25 bp, Homo sapien
ggttcctgcgtagagcttgtctcaa

SEQ ID NO: 1722330 - DNA, 25 bp, Homo sapien
aaagtgcttaagctgttcatagggc

SEQ ID NO: 1722331 - DNA, 25 bp, Homo sapien
agtaaactgacagcagccttcctgg

SEQ ID NO: 1722332 - DNA, 25 bp, Homo sapien
ggaaacaccactggtaccatgcagt

SEQ ID NO: 1722333 - DNA, 25 bp, Homo sapien
gagctgctggcgttgatacatgata

SEQ ID NO: 1722334 - DNA, 25 bp, Homo sapien
aatatggctcggaagagacggcgca

SEQ ID NO: 1722335 - DNA, 25 bp, Homo sapien
tagtgtccgtgcaaagaagtcctcc

SEQ ID NO: 1722336 - DNA, 25 bp, Homo sapien
gaaggtctgccacatgacagggtca

SEQ ID NO: 1722337 - DNA, 25 bp, Homo sapien
caaatgtagtcttcccaagccgtgg

SEQ ID NO: 1722338 - DNA, 25 bp, Homo sapien
gatgggtgattcagcgccacatgga

SEQ ID NO: 1722339 - DNA, 25 bp, Homo sapien
tgccatcagcctatcaggaaatctg

SEQ ID NO: 1722340 - DNA, 25 bp, Homo sapien
ccctctgggaaaatcaacctttgat

SEQ ID NO: 1722341 - DNA, 25 bp, Homo sapien
tcagcaatgattacagtcacagtca

SEQ ID NO: 1722342 - DNA, 25 bp, Homo sapien
caggtcagcggctccgctcaacgcc

SEQ ID NO: 1722343 - DNA, 25 bp, Homo sapien
cgtcgagttgctaggagaagccgcc

SEQ ID NO: 1722344 - DNA, 25 bp, Homo sapien
cgctcaacgcccgtcgagttgctag

SEQ ID NO: 1722345 - DNA, 25 bp, Homo sapien
aacgcccgtcgagttgctaggagaa

SEQ ID NO: 1722346 - DNA, 25 bp, Homo sapien
gaagagaacccgatcatagcggtag

SEQ ID NO: 1722347 - DNA, 25 bp, Homo sapien
ctatagagcgtcttgcgcggtgcga

SEQ ID NO: 1722348 - DNA, 25 bp, Homo sapien
cgatgtagtaatcggcgacgaggcc

SEQ ID NO: 1722349 - DNA, 25 bp, Homo sapien
taaccagcataagagacgtgagcag

SEQ ID NO: 1722350 - DNA, 25 bp, Homo sapien
tcctggtgcctaaatcaatgcctag

SEQ ID NO: 1722351 - DNA, 25 bp, Homo sapien
cctagcacatggtagcacatagtag

SEQ ID NO: 1722352 - DNA, 25 bp, Homo sapien
tgaattctctcctactgagtggtgc

SEQ ID NO: 1722353 - DNA, 25 bp, Homo sapien
aacttactcagctgcctaagctagg

SEQ ID NO: 1722354 - DNA, 25 bp, Homo sapien
gcagggggcaagaggctccactctg

SEQ ID NO: 1722355 - DNA, 25 bp, Homo sapien
atgaagcggcccttcaccacagacg

SEQ ID NO: 1722356 - DNA, 25 bp, Homo sapien
tcaccacagacgactgcgccaccat

SEQ ID NO: 1722357 - DNA, 25 bp, Homo sapien
gcagctcagtgtgttcatattcgta

SEQ ID NO: 1722358 - DNA, 25 bp, Homo sapien
tcgtatgatgggtcccccatgaagc

SEQ ID NO: 1722359 - DNA, 25 bp, Homo sapien
ctggtcaatgacagacaccaagcgg

SEQ ID NO: 1722360 - DNA, 25 bp, Homo sapien
gacaccaagcgggtctcttccttga

SEQ ID NO: 1722361 - DNA, 25 bp, Homo sapien
caatgacagacaccaagcgggtctc

SEQ ID NO: 1722362 - DNA, 25 bp, Homo sapien
accaagcgggtctcttccttgatct

SEQ ID NO: 1722363 - DNA, 25 bp, Homo sapien
cttcaaaggtccgattgacatgggt

SEQ ID NO: 1722364 - DNA, 25 bp, Homo sapien
caaaggtccgattgacatgggtggg

SEQ ID NO: 1722365 - DNA, 25 bp, Homo sapien
tcaaaggtccgattgacatgggtgg

SEQ ID NO: 1722366 - DNA, 25 bp, Homo sapien
aggggtcttgaagagggcgcctcgg

SEQ ID NO: 1722367 - DNA, 25 bp, Homo sapien
tgggaatgtcatgctccaaggagtc

SEQ ID NO: 1722368 - DNA, 25 bp, Homo sapien
cctgaaatggaagtaggagctgagc

SEQ ID NO: 1722369 - DNA, 25 bp, Homo sapien
caagcaaggtcttattctttagctc

SEQ ID NO: 1722370 - DNA, 25 bp, Homo sapien
atgctccaaggagtccatgaaatcc

SEQ ID NO: 1722371 - DNA, 25 bp, Homo sapien
cagaagagactaggcacattcaggg

SEQ ID NO: 1722372 - DNA, 25 bp, Homo sapien
tccaagatcagaagagactaggcac

SEQ ID NO: 1722373 - DNA, 25 bp, Homo sapien
ttccaagatcagaagagactaggca

SEQ ID NO: 1722374 - DNA, 25 bp, Homo sapien
agaagagactaggcacattcagggt

SEQ ID NO: 1722375 - DNA, 25 bp, Homo sapien
gctcagaagccacgtgaagtcaccc

SEQ ID NO: 1722376 - DNA, 25 bp, Homo sapien
gaagccacgtgaagtcaccctgaac

SEQ ID NO: 1722377 - DNA, 25 bp, Homo sapien
gaagtcaccctgaacaactgcctca

SEQ ID NO: 1722378 - DNA, 25 bp, Homo sapien
cacgtgaagtcaccctgaacaactg

SEQ ID NO: 1722379 - DNA, 25 bp, Homo sapien
gaaagttttggtgttggaccagcca

SEQ ID NO: 1722380 - DNA, 25 bp, Homo sapien
gaaggagcctgggaaaatcgcctct

SEQ ID NO: 1722381 - DNA, 25 bp, Homo sapien
gcagctcatgcacccttactcaggg

SEQ ID NO: 1722382 - DNA, 25 bp, Homo sapien
gattaagctccagaaccgagggagg

SEQ ID NO: 1722383 - DNA, 25 bp, Homo sapien
acgtagccatagttcttggtgcggg

SEQ ID NO: 1722384 - DNA, 25 bp, Homo sapien
tgttcttctcgccagtgcccacgta

SEQ ID NO: 1722385 - DNA, 25 bp, Homo sapien
cacgtagacgtagccatagttcttg

SEQ ID NO: 1722386 - DNA, 25 bp, Homo sapien
cagtgcccacgtagacgtagccata

SEQ ID NO: 1722387 - DNA, 25 bp, Homo sapien
tgtttaaaaacatccaggctggctc

SEQ ID NO: 1722388 - DNA, 25 bp, Homo sapien
gactctgtttaaaaacatccaggct

SEQ ID NO: 1722389 - DNA, 25 bp, Homo sapien
tctgtttaaaaacatccaggctggc

SEQ ID NO: 1722390 - DNA, 25 bp, Homo sapien
taaaaacatccaggctggctcccat

SEQ ID NO: 1722391 - DNA, 25 bp, Homo sapien
tgccgctctcgtgtgaatccaagaa

SEQ ID NO: 1722392 - DNA, 25 bp, Homo sapien
caaagatcaagggagcttgtggccc

SEQ ID NO: 1722393 - DNA, 25 bp, Homo sapien
cataaactgggttcatgggcttacc

SEQ ID NO: 1722394 - DNA, 25 bp, Homo sapien
gaaaggatttgcttgcccaaccgtg

SEQ ID NO: 1722395 - DNA, 25 bp, Homo sapien
aaccttcctaggctagggctgcgcc

SEQ ID NO: 1722396 - DNA, 25 bp, Homo sapien
tacaggaaccttcctaggctagggc

SEQ ID NO: 1722397 - DNA, 25 bp, Homo sapien
tagggctgcgcccacgggcccttac

SEQ ID NO: 1722398 - DNA, 25 bp, Homo sapien
ggaaccttcctaggctagggctgcg

SEQ ID NO: 1722399 - DNA, 25 bp, Homo sapien
ccaaaggtccatgggcggcagccat

SEQ ID NO: 1722400 - DNA, 25 bp, Homo sapien
aaaggaggccaaaggtccatgggcg

SEQ ID NO: 1722401 - DNA, 25 bp, Homo sapien
taaaacccaatcctagccggcatga

SEQ ID NO: 1722402 - DNA, 25 bp, Homo sapien
ttctgggaactatcagggccctggc

SEQ ID NO: 1722403 - DNA, 25 bp, Homo sapien
tcatggttaggacccaagtgcctcc

SEQ ID NO: 1722404 - DNA, 25 bp, Homo sapien
ttagcaaagttgcagggtgcctgga

SEQ ID NO: 1722405 - DNA, 25 bp, Homo sapien
caagcagggaaccacatgtttatcc

SEQ ID NO: 1722406 - DNA, 25 bp, Homo sapien
tgttcttctgccgactccagtggta

SEQ ID NO: 1722407 - DNA, 25 bp, Homo sapien
ttagatctgcagtgacccctgctgg

SEQ ID NO: 1722408 - DNA, 25 bp, Homo sapien
agatctgcagtgacccctgctggct

SEQ ID NO: 1722409 - DNA, 25 bp, Homo sapien
tagatctgcagtgacccctgctggc

SEQ ID NO: 1722410 - DNA, 25 bp, Homo sapien
agctttacaagatcagatcagatga

SEQ ID NO: 1722411 - DNA, 25 bp, Homo sapien
tagctttacaagatcagatcagatg

SEQ ID NO: 1722412 - DNA, 25 bp, Homo sapien
aagtggaccctacacacctaggcca

SEQ ID NO: 1722413 - DNA, 25 bp, Homo sapien
ggtttgcctctaatcacatatcatt

SEQ ID NO: 1722414 - DNA, 25 bp, Homo sapien
gatcttagacttcattatacaccaa

SEQ ID NO: 1722415 - DNA, 25 bp, Homo sapien
tacctactcagtttgctcagtctcc

SEQ ID NO: 1722416 - DNA, 25 bp, Homo sapien
gacgaaaagtttcagtgcgacgccg

SEQ ID NO: 1722417 - DNA, 25 bp, Homo sapien
aatatcaaattccagcaccgagcgc

SEQ ID NO: 1722418 - DNA, 25 bp, Homo sapien
aagtagagcaatctccccaagccgt

SEQ ID NO: 1722419 - DNA, 25 bp, Homo sapien
gaagcgagaacagcccagaagttgg

SEQ ID NO: 1722420 - DNA, 25 bp, Homo sapien
gctggagcactgtctgcgcacaccg

SEQ ID NO: 1722421 - DNA, 25 bp, Homo sapien
tcctcggcgcctcggcgagctactc

SEQ ID NO: 1722422 - DNA, 25 bp, Homo sapien
tcggcgagctactcttcctccccgg

SEQ ID NO: 1722423 - DNA, 25 bp, Homo sapien
cgcgcgcggctggagcactgtctgc

SEQ ID NO: 1722424 - DNA, 25 bp, Homo sapien
gcatggtggaggtagagcagcaagg

SEQ ID NO: 1722425 - DNA, 25 bp, Homo sapien
ccaatgcacccaagacagcagaaag

SEQ ID NO: 1722426 - DNA, 25 bp, Homo sapien
gcagcaaggcaaggctccaatgcac

SEQ ID NO: 1722427 - DNA, 25 bp, Homo sapien
caatgcacccaagacagcagaaagt

SEQ ID NO: 1722428 - DNA, 25 bp, Homo sapien
acgcacgtccccagccgggagaggc

SEQ ID NO: 1722429 - DNA, 25 bp, Homo sapien
ggcgccagcagggcacgaccgctta

SEQ ID NO: 1722430 - DNA, 25 bp, Homo sapien
cacgcgcgcgctcgcacgcacgtcc

SEQ ID NO: 1722431 - DNA, 25 bp, Homo sapien
cgggagaggcgctcgcagcggcccg

SEQ ID NO: 1722432 - DNA, 25 bp, Homo sapien
ctctgggctccccattcgggcagcc

SEQ ID NO: 1722433 - DNA, 25 bp, Homo sapien
ctccccattcgggcagccgaggctc

SEQ ID NO: 1722434 - DNA, 25 bp, Homo sapien
tgggctccccattcgggcagccgag

SEQ ID NO: 1722435 - DNA, 25 bp, Homo sapien
gctccccattcgggcagccgaggct

SEQ ID NO: 1722436 - DNA, 25 bp, Homo sapien
gactaggggcgagaaaaacaacatg

SEQ ID NO: 1722437 - DNA, 25 bp, Homo sapien
agccatggtaagtattaaggtcaaa

SEQ ID NO: 1722438 - DNA, 25 bp, Homo sapien
gagaaaaacaacatggtgaccttct

SEQ ID NO: 1722439 - DNA, 25 bp, Homo sapien
ccatggtaagtattaaggtcaaata

SEQ ID NO: 1722440 - DNA, 25 bp, Homo sapien
tccttctgccatgggtgcagcctgg

SEQ ID NO: 1722441 - DNA, 25 bp, Homo sapien
ttctgccatgggtgcagcctgggac

SEQ ID NO: 1722442 - DNA, 25 bp, Homo sapien
ctccttctgccatgggtgcagcctg

SEQ ID NO: 1722443 - DNA, 25 bp, Homo sapien
cttcgtgatgattctgccctcctcc

SEQ ID NO: 1722444 - DNA, 25 bp, Homo sapien
ccgcatccttcatcaggcagccgcc

SEQ ID NO: 1722445 - DNA, 25 bp, Homo sapien
gccgcccctccaaggagggctggcc

SEQ ID NO: 1722446 - DNA, 25 bp, Homo sapien
agccgcccctccaaggagggctggc

SEQ ID NO: 1722447 - DNA, 25 bp, Homo sapien
catccttcatcaggcagccgcccct

SEQ ID NO: 1722448 - DNA, 25 bp, Homo sapien
aactgaatcctgggccaacctcgat

SEQ ID NO: 1722449 - DNA, 25 bp, Homo sapien
caacctcgatgccagaggacagtct

SEQ ID NO: 1722450 - DNA, 25 bp, Homo sapien
acagtctgagtatgggtatacccca

SEQ ID NO: 1722451 - DNA, 25 bp, Homo sapien
cagaggacagtctgagtatgggtat

SEQ ID NO: 1722452 - DNA, 25 bp, Homo sapien
caccagggtctcgattggatggcag

SEQ ID NO: 1722453 - DNA, 25 bp, Homo sapien
tgcatggtgatgttggactcctcag

SEQ ID NO: 1722454 - DNA, 25 bp, Homo sapien
gatgtactcgatctcatcagggtac

SEQ ID NO: 1722455 - DNA, 25 bp, Homo sapien
cagtagctgcgctgatagacatcca

SEQ ID NO: 1722456 - DNA, 25 bp, Homo sapien
gggcaggagccagacaaggcaaatc

SEQ ID NO: 1722457 - DNA, 25 bp, Homo sapien
cctgggaccacctgttcccaaagtg

SEQ ID NO: 1722458 - DNA, 25 bp, Homo sapien
gccagacaaggcaaatctagccagg

SEQ ID NO: 1722459 - DNA, 25 bp, Homo sapien
aaatctagccaggaaacgacctggg

SEQ ID NO: 1722460 - DNA, 25 bp, Homo sapien
tcctagtagatacccgaaagcaacc

SEQ ID NO: 1722461 - DNA, 25 bp, Homo sapien
tgagatgtgccccattaccaggtaa

SEQ ID NO: 1722462 - DNA, 25 bp, Homo sapien
gaaggaagcagatcacagaggttag

SEQ ID NO: 1722463 - DNA, 25 bp, Homo sapien
cagccagccatacccagatgggaca

SEQ ID NO: 1722464 - DNA, 25 bp, Homo sapien
tgttgtgctgtaggaagctcatctc

SEQ ID NO: 1722465 - DNA, 25 bp, Homo sapien
ggccttggtgaggtttgatccgcat

SEQ ID NO: 1722466 - DNA, 25 bp, Homo sapien
ttgttgtgctgtaggaagctcatct

SEQ ID NO: 1722467 - DNA, 25 bp, Homo sapien
ctctcctatgtgctggccttggtga

SEQ ID NO: 1722468 - DNA, 25 bp, Homo sapien
tgcagccacttgctgataatgaatc

SEQ ID NO: 1722469 - DNA, 25 bp, Homo sapien
gccaaaaagtacagcatgcttaacc

SEQ ID NO: 1722470 - DNA, 25 bp, Homo sapien
gtcacatagcgggaagctggacggg

SEQ ID NO: 1722471 - DNA, 25 bp, Homo sapien
actgaggcacattgaagtaaaatgc

SEQ ID NO: 1722472 - DNA, 25 bp, Homo sapien
tttcttgtcttgctctatctttctt

SEQ ID NO: 1722473 - DNA, 25 bp, Homo sapien
tcttgtcttgctctatctttctttg

SEQ ID NO: 1722474 - DNA, 25 bp, Homo sapien
ttttcttgtcttgctctatctttct

SEQ ID NO: 1722475 - DNA, 25 bp, Homo sapien
ttgtcttgctctatctttctttggt

SEQ ID NO: 1722476 - DNA, 25 bp, Homo sapien
tatgttttctcactagccctagagc

SEQ ID NO: 1722477 - DNA, 25 bp, Homo sapien
tgtcccttccaaaggaagtgccagg

SEQ ID NO: 1722478 - DNA, 25 bp, Homo sapien
gaagtgctaaagtcagggccactta

SEQ ID NO: 1722479 - DNA, 25 bp, Homo sapien
cctagagccatcatcctggagttgg

SEQ ID NO: 1722480 - DNA, 25 bp, Homo sapien
ggatttcttgcgctttcgtttttgc

SEQ ID NO: 1722481 - DNA, 25 bp, Homo sapien
gatttcttgcgctttcgtttttgcc

SEQ ID NO: 1722482 - DNA, 25 bp, Homo sapien
ctccagggcattagacagcagcggg

SEQ ID NO: 1722483 - DNA, 25 bp, Homo sapien
cagggcattagacagcagcgggcac

SEQ ID NO: 1722484 - DNA, 25 bp, Homo sapien
aggctccagggcattagacagcagc

SEQ ID NO: 1722485 - DNA, 25 bp, Homo sapien
ggaggctccagggcattagacagca

SEQ ID NO: 1722486 - DNA, 25 bp, Homo sapien
agggaatggcaggcggaggttgtac

SEQ ID NO: 1722487 - DNA, 25 bp, Homo sapien
gggagaggctgccataaggggcaat

SEQ ID NO: 1722488 - DNA, 25 bp, Homo sapien
ggcacagacgggcagagagtgcagg

SEQ ID NO: 1722489 - DNA, 25 bp, Homo sapien
aggcgggcacagacgggcagagagt

SEQ ID NO: 1722490 - DNA, 25 bp, Homo sapien
ggagaggctgccataaggggcaatg

SEQ ID NO: 1722491 - DNA, 25 bp, Homo sapien
gccttgcaacgcgagtctgtgtttt

SEQ ID NO: 1722492 - DNA, 25 bp, Homo sapien
cacgtctgcggatcttgtacaaaca

SEQ ID NO: 1722493 - DNA, 25 bp, Homo sapien
tgctttctccgctctgagcaaggcc

SEQ ID NO: 1722494 - DNA, 25 bp, Homo sapien
gttcgtttaactcaagctgcctcgc

SEQ ID NO: 1722495 - DNA, 25 bp, Homo sapien
gatattcccagatacagccagcttg

SEQ ID NO: 1722496 - DNA, 25 bp, Homo sapien
aatatgctgcttcacttaggatggg

SEQ ID NO: 1722497 - DNA, 25 bp, Homo sapien
gatcttctgggagaacgcctgaggc

SEQ ID NO: 1722498 - DNA, 25 bp, Homo sapien
taacttcagttagctcccaggtcac

SEQ ID NO: 1722499 - DNA, 25 bp, Homo sapien
ccctgagggaggctccttcctcctg

SEQ ID NO: 1722500 - DNA, 25 bp, Homo sapien
agggaggctccttcctcctgcccgg

SEQ ID NO: 1722501 - DNA, 25 bp, Homo sapien
accctgagggaggctccttcctcct

SEQ ID NO: 1722502 - DNA, 25 bp, Homo sapien
tgagggaggctccttcctcctgccc

SEQ ID NO: 1722503 - DNA, 25 bp, Homo sapien
cttttaggctgcaccccaggaaggg

SEQ ID NO: 1722504 - DNA, 25 bp, Homo sapien
tccaattccaagagggaccgtgctg

SEQ ID NO: 1722505 - DNA, 25 bp, Homo sapien
ttccgggctcggtgatttagcagca

SEQ ID NO: 1722506 - DNA, 25 bp, Homo sapien
tcaatggtgtgaggacataggtcct

SEQ ID NO: 1722507 - DNA, 25 bp, Homo sapien
aaaccggtacaaataagagagcaag

SEQ ID NO: 1722508 - DNA, 25 bp, Homo sapien
agctagtgactgtcaccgatcaggg

SEQ ID NO: 1722509 - DNA, 25 bp, Homo sapien
tatgtagatgtatattgaaacctta

SEQ ID NO: 1722510 - DNA, 25 bp, Homo sapien
aattaaatatctgttcaagataagc

SEQ ID NO: 1722511 - DNA, 25 bp, Homo sapien
ggaatatctcgaaaaactgcactag

SEQ ID NO: 1722512 - DNA, 25 bp, Homo sapien
tccccacaattattacggataaaca

SEQ ID NO: 1722513 - DNA, 25 bp, Homo sapien
gagagagatttagtatgtagaattc

SEQ ID NO: 1722514 - DNA, 25 bp, Homo sapien
cggataaacagtagcaccaataaat

SEQ ID NO: 1722515 - DNA, 25 bp, Homo sapien
tgccaggcacctatggaaaagtcta

SEQ ID NO: 1722516 - DNA, 25 bp, Homo sapien
tgagccgctcagtgtttaaaacccc

SEQ ID NO: 1722517 - DNA, 25 bp, Homo sapien
gaaaagtctatctgactgagccgct

SEQ ID NO: 1722518 - DNA, 25 bp, Homo sapien
gctgagaccttgcaatggccggcac

SEQ ID NO: 1722519 - DNA, 25 bp, Homo sapien
ttttaaactccataagtggctcaca

SEQ ID NO: 1722520 - DNA, 25 bp, Homo sapien
agcactgttctagagtctgtcaggt

SEQ ID NO: 1722521 - DNA, 25 bp, Homo sapien
gttctagagtctgtcaggtggctac

SEQ ID NO: 1722522 - DNA, 25 bp, Homo sapien
aattttaaactccataagtggctca

SEQ ID NO: 1722523 - DNA, 25 bp, Homo sapien
cctggcatatttgggcctcttctgg

SEQ ID NO: 1722524 - DNA, 25 bp, Homo sapien
tggacctgagtgcaggtacctggcc

SEQ ID NO: 1722525 - DNA, 25 bp, Homo sapien
ggacgcgatgttgcagccctggcat

SEQ ID NO: 1722526 - DNA, 25 bp, Homo sapien
gatgttgcagccctggcatatttgg

SEQ ID NO: 1722527 - DNA, 25 bp, Homo sapien
ctggtgccatggggcttagtgtctg

SEQ ID NO: 1722528 - DNA, 25 bp, Homo sapien
agtgtctgagatggactgaggcctc

SEQ ID NO: 1722529 - DNA, 25 bp, Homo sapien
cctggtgccatggggcttagtgtct

SEQ ID NO: 1722530 - DNA, 25 bp, Homo sapien
ttctggagatgcagcgagtttgctt

SEQ ID NO: 1722531 - DNA, 25 bp, Homo sapien
gcgagtttgcttccgcccctctgag

SEQ ID NO: 1722532 - DNA, 25 bp, Homo sapien
gcagcctgggacagtcttcggctac

SEQ ID NO: 1722533 - DNA, 25 bp, Homo sapien
agtcttcggctacacatccagcgta

SEQ ID NO: 1722534 - DNA, 25 bp, Homo sapien
aatgcctgcctttgatgggagtgac

SEQ ID NO: 1722535 - DNA, 25 bp, Homo sapien
aagtcaggccacactaactgtcagg

SEQ ID NO: 1722536 - DNA, 25 bp, Homo sapien
ttatacaacgttccaaagtcaggcc

SEQ ID NO: 1722537 - DNA, 25 bp, Homo sapien
taagtgaaccgcacacatgacatgg

SEQ ID NO: 1722538 - DNA, 25 bp, Homo sapien
ccatgctgaatttgctagtgatgct

SEQ ID NO: 1722539 - DNA, 25 bp, Homo sapien
aatttgctagtgatgctggcattcc

SEQ ID NO: 1722540 - DNA, 25 bp, Homo sapien
gctgaatttgctagtgatgctggca

SEQ ID NO: 1722541 - DNA, 25 bp, Homo sapien
tttgctagtgatgctggcattccca

SEQ ID NO: 1722542 - DNA, 25 bp, Homo sapien
aaggagggcatcatcggcataggcc

SEQ ID NO: 1722543 - DNA, 25 bp, Homo sapien
aggagggcatcatcggcataggcct

SEQ ID NO: 1722544 - DNA, 25 bp, Homo sapien
gaaaagaaggagggcatcatcggca

SEQ ID NO: 1722545 - DNA, 25 bp, Homo sapien
aagaaggagggcatcatcggcatag

SEQ ID NO: 1722546 - DNA, 25 bp, Homo sapien
ctggccatgagcatagagggagggc

SEQ ID NO: 1722547 - DNA, 25 bp, Homo sapien
caaactggccatgagcatagaggga

SEQ ID NO: 1722548 - DNA, 25 bp, Homo sapien
aactggccatgagcatagagggagg

SEQ ID NO: 1722549 - DNA, 25 bp, Homo sapien
gagcagatagccaaactggccatga

SEQ ID NO: 1722550 - DNA, 25 bp, Homo sapien
tcatctcccctaagcatgatgagca

SEQ ID NO: 1722551 - DNA, 25 bp, Homo sapien
ctgctgccgtgtcatcctcatctcc

SEQ ID NO: 1722552 - DNA, 25 bp, Homo sapien
taagcatgatgagcactgaaggtgt

SEQ ID NO: 1722553 - DNA, 25 bp, Homo sapien
gagcactgaaggtgtcgggccatcc

SEQ ID NO: 1722554 - DNA, 25 bp, Homo sapien
attccagcccttctatccttaatct

SEQ ID NO: 1722555 - DNA, 25 bp, Homo sapien
caaccccatagtcatcctgtaccat

SEQ ID NO: 1722556 - DNA, 25 bp, Homo sapien
cagcccttctatccttaatctgctc

SEQ ID NO: 1722557 - DNA, 25 bp, Homo sapien
gcccttctatccttaatctgctccc

SEQ ID NO: 1722558 - DNA, 25 bp, Homo sapien
ccacaaccagcccagtactggaagc

SEQ ID NO: 1722559 - DNA, 25 bp, Homo sapien
tcatcaaggatcacaaggggaaaat

SEQ ID NO: 1722560 - DNA, 25 bp, Homo sapien
cagaaacattctcctggggtttatc

SEQ ID NO: 1722561 - DNA, 25 bp, Homo sapien
cattctcctggggtttatctgcccc

SEQ ID NO: 1722562 - DNA, 25 bp, Homo sapien
ggagcagggcttgagcaccccctct

SEQ ID NO: 1722563 - DNA, 25 bp, Homo sapien
agtagtgcaccccctgaaggtagca

SEQ ID NO: 1722564 - DNA, 25 bp, Homo sapien
ctgtccagtagtgcaccccctgaag

SEQ ID NO: 1722565 - DNA, 25 bp, Homo sapien
tccagtagtgcaccccctgaaggta

SEQ ID NO: 1722566 - DNA, 25 bp, Homo sapien
gtccagtagtgcaccccctgaaggt

SEQ ID NO: 1722567 - DNA, 25 bp, Homo sapien
gctgcacagtggtaggtggtattcc

SEQ ID NO: 1722568 - DNA, 25 bp, Homo sapien
acttcaatgcggaggacgcttgagc

SEQ ID NO: 1722569 - DNA, 25 bp, Homo sapien
ttgtcgtggccaagctaggacagct

SEQ ID NO: 1722570 - DNA, 25 bp, Homo sapien
tttttccggtgtcaacttcaatgcg

SEQ ID NO: 1722571 - DNA, 25 bp, Homo sapien
cacagggacctccagacatacagga

SEQ ID NO: 1722572 - DNA, 25 bp, Homo sapien
caatgtagtctacctgtgccagggt

SEQ ID NO: 1722573 - DNA, 25 bp, Homo sapien
ggatagaaaccctgacctctagcaa

SEQ ID NO: 1722574 - DNA, 25 bp, Homo sapien
gacctctagcaatgtagtctacctg

SEQ ID NO: 1722575 - DNA, 25 bp, Homo sapien
tcaggacacttgtgagcgctgattt

SEQ ID NO: 1722576 - DNA, 25 bp, Homo sapien
ttctccttccaggatgtgttgccaa

SEQ ID NO: 1722577 - DNA, 25 bp, Homo sapien
cttccaggatgtgttgccaatggcc

SEQ ID NO: 1722578 - DNA, 25 bp, Homo sapien
gatttgctggcctggtaaaagcctt

SEQ ID NO: 1722579 - DNA, 25 bp, Homo sapien
atccgtgcaacccaggcttcaactg

SEQ ID NO: 1722580 - DNA, 25 bp, Homo sapien
caggcttcaactgcacaagagcctt

SEQ ID NO: 1722581 - DNA, 25 bp, Homo sapien
gcaaggcggggaccatccgtgcaac

SEQ ID NO: 1722582 - DNA, 25 bp, Homo sapien
ccagtgaaggtttggcttggtatga

SEQ ID NO: 1722583 - DNA, 25 bp, Homo sapien
ggcactgctatgtctcagaacaatg

SEQ ID NO: 1722584 - DNA, 25 bp, Homo sapien
ctgtgaaacatgttgtccccgctgg

SEQ ID NO: 1722585 - DNA, 25 bp, Homo sapien
agaaaatgacagaggcagcgcgtga

SEQ ID NO: 1722586 - DNA, 25 bp, Homo sapien
caggcaaagacaagacggtgaagag

SEQ ID NO: 1722587 - DNA, 25 bp, Homo sapien
ctcttgcaatccagtgttcttgggt

SEQ ID NO: 1722588 - DNA, 25 bp, Homo sapien
gagtgaggggctggcaaggggctcc

SEQ ID NO: 1722589 - DNA, 25 bp, Homo sapien
tgaggggctggcaaggggctccagg

SEQ ID NO: 1722590 - DNA, 25 bp, Homo sapien
gctccaggtcctgcagaacactcat

SEQ ID NO: 1722591 - DNA, 25 bp, Homo sapien
aggggctggcaaggggctccaggtc

SEQ ID NO: 1722592 - DNA, 25 bp, Homo sapien
gggcttcccgtgcatgctgtctggt

SEQ ID NO: 1722593 - DNA, 25 bp, Homo sapien
cctggtggctcctgactgataggga

SEQ ID NO: 1722594 - DNA, 25 bp, Homo sapien
ctgtttgttcgcaggagcctggtgg

SEQ ID NO: 1722595 - DNA, 25 bp, Homo sapien
actgccatgagtgcttcaatcaggc

SEQ ID NO: 1722596 - DNA, 25 bp, Homo sapien
gaggacaagtagacagtccagggca

SEQ ID NO: 1722597 - DNA, 25 bp, Homo sapien
gtcctggcaagcacaagagggcctg

SEQ ID NO: 1722598 - DNA, 25 bp, Homo sapien
gggcaggaacgtcctggcaagcaca

SEQ ID NO: 1722599 - DNA, 25 bp, Homo sapien
ggaacgtcctggcaagcacaagagg

SEQ ID NO: 1722600 - DNA, 25 bp, Homo sapien
gctctggggacagctcctgaaggtc

SEQ ID NO: 1722601 - DNA, 25 bp, Homo sapien
agctcctgaaggtctggccctgatg

SEQ ID NO: 1722602 - DNA, 25 bp, Homo sapien
tggggacagctcctgaaggtctggc

SEQ ID NO: 1722603 - DNA, 25 bp, Homo sapien
cagctcctgaaggtctggccctgat

SEQ ID NO: 1722604 - DNA, 25 bp, Homo sapien
catttcccatcagggcgatggtcac

SEQ ID NO: 1722605 - DNA, 25 bp, Homo sapien
acatttcccatcagggcgatggtca

SEQ ID NO: 1722606 - DNA, 25 bp, Homo sapien
cccaggttccttgagacatttccca

SEQ ID NO: 1722607 - DNA, 25 bp, Homo sapien
aggttccttgagacatttcccatca

SEQ ID NO: 1722608 - DNA, 25 bp, Homo sapien
agggcatcctgatggtgggacatat

SEQ ID NO: 1722609 - DNA, 25 bp, Homo sapien
gatatcagggtaaaagacagcagga

SEQ ID NO: 1722610 - DNA, 25 bp, Homo sapien
acatatgaaccggtgggttgtagga

SEQ ID NO: 1722611 - DNA, 25 bp, Homo sapien
caggaggtgtgagctcggatgccag

SEQ ID NO: 1722612 - DNA, 25 bp, Homo sapien
cagggaatggatgcaagcttgtgtc

SEQ ID NO: 1722613 - DNA, 25 bp, Homo sapien
tcagggaatggatgcaagcttgtgt

SEQ ID NO: 1722614 - DNA, 25 bp, Homo sapien
agcttgtgtcctttccactcagttt

SEQ ID NO: 1722615 - DNA, 25 bp, Homo sapien
ctcagtttcttccacaactaaaggt

SEQ ID NO: 1722616 - DNA, 25 bp, Homo sapien
gaccatcctcaaacagcatccgtgt

SEQ ID NO: 1722617 - DNA, 25 bp, Homo sapien
gtggaccatcctcaaacagcatccg

SEQ ID NO: 1722618 - DNA, 25 bp, Homo sapien
aacagcatccgtgtgcacaggtgca

SEQ ID NO: 1722619 - DNA, 25 bp, Homo sapien
catcctcaaacagcatccgtgtgca

SEQ ID NO: 1722620 - DNA, 25 bp, Homo sapien
atcgctgtcggcaaggtgcaggccc

SEQ ID NO: 1722621 - DNA, 25 bp, Homo sapien
tgggagatcgctgtcggcaaggtgc

SEQ ID NO: 1722622 - DNA, 25 bp, Homo sapien
cttctgttgattgtactgaggcagc

SEQ ID NO: 1722623 - DNA, 25 bp, Homo sapien
ggagatcgctgtcggcaaggtgcag

SEQ ID NO: 1722624 - DNA, 25 bp, Homo sapien
aaccaagatgtcaaaggccccgctg

SEQ ID NO: 1722625 - DNA, 25 bp, Homo sapien
tggctgctacccctgtacaggttcc

SEQ ID NO: 1722626 - DNA, 25 bp, Homo sapien
aaaccaagatgtcaaaggccccgct

SEQ ID NO: 1722627 - DNA, 25 bp, Homo sapien
ggatggctgctacccctgtacaggt

SEQ ID NO: 1722628 - DNA, 25 bp, Homo sapien
gaactgccaattccaagggcctggt

SEQ ID NO: 1722629 - DNA, 25 bp, Homo sapien
ttagggtggagtctccgggaggatg

SEQ ID NO: 1722630 - DNA, 25 bp, Homo sapien
aagaactgccaattccaagggcctg

SEQ ID NO: 1722631 - DNA, 25 bp, Homo sapien
agggtggagtctccgggaggatggc

SEQ ID NO: 1722632 - DNA, 25 bp, Homo sapien
tttccgaggcttagcaagtctgcat

SEQ ID NO: 1722633 - DNA, 25 bp, Homo sapien
aagtctgcatattttttgacgctga

SEQ ID NO: 1722634 - DNA, 25 bp, Homo sapien
cctttccgaggcttagcaagtctgc

SEQ ID NO: 1722635 - DNA, 25 bp, Homo sapien
gtttgatgctaatttctttgcttgg

SEQ ID NO: 1722636 - DNA, 25 bp, Homo sapien
actctttcttcgtgtcctcaaccag

SEQ ID NO: 1722637 - DNA, 25 bp, Homo sapien
agtattcgtactctttcttcgtgtc

SEQ ID NO: 1722638 - DNA, 25 bp, Homo sapien
cattgaagctggagtattcgtactc

SEQ ID NO: 1722639 - DNA, 25 bp, Homo sapien
tgtgcattgaagctggagtattcgt

SEQ ID NO: 1722640 - DNA, 25 bp, Homo sapien
aggcaatgccacagaaaaacactgg

SEQ ID NO: 1722641 - DNA, 25 bp, Homo sapien
aaacactgggattttctgcagctgg

SEQ ID NO: 1722642 - DNA, 25 bp, Homo sapien
ctgtcttcccttccagaagcgggag

SEQ ID NO: 1722643 - DNA, 25 bp, Homo sapien
ttccagaagcgggagcagaaggcat

SEQ ID NO: 1722644 - DNA, 25 bp, Homo sapien
cttaaggcaagggagagtcagagct

SEQ ID NO: 1722645 - DNA, 25 bp, Homo sapien
tcttccgggaaccagatgatgagct

SEQ ID NO: 1722646 - DNA, 25 bp, Homo sapien
tactccaggctgtacgagatctgca

SEQ ID NO: 1722647 - DNA, 25 bp, Homo sapien
cacaacactgactaagggagctgca

SEQ ID NO: 1722648 - DNA, 25 bp, Homo sapien
agcactacccagtgtcagctctgct

SEQ ID NO: 1722649 - DNA, 25 bp, Homo sapien
agctctgctctgacagcagggtgga

SEQ ID NO: 1722650 - DNA, 25 bp, Homo sapien
tgctctgacagcagggtggaggagc

SEQ ID NO: 1722651 - DNA, 25 bp, Homo sapien
cagcactacccagtgtcagctctgc

SEQ ID NO: 1722652 - DNA, 25 bp, Homo sapien
ggcctcccccttagcaggccacaga

SEQ ID NO: 1722653 - DNA, 25 bp, Homo sapien
gggtggcctcccccttagcaggcca

SEQ ID NO: 1722654 - DNA, 25 bp, Homo sapien
tggcctcccccttagcaggccacag

SEQ ID NO: 1722655 - DNA, 25 bp, Homo sapien
ggtggcctcccccttagcaggccac

SEQ ID NO: 1722656 - DNA, 25 bp, Homo sapien
agccaaggcaggtgcttggttccca

SEQ ID NO: 1722657 - DNA, 25 bp, Homo sapien
aagccaaggcaggtgcttggttccc

SEQ ID NO: 1722658 - DNA, 25 bp, Homo sapien
ctcctcttttccttgctggggcaag

SEQ ID NO: 1722659 - DNA, 25 bp, Homo sapien
tctcctcttttccttgctggggcaa

SEQ ID NO: 1722660 - DNA, 25 bp, Homo sapien
cttctcctcttttccttgctggggc

SEQ ID NO: 1722661 - DNA, 25 bp, Homo sapien
cctcttttccttgctggggcaaggt

SEQ ID NO: 1722662 - DNA, 25 bp, Homo sapien
ccccagccaaggtgcaagatacaag

SEQ ID NO: 1722663 - DNA, 25 bp, Homo sapien
agccccagccaaggtgcaagataca

SEQ ID NO: 1722664 - DNA, 25 bp, Homo sapien
ctgactgctacatgctccccccgtt

SEQ ID NO: 1722665 - DNA, 25 bp, Homo sapien
gactgctacatgctccccccgtttt

SEQ ID NO: 1722666 - DNA, 25 bp, Homo sapien
gccaaggctaggataagtagctagg

SEQ ID NO: 1722667 - DNA, 25 bp, Homo sapien
tctcgccaaggctaggataagtagc

SEQ ID NO: 1722668 - DNA, 25 bp, Homo sapien
tcctctcgccaaggctaggataagt

SEQ ID NO: 1722669 - DNA, 25 bp, Homo sapien
agtgatcctctcgccaaggctagga

SEQ ID NO: 1722670 - DNA, 25 bp, Homo sapien
acagaggaatctagaagcatgggag

SEQ ID NO: 1722671 - DNA, 25 bp, Homo sapien
accgggaccctacagaggaatctag

SEQ ID NO: 1722672 - DNA, 25 bp, Homo sapien
caaactcactgacatacagtactca

SEQ ID NO: 1722673 - DNA, 25 bp, Homo sapien
aggtgtgtgcatgcaaactcactga

SEQ ID NO: 1722674 - DNA, 25 bp, Homo sapien
tgtctaggcacacacacggttacaa

SEQ ID NO: 1722675 - DNA, 25 bp, Homo sapien
gaacacccacatgggctcatttgcc

SEQ ID NO: 1722676 - DNA, 25 bp, Homo sapien
cccacatgggctcatttgcctgtgt

SEQ ID NO: 1722677 - DNA, 25 bp, Homo sapien
cctgtgtctaggcacacacacggtt

SEQ ID NO: 1722678 - DNA, 25 bp, Homo sapien
tccttgggccagggcgcctgcttct

SEQ ID NO: 1722679 - DNA, 25 bp, Homo sapien
aatgcaggcccactccgttgctgaa

SEQ ID NO: 1722680 - DNA, 25 bp, Homo sapien
ggccagggcgcctgcttctgccagt

SEQ ID NO: 1722681 - DNA, 25 bp, Homo sapien
ggcccactccgttgctgaagggcct

SEQ ID NO: 1722682 - DNA, 25 bp, Homo sapien
acggtcacagcctcaacaaacccct

SEQ ID NO: 1722683 - DNA, 25 bp, Homo sapien
ggaacattgggggagcataggcaga

SEQ ID NO: 1722684 - DNA, 25 bp, Homo sapien
ggagaagcgctttcccacggtcaca

SEQ ID NO: 1722685 - DNA, 25 bp, Homo sapien
gccctggagaagcgctttcccacgg

SEQ ID NO: 1722686 - DNA, 25 bp, Homo sapien
ctctgaccatcagtaaggtgggctg

SEQ ID NO: 1722687 - DNA, 25 bp, Homo sapien
gaccatcagtaaggtgggctgcttg

SEQ ID NO: 1722688 - DNA, 25 bp, Homo sapien
tctgaccatcagtaaggtgggctgc

SEQ ID NO: 1722689 - DNA, 25 bp, Homo sapien
catcagtaaggtgggctgcttgtgc

SEQ ID NO: 1722690 - DNA, 25 bp, Homo sapien
gaggacagctgaagtcttgccactt

SEQ ID NO: 1722691 - DNA, 25 bp, Homo sapien
ctttgcttgtgctgttctttctgcc

SEQ ID NO: 1722692 - DNA, 25 bp, Homo sapien
tttgaggacagctgaagtcttgcca

SEQ ID NO: 1722693 - DNA, 25 bp, Homo sapien
tgctgttctttctgccagaaacact

SEQ ID NO: 1722694 - DNA, 25 bp, Homo sapien
gaggctcctcctccattagtgttgc

SEQ ID NO: 1722695 - DNA, 25 bp, Homo sapien
tggccagcatgtgggagaagctctg

SEQ ID NO: 1722696 - DNA, 25 bp, Homo sapien
actggcctacggatggatgggacct

SEQ ID NO: 1722697 - DNA, 25 bp, Homo sapien
caacctgtgaggcttgctgaggcag

SEQ ID NO: 1722698 - DNA, 25 bp, Homo sapien
tgagtttcaccctaaagaaggcagc

SEQ ID NO: 1722699 - DNA, 25 bp, Homo sapien
cagattgatggttcccgaaagtcca

SEQ ID NO: 1722700 - DNA, 25 bp, Homo sapien
catttgagagatccctaagggcagg

SEQ ID NO: 1722701 - DNA, 25 bp, Homo sapien
ggcatggtctgtccgcttcctagag

SEQ ID NO: 1722702 - DNA, 25 bp, Homo sapien
tcaaactggaggcacctagggttac

SEQ ID NO: 1722703 - DNA, 25 bp, Homo sapien
cctcaaactggaggcacctagggtt

SEQ ID NO: 1722704 - DNA, 25 bp, Homo sapien
aactggaggcacctagggttaccag

SEQ ID NO: 1722705 - DNA, 25 bp, Homo sapien
ctggaggcacctagggttaccagat

SEQ ID NO: 1722706 - DNA, 25 bp, Homo sapien
cgagaatccccgacgggctacagac

SEQ ID NO: 1722707 - DNA, 25 bp, Homo sapien
tcccaaatcccacgtctccccgaga

SEQ ID NO: 1722708 - DNA, 25 bp, Homo sapien
caaatcccacgtctccccgagaatc

SEQ ID NO: 1722709 - DNA, 25 bp, Homo sapien
caaacgcagtggctaggcggagacc

SEQ ID NO: 1722710 - DNA, 25 bp, Homo sapien
cgagtcctccgcgacatccgggcca

SEQ ID NO: 1722711 - DNA, 25 bp, Homo sapien
tcctccgcgacatccgggccagcgt

SEQ ID NO: 1722712 - DNA, 25 bp, Homo sapien
gcccgcgagtcctccgcgacatccg

SEQ ID NO: 1722713 - DNA, 25 bp, Homo sapien
gtcctgcccctggtgcgcaggtgga

SEQ ID NO: 1722714 - DNA, 25 bp, Homo sapien
taattagagcgcattagccgtgccc

SEQ ID NO: 1722715 - DNA, 25 bp, Homo sapien
cgatgccggcttggctgagtcagac

SEQ ID NO: 1722716 - DNA, 25 bp, Homo sapien
cctgtaatttcttctcgcgctcggg

SEQ ID NO: 1722717 - DNA, 25 bp, Homo sapien
gacgcagtcctctaggagtcacctg

SEQ ID NO: 1722718 - DNA, 25 bp, Homo sapien
tcaccctacctgacatgggaggcca

SEQ ID NO: 1722719 - DNA, 25 bp, Homo sapien
tctgtcaacgaaataggtccctggc

SEQ ID NO: 1722720 - DNA, 25 bp, Homo sapien
gagtccgtcgtgctgctcataaagc

SEQ ID NO: 1722721 - DNA, 25 bp, Homo sapien
cactgttaaacgagcgggtctggga

SEQ ID NO: 1722722 - DNA, 25 bp, Homo sapien
acgctgaggaaaaggatgtaggcac

SEQ ID NO: 1722723 - DNA, 25 bp, Homo sapien
cagcgggccggtctaaatcagaggt

SEQ ID NO: 1722724 - DNA, 25 bp, Homo sapien
ggcagtcggagaacccacattgtct

SEQ ID NO: 1722725 - DNA, 25 bp, Homo sapien
gagtttgcaacaccctggacctcag

SEQ ID NO: 1722726 - DNA, 25 bp, Homo sapien
gatgcagaagacacaaagaacctag

SEQ ID NO: 1722727 - DNA, 25 bp, Homo sapien
gcccttagtgaaatcccagcctgaa

SEQ ID NO: 1722728 - DNA, 25 bp, Homo sapien
tcagagcgctccctgtgataggaga

SEQ ID NO: 1722729 - DNA, 25 bp, Homo sapien
caagaaacatgcagaccacaaaggg

SEQ ID NO: 1722730 - DNA, 25 bp, Homo sapien
attcatcaaagcgtgacaaatggtg

SEQ ID NO: 1722731 - DNA, 25 bp, Homo sapien
aagtttcattcatcaaagcgtgaca

SEQ ID NO: 1722732 - DNA, 25 bp, Homo sapien
aagcgtgacaaatggtgtcctggga

SEQ ID NO: 1722733 - DNA, 25 bp, Homo sapien
gtcctgggaggaatgcctgggcgcc

SEQ ID NO: 1722734 - DNA, 25 bp, Homo sapien
agaccagccgaaatgttcctctcag

SEQ ID NO: 1722735 - DNA, 25 bp, Homo sapien
gaagtgggttaaggtcacagcctcc

SEQ ID NO: 1722736 - DNA, 25 bp, Homo sapien
gactgatgtttttgccaagaccagc

SEQ ID NO: 1722737 - DNA, 25 bp, Homo sapien
cactcagatgtgaaccagaggcttg

SEQ ID NO: 1722738 - DNA, 25 bp, Homo sapien
caaggctgtgaagtctctaggcact

SEQ ID NO: 1722739 - DNA, 25 bp, Homo sapien
tctaggcactctctggggacaaatg

SEQ ID NO: 1722740 - DNA, 25 bp, Homo sapien
ggctgtgaagtctctaggcactctc

SEQ ID NO: 1722741 - DNA, 25 bp, Homo sapien
gtgaagtctctaggcactctctggg

SEQ ID NO: 1722742 - DNA, 25 bp, Homo sapien
ttttgaccccaaagcacgactagct

SEQ ID NO: 1722743 - DNA, 25 bp, Homo sapien
cgtgcctggcaacatagcggctgtc

SEQ ID NO: 1722744 - DNA, 25 bp, Homo sapien
tggaccaccccatataaaacagcgc

SEQ ID NO: 1722745 - DNA, 25 bp, Homo sapien
aatacttgccacaccatgacctgag

SEQ ID NO: 1722746 - DNA, 25 bp, Homo sapien
gtctggttatatggctggtgtccca

SEQ ID NO: 1722747 - DNA, 25 bp, Homo sapien
ttccagaagtctggttatatggctg

SEQ ID NO: 1722748 - DNA, 25 bp, Homo sapien
gtctactgtggatctttctgacagc

SEQ ID NO: 1722749 - DNA, 25 bp, Homo sapien
cgagcttgaatagccctgagaatct

SEQ ID NO: 1722750 - DNA, 25 bp, Homo sapien
agagaaagttctcgtgtaaatgagc

SEQ ID NO: 1722751 - DNA, 25 bp, Homo sapien
agaaagttctcgtgtaaatgagcat

SEQ ID NO: 1722752 - DNA, 25 bp, Homo sapien
gcagagaaagttctcgtgtaaatga

SEQ ID NO: 1722753 - DNA, 25 bp, Homo sapien
tgggtggtggagaagtaagggcaga

SEQ ID NO: 1722754 - DNA, 25 bp, Homo sapien
ttaggccttctcgtctggggagctc

SEQ ID NO: 1722755 - DNA, 25 bp, Homo sapien
ttctcgtctggggagctccagtctg

SEQ ID NO: 1722756 - DNA, 25 bp, Homo sapien
aggccttctcgtctggggagctcca

SEQ ID NO: 1722757 - DNA, 25 bp, Homo sapien
ctcgtctggggagctccagtctgtc

SEQ ID NO: 1722758 - DNA, 25 bp, Homo sapien
gcgtgtagggaccactggtggccca

SEQ ID NO: 1722759 - DNA, 25 bp, Homo sapien
gagggctggacagcgggccaatggt

SEQ ID NO: 1722760 - DNA, 25 bp, Homo sapien
caatggtggggaataagctggaacc

SEQ ID NO: 1722761 - DNA, 25 bp, Homo sapien
tccactagactgggtgattccttag

SEQ ID NO: 1722762 - DNA, 25 bp, Homo sapien
ttattgataggcttcctctctgctg

SEQ ID NO: 1722763 - DNA, 25 bp, Homo sapien
gatttggtttgtctgtgacttttta

SEQ ID NO: 1722764 - DNA, 25 bp, Homo sapien
tttacatccgtaggaactcaaagat

SEQ ID NO: 1722765 - DNA, 25 bp, Homo sapien
tattgataggcttcctctctgctgc

SEQ ID NO: 1722766 - DNA, 25 bp, Homo sapien
tcttgaagcagtttcgaagtcctct

SEQ ID NO: 1722767 - DNA, 25 bp, Homo sapien
cttagctcagaacttcctccgtcgt

SEQ ID NO: 1722768 - DNA, 25 bp, Homo sapien
agaacttcctccgtcgttcatcttc

SEQ ID NO: 1722769 - DNA, 25 bp, Homo sapien
aatatagtaggttatgttgagtttc

SEQ ID NO: 1722770 - DNA, 25 bp, Homo sapien
tttcatcaatactcccttccttagc

SEQ ID NO: 1722771 - DNA, 25 bp, Homo sapien
tggccagctgttgcaattcctggct

SEQ ID NO: 1722772 - DNA, 25 bp, Homo sapien
ggccagctgttgcaattcctggctc

SEQ ID NO: 1722773 - DNA, 25 bp, Homo sapien
gtggccagctgttgcaattcctggc

SEQ ID NO: 1722774 - DNA, 25 bp, Homo sapien
tgctaagcaggtccattgacggcca

SEQ ID NO: 1722775 - DNA, 25 bp, Homo sapien
gacccatggcctgaatctatgctaa

SEQ ID NO: 1722776 - DNA, 25 bp, Homo sapien
ggccacccagacgagaacatgaaat

SEQ ID NO: 1722777 - DNA, 25 bp, Homo sapien
gcaggcgggtgccatctcagaagtt

SEQ ID NO: 1722778 - DNA, 25 bp, Homo sapien
ccagactgggtatgcctgccctctt

SEQ ID NO: 1722779 - DNA, 25 bp, Homo sapien
cagactgggtatgcctgccctcttt

SEQ ID NO: 1722780 - DNA, 25 bp, Homo sapien
gccagactgggtatgcctgccctct

SEQ ID NO: 1722781 - DNA, 25 bp, Homo sapien
cctggcagtgctcgggaatgagaat

SEQ ID NO: 1722782 - DNA, 25 bp, Homo sapien
tgcaggtggcctggcaagtggcatt

SEQ ID NO: 1722783 - DNA, 25 bp, Homo sapien
cattgtgcaagatagctctcttcct

SEQ ID NO: 1722784 - DNA, 25 bp, Homo sapien
ggcccctggcagtgctcgggaatga

SEQ ID NO: 1722785 - DNA, 25 bp, Homo sapien
gaccatagaagaagacttccttgcc

SEQ ID NO: 1722786 - DNA, 25 bp, Homo sapien
cctgcctttgtagcaggtgtgggct

SEQ ID NO: 1722787 - DNA, 25 bp, Homo sapien
ggccctgaccatagaagaagacttc

SEQ ID NO: 1722788 - DNA, 25 bp, Homo sapien
ccctgaccatagaagaagacttcct

SEQ ID NO: 1722789 - DNA, 25 bp, Homo sapien
ctgctggctgatacccttccacact

SEQ ID NO: 1722790 - DNA, 25 bp, Homo sapien
tggctgatacccttccacactgagg

SEQ ID NO: 1722791 - DNA, 25 bp, Homo sapien
caggactgggagtctggcttctgat

SEQ ID NO: 1722792 - DNA, 25 bp, Homo sapien
cccaggactgggagtctggcttctg

SEQ ID NO: 1722793 - DNA, 25 bp, Homo sapien
gcagagggcttgaggttagaccaca

SEQ ID NO: 1722794 - DNA, 25 bp, Homo sapien
cagccctgtaatgcgagtgagtcca

SEQ ID NO: 1722795 - DNA, 25 bp, Homo sapien
tgtgtaatgaaactggacgccttcc

SEQ ID NO: 1722796 - DNA, 25 bp, Homo sapien
acaaacaggtgtatagggcgcagcc

SEQ ID NO: 1722797 - DNA, 25 bp, Homo sapien
ggcgcaggtcagagatatgccccct

SEQ ID NO: 1722798 - DNA, 25 bp, Homo sapien
caaatgagatgcaaactccttaatg

SEQ ID NO: 1722799 - DNA, 25 bp, Homo sapien
tgtttagggccaggaaatgatttcc

SEQ ID NO: 1722800 - DNA, 25 bp, Homo sapien
tcccagactgtgcatgggtaaagca

SEQ ID NO: 1722801 - DNA, 25 bp, Homo sapien
tgtcccaggacatacagaaccaaga

SEQ ID NO: 1722802 - DNA, 25 bp, Homo sapien
cacttggaggcctctgtaaacatgg

SEQ ID NO: 1722803 - DNA, 25 bp, Homo sapien
tacataaggaaacccctctgtgggc

SEQ ID NO: 1722804 - DNA, 25 bp, Homo sapien
cacttgggacacgaaggacagaccc

SEQ ID NO: 1722805 - DNA, 25 bp, Homo sapien
aggcccatgcgggacctacatgatg

SEQ ID NO: 1722806 - DNA, 25 bp, Homo sapien
cccaggttctgtgacttgagctgag

SEQ ID NO: 1722807 - DNA, 25 bp, Homo sapien
tcaccaaagtgttgagacgacaggt

SEQ ID NO: 1722808 - DNA, 25 bp, Homo sapien
cagatgacatttgaagcggctttcc

SEQ ID NO: 1722809 - DNA, 25 bp, Homo sapien
cagcctggcatcagcgatgctggga

SEQ ID NO: 1722810 - DNA, 25 bp, Homo sapien
agaggttgtggtacccagcctggca

SEQ ID NO: 1722811 - DNA, 25 bp, Homo sapien
gaccagtccgttggtatgcagaggt

SEQ ID NO: 1722812 - DNA, 25 bp, Homo sapien
ctctggcatcaggatgtagggacca

SEQ ID NO: 1722813 - DNA, 25 bp, Homo sapien
acaaagctgaagtggattcccacca

SEQ ID NO: 1722814 - DNA, 25 bp, Homo sapien
ggcacagatgtccagtccgctttct

SEQ ID NO: 1722815 - DNA, 25 bp, Homo sapien
atgtgctcttggctgttgatgaggt

SEQ ID NO: 1722816 - DNA, 25 bp, Homo sapien
tcggcactcctgaagctagtcatct

SEQ ID NO: 1722817 - DNA, 25 bp, Homo sapien
gactcctaaggaccagccacattga

SEQ ID NO: 1722818 - DNA, 25 bp, Homo sapien
agaggctcccttagtttctttagtg

SEQ ID NO: 1722819 - DNA, 25 bp, Homo sapien
tgtgcaggtgattcagtgacagtta

SEQ ID NO: 1722820 - DNA, 25 bp, Homo sapien
gttatctttcgttcatctgttggtc

SEQ ID NO: 1722821 - DNA, 25 bp, Homo sapien
tagtggaacctcatcaacttatttg

SEQ ID NO: 1722822 - DNA, 25 bp, Homo sapien
gaactttgtgtgagttgagcccagg

SEQ ID NO: 1722823 - DNA, 25 bp, Homo sapien
tttgctaagggagcttgggagccac

SEQ ID NO: 1722824 - DNA, 25 bp, Homo sapien
cgcaagcgggaaggcgagtattcca

SEQ ID NO: 1722825 - DNA, 25 bp, Homo sapien
ggcctctggttgcaggactcgtgaa

SEQ ID NO: 1722826 - DNA, 25 bp, Homo sapien
aattcctgtagcacgttcagttgcc

SEQ ID NO: 1722827 - DNA, 25 bp, Homo sapien
ttcctgtagcacgttcagttgccat

SEQ ID NO: 1722828 - DNA, 25 bp, Homo sapien
gaattcctgtagcacgttcagttgc

SEQ ID NO: 1722829 - DNA, 25 bp, Homo sapien
attcctgtagcacgttcagttgcca

SEQ ID NO: 1722830 - DNA, 25 bp, Homo sapien
ttcagccgtcgctggtcactccgga

SEQ ID NO: 1722831 - DNA, 25 bp, Homo sapien
ggcgggctgcgttcagccgtcgctg

SEQ ID NO: 1722832 - DNA, 25 bp, Homo sapien
gtcgctggtcactccggagcgtctc

SEQ ID NO: 1722833 - DNA, 25 bp, Homo sapien
ctgcgttcagccgtcgctggtcact

SEQ ID NO: 1722834 - DNA, 25 bp, Homo sapien
tgctttccccgggttgcggcgtcga

SEQ ID NO: 1722835 - DNA, 25 bp, Homo sapien
ggctgcttctgcgacccccaagtcc

SEQ ID NO: 1722836 - DNA, 25 bp, Homo sapien
tgcgacccccaagtccgtggccggc

SEQ ID NO: 1722837 - DNA, 25 bp, Homo sapien
ttctgcgacccccaagtccgtggcc

SEQ ID NO: 1722838 - DNA, 25 bp, Homo sapien
ccccaagtccgtggccggcgctcac

SEQ ID NO: 1722839 - DNA, 25 bp, Homo sapien
gagtcgctgggcggctcgagctccg

SEQ ID NO: 1722840 - DNA, 25 bp, Homo sapien
gagggggagtcgctgggcggctcga

SEQ ID NO: 1722841 - DNA, 25 bp, Homo sapien
gggggagtcgctgggcggctcgagc

SEQ ID NO: 1722842 - DNA, 25 bp, Homo sapien
gggagtcgctgggcggctcgagctc

SEQ ID NO: 1722843 - DNA, 25 bp, Homo sapien
ccccaggcgcagactcggctccggc

SEQ ID NO: 1722844 - DNA, 25 bp, Homo sapien
cccaggcgcagactcggctccggct

SEQ ID NO: 1722845 - DNA, 25 bp, Homo sapien
cgcgcgccacccctgggtcccgcgg

SEQ ID NO: 1722846 - DNA, 25 bp, Homo sapien
gaggggacgcgcagctgagtccagg

SEQ ID NO: 1722847 - DNA, 25 bp, Homo sapien
tgaagggaggggacgcgcagctgag

SEQ ID NO: 1722848 - DNA, 25 bp, Homo sapien
atttggctcgggatggtgcggggtt

SEQ ID NO: 1722849 - DNA, 25 bp, Homo sapien
gaagaatagtagagctagaatttga

SEQ ID NO: 1722850 - DNA, 25 bp, Homo sapien
gaatttgaacgcaggtctctaagac

SEQ ID NO: 1722851 - DNA, 25 bp, Homo sapien
gggttcttagttacccactgcctgc

SEQ ID NO: 1722852 - DNA, 25 bp, Homo sapien
aagactgcactgagtgagccaacag

SEQ ID NO: 1722853 - DNA, 25 bp, Homo sapien
ggcagtgaggacagatcaccaggct

SEQ ID NO: 1722854 - DNA, 25 bp, Homo sapien
aagctctggcctctggagataaggg

SEQ ID NO: 1722855 - DNA, 25 bp, Homo sapien
ccttcatggcccagtagggtgggcg

SEQ ID NO: 1722856 - DNA, 25 bp, Homo sapien
cagagggtggagcagtcagctgggc

SEQ ID NO: 1722857 - DNA, 25 bp, Homo sapien
tgcgggcgctgtagcagtagtcctt

SEQ ID NO: 1722858 - DNA, 25 bp, Homo sapien
tagtccttggggttgctgttgttga

SEQ ID NO: 1722859 - DNA, 25 bp, Homo sapien
catgaagtcgagagccagcacggtg

SEQ ID NO: 1722860 - DNA, 25 bp, Homo sapien
aaggaagcacatgaagtcgagagcc

SEQ ID NO: 1722861 - DNA, 25 bp, Homo sapien
ggatagagaataagaacagcagtgc

SEQ ID NO: 1722862 - DNA, 25 bp, Homo sapien
gaggatagagaataagaacagcagt

SEQ ID NO: 1722863 - DNA, 25 bp, Homo sapien
cggaggatagagaataagaacagca

SEQ ID NO: 1722864 - DNA, 25 bp, Homo sapien
tccggaggatagagaataagaacag

SEQ ID NO: 1722865 - DNA, 25 bp, Homo sapien
caaggccagccgcccatagtcccag

SEQ ID NO: 1722866 - DNA, 25 bp, Homo sapien
aggccagccgcccatagtcccaggc

SEQ ID NO: 1722867 - DNA, 25 bp, Homo sapien
ctgtctgcatctgtcaccaaggcca

SEQ ID NO: 1722868 - DNA, 25 bp, Homo sapien
ccagccgcccatagtcccaggccac

SEQ ID NO: 1722869 - DNA, 25 bp, Homo sapien
ctgttccactcggtccctctcctgc

SEQ ID NO: 1722870 - DNA, 25 bp, Homo sapien
ttcctgttccactcggtccctctcc

SEQ ID NO: 1722871 - DNA, 25 bp, Homo sapien
tattcctgttccactcggtccctct

SEQ ID NO: 1722872 - DNA, 25 bp, Homo sapien
ttccactcggtccctctcctgccgc

SEQ ID NO: 1722873 - DNA, 25 bp, Homo sapien
ctgtccccgtgcatagctgaagcca

SEQ ID NO: 1722874 - DNA, 25 bp, Homo sapien
caaagtcaacggagctggagacaga

SEQ ID NO: 1722875 - DNA, 25 bp, Homo sapien
gacagaggtgagacgctcataccgg

SEQ ID NO: 1722876 - DNA, 25 bp, Homo sapien
tcataccggtcatggctgtccccgt

SEQ ID NO: 1722877 - DNA, 25 bp, Homo sapien
tggctgtcagccaggaacagaaacc

SEQ ID NO: 1722878 - DNA, 25 bp, Homo sapien
atggctgtcagccaggaacagaaac

SEQ ID NO: 1722879 - DNA, 25 bp, Homo sapien
tttatcctgaagatggctgtcagcc

SEQ ID NO: 1722880 - DNA, 25 bp, Homo sapien
atcctgaagatggctgtcagccagg

SEQ ID NO: 1722881 - DNA, 25 bp, Homo sapien
gcccgatgatgtgccgctgaaagga

SEQ ID NO: 1722882 - DNA, 25 bp, Homo sapien
atgcctacggagaggacgcccacaa

SEQ ID NO: 1722883 - DNA, 25 bp, Homo sapien
aaggacaggtagtgcacggcatcgc

SEQ ID NO: 1722884 - DNA, 25 bp, Homo sapien
gcagcacgatgcctacggagaggac

SEQ ID NO: 1722885 - DNA, 25 bp, Homo sapien
caatggtggttctcccaaagctgta

SEQ ID NO: 1722886 - DNA, 25 bp, Homo sapien
tttcaagttggcaatggtggttctc

SEQ ID NO: 1722887 - DNA, 25 bp, Homo sapien
caagttggcaatggtggttctccca

SEQ ID NO: 1722888 - DNA, 25 bp, Homo sapien
gtggttctcccaaagctgtaggcat

SEQ ID NO: 1722889 - DNA, 25 bp, Homo sapien
tgtagacggtgagcagcagatacag

SEQ ID NO: 1722890 - DNA, 25 bp, Homo sapien
ggcgaaggaggtgtgcagccatagc

SEQ ID NO: 1722891 - DNA, 25 bp, Homo sapien
cagatacaggaaggcgaaggaggtg

SEQ ID NO: 1722892 - DNA, 25 bp, Homo sapien
cttggaggtgtgtctacgcatgctg

SEQ ID NO: 1722893 - DNA, 25 bp, Homo sapien
tttctgtgtattccccacaaccttg

SEQ ID NO: 1722894 - DNA, 25 bp, Homo sapien
tccggttctggcttggtgagtgcat

SEQ ID NO: 1722895 - DNA, 25 bp, Homo sapien
tgagaaaatcatggcttgggaggtt

SEQ ID NO: 1722896 - DNA, 25 bp, Homo sapien
gaatattactatcctaggatcagcc

SEQ ID NO: 1722897 - DNA, 25 bp, Homo sapien
cattgatgaagagggtccgcttcac

SEQ ID NO: 1722898 - DNA, 25 bp, Homo sapien
caaaatgcttcttgatcttttctga

SEQ ID NO: 1722899 - DNA, 25 bp, Homo sapien
tatttggagattccattgatgaaga

SEQ ID NO: 1722900 - DNA, 25 bp, Homo sapien
ttttctgactctgcatatttggaga

SEQ ID NO: 1722901 - DNA, 25 bp, Homo sapien
gatctaatctctatcccacccacgg

SEQ ID NO: 1722902 - DNA, 25 bp, Homo sapien
gctaaaccaccctggaatcggacat

SEQ ID NO: 1722903 - DNA, 25 bp, Homo sapien
ccaggctagggtataaggatgttct

SEQ ID NO: 1722904 - DNA, 25 bp, Homo sapien
tatcacccgacccaagtgctaaacc

SEQ ID NO: 1722905 - DNA, 25 bp, Homo sapien
tctctgcatcgaggaacattaggcg

SEQ ID NO: 1722906 - DNA, 25 bp, Homo sapien
catcgaggaacattaggcgagccac

SEQ ID NO: 1722907 - DNA, 25 bp, Homo sapien
ttaggcgagccacgttgtaacacgg

SEQ ID NO: 1722908 - DNA, 25 bp, Homo sapien
aacacgggcgggcttcgagaactgt

SEQ ID NO: 1722909 - DNA, 25 bp, Homo sapien
aagtacagctttccccgctcggcct

SEQ ID NO: 1722910 - DNA, 25 bp, Homo sapien
tgaagtacagctttccccgctcggc

SEQ ID NO: 1722911 - DNA, 25 bp, Homo sapien
agtacagctttccccgctcggcctt

SEQ ID NO: 1722912 - DNA, 25 bp, Homo sapien
gaagtacagctttccccgctcggcc

SEQ ID NO: 1722913 - DNA, 25 bp, Homo sapien
gggttgatcatggtaggcacgttct

SEQ ID NO: 1722914 - DNA, 25 bp, Homo sapien
ctcacagcctcgcaccacacagcag

SEQ ID NO: 1722915 - DNA, 25 bp, Homo sapien
tgctcacagcctcgcaccacacagc

SEQ ID NO: 1722916 - DNA, 25 bp, Homo sapien
ggtaggcacgttctccttgctctgg

SEQ ID NO: 1722917 - DNA, 25 bp, Homo sapien
ggcctctagttggaaagccaggctg

SEQ ID NO: 1722918 - DNA, 25 bp, Homo sapien
tagggacagggcctctagttggaaa

SEQ ID NO: 1722919 - DNA, 25 bp, Homo sapien
aggcactgctcctctaagcattttt

SEQ ID NO: 1722920 - DNA, 25 bp, Homo sapien
agcatccagcccacgctgacttggg

SEQ ID NO: 1722921 - DNA, 25 bp, Homo sapien
cggtgatagtctcattgtggaaggt

SEQ ID NO: 1722922 - DNA, 25 bp, Homo sapien
atggcggtgatagtctcattgtgga

SEQ ID NO: 1722923 - DNA, 25 bp, Homo sapien
ttgtgtagtactcaatggcctccac

SEQ ID NO: 1722924 - DNA, 25 bp, Homo sapien
ctttgtgtagtactcaatggcctcc

SEQ ID NO: 1722925 - DNA, 25 bp, Homo sapien
ggatgaggggcgtggctccccacgg

SEQ ID NO: 1722926 - DNA, 25 bp, Homo sapien
cagtagatgttctgagggtcagggg

SEQ ID NO: 1722927 - DNA, 25 bp, Homo sapien
cataggacacggtccagttggagat

SEQ ID NO: 1722928 - DNA, 25 bp, Homo sapien
cagccctggcatttacacacgttga

SEQ ID NO: 1722929 - DNA, 25 bp, Homo sapien
gcttggtgacgttgaacttgtccat

SEQ ID NO: 1722930 - DNA, 25 bp, Homo sapien
ctccacaggcttggtgacgttgaac

SEQ ID NO: 1722931 - DNA, 25 bp, Homo sapien
acgacattgatgaccaggcagcgca

SEQ ID NO: 1722932 - DNA, 25 bp, Homo sapien
tgaagaggacgacattgatgaccag

SEQ ID NO: 1722933 - DNA, 25 bp, Homo sapien
gtgtttctccaggtgttgcacacct

SEQ ID NO: 1722934 - DNA, 25 bp, Homo sapien
gatcaggactaaatgcaggctctct

SEQ ID NO: 1722935 - DNA, 25 bp, Homo sapien
tgtgacccagcgtggaaagtgacag

SEQ ID NO: 1722936 - DNA, 25 bp, Homo sapien
tggaacaagcagaacgggctgggct

SEQ ID NO: 1722937 - DNA, 25 bp, Homo sapien
cgtgtccagtgggcttcaaagaagg

SEQ ID NO: 1722938 - DNA, 25 bp, Homo sapien
ggctgagtagtagacgatggtggga

SEQ ID NO: 1722939 - DNA, 25 bp, Homo sapien
ctgagtagtagacgatggtgggaag

SEQ ID NO: 1722940 - DNA, 25 bp, Homo sapien
caaagaaggctgagtagtagacgat

SEQ ID NO: 1722941 - DNA, 25 bp, Homo sapien
agtgtagcacttgtgcatggttgtc

SEQ ID NO: 1722942 - DNA, 25 bp, Homo sapien
ggaaagtgtagcacttgtgcatggt

SEQ ID NO: 1722943 - DNA, 25 bp, Homo sapien
cacttgtgcatggttgtcctgttct

SEQ ID NO: 1722944 - DNA, 25 bp, Homo sapien
gatgaggaaagtgtagcacttgtgc

SEQ ID NO: 1722945 - DNA, 25 bp, Homo sapien
tcaaaccgaatagctgcctcagcca

SEQ ID NO: 1722946 - DNA, 25 bp, Homo sapien
aaccgaatagctgcctcagccaaga

SEQ ID NO: 1722947 - DNA, 25 bp, Homo sapien
caaagagccagcggaagaagaggtc

SEQ ID NO: 1722948 - DNA, 25 bp, Homo sapien
aaaccgaatagctgcctcagccaag

SEQ ID NO: 1722949 - DNA, 25 bp, Homo sapien
gatcttagcatccaaacaggttacc

SEQ ID NO: 1722950 - DNA, 25 bp, Homo sapien
gggatacccctagtagcctccaaga

SEQ ID NO: 1722951 - DNA, 25 bp, Homo sapien
gaaactaccagaatgtggagcccca

SEQ ID NO: 1722952 - DNA, 25 bp, Homo sapien
aagtatcaccaagacctccctagag

SEQ ID NO: 1722953 - DNA, 25 bp, Homo sapien
ctgcgggcaccaggtgctccagcac

SEQ ID NO: 1722954 - DNA, 25 bp, Homo sapien
gggcaccaggtgctccagcactgca

SEQ ID NO: 1722955 - DNA, 25 bp, Homo sapien
gcgggcaccaggtgctccagcactg

SEQ ID NO: 1722956 - DNA, 25 bp, Homo sapien
gcaccaggtgctccagcactgcacc

SEQ ID NO: 1722957 - DNA, 25 bp, Homo sapien
ggtccatggcgttgccgataaaggc

SEQ ID NO: 1722958 - DNA, 25 bp, Homo sapien
tgacgtagttcacgaagaaggcgcc

SEQ ID NO: 1722959 - DNA, 25 bp, Homo sapien
taaaggctgaggcaatgacgtagtt

SEQ ID NO: 1722960 - DNA, 25 bp, Homo sapien
gatcatgtacatgagcaggcctggg

SEQ ID NO: 1722961 - DNA, 25 bp, Homo sapien
cagggggcgctgtgcgggccgctgc

SEQ ID NO: 1722962 - DNA, 25 bp, Homo sapien
cctagcgcgatggctgctgtttctt

SEQ ID NO: 1722963 - DNA, 25 bp, Homo sapien
ccgctgctgccccaggcggccgtac

SEQ ID NO: 1722964 - DNA, 25 bp, Homo sapien
gctgtttcttgttgggccaccaggg

SEQ ID NO: 1722965 - DNA, 25 bp, Homo sapien
caggtgatactgtaggtcatgacca

SEQ ID NO: 1722966 - DNA, 25 bp, Homo sapien
tgaccaccgtgaagacgcacatcat

SEQ ID NO: 1722967 - DNA, 25 bp, Homo sapien
gcacatcatccaggcgtaggctgcg

SEQ ID NO: 1722968 - DNA, 25 bp, Homo sapien
caaactggaactcgtaggcctgatg

SEQ ID NO: 1722969 - DNA, 25 bp, Homo sapien
caggtcccggcgcggcggtgcctac

SEQ ID NO: 1722970 - DNA, 25 bp, Homo sapien
ccaggtcccggcgcggcggtgccta

SEQ ID NO: 1722971 - DNA, 25 bp, Homo sapien
ccccaggacgggatagtgccccgtg

SEQ ID NO: 1722972 - DNA, 25 bp, Homo sapien
cagtgctgccgaaccttttgtgtgt

SEQ ID NO: 1722973 - DNA, 25 bp, Homo sapien
gtgtctgtcacaggttgttctggtc

SEQ ID NO: 1722974 - DNA, 25 bp, Homo sapien
atgggccctgacctcggaaccagtg

SEQ ID NO: 1722975 - DNA, 25 bp, Homo sapien
caggtaggcgtagtagagattgtac

SEQ ID NO: 1722976 - DNA, 25 bp, Homo sapien
acagcccccgagtggatcttcttgt

SEQ ID NO: 1722977 - DNA, 25 bp, Homo sapien
gattgtacctgtctaccaggtgctt

SEQ ID NO: 1722978 - DNA, 25 bp, Homo sapien
cagcttggccggcaggtaggcgtag

SEQ ID NO: 1722979 - DNA, 25 bp, Homo sapien
tatttgaagtgtccaaagcagacgt

SEQ ID NO: 1722980 - DNA, 25 bp, Homo sapien
tccaaagcagacgtggcagagacag

SEQ ID NO: 1722981 - DNA, 25 bp, Homo sapien
aatgtgaacatagacgtgggagcta

SEQ ID NO: 1722982 - DNA, 25 bp, Homo sapien
cagacgtggcagagacagatgacga

SEQ ID NO: 1722983 - DNA, 25 bp, Homo sapien
gggtccacagtatctgtctccgtgt

SEQ ID NO: 1722984 - DNA, 25 bp, Homo sapien
cagtggggggccgtccattgcttct

SEQ ID NO: 1722985 - DNA, 25 bp, Homo sapien
tccacagtatctgtctccgtgtgct

SEQ ID NO: 1722986 - DNA, 25 bp, Homo sapien
cagtatctgtctccgtgtgctcaat

SEQ ID NO: 1722987 - DNA, 25 bp, Homo sapien
tctgtgtccgtgagggcgtcgggtg

SEQ ID NO: 1722988 - DNA, 25 bp, Homo sapien
ggcatcagcaactcctcatcttggg

SEQ ID NO: 1722989 - DNA, 25 bp, Homo sapien
gatgggggctcatcccctgagctcc

SEQ ID NO: 1722990 - DNA, 25 bp, Homo sapien
tggaagtctgtgtccgtgagggcgt

SEQ ID NO: 1722991 - DNA, 25 bp, Homo sapien
atctcattctctatgaggctgtcct

SEQ ID NO: 1722992 - DNA, 25 bp, Homo sapien
ctctatgaggctgtcctcgcaagac

SEQ ID NO: 1722993 - DNA, 25 bp, Homo sapien
tggtgaatctcattctctatgaggc

SEQ ID NO: 1722994 - DNA, 25 bp, Homo sapien
cattctctatgaggctgtcctcgca

SEQ ID NO: 1722995 - DNA, 25 bp, Homo sapien
tattagcgttttagtgtccgtggga

SEQ ID NO: 1722996 - DNA, 25 bp, Homo sapien
agcgttttagtgtccgtgggagtgg

SEQ ID NO: 1722997 - DNA, 25 bp, Homo sapien
attagcgttttagtgtccgtgggag

SEQ ID NO: 1722998 - DNA, 25 bp, Homo sapien
aattattagcgttttagtgtccgtg

SEQ ID NO: 1722999 - DNA, 25 bp, Homo sapien
tccctccatcatgggggagagcagt

SEQ ID NO: 1723000 - DNA, 25 bp, Homo sapien
tccatcatgggggagagcagtgaaa

SEQ ID NO: 1723001 - DNA, 25 bp, Homo sapien
gagagcagtgaaacccccaagttta

SEQ ID NO: 1723002 - DNA, 25 bp, Homo sapien
tcatgggggagagcagtgaaacccc

SEQ ID NO: 1723003 - DNA, 25 bp, Homo sapien
tctcctggtcatgctactagctggg

SEQ ID NO: 1723004 - DNA, 25 bp, Homo sapien
ttggctctcattaaccctctcctgg

SEQ ID NO: 1723005 - DNA, 25 bp, Homo sapien
agctgtgagcctgactcttcctccc

SEQ ID NO: 1723006 - DNA, 25 bp, Homo sapien
tgcaccaggtactcctcttggctct

SEQ ID NO: 1723007 - DNA, 25 bp, Homo sapien
tgacttttgtggaacctggttctcc

SEQ ID NO: 1723008 - DNA, 25 bp, Homo sapien
gggcaatctttatcaggcttgctgt

SEQ ID NO: 1723009 - DNA, 25 bp, Homo sapien
ctgttcctgctgttggtggttcctg

SEQ ID NO: 1723010 - DNA, 25 bp, Homo sapien
cctgggcaatctttatcaggcttgc

SEQ ID NO: 1723011 - DNA, 25 bp, Homo sapien
tggaaatgctggaacctggctttga

SEQ ID NO: 1723012 - DNA, 25 bp, Homo sapien
tcaggactcttgctcagtgtgctgc

SEQ ID NO: 1723013 - DNA, 25 bp, Homo sapien
gaaatgctggaacctggctttgaac

SEQ ID NO: 1723014 - DNA, 25 bp, Homo sapien
tgctgcttgggcattatctggagtt

SEQ ID NO: 1723015 - DNA, 25 bp, Homo sapien
gctcggtgcttgacagttgaaggtt

SEQ ID NO: 1723016 - DNA, 25 bp, Homo sapien
gagtacagcatgctggtggctagct

SEQ ID NO: 1723017 - DNA, 25 bp, Homo sapien
gctggtggctagctcggtgcttgac

SEQ ID NO: 1723018 - DNA, 25 bp, Homo sapien
ctggggagtacagcatgctggtggc

SEQ ID NO: 1723019 - DNA, 25 bp, Homo sapien
gctgctccgaggactgagggtgttg

SEQ ID NO: 1723020 - DNA, 25 bp, Homo sapien
gctccgaggactgagggtgttgagc

SEQ ID NO: 1723021 - DNA, 25 bp, Homo sapien
ctgctccgaggactgagggtgttga

SEQ ID NO: 1723022 - DNA, 25 bp, Homo sapien
ggctgctccgaggactgagggtgtt

SEQ ID NO: 1723023 - DNA, 25 bp, Homo sapien
ctagttggtcaactggtatttgttg

SEQ ID NO: 1723024 - DNA, 25 bp, Homo sapien
tagttggtcaactggtatttgttga

SEQ ID NO: 1723025 - DNA, 25 bp, Homo sapien
gagctccttctaggatcacatggcc

SEQ ID NO: 1723026 - DNA, 25 bp, Homo sapien
tatcctcctgtgatccatccaggct

SEQ ID NO: 1723027 - DNA, 25 bp, Homo sapien
catgagccccgaggcttatcctcct

SEQ ID NO: 1723028 - DNA, 25 bp, Homo sapien
aggcttatcctcctgtgatccatcc

SEQ ID NO: 1723029 - DNA, 25 bp, Homo sapien
aggctctctgctgactccggaagac

SEQ ID NO: 1723030 - DNA, 25 bp, Homo sapien
gctcctcaaagctctggttaccaaa

SEQ ID NO: 1723031 - DNA, 25 bp, Homo sapien
tgagccggctgttgtttatgtgagc

SEQ ID NO: 1723032 - DNA, 25 bp, Homo sapien
ttgggccgctgccaggagatgttct

SEQ ID NO: 1723033 - DNA, 25 bp, Homo sapien
cctttcttagacaggctgctcgcag

SEQ ID NO: 1723034 - DNA, 25 bp, Homo sapien
tggcagatgtctgttggagaaatcc

SEQ ID NO: 1723035 - DNA, 25 bp, Homo sapien
ctggcagatgtctgttggagaaatc

SEQ ID NO: 1723036 - DNA, 25 bp, Homo sapien
ggcagatgtctgttggagaaatccc

SEQ ID NO: 1723037 - DNA, 25 bp, Homo sapien
gaagatgccagcatagtttttcttg

SEQ ID NO: 1723038 - DNA, 25 bp, Homo sapien
ggcaggtggtaagggagccgatggc

SEQ ID NO: 1723039 - DNA, 25 bp, Homo sapien
ggtggtaagggagccgatggcagcc

SEQ ID NO: 1723040 - DNA, 25 bp, Homo sapien
agatgccagcatagtttttcttgaa

SEQ ID NO: 1723041 - DNA, 25 bp, Homo sapien
cccttgcgtgggaaccctatcatca

SEQ ID NO: 1723042 - DNA, 25 bp, Homo sapien
ctgtgggtagcaaacacacacccct

SEQ ID NO: 1723043 - DNA, 25 bp, Homo sapien
tgggaaccctatcatcaagcgcctc

SEQ ID NO: 1723044 - DNA, 25 bp, Homo sapien
cacaccccttgcgtgggaaccctat

SEQ ID NO: 1723045 - DNA, 25 bp, Homo sapien
ggcactccagaactcactgcgttcg

SEQ ID NO: 1723046 - DNA, 25 bp, Homo sapien
tcggttgagtgcacaaacaccagct

SEQ ID NO: 1723047 - DNA, 25 bp, Homo sapien
agccggtcatctaccaccacgttca

SEQ ID NO: 1723048 - DNA, 25 bp, Homo sapien
cactgcgttcggttgagtgcacaaa

SEQ ID NO: 1723049 - DNA, 25 bp, Homo sapien
tgtgggcacagagaaggcactgttg

SEQ ID NO: 1723050 - DNA, 25 bp, Homo sapien
ctgtgggcacagagaaggcactgtt

SEQ ID NO: 1723051 - DNA, 25 bp, Homo sapien
ggcacagagaaggcactgttgggct

SEQ ID NO: 1723052 - DNA, 25 bp, Homo sapien
tgggcacagagaaggcactgttggg

SEQ ID NO: 1723053 - DNA, 25 bp, Homo sapien
ccctgacaatgcttcataggaccca

SEQ ID NO: 1723054 - DNA, 25 bp, Homo sapien
tggtactgccccctgacaatgcttc

SEQ ID NO: 1723055 - DNA, 25 bp, Homo sapien
caatgcttcataggacccactcagc

SEQ ID NO: 1723056 - DNA, 25 bp, Homo sapien
tcctcaaggccctccatggtactgc

SEQ ID NO: 1723057 - DNA, 25 bp, Homo sapien
ggccttcctaaggagcctgagcagg

SEQ ID NO: 1723058 - DNA, 25 bp, Homo sapien
ttcctaaggagcctgagcaggttct

SEQ ID NO: 1723059 - DNA, 25 bp, Homo sapien
gggcctctggagttggaagctctgg

SEQ ID NO: 1723060 - DNA, 25 bp, Homo sapien
ctgagcaggttctgagggggcctct

SEQ ID NO: 1723061 - DNA, 25 bp, Homo sapien
ttcaatggagcaacccatgagggag

SEQ ID NO: 1723062 - DNA, 25 bp, Homo sapien
tggagcaacccatgagggaggatcg

SEQ ID NO: 1723063 - DNA, 25 bp, Homo sapien
agcaacccatgagggaggatcgctc

SEQ ID NO: 1723064 - DNA, 25 bp, Homo sapien
aacccatgagggaggatcgctccac

SEQ ID NO: 1723065 - DNA, 25 bp, Homo sapien
agtcatggattccagttcactatca

SEQ ID NO: 1723066 - DNA, 25 bp, Homo sapien
tgtcagtcatggattccagttcact

SEQ ID NO: 1723067 - DNA, 25 bp, Homo sapien
cttgtcagtcatggattccagttca

SEQ ID NO: 1723068 - DNA, 25 bp, Homo sapien
cagtcatggattccagttcactatc

SEQ ID NO: 1723069 - DNA, 25 bp, Homo sapien
gtcacagagtaagcgtgccctctca

SEQ ID NO: 1723070 - DNA, 25 bp, Homo sapien
tcacagagtaagcgtgccctctcac

SEQ ID NO: 1723071 - DNA, 25 bp, Homo sapien
ccagggattccggacccgaatcagt

SEQ ID NO: 1723072 - DNA, 25 bp, Homo sapien
tcaatccggccccagggattccgga

SEQ ID NO: 1723073 - DNA, 25 bp, Homo sapien
ccggacccgaatcagtgtttccatt

SEQ ID NO: 1723074 - DNA, 25 bp, Homo sapien
cattccactcaatccggccccaggg

SEQ ID NO: 1723075 - DNA, 25 bp, Homo sapien
aactccccgtcctccgtcttgtgca

SEQ ID NO: 1723076 - DNA, 25 bp, Homo sapien
ccgtcctccgtcttgtgcagcagct

SEQ ID NO: 1723077 - DNA, 25 bp, Homo sapien
catctggatgtctgaggccacctct

SEQ ID NO: 1723078 - DNA, 25 bp, Homo sapien
tgcatctggatgtctgaggccacct

SEQ ID NO: 1723079 - DNA, 25 bp, Homo sapien
cctcgtagaaggtggtgtgccagta

SEQ ID NO: 1723080 - DNA, 25 bp, Homo sapien
gtgccagtagctcttgtagtcccca

SEQ ID NO: 1723081 - DNA, 25 bp, Homo sapien
atctccaggagcgtgaagttgttca

SEQ ID NO: 1723082 - DNA, 25 bp, Homo sapien
tccccagagagtgtatcaggcgtga

SEQ ID NO: 1723083 - DNA, 25 bp, Homo sapien
tccctgctgccgtgcatgccgccag

SEQ ID NO: 1723084 - DNA, 25 bp, Homo sapien
tgctgccgtgcatgccgccagttct

SEQ ID NO: 1723085 - DNA, 25 bp, Homo sapien
caggtgcagaccacaacattgccct

SEQ ID NO: 1723086 - DNA, 25 bp, Homo sapien
ctctgggtcatccccctcaggaaga

SEQ ID NO: 1723087 - DNA, 25 bp, Homo sapien
gcctctcgccaaattccaccctttg

SEQ ID NO: 1723088 - DNA, 25 bp, Homo sapien
tttgccaatccacttgcagccaggg

SEQ ID NO: 1723089 - DNA, 25 bp, Homo sapien
tatgtgtccaggaacaagccccaca

SEQ ID NO: 1723090 - DNA, 25 bp, Homo sapien
ccctgaagagggctggaatcctaac

SEQ ID NO: 1723091 - DNA, 25 bp, Homo sapien
gtggcccgcaactccaacagggtct

SEQ ID NO: 1723092 - DNA, 25 bp, Homo sapien
catcctggaagtgggtacaggactg

SEQ ID NO: 1723093 - DNA, 25 bp, Homo sapien
ggcctggacaccatctaagtggccc

SEQ ID NO: 1723094 - DNA, 25 bp, Homo sapien
gggtacaggactggcatgggaggtt

SEQ ID NO: 1723095 - DNA, 25 bp, Homo sapien
catgactcgctgtgcttctcggtga

SEQ ID NO: 1723096 - DNA, 25 bp, Homo sapien
aagccgtggtcctgatacttcgtga

SEQ ID NO: 1723097 - DNA, 25 bp, Homo sapien
tccttcttcaagtggacatcctgaa

SEQ ID NO: 1723098 - DNA, 25 bp, Homo sapien
tgaagacccgaagcaggaagtcagc

SEQ ID NO: 1723099 - DNA, 25 bp, Homo sapien
gctcagcatagttgacttcatccaa

SEQ ID NO: 1723100 - DNA, 25 bp, Homo sapien
gttgctcagcatagttgacttcatc

SEQ ID NO: 1723101 - DNA, 25 bp, Homo sapien
gagttgctcagcatagttgacttca

SEQ ID NO: 1723102 - DNA, 25 bp, Homo sapien
agcatagttgacttcatccaattcc

SEQ ID NO: 1723103 - DNA, 25 bp, Homo sapien
ctcctgccactatcttaaacaaatg

SEQ ID NO: 1723104 - DNA, 25 bp, Homo sapien
ctctcctgccactatcttaaacaaa

SEQ ID NO: 1723105 - DNA, 25 bp, Homo sapien
tctcctgccactatcttaaacaaat

SEQ ID NO: 1723106 - DNA, 25 bp, Homo sapien
gctcatacacccctatctccttgcc

SEQ ID NO: 1723107 - DNA, 25 bp, Homo sapien
atttgatggccatcctgttgagcag

SEQ ID NO: 1723108 - DNA, 25 bp, Homo sapien
agcctctggagctcatacaccccta

SEQ ID NO: 1723109 - DNA, 25 bp, Homo sapien
gatggccatcctgttgagcagcctc

SEQ ID NO: 1723110 - DNA, 25 bp, Homo sapien
gttgatcatgcagcggcaagcatcc

SEQ ID NO: 1723111 - DNA, 25 bp, Homo sapien
atccatgaggttgatcatgcagcgg

SEQ ID NO: 1723112 - DNA, 25 bp, Homo sapien
atcatgcagcggcaagcatccaggc

SEQ ID NO: 1723113 - DNA, 25 bp, Homo sapien
tgaggttgatcatgcagcggcaagc

SEQ ID NO: 1723114 - DNA, 25 bp, Homo sapien
gggttccggtactgtagcagccaga

SEQ ID NO: 1723115 - DNA, 25 bp, Homo sapien
caggggatagggaagcagcgggggt

SEQ ID NO: 1723116 - DNA, 25 bp, Homo sapien
gacagcagagaaggagtgaagaagg

SEQ ID NO: 1723117 - DNA, 25 bp, Homo sapien
agaaggagtgaagaaggcatcccag

SEQ ID NO: 1723118 - DNA, 25 bp, Homo sapien
aagaaggcatcccaggggataggga

SEQ ID NO: 1723119 - DNA, 25 bp, Homo sapien
tcttgaactctagaagccccagctt

SEQ ID NO: 1723120 - DNA, 25 bp, Homo sapien
gatcttgaactctagaagccccagc

SEQ ID NO: 1723121 - DNA, 25 bp, Homo sapien
atcttgaactctagaagccccagct

SEQ ID NO: 1723122 - DNA, 25 bp, Homo sapien
caggcgcatctcataggagttcaag

SEQ ID NO: 1723123 - DNA, 25 bp, Homo sapien
catctcataggagttcaaggtgcct

SEQ ID NO: 1723124 - DNA, 25 bp, Homo sapien
ttctcaataaccaggcgcatctcat

SEQ ID NO: 1723125 - DNA, 25 bp, Homo sapien
gtcctggtcacactctctgaagatg

SEQ ID NO: 1723126 - DNA, 25 bp, Homo sapien
tggccaccaggacctgcattacctt

SEQ ID NO: 1723127 - DNA, 25 bp, Homo sapien
gaagctgtcaaagtctatgatcagg

SEQ ID NO: 1723128 - DNA, 25 bp, Homo sapien
tatgatcaggtcatcatctgcatac

SEQ ID NO: 1723129 - DNA, 25 bp, Homo sapien
gaacatggtctttagcctcaggaaa

SEQ ID NO: 1723130 - DNA, 25 bp, Homo sapien
aggctcaagcaaatatggccagtat

SEQ ID NO: 1723131 - DNA, 25 bp, Homo sapien
agcaaatatggccagtattcttggg

SEQ ID NO: 1723132 - DNA, 25 bp, Homo sapien
caaatatggccagtattcttggggt

SEQ ID NO: 1723133 - DNA, 25 bp, Homo sapien
caggctcaagcaaatatggccagta

SEQ ID NO: 1723134 - DNA, 25 bp, Homo sapien
atccccacatggtcatctgcagcca

SEQ ID NO: 1723135 - DNA, 25 bp, Homo sapien
tatccccacatggtcatctgcagcc

SEQ ID NO: 1723136 - DNA, 25 bp, Homo sapien
ctatccccacatggtcatctgcagc

SEQ ID NO: 1723137 - DNA, 25 bp, Homo sapien
cagtaaacacggcacctgggacccg

SEQ ID NO: 1723138 - DNA, 25 bp, Homo sapien
tattagaatagtatccacagatggg

SEQ ID NO: 1723139 - DNA, 25 bp, Homo sapien
tagtaaaatatactctgagagagcg

SEQ ID NO: 1723140 - DNA, 25 bp, Homo sapien
gggaagcatcaactactctttagta

SEQ ID NO: 1723141 - DNA, 25 bp, Homo sapien
agcgcatgtgcttgggctccagtgt

SEQ ID NO: 1723142 - DNA, 25 bp, Homo sapien
ggctgagaagcgcatgtgcttgggc

SEQ ID NO: 1723143 - DNA, 25 bp, Homo sapien
gaagcgcatgtgcttgggctccagt

SEQ ID NO: 1723144 - DNA, 25 bp, Homo sapien
gagaagcgcatgtgcttgggctcca

SEQ ID NO: 1723145 - DNA, 25 bp, Homo sapien
caggttcccaacaggattctgaagc

SEQ ID NO: 1723146 - DNA, 25 bp, Homo sapien
cctggctgtgtcacttacagaaaca

SEQ ID NO: 1723147 - DNA, 25 bp, Homo sapien
ccacaatgctcaggcgagtcctgga

SEQ ID NO: 1723148 - DNA, 25 bp, Homo sapien
ctgaagccctgtgaaacctagcgtt

SEQ ID NO: 1723149 - DNA, 25 bp, Homo sapien
caacagatgtcgttaaacttctctg

SEQ ID NO: 1723150 - DNA, 25 bp, Homo sapien
cacctgatgagtattctagttggat

SEQ ID NO: 1723151 - DNA, 25 bp, Homo sapien
taccactaaaggcaagtccatacca

SEQ ID NO: 1723152 - DNA, 25 bp, Homo sapien
tccataccaattatgacaacagatg

SEQ ID NO: 1723153 - DNA, 25 bp, Homo sapien
ggctggctccaaggaatggatctag

SEQ ID NO: 1723154 - DNA, 25 bp, Homo sapien
cagcggtgagatccttggaccctgg

SEQ ID NO: 1723155 - DNA, 25 bp, Homo sapien
gaaactagctattgtctctgggaac

SEQ ID NO: 1723156 - DNA, 25 bp, Homo sapien
gaaccaccaaagtgcgtactccacg

SEQ ID NO: 1723157 - DNA, 25 bp, Homo sapien
gtcaaaaaggcctgtcccacttcta

SEQ ID NO: 1723158 - DNA, 25 bp, Homo sapien
tcaaaaaggcctgtcccacttctac

SEQ ID NO: 1723159 - DNA, 25 bp, Homo sapien
caggtcaaaaaggcctgtcccactt

SEQ ID NO: 1723160 - DNA, 25 bp, Homo sapien
agccgccactagcatcatcatctcc

SEQ ID NO: 1723161 - DNA, 25 bp, Homo sapien
gccgccactagcatcatcatctcca

SEQ ID NO: 1723162 - DNA, 25 bp, Homo sapien
gcagaactgctgctcagaatcagtc

SEQ ID NO: 1723163 - DNA, 25 bp, Homo sapien
actgctgctcagaatcagtctctgg

SEQ ID NO: 1723164 - DNA, 25 bp, Homo sapien
gaactgctgctcagaatcagtctct

SEQ ID NO: 1723165 - DNA, 25 bp, Homo sapien
gggcagaactgctgctcagaatcag

SEQ ID NO: 1723166 - DNA, 25 bp, Homo sapien
caggcggcgggccaatcggcgcagc

SEQ ID NO: 1723167 - DNA, 25 bp, Homo sapien
ggcaggacagcagcaatcgaagcag

SEQ ID NO: 1723168 - DNA, 25 bp, Homo sapien
cggcgggccaatcggcgcagcaggg

SEQ ID NO: 1723169 - DNA, 25 bp, Homo sapien
gcagcaatcgaagcagcagcgggag

SEQ ID NO: 1723170 - DNA, 25 bp, Homo sapien
gagtgtcgctggctgagaatgaaca

SEQ ID NO: 1723171 - DNA, 25 bp, Homo sapien
tccccagcgtctggcgagtgtcgct

SEQ ID NO: 1723172 - DNA, 25 bp, Homo sapien
gtcgctggctgagaatgaacagcag

SEQ ID NO: 1723173 - DNA, 25 bp, Homo sapien
tccaggcggtccactcttgaggcct

SEQ ID NO: 1723174 - DNA, 25 bp, Homo sapien
caggcttcggtcagtgctggtgcca

SEQ ID NO: 1723175 - DNA, 25 bp, Homo sapien
tcagttttgtgctagatgcaaggca

SEQ ID NO: 1723176 - DNA, 25 bp, Homo sapien
gcattttgtggatacagctgctgcc

SEQ ID NO: 1723177 - DNA, 25 bp, Homo sapien
acttgtccctcagttaagcactggg

SEQ ID NO: 1723178 - DNA, 25 bp, Homo sapien
ccgggcggaagagaggctgcaacag

SEQ ID NO: 1723179 - DNA, 25 bp, Homo sapien
gcctgaccggtgtgggccgccgggc

SEQ ID NO: 1723180 - DNA, 25 bp, Homo sapien
ccgcgccgggcctgaccggtgtggg

SEQ ID NO: 1723181 - DNA, 25 bp, Homo sapien
tgcgggcccctagttctctccctcc

SEQ ID NO: 1723182 - DNA, 25 bp, Homo sapien
tgtctacaaatcaagactccatgat

SEQ ID NO: 1723183 - DNA, 25 bp, Homo sapien
tttaatgcaatgtctacaaatcaag

SEQ ID NO: 1723184 - DNA, 25 bp, Homo sapien
agactccatgatgccaagtgcagtg

SEQ ID NO: 1723185 - DNA, 25 bp, Homo sapien
aataagttttaatgcaatgtctaca

SEQ ID NO: 1723186 - DNA, 25 bp, Homo sapien
aggccttgcctggagtttttctagc

SEQ ID NO: 1723187 - DNA, 25 bp, Homo sapien
ttccctctcccgccggggcacattc

SEQ ID NO: 1723188 - DNA, 25 bp, Homo sapien
atccgcgcgctctcgctgcagcttc

SEQ ID NO: 1723189 - DNA, 25 bp, Homo sapien
agaagcactgctcccgcgctgagat

SEQ ID NO: 1723190 - DNA, 25 bp, Homo sapien
ccgcgctgagatccgcgcgctctcg

SEQ ID NO: 1723191 - DNA, 25 bp, Homo sapien
cttctccgggctgcggagccgtcag

SEQ ID NO: 1723192 - DNA, 25 bp, Homo sapien
cagatcgatggggatcacccgtcca

SEQ ID NO: 1723193 - DNA, 25 bp, Homo sapien
ctgccccttgcggaggtcaacgtga

SEQ ID NO: 1723194 - DNA, 25 bp, Homo sapien
cagcctgttttaggcccgggagcca

SEQ ID NO: 1723195 - DNA, 25 bp, Homo sapien
ctccgctcgcgagcctccatcccca

SEQ ID NO: 1723196 - DNA, 25 bp, Homo sapien
gccagcgcagtcagcggcacggccc

SEQ ID NO: 1723197 - DNA, 25 bp, Homo sapien
atccccatacccctccgccagcgca

SEQ ID NO: 1723198 - DNA, 25 bp, Homo sapien
ccgctcgcgagcctccatccccatc

SEQ ID NO: 1723199 - DNA, 25 bp, Homo sapien
gacgccagggatacgagtttagcca

SEQ ID NO: 1723200 - DNA, 25 bp, Homo sapien
taaatcagtaaatgaagacgtgcgc

SEQ ID NO: 1723201 - DNA, 25 bp, Homo sapien
aggcaaagggactaccacagggctg

SEQ ID NO: 1723202 - DNA, 25 bp, Homo sapien
taagcaaagccgaggactgtttgtc

SEQ ID NO: 1723203 - DNA, 25 bp, Homo sapien
attcctggcagttaagagcaggtgt

SEQ ID NO: 1723204 - DNA, 25 bp, Homo sapien
ctggcagttaagagcaggtgtagct

SEQ ID NO: 1723205 - DNA, 25 bp, Homo sapien
tcctggcagttaagagcaggtgtag

SEQ ID NO: 1723206 - DNA, 25 bp, Homo sapien
ttcatacccgcataccccgtactcc

SEQ ID NO: 1723207 - DNA, 25 bp, Homo sapien
gagataaaaagccacccctgtcgct

SEQ ID NO: 1723208 - DNA, 25 bp, Homo sapien
ggagataaaaagccacccctgtcgc

SEQ ID NO: 1723209 - DNA, 25 bp, Homo sapien
cacagggtgttatcaggagagagtc

SEQ ID NO: 1723210 - DNA, 25 bp, Homo sapien
ctgggtgcggatccagaatgaaaaa

SEQ ID NO: 1723211 - DNA, 25 bp, Homo sapien
gagtccctcaggcttcatggggccc

SEQ ID NO: 1723212 - DNA, 25 bp, Homo sapien
cagagcaagcctgggcagtccctag

SEQ ID NO: 1723213 - DNA, 25 bp, Homo sapien
gtccctaggaggtgctcctagttca

SEQ ID NO: 1723214 - DNA, 25 bp, Homo sapien
gctcctagttcaggctcaggcagtg

SEQ ID NO: 1723215 - DNA, 25 bp, Homo sapien
aggtgctcctagttcaggctcaggc

SEQ ID NO: 1723216 - DNA, 25 bp, Homo sapien
tcagggacagtgatgacaagggaag

SEQ ID NO: 1723217 - DNA, 25 bp, Homo sapien
cgctgccaccgctatttttatccag

SEQ ID NO: 1723218 - DNA, 25 bp, Homo sapien
tccagcagccgaagcagtttataag

SEQ ID NO: 1723219 - DNA, 25 bp, Homo sapien
agaaggcaggcaagaggacgagagg

SEQ ID NO: 1723220 - DNA, 25 bp, Homo sapien
cagtggaggagtccagtaagacccc

SEQ ID NO: 1723221 - DNA, 25 bp, Homo sapien
gccagtggaggagtccagtaagacc

SEQ ID NO: 1723222 - DNA, 25 bp, Homo sapien
aacaggccagtggaggagtccagta

SEQ ID NO: 1723223 - DNA, 25 bp, Homo sapien
ctcctcaggctcttagggggagagg

SEQ ID NO: 1723224 - DNA, 25 bp, Homo sapien
tctcggttttccctggctgacagct

SEQ ID NO: 1723225 - DNA, 25 bp, Homo sapien
tgatggtgttctcggttttccctgg

SEQ ID NO: 1723226 - DNA, 25 bp, Homo sapien
gtgatggtgttctcggttttccctg

SEQ ID NO: 1723227 - DNA, 25 bp, Homo sapien
ggtgttctcggttttccctggctga

SEQ ID NO: 1723228 - DNA, 25 bp, Homo sapien
tcctgaggctggtgactggttgtca

SEQ ID NO: 1723229 - DNA, 25 bp, Homo sapien
cctgaggctggtgactggttgtcat

SEQ ID NO: 1723230 - DNA, 25 bp, Homo sapien
tgacccacacatccggagatggttt

SEQ ID NO: 1723231 - DNA, 25 bp, Homo sapien
caggaaagcccctgtccgttgtcag

SEQ ID NO: 1723232 - DNA, 25 bp, Homo sapien
gaaaagggtacattgctcgttggaa

SEQ ID NO: 1723233 - DNA, 25 bp, Homo sapien
cataggactgaatggcatggctgac

SEQ ID NO: 1723234 - DNA, 25 bp, Homo sapien
catgaaaaaattccacgggagcagc

SEQ ID NO: 1723235 - DNA, 25 bp, Homo sapien
aattccacgggagcagcgttcccag

SEQ ID NO: 1723236 - DNA, 25 bp, Homo sapien
gcagcgttcccagacccagcatgaa

SEQ ID NO: 1723237 - DNA, 25 bp, Homo sapien
tgagtggccgtcatgaaaaaattcc

SEQ ID NO: 1723238 - DNA, 25 bp, Homo sapien
ggacatgtccaggcggtttgtgaaa

SEQ ID NO: 1723239 - DNA, 25 bp, Homo sapien
gacatgtccaggcggtttgtgaaat

SEQ ID NO: 1723240 - DNA, 25 bp, Homo sapien
acatgtccaggcggtttgtgaaata

SEQ ID NO: 1723241 - DNA, 25 bp, Homo sapien
gggacatgtccaggcggtttgtgaa

SEQ ID NO: 1723242 - DNA, 25 bp, Homo sapien
cacatagggtcatgacattgttgaa

SEQ ID NO: 1723243 - DNA, 25 bp, Homo sapien
tcagttcagcagtgaccaaggacac

SEQ ID NO: 1723244 - DNA, 25 bp, Homo sapien
gaagatggcactgagagagttccgc

SEQ ID NO: 1723245 - DNA, 25 bp, Homo sapien
agagttccgctcaggcaagggtgct

SEQ ID NO: 1723246 - DNA, 25 bp, Homo sapien
gctgcccaggatccgtacggactgg

SEQ ID NO: 1723247 - DNA, 25 bp, Homo sapien
cgatcttgatcatggtgatgacaaa

SEQ ID NO: 1723248 - DNA, 25 bp, Homo sapien
gatcttgatcatggtgatgacaaag

SEQ ID NO: 1723249 - DNA, 25 bp, Homo sapien
ccaggctgcccaggatccgtacgga

SEQ ID NO: 1723250 - DNA, 25 bp, Homo sapien
ggctaacgctgggtctgaaaaaaga

SEQ ID NO: 1723251 - DNA, 25 bp, Homo sapien
cttctctctggctaacgctgggtct

SEQ ID NO: 1723252 - DNA, 25 bp, Homo sapien
ctctggctaacgctgggtctgaaaa

SEQ ID NO: 1723253 - DNA, 25 bp, Homo sapien
taacgctgggtctgaaaaaagagtg

SEQ ID NO: 1723254 - DNA, 25 bp, Homo sapien
gtggttgggggtgcccaagaagaca

SEQ ID NO: 1723255 - DNA, 25 bp, Homo sapien
caagaagacagatccctgtcattcc

SEQ ID NO: 1723256 - DNA, 25 bp, Homo sapien
cagggcgggcatgagcaggggagct

SEQ ID NO: 1723257 - DNA, 25 bp, Homo sapien
gggaaacagggcgggcatgagcagg

SEQ ID NO: 1723258 - DNA, 25 bp, Homo sapien
tggcaatagcgcagatcatggccac

SEQ ID NO: 1723259 - DNA, 25 bp, Homo sapien
gcagatcatggccacggaggcaaag

SEQ ID NO: 1723260 - DNA, 25 bp, Homo sapien
catggccacggaggcaaagaagcct

SEQ ID NO: 1723261 - DNA, 25 bp, Homo sapien
aggcaaagaagcctgctaggccctg

SEQ ID NO: 1723262 - DNA, 25 bp, Homo sapien
ctgtgataaagtagccgaaggcact

SEQ ID NO: 1723263 - DNA, 25 bp, Homo sapien
ggtcaaaatgataacagcacaggct

SEQ ID NO: 1723264 - DNA, 25 bp, Homo sapien
gcactttctgatagctccgagccac

SEQ ID NO: 1723265 - DNA, 25 bp, Homo sapien
tcaaaatgataacagcacaggctgt

SEQ ID NO: 1723266 - DNA, 25 bp, Homo sapien
gctgctggtagtagcggtagaattc

SEQ ID NO: 1723267 - DNA, 25 bp, Homo sapien
tgctccccgggtccttcaagcttga

SEQ ID NO: 1723268 - DNA, 25 bp, Homo sapien
gaggtccaacttggtctcctgctcc

SEQ ID NO: 1723269 - DNA, 25 bp, Homo sapien
ctttgctaatgaggtccaacttggt

SEQ ID NO: 1723270 - DNA, 25 bp, Homo sapien
ctgagagttggagactgaaactcca

SEQ ID NO: 1723271 - DNA, 25 bp, Homo sapien
gagttggagactgaaactccagatt

SEQ ID NO: 1723272 - DNA, 25 bp, Homo sapien
ttgatagagtggctttcattggtgg

SEQ ID NO: 1723273 - DNA, 25 bp, Homo sapien
ttcaggatggctttgatagagtggc

SEQ ID NO: 1723274 - DNA, 25 bp, Homo sapien
gacttgacctcaacagtcacggctg

SEQ ID NO: 1723275 - DNA, 25 bp, Homo sapien
gcctgcgatgctggacttgacctca

SEQ ID NO: 1723276 - DNA, 25 bp, Homo sapien
ggctggaaacatcccaatggtgata

SEQ ID NO: 1723277 - DNA, 25 bp, Homo sapien
caatggtgatagtgaagatgaagca

SEQ ID NO: 1723278 - DNA, 25 bp, Homo sapien
tgtgaggctccggcccaaccagtca

SEQ ID NO: 1723279 - DNA, 25 bp, Homo sapien
tgaggctccggcccaaccagtcaaa

SEQ ID NO: 1723280 - DNA, 25 bp, Homo sapien
aggctccggcccaaccagtcaaaga

SEQ ID NO: 1723281 - DNA, 25 bp, Homo sapien
gaggctccggcccaaccagtcaaag

SEQ ID NO: 1723282 - DNA, 25 bp, Homo sapien
caaatggtccccttactaccatact

SEQ ID NO: 1723283 - DNA, 25 bp, Homo sapien
tcttgggttccctctctgggtccag

SEQ ID NO: 1723284 - DNA, 25 bp, Homo sapien
tatgcctcgactttaaaacaaatgg

SEQ ID NO: 1723285 - DNA, 25 bp, Homo sapien
gggcccctcaggatctgaactgaaa

SEQ ID NO: 1723286 - DNA, 25 bp, Homo sapien
tagcggcggggcttaatgttgcaca

SEQ ID NO: 1723287 - DNA, 25 bp, Homo sapien
cgaggtagccgttggagaaggcaaa

SEQ ID NO: 1723288 - DNA, 25 bp, Homo sapien
catcgtgctcgaagaccacagtcag

SEQ ID NO: 1723289 - DNA, 25 bp, Homo sapien
gatgaaccaggcatcgtgctcgaag

SEQ ID NO: 1723290 - DNA, 25 bp, Homo sapien
gccatgatggctcctgcggtctctg

SEQ ID NO: 1723291 - DNA, 25 bp, Homo sapien
acacaggaagaaggccatgatggct

SEQ ID NO: 1723292 - DNA, 25 bp, Homo sapien
gctcctgcggtctctgcctcagctg

SEQ ID NO: 1723293 - DNA, 25 bp, Homo sapien
tgcccggaacaggaaggagaaaaca

SEQ ID NO: 1723294 - DNA, 25 bp, Homo sapien
agcacacgccgtggaaagcagaagt

SEQ ID NO: 1723295 - DNA, 25 bp, Homo sapien
tcaggatcacccctggcagaaggaa

SEQ ID NO: 1723296 - DNA, 25 bp, Homo sapien
taacgtggcaactgtacagggtgca

SEQ ID NO: 1723297 - DNA, 25 bp, Homo sapien
tcaggtcaaaccatacaacggtcag

SEQ ID NO: 1723298 - DNA, 25 bp, Homo sapien
gttttgcagagttcattgctggggc

SEQ ID NO: 1723299 - DNA, 25 bp, Homo sapien
gctaacagtcttggtgttctggttc

SEQ ID NO: 1723300 - DNA, 25 bp, Homo sapien
ctgggtcatgctcatctcccagact

SEQ ID NO: 1723301 - DNA, 25 bp, Homo sapien
acccgttcttagtcttggctaacag

SEQ ID NO: 1723302 - DNA, 25 bp, Homo sapien
tagggcttcagagctcatcaaagag

SEQ ID NO: 1723303 - DNA, 25 bp, Homo sapien
tatacttagctaccccattagggct

SEQ ID NO: 1723304 - DNA, 25 bp, Homo sapien
aataccttgttttccagcaccgcag

SEQ ID NO: 1723305 - DNA, 25 bp, Homo sapien
gaaaggaagcgctgacaaaggtgcc

SEQ ID NO: 1723306 - DNA, 25 bp, Homo sapien
gatcagaaaacgctcaggacacagg

SEQ ID NO: 1723307 - DNA, 25 bp, Homo sapien
tgtagagatgaattccgccttggga

SEQ ID NO: 1723308 - DNA, 25 bp, Homo sapien
catgctccagagaacaagcagcgcc

SEQ ID NO: 1723309 - DNA, 25 bp, Homo sapien
atcccagggtcacaagcaaggcgtg

SEQ ID NO: 1723310 - DNA, 25 bp, Homo sapien
ggagctgcttttcctaacctcctca

SEQ ID NO: 1723311 - DNA, 25 bp, Homo sapien
gctgcttttcctaacctcctcaccc

SEQ ID NO: 1723312 - DNA, 25 bp, Homo sapien
gctgggtgggcaggagaccttagga

SEQ ID NO: 1723313 - DNA, 25 bp, Homo sapien
gggcaggagaccttaggagctgctt

SEQ ID NO: 1723314 - DNA, 25 bp, Homo sapien
tgcgagcgcccacttggggtcggga

SEQ ID NO: 1723315 - DNA, 25 bp, Homo sapien
gtgctagcaggaaagtggaggatcc

SEQ ID NO: 1723316 - DNA, 25 bp, Homo sapien
caaggtgctagcaggaaagtggagg

SEQ ID NO: 1723317 - DNA, 25 bp, Homo sapien
gcagcaaggtgctagcaggaaagtg

SEQ ID NO: 1723318 - DNA, 25 bp, Homo sapien
cctgtgttgcaatggcagccactcc

SEQ ID NO: 1723319 - DNA, 25 bp, Homo sapien
aaggtgatgaccagcagcaagtgag

SEQ ID NO: 1723320 - DNA, 25 bp, Homo sapien
gatacctggaggattttcatgctca

SEQ ID NO: 1723321 - DNA, 25 bp, Homo sapien
tccaggatggctaatttactacggc

SEQ ID NO: 1723322 - DNA, 25 bp, Homo sapien
cacaggaagccaggtcataccgaga

SEQ ID NO: 1723323 - DNA, 25 bp, Homo sapien
cggacataaggccattgatgaggtt

SEQ ID NO: 1723324 - DNA, 25 bp, Homo sapien
gaagccaggtcataccgagatgggc

SEQ ID NO: 1723325 - DNA, 25 bp, Homo sapien
ggtccagcccggacataaggccatt

SEQ ID NO: 1723326 - DNA, 25 bp, Homo sapien
agtgggcacgtcctctccccgagag

SEQ ID NO: 1723327 - DNA, 25 bp, Homo sapien
cgagtgggcacgtcctctccccgag

SEQ ID NO: 1723328 - DNA, 25 bp, Homo sapien
tccgagtgggcacgtcctctccccg

SEQ ID NO: 1723329 - DNA, 25 bp, Homo sapien
ggctccgagtgggcacgtcctctcc

SEQ ID NO: 1723330 - DNA, 25 bp, Homo sapien
gcagtctgttgccagaatgccaact

SEQ ID NO: 1723331 - DNA, 25 bp, Homo sapien
tgcagtctgttgccagaatgccaac

SEQ ID NO: 1723332 - DNA, 25 bp, Homo sapien
atgatggaacggtaggactgtgata

SEQ ID NO: 1723333 - DNA, 25 bp, Homo sapien
tggcctcacttccaccccacgcaga

SEQ ID NO: 1723334 - DNA, 25 bp, Homo sapien
aagtcattccttttcagcatgcagg

SEQ ID NO: 1723335 - DNA, 25 bp, Homo sapien
tgcaggtttcaatgggctggatttc

SEQ ID NO: 1723336 - DNA, 25 bp, Homo sapien
tatgactaagttctacctcgcgacc

SEQ ID NO: 1723337 - DNA, 25 bp, Homo sapien
gaaattgtggtctgagacactcctg

SEQ ID NO: 1723338 - DNA, 25 bp, Homo sapien
gaccactctaggttggaggtcagct

SEQ ID NO: 1723339 - DNA, 25 bp, Homo sapien
tgcacaggacatagcttggagaaga

SEQ ID NO: 1723340 - DNA, 25 bp, Homo sapien
tgagacttcgtttgaaactttagaa

SEQ ID NO: 1723341 - DNA, 25 bp, Homo sapien
cctgtatttgagacttcgtttgaaa

SEQ ID NO: 1723342 - DNA, 25 bp, Homo sapien
tagaaggtggttaatatctctaaag

SEQ ID NO: 1723343 - DNA, 25 bp, Homo sapien
ctaaaggctccatatgtgcttgagg

SEQ ID NO: 1723344 - DNA, 25 bp, Homo sapien
gggctgaagtacagtaatacatagc

SEQ ID NO: 1723345 - DNA, 25 bp, Homo sapien
acccgcacccagctgaacatattta

SEQ ID NO: 1723346 - DNA, 25 bp, Homo sapien
tgtctgattcctaatcagaaaatga

SEQ ID NO: 1723347 - DNA, 25 bp, Homo sapien
ctgggcatccctgtctgattcctaa

SEQ ID NO: 1723348 - DNA, 25 bp, Homo sapien
ggtgttttataggtacaaccatatc

SEQ ID NO: 1723349 - DNA, 25 bp, Homo sapien
cttgttttaatgcaccagctaggac

SEQ ID NO: 1723350 - DNA, 25 bp, Homo sapien
gcaagttggtaagctagcttattaa

SEQ ID NO: 1723351 - DNA, 25 bp, Homo sapien
tgattgagcaagttggtaagctagc

SEQ ID NO: 1723352 - DNA, 25 bp, Homo sapien
gggatgcagagatgcatacacagga

SEQ ID NO: 1723353 - DNA, 25 bp, Homo sapien
tgcagagatgcatacacaggactgg

SEQ ID NO: 1723354 - DNA, 25 bp, Homo sapien
ctgggagcccttaacccactggagg

SEQ ID NO: 1723355 - DNA, 25 bp, Homo sapien
aggactgggagcccttaacccactg

SEQ ID NO: 1723356 - DNA, 25 bp, Homo sapien
ctcattgacactcactaagcctcca

SEQ ID NO: 1723357 - DNA, 25 bp, Homo sapien
tccactcattgacactcactaagcc

SEQ ID NO: 1723358 - DNA, 25 bp, Homo sapien
cactcattgacactcactaagcctc

SEQ ID NO: 1723359 - DNA, 25 bp, Homo sapien
ctccatcgttttccactcattgaca

SEQ ID NO: 1723360 - DNA, 25 bp, Homo sapien
ggagggatcggctgacccctccttc

SEQ ID NO: 1723361 - DNA, 25 bp, Homo sapien
ccgcgtcaatcacacaacacccagg

SEQ ID NO: 1723362 - DNA, 25 bp, Homo sapien
ggtaccagcccaatcctcagggatg

SEQ ID NO: 1723363 - DNA, 25 bp, Homo sapien
ctgtccgagagacgcgggtaccagc

SEQ ID NO: 1723364 - DNA, 25 bp, Homo sapien
ggcagggtttttgcagcgaccccac

SEQ ID NO: 1723365 - DNA, 25 bp, Homo sapien
gggcagggtttttgcagcgacccca

SEQ ID NO: 1723366 - DNA, 25 bp, Homo sapien
gcagggtttttgcagcgaccccacc

SEQ ID NO: 1723367 - DNA, 25 bp, Homo sapien
tccaggcctgtctcggcggtcccgc

SEQ ID NO: 1723368 - DNA, 25 bp, Homo sapien
cagtttccaggcctgtctcggcggt

SEQ ID NO: 1723369 - DNA, 25 bp, Homo sapien
cagcagtttccaggcctgtctcggc

SEQ ID NO: 1723370 - DNA, 25 bp, Homo sapien
gtttccaggcctgtctcggcggtcc

SEQ ID NO: 1723371 - DNA, 25 bp, Homo sapien
aggaagggcggagggttcgcgctga

SEQ ID NO: 1723372 - DNA, 25 bp, Homo sapien
ccagatcccgactctcgcaggagta

SEQ ID NO: 1723373 - DNA, 25 bp, Homo sapien
ccgactctcgcaggagtagaggaag

SEQ ID NO: 1723374 - DNA, 25 bp, Homo sapien
ggactctttgccgacatgcggcgga

SEQ ID NO: 1723375 - DNA, 25 bp, Homo sapien
taaacggtgtctctacgggcgagga

SEQ ID NO: 1723376 - DNA, 25 bp, Homo sapien
tataaggcgaagcacagtacagccg

SEQ ID NO: 1723377 - DNA, 25 bp, Homo sapien
ggagtatgattgtcaaccccgcacc

SEQ ID NO: 1723378 - DNA, 25 bp, Homo sapien
taggacatgactccatcaagagcgg

SEQ ID NO: 1723379 - DNA, 25 bp, Homo sapien
tccagaacaatctcagctctcgagg

SEQ ID NO: 1723380 - DNA, 25 bp, Homo sapien
caagaaggctttaacaacgcgtccg

SEQ ID NO: 1723381 - DNA, 25 bp, Homo sapien
aacgcgtccgataagagaggtgaca

SEQ ID NO: 1723382 - DNA, 25 bp, Homo sapien
tccaccgggactgcaagaaagatct

SEQ ID NO: 1723383 - DNA, 25 bp, Homo sapien
gatcaactcccgaaggaaaatctcc

SEQ ID NO: 1723384 - DNA, 25 bp, Homo sapien
tctccatggtgcacttcctcaggca

SEQ ID NO: 1723385 - DNA, 25 bp, Homo sapien
atgagggacatgagttgggcaattt

SEQ ID NO: 1723386 - DNA, 25 bp, Homo sapien
attagagatcaactcccgaaggaaa

SEQ ID NO: 1723387 - DNA, 25 bp, Homo sapien
caaatgtggaaaccagagcacctac

SEQ ID NO: 1723388 - DNA, 25 bp, Homo sapien
tgccaaatgtggaaaccagagcacc

SEQ ID NO: 1723389 - DNA, 25 bp, Homo sapien
catgccaaatgtggaaaccagagca

SEQ ID NO: 1723390 - DNA, 25 bp, Homo sapien
gccaaatgtggaaaccagagcacct

SEQ ID NO: 1723391 - DNA, 25 bp, Homo sapien
tatgagagcctgacagacccttcga

SEQ ID NO: 1723392 - DNA, 25 bp, Homo sapien
gacagacccttcgaagttggacagt

SEQ ID NO: 1723393 - DNA, 25 bp, Homo sapien
cgaagttggacagtggtaaagagct

SEQ ID NO: 1723394 - DNA, 25 bp, Homo sapien
tcgaagttggacagtggtaaagagc

SEQ ID NO: 1723395 - DNA, 25 bp, Homo sapien
gagagcctgacagacccttcgaagt

SEQ ID NO: 1723396 - DNA, 25 bp, Homo sapien
gagcctgacagacccttcgaagttg

SEQ ID NO: 1723397 - DNA, 25 bp, Homo sapien
acttcgaagggtctgtcaggctctc

SEQ ID NO: 1723398 - DNA, 25 bp, Homo sapien
cgaagggtctgtcaggctctcatag

SEQ ID NO: 1723399 - DNA, 25 bp, Homo sapien
cactgtccaacttcgaagggtctgt

SEQ ID NO: 1723400 - DNA, 25 bp, Homo sapien
gctctttaccactgtccaacttcga

SEQ ID NO: 1723401 - DNA, 25 bp, Homo sapien
tccaacttcgaagggtctgtcaggc

SEQ ID NO: 1723402 - DNA, 25 bp, Homo sapien
caacttcgaagggtctgtcaggctc

SEQ ID NO: 1723403 - DNA, 25 bp, Homo sapien
caaccctcaggaacgtaccctgact

SEQ ID NO: 1723404 - DNA, 25 bp, Homo sapien
caggaacgtaccctgactttggtag

SEQ ID NO: 1723405 - DNA, 25 bp, Homo sapien
cgtaccctgactttggtagacacag

SEQ ID NO: 1723406 - DNA, 25 bp, Homo sapien
tcatccccaaccctcaggaacgtac

SEQ ID NO: 1723407 - DNA, 25 bp, Homo sapien
gaacgtaccctgactttggtagaca

SEQ ID NO: 1723408 - DNA, 25 bp, Homo sapien
gactttggtagacacaggcattggc

SEQ ID NO: 1723409 - DNA, 25 bp, Homo sapien
gccaatgcctgtgtctaccaaagtc

SEQ ID NO: 1723410 - DNA, 25 bp, Homo sapien
ctaccaaagtcagggtacgttcctg

SEQ ID NO: 1723411 - DNA, 25 bp, Homo sapien
tgtctaccaaagtcagggtacgttc

SEQ ID NO: 1723412 - DNA, 25 bp, Homo sapien
agtcagggtacgttcctgagggttg

SEQ ID NO: 1723413 - DNA, 25 bp, Homo sapien
ctgtgtctaccaaagtcagggtacg

SEQ ID NO: 1723414 - DNA, 25 bp, Homo sapien
caaagtcagggtacgttcctgaggg

SEQ ID NO: 1723415 - DNA, 25 bp, Homo sapien
aagctgatctcataaataatttggg

SEQ ID NO: 1723416 - DNA, 25 bp, Homo sapien
cataaataatttgggaaccattgcc

SEQ ID NO: 1723417 - DNA, 25 bp, Homo sapien
tcataaataatttgggaaccattgc

SEQ ID NO: 1723418 - DNA, 25 bp, Homo sapien
gaccaaagctgatctcataaataat

SEQ ID NO: 1723419 - DNA, 25 bp, Homo sapien
tgaccaaagctgatctcataaataa

SEQ ID NO: 1723420 - DNA, 25 bp, Homo sapien
taaataatttgggaaccattgccaa

SEQ ID NO: 1723421 - DNA, 25 bp, Homo sapien
ttggcaatggttcccaaattattta

SEQ ID NO: 1723422 - DNA, 25 bp, Homo sapien
cccaaattatttatgagatcagctt

SEQ ID NO: 1723423 - DNA, 25 bp, Homo sapien
caatggttcccaaattatttatgag

SEQ ID NO: 1723424 - DNA, 25 bp, Homo sapien
ggcaatggttcccaaattatttatg

SEQ ID NO: 1723425 - DNA, 25 bp, Homo sapien
attatttatgagatcagctttggtc

SEQ ID NO: 1723426 - DNA, 25 bp, Homo sapien
tatttatgagatcagctttggtcat

SEQ ID NO: 1723427 - DNA, 25 bp, Homo sapien
gtctggtactaaagcattcatggag

SEQ ID NO: 1723428 - DNA, 25 bp, Homo sapien
tctggtactaaagcattcatggagg

SEQ ID NO: 1723429 - DNA, 25 bp, Homo sapien
taaagcattcatggaggctcttcag

SEQ ID NO: 1723430 - DNA, 25 bp, Homo sapien
gtactaaagcattcatggaggctct

SEQ ID NO: 1723431 - DNA, 25 bp, Homo sapien
ctggtactaaagcattcatggaggc

SEQ ID NO: 1723432 - DNA, 25 bp, Homo sapien
ggtactaaagcattcatggaggctc

SEQ ID NO: 1723433 - DNA, 25 bp, Homo sapien
agagcctccatgaatgctttagtac

SEQ ID NO: 1723434 - DNA, 25 bp, Homo sapien
cctccatgaatgctttagtaccaga

SEQ ID NO: 1723435 - DNA, 25 bp, Homo sapien
ctccatgaatgctttagtaccagac

SEQ ID NO: 1723436 - DNA, 25 bp, Homo sapien
tgaagagcctccatgaatgctttag

SEQ ID NO: 1723437 - DNA, 25 bp, Homo sapien
gcctccatgaatgctttagtaccag

SEQ ID NO: 1723438 - DNA, 25 bp, Homo sapien
gagcctccatgaatgctttagtacc

SEQ ID NO: 1723439 - DNA, 25 bp, Homo sapien
ggcttttattctgcctacttggtgg

SEQ ID NO: 1723440 - DNA, 25 bp, Homo sapien
aacagtatgcttgggagtcttctgc

SEQ ID NO: 1723441 - DNA, 25 bp, Homo sapien
gaggttccttcactgtgcgtgctga

SEQ ID NO: 1723442 - DNA, 25 bp, Homo sapien
cacaacgatgatgaacagtatgctt

SEQ ID NO: 1723443 - DNA, 25 bp, Homo sapien
tgcctacttggtggcagagaaagtg

SEQ ID NO: 1723444 - DNA, 25 bp, Homo sapien
ggagtcttctgctggaggttccttc

SEQ ID NO: 1723445 - DNA, 25 bp, Homo sapien
ccaccaagtaggcagaataaaagcc

SEQ ID NO: 1723446 - DNA, 25 bp, Homo sapien
gaataaaagccaacaccaaactgcc

SEQ ID NO: 1723447 - DNA, 25 bp, Homo sapien
gcagaagactcccaagcatactgtt

SEQ ID NO: 1723448 - DNA, 25 bp, Homo sapien
gaaggaacctccagcagaagactcc

SEQ ID NO: 1723449 - DNA, 25 bp, Homo sapien
aagcatactgttcatcatcgttgtg

SEQ ID NO: 1723450 - DNA, 25 bp, Homo sapien
tcagcacgcacagtgaaggaacctc

SEQ ID NO: 1723451 - DNA, 25 bp, Homo sapien
agcagaaattttgggcatcctgtct

SEQ ID NO: 1723452 - DNA, 25 bp, Homo sapien
tgggctcacaccagtagcagaaatt

SEQ ID NO: 1723453 - DNA, 25 bp, Homo sapien
atcctgtctgtaaagcagttcttca

SEQ ID NO: 1723454 - DNA, 25 bp, Homo sapien
catatactttttaccctgttacacg

SEQ ID NO: 1723455 - DNA, 25 bp, Homo sapien
tactaattgctggtctcaactgcat

SEQ ID NO: 1723456 - DNA, 25 bp, Homo sapien
cagcagttctgctgatacttactaa

SEQ ID NO: 1723457 - DNA, 25 bp, Homo sapien
agacaggatgcccaaaatttctgct

SEQ ID NO: 1723458 - DNA, 25 bp, Homo sapien
gaccagcaattagtaagtatcagca

SEQ ID NO: 1723459 - DNA, 25 bp, Homo sapien
tgaagaactgctttacagacaggat

SEQ ID NO: 1723460 - DNA, 25 bp, Homo sapien
aaagtatatgcagttgagaccagca

SEQ ID NO: 1723461 - DNA, 25 bp, Homo sapien
aatttctgctactggtgtgagccca

SEQ ID NO: 1723462 - DNA, 25 bp, Homo sapien
caattacaagcgtgtaacagggtaa

SEQ ID NO: 1723463 - DNA, 25 bp, Homo sapien
tagaagagaggcgggtcaaagaagt

SEQ ID NO: 1723464 - DNA, 25 bp, Homo sapien
agaagagaggcgggtcaaagaagta

SEQ ID NO: 1723465 - DNA, 25 bp, Homo sapien
acttctttgacccgcctctcttcta

SEQ ID NO: 1723466 - DNA, 25 bp, Homo sapien
tacttctttgacccgcctctcttct

SEQ ID NO: 1723467 - DNA, 25 bp, Homo sapien
gatcctccatcttaaagaagatcag

SEQ ID NO: 1723468 - DNA, 25 bp, Homo sapien
tacctagaagagaggcgggtcaaag

SEQ ID NO: 1723469 - DNA, 25 bp, Homo sapien
gggtaccaaagtgatcctccatctt

SEQ ID NO: 1723470 - DNA, 25 bp, Homo sapien
agacagagtacctagaagagaggcg

SEQ ID NO: 1723471 - DNA, 25 bp, Homo sapien
gaagatcagacagagtacctagaag

SEQ ID NO: 1723472 - DNA, 25 bp, Homo sapien
acctagaagagaggcgggtcaaaga

SEQ ID NO: 1723473 - DNA, 25 bp, Homo sapien
cttctaggtactctgtctgatcttc

SEQ ID NO: 1723474 - DNA, 25 bp, Homo sapien
tttgacccgcctctcttctaggtac

SEQ ID NO: 1723475 - DNA, 25 bp, Homo sapien
tttggtacccctgccaatgggctca

SEQ ID NO: 1723476 - DNA, 25 bp, Homo sapien
tctttgacccgcctctcttctaggt

SEQ ID NO: 1723477 - DNA, 25 bp, Homo sapien
tctgatcttctttaagatggaggat

SEQ ID NO: 1723478 - DNA, 25 bp, Homo sapien
gaggatcactttggtacccctgcca

SEQ ID NO: 1723479 - DNA, 25 bp, Homo sapien
gaagcattctcagttcataggctat

SEQ ID NO: 1723480 - DNA, 25 bp, Homo sapien
gaagaagcattctcagttcataggc

SEQ ID NO: 1723481 - DNA, 25 bp, Homo sapien
ttctcagttcataggctatcccatc

SEQ ID NO: 1723482 - DNA, 25 bp, Homo sapien
cattctcagttcataggctatccca

SEQ ID NO: 1723483 - DNA, 25 bp, Homo sapien
gcattctcagttcataggctatccc

SEQ ID NO: 1723484 - DNA, 25 bp, Homo sapien
aagaagcattctcagttcataggct

SEQ ID NO: 1723485 - DNA, 25 bp, Homo sapien
tgggatagcctatgaactgagaatg

SEQ ID NO: 1723486 - DNA, 25 bp, Homo sapien
gatgggatagcctatgaactgagaa

SEQ ID NO: 1723487 - DNA, 25 bp, Homo sapien
gcctatgaactgagaatgcttcttc

SEQ ID NO: 1723488 - DNA, 25 bp, Homo sapien
ggatagcctatgaactgagaatgct

SEQ ID NO: 1723489 - DNA, 25 bp, Homo sapien
tagcctatgaactgagaatgcttct

SEQ ID NO: 1723490 - DNA, 25 bp, Homo sapien
ctatgaactgagaatgcttcttcac

SEQ ID NO: 1723491 - DNA, 25 bp, Homo sapien
tagtgttttgtactccaaggctaac

SEQ ID NO: 1723492 - DNA, 25 bp, Homo sapien
tgctttccctggtagtgttttgtac

SEQ ID NO: 1723493 - DNA, 25 bp, Homo sapien
tcttttacacttaacgtgcaggatg

SEQ ID NO: 1723494 - DNA, 25 bp, Homo sapien
tccctggtagtgttttgtactccaa

SEQ ID NO: 1723495 - DNA, 25 bp, Homo sapien
tttgtactccaaggctaacttctgt

SEQ ID NO: 1723496 - DNA, 25 bp, Homo sapien
tacacttaacgtgcaggatgtttcc

SEQ ID NO: 1723497 - DNA, 25 bp, Homo sapien
ttggagtacaaaacactaccaggga

SEQ ID NO: 1723498 - DNA, 25 bp, Homo sapien
catcctgcacgttaagtgtaaaaga

SEQ ID NO: 1723499 - DNA, 25 bp, Homo sapien
tagccttggagtacaaaacactacc

SEQ ID NO: 1723500 - DNA, 25 bp, Homo sapien
ggaaacatcctgcacgttaagtgta

SEQ ID NO: 1723501 - DNA, 25 bp, Homo sapien
gtacaaaacactaccagggaaagca

SEQ ID NO: 1723502 - DNA, 25 bp, Homo sapien
acagaagttagccttggagtacaaa

SEQ ID NO: 1723503 - DNA, 25 bp, Homo sapien
gatgatgaagaaaaacccaagatcg

SEQ ID NO: 1723504 - DNA, 25 bp, Homo sapien
gaagaggaagataaagatgatgaag

SEQ ID NO: 1723505 - DNA, 25 bp, Homo sapien
ccaagatcgaagatgtgggttcaga

SEQ ID NO: 1723506 - DNA, 25 bp, Homo sapien
tgacagcggtaaggataagaagaag

SEQ ID NO: 1723507 - DNA, 25 bp, Homo sapien
tgaagaaaaacccaagatcgaagat

SEQ ID NO: 1723508 - DNA, 25 bp, Homo sapien
gaaggaaattagtgatgatgaggca

SEQ ID NO: 1723509 - DNA, 25 bp, Homo sapien
tttcttcttcttatccttaccgctg

SEQ ID NO: 1723510 - DNA, 25 bp, Homo sapien
tctgaacccacatcttcgatcttgg

SEQ ID NO: 1723511 - DNA, 25 bp, Homo sapien
ttcttatccttaccgctgtcatcct

SEQ ID NO: 1723512 - DNA, 25 bp, Homo sapien
cgatcttgggtttttcttcatcatc

SEQ ID NO: 1723513 - DNA, 25 bp, Homo sapien
cacatcttcgatcttgggtttttct

SEQ ID NO: 1723514 - DNA, 25 bp, Homo sapien
gcctcatcatcactaatttccttct

SEQ ID NO: 1723515 - DNA, 25 bp, Homo sapien
tcactaatgactgggaagaccactt

SEQ ID NO: 1723516 - DNA, 25 bp, Homo sapien
cctgatgacatcacccaagaggagt

SEQ ID NO: 1723517 - DNA, 25 bp, Homo sapien
tacaagagcctcactaatgactggg

SEQ ID NO: 1723518 - DNA, 25 bp, Homo sapien
gcctatttggaccagaaaccctgat

SEQ ID NO: 1723519 - DNA, 25 bp, Homo sapien
caagagcctcactaatgactgggaa

SEQ ID NO: 1723520 - DNA, 25 bp, Homo sapien
ccaagaggagtatggagaattctac

SEQ ID NO: 1723521 - DNA, 25 bp, Homo sapien
tcagggtttctggtccaaataggct

SEQ ID NO: 1723522 - DNA, 25 bp, Homo sapien
gtagaattctccatactcctcttgg

SEQ ID NO: 1723523 - DNA, 25 bp, Homo sapien
ttcccagtcattagtgaggctcttg

SEQ ID NO: 1723524 - DNA, 25 bp, Homo sapien
gtggtcttcccagtcattagtgagg

SEQ ID NO: 1723525 - DNA, 25 bp, Homo sapien
cccagtcattagtgaggctcttgta

SEQ ID NO: 1723526 - DNA, 25 bp, Homo sapien
actcctcttgggtgatgtcatcagg

SEQ ID NO: 1723527 - DNA, 25 bp, Homo sapien
tattggcagccttacacatccaggg

SEQ ID NO: 1723528 - DNA, 25 bp, Homo sapien
gaaatctgggtaatgtctattggca

SEQ ID NO: 1723529 - DNA, 25 bp, Homo sapien
tgttggctcaacatgcacatatgga

SEQ ID NO: 1723530 - DNA, 25 bp, Homo sapien
tagacacacggaacttgtccaactg

SEQ ID NO: 1723531 - DNA, 25 bp, Homo sapien
tgattaccctgtcatagtgaagtgc

SEQ ID NO: 1723532 - DNA, 25 bp, Homo sapien
tagtacccatctagatcgtggaggg

SEQ ID NO: 1723533 - DNA, 25 bp, Homo sapien
gaaccctggatgtgtaaggctgcca

SEQ ID NO: 1723534 - DNA, 25 bp, Homo sapien
taaggctgccaatagacattaccca

SEQ ID NO: 1723535 - DNA, 25 bp, Homo sapien
gaaaactgagccttaatgccctcca

SEQ ID NO: 1723536 - DNA, 25 bp, Homo sapien
tgccctccacgatctagatgggtac

SEQ ID NO: 1723537 - DNA, 25 bp, Homo sapien
tccatatgtgcatgttgagccaaca

SEQ ID NO: 1723538 - DNA, 25 bp, Homo sapien
gaacaatgatcctccctaagcctaa

SEQ ID NO: 1723539 - DNA, 25 bp, Homo sapien
gcattgctatttattcctcgtcggg

SEQ ID NO: 1723540 - DNA, 25 bp, Homo sapien
gctatttattcctcgtcgggctccc

SEQ ID NO: 1723541 - DNA, 25 bp, Homo sapien
tattcctcgtcgggctccctttgac

SEQ ID NO: 1723542 - DNA, 25 bp, Homo sapien
catcaaactctatgtccgccgtgtg

SEQ ID NO: 1723543 - DNA, 25 bp, Homo sapien
ccgccgtgtgttcatcatggacagc

SEQ ID NO: 1723544 - DNA, 25 bp, Homo sapien
tcagggcattgctatttattcctcg

SEQ ID NO: 1723545 - DNA, 25 bp, Homo sapien
gtcaaagggagcccgacgaggaata

SEQ ID NO: 1723546 - DNA, 25 bp, Homo sapien
ggagcccgacgaggaataaatagca

SEQ ID NO: 1723547 - DNA, 25 bp, Homo sapien
cacacggcggacatagagtttgatg

SEQ ID NO: 1723548 - DNA, 25 bp, Homo sapien
cccgacgaggaataaatagcaatgc

SEQ ID NO: 1723549 - DNA, 25 bp, Homo sapien
gaggaataaatagcaatgccctgaa

SEQ ID NO: 1723550 - DNA, 25 bp, Homo sapien
gctgtccatgatgaacacacggcgg

SEQ ID NO: 1723551 - DNA, 25 bp, Homo sapien
tttatccgtggtgtggttgactctg

SEQ ID NO: 1723552 - DNA, 25 bp, Homo sapien
ttatccgtggtgtggttgactctga

SEQ ID NO: 1723553 - DNA, 25 bp, Homo sapien
tatccgtggtgtggttgactctgag

SEQ ID NO: 1723554 - DNA, 25 bp, Homo sapien
cagagtcaaccacaccacggataaa

SEQ ID NO: 1723555 - DNA, 25 bp, Homo sapien
tcagagtcaaccacaccacggataa

SEQ ID NO: 1723556 - DNA, 25 bp, Homo sapien
ctcagagtcaaccacaccacggata

SEQ ID NO: 1723557 - DNA, 25 bp, Homo sapien
catctcccgagaaatgctccagcag

SEQ ID NO: 1723558 - DNA, 25 bp, Homo sapien
acatctcccgagaaatgctccagca

SEQ ID NO: 1723559 - DNA, 25 bp, Homo sapien
ctgctggagcatttctcgggagatg

SEQ ID NO: 1723560 - DNA, 25 bp, Homo sapien
tgctggagcatttctcgggagatgt

SEQ ID NO: 1723561 - DNA, 25 bp, Homo sapien
tgaggcattctctaaaaatctcaag

SEQ ID NO: 1723562 - DNA, 25 bp, Homo sapien
ctggcagaagacaaggagaattaca

SEQ ID NO: 1723563 - DNA, 25 bp, Homo sapien
tgagctcttctctgagctggcagaa

SEQ ID NO: 1723564 - DNA, 25 bp, Homo sapien
gcaaaaacattgttaagaagtgcct

SEQ ID NO: 1723565 - DNA, 25 bp, Homo sapien
cattgttaagaagtgccttgagctc

SEQ ID NO: 1723566 - DNA, 25 bp, Homo sapien
gacaaggagaattacaagaaattct

SEQ ID NO: 1723567 - DNA, 25 bp, Homo sapien
tgtaattctccttgtcttctgccag

SEQ ID NO: 1723568 - DNA, 25 bp, Homo sapien
tagaatttcttgtaattctccttgt

SEQ ID NO: 1723569 - DNA, 25 bp, Homo sapien
gagatttttagagaatgcctcatag

SEQ ID NO: 1723570 - DNA, 25 bp, Homo sapien
gagctcaaggcacttcttaacaatg

SEQ ID NO: 1723571 - DNA, 25 bp, Homo sapien
aggcacttcttaacaatgtttttgc

SEQ ID NO: 1723572 - DNA, 25 bp, Homo sapien
ttctgccagctcagagaagagctca

SEQ ID NO: 1723573 - DNA, 25 bp, Homo sapien
atccacgaagactccactaaccgcc

SEQ ID NO: 1723574 - DNA, 25 bp, Homo sapien
aatccacgaagactccactaaccgc

SEQ ID NO: 1723575 - DNA, 25 bp, Homo sapien
gcggttagtggagtcttcgtggatt

SEQ ID NO: 1723576 - DNA, 25 bp, Homo sapien
ggcggttagtggagtcttcgtggat

SEQ ID NO: 1723577 - DNA, 25 bp, Homo sapien
gaatccacgaagactccactaaccg

SEQ ID NO: 1723578 - DNA, 25 bp, Homo sapien
tctgtcagagtatgtttctcgcatg

SEQ ID NO: 1723579 - DNA, 25 bp, Homo sapien
gacacagaagtccatctattacatc

SEQ ID NO: 1723580 - DNA, 25 bp, Homo sapien
tgtttctcgcatgaaggagacacag

SEQ ID NO: 1723581 - DNA, 25 bp, Homo sapien
cctgtctgagctgctgcgctatcat

SEQ ID NO: 1723582 - DNA, 25 bp, Homo sapien
gcgctatcatacctcccagtctgga

SEQ ID NO: 1723583 - DNA, 25 bp, Homo sapien
atagcgcagcagctcagacaggcgg

SEQ ID NO: 1723584 - DNA, 25 bp, Homo sapien
tagtggagtcttcgtggattccaag

SEQ ID NO: 1723585 - DNA, 25 bp, Homo sapien
tccagactgggaggtatgatagcgc

SEQ ID NO: 1723586 - DNA, 25 bp, Homo sapien
tgtgtctccttcatgcgagaaacat

SEQ ID NO: 1723587 - DNA, 25 bp, Homo sapien
gatgtaatagatggacttctgtgtc

SEQ ID NO: 1723588 - DNA, 25 bp, Homo sapien
catgcgagaaacatactctgacaga

SEQ ID NO: 1723589 - DNA, 25 bp, Homo sapien
tatatatgaccgagcccattgacga

SEQ ID NO: 1723590 - DNA, 25 bp, Homo sapien
ccgagcccattgacgagtactgtgt

SEQ ID NO: 1723591 - DNA, 25 bp, Homo sapien
atttgatgggaagagcctggtctca

SEQ ID NO: 1723592 - DNA, 25 bp, Homo sapien
gaccgagcccattgacgagtactgt

SEQ ID NO: 1723593 - DNA, 25 bp, Homo sapien
gcttcgaggtggtatatatgaccga

SEQ ID NO: 1723594 - DNA, 25 bp, Homo sapien
gacgagtactgtgtgcagcagctca

SEQ ID NO: 1723595 - DNA, 25 bp, Homo sapien
gggctcggtcatatataccacctcg

SEQ ID NO: 1723596 - DNA, 25 bp, Homo sapien
acacagtactcgtcaatgggctcgg

SEQ ID NO: 1723597 - DNA, 25 bp, Homo sapien
acagtactcgtcaatgggctcggtc

SEQ ID NO: 1723598 - DNA, 25 bp, Homo sapien
atatataccacctcgaagccccgtt

SEQ ID NO: 1723599 - DNA, 25 bp, Homo sapien
tgagctgctgcacacagtactcgtc

SEQ ID NO: 1723600 - DNA, 25 bp, Homo sapien
tgagaccaggctcttcccatcaaat

SEQ ID NO: 1723601 - DNA, 25 bp, Homo sapien
acctctgcaagctcatgaaagaaat

SEQ ID NO: 1723602 - DNA, 25 bp, Homo sapien
aagctcatgaaagaaatcttagata

SEQ ID NO: 1723603 - DNA, 25 bp, Homo sapien
gcaaagtttgagaacctctgcaagc

SEQ ID NO: 1723604 - DNA, 25 bp, Homo sapien
tgcaagctcatgaaagaaatcttag

SEQ ID NO: 1723605 - DNA, 25 bp, Homo sapien
gagaacctctgcaagctcatgaaag

SEQ ID NO: 1723606 - DNA, 25 bp, Homo sapien
catgaaagaaatcttagataagaag

SEQ ID NO: 1723607 - DNA, 25 bp, Homo sapien
gcttgcagaggttctcaaactttgc

SEQ ID NO: 1723608 - DNA, 25 bp, Homo sapien
tcttatctaagatttctttcatgag

SEQ ID NO: 1723609 - DNA, 25 bp, Homo sapien
ctaagatttctttcatgagcttgca

SEQ ID NO: 1723610 - DNA, 25 bp, Homo sapien
taagatttctttcatgagcttgcag

SEQ ID NO: 1723611 - DNA, 25 bp, Homo sapien
tatctaagatttctttcatgagctt

SEQ ID NO: 1723612 - DNA, 25 bp, Homo sapien
tttcatgagcttgcagaggttctca

SEQ ID NO: 1723613 - DNA, 25 bp, Homo sapien
tggcacagattaggcattgcttcag

SEQ ID NO: 1723614 - DNA, 25 bp, Homo sapien
ttgtaacatcttcgaggtgggctcc

SEQ ID NO: 1723615 - DNA, 25 bp, Homo sapien
tacaattagtggtttgaggcagcct

SEQ ID NO: 1723616 - DNA, 25 bp, Homo sapien
aggcagcctatttactgtttcatgc

SEQ ID NO: 1723617 - DNA, 25 bp, Homo sapien
ggtgggctccctcacaagcatgttt

SEQ ID NO: 1723618 - DNA, 25 bp, Homo sapien
tcttctctagtcaggtttaaggcta

SEQ ID NO: 1723619 - DNA, 25 bp, Homo sapien
taactgaagcaatgcctaatctgtg

SEQ ID NO: 1723620 - DNA, 25 bp, Homo sapien
aaaatatatcctagccccagaatgg

SEQ ID NO: 1723621 - DNA, 25 bp, Homo sapien
gcatgaaacagtaaataggctgcct

SEQ ID NO: 1723622 - DNA, 25 bp, Homo sapien
ggagcccacctcgaagatgttacaa

SEQ ID NO: 1723623 - DNA, 25 bp, Homo sapien
taggctgcctcaaaccactaattgt

SEQ ID NO: 1723624 - DNA, 25 bp, Homo sapien
aaacatgcttgtgagggagcccacc

SEQ ID NO: 1723625 - DNA, 25 bp, Homo sapien
tccaaccgcatctatcgcatgatca

SEQ ID NO: 1723626 - DNA, 25 bp, Homo sapien
caaccgcatctatcgcatgatcaag

SEQ ID NO: 1723627 - DNA, 25 bp, Homo sapien
aaccgcatctatcgcatgatcaagc

SEQ ID NO: 1723628 - DNA, 25 bp, Homo sapien
cgcatctatcgcatgatcaagctag

SEQ ID NO: 1723629 - DNA, 25 bp, Homo sapien
ccgcatctatcgcatgatcaagcta

SEQ ID NO: 1723630 - DNA, 25 bp, Homo sapien
actccaaccgcatctatcgcatgat

SEQ ID NO: 1723631 - DNA, 25 bp, Homo sapien
ctgaggccgacaagaatgataaggc

SEQ ID NO: 1723632 - DNA, 25 bp, Homo sapien
tgtttgaaaccgccctgctatcttc

SEQ ID NO: 1723633 - DNA, 25 bp, Homo sapien
ggctgaggccgacaagaatgataag

SEQ ID NO: 1723634 - DNA, 25 bp, Homo sapien
tgctgtttgaaaccgccctgctatc

SEQ ID NO: 1723635 - DNA, 25 bp, Homo sapien
gaggccgacaagaatgataaggcag

SEQ ID NO: 1723636 - DNA, 25 bp, Homo sapien
gccgacaagaatgataaggcagtta

SEQ ID NO: 1723637 - DNA, 25 bp, Homo sapien
aactgccttatcattcttgtcggcc

SEQ ID NO: 1723638 - DNA, 25 bp, Homo sapien
taactgccttatcattcttgtcggc

SEQ ID NO: 1723639 - DNA, 25 bp, Homo sapien
gatagcagggcggtttcaaacagca

SEQ ID NO: 1723640 - DNA, 25 bp, Homo sapien
cttatcattcttgtcggcctcagcc

SEQ ID NO: 1723641 - DNA, 25 bp, Homo sapien
gaagatagcagggcggtttcaaaca

SEQ ID NO: 1723642 - DNA, 25 bp, Homo sapien
gccttatcattcttgtcggcctcag

SEQ ID NO: 1723643 - DNA, 25 bp, Homo sapien
tagcttgatcatgcgatagatgcgg

SEQ ID NO: 1723644 - DNA, 25 bp, Homo sapien
cttgatcatgcgatagatgcggttg

SEQ ID NO: 1723645 - DNA, 25 bp, Homo sapien
tgatcatgcgatagatgcggttgga

SEQ ID NO: 1723646 - DNA, 25 bp, Homo sapien
cgatagatgcggttggagtgggtct

SEQ ID NO: 1723647 - DNA, 25 bp, Homo sapien
ctagcttgatcatgcgatagatgcg

SEQ ID NO: 1723648 - DNA, 25 bp, Homo sapien
gcttgatcatgcgatagatgcggtt

SEQ ID NO: 1723649 - DNA, 25 bp, Homo sapien
tgtgcaactcgtctcctctatggat

SEQ ID NO: 1723650 - DNA, 25 bp, Homo sapien
gtagctttggtacttggtgtggcaa

SEQ ID NO: 1723651 - DNA, 25 bp, Homo sapien
gcaactcgtctcctctatggatttg

SEQ ID NO: 1723652 - DNA, 25 bp, Homo sapien
tagctttggtacttggtgtggcaag

SEQ ID NO: 1723653 - DNA, 25 bp, Homo sapien
ggatttgacttaatgctatttggtc

SEQ ID NO: 1723654 - DNA, 25 bp, Homo sapien
tctatggatttgacttaatgctatt

SEQ ID NO: 1723655 - DNA, 25 bp, Homo sapien
ttgccacaccaagtaccaaagctac

SEQ ID NO: 1723656 - DNA, 25 bp, Homo sapien
gaccaaatagcattaagtcaaatcc

SEQ ID NO: 1723657 - DNA, 25 bp, Homo sapien
aatccatagaggagacgagttgcac

SEQ ID NO: 1723658 - DNA, 25 bp, Homo sapien
aatagcattaagtcaaatccataga

SEQ ID NO: 1723659 - DNA, 25 bp, Homo sapien
caaatccatagaggagacgagttgc

SEQ ID NO: 1723660 - DNA, 25 bp, Homo sapien
tccatagaggagacgagttgcacaa

SEQ ID NO: 1723661 - DNA, 25 bp, Homo sapien
ctcacatggcttaattttacttcag

SEQ ID NO: 1723662 - DNA, 25 bp, Homo sapien
tctcacatggcttaattttacttca

SEQ ID NO: 1723663 - DNA, 25 bp, Homo sapien
ctgaagtaaaattaagccatgtgag

SEQ ID NO: 1723664 - DNA, 25 bp, Homo sapien
tgaagtaaaattaagccatgtgaga

SEQ ID NO: 1723665 - DNA, 25 bp, Homo sapien
atgaggatgcgtctcgcatggaaga

SEQ ID NO: 1723666 - DNA, 25 bp, Homo sapien
tgaggatgcgtctcgcatggaagaa

SEQ ID NO: 1723667 - DNA, 25 bp, Homo sapien
ttcttccatgcgagacgcatcctca

SEQ ID NO: 1723668 - DNA, 25 bp, Homo sapien
tcttccatgcgagacgcatcctcat

SEQ ID NO: 1723669 - DNA, 25 bp, Homo sapien
tgctgcagttcctgatgagatcccc

SEQ ID NO: 1723670 - DNA, 25 bp, Homo sapien
cgatgaggatgcgtctcgcatggaa

SEQ ID NO: 1723671 - DNA, 25 bp, Homo sapien
gcagaggaacccaatgctgcagttc

SEQ ID NO: 1723672 - DNA, 25 bp, Homo sapien
tgagatcccccctctcgagggcgat

SEQ ID NO: 1723673 - DNA, 25 bp, Homo sapien
gaacccaatgctgcagttcctgatg

SEQ ID NO: 1723674 - DNA, 25 bp, Homo sapien
tgaggatgcgtctcgcatggaagaa

SEQ ID NO: 1723675 - DNA, 25 bp, Homo sapien
ttccatgcgagacgcatcctcatcg

SEQ ID NO: 1723676 - DNA, 25 bp, Homo sapien
tcatcgccctcgagaggggggatct

SEQ ID NO: 1723677 - DNA, 25 bp, Homo sapien
ttcttccatgcgagacgcatcctca

SEQ ID NO: 1723678 - DNA, 25 bp, Homo sapien
gggatctcatcaggaactgcagcat

SEQ ID NO: 1723679 - DNA, 25 bp, Homo sapien
tctcatcaggaactgcagcattggg

SEQ ID NO: 1723680 - DNA, 25 bp, Homo sapien
gaactgcagcattgggttcctctgc

SEQ ID NO: 1723681 - DNA, 25 bp, Homo sapien
catagttggaaaacttgtgcccttg

SEQ ID NO: 1723682 - DNA, 25 bp, Homo sapien
gttcatagttggaaaacttgtgccc

SEQ ID NO: 1723683 - DNA, 25 bp, Homo sapien
ttggaaaacttgtgcccttgtatag

SEQ ID NO: 1723684 - DNA, 25 bp, Homo sapien
cttgtgcccttgtatagtgtcccca

SEQ ID NO: 1723685 - DNA, 25 bp, Homo sapien
aacttgtgcccttgtatagtgtccc

SEQ ID NO: 1723686 - DNA, 25 bp, Homo sapien
gtgcccttgtatagtgtccccatgg

SEQ ID NO: 1723687 - DNA, 25 bp, Homo sapien
gacactatacaagggcacaagtttt

SEQ ID NO: 1723688 - DNA, 25 bp, Homo sapien
actatacaagggcacaagttttcca

SEQ ID NO: 1723689 - DNA, 25 bp, Homo sapien
gggacactatacaagggcacaagtt

SEQ ID NO: 1723690 - DNA, 25 bp, Homo sapien
ccatggggacactatacaagggcac

SEQ ID NO: 1723691 - DNA, 25 bp, Homo sapien
tatacaagggcacaagttttccaac

SEQ ID NO: 1723692 - DNA, 25 bp, Homo sapien
gggcacaagttttccaactatgaac

SEQ ID NO: 1723693 - DNA, 25 bp, Homo sapien
cctgctggtgtctagtgtttttttc

SEQ ID NO: 1723694 - DNA, 25 bp, Homo sapien
gctccccctgctggtgtctagtgtt

SEQ ID NO: 1723695 - DNA, 25 bp, Homo sapien
tttccctctcctgtccttgtgttga

SEQ ID NO: 1723696 - DNA, 25 bp, Homo sapien
tgctggtgtctagtgtttttttccc

SEQ ID NO: 1723697 - DNA, 25 bp, Homo sapien
cccctgctggtgtctagtgtttttt

SEQ ID NO: 1723698 - DNA, 25 bp, Homo sapien
ttttccctctcctgtccttgtgttg

SEQ ID NO: 1723699 - DNA, 25 bp, Homo sapien
aacactagacaccagcagggggagc

SEQ ID NO: 1723700 - DNA, 25 bp, Homo sapien
gggaaaaaaacactagacaccagca

SEQ ID NO: 1723701 - DNA, 25 bp, Homo sapien
caacacaaggacaggagagggaaaa

SEQ ID NO: 1723702 - DNA, 25 bp, Homo sapien
gaaaaaaacactagacaccagcagg

SEQ ID NO: 1723703 - DNA, 25 bp, Homo sapien
aaacactagacaccagcagggggag

SEQ ID NO: 1723704 - DNA, 25 bp, Homo sapien
tcaacacaaggacaggagagggaaa

SEQ ID NO: 1723705 - DNA, 25 bp, Homo sapien
aagggtgtcaagccccattccctct

SEQ ID NO: 1723706 - DNA, 25 bp, Homo sapien
ctaagggtgtcaagccccattccct

SEQ ID NO: 1723707 - DNA, 25 bp, Homo sapien
ggcagtaaactaagggtgtcaagcc

SEQ ID NO: 1723708 - DNA, 25 bp, Homo sapien
aggcagtaaactaagggtgtcaagc

SEQ ID NO: 1723709 - DNA, 25 bp, Homo sapien
gcagtaaactaagggtgtcaagccc

SEQ ID NO: 1723710 - DNA, 25 bp, Homo sapien
taagggtgtcaagccccattccctc

SEQ ID NO: 1723711 - DNA, 25 bp, Homo sapien
gggcttgacacccttagtttactgc

SEQ ID NO: 1723712 - DNA, 25 bp, Homo sapien
agggaatggggcttgacacccttag

SEQ ID NO: 1723713 - DNA, 25 bp, Homo sapien
ggcttgacacccttagtttactgcc

SEQ ID NO: 1723714 - DNA, 25 bp, Homo sapien
gagggaatggggcttgacaccctta

SEQ ID NO: 1723715 - DNA, 25 bp, Homo sapien
gcttgacacccttagtttactgcct

SEQ ID NO: 1723716 - DNA, 25 bp, Homo sapien
agagggaatggggcttgacaccctt

SEQ ID NO: 1723717 - DNA, 25 bp, Homo sapien
cagcaggattggatgttgtgtattg

SEQ ID NO: 1723718 - DNA, 25 bp, Homo sapien
gacagcaggattggatgttgtgtat

SEQ ID NO: 1723719 - DNA, 25 bp, Homo sapien
acagcaggattggatgttgtgtatt

SEQ ID NO: 1723720 - DNA, 25 bp, Homo sapien
atacacaacatccaatcctgctgtc

SEQ ID NO: 1723721 - DNA, 25 bp, Homo sapien
aatacacaacatccaatcctgctgt

SEQ ID NO: 1723722 - DNA, 25 bp, Homo sapien
caatacacaacatccaatcctgctg

SEQ ID NO: 1723723 - DNA, 25 bp, Homo sapien
cagagcacagctagggcaagactta

SEQ ID NO: 1723724 - DNA, 25 bp, Homo sapien
taaactgcttactggaagatgggtg

SEQ ID NO: 1723725 - DNA, 25 bp, Homo sapien
agagcctagggatccaggagcatag

SEQ ID NO: 1723726 - DNA, 25 bp, Homo sapien
tctgtgatactgagaaaacacctgc

SEQ ID NO: 1723727 - DNA, 25 bp, Homo sapien
gcattggagcctacaccgcttgtgc

SEQ ID NO: 1723728 - DNA, 25 bp, Homo sapien
gaagagtaactggaacctacctatg

SEQ ID NO: 1723729 - DNA, 25 bp, Homo sapien
ttctgctgtaacctctgagggagct

SEQ ID NO: 1723730 - DNA, 25 bp, Homo sapien
gaagctagggaaggataacatccac

SEQ ID NO: 1723731 - DNA, 25 bp, Homo sapien
ttctcagtatcacagaccagctctg

SEQ ID NO: 1723732 - DNA, 25 bp, Homo sapien
tcaagagagcataggtaggttccag

SEQ ID NO: 1723733 - DNA, 25 bp, Homo sapien
taagtcttgccctagctgtgctctg

SEQ ID NO: 1723734 - DNA, 25 bp, Homo sapien
cacaagcggtgtaggctccaatgct

SEQ ID NO: 1723735 - DNA, 25 bp, Homo sapien
actgctgcagtttgggcccaggcta

SEQ ID NO: 1723736 - DNA, 25 bp, Homo sapien
ctggaagccggagccataactgctg

SEQ ID NO: 1723737 - DNA, 25 bp, Homo sapien
tatgtgctcttctggtgccctaggg

SEQ ID NO: 1723738 - DNA, 25 bp, Homo sapien
tacccatgttgggtcagcctgaaac

SEQ ID NO: 1723739 - DNA, 25 bp, Homo sapien
ctggtgcccaggtagatgcccgcat

SEQ ID NO: 1723740 - DNA, 25 bp, Homo sapien
gcccgcatgctgaacgggtgcacac

SEQ ID NO: 1723741 - DNA, 25 bp, Homo sapien
aagagcggggcctggtacagttcct

SEQ ID NO: 1723742 - DNA, 25 bp, Homo sapien
tagatgcccgcatgctgaacgggtg

SEQ ID NO: 1723743 - DNA, 25 bp, Homo sapien
gccgccgccgtgagctcctccgaga

SEQ ID NO: 1723744 - DNA, 25 bp, Homo sapien
cgccgccgccgtgagctcctccgag

SEQ ID NO: 1723745 - DNA, 25 bp, Homo sapien
gccgccgtgagctcctccgagaccc

SEQ ID NO: 1723746 - DNA, 25 bp, Homo sapien
gccgtgagctcctccgagaccccgg

SEQ ID NO: 1723747 - DNA, 25 bp, Homo sapien
ccccaactagggatatgaggaagca

SEQ ID NO: 1723748 - DNA, 25 bp, Homo sapien
ttgtgtgcctctgccctagtacagg

SEQ ID NO: 1723749 - DNA, 25 bp, Homo sapien
tcagaggactgagtactagggaccc

SEQ ID NO: 1723750 - DNA, 25 bp, Homo sapien
ttagggtcccagatcaggtaccacc

SEQ ID NO: 1723751 - DNA, 25 bp, Homo sapien
ccccatgtgggtacctctgaaaggg

SEQ ID NO: 1723752 - DNA, 25 bp, Homo sapien
cccatgtgggtacctctgaaagggg

SEQ ID NO: 1723753 - DNA, 25 bp, Homo sapien
ccggaatgccagtacaggagagtgc

SEQ ID NO: 1723754 - DNA, 25 bp, Homo sapien
gaggacaacgtttgaagcccagcaa

SEQ ID NO: 1723755 - DNA, 25 bp, Homo sapien
tacagtaataggcatcggtccctgg

SEQ ID NO: 1723756 - DNA, 25 bp, Homo sapien
acaggcatcagcgaaggaaggtccc

SEQ ID NO: 1723757 - DNA, 25 bp, Homo sapien
aggcagccgtacatgagcagcgaga

SEQ ID NO: 1723758 - DNA, 25 bp, Homo sapien
tcatggtacatgaggctgttgccct

SEQ ID NO: 1723759 - DNA, 25 bp, Homo sapien
tagacggcgtacaacatgagcagga

SEQ ID NO: 1723760 - DNA, 25 bp, Homo sapien
gatgtagacatagccgttggagcag

SEQ ID NO: 1723761 - DNA, 25 bp, Homo sapien
tgggtggtggtataggcgtctccat

SEQ ID NO: 1723762 - DNA, 25 bp, Homo sapien
gtggtataggcgtctccattgcggt

SEQ ID NO: 1723763 - DNA, 25 bp, Homo sapien
gtctccattgcggtatctggtgacc

SEQ ID NO: 1723764 - DNA, 25 bp, Homo sapien
taggcgtctccattgcggtatctgg

SEQ ID NO: 1723765 - DNA, 25 bp, Homo sapien
taagtgccacctcccatgttgaatg

SEQ ID NO: 1723766 - DNA, 25 bp, Homo sapien
caatatgtctcatcctggcgagtcc

SEQ ID NO: 1723767 - DNA, 25 bp, Homo sapien
cttatactgagacagatggcctgca

SEQ ID NO: 1723768 - DNA, 25 bp, Homo sapien
tagcactaccacttaagagcagcag

SEQ ID NO: 1723769 - DNA, 25 bp, Homo sapien
tgtctactgtgttgacccgcggcag

SEQ ID NO: 1723770 - DNA, 25 bp, Homo sapien
taggccctcgttctctgcgaagaag

SEQ ID NO: 1723771 - DNA, 25 bp, Homo sapien
catgagcaccgcctcagagtagctg

SEQ ID NO: 1723772 - DNA, 25 bp, Homo sapien
tccacgctggcgaaactgaagcact

SEQ ID NO: 1723773 - DNA, 25 bp, Homo sapien
gcgccggtagggagccacgcccgcc

SEQ ID NO: 1723774 - DNA, 25 bp, Homo sapien
ctgcgccggtagggagccacgcccg

SEQ ID NO: 1723775 - DNA, 25 bp, Homo sapien
tgcgccggtagggagccacgcccgc

SEQ ID NO: 1723776 - DNA, 25 bp, Homo sapien
ctggcgcagatgcttagggcgctgc

SEQ ID NO: 1723777 - DNA, 25 bp, Homo sapien
gcttagggcgctgcgcgagaagata

SEQ ID NO: 1723778 - DNA, 25 bp, Homo sapien
cgcgggctggcgcagatgcttaggg

SEQ ID NO: 1723779 - DNA, 25 bp, Homo sapien
gcgagaagatagacgagctgctgac

SEQ ID NO: 1723780 - DNA, 25 bp, Homo sapien
agccgtagagacggcccagcgagaa

SEQ ID NO: 1723781 - DNA, 25 bp, Homo sapien
gccgggagccgtagagacggcccag

SEQ ID NO: 1723782 - DNA, 25 bp, Homo sapien
gcgccgggagccgtagagacggccc

SEQ ID NO: 1723783 - DNA, 25 bp, Homo sapien
gggagccgtagagacggcccagcga

SEQ ID NO: 1723784 - DNA, 25 bp, Homo sapien
cccgctgcggctgcgccacaggcag

SEQ ID NO: 1723785 - DNA, 25 bp, Homo sapien
tcccgctgcggctgcgccacaggca

SEQ ID NO: 1723786 - DNA, 25 bp, Homo sapien
gggcagctggcctcgttgacgctcc

SEQ ID NO: 1723787 - DNA, 25 bp, Homo sapien
gcagctggcctcgttgacgctcccg

SEQ ID NO: 1723788 - DNA, 25 bp, Homo sapien
agtagagggcgtcgtggtagggcgg

SEQ ID NO: 1723789 - DNA, 25 bp, Homo sapien
cgatgaggaccggaaagtagagggc

SEQ ID NO: 1723790 - DNA, 25 bp, Homo sapien
ctcgtcgtcccccatgctggcctgg

SEQ ID NO: 1723791 - DNA, 25 bp, Homo sapien
ccctcctgccggtggacgatgagga

SEQ ID NO: 1723792 - DNA, 25 bp, Homo sapien
cacggcacggttgtcatctaacaga

SEQ ID NO: 1723793 - DNA, 25 bp, Homo sapien
tctctttatgtacagggacagcggg

SEQ ID NO: 1723794 - DNA, 25 bp, Homo sapien
tgtttgagcgacaagcacactccac

SEQ ID NO: 1723795 - DNA, 25 bp, Homo sapien
tgcattagctagttggaatccagcc

SEQ ID NO: 1723796 - DNA, 25 bp, Homo sapien
gagcacacggagagaaggcggtgtc

SEQ ID NO: 1723797 - DNA, 25 bp, Homo sapien
tcagagctttaggggaacaggacgt

SEQ ID NO: 1723798 - DNA, 25 bp, Homo sapien
gagaaggcggtgtcagagctttagg

SEQ ID NO: 1723799 - DNA, 25 bp, Homo sapien
cacacggagagaaggcggtgtcaga

SEQ ID NO: 1723800 - DNA, 25 bp, Homo sapien
gagttctgatggctcaggcgaagta

SEQ ID NO: 1723801 - DNA, 25 bp, Homo sapien
caagggttatcctctctagcctgaa

SEQ ID NO: 1723802 - DNA, 25 bp, Homo sapien
tcaggcgaagtaagaagcatcaggg

SEQ ID NO: 1723803 - DNA, 25 bp, Homo sapien
ggtgctaaatctgctggggagactt

SEQ ID NO: 1723804 - DNA, 25 bp, Homo sapien
tcgcactccccgctaggaagaaggg

SEQ ID NO: 1723805 - DNA, 25 bp, Homo sapien
caggcaggttcagtgctagtaggca

SEQ ID NO: 1723806 - DNA, 25 bp, Homo sapien
ctgagacgacctaggcagaaatggt

SEQ ID NO: 1723807 - DNA, 25 bp, Homo sapien
ttccctggcaatcagtaaagctacc

SEQ ID NO: 1723808 - DNA, 25 bp, Homo sapien
gatgcacccaattgacagagacctg

SEQ ID NO: 1723809 - DNA, 25 bp, Homo sapien
tgattcaggctgagcgccattgccc

SEQ ID NO: 1723810 - DNA, 25 bp, Homo sapien
ggccacaagagacctagctgactga

SEQ ID NO: 1723811 - DNA, 25 bp, Homo sapien
cagttccggagtgcaaacgtgtagg

SEQ ID NO: 1723812 - DNA, 25 bp, Homo sapien
tcccacatgctgaagcgaggactag

SEQ ID NO: 1723813 - DNA, 25 bp, Homo sapien
tacgtgacacaaggagacatgggct

SEQ ID NO: 1723814 - DNA, 25 bp, Homo sapien
tatttcacagaggatagcaagctcc

SEQ ID NO: 1723815 - DNA, 25 bp, Homo sapien
tcattgccatgagtgttcggacagg

SEQ ID NO: 1723816 - DNA, 25 bp, Homo sapien
tctccatggagatcttaaaggcacc

SEQ ID NO: 1723817 - DNA, 25 bp, Homo sapien
cgagctgtgcgtttctccatggaga

SEQ ID NO: 1723818 - DNA, 25 bp, Homo sapien
cctggcttcctaggcagcctggtac

SEQ ID NO: 1723819 - DNA, 25 bp, Homo sapien
ttaggctggttcttcgtcggatcct

SEQ ID NO: 1723820 - DNA, 25 bp, Homo sapien
ctggggattcatgtctgggctctga

SEQ ID NO: 1723821 - DNA, 25 bp, Homo sapien
catgagccgctggggattcatgtct

SEQ ID NO: 1723822 - DNA, 25 bp, Homo sapien
ccgctggggattcatgtctgggctc

SEQ ID NO: 1723823 - DNA, 25 bp, Homo sapien
gggattcatgtctgggctctgaacc

SEQ ID NO: 1723824 - DNA, 25 bp, Homo sapien
agagggagagctttgaggtgggagc

SEQ ID NO: 1723825 - DNA, 25 bp, Homo sapien
gcacacactggacctcgtccttccc

SEQ ID NO: 1723826 - DNA, 25 bp, Homo sapien
agaggtgggtctggttgagccagta

SEQ ID NO: 1723827 - DNA, 25 bp, Homo sapien
ctggttgagccagtaggaggaatgg

SEQ ID NO: 1723828 - DNA, 25 bp, Homo sapien
acagacacagcgtaccgcgtggtgg

SEQ ID NO: 1723829 - DNA, 25 bp, Homo sapien
tagaggcgataaagagcacccacct

SEQ ID NO: 1723830 - DNA, 25 bp, Homo sapien
tgtagcaccaaatatgagccccgtg

SEQ ID NO: 1723831 - DNA, 25 bp, Homo sapien
actggcaaggccattctggatgtgg

SEQ ID NO: 1723832 - DNA, 25 bp, Homo sapien
ggaggctattatcggtccaggcaag

SEQ ID NO: 1723833 - DNA, 25 bp, Homo sapien
tagtggagagcacctggagtccaac

SEQ ID NO: 1723834 - DNA, 25 bp, Homo sapien
gcatgctaatacctcctggaatggg

SEQ ID NO: 1723835 - DNA, 25 bp, Homo sapien
gaatggcatgactgttagacgaaga

SEQ ID NO: 1723836 - DNA, 25 bp, Homo sapien
cagaatccagtcttgtgggcctcaa

SEQ ID NO: 1723837 - DNA, 25 bp, Homo sapien
caaggttccaagacagagagcagac

SEQ ID NO: 1723838 - DNA, 25 bp, Homo sapien
gccccaaaggaggagtcagctacag

SEQ ID NO: 1723839 - DNA, 25 bp, Homo sapien
tgtctgtcatcacctagctggctag

SEQ ID NO: 1723840 - DNA, 25 bp, Homo sapien
ctacagacattgcacctacagtgca

SEQ ID NO: 1723841 - DNA, 25 bp, Homo sapien
ttgcacctacagtgcaagagagcac

SEQ ID NO: 1723842 - DNA, 25 bp, Homo sapien
caaaagttcgccagaacctgtccca

SEQ ID NO: 1723843 - DNA, 25 bp, Homo sapien
tggccacccaaaagttcgccagaac

SEQ ID NO: 1723844 - DNA, 25 bp, Homo sapien
ggacaatgttaacacattcagggtt

SEQ ID NO: 1723845 - DNA, 25 bp, Homo sapien
caagcacttagtatggtatgtatag

SEQ ID NO: 1723846 - DNA, 25 bp, Homo sapien
aagccaagtgaaaagcatctgtata

SEQ ID NO: 1723847 - DNA, 25 bp, Homo sapien
cagtgctcagaaggttgtgttatga

SEQ ID NO: 1723848 - DNA, 25 bp, Homo sapien
cttgtggtccacatttatgacgact

SEQ ID NO: 1723849 - DNA, 25 bp, Homo sapien
tccacatttatgacgactggactgc

SEQ ID NO: 1723850 - DNA, 25 bp, Homo sapien
ggactgctcgctggttcgttgtggg

SEQ ID NO: 1723851 - DNA, 25 bp, Homo sapien
tttatgacgactggactgctcgctg

SEQ ID NO: 1723852 - DNA, 25 bp, Homo sapien
atgaactctgagaggagggtggcta

SEQ ID NO: 1723853 - DNA, 25 bp, Homo sapien
tcatgaactctgagaggagggtggc

SEQ ID NO: 1723854 - DNA, 25 bp, Homo sapien
catgaactctgagaggagggtggct

SEQ ID NO: 1723855 - DNA, 25 bp, Homo sapien
tgaactctgagaggagggtggctac

SEQ ID NO: 1723856 - DNA, 25 bp, Homo sapien
aagactgaggttcctgaaggtccca

SEQ ID NO: 1723857 - DNA, 25 bp, Homo sapien
gtgttttcccaggattggcacctga

SEQ ID NO: 1723858 - DNA, 25 bp, Homo sapien
gagctgcctctgatcagcttggccc

SEQ ID NO: 1723859 - DNA, 25 bp, Homo sapien
gggaggatgctagatgtccccagaa

SEQ ID NO: 1723860 - DNA, 25 bp, Homo sapien
catggagagggaacttagatcacac

SEQ ID NO: 1723861 - DNA, 25 bp, Homo sapien
gggtctctcacagggtctcagtcag

SEQ ID NO: 1723862 - DNA, 25 bp, Homo sapien
gttagcgccagttcacccatgtgtg

SEQ ID NO: 1723863 - DNA, 25 bp, Homo sapien
tgagtttccaacgtgagcatcccag

SEQ ID NO: 1723864 - DNA, 25 bp, Homo sapien
tgagaaccgagagcctagggcaaaa

SEQ ID NO: 1723865 - DNA, 25 bp, Homo sapien
ttctcccacagaggcgcgttccggg

SEQ ID NO: 1723866 - DNA, 25 bp, Homo sapien
acgccgcacgccgaggcctgagaac

SEQ ID NO: 1723867 - DNA, 25 bp, Homo sapien
agggcaaaagggacaccgcagccgc

SEQ ID NO: 1723868 - DNA, 25 bp, Homo sapien
gccaccgaaagtcaggagggcagga

SEQ ID NO: 1723869 - DNA, 25 bp, Homo sapien
ctccacctgggcgtttcgtggtttg

SEQ ID NO: 1723870 - DNA, 25 bp, Homo sapien
aagtccctcgtaagaaaggtatcag

SEQ ID NO: 1723871 - DNA, 25 bp, Homo sapien
gactggcctctaaacgggagcctta

SEQ ID NO: 1723872 - DNA, 25 bp, Homo sapien
tgtctgccgcaggtcgtgcttgaga

SEQ ID NO: 1723873 - DNA, 25 bp, Homo sapien
ccccgtggactgtttccagtgagca

SEQ ID NO: 1723874 - DNA, 25 bp, Homo sapien
gtaggtcctctccacctcggtcatg

SEQ ID NO: 1723875 - DNA, 25 bp, Homo sapien
cggtcatgccagagtcccttttttc

SEQ ID NO: 1723876 - DNA, 25 bp, Homo sapien
ccataacaggtaaatgagaacttga

SEQ ID NO: 1723877 - DNA, 25 bp, Homo sapien
aaatgagaacttgagcgcaggcgca

SEQ ID NO: 1723878 - DNA, 25 bp, Homo sapien
gtttggcagtaatctccttcttgaa

SEQ ID NO: 1723879 - DNA, 25 bp, Homo sapien
tttggcagtaatctccttcttgaag

SEQ ID NO: 1723880 - DNA, 25 bp, Homo sapien
tctccttcttgaagtctagttccat

SEQ ID NO: 1723881 - DNA, 25 bp, Homo sapien
taatctccttcttgaagtctagttc

SEQ ID NO: 1723882 - DNA, 25 bp, Homo sapien
ccagagggtgttgtgttggcaaaac

SEQ ID NO: 1723883 - DNA, 25 bp, Homo sapien
acttttgccagagggtgttgtgttg

SEQ ID NO: 1723884 - DNA, 25 bp, Homo sapien
ccaggaggctcactgacacttgggc

SEQ ID NO: 1723885 - DNA, 25 bp, Homo sapien
gcaaaacatcccttagattccagaa

SEQ ID NO: 1723886 - DNA, 25 bp, Homo sapien
gcacagtttaagtgggtgactttta

SEQ ID NO: 1723887 - DNA, 25 bp, Homo sapien
tgtctcagactagagggataggaag

SEQ ID NO: 1723888 - DNA, 25 bp, Homo sapien
aaaaccatcgagttgtgtgcacagt

SEQ ID NO: 1723889 - DNA, 25 bp, Homo sapien
taaatctgttaccaaaaaaagcatg

SEQ ID NO: 1723890 - DNA, 25 bp, Homo sapien
cagaggagtgatcagaatgtgagaa

SEQ ID NO: 1723891 - DNA, 25 bp, Homo sapien
ttttggacttcaggcaacgacattt

SEQ ID NO: 1723892 - DNA, 25 bp, Homo sapien
caggctgaattcctcaggatattta

SEQ ID NO: 1723893 - DNA, 25 bp, Homo sapien
ggagagtttccgatccaagtcagca

SEQ ID NO: 1723894 - DNA, 25 bp, Homo sapien
ccacatggcacctcaagtggaggaa

SEQ ID NO: 1723895 - DNA, 25 bp, Homo sapien
tcttcactctgataacggtgtagga

SEQ ID NO: 1723896 - DNA, 25 bp, Homo sapien
tgttggctgcaacaatagcacgcgc

SEQ ID NO: 1723897 - DNA, 25 bp, Homo sapien
tagaatgccatcaaccagcaaatgg

SEQ ID NO: 1723898 - DNA, 25 bp, Homo sapien
tcttgttgccgaggaagactccatt

SEQ ID NO: 1723899 - DNA, 25 bp, Homo sapien
aagaagcactgctttccgacgtggt

SEQ ID NO: 1723900 - DNA, 25 bp, Homo sapien
taggtgtggatgttgctgctaaacc

SEQ ID NO: 1723901 - DNA, 25 bp, Homo sapien
gctgctaaaccttgggtaaaatgtc

SEQ ID NO: 1723902 - DNA, 25 bp, Homo sapien
aaagcacttgtccaccgtcctctct

SEQ ID NO: 1723903 - DNA, 25 bp, Homo sapien
ccaaagcacttgtccaccgtcctct

SEQ ID NO: 1723904 - DNA, 25 bp, Homo sapien
tcccaaagcacttgtccaccgtcct

SEQ ID NO: 1723905 - DNA, 25 bp, Homo sapien
caaagcacttgtccaccgtcctctc

SEQ ID NO: 1723906 - DNA, 25 bp, Homo sapien
gaaaaattcactggtgggagcattg

SEQ ID NO: 1723907 - DNA, 25 bp, Homo sapien
ggagcattgatcctgctttgtggaa

SEQ ID NO: 1723908 - DNA, 25 bp, Homo sapien
tacatatatggattgtcgcctggag

SEQ ID NO: 1723909 - DNA, 25 bp, Homo sapien
tcgcctggagttaactttgggattc

SEQ ID NO: 1723910 - DNA, 25 bp, Homo sapien
ttgggaatttgtggaagaggctcaa

SEQ ID NO: 1723911 - DNA, 25 bp, Homo sapien
gaggctcaagtggaataaatgtatc

SEQ ID NO: 1723912 - DNA, 25 bp, Homo sapien
atttgtggaagaggctcaagtggaa

SEQ ID NO: 1723913 - DNA, 25 bp, Homo sapien
gaagaggctcaagtggaataaatgt

SEQ ID NO: 1723914 - DNA, 25 bp, Homo sapien
cagttgtcaagctcctcaacctctt

SEQ ID NO: 1723915 - DNA, 25 bp, Homo sapien
tatctcatttttcaaactgttggcc

SEQ ID NO: 1723916 - DNA, 25 bp, Homo sapien
tttcaaactgttggccttctccttc

SEQ ID NO: 1723917 - DNA, 25 bp, Homo sapien
ctcctcaacctcttgtatctcattt

SEQ ID NO: 1723918 - DNA, 25 bp, Homo sapien
atgtgcattaagggcactgctggct

SEQ ID NO: 1723919 - DNA, 25 bp, Homo sapien
catgtgcattaagggcactgctggc

SEQ ID NO: 1723920 - DNA, 25 bp, Homo sapien
tgtgcattaagggcactgctggctg

SEQ ID NO: 1723921 - DNA, 25 bp, Homo sapien
tacactattctttgaagtttcttta

SEQ ID NO: 1723922 - DNA, 25 bp, Homo sapien
ggattgtcttggaaagtccaaagca

SEQ ID NO: 1723923 - DNA, 25 bp, Homo sapien
tcaggattgtcttggaaagtccaaa

SEQ ID NO: 1723924 - DNA, 25 bp, Homo sapien
caggattgtcttggaaagtccaaag

SEQ ID NO: 1723925 - DNA, 25 bp, Homo sapien
gattgtcttggaaagtccaaagcac

SEQ ID NO: 1723926 - DNA, 25 bp, Homo sapien
aggccctaaaactcatgactggtgg

SEQ ID NO: 1723927 - DNA, 25 bp, Homo sapien
tatctatgagccagaaggctggccc

SEQ ID NO: 1723928 - DNA, 25 bp, Homo sapien
aacatcaactggaaaagggtcgcca

SEQ ID NO: 1723929 - DNA, 25 bp, Homo sapien
taaagggttacaatatctgccactc

SEQ ID NO: 1723930 - DNA, 25 bp, Homo sapien
tttgactgtgtcaaagcctgtgagg

SEQ ID NO: 1723931 - DNA, 25 bp, Homo sapien
tcactagtttgactgtgtcaaagcc

SEQ ID NO: 1723932 - DNA, 25 bp, Homo sapien
tgtgtcaaagcctgtgaggcagctt

SEQ ID NO: 1723933 - DNA, 25 bp, Homo sapien
aaaatgccgtgagtcactagtttga

SEQ ID NO: 1723934 - DNA, 25 bp, Homo sapien
ttttggagatactagatctgcagcc

SEQ ID NO: 1723935 - DNA, 25 bp, Homo sapien
ggatgtatgctgatgttaacccaag

SEQ ID NO: 1723936 - DNA, 25 bp, Homo sapien
tctctgccagttagtctagaggcac

SEQ ID NO: 1723937 - DNA, 25 bp, Homo sapien
ggccagaggattagcacggatgtat

SEQ ID NO: 1723938 - DNA, 25 bp, Homo sapien
ggcgcagaatagcaagtctcgcgag

SEQ ID NO: 1723939 - DNA, 25 bp, Homo sapien
ccaagcgcgaccttctgctttgaag

SEQ ID NO: 1723940 - DNA, 25 bp, Homo sapien
cagctgcaggaagactaacacaaaa

SEQ ID NO: 1723941 - DNA, 25 bp, Homo sapien
gaagtagtaacagcgattgggccac

SEQ ID NO: 1723942 - DNA, 25 bp, Homo sapien
cttggcggcagggtgtctcggcaag

SEQ ID NO: 1723943 - DNA, 25 bp, Homo sapien
ggcagggtgtctcggcaagcagccg

SEQ ID NO: 1723944 - DNA, 25 bp, Homo sapien
tggcggcagggtgtctcggcaagca

SEQ ID NO: 1723945 - DNA, 25 bp, Homo sapien
gggtgtctcggcaagcagccgagag

SEQ ID NO: 1723946 - DNA, 25 bp, Homo sapien
cccccttgatcataattcgaggcat

SEQ ID NO: 1723947 - DNA, 25 bp, Homo sapien
tgaggcaatcctagaccactgattt

SEQ ID NO: 1723948 - DNA, 25 bp, Homo sapien
tatttcattaccgctgctttcagaa

SEQ ID NO: 1723949 - DNA, 25 bp, Homo sapien
tttcattaccgctgctttcagaatt

SEQ ID NO: 1723950 - DNA, 25 bp, Homo sapien
gattttctatgcagcaatgaggcaa

SEQ ID NO: 1723951 - DNA, 25 bp, Homo sapien
gttctaagcactgggccgctgttct

SEQ ID NO: 1723952 - DNA, 25 bp, Homo sapien
cactgagttggcatcaacttggcca

SEQ ID NO: 1723953 - DNA, 25 bp, Homo sapien
gggccgctgttcttccaatgattgg

SEQ ID NO: 1723954 - DNA, 25 bp, Homo sapien
ttggagcaatggtcctccactgagt

SEQ ID NO: 1723955 - DNA, 25 bp, Homo sapien
gaaaaaagcccataggagttagtca

SEQ ID NO: 1723956 - DNA, 25 bp, Homo sapien
aaaaagcccataggagttagtcaca

SEQ ID NO: 1723957 - DNA, 25 bp, Homo sapien
ctagaaaaaagcccataggagttag

SEQ ID NO: 1723958 - DNA, 25 bp, Homo sapien
caggtttaagttttcgtggatcatc

SEQ ID NO: 1723959 - DNA, 25 bp, Homo sapien
cctcatccatatcaattggatcagg

SEQ ID NO: 1723960 - DNA, 25 bp, Homo sapien
tcaattggatcaggccgcgctggtt

SEQ ID NO: 1723961 - DNA, 25 bp, Homo sapien
tcgtggatcatctgttgtttcctct

SEQ ID NO: 1723962 - DNA, 25 bp, Homo sapien
tctttccctgagtattagccaagcg

SEQ ID NO: 1723963 - DNA, 25 bp, Homo sapien
tccctgagtattagccaagcgggct

SEQ ID NO: 1723964 - DNA, 25 bp, Homo sapien
gccttctttccctgagtattagcca

SEQ ID NO: 1723965 - DNA, 25 bp, Homo sapien
gagtattagccaagcgggctctggc

SEQ ID NO: 1723966 - DNA, 25 bp, Homo sapien
cctgaaatctgcgtcaagagcttgg

SEQ ID NO: 1723967 - DNA, 25 bp, Homo sapien
ttagctccccatcaagatcctgttg

SEQ ID NO: 1723968 - DNA, 25 bp, Homo sapien
caaatgggatttcggcattataatc

SEQ ID NO: 1723969 - DNA, 25 bp, Homo sapien
tctgaatttctatgccagctgctcg

SEQ ID NO: 1723970 - DNA, 25 bp, Homo sapien
ttgaagaatagctgatggtaaatca

SEQ ID NO: 1723971 - DNA, 25 bp, Homo sapien
gcaggaagtactagtttgcttctct

SEQ ID NO: 1723972 - DNA, 25 bp, Homo sapien
gaaacaccactagtttgaagaatag

SEQ ID NO: 1723973 - DNA, 25 bp, Homo sapien
gggcaggaagtactagtttgcttct

SEQ ID NO: 1723974 - DNA, 25 bp, Homo sapien
aaaccatcatatgagcagtttaaga

SEQ ID NO: 1723975 - DNA, 25 bp, Homo sapien
aaccatcatatgagcagtttaagat

SEQ ID NO: 1723976 - DNA, 25 bp, Homo sapien
caaaccatcatatgagcagtttaag

SEQ ID NO: 1723977 - DNA, 25 bp, Homo sapien
cgtggtgttctaagagcaacgctgt

SEQ ID NO: 1723978 - DNA, 25 bp, Homo sapien
aacgctgttgttggtgacattgtac

SEQ ID NO: 1723979 - DNA, 25 bp, Homo sapien
gattcctcggcagtttgacgtgcaa

SEQ ID NO: 1723980 - DNA, 25 bp, Homo sapien
gacgtgcaatttcactcgcttggcc

SEQ ID NO: 1723981 - DNA, 25 bp, Homo sapien
tgagaagtcactctcatgcaatggg

SEQ ID NO: 1723982 - DNA, 25 bp, Homo sapien
tggagttacacctgagaagtcactc

SEQ ID NO: 1723983 - DNA, 25 bp, Homo sapien
gagaactgtgtttggagtctgtaca

SEQ ID NO: 1723984 - DNA, 25 bp, Homo sapien
caacttgtcgctgtggagttacacc

SEQ ID NO: 1723985 - DNA, 25 bp, Homo sapien
tattcctgataggtaaggtgttatc

SEQ ID NO: 1723986 - DNA, 25 bp, Homo sapien
cctgtatattggtgtgttgcagaac

SEQ ID NO: 1723987 - DNA, 25 bp, Homo sapien
tgatgctgccagacagctattcctg

SEQ ID NO: 1723988 - DNA, 25 bp, Homo sapien
ggtgttatcacataagacatggttc

SEQ ID NO: 1723989 - DNA, 25 bp, Homo sapien
taagagggatcactatagtctgcca

SEQ ID NO: 1723990 - DNA, 25 bp, Homo sapien
tgtttaacttgtctcgaagaggagt

SEQ ID NO: 1723991 - DNA, 25 bp, Homo sapien
tagtctgccattccatcctcgggat

SEQ ID NO: 1723992 - DNA, 25 bp, Homo sapien
ctacccggagtagagttaataactg

SEQ ID NO: 1723993 - DNA, 25 bp, Homo sapien
ccctaaacggagatgttctcgggat

SEQ ID NO: 1723994 - DNA, 25 bp, Homo sapien
aaacggagatgttctcgggattctc

SEQ ID NO: 1723995 - DNA, 25 bp, Homo sapien
cggagatgttctcgggattctcttt

SEQ ID NO: 1723996 - DNA, 25 bp, Homo sapien
caacaaccctaaacggagatgttct

SEQ ID NO: 1723997 - DNA, 25 bp, Homo sapien
tctatttcacgttcttccagctcct

SEQ ID NO: 1723998 - DNA, 25 bp, Homo sapien
cttctcggcattttctggtagaaca

SEQ ID NO: 1723999 - DNA, 25 bp, Homo sapien
gcagcatcttcaatgtaagtatcat

SEQ ID NO: 1724000 - DNA, 25 bp, Homo sapien
ctccttctcggcattttctggtaga

SEQ ID NO: 1724001 - DNA, 25 bp, Homo sapien
agctttatgcattcgtttcatttcc

SEQ ID NO: 1724002 - DNA, 25 bp, Homo sapien
tgatggtcttggcagatctttctgg

SEQ ID NO: 1724003 - DNA, 25 bp, Homo sapien
ttacacgctctgcatctcgtatggc

SEQ ID NO: 1724004 - DNA, 25 bp, Homo sapien
cagatctttctggacagctttatgc

SEQ ID NO: 1724005 - DNA, 25 bp, Homo sapien
aaatctgttaaaggcggttctacat

SEQ ID NO: 1724006 - DNA, 25 bp, Homo sapien
ctacatttaagggtcttagaatagt

SEQ ID NO: 1724007 - DNA, 25 bp, Homo sapien
ctgtaaatctgttaaaggcggttct

SEQ ID NO: 1724008 - DNA, 25 bp, Homo sapien
ttctacatttaagggtcttagaata

SEQ ID NO: 1724009 - DNA, 25 bp, Homo sapien
ttccagatggttcataagggtgatg

SEQ ID NO: 1724010 - DNA, 25 bp, Homo sapien
gatgtagaaggtcataatgaagcat

SEQ ID NO: 1724011 - DNA, 25 bp, Homo sapien
cttttcataaggattatgttccaga

SEQ ID NO: 1724012 - DNA, 25 bp, Homo sapien
tgtgctctgaattattggtaccaaa

SEQ ID NO: 1724013 - DNA, 25 bp, Homo sapien
gcctttgagtcaatgcagactgctt

SEQ ID NO: 1724014 - DNA, 25 bp, Homo sapien
gaagggtggataacaatacctagga

SEQ ID NO: 1724015 - DNA, 25 bp, Homo sapien
gcagctatcatttctcaggtaccta

SEQ ID NO: 1724016 - DNA, 25 bp, Homo sapien
gtttaagtactacaaacacttgcca

SEQ ID NO: 1724017 - DNA, 25 bp, Homo sapien
ttggcccgtgtgtagcggctctgcc

SEQ ID NO: 1724018 - DNA, 25 bp, Homo sapien
gatataaaacttgactgtagcattc

SEQ ID NO: 1724019 - DNA, 25 bp, Homo sapien
tcaattctgtcctttttactagcca

SEQ ID NO: 1724020 - DNA, 25 bp, Homo sapien
agcattcttcccacacctggttata

SEQ ID NO: 1724021 - DNA, 25 bp, Homo sapien
catgccattggcaaaatgcctacac

SEQ ID NO: 1724022 - DNA, 25 bp, Homo sapien
ccattggcaaaatgcctacacagat

SEQ ID NO: 1724023 - DNA, 25 bp, Homo sapien
tgccattggcaaaatgcctacacag

SEQ ID NO: 1724024 - DNA, 25 bp, Homo sapien
ttacatgccattggcaaaatgccta

SEQ ID NO: 1724025 - DNA, 25 bp, Homo sapien
gtggaaaggataatttaagtatagc

SEQ ID NO: 1724026 - DNA, 25 bp, Homo sapien
agcatttagtttatacaatataact

SEQ ID NO: 1724027 - DNA, 25 bp, Homo sapien
cagccatggcatacagtgcttacag

SEQ ID NO: 1724028 - DNA, 25 bp, Homo sapien
taatccattcaggagacaccagcca

SEQ ID NO: 1724029 - DNA, 25 bp, Homo sapien
gattcacggttccaaagttcatggc

SEQ ID NO: 1724030 - DNA, 25 bp, Homo sapien
gatagggccataatttagattcacg

SEQ ID NO: 1724031 - DNA, 25 bp, Homo sapien
gctaactttatcaccactagacctg

SEQ ID NO: 1724032 - DNA, 25 bp, Homo sapien
ctttttcaatcaatagctaacttta

SEQ ID NO: 1724033 - DNA, 25 bp, Homo sapien
caccactagacctgcattacaggaa

SEQ ID NO: 1724034 - DNA, 25 bp, Homo sapien
ccagcaaccctgtatttcaaaacca

SEQ ID NO: 1724035 - DNA, 25 bp, Homo sapien
gcaagtactttcagggactgcaccc

SEQ ID NO: 1724036 - DNA, 25 bp, Homo sapien
tgggacagtgcaaaagtagccttct

SEQ ID NO: 1724037 - DNA, 25 bp, Homo sapien
tattttgggactagctgcaagccac

SEQ ID NO: 1724038 - DNA, 25 bp, Homo sapien
gggctaaaaaggtaccatgcgttca

SEQ ID NO: 1724039 - DNA, 25 bp, Homo sapien
tcaaaagtgcgtaactccaagtgag

SEQ ID NO: 1724040 - DNA, 25 bp, Homo sapien
tgagccccatagcacgagactggta

SEQ ID NO: 1724041 - DNA, 25 bp, Homo sapien
cctcttggcttctgtcgtcatgtga

SEQ ID NO: 1724042 - DNA, 25 bp, Homo sapien
tttggtcccataagtcattcaactg

SEQ ID NO: 1724043 - DNA, 25 bp, Homo sapien
tctttcttgttgtcgctgaacgtct

SEQ ID NO: 1724044 - DNA, 25 bp, Homo sapien
tctctttcttgttgtcgctgaacgt

SEQ ID NO: 1724045 - DNA, 25 bp, Homo sapien
aatcagcatatctatgttgaagttc

SEQ ID NO: 1724046 - DNA, 25 bp, Homo sapien
tatctatgttgaagttccttttctc

SEQ ID NO: 1724047 - DNA, 25 bp, Homo sapien
cagccttctagagtatgaaaaccgg

SEQ ID NO: 1724048 - DNA, 25 bp, Homo sapien
taaactctaaaatgtccgtcctgtg

SEQ ID NO: 1724049 - DNA, 25 bp, Homo sapien
cacagaatgtgtaagatcgatatca

SEQ ID NO: 1724050 - DNA, 25 bp, Homo sapien
ggcaattaattaatcctgtgacaga

SEQ ID NO: 1724051 - DNA, 25 bp, Homo sapien
gaggtctctttgatcgtccagtcta

SEQ ID NO: 1724052 - DNA, 25 bp, Homo sapien
ggcacagggtatacattcaatatcg

SEQ ID NO: 1724053 - DNA, 25 bp, Homo sapien
cagcttatagtggtacggtgcggca

SEQ ID NO: 1724054 - DNA, 25 bp, Homo sapien
tatgtggctctatacaacgaggtct

SEQ ID NO: 1724055 - DNA, 25 bp, Homo sapien
cctgggctttacaggatactgacaa

SEQ ID NO: 1724056 - DNA, 25 bp, Homo sapien
tggttggccaacattaagtctgcag

SEQ ID NO: 1724057 - DNA, 25 bp, Homo sapien
aatagtcaccaaaatcgctgtatgg

SEQ ID NO: 1724058 - DNA, 25 bp, Homo sapien
tatggtgctggtaaagaatcctggg

SEQ ID NO: 1724059 - DNA, 25 bp, Homo sapien
tctgccctttagaacaacaaacgca

SEQ ID NO: 1724060 - DNA, 25 bp, Homo sapien
gcggagcagacctagttcctctgaa

SEQ ID NO: 1724061 - DNA, 25 bp, Homo sapien
catggcccatgactcttagctctgt

SEQ ID NO: 1724062 - DNA, 25 bp, Homo sapien
tctgaaccaggaatcgcatcttgtc

SEQ ID NO: 1724063 - DNA, 25 bp, Homo sapien
tcagcttctgcgcagagagtacggt

SEQ ID NO: 1724064 - DNA, 25 bp, Homo sapien
gagacaccccaacatatccaactgt

SEQ ID NO: 1724065 - DNA, 25 bp, Homo sapien
ggcccagacagcttgtatgcatatg

SEQ ID NO: 1724066 - DNA, 25 bp, Homo sapien
tgatgcagtgcacaccggtcagctt

SEQ ID NO: 1724067 - DNA, 25 bp, Homo sapien
agccttctgaccacggggtctgcca

SEQ ID NO: 1724068 - DNA, 25 bp, Homo sapien
ttctgaccacggggtctgccaccag

SEQ ID NO: 1724069 - DNA, 25 bp, Homo sapien
tgccaccagccttctgaccacgggg

SEQ ID NO: 1724070 - DNA, 25 bp, Homo sapien
ccaccagccttctgaccacggggtc

SEQ ID NO: 1724071 - DNA, 25 bp, Homo sapien
ggtcatggttcggttcagttcaagt

SEQ ID NO: 1724072 - DNA, 25 bp, Homo sapien
aagtctcactttgccctcggatagg

SEQ ID NO: 1724073 - DNA, 25 bp, Homo sapien
tatgtttgtgtctagttcgaactgg

SEQ ID NO: 1724074 - DNA, 25 bp, Homo sapien
tggattcggtttcgggttcagtgaa

SEQ ID NO: 1724075 - DNA, 25 bp, Homo sapien
cacagcaccaccaggtgtaattcga

SEQ ID NO: 1724076 - DNA, 25 bp, Homo sapien
gcaccaccaggtgtaattcgatcag

SEQ ID NO: 1724077 - DNA, 25 bp, Homo sapien
ccaggtgtaattcgatcagagtgtc

SEQ ID NO: 1724078 - DNA, 25 bp, Homo sapien
ggtgtaattcgatcagagtgtcgca

SEQ ID NO: 1724079 - DNA, 25 bp, Homo sapien
acctagcaaagtcagggccgggatg

SEQ ID NO: 1724080 - DNA, 25 bp, Homo sapien
aggcccacacctagcaaagtcaggg

SEQ ID NO: 1724081 - DNA, 25 bp, Homo sapien
acacctagcaaagtcagggccggga

SEQ ID NO: 1724082 - DNA, 25 bp, Homo sapien
ccacacctagcaaagtcagggccgg

SEQ ID NO: 1724083 - DNA, 25 bp, Homo sapien
atccagtctgaccagtagctaagaa

SEQ ID NO: 1724084 - DNA, 25 bp, Homo sapien
ccctgaaagctttttggcagtctca

SEQ ID NO: 1724085 - DNA, 25 bp, Homo sapien
tgttacatggtgaggaaattccctg

SEQ ID NO: 1724086 - DNA, 25 bp, Homo sapien
tgaaagctttttggcagtctcatcc

SEQ ID NO: 1724087 - DNA, 25 bp, Homo sapien
actgtttcagagaacgtttatagct

SEQ ID NO: 1724088 - DNA, 25 bp, Homo sapien
ttcagagaacgtttatagctttctg

SEQ ID NO: 1724089 - DNA, 25 bp, Homo sapien
tggctgaactgtttcagagaacgtt

SEQ ID NO: 1724090 - DNA, 25 bp, Homo sapien
gaactgtttcagagaacgtttatag

SEQ ID NO: 1724091 - DNA, 25 bp, Homo sapien
taaacctttctagagtgacactaga

SEQ ID NO: 1724092 - DNA, 25 bp, Homo sapien
ggacttaactgccacattgcatctt

SEQ ID NO: 1724093 - DNA, 25 bp, Homo sapien
tattgacagtggacttaactgccac

SEQ ID NO: 1724094 - DNA, 25 bp, Homo sapien
aaaatattgacagtggacttaactg

SEQ ID NO: 1724095 - DNA, 25 bp, Homo sapien
gacagtggacttaactgccacattg

SEQ ID NO: 1724096 - DNA, 25 bp, Homo sapien
cagaggaggtggagtggcatcgcgg

SEQ ID NO: 1724097 - DNA, 25 bp, Homo sapien
cacagccacctggactggtcaggaa

SEQ ID NO: 1724098 - DNA, 25 bp, Homo sapien
aagtcaaagtgtgcgagaccaggga

SEQ ID NO: 1724099 - DNA, 25 bp, Homo sapien
gggagacttcacaatgcctcctgag

SEQ ID NO: 1724100 - DNA, 25 bp, Homo sapien
ccaaggccagatctgttgtccaagg

SEQ ID NO: 1724101 - DNA, 25 bp, Homo sapien
ttcaactcacacaataaactcaggg

SEQ ID NO: 1724102 - DNA, 25 bp, Homo sapien
cttccacttcaactcacacaataaa

SEQ ID NO: 1724103 - DNA, 25 bp, Homo sapien
aagggaagccgccattcatcacctt

SEQ ID NO: 1724104 - DNA, 25 bp, Homo sapien
tccagttaacctttcaggaggtcac

SEQ ID NO: 1724105 - DNA, 25 bp, Homo sapien
gagtgcgttgcagtatctctgcttg

SEQ ID NO: 1724106 - DNA, 25 bp, Homo sapien
gcctgttataaggtcctataggtaa

SEQ ID NO: 1724107 - DNA, 25 bp, Homo sapien
tgaagttctcagtggtggctacatg

SEQ ID NO: 1724108 - DNA, 25 bp, Homo sapien
ctttgtcgagggaaggctcagttac

SEQ ID NO: 1724109 - DNA, 25 bp, Homo sapien
aaaacagctgcaaccccataatggc

SEQ ID NO: 1724110 - DNA, 25 bp, Homo sapien
tcagggagtgtaaagaattagggaa

SEQ ID NO: 1724111 - DNA, 25 bp, Homo sapien
tgggaatcttctggaccccatctgc

SEQ ID NO: 1724112 - DNA, 25 bp, Homo sapien
gtttcacaggaagcgtaagttgcta

SEQ ID NO: 1724113 - DNA, 25 bp, Homo sapien
gaagcgtaagttgctagagacagcg

SEQ ID NO: 1724114 - DNA, 25 bp, Homo sapien
caggaagcgtaagttgctagagaca

SEQ ID NO: 1724115 - DNA, 25 bp, Homo sapien
cgtaagttgctagagacagcgagag

SEQ ID NO: 1724116 - DNA, 25 bp, Homo sapien
caaaggtagaacgcagggctccagt

SEQ ID NO: 1724117 - DNA, 25 bp, Homo sapien
aggtagaacgcagggctccagtccc

SEQ ID NO: 1724118 - DNA, 25 bp, Homo sapien
aaggtagaacgcagggctccagtcc

SEQ ID NO: 1724119 - DNA, 25 bp, Homo sapien
aaaggtagaacgcagggctccagtc

SEQ ID NO: 1724120 - DNA, 25 bp, Homo sapien
tttagcaggagccacctctactcgg

SEQ ID NO: 1724121 - DNA, 25 bp, Homo sapien
gagttctgtggctacaactggctca

SEQ ID NO: 1724122 - DNA, 25 bp, Homo sapien
catagctgcctattaccattggtgc

SEQ ID NO: 1724123 - DNA, 25 bp, Homo sapien
tgtggttcccagtcactcacgagaa

SEQ ID NO: 1724124 - DNA, 25 bp, Homo sapien
ccaccacgcggcacaggggggtgtg

SEQ ID NO: 1724125 - DNA, 25 bp, Homo sapien
agccaccacgcggcacaggggggtg

SEQ ID NO: 1724126 - DNA, 25 bp, Homo sapien
accacgcggcacaggggggtgtggt

SEQ ID NO: 1724127 - DNA, 25 bp, Homo sapien
gccaccacgcggcacaggggggtgt

SEQ ID NO: 1724128 - DNA, 25 bp, Homo sapien
tttccacagaagtgaacattagcag

SEQ ID NO: 1724129 - DNA, 25 bp, Homo sapien
cattagcagttgtggagctgtgagt

SEQ ID NO: 1724130 - DNA, 25 bp, Homo sapien
cctaaggagcccgtgatgttgacac

SEQ ID NO: 1724131 - DNA, 25 bp, Homo sapien
taaggagcccgtgatgttgacacag

SEQ ID NO: 1724132 - DNA, 25 bp, Homo sapien
cggtgctaagaatatggaaggccat

SEQ ID NO: 1724133 - DNA, 25 bp, Homo sapien
tgcaatccagtgtcggtgctaagaa

SEQ ID NO: 1724134 - DNA, 25 bp, Homo sapien
caagcctcaggtagtaaatcatgca

SEQ ID NO: 1724135 - DNA, 25 bp, Homo sapien
tagatgtttgcactagaggggagtt

SEQ ID NO: 1724136 - DNA, 25 bp, Homo sapien
gctccagcctgatcttggacctctg

SEQ ID NO: 1724137 - DNA, 25 bp, Homo sapien
ggcctgattaaacccatatatcttc

SEQ ID NO: 1724138 - DNA, 25 bp, Homo sapien
gcagggctttctctttcactggatg

SEQ ID NO: 1724139 - DNA, 25 bp, Homo sapien
tgtcaggggcctgattaaacccata

SEQ ID NO: 1724140 - DNA, 25 bp, Homo sapien
ccatcttccttttgttgtcccctgc

SEQ ID NO: 1724141 - DNA, 25 bp, Homo sapien
catcttccttttgttgtcccctgcc

SEQ ID NO: 1724142 - DNA, 25 bp, Homo sapien
tccatcttccttttgttgtcccctg

SEQ ID NO: 1724143 - DNA, 25 bp, Homo sapien
tattctcccggcatgggtaacgtga

SEQ ID NO: 1724144 - DNA, 25 bp, Homo sapien
gggtaacgtgaatcctccagctgta

SEQ ID NO: 1724145 - DNA, 25 bp, Homo sapien
tcccggcatgggtaacgtgaatcct

SEQ ID NO: 1724146 - DNA, 25 bp, Homo sapien
gaatcctccagctgtattagggaat

SEQ ID NO: 1724147 - DNA, 25 bp, Homo sapien
gacaagacaacttttaggacatcaa

SEQ ID NO: 1724148 - DNA, 25 bp, Homo sapien
ggtaccacagggcagctctttgaca

SEQ ID NO: 1724149 - DNA, 25 bp, Homo sapien
gacaacttttaggacatcaattatt

SEQ ID NO: 1724150 - DNA, 25 bp, Homo sapien
cttcaggtaccacagggcagctctt

SEQ ID NO: 1724151 - DNA, 25 bp, Homo sapien
gctttgccttggtagggtaagcaga

SEQ ID NO: 1724152 - DNA, 25 bp, Homo sapien
ctgctttgccttggtagggtaagca

SEQ ID NO: 1724153 - DNA, 25 bp, Homo sapien
ctttgccttggtagggtaagcagat

SEQ ID NO: 1724154 - DNA, 25 bp, Homo sapien
tgctttgccttggtagggtaagcag

SEQ ID NO: 1724155 - DNA, 25 bp, Homo sapien
ctgccatagggcctaagtcccccat

SEQ ID NO: 1724156 - DNA, 25 bp, Homo sapien
ttgacttcagcaacaccagcccatt

SEQ ID NO: 1724157 - DNA, 25 bp, Homo sapien
gttgacttcagcaacaccagcccat

SEQ ID NO: 1724158 - DNA, 25 bp, Homo sapien
tttgctctgccatagggcctaagtc

SEQ ID NO: 1724159 - DNA, 25 bp, Homo sapien
gattgaaataaagagtgacaggcag

SEQ ID NO: 1724160 - DNA, 25 bp, Homo sapien
tggagattgaaataaagagtgacag

SEQ ID NO: 1724161 - DNA, 25 bp, Homo sapien
gagattgaaataaagagtgacaggc

SEQ ID NO: 1724162 - DNA, 25 bp, Homo sapien
agattgaaataaagagtgacaggca

SEQ ID NO: 1724163 - DNA, 25 bp, Homo sapien
cccaggacggcagctgctaggggct

SEQ ID NO: 1724164 - DNA, 25 bp, Homo sapien
gctggccccaggacggcagctgcta

SEQ ID NO: 1724165 - DNA, 25 bp, Homo sapien
ggacggcagctgctaggggctgctt

SEQ ID NO: 1724166 - DNA, 25 bp, Homo sapien
cggcagctgctaggggctgcttcct

SEQ ID NO: 1724167 - DNA, 25 bp, Homo sapien
tacaccaacaggatggatgcatgtg

SEQ ID NO: 1724168 - DNA, 25 bp, Homo sapien
cctcatagctgtgccatctggatct

SEQ ID NO: 1724169 - DNA, 25 bp, Homo sapien
ggatctactgctgagagtgcccact

SEQ ID NO: 1724170 - DNA, 25 bp, Homo sapien
tagggttgtctccagagggtgtcac

SEQ ID NO: 1724171 - DNA, 25 bp, Homo sapien
gcaggtggttctgtggcgtcatttg

SEQ ID NO: 1724172 - DNA, 25 bp, Homo sapien
cagcaagaatagcaggtggttctgt

SEQ ID NO: 1724173 - DNA, 25 bp, Homo sapien
aggtggttctgtggcgtcatttgga

SEQ ID NO: 1724174 - DNA, 25 bp, Homo sapien
ggttctgtggcgtcatttggagaca

SEQ ID NO: 1724175 - DNA, 25 bp, Homo sapien
tctccagggacaattcatcgaggaa

SEQ ID NO: 1724176 - DNA, 25 bp, Homo sapien
gagtgatgtaatttccgatttgccc

SEQ ID NO: 1724177 - DNA, 25 bp, Homo sapien
atttgcccaccgagcacagcatgct

SEQ ID NO: 1724178 - DNA, 25 bp, Homo sapien
tggataccattattgctctccaggg

SEQ ID NO: 1724179 - DNA, 25 bp, Homo sapien
agcctgctggcaacagattctggga

SEQ ID NO: 1724180 - DNA, 25 bp, Homo sapien
cacaaacttgtctggcacagtgggt

SEQ ID NO: 1724181 - DNA, 25 bp, Homo sapien
gagtgcctctcatcgggaaatttaa

SEQ ID NO: 1724182 - DNA, 25 bp, Homo sapien
cagtgtactacatcaatgcagggta

SEQ ID NO: 1724183 - DNA, 25 bp, Homo sapien
catgcctggacgtgtttgggaactg

SEQ ID NO: 1724184 - DNA, 25 bp, Homo sapien
tatgcataccttcatgcaggaaggc

SEQ ID NO: 1724185 - DNA, 25 bp, Homo sapien
taggaaggccttatagaaatgagac

SEQ ID NO: 1724186 - DNA, 25 bp, Homo sapien
ttgtgatcccagtttatatatagca

SEQ ID NO: 1724187 - DNA, 25 bp, Homo sapien
ggcaaagaccacagctcgctcttca

SEQ ID NO: 1724188 - DNA, 25 bp, Homo sapien
aagaccacagctcgctcttcaaacc

SEQ ID NO: 1724189 - DNA, 25 bp, Homo sapien
gaccacagctcgctcttcaaacctg

SEQ ID NO: 1724190 - DNA, 25 bp, Homo sapien
caaagaccacagctcgctcttcaaa

SEQ ID NO: 1724191 - DNA, 25 bp, Homo sapien
actcactcagcacagacccagcagc

SEQ ID NO: 1724192 - DNA, 25 bp, Homo sapien
caactcactcagcacagacccagca

SEQ ID NO: 1724193 - DNA, 25 bp, Homo sapien
tcactcagcacagacccagcagcca

SEQ ID NO: 1724194 - DNA, 25 bp, Homo sapien
cactcagcacagacccagcagccat

SEQ ID NO: 1724195 - DNA, 25 bp, Homo sapien
tgaggagacaaaatcctacactcat

SEQ ID NO: 1724196 - DNA, 25 bp, Homo sapien
tgggtgaggagacaaaatcctacac

SEQ ID NO: 1724197 - DNA, 25 bp, Homo sapien
ggtgaggagacaaaatcctacactc

SEQ ID NO: 1724198 - DNA, 25 bp, Homo sapien
ctgggtgaggagacaaaatcctaca

SEQ ID NO: 1724199 - DNA, 25 bp, Homo sapien
gaggatgaggagaactgtttctgtg

SEQ ID NO: 1724200 - DNA, 25 bp, Homo sapien
gatgaggagaactgtttctgtgccc

SEQ ID NO: 1724201 - DNA, 25 bp, Homo sapien
gaggagaactgtttctgtgcccagg

SEQ ID NO: 1724202 - DNA, 25 bp, Homo sapien
tgaggagaactgtttctgtgcccag

SEQ ID NO: 1724203 - DNA, 25 bp, Homo sapien
gggcagcttcagatccggcgagttt

SEQ ID NO: 1724204 - DNA, 25 bp, Homo sapien
gagttgtggtgctcagcgccgatct

SEQ ID NO: 1724205 - DNA, 25 bp, Homo sapien
gagttttccactagcctggctgcgg

SEQ ID NO: 1724206 - DNA, 25 bp, Homo sapien
cagattcgtcgtcaaattggaagcc

SEQ ID NO: 1724207 - DNA, 25 bp, Homo sapien
ggggagcagcaagtgtacaggtaca

SEQ ID NO: 1724208 - DNA, 25 bp, Homo sapien
aggggagcagcaagtgtacaggtac

SEQ ID NO: 1724209 - DNA, 25 bp, Homo sapien
gggagcagcaagtgtacaggtacac

SEQ ID NO: 1724210 - DNA, 25 bp, Homo sapien
caggggagcagcaagtgtacaggta

SEQ ID NO: 1724211 - DNA, 25 bp, Homo sapien
cctgcttcttgcggactccttctgg

SEQ ID NO: 1724212 - DNA, 25 bp, Homo sapien
tcctgtggcgcggtctcaggtccga

SEQ ID NO: 1724213 - DNA, 25 bp, Homo sapien
tggcgcggtctcaggtccgaaccct

SEQ ID NO: 1724214 - DNA, 25 bp, Homo sapien
ctgtggcgcggtctcaggtccgaac

SEQ ID NO: 1724215 - DNA, 25 bp, Homo sapien
tggacttcttgtccagcaccatgct

SEQ ID NO: 1724216 - DNA, 25 bp, Homo sapien
gacagagggctctgtgtcagtccag

SEQ ID NO: 1724217 - DNA, 25 bp, Homo sapien
ctaagctataaaaagtttatgaggg

SEQ ID NO: 1724218 - DNA, 25 bp, Homo sapien
gctactgcattccacaggaagacag

SEQ ID NO: 1724219 - DNA, 25 bp, Homo sapien
gcatcactcaggcaggcagattctt

SEQ ID NO: 1724220 - DNA, 25 bp, Homo sapien
gcacatagcagatgcccggaaagtt

SEQ ID NO: 1724221 - DNA, 25 bp, Homo sapien
tctactggttccttgccccagggaa

SEQ ID NO: 1724222 - DNA, 25 bp, Homo sapien
tgtgaaaagtacagtggttcccagc

SEQ ID NO: 1724223 - DNA, 25 bp, Homo sapien
tgtcctccatgtccttgtcggccat

SEQ ID NO: 1724224 - DNA, 25 bp, Homo sapien
ctgtcctccatgtccttgtcggcca

SEQ ID NO: 1724225 - DNA, 25 bp, Homo sapien
attcctagagcccagaaccgtgtgc

SEQ ID NO: 1724226 - DNA, 25 bp, Homo sapien
gctcctataagcatgtacgcccaag

SEQ ID NO: 1724227 - DNA, 25 bp, Homo sapien
gcagagtcctgagacaccacagtca

SEQ ID NO: 1724228 - DNA, 25 bp, Homo sapien
tgatgatcctgggtcgcagagtcct

SEQ ID NO: 1724229 - DNA, 25 bp, Homo sapien
tgccagagtagtggagtgtcctccc

SEQ ID NO: 1724230 - DNA, 25 bp, Homo sapien
gagtcttcaagagagtgccagagta

SEQ ID NO: 1724231 - DNA, 25 bp, Homo sapien
ttacttcccaatcagtgacaaaggg

SEQ ID NO: 1724232 - DNA, 25 bp, Homo sapien
tcttcacagaagagtggtgctctgg

SEQ ID NO: 1724233 - DNA, 25 bp, Homo sapien
agctgatctcttgccagaaacccta

SEQ ID NO: 1724234 - DNA, 25 bp, Homo sapien
gggtatcagcaatggaagatgaaat

SEQ ID NO: 1724235 - DNA, 25 bp, Homo sapien
ctcaggagccgatgcgatcaactgg

SEQ ID NO: 1724236 - DNA, 25 bp, Homo sapien
aaggcaggccaacgttcagattcag

SEQ ID NO: 1724237 - DNA, 25 bp, Homo sapien
ctgcctggaatgctactctccctca

SEQ ID NO: 1724238 - DNA, 25 bp, Homo sapien
tgcctggaatgctactctccctcat

SEQ ID NO: 1724239 - DNA, 25 bp, Homo sapien
tgccacttacacaaaaggataccag

SEQ ID NO: 1724240 - DNA, 25 bp, Homo sapien
agaggaagtctagtctgtctgatcc

SEQ ID NO: 1724241 - DNA, 25 bp, Homo sapien
tcttatatcccactatcagtcaggg

SEQ ID NO: 1724242 - DNA, 25 bp, Homo sapien
gaataaagcaggataggacaaggga

SEQ ID NO: 1724243 - DNA, 25 bp, Homo sapien
caagagacactttcaccacggcctt

SEQ ID NO: 1724244 - DNA, 25 bp, Homo sapien
gccttctccaggaacgcagatataa

SEQ ID NO: 1724245 - DNA, 25 bp, Homo sapien
ttagggcctggcatgcattcatcaa

SEQ ID NO: 1724246 - DNA, 25 bp, Homo sapien
tcaactttatagtagcgccgacttg

SEQ ID NO: 1724247 - DNA, 25 bp, Homo sapien
tctatgcctcttaaaagtgtctgca

SEQ ID NO: 1724248 - DNA, 25 bp, Homo sapien
tgtctgcaagcatgatagtcactcc

SEQ ID NO: 1724249 - DNA, 25 bp, Homo sapien
gccaaatacggccactagctgagca

SEQ ID NO: 1724250 - DNA, 25 bp, Homo sapien
ccatgaagccaaatacggccactag

SEQ ID NO: 1724251 - DNA, 25 bp, Homo sapien
tcatgaggatccatttggcttgttt

SEQ ID NO: 1724252 - DNA, 25 bp, Homo sapien
agtcactgtgtgtgcttgcagaagc

SEQ ID NO: 1724253 - DNA, 25 bp, Homo sapien
cactgtgtgtgcttgcagaagccct

SEQ ID NO: 1724254 - DNA, 25 bp, Homo sapien
ctgcctcatgaggatccatttggct

SEQ ID NO: 1724255 - DNA, 25 bp, Homo sapien
ttgttcagcctcaatctggaaattg

SEQ ID NO: 1724256 - DNA, 25 bp, Homo sapien
cagaacaggctgacactgtagcaca

SEQ ID NO: 1724257 - DNA, 25 bp, Homo sapien
tccaaaagccagaacaggctgacac

SEQ ID NO: 1724258 - DNA, 25 bp, Homo sapien
catcagaggcatatgggagctctct

SEQ ID NO: 1724259 - DNA, 25 bp, Homo sapien
accatgccccgccaaaagtgcattt

SEQ ID NO: 1724260 - DNA, 25 bp, Homo sapien
aagtcctatatgacacatccatttt

SEQ ID NO: 1724261 - DNA, 25 bp, Homo sapien
tagtaaaaggctattaagtcctata

SEQ ID NO: 1724262 - DNA, 25 bp, Homo sapien
caccatgccccgccaaaagtgcatt

SEQ ID NO: 1724263 - DNA, 25 bp, Homo sapien
tggaaagaactgacaccttagcaac

SEQ ID NO: 1724264 - DNA, 25 bp, Homo sapien
tagctctaatagattgctgaggtgg

SEQ ID NO: 1724265 - DNA, 25 bp, Homo sapien
tattgcagtgactaggatctccagt

SEQ ID NO: 1724266 - DNA, 25 bp, Homo sapien
gatctccagtacactattgaatagg

SEQ ID NO: 1724267 - DNA, 25 bp, Homo sapien
gcctctcttgatactgcttcctaga

SEQ ID NO: 1724268 - DNA, 25 bp, Homo sapien
ctgaacatgccatttagaggttatg

SEQ ID NO: 1724269 - DNA, 25 bp, Homo sapien
taatagttgcgattcaaaaacactg

SEQ ID NO: 1724270 - DNA, 25 bp, Homo sapien
tatattgtaatagttgcgattcaaa

SEQ ID NO: 1724271 - DNA, 25 bp, Homo sapien
cctgctgatgtgacaactgtgatgt

SEQ ID NO: 1724272 - DNA, 25 bp, Homo sapien
agcctgctgatgtgacaactgtgat

SEQ ID NO: 1724273 - DNA, 25 bp, Homo sapien
gcctgctgatgtgacaactgtgatg

SEQ ID NO: 1724274 - DNA, 25 bp, Homo sapien
tagtatataggcacgtaggatccag

SEQ ID NO: 1724275 - DNA, 25 bp, Homo sapien
gacgttcccataattgccctacata

SEQ ID NO: 1724276 - DNA, 25 bp, Homo sapien
gaatcattcatagggtctgacagaa

SEQ ID NO: 1724277 - DNA, 25 bp, Homo sapien
gcatgccaaagttgggacgttccca

SEQ ID NO: 1724278 - DNA, 25 bp, Homo sapien
catttgtatcccctaagatgtatca

SEQ ID NO: 1724279 - DNA, 25 bp, Homo sapien
cagaagtaaaccactatgggattta

SEQ ID NO: 1724280 - DNA, 25 bp, Homo sapien
taagtaggctaatggcaaacataat

SEQ ID NO: 1724281 - DNA, 25 bp, Homo sapien
agtaagttttgtagcatgtgtcctt

SEQ ID NO: 1724282 - DNA, 25 bp, Homo sapien
cagctattgctatctgtgttcttac

SEQ ID NO: 1724283 - DNA, 25 bp, Homo sapien
atcaaattggtgttgaccattggca

SEQ ID NO: 1724284 - DNA, 25 bp, Homo sapien
tcttactccttgtatggtgttttaa

SEQ ID NO: 1724285 - DNA, 25 bp, Homo sapien
gtccaatcaaattggtgttgaccat

SEQ ID NO: 1724286 - DNA, 25 bp, Homo sapien
gaatatgaacacaagcgtgagtcac

SEQ ID NO: 1724287 - DNA, 25 bp, Homo sapien
gaaggcaacaatatgtctccattgg

SEQ ID NO: 1724288 - DNA, 25 bp, Homo sapien
tctccaaggagacctaggataactc

SEQ ID NO: 1724289 - DNA, 25 bp, Homo sapien
tgagtcacatcagtgtctctccaag

SEQ ID NO: 1724290 - DNA, 25 bp, Homo sapien
tccttgcacagctttcattgaaact

SEQ ID NO: 1724291 - DNA, 25 bp, Homo sapien
tggcagacagtatgaagcttttcag

SEQ ID NO: 1724292 - DNA, 25 bp, Homo sapien
tctgggaacagtcatattcttccct

SEQ ID NO: 1724293 - DNA, 25 bp, Homo sapien
atggtagtgtaaatgcttgactgcc

SEQ ID NO: 1724294 - DNA, 25 bp, Homo sapien
gaaaccatgtctaatgatcttgagt

SEQ ID NO: 1724295 - DNA, 25 bp, Homo sapien
agcattgaagaaaccatgtctaatg

SEQ ID NO: 1724296 - DNA, 25 bp, Homo sapien
ttgaagaaaccatgtctaatgatct

SEQ ID NO: 1724297 - DNA, 25 bp, Homo sapien
gaagaaaccatgtctaatgatcttg

SEQ ID NO: 1724298 - DNA, 25 bp, Homo sapien
gcaatgcgtaagtgttccagtttct

SEQ ID NO: 1724299 - DNA, 25 bp, Homo sapien
gtttctccacaacctaaccaatgga

SEQ ID NO: 1724300 - DNA, 25 bp, Homo sapien
cacacccgagagcagctataccatt

SEQ ID NO: 1724301 - DNA, 25 bp, Homo sapien
ctattcctggtgagggaacgcccca

SEQ ID NO: 1724302 - DNA, 25 bp, Homo sapien
tcagctttcttgctttgggttggaa

SEQ ID NO: 1724303 - DNA, 25 bp, Homo sapien
cttttttcagggttctcagctttct

SEQ ID NO: 1724304 - DNA, 25 bp, Homo sapien
agttgtgattttttggagaagaggc

SEQ ID NO: 1724305 - DNA, 25 bp, Homo sapien
gctttgggttggaatatgctccttt

SEQ ID NO: 1724306 - DNA, 25 bp, Homo sapien
tgtatcctcaggtagaccaaaggac

SEQ ID NO: 1724307 - DNA, 25 bp, Homo sapien
gctccaagatacatcgtatttcctg

SEQ ID NO: 1724308 - DNA, 25 bp, Homo sapien
ttgctccaagatacatcgtatttcc

SEQ ID NO: 1724309 - DNA, 25 bp, Homo sapien
gaccaaaggactgcgtcttaatcat

SEQ ID NO: 1724310 - DNA, 25 bp, Homo sapien
ctccttttggatctagtcctaagct

SEQ ID NO: 1724311 - DNA, 25 bp, Homo sapien
tctccttttggatctagtcctaagc

SEQ ID NO: 1724312 - DNA, 25 bp, Homo sapien
ccttttggatctagtcctaagcttt

SEQ ID NO: 1724313 - DNA, 25 bp, Homo sapien
ttctccttttggatctagtcctaag

SEQ ID NO: 1724314 - DNA, 25 bp, Homo sapien
atccgtccccactcagtggttaaca

SEQ ID NO: 1724315 - DNA, 25 bp, Homo sapien
gtgctgtggagacacacaccatccg

SEQ ID NO: 1724316 - DNA, 25 bp, Homo sapien
cactcagtggttaacaacagtactc

SEQ ID NO: 1724317 - DNA, 25 bp, Homo sapien
tgctgtggagacacacaccatccgt

SEQ ID NO: 1724318 - DNA, 25 bp, Homo sapien
gcatgtcatcccaaatctagagttt

SEQ ID NO: 1724319 - DNA, 25 bp, Homo sapien
gaaaggctgaactgacttgcctcca

SEQ ID NO: 1724320 - DNA, 25 bp, Homo sapien
aaaaatctgcttttagcgagtcatc

SEQ ID NO: 1724321 - DNA, 25 bp, Homo sapien
ttaaaatgccaatgaacaactagtt

SEQ ID NO: 1724322 - DNA, 25 bp, Homo sapien
acttccctaaggtccactctgagga

SEQ ID NO: 1724323 - DNA, 25 bp, Homo sapien
gggacactttgccaccttggctttg

SEQ ID NO: 1724324 - DNA, 25 bp, Homo sapien
gacactttgccaccttggctttgag

SEQ ID NO: 1724325 - DNA, 25 bp, Homo sapien
ggacctgacatggtactttaagctg

SEQ ID NO: 1724326 - DNA, 25 bp, Homo sapien
aaagggagctcatggtagaaactta

SEQ ID NO: 1724327 - DNA, 25 bp, Homo sapien
aagggagctcatggtagaaacttac

SEQ ID NO: 1724328 - DNA, 25 bp, Homo sapien
aaaagggagctcatggtagaaactt

SEQ ID NO: 1724329 - DNA, 25 bp, Homo sapien
aaaaagggagctcatggtagaaact

SEQ ID NO: 1724330 - DNA, 25 bp, Homo sapien
cgcccaggctacctatgctttttta

SEQ ID NO: 1724331 - DNA, 25 bp, Homo sapien
cacagcgcccaggctacctatgctt

SEQ ID NO: 1724332 - DNA, 25 bp, Homo sapien
cagcgcccaggctacctatgctttt

SEQ ID NO: 1724333 - DNA, 25 bp, Homo sapien
acagcgcccaggctacctatgcttt

SEQ ID NO: 1724334 - DNA, 25 bp, Homo sapien
tttgctgaaagactcttttctccca

SEQ ID NO: 1724335 - DNA, 25 bp, Homo sapien
catgatgatattgtcctgtgttttc

SEQ ID NO: 1724336 - DNA, 25 bp, Homo sapien
tattgtatgagttgaagccaaatcc

SEQ ID NO: 1724337 - DNA, 25 bp, Homo sapien
tctcccattggattgcttgaacaat

SEQ ID NO: 1724338 - DNA, 25 bp, Homo sapien
tacatatcttgtgacaacagtcctg

SEQ ID NO: 1724339 - DNA, 25 bp, Homo sapien
tatgtatcttactctgagaagtgtc

SEQ ID NO: 1724340 - DNA, 25 bp, Homo sapien
taagtttctgatgaagcctaattta

SEQ ID NO: 1724341 - DNA, 25 bp, Homo sapien
ctgatgactgataaggttgagcact

SEQ ID NO: 1724342 - DNA, 25 bp, Homo sapien
ttattttcttgcaatctaaaatatg

SEQ ID NO: 1724343 - DNA, 25 bp, Homo sapien
gggaatatatggattccattcactg

SEQ ID NO: 1724344 - DNA, 25 bp, Homo sapien
gtggccccagattctgactgaaagg

SEQ ID NO: 1724345 - DNA, 25 bp, Homo sapien
aatatggatttgtcaactgtggccc

SEQ ID NO: 1724346 - DNA, 25 bp, Homo sapien
tttatgagggttccataaggtatct

SEQ ID NO: 1724347 - DNA, 25 bp, Homo sapien
cctcacctctatcaaagcatctctg

SEQ ID NO: 1724348 - DNA, 25 bp, Homo sapien
aatattggaggactgtgagtcttct

SEQ ID NO: 1724349 - DNA, 25 bp, Homo sapien
gagaaagaatattggaggactgtga

SEQ ID NO: 1724350 - DNA, 25 bp, Homo sapien
tagtcttgcctaaacggatatttga

SEQ ID NO: 1724351 - DNA, 25 bp, Homo sapien
ttagtcttgcctaaacggatatttg

SEQ ID NO: 1724352 - DNA, 25 bp, Homo sapien
agtcttgcctaaacggatatttgac

SEQ ID NO: 1724353 - DNA, 25 bp, Homo sapien
ttctttactgttagtttttggatga

SEQ ID NO: 1724354 - DNA, 25 bp, Homo sapien
tctttactgttagtttttggatgaa

SEQ ID NO: 1724355 - DNA, 25 bp, Homo sapien
tctatctgaaatgtccttatcctct

SEQ ID NO: 1724356 - DNA, 25 bp, Homo sapien
cttctgcattgcctgttctatctga

SEQ ID NO: 1724357 - DNA, 25 bp, Homo sapien
tgcctgttctatctgaaatgtcctt

SEQ ID NO: 1724358 - DNA, 25 bp, Homo sapien
tttttacccccttctgcattgcctg

SEQ ID NO: 1724359 - DNA, 25 bp, Homo sapien
tatacttatacggatcatacttaca

SEQ ID NO: 1724360 - DNA, 25 bp, Homo sapien
caggaactttctaggaaataggaag

SEQ ID NO: 1724361 - DNA, 25 bp, Homo sapien
taggaaggtgactatgagtgtactg

SEQ ID NO: 1724362 - DNA, 25 bp, Homo sapien
ttttggtggtttcctcgccctcata

SEQ ID NO: 1724363 - DNA, 25 bp, Homo sapien
ggatgtagagcttgtatgtgtcttc

SEQ ID NO: 1724364 - DNA, 25 bp, Homo sapien
gttcctttcccaagatctttgaatg

SEQ ID NO: 1724365 - DNA, 25 bp, Homo sapien
tctttatccataactctgcatcttc

SEQ ID NO: 1724366 - DNA, 25 bp, Homo sapien
cagttcctttcccaagatctttgaa

SEQ ID NO: 1724367 - DNA, 25 bp, Homo sapien
ctgtatctgaactaagagattgttt

SEQ ID NO: 1724368 - DNA, 25 bp, Homo sapien
cagttctgggtgttgtaagcttggg

SEQ ID NO: 1724369 - DNA, 25 bp, Homo sapien
gggcagaccatgctttaggtcttaa

SEQ ID NO: 1724370 - DNA, 25 bp, Homo sapien
gtgttgtaagcttgggaacccagag

SEQ ID NO: 1724371 - DNA, 25 bp, Homo sapien
cacaaattttgcgttccttcctgct

SEQ ID NO: 1724372 - DNA, 25 bp, Homo sapien
tctctcatattctacatgcagtact

SEQ ID NO: 1724373 - DNA, 25 bp, Homo sapien
ggccacgttccatcagagctagaaa

SEQ ID NO: 1724374 - DNA, 25 bp, Homo sapien
tgacatcagactttggcaggtcacc

SEQ ID NO: 1724375 - DNA, 25 bp, Homo sapien
tctctggtcagtgtggctttttccc

SEQ ID NO: 1724376 - DNA, 25 bp, Homo sapien
ttggtaggagggtgtggtccaagct

SEQ ID NO: 1724377 - DNA, 25 bp, Homo sapien
tggtaggagggtgtggtccaagctg

SEQ ID NO: 1724378 - DNA, 25 bp, Homo sapien
tttggtaggagggtgtggtccaagc

SEQ ID NO: 1724379 - DNA, 25 bp, Homo sapien
tctgattggcaaggggatcatctgg

SEQ ID NO: 1724380 - DNA, 25 bp, Homo sapien
tattctgattggcaaggggatcatc

SEQ ID NO: 1724381 - DNA, 25 bp, Homo sapien
tgcttatctgtttctggatcattga

SEQ ID NO: 1724382 - DNA, 25 bp, Homo sapien
ttagatgcttatctgtttctggatc

SEQ ID NO: 1724383 - DNA, 25 bp, Homo sapien
accttgtcctctgatgggtccagat

SEQ ID NO: 1724384 - DNA, 25 bp, Homo sapien
ccagatggggcatgattgaagccca

SEQ ID NO: 1724385 - DNA, 25 bp, Homo sapien
tgtcttagatctgtctcagaaaggg

SEQ ID NO: 1724386 - DNA, 25 bp, Homo sapien
gggtattatccagactaccaacata

SEQ ID NO: 1724387 - DNA, 25 bp, Homo sapien
caacagtaatcaatctgcatctctc

SEQ ID NO: 1724388 - DNA, 25 bp, Homo sapien
tgaacaacagtaatcaatctgcatc

SEQ ID NO: 1724389 - DNA, 25 bp, Homo sapien
aacagtaatcaatctgcatctctcc

SEQ ID NO: 1724390 - DNA, 25 bp, Homo sapien
aacaacagtaatcaatctgcatctc

SEQ ID NO: 1724391 - DNA, 25 bp, Homo sapien
ccattttatgttgagtctacagcca

SEQ ID NO: 1724392 - DNA, 25 bp, Homo sapien
gtagctggcacatgcatcttctgct

SEQ ID NO: 1724393 - DNA, 25 bp, Homo sapien
caccacagctggaggaccatgttgg

SEQ ID NO: 1724394 - DNA, 25 bp, Homo sapien
gagtctgtgatctgttcttctcttt

SEQ ID NO: 1724395 - DNA, 25 bp, Homo sapien
gaataggctgtagctggatcccaga

SEQ ID NO: 1724396 - DNA, 25 bp, Homo sapien
tgagaaagatagtggattaatcctg

SEQ ID NO: 1724397 - DNA, 25 bp, Homo sapien
taatcctggagttgtcatgaaagga

SEQ ID NO: 1724398 - DNA, 25 bp, Homo sapien
ccattgaggtgaatatgtgtggcct

SEQ ID NO: 1724399 - DNA, 25 bp, Homo sapien
gtggtcccattgaggtgaatatgtg

SEQ ID NO: 1724400 - DNA, 25 bp, Homo sapien
gctgactccccgggtaaatgtctta

SEQ ID NO: 1724401 - DNA, 25 bp, Homo sapien
ttgctgactccccgggtaaatgtct

SEQ ID NO: 1724402 - DNA, 25 bp, Homo sapien
tgttgctgactccccgggtaaatgt

SEQ ID NO: 1724403 - DNA, 25 bp, Homo sapien
tgctgactccccgggtaaatgtctt

SEQ ID NO: 1724404 - DNA, 25 bp, Homo sapien
attgagttcagggattggtcgtgtt

SEQ ID NO: 1724405 - DNA, 25 bp, Homo sapien
tgggttttcaggaagcattgagttc

SEQ ID NO: 1724406 - DNA, 25 bp, Homo sapien
ggtcgtgttctggagttgacataat

SEQ ID NO: 1724407 - DNA, 25 bp, Homo sapien
tgttagcaaggaaggctgctgatct

SEQ ID NO: 1724408 - DNA, 25 bp, Homo sapien
tcagtcaatgcaggataattagcga

SEQ ID NO: 1724409 - DNA, 25 bp, Homo sapien
tgtatattatcaacctcagtcaatg

SEQ ID NO: 1724410 - DNA, 25 bp, Homo sapien
tctgctgtgtatattatcaacctca

SEQ ID NO: 1724411 - DNA, 25 bp, Homo sapien
taattagcgatcacattgatcccca

SEQ ID NO: 1724412 - DNA, 25 bp, Homo sapien
cattggattcactggtgtgtcttct

SEQ ID NO: 1724413 - DNA, 25 bp, Homo sapien
tcaaatagtttgaatcaatgcttct

SEQ ID NO: 1724414 - DNA, 25 bp, Homo sapien
gtacattcattgttcaggctgttaa

SEQ ID NO: 1724415 - DNA, 25 bp, Homo sapien
tctgtgtttgatcatggagggtaca

SEQ ID NO: 1724416 - DNA, 25 bp, Homo sapien
cctgacatactacattatggatttt

SEQ ID NO: 1724417 - DNA, 25 bp, Homo sapien
cacactttctgatgagatagcccca

SEQ ID NO: 1724418 - DNA, 25 bp, Homo sapien
gacatactacattatggattttaga

SEQ ID NO: 1724419 - DNA, 25 bp, Homo sapien
gatttttttgatcttgtaaccacac

SEQ ID NO: 1724420 - DNA, 25 bp, Homo sapien
tggattctaacacaactgcataggt

SEQ ID NO: 1724421 - DNA, 25 bp, Homo sapien
gagaatgggaatgtagggactggat

SEQ ID NO: 1724422 - DNA, 25 bp, Homo sapien
ctgaacatcttggtcatccccttca

SEQ ID NO: 1724423 - DNA, 25 bp, Homo sapien
acatcttggtcatccccttcagtgg

SEQ ID NO: 1724424 - DNA, 25 bp, Homo sapien
aaatctggtcagttcaataggatat

SEQ ID NO: 1724425 - DNA, 25 bp, Homo sapien
ccatattgcatcattggaaaatggg

SEQ ID NO: 1724426 - DNA, 25 bp, Homo sapien
ttggaaaatgggtctgctgcattga

SEQ ID NO: 1724427 - DNA, 25 bp, Homo sapien
tctggtcagttcaataggatattgt

SEQ ID NO: 1724428 - DNA, 25 bp, Homo sapien
ttacgttcaggtgtgcccagtaaca

SEQ ID NO: 1724429 - DNA, 25 bp, Homo sapien
aattgattttgaagcctagaggcct

SEQ ID NO: 1724430 - DNA, 25 bp, Homo sapien
tagatccaaggatgacaacctgtct

SEQ ID NO: 1724431 - DNA, 25 bp, Homo sapien
ggctattgatggctctagatccaag

SEQ ID NO: 1724432 - DNA, 25 bp, Homo sapien
ttaactggctgtattcttggccaga

SEQ ID NO: 1724433 - DNA, 25 bp, Homo sapien
tacctaaatgctaagttaagtgcgg

SEQ ID NO: 1724434 - DNA, 25 bp, Homo sapien
tttactggcagttgattatgctcac

SEQ ID NO: 1724435 - DNA, 25 bp, Homo sapien
cttggccagatttaggtaacagtaa

SEQ ID NO: 1724436 - DNA, 25 bp, Homo sapien
cttggtagttagattctgtaaagtc

SEQ ID NO: 1724437 - DNA, 25 bp, Homo sapien
tctcctgtctacctgtataaaggag

SEQ ID NO: 1724438 - DNA, 25 bp, Homo sapien
tctacctgtataaaggagactggaa

SEQ ID NO: 1724439 - DNA, 25 bp, Homo sapien
actcattccctaacacctctcctgt

SEQ ID NO: 1724440 - DNA, 25 bp, Homo sapien
ttgaaatacgtccctaatttattga

SEQ ID NO: 1724441 - DNA, 25 bp, Homo sapien
gaaatacgtccctaatttattgaga

SEQ ID NO: 1724442 - DNA, 25 bp, Homo sapien
tgaaatacgtccctaatttattgag

SEQ ID NO: 1724443 - DNA, 25 bp, Homo sapien
atatggcagggctgtcgtaaatttt

SEQ ID NO: 1724444 - DNA, 25 bp, Homo sapien
tggcagggctgtcgtaaattttcaa

SEQ ID NO: 1724445 - DNA, 25 bp, Homo sapien
gctgtcgtaaattttcaacatgaac

SEQ ID NO: 1724446 - DNA, 25 bp, Homo sapien
gcagggctgtcgtaaattttcaaca

SEQ ID NO: 1724447 - DNA, 25 bp, Homo sapien
ttattattttagactcttacctggc

SEQ ID NO: 1724448 - DNA, 25 bp, Homo sapien
attattttagactcttacctggctc

SEQ ID NO: 1724449 - DNA, 25 bp, Homo sapien
tattattttagactcttacctggct

SEQ ID NO: 1724450 - DNA, 25 bp, Homo sapien
ttctgcatggctgtatcttttgttg

SEQ ID NO: 1724451 - DNA, 25 bp, Homo sapien
tccagtatttggtgaactgcttgtc

SEQ ID NO: 1724452 - DNA, 25 bp, Homo sapien
ctgcttgtctgtgataacctgtgta

SEQ ID NO: 1724453 - DNA, 25 bp, Homo sapien
taagtgttcctcgtagatccagtat

SEQ ID NO: 1724454 - DNA, 25 bp, Homo sapien
ccttgaacccaaaggctctgatgag

SEQ ID NO: 1724455 - DNA, 25 bp, Homo sapien
tatatgtggaaggaacgagcatctt

SEQ ID NO: 1724456 - DNA, 25 bp, Homo sapien
tgtatttgaatggaaggactgcatc

SEQ ID NO: 1724457 - DNA, 25 bp, Homo sapien
cagtcagtagcctgggagtgattcc

SEQ ID NO: 1724458 - DNA, 25 bp, Homo sapien
tgatcatgtaaatgcatccatccat

SEQ ID NO: 1724459 - DNA, 25 bp, Homo sapien
ttttgatcatgtaaatgcatccatc

SEQ ID NO: 1724460 - DNA, 25 bp, Homo sapien
gtataatttttgatcatgtaaatgc

SEQ ID NO: 1724461 - DNA, 25 bp, Homo sapien
aacaaccttgtataatttttgatca

SEQ ID NO: 1724462 - DNA, 25 bp, Homo sapien
catttgcatggcatacctttggcat

SEQ ID NO: 1724463 - DNA, 25 bp, Homo sapien
catctctgaaggatagccttgctgt

SEQ ID NO: 1724464 - DNA, 25 bp, Homo sapien
tgtaagttcggtctagtcatgatga

SEQ ID NO: 1724465 - DNA, 25 bp, Homo sapien
cataggtatctgctgtatcagtgag

SEQ ID NO: 1724466 - DNA, 25 bp, Homo sapien
gctcaggacgtggtctatcttagtg

SEQ ID NO: 1724467 - DNA, 25 bp, Homo sapien
tcttagtgaatattcaatgggtact

SEQ ID NO: 1724468 - DNA, 25 bp, Homo sapien
caattatggttagataacatgttct

SEQ ID NO: 1724469 - DNA, 25 bp, Homo sapien
gaagtgtgcttagagattttctcat

SEQ ID NO: 1724470 - DNA, 25 bp, Homo sapien
taactgcaatgaacctgtcatttcc

SEQ ID NO: 1724471 - DNA, 25 bp, Homo sapien
ccaacatcagttttgaagaccaaca

SEQ ID NO: 1724472 - DNA, 25 bp, Homo sapien
ttactttccatcagattaactgcaa

SEQ ID NO: 1724473 - DNA, 25 bp, Homo sapien
ctgtgacatacattgttactttcca

SEQ ID NO: 1724474 - DNA, 25 bp, Homo sapien
gttgatcaaatcggctactgaagct

SEQ ID NO: 1724475 - DNA, 25 bp, Homo sapien
ctgaagcttgtgcatttgtcacgta

SEQ ID NO: 1724476 - DNA, 25 bp, Homo sapien
ggggaagttctcctgcagagtgttt

SEQ ID NO: 1724477 - DNA, 25 bp, Homo sapien
agcttgtgcatttgtcacgtagttc

SEQ ID NO: 1724478 - DNA, 25 bp, Homo sapien
cagtgccactgcttttggatgaatc

SEQ ID NO: 1724479 - DNA, 25 bp, Homo sapien
tggaacaacgttcttcaactttgac

SEQ ID NO: 1724480 - DNA, 25 bp, Homo sapien
gaatatcatcgtatgtctgtctgta

SEQ ID NO: 1724481 - DNA, 25 bp, Homo sapien
actcatggtggtctttggaacaacg

SEQ ID NO: 1724482 - DNA, 25 bp, Homo sapien
ggttgtttgtgaggcgaatgaagca

SEQ ID NO: 1724483 - DNA, 25 bp, Homo sapien
tggagaaagtttgcaccgcacttgt

SEQ ID NO: 1724484 - DNA, 25 bp, Homo sapien
gacctgcggagattaaccatttaaa

SEQ ID NO: 1724485 - DNA, 25 bp, Homo sapien
actctgttggtctcggtggctggta

SEQ ID NO: 1724486 - DNA, 25 bp, Homo sapien
tgcatagactgtggttagagagcac

SEQ ID NO: 1724487 - DNA, 25 bp, Homo sapien
tattactgcatagactgtggttaga

SEQ ID NO: 1724488 - DNA, 25 bp, Homo sapien
tactgcatagactgtggttagagag

SEQ ID NO: 1724489 - DNA, 25 bp, Homo sapien
tagactgtggttagagagcactcac

SEQ ID NO: 1724490 - DNA, 25 bp, Homo sapien
gagaatgagcaaatatttgaaggac

SEQ ID NO: 1724491 - DNA, 25 bp, Homo sapien
ctggtaacatgtgaaaagcaaagaa

SEQ ID NO: 1724492 - DNA, 25 bp, Homo sapien
gaatgagcaaatatttgaaggacct

SEQ ID NO: 1724493 - DNA, 25 bp, Homo sapien
atgagcaaatatttgaaggacctac

SEQ ID NO: 1724494 - DNA, 25 bp, Homo sapien
ttagttttacagtatgcctggagta

SEQ ID NO: 1724495 - DNA, 25 bp, Homo sapien
tttagttttacagtatgcctggagt

SEQ ID NO: 1724496 - DNA, 25 bp, Homo sapien
agttttacagtatgcctggagtaca

SEQ ID NO: 1724497 - DNA, 25 bp, Homo sapien
tagttttacagtatgcctggagtac

SEQ ID NO: 1724498 - DNA, 25 bp, Homo sapien
tgtaccctctgttgtaaatactgct

SEQ ID NO: 1724499 - DNA, 25 bp, Homo sapien
tttcagatagaacttgtaccctctg

SEQ ID NO: 1724500 - DNA, 25 bp, Homo sapien
gaacttgtaccctctgttgtaaata

SEQ ID NO: 1724501 - DNA, 25 bp, Homo sapien
gatagaacttgtaccctctgttgta

SEQ ID NO: 1724502 - DNA, 25 bp, Homo sapien
tttgctgacatggtgtcactgtgct

SEQ ID NO: 1724503 - DNA, 25 bp, Homo sapien
gttttgctgacatggtgtcactgtg

SEQ ID NO: 1724504 - DNA, 25 bp, Homo sapien
gaagttttgctgacatggtgtcact

SEQ ID NO: 1724505 - DNA, 25 bp, Homo sapien
aagaagttttgctgacatggtgtca

SEQ ID NO: 1724506 - DNA, 25 bp, Homo sapien
ggtgtaagatacatgactataagga

SEQ ID NO: 1724507 - DNA, 25 bp, Homo sapien
cattgatgtaaaaaatcgatgtaac

SEQ ID NO: 1724508 - DNA, 25 bp, Homo sapien
tggtatataatgattctggtagaca

SEQ ID NO: 1724509 - DNA, 25 bp, Homo sapien
agaaatgtcactaatctgatgtaac

SEQ ID NO: 1724510 - DNA, 25 bp, Homo sapien
ttttgctctgaggatatgtagcatt

SEQ ID NO: 1724511 - DNA, 25 bp, Homo sapien
tagaagtgtatcatattataaatac

SEQ ID NO: 1724512 - DNA, 25 bp, Homo sapien
ctagaagtgtatcatattataaata

SEQ ID NO: 1724513 - DNA, 25 bp, Homo sapien
tttgctctgaggatatgtagcattc

SEQ ID NO: 1724514 - DNA, 25 bp, Homo sapien
gaatgaagcttggcttcagagcata

SEQ ID NO: 1724515 - DNA, 25 bp, Homo sapien
agcttggcttcagagcatagtccat

SEQ ID NO: 1724516 - DNA, 25 bp, Homo sapien
tgaagcttggcttcagagcatagtc

SEQ ID NO: 1724517 - DNA, 25 bp, Homo sapien
gaagcttggcttcagagcatagtcc

SEQ ID NO: 1724518 - DNA, 25 bp, Homo sapien
ctaacaggctgtattactctttttc

SEQ ID NO: 1724519 - DNA, 25 bp, Homo sapien
acaggctgtattactctttttcaaa

SEQ ID NO: 1724520 - DNA, 25 bp, Homo sapien
gctgtattactctttttcaaagtgc

SEQ ID NO: 1724521 - DNA, 25 bp, Homo sapien
ctttttcaaagtgctcagcagctgg

SEQ ID NO: 1724522 - DNA, 25 bp, Homo sapien
tgtgtactcagatttcagacattgg

SEQ ID NO: 1724523 - DNA, 25 bp, Homo sapien
ctagaatgtagaattgtgctgtgac

SEQ ID NO: 1724524 - DNA, 25 bp, Homo sapien
gaatggtagtcatagctggaaataa

SEQ ID NO: 1724525 - DNA, 25 bp, Homo sapien
tgactaatgagtgggccggttaact

SEQ ID NO: 1724526 - DNA, 25 bp, Homo sapien
tatgattcctttccaagcgaggcat

SEQ ID NO: 1724527 - DNA, 25 bp, Homo sapien
cctgaatgagttagcagcggcagta

SEQ ID NO: 1724528 - DNA, 25 bp, Homo sapien
gcagtagaagtaatgagatcctcac

SEQ ID NO: 1724529 - DNA, 25 bp, Homo sapien
gcagtgaagccccttattatccaag

SEQ ID NO: 1724530 - DNA, 25 bp, Homo sapien
tttaggttattgaactcaagcagcc

SEQ ID NO: 1724531 - DNA, 25 bp, Homo sapien
tttatcacagctcctttgaataacc

SEQ ID NO: 1724532 - DNA, 25 bp, Homo sapien
aataacctgtactggaatggtccag

SEQ ID NO: 1724533 - DNA, 25 bp, Homo sapien
gcatataactgagcacatttgctat

SEQ ID NO: 1724534 - DNA, 25 bp, Homo sapien
gaaaggcgtgcatccttaaattcct

SEQ ID NO: 1724535 - DNA, 25 bp, Homo sapien
ctgaggaaaggcgtgcatccttaaa

SEQ ID NO: 1724536 - DNA, 25 bp, Homo sapien
tttctgaggaaaggcgtgcatcctt

SEQ ID NO: 1724537 - DNA, 25 bp, Homo sapien
ttgtgattaacttcactacaattaa

SEQ ID NO: 1724538 - DNA, 25 bp, Homo sapien
taggagtataattgctgccaaaatc

SEQ ID NO: 1724539 - DNA, 25 bp, Homo sapien
actgttaggagtataattgctgcca

SEQ ID NO: 1724540 - DNA, 25 bp, Homo sapien
gttaggagtataattgctgccaaaa

SEQ ID NO: 1724541 - DNA, 25 bp, Homo sapien
ctcttactgttaggagtataattgc

SEQ ID NO: 1724542 - DNA, 25 bp, Homo sapien
ccagcttgtatcactaaatagtagt

SEQ ID NO: 1724543 - DNA, 25 bp, Homo sapien
cagttttagtcccagcttgtatcac

SEQ ID NO: 1724544 - DNA, 25 bp, Homo sapien
aatagtagtgtgtccttgggcagtt

SEQ ID NO: 1724545 - DNA, 25 bp, Homo sapien
ttgggcagttcaagaaacccctctg

SEQ ID NO: 1724546 - DNA, 25 bp, Homo sapien
ctttagcagcttgagttttggttcc

SEQ ID NO: 1724547 - DNA, 25 bp, Homo sapien
gcagcttgagttttggttccctctg

SEQ ID NO: 1724548 - DNA, 25 bp, Homo sapien
tagcagcttgagttttggttccctc

SEQ ID NO: 1724549 - DNA, 25 bp, Homo sapien
gcttgagttttggttccctctggaa

SEQ ID NO: 1724550 - DNA, 25 bp, Homo sapien
gagggcggctgcctgggtcttcgtg

SEQ ID NO: 1724551 - DNA, 25 bp, Homo sapien
ccctggttccgctgccgagcgtgga

SEQ ID NO: 1724552 - DNA, 25 bp, Homo sapien
ggagggacgcagagcggagatccca

SEQ ID NO: 1724553 - DNA, 25 bp, Homo sapien
tcttcgtggtctacgccggagtgtt

SEQ ID NO: 1724554 - DNA, 25 bp, Homo sapien
aaacgcctgcgtctagtaacatgag

SEQ ID NO: 1724555 - DNA, 25 bp, Homo sapien
taagagctggtttcgccgtcccaga

SEQ ID NO: 1724556 - DNA, 25 bp, Homo sapien
caaaacatggtagttaaacgcctgc

SEQ ID NO: 1724557 - DNA, 25 bp, Homo sapien
ggaacaggccaaaatctaaacacag

SEQ ID NO: 1724558 - DNA, 25 bp, Homo sapien
tttttacctcaacatttagaccaga

SEQ ID NO: 1724559 - DNA, 25 bp, Homo sapien
caagtaagatatcctacagtaaagc

SEQ ID NO: 1724560 - DNA, 25 bp, Homo sapien
tagtgtgcccataactacaaacatg

SEQ ID NO: 1724561 - DNA, 25 bp, Homo sapien
caggattactggaaatgtgggttgc

SEQ ID NO: 1724562 - DNA, 25 bp, Homo sapien
aggtctctcgagtcccacaggcggc

SEQ ID NO: 1724563 - DNA, 25 bp, Homo sapien
caggcggccgatccgggaagggaag

SEQ ID NO: 1724564 - DNA, 25 bp, Homo sapien
ccctgcgtgcacaggtctctcgagt

SEQ ID NO: 1724565 - DNA, 25 bp, Homo sapien
gcgtcccctgcgtgcacaggtctct

SEQ ID NO: 1724566 - DNA, 25 bp, Homo sapien
ggagccctttcgagtacaagatgag

SEQ ID NO: 1724567 - DNA, 25 bp, Homo sapien
gactctggagccctttcgagtacaa

SEQ ID NO: 1724568 - DNA, 25 bp, Homo sapien
tggttgcgtgactcgggatcgcccc

SEQ ID NO: 1724569 - DNA, 25 bp, Homo sapien
cctggtgccagtcgcggactctgga

SEQ ID NO: 1724570 - DNA, 25 bp, Homo sapien
tgtctctcgcgcttcaaggtgccaa

SEQ ID NO: 1724571 - DNA, 25 bp, Homo sapien
tcaagtttgatgaggccgactgccg

SEQ ID NO: 1724572 - DNA, 25 bp, Homo sapien
agattgaagccgagacaccagagag

SEQ ID NO: 1724573 - DNA, 25 bp, Homo sapien
cgccgtgtgcagtttccgaagccta

SEQ ID NO: 1724574 - DNA, 25 bp, Homo sapien
tcacgtcgctcattttgccgggctg

SEQ ID NO: 1724575 - DNA, 25 bp, Homo sapien
gggctcacgtcgctcattttgccgg

SEQ ID NO: 1724576 - DNA, 25 bp, Homo sapien
cgtcgctcattttgccgggctgcag

SEQ ID NO: 1724577 - DNA, 25 bp, Homo sapien
ctgaagcgccggctggtgctcggat

SEQ ID NO: 1724578 - DNA, 25 bp, Homo sapien
gctgtcggtgcggacgagttcggcc

SEQ ID NO: 1724579 - DNA, 25 bp, Homo sapien
ccgggtggtcggcgatgatctccac

SEQ ID NO: 1724580 - DNA, 25 bp, Homo sapien
tggggcggccgcaaccggggcactg

SEQ ID NO: 1724581 - DNA, 25 bp, Homo sapien
catggtgcggttgtcgtggggcggc

SEQ ID NO: 1724582 - DNA, 25 bp, Homo sapien
ggaccaggaccgctgaactctgcgg

SEQ ID NO: 1724583 - DNA, 25 bp, Homo sapien
caggaccgctgaactctgcgggtcg

SEQ ID NO: 1724584 - DNA, 25 bp, Homo sapien
cacgaatcccggcacgggagcccgg

SEQ ID NO: 1724585 - DNA, 25 bp, Homo sapien
ccgagacctgaggagaggcgtttgg

SEQ ID NO: 1724586 - DNA, 25 bp, Homo sapien
tcccgcggctgccacccgccctcaa

SEQ ID NO: 1724587 - DNA, 25 bp, Homo sapien
cacctgcctgcgactcccgcggctg

SEQ ID NO: 1724588 - DNA, 25 bp, Homo sapien
ctgcctgcgactcccgcggctgcca

SEQ ID NO: 1724589 - DNA, 25 bp, Homo sapien
cccgcggctgccacccgccctcaaa

SEQ ID NO: 1724590 - DNA, 25 bp, Homo sapien
gccatcgggctactgtgagaggctc

SEQ ID NO: 1724591 - DNA, 25 bp, Homo sapien
ctggatcgggttatggagagccatc

SEQ ID NO: 1724592 - DNA, 25 bp, Homo sapien
gaggctccagatcctaaaacctcaa

SEQ ID NO: 1724593 - DNA, 25 bp, Homo sapien
gttatggagagccatcgggctactg

SEQ ID NO: 1724594 - DNA, 25 bp, Homo sapien
tcaacccagtgtgcgctgggccctg

SEQ ID NO: 1724595 - DNA, 25 bp, Homo sapien
cgtcttgcgagtgtggacagtcctg

SEQ ID NO: 1724596 - DNA, 25 bp, Homo sapien
tgcatccctggcgtcttgcgagtgt

SEQ ID NO: 1724597 - DNA, 25 bp, Homo sapien
tgtggacagcctgggaacccgtttc

SEQ ID NO: 1724598 - DNA, 25 bp, Homo sapien
catcagctaatgagctgaatttgca

SEQ ID NO: 1724599 - DNA, 25 bp, Homo sapien
tcagctaatgagctgaatttgcaaa

SEQ ID NO: 1724600 - DNA, 25 bp, Homo sapien
ctgaccatcagctaatgagctgaat

SEQ ID NO: 1724601 - DNA, 25 bp, Homo sapien
tgaccatcagctaatgagctgaatt

SEQ ID NO: 1724602 - DNA, 25 bp, Homo sapien
ctcacacaaaataacttcatctcca

SEQ ID NO: 1724603 - DNA, 25 bp, Homo sapien
gacagtaaccacagtcccatctggt

SEQ ID NO: 1724604 - DNA, 25 bp, Homo sapien
ttacccgccatgacagtaaccacag

SEQ ID NO: 1724605 - DNA, 25 bp, Homo sapien
tctggtacctctccgagggctacca

SEQ ID NO: 1724606 - DNA, 25 bp, Homo sapien
agtcccatctggtacctctccgagg

SEQ ID NO: 1724607 - DNA, 25 bp, Homo sapien
caaatctcagatcgttgaaccttgc

SEQ ID NO: 1724608 - DNA, 25 bp, Homo sapien
tctcagatcgttgaaccttgctact

SEQ ID NO: 1724609 - DNA, 25 bp, Homo sapien
gatcgttgaaccttgctacttggtt

SEQ ID NO: 1724610 - DNA, 25 bp, Homo sapien
cggcccacaaatctcagatcgttga

SEQ ID NO: 1724611 - DNA, 25 bp, Homo sapien
ctattatcagtatcaaaagtcagag

SEQ ID NO: 1724612 - DNA, 25 bp, Homo sapien
tacatttcatcaaaggagcctaatg

SEQ ID NO: 1724613 - DNA, 25 bp, Homo sapien
gtgcttattctattatcagtatcaa

SEQ ID NO: 1724614 - DNA, 25 bp, Homo sapien
tcaaaggagcctaatgtgcttattc

SEQ ID NO: 1724615 - DNA, 25 bp, Homo sapien
taattgctctgtgataggtagctac

SEQ ID NO: 1724616 - DNA, 25 bp, Homo sapien
gggttcccgaggtccatctactgta

SEQ ID NO: 1724617 - DNA, 25 bp, Homo sapien
gttatggtcaaggtgaaactcttgc

SEQ ID NO: 1724618 - DNA, 25 bp, Homo sapien
ggatttgtgaagacggttatggtca

SEQ ID NO: 1724619 - DNA, 25 bp, Homo sapien
gtgaaaccttctggatgtccagaca

SEQ ID NO: 1724620 - DNA, 25 bp, Homo sapien
accttctggatgtccagacagacaa

SEQ ID NO: 1724621 - DNA, 25 bp, Homo sapien
actgattgccggtgaaaccttctgg

SEQ ID NO: 1724622 - DNA, 25 bp, Homo sapien
ctgaaactgattgccggtgaaacct

SEQ ID NO: 1724623 - DNA, 25 bp, Homo sapien
ttaatcttgtaatgagtgatgatca

SEQ ID NO: 1724624 - DNA, 25 bp, Homo sapien
tgtaatgagtgatgatcatgtgctc

SEQ ID NO: 1724625 - DNA, 25 bp, Homo sapien
tatgaagttagtccaactgccaacg

SEQ ID NO: 1724626 - DNA, 25 bp, Homo sapien
tgccaacgccagatgtgtatattaa

SEQ ID NO: 1724627 - DNA, 25 bp, Homo sapien
aaggattcctgctccggttgctcag

SEQ ID NO: 1724628 - DNA, 25 bp, Homo sapien
aacgtgtggacaccaatatctaagg

SEQ ID NO: 1724629 - DNA, 25 bp, Homo sapien
caatatctaaggattcctgctccgg

SEQ ID NO: 1724630 - DNA, 25 bp, Homo sapien
tgctccggttgctcagggagcaaca

SEQ ID NO: 1724631 - DNA, 25 bp, Homo sapien
cttgaagggcccatctttgcctact

SEQ ID NO: 1724632 - DNA, 25 bp, Homo sapien
gaagggcccatctttgcctactaat

SEQ ID NO: 1724633 - DNA, 25 bp, Homo sapien
aagggcccatctttgcctactaata

SEQ ID NO: 1724634 - DNA, 25 bp, Homo sapien
tgaagggcccatctttgcctactaa

SEQ ID NO: 1724635 - DNA, 25 bp, Homo sapien
cgaagccttaactcgaagaagaatc

SEQ ID NO: 1724636 - DNA, 25 bp, Homo sapien
tgtcctcgaagccttaactcgaaga

SEQ ID NO: 1724637 - DNA, 25 bp, Homo sapien
ctatgaacatcctgtcctcgaagcc

SEQ ID NO: 1724638 - DNA, 25 bp, Homo sapien
gaacatcctgtcctcgaagccttaa

SEQ ID NO: 1724639 - DNA, 25 bp, Homo sapien
aaaaatggcttagaatgtgttatcc

SEQ ID NO: 1724640 - DNA, 25 bp, Homo sapien
tattgctgattgtcacgggagtctc

SEQ ID NO: 1724641 - DNA, 25 bp, Homo sapien
tgctggaggccctttcaagttagac

SEQ ID NO: 1724642 - DNA, 25 bp, Homo sapien
tagtaaagataagcaaagcccaatg

SEQ ID NO: 1724643 - DNA, 25 bp, Homo sapien
tatggacctttacgggtgctaatct

SEQ ID NO: 1724644 - DNA, 25 bp, Homo sapien
ccctgccctgacttgcagccttctt

SEQ ID NO: 1724645 - DNA, 25 bp, Homo sapien
tatacatcccttcccttctacgtct

SEQ ID NO: 1724646 - DNA, 25 bp, Homo sapien
tgtgcgagtacttttccagctggct

SEQ ID NO: 1724647 - DNA, 25 bp, Homo sapien
tatttcctgggtctcatcacactgg

SEQ ID NO: 1724648 - DNA, 25 bp, Homo sapien
ccttctacgtcttccgtatatttgg

SEQ ID NO: 1724649 - DNA, 25 bp, Homo sapien
ccttctccatgatgttgatactgac

SEQ ID NO: 1724650 - DNA, 25 bp, Homo sapien
ttccttctccatgatgttgatactg

SEQ ID NO: 1724651 - DNA, 25 bp, Homo sapien
tccttctccatgatgttgatactga

SEQ ID NO: 1724652 - DNA, 25 bp, Homo sapien
tttccttctccatgatgttgatact

SEQ ID NO: 1724653 - DNA, 25 bp, Homo sapien
tcaggtcagatacccaagtggctgc

SEQ ID NO: 1724654 - DNA, 25 bp, Homo sapien
actgtatgcatccttcacatagggc

SEQ ID NO: 1724655 - DNA, 25 bp, Homo sapien
gcctgtgccactgtatgcatccttc

SEQ ID NO: 1724656 - DNA, 25 bp, Homo sapien
tggctgctggtctgtaaaggtgcct

SEQ ID NO: 1724657 - DNA, 25 bp, Homo sapien
tttggataatgctcggacattgacc

SEQ ID NO: 1724658 - DNA, 25 bp, Homo sapien
tgctcggacattgacctaagctggt

SEQ ID NO: 1724659 - DNA, 25 bp, Homo sapien
cattgacctaagctggtttttccag

SEQ ID NO: 1724660 - DNA, 25 bp, Homo sapien
gtgagttttggataatgctcggaca

SEQ ID NO: 1724661 - DNA, 25 bp, Homo sapien
acagtgatctcatcccccaaatctg

SEQ ID NO: 1724662 - DNA, 25 bp, Homo sapien
atggaggccaggttgctttttctga

SEQ ID NO: 1724663 - DNA, 25 bp, Homo sapien
tttttctgagtatcagggtccacag

SEQ ID NO: 1724664 - DNA, 25 bp, Homo sapien
ccacagtgatctcatcccccaaatc

SEQ ID NO: 1724665 - DNA, 25 bp, Homo sapien
ggatgctgctgaaagaatatcttcc

SEQ ID NO: 1724666 - DNA, 25 bp, Homo sapien
tgtgtgtggcctgcagaacatatcg

SEQ ID NO: 1724667 - DNA, 25 bp, Homo sapien
tgctccgggactgttttctttagac

SEQ ID NO: 1724668 - DNA, 25 bp, Homo sapien
caggcccaaaggctgctccgggact

SEQ ID NO: 1724669 - DNA, 25 bp, Homo sapien
ctgaagtggcggtgctgcggcagct

SEQ ID NO: 1724670 - DNA, 25 bp, Homo sapien
agtggcggtgctgcggcagctgagc

SEQ ID NO: 1724671 - DNA, 25 bp, Homo sapien
gctgagcctgcttctttccaggacc

SEQ ID NO: 1724672 - DNA, 25 bp, Homo sapien
gagcctgcttctttccaggacctgg

SEQ ID NO: 1724673 - DNA, 25 bp, Homo sapien
tttggcagtccatgagcctcatcca

SEQ ID NO: 1724674 - DNA, 25 bp, Homo sapien
gccacaggatgtaacagtttcagaa

SEQ ID NO: 1724675 - DNA, 25 bp, Homo sapien
gggagacatgagctaattttgctgt

SEQ ID NO: 1724676 - DNA, 25 bp, Homo sapien
tgtgattgaataaagtctggtccaa

SEQ ID NO: 1724677 - DNA, 25 bp, Homo sapien
cgtccaagttgactgagctttccat

SEQ ID NO: 1724678 - DNA, 25 bp, Homo sapien
caccatcagtgctggtattctagct

SEQ ID NO: 1724679 - DNA, 25 bp, Homo sapien
tcacgaggatatagccctcgtccaa

SEQ ID NO: 1724680 - DNA, 25 bp, Homo sapien
gctttccattcatcacgtggcacca

SEQ ID NO: 1724681 - DNA, 25 bp, Homo sapien
tgtctccacggccaaacgtgttcca

SEQ ID NO: 1724682 - DNA, 25 bp, Homo sapien
ccagtgcaagtttttgggcatctgc

SEQ ID NO: 1724683 - DNA, 25 bp, Homo sapien
caactaggcccattaactgaaatgc

SEQ ID NO: 1724684 - DNA, 25 bp, Homo sapien
gcttggtaatatgagtgtagctgtc

SEQ ID NO: 1724685 - DNA, 25 bp, Homo sapien
ttaattagctgaacaattgaccatg

SEQ ID NO: 1724686 - DNA, 25 bp, Homo sapien
tagcaaatcataaaataaaagcata

SEQ ID NO: 1724687 - DNA, 25 bp, Homo sapien
ataaaagcatattaattagctgaac

SEQ ID NO: 1724688 - DNA, 25 bp, Homo sapien
ctggaaatagcaaatcataaaataa

SEQ ID NO: 1724689 - DNA, 25 bp, Homo sapien
tcatactgggatgaggaatgcgccc

SEQ ID NO: 1724690 - DNA, 25 bp, Homo sapien
gttctgaggcgggacacctactctc

SEQ ID NO: 1724691 - DNA, 25 bp, Homo sapien
tcactgaggcggtcagagaacaaac

SEQ ID NO: 1724692 - DNA, 25 bp, Homo sapien
ggtttagagtcatcaagcttctgtc

SEQ ID NO: 1724693 - DNA, 25 bp, Homo sapien
acccaaacagcaatcattgtactca

SEQ ID NO: 1724694 - DNA, 25 bp, Homo sapien
cagtctaaggattactataaagaca

SEQ ID NO: 1724695 - DNA, 25 bp, Homo sapien
ctcaagggtcatttttcaaccctca

SEQ ID NO: 1724696 - DNA, 25 bp, Homo sapien
tgaataatctaaagtctactacttt

SEQ ID NO: 1724697 - DNA, 25 bp, Homo sapien
ttatgggtccatccaccctcacact

SEQ ID NO: 1724698 - DNA, 25 bp, Homo sapien
ctgaacccgcatacaaaaggctatt

SEQ ID NO: 1724699 - DNA, 25 bp, Homo sapien
tgtgtaacaggacaccatggcagcc

SEQ ID NO: 1724700 - DNA, 25 bp, Homo sapien
aagtcaatgggagcaaagcctgaac

SEQ ID NO: 1724701 - DNA, 25 bp, Homo sapien
catggcagccagtgattctgccaaa

SEQ ID NO: 1724702 - DNA, 25 bp, Homo sapien
ccagggggtgctcaaaaatgctagt

SEQ ID NO: 1724703 - DNA, 25 bp, Homo sapien
gagaggggtggttcctctgtctcaa

SEQ ID NO: 1724704 - DNA, 25 bp, Homo sapien
ctctgtctcaagttgcctttcatca

SEQ ID NO: 1724705 - DNA, 25 bp, Homo sapien
ctcaaaaatgctagttgggagaggg

SEQ ID NO: 1724706 - DNA, 25 bp, Homo sapien
caaaatgactacatgcgagagaaga

SEQ ID NO: 1724707 - DNA, 25 bp, Homo sapien
gatgtgattgatcaaaatgactaca

SEQ ID NO: 1724708 - DNA, 25 bp, Homo sapien
gactacatgcgagagaagagaacaa

SEQ ID NO: 1724709 - DNA, 25 bp, Homo sapien
gacaggatgtgattgatcaaaatga

SEQ ID NO: 1724710 - DNA, 25 bp, Homo sapien
atggacggggacgtcatctggctca

SEQ ID NO: 1724711 - DNA, 25 bp, Homo sapien
ccagtgccccgtgtggaagacagcg

SEQ ID NO: 1724712 - DNA, 25 bp, Homo sapien
tgaaatgcgcctaggcacatcggtg

SEQ ID NO: 1724713 - DNA, 25 bp, Homo sapien
taagactggtcataggaccacggcg

SEQ ID NO: 1724714 - DNA, 25 bp, Homo sapien
ggccacacatttctgtggtgccttt

SEQ ID NO: 1724715 - DNA, 25 bp, Homo sapien
ggtgcctttggaacagaggaattgt

SEQ ID NO: 1724716 - DNA, 25 bp, Homo sapien
tttggaacagaggaattgtgagcac

SEQ ID NO: 1724717 - DNA, 25 bp, Homo sapien
gaattgtgagcactgggctgccggg

SEQ ID NO: 1724718 - DNA, 25 bp, Homo sapien
aaggctcccaggactagtccccagg

SEQ ID NO: 1724719 - DNA, 25 bp, Homo sapien
agaaatggtgcacactccgatgaca

SEQ ID NO: 1724720 - DNA, 25 bp, Homo sapien
tgggaacctatgagacaggctcccc

SEQ ID NO: 1724721 - DNA, 25 bp, Homo sapien
atgacatggtccttgagtccaccag

SEQ ID NO: 1724722 - DNA, 25 bp, Homo sapien
tcccgtttccctcaatgggctgtca

SEQ ID NO: 1724723 - DNA, 25 bp, Homo sapien
tttgacagccaaagaaacagccaac

SEQ ID NO: 1724724 - DNA, 25 bp, Homo sapien
tgtaccaatctctttgttcttcccg

SEQ ID NO: 1724725 - DNA, 25 bp, Homo sapien
caatgggctgtcaaacctagttttt

SEQ ID NO: 1724726 - DNA, 25 bp, Homo sapien
ggaccatggacctcttcatatgcaa

SEQ ID NO: 1724727 - DNA, 25 bp, Homo sapien
tctgttgcacatgcccgagtttcca

SEQ ID NO: 1724728 - DNA, 25 bp, Homo sapien
cacttctcttggatgaccagcagca

SEQ ID NO: 1724729 - DNA, 25 bp, Homo sapien
tcatctaactgcactggaccatgga

SEQ ID NO: 1724730 - DNA, 25 bp, Homo sapien
agagtttgatttggcatcagtttca

SEQ ID NO: 1724731 - DNA, 25 bp, Homo sapien
tgccccactggaggcctgggctgac

SEQ ID NO: 1724732 - DNA, 25 bp, Homo sapien
ccccactggaggcctgggctgacca

SEQ ID NO: 1724733 - DNA, 25 bp, Homo sapien
ctgtgccccactggaggcctgggct

SEQ ID NO: 1724734 - DNA, 25 bp, Homo sapien
tgtgccccactggaggcctgggctg

SEQ ID NO: 1724735 - DNA, 25 bp, Homo sapien
tgcccatgctctccccagcacccat

SEQ ID NO: 1724736 - DNA, 25 bp, Homo sapien
tttgcccatgctctccccagcaccc

SEQ ID NO: 1724737 - DNA, 25 bp, Homo sapien
gggagctttgcccatgctctcccca

SEQ ID NO: 1724738 - DNA, 25 bp, Homo sapien
gctttgcccatgctctccccagcac

SEQ ID NO: 1724739 - DNA, 25 bp, Homo sapien
tagtaaacggatgcctctgctttgc

SEQ ID NO: 1724740 - DNA, 25 bp, Homo sapien
gccagtatctgggtgtagatccaca

SEQ ID NO: 1724741 - DNA, 25 bp, Homo sapien
ctcccagccagtatctgggtgtaga

SEQ ID NO: 1724742 - DNA, 25 bp, Homo sapien
acagcagttgacactagtaaacgga

SEQ ID NO: 1724743 - DNA, 25 bp, Homo sapien
ctgtttgacatttgaaggcctttac

SEQ ID NO: 1724744 - DNA, 25 bp, Homo sapien
aatatggttggttgacggaaaatgg

SEQ ID NO: 1724745 - DNA, 25 bp, Homo sapien
tctcattgactaggcccccaataaa

SEQ ID NO: 1724746 - DNA, 25 bp, Homo sapien
tacattttctcattgactaggcccc

SEQ ID NO: 1724747 - DNA, 25 bp, Homo sapien
tcttactgagagtggaaggccagag

SEQ ID NO: 1724748 - DNA, 25 bp, Homo sapien
tcttggtaggctctttcatcaatga

SEQ ID NO: 1724749 - DNA, 25 bp, Homo sapien
taatagcgtgctgccattcgaggtg

SEQ ID NO: 1724750 - DNA, 25 bp, Homo sapien
gacataccgagggacatgcctgagg

SEQ ID NO: 1724751 - DNA, 25 bp, Homo sapien
taaaggtggctggatagtgcattcg

SEQ ID NO: 1724752 - DNA, 25 bp, Homo sapien
gataggatcctgacgaagtgccata

SEQ ID NO: 1724753 - DNA, 25 bp, Homo sapien
gcaatgctgggtggcctacaaaggt

SEQ ID NO: 1724754 - DNA, 25 bp, Homo sapien
tatgtctttgctatgaagcctggcg

SEQ ID NO: 1724755 - DNA, 25 bp, Homo sapien
ccaacagttcagatgaggacctgca

SEQ ID NO: 1724756 - DNA, 25 bp, Homo sapien
tgtgcctggatgaactgaaattgct

SEQ ID NO: 1724757 - DNA, 25 bp, Homo sapien
ttggaattctatcatcccctcttac

SEQ ID NO: 1724758 - DNA, 25 bp, Homo sapien
attctatcatcccctcttactgctc

SEQ ID NO: 1724759 - DNA, 25 bp, Homo sapien
ggaattctatcatcccctcttactg

SEQ ID NO: 1724760 - DNA, 25 bp, Homo sapien
gaattctatcatcccctcttactgc

SEQ ID NO: 1724761 - DNA, 25 bp, Homo sapien
cagctggtaattagggactcagcag

SEQ ID NO: 1724762 - DNA, 25 bp, Homo sapien
tctgcagctggtaattagggactca

SEQ ID NO: 1724763 - DNA, 25 bp, Homo sapien
tggtctgcagctggtaattagggac

SEQ ID NO: 1724764 - DNA, 25 bp, Homo sapien
ctggtaattagggactcagcagtct

SEQ ID NO: 1724765 - DNA, 25 bp, Homo sapien
gagatgtacgtttaggaacaggtcc

SEQ ID NO: 1724766 - DNA, 25 bp, Homo sapien
tttcatgcccacttggagccggagc

SEQ ID NO: 1724767 - DNA, 25 bp, Homo sapien
tcatagatgctctctgtaggagtcc

SEQ ID NO: 1724768 - DNA, 25 bp, Homo sapien
ccacaatgagaagcgtttccaagaa

SEQ ID NO: 1724769 - DNA, 25 bp, Homo sapien
tccaataagtggtgttctttcagct

SEQ ID NO: 1724770 - DNA, 25 bp, Homo sapien
gcacctttcttccaataagtggtgt

SEQ ID NO: 1724771 - DNA, 25 bp, Homo sapien
tcttccaataagtggtgttctttca

SEQ ID NO: 1724772 - DNA, 25 bp, Homo sapien
ataagtggtgttctttcagcttgcc

SEQ ID NO: 1724773 - DNA, 25 bp, Homo sapien
tgtggaaagcaggtcaccattggaa

SEQ ID NO: 1724774 - DNA, 25 bp, Homo sapien
tgaatactggaaccaaggctcagga

SEQ ID NO: 1724775 - DNA, 25 bp, Homo sapien
tacagcaaatgcttgtaggaggcac

SEQ ID NO: 1724776 - DNA, 25 bp, Homo sapien
gattcctgaaactcctgatacagca

SEQ ID NO: 1724777 - DNA, 25 bp, Homo sapien
caagcgttactatcagttgatgggt

SEQ ID NO: 1724778 - DNA, 25 bp, Homo sapien
tcaagcgttactatcagttgatggg

SEQ ID NO: 1724779 - DNA, 25 bp, Homo sapien
aagcgttactatcagttgatgggtt

SEQ ID NO: 1724780 - DNA, 25 bp, Homo sapien
agcgttactatcagttgatgggttc

SEQ ID NO: 1724781 - DNA, 25 bp, Homo sapien
caacaactaagggtgctgaatactc

SEQ ID NO: 1724782 - DNA, 25 bp, Homo sapien
gcccaggaggatgtgtatccaacaa

SEQ ID NO: 1724783 - DNA, 25 bp, Homo sapien
gacaccttcaccatagttaccaaaa

SEQ ID NO: 1724784 - DNA, 25 bp, Homo sapien
atttggaggccttgtctgacacctt

SEQ ID NO: 1724785 - DNA, 25 bp, Homo sapien
tgtgcttctcgggtgttccacccat

SEQ ID NO: 1724786 - DNA, 25 bp, Homo sapien
tcttcattatcaccaccgttgcctg

SEQ ID NO: 1724787 - DNA, 25 bp, Homo sapien
tcagctaactagaggcttcagcacc

SEQ ID NO: 1724788 - DNA, 25 bp, Homo sapien
catctctggtctccgccctgagtga

SEQ ID NO: 1724789 - DNA, 25 bp, Homo sapien
tgccaacttggtgggagtgtttagt

SEQ ID NO: 1724790 - DNA, 25 bp, Homo sapien
ctgctctccccagaacttcacactt

SEQ ID NO: 1724791 - DNA, 25 bp, Homo sapien
cccctgccaacttggtgggagtgtt

SEQ ID NO: 1724792 - DNA, 25 bp, Homo sapien
caacttggtgggagtgtttagtgac

SEQ ID NO: 1724793 - DNA, 25 bp, Homo sapien
cactcttgttcttccgccagatgtg

SEQ ID NO: 1724794 - DNA, 25 bp, Homo sapien
tctctcccagagacgaggtcagaca

SEQ ID NO: 1724795 - DNA, 25 bp, Homo sapien
gcgtgtgccgaaatcagagatgcca

SEQ ID NO: 1724796 - DNA, 25 bp, Homo sapien
gttactcaacgagcaatccccagag

SEQ ID NO: 1724797 - DNA, 25 bp, Homo sapien
gatccatcagcaattcggagaaagg

SEQ ID NO: 1724798 - DNA, 25 bp, Homo sapien
ctcctggaaacgatccatcagcaat

SEQ ID NO: 1724799 - DNA, 25 bp, Homo sapien
gaaaggatctcccacgtaaagcagg

SEQ ID NO: 1724800 - DNA, 25 bp, Homo sapien
caattcggagaaaggatctcccacg

SEQ ID NO: 1724801 - DNA, 25 bp, Homo sapien
gcattgaacttttcatgcctgtccg

SEQ ID NO: 1724802 - DNA, 25 bp, Homo sapien
taggtttgccgcgttctgcattgaa

SEQ ID NO: 1724803 - DNA, 25 bp, Homo sapien
ctgagtaggtttgccgcgttctgca

SEQ ID NO: 1724804 - DNA, 25 bp, Homo sapien
ctgtccgtgcatgccagttgttcac

SEQ ID NO: 1724805 - DNA, 25 bp, Homo sapien
taaccagtgttacctgaggtgcttc

SEQ ID NO: 1724806 - DNA, 25 bp, Homo sapien
cagtgttacctgaggtgcttccttc

SEQ ID NO: 1724807 - DNA, 25 bp, Homo sapien
ttccacacttagctcctttctactc

SEQ ID NO: 1724808 - DNA, 25 bp, Homo sapien
ttacctgaggtgcttccttccacac

SEQ ID NO: 1724809 - DNA, 25 bp, Homo sapien
caaccccagccgtggcatcagtgat

SEQ ID NO: 1724810 - DNA, 25 bp, Homo sapien
tatccacctggtaaccaacaactgg

SEQ ID NO: 1724811 - DNA, 25 bp, Homo sapien
gatccgtgtcttgtatcctctttta

SEQ ID NO: 1724812 - DNA, 25 bp, Homo sapien
aaaagacgtcacaaccccagccgtg

SEQ ID NO: 1724813 - DNA, 25 bp, Homo sapien
tccccctaccataggggccatggta

SEQ ID NO: 1724814 - DNA, 25 bp, Homo sapien
cgcctccccctaccataggggccat

SEQ ID NO: 1724815 - DNA, 25 bp, Homo sapien
ctccccctaccataggggccatggt

SEQ ID NO: 1724816 - DNA, 25 bp, Homo sapien
atcttctctgtatccttccaatttt

SEQ ID NO: 1724817 - DNA, 25 bp, Homo sapien
gctgtccctggtcactggggcttga

SEQ ID NO: 1724818 - DNA, 25 bp, Homo sapien
tccctggtcactggggcttgaagct

SEQ ID NO: 1724819 - DNA, 25 bp, Homo sapien
ggctgtccctggtcactggggcttg

SEQ ID NO: 1724820 - DNA, 25 bp, Homo sapien
tgtccctggtcactggggcttgaag

SEQ ID NO: 1724821 - DNA, 25 bp, Homo sapien
tgagcaaccaagcagtaggacaccc

SEQ ID NO: 1724822 - DNA, 25 bp, Homo sapien
tgtgtcagccgggacaggcacctca

SEQ ID NO: 1724823 - DNA, 25 bp, Homo sapien
cacactgagcaaccaagcagtagga

SEQ ID NO: 1724824 - DNA, 25 bp, Homo sapien
tgttccatggtgttcccttgccaag

SEQ ID NO: 1724825 - DNA, 25 bp, Homo sapien
gacttggctaagttgctgcctgctc

SEQ ID NO: 1724826 - DNA, 25 bp, Homo sapien
aagaggaacagacctgtcttcagga

SEQ ID NO: 1724827 - DNA, 25 bp, Homo sapien
gttcagacttggctaagttgctgcc

SEQ ID NO: 1724828 - DNA, 25 bp, Homo sapien
gaggaacagacctgtcttcaggaga

SEQ ID NO: 1724829 - DNA, 25 bp, Homo sapien
ggaaggaggagaaagtcgatagcct

SEQ ID NO: 1724830 - DNA, 25 bp, Homo sapien
ggaggagaaagtcgatagccttggg

SEQ ID NO: 1724831 - DNA, 25 bp, Homo sapien
ctggaaggaggagaaagtcgatagc

SEQ ID NO: 1724832 - DNA, 25 bp, Homo sapien
aaggaggagaaagtcgatagccttg

SEQ ID NO: 1724833 - DNA, 25 bp, Homo sapien
agaggcagccctcagaaacattttc

SEQ ID NO: 1724834 - DNA, 25 bp, Homo sapien
ctcaccagaggcagccctcagaaac

SEQ ID NO: 1724835 - DNA, 25 bp, Homo sapien
accagaggcagccctcagaaacatt

SEQ ID NO: 1724836 - DNA, 25 bp, Homo sapien
cagaggcagccctcagaaacatttt

SEQ ID NO: 1724837 - DNA, 25 bp, Homo sapien
gggaaaaggcctgaggctcgcagga

SEQ ID NO: 1724838 - DNA, 25 bp, Homo sapien
ggctcctccgaggagaggaacaagg

SEQ ID NO: 1724839 - DNA, 25 bp, Homo sapien
gagggagatggcagggcggcggtgg

SEQ ID NO: 1724840 - DNA, 25 bp, Homo sapien
acaaggtggtcgaagactgggagtc

SEQ ID NO: 1724841 - DNA, 25 bp, Homo sapien
aaccggggagccagtcgaccagacg

SEQ ID NO: 1724842 - DNA, 25 bp, Homo sapien
ccggtgccaggacgggcggcggccg

SEQ ID NO: 1724843 - DNA, 25 bp, Homo sapien
acgactgagtagcggcctgtgcgcc

SEQ ID NO: 1724844 - DNA, 25 bp, Homo sapien
tgtcatccccgcgtgtgctgggaga

SEQ ID NO: 1724845 - DNA, 25 bp, Homo sapien
agggcccgcgctatgctgtccaggt

SEQ ID NO: 1724846 - DNA, 25 bp, Homo sapien
aggatgtccccgacgtgggcctcca

SEQ ID NO: 1724847 - DNA, 25 bp, Homo sapien
aggtggccgttcatggtccgcagct

SEQ ID NO: 1724848 - DNA, 25 bp, Homo sapien
cccagggacgaagccagtttggtga

SEQ ID NO: 1724849 - DNA, 25 bp, Homo sapien
ggatgcctggtgcaagcgatccctc

SEQ ID NO: 1724850 - DNA, 25 bp, Homo sapien
cagggatgcctggtgcaagcgatcc

SEQ ID NO: 1724851 - DNA, 25 bp, Homo sapien
ggcagggatgcctggtgcaagcgat

SEQ ID NO: 1724852 - DNA, 25 bp, Homo sapien
tgcctggtgcaagcgatccctcggc

SEQ ID NO: 1724853 - DNA, 25 bp, Homo sapien
tgtgaggcgcaaccgggtctgtttc

SEQ ID NO: 1724854 - DNA, 25 bp, Homo sapien
taggcagctgcgcagagcaaccgct

SEQ ID NO: 1724855 - DNA, 25 bp, Homo sapien
ctagggccgtgctttccgctaggca

SEQ ID NO: 1724856 - DNA, 25 bp, Homo sapien
tttcacgctgaaacgctagggccgt

SEQ ID NO: 1724857 - DNA, 25 bp, Homo sapien
acgccacgcggaagtcgcaggaatg

SEQ ID NO: 1724858 - DNA, 25 bp, Homo sapien
tgctgctttggcgacttgctttgag

SEQ ID NO: 1724859 - DNA, 25 bp, Homo sapien
tctaagcatccttcgcagggtgcca

SEQ ID NO: 1724860 - DNA, 25 bp, Homo sapien
gaacgtcaccagagatggatgcccc

SEQ ID NO: 1724861 - DNA, 25 bp, Homo sapien
taagtgctcccagacagggttttat

SEQ ID NO: 1724862 - DNA, 25 bp, Homo sapien
aggtgcacaaactctaccagccgca

SEQ ID NO: 1724863 - DNA, 25 bp, Homo sapien
tcctgcttatcaaagtctgtgaggc

SEQ ID NO: 1724864 - DNA, 25 bp, Homo sapien
cagctgtgagccctataagtgctcc

SEQ ID NO: 1724865 - DNA, 25 bp, Homo sapien
ccacagtactacttgcacggatcat

SEQ ID NO: 1724866 - DNA, 25 bp, Homo sapien
gatgcccttcctctgactgacagtt

SEQ ID NO: 1724867 - DNA, 25 bp, Homo sapien
gttgctctctttagctatcccactg

SEQ ID NO: 1724868 - DNA, 25 bp, Homo sapien
tatcccactgctttgacccacagta

SEQ ID NO: 1724869 - DNA, 25 bp, Homo sapien
cacagggttcttcctgtggctagct

SEQ ID NO: 1724870 - DNA, 25 bp, Homo sapien
tcttcctgtggctagctccagagag

SEQ ID NO: 1724871 - DNA, 25 bp, Homo sapien
ggttcttcctgtggctagctccaga

SEQ ID NO: 1724872 - DNA, 25 bp, Homo sapien
tcctgtggctagctccagagagcca

SEQ ID NO: 1724873 - DNA, 25 bp, Homo sapien
gaaaacaagcaaaggcgaggcctgg

SEQ ID NO: 1724874 - DNA, 25 bp, Homo sapien
tggaaacaagccgtgcggcccacac

SEQ ID NO: 1724875 - DNA, 25 bp, Homo sapien
tcaccatggaaacaagccgtgcggc

SEQ ID NO: 1724876 - DNA, 25 bp, Homo sapien
tgccattgtgggcagacaccgaggc

SEQ ID NO: 1724877 - DNA, 25 bp, Homo sapien
attttctgcccccatatcatgctta

SEQ ID NO: 1724878 - DNA, 25 bp, Homo sapien
tgcttaaagctccactgtacattag

SEQ ID NO: 1724879 - DNA, 25 bp, Homo sapien
cctaatcagtcagagaaggattggg

SEQ ID NO: 1724880 - DNA, 25 bp, Homo sapien
gttatatttatgagtccatgaagtg

SEQ ID NO: 1724881 - DNA, 25 bp, Homo sapien
gaaatcaggcgaccacaaggaagat

SEQ ID NO: 1724882 - DNA, 25 bp, Homo sapien
gcttttctcgaaggctattgactac

SEQ ID NO: 1724883 - DNA, 25 bp, Homo sapien
tgcttccttcaacatgcagttgcat

SEQ ID NO: 1724884 - DNA, 25 bp, Homo sapien
cactgagagtcggatctgtggctga

SEQ ID NO: 1724885 - DNA, 25 bp, Homo sapien
tgaggtctatttgcgctccctgtaa

SEQ ID NO: 1724886 - DNA, 25 bp, Homo sapien
ttctcagaccacacagacaagtgcg

SEQ ID NO: 1724887 - DNA, 25 bp, Homo sapien
ccctgtaacctgtaaccctgcatga

SEQ ID NO: 1724888 - DNA, 25 bp, Homo sapien
ccctgcatgaacgttgtactggtac

SEQ ID NO: 1724889 - DNA, 25 bp, Homo sapien
ttcctaggtgctgctctgctcccaa

SEQ ID NO: 1724890 - DNA, 25 bp, Homo sapien
gctcccaaagaagccggccctgaag

SEQ ID NO: 1724891 - DNA, 25 bp, Homo sapien
gaagccggccctgaagcagtggcct

SEQ ID NO: 1724892 - DNA, 25 bp, Homo sapien
tctgctcccaaagaagccggccctg

SEQ ID NO: 1724893 - DNA, 25 bp, Homo sapien
aactctccaatcccagaagggacct

SEQ ID NO: 1724894 - DNA, 25 bp, Homo sapien
actctccaatcccagaagggaccta

SEQ ID NO: 1724895 - DNA, 25 bp, Homo sapien
tcaactctccaatcccagaagggac

SEQ ID NO: 1724896 - DNA, 25 bp, Homo sapien
ctctccaatcccagaagggacctac

SEQ ID NO: 1724897 - DNA, 25 bp, Homo sapien
gagcaggctatcatgatatagctca

SEQ ID NO: 1724898 - DNA, 25 bp, Homo sapien
gccaggagcaggctatcatgatata

SEQ ID NO: 1724899 - DNA, 25 bp, Homo sapien
taattgctcccagatgataacagag

SEQ ID NO: 1724900 - DNA, 25 bp, Homo sapien
caggctgtcctggtacagtacacca

SEQ ID NO: 1724901 - DNA, 25 bp, Homo sapien
cctctccctgaaacccactgtgttt

SEQ ID NO: 1724902 - DNA, 25 bp, Homo sapien
ctctccctgaaacccactgtgtttc

SEQ ID NO: 1724903 - DNA, 25 bp, Homo sapien
ctccctgaaacccactgtgtttcca

SEQ ID NO: 1724904 - DNA, 25 bp, Homo sapien
tccctgaaacccactgtgtttccat

SEQ ID NO: 1724905 - DNA, 25 bp, Homo sapien
atgtctattgtctgcagaaatggca

SEQ ID NO: 1724906 - DNA, 25 bp, Homo sapien
cttagtcaggaggtctattatctga

SEQ ID NO: 1724907 - DNA, 25 bp, Homo sapien
tattatctgactactaaggagcatt

SEQ ID NO: 1724908 - DNA, 25 bp, Homo sapien
tctgactactaaggagcatttctgg

SEQ ID NO: 1724909 - DNA, 25 bp, Homo sapien
ggaggtctattatctgactactaag

SEQ ID NO: 1724910 - DNA, 25 bp, Homo sapien
cctcttcaaccatcagcaaaatctg

SEQ ID NO: 1724911 - DNA, 25 bp, Homo sapien
aatccctcttcaaccatcagcaaaa

SEQ ID NO: 1724912 - DNA, 25 bp, Homo sapien
ctccacctcgacaccctgccctgag

SEQ ID NO: 1724913 - DNA, 25 bp, Homo sapien
tgctgcttcctcacaaggagggccc

SEQ ID NO: 1724914 - DNA, 25 bp, Homo sapien
tgtaccctgggcacgaaatgctcct

SEQ ID NO: 1724915 - DNA, 25 bp, Homo sapien
tttttaacttaagccagatcctgtc

SEQ ID NO: 1724916 - DNA, 25 bp, Homo sapien
tctgcaatgtcagtgccacaaaggc

SEQ ID NO: 1724917 - DNA, 25 bp, Homo sapien
tagaatacacctgacagcttcccca

SEQ ID NO: 1724918 - DNA, 25 bp, Homo sapien
cctgtgttcggtgggacactgccct

SEQ ID NO: 1724919 - DNA, 25 bp, Homo sapien
tttacagcatcatagtggagcttgg

SEQ ID NO: 1724920 - DNA, 25 bp, Homo sapien
ctgatagccctgtgttcggtgggac

SEQ ID NO: 1724921 - DNA, 25 bp, Homo sapien
ggcatggtgctgatagccctgtgtt

SEQ ID NO: 1724922 - DNA, 25 bp, Homo sapien
gaaaacagagacacctgtcttgata

SEQ ID NO: 1724923 - DNA, 25 bp, Homo sapien
aaacagagacacctgtcttgatagg

SEQ ID NO: 1724924 - DNA, 25 bp, Homo sapien
acagagacacctgtcttgataggtg

SEQ ID NO: 1724925 - DNA, 25 bp, Homo sapien
tggaaaacagagacacctgtcttga

SEQ ID NO: 1724926 - DNA, 25 bp, Homo sapien
gcaaaaggttcatcggaatttccaa

SEQ ID NO: 1724927 - DNA, 25 bp, Homo sapien
tcagcacaacaactaagagcaaaag

SEQ ID NO: 1724928 - DNA, 25 bp, Homo sapien
gatttctccctttggttcttcagag

SEQ ID NO: 1724929 - DNA, 25 bp, Homo sapien
gatgagagtaagacacgcagagaag

SEQ ID NO: 1724930 - DNA, 25 bp, Homo sapien
cagcatatcgaagcttgcacctggc

SEQ ID NO: 1724931 - DNA, 25 bp, Homo sapien
tctgctgttcaaaagcgccttcatg

SEQ ID NO: 1724932 - DNA, 25 bp, Homo sapien
tgcacctggcctcgaagggatgtac

SEQ ID NO: 1724933 - DNA, 25 bp, Homo sapien
ttgctatgactaatgcagcatatcg

SEQ ID NO: 1724934 - DNA, 25 bp, Homo sapien
caggactaagatccatgttgactat

SEQ ID NO: 1724935 - DNA, 25 bp, Homo sapien
aatgcaacaggactaagatccatgt

SEQ ID NO: 1724936 - DNA, 25 bp, Homo sapien
tataaccaggaacagcgcagaaggc

SEQ ID NO: 1724937 - DNA, 25 bp, Homo sapien
catgttgactataaccaggaacagc

SEQ ID NO: 1724938 - DNA, 25 bp, Homo sapien
accacaagcccctttctgcaagggc

SEQ ID NO: 1724939 - DNA, 25 bp, Homo sapien
gccagtgcacttcggtcctgctgat

SEQ ID NO: 1724940 - DNA, 25 bp, Homo sapien
gaagctgtatggcttggggatcacc

SEQ ID NO: 1724941 - DNA, 25 bp, Homo sapien
gtgcacttcggtcctgctgatgcct

SEQ ID NO: 1724942 - DNA, 25 bp, Homo sapien
ttctcaagaaccaagcacctgccac

SEQ ID NO: 1724943 - DNA, 25 bp, Homo sapien
cttctcaagaaccaagcacctgcca

SEQ ID NO: 1724944 - DNA, 25 bp, Homo sapien
tctcaagaaccaagcacctgccacc

SEQ ID NO: 1724945 - DNA, 25 bp, Homo sapien
tccacacacattttgcgtaagtctg

SEQ ID NO: 1724946 - DNA, 25 bp, Homo sapien
cacacacattttgcgtaagtctggc

SEQ ID NO: 1724947 - DNA, 25 bp, Homo sapien
cacacattttgcgtaagtctggctc

SEQ ID NO: 1724948 - DNA, 25 bp, Homo sapien
acacattttgcgtaagtctggctct

SEQ ID NO: 1724949 - DNA, 25 bp, Homo sapien
catgaaaacactccctggctgtacg

SEQ ID NO: 1724950 - DNA, 25 bp, Homo sapien
aaaacactccctggctgtacgcaga

SEQ ID NO: 1724951 - DNA, 25 bp, Homo sapien
actccctggctgtacgcagacaccc

SEQ ID NO: 1724952 - DNA, 25 bp, Homo sapien
tccctggctgtacgcagacacccat

SEQ ID NO: 1724953 - DNA, 25 bp, Homo sapien
caaaacgctttttcgcctggatcaa

SEQ ID NO: 1724954 - DNA, 25 bp, Homo sapien
ccctgaggcacaaatccaaaacgct

SEQ ID NO: 1724955 - DNA, 25 bp, Homo sapien
ccctgttatcaaagcaaaggttgca

SEQ ID NO: 1724956 - DNA, 25 bp, Homo sapien
tagttctaataaaacaccctgaggc

SEQ ID NO: 1724957 - DNA, 25 bp, Homo sapien
agagtgtttcatagaagatgtattg

SEQ ID NO: 1724958 - DNA, 25 bp, Homo sapien
ctgtggagagtgtttcatagaagat

SEQ ID NO: 1724959 - DNA, 25 bp, Homo sapien
tgtggagagtgtttcatagaagatg

SEQ ID NO: 1724960 - DNA, 25 bp, Homo sapien
tggagagtgtttcatagaagatgta

SEQ ID NO: 1724961 - DNA, 25 bp, Homo sapien
tcttccttcgagtgtcaatccttcc

SEQ ID NO: 1724962 - DNA, 25 bp, Homo sapien
ggtttgacttcagctccagtggtga

SEQ ID NO: 1724963 - DNA, 25 bp, Homo sapien
gaacggacaccggaagagaattcta

SEQ ID NO: 1724964 - DNA, 25 bp, Homo sapien
tccttgcagtgccacagaacggaca

SEQ ID NO: 1724965 - DNA, 25 bp, Homo sapien
ctctgactggtcacgagttggaata

SEQ ID NO: 1724966 - DNA, 25 bp, Homo sapien
cacgagttggaataagtggtctctc

SEQ ID NO: 1724967 - DNA, 25 bp, Homo sapien
tggaataagtggtctctcttgaaca

SEQ ID NO: 1724968 - DNA, 25 bp, Homo sapien
gactggtcacgagttggaataagtg

SEQ ID NO: 1724969 - DNA, 25 bp, Homo sapien
ctgacagtgcatagaatgcttttac

SEQ ID NO: 1724970 - DNA, 25 bp, Homo sapien
cagtgcatagaatgcttttacagtc

SEQ ID NO: 1724971 - DNA, 25 bp, Homo sapien
cacaaggacacaccatgaactgaca

SEQ ID NO: 1724972 - DNA, 25 bp, Homo sapien
caccatgaactgacagtgcatagaa

SEQ ID NO: 1724973 - DNA, 25 bp, Homo sapien
agttagataagtactgaggagcaga

SEQ ID NO: 1724974 - DNA, 25 bp, Homo sapien
acagttagataagtactgaggagca

SEQ ID NO: 1724975 - DNA, 25 bp, Homo sapien
cagttagataagtactgaggagcag

SEQ ID NO: 1724976 - DNA, 25 bp, Homo sapien
aacagttagataagtactgaggagc

SEQ ID NO: 1724977 - DNA, 25 bp, Homo sapien
tgtgcctcgggacagaaacaacgac

SEQ ID NO: 1724978 - DNA, 25 bp, Homo sapien
gaagtgcgagctgttctctcggaga

SEQ ID NO: 1724979 - DNA, 25 bp, Homo sapien
acaacgacccgggattgctgacagg

SEQ ID NO: 1724980 - DNA, 25 bp, Homo sapien
cccagagcgaggttctggacagctg

SEQ ID NO: 1724981 - DNA, 25 bp, Homo sapien
aggagccctaaatgagccccactgc

SEQ ID NO: 1724982 - DNA, 25 bp, Homo sapien
gtgtggagggaagggatcccccagc

SEQ ID NO: 1724983 - DNA, 25 bp, Homo sapien
ggagccctaaatgagccccactgct

SEQ ID NO: 1724984 - DNA, 25 bp, Homo sapien
gagccctaaatgagccccactgctc

SEQ ID NO: 1724985 - DNA, 25 bp, Homo sapien
agcataacctctggatggcatgtgt

SEQ ID NO: 1724986 - DNA, 25 bp, Homo sapien
gaagcataacctctggatggcatgt

SEQ ID NO: 1724987 - DNA, 25 bp, Homo sapien
gcataacctctggatggcatgtgtt

SEQ ID NO: 1724988 - DNA, 25 bp, Homo sapien
aagcataacctctggatggcatgtg

SEQ ID NO: 1724989 - DNA, 25 bp, Homo sapien
cgagctcctttgaaaccagacactg

SEQ ID NO: 1724990 - DNA, 25 bp, Homo sapien
gaatggccttctcaacgtcagcctt

SEQ ID NO: 1724991 - DNA, 25 bp, Homo sapien
tcaacgtcagccttaactacgctca

SEQ ID NO: 1724992 - DNA, 25 bp, Homo sapien
tggccttctcaacgtcagccttaac

SEQ ID NO: 1724993 - DNA, 25 bp, Homo sapien
ttctcaacgtcagccttaactacgc

SEQ ID NO: 1724994 - DNA, 25 bp, Homo sapien
ggcctgagctgtgactgtgttgtaa

SEQ ID NO: 1724995 - DNA, 25 bp, Homo sapien
cagcattgttatctataagatgttc

SEQ ID NO: 1724996 - DNA, 25 bp, Homo sapien
atatgaatcgaagatatgctttgcc

SEQ ID NO: 1724997 - DNA, 25 bp, Homo sapien
cttgttcacttgcagccaacttcat

SEQ ID NO: 1724998 - DNA, 25 bp, Homo sapien
agcacctcacatcaggccagtcagt

SEQ ID NO: 1724999 - DNA, 25 bp, Homo sapien
gggcagcacctcacatcaggccagt

SEQ ID NO: 1725000 - DNA, 25 bp, Homo sapien
tgatgtttccccagctcgctacact

SEQ ID NO: 1725001 - DNA, 25 bp, Homo sapien
ctcggtgatgtttccccagctcgct

SEQ ID NO: 1725002 - DNA, 25 bp, Homo sapien
ggtggcctggccacccttgctttca

SEQ ID NO: 1725003 - DNA, 25 bp, Homo sapien
tggcaaattcaggtttatgcgatgc

SEQ ID NO: 1725004 - DNA, 25 bp, Homo sapien
cttgctttcaggttgggaaaatggc

SEQ ID NO: 1725005 - DNA, 25 bp, Homo sapien
tttatgcgatgcactaagttgtcac

SEQ ID NO: 1725006 - DNA, 25 bp, Homo sapien
taaaaatgtatgagtggtgctccat

SEQ ID NO: 1725007 - DNA, 25 bp, Homo sapien
tctgcataaaaatgtatgagtggtg

SEQ ID NO: 1725008 - DNA, 25 bp, Homo sapien
aaaatgtatgagtggtgctccatcc

SEQ ID NO: 1725009 - DNA, 25 bp, Homo sapien
gcataaaaatgtatgagtggtgctc

SEQ ID NO: 1725010 - DNA, 25 bp, Homo sapien
acggtggcagctccgtgtactggga

SEQ ID NO: 1725011 - DNA, 25 bp, Homo sapien
gcttcacggtggcagctccgtgtac

SEQ ID NO: 1725012 - DNA, 25 bp, Homo sapien
tcacggtggcagctccgtgtactgg

SEQ ID NO: 1725013 - DNA, 25 bp, Homo sapien
aagcttcacggtggcagctccgtgt

SEQ ID NO: 1725014 - DNA, 25 bp, Homo sapien
tagcggcttctgtgacacatttcca

SEQ ID NO: 1725015 - DNA, 25 bp, Homo sapien
cggcttctgtgacacatttccactg

SEQ ID NO: 1725016 - DNA, 25 bp, Homo sapien
attagcggcttctgtgacacatttc

SEQ ID NO: 1725017 - DNA, 25 bp, Homo sapien
actggaagtggggagcagtcaccat

SEQ ID NO: 1725018 - DNA, 25 bp, Homo sapien
cactctgagaactcattctgcattt

SEQ ID NO: 1725019 - DNA, 25 bp, Homo sapien
ccacatttatccagtgctaagtcat

SEQ ID NO: 1725020 - DNA, 25 bp, Homo sapien
caagttaggataatgtgtctgtggg

SEQ ID NO: 1725021 - DNA, 25 bp, Homo sapien
ctcttcaacaaatcccagactttgc

SEQ ID NO: 1725022 - DNA, 25 bp, Homo sapien
gggcagccagtgttccaagcaagga

SEQ ID NO: 1725023 - DNA, 25 bp, Homo sapien
gcaaggactgctaggccatggagct

SEQ ID NO: 1725024 - DNA, 25 bp, Homo sapien
gaggcaccagccttcagttggccaa

SEQ ID NO: 1725025 - DNA, 25 bp, Homo sapien
gagaagtgagatgtgccctccatgc

SEQ ID NO: 1725026 - DNA, 25 bp, Homo sapien
ggagccagcagcaacggcaatgtag

SEQ ID NO: 1725027 - DNA, 25 bp, Homo sapien
gcagcaacggcaatgtagagagatg

SEQ ID NO: 1725028 - DNA, 25 bp, Homo sapien
cagcagcaacggcaatgtagagaga

SEQ ID NO: 1725029 - DNA, 25 bp, Homo sapien
caacggcaatgtagagagatggcca

SEQ ID NO: 1725030 - DNA, 25 bp, Homo sapien
ccctcacaggcatagatactctgat

SEQ ID NO: 1725031 - DNA, 25 bp, Homo sapien
cagcttccagacacgggccattgga

SEQ ID NO: 1725032 - DNA, 25 bp, Homo sapien
tgggcagcttccagacacgggccat

SEQ ID NO: 1725033 - DNA, 25 bp, Homo sapien
tactctgatcttcctccatgtttgt

SEQ ID NO: 1725034 - DNA, 25 bp, Homo sapien
tgctcccctcgggtggggctattca

SEQ ID NO: 1725035 - DNA, 25 bp, Homo sapien
cccagggcgctttctgcacacataa

SEQ ID NO: 1725036 - DNA, 25 bp, Homo sapien
ggtacttggaaccatgcttctttct

SEQ ID NO: 1725037 - DNA, 25 bp, Homo sapien
gctttctgcacacataaactgctcc

SEQ ID NO: 1725038 - DNA, 25 bp, Homo sapien
aagagttgtggccagcggccaaact

SEQ ID NO: 1725039 - DNA, 25 bp, Homo sapien
aagtccgcagcggaagagttgtggc

SEQ ID NO: 1725040 - DNA, 25 bp, Homo sapien
ctgccttaccctccatgaagatatt

SEQ ID NO: 1725041 - DNA, 25 bp, Homo sapien
gagttgtggccagcggccaaacttc

SEQ ID NO: 1725042 - DNA, 25 bp, Homo sapien
tcaactcaaagaatcatggcgcacc

SEQ ID NO: 1725043 - DNA, 25 bp, Homo sapien
gagacttggcctacagaatcattgg

SEQ ID NO: 1725044 - DNA, 25 bp, Homo sapien
gattccctgccacaggcaatacact

SEQ ID NO: 1725045 - DNA, 25 bp, Homo sapien
tgcacactggattccctgccacagg

SEQ ID NO: 1725046 - DNA, 25 bp, Homo sapien
tgaggttgggctgcttcgggaggat

SEQ ID NO: 1725047 - DNA, 25 bp, Homo sapien
caaatctcttcacatacagctctgt

SEQ ID NO: 1725048 - DNA, 25 bp, Homo sapien
gctgcttcgggaggatgttaagaaa

SEQ ID NO: 1725049 - DNA, 25 bp, Homo sapien
tctgttccctgggacgtttcatcac

SEQ ID NO: 1725050 - DNA, 25 bp, Homo sapien
atttccagaaaaaccatggtatgga

SEQ ID NO: 1725051 - DNA, 25 bp, Homo sapien
gactcagaggtagcgtatggaaaga

SEQ ID NO: 1725052 - DNA, 25 bp, Homo sapien
cactctcaatgaggcgtgactcaga

SEQ ID NO: 1725053 - DNA, 25 bp, Homo sapien
tccagaaaaaccatggtatggaaac

SEQ ID NO: 1725054 - DNA, 25 bp, Homo sapien
tattgccttagcaaggtttaactgg

SEQ ID NO: 1725055 - DNA, 25 bp, Homo sapien
aacatgtggcagagcccgaattcca

SEQ ID NO: 1725056 - DNA, 25 bp, Homo sapien
gcagcatccgaacgtccagagatca

SEQ ID NO: 1725057 - DNA, 25 bp, Homo sapien
gaattccacggctcaaaatatcctc

SEQ ID NO: 1725058 - DNA, 25 bp, Homo sapien
cagttttgctcaagtagggcatcca

SEQ ID NO: 1725059 - DNA, 25 bp, Homo sapien
ttttcttaatgccaggagtgattta

SEQ ID NO: 1725060 - DNA, 25 bp, Homo sapien
aaatgaacgggatgatgctgcgctg

SEQ ID NO: 1725061 - DNA, 25 bp, Homo sapien
tgcgctggcgaatccctgggcttgt

SEQ ID NO: 1725062 - DNA, 25 bp, Homo sapien
tgaatgactccctcaaggaagactt

SEQ ID NO: 1725063 - DNA, 25 bp, Homo sapien
tgatttctatcactaagcagactgt

SEQ ID NO: 1725064 - DNA, 25 bp, Homo sapien
gacaaggattcctactcaacttttg

SEQ ID NO: 1725065 - DNA, 25 bp, Homo sapien
gattaagtaaccctatggtcatacc

SEQ ID NO: 1725066 - DNA, 25 bp, Homo sapien
actgtggggagattaatgaaaggcc

SEQ ID NO: 1725067 - DNA, 25 bp, Homo sapien
tatcgatagataaagctgagtggaa

SEQ ID NO: 1725068 - DNA, 25 bp, Homo sapien
tggaccaaaagaagatgggatcata

SEQ ID NO: 1725069 - DNA, 25 bp, Homo sapien
ctcagagagcaaccggcggccatgg

SEQ ID NO: 1725070 - DNA, 25 bp, Homo sapien
acagcgtgaaagcgcagctcaaccc

SEQ ID NO: 1725071 - DNA, 25 bp, Homo sapien
cagcgtgaaagcgcagctcaaccca

SEQ ID NO: 1725072 - DNA, 25 bp, Homo sapien
agacagcgtgaaagcgcagctcaac

SEQ ID NO: 1725073 - DNA, 25 bp, Homo sapien
gacagcgtgaaagcgcagctcaacc

SEQ ID NO: 1725074 - DNA, 25 bp, Homo sapien
gctgttagtccttgctgtccaccac

SEQ ID NO: 1725075 - DNA, 25 bp, Homo sapien
tctcctcggctgttagtccttgctg

SEQ ID NO: 1725076 - DNA, 25 bp, Homo sapien
tccacacttctcctcggctgttagt

SEQ ID NO: 1725077 - DNA, 25 bp, Homo sapien
tcggctgttagtccttgctgtccac

SEQ ID NO: 1725078 - DNA, 25 bp, Homo sapien
gcagtatagaagcaggtaacttcct

SEQ ID NO: 1725079 - DNA, 25 bp, Homo sapien
gaaagccagaactttattctgcagt

SEQ ID NO: 1725080 - DNA, 25 bp, Homo sapien
gcaggtaacttcctaccaatcacct

SEQ ID NO: 1725081 - DNA, 25 bp, Homo sapien
gccagaactttattctgcagtatag

SEQ ID NO: 1725082 - DNA, 25 bp, Homo sapien
tcctgcgcaacttcttgagggacca

SEQ ID NO: 1725083 - DNA, 25 bp, Homo sapien
gggaccaaaagcacgataactccat

SEQ ID NO: 1725084 - DNA, 25 bp, Homo sapien
agggaccaaaagcacgataactcca

SEQ ID NO: 1725085 - DNA, 25 bp, Homo sapien
ggggcaatactgtcccgcccttgga

SEQ ID NO: 1725086 - DNA, 25 bp, Homo sapien
aatactgtcccgcccttggagagct

SEQ ID NO: 1725087 - DNA, 25 bp, Homo sapien
gggcaatactgtcccgcccttggag

SEQ ID NO: 1725088 - DNA, 25 bp, Homo sapien
ctgtcccgcccttggagagctacag

SEQ ID NO: 1725089 - DNA, 25 bp, Homo sapien
agggatgcctgccatatagctccag

SEQ ID NO: 1725090 - DNA, 25 bp, Homo sapien
ggcatgggcaaaacatgagttctga

SEQ ID NO: 1725091 - DNA, 25 bp, Homo sapien
gaccttcaggtctagcacagcagca

SEQ ID NO: 1725092 - DNA, 25 bp, Homo sapien
ggaaaagggcatgggcaaaacatga

SEQ ID NO: 1725093 - DNA, 25 bp, Homo sapien
cacaccactaatttagcactttgca

SEQ ID NO: 1725094 - DNA, 25 bp, Homo sapien
cactttctggccacaccactaattt

SEQ ID NO: 1725095 - DNA, 25 bp, Homo sapien
ccaagctggtaatggggccgcctgc

SEQ ID NO: 1725096 - DNA, 25 bp, Homo sapien
ctgcccaccagctcggaatctccat

SEQ ID NO: 1725097 - DNA, 25 bp, Homo sapien
ttcttattggtagaagcctcctcct

SEQ ID NO: 1725098 - DNA, 25 bp, Homo sapien
tttggctaccgatccagatgctgag

SEQ ID NO: 1725099 - DNA, 25 bp, Homo sapien
caacccatttcatgacgtattctga

SEQ ID NO: 1725100 - DNA, 25 bp, Homo sapien
tattctgaagtgacccaaataagcc

SEQ ID NO: 1725101 - DNA, 25 bp, Homo sapien
ccttaggtgtcccaagaacaactca

SEQ ID NO: 1725102 - DNA, 25 bp, Homo sapien
tacagctatagggtaggaggcttcc

SEQ ID NO: 1725103 - DNA, 25 bp, Homo sapien
cagcaacagtgtggtgaggtcctta

SEQ ID NO: 1725104 - DNA, 25 bp, Homo sapien
gccttcttatcatatgtgcagcaca

SEQ ID NO: 1725105 - DNA, 25 bp, Homo sapien
tgttcgctggtaaagggtgaggctc

SEQ ID NO: 1725106 - DNA, 25 bp, Homo sapien
tcaacaatcccccttctatagtgtt

SEQ ID NO: 1725107 - DNA, 25 bp, Homo sapien
ttcgctggtaaagggtgaggctccc

SEQ ID NO: 1725108 - DNA, 25 bp, Homo sapien
cccttctatagtgttcgctggtaaa

SEQ ID NO: 1725109 - DNA, 25 bp, Homo sapien
aggtctgtcggctgggtgctctcca

SEQ ID NO: 1725110 - DNA, 25 bp, Homo sapien
tggaatgcaggtctgtcggctgggt

SEQ ID NO: 1725111 - DNA, 25 bp, Homo sapien
aatgcaggtctgtcggctgggtgct

SEQ ID NO: 1725112 - DNA, 25 bp, Homo sapien
caggtctgtcggctgggtgctctcc

SEQ ID NO: 1725113 - DNA, 25 bp, Homo sapien
tgctgcgcacctggcccatgctgtc

SEQ ID NO: 1725114 - DNA, 25 bp, Homo sapien
aagtcacttgagacacattctcagt

SEQ ID NO: 1725115 - DNA, 25 bp, Homo sapien
cagactggaaagtcacttgagacac

SEQ ID NO: 1725116 - DNA, 25 bp, Homo sapien
gcacctggcccatgctgtccctggc

SEQ ID NO: 1725117 - DNA, 25 bp, Homo sapien
gccacttcctgtccccgctgtggaa

SEQ ID NO: 1725118 - DNA, 25 bp, Homo sapien
tgatgacggggcctcatcagagcca

SEQ ID NO: 1725119 - DNA, 25 bp, Homo sapien
gagatgatgacggggcctcatcaga

SEQ ID NO: 1725120 - DNA, 25 bp, Homo sapien
ttgggagatgatgacggggcctcat

SEQ ID NO: 1725121 - DNA, 25 bp, Homo sapien
tcctccctcatggagggtccttggg

SEQ ID NO: 1725122 - DNA, 25 bp, Homo sapien
ctggtgggctctgcacttgcatgtc

SEQ ID NO: 1725123 - DNA, 25 bp, Homo sapien
acttgcatgtcctcgtctcctccct

SEQ ID NO: 1725124 - DNA, 25 bp, Homo sapien
ggctctgcacttgcatgtcctcgtc

SEQ ID NO: 1725125 - DNA, 25 bp, Homo sapien
tttgctttgactagcattcttgtaa

SEQ ID NO: 1725126 - DNA, 25 bp, Homo sapien
tgtgcaaatagccaactaggggtat

SEQ ID NO: 1725127 - DNA, 25 bp, Homo sapien
ctgtgtgcaaatagccaactagggg

SEQ ID NO: 1725128 - DNA, 25 bp, Homo sapien
ctttgactagcattcttgtaaggaa

SEQ ID NO: 1725129 - DNA, 25 bp, Homo sapien
gccatcttggtgaaggctcctgggt

SEQ ID NO: 1725130 - DNA, 25 bp, Homo sapien
tctggtcacaaagggacccttcagg

SEQ ID NO: 1725131 - DNA, 25 bp, Homo sapien
cctccacagcaatgcggataacatg

SEQ ID NO: 1725132 - DNA, 25 bp, Homo sapien
gataacatgtgaccgtctcaccact

SEQ ID NO: 1725133 - DNA, 25 bp, Homo sapien
ccatgtctactctgttggaagcagt

SEQ ID NO: 1725134 - DNA, 25 bp, Homo sapien
gggctccatgtctactctgttggaa

SEQ ID NO: 1725135 - DNA, 25 bp, Homo sapien
cctgtagcatgctcagaaacagagt

SEQ ID NO: 1725136 - DNA, 25 bp, Homo sapien
aacagagtcacttaggtggccgtgg

SEQ ID NO: 1725137 - DNA, 25 bp, Homo sapien
acaggcctgatgagaaagctaaggc

SEQ ID NO: 1725138 - DNA, 25 bp, Homo sapien
catccaggggatggatgcggcaccc

SEQ ID NO: 1725139 - DNA, 25 bp, Homo sapien
acttcaatcataaggcgcttcatgc

SEQ ID NO: 1725140 - DNA, 25 bp, Homo sapien
gctaaggccgtgtgtaaaaagcagc

SEQ ID NO: 1725141 - DNA, 25 bp, Homo sapien
tccttctaagaggtgccacctgcag

SEQ ID NO: 1725142 - DNA, 25 bp, Homo sapien
ttcaggcccgaatcttcaaattgct

SEQ ID NO: 1725143 - DNA, 25 bp, Homo sapien
acaggtgcattcctcgctctttcct

SEQ ID NO: 1725144 - DNA, 25 bp, Homo sapien
tagagccctcatataaggcagcagg

SEQ ID NO: 1725145 - DNA, 25 bp, Homo sapien
ctccgtgggaaggtgtagcgcccac

SEQ ID NO: 1725146 - DNA, 25 bp, Homo sapien
ccattttatataacggagtccgtgc

SEQ ID NO: 1725147 - DNA, 25 bp, Homo sapien
ggagtccgtgctttctcaagactca

SEQ ID NO: 1725148 - DNA, 25 bp, Homo sapien
tgggaaggtgtagcgcccacactgt

SEQ ID NO: 1725149 - DNA, 25 bp, Homo sapien
aattcttcctgtgtcgggatgtctt

SEQ ID NO: 1725150 - DNA, 25 bp, Homo sapien
ttttgctagttcctccttcaattcc

SEQ ID NO: 1725151 - DNA, 25 bp, Homo sapien
tcagttctcctcttgttacttccac

SEQ ID NO: 1725152 - DNA, 25 bp, Homo sapien
taacagtatatggatctggcttctg

SEQ ID NO: 1725153 - DNA, 25 bp, Homo sapien
attcttttcagctcttacaaactcc

SEQ ID NO: 1725154 - DNA, 25 bp, Homo sapien
ttcttttcagctcttacaaactcca

SEQ ID NO: 1725155 - DNA, 25 bp, Homo sapien
tattcttttcagctcttacaaactc

SEQ ID NO: 1725156 - DNA, 25 bp, Homo sapien
cagagatcccaagcgtctgtaactc

SEQ ID NO: 1725157 - DNA, 25 bp, Homo sapien
catacctgaatcttctatgtgtctt

SEQ ID NO: 1725158 - DNA, 25 bp, Homo sapien
ccagtccatacctgaatcttctatg

SEQ ID NO: 1725159 - DNA, 25 bp, Homo sapien
gcctacatgccagccagtccatacc

SEQ ID NO: 1725160 - DNA, 25 bp, Homo sapien
cattcctgttacaccaaagaatcca

SEQ ID NO: 1725161 - DNA, 25 bp, Homo sapien
tattcaatggtaccaaggattctga

SEQ ID NO: 1725162 - DNA, 25 bp, Homo sapien
accctgcattcctgttacaccaaag

SEQ ID NO: 1725163 - DNA, 25 bp, Homo sapien
ctgggtagctttattcaatggtacc

SEQ ID NO: 1725164 - DNA, 25 bp, Homo sapien
gactttcaagtgagacacactgcca

SEQ ID NO: 1725165 - DNA, 25 bp, Homo sapien
actgactttcaagtgagacacactg

SEQ ID NO: 1725166 - DNA, 25 bp, Homo sapien
ctgccagtgaaagagtatcaggtct

SEQ ID NO: 1725167 - DNA, 25 bp, Homo sapien
aaagagtatcaggtctccagttcca

SEQ ID NO: 1725168 - DNA, 25 bp, Homo sapien
caaatgcttgggttaagtccacagt

SEQ ID NO: 1725169 - DNA, 25 bp, Homo sapien
caactaagttaatggggtcaaatgc

SEQ ID NO: 1725170 - DNA, 25 bp, Homo sapien
agttaatggggtcaaatgcttgggt

SEQ ID NO: 1725171 - DNA, 25 bp, Homo sapien
ttaagtccacagtgccactcatgtt

SEQ ID NO: 1725172 - DNA, 25 bp, Homo sapien
cttgccccagctaacttctggtaaa

SEQ ID NO: 1725173 - DNA, 25 bp, Homo sapien
cagctaacttctggtaaattttaat

SEQ ID NO: 1725174 - DNA, 25 bp, Homo sapien
tgccccagctaacttctggtaaatt

SEQ ID NO: 1725175 - DNA, 25 bp, Homo sapien
ttgccccagctaacttctggtaaat

SEQ ID NO: 1725176 - DNA, 25 bp, Homo sapien
gcttgttggccaactcaagtggttt

SEQ ID NO: 1725177 - DNA, 25 bp, Homo sapien
cttgttggccaactcaagtggtttt

SEQ ID NO: 1725178 - DNA, 25 bp, Homo sapien
agatgtgaaacccaccatccttcta

SEQ ID NO: 1725179 - DNA, 25 bp, Homo sapien
agtgagatgtgaaacccaccatcct

SEQ ID NO: 1725180 - DNA, 25 bp, Homo sapien
gatgctacacatttatggttgatgg

SEQ ID NO: 1725181 - DNA, 25 bp, Homo sapien
gtgatgctacacatttatggttgat

SEQ ID NO: 1725182 - DNA, 25 bp, Homo sapien
ttctactatagcaaccctctgctca

SEQ ID NO: 1725183 - DNA, 25 bp, Homo sapien
tctctttctactatagcaaccctct

SEQ ID NO: 1725184 - DNA, 25 bp, Homo sapien
tacccactcccagatgtatctgagg

SEQ ID NO: 1725185 - DNA, 25 bp, Homo sapien
tccctcatccctacattcatcagtt

SEQ ID NO: 1725186 - DNA, 25 bp, Homo sapien
agtacagtgcaaccaccactggatc

SEQ ID NO: 1725187 - DNA, 25 bp, Homo sapien
gcaactgaagtacagtgcaaccacc

SEQ ID NO: 1725188 - DNA, 25 bp, Homo sapien
gactgctgctccataagctggagcc

SEQ ID NO: 1725189 - DNA, 25 bp, Homo sapien
ctccataagctggagcccactagag

SEQ ID NO: 1725190 - DNA, 25 bp, Homo sapien
tgagaacacaagcagtgagtctcat

SEQ ID NO: 1725191 - DNA, 25 bp, Homo sapien
cctgagaacacaagcagtgagtctc

SEQ ID NO: 1725192 - DNA, 25 bp, Homo sapien
ccctgagaacacaagcagtgagtct

SEQ ID NO: 1725193 - DNA, 25 bp, Homo sapien
agaacacaagcagtgagtctcattg

SEQ ID NO: 1725194 - DNA, 25 bp, Homo sapien
gagaaatgttcccgattgttggagc

SEQ ID NO: 1725195 - DNA, 25 bp, Homo sapien
aatgttcccgattgttggagctgac

SEQ ID NO: 1725196 - DNA, 25 bp, Homo sapien
gaaatgttcccgattgttggagctg

SEQ ID NO: 1725197 - DNA, 25 bp, Homo sapien
aagagaaatgttcccgattgttgga

SEQ ID NO: 1725198 - DNA, 25 bp, Homo sapien
tggagttggtgtcagcatttcaagc

SEQ ID NO: 1725199 - DNA, 25 bp, Homo sapien
gcctattagtaagtctttctctgta

SEQ ID NO: 1725200 - DNA, 25 bp, Homo sapien
tgtaggctccatgtagcccaataag

SEQ ID NO: 1725201 - DNA, 25 bp, Homo sapien
tttcaagctgagtatggatctggcc

SEQ ID NO: 1725202 - DNA, 25 bp, Homo sapien
caaggtgtcaagtttctgaaagata

SEQ ID NO: 1725203 - DNA, 25 bp, Homo sapien
gaccgattctacctgcacctttgga

SEQ ID NO: 1725204 - DNA, 25 bp, Homo sapien
cagattccttgagagtggtagtttc

SEQ ID NO: 1725205 - DNA, 25 bp, Homo sapien
tttgccccactcctaggtgtggaga

SEQ ID NO: 1725206 - DNA, 25 bp, Homo sapien
ctgatgctgggtagtgttggacctt

SEQ ID NO: 1725207 - DNA, 25 bp, Homo sapien
caggtcctttggcagacccaggtaa

SEQ ID NO: 1725208 - DNA, 25 bp, Homo sapien
taaaggaggtcatttctcgtctgat

SEQ ID NO: 1725209 - DNA, 25 bp, Homo sapien
gtagtgttggaccttagggcagcaa

SEQ ID NO: 1725210 - DNA, 25 bp, Homo sapien
gagctgctgtactttatttgcaacc

SEQ ID NO: 1725211 - DNA, 25 bp, Homo sapien
gaggctgcggcggcgtttcccggtc

SEQ ID NO: 1725212 - DNA, 25 bp, Homo sapien
tgctgtactttatttgcaacctgta

SEQ ID NO: 1725213 - DNA, 25 bp, Homo sapien
gagaaagaaacatttgatcagccct

SEQ ID NO: 1725214 - DNA, 25 bp, Homo sapien
gagttgatccgcagtttgtccaccc

SEQ ID NO: 1725215 - DNA, 25 bp, Homo sapien
gggtgcgctggactccggaccctcc

SEQ ID NO: 1725216 - DNA, 25 bp, Homo sapien
ctcctgggcggaatggaggaaggca

SEQ ID NO: 1725217 - DNA, 25 bp, Homo sapien
aggttccggcaggtggccgtcttct

SEQ ID NO: 1725218 - DNA, 25 bp, Homo sapien
tgcagccgccggctattttgggcgc

SEQ ID NO: 1725219 - DNA, 25 bp, Homo sapien
gacagtcgcggatcctgtgacacct

SEQ ID NO: 1725220 - DNA, 25 bp, Homo sapien
acttgttgctcccacgacctgttgt

SEQ ID NO: 1725221 - DNA, 25 bp, Homo sapien
tgggacactgatctctcagaccccg

SEQ ID NO: 1725222 - DNA, 25 bp, Homo sapien
taaagtgccttttgctccatgaagc

SEQ ID NO: 1725223 - DNA, 25 bp, Homo sapien
ttcaggaaggttcagctaaagtgcc

SEQ ID NO: 1725224 - DNA, 25 bp, Homo sapien
gacacagcctgccataaagggtagt

SEQ ID NO: 1725225 - DNA, 25 bp, Homo sapien
ctatcagatgcctgacctttcagga

SEQ ID NO: 1725226 - DNA, 25 bp, Homo sapien
caggaaggaggaatttgcactgaga

SEQ ID NO: 1725227 - DNA, 25 bp, Homo sapien
aggaaggaggaatttgcactgagag

SEQ ID NO: 1725228 - DNA, 25 bp, Homo sapien
gggcttggtgactgctttcttcagg

SEQ ID NO: 1725229 - DNA, 25 bp, Homo sapien
gttgggcttggtgactgctttcttc

SEQ ID NO: 1725230 - DNA, 25 bp, Homo sapien
taaacatcaccttgattaagttata

SEQ ID NO: 1725231 - DNA, 25 bp, Homo sapien
ctgaagccaagcaggaggaaagcaa

SEQ ID NO: 1725232 - DNA, 25 bp, Homo sapien
tgaagccaagcaggaggaaagcaat

SEQ ID NO: 1725233 - DNA, 25 bp, Homo sapien
gttataatgtaccaagagagttgca

SEQ ID NO: 1725234 - DNA, 25 bp, Homo sapien
tctccctctgtaaccttggtccttc

SEQ ID NO: 1725235 - DNA, 25 bp, Homo sapien
atgcagcgaaggcaccagtctccct

SEQ ID NO: 1725236 - DNA, 25 bp, Homo sapien
cagaatgtacagctgtgaaggtgac

SEQ ID NO: 1725237 - DNA, 25 bp, Homo sapien
gactgtttctctaaaggctttggtg

SEQ ID NO: 1725238 - DNA, 25 bp, Homo sapien
taagaatattgcctacacttcagtg

SEQ ID NO: 1725239 - DNA, 25 bp, Homo sapien
aatattgcctacacttcagtgcagg

SEQ ID NO: 1725240 - DNA, 25 bp, Homo sapien
gccattaagaatattgcctacactt

SEQ ID NO: 1725241 - DNA, 25 bp, Homo sapien
cattaagaatattgcctacacttca

SEQ ID NO: 1725242 - DNA, 25 bp, Homo sapien
tcaccctttcattggagccatgcca

SEQ ID NO: 1725243 - DNA, 25 bp, Homo sapien
tttcattggagccatgccaatcttc

SEQ ID NO: 1725244 - DNA, 25 bp, Homo sapien
ttgcatgtcaccctttcattggagc

SEQ ID NO: 1725245 - DNA, 25 bp, Homo sapien
gcatgtcaccctttcattggagcca

SEQ ID NO: 1725246 - DNA, 25 bp, Homo sapien
tttgaatgattcagcagctgatctt

SEQ ID NO: 1725247 - DNA, 25 bp, Homo sapien
catggccaggcatgcagcatctcta

SEQ ID NO: 1725248 - DNA, 25 bp, Homo sapien
acatggccaggcatgcagcatctct

SEQ ID NO: 1725249 - DNA, 25 bp, Homo sapien
atggccaggcatgcagcatctctat

SEQ ID NO: 1725250 - DNA, 25 bp, Homo sapien
tagggtttcccagaatctatagagc

SEQ ID NO: 1725251 - DNA, 25 bp, Homo sapien
ttagggtttcccagaatctatagag

SEQ ID NO: 1725252 - DNA, 25 bp, Homo sapien
gaacacaagttcacctccactatga

SEQ ID NO: 1725253 - DNA, 25 bp, Homo sapien
tagtgagtccctctgcagtatctgt

SEQ ID NO: 1725254 - DNA, 25 bp, Homo sapien
gccacccagattcagcaggtccctc

SEQ ID NO: 1725255 - DNA, 25 bp, Homo sapien
tcacctccactatgaaagacttctc

SEQ ID NO: 1725256 - DNA, 25 bp, Homo sapien
tcaaaatccaatggccacgtccagg

SEQ ID NO: 1725257 - DNA, 25 bp, Homo sapien
tgaggactgaggatgttgcccctct

SEQ ID NO: 1725258 - DNA, 25 bp, Homo sapien
ctctagtctctaaggccaaatgcaa

SEQ ID NO: 1725259 - DNA, 25 bp, Homo sapien
cgtccaggcccattaagtgtctctc

SEQ ID NO: 1725260 - DNA, 25 bp, Homo sapien
tgctatgatctgtgggcctggacct

SEQ ID NO: 1725261 - DNA, 25 bp, Homo sapien
gagctgatgagaacagatcccctta

SEQ ID NO: 1725262 - DNA, 25 bp, Homo sapien
tcataagcaacacatttagtgcatt

SEQ ID NO: 1725263 - DNA, 25 bp, Homo sapien
agaacagatccccttacttcctagg

SEQ ID NO: 1725264 - DNA, 25 bp, Homo sapien
gtatagctattaccaacaatctgga

SEQ ID NO: 1725265 - DNA, 25 bp, Homo sapien
cgttgattattagtttgtgccttga

SEQ ID NO: 1725266 - DNA, 25 bp, Homo sapien
cagccatggagatgatttggcaata

SEQ ID NO: 1725267 - DNA, 25 bp, Homo sapien
tccagttttaagtctcaggttggcc

SEQ ID NO: 1725268 - DNA, 25 bp, Homo sapien
ggctgcaccaaggtccggcacaagt

SEQ ID NO: 1725269 - DNA, 25 bp, Homo sapien
tggccgcggagaaagcaactttggc

SEQ ID NO: 1725270 - DNA, 25 bp, Homo sapien
acaagtctggagaagcttcagccag

SEQ ID NO: 1725271 - DNA, 25 bp, Homo sapien
gataaatgaaacgtggatctaccat

SEQ ID NO: 1725272 - DNA, 25 bp, Homo sapien
ccccaacgtccctatctgcgccgct

SEQ ID NO: 1725273 - DNA, 25 bp, Homo sapien
acagccccaacgtccctatctgcgc

SEQ ID NO: 1725274 - DNA, 25 bp, Homo sapien
caacgtccctatctgcgccgctcgg

SEQ ID NO: 1725275 - DNA, 25 bp, Homo sapien
gggcacagccccaacgtccctatct

SEQ ID NO: 1725276 - DNA, 25 bp, Homo sapien
aagaggggcgatgccgagctcttcc

SEQ ID NO: 1725277 - DNA, 25 bp, Homo sapien
gggcgatgccgagctcttcctgagg

SEQ ID NO: 1725278 - DNA, 25 bp, Homo sapien
tggaggaagaggggcgatgccgagc

SEQ ID NO: 1725279 - DNA, 25 bp, Homo sapien
cgatgccgagctcttcctgaggcgc

SEQ ID NO: 1725280 - DNA, 25 bp, Homo sapien
ggtcgcttctttccaatgcgcggaa

SEQ ID NO: 1725281 - DNA, 25 bp, Homo sapien
gcttctttccaatgcgcggaactcg

SEQ ID NO: 1725282 - DNA, 25 bp, Homo sapien
gccgcggtcgcttctttccaatgcg

SEQ ID NO: 1725283 - DNA, 25 bp, Homo sapien
caatgcgcggaactcggcgctcgcg

SEQ ID NO: 1725284 - DNA, 25 bp, Homo sapien
tcaaagcccctaggggactggagag

SEQ ID NO: 1725285 - DNA, 25 bp, Homo sapien
ttcaaagcccctaggggactggaga

SEQ ID NO: 1725286 - DNA, 25 bp, Homo sapien
caaagcccctaggggactggagagg

SEQ ID NO: 1725287 - DNA, 25 bp, Homo sapien
gagagggggtgacattgccccccag

SEQ ID NO: 1725288 - DNA, 25 bp, Homo sapien
cgttgaaggacagcaatcagggttc

SEQ ID NO: 1725289 - DNA, 25 bp, Homo sapien
aatgaacacgttgaaggacagcaat

SEQ ID NO: 1725290 - DNA, 25 bp, Homo sapien
gaacacgttgaaggacagcaatcag

SEQ ID NO: 1725291 - DNA, 25 bp, Homo sapien
cacgttgaaggacagcaatcagggt

SEQ ID NO: 1725292 - DNA, 25 bp, Homo sapien
acaaaagtattactaataacttcat

SEQ ID NO: 1725293 - DNA, 25 bp, Homo sapien
cagttataagtccagaaaacaaaag

SEQ ID NO: 1725294 - DNA, 25 bp, Homo sapien
tatgaatgatcgatgcaggaatcca

SEQ ID NO: 1725295 - DNA, 25 bp, Homo sapien
caagcctgtcacaatactgtagtgg

SEQ ID NO: 1725296 - DNA, 25 bp, Homo sapien
tcctgaagctgattggtcacccaaa

SEQ ID NO: 1725297 - DNA, 25 bp, Homo sapien
tcctgagaacactgggtcatcccat

SEQ ID NO: 1725298 - DNA, 25 bp, Homo sapien
ataaaatctgttaggaatgtcttct

SEQ ID NO: 1725299 - DNA, 25 bp, Homo sapien
ttcatcggcaaccaaaataatgggc

SEQ ID NO: 1725300 - DNA, 25 bp, Homo sapien
taaacattcatatgagggctacagt

SEQ ID NO: 1725301 - DNA, 25 bp, Homo sapien
agcacaattgtccagccttcatcgg

SEQ ID NO: 1725302 - DNA, 25 bp, Homo sapien
caaggtatgatttgttcctaggata

SEQ ID NO: 1725303 - DNA, 25 bp, Homo sapien
gactttgccttcactcttaaattta

SEQ ID NO: 1725304 - DNA, 25 bp, Homo sapien
tcctaggatacaacagaaatatctc

SEQ ID NO: 1725305 - DNA, 25 bp, Homo sapien
taccctcttaacacaacagtatcac

SEQ ID NO: 1725306 - DNA, 25 bp, Homo sapien
aatgttgccatttaacgtacacccg

SEQ ID NO: 1725307 - DNA, 25 bp, Homo sapien
tcatattaagtacgggtgactgggt

SEQ ID NO: 1725308 - DNA, 25 bp, Homo sapien
catttgcctataaatccatactgag

SEQ ID NO: 1725309 - DNA, 25 bp, Homo sapien
tctatactttcggttgtcaacaaca

SEQ ID NO: 1725310 - DNA, 25 bp, Homo sapien
tcttcaactcagctatgttccatat

SEQ ID NO: 1725311 - DNA, 25 bp, Homo sapien
tctttcagaaagggactagaaataa

SEQ ID NO: 1725312 - DNA, 25 bp, Homo sapien
aacatcagtcaataagatcagactt

SEQ ID NO: 1725313 - DNA, 25 bp, Homo sapien
gatcagactttttaggacaaaataa

SEQ ID NO: 1725314 - DNA, 25 bp, Homo sapien
gcaccactggtcaactaacaagcac

SEQ ID NO: 1725315 - DNA, 25 bp, Homo sapien
ggcttctgggagattaatgcaccac

SEQ ID NO: 1725316 - DNA, 25 bp, Homo sapien
tccgtgggcagctagaaatggatgc

SEQ ID NO: 1725317 - DNA, 25 bp, Homo sapien
gataacaatcgcgatggcttctggg

SEQ ID NO: 1725318 - DNA, 25 bp, Homo sapien
tacaataggcagcaaataccaggct

SEQ ID NO: 1725319 - DNA, 25 bp, Homo sapien
ttagcagtgactcaataggacgcac

SEQ ID NO: 1725320 - DNA, 25 bp, Homo sapien
tactgatgaatggttcttgagccca

SEQ ID NO: 1725321 - DNA, 25 bp, Homo sapien
gagcatttcctacctcaagagggta

SEQ ID NO: 1725322 - DNA, 25 bp, Homo sapien
gaaagggttaagatactgacaggac

SEQ ID NO: 1725323 - DNA, 25 bp, Homo sapien
gttggatgccaagtatagatttctg

SEQ ID NO: 1725324 - DNA, 25 bp, Homo sapien
gaaactcataaccaccaatcacgat

SEQ ID NO: 1725325 - DNA, 25 bp, Homo sapien
cattaaaactcacaccattgcaagg

SEQ ID NO: 1725326 - DNA, 25 bp, Homo sapien
ttctcagtgtactaaaggagtcaat

SEQ ID NO: 1725327 - DNA, 25 bp, Homo sapien
aaattcttatgccattcctagtgga

SEQ ID NO: 1725328 - DNA, 25 bp, Homo sapien
gcagcagaactgtccctatgttata

SEQ ID NO: 1725329 - DNA, 25 bp, Homo sapien
ggagtcaatggctttaacagtgata

SEQ ID NO: 1725330 - DNA, 25 bp, Homo sapien
atccataaagcttatcagatatggg

SEQ ID NO: 1725331 - DNA, 25 bp, Homo sapien
taatccataaagcttatcagatatg

SEQ ID NO: 1725332 - DNA, 25 bp, Homo sapien
caataatccataaagcttatcagat

SEQ ID NO: 1725333 - DNA, 25 bp, Homo sapien
aatgcaataatccataaagcttatc

SEQ ID NO: 1725334 - DNA, 25 bp, Homo sapien
ttaatttaaattaaggcactacata

SEQ ID NO: 1725335 - DNA, 25 bp, Homo sapien
aattaaggcactacatacacatttc

SEQ ID NO: 1725336 - DNA, 25 bp, Homo sapien
tttaaattaaggcactacatacaca

SEQ ID NO: 1725337 - DNA, 25 bp, Homo sapien
aatttaaattaaggcactacataca

SEQ ID NO: 1725338 - DNA, 25 bp, Homo sapien
ttttggtagattttattcacacaca

SEQ ID NO: 1725339 - DNA, 25 bp, Homo sapien
ggtagattttattcacacacatttt

SEQ ID NO: 1725340 - DNA, 25 bp, Homo sapien
atgaacaaagtcattaattctgaac

SEQ ID NO: 1725341 - DNA, 25 bp, Homo sapien
aacaaagtcattaattctgaactca

SEQ ID NO: 1725342 - DNA, 25 bp, Homo sapien
tatgctgggtggaaaaaccaatgct

SEQ ID NO: 1725343 - DNA, 25 bp, Homo sapien
cgtttatttcgcacagttccaggag

SEQ ID NO: 1725344 - DNA, 25 bp, Homo sapien
tgaaaagtgcatgcccaagtgccaa

SEQ ID NO: 1725345 - DNA, 25 bp, Homo sapien
cacatcgtggactattacttggcaa

SEQ ID NO: 1725346 - DNA, 25 bp, Homo sapien
aaggctctgcttcaataccagactc

SEQ ID NO: 1725347 - DNA, 25 bp, Homo sapien
gcttcgttgaaatcccaccatcttc

SEQ ID NO: 1725348 - DNA, 25 bp, Homo sapien
ttcacgtgcttcgttgaaatcccac

SEQ ID NO: 1725349 - DNA, 25 bp, Homo sapien
gtcttctctgtttcacgtgcttcgt

SEQ ID NO: 1725350 - DNA, 25 bp, Homo sapien
gatcctcacttaggcagtccagggc

SEQ ID NO: 1725351 - DNA, 25 bp, Homo sapien
tagtttggaattgactgatcctcac

SEQ ID NO: 1725352 - DNA, 25 bp, Homo sapien
aattgactgatcctcacttaggcag

SEQ ID NO: 1725353 - DNA, 25 bp, Homo sapien
tagtattaaatagtttggaattgac

SEQ ID NO: 1725354 - DNA, 25 bp, Homo sapien
tcctccttctttatgaggaccttta

SEQ ID NO: 1725355 - DNA, 25 bp, Homo sapien
tatgaggacctttaaaagacccaca

SEQ ID NO: 1725356 - DNA, 25 bp, Homo sapien
tctcctccttctttatgaggacctt

SEQ ID NO: 1725357 - DNA, 25 bp, Homo sapien
tttaaaagacccacatttctcttgc

SEQ ID NO: 1725358 - DNA, 25 bp, Homo sapien
tgcactcctctctaagtgtttcgaa

SEQ ID NO: 1725359 - DNA, 25 bp, Homo sapien
caaatgagtttagaatggagagtgc

SEQ ID NO: 1725360 - DNA, 25 bp, Homo sapien
ccacatttctcgtgataatcagtct

SEQ ID NO: 1725361 - DNA, 25 bp, Homo sapien
gagagtgctctaagcaggggatatt

SEQ ID NO: 1725362 - DNA, 25 bp, Homo sapien
aaacacctttcatcattatctccca

SEQ ID NO: 1725363 - DNA, 25 bp, Homo sapien
tgtgaatgcaaacacctttcatcat

SEQ ID NO: 1725364 - DNA, 25 bp, Homo sapien
gtgtgtgaatgcaaacacctttcat

SEQ ID NO: 1725365 - DNA, 25 bp, Homo sapien
aaagaaagatctttctccgtatctt

SEQ ID NO: 1725366 - DNA, 25 bp, Homo sapien
tctacttgtcttcgaaaagtggctc

SEQ ID NO: 1725367 - DNA, 25 bp, Homo sapien
attctcacttctacttgtcttcgaa

SEQ ID NO: 1725368 - DNA, 25 bp, Homo sapien
ctcacttctacttgtcttcgaaaag

SEQ ID NO: 1725369 - DNA, 25 bp, Homo sapien
cttgtcttcgaaaagtggctcttcc

SEQ ID NO: 1725370 - DNA, 25 bp, Homo sapien
cagagagaagagaccatcgttcatt

SEQ ID NO: 1725371 - DNA, 25 bp, Homo sapien
aatatggctcggagggcattgtccc

SEQ ID NO: 1725372 - DNA, 25 bp, Homo sapien
tgctggtggtgacgactgagcatct

SEQ ID NO: 1725373 - DNA, 25 bp, Homo sapien
aaaaaatgcctcattacctgatctg

SEQ ID NO: 1725374 - DNA, 25 bp, Homo sapien
cagctcgttgtagaaaacatggtgc

SEQ ID NO: 1725375 - DNA, 25 bp, Homo sapien
tcatcttctccctattggccctggg

SEQ ID NO: 1725376 - DNA, 25 bp, Homo sapien
tcgttgtagaaaacatggtgccaga

SEQ ID NO: 1725377 - DNA, 25 bp, Homo sapien
cgttgtagaaaacatggtgccagat

SEQ ID NO: 1725378 - DNA, 25 bp, Homo sapien
tggagggtcagcacggcctgaatgg

SEQ ID NO: 1725379 - DNA, 25 bp, Homo sapien
tgtggagggtcagcacggcctgaat

SEQ ID NO: 1725380 - DNA, 25 bp, Homo sapien
ggagggtcagcacggcctgaatggc

SEQ ID NO: 1725381 - DNA, 25 bp, Homo sapien
ctgtggagggtcagcacggcctgaa

SEQ ID NO: 1725382 - DNA, 25 bp, Homo sapien
gagggtgtggcgctcgtagatgggc

SEQ ID NO: 1725383 - DNA, 25 bp, Homo sapien
gggagggtgtggcgctcgtagatgg

SEQ ID NO: 1725384 - DNA, 25 bp, Homo sapien
gagggagggtgtggcgctcgtagat

SEQ ID NO: 1725385 - DNA, 25 bp, Homo sapien
gggtgtggcgctcgtagatgggcac

SEQ ID NO: 1725386 - DNA, 25 bp, Homo sapien
tcgaagtccagagcgacatagcata

SEQ ID NO: 1725387 - DNA, 25 bp, Homo sapien
gtccagagcgacatagcatagcttc

SEQ ID NO: 1725388 - DNA, 25 bp, Homo sapien
tttccacttggccatggtgttgaag

SEQ ID NO: 1725389 - DNA, 25 bp, Homo sapien
cttgatgttgcgcacgattttccac

SEQ ID NO: 1725390 - DNA, 25 bp, Homo sapien
cattgctaataatgatggcctggct

SEQ ID NO: 1725391 - DNA, 25 bp, Homo sapien
tttcatggatgccacaggattccat

SEQ ID NO: 1725392 - DNA, 25 bp, Homo sapien
ctttcatggatgccacaggattcca

SEQ ID NO: 1725393 - DNA, 25 bp, Homo sapien
ttggggatgtccatatcacacttca

SEQ ID NO: 1725394 - DNA, 25 bp, Homo sapien
gtctttggggatgtccatatcacac

SEQ ID NO: 1725395 - DNA, 25 bp, Homo sapien
ctttggggatgtccatatcacactt

SEQ ID NO: 1725396 - DNA, 25 bp, Homo sapien
aggtctttggggatgtccatatcac

SEQ ID NO: 1725397 - DNA, 25 bp, Homo sapien
tgctcgcagtccatttgcggtggat

SEQ ID NO: 1725398 - DNA, 25 bp, Homo sapien
gcactctgggggcacgatatcttga

SEQ ID NO: 1725399 - DNA, 25 bp, Homo sapien
catctgctcgcagtccatttgcggt

SEQ ID NO: 1725400 - DNA, 25 bp, Homo sapien
tatgcatctgctcgcagtccatttg

SEQ ID NO: 1725401 - DNA, 25 bp, Homo sapien
tattcaggcccagagatagctaacc

SEQ ID NO: 1725402 - DNA, 25 bp, Homo sapien
aacaagttctatgctccagtgctga

SEQ ID NO: 1725403 - DNA, 25 bp, Homo sapien
gaatctctggtggttgtcagcccaa

SEQ ID NO: 1725404 - DNA, 25 bp, Homo sapien
tcagtgtcctatgctcagacagggc

SEQ ID NO: 1725405 - DNA, 25 bp, Homo sapien
cttccatcactttgagcgccccgga

SEQ ID NO: 1725406 - DNA, 25 bp, Homo sapien
agcgccccggaattgtacaactctt

SEQ ID NO: 1725407 - DNA, 25 bp, Homo sapien
ttgagcgccccggaattgtacaact

SEQ ID NO: 1725408 - DNA, 25 bp, Homo sapien
tcttccatcactttgagcgccccgg

SEQ ID NO: 1725409 - DNA, 25 bp, Homo sapien
tgcaagggaacctcctagcactgtg

SEQ ID NO: 1725410 - DNA, 25 bp, Homo sapien
catttgtgcacgtgtatagctcaaa

SEQ ID NO: 1725411 - DNA, 25 bp, Homo sapien
tgaaagtcagaatcgcctcagcatt

SEQ ID NO: 1725412 - DNA, 25 bp, Homo sapien
ggcttttcctaggagaacgataaga

SEQ ID NO: 1725413 - DNA, 25 bp, Homo sapien
gaattactttagatgcaaacgcaga

SEQ ID NO: 1725414 - DNA, 25 bp, Homo sapien
gatgaagctaaatccccagaatgca

SEQ ID NO: 1725415 - DNA, 25 bp, Homo sapien
cattaccttctgctatgtgtgccag

SEQ ID NO: 1725416 - DNA, 25 bp, Homo sapien
gatagctacatgtatgccggtccta

SEQ ID NO: 1725417 - DNA, 25 bp, Homo sapien
gactttgactgcatgagatatccct

SEQ ID NO: 1725418 - DNA, 25 bp, Homo sapien
tgtgagtcaatacaccatagctctg

SEQ ID NO: 1725419 - DNA, 25 bp, Homo sapien
cattcccaggacatgcatgatcacc

SEQ ID NO: 1725420 - DNA, 25 bp, Homo sapien
gaatattccagctcaacaagtctgg

SEQ ID NO: 1725421 - DNA, 25 bp, Homo sapien
gcaggcactaaacttataggaagat

SEQ ID NO: 1725422 - DNA, 25 bp, Homo sapien
caggatgcatgtgtgagatcaggcc

SEQ ID NO: 1725423 - DNA, 25 bp, Homo sapien
catggcccgtaagccaaggtggcat

SEQ ID NO: 1725424 - DNA, 25 bp, Homo sapien
agagacgtcagtaagtcaggatgca

SEQ ID NO: 1725425 - DNA, 25 bp, Homo sapien
taggcaatgtaatgaggcccctgtc

SEQ ID NO: 1725426 - DNA, 25 bp, Homo sapien
gacaatcattaaagcctgcccagga

SEQ ID NO: 1725427 - DNA, 25 bp, Homo sapien
cagcagacctggattggagttcacc

SEQ ID NO: 1725428 - DNA, 25 bp, Homo sapien
taaaagattggttgagccagcaccc

SEQ ID NO: 1725429 - DNA, 25 bp, Homo sapien
atgcccgtcacataaggagtctgca

SEQ ID NO: 1725430 - DNA, 25 bp, Homo sapien
atgcacgccagttatgcccgtcaca

SEQ ID NO: 1725431 - DNA, 25 bp, Homo sapien
caggaggtcctcctgagacgcccat

SEQ ID NO: 1725432 - DNA, 25 bp, Homo sapien
cccgtcacataaggagtctgcatcc

SEQ ID NO: 1725433 - DNA, 25 bp, Homo sapien
tggtgagtgccccaccagaacaagc

SEQ ID NO: 1725434 - DNA, 25 bp, Homo sapien
caaatggtaccttgcttggcatagc

SEQ ID NO: 1725435 - DNA, 25 bp, Homo sapien
gacccattgggagacttagaagtgt

SEQ ID NO: 1725436 - DNA, 25 bp, Homo sapien
caagagacttgcagccatccacaaa

SEQ ID NO: 1725437 - DNA, 25 bp, Homo sapien
actcatcaagaggactgtcacgtct

SEQ ID NO: 1725438 - DNA, 25 bp, Homo sapien
tgacaggttccactcatcaagagga

SEQ ID NO: 1725439 - DNA, 25 bp, Homo sapien
tatggaatgagcataatttgctgct

SEQ ID NO: 1725440 - DNA, 25 bp, Homo sapien
aggcctgcatattttgacaggttcc

SEQ ID NO: 1725441 - DNA, 25 bp, Homo sapien
tgggagcatcgaatggcctaaaaga

SEQ ID NO: 1725442 - DNA, 25 bp, Homo sapien
aagagccgaggggaaccctccacag

SEQ ID NO: 1725443 - DNA, 25 bp, Homo sapien
tggtctgtgagcatggcacaaagtg

SEQ ID NO: 1725444 - DNA, 25 bp, Homo sapien
aatcagcaatgagagggtggtctgt

SEQ ID NO: 1725445 - DNA, 25 bp, Homo sapien
cactggttgacgagaagctcagtct

SEQ ID NO: 1725446 - DNA, 25 bp, Homo sapien
ggttgacgagaagctcagtctgact

SEQ ID NO: 1725447 - DNA, 25 bp, Homo sapien
gacgagaagctcagtctgactctgg

SEQ ID NO: 1725448 - DNA, 25 bp, Homo sapien
tcactggttgacgagaagctcagtc

SEQ ID NO: 1725449 - DNA, 25 bp, Homo sapien
agagcttgtgtcgtggcaaagtata

SEQ ID NO: 1725450 - DNA, 25 bp, Homo sapien
ctcctggacacagttgctgtttctt

SEQ ID NO: 1725451 - DNA, 25 bp, Homo sapien
gtgtcgtggcaaagtatactctatg

SEQ ID NO: 1725452 - DNA, 25 bp, Homo sapien
cttgtgtcgtggcaaagtatactct

SEQ ID NO: 1725453 - DNA, 25 bp, Homo sapien
attttcatgcacagaccaattgtag

SEQ ID NO: 1725454 - DNA, 25 bp, Homo sapien
ctgctcgtgacagctggtcttgcaa

SEQ ID NO: 1725455 - DNA, 25 bp, Homo sapien
gtagacacagtttgagaaattctgc

SEQ ID NO: 1725456 - DNA, 25 bp, Homo sapien
catgcacagaccaattgtagacaca

SEQ ID NO: 1725457 - DNA, 25 bp, Homo sapien
tttgaaagctgctacatcactggtg

SEQ ID NO: 1725458 - DNA, 25 bp, Homo sapien
gaggaacccattttctataggctaa

SEQ ID NO: 1725459 - DNA, 25 bp, Homo sapien
gcagtttaggactttgctaggccct

SEQ ID NO: 1725460 - DNA, 25 bp, Homo sapien
gagtggattgaaacccatagctgct

SEQ ID NO: 1725461 - DNA, 25 bp, Homo sapien
tagcttcccagaagttctgtacatg

SEQ ID NO: 1725462 - DNA, 25 bp, Homo sapien
ttctaactgcctgggcatgtctgtt

SEQ ID NO: 1725463 - DNA, 25 bp, Homo sapien
tagaaatcagcataattgtgtaaag

SEQ ID NO: 1725464 - DNA, 25 bp, Homo sapien
cctgggcatgtctgttcttcagtcc

SEQ ID NO: 1725465 - DNA, 25 bp, Homo sapien
ttaattaggaagaacgctcaggaat

SEQ ID NO: 1725466 - DNA, 25 bp, Homo sapien
ttaggaagaacgctcaggaatatat

SEQ ID NO: 1725467 - DNA, 25 bp, Homo sapien
aattaggaagaacgctcaggaatat

SEQ ID NO: 1725468 - DNA, 25 bp, Homo sapien
aggaagaacgctcaggaatatattc

SEQ ID NO: 1725469 - DNA, 25 bp, Homo sapien
cacttgcgggtccaagttggctgct

SEQ ID NO: 1725470 - DNA, 25 bp, Homo sapien
cacagtgtcattcagggatcctgga

SEQ ID NO: 1725471 - DNA, 25 bp, Homo sapien
tccatggagggtcggtagctttgcc

SEQ ID NO: 1725472 - DNA, 25 bp, Homo sapien
catacttggtcccacttgcgggtcc

SEQ ID NO: 1725473 - DNA, 25 bp, Homo sapien
atttgcaggtagatctctattaaca

SEQ ID NO: 1725474 - DNA, 25 bp, Homo sapien
cacttaggtaattctgttcatttgc

SEQ ID NO: 1725475 - DNA, 25 bp, Homo sapien
tgtgttgctgccattcacttaggta

SEQ ID NO: 1725476 - DNA, 25 bp, Homo sapien
tgcaggtagatctctattaacagat

SEQ ID NO: 1725477 - DNA, 25 bp, Homo sapien
tcaaaggcatggcaggtacaaggca

SEQ ID NO: 1725478 - DNA, 25 bp, Homo sapien
cagttggagagattacggcccggta

SEQ ID NO: 1725479 - DNA, 25 bp, Homo sapien
tacttctttctaggtcagttggaga

SEQ ID NO: 1725480 - DNA, 25 bp, Homo sapien
gctgactgggcatcccatgcactta

SEQ ID NO: 1725481 - DNA, 25 bp, Homo sapien
tgccccattataaacagattcctga

SEQ ID NO: 1725482 - DNA, 25 bp, Homo sapien
taagttgagcattaaaccatcccac

SEQ ID NO: 1725483 - DNA, 25 bp, Homo sapien
catggtgacaaatgtaagctccaga

SEQ ID NO: 1725484 - DNA, 25 bp, Homo sapien
taatccccattatagcccaaggcat

SEQ ID NO: 1725485 - DNA, 25 bp, Homo sapien
aaagctgcctggtacttcatgttgg

SEQ ID NO: 1725486 - DNA, 25 bp, Homo sapien
gctgcctggtacttcatgttggcca

SEQ ID NO: 1725487 - DNA, 25 bp, Homo sapien
ttcaaaagctgcctggtacttcatg

SEQ ID NO: 1725488 - DNA, 25 bp, Homo sapien
ctgcctggtacttcatgttggccag

SEQ ID NO: 1725489 - DNA, 25 bp, Homo sapien
ccatggagtccttcaaagatctaga

SEQ ID NO: 1725490 - DNA, 25 bp, Homo sapien
actcctgtaataccccatcacaatg

SEQ ID NO: 1725491 - DNA, 25 bp, Homo sapien
gagagacttatttcccactcctgta

SEQ ID NO: 1725492 - DNA, 25 bp, Homo sapien
cccatcacaatgtgatagaagaggg

SEQ ID NO: 1725493 - DNA, 25 bp, Homo sapien
gtcctagctttttgatttaccacaa

SEQ ID NO: 1725494 - DNA, 25 bp, Homo sapien
tcctctgtcctagctttttgattta

SEQ ID NO: 1725495 - DNA, 25 bp, Homo sapien
tgtcctagctttttgatttaccaca

SEQ ID NO: 1725496 - DNA, 25 bp, Homo sapien
tctgtcctagctttttgatttacca

SEQ ID NO: 1725497 - DNA, 25 bp, Homo sapien
taaggtctggctcaatttggaaaga

SEQ ID NO: 1725498 - DNA, 25 bp, Homo sapien
acatgttatccagcctgtagacaat

SEQ ID NO: 1725499 - DNA, 25 bp, Homo sapien
ttttcacggatttcacaacttgtct

SEQ ID NO: 1725500 - DNA, 25 bp, Homo sapien
catattaggatttacaactgagagg

SEQ ID NO: 1725501 - DNA, 25 bp, Homo sapien
tctgacatgctaatactgcccttga

SEQ ID NO: 1725502 - DNA, 25 bp, Homo sapien
ttttcagtaccacagacggacggct

SEQ ID NO: 1725503 - DNA, 25 bp, Homo sapien
tcaccttagacacaccacaaaatgg

SEQ ID NO: 1725504 - DNA, 25 bp, Homo sapien
acggctggctgttgtctaggattct

SEQ ID NO: 1725505 - DNA, 25 bp, Homo sapien
ggacccagaattcttagatattctg

SEQ ID NO: 1725506 - DNA, 25 bp, Homo sapien
tttccttctcttattagtgactcat

SEQ ID NO: 1725507 - DNA, 25 bp, Homo sapien
aattcttagatattctggtttcctc

SEQ ID NO: 1725508 - DNA, 25 bp, Homo sapien
tattagtgactcatagtactttaca

SEQ ID NO: 1725509 - DNA, 25 bp, Homo sapien
gctcgtaaaccatgcaaattcttct

SEQ ID NO: 1725510 - DNA, 25 bp, Homo sapien
ctgctcgtaaaccatgcaaattctt

SEQ ID NO: 1725511 - DNA, 25 bp, Homo sapien
cgtaaaccatgcaaattcttcttaa

SEQ ID NO: 1725512 - DNA, 25 bp, Homo sapien
ctcgtaaaccatgcaaattcttctt

SEQ ID NO: 1725513 - DNA, 25 bp, Homo sapien
tcatgttcccctgacaacttcctgt

SEQ ID NO: 1725514 - DNA, 25 bp, Homo sapien
catgttcccctgacaacttcctgtt

SEQ ID NO: 1725515 - DNA, 25 bp, Homo sapien
tcctcatgttcccctgacaacttcc

SEQ ID NO: 1725516 - DNA, 25 bp, Homo sapien
ctcatgttcccctgacaacttcctg

SEQ ID NO: 1725517 - DNA, 25 bp, Homo sapien
ctgaggcacgaacctgtgcacgttc

SEQ ID NO: 1725518 - DNA, 25 bp, Homo sapien
tgtgcacgttcacatccatccaagc

SEQ ID NO: 1725519 - DNA, 25 bp, Homo sapien
ctgaccacaccagttgcatccatat

SEQ ID NO: 1725520 - DNA, 25 bp, Homo sapien
gaacctgtgcacgttcacatccatc

SEQ ID NO: 1725521 - DNA, 25 bp, Homo sapien
gactctaggccgaatgttgacatag

SEQ ID NO: 1725522 - DNA, 25 bp, Homo sapien
agactctaggccgaatgttgacata

SEQ ID NO: 1725523 - DNA, 25 bp, Homo sapien
ttagactctaggccgaatgttgaca

SEQ ID NO: 1725524 - DNA, 25 bp, Homo sapien
ctctaggccgaatgttgacatagat

SEQ ID NO: 1725525 - DNA, 25 bp, Homo sapien
ggatagagttctccatgtcacttct

SEQ ID NO: 1725526 - DNA, 25 bp, Homo sapien
tgtgcacagaggtttcagctcattc

SEQ ID NO: 1725527 - DNA, 25 bp, Homo sapien
cccctttgatttctggtctcattac

SEQ ID NO: 1725528 - DNA, 25 bp, Homo sapien
cacttcttatgctctgggcctgctg

SEQ ID NO: 1725529 - DNA, 25 bp, Homo sapien
cccctggagttgtggcattatggaa

SEQ ID NO: 1725530 - DNA, 25 bp, Homo sapien
ctttcccctggagttgtggcattat

SEQ ID NO: 1725531 - DNA, 25 bp, Homo sapien
tggcctgggagtcaaaggtgactac

SEQ ID NO: 1725532 - DNA, 25 bp, Homo sapien
caaaggtgactacagattcctccat

SEQ ID NO: 1725533 - DNA, 25 bp, Homo sapien
gatgaatttgtgagacgacccctag

SEQ ID NO: 1725534 - DNA, 25 bp, Homo sapien
cagaaaaggtgatggcttgcacagc

SEQ ID NO: 1725535 - DNA, 25 bp, Homo sapien
cagtctccgcgtaagcacatggaaa

SEQ ID NO: 1725536 - DNA, 25 bp, Homo sapien
tatcaaagtgcgattagggctgcag

SEQ ID NO: 1725537 - DNA, 25 bp, Homo sapien
ccctgtgccgttagactgttttcct

SEQ ID NO: 1725538 - DNA, 25 bp, Homo sapien
gtgccgttagactgttttcctgtgg

SEQ ID NO: 1725539 - DNA, 25 bp, Homo sapien
aaagcagtgtcctccaagccctcct

SEQ ID NO: 1725540 - DNA, 25 bp, Homo sapien
cctgattgcttgctatgaggctgtg

SEQ ID NO: 1725541 - DNA, 25 bp, Homo sapien
ggcatgccatcaataacgacattca

SEQ ID NO: 1725542 - DNA, 25 bp, Homo sapien
ataacgacattcacacccttaacca

SEQ ID NO: 1725543 - DNA, 25 bp, Homo sapien
catcaataacgacattcacaccctt

SEQ ID NO: 1725544 - DNA, 25 bp, Homo sapien
acttagtaggcatgccatcaataac

SEQ ID NO: 1725545 - DNA, 25 bp, Homo sapien
tagatagccaccagagtatacacat

SEQ ID NO: 1725546 - DNA, 25 bp, Homo sapien
ttctgtcctttagctgcagaaatga

SEQ ID NO: 1725547 - DNA, 25 bp, Homo sapien
catttttagatagccaccagagtat

SEQ ID NO: 1725548 - DNA, 25 bp, Homo sapien
cagagtatacacatttgaacttgat

SEQ ID NO: 1725549 - DNA, 25 bp, Homo sapien
ctgttcattctcagtagatttgtat

SEQ ID NO: 1725550 - DNA, 25 bp, Homo sapien
ctgggcttgtaaaaggcgatatagc

SEQ ID NO: 1725551 - DNA, 25 bp, Homo sapien
aaaggcgatatagctcatctcctgt

SEQ ID NO: 1725552 - DNA, 25 bp, Homo sapien
tgtatattgtcacatgtgtcctcag

SEQ ID NO: 1725553 - DNA, 25 bp, Homo sapien
tctaagggcttttgatctatcgaca

SEQ ID NO: 1725554 - DNA, 25 bp, Homo sapien
gtgttctgagaatgatggcacttct

SEQ ID NO: 1725555 - DNA, 25 bp, Homo sapien
gaatgatggcacttctaagggcttt

SEQ ID NO: 1725556 - DNA, 25 bp, Homo sapien
ctatcgacatattggaaaccacagg

SEQ ID NO: 1725557 - DNA, 25 bp, Homo sapien
tcagctttcaaacatcggtcatctt

SEQ ID NO: 1725558 - DNA, 25 bp, Homo sapien
tcaaacatcggtcatctttcacatt

SEQ ID NO: 1725559 - DNA, 25 bp, Homo sapien
ctgggtattgtcacagaggatgagc

SEQ ID NO: 1725560 - DNA, 25 bp, Homo sapien
gaagcattagctgtagttagaacaa

SEQ ID NO: 1725561 - DNA, 25 bp, Homo sapien
tccagatttactgctactgaagaat

SEQ ID NO: 1725562 - DNA, 25 bp, Homo sapien
cacctgtcacggacttaaatctgat

SEQ ID NO: 1725563 - DNA, 25 bp, Homo sapien
gaattctgccacctgtcacggactt

SEQ ID NO: 1725564 - DNA, 25 bp, Homo sapien
taaatctgatcactgttaatgacat

SEQ ID NO: 1725565 - DNA, 25 bp, Homo sapien
gatccttcatagttctgagcaccat

SEQ ID NO: 1725566 - DNA, 25 bp, Homo sapien
ttctcgcagctaagtaagaataggc

SEQ ID NO: 1725567 - DNA, 25 bp, Homo sapien
gctcttctgtgtggtattctcgcag

SEQ ID NO: 1725568 - DNA, 25 bp, Homo sapien
taagaataggctatggatccttcat

SEQ ID NO: 1725569 - DNA, 25 bp, Homo sapien
ttctctagtggaaattctgcaaatt

SEQ ID NO: 1725570 - DNA, 25 bp, Homo sapien
gagagctgagggcaagttctttcga

SEQ ID NO: 1725571 - DNA, 25 bp, Homo sapien
ggatctatggtttttactagccaga

SEQ ID NO: 1725572 - DNA, 25 bp, Homo sapien
tttggcatgtctggtattcactact

SEQ ID NO: 1725573 - DNA, 25 bp, Homo sapien
actgatcacattgtggcctgcgtac

SEQ ID NO: 1725574 - DNA, 25 bp, Homo sapien
cagttgcccatagcaagacgagctc

SEQ ID NO: 1725575 - DNA, 25 bp, Homo sapien
gcccatagcaagacgagctctttca

SEQ ID NO: 1725576 - DNA, 25 bp, Homo sapien
aagatgcactccttccataaagcag

SEQ ID NO: 1725577 - DNA, 25 bp, Homo sapien
ccataaagcagttgcccatagcaag

SEQ ID NO: 1725578 - DNA, 25 bp, Homo sapien
tgtctgtagtcccaagtcctagcca

SEQ ID NO: 1725579 - DNA, 25 bp, Homo sapien
aaatgatggcacatttatgcaatgg

SEQ ID NO: 1725580 - DNA, 25 bp, Homo sapien
ggacaaagatttaggaacaaacata

SEQ ID NO: 1725581 - DNA, 25 bp, Homo sapien
taatctcagttctataataagcaca

SEQ ID NO: 1725582 - DNA, 25 bp, Homo sapien
gccctctgatggttgtatgtcaata

SEQ ID NO: 1725583 - DNA, 25 bp, Homo sapien
aagccctctgatggttgtatgtcaa

SEQ ID NO: 1725584 - DNA, 25 bp, Homo sapien
ccctctgatggttgtatgtcaatac

SEQ ID NO: 1725585 - DNA, 25 bp, Homo sapien
gcaaagccctctgatggttgtatgt

SEQ ID NO: 1725586 - DNA, 25 bp, Homo sapien
tgtgggattcagaccaaggagaagt

SEQ ID NO: 1725587 - DNA, 25 bp, Homo sapien
ctcaggacaccagaaattgtgggat

SEQ ID NO: 1725588 - DNA, 25 bp, Homo sapien
cagtatcctaggaaaagcagctatc

SEQ ID NO: 1725589 - DNA, 25 bp, Homo sapien
tacccagatggttaggctcagcact

SEQ ID NO: 1725590 - DNA, 25 bp, Homo sapien
tgaagcctctaggtgttgagtcatc

SEQ ID NO: 1725591 - DNA, 25 bp, Homo sapien
cattacatcattgaagcctctaggt

SEQ ID NO: 1725592 - DNA, 25 bp, Homo sapien
caacattacatcattgaagcctcta

SEQ ID NO: 1725593 - DNA, 25 bp, Homo sapien
catcattgaagcctctaggtgttga

SEQ ID NO: 1725594 - DNA, 25 bp, Homo sapien
ggcaaggctggccatggtaattgtt

SEQ ID NO: 1725595 - DNA, 25 bp, Homo sapien
gcaaggctggccatggtaattgttt

SEQ ID NO: 1725596 - DNA, 25 bp, Homo sapien
atttccagcactccttgtattggcc

SEQ ID NO: 1725597 - DNA, 25 bp, Homo sapien
actccttgtattggcctatgggcaa

SEQ ID NO: 1725598 - DNA, 25 bp, Homo sapien
tgggactgaagaacatggagcttcc

SEQ ID NO: 1725599 - DNA, 25 bp, Homo sapien
tgtgatgatgggactgaagaacatg

SEQ ID NO: 1725600 - DNA, 25 bp, Homo sapien
tgatgggactgaagaacatggagct

SEQ ID NO: 1725601 - DNA, 25 bp, Homo sapien
gactgaagaacatggagcttcctga

SEQ ID NO: 1725602 - DNA, 25 bp, Homo sapien
ggcaacatgcagctattagagggtt

SEQ ID NO: 1725603 - DNA, 25 bp, Homo sapien
gcagaggatggcaacatgcagctat

SEQ ID NO: 1725604 - DNA, 25 bp, Homo sapien
tccgtaaccaatagtcatagagccc

SEQ ID NO: 1725605 - DNA, 25 bp, Homo sapien
gctcaagtgggcatttcttgaaaac

SEQ ID NO: 1725606 - DNA, 25 bp, Homo sapien
ccatgagaatgtctgttaaatgaac

SEQ ID NO: 1725607 - DNA, 25 bp, Homo sapien
catgagaatgtctgttaaatgaaca

SEQ ID NO: 1725608 - DNA, 25 bp, Homo sapien
taaaacagagtccatgagaatgtct

SEQ ID NO: 1725609 - DNA, 25 bp, Homo sapien
attttaaaacagagtccatgagaat

SEQ ID NO: 1725610 - DNA, 25 bp, Homo sapien
actttggagcactagatcggagggc

SEQ ID NO: 1725611 - DNA, 25 bp, Homo sapien
cgaatttccagtaagactttggagc

SEQ ID NO: 1725612 - DNA, 25 bp, Homo sapien
tttatccttagttcttcggtgttgc

SEQ ID NO: 1725613 - DNA, 25 bp, Homo sapien
gaagaggaggtagtatctgacagca

SEQ ID NO: 1725614 - DNA, 25 bp, Homo sapien
aaatctaggtgagcggtttcccctg

SEQ ID NO: 1725615 - DNA, 25 bp, Homo sapien
tctaggtgagcggtttcccctgtgc

SEQ ID NO: 1725616 - DNA, 25 bp, Homo sapien
taggtgagcggtttcccctgtgctc

SEQ ID NO: 1725617 - DNA, 25 bp, Homo sapien
tggggaaatctaggtgagcggtttc

SEQ ID NO: 1725618 - DNA, 25 bp, Homo sapien
tttccgttatcagtggcctggccca

SEQ ID NO: 1725619 - DNA, 25 bp, Homo sapien
gctgatctgctaacgcggacttatg

SEQ ID NO: 1725620 - DNA, 25 bp, Homo sapien
cctcagtgagacctgactgctgaca

SEQ ID NO: 1725621 - DNA, 25 bp, Homo sapien
tgtcatcacagcctgctgatctgct

SEQ ID NO: 1725622 - DNA, 25 bp, Homo sapien
taccacaaggtaccacgcaacactt

SEQ ID NO: 1725623 - DNA, 25 bp, Homo sapien
tcacttcaaaacgaagaacaaatgt

SEQ ID NO: 1725624 - DNA, 25 bp, Homo sapien
gaacaaatgtaccacaaggtaccac

SEQ ID NO: 1725625 - DNA, 25 bp, Homo sapien
aacacttgctaaccggcctctgcat

SEQ ID NO: 1725626 - DNA, 25 bp, Homo sapien
acagcattccagctcacacttctct

SEQ ID NO: 1725627 - DNA, 25 bp, Homo sapien
tgtcacagcattccagctcacactt

SEQ ID NO: 1725628 - DNA, 25 bp, Homo sapien
cacagttttccacaattggagatga

SEQ ID NO: 1725629 - DNA, 25 bp, Homo sapien
ttaatatgcattcccacagttttcc

SEQ ID NO: 1725630 - DNA, 25 bp, Homo sapien
ataggattccttgcagcccgaaccc

SEQ ID NO: 1725631 - DNA, 25 bp, Homo sapien
catggctctcacacaataggattcc

SEQ ID NO: 1725632 - DNA, 25 bp, Homo sapien
ttgcagcccgaacccttctgtcctc

SEQ ID NO: 1725633 - DNA, 25 bp, Homo sapien
ggctctcacacaataggattccttg

SEQ ID NO: 1725634 - DNA, 25 bp, Homo sapien
ttactttctcctgtggaagaggcca

SEQ ID NO: 1725635 - DNA, 25 bp, Homo sapien
gagacccacgtatttcacattctct

SEQ ID NO: 1725636 - DNA, 25 bp, Homo sapien
ctgagacccacgtatttcacattct

SEQ ID NO: 1725637 - DNA, 25 bp, Homo sapien
tttactttctcctgtggaagaggcc

SEQ ID NO: 1725638 - DNA, 25 bp, Homo sapien
tcaccgtggaattagggatattacc

SEQ ID NO: 1725639 - DNA, 25 bp, Homo sapien
ggccagctgcaaattccttaagaga

SEQ ID NO: 1725640 - DNA, 25 bp, Homo sapien
gtggtaacacttgtacaactctgtg

SEQ ID NO: 1725641 - DNA, 25 bp, Homo sapien
tccataacgctgttaaaacaacggc

SEQ ID NO: 1725642 - DNA, 25 bp, Homo sapien
acttaggataatgcattctatattc

SEQ ID NO: 1725643 - DNA, 25 bp, Homo sapien
caaaagatcaccagaacctattttt

SEQ ID NO: 1725644 - DNA, 25 bp, Homo sapien
tgcattctatattcactcatgttgt

SEQ ID NO: 1725645 - DNA, 25 bp, Homo sapien
tctccagttaccttaccttcccagc

SEQ ID NO: 1725646 - DNA, 25 bp, Homo sapien
taacagcggagctatgcagcaacag

SEQ ID NO: 1725647 - DNA, 25 bp, Homo sapien
tagcctacctgaacaaccttggaaa

SEQ ID NO: 1725648 - DNA, 25 bp, Homo sapien
cacactgacgtttgttgccacagca

SEQ ID NO: 1725649 - DNA, 25 bp, Homo sapien
gacatgcagcatggaagagacacac

SEQ ID NO: 1725650 - DNA, 25 bp, Homo sapien
tgtgctgttgacataaagatagaca

SEQ ID NO: 1725651 - DNA, 25 bp, Homo sapien
gatttttgaccaagatactaagacc

SEQ ID NO: 1725652 - DNA, 25 bp, Homo sapien
gaaatagaccctggaatatgtggtc

SEQ ID NO: 1725653 - DNA, 25 bp, Homo sapien
tactaagaccattccatgggaaagg

SEQ ID NO: 1725654 - DNA, 25 bp, Homo sapien
taaactccagtgtaaaacaacagcc

SEQ ID NO: 1725655 - DNA, 25 bp, Homo sapien
tgtagcttgcaaagtgaagagtctc

SEQ ID NO: 1725656 - DNA, 25 bp, Homo sapien
tgcttgctatacctgtcccctggaa

SEQ ID NO: 1725657 - DNA, 25 bp, Homo sapien
agaggatgcctgatttgctgtgtca

SEQ ID NO: 1725658 - DNA, 25 bp, Homo sapien
tatatggaaatcagaattatataga

SEQ ID NO: 1725659 - DNA, 25 bp, Homo sapien
atttccttccatataactgaatata

SEQ ID NO: 1725660 - DNA, 25 bp, Homo sapien
aaatcagaattatatagatactata

SEQ ID NO: 1725661 - DNA, 25 bp, Homo sapien
tatatgtatatggaaatcagaatta

SEQ ID NO: 1725662 - DNA, 25 bp, Homo sapien
acttcctgtgcaaagctgctcactc

SEQ ID NO: 1725663 - DNA, 25 bp, Homo sapien
tccaagtgaagccttctaattttag

SEQ ID NO: 1725664 - DNA, 25 bp, Homo sapien
tgtactggtccctgtctccattaga

SEQ ID NO: 1725665 - DNA, 25 bp, Homo sapien
tattggtctgtcatctgtactggtc

SEQ ID NO: 1725666 - DNA, 25 bp, Homo sapien
gtagcccttttcatgattaccttgg

SEQ ID NO: 1725667 - DNA, 25 bp, Homo sapien
gaaggttattgaatcagtttgtttg

SEQ ID NO: 1725668 - DNA, 25 bp, Homo sapien
tgatagaagtcattgctgaaggtta

SEQ ID NO: 1725669 - DNA, 25 bp, Homo sapien
tagatgtattgaccaaatgttgata

SEQ ID NO: 1725670 - DNA, 25 bp, Homo sapien
tgaagagtagatgtattgaccaaat

SEQ ID NO: 1725671 - DNA, 25 bp, Homo sapien
taatagtagaaagggggcctgagta

SEQ ID NO: 1725672 - DNA, 25 bp, Homo sapien
agacaggacaagatagttctctgag

SEQ ID NO: 1725673 - DNA, 25 bp, Homo sapien
cctgagtagagacaggacaagatag

SEQ ID NO: 1725674 - DNA, 25 bp, Homo sapien
cttttatctgtagttaatagtagaa

SEQ ID NO: 1725675 - DNA, 25 bp, Homo sapien
gaacatccgttttgcgtaactgaaa

SEQ ID NO: 1725676 - DNA, 25 bp, Homo sapien
tccgttttgcgtaactgaaaatcta

SEQ ID NO: 1725677 - DNA, 25 bp, Homo sapien
tgaaaatctaagtaatatggcttgg

SEQ ID NO: 1725678 - DNA, 25 bp, Homo sapien
gaaaatctaagtaatatggcttggc

SEQ ID NO: 1725679 - DNA, 25 bp, Homo sapien
cagattgtacagtcagcatgcttcc

SEQ ID NO: 1725680 - DNA, 25 bp, Homo sapien
gattgtacagtcagcatgcttccag

SEQ ID NO: 1725681 - DNA, 25 bp, Homo sapien
tgtacagtcagcatgcttccagtat

SEQ ID NO: 1725682 - DNA, 25 bp, Homo sapien
cagtcagcatgcttccagtatggct

SEQ ID NO: 1725683 - DNA, 25 bp, Homo sapien
atcaaggtatgtggtcgtggcagac

SEQ ID NO: 1725684 - DNA, 25 bp, Homo sapien
gactcttaagtgcagggctagaaca

SEQ ID NO: 1725685 - DNA, 25 bp, Homo sapien
cagcggaagaatttgcgtagacccc

SEQ ID NO: 1725686 - DNA, 25 bp, Homo sapien
gttggtccgtacacaataaacaggc

SEQ ID NO: 1725687 - DNA, 25 bp, Homo sapien
cagaatagaaaaacacagcggagcc

SEQ ID NO: 1725688 - DNA, 25 bp, Homo sapien
gacccgcaaccttcctagcagtccc

SEQ ID NO: 1725689 - DNA, 25 bp, Homo sapien
tcctagcagtcccagctggagtggt

SEQ ID NO: 1725690 - DNA, 25 bp, Homo sapien
gaatagaaaaacacagcggagccca

SEQ ID NO: 1725691 - DNA, 25 bp, Homo sapien
cggcgagtggccgggtgaggaccat

SEQ ID NO: 1725692 - DNA, 25 bp, Homo sapien
tcagcagtagcgcaagacgataacg

SEQ ID NO: 1725693 - DNA, 25 bp, Homo sapien
gtagcgcaagacgataacgcactcc

SEQ ID NO: 1725694 - DNA, 25 bp, Homo sapien
tccttctcgccgctgcgctgcaccg

SEQ ID NO: 1725695 - DNA, 25 bp, Homo sapien
aagacgataacgcactccttctcgc

SEQ ID NO: 1725696 - DNA, 25 bp, Homo sapien
cagccggacagtaggaatttgctcg

SEQ ID NO: 1725697 - DNA, 25 bp, Homo sapien
tgggtcagcggcaaaagcctctcct

SEQ ID NO: 1725698 - DNA, 25 bp, Homo sapien
tcgctcggggccatctctgggtcag

SEQ ID NO: 1725699 - DNA, 25 bp, Homo sapien
cgcgcagccggacagtaggaatttg

SEQ ID NO: 1725700 - DNA, 25 bp, Homo sapien
ggcccaggcgtgggcagccgggtac

SEQ ID NO: 1725701 - DNA, 25 bp, Homo sapien
aaaatgtcgcaactaatgggtgtcc

SEQ ID NO: 1725702 - DNA, 25 bp, Homo sapien
gcaggttaataacggaagtcccaca

SEQ ID NO: 1725703 - DNA, 25 bp, Homo sapien
tcaaagaggtcaagtagtcgatgct

SEQ ID NO: 1725704 - DNA, 25 bp, Homo sapien
tcctacagaggaatgacagctcgcg

SEQ ID NO: 1725705 - DNA, 25 bp, Homo sapien
gaaaagttagtatcttgctgacagt

SEQ ID NO: 1725706 - DNA, 25 bp, Homo sapien
aaaagttagtatcttgctgacagtt

SEQ ID NO: 1725707 - DNA, 25 bp, Homo sapien
aaagttagtatcttgctgacagttt

SEQ ID NO: 1725708 - DNA, 25 bp, Homo sapien
aagttagtatcttgctgacagtttc

SEQ ID NO: 1725709 - DNA, 25 bp, Homo sapien
tcaatgatccctagagctgtgcgca

SEQ ID NO: 1725710 - DNA, 25 bp, Homo sapien
tacgtgtctgtaaatggcgggtgtc

SEQ ID NO: 1725711 - DNA, 25 bp, Homo sapien
gcgggtgtcactccttgccaaagct

SEQ ID NO: 1725712 - DNA, 25 bp, Homo sapien
gtctcccaaccgagcaagagctgct

SEQ ID NO: 1725713 - DNA, 25 bp, Homo sapien
tcctcttgtgagtgccactgtggaa

SEQ ID NO: 1725714 - DNA, 25 bp, Homo sapien
taagggtgactaaggcccacatagc

SEQ ID NO: 1725715 - DNA, 25 bp, Homo sapien
ggactcatgagatttggcactgtaa

SEQ ID NO: 1725716 - DNA, 25 bp, Homo sapien
tgttgcatttacactacagccagtg

SEQ ID NO: 1725717 - DNA, 25 bp, Homo sapien
taacacgtgggcttcttgatgcttc

SEQ ID NO: 1725718 - DNA, 25 bp, Homo sapien
gaactgagcactcttctgatcaagg

SEQ ID NO: 1725719 - DNA, 25 bp, Homo sapien
tacataccttggtacgcagcaggca

SEQ ID NO: 1725720 - DNA, 25 bp, Homo sapien
tacacgctaacttactcatatggag

SEQ ID NO: 1725721 - DNA, 25 bp, Homo sapien
actttggctatatgtatctatatgc

SEQ ID NO: 1725722 - DNA, 25 bp, Homo sapien
gtaactttggctatatgtatctata

SEQ ID NO: 1725723 - DNA, 25 bp, Homo sapien
aaggtaactttggctatatgtatct

SEQ ID NO: 1725724 - DNA, 25 bp, Homo sapien
ggtaactttggctatatgtatctat

SEQ ID NO: 1725725 - DNA, 25 bp, Homo sapien
gatgttcatatgtgaccattcgacc

SEQ ID NO: 1725726 - DNA, 25 bp, Homo sapien
tgtgaccattcgacctccagaatac

SEQ ID NO: 1725727 - DNA, 25 bp, Homo sapien
ttgccaaacacaacctctcggagat

SEQ ID NO: 1725728 - DNA, 25 bp, Homo sapien
aacctctcggagatgttcatatgtg

SEQ ID NO: 1725729 - DNA, 25 bp, Homo sapien
tctgactctaaagccgagagttctt

SEQ ID NO: 1725730 - DNA, 25 bp, Homo sapien
tgtatacatctgcagtaaatgctca

SEQ ID NO: 1725731 - DNA, 25 bp, Homo sapien
gaatttgagcccatccctgtctgac

SEQ ID NO: 1725732 - DNA, 25 bp, Homo sapien
tgtccaggttatacagtagcagagc

SEQ ID NO: 1725733 - DNA, 25 bp, Homo sapien
gcatctgaaccttcactaggtcagt

SEQ ID NO: 1725734 - DNA, 25 bp, Homo sapien
tgcatctgaaccttcactaggtcag

SEQ ID NO: 1725735 - DNA, 25 bp, Homo sapien
taggtcagttggattggctaaaaac

SEQ ID NO: 1725736 - DNA, 25 bp, Homo sapien
tcactaggtcagttggattggctaa

SEQ ID NO: 1725737 - DNA, 25 bp, Homo sapien
tctttgtatattgggtacccagcct

SEQ ID NO: 1725738 - DNA, 25 bp, Homo sapien
tttgtatattgggtacccagcctgc

SEQ ID NO: 1725739 - DNA, 25 bp, Homo sapien
tgcccaaagccctcgtattcctcct

SEQ ID NO: 1725740 - DNA, 25 bp, Homo sapien
ctgcccaaagccctcgtattcctcc

SEQ ID NO: 1725741 - DNA, 25 bp, Homo sapien
gagaacattgaggtttccagcctgg

SEQ ID NO: 1725742 - DNA, 25 bp, Homo sapien
tagaacatctatacagccagtcaac

SEQ ID NO: 1725743 - DNA, 25 bp, Homo sapien
tatttaggaataggagcaggattgc

SEQ ID NO: 1725744 - DNA, 25 bp, Homo sapien
gccagtcaacaatatatggtcacca

SEQ ID NO: 1725745 - DNA, 25 bp, Homo sapien
ggattataggcatgagccgccgcgc

SEQ ID NO: 1725746 - DNA, 25 bp, Homo sapien
ctcacctcaacctcccaaagtgctg

SEQ ID NO: 1725747 - DNA, 25 bp, Homo sapien
caactccggagctcaagagatctgc

SEQ ID NO: 1725748 - DNA, 25 bp, Homo sapien
taggcatgagccgccgcgcctggcc

SEQ ID NO: 1725749 - DNA, 25 bp, Homo sapien
caagtagtgtttcactgtatcataa

SEQ ID NO: 1725750 - DNA, 25 bp, Homo sapien
gatattgtcctcaagtggtgtattc

SEQ ID NO: 1725751 - DNA, 25 bp, Homo sapien
tattcaataccaagtagtgtttcac

SEQ ID NO: 1725752 - DNA, 25 bp, Homo sapien
taaaccgtgagtcatgatattgtcc

SEQ ID NO: 1725753 - DNA, 25 bp, Homo sapien
tatacttcacttgggaaaaggcaga

SEQ ID NO: 1725754 - DNA, 25 bp, Homo sapien
aagcccttcgtatccctttctgtga

SEQ ID NO: 1725755 - DNA, 25 bp, Homo sapien
tgttgcaaagagatcaaggtactgc

SEQ ID NO: 1725756 - DNA, 25 bp, Homo sapien
cacatgtatatgaagacctgaagga

SEQ ID NO: 1725757 - DNA, 25 bp, Homo sapien
tggtgttcccagaatagaagctacc

SEQ ID NO: 1725758 - DNA, 25 bp, Homo sapien
tagaagctaccagtccagaacataa

SEQ ID NO: 1725759 - DNA, 25 bp, Homo sapien
ttttgatgacatcggctggtgttcc

SEQ ID NO: 1725760 - DNA, 25 bp, Homo sapien
tctcgtggttgattcattattctgc

SEQ ID NO: 1725761 - DNA, 25 bp, Homo sapien
tacagatattcaagcacatggatac

SEQ ID NO: 1725762 - DNA, 25 bp, Homo sapien
tattacagatattcaagcacatgga

SEQ ID NO: 1725763 - DNA, 25 bp, Homo sapien
gatattcaagcacatggatactgaa

SEQ ID NO: 1725764 - DNA, 25 bp, Homo sapien
attcaagcacatggatactgaagac

SEQ ID NO: 1725765 - DNA, 25 bp, Homo sapien
tacctactcaagtcataagcgtctg

SEQ ID NO: 1725766 - DNA, 25 bp, Homo sapien
tcaaatcagattctccacgttacct

SEQ ID NO: 1725767 - DNA, 25 bp, Homo sapien
gcgtctgaagaaagtgctctgtaaa

SEQ ID NO: 1725768 - DNA, 25 bp, Homo sapien
gagaacatactatttcatatcaaat

SEQ ID NO: 1725769 - DNA, 25 bp, Homo sapien
tcagccaagatggtaaaaagccttt

SEQ ID NO: 1725770 - DNA, 25 bp, Homo sapien
cagcctgaatcaagcagtcagtcga

SEQ ID NO: 1725771 - DNA, 25 bp, Homo sapien
cagtcgatgatttatacaaaagtcc

SEQ ID NO: 1725772 - DNA, 25 bp, Homo sapien
ttcaccttgaacagcctgaatcaag

SEQ ID NO: 1725773 - DNA, 25 bp, Homo sapien
tactggctttataacaagactatca

SEQ ID NO: 1725774 - DNA, 25 bp, Homo sapien
caacttattcgtcaatggatgtaac

SEQ ID NO: 1725775 - DNA, 25 bp, Homo sapien
taccacagaaggcaagataactctg

SEQ ID NO: 1725776 - DNA, 25 bp, Homo sapien
ttattttaccttactctaccacaga

SEQ ID NO: 1725777 - DNA, 25 bp, Homo sapien
atttctaaacctataactcacctat

SEQ ID NO: 1725778 - DNA, 25 bp, Homo sapien
tattgtgttaatttttgattgcttg

SEQ ID NO: 1725779 - DNA, 25 bp, Homo sapien
tgtgttaatttttgattgcttgaat

SEQ ID NO: 1725780 - DNA, 25 bp, Homo sapien
tctaaacctataactcacctattct

SEQ ID NO: 1725781 - DNA, 25 bp, Homo sapien
ggtttactcaattgccagcttaggc

SEQ ID NO: 1725782 - DNA, 25 bp, Homo sapien
tcatatggtccttcctagtgtggtg

SEQ ID NO: 1725783 - DNA, 25 bp, Homo sapien
aaactggtgcccattactcttctgg

SEQ ID NO: 1725784 - DNA, 25 bp, Homo sapien
gaggtctctgtagcttggtctgcta

SEQ ID NO: 1725785 - DNA, 25 bp, Homo sapien
taagtaagccagaacaccattgacc

SEQ ID NO: 1725786 - DNA, 25 bp, Homo sapien
tcataagtaagccagaacaccattg

SEQ ID NO: 1725787 - DNA, 25 bp, Homo sapien
aagccagaacaccattgaccaaggg

SEQ ID NO: 1725788 - DNA, 25 bp, Homo sapien
gtaagccagaacaccattgaccaag

SEQ ID NO: 1725789 - DNA, 25 bp, Homo sapien
aatactgaacactgtatctttaagg

SEQ ID NO: 1725790 - DNA, 25 bp, Homo sapien
tgtgttgcagatgcccatatttcaa

SEQ ID NO: 1725791 - DNA, 25 bp, Homo sapien
tatgtgttgcagatgcccatatttc

SEQ ID NO: 1725792 - DNA, 25 bp, Homo sapien
atctttaagggttgcatctttaggg

SEQ ID NO: 1725793 - DNA, 25 bp, Homo sapien
gagtcaaagagaacttgggtttcca

SEQ ID NO: 1725794 - DNA, 25 bp, Homo sapien
tcaaagagaacttgggtttccagaa

SEQ ID NO: 1725795 - DNA, 25 bp, Homo sapien
aagtgctgccccctataaatcagtc

SEQ ID NO: 1725796 - DNA, 25 bp, Homo sapien
agtcaaagagaacttgggtttccag

SEQ ID NO: 1725797 - DNA, 25 bp, Homo sapien
ttggatggccttgtgagatccgacc

SEQ ID NO: 1725798 - DNA, 25 bp, Homo sapien
ggatggccttgtgagatccgaccag

SEQ ID NO: 1725799 - DNA, 25 bp, Homo sapien
tcattggatggccttgtgagatccg

SEQ ID NO: 1725800 - DNA, 25 bp, Homo sapien
gatggccttgtgagatccgaccaga

SEQ ID NO: 1725801 - DNA, 25 bp, Homo sapien
caaggtgaaagtggtcaggcttcga

SEQ ID NO: 1725802 - DNA, 25 bp, Homo sapien
ttgcccaaggtgaaagtggtcaggc

SEQ ID NO: 1725803 - DNA, 25 bp, Homo sapien
ggtcaggcttcgattcttctttaga

SEQ ID NO: 1725804 - DNA, 25 bp, Homo sapien
tgaaagtggtcaggcttcgattctt

SEQ ID NO: 1725805 - DNA, 25 bp, Homo sapien
tgagagggcactgacagaaagcagc

SEQ ID NO: 1725806 - DNA, 25 bp, Homo sapien
catcaagattcggtgtgtggctgtc

SEQ ID NO: 1725807 - DNA, 25 bp, Homo sapien
tcttgagagctagcaacatatctgg

SEQ ID NO: 1725808 - DNA, 25 bp, Homo sapien
tctagagcccctagtgtcaggtaag

SEQ ID NO: 1725809 - DNA, 25 bp, Homo sapien
tagctgaatttgaagaactcttacc

SEQ ID NO: 1725810 - DNA, 25 bp, Homo sapien
ccggtggtatgtagctgaatttgaa

SEQ ID NO: 1725811 - DNA, 25 bp, Homo sapien
ctgaggttgggagagccggtggtat

SEQ ID NO: 1725812 - DNA, 25 bp, Homo sapien
agagccggtggtatgtagctgaatt

SEQ ID NO: 1725813 - DNA, 25 bp, Homo sapien
actgcatatcagtacatgacattca

SEQ ID NO: 1725814 - DNA, 25 bp, Homo sapien
tacagcctttatccataaccgcagc

SEQ ID NO: 1725815 - DNA, 25 bp, Homo sapien
tatacattagtgcaaccacaaagca

SEQ ID NO: 1725816 - DNA, 25 bp, Homo sapien
aattctgtttggctggctccaaggc

SEQ ID NO: 1725817 - DNA, 25 bp, Homo sapien
aattttccctaagtggttcaatgca

SEQ ID NO: 1725818 - DNA, 25 bp, Homo sapien
ttgttcacggtccaggttggatgca

SEQ ID NO: 1725819 - DNA, 25 bp, Homo sapien
cagaacacttgggaagttaagcata

SEQ ID NO: 1725820 - DNA, 25 bp, Homo sapien
cacggtccaggttggatgcaattat

SEQ ID NO: 1725821 - DNA, 25 bp, Homo sapien
tggaagatgtatacctacccactag

SEQ ID NO: 1725822 - DNA, 25 bp, Homo sapien
ggtcttcatgttcaagctaaagcat

SEQ ID NO: 1725823 - DNA, 25 bp, Homo sapien
ttgtgaccatgacataagacccttc

SEQ ID NO: 1725824 - DNA, 25 bp, Homo sapien
tagaagactctactgggttgtgacc

SEQ ID NO: 1725825 - DNA, 25 bp, Homo sapien
ggcatcaatgaaggccaaatagtga

SEQ ID NO: 1725826 - DNA, 25 bp, Homo sapien
taaacagatgaagatgatccttaaa

SEQ ID NO: 1725827 - DNA, 25 bp, Homo sapien
cacttgagtgggtaaaatgttcatg

SEQ ID NO: 1725828 - DNA, 25 bp, Homo sapien
aaatcagaagtgttattgacccaac

SEQ ID NO: 1725829 - DNA, 25 bp, Homo sapien
tgctgctgttgacaatcacagcagc

SEQ ID NO: 1725830 - DNA, 25 bp, Homo sapien
gcaaacagacatctttaagcatctt

SEQ ID NO: 1725831 - DNA, 25 bp, Homo sapien
caaacagacatctttaagcatcttc

SEQ ID NO: 1725832 - DNA, 25 bp, Homo sapien
ggatatccaattgttatactgccat

SEQ ID NO: 1725833 - DNA, 25 bp, Homo sapien
tgtacagtaaaactcacactttcat

SEQ ID NO: 1725834 - DNA, 25 bp, Homo sapien
gttgcaaagactatactttccagtt

SEQ ID NO: 1725835 - DNA, 25 bp, Homo sapien
tgaagacgaaatgagccaatatggg

SEQ ID NO: 1725836 - DNA, 25 bp, Homo sapien
caatgagagtagagagagcatagtc

SEQ ID NO: 1725837 - DNA, 25 bp, Homo sapien
tgcagcaaaacatagtgggaaagga

SEQ ID NO: 1725838 - DNA, 25 bp, Homo sapien
ggatataacggcatacaccttacac

SEQ ID NO: 1725839 - DNA, 25 bp, Homo sapien
tctcagggtgacatggataataaaa

SEQ ID NO: 1725840 - DNA, 25 bp, Homo sapien
ccaaactcctttgtagaccacaggg

SEQ ID NO: 1725841 - DNA, 25 bp, Homo sapien
gaccacagggttgtagatattatga

SEQ ID NO: 1725842 - DNA, 25 bp, Homo sapien
tatgttctcgatgcctagccagtgc

SEQ ID NO: 1725843 - DNA, 25 bp, Homo sapien
taacactatggcctttacagtggaa

SEQ ID NO: 1725844 - DNA, 25 bp, Homo sapien
agcttgttgggacgttcaggagacc

SEQ ID NO: 1725845 - DNA, 25 bp, Homo sapien
caactaccagggattgagcactggg

SEQ ID NO: 1725846 - DNA, 25 bp, Homo sapien
gaggaccgaccagagagggatttcc

SEQ ID NO: 1725847 - DNA, 25 bp, Homo sapien
tcagagcgccttcgactctggaggc

SEQ ID NO: 1725848 - DNA, 25 bp, Homo sapien
tccggaaattaagggccgcgcctca

SEQ ID NO: 1725849 - DNA, 25 bp, Homo sapien
aaggcgagtcccagccaaactaggt

SEQ ID NO: 1725850 - DNA, 25 bp, Homo sapien
caaactaggttcaaaggacccagtg

SEQ ID NO: 1725851 - DNA, 25 bp, Homo sapien
aagaatgccggcgaggccttttctc

SEQ ID NO: 1725852 - DNA, 25 bp, Homo sapien
tcgggatgcacgtccacgaaggaca

SEQ ID NO: 1725853 - DNA, 25 bp, Homo sapien
ccagcacttccgagggcaaattgaa

SEQ ID NO: 1725854 - DNA, 25 bp, Homo sapien
ttgctaaggaagtccacggcgtcgg

SEQ ID NO: 1725855 - DNA, 25 bp, Homo sapien
caaattgaagaactctctgcgccca

SEQ ID NO: 1725856 - DNA, 25 bp, Homo sapien
agtggccgctgtgagatagcgctcc

SEQ ID NO: 1725857 - DNA, 25 bp, Homo sapien
accccggagcccacgctagcagtgg

SEQ ID NO: 1725858 - DNA, 25 bp, Homo sapien
gtgagatagcgctccagcagcgaac

SEQ ID NO: 1725859 - DNA, 25 bp, Homo sapien
gccgctgtgagatagcgctccagca

SEQ ID NO: 1725860 - DNA, 25 bp, Homo sapien
tatacctgggccatgctctcggaga

SEQ ID NO: 1725861 - DNA, 25 bp, Homo sapien
ggtaggtcaccaccggcattcgaaa

SEQ ID NO: 1725862 - DNA, 25 bp, Homo sapien
catagtccacatgaagcacctgggc

SEQ ID NO: 1725863 - DNA, 25 bp, Homo sapien
tattcaggcagcaagtaccgaaggc

SEQ ID NO: 1725864 - DNA, 25 bp, Homo sapien
cacagcaaaggtcatcaggttcagg

SEQ ID NO: 1725865 - DNA, 25 bp, Homo sapien
tacctgcgcatcgtagaaggcattc

SEQ ID NO: 1725866 - DNA, 25 bp, Homo sapien
taaggctgggagtgaaatctcttca

SEQ ID NO: 1725867 - DNA, 25 bp, Homo sapien
tcggtcagccaagcaacacgactgt

SEQ ID NO: 1725868 - DNA, 25 bp, Homo sapien
tatcaagaatatggatgactaattc

SEQ ID NO: 1725869 - DNA, 25 bp, Homo sapien
gccagggtgcacttcacagccaata

SEQ ID NO: 1725870 - DNA, 25 bp, Homo sapien
gcctcctggctccaagtttttccca

SEQ ID NO: 1725871 - DNA, 25 bp, Homo sapien
ctttgtggagcacagtctttttaaa

SEQ ID NO: 1725872 - DNA, 25 bp, Homo sapien
gggagtgggcatttaccaggatatt

SEQ ID NO: 1725873 - DNA, 25 bp, Homo sapien
caaattcctgatacttggcatatcc

SEQ ID NO: 1725874 - DNA, 25 bp, Homo sapien
tcttcccctgttcttgattcgtcaa

SEQ ID NO: 1725875 - DNA, 25 bp, Homo sapien
ccagcttgggcaattaccttactaa

SEQ ID NO: 1725876 - DNA, 25 bp, Homo sapien
taatttccaagcaattctgcataag

SEQ ID NO: 1725877 - DNA, 25 bp, Homo sapien
gtgtcactcaaagcttttgaaacag

SEQ ID NO: 1725878 - DNA, 25 bp, Homo sapien
tgcacaactagttcagttgaaccat

SEQ ID NO: 1725879 - DNA, 25 bp, Homo sapien
ccaagcaattctgcataagaggaaa

SEQ ID NO: 1725880 - DNA, 25 bp, Homo sapien
tcgcttagccaaacaagcaagggtg

SEQ ID NO: 1725881 - DNA, 25 bp, Homo sapien
caaacaaagggattctggccaactg

SEQ ID NO: 1725882 - DNA, 25 bp, Homo sapien
tataaagactgcacctaaaagcctg

SEQ ID NO: 1725883 - DNA, 25 bp, Homo sapien
caaggcacaaggttccagggttcaa

SEQ ID NO: 1725884 - DNA, 25 bp, Homo sapien
cttctggtatatgatcaggaatatc

SEQ ID NO: 1725885 - DNA, 25 bp, Homo sapien
ttccatctggatcttttgctacaac

SEQ ID NO: 1725886 - DNA, 25 bp, Homo sapien
ttgctacaactaaagccttcaatga

SEQ ID NO: 1725887 - DNA, 25 bp, Homo sapien
tactagcactaatttgaatattgtc

SEQ ID NO: 1725888 - DNA, 25 bp, Homo sapien
gatctgaggtttatatgactcttcc

SEQ ID NO: 1725889 - DNA, 25 bp, Homo sapien
tgttttcaagggtgtctcagcagaa

SEQ ID NO: 1725890 - DNA, 25 bp, Homo sapien
tacttaaatactctgtacatggcaa

SEQ ID NO: 1725891 - DNA, 25 bp, Homo sapien
cacagagtcttgatattgagtgact

SEQ ID NO: 1725892 - DNA, 25 bp, Homo sapien
ggacctacataatattcgggccttg

SEQ ID NO: 1725893 - DNA, 25 bp, Homo sapien
caggcattatagtcttctgtgggaa

SEQ ID NO: 1725894 - DNA, 25 bp, Homo sapien
tctgtgggaactcacaaaatttcag

SEQ ID NO: 1725895 - DNA, 25 bp, Homo sapien
cattgggttgttgctccttgatcac

SEQ ID NO: 1725896 - DNA, 25 bp, Homo sapien
aatattgcattaacaaggtcaagcc

SEQ ID NO: 1725897 - DNA, 25 bp, Homo sapien
tgtcaggaacctcaaatccctgcaa

SEQ ID NO: 1725898 - DNA, 25 bp, Homo sapien
gcacaaccccggcaatattgcatta

SEQ ID NO: 1725899 - DNA, 25 bp, Homo sapien
tccctgcaaggagcaatgaatgcac

SEQ ID NO: 1725900 - DNA, 25 bp, Homo sapien
cgctggtccgttgggaaaagtaatg

SEQ ID NO: 1725901 - DNA, 25 bp, Homo sapien
catctgctatgatcccatgttcatc

SEQ ID NO: 1725902 - DNA, 25 bp, Homo sapien
ttcacatcttattgcagcctcgctg

SEQ ID NO: 1725903 - DNA, 25 bp, Homo sapien
ctgctaatcatatcatctgctatga

SEQ ID NO: 1725904 - DNA, 25 bp, Homo sapien
ctgaagtgtcaatgtctgatttgtt

SEQ ID NO: 1725905 - DNA, 25 bp, Homo sapien
acagactttgaactggcacttttaa

SEQ ID NO: 1725906 - DNA, 25 bp, Homo sapien
tctgatttgttaacagactttgaac

SEQ ID NO: 1725907 - DNA, 25 bp, Homo sapien
ttgaactggcacttttaattacttg

SEQ ID NO: 1725908 - DNA, 25 bp, Homo sapien
tcttgtcatctaaaggcagctgggc

SEQ ID NO: 1725909 - DNA, 25 bp, Homo sapien
tcatcaggagaaagcggcacctcaa

SEQ ID NO: 1725910 - DNA, 25 bp, Homo sapien
tggaaaggcttgcatgggaaccgac

SEQ ID NO: 1725911 - DNA, 25 bp, Homo sapien
cagtgtaaatagctccatggcgcct

SEQ ID NO: 1725912 - DNA, 25 bp, Homo sapien
ttctcatgtcctcagtacacatgga

SEQ ID NO: 1725913 - DNA, 25 bp, Homo sapien
acacaacttgactttctcatgtcct

SEQ ID NO: 1725914 - DNA, 25 bp, Homo sapien
cacaacttgactttctcatgtcctc

SEQ ID NO: 1725915 - DNA, 25 bp, Homo sapien
cctcagtacacatggattcctgtgc

SEQ ID NO: 1725916 - DNA, 25 bp, Homo sapien
tagatgcaatgacatcctgcgctgg

SEQ ID NO: 1725917 - DNA, 25 bp, Homo sapien
taaaccattattgtgcttgcttcca

SEQ ID NO: 1725918 - DNA, 25 bp, Homo sapien
tgttttaggatcacaatctgctcca

SEQ ID NO: 1725919 - DNA, 25 bp, Homo sapien
caaaggcatcaatgccgaaatggca

SEQ ID NO: 1725920 - DNA, 25 bp, Homo sapien
gaattgagtaagactcaatgcatat

SEQ ID NO: 1725921 - DNA, 25 bp, Homo sapien
ttgagtaagactcaatgcatatctc

SEQ ID NO: 1725922 - DNA, 25 bp, Homo sapien
tgagtaagactcaatgcatatctct

SEQ ID NO: 1725923 - DNA, 25 bp, Homo sapien
aattgagtaagactcaatgcatatc

SEQ ID NO: 1725924 - DNA, 25 bp, Homo sapien
gaccatgtgtttcttagacttgacc

SEQ ID NO: 1725925 - DNA, 25 bp, Homo sapien
aatctcacatttagaccatgtgttt

SEQ ID NO: 1725926 - DNA, 25 bp, Homo sapien
catttagatccaacagtaaaggctt

SEQ ID NO: 1725927 - DNA, 25 bp, Homo sapien
caacacatttagatccaacagtaaa

SEQ ID NO: 1725928 - DNA, 25 bp, Homo sapien
caatttgggtatgccattccagaca

SEQ ID NO: 1725929 - DNA, 25 bp, Homo sapien
attctcagggttcactatctcctcc

SEQ ID NO: 1725930 - DNA, 25 bp, Homo sapien
tctcctccataccatttgaaaggtt

SEQ ID NO: 1725931 - DNA, 25 bp, Homo sapien
ctcttatccaatttgggtatgccat

SEQ ID NO: 1725932 - DNA, 25 bp, Homo sapien
taattactatttatagaattccata

SEQ ID NO: 1725933 - DNA, 25 bp, Homo sapien
ctaattactatttatagaattccat

SEQ ID NO: 1725934 - DNA, 25 bp, Homo sapien
aattactatttatagaattccatac

SEQ ID NO: 1725935 - DNA, 25 bp, Homo sapien
gtggtatcacccactgacatgaagt

SEQ ID NO: 1725936 - DNA, 25 bp, Homo sapien
aagatctttccctactctttgggat

SEQ ID NO: 1725937 - DNA, 25 bp, Homo sapien
cactgacatgaagtaaagatctttc

SEQ ID NO: 1725938 - DNA, 25 bp, Homo sapien
aatagtggtatcacccactgacatg

SEQ ID NO: 1725939 - DNA, 25 bp, Homo sapien
ccactgcattatttatgaacaagaa

SEQ ID NO: 1725940 - DNA, 25 bp, Homo sapien
gaaattccaagagattatttaacaa

SEQ ID NO: 1725941 - DNA, 25 bp, Homo sapien
tgtgcaataccaagaaccagccaat

SEQ ID NO: 1725942 - DNA, 25 bp, Homo sapien
tccctgctacctatgtccaaagaaa

SEQ ID NO: 1725943 - DNA, 25 bp, Homo sapien
atctccatcacctccaaaccccttt

SEQ ID NO: 1725944 - DNA, 25 bp, Homo sapien
aatctccatcacctccaaacccctt

SEQ ID NO: 1725945 - DNA, 25 bp, Homo sapien
ttaaatctccatcacctccaaaccc

SEQ ID NO: 1725946 - DNA, 25 bp, Homo sapien
taaatctccatcacctccaaacccc

SEQ ID NO: 1725947 - DNA, 25 bp, Homo sapien
gacaataaagacgaaagatcccaga

SEQ ID NO: 1725948 - DNA, 25 bp, Homo sapien
cgtaagatgccacttgttcaagggc

SEQ ID NO: 1725949 - DNA, 25 bp, Homo sapien
caaaaattctgaaggagatcctgct

SEQ ID NO: 1725950 - DNA, 25 bp, Homo sapien
caaatactctgttggtctgcgtaag

SEQ ID NO: 1725951 - DNA, 25 bp, Homo sapien
ggcactccttttctgattgagtgga

SEQ ID NO: 1725952 - DNA, 25 bp, Homo sapien
ggtccatggatcagctttgagtagc

SEQ ID NO: 1725953 - DNA, 25 bp, Homo sapien
ctcttaaactttaatgggcactcct

SEQ ID NO: 1725954 - DNA, 25 bp, Homo sapien
cctccaattcacagggtttgttcat

SEQ ID NO: 1725955 - DNA, 25 bp, Homo sapien
cttctcagaggtcaggtgtcctgga

SEQ ID NO: 1725956 - DNA, 25 bp, Homo sapien
acctggatcagcctgatgattcctg

SEQ ID NO: 1725957 - DNA, 25 bp, Homo sapien
gatcagcctgatgattcctgaggtc

SEQ ID NO: 1725958 - DNA, 25 bp, Homo sapien
tcttctcagaggtcaggtgtcctgg

SEQ ID NO: 1725959 - DNA, 25 bp, Homo sapien
ccataaccgggtcagctgtaggcta

SEQ ID NO: 1725960 - DNA, 25 bp, Homo sapien
taatagcatgccataggttccaatc

SEQ ID NO: 1725961 - DNA, 25 bp, Homo sapien
gaaccacaaaactgtgtgagtggtc

SEQ ID NO: 1725962 - DNA, 25 bp, Homo sapien
cttaatgatgactcctgacagatgg

SEQ ID NO: 1725963 - DNA, 25 bp, Homo sapien
tgtacatcccatttccggtgtgccc

SEQ ID NO: 1725964 - DNA, 25 bp, Homo sapien
tctgtgcctgttgcttgtacatccc

SEQ ID NO: 1725965 - DNA, 25 bp, Homo sapien
tttaatactgcatcctcctggagaa

SEQ ID NO: 1725966 - DNA, 25 bp, Homo sapien
ctttagcgggagagcatctgtgcct

SEQ ID NO: 1725967 - DNA, 25 bp, Homo sapien
cttgcacttgggcactgaaagtgct

SEQ ID NO: 1725968 - DNA, 25 bp, Homo sapien
ggcctacttcagctccttgcacttg

SEQ ID NO: 1725969 - DNA, 25 bp, Homo sapien
ccccagatatttgtgcaccagaagc

SEQ ID NO: 1725970 - DNA, 25 bp, Homo sapien
cattttccagcaggcctacttcagc

SEQ ID NO: 1725971 - DNA, 25 bp, Homo sapien
gccctgcagaaagtggtgagacagc

SEQ ID NO: 1725972 - DNA, 25 bp, Homo sapien
ccctgcagaaagtggtgagacagcg

SEQ ID NO: 1725973 - DNA, 25 bp, Homo sapien
tgcagaaagtggtgagacagcgcac

SEQ ID NO: 1725974 - DNA, 25 bp, Homo sapien
cctgcagaaagtggtgagacagcgc

SEQ ID NO: 1725975 - DNA, 25 bp, Homo sapien
cagccctcggaaacagcgctaggat

SEQ ID NO: 1725976 - DNA, 25 bp, Homo sapien
cctgcagccctcggaaacagcgcta

SEQ ID NO: 1725977 - DNA, 25 bp, Homo sapien
tgcagccctcggaaacagcgctagg

SEQ ID NO: 1725978 - DNA, 25 bp, Homo sapien
agccctcggaaacagcgctaggatc

SEQ ID NO: 1725979 - DNA, 25 bp, Homo sapien
gctggtcggaggctcgcagtgctgt

SEQ ID NO: 1725980 - DNA, 25 bp, Homo sapien
tggtgcgcggtggaacgcgcccagg

SEQ ID NO: 1725981 - DNA, 25 bp, Homo sapien
ctgtcggcgagaagcagtcgggttt

SEQ ID NO: 1725982 - DNA, 25 bp, Homo sapien
agtcgggtttggagcgcttgggtcg

SEQ ID NO: 1725983 - DNA, 25 bp, Homo sapien
ctcctccagcatcaccaggggagga

SEQ ID NO: 1725984 - DNA, 25 bp, Homo sapien
cctccagcatcaccaggggaggaga

SEQ ID NO: 1725985 - DNA, 25 bp, Homo sapien
agagggtcggggccacaaggccgcg

SEQ ID NO: 1725986 - DNA, 25 bp, Homo sapien
gaggagagggtcggggccacaaggc

SEQ ID NO: 1725987 - DNA, 25 bp, Homo sapien
cattgccaactatagatgctcggag

SEQ ID NO: 1725988 - DNA, 25 bp, Homo sapien
gagcacggtccacacaacttccgaa

SEQ ID NO: 1725989 - DNA, 25 bp, Homo sapien
tcagtgtaaagtgtatcggagtgcg

SEQ ID NO: 1725990 - DNA, 25 bp, Homo sapien
agtggcaggccttccaatctggagc

SEQ ID NO: 1725991 - DNA, 25 bp, Homo sapien
gctattcctgattgtccttcattgt

SEQ ID NO: 1725992 - DNA, 25 bp, Homo sapien
taagtgctattcctgattgtccttc

SEQ ID NO: 1725993 - DNA, 25 bp, Homo sapien
ctaagtgctattcctgattgtcctt

SEQ ID NO: 1725994 - DNA, 25 bp, Homo sapien
agtgctattcctgattgtccttcat

SEQ ID NO: 1725995 - DNA, 25 bp, Homo sapien
gatgggccagtcattgatctttggt

SEQ ID NO: 1725996 - DNA, 25 bp, Homo sapien
ccacctggggaaatatcgatgggcc

SEQ ID NO: 1725997 - DNA, 25 bp, Homo sapien
tcgatgggccagtcattgatctttg

SEQ ID NO: 1725998 - DNA, 25 bp, Homo sapien
tatcctgcaacaggtcacagaggcc

SEQ ID NO: 1725999 - DNA, 25 bp, Homo sapien
tagtgatgctcagatcccagtgaac

SEQ ID NO: 1726000 - DNA, 25 bp, Homo sapien
gccaccagcagagtctccattgtgt

SEQ ID NO: 1726001 - DNA, 25 bp, Homo sapien
ccagttagttggcaggagacatgga

SEQ ID NO: 1726002 - DNA, 25 bp, Homo sapien
cagtgaactttctctcctcctagag

SEQ ID NO: 1726003 - DNA, 25 bp, Homo sapien
tggagatattcttaggcgaacgagg

SEQ ID NO: 1726004 - DNA, 25 bp, Homo sapien
tattcttaggcgaacgaggacaagc

SEQ ID NO: 1726005 - DNA, 25 bp, Homo sapien
tcaggtggagatattcttaggcgaa

SEQ ID NO: 1726006 - DNA, 25 bp, Homo sapien
ggagccctcaggtggagatattctt

SEQ ID NO: 1726007 - DNA, 25 bp, Homo sapien
tcattccagtctacatctttgtagt

SEQ ID NO: 1726008 - DNA, 25 bp, Homo sapien
ttgtagtttgggtcacagagacctt

SEQ ID NO: 1726009 - DNA, 25 bp, Homo sapien
ctttgattgcagcccagtgaagtgg

SEQ ID NO: 1726010 - DNA, 25 bp, Homo sapien
tgcagccacagcttggtgaagcttt

SEQ ID NO: 1726011 - DNA, 25 bp, Homo sapien
gcgtcgatggcagcgtgcaatgcat

SEQ ID NO: 1726012 - DNA, 25 bp, Homo sapien
ttcggtgtgtctccaaagaagtcag

SEQ ID NO: 1726013 - DNA, 25 bp, Homo sapien
ttctgtccatagatctgtgcaatcc

SEQ ID NO: 1726014 - DNA, 25 bp, Homo sapien
cagcccacactagtaaccaggcagg

SEQ ID NO: 1726015 - DNA, 25 bp, Homo sapien
gatccccttgcctaaagtctagcag

SEQ ID NO: 1726016 - DNA, 25 bp, Homo sapien
tatcttcatcacctagcccaggagc

SEQ ID NO: 1726017 - DNA, 25 bp, Homo sapien
gccagctagctttcaagatccaggt

SEQ ID NO: 1726018 - DNA, 25 bp, Homo sapien
aattgatttagcgtgaggagctccc

SEQ ID NO: 1726019 - DNA, 25 bp, Homo sapien
ttcatgttttgatttagggaaggaa

SEQ ID NO: 1726020 - DNA, 25 bp, Homo sapien
ctggtggggcctcgacttttcttat

SEQ ID NO: 1726021 - DNA, 25 bp, Homo sapien
ccttctgctgggcagcgcaacggtg

SEQ ID NO: 1726022 - DNA, 25 bp, Homo sapien
ttcatcacgctcatccagaggcagc

SEQ ID NO: 1726023 - DNA, 25 bp, Homo sapien
aacagcccatgtggacagcacctaa

SEQ ID NO: 1726024 - DNA, 25 bp, Homo sapien
tgcaagcaggttttgtcctttcccg

SEQ ID NO: 1726025 - DNA, 25 bp, Homo sapien
cattatctctcgatcgttatcaggg

SEQ ID NO: 1726026 - DNA, 25 bp, Homo sapien
ccttgccagaaaacataaggttgag

SEQ ID NO: 1726027 - DNA, 25 bp, Homo sapien
ccctaacatgggtggacaatcagct

SEQ ID NO: 1726028 - DNA, 25 bp, Homo sapien
actgagccatagatgtgcccagata

SEQ ID NO: 1726029 - DNA, 25 bp, Homo sapien
tttggatatcctaaactcgtgtcag

SEQ ID NO: 1726030 - DNA, 25 bp, Homo sapien
aaagatcctctttcacagcttctgg

SEQ ID NO: 1726031 - DNA, 25 bp, Homo sapien
tgcaagtgagctgattttagcacac

SEQ ID NO: 1726032 - DNA, 25 bp, Homo sapien
ctgcaagtgagctgattttagcaca

SEQ ID NO: 1726033 - DNA, 25 bp, Homo sapien
gcaagtgagctgattttagcacaca

SEQ ID NO: 1726034 - DNA, 25 bp, Homo sapien
caagtgagctgattttagcacacac

SEQ ID NO: 1726035 - DNA, 25 bp, Homo sapien
cagctgctatgtgggcaaaaagcaa

SEQ ID NO: 1726036 - DNA, 25 bp, Homo sapien
gctatgtgggcaaaaagcaaggtaa

SEQ ID NO: 1726037 - DNA, 25 bp, Homo sapien
tacagctgctatgtgggcaaaaagc

SEQ ID NO: 1726038 - DNA, 25 bp, Homo sapien
cggtacagctgctatgtgggcaaaa

SEQ ID NO: 1726039 - DNA, 25 bp, Homo sapien
cattttcttcaggaagatacttaat

SEQ ID NO: 1726040 - DNA, 25 bp, Homo sapien
tgaaatatccttctgttcaccaaaa

SEQ ID NO: 1726041 - DNA, 25 bp, Homo sapien
gaaatatccttctgttcaccaaaat

SEQ ID NO: 1726042 - DNA, 25 bp, Homo sapien
atatccttctgttcaccaaaatctg

SEQ ID NO: 1726043 - DNA, 25 bp, Homo sapien
aaatatccttctgttcaccaaaatc

SEQ ID NO: 1726044 - DNA, 25 bp, Homo sapien
ggatgtccccttgaaagaggtccaa

SEQ ID NO: 1726045 - DNA, 25 bp, Homo sapien
aggatgtccccttgaaagaggtcca

SEQ ID NO: 1726046 - DNA, 25 bp, Homo sapien
ttatcagccaagatgtaaggaatgg

SEQ ID NO: 1726047 - DNA, 25 bp, Homo sapien
aattatcagccaagatgtaaggaat

SEQ ID NO: 1726048 - DNA, 25 bp, Homo sapien
ccaaattatcagccaagatgtaagg

SEQ ID NO: 1726049 - DNA, 25 bp, Homo sapien
tatcagccaagatgtaaggaatggg

SEQ ID NO: 1726050 - DNA, 25 bp, Homo sapien
ggaaagcagaacttagagaggtttg

SEQ ID NO: 1726051 - DNA, 25 bp, Homo sapien
cccaatctaaaaagacattctctct

SEQ ID NO: 1726052 - DNA, 25 bp, Homo sapien
cagaacttagagaggtttgtgggtt

SEQ ID NO: 1726053 - DNA, 25 bp, Homo sapien
gaggaaagcagaacttagagaggtt

SEQ ID NO: 1726054 - DNA, 25 bp, Homo sapien
cacaggacttgagacggaacatctc

SEQ ID NO: 1726055 - DNA, 25 bp, Homo sapien
ggcatacagaatggctcctttagca

SEQ ID NO: 1726056 - DNA, 25 bp, Homo sapien
gaaatatgatatatgagctctctcc

SEQ ID NO: 1726057 - DNA, 25 bp, Homo sapien
tagggcttgaaatccacacaggact

SEQ ID NO: 1726058 - DNA, 25 bp, Homo sapien
taggcacatccttggccaatggaaa

SEQ ID NO: 1726059 - DNA, 25 bp, Homo sapien
ccttgactgctcgtggtaaaatccc

SEQ ID NO: 1726060 - DNA, 25 bp, Homo sapien
tgaaagaatttggtcccaccagatg

SEQ ID NO: 1726061 - DNA, 25 bp, Homo sapien
tcccaaagcatgcaggatctcgtgt

SEQ ID NO: 1726062 - DNA, 25 bp, Homo sapien
tagggagagaatccacaggtccttc

SEQ ID NO: 1726063 - DNA, 25 bp, Homo sapien
ctgttagggagagaatccacaggtc

SEQ ID NO: 1726064 - DNA, 25 bp, Homo sapien
tgttagggagagaatccacaggtcc

SEQ ID NO: 1726065 - DNA, 25 bp, Homo sapien
ttagggagagaatccacaggtcctt

SEQ ID NO: 1726066 - DNA, 25 bp, Homo sapien
gaaaggctggtagtgcatcaaagac

SEQ ID NO: 1726067 - DNA, 25 bp, Homo sapien
tcaaagactcataatcatagggtgt

SEQ ID NO: 1726068 - DNA, 25 bp, Homo sapien
tccaggcgctgtccgataatggagt

SEQ ID NO: 1726069 - DNA, 25 bp, Homo sapien
gcaattgtacattcggttcagcctc

SEQ ID NO: 1726070 - DNA, 25 bp, Homo sapien
gatgggcccagtcagtgtcatctct

SEQ ID NO: 1726071 - DNA, 25 bp, Homo sapien
tacagtggtccaaaagagtgtgagt

SEQ ID NO: 1726072 - DNA, 25 bp, Homo sapien
tgagcactgtcctgatgggcccagt

SEQ ID NO: 1726073 - DNA, 25 bp, Homo sapien
tgtgcattgtcccaacaaggtgtga

SEQ ID NO: 1726074 - DNA, 25 bp, Homo sapien
gaaggacttcccgtcattttataga

SEQ ID NO: 1726075 - DNA, 25 bp, Homo sapien
gtgctgaactgcatgaagtagccgg

SEQ ID NO: 1726076 - DNA, 25 bp, Homo sapien
caacttgcgaacattgcctgtgctg

SEQ ID NO: 1726077 - DNA, 25 bp, Homo sapien
taaagaatccgagactccagtaggg

SEQ ID NO: 1726078 - DNA, 25 bp, Homo sapien
ccaaaaccatatccctccgaattgt

SEQ ID NO: 1726079 - DNA, 25 bp, Homo sapien
atatccctccgaattgtagaatcga

SEQ ID NO: 1726080 - DNA, 25 bp, Homo sapien
gctttctctgctatttgggtataaa

SEQ ID NO: 1726081 - DNA, 25 bp, Homo sapien
tctgctatttgggtataaagttacc

SEQ ID NO: 1726082 - DNA, 25 bp, Homo sapien
gagatgtgtgcgacttcgaggtagt

SEQ ID NO: 1726083 - DNA, 25 bp, Homo sapien
gtgtgcgacttcgaggtagtgaaca

SEQ ID NO: 1726084 - DNA, 25 bp, Homo sapien
ctggagatgtgtgcgacttcgaggt

SEQ ID NO: 1726085 - DNA, 25 bp, Homo sapien
gatgtgtgcgacttcgaggtagtga

SEQ ID NO: 1726086 - DNA, 25 bp, Homo sapien
ttcccaccctggacggcctgtccca

SEQ ID NO: 1726087 - DNA, 25 bp, Homo sapien
tcccaccctggacggcctgtcccag

SEQ ID NO: 1726088 - DNA, 25 bp, Homo sapien
accctggacggcctgtcccagatga

SEQ ID NO: 1726089 - DNA, 25 bp, Homo sapien
ccaccctggacggcctgtcccagat

SEQ ID NO: 1726090 - DNA, 25 bp, Homo sapien
tcttttgcctttagtgggaacttca

SEQ ID NO: 1726091 - DNA, 25 bp, Homo sapien
cttggagaatgaggccttgggggct

SEQ ID NO: 1726092 - DNA, 25 bp, Homo sapien
ctttagtgggaacttcagtctggct

SEQ ID NO: 1726093 - DNA, 25 bp, Homo sapien
tgcctttagtgggaacttcagtctg

SEQ ID NO: 1726094 - DNA, 25 bp, Homo sapien
aaccttcttcggagacctgctgctc

SEQ ID NO: 1726095 - DNA, 25 bp, Homo sapien
tcccgaaccttcttcggagacctgc

SEQ ID NO: 1726096 - DNA, 25 bp, Homo sapien
cttcttcggagacctgctgctcctg

SEQ ID NO: 1726097 - DNA, 25 bp, Homo sapien
ccgaaccttcttcggagacctgctg

SEQ ID NO: 1726098 - DNA, 25 bp, Homo sapien
gcaagggtttgggtcacatgggtct

SEQ ID NO: 1726099 - DNA, 25 bp, Homo sapien
gggtctctgaagtactgtggccagt

SEQ ID NO: 1726100 - DNA, 25 bp, Homo sapien
tgggtctctgaagtactgtggccag

SEQ ID NO: 1726101 - DNA, 25 bp, Homo sapien
caagggtttgggtcacatgggtctc

SEQ ID NO: 1726102 - DNA, 25 bp, Homo sapien
ctgacagcgctcccccgtgtagaag

SEQ ID NO: 1726103 - DNA, 25 bp, Homo sapien
cagcgctcccccgtgtagaagaaag

SEQ ID NO: 1726104 - DNA, 25 bp, Homo sapien
ctcccccgtgtagaagaaagcatgt

SEQ ID NO: 1726105 - DNA, 25 bp, Homo sapien
cgctcccccgtgtagaagaaagcat

SEQ ID NO: 1726106 - DNA, 25 bp, Homo sapien
cctttgggaaaggatggcgatgatg

SEQ ID NO: 1726107 - DNA, 25 bp, Homo sapien
agaaggtcaagaagatcacgccagc

SEQ ID NO: 1726108 - DNA, 25 bp, Homo sapien
tggagaaggtcaagaagatcacgcc

SEQ ID NO: 1726109 - DNA, 25 bp, Homo sapien
gtcaagaagatcacgccagccgtgc

SEQ ID NO: 1726110 - DNA, 25 bp, Homo sapien
gaggccttagtccttggaggtccta

SEQ ID NO: 1726111 - DNA, 25 bp, Homo sapien
gatacattaggagcacatagcaaag

SEQ ID NO: 1726112 - DNA, 25 bp, Homo sapien
gccagcacggtcaatgagaacaaca

SEQ ID NO: 1726113 - DNA, 25 bp, Homo sapien
aaaaactgcattgaccatgggaaag

SEQ ID NO: 1726114 - DNA, 25 bp, Homo sapien
ctttaacaagatcttaaaagagtga

SEQ ID NO: 1726115 - DNA, 25 bp, Homo sapien
tggctgcccagaagtacctttattt

SEQ ID NO: 1726116 - DNA, 25 bp, Homo sapien
gacactactgtatctaatgaaaaat

SEQ ID NO: 1726117 - DNA, 25 bp, Homo sapien
gaaaaatgagtatttgattctaaca

SEQ ID NO: 1726118 - DNA, 25 bp, Homo sapien
tcccaagccgtgtgcaaagatccag

SEQ ID NO: 1726119 - DNA, 25 bp, Homo sapien
gatcccgtgagctgtctttgtagta

SEQ ID NO: 1726120 - DNA, 25 bp, Homo sapien
tccattccataacaaggaaatatct

SEQ ID NO: 1726121 - DNA, 25 bp, Homo sapien
gctgaactcaactggctgtcagggc

SEQ ID NO: 1726122 - DNA, 25 bp, Homo sapien
tcagcaatgattacaaggctattag

SEQ ID NO: 1726123 - DNA, 25 bp, Homo sapien
tgtgttcctaacatctctcagtgta

SEQ ID NO: 1726124 - DNA, 25 bp, Homo sapien
cagtgtataaagaccattccctggg

SEQ ID NO: 1726125 - DNA, 25 bp, Homo sapien
actttgttcgtaaggtgcccagtgc

SEQ ID NO: 1726126 - DNA, 25 bp, Homo sapien
cagagttcatgatggcttgtcttca

SEQ ID NO: 1726127 - DNA, 25 bp, Homo sapien
tcaggaacgtataatgtttccaccc

SEQ ID NO: 1726128 - DNA, 25 bp, Homo sapien
taggagatgttcacaccccagagtt

SEQ ID NO: 1726129 - DNA, 25 bp, Homo sapien
tccctggaaaactcatccagtgctt

SEQ ID NO: 1726130 - DNA, 25 bp, Homo sapien
caatgctgctaataattcagtctgg

SEQ ID NO: 1726131 - DNA, 25 bp, Homo sapien
tctcgtttgccatcctgttccctgg

SEQ ID NO: 1726132 - DNA, 25 bp, Homo sapien
tcattcctgactgactacccacccc

SEQ ID NO: 1726133 - DNA, 25 bp, Homo sapien
ccacctctcattcctgactgactac

SEQ ID NO: 1726134 - DNA, 25 bp, Homo sapien
cttctcgtttgccatcctgttccct

SEQ ID NO: 1726135 - DNA, 25 bp, Homo sapien
tacaacctgtacactcatacacaat

SEQ ID NO: 1726136 - DNA, 25 bp, Homo sapien
ttgtttcacgacttcatgtactttc

SEQ ID NO: 1726137 - DNA, 25 bp, Homo sapien
ctttcattgtttgacctaggttatc

SEQ ID NO: 1726138 - DNA, 25 bp, Homo sapien
tatatatggtgtgtctcctcttcca

SEQ ID NO: 1726139 - DNA, 25 bp, Homo sapien
taatctcattcgagtctcagaaaac

SEQ ID NO: 1726140 - DNA, 25 bp, Homo sapien
tggattctattgacgatcagagtaa

SEQ ID NO: 1726141 - DNA, 25 bp, Homo sapien
gcccttctggatggttgcattctgg

SEQ ID NO: 1726142 - DNA, 25 bp, Homo sapien
aattattgcagcctgcatttctgga

SEQ ID NO: 1726143 - DNA, 25 bp, Homo sapien
gaagttgctcagagccgcaaggcta

SEQ ID NO: 1726144 - DNA, 25 bp, Homo sapien
tactgagggctagggcatatttccc

SEQ ID NO: 1726145 - DNA, 25 bp, Homo sapien
tgccttgaatatgggatgctgctcc

SEQ ID NO: 1726146 - DNA, 25 bp, Homo sapien
cagccagcaccggttgtttctaagg

SEQ ID NO: 1726147 - DNA, 25 bp, Homo sapien
gagacagagaagaccagtgaataaa

SEQ ID NO: 1726148 - DNA, 25 bp, Homo sapien
ccaatgacatatccacaacttggac

SEQ ID NO: 1726149 - DNA, 25 bp, Homo sapien
atgagacagagaagaccagtgaata

SEQ ID NO: 1726150 - DNA, 25 bp, Homo sapien
aagagggtaacaaaccaatgacata

SEQ ID NO: 1726151 - DNA, 25 bp, Homo sapien
gtagcaacctgatcaccaggccaac

SEQ ID NO: 1726152 - DNA, 25 bp, Homo sapien
cttcattagtagcaacctgatcacc

SEQ ID NO: 1726153 - DNA, 25 bp, Homo sapien
agtagcaacctgatcaccaggccaa

SEQ ID NO: 1726154 - DNA, 25 bp, Homo sapien
tagcaacctgatcaccaggccaact

SEQ ID NO: 1726155 - DNA, 25 bp, Homo sapien
cattgtgctgagataggccatggga

SEQ ID NO: 1726156 - DNA, 25 bp, Homo sapien
gacaatctgtacaatgctagaccat

SEQ ID NO: 1726157 - DNA, 25 bp, Homo sapien
gacgtagttatgaaaggtcttgaac

SEQ ID NO: 1726158 - DNA, 25 bp, Homo sapien
tgagcaatttccctgaggcccgacg

SEQ ID NO: 1726159 - DNA, 25 bp, Homo sapien
aatcgtgtaattgttgatatgtagc

SEQ ID NO: 1726160 - DNA, 25 bp, Homo sapien
caagggcgatgggtctggaataatc

SEQ ID NO: 1726161 - DNA, 25 bp, Homo sapien
caggtcagatgaggcaaaaccaagg

SEQ ID NO: 1726162 - DNA, 25 bp, Homo sapien
aaatagtttagtggtcctgagagga

SEQ ID NO: 1726163 - DNA, 25 bp, Homo sapien
gagaatgagcctaagcactgagcca

SEQ ID NO: 1726164 - DNA, 25 bp, Homo sapien
tgagccagtacagattccacccaac

SEQ ID NO: 1726165 - DNA, 25 bp, Homo sapien
taagcactgagccagtacagattcc

SEQ ID NO: 1726166 - DNA, 25 bp, Homo sapien
ggtggccacagagaatgagcctaag

SEQ ID NO: 1726167 - DNA, 25 bp, Homo sapien
ttaaatctccaagcactagcgaagc

SEQ ID NO: 1726168 - DNA, 25 bp, Homo sapien
ggaactcttcaattatccccagaga

SEQ ID NO: 1726169 - DNA, 25 bp, Homo sapien
ggtgtcttcaccgtccttaaatctc

SEQ ID NO: 1726170 - DNA, 25 bp, Homo sapien
ccagagacatctttatggtgtcttc

SEQ ID NO: 1726171 - DNA, 25 bp, Homo sapien
ccctccaaggtccgcagattcagga

SEQ ID NO: 1726172 - DNA, 25 bp, Homo sapien
ccgcagattcaggaaaatgtgctgt

SEQ ID NO: 1726173 - DNA, 25 bp, Homo sapien
ggtccgcagattcaggaaaatgtgc

SEQ ID NO: 1726174 - DNA, 25 bp, Homo sapien
tccaaggtccgcagattcaggaaaa

SEQ ID NO: 1726175 - DNA, 25 bp, Homo sapien
cacacacatcctgtccggtgttgag

SEQ ID NO: 1726176 - DNA, 25 bp, Homo sapien
tactcaaagttgcaatgctcagggc

SEQ ID NO: 1726177 - DNA, 25 bp, Homo sapien
ggtctccgtgaaagatgaagaggtg

SEQ ID NO: 1726178 - DNA, 25 bp, Homo sapien
tccggtgttgagtctgtgatctgca

SEQ ID NO: 1726179 - DNA, 25 bp, Homo sapien
gcatcgttttgatttgccatgttaa

SEQ ID NO: 1726180 - DNA, 25 bp, Homo sapien
catcgttttgatttgccatgttaaa

SEQ ID NO: 1726181 - DNA, 25 bp, Homo sapien
catgttaaatgtgaatccggctgct

SEQ ID NO: 1726182 - DNA, 25 bp, Homo sapien
ttaaatgtgaatccggctgctctgg

SEQ ID NO: 1726183 - DNA, 25 bp, Homo sapien
aaaggtaaagttggctggcccatca

SEQ ID NO: 1726184 - DNA, 25 bp, Homo sapien
agttctcagtatgtttattctcttc

SEQ ID NO: 1726185 - DNA, 25 bp, Homo sapien
agtggccagaggacaagtttcctgt

SEQ ID NO: 1726186 - DNA, 25 bp, Homo sapien
caggaagaaagcacttggtaaaagg

SEQ ID NO: 1726187 - DNA, 25 bp, Homo sapien
caggttctgtgctaatgtcttccat

SEQ ID NO: 1726188 - DNA, 25 bp, Homo sapien
tcacacctctggaggatgccttggt

SEQ ID NO: 1726189 - DNA, 25 bp, Homo sapien
ctggtgttaaacaacaagcaggatc

SEQ ID NO: 1726190 - DNA, 25 bp, Homo sapien
tcattgatgtcctcagtccgtccac

SEQ ID NO: 1726191 - DNA, 25 bp, Homo sapien
gtgttgtggttacccatctggcaag

SEQ ID NO: 1726192 - DNA, 25 bp, Homo sapien
tatgttgattatattgggtggcagc

SEQ ID NO: 1726193 - DNA, 25 bp, Homo sapien
tttattcctgtgctgatggtgtata

SEQ ID NO: 1726194 - DNA, 25 bp, Homo sapien
gcagaatcccctgagcttttgaaaa

SEQ ID NO: 1726195 - DNA, 25 bp, Homo sapien
ctgttctttgactttacatgttgcc

SEQ ID NO: 1726196 - DNA, 25 bp, Homo sapien
gttctttgactttacatgttgccaa

SEQ ID NO: 1726197 - DNA, 25 bp, Homo sapien
gcaatatttagtgggactaaaggta

SEQ ID NO: 1726198 - DNA, 25 bp, Homo sapien
agcctggcaatatttagtgggacta

SEQ ID NO: 1726199 - DNA, 25 bp, Homo sapien
cagctttatagggtatgacccagtg

SEQ ID NO: 1726200 - DNA, 25 bp, Homo sapien
cgatctagggcaaaagtgttccaca

SEQ ID NO: 1726201 - DNA, 25 bp, Homo sapien
cattttgtagtaaaccgatctaggg

SEQ ID NO: 1726202 - DNA, 25 bp, Homo sapien
cattggaattatgcatgaagggctg

SEQ ID NO: 1726203 - DNA, 25 bp, Homo sapien
gataactttttcagtgggctagacc

SEQ ID NO: 1726204 - DNA, 25 bp, Homo sapien
agtatgatagggatcagtggcccag

SEQ ID NO: 1726205 - DNA, 25 bp, Homo sapien
tagacccagacccaatcatgttaag

SEQ ID NO: 1726206 - DNA, 25 bp, Homo sapien
ggtttgtcaggtaagccccattctc

SEQ ID NO: 1726207 - DNA, 25 bp, Homo sapien
aattaagtgattgtaccgcatagtg

SEQ ID NO: 1726208 - DNA, 25 bp, Homo sapien
ccgctacaacgttgtgaatcttggc

SEQ ID NO: 1726209 - DNA, 25 bp, Homo sapien
gaatcttggccactagatgtctctc

SEQ ID NO: 1726210 - DNA, 25 bp, Homo sapien
gattttgtaaacaggtggccgctac

SEQ ID NO: 1726211 - DNA, 25 bp, Homo sapien
ccttcaaaggatcctttctattgga

SEQ ID NO: 1726212 - DNA, 25 bp, Homo sapien
tcaaaggatcctttctattggacat

SEQ ID NO: 1726213 - DNA, 25 bp, Homo sapien
tggataaggtccttcaaaggatcct

SEQ ID NO: 1726214 - DNA, 25 bp, Homo sapien
tcccctcctggataaggtccttcaa

SEQ ID NO: 1726215 - DNA, 25 bp, Homo sapien
ccacaaagagccttgccggcttcta

SEQ ID NO: 1726216 - DNA, 25 bp, Homo sapien
tgactctagagtgatttctgggaag

SEQ ID NO: 1726217 - DNA, 25 bp, Homo sapien
tttgcaattccctgactctagagtg

SEQ ID NO: 1726218 - DNA, 25 bp, Homo sapien
gccggcttctacaaagacttgactt

SEQ ID NO: 1726219 - DNA, 25 bp, Homo sapien
tgagagctgaaagtagctgccagga

SEQ ID NO: 1726220 - DNA, 25 bp, Homo sapien
tctcctgagagctgaaagtagctgc

SEQ ID NO: 1726221 - DNA, 25 bp, Homo sapien
agctgaaagtagctgccaggatgga

SEQ ID NO: 1726222 - DNA, 25 bp, Homo sapien
ttccttcgtttctctggctttgtct

SEQ ID NO: 1726223 - DNA, 25 bp, Homo sapien
aaacaaacaggctcctcatcatgcc

SEQ ID NO: 1726224 - DNA, 25 bp, Homo sapien
tcatttcctgaacaggacggttcta

SEQ ID NO: 1726225 - DNA, 25 bp, Homo sapien
tggtggaccggtctctccaaaacaa

SEQ ID NO: 1726226 - DNA, 25 bp, Homo sapien
acaggacggttctaccacctggtgg

SEQ ID NO: 1726227 - DNA, 25 bp, Homo sapien
gagagaaaccctttgtggccatgca

SEQ ID NO: 1726228 - DNA, 25 bp, Homo sapien
gaaaccctttgtggccatgcacata

SEQ ID NO: 1726229 - DNA, 25 bp, Homo sapien
ggccatgcacatagcaagccagaaa

SEQ ID NO: 1726230 - DNA, 25 bp, Homo sapien
tttgtggccatgcacatagcaagcc

SEQ ID NO: 1726231 - DNA, 25 bp, Homo sapien
tagtttgcaactgtcagcgtctgtg

SEQ ID NO: 1726232 - DNA, 25 bp, Homo sapien
gttggtttagtttgcaactgtcagc

SEQ ID NO: 1726233 - DNA, 25 bp, Homo sapien
ggtttagtttgcaactgtcagcgtc

SEQ ID NO: 1726234 - DNA, 25 bp, Homo sapien
ttgcaactgtcagcgtctgtgtcca

SEQ ID NO: 1726235 - DNA, 25 bp, Homo sapien
cagatactgaacgtaaccaggaaat

SEQ ID NO: 1726236 - DNA, 25 bp, Homo sapien
gctttctgatgttactcagatactg

SEQ ID NO: 1726237 - DNA, 25 bp, Homo sapien
caggaaatattgggttagtttccag

SEQ ID NO: 1726238 - DNA, 25 bp, Homo sapien
ctgaacgtaaccaggaaatattggg

SEQ ID NO: 1726239 - DNA, 25 bp, Homo sapien
ttgacaattgcaagccgtgactacc

SEQ ID NO: 1726240 - DNA, 25 bp, Homo sapien
gcaagccgtgactaccaatggaggt

SEQ ID NO: 1726241 - DNA, 25 bp, Homo sapien
cgtgactaccaatggaggtaacaga

SEQ ID NO: 1726242 - DNA, 25 bp, Homo sapien
ctttaggagtaaccttgacaattgc

SEQ ID NO: 1726243 - DNA, 25 bp, Homo sapien
caaaagcatgggcatttagttcccc

SEQ ID NO: 1726244 - DNA, 25 bp, Homo sapien
gactgtgtgaaagtgtttggagcca

SEQ ID NO: 1726245 - DNA, 25 bp, Homo sapien
tttggagccagtacaccagggctgg

SEQ ID NO: 1726246 - DNA, 25 bp, Homo sapien
gctgtgacaactcgaggcatgggct

SEQ ID NO: 1726247 - DNA, 25 bp, Homo sapien
gcacggcgggtaattacggagacca

SEQ ID NO: 1726248 - DNA, 25 bp, Homo sapien
ctgtcctgtcagtgcacggcgggta

SEQ ID NO: 1726249 - DNA, 25 bp, Homo sapien
aacgcggcttttaatggcgaatcct

SEQ ID NO: 1726250 - DNA, 25 bp, Homo sapien
tttaatggcgaatcctttcctgtcc

SEQ ID NO: 1726251 - DNA, 25 bp, Homo sapien
tgtcactgacagcatgctttttggg

SEQ ID NO: 1726252 - DNA, 25 bp, Homo sapien
catgttgtgggtgcacctccccgct

SEQ ID NO: 1726253 - DNA, 25 bp, Homo sapien
tgttgtgggtgcacctccccgctgg

SEQ ID NO: 1726254 - DNA, 25 bp, Homo sapien
caggggggcttcactcaccttcact

SEQ ID NO: 1726255 - DNA, 25 bp, Homo sapien
gcttacagaattattatcatggtga

SEQ ID NO: 1726256 - DNA, 25 bp, Homo sapien
tgtagtgattgtttatcccttccat

SEQ ID NO: 1726257 - DNA, 25 bp, Homo sapien
ctttccaaagtgtgaagagttatgt

SEQ ID NO: 1726258 - DNA, 25 bp, Homo sapien
tgcttacagaattattatcatggtg

SEQ ID NO: 1726259 - DNA, 25 bp, Homo sapien
ctgtgaccgaggtcctccgcaatca

SEQ ID NO: 1726260 - DNA, 25 bp, Homo sapien
tgccctgtgaccgaggtcctccgca

SEQ ID NO: 1726261 - DNA, 25 bp, Homo sapien
tgtgaccgaggtcctccgcaatcat

SEQ ID NO: 1726262 - DNA, 25 bp, Homo sapien
ccctgtgaccgaggtcctccgcaat

SEQ ID NO: 1726263 - DNA, 25 bp, Homo sapien
tttagctattgcaggtctgatgaag

SEQ ID NO: 1726264 - DNA, 25 bp, Homo sapien
ttttagctattgcaggtctgatgaa

SEQ ID NO: 1726265 - DNA, 25 bp, Homo sapien
tagatcctacgacatttctttgttc

SEQ ID NO: 1726266 - DNA, 25 bp, Homo sapien
agatcctacgacatttctttgttcc

SEQ ID NO: 1726267 - DNA, 25 bp, Homo sapien
ttagatcctacgacatttctttgtt

SEQ ID NO: 1726268 - DNA, 25 bp, Homo sapien
cttggggcagctgtggtcctcctcc

SEQ ID NO: 1726269 - DNA, 25 bp, Homo sapien
gggcttggggcagctgtggtcctcc

SEQ ID NO: 1726270 - DNA, 25 bp, Homo sapien
cttcttatctgcagccccaagatgg

SEQ ID NO: 1726271 - DNA, 25 bp, Homo sapien
ttcttatctgcagccccaagatggg

SEQ ID NO: 1726272 - DNA, 25 bp, Homo sapien
atcagcatgggctattttgagcatt

SEQ ID NO: 1726273 - DNA, 25 bp, Homo sapien
gacagatgcactaggtgggagatat

SEQ ID NO: 1726274 - DNA, 25 bp, Homo sapien
ggtaagtttcaaggtgacgatgtga

SEQ ID NO: 1726275 - DNA, 25 bp, Homo sapien
tgccttcgatgactgggacagatgc

SEQ ID NO: 1726276 - DNA, 25 bp, Homo sapien
ggtctgttcaatgcctccctgaggg

SEQ ID NO: 1726277 - DNA, 25 bp, Homo sapien
taaggttcagtgattgcccagagtg

SEQ ID NO: 1726278 - DNA, 25 bp, Homo sapien
cccagagtggtatgagctgcaggaa

SEQ ID NO: 1726279 - DNA, 25 bp, Homo sapien
tgagggacgagagcacactgtcagt

SEQ ID NO: 1726280 - DNA, 25 bp, Homo sapien
caaacgtgaaccaaagccaagtgct

SEQ ID NO: 1726281 - DNA, 25 bp, Homo sapien
ctactctctgattgccaaacgtgaa

SEQ ID NO: 1726282 - DNA, 25 bp, Homo sapien
tgattgccaaacgtgaaccaaagcc

SEQ ID NO: 1726283 - DNA, 25 bp, Homo sapien
tgaaccaaagccaagtgcttctttg

SEQ ID NO: 1726284 - DNA, 25 bp, Homo sapien
atatatctcagctaaacatccccag

SEQ ID NO: 1726285 - DNA, 25 bp, Homo sapien
atcatatatctcagctaaacatccc

SEQ ID NO: 1726286 - DNA, 25 bp, Homo sapien
tgaatcatatatctcagctaaacat

SEQ ID NO: 1726287 - DNA, 25 bp, Homo sapien
catatatctcagctaaacatcccca

SEQ ID NO: 1726288 - DNA, 25 bp, Homo sapien
ctttgaacattcggcatatctttgc

SEQ ID NO: 1726289 - DNA, 25 bp, Homo sapien
gaacattcggcatatctttgcaaat

SEQ ID NO: 1726290 - DNA, 25 bp, Homo sapien
tgaacattcggcatatctttgcaaa

SEQ ID NO: 1726291 - DNA, 25 bp, Homo sapien
ttgaacattcggcatatctttgcaa

SEQ ID NO: 1726292 - DNA, 25 bp, Homo sapien
gcccatgatgctgtcccagagactg

SEQ ID NO: 1726293 - DNA, 25 bp, Homo sapien
tccttgaattgccagagcttctcct

SEQ ID NO: 1726294 - DNA, 25 bp, Homo sapien
cagagactgcaagtcaaactttcag

SEQ ID NO: 1726295 - DNA, 25 bp, Homo sapien
tgaaacccagggtgctcaaggccct

SEQ ID NO: 1726296 - DNA, 25 bp, Homo sapien
caagaagcttcagggtacatatgac

SEQ ID NO: 1726297 - DNA, 25 bp, Homo sapien
gcccagagaggtgcatgaaatcaat

SEQ ID NO: 1726298 - DNA, 25 bp, Homo sapien
tcttgactctaaccagggccgtggc

SEQ ID NO: 1726299 - DNA, 25 bp, Homo sapien
gaggagtcacttctgcaaacaacag

SEQ ID NO: 1726300 - DNA, 25 bp, Homo sapien
caccccaaggtagtgcctgagtggc

SEQ ID NO: 1726301 - DNA, 25 bp, Homo sapien
cccaccccaaggtagtgcctgagtg

SEQ ID NO: 1726302 - DNA, 25 bp, Homo sapien
ccaccccaaggtagtgcctgagtgg

SEQ ID NO: 1726303 - DNA, 25 bp, Homo sapien
agattgaggctagaccccttcccca

SEQ ID NO: 1726304 - DNA, 25 bp, Homo sapien
cacctaagaccatctgatcttggac

SEQ ID NO: 1726305 - DNA, 25 bp, Homo sapien
ctcagttatggtattactgggtcaa

SEQ ID NO: 1726306 - DNA, 25 bp, Homo sapien
aatcaccacaccaatttctacagtg

SEQ ID NO: 1726307 - DNA, 25 bp, Homo sapien
tacaaaaacaggagcatagatcaat

SEQ ID NO: 1726308 - DNA, 25 bp, Homo sapien
gcccaggccatatgcaagatcaaca

SEQ ID NO: 1726309 - DNA, 25 bp, Homo sapien
tgatgacccaacgagatttctagaa

SEQ ID NO: 1726310 - DNA, 25 bp, Homo sapien
tttctagaaccagacaatcttgggc

SEQ ID NO: 1726311 - DNA, 25 bp, Homo sapien
ggagattataccacttccatgtgag

SEQ ID NO: 1726312 - DNA, 25 bp, Homo sapien
tggctgcaactgtaagaacccttgt

SEQ ID NO: 1726313 - DNA, 25 bp, Homo sapien
cagtggcgccctttccatagagaat

SEQ ID NO: 1726314 - DNA, 25 bp, Homo sapien
taacagagaatatggccagtgcttg

SEQ ID NO: 1726315 - DNA, 25 bp, Homo sapien
gtcaaaatcaagtgccagtggcgcc

SEQ ID NO: 1726316 - DNA, 25 bp, Homo sapien
tcctggctctggtacatattagctt

SEQ ID NO: 1726317 - DNA, 25 bp, Homo sapien
tctacaagtggtagttacgaccatg

SEQ ID NO: 1726318 - DNA, 25 bp, Homo sapien
cacagacttcaattcaggtttcaga

SEQ ID NO: 1726319 - DNA, 25 bp, Homo sapien
gtatgtacttccctgaaaggccatg

SEQ ID NO: 1726320 - DNA, 25 bp, Homo sapien
gttgctgcaaccaaagctttccctc

SEQ ID NO: 1726321 - DNA, 25 bp, Homo sapien
ttttgacttaaaattccagacagtc

SEQ ID NO: 1726322 - DNA, 25 bp, Homo sapien
cagttgctgcaaccaaagctttccc

SEQ ID NO: 1726323 - DNA, 25 bp, Homo sapien
agttgctgcaaccaaagctttccct

SEQ ID NO: 1726324 - DNA, 25 bp, Homo sapien
ccagcttgttctggaataaaacgcc

SEQ ID NO: 1726325 - DNA, 25 bp, Homo sapien
cctacttgttcataaattgcttgaa

SEQ ID NO: 1726326 - DNA, 25 bp, Homo sapien
gaaatcactcagatatcctacttgt

SEQ ID NO: 1726327 - DNA, 25 bp, Homo sapien
cgcctacaaaattgtcatcaacagt

SEQ ID NO: 1726328 - DNA, 25 bp, Homo sapien
ttgagcacctttctagctgcttttg

SEQ ID NO: 1726329 - DNA, 25 bp, Homo sapien
caaaggtgttcttctttatgcctcc

SEQ ID NO: 1726330 - DNA, 25 bp, Homo sapien
ttccttgaaccctcttagagacttg

SEQ ID NO: 1726331 - DNA, 25 bp, Homo sapien
gagacaaaggtgttcttctttatgc

SEQ ID NO: 1726332 - DNA, 25 bp, Homo sapien
gaagcggtatgtgtctaccttttta

SEQ ID NO: 1726333 - DNA, 25 bp, Homo sapien
tccctggatagcctggatgacaccg

SEQ ID NO: 1726334 - DNA, 25 bp, Homo sapien
gatgacaccggtaatggttcctaga

SEQ ID NO: 1726335 - DNA, 25 bp, Homo sapien
ggttcctagatgataatcaagacag

SEQ ID NO: 1726336 - DNA, 25 bp, Homo sapien
ggtaagtaacaaaggagaaccatca

SEQ ID NO: 1726337 - DNA, 25 bp, Homo sapien
gtaagtaacaaaggagaaccatcag

SEQ ID NO: 1726338 - DNA, 25 bp, Homo sapien
tttctcgaatttcaacagttcgagc

SEQ ID NO: 1726339 - DNA, 25 bp, Homo sapien
caacagttcgagctcagtttttcct

SEQ ID NO: 1726340 - DNA, 25 bp, Homo sapien
agtttttcctctagcagtaactatt

SEQ ID NO: 1726341 - DNA, 25 bp, Homo sapien
cacagcttggataaacagtttgatt

SEQ ID NO: 1726342 - DNA, 25 bp, Homo sapien
catagacttgtcatctcttagcagc

SEQ ID NO: 1726343 - DNA, 25 bp, Homo sapien
tgccatagacttgtcatctcttagc

SEQ ID NO: 1726344 - DNA, 25 bp, Homo sapien
gccatagacttgtcatctcttagca

SEQ ID NO: 1726345 - DNA, 25 bp, Homo sapien
ctatgccatagacttgtcatctctt

SEQ ID NO: 1726346 - DNA, 25 bp, Homo sapien
gtttctggcttggatcatatttcct

SEQ ID NO: 1726347 - DNA, 25 bp, Homo sapien
acaaaacatcggcagtttctggctt

SEQ ID NO: 1726348 - DNA, 25 bp, Homo sapien
tgaagaagctctgcaaagtgacaat

SEQ ID NO: 1726349 - DNA, 25 bp, Homo sapien
agtgacaataggaacaaaacatcgg

SEQ ID NO: 1726350 - DNA, 25 bp, Homo sapien
gcagaggcaaacatcctatttgggt

SEQ ID NO: 1726351 - DNA, 25 bp, Homo sapien
gaatacctacatacctgtgcccaca

SEQ ID NO: 1726352 - DNA, 25 bp, Homo sapien
aagacaactatttactggaagcctg

SEQ ID NO: 1726353 - DNA, 25 bp, Homo sapien
tggtcaaaagtcaagtgaaagtcgg

SEQ ID NO: 1726354 - DNA, 25 bp, Homo sapien
gctcaccacaacttcacctcccagg

SEQ ID NO: 1726355 - DNA, 25 bp, Homo sapien
attttgtatttttactagagatggg

SEQ ID NO: 1726356 - DNA, 25 bp, Homo sapien
ctcaccacaacttcacctcccaggt

SEQ ID NO: 1726357 - DNA, 25 bp, Homo sapien
aattttgtatttttactagagatgg

SEQ ID NO: 1726358 - DNA, 25 bp, Homo sapien
tgactgtagtcagccatgcccatgg

SEQ ID NO: 1726359 - DNA, 25 bp, Homo sapien
acataccgccatgttgaccgtgcca

SEQ ID NO: 1726360 - DNA, 25 bp, Homo sapien
gctcagccagaacagaaggcctcga

SEQ ID NO: 1726361 - DNA, 25 bp, Homo sapien
cattgtaccaacacaagcctgcgcg

SEQ ID NO: 1726362 - DNA, 25 bp, Homo sapien
ggcgtcagatattctggctcccact

SEQ ID NO: 1726363 - DNA, 25 bp, Homo sapien
tggtgagcctccgatctagtttatc

SEQ ID NO: 1726364 - DNA, 25 bp, Homo sapien
gtttatccaactctgtacaagtgaa

SEQ ID NO: 1726365 - DNA, 25 bp, Homo sapien
tcttgaccaggtaggactcggcgtc

SEQ ID NO: 1726366 - DNA, 25 bp, Homo sapien
gactagatcagggaaactcactgtg

SEQ ID NO: 1726367 - DNA, 25 bp, Homo sapien
ccgtagaatcattaatatctcatgg

SEQ ID NO: 1726368 - DNA, 25 bp, Homo sapien
tgcttacttaaattctgccctagtt

SEQ ID NO: 1726369 - DNA, 25 bp, Homo sapien
cactcttttaagaccgtagaatcat

SEQ ID NO: 1726370 - DNA, 25 bp, Homo sapien
tgcgagtccccggttcagccatggg

SEQ ID NO: 1726371 - DNA, 25 bp, Homo sapien
agccatggggacctctccgagcagc

SEQ ID NO: 1726372 - DNA, 25 bp, Homo sapien
gagccacagccacgatgatcgcggg

SEQ ID NO: 1726373 - DNA, 25 bp, Homo sapien
tgggcagaagcagccgccgattcca

SEQ ID NO: 1726374 - DNA, 25 bp, Homo sapien
catcgtgtccgaaacaatggaaagg

SEQ ID NO: 1726375 - DNA, 25 bp, Homo sapien
caggagtgagatgctttctcagcgc

SEQ ID NO: 1726376 - DNA, 25 bp, Homo sapien
ggcgtatgtagctgaaataatttag

SEQ ID NO: 1726377 - DNA, 25 bp, Homo sapien
taagtaaagttagatcaggagtgag

SEQ ID NO: 1726378 - DNA, 25 bp, Homo sapien
gcaaagtttgagaagcaacacacag

SEQ ID NO: 1726379 - DNA, 25 bp, Homo sapien
agagtctctagaggtgggacccaag

SEQ ID NO: 1726380 - DNA, 25 bp, Homo sapien
tccaggtgattccacagggcagcaa

SEQ ID NO: 1726381 - DNA, 25 bp, Homo sapien
acaggtctcctttttcgtcacgcag

SEQ ID NO: 1726382 - DNA, 25 bp, Homo sapien
cttgggggaagctatcacttctcaa

SEQ ID NO: 1726383 - DNA, 25 bp, Homo sapien
tcacagtctttgtataggacaaagt

SEQ ID NO: 1726384 - DNA, 25 bp, Homo sapien
agttaccttcccatgagagttgaaa

SEQ ID NO: 1726385 - DNA, 25 bp, Homo sapien
gggggaagctatcacttctcaagat

SEQ ID NO: 1726386 - DNA, 25 bp, Homo sapien
tgggttttgtggccgctggaacact

SEQ ID NO: 1726387 - DNA, 25 bp, Homo sapien
ccttcccgtctgctcgagggttaag

SEQ ID NO: 1726388 - DNA, 25 bp, Homo sapien
tcctttcagtctcggcttttactgc

SEQ ID NO: 1726389 - DNA, 25 bp, Homo sapien
taagctttgccctattcctgctcct

SEQ ID NO: 1726390 - DNA, 25 bp, Homo sapien
aagttctctgtgtaggtaggagaat

SEQ ID NO: 1726391 - DNA, 25 bp, Homo sapien
agttctctgtgtaggtaggagaatc

SEQ ID NO: 1726392 - DNA, 25 bp, Homo sapien
gaagccttttccaatatggtgtctt

SEQ ID NO: 1726393 - DNA, 25 bp, Homo sapien
tctttctcagaggaaccctcacaac

SEQ ID NO: 1726394 - DNA, 25 bp, Homo sapien
tccctctgtgctctttttagggcac

SEQ ID NO: 1726395 - DNA, 25 bp, Homo sapien
cagttctttcctgggtgtaagtgaa

SEQ ID NO: 1726396 - DNA, 25 bp, Homo sapien
ccagtgatcacaaggatattggaac

SEQ ID NO: 1726397 - DNA, 25 bp, Homo sapien
ggcatcatcaaaaatagagagctcc

SEQ ID NO: 1726398 - DNA, 25 bp, Homo sapien
cagtggttgtcccagacttgttctt

SEQ ID NO: 1726399 - DNA, 25 bp, Homo sapien
tggaacctaacttgactctccattt

SEQ ID NO: 1726400 - DNA, 25 bp, Homo sapien
cttttcaaagttggtgatcggttgg

SEQ ID NO: 1726401 - DNA, 25 bp, Homo sapien
ccatggttggtcctgtctcttctgc

SEQ ID NO: 1726402 - DNA, 25 bp, Homo sapien
tgctgccctttctcaggctctactc

SEQ ID NO: 1726403 - DNA, 25 bp, Homo sapien
ctcccctcttttcaaagttggtgat

SEQ ID NO: 1726404 - DNA, 25 bp, Homo sapien
ggctgctcacgatattaccagctaa

SEQ ID NO: 1726405 - DNA, 25 bp, Homo sapien
gaccgcttctgcatgggcaacacaa

SEQ ID NO: 1726406 - DNA, 25 bp, Homo sapien
tacagaatttttggcatatgcctcc

SEQ ID NO: 1726407 - DNA, 25 bp, Homo sapien
aaaatagccaatcaacccttcaaat

SEQ ID NO: 1726408 - DNA, 25 bp, Homo sapien
cctctggggcatctgacacttatgg

SEQ ID NO: 1726409 - DNA, 25 bp, Homo sapien
gtcttcctttgaatagttaggaaca

SEQ ID NO: 1726410 - DNA, 25 bp, Homo sapien
ggcatctgacacttatgggtccagg

SEQ ID NO: 1726411 - DNA, 25 bp, Homo sapien
cctttgaatagttaggaacataaag

SEQ ID NO: 1726412 - DNA, 25 bp, Homo sapien
aacacttccttgtttgtgttcctct

SEQ ID NO: 1726413 - DNA, 25 bp, Homo sapien
catccttcttggggcacacaagcca

SEQ ID NO: 1726414 - DNA, 25 bp, Homo sapien
atccttcttggggcacacaagccat

SEQ ID NO: 1726415 - DNA, 25 bp, Homo sapien
tagatttagagtgctttccctgaga

SEQ ID NO: 1726416 - DNA, 25 bp, Homo sapien
tgatgagccttgttcccagtttggt

SEQ ID NO: 1726417 - DNA, 25 bp, Homo sapien
gggtttactccagtgcaccatagca

SEQ ID NO: 1726418 - DNA, 25 bp, Homo sapien
caagaaaagcctgagtgtcgcaagt

SEQ ID NO: 1726419 - DNA, 25 bp, Homo sapien
gaaaatggtctgttggcatgctaag

SEQ ID NO: 1726420 - DNA, 25 bp, Homo sapien
gaaatttccaccacgtagacaatgg

SEQ ID NO: 1726421 - DNA, 25 bp, Homo sapien
gtttagattctaaggtgctgacagt

SEQ ID NO: 1726422 - DNA, 25 bp, Homo sapien
tccagtctggcttacagctgaagaa

SEQ ID NO: 1726423 - DNA, 25 bp, Homo sapien
tctagcgtcaatgtgaaggagggca

SEQ ID NO: 1726424 - DNA, 25 bp, Homo sapien
ttaagtagacccaattccagggcag

SEQ ID NO: 1726425 - DNA, 25 bp, Homo sapien
cttgatcgagagaaaaataggcatc

SEQ ID NO: 1726426 - DNA, 25 bp, Homo sapien
gttgaacgccaactattgtgcctag

SEQ ID NO: 1726427 - DNA, 25 bp, Homo sapien
cggagttactttctgcagcgaagca

SEQ ID NO: 1726428 - DNA, 25 bp, Homo sapien
tggtttgtcgcctcagatggatcaa

SEQ ID NO: 1726429 - DNA, 25 bp, Homo sapien
tccaggtgcagcgagcggatgagga

SEQ ID NO: 1726430 - DNA, 25 bp, Homo sapien
ctcggaacagcttgggcgggcgttt

SEQ ID NO: 1726431 - DNA, 25 bp, Homo sapien
tcttccttagcactcgcagttagaa

SEQ ID NO: 1726432 - DNA, 25 bp, Homo sapien
gcagttagaaaaggcgacaccgtag

SEQ ID NO: 1726433 - DNA, 25 bp, Homo sapien
ggcagaggcaaaggcggcgacagct

SEQ ID NO: 1726434 - DNA, 25 bp, Homo sapien
aaaggcgacaccgtagactaaggtg

SEQ ID NO: 1726435 - DNA, 25 bp, Homo sapien
tcctaccagtctcttcagcgcggcc

SEQ ID NO: 1726436 - DNA, 25 bp, Homo sapien
ctcctaccagtctcttcagcgcggc

SEQ ID NO: 1726437 - DNA, 25 bp, Homo sapien
tcaggcggggcgaagagtcgcctcc

SEQ ID NO: 1726438 - DNA, 25 bp, Homo sapien
caggcggggcgaagagtcgcctcca

SEQ ID NO: 1726439 - DNA, 25 bp, Homo sapien
ggggcgaagagtcgcctccatccgc

SEQ ID NO: 1726440 - DNA, 25 bp, Homo sapien
gcggggcgaagagtcgcctccatcc

SEQ ID NO: 1726441 - DNA, 25 bp, Homo sapien
gcgctccgcgctagcccctcctgag

SEQ ID NO: 1726442 - DNA, 25 bp, Homo sapien
ccgcgctccgcgctagcccctcctg

SEQ ID NO: 1726443 - DNA, 25 bp, Homo sapien
tccagtggtggctcgcgcggccgct

SEQ ID NO: 1726444 - DNA, 25 bp, Homo sapien
ctcctccagtggtggctcgcgcggc

SEQ ID NO: 1726445 - DNA, 25 bp, Homo sapien
gcggggagaagccgacgtccgctcc

SEQ ID NO: 1726446 - DNA, 25 bp, Homo sapien
cgcggggagaagccgacgtccgctc

SEQ ID NO: 1726447 - DNA, 25 bp, Homo sapien
agaaggccgagaaagggcacagcct

SEQ ID NO: 1726448 - DNA, 25 bp, Homo sapien
ctggtgaacaggaaaagaggcggag

SEQ ID NO: 1726449 - DNA, 25 bp, Homo sapien
gcgagggaaagcacccgcgagctct

SEQ ID NO: 1726450 - DNA, 25 bp, Homo sapien
cagtttctccgtgagaagagcaagg

SEQ ID NO: 1726451 - DNA, 25 bp, Homo sapien
gcaaggaagtctaactccaaacagg

SEQ ID NO: 1726452 - DNA, 25 bp, Homo sapien
tatcaagtttttcgatcgccctccc

SEQ ID NO: 1726453 - DNA, 25 bp, Homo sapien
taaacgtattcaaagcctcgcagaa

SEQ ID NO: 1726454 - DNA, 25 bp, Homo sapien
cacacttgcctaggtagaacccgag

SEQ ID NO: 1726455 - DNA, 25 bp, Homo sapien
tcctgcaaatacccaccttgtattt

SEQ ID NO: 1726456 - DNA, 25 bp, Homo sapien
gcaaatacccaccttgtatttctcc

SEQ ID NO: 1726457 - DNA, 25 bp, Homo sapien
ccaataagaaatctggaccctgtct

SEQ ID NO: 1726458 - DNA, 25 bp, Homo sapien
tgcaaatacccaccttgtatttctc

SEQ ID NO: 1726459 - DNA, 25 bp, Homo sapien
ttattcctatcacataagccatccc

SEQ ID NO: 1726460 - DNA, 25 bp, Homo sapien
tatcacataagccatcccaacacat

SEQ ID NO: 1726461 - DNA, 25 bp, Homo sapien
attcctatcacataagccatcccaa

SEQ ID NO: 1726462 - DNA, 25 bp, Homo sapien
tcctatcacataagccatcccaaca

SEQ ID NO: 1726463 - DNA, 25 bp, Homo sapien
cagagttcccagttagctttttatt

SEQ ID NO: 1726464 - DNA, 25 bp, Homo sapien
acagagttcccagttagctttttat

SEQ ID NO: 1726465 - DNA, 25 bp, Homo sapien
catagtcatactccacaatatagtc

SEQ ID NO: 1726466 - DNA, 25 bp, Homo sapien
caactcgaatagttaattcatcatc

SEQ ID NO: 1726467 - DNA, 25 bp, Homo sapien
ctccaactcgaatagttaattcatc

SEQ ID NO: 1726468 - DNA, 25 bp, Homo sapien
tagtcatactccacaatatagtcaa

SEQ ID NO: 1726469 - DNA, 25 bp, Homo sapien
caggatgaacgtgcaccttaatgtc

SEQ ID NO: 1726470 - DNA, 25 bp, Homo sapien
atgtcccaataggaagcttattttc

SEQ ID NO: 1726471 - DNA, 25 bp, Homo sapien
tgttagccaggatgaacgtgcacct

SEQ ID NO: 1726472 - DNA, 25 bp, Homo sapien
gcaccttaatgtcccaataggaagc

SEQ ID NO: 1726473 - DNA, 25 bp, Homo sapien
tccagcccaatttgactatcattgt

SEQ ID NO: 1726474 - DNA, 25 bp, Homo sapien
cagcccaatttgactatcattgttc

SEQ ID NO: 1726475 - DNA, 25 bp, Homo sapien
cttccagcccaatttgactatcatt

SEQ ID NO: 1726476 - DNA, 25 bp, Homo sapien
agcccaatttgactatcattgttct

SEQ ID NO: 1726477 - DNA, 25 bp, Homo sapien
acagcaggcaagtcgtgctgggtcc

SEQ ID NO: 1726478 - DNA, 25 bp, Homo sapien
ctttctcaaggatgctagactcctt

SEQ ID NO: 1726479 - DNA, 25 bp, Homo sapien
aggatgctagactccttgaggccac

SEQ ID NO: 1726480 - DNA, 25 bp, Homo sapien
agcaggcaagtcgtgctgggtccaa

SEQ ID NO: 1726481 - DNA, 25 bp, Homo sapien
ttaataacacccatcaacctcacag

SEQ ID NO: 1726482 - DNA, 25 bp, Homo sapien
tagttacaacctcaacatgccaaag

SEQ ID NO: 1726483 - DNA, 25 bp, Homo sapien
tcctgtctgcctcataagctaccta

SEQ ID NO: 1726484 - DNA, 25 bp, Homo sapien
tgttgcttctagtacaggagaccaa

SEQ ID NO: 1726485 - DNA, 25 bp, Homo sapien
tactctccacagtataattctccct

SEQ ID NO: 1726486 - DNA, 25 bp, Homo sapien
tgttttcacactcccttttactctc

SEQ ID NO: 1726487 - DNA, 25 bp, Homo sapien
aagagaagtgtaccttgttttcaca

SEQ ID NO: 1726488 - DNA, 25 bp, Homo sapien
tttgctcctattggaatcactttgg

SEQ ID NO: 1726489 - DNA, 25 bp, Homo sapien
ctggcacaagcagtatctagtactt

SEQ ID NO: 1726490 - DNA, 25 bp, Homo sapien
acaaatgtaggtaaagacgacgact

SEQ ID NO: 1726491 - DNA, 25 bp, Homo sapien
gaagctcaaacagccattagttgtg

SEQ ID NO: 1726492 - DNA, 25 bp, Homo sapien
tacatgctacccagaagcttcttag

SEQ ID NO: 1726493 - DNA, 25 bp, Homo sapien
gcaaaataactattatgtactataa

SEQ ID NO: 1726494 - DNA, 25 bp, Homo sapien
tacttgagaactgataatgtgctag

SEQ ID NO: 1726495 - DNA, 25 bp, Homo sapien
gagtactggtaacctatcatttcca

SEQ ID NO: 1726496 - DNA, 25 bp, Homo sapien
taaaacatacttcaaatacttgaga

SEQ ID NO: 1726497 - DNA, 25 bp, Homo sapien
tccagctggaagtccataggtgctt

SEQ ID NO: 1726498 - DNA, 25 bp, Homo sapien
ttgatgggcaaactgtcatccttga

SEQ ID NO: 1726499 - DNA, 25 bp, Homo sapien
tacaagacttgctacattcccatgc

SEQ ID NO: 1726500 - DNA, 25 bp, Homo sapien
ccataggtgcttattcgttgtacaa

SEQ ID NO: 1726501 - DNA, 25 bp, Homo sapien
aggcagtagtaagaactctgttcac

SEQ ID NO: 1726502 - DNA, 25 bp, Homo sapien
acccaggcagtagtaagaactctgt

SEQ ID NO: 1726503 - DNA, 25 bp, Homo sapien
caggcagtagtaagaactctgttca

SEQ ID NO: 1726504 - DNA, 25 bp, Homo sapien
ccaggcagtagtaagaactctgttc

SEQ ID NO: 1726505 - DNA, 25 bp, Homo sapien
cagatgtggcagatattctagagca

SEQ ID NO: 1726506 - DNA, 25 bp, Homo sapien
taataccctcctgccctttcataag

SEQ ID NO: 1726507 - DNA, 25 bp, Homo sapien
gaaaggacaggtttgaactggagca

SEQ ID NO: 1726508 - DNA, 25 bp, Homo sapien
tgagtaagatacaagaaggtgggac

SEQ ID NO: 1726509 - DNA, 25 bp, Homo sapien
cctaatcaagtctgggaatactact

SEQ ID NO: 1726510 - DNA, 25 bp, Homo sapien
gaacgtatgagcattctaaacagct

SEQ ID NO: 1726511 - DNA, 25 bp, Homo sapien
gatcatttataaccattcgcgcttg

SEQ ID NO: 1726512 - DNA, 25 bp, Homo sapien
taatcacaatcagccctggttagct

SEQ ID NO: 1726513 - DNA, 25 bp, Homo sapien
caaaaagaactttacactgacgctt

SEQ ID NO: 1726514 - DNA, 25 bp, Homo sapien
actttacactgacgcttcttggtct

SEQ ID NO: 1726515 - DNA, 25 bp, Homo sapien
tttgtggaatgtactcaaaaagaac

SEQ ID NO: 1726516 - DNA, 25 bp, Homo sapien
aataatatctcccactttcagctcc

SEQ ID NO: 1726517 - DNA, 25 bp, Homo sapien
cattactgttttacctgtaacacat

SEQ ID NO: 1726518 - DNA, 25 bp, Homo sapien
attactgttttacctgtaacacatt

SEQ ID NO: 1726519 - DNA, 25 bp, Homo sapien
cagtactggcttcgtagtagtgaat

SEQ ID NO: 1726520 - DNA, 25 bp, Homo sapien
tcttgcagtactggcttcgtagtag

SEQ ID NO: 1726521 - DNA, 25 bp, Homo sapien
tgacaatgtgcccaggtgataatct

SEQ ID NO: 1726522 - DNA, 25 bp, Homo sapien
tgatagactgtcctttataggttac

SEQ ID NO: 1726523 - DNA, 25 bp, Homo sapien
gtctttgatgtaggcatcaactttt

SEQ ID NO: 1726524 - DNA, 25 bp, Homo sapien
agaggttttgaaaggtgtgtcacta

SEQ ID NO: 1726525 - DNA, 25 bp, Homo sapien
ttttgaaaggtgtgtcactattgtc

SEQ ID NO: 1726526 - DNA, 25 bp, Homo sapien
agtctttgatgtaggcatcaacttt

SEQ ID NO: 1726527 - DNA, 25 bp, Homo sapien
tgaaaaagttcacaattcaaaagca

SEQ ID NO: 1726528 - DNA, 25 bp, Homo sapien
gaaaaagttcacaattcaaaagcaa

SEQ ID NO: 1726529 - DNA, 25 bp, Homo sapien
ctgaaaaagttcacaattcaaaagc

SEQ ID NO: 1726530 - DNA, 25 bp, Homo sapien
atcgtcctgggcttcatgagtttca

SEQ ID NO: 1726531 - DNA, 25 bp, Homo sapien
gttattcagggttccactccaccag

SEQ ID NO: 1726532 - DNA, 25 bp, Homo sapien
atctgttacctctaattctttcaca

SEQ ID NO: 1726533 - DNA, 25 bp, Homo sapien
tctttcacaaaatttgagggaaaca

SEQ ID NO: 1726534 - DNA, 25 bp, Homo sapien
tcttcaacacatccaagcttttgct

SEQ ID NO: 1726535 - DNA, 25 bp, Homo sapien
catccaagcttttgcttatgcaaga

SEQ ID NO: 1726536 - DNA, 25 bp, Homo sapien
cacatccaagcttttgcttatgcaa

SEQ ID NO: 1726537 - DNA, 25 bp, Homo sapien
aacacatccaagcttttgcttatgc

SEQ ID NO: 1726538 - DNA, 25 bp, Homo sapien
ctgtggatgagggtggtcttctgaa

SEQ ID NO: 1726539 - DNA, 25 bp, Homo sapien
tgtggatgagggtggtcttctgaac

SEQ ID NO: 1726540 - DNA, 25 bp, Homo sapien
ctactgtggatgagggtggtcttct

SEQ ID NO: 1726541 - DNA, 25 bp, Homo sapien
tactgtggatgagggtggtcttctg

SEQ ID NO: 1726542 - DNA, 25 bp, Homo sapien
gcacacaaacatgagcttgccactt

SEQ ID NO: 1726543 - DNA, 25 bp, Homo sapien
tgcaagcacacaaacatgagcttgc

SEQ ID NO: 1726544 - DNA, 25 bp, Homo sapien
acacaaacatgagcttgccacttgt

SEQ ID NO: 1726545 - DNA, 25 bp, Homo sapien
aagcacacaaacatgagcttgccac

SEQ ID NO: 1726546 - DNA, 25 bp, Homo sapien
caattttacagaggcctacccattc

SEQ ID NO: 1726547 - DNA, 25 bp, Homo sapien
tgtcaattttacagaggcctaccca

SEQ ID NO: 1726548 - DNA, 25 bp, Homo sapien
gtcaattttacagaggcctacccat

SEQ ID NO: 1726549 - DNA, 25 bp, Homo sapien
ctgtcaattttacagaggcctaccc

SEQ ID NO: 1726550 - DNA, 25 bp, Homo sapien
gacatactgggcgtaagattctttg

SEQ ID NO: 1726551 - DNA, 25 bp, Homo sapien
actgggcgtaagattctttgccata

SEQ ID NO: 1726552 - DNA, 25 bp, Homo sapien
cgatgacatactgggcgtaagattc

SEQ ID NO: 1726553 - DNA, 25 bp, Homo sapien
actcttcgatgacatactgggcgta

SEQ ID NO: 1726554 - DNA, 25 bp, Homo sapien
ctgccacaaacttgcttagaaattt

SEQ ID NO: 1726555 - DNA, 25 bp, Homo sapien
attctattgtgctgataaccaccat

SEQ ID NO: 1726556 - DNA, 25 bp, Homo sapien
aaattctattgtgctgataaccacc

SEQ ID NO: 1726557 - DNA, 25 bp, Homo sapien
taaattctattgtgctgataaccac

SEQ ID NO: 1726558 - DNA, 25 bp, Homo sapien
gataaattctattgtgctgataacc

SEQ ID NO: 1726559 - DNA, 25 bp, Homo sapien
caataatttgtttttgaagaatgac

SEQ ID NO: 1726560 - DNA, 25 bp, Homo sapien
aacaataatttgtttttgaagaatg

SEQ ID NO: 1726561 - DNA, 25 bp, Homo sapien
ataatttgtttttgaagaatgacac

SEQ ID NO: 1726562 - DNA, 25 bp, Homo sapien
ctgaaacaataatttgtttttgaag

SEQ ID NO: 1726563 - DNA, 25 bp, Homo sapien
ttaaaaatgtctccaaatccaattc

SEQ ID NO: 1726564 - DNA, 25 bp, Homo sapien
tcttgtccgaagtttcacagagcct

SEQ ID NO: 1726565 - DNA, 25 bp, Homo sapien
ggtataggtgaagtaggcccagcca

SEQ ID NO: 1726566 - DNA, 25 bp, Homo sapien
tggctgtgtaactgatccagatgca

SEQ ID NO: 1726567 - DNA, 25 bp, Homo sapien
gactagtagcctcataactatctgc

SEQ ID NO: 1726568 - DNA, 25 bp, Homo sapien
tgggcactattcaaacaataataca

SEQ ID NO: 1726569 - DNA, 25 bp, Homo sapien
taaatagtgcaaataggactagtag

SEQ ID NO: 1726570 - DNA, 25 bp, Homo sapien
gcattaagtgggcactattcaaaca

SEQ ID NO: 1726571 - DNA, 25 bp, Homo sapien
gtcccagtgactgtaggattaaggg

SEQ ID NO: 1726572 - DNA, 25 bp, Homo sapien
cttcggtatctgtttttgttatctc

SEQ ID NO: 1726573 - DNA, 25 bp, Homo sapien
tctccacactctgagttttgggtcc

SEQ ID NO: 1726574 - DNA, 25 bp, Homo sapien
tgttatctccacactctgagttttg

SEQ ID NO: 1726575 - DNA, 25 bp, Homo sapien
tacttatcaaatggattatctcccc

SEQ ID NO: 1726576 - DNA, 25 bp, Homo sapien
cttacttatcaaatggattatctcc

SEQ ID NO: 1726577 - DNA, 25 bp, Homo sapien
catcttcattagtaccttcataggc

SEQ ID NO: 1726578 - DNA, 25 bp, Homo sapien
tagtaccttcataggcaaataatgt

SEQ ID NO: 1726579 - DNA, 25 bp, Homo sapien
tgacatcttataacaaagtcagtgt

SEQ ID NO: 1726580 - DNA, 25 bp, Homo sapien
caccacccttgcatgaaaaattagg

SEQ ID NO: 1726581 - DNA, 25 bp, Homo sapien
taaatgattttagctgctattgcca

SEQ ID NO: 1726582 - DNA, 25 bp, Homo sapien
aaaaattaggtgtaatcagtgcaaa

SEQ ID NO: 1726583 - DNA, 25 bp, Homo sapien
tctaaactgtatccttcttaacact

SEQ ID NO: 1726584 - DNA, 25 bp, Homo sapien
aattaacacgatttgaccaggcaca

SEQ ID NO: 1726585 - DNA, 25 bp, Homo sapien
aaaattaacacgatttgaccaggca

SEQ ID NO: 1726586 - DNA, 25 bp, Homo sapien
tttctaaactgtatccttcttaaca

SEQ ID NO: 1726587 - DNA, 25 bp, Homo sapien
aattgtctggaaatactccttcttt

SEQ ID NO: 1726588 - DNA, 25 bp, Homo sapien
gtctggaaatactccttctttacca

SEQ ID NO: 1726589 - DNA, 25 bp, Homo sapien
tggaaatactccttctttaccatta

SEQ ID NO: 1726590 - DNA, 25 bp, Homo sapien
taccattaagttcgcccctccacca

SEQ ID NO: 1726591 - DNA, 25 bp, Homo sapien
ctggcagaacaagggagagaccgtt

SEQ ID NO: 1726592 - DNA, 25 bp, Homo sapien
gacagcctaagcttccatagagttg

SEQ ID NO: 1726593 - DNA, 25 bp, Homo sapien
tgcaatctaacaaaacaaaggcctc

SEQ ID NO: 1726594 - DNA, 25 bp, Homo sapien
catggtagcccatcctgttgtgtgc

SEQ ID NO: 1726595 - DNA, 25 bp, Homo sapien
tggagccttagcaggaggtggtggt

SEQ ID NO: 1726596 - DNA, 25 bp, Homo sapien
gagccttagcaggaggtggtggttt

SEQ ID NO: 1726597 - DNA, 25 bp, Homo sapien
ctggagccttagcaggaggtggtgg

SEQ ID NO: 1726598 - DNA, 25 bp, Homo sapien
agccttagcaggaggtggtggtttc

SEQ ID NO: 1726599 - DNA, 25 bp, Homo sapien
tgcagctatcagttcaggctttgga

SEQ ID NO: 1726600 - DNA, 25 bp, Homo sapien
gaaatgaactactccctcccagaaa

SEQ ID NO: 1726601 - DNA, 25 bp, Homo sapien
aactgggtcttcaacattctaagga

SEQ ID NO: 1726602 - DNA, 25 bp, Homo sapien
tcatgcttaagtaggaactgggtct

SEQ ID NO: 1726603 - DNA, 25 bp, Homo sapien
tcagtgtaaataactcagtgtggag

SEQ ID NO: 1726604 - DNA, 25 bp, Homo sapien
ccagaaaaggagctaaagtgagaga

SEQ ID NO: 1726605 - DNA, 25 bp, Homo sapien
tggattagactacaacactggagga

SEQ ID NO: 1726606 - DNA, 25 bp, Homo sapien
ggatacaatactttaggcaagaaac

SEQ ID NO: 1726607 - DNA, 25 bp, Homo sapien
ttagcaaaatacatgtggtaccctg

SEQ ID NO: 1726608 - DNA, 25 bp, Homo sapien
gcaagactgcttagccacagacgag

SEQ ID NO: 1726609 - DNA, 25 bp, Homo sapien
caaatgttaagagaaactagggcaa

SEQ ID NO: 1726610 - DNA, 25 bp, Homo sapien
gaaaattatctagacttaaatccag

SEQ ID NO: 1726611 - DNA, 25 bp, Homo sapien
gaaactcaagtcctatataacattc

SEQ ID NO: 1726612 - DNA, 25 bp, Homo sapien
gctttgggtacactgttccagaaga

SEQ ID NO: 1726613 - DNA, 25 bp, Homo sapien
gaagatctcagtaaattactggctt

SEQ ID NO: 1726614 - DNA, 25 bp, Homo sapien
cagtaaattactggctttggtaggt

SEQ ID NO: 1726615 - DNA, 25 bp, Homo sapien
ttttcaggtcgctttgggtacactg

SEQ ID NO: 1726616 - DNA, 25 bp, Homo sapien
acctggagatttagaaaggcaatag

SEQ ID NO: 1726617 - DNA, 25 bp, Homo sapien
ggtgagtaaatcagtaagctaattt

SEQ ID NO: 1726618 - DNA, 25 bp, Homo sapien
gaaaaaacatacctggagatttaga

SEQ ID NO: 1726619 - DNA, 25 bp, Homo sapien
ggcaatagagccattaaggtcaaag

SEQ ID NO: 1726620 - DNA, 25 bp, Homo sapien
gtgtagaaaattattataacataaa

SEQ ID NO: 1726621 - DNA, 25 bp, Homo sapien
agtgtagaaaattattataacataa

SEQ ID NO: 1726622 - DNA, 25 bp, Homo sapien
aagtgtagaaaattattataacata

SEQ ID NO: 1726623 - DNA, 25 bp, Homo sapien
gggcagctgttcagaatctagcttt

SEQ ID NO: 1726624 - DNA, 25 bp, Homo sapien
tagttttgatactggctcagtttca

SEQ ID NO: 1726625 - DNA, 25 bp, Homo sapien
aagtctactgattttggtctaaggg

SEQ ID NO: 1726626 - DNA, 25 bp, Homo sapien
gttcagaatctagctttagttttga

SEQ ID NO: 1726627 - DNA, 25 bp, Homo sapien
gacactatataggaaaagtttcgaa

SEQ ID NO: 1726628 - DNA, 25 bp, Homo sapien
caagatgaatacaaagcaagatgtg

SEQ ID NO: 1726629 - DNA, 25 bp, Homo sapien
aatatggcagtgtgttgtgacacta

SEQ ID NO: 1726630 - DNA, 25 bp, Homo sapien
ggattccagattttactccttcaat

SEQ ID NO: 1726631 - DNA, 25 bp, Homo sapien
tagaaatatgtggaccacacaagct

SEQ ID NO: 1726632 - DNA, 25 bp, Homo sapien
ttacatgtacaaaagtcagtctgca

SEQ ID NO: 1726633 - DNA, 25 bp, Homo sapien
gcatggttcttaacagctctgatat

SEQ ID NO: 1726634 - DNA, 25 bp, Homo sapien
gtggcactgagattttccttaaacc

SEQ ID NO: 1726635 - DNA, 25 bp, Homo sapien
taactatttgcaggttatctaactt

SEQ ID NO: 1726636 - DNA, 25 bp, Homo sapien
aaaagaacagctgtagaatgaataa

SEQ ID NO: 1726637 - DNA, 25 bp, Homo sapien
taaaaccatttcaatgtttggcata

SEQ ID NO: 1726638 - DNA, 25 bp, Homo sapien
tttggcatataactatttgcaggtt

SEQ ID NO: 1726639 - DNA, 25 bp, Homo sapien
taatttcctgacacgtaagaaggga

SEQ ID NO: 1726640 - DNA, 25 bp, Homo sapien
gaataatttcctgacacgtaagaag

SEQ ID NO: 1726641 - DNA, 25 bp, Homo sapien
atggcaaacaggctaggaaacaaaa

SEQ ID NO: 1726642 - DNA, 25 bp, Homo sapien
agaataatttcctgacacgtaagaa

SEQ ID NO: 1726643 - DNA, 25 bp, Homo sapien
gaaaatactattttgattgctttat

SEQ ID NO: 1726644 - DNA, 25 bp, Homo sapien
aaatactattttgattgctttataa

SEQ ID NO: 1726645 - DNA, 25 bp, Homo sapien
tactattttgattgctttataaact

SEQ ID NO: 1726646 - DNA, 25 bp, Homo sapien
gattgctttataaactttcatctta

SEQ ID NO: 1726647 - DNA, 25 bp, Homo sapien
tttctttaactctaaagcccagata

SEQ ID NO: 1726648 - DNA, 25 bp, Homo sapien
tgccttttcctagatgattcagaaa

SEQ ID NO: 1726649 - DNA, 25 bp, Homo sapien
tgacctctgacctggtaacttgggt

SEQ ID NO: 1726650 - DNA, 25 bp, Homo sapien
gtttaaggacaaatctactctacaa

SEQ ID NO: 1726651 - DNA, 25 bp, Homo sapien
ctgtgcttttcatatgcatttggaa

SEQ ID NO: 1726652 - DNA, 25 bp, Homo sapien
tatgcatttggaaaacaacactcgc

SEQ ID NO: 1726653 - DNA, 25 bp, Homo sapien
atgcatttggaaaacaacactcgcc

SEQ ID NO: 1726654 - DNA, 25 bp, Homo sapien
tcatatgcatttggaaaacaacact

SEQ ID NO: 1726655 - DNA, 25 bp, Homo sapien
ctttggtctatttgcagtgagatga

SEQ ID NO: 1726656 - DNA, 25 bp, Homo sapien
ggcccggcaaccttcttccaggcat

SEQ ID NO: 1726657 - DNA, 25 bp, Homo sapien
atgtccaccattgaaacggcccggc

SEQ ID NO: 1726658 - DNA, 25 bp, Homo sapien
ggaagctatgtcatcaaaatttaca

SEQ ID NO: 1726659 - DNA, 25 bp, Homo sapien
aaatgagtacaatcattatggagaa

SEQ ID NO: 1726660 - DNA, 25 bp, Homo sapien
gatatggagatagggaaccctcgta

SEQ ID NO: 1726661 - DNA, 25 bp, Homo sapien
atagcaaatactggcaaggatatgg

SEQ ID NO: 1726662 - DNA, 25 bp, Homo sapien
tatccaaaagataggtaatagcaaa

SEQ ID NO: 1726663 - DNA, 25 bp, Homo sapien
tttaattcagatggcttcaggttgg

SEQ ID NO: 1726664 - DNA, 25 bp, Homo sapien
ctttggagagtagcatgtatctttt

SEQ ID NO: 1726665 - DNA, 25 bp, Homo sapien
ttaattcagatggcttcaggttggc

SEQ ID NO: 1726666 - DNA, 25 bp, Homo sapien
acttcaagattttttcggggctgtg

SEQ ID NO: 1726667 - DNA, 25 bp, Homo sapien
tggaaggtgttgaaaggtacacaga

SEQ ID NO: 1726668 - DNA, 25 bp, Homo sapien
cactggaaggtgttgaaaggtacac

SEQ ID NO: 1726669 - DNA, 25 bp, Homo sapien
actggaaggtgttgaaaggtacaca

SEQ ID NO: 1726670 - DNA, 25 bp, Homo sapien
gaaggtgttgaaaggtacacagatg

SEQ ID NO: 1726671 - DNA, 25 bp, Homo sapien
caacaattcaataatctgggctcta

SEQ ID NO: 1726672 - DNA, 25 bp, Homo sapien
aatctgggctctaagttcatccagg

SEQ ID NO: 1726673 - DNA, 25 bp, Homo sapien
tgcacaacaattcaataatctgggc

SEQ ID NO: 1726674 - DNA, 25 bp, Homo sapien
taatctgggctctaagttcatccag

SEQ ID NO: 1726675 - DNA, 25 bp, Homo sapien
tataattgtgatttggtattcaaat

SEQ ID NO: 1726676 - DNA, 25 bp, Homo sapien
ataattgtgatttggtattcaaata

SEQ ID NO: 1726677 - DNA, 25 bp, Homo sapien
caaatcttttcgcagtttttccagt

SEQ ID NO: 1726678 - DNA, 25 bp, Homo sapien
tcttcttccaaatcttttcgcagtt

SEQ ID NO: 1726679 - DNA, 25 bp, Homo sapien
tctagattacttctcattgtcttct

SEQ ID NO: 1726680 - DNA, 25 bp, Homo sapien
tccaaatcttttcgcagtttttcca

SEQ ID NO: 1726681 - DNA, 25 bp, Homo sapien
aaaaatgtgatctgttgcaggcact

SEQ ID NO: 1726682 - DNA, 25 bp, Homo sapien
agagaccttgaatttggcatcagta

SEQ ID NO: 1726683 - DNA, 25 bp, Homo sapien
actgaagaagagaccttgaatttgg

SEQ ID NO: 1726684 - DNA, 25 bp, Homo sapien
aagaagagaccttgaatttggcatc

SEQ ID NO: 1726685 - DNA, 25 bp, Homo sapien
tacatgctttggctagcttcgacaa

SEQ ID NO: 1726686 - DNA, 25 bp, Homo sapien
taaagcccaggaatatatctaagat

SEQ ID NO: 1726687 - DNA, 25 bp, Homo sapien
tagttccacctttaggcagaaggaa

SEQ ID NO: 1726688 - DNA, 25 bp, Homo sapien
gatgccaatgttccacactaacaag

SEQ ID NO: 1726689 - DNA, 25 bp, Homo sapien
cagcttttttcagcttctctatttc

SEQ ID NO: 1726690 - DNA, 25 bp, Homo sapien
tcaagaagacaggacagcttttttc

SEQ ID NO: 1726691 - DNA, 25 bp, Homo sapien
gcttttttcagcttctctatttcca

SEQ ID NO: 1726692 - DNA, 25 bp, Homo sapien
aagaagacaggacagcttttttcag

SEQ ID NO: 1726693 - DNA, 25 bp, Homo sapien
ggaacattatgaacaccaggtccac

SEQ ID NO: 1726694 - DNA, 25 bp, Homo sapien
ctgaatccctggaacattatgaaca

SEQ ID NO: 1726695 - DNA, 25 bp, Homo sapien
tcagctgaagttcatagcgttgctt

SEQ ID NO: 1726696 - DNA, 25 bp, Homo sapien
cagctgaagttcatagcgttgcttc

SEQ ID NO: 1726697 - DNA, 25 bp, Homo sapien
atttgctcatatttatcacaacaac

SEQ ID NO: 1726698 - DNA, 25 bp, Homo sapien
catatttatcacaacaacagaattc

SEQ ID NO: 1726699 - DNA, 25 bp, Homo sapien
tacttttctatagatattacacttc

SEQ ID NO: 1726700 - DNA, 25 bp, Homo sapien
ttctatagatattacacttcatttg

SEQ ID NO: 1726701 - DNA, 25 bp, Homo sapien
gagtatcttctgttacacaaggcct

SEQ ID NO: 1726702 - DNA, 25 bp, Homo sapien
taaacagcattgcagacaaacaggc

SEQ ID NO: 1726703 - DNA, 25 bp, Homo sapien
ggcacaacagtgtaaccttcggtaa

SEQ ID NO: 1726704 - DNA, 25 bp, Homo sapien
gacagaagcttagtggtcacaaaca

SEQ ID NO: 1726705 - DNA, 25 bp, Homo sapien
tacagcacctgtaaacaagttagtg

SEQ ID NO: 1726706 - DNA, 25 bp, Homo sapien
gaatgttaggttacaacatcaactg

SEQ ID NO: 1726707 - DNA, 25 bp, Homo sapien
cattacgtaacagttattgaaagca

SEQ ID NO: 1726708 - DNA, 25 bp, Homo sapien
taaccaataaagactgacacgactg

SEQ ID NO: 1726709 - DNA, 25 bp, Homo sapien
aatttctttatggaagctacgtaag

SEQ ID NO: 1726710 - DNA, 25 bp, Homo sapien
ttttgctgaaaagccatgaaaacca

SEQ ID NO: 1726711 - DNA, 25 bp, Homo sapien
gtttttgctgaaaagccatgaaaac

SEQ ID NO: 1726712 - DNA, 25 bp, Homo sapien
aagctacgtaaggttgtttattgtg

SEQ ID NO: 1726713 - DNA, 25 bp, Homo sapien
agtgaacatggcttcaaactctcat

SEQ ID NO: 1726714 - DNA, 25 bp, Homo sapien
gaacatggcttcaaactctcatcaa

SEQ ID NO: 1726715 - DNA, 25 bp, Homo sapien
acatggcttcaaactctcatcaatc

SEQ ID NO: 1726716 - DNA, 25 bp, Homo sapien
tgaacatggcttcaaactctcatca

SEQ ID NO: 1726717 - DNA, 25 bp, Homo sapien
agtgctgcagcctgacagacaagtc

SEQ ID NO: 1726718 - DNA, 25 bp, Homo sapien
gcaggagtgctgcagcctgacagac

SEQ ID NO: 1726719 - DNA, 25 bp, Homo sapien
aggagtgctgcagcctgacagacaa

SEQ ID NO: 1726720 - DNA, 25 bp, Homo sapien
tgcagcctgacagacaagtcctgca

SEQ ID NO: 1726721 - DNA, 25 bp, Homo sapien
aggctggaccctgcggttcccatag

SEQ ID NO: 1726722 - DNA, 25 bp, Homo sapien
aagttagccccgaatggcagctccc

SEQ ID NO: 1726723 - DNA, 25 bp, Homo sapien
atggatgagagtcaagttagccccg

SEQ ID NO: 1726724 - DNA, 25 bp, Homo sapien
ctgggctcttgtatggatgagagtc

SEQ ID NO: 1726725 - DNA, 25 bp, Homo sapien
caagaagaaagagatgggactcact

SEQ ID NO: 1726726 - DNA, 25 bp, Homo sapien
agagatgggactcactctctttgtc

SEQ ID NO: 1726727 - DNA, 25 bp, Homo sapien
ctcaccccaggaattttgaaatttg

SEQ ID NO: 1726728 - DNA, 25 bp, Homo sapien
agaaagagatgggactcactctctt

SEQ ID NO: 1726729 - DNA, 25 bp, Homo sapien
gggatggcagttgatccaactgaac

SEQ ID NO: 1726730 - DNA, 25 bp, Homo sapien
tgtacttggtcagagctgactgcat

SEQ ID NO: 1726731 - DNA, 25 bp, Homo sapien
tgaacagtgtacttggtcagagctg

SEQ ID NO: 1726732 - DNA, 25 bp, Homo sapien
gtgcagccagctgaacagtgtactt

SEQ ID NO: 1726733 - DNA, 25 bp, Homo sapien
aaagcacacgattcacagtcctcag

SEQ ID NO: 1726734 - DNA, 25 bp, Homo sapien
cagttctcttttcggaaccggctga

SEQ ID NO: 1726735 - DNA, 25 bp, Homo sapien
tgtcacgacttaggcatttggcatc

SEQ ID NO: 1726736 - DNA, 25 bp, Homo sapien
cagttcttgctacaggaagcccagt

SEQ ID NO: 1726737 - DNA, 25 bp, Homo sapien
tgcattggacactttcccctttatg

SEQ ID NO: 1726738 - DNA, 25 bp, Homo sapien
gattggccagtttctctaaagcttc

SEQ ID NO: 1726739 - DNA, 25 bp, Homo sapien
catgcaggtttcaattgatgccagg

SEQ ID NO: 1726740 - DNA, 25 bp, Homo sapien
gacactttcccctttatgcatgcag

SEQ ID NO: 1726741 - DNA, 25 bp, Homo sapien
ttgcttcttctagcccattcatggt

SEQ ID NO: 1726742 - DNA, 25 bp, Homo sapien
ctatcaggtttcttatgggagatgc

SEQ ID NO: 1726743 - DNA, 25 bp, Homo sapien
catggtgttcactatcaggtttctt

SEQ ID NO: 1726744 - DNA, 25 bp, Homo sapien
ggagatgctgttgccattttggatg

SEQ ID NO: 1726745 - DNA, 25 bp, Homo sapien
ggcaccttctccttgcttttgcttg

SEQ ID NO: 1726746 - DNA, 25 bp, Homo sapien
ccttctccttgcttttgcttgcagc

SEQ ID NO: 1726747 - DNA, 25 bp, Homo sapien
cgtgtggcctggcaggcaccttctc

SEQ ID NO: 1726748 - DNA, 25 bp, Homo sapien
caccttctccttgcttttgcttgca

SEQ ID NO: 1726749 - DNA, 25 bp, Homo sapien
tatcagatgggaaggtctgggctct

SEQ ID NO: 1726750 - DNA, 25 bp, Homo sapien
ctgcagtgacagcacataaatcctg

SEQ ID NO: 1726751 - DNA, 25 bp, Homo sapien
gacagcacataaatcctgcagacat

SEQ ID NO: 1726752 - DNA, 25 bp, Homo sapien
cccactgggccaatcaccaaggtgt

SEQ ID NO: 1726753 - DNA, 25 bp, Homo sapien
tgttgagggcattaagagtctggca

SEQ ID NO: 1726754 - DNA, 25 bp, Homo sapien
tctggagggcaaggttgagtacact

SEQ ID NO: 1726755 - DNA, 25 bp, Homo sapien
tgtcagtgatcttgtgccatgtctt

SEQ ID NO: 1726756 - DNA, 25 bp, Homo sapien
cactgggagtagtctgtacagacac

SEQ ID NO: 1726757 - DNA, 25 bp, Homo sapien
atggctgaaccaaacgtgaatcctc

SEQ ID NO: 1726758 - DNA, 25 bp, Homo sapien
caacatatctgttatggtctcagac

SEQ ID NO: 1726759 - DNA, 25 bp, Homo sapien
cagactttccagtatatacacttat

SEQ ID NO: 1726760 - DNA, 25 bp, Homo sapien
gggacacttttgtagcaacatatct

SEQ ID NO: 1726761 - DNA, 25 bp, Homo sapien
tggtatccagggagactgctgaatg

SEQ ID NO: 1726762 - DNA, 25 bp, Homo sapien
ggtatccagggagactgctgaatgt

SEQ ID NO: 1726763 - DNA, 25 bp, Homo sapien
ctggtatccagggagactgctgaat

SEQ ID NO: 1726764 - DNA, 25 bp, Homo sapien
tatccagggagactgctgaatgttt

SEQ ID NO: 1726765 - DNA, 25 bp, Homo sapien
tgttgatatgttgtgtaagagctgc

SEQ ID NO: 1726766 - DNA, 25 bp, Homo sapien
tttgcctcatcaacacctgtccata

SEQ ID NO: 1726767 - DNA, 25 bp, Homo sapien
agctgcacaattacggcaatgtttc

SEQ ID NO: 1726768 - DNA, 25 bp, Homo sapien
acacctgtccatattgctgttgata

SEQ ID NO: 1726769 - DNA, 25 bp, Homo sapien
gactaggacctcaatggacaagcaa

SEQ ID NO: 1726770 - DNA, 25 bp, Homo sapien
caggtttactaccacgatggccaaa

SEQ ID NO: 1726771 - DNA, 25 bp, Homo sapien
gccaaagctgggatcacgaaggcca

SEQ ID NO: 1726772 - DNA, 25 bp, Homo sapien
tgcaaatagaaatgcccaggcctac

SEQ ID NO: 1726773 - DNA, 25 bp, Homo sapien
atcttcatgaattctctcactttgc

SEQ ID NO: 1726774 - DNA, 25 bp, Homo sapien
aattctctcactttgcacttggtca

SEQ ID NO: 1726775 - DNA, 25 bp, Homo sapien
tctcactttgcacttggtcagaagc

SEQ ID NO: 1726776 - DNA, 25 bp, Homo sapien
ctttgcacttggtcagaagcatctg

SEQ ID NO: 1726777 - DNA, 25 bp, Homo sapien
cccagatgagaggtggaggacctta

SEQ ID NO: 1726778 - DNA, 25 bp, Homo sapien
catgggttgtatacagctggcacca

SEQ ID NO: 1726779 - DNA, 25 bp, Homo sapien
tacaacctggtattcatcgctgaga

SEQ ID NO: 1726780 - DNA, 25 bp, Homo sapien
tgagaacaataccaaacctaccgct

SEQ ID NO: 1726781 - DNA, 25 bp, Homo sapien
caggatggttccaaacactaggatg

SEQ ID NO: 1726782 - DNA, 25 bp, Homo sapien
gatccaggatggttccaaacactag

SEQ ID NO: 1726783 - DNA, 25 bp, Homo sapien
tccaggatggttccaaacactagga

SEQ ID NO: 1726784 - DNA, 25 bp, Homo sapien
tggatccaggatggttccaaacact

SEQ ID NO: 1726785 - DNA, 25 bp, Homo sapien
ctgctggtactgtggctacagatac

SEQ ID NO: 1726786 - DNA, 25 bp, Homo sapien
taagtgctttgcgtttttacctaca

SEQ ID NO: 1726787 - DNA, 25 bp, Homo sapien
taatcctgtggcatatgattgggcg

SEQ ID NO: 1726788 - DNA, 25 bp, Homo sapien
ctgtggctacagatactagttgtgt

SEQ ID NO: 1726789 - DNA, 25 bp, Homo sapien
catcttgatagaaggttccatgact

SEQ ID NO: 1726790 - DNA, 25 bp, Homo sapien
ccatgacttggagttctttgcacat

SEQ ID NO: 1726791 - DNA, 25 bp, Homo sapien
tatcacaattgcaaaggtaagaggt

SEQ ID NO: 1726792 - DNA, 25 bp, Homo sapien
ctttcatatcacaattgcaaaggta

SEQ ID NO: 1726793 - DNA, 25 bp, Homo sapien
cacaagtttgagaattcctcgacat

SEQ ID NO: 1726794 - DNA, 25 bp, Homo sapien
aatatggacccaatgcctgagaaat

SEQ ID NO: 1726795 - DNA, 25 bp, Homo sapien
gagaaatgcagtttgccacaagttt

SEQ ID NO: 1726796 - DNA, 25 bp, Homo sapien
tatggacccaatgcctgagaaatgc

SEQ ID NO: 1726797 - DNA, 25 bp, Homo sapien
cagaggctactcaaccctttaaggc

SEQ ID NO: 1726798 - DNA, 25 bp, Homo sapien
gcagaggctactcaaccctttaagg

SEQ ID NO: 1726799 - DNA, 25 bp, Homo sapien
tgtaggatcagaatttgtttccctg

SEQ ID NO: 1726800 - DNA, 25 bp, Homo sapien
agataagttaacgaccctgttatag

SEQ ID NO: 1726801 - DNA, 25 bp, Homo sapien
cgaccctgttatagtccagcctgct

SEQ ID NO: 1726802 - DNA, 25 bp, Homo sapien
acttcagtaccatggcagctggccc

SEQ ID NO: 1726803 - DNA, 25 bp, Homo sapien
ctttgatgggatgacaagataattc

SEQ ID NO: 1726804 - DNA, 25 bp, Homo sapien
tagggatgtagcctggtttgttaac

SEQ ID NO: 1726805 - DNA, 25 bp, Homo sapien
tgggcctttgatgggatgacaagat

SEQ ID NO: 1726806 - DNA, 25 bp, Homo sapien
tcctaggttagggatgtagcctggt

SEQ ID NO: 1726807 - DNA, 25 bp, Homo sapien
gatccagagggacatcgagacacag

SEQ ID NO: 1726808 - DNA, 25 bp, Homo sapien
gtatctcgatgtgggttcctctgtc

SEQ ID NO: 1726809 - DNA, 25 bp, Homo sapien
taggtggctctcttctagtcgtgag

SEQ ID NO: 1726810 - DNA, 25 bp, Homo sapien
tccctatgaatgtgggtatctcgat

SEQ ID NO: 1726811 - DNA, 25 bp, Homo sapien
gatgtgtactctttcctggccaggt

SEQ ID NO: 1726812 - DNA, 25 bp, Homo sapien
gaatgtgtctctacccagggtcatc

SEQ ID NO: 1726813 - DNA, 25 bp, Homo sapien
gaatcagcgcttctggttggaccaa

SEQ ID NO: 1726814 - DNA, 25 bp, Homo sapien
ccatgagggtgtcttcagccaaact

SEQ ID NO: 1726815 - DNA, 25 bp, Homo sapien
agaactgactgcctgttgcgagaag

SEQ ID NO: 1726816 - DNA, 25 bp, Homo sapien
gagaagccgatctgagaactgtaaa

SEQ ID NO: 1726817 - DNA, 25 bp, Homo sapien
cctgttgcgagaagccgatctgaga

SEQ ID NO: 1726818 - DNA, 25 bp, Homo sapien
tgactgcctgttgcgagaagccgat

SEQ ID NO: 1726819 - DNA, 25 bp, Homo sapien
agaggtggagaatcacccagcagga

SEQ ID NO: 1726820 - DNA, 25 bp, Homo sapien
cccagaggtggagaatcacccagca

SEQ ID NO: 1726821 - DNA, 25 bp, Homo sapien
ccaggaagtagatctagcagcccag

SEQ ID NO: 1726822 - DNA, 25 bp, Homo sapien
agtagatctagcagcccagaggtgg

SEQ ID NO: 1726823 - DNA, 25 bp, Homo sapien
ccagtttctggtaaagagtggacag

SEQ ID NO: 1726824 - DNA, 25 bp, Homo sapien
ccaggtgagggacataccagtttct

SEQ ID NO: 1726825 - DNA, 25 bp, Homo sapien
tcctatcctatgtggagaatccaga

SEQ ID NO: 1726826 - DNA, 25 bp, Homo sapien
gtggacagccagtgctagatcctat

SEQ ID NO: 1726827 - DNA, 25 bp, Homo sapien
tgtggacagaaagaacactaagcag

SEQ ID NO: 1726828 - DNA, 25 bp, Homo sapien
tggacagaaagaacactaagcagca

SEQ ID NO: 1726829 - DNA, 25 bp, Homo sapien
gacagaaagaacactaagcagcaaa

SEQ ID NO: 1726830 - DNA, 25 bp, Homo sapien
gaaagaacactaagcagcaaatcat

SEQ ID NO: 1726831 - DNA, 25 bp, Homo sapien
ttaggtgaatcttggatctatagtg

SEQ ID NO: 1726832 - DNA, 25 bp, Homo sapien
tttaggtgaatcttggatctatagt

SEQ ID NO: 1726833 - DNA, 25 bp, Homo sapien
ttcagggctttgaagtttatctcca

SEQ ID NO: 1726834 - DNA, 25 bp, Homo sapien
cagggctttgaagtttatctccagc

SEQ ID NO: 1726835 - DNA, 25 bp, Homo sapien
cagtcttgggtttcccttcagggct

SEQ ID NO: 1726836 - DNA, 25 bp, Homo sapien
cttggatccttccagtcttgggttt

SEQ ID NO: 1726837 - DNA, 25 bp, Homo sapien
gaagaaatacaaggtccttcgcatt

SEQ ID NO: 1726838 - DNA, 25 bp, Homo sapien
gattacatgtaaatcctatttctcc

SEQ ID NO: 1726839 - DNA, 25 bp, Homo sapien
aaggcttgtacatgtttcagctgat

SEQ ID NO: 1726840 - DNA, 25 bp, Homo sapien
aagagtttttccacagaaaggcttg

SEQ ID NO: 1726841 - DNA, 25 bp, Homo sapien
tggtctctggagctcgaaagtctag

SEQ ID NO: 1726842 - DNA, 25 bp, Homo sapien
gagctacactctcaatggtctctgg

SEQ ID NO: 1726843 - DNA, 25 bp, Homo sapien
ccatgtcagtgatgcaggcataatc

SEQ ID NO: 1726844 - DNA, 25 bp, Homo sapien
tacagaaaggcgagatgcaccagtt

SEQ ID NO: 1726845 - DNA, 25 bp, Homo sapien
gacagcaatgatcaatgggcaccca

SEQ ID NO: 1726846 - DNA, 25 bp, Homo sapien
tttacagccacaatgacgaacgccg

SEQ ID NO: 1726847 - DNA, 25 bp, Homo sapien
tattgtcccagttaagccaacaggc

SEQ ID NO: 1726848 - DNA, 25 bp, Homo sapien
caatgcaggtgatgtagtccagaac

SEQ ID NO: 1726849 - DNA, 25 bp, Homo sapien
ctagtcggagtaacacagaaaagtc

SEQ ID NO: 1726850 - DNA, 25 bp, Homo sapien
acacagaaaagtctccctcttggaa

SEQ ID NO: 1726851 - DNA, 25 bp, Homo sapien
tagtcggagtaacacagaaaagtct

SEQ ID NO: 1726852 - DNA, 25 bp, Homo sapien
cagaaaagtctccctcttggaactt

SEQ ID NO: 1726853 - DNA, 25 bp, Homo sapien
gatccataatggttccaaacagcag

SEQ ID NO: 1726854 - DNA, 25 bp, Homo sapien
cttgtgatccataatggttccaaac

SEQ ID NO: 1726855 - DNA, 25 bp, Homo sapien
tgatccataatggttccaaacagca

SEQ ID NO: 1726856 - DNA, 25 bp, Homo sapien
tgtgatccataatggttccaaacag

SEQ ID NO: 1726857 - DNA, 25 bp, Homo sapien
tgccctcgatttccccttcagtgaa

SEQ ID NO: 1726858 - DNA, 25 bp, Homo sapien
ataaccggcaaggacacggactctc

SEQ ID NO: 1726859 - DNA, 25 bp, Homo sapien
tgcataaccggcaaggacacggact

SEQ ID NO: 1726860 - DNA, 25 bp, Homo sapien
ctgcataaccggcaaggacacggac

SEQ ID NO: 1726861 - DNA, 25 bp, Homo sapien
accggcaaggacacggactctccag

SEQ ID NO: 1726862 - DNA, 25 bp, Homo sapien
tgcccacagatcctgagtactgagc

SEQ ID NO: 1726863 - DNA, 25 bp, Homo sapien
cagatcctgagtactgagctatggt

SEQ ID NO: 1726864 - DNA, 25 bp, Homo sapien
tctttgcccacagatcctgagtact

SEQ ID NO: 1726865 - DNA, 25 bp, Homo sapien
cctgagtactgagctatggtatttg

SEQ ID NO: 1726866 - DNA, 25 bp, Homo sapien
ggccatgtgcccatcccataagtat

SEQ ID NO: 1726867 - DNA, 25 bp, Homo sapien
gcccatcccataagtattctgggct

SEQ ID NO: 1726868 - DNA, 25 bp, Homo sapien
gtggccatgtgcccatcccataagt

SEQ ID NO: 1726869 - DNA, 25 bp, Homo sapien
tgcccatcccataagtattctgggc

SEQ ID NO: 1726870 - DNA, 25 bp, Homo sapien
taatttagatccattggttgggcct

SEQ ID NO: 1726871 - DNA, 25 bp, Homo sapien
gatccattggttgggcctagtgatg

SEQ ID NO: 1726872 - DNA, 25 bp, Homo sapien
cattggttgggcctagtgatgcatt

SEQ ID NO: 1726873 - DNA, 25 bp, Homo sapien
ttagatccattggttgggcctagtg

SEQ ID NO: 1726874 - DNA, 25 bp, Homo sapien
tcaggacatccatgagaaatggggc

SEQ ID NO: 1726875 - DNA, 25 bp, Homo sapien
ttggtctcaggacatccatgagaaa

SEQ ID NO: 1726876 - DNA, 25 bp, Homo sapien
ggacatccatgagaaatggggcagc

SEQ ID NO: 1726877 - DNA, 25 bp, Homo sapien
tctcaggacatccatgagaaatggg

SEQ ID NO: 1726878 - DNA, 25 bp, Homo sapien
cctcaggagtgaaagacgaccaagc

SEQ ID NO: 1726879 - DNA, 25 bp, Homo sapien
tcaagattgaccaagaagccagcct

SEQ ID NO: 1726880 - DNA, 25 bp, Homo sapien
ttcttcggccgaccaagagcttggg

SEQ ID NO: 1726881 - DNA, 25 bp, Homo sapien
ctcttgcagggcacgggtaggttaa

SEQ ID NO: 1726882 - DNA, 25 bp, Homo sapien
ccaggatccacgcagagtgatggag

SEQ ID NO: 1726883 - DNA, 25 bp, Homo sapien
gtccaaagtacccaggatccacgca

SEQ ID NO: 1726884 - DNA, 25 bp, Homo sapien
tcactgtccaaagtacccaggatcc

SEQ ID NO: 1726885 - DNA, 25 bp, Homo sapien
aaagtacccaggatccacgcagagt

SEQ ID NO: 1726886 - DNA, 25 bp, Homo sapien
gctaaattagtttactcaaggtcta

SEQ ID NO: 1726887 - DNA, 25 bp, Homo sapien
cttgcttttcttccgttccctatct

SEQ ID NO: 1726888 - DNA, 25 bp, Homo sapien
cctatctttaggaaacgtaccatga

SEQ ID NO: 1726889 - DNA, 25 bp, Homo sapien
aaaggtacatatattcgtttatgtc

SEQ ID NO: 1726890 - DNA, 25 bp, Homo sapien
ggatggcttgtatcttcatatgtaa

SEQ ID NO: 1726891 - DNA, 25 bp, Homo sapien
atggcttgtatcttcatatgtaatg

SEQ ID NO: 1726892 - DNA, 25 bp, Homo sapien
gatggcttgtatcttcatatgtaat

SEQ ID NO: 1726893 - DNA, 25 bp, Homo sapien
catctgctccaatactgttgaccat

SEQ ID NO: 1726894 - DNA, 25 bp, Homo sapien
ctgctccaatactgttgaccatttc

SEQ ID NO: 1726895 - DNA, 25 bp, Homo sapien
tctgctccaatactgttgaccattt

SEQ ID NO: 1726896 - DNA, 25 bp, Homo sapien
ctcatctgctccaatactgttgacc

SEQ ID NO: 1726897 - DNA, 25 bp, Homo sapien
tagcgttgacttacaatcatctgcc

SEQ ID NO: 1726898 - DNA, 25 bp, Homo sapien
gggaagtagcgttgacttacaatca

SEQ ID NO: 1726899 - DNA, 25 bp, Homo sapien
gcgttgacttacaatcatctgccca

SEQ ID NO: 1726900 - DNA, 25 bp, Homo sapien
gaagtagcgttgacttacaatcatc

SEQ ID NO: 1726901 - DNA, 25 bp, Homo sapien
cttaatatataactgcttaagaaat

SEQ ID NO: 1726902 - DNA, 25 bp, Homo sapien
aatatataactgcttaagaaataca

SEQ ID NO: 1726903 - DNA, 25 bp, Homo sapien
taatatataactgcttaagaaatac

SEQ ID NO: 1726904 - DNA, 25 bp, Homo sapien
atatataactgcttaagaaatacaa

SEQ ID NO: 1726905 - DNA, 25 bp, Homo sapien
ttttctgccatggttcaatatgatg

SEQ ID NO: 1726906 - DNA, 25 bp, Homo sapien
gctttttctgccatggttcaatatg

SEQ ID NO: 1726907 - DNA, 25 bp, Homo sapien
ctttttctgccatggttcaatatga

SEQ ID NO: 1726908 - DNA, 25 bp, Homo sapien
tttttctgccatggttcaatatgat

SEQ ID NO: 1726909 - DNA, 25 bp, Homo sapien
gggcaggcgctcgtcctgaggcagg

SEQ ID NO: 1726910 - DNA, 25 bp, Homo sapien
ccatctcgaaggtaatggggcaggc

SEQ ID NO: 1726911 - DNA, 25 bp, Homo sapien
aggcagggcagtgtgatttaacgcc

SEQ ID NO: 1726912 - DNA, 25 bp, Homo sapien
tattgttaggtaaaagccagccact

SEQ ID NO: 1726913 - DNA, 25 bp, Homo sapien
aatccccagatcacagactgctaaa

SEQ ID NO: 1726914 - DNA, 25 bp, Homo sapien
gacatgtaaaggacatatccatttc

SEQ ID NO: 1726915 - DNA, 25 bp, Homo sapien
tcagcttcttctttcgtctagaaga

SEQ ID NO: 1726916 - DNA, 25 bp, Homo sapien
tagtcattatttcagcgggtctcag

SEQ ID NO: 1726917 - DNA, 25 bp, Homo sapien
gaaccagaagcttcctatgcttgtg

SEQ ID NO: 1726918 - DNA, 25 bp, Homo sapien
gatatgtcactaagtcatgattaca

SEQ ID NO: 1726919 - DNA, 25 bp, Homo sapien
taattcagaacttccccagatgata

SEQ ID NO: 1726920 - DNA, 25 bp, Homo sapien
ggtaacactctcaacgacttaattc

SEQ ID NO: 1726921 - DNA, 25 bp, Homo sapien
cgttcataatgtttatgcaggtcca

SEQ ID NO: 1726922 - DNA, 25 bp, Homo sapien
tgctcttcttaatgtgcgtgtgcat

SEQ ID NO: 1726923 - DNA, 25 bp, Homo sapien
catccaaactctgagtaagcacaca

SEQ ID NO: 1726924 - DNA, 25 bp, Homo sapien
gtgcattcaccataagcgttcataa

SEQ ID NO: 1726925 - DNA, 25 bp, Homo sapien
gatgtagctggaatgacatgtttca

SEQ ID NO: 1726926 - DNA, 25 bp, Homo sapien
aaagctaccgttcctgttgcgacag

SEQ ID NO: 1726927 - DNA, 25 bp, Homo sapien
gcgccatcgcgtggcaacaggtaaa

SEQ ID NO: 1726928 - DNA, 25 bp, Homo sapien
catgttacgctcaataccaggtaga

SEQ ID NO: 1726929 - DNA, 25 bp, Homo sapien
tgacagcagtcatggtgataaggct

SEQ ID NO: 1726930 - DNA, 25 bp, Homo sapien
aacacccagcggtgacaaaagcaag

SEQ ID NO: 1726931 - DNA, 25 bp, Homo sapien
tcaaatatcgatccaggctgacagc

SEQ ID NO: 1726932 - DNA, 25 bp, Homo sapien
cagtcatggtgataaggcttccaca

SEQ ID NO: 1726933 - DNA, 25 bp, Homo sapien
aaaggctgtcaagtacaggagggag

SEQ ID NO: 1726934 - DNA, 25 bp, Homo sapien
tccagtatggtgaaaggctgtcaag

SEQ ID NO: 1726935 - DNA, 25 bp, Homo sapien
attggttctgtgttgctccagaagt

SEQ ID NO: 1726936 - DNA, 25 bp, Homo sapien
ttctgtgttgctccagaagtcagaa

SEQ ID NO: 1726937 - DNA, 25 bp, Homo sapien
cagatgtaggcgtgctttcttttca

SEQ ID NO: 1726938 - DNA, 25 bp, Homo sapien
gtccagaaggaagcataggcccaga

SEQ ID NO: 1726939 - DNA, 25 bp, Homo sapien
gaaggaagcataggcccagatggct

SEQ ID NO: 1726940 - DNA, 25 bp, Homo sapien
ctgccaggcagatgtaggcgtgctt

SEQ ID NO: 1726941 - DNA, 25 bp, Homo sapien
tccgaagggctcaggtacgtagtcc

SEQ ID NO: 1726942 - DNA, 25 bp, Homo sapien
gctgctatggatccgactgtcgaaa

SEQ ID NO: 1726943 - DNA, 25 bp, Homo sapien
cgatcacagccgttgggagcaagag

SEQ ID NO: 1726944 - DNA, 25 bp, Homo sapien
accagtccagggtgcacgaggttcc

SEQ ID NO: 1726945 - DNA, 25 bp, Homo sapien
tgtagccatggcctcaggaaagaat

SEQ ID NO: 1726946 - DNA, 25 bp, Homo sapien
tgtgactgagaactggttctgatgc

SEQ ID NO: 1726947 - DNA, 25 bp, Homo sapien
ggttctgatgcagaaactcctgctg

SEQ ID NO: 1726948 - DNA, 25 bp, Homo sapien
ccatggcctcaggaaagaattccct

SEQ ID NO: 1726949 - DNA, 25 bp, Homo sapien
aatgataattaaggtcaactatcct

SEQ ID NO: 1726950 - DNA, 25 bp, Homo sapien
gataattaaggtcaactatcctaaa

SEQ ID NO: 1726951 - DNA, 25 bp, Homo sapien
ctttgagtgtgtctagttggaattt

SEQ ID NO: 1726952 - DNA, 25 bp, Homo sapien
tgataattaaggtcaactatcctaa

SEQ ID NO: 1726953 - DNA, 25 bp, Homo sapien
tgcataaggaatccaggcaatcagg

SEQ ID NO: 1726954 - DNA, 25 bp, Homo sapien
tcaggaatccagcacaaatcaacat

SEQ ID NO: 1726955 - DNA, 25 bp, Homo sapien
ggaatccaggcaatcaggaatccag

SEQ ID NO: 1726956 - DNA, 25 bp, Homo sapien
aatcaggaatccagcacaaatcaac

SEQ ID NO: 1726957 - DNA, 25 bp, Homo sapien
gattgtacatcgctgcagattttgc

SEQ ID NO: 1726958 - DNA, 25 bp, Homo sapien
cagattttgcaagtagggttggcac

SEQ ID NO: 1726959 - DNA, 25 bp, Homo sapien
cttccaaaagctgaccacacagaca

SEQ ID NO: 1726960 - DNA, 25 bp, Homo sapien
ccacagagagctgtatgggaatgga

SEQ ID NO: 1726961 - DNA, 25 bp, Homo sapien
ttcctgactgtggttacggtgtgca

SEQ ID NO: 1726962 - DNA, 25 bp, Homo sapien
tcctgactgtggttacggtgtgcag

SEQ ID NO: 1726963 - DNA, 25 bp, Homo sapien
cctgactgtggttacggtgtgcagc

SEQ ID NO: 1726964 - DNA, 25 bp, Homo sapien
gagtgtccatagtgatgctgtatcc

SEQ ID NO: 1726965 - DNA, 25 bp, Homo sapien
tgtggccacaatcaaatgtttacag

SEQ ID NO: 1726966 - DNA, 25 bp, Homo sapien
aagaggcaaataagtgaatacgagt

SEQ ID NO: 1726967 - DNA, 25 bp, Homo sapien
cacaatcaaatgtttacagcagtga

SEQ ID NO: 1726968 - DNA, 25 bp, Homo sapien
ggactcctttgtggaatcactgcca

SEQ ID NO: 1726969 - DNA, 25 bp, Homo sapien
agtacctaccaaagagccatggccc

SEQ ID NO: 1726970 - DNA, 25 bp, Homo sapien
ggctgtgagaaccaaagtacctacc

SEQ ID NO: 1726971 - DNA, 25 bp, Homo sapien
tacatgattgtccacctgaatgagc

SEQ ID NO: 1726972 - DNA, 25 bp, Homo sapien
gaagcatttttattcgtagatttgt

SEQ ID NO: 1726973 - DNA, 25 bp, Homo sapien
ttttctccctcatttgcactaactt

SEQ ID NO: 1726974 - DNA, 25 bp, Homo sapien
ccctcatttgcactaacttaatgga

SEQ ID NO: 1726975 - DNA, 25 bp, Homo sapien
tattcgtagatttgtggctcaggtt

SEQ ID NO: 1726976 - DNA, 25 bp, Homo sapien
ccctagtgtttcactggaggctgtc

SEQ ID NO: 1726977 - DNA, 25 bp, Homo sapien
agaattctccccacaagatagctga

SEQ ID NO: 1726978 - DNA, 25 bp, Homo sapien
tttgtccctagtgtttcactggagg

SEQ ID NO: 1726979 - DNA, 25 bp, Homo sapien
attctccccacaagatagctgatgc

SEQ ID NO: 1726980 - DNA, 25 bp, Homo sapien
aaccgaggcactaaactactgaatg

SEQ ID NO: 1726981 - DNA, 25 bp, Homo sapien
gaatgaaaccgaggcactaaactac

SEQ ID NO: 1726982 - DNA, 25 bp, Homo sapien
agaacactgaatgaaaccgaggcac

SEQ ID NO: 1726983 - DNA, 25 bp, Homo sapien
cagcagcagcctgactaatgtgaat

SEQ ID NO: 1726984 - DNA, 25 bp, Homo sapien
gccagagggctgtagtatactgact

SEQ ID NO: 1726985 - DNA, 25 bp, Homo sapien
caactggagtgtattgaggctgagc

SEQ ID NO: 1726986 - DNA, 25 bp, Homo sapien
caggcattgaatagagcaactggag

SEQ ID NO: 1726987 - DNA, 25 bp, Homo sapien
tgcaatcaatacagaatgagctgac

SEQ ID NO: 1726988 - DNA, 25 bp, Homo sapien
caaagaccttagtgaattgaatcct

SEQ ID NO: 1726989 - DNA, 25 bp, Homo sapien
tcagagcctccagaataatactgtg

SEQ ID NO: 1726990 - DNA, 25 bp, Homo sapien
tgaatcctttccgtctcttgcccaa

SEQ ID NO: 1726991 - DNA, 25 bp, Homo sapien
taatactgtgccaagacattcagtg

SEQ ID NO: 1726992 - DNA, 25 bp, Homo sapien
caaattgtgcagtagagtttaccat

SEQ ID NO: 1726993 - DNA, 25 bp, Homo sapien
aaatagataaggcttgccatgggaa

SEQ ID NO: 1726994 - DNA, 25 bp, Homo sapien
tgtggcgtctccctgccaggtacgt

SEQ ID NO: 1726995 - DNA, 25 bp, Homo sapien
atttgaaggtatctcagggatcagc

SEQ ID NO: 1726996 - DNA, 25 bp, Homo sapien
tctccccgaacccacagagtcctct

SEQ ID NO: 1726997 - DNA, 25 bp, Homo sapien
ggattgcgatggacattgtcactga

SEQ ID NO: 1726998 - DNA, 25 bp, Homo sapien
caaaagaaccaggattgcgatggac

SEQ ID NO: 1726999 - DNA, 25 bp, Homo sapien
ctgagatggcttctccccgaaccca

SEQ ID NO: 1727000 - DNA, 25 bp, Homo sapien
tgacgagaccgaggtgtgcactgca

SEQ ID NO: 1727001 - DNA, 25 bp, Homo sapien
gccgtgtaagcacttcagatgcact

SEQ ID NO: 1727002 - DNA, 25 bp, Homo sapien
gatacttggatactcctagggtgca

SEQ ID NO: 1727003 - DNA, 25 bp, Homo sapien
ctgcatatgccagacgccgtgtaag

SEQ ID NO: 1727004 - DNA, 25 bp, Homo sapien
cagctttcacaagccccagttcaga

SEQ ID NO: 1727005 - DNA, 25 bp, Homo sapien
tgtagctgctccagtcagagacaca

SEQ ID NO: 1727006 - DNA, 25 bp, Homo sapien
gtacatcatctgcaatagaacaaat

SEQ ID NO: 1727007 - DNA, 25 bp, Homo sapien
tacagatggggagtgtagctgctcc

SEQ ID NO: 1727008 - DNA, 25 bp, Homo sapien
gcatcccgaggagctttaagtagga

SEQ ID NO: 1727009 - DNA, 25 bp, Homo sapien
catggaactcacatctgggaacctg

SEQ ID NO: 1727010 - DNA, 25 bp, Homo sapien
gacttttgagaggaagcatcccgag

SEQ ID NO: 1727011 - DNA, 25 bp, Homo sapien
ttgtaaaggcatcagggacaaaccc

SEQ ID NO: 1727012 - DNA, 25 bp, Homo sapien
ggagtgccaaggtttctagctgcca

SEQ ID NO: 1727013 - DNA, 25 bp, Homo sapien
cattcaatggacgtggtacaacagt

SEQ ID NO: 1727014 - DNA, 25 bp, Homo sapien
ggacttgcaattggcctagaaccca

SEQ ID NO: 1727015 - DNA, 25 bp, Homo sapien
gagaaatggctaacctcccgaggtc

SEQ ID NO: 1727016 - DNA, 25 bp, Homo sapien
cactggcagggttttccacgtgtaa

SEQ ID NO: 1727017 - DNA, 25 bp, Homo sapien
cacgtgtaaagaagcaatggactat

SEQ ID NO: 1727018 - DNA, 25 bp, Homo sapien
ggatgactgcatatcacaatgagca

SEQ ID NO: 1727019 - DNA, 25 bp, Homo sapien
tggtagttcacagtttgtcctaaga

SEQ ID NO: 1727020 - DNA, 25 bp, Homo sapien
caaggaatgtgagatagatggtaaa

SEQ ID NO: 1727021 - DNA, 25 bp, Homo sapien
cattgaccttgacaaggaatgtgag

SEQ ID NO: 1727022 - DNA, 25 bp, Homo sapien
aataatacattgaccttgacaagga

SEQ ID NO: 1727023 - DNA, 25 bp, Homo sapien
taatacattgaccttgacaaggaat

SEQ ID NO: 1727024 - DNA, 25 bp, Homo sapien
tttgatgattagagcttccctaagg

SEQ ID NO: 1727025 - DNA, 25 bp, Homo sapien
aaggatacaagagtcgctgtttgac

SEQ ID NO: 1727026 - DNA, 25 bp, Homo sapien
gcttccctaaggatacaagagtcgc

SEQ ID NO: 1727027 - DNA, 25 bp, Homo sapien
caagagtcgctgtttgacatgtcac

SEQ ID NO: 1727028 - DNA, 25 bp, Homo sapien
atttttgaggtgcaacatatccact

SEQ ID NO: 1727029 - DNA, 25 bp, Homo sapien
tttgaggtgcaacatatccactgat

SEQ ID NO: 1727030 - DNA, 25 bp, Homo sapien
tccactgatttttagcatctattca

SEQ ID NO: 1727031 - DNA, 25 bp, Homo sapien
cactgatttttagcatctattcaac

SEQ ID NO: 1727032 - DNA, 25 bp, Homo sapien
catccagattattgggactagcaga

SEQ ID NO: 1727033 - DNA, 25 bp, Homo sapien
tctgaagccctggtgaacaggtaag

SEQ ID NO: 1727034 - DNA, 25 bp, Homo sapien
taacacacaactgggctagagagaa

SEQ ID NO: 1727035 - DNA, 25 bp, Homo sapien
aatgctgtatgcaggttgacttgac

SEQ ID NO: 1727036 - DNA, 25 bp, Homo sapien
caagtttgaagtagagctcagcaca

SEQ ID NO: 1727037 - DNA, 25 bp, Homo sapien
ttgaagtagagctcagcacatcttt

SEQ ID NO: 1727038 - DNA, 25 bp, Homo sapien
tagagctcagcacatctttccattt

SEQ ID NO: 1727039 - DNA, 25 bp, Homo sapien
gtagagctcagcacatctttccatt

SEQ ID NO: 1727040 - DNA, 25 bp, Homo sapien
cataaaaggtatgttctaaagtgtt

SEQ ID NO: 1727041 - DNA, 25 bp, Homo sapien
ctgctgcatctaaaacataaaaggt

SEQ ID NO: 1727042 - DNA, 25 bp, Homo sapien
taaagtgttttgtcctagataccag

SEQ ID NO: 1727043 - DNA, 25 bp, Homo sapien
cagaagtcattttccatctcacctg

SEQ ID NO: 1727044 - DNA, 25 bp, Homo sapien
agttttctgctgatccaacaccatt

SEQ ID NO: 1727045 - DNA, 25 bp, Homo sapien
ccataggcagcacaatacaccagca

SEQ ID NO: 1727046 - DNA, 25 bp, Homo sapien
gcacaatacaccagcacacagttag

SEQ ID NO: 1727047 - DNA, 25 bp, Homo sapien
cagcacacagttagcagcactttgg

SEQ ID NO: 1727048 - DNA, 25 bp, Homo sapien
tcacgccaagttccaacatgtttga

SEQ ID NO: 1727049 - DNA, 25 bp, Homo sapien
ttcacgccaagttccaacatgtttg

SEQ ID NO: 1727050 - DNA, 25 bp, Homo sapien
cttcacgccaagttccaacatgttt

SEQ ID NO: 1727051 - DNA, 25 bp, Homo sapien
cagcaatgactaagacatatttaga

SEQ ID NO: 1727052 - DNA, 25 bp, Homo sapien
tcagcaaggagtgttaatgagtcgt

SEQ ID NO: 1727053 - DNA, 25 bp, Homo sapien
ccacctcttctatttagcacagcaa

SEQ ID NO: 1727054 - DNA, 25 bp, Homo sapien
gagtcgttttctaccctgttgccac

SEQ ID NO: 1727055 - DNA, 25 bp, Homo sapien
gaaagttatgtataaggcacatgct

SEQ ID NO: 1727056 - DNA, 25 bp, Homo sapien
ctacatgcacgtattatagctagag

SEQ ID NO: 1727057 - DNA, 25 bp, Homo sapien
tcttaggaacataaataggcagtct

SEQ ID NO: 1727058 - DNA, 25 bp, Homo sapien
ggttttgacatgcagcgtggcccat

SEQ ID NO: 1727059 - DNA, 25 bp, Homo sapien
tatctgatgaattcactggttgttg

SEQ ID NO: 1727060 - DNA, 25 bp, Homo sapien
ccctggacacggaaacaccttctat

SEQ ID NO: 1727061 - DNA, 25 bp, Homo sapien
ggttgttggtagcaacactgataga

SEQ ID NO: 1727062 - DNA, 25 bp, Homo sapien
caccttctatcattttatctgatga

SEQ ID NO: 1727063 - DNA, 25 bp, Homo sapien
acaagaatccttgaaaaaatgtgag

SEQ ID NO: 1727064 - DNA, 25 bp, Homo sapien
aatgtgagtggtatcatgtaaacat

SEQ ID NO: 1727065 - DNA, 25 bp, Homo sapien
tacaagaatccttgaaaaaatgtga

SEQ ID NO: 1727066 - DNA, 25 bp, Homo sapien
aaaaatgtgagtggtatcatgtaaa

SEQ ID NO: 1727067 - DNA, 25 bp, Homo sapien
tgacccctctcattggagaaacaga

SEQ ID NO: 1727068 - DNA, 25 bp, Homo sapien
aagagtgtaagaggaaagccttcca

SEQ ID NO: 1727069 - DNA, 25 bp, Homo sapien
gggagagcatgacccctctcattgg

SEQ ID NO: 1727070 - DNA, 25 bp, Homo sapien
ggaatctgacacctaatgtccccaa

SEQ ID NO: 1727071 - DNA, 25 bp, Homo sapien
taggtgtggtcttgtcttttagatg

SEQ ID NO: 1727072 - DNA, 25 bp, Homo sapien
cctggtctctgttaatctatcttga

SEQ ID NO: 1727073 - DNA, 25 bp, Homo sapien
gtcttttagatgttgtcttgtggtc

SEQ ID NO: 1727074 - DNA, 25 bp, Homo sapien
gatgcccatattttgaaaaacacta

SEQ ID NO: 1727075 - DNA, 25 bp, Homo sapien
tgattcacaggttcccggttgttaa

SEQ ID NO: 1727076 - DNA, 25 bp, Homo sapien
tgcccctgttggtgccgtctggctc

SEQ ID NO: 1727077 - DNA, 25 bp, Homo sapien
gaaggtggagcttatcttcttagac

SEQ ID NO: 1727078 - DNA, 25 bp, Homo sapien
gcaactacgaggtaaatgcctgccc

SEQ ID NO: 1727079 - DNA, 25 bp, Homo sapien
gatatctgctgccatattctgcctg

SEQ ID NO: 1727080 - DNA, 25 bp, Homo sapien
tatcaactgacacctggatatctgc

SEQ ID NO: 1727081 - DNA, 25 bp, Homo sapien
ctgcattgtccacctgactttgaat

SEQ ID NO: 1727082 - DNA, 25 bp, Homo sapien
agtccttaatatattgtgcattgca

SEQ ID NO: 1727083 - DNA, 25 bp, Homo sapien
cctctggagggactttcataagacc

SEQ ID NO: 1727084 - DNA, 25 bp, Homo sapien
tcatcaccgatggaaagtacaactc

SEQ ID NO: 1727085 - DNA, 25 bp, Homo sapien
ggaatcccgttcttcgccatgggta

SEQ ID NO: 1727086 - DNA, 25 bp, Homo sapien
tgcttgcgcagtaagcccttcctgg

SEQ ID NO: 1727087 - DNA, 25 bp, Homo sapien
atcttgcctgcagagaacgccacaa

SEQ ID NO: 1727088 - DNA, 25 bp, Homo sapien
ttcaggcactctttccactatggag

SEQ ID NO: 1727089 - DNA, 25 bp, Homo sapien
cactatggagcttgtcccatccaga

SEQ ID NO: 1727090 - DNA, 25 bp, Homo sapien
ggcactctttccactatggagcttg

SEQ ID NO: 1727091 - DNA, 25 bp, Homo sapien
ttctggctaaactgagctgacagga

SEQ ID NO: 1727092 - DNA, 25 bp, Homo sapien
catcagtggcaagggagattctggc

SEQ ID NO: 1727093 - DNA, 25 bp, Homo sapien
tctgaatacaaccaacgaaagtgcg

SEQ ID NO: 1727094 - DNA, 25 bp, Homo sapien
caggccagggttagtagatatcagc

SEQ ID NO: 1727095 - DNA, 25 bp, Homo sapien
aggaaatttgcacataactgcggcg

SEQ ID NO: 1727096 - DNA, 25 bp, Homo sapien
tttgcacataactgcggcgatcagt

SEQ ID NO: 1727097 - DNA, 25 bp, Homo sapien
gacataccggacaataatctcaata

SEQ ID NO: 1727098 - DNA, 25 bp, Homo sapien
tgaagagttgacataccggacaata

SEQ ID NO: 1727099 - DNA, 25 bp, Homo sapien
tagtcaccgatactgtctctctgtt

SEQ ID NO: 1727100 - DNA, 25 bp, Homo sapien
tttctcccagctctaatgtttgttc

SEQ ID NO: 1727101 - DNA, 25 bp, Homo sapien
tattatcaacatagtcaccgatact

SEQ ID NO: 1727102 - DNA, 25 bp, Homo sapien
cagctctaatgtttgttccccagta

SEQ ID NO: 1727103 - DNA, 25 bp, Homo sapien
cagcaaggccttaaaaccagattta

SEQ ID NO: 1727104 - DNA, 25 bp, Homo sapien
tcctttagtggttcagaaccaccaa

SEQ ID NO: 1727105 - DNA, 25 bp, Homo sapien
gggatagaaagcgttctctccattc

SEQ ID NO: 1727106 - DNA, 25 bp, Homo sapien
tggtttcagcaaggccttaaaacca

SEQ ID NO: 1727107 - DNA, 25 bp, Homo sapien
gcaagatagccagagaccagtctca

SEQ ID NO: 1727108 - DNA, 25 bp, Homo sapien
tgttgtgagaagagagtacgctgcc

SEQ ID NO: 1727109 - DNA, 25 bp, Homo sapien
tacgctgcctgatgctaccgaagga

SEQ ID NO: 1727110 - DNA, 25 bp, Homo sapien
gacagtggcatgcaaaagtgactcc

SEQ ID NO: 1727111 - DNA, 25 bp, Homo sapien
catgaaaggatcttgccttggtggc

SEQ ID NO: 1727112 - DNA, 25 bp, Homo sapien
tccccatgacgttttatgctaaacc

SEQ ID NO: 1727113 - DNA, 25 bp, Homo sapien
tgtcctgaccctttctgccctatca

SEQ ID NO: 1727114 - DNA, 25 bp, Homo sapien
tgtatctgcttgcacagtgtattcc

SEQ ID NO: 1727115 - DNA, 25 bp, Homo sapien
gcttcagtgtaattctcccttctca

SEQ ID NO: 1727116 - DNA, 25 bp, Homo sapien
tgaatctgtgaaaatgccttgccct

SEQ ID NO: 1727117 - DNA, 25 bp, Homo sapien
tgccctcatgggatggtcaataaat

SEQ ID NO: 1727118 - DNA, 25 bp, Homo sapien
ggtgaccttcccatcatccctattc

SEQ ID NO: 1727119 - DNA, 25 bp, Homo sapien
ccatcacaatattgccccatgctgt

SEQ ID NO: 1727120 - DNA, 25 bp, Homo sapien
ggtagcatagaaggcccatcacaat

SEQ ID NO: 1727121 - DNA, 25 bp, Homo sapien
attctccaaggtagcatagaaggcc

SEQ ID NO: 1727122 - DNA, 25 bp, Homo sapien
caaggtagcatagaaggcccatcac

SEQ ID NO: 1727123 - DNA, 25 bp, Homo sapien
tcttgctgcaaggcttggccagact

SEQ ID NO: 1727124 - DNA, 25 bp, Homo sapien
cttgctgcaaggcttggccagactc

SEQ ID NO: 1727125 - DNA, 25 bp, Homo sapien
tgctgcaaggcttggccagactcat

SEQ ID NO: 1727126 - DNA, 25 bp, Homo sapien
ttgctgcaaggcttggccagactca

SEQ ID NO: 1727127 - DNA, 25 bp, Homo sapien
aattgatgttaagggacacctgtac

SEQ ID NO: 1727128 - DNA, 25 bp, Homo sapien
tgaaattgatgttaagggacacctg

SEQ ID NO: 1727129 - DNA, 25 bp, Homo sapien
ctgaaattgatgttaagggacacct

SEQ ID NO: 1727130 - DNA, 25 bp, Homo sapien
gaaattgatgttaagggacacctgt

SEQ ID NO: 1727131 - DNA, 25 bp, Homo sapien
tgtccagcacgctagcaactgctgg

SEQ ID NO: 1727132 - DNA, 25 bp, Homo sapien
ctttaagggctggaattgtgcaggc

SEQ ID NO: 1727133 - DNA, 25 bp, Homo sapien
caggctggcgaccactatttggaga

SEQ ID NO: 1727134 - DNA, 25 bp, Homo sapien
tctccaagtgtgcattagtaatctg

SEQ ID NO: 1727135 - DNA, 25 bp, Homo sapien
gggaagccaatcagcttcctttctt

SEQ ID NO: 1727136 - DNA, 25 bp, Homo sapien
ggaagccaatcagcttcctttcttt

SEQ ID NO: 1727137 - DNA, 25 bp, Homo sapien
gaagccaatcagcttcctttctttt

SEQ ID NO: 1727138 - DNA, 25 bp, Homo sapien
gcttggtagatcttactccattcct

SEQ ID NO: 1727139 - DNA, 25 bp, Homo sapien
acatgtgctgaggagtggtttactt

SEQ ID NO: 1727140 - DNA, 25 bp, Homo sapien
tgttggtctgtaaggacttgcttta

SEQ ID NO: 1727141 - DNA, 25 bp, Homo sapien
gaatctaagtctctttgttggtctg

SEQ ID NO: 1727142 - DNA, 25 bp, Homo sapien
atctccaggccattgttttgttgca

SEQ ID NO: 1727143 - DNA, 25 bp, Homo sapien
catggcccacggtttcatgcagaaa

SEQ ID NO: 1727144 - DNA, 25 bp, Homo sapien
ccatgggaacaccatgtcgagcgat

SEQ ID NO: 1727145 - DNA, 25 bp, Homo sapien
tcccaaggctgagttccatggccca

SEQ ID NO: 1727146 - DNA, 25 bp, Homo sapien
cctgggctcttagaaataccgtaat

SEQ ID NO: 1727147 - DNA, 25 bp, Homo sapien
tctacaaggtactcagaggtggtgt

SEQ ID NO: 1727148 - DNA, 25 bp, Homo sapien
caatgtaagattgtccctgggctct

SEQ ID NO: 1727149 - DNA, 25 bp, Homo sapien
ggctgacaggagcacttgcacagtg

SEQ ID NO: 1727150 - DNA, 25 bp, Homo sapien
tggtaccctgataacttcttctcac

SEQ ID NO: 1727151 - DNA, 25 bp, Homo sapien
ctggtaccctgataacttcttctca

SEQ ID NO: 1727152 - DNA, 25 bp, Homo sapien
ttcttctcactcatgttatttataa

SEQ ID NO: 1727153 - DNA, 25 bp, Homo sapien
tctcactcatgttatttataatttc

SEQ ID NO: 1727154 - DNA, 25 bp, Homo sapien
ctatggtgtgctatctgcaaatgct

SEQ ID NO: 1727155 - DNA, 25 bp, Homo sapien
ggtgtgctatctgcaaatgcttgca

SEQ ID NO: 1727156 - DNA, 25 bp, Homo sapien
aatgcttgcagatcagagcactcaa

SEQ ID NO: 1727157 - DNA, 25 bp, Homo sapien
tcagagcactcaatgacaacaccaa

SEQ ID NO: 1727158 - DNA, 25 bp, Homo sapien
tgtgaagacaggacattgtccttgg

SEQ ID NO: 1727159 - DNA, 25 bp, Homo sapien
ggaaatcaaaccaggattgtgaaga

SEQ ID NO: 1727160 - DNA, 25 bp, Homo sapien
aggattgtgaagacaggacattgtc

SEQ ID NO: 1727161 - DNA, 25 bp, Homo sapien
cttggggccacatgaatgaacagca

SEQ ID NO: 1727162 - DNA, 25 bp, Homo sapien
gcaaggcacagatacatgtcaaagg

SEQ ID NO: 1727163 - DNA, 25 bp, Homo sapien
gtcaaaggtcaaagaggtgtgtttc

SEQ ID NO: 1727164 - DNA, 25 bp, Homo sapien
aggcacagatacatgtcaaaggtca

SEQ ID NO: 1727165 - DNA, 25 bp, Homo sapien
aaggtcaaagaggtgtgtttccatc

SEQ ID NO: 1727166 - DNA, 25 bp, Homo sapien
aatttcagtttctagcccctcttga

SEQ ID NO: 1727167 - DNA, 25 bp, Homo sapien
taagatctgtaaattgggtcctgac

SEQ ID NO: 1727168 - DNA, 25 bp, Homo sapien
tggaatatcacagccatctcctgta

SEQ ID NO: 1727169 - DNA, 25 bp, Homo sapien
gattgctagcctgcttttcggatgg

SEQ ID NO: 1727170 - DNA, 25 bp, Homo sapien
ttgtggcagtgtcccgcagctcttc

SEQ ID NO: 1727171 - DNA, 25 bp, Homo sapien
ctatgctaagactcttgtggcagtg

SEQ ID NO: 1727172 - DNA, 25 bp, Homo sapien
cagtgtcccgcagctcttcaaaaca

SEQ ID NO: 1727173 - DNA, 25 bp, Homo sapien
actcttgtggcagtgtcccgcagct

SEQ ID NO: 1727174 - DNA, 25 bp, Homo sapien
ggtttgtctgttgtaagccttattc

SEQ ID NO: 1727175 - DNA, 25 bp, Homo sapien
taatcatcaaaattggtttgtctgt

SEQ ID NO: 1727176 - DNA, 25 bp, Homo sapien
ttctcttttcggatatagaaaagca

SEQ ID NO: 1727177 - DNA, 25 bp, Homo sapien
cagtacgtggccctctctgtttctc

SEQ ID NO: 1727178 - DNA, 25 bp, Homo sapien
tggcgtttccactctcctttcatga

SEQ ID NO: 1727179 - DNA, 25 bp, Homo sapien
gtttccactctcctttcatgatatt

SEQ ID NO: 1727180 - DNA, 25 bp, Homo sapien
tcactggcgtttccactctcctttc

SEQ ID NO: 1727181 - DNA, 25 bp, Homo sapien
gcgtttccactctcctttcatgata

SEQ ID NO: 1727182 - DNA, 25 bp, Homo sapien
tgctcaagcagttgggaaccatttc

SEQ ID NO: 1727183 - DNA, 25 bp, Homo sapien
tcatccttgctgagataaaactgtc

SEQ ID NO: 1727184 - DNA, 25 bp, Homo sapien
tagtgaagctatagcagatcaaggc

SEQ ID NO: 1727185 - DNA, 25 bp, Homo sapien
gatgccatgttagatttgattcgga

SEQ ID NO: 1727186 - DNA, 25 bp, Homo sapien
tttatatcttccctggatgactaga

SEQ ID NO: 1727187 - DNA, 25 bp, Homo sapien
cctttatatcttccctggatgacta

SEQ ID NO: 1727188 - DNA, 25 bp, Homo sapien
cctggatgactagagtttcaggagc

SEQ ID NO: 1727189 - DNA, 25 bp, Homo sapien
ggatgactagagtttcaggagccat

SEQ ID NO: 1727190 - DNA, 25 bp, Homo sapien
atttaaggatgtggcattaactttc

SEQ ID NO: 1727191 - DNA, 25 bp, Homo sapien
cttatttaaggatgtggcattaact

SEQ ID NO: 1727192 - DNA, 25 bp, Homo sapien
tggcattaactttcttgatggagac

SEQ ID NO: 1727193 - DNA, 25 bp, Homo sapien
tccttatttaaggatgtggcattaa

SEQ ID NO: 1727194 - DNA, 25 bp, Homo sapien
atccagtctgtcctgcttcaaacat

SEQ ID NO: 1727195 - DNA, 25 bp, Homo sapien
cacatccagtctgtcctgcttcaaa

SEQ ID NO: 1727196 - DNA, 25 bp, Homo sapien
ttcccacatccagtctgtcctgctt

SEQ ID NO: 1727197 - DNA, 25 bp, Homo sapien
cttccgtgtcacttttctctggctt

SEQ ID NO: 1727198 - DNA, 25 bp, Homo sapien
ttaggtctgttgtttcctttggata

SEQ ID NO: 1727199 - DNA, 25 bp, Homo sapien
taggtctgttgtttcctttggataa

SEQ ID NO: 1727200 - DNA, 25 bp, Homo sapien
attaggtctgttgtttcctttggat

SEQ ID NO: 1727201 - DNA, 25 bp, Homo sapien
tgaattaggtctgttgtttcctttg

SEQ ID NO: 1727202 - DNA, 25 bp, Homo sapien
tatcccatggtgtttactcaacagg

SEQ ID NO: 1727203 - DNA, 25 bp, Homo sapien
tcctccgtatcccatggtgtttact

SEQ ID NO: 1727204 - DNA, 25 bp, Homo sapien
tccgtatcccatggtgtttactcaa

SEQ ID NO: 1727205 - DNA, 25 bp, Homo sapien
ctgttcctccgtatcccatggtgtt

SEQ ID NO: 1727206 - DNA, 25 bp, Homo sapien
ttttcacacaggatgttgaagttgc

SEQ ID NO: 1727207 - DNA, 25 bp, Homo sapien
cacaggatgttgaagttgcgtcgtc

SEQ ID NO: 1727208 - DNA, 25 bp, Homo sapien
gatgttgaagttgcgtcgtctgcgt

SEQ ID NO: 1727209 - DNA, 25 bp, Homo sapien
gttgaagttgcgtcgtctgcgtctg

SEQ ID NO: 1727210 - DNA, 25 bp, Homo sapien
tggaagaagactactgctcaaaagc

SEQ ID NO: 1727211 - DNA, 25 bp, Homo sapien
tctggattatgagatagcaactccc

SEQ ID NO: 1727212 - DNA, 25 bp, Homo sapien
tcaggctggttaatgtgaccttctc

SEQ ID NO: 1727213 - DNA, 25 bp, Homo sapien
gggcacagaactccatataccaggt

SEQ ID NO: 1727214 - DNA, 25 bp, Homo sapien
attccatagtcaaggattaacatgt

SEQ ID NO: 1727215 - DNA, 25 bp, Homo sapien
cattccatagtcaaggattaacatg

SEQ ID NO: 1727216 - DNA, 25 bp, Homo sapien
tagaaaatgccactctgccagaata

SEQ ID NO: 1727217 - DNA, 25 bp, Homo sapien
taaaagccaagtatcgacacctctg

SEQ ID NO: 1727218 - DNA, 25 bp, Homo sapien
cctgcctttggttcttactagaatg

SEQ ID NO: 1727219 - DNA, 25 bp, Homo sapien
ttaaaacaatatcgccctgcctttg

SEQ ID NO: 1727220 - DNA, 25 bp, Homo sapien
taacttcataattgttctccagacc

SEQ ID NO: 1727221 - DNA, 25 bp, Homo sapien
aacttcataattgttctccagacct

SEQ ID NO: 1727222 - DNA, 25 bp, Homo sapien
gtttataacttcataattgttctcc

SEQ ID NO: 1727223 - DNA, 25 bp, Homo sapien
tataacttcataattgttctccaga

SEQ ID NO: 1727224 - DNA, 25 bp, Homo sapien
tcaggtaataacgaccaactgttct

SEQ ID NO: 1727225 - DNA, 25 bp, Homo sapien
aaatttggagatcgatttacttgca

SEQ ID NO: 1727226 - DNA, 25 bp, Homo sapien
gtttccctagacattgccatgattg

SEQ ID NO: 1727227 - DNA, 25 bp, Homo sapien
ccataacacagtgggaaggattaga

SEQ ID NO: 1727228 - DNA, 25 bp, Homo sapien
cttcagttcatgcaaagattctacc

SEQ ID NO: 1727229 - DNA, 25 bp, Homo sapien
tgcttcagttcatgcaaagattcta

SEQ ID NO: 1727230 - DNA, 25 bp, Homo sapien
tttgcttcagttcatgcaaagattc

SEQ ID NO: 1727231 - DNA, 25 bp, Homo sapien
tgtttgcttcagttcatgcaaagat

SEQ ID NO: 1727232 - DNA, 25 bp, Homo sapien
cttctgctaaacaggacacagtcat

SEQ ID NO: 1727233 - DNA, 25 bp, Homo sapien
tacagttccttctgctaaacaggac

SEQ ID NO: 1727234 - DNA, 25 bp, Homo sapien
tcagtgtgcattacagttccttctg

SEQ ID NO: 1727235 - DNA, 25 bp, Homo sapien
gtgcattacagttccttctgctaaa

SEQ ID NO: 1727236 - DNA, 25 bp, Homo sapien
ttgaaatataatcgtcaagaaaaaa

SEQ ID NO: 1727237 - DNA, 25 bp, Homo sapien
tttgaaatataatcgtcaagaaaaa

SEQ ID NO: 1727238 - DNA, 25 bp, Homo sapien
ttgctagtttcacaactagcaaatg

SEQ ID NO: 1727239 - DNA, 25 bp, Homo sapien
ttcttgctagtttcacaactagcaa

SEQ ID NO: 1727240 - DNA, 25 bp, Homo sapien
tatgcctgatgtaatttggctgtga

SEQ ID NO: 1727241 - DNA, 25 bp, Homo sapien
ccaatattgtaatggaggtcctaac

SEQ ID NO: 1727242 - DNA, 25 bp, Homo sapien
ggtaagctttctactagtgattcaa

SEQ ID NO: 1727243 - DNA, 25 bp, Homo sapien
gaatgagactttcttataccaatat

SEQ ID NO: 1727244 - DNA, 25 bp, Homo sapien
tatgtttaggatagttagtgcttct

SEQ ID NO: 1727245 - DNA, 25 bp, Homo sapien
agtgtggtgttacaatctcccacta

SEQ ID NO: 1727246 - DNA, 25 bp, Homo sapien
gtgtggtgttacaatctcccactat

SEQ ID NO: 1727247 - DNA, 25 bp, Homo sapien
tggtgttacaatctcccactattat

SEQ ID NO: 1727248 - DNA, 25 bp, Homo sapien
tgggagcgcctggtcgctccagcca

SEQ ID NO: 1727249 - DNA, 25 bp, Homo sapien
taaaccgcttccagtccgaaggtga

SEQ ID NO: 1727250 - DNA, 25 bp, Homo sapien
tggaccagtccaaaacccagctcta

SEQ ID NO: 1727251 - DNA, 25 bp, Homo sapien
acccagctctattcggacttgcaca

SEQ ID NO: 1727252 - DNA, 25 bp, Homo sapien
taggtgcgcctaggaagcgccaaag

SEQ ID NO: 1727253 - DNA, 25 bp, Homo sapien
caaactgaaggaaggtgaacgcaga

SEQ ID NO: 1727254 - DNA, 25 bp, Homo sapien
aacgcagagtgttcggtacagacct

SEQ ID NO: 1727255 - DNA, 25 bp, Homo sapien
gaatccgggataatgaagcctcctg

SEQ ID NO: 1727256 - DNA, 25 bp, Homo sapien
tcacactctgcagaagacacctttg

SEQ ID NO: 1727257 - DNA, 25 bp, Homo sapien
ctatggtgaagcagcaaagtttgaa

SEQ ID NO: 1727258 - DNA, 25 bp, Homo sapien
gaccaaatgccgactagattcccat

SEQ ID NO: 1727259 - DNA, 25 bp, Homo sapien
gaagtgtcatcactgttgtagtcca

SEQ ID NO: 1727260 - DNA, 25 bp, Homo sapien
tgagtttttgttctactgttagacc

SEQ ID NO: 1727261 - DNA, 25 bp, Homo sapien
caagcatgtattccatcttttgctg

SEQ ID NO: 1727262 - DNA, 25 bp, Homo sapien
tgttagaccttcaaaacgttcagag

SEQ ID NO: 1727263 - DNA, 25 bp, Homo sapien
caaatggatagtgtctgctctttca

SEQ ID NO: 1727264 - DNA, 25 bp, Homo sapien
taaggcacgtataataaaggatact

SEQ ID NO: 1727265 - DNA, 25 bp, Homo sapien
agttatgcattccaatctcttcaca

SEQ ID NO: 1727266 - DNA, 25 bp, Homo sapien
tgtaatcatatgcttgaaattctcc

SEQ ID NO: 1727267 - DNA, 25 bp, Homo sapien
tcacattaaggcacgtataataaag

SEQ ID NO: 1727268 - DNA, 25 bp, Homo sapien
ccatataagcagtaggtggctctct

SEQ ID NO: 1727269 - DNA, 25 bp, Homo sapien
gcattcggaagtctgactgcccggg

SEQ ID NO: 1727270 - DNA, 25 bp, Homo sapien
gagctattcgttcgagcattcggaa

SEQ ID NO: 1727271 - DNA, 25 bp, Homo sapien
gatgtaatttgatactgaagacaca

SEQ ID NO: 1727272 - DNA, 25 bp, Homo sapien
tccactttgccgatacagtgcgtct

SEQ ID NO: 1727273 - DNA, 25 bp, Homo sapien
cgatacagtgcgtctgccgtaccat

SEQ ID NO: 1727274 - DNA, 25 bp, Homo sapien
ttgccgatacagtgcgtctgccgta

SEQ ID NO: 1727275 - DNA, 25 bp, Homo sapien
tttgcatccactttgccgatacagt

SEQ ID NO: 1727276 - DNA, 25 bp, Homo sapien
aagcttcaaattcttattcattgag

SEQ ID NO: 1727277 - DNA, 25 bp, Homo sapien
aatcttataagcttcaaattcttat

SEQ ID NO: 1727278 - DNA, 25 bp, Homo sapien
ttttcataaatcttataagcttcaa

SEQ ID NO: 1727279 - DNA, 25 bp, Homo sapien
aattcttattcattgagcaggtttt

SEQ ID NO: 1727280 - DNA, 25 bp, Homo sapien
gataggcaatatcaactctttaaag

SEQ ID NO: 1727281 - DNA, 25 bp, Homo sapien
gagcagtacctattatcagtaggaa

SEQ ID NO: 1727282 - DNA, 25 bp, Homo sapien
gattcggctgttctgagagcagtac

SEQ ID NO: 1727283 - DNA, 25 bp, Homo sapien
ttataactctaggagaggaggtctg

SEQ ID NO: 1727284 - DNA, 25 bp, Homo sapien
ccacatccatttctgtgccagataa

SEQ ID NO: 1727285 - DNA, 25 bp, Homo sapien
aaagctagcgagaaccattcttcca

SEQ ID NO: 1727286 - DNA, 25 bp, Homo sapien
agctagcgagaaccattcttccaga

SEQ ID NO: 1727287 - DNA, 25 bp, Homo sapien
ctgtgccagataaagctagcgagaa

SEQ ID NO: 1727288 - DNA, 25 bp, Homo sapien
acttcctttcacagcaaggtgattg

SEQ ID NO: 1727289 - DNA, 25 bp, Homo sapien
taataactagaagcacagatggatt

SEQ ID NO: 1727290 - DNA, 25 bp, Homo sapien
gatggattgattgtcacattagtgg

SEQ ID NO: 1727291 - DNA, 25 bp, Homo sapien
gggttgtcagattctctttaataac

SEQ ID NO: 1727292 - DNA, 25 bp, Homo sapien
tctccatgatccaccttagaagtca

SEQ ID NO: 1727293 - DNA, 25 bp, Homo sapien
aaatctccatgatccaccttagaag

SEQ ID NO: 1727294 - DNA, 25 bp, Homo sapien
tgcccaaatctccatgatccacctt

SEQ ID NO: 1727295 - DNA, 25 bp, Homo sapien
ccaaatctccatgatccaccttaga

SEQ ID NO: 1727296 - DNA, 25 bp, Homo sapien
gacactgattatctctcctgtgcaa

SEQ ID NO: 1727297 - DNA, 25 bp, Homo sapien
actcatgtctgcatcggtctgacac

SEQ ID NO: 1727298 - DNA, 25 bp, Homo sapien
tctcctgtgcaaagtcaggtgactg

SEQ ID NO: 1727299 - DNA, 25 bp, Homo sapien
ctgctgttacagagtctgttacaag

SEQ ID NO: 1727300 - DNA, 25 bp, Homo sapien
ccatctttgcttggacagctgtaga

SEQ ID NO: 1727301 - DNA, 25 bp, Homo sapien
cagctgtagaataggtgtggatgta

SEQ ID NO: 1727302 - DNA, 25 bp, Homo sapien
ctgataaatggagtgtccatctttg

SEQ ID NO: 1727303 - DNA, 25 bp, Homo sapien
tgccgatctgttctgtgttataaag

SEQ ID NO: 1727304 - DNA, 25 bp, Homo sapien
agcacagatattactttgattccct

SEQ ID NO: 1727305 - DNA, 25 bp, Homo sapien
tcagcacagatattactttgattcc

SEQ ID NO: 1727306 - DNA, 25 bp, Homo sapien
cagcacagatattactttgattccc

SEQ ID NO: 1727307 - DNA, 25 bp, Homo sapien
ttcagcacagatattactttgattc

SEQ ID NO: 1727308 - DNA, 25 bp, Homo sapien
atcaaccccaaactcagtctggaag

SEQ ID NO: 1727309 - DNA, 25 bp, Homo sapien
tgcttcctttcatcaaccccaaact

SEQ ID NO: 1727310 - DNA, 25 bp, Homo sapien
ctgcttcctttcatcaaccccaaac

SEQ ID NO: 1727311 - DNA, 25 bp, Homo sapien
gattggcccaatatggccttgccaa

SEQ ID NO: 1727312 - DNA, 25 bp, Homo sapien
cagctgggcagctgattggcccaat

SEQ ID NO: 1727313 - DNA, 25 bp, Homo sapien
cagtagcagcgagagtgggcaaagg

SEQ ID NO: 1727314 - DNA, 25 bp, Homo sapien
gggcagctgattggcccaatatggc

SEQ ID NO: 1727315 - DNA, 25 bp, Homo sapien
gcctatggggaggagtaatgttcaa

SEQ ID NO: 1727316 - DNA, 25 bp, Homo sapien
gggaggagtaatgttcaaaggcaac

SEQ ID NO: 1727317 - DNA, 25 bp, Homo sapien
gaggagtaatgttcaaaggcaactg

SEQ ID NO: 1727318 - DNA, 25 bp, Homo sapien
ggagtaatgttcaaaggcaactgac

SEQ ID NO: 1727319 - DNA, 25 bp, Homo sapien
tgtcctattggtgagatccccttcc

SEQ ID NO: 1727320 - DNA, 25 bp, Homo sapien
gactcagcaggacagaatttacctc

SEQ ID NO: 1727321 - DNA, 25 bp, Homo sapien
cctttaggctggtaatgtcctattg

SEQ ID NO: 1727322 - DNA, 25 bp, Homo sapien
taggacaggatgatctaaaccacaa

SEQ ID NO: 1727323 - DNA, 25 bp, Homo sapien
tgttgtagaatcaccagcgtccttg

SEQ ID NO: 1727324 - DNA, 25 bp, Homo sapien
caccagcgtccttggatctgtgctg

SEQ ID NO: 1727325 - DNA, 25 bp, Homo sapien
cacttgttgtagaatcaccagcgtc

SEQ ID NO: 1727326 - DNA, 25 bp, Homo sapien
aaagcacttgttgtagaatcaccag

SEQ ID NO: 1727327 - DNA, 25 bp, Homo sapien
gagatgtagctctgctttaaataat

SEQ ID NO: 1727328 - DNA, 25 bp, Homo sapien
ccttaattcttccagtggcagcaag

SEQ ID NO: 1727329 - DNA, 25 bp, Homo sapien
tggatgtctgagatgtagctctgct

SEQ ID NO: 1727330 - DNA, 25 bp, Homo sapien
gcaagtacagcatcattaatccctt

SEQ ID NO: 1727331 - DNA, 25 bp, Homo sapien
cgtaggcattgaagttcaagtctcc

SEQ ID NO: 1727332 - DNA, 25 bp, Homo sapien
gaactgcccagacattgctgatagg

SEQ ID NO: 1727333 - DNA, 25 bp, Homo sapien
taggcttgcacccttaagtccattc

SEQ ID NO: 1727334 - DNA, 25 bp, Homo sapien
tatcctacgaatgatacatataagt

SEQ ID NO: 1727335 - DNA, 25 bp, Homo sapien
acccacagctatggcaacctggaga

SEQ ID NO: 1727336 - DNA, 25 bp, Homo sapien
cttggaaggattcttgagtgaagca

SEQ ID NO: 1727337 - DNA, 25 bp, Homo sapien
tcagacttcctttgggctggaggac

SEQ ID NO: 1727338 - DNA, 25 bp, Homo sapien
gctggaggacaaacttagaagcttc

SEQ ID NO: 1727339 - DNA, 25 bp, Homo sapien
cctatcttcatcatcataagtcttc

SEQ ID NO: 1727340 - DNA, 25 bp, Homo sapien
ctatcttcatcatcataagtcttca

SEQ ID NO: 1727341 - DNA, 25 bp, Homo sapien
tatcttcatcatcataagtcttcat

SEQ ID NO: 1727342 - DNA, 25 bp, Homo sapien
tgtccaacataagcagctgaccaag

SEQ ID NO: 1727343 - DNA, 25 bp, Homo sapien
cattgattaggaacataacggctgt

SEQ ID NO: 1727344 - DNA, 25 bp, Homo sapien
agtcgtcttccaaatatcagtgcag

SEQ ID NO: 1727345 - DNA, 25 bp, Homo sapien
aataatttcatgactcatagcattg

SEQ ID NO: 1727346 - DNA, 25 bp, Homo sapien
tcgaaagcaaatgtataaagagggc

SEQ ID NO: 1727347 - DNA, 25 bp, Homo sapien
ttcccacagttctgtataagaaacc

SEQ ID NO: 1727348 - DNA, 25 bp, Homo sapien
gaaaccatcgaaagcaaatgtataa

SEQ ID NO: 1727349 - DNA, 25 bp, Homo sapien
ctgtataagaaaccatcgaaagcaa

SEQ ID NO: 1727350 - DNA, 25 bp, Homo sapien
ctcatgcaagatgtaagtgtggaca

SEQ ID NO: 1727351 - DNA, 25 bp, Homo sapien
tatgattattaagctgcataccaat

SEQ ID NO: 1727352 - DNA, 25 bp, Homo sapien
ttaggctacactcatgcaagatgta

SEQ ID NO: 1727353 - DNA, 25 bp, Homo sapien
gctgcataccaattaggctacactc

SEQ ID NO: 1727354 - DNA, 25 bp, Homo sapien
ctttcaatcagtatcagtctgaagt

SEQ ID NO: 1727355 - DNA, 25 bp, Homo sapien
tctgaagttgacatggttaatcgtg

SEQ ID NO: 1727356 - DNA, 25 bp, Homo sapien
gctgctgccatggtttgtgatgctt

SEQ ID NO: 1727357 - DNA, 25 bp, Homo sapien
gacatggttaatcgtgtgctcagga

SEQ ID NO: 1727358 - DNA, 25 bp, Homo sapien
ggagaacagcagggtacttgaacca

SEQ ID NO: 1727359 - DNA, 25 bp, Homo sapien
agaacagcagggtacttgaaccaac

SEQ ID NO: 1727360 - DNA, 25 bp, Homo sapien
gagaacagcagggtacttgaaccaa

SEQ ID NO: 1727361 - DNA, 25 bp, Homo sapien
gcctctggtgaggatcccctcagct

SEQ ID NO: 1727362 - DNA, 25 bp, Homo sapien
ttctcttttcacataaaggctgtcc

SEQ ID NO: 1727363 - DNA, 25 bp, Homo sapien
cctggtagctacagttgttattaaa

SEQ ID NO: 1727364 - DNA, 25 bp, Homo sapien
tttctgccaagacgctgaaggcaac

SEQ ID NO: 1727365 - DNA, 25 bp, Homo sapien
caaagctgtcatttagggaggaatt

SEQ ID NO: 1727366 - DNA, 25 bp, Homo sapien
catataaagggtaggtttcagggca

SEQ ID NO: 1727367 - DNA, 25 bp, Homo sapien
tcagaggcacggtagttactgacag

SEQ ID NO: 1727368 - DNA, 25 bp, Homo sapien
gaagatttagttagttggccaggcg

SEQ ID NO: 1727369 - DNA, 25 bp, Homo sapien
ctacacctcccaggtcagttatcat

SEQ ID NO: 1727370 - DNA, 25 bp, Homo sapien
attctccttcgctgctacttctaca

SEQ ID NO: 1727371 - DNA, 25 bp, Homo sapien
tttgcattctccttcgctgctactt

SEQ ID NO: 1727372 - DNA, 25 bp, Homo sapien
tgcattctccttcgctgctacttct

SEQ ID NO: 1727373 - DNA, 25 bp, Homo sapien
tgtgatattgttattggtgcacttt

SEQ ID NO: 1727374 - DNA, 25 bp, Homo sapien
gatattgttattggtgcactttttc

SEQ ID NO: 1727375 - DNA, 25 bp, Homo sapien
tattgttattggtgcactttttcct

SEQ ID NO: 1727376 - DNA, 25 bp, Homo sapien
ctgttgtgatattgttattggtgca

SEQ ID NO: 1727377 - DNA, 25 bp, Homo sapien
ggatttccataaaagtcacatcctg

SEQ ID NO: 1727378 - DNA, 25 bp, Homo sapien
ctaggatttccataaaagtcacatc

SEQ ID NO: 1727379 - DNA, 25 bp, Homo sapien
taggatttccataaaagtcacatcc

SEQ ID NO: 1727380 - DNA, 25 bp, Homo sapien
gatttccataaaagtcacatcctgt

SEQ ID NO: 1727381 - DNA, 25 bp, Homo sapien
tctgaagatgttgcttgtagcaaac

SEQ ID NO: 1727382 - DNA, 25 bp, Homo sapien
gcaaactgaacatgttccattagtc

SEQ ID NO: 1727383 - DNA, 25 bp, Homo sapien
cactattctgccacttctgaagatg

SEQ ID NO: 1727384 - DNA, 25 bp, Homo sapien
cctgccactattctgccacttctga

SEQ ID NO: 1727385 - DNA, 25 bp, Homo sapien
acagtcatttaagctggtgtctgct

SEQ ID NO: 1727386 - DNA, 25 bp, Homo sapien
tcacagtcatttaagctggtgtctg

SEQ ID NO: 1727387 - DNA, 25 bp, Homo sapien
cttcacagtcatttaagctggtgtc

SEQ ID NO: 1727388 - DNA, 25 bp, Homo sapien
cacagtcatttaagctggtgtctgc

SEQ ID NO: 1727389 - DNA, 25 bp, Homo sapien
acatcatgatggcagtattgcaaag

SEQ ID NO: 1727390 - DNA, 25 bp, Homo sapien
gcaaagatttatactagaggaatgg

SEQ ID NO: 1727391 - DNA, 25 bp, Homo sapien
caaagatttatactagaggaatggc

SEQ ID NO: 1727392 - DNA, 25 bp, Homo sapien
gatggcagtattgcaaagatttata

SEQ ID NO: 1727393 - DNA, 25 bp, Homo sapien
gcctccccagcaacagtggaagatt

SEQ ID NO: 1727394 - DNA, 25 bp, Homo sapien
cttagggtacggagatgcagggaaa

SEQ ID NO: 1727395 - DNA, 25 bp, Homo sapien
agggaaaggatgtccgcctccccag

SEQ ID NO: 1727396 - DNA, 25 bp, Homo sapien
ttaacatcaacccaggagattggct

SEQ ID NO: 1727397 - DNA, 25 bp, Homo sapien
atgaccaccaaagctttgttgggtt

SEQ ID NO: 1727398 - DNA, 25 bp, Homo sapien
acatgaccaccaaagctttgttggg

SEQ ID NO: 1727399 - DNA, 25 bp, Homo sapien
catgaccaccaaagctttgttgggt

SEQ ID NO: 1727400 - DNA, 25 bp, Homo sapien
caccaaagctttgttgggttttatg

SEQ ID NO: 1727401 - DNA, 25 bp, Homo sapien
ctggaatgggaggagacattgggtc

SEQ ID NO: 1727402 - DNA, 25 bp, Homo sapien
caaagcagagggtatcactggggac

SEQ ID NO: 1727403 - DNA, 25 bp, Homo sapien
aatgtttccggtgctgttttcccag

SEQ ID NO: 1727404 - DNA, 25 bp, Homo sapien
caaaggtcttgtggtggagttgaat

SEQ ID NO: 1727405 - DNA, 25 bp, Homo sapien
ttcccagatgctccacggtgtattt

SEQ ID NO: 1727406 - DNA, 25 bp, Homo sapien
gaaagatttgctcactaaagaagga

SEQ ID NO: 1727407 - DNA, 25 bp, Homo sapien
gaacacctgtactttgcttactgaa

SEQ ID NO: 1727408 - DNA, 25 bp, Homo sapien
tctgggcttggctcaagaccaagga

SEQ ID NO: 1727409 - DNA, 25 bp, Homo sapien
tcaagcacagcaggttggaatatgg

SEQ ID NO: 1727410 - DNA, 25 bp, Homo sapien
tacttataggcctggtgtcatgcta

SEQ ID NO: 1727411 - DNA, 25 bp, Homo sapien
tgtcatgctataagtatgtacatac

SEQ ID NO: 1727412 - DNA, 25 bp, Homo sapien
cctgatttgtactttccttgaaagc

SEQ ID NO: 1727413 - DNA, 25 bp, Homo sapien
tatcaagaactctggacaatggtat

SEQ ID NO: 1727414 - DNA, 25 bp, Homo sapien
tctatgcagctgtttaccatggcac

SEQ ID NO: 1727415 - DNA, 25 bp, Homo sapien
catattgctgttaccttgggagagt

SEQ ID NO: 1727416 - DNA, 25 bp, Homo sapien
tgtaccctggctcacgaaggtggga

SEQ ID NO: 1727417 - DNA, 25 bp, Homo sapien
tggacgagagtagggagatcatcac

SEQ ID NO: 1727418 - DNA, 25 bp, Homo sapien
gatgtacagtgggagaaatcacaga

SEQ ID NO: 1727419 - DNA, 25 bp, Homo sapien
tgagtggagcatatcgccaggaatt

SEQ ID NO: 1727420 - DNA, 25 bp, Homo sapien
tggtgaacataaagcgaatgatcga

SEQ ID NO: 1727421 - DNA, 25 bp, Homo sapien
ccccttgaatctactgggagcttaa

SEQ ID NO: 1727422 - DNA, 25 bp, Homo sapien
ctttgatctggcgacacatcgtggc

SEQ ID NO: 1727423 - DNA, 25 bp, Homo sapien
gagttgctattgacactgtggaaga

SEQ ID NO: 1727424 - DNA, 25 bp, Homo sapien
tggtcagcagggattatcagttgcc

SEQ ID NO: 1727425 - DNA, 25 bp, Homo sapien
ggctatgattcagacaaccctcgag

SEQ ID NO: 1727426 - DNA, 25 bp, Homo sapien
catgtatacctttaggccctggacc

SEQ ID NO: 1727427 - DNA, 25 bp, Homo sapien
gagagatactatggacttacctgaa

SEQ ID NO: 1727428 - DNA, 25 bp, Homo sapien
tggaccatccgccagtatgctggtt

SEQ ID NO: 1727429 - DNA, 25 bp, Homo sapien
gagtgaagccattcacacgtggacc

SEQ ID NO: 1727430 - DNA, 25 bp, Homo sapien
caggctcatacagcaacgacttcta

SEQ ID NO: 1727431 - DNA, 25 bp, Homo sapien
ttccatgctccaccatgttaagagc

SEQ ID NO: 1727432 - DNA, 25 bp, Homo sapien
tctattgggtgtttccatgctccac

SEQ ID NO: 1727433 - DNA, 25 bp, Homo sapien
caggtaaaagaatcatcaggctcca

SEQ ID NO: 1727434 - DNA, 25 bp, Homo sapien
gattttcacttcgaccaacctctag

SEQ ID NO: 1727435 - DNA, 25 bp, Homo sapien
ctagttttgggcgaagtccctggca

SEQ ID NO: 1727436 - DNA, 25 bp, Homo sapien
tactgtgacgggatcccactctctg

SEQ ID NO: 1727437 - DNA, 25 bp, Homo sapien
tccctggcaattcggaggtacttct

SEQ ID NO: 1727438 - DNA, 25 bp, Homo sapien
taccagtgagtaggacgtacacctt

SEQ ID NO: 1727439 - DNA, 25 bp, Homo sapien
ctcccacagcggagtccaaaacagg

SEQ ID NO: 1727440 - DNA, 25 bp, Homo sapien
tttcagatcgctccattcttctggc

SEQ ID NO: 1727441 - DNA, 25 bp, Homo sapien
tccaaaacaggcctaccagtgagta

SEQ ID NO: 1727442 - DNA, 25 bp, Homo sapien
taaacgtcatcaggaatgcgcccat

SEQ ID NO: 1727443 - DNA, 25 bp, Homo sapien
gcttagagtaattcgcgcccaaaca

SEQ ID NO: 1727444 - DNA, 25 bp, Homo sapien
ttcttgcacccttctgagagccgcg

SEQ ID NO: 1727445 - DNA, 25 bp, Homo sapien
cattcgtaaacagaggagacccgga

SEQ ID NO: 1727446 - DNA, 25 bp, Homo sapien
gccggttaaggatatcacgactcac

SEQ ID NO: 1727447 - DNA, 25 bp, Homo sapien
taaaactcatccctgaactttagat

SEQ ID NO: 1727448 - DNA, 25 bp, Homo sapien
cacccagccggttaaggatatcacg

SEQ ID NO: 1727449 - DNA, 25 bp, Homo sapien
ctgaactttagatccacccagccgg

SEQ ID NO: 1727450 - DNA, 25 bp, Homo sapien
aaaaaaagctaaagccttgcacaat

SEQ ID NO: 1727451 - DNA, 25 bp, Homo sapien
caaaaaaagctaaagccttgcacaa

SEQ ID NO: 1727452 - DNA, 25 bp, Homo sapien
tgacaacacaacttcctcattatcc

SEQ ID NO: 1727453 - DNA, 25 bp, Homo sapien
caacacaacttcctcattatccttt

SEQ ID NO: 1727454 - DNA, 25 bp, Homo sapien
gacaacacaacttcctcattatcct

SEQ ID NO: 1727455 - DNA, 25 bp, Homo sapien
ctgacaacacaacttcctcattatc

SEQ ID NO: 1727456 - DNA, 25 bp, Homo sapien
agccatagtgcttggccacagttga

SEQ ID NO: 1727457 - DNA, 25 bp, Homo sapien
gagccatagtgcttggccacagttg

SEQ ID NO: 1727458 - DNA, 25 bp, Homo sapien
tgagccatagtgcttggccacagtt

SEQ ID NO: 1727459 - DNA, 25 bp, Homo sapien
aagacagatctttcagatgattttt

SEQ ID NO: 1727460 - DNA, 25 bp, Homo sapien
gaagacagatctttcagatgatttt

SEQ ID NO: 1727461 - DNA, 25 bp, Homo sapien
gacagaggttgccaggtttttctct

SEQ ID NO: 1727462 - DNA, 25 bp, Homo sapien
ccgtgttttaggttagtgtgctttg

SEQ ID NO: 1727463 - DNA, 25 bp, Homo sapien
ccatcatagtttgcaaatggtctct

SEQ ID NO: 1727464 - DNA, 25 bp, Homo sapien
gtttgcaaatggtctctggtactct

SEQ ID NO: 1727465 - DNA, 25 bp, Homo sapien
ctgctgaaggcaaataccgtcacat

SEQ ID NO: 1727466 - DNA, 25 bp, Homo sapien
tctgctgaaggcaaataccgtcaca

SEQ ID NO: 1727467 - DNA, 25 bp, Homo sapien
ctttaatactgttactcaaaattgt

SEQ ID NO: 1727468 - DNA, 25 bp, Homo sapien
tttaatactgttactcaaaattgtc

SEQ ID NO: 1727469 - DNA, 25 bp, Homo sapien
tctttaatactgttactcaaaattg

SEQ ID NO: 1727470 - DNA, 25 bp, Homo sapien
tttcttcaggaagttgagatggtat

SEQ ID NO: 1727471 - DNA, 25 bp, Homo sapien
ttcttcaggaagttgagatggtatt

SEQ ID NO: 1727472 - DNA, 25 bp, Homo sapien
ttttcttcaggaagttgagatggta

SEQ ID NO: 1727473 - DNA, 25 bp, Homo sapien
cttttcttcaggaagttgagatggt

SEQ ID NO: 1727474 - DNA, 25 bp, Homo sapien
taactgtatcttgggtatggtgact

SEQ ID NO: 1727475 - DNA, 25 bp, Homo sapien
tcagaaacactgctacagaaaaatg

SEQ ID NO: 1727476 - DNA, 25 bp, Homo sapien
gagttccaattaggatcagtttgct

SEQ ID NO: 1727477 - DNA, 25 bp, Homo sapien
caccataggttacttttatccatag

SEQ ID NO: 1727478 - DNA, 25 bp, Homo sapien
ggagggactttcagagtttcacact

SEQ ID NO: 1727479 - DNA, 25 bp, Homo sapien
gggactttcagagtttcacactgtt

SEQ ID NO: 1727480 - DNA, 25 bp, Homo sapien
tgggagggactttcagagtttcaca

SEQ ID NO: 1727481 - DNA, 25 bp, Homo sapien
tttgggagggactttcagagtttca

SEQ ID NO: 1727482 - DNA, 25 bp, Homo sapien
cttcttcattagctttgtctcgtgc

SEQ ID NO: 1727483 - DNA, 25 bp, Homo sapien
ctgtagtaatgccagaccttcttca

SEQ ID NO: 1727484 - DNA, 25 bp, Homo sapien
cattagctttgtctcgtgccctttc

SEQ ID NO: 1727485 - DNA, 25 bp, Homo sapien
gtagtaatgccagaccttcttcatt

SEQ ID NO: 1727486 - DNA, 25 bp, Homo sapien
tacccgtgacgatacaggatgcttc

SEQ ID NO: 1727487 - DNA, 25 bp, Homo sapien
acatatattagtttcccgtggctgc

SEQ ID NO: 1727488 - DNA, 25 bp, Homo sapien
cattggatttaggacgtacccgtga

SEQ ID NO: 1727489 - DNA, 25 bp, Homo sapien
gattcaacccactacaaagggaatg

SEQ ID NO: 1727490 - DNA, 25 bp, Homo sapien
tatacagctctaaaggatttaaaga

SEQ ID NO: 1727491 - DNA, 25 bp, Homo sapien
tggccatcctgtcacacctttaact

SEQ ID NO: 1727492 - DNA, 25 bp, Homo sapien
caaacatatggttagtgttcacatt

SEQ ID NO: 1727493 - DNA, 25 bp, Homo sapien
tatttcaaatcctagatatcctatc

SEQ ID NO: 1727494 - DNA, 25 bp, Homo sapien
taaggagatgtacatgaacacttcc

SEQ ID NO: 1727495 - DNA, 25 bp, Homo sapien
caagtgtaaatctagcagagcccag

SEQ ID NO: 1727496 - DNA, 25 bp, Homo sapien
ccaatgctggtagggtcagagatcc

SEQ ID NO: 1727497 - DNA, 25 bp, Homo sapien
cttcctcaaaacgtaccaatgctgg

SEQ ID NO: 1727498 - DNA, 25 bp, Homo sapien
ccagtcattaactctgtggtctcta

SEQ ID NO: 1727499 - DNA, 25 bp, Homo sapien
atattcccagtcattaactctgtgg

SEQ ID NO: 1727500 - DNA, 25 bp, Homo sapien
ttccacctcacttgccagaatctga

SEQ ID NO: 1727501 - DNA, 25 bp, Homo sapien
tcccagtcattaactctgtggtctc

SEQ ID NO: 1727502 - DNA, 25 bp, Homo sapien
gagagagtactccactactatttat

SEQ ID NO: 1727503 - DNA, 25 bp, Homo sapien
aagttccggaagagagagtactcca

SEQ ID NO: 1727504 - DNA, 25 bp, Homo sapien
ttttctgagaaagttccggaagaga

SEQ ID NO: 1727505 - DNA, 25 bp, Homo sapien
aagtgtgggtgctttgagagttttc

SEQ ID NO: 1727506 - DNA, 25 bp, Homo sapien
aattgtcaacgaatcgccattcttc

SEQ ID NO: 1727507 - DNA, 25 bp, Homo sapien
aacgaatcgccattcttctttcaaa

SEQ ID NO: 1727508 - DNA, 25 bp, Homo sapien
gatagtattaaatgtagttgttaac

SEQ ID NO: 1727509 - DNA, 25 bp, Homo sapien
tcaataattgtcaacgaatcgccat

SEQ ID NO: 1727510 - DNA, 25 bp, Homo sapien
gaagaatatccaagtcctttagaag

SEQ ID NO: 1727511 - DNA, 25 bp, Homo sapien
aagatgcatccagtttcttataggc

SEQ ID NO: 1727512 - DNA, 25 bp, Homo sapien
gcattctggtttggaattagcgcca

SEQ ID NO: 1727513 - DNA, 25 bp, Homo sapien
cttcttcaatgaaggttgacatgct

SEQ ID NO: 1727514 - DNA, 25 bp, Homo sapien
taagccattggctacagaatgaatg

SEQ ID NO: 1727515 - DNA, 25 bp, Homo sapien
ccaaagttaaagatagcaggcatat

SEQ ID NO: 1727516 - DNA, 25 bp, Homo sapien
tccagatgaccagacagaaactgta

SEQ ID NO: 1727517 - DNA, 25 bp, Homo sapien
cagtcttcagaactacattagatgc

SEQ ID NO: 1727518 - DNA, 25 bp, Homo sapien
tattcacatatataagcttattatc

SEQ ID NO: 1727519 - DNA, 25 bp, Homo sapien
tacactaggttataacttattcaca

SEQ ID NO: 1727520 - DNA, 25 bp, Homo sapien
aaaacccaagacagtatactgtagt

SEQ ID NO: 1727521 - DNA, 25 bp, Homo sapien
gacagtatactgtagtttgttagaa

SEQ ID NO: 1727522 - DNA, 25 bp, Homo sapien
gggagaatgtcaccaagccattcat

SEQ ID NO: 1727523 - DNA, 25 bp, Homo sapien
gagaacttatttactcctgggagaa

SEQ ID NO: 1727524 - DNA, 25 bp, Homo sapien
gatacagtggtggtgcagacattcc

SEQ ID NO: 1727525 - DNA, 25 bp, Homo sapien
ggtaataggcctcatgtgagtccca

SEQ ID NO: 1727526 - DNA, 25 bp, Homo sapien
tttgttccctgaaggatctaaagcc

SEQ ID NO: 1727527 - DNA, 25 bp, Homo sapien
tgttccctgaaggatctaaagccat

SEQ ID NO: 1727528 - DNA, 25 bp, Homo sapien
ttgttccctgaaggatctaaagcca

SEQ ID NO: 1727529 - DNA, 25 bp, Homo sapien
agacttgagtgggtcgggtcgttat

SEQ ID NO: 1727530 - DNA, 25 bp, Homo sapien
acttgagtgggtcgggtcgttatga

SEQ ID NO: 1727531 - DNA, 25 bp, Homo sapien
gagtgggtcgggtcgttatgaggaa

SEQ ID NO: 1727532 - DNA, 25 bp, Homo sapien
agaaagacttgagtgggtcgggtcg

SEQ ID NO: 1727533 - DNA, 25 bp, Homo sapien
gtaatttggtagaacagtttagcac

SEQ ID NO: 1727534 - DNA, 25 bp, Homo sapien
agtaatttggtagaacagtttagca

SEQ ID NO: 1727535 - DNA, 25 bp, Homo sapien
tgagtcagataacccagagacaagc

SEQ ID NO: 1727536 - DNA, 25 bp, Homo sapien
ctgagtcagataacccagagacaag

SEQ ID NO: 1727537 - DNA, 25 bp, Homo sapien
gataacccagagacaagccaatcat

SEQ ID NO: 1727538 - DNA, 25 bp, Homo sapien
gtcagataacccagagacaagccaa

SEQ ID NO: 1727539 - DNA, 25 bp, Homo sapien
aaatccggccatgaatccaacacca

SEQ ID NO: 1727540 - DNA, 25 bp, Homo sapien
gatttatgttcatcaccgctccgta

SEQ ID NO: 1727541 - DNA, 25 bp, Homo sapien
ctctctttgtcgtcgggtgataaca

SEQ ID NO: 1727542 - DNA, 25 bp, Homo sapien
gggttcccacgatttatgttcatca

SEQ ID NO: 1727543 - DNA, 25 bp, Homo sapien
cttccaatagctgtcgataagccct

SEQ ID NO: 1727544 - DNA, 25 bp, Homo sapien
tagctgtcgataagccctgacatcc

SEQ ID NO: 1727545 - DNA, 25 bp, Homo sapien
tgtagaacacagcataggcattagt

SEQ ID NO: 1727546 - DNA, 25 bp, Homo sapien
cacagcataggcattagtataatga

SEQ ID NO: 1727547 - DNA, 25 bp, Homo sapien
tacatacaggtgtgtatagataatc

SEQ ID NO: 1727548 - DNA, 25 bp, Homo sapien
gattctcactgatatccatccatat

SEQ ID NO: 1727549 - DNA, 25 bp, Homo sapien
gacaaatgagtgttcttacaacact

SEQ ID NO: 1727550 - DNA, 25 bp, Homo sapien
catgcatgcctcattagaagtgaca

SEQ ID NO: 1727551 - DNA, 25 bp, Homo sapien
ataaaaggcctacctattggctaag

SEQ ID NO: 1727552 - DNA, 25 bp, Homo sapien
tggctaagacctaaattatagttat

SEQ ID NO: 1727553 - DNA, 25 bp, Homo sapien
tattggctaagacctaaattatagt

SEQ ID NO: 1727554 - DNA, 25 bp, Homo sapien
ggcctacctattggctaagacctaa

SEQ ID NO: 1727555 - DNA, 25 bp, Homo sapien
tctttgggttatgaccatgtgttaa

SEQ ID NO: 1727556 - DNA, 25 bp, Homo sapien
gcttttccttattggaggacctcag

SEQ ID NO: 1727557 - DNA, 25 bp, Homo sapien
caccgcacctgactacgaataaatt

SEQ ID NO: 1727558 - DNA, 25 bp, Homo sapien
tccaggtggatagaagcttttcctt

SEQ ID NO: 1727559 - DNA, 25 bp, Homo sapien
gaaaaatgaacagccttgaaggaag

SEQ ID NO: 1727560 - DNA, 25 bp, Homo sapien
ttgaattggcaaccgctttggaaac

SEQ ID NO: 1727561 - DNA, 25 bp, Homo sapien
tagctttatattcaactgctttgaa

SEQ ID NO: 1727562 - DNA, 25 bp, Homo sapien
acatcatataactcactctgcagcc

SEQ ID NO: 1727563 - DNA, 25 bp, Homo sapien
taagtaccccagttactgctacgtg

SEQ ID NO: 1727564 - DNA, 25 bp, Homo sapien
gaaatccagagtgcctggatattcc

SEQ ID NO: 1727565 - DNA, 25 bp, Homo sapien
caaatgcaaaaacttggtttacata

SEQ ID NO: 1727566 - DNA, 25 bp, Homo sapien
gtacttctatagcagtaagtcctgc

SEQ ID NO: 1727567 - DNA, 25 bp, Homo sapien
tgacacaaaaacaaataggacctca

SEQ ID NO: 1727568 - DNA, 25 bp, Homo sapien
aatgacacaaaaacaaataggacct

SEQ ID NO: 1727569 - DNA, 25 bp, Homo sapien
ctagaccagaatgacacaaaaacaa

SEQ ID NO: 1727570 - DNA, 25 bp, Homo sapien
acacaaaaacaaataggacctcaga

SEQ ID NO: 1727571 - DNA, 25 bp, Homo sapien
tgatggaccaggagaccgggtttcc

SEQ ID NO: 1727572 - DNA, 25 bp, Homo sapien
tagatccgcattggcaacactcagg

SEQ ID NO: 1727573 - DNA, 25 bp, Homo sapien
tagacgccgtgttgtcatccaggac

SEQ ID NO: 1727574 - DNA, 25 bp, Homo sapien
agacattgttcattgcctccccggg

SEQ ID NO: 1727575 - DNA, 25 bp, Homo sapien
cccaaacacccctatatataaatct

SEQ ID NO: 1727576 - DNA, 25 bp, Homo sapien
taaaaaaggatacatgatttagtga

SEQ ID NO: 1727577 - DNA, 25 bp, Homo sapien
tgcctccagtactgattataaagaa

SEQ ID NO: 1727578 - DNA, 25 bp, Homo sapien
ttttcatatgtaatcaaagggttaa

SEQ ID NO: 1727579 - DNA, 25 bp, Homo sapien
tatttcttttctctttggagctttg

SEQ ID NO: 1727580 - DNA, 25 bp, Homo sapien
ctctttggagctttgcttcctcttt

SEQ ID NO: 1727581 - DNA, 25 bp, Homo sapien
ttcttttctctttggagctttgctt

SEQ ID NO: 1727582 - DNA, 25 bp, Homo sapien
cttttctctttggagctttgcttcc

SEQ ID NO: 1727583 - DNA, 25 bp, Homo sapien
gaggacaatggtcacacctgtgtcc

SEQ ID NO: 1727584 - DNA, 25 bp, Homo sapien
ataatggaatgtagatcaaatggtc

SEQ ID NO: 1727585 - DNA, 25 bp, Homo sapien
aaataatggaatgtagatcaaatgg

SEQ ID NO: 1727586 - DNA, 25 bp, Homo sapien
ctctggaggacaatggtcacacctg

SEQ ID NO: 1727587 - DNA, 25 bp, Homo sapien
tttgtccattccgaatccactccca

SEQ ID NO: 1727588 - DNA, 25 bp, Homo sapien
gaaatgccccgaagtatgtttgctt

SEQ ID NO: 1727589 - DNA, 25 bp, Homo sapien
ggagctgaggcgcaaaggacaccct

SEQ ID NO: 1727590 - DNA, 25 bp, Homo sapien
ccccactgaaatgccccgaagtatg

SEQ ID NO: 1727591 - DNA, 25 bp, Homo sapien
gctttccaaggacgctccttgaggt

SEQ ID NO: 1727592 - DNA, 25 bp, Homo sapien
gattcagtcccctcttacttttcac

SEQ ID NO: 1727593 - DNA, 25 bp, Homo sapien
cctgctccctttgtcattcgctgat

SEQ ID NO: 1727594 - DNA, 25 bp, Homo sapien
tagccattcagaagaagcttgacac

SEQ ID NO: 1727595 - DNA, 25 bp, Homo sapien
agccccaggctaaccgcgtgcggaa

SEQ ID NO: 1727596 - DNA, 25 bp, Homo sapien
agcagcaagcgcctgctgagctccg

SEQ ID NO: 1727597 - DNA, 25 bp, Homo sapien
gttccttctttgaccggttcaagca

SEQ ID NO: 1727598 - DNA, 25 bp, Homo sapien
tgagctccggaaagcgcgggaccac

SEQ ID NO: 1727599 - DNA, 25 bp, Homo sapien
aaagcgcgggaccaccaagccctgg

SEQ ID NO: 1727600 - DNA, 25 bp, Homo sapien
gggattcgcagctccctgaggcccc

SEQ ID NO: 1727601 - DNA, 25 bp, Homo sapien
ctccctgaggcccccgggtctccat

SEQ ID NO: 1727602 - DNA, 25 bp, Homo sapien
cgcagctccctgaggcccccgggtc

SEQ ID NO: 1727603 - DNA, 25 bp, Homo sapien
cagctccctgaggcccccgggtctc

SEQ ID NO: 1727604 - DNA, 25 bp, Homo sapien
gcccgaggtccgagggcccgatctg

SEQ ID NO: 1727605 - DNA, 25 bp, Homo sapien
tgccgttctgtcctcgtggccgccg

SEQ ID NO: 1727606 - DNA, 25 bp, Homo sapien
tccgggcgcccggagctagcggagc

SEQ ID NO: 1727607 - DNA, 25 bp, Homo sapien
cctggcttcggctcgcccctgccgt

SEQ ID NO: 1727608 - DNA, 25 bp, Homo sapien
tgtcgttgaaagacagaagggtagt

SEQ ID NO: 1727609 - DNA, 25 bp, Homo sapien
gggctacacgcctgccagaaattcg

SEQ ID NO: 1727610 - DNA, 25 bp, Homo sapien
tatttgggtgggtctgctgcgtccc

SEQ ID NO: 1727611 - DNA, 25 bp, Homo sapien
tctccacccgcatgaggaaggtcct

SEQ ID NO: 1727612 - DNA, 25 bp, Homo sapien
tcctcgtggtcatgcgacccttggc

SEQ ID NO: 1727613 - DNA, 25 bp, Homo sapien
tcatgcgacccttggcccaggaggt

SEQ ID NO: 1727614 - DNA, 25 bp, Homo sapien
aagtgctcctcagtcctcgtggtca

SEQ ID NO: 1727615 - DNA, 25 bp, Homo sapien
aggtctgcaacacttcttgtgttac

SEQ ID NO: 1727616 - DNA, 25 bp, Homo sapien
ggctgtccctctctactgctgcgaa

SEQ ID NO: 1727617 - DNA, 25 bp, Homo sapien
tgctgcgaaaagtgagcgcggtcac

SEQ ID NO: 1727618 - DNA, 25 bp, Homo sapien
taatttcctcgagccaagtccctgg

SEQ ID NO: 1727619 - DNA, 25 bp, Homo sapien
ggatgcccctgttcgtgcctggaga

SEQ ID NO: 1727620 - DNA, 25 bp, Homo sapien
cccggaacatttctcgagctactca

SEQ ID NO: 1727621 - DNA, 25 bp, Homo sapien
agttcttaatctgcctccccgaagc

SEQ ID NO: 1727622 - DNA, 25 bp, Homo sapien
tgcaggttggagctcccagaatagc

SEQ ID NO: 1727623 - DNA, 25 bp, Homo sapien
aggttccttctgtaggttaattgca

SEQ ID NO: 1727624 - DNA, 25 bp, Homo sapien
tcatttcaaaactcccacattctgc

SEQ ID NO: 1727625 - DNA, 25 bp, Homo sapien
atcaattgagagttattccaaaatg

SEQ ID NO: 1727626 - DNA, 25 bp, Homo sapien
agatcaattgagagttattccaaaa

SEQ ID NO: 1727627 - DNA, 25 bp, Homo sapien
agagatcaattgagagttattccaa

SEQ ID NO: 1727628 - DNA, 25 bp, Homo sapien
attagctattgtttgcagtaaagcc

SEQ ID NO: 1727629 - DNA, 25 bp, Homo sapien
gaagagagtcacttgctgctttggt

SEQ ID NO: 1727630 - DNA, 25 bp, Homo sapien
agagagcagacttcaaacttcactt

SEQ ID NO: 1727631 - DNA, 25 bp, Homo sapien
tttttgaactacacaaggagaatgg

SEQ ID NO: 1727632 - DNA, 25 bp, Homo sapien
tcttgcagtaaatactccttcaggt

SEQ ID NO: 1727633 - DNA, 25 bp, Homo sapien
cttgcagtaaatactccttcaggtg

SEQ ID NO: 1727634 - DNA, 25 bp, Homo sapien
ttcttgcagtaaatactccttcagg

SEQ ID NO: 1727635 - DNA, 25 bp, Homo sapien
aattcttgcagtaaatactccttca

SEQ ID NO: 1727636 - DNA, 25 bp, Homo sapien
caagatcgtgccgttgcactgcagt

SEQ ID NO: 1727637 - DNA, 25 bp, Homo sapien
aaatacagaattagccggggtgatg

SEQ ID NO: 1727638 - DNA, 25 bp, Homo sapien
cagaattagccggggtgatggcaca

SEQ ID NO: 1727639 - DNA, 25 bp, Homo sapien
tacagaattagccggggtgatggca

SEQ ID NO: 1727640 - DNA, 25 bp, Homo sapien
tcaggctcttcaaataacagggttc

SEQ ID NO: 1727641 - DNA, 25 bp, Homo sapien
ccaggacatttgtaaacgggataag

SEQ ID NO: 1727642 - DNA, 25 bp, Homo sapien
ttcactttggatgcactcccaggac

SEQ ID NO: 1727643 - DNA, 25 bp, Homo sapien
cagggttctgcttggatcaggaaca

SEQ ID NO: 1727644 - DNA, 25 bp, Homo sapien
agagatttcttagtattgaggatgc

SEQ ID NO: 1727645 - DNA, 25 bp, Homo sapien
ctaacacaattttagataatcatgt

SEQ ID NO: 1727646 - DNA, 25 bp, Homo sapien
taagatcaaagagccaagatccagt

SEQ ID NO: 1727647 - DNA, 25 bp, Homo sapien
ggagtagaggtaagatcaaagagcc

SEQ ID NO: 1727648 - DNA, 25 bp, Homo sapien
ttctggaagtctttgatgcggttca

SEQ ID NO: 1727649 - DNA, 25 bp, Homo sapien
ctgatcctgggggttatgcgattct

SEQ ID NO: 1727650 - DNA, 25 bp, Homo sapien
tcctgggggttatgcgattctgaca

SEQ ID NO: 1727651 - DNA, 25 bp, Homo sapien
gaagtctttgatgcggttcatccac

SEQ ID NO: 1727652 - DNA, 25 bp, Homo sapien
ccaaaaggagatcatggttgtaaac

SEQ ID NO: 1727653 - DNA, 25 bp, Homo sapien
acaaaaataagcagtaagtcaaatg

SEQ ID NO: 1727654 - DNA, 25 bp, Homo sapien
caccaagcactggtaacatccaaca

SEQ ID NO: 1727655 - DNA, 25 bp, Homo sapien
caaatgtaatgattcccaaaaggag

SEQ ID NO: 1727656 - DNA, 25 bp, Homo sapien
gacaaaatgcgaattctgattcaac

SEQ ID NO: 1727657 - DNA, 25 bp, Homo sapien
taatgtgaatcatccaatgatcttg

SEQ ID NO: 1727658 - DNA, 25 bp, Homo sapien
gccgtttcacagaacgcccatcttg

SEQ ID NO: 1727659 - DNA, 25 bp, Homo sapien
cttgagtagcatcagtatatgtttg

SEQ ID NO: 1727660 - DNA, 25 bp, Homo sapien
tttaagcaataatcacgagaatttt

SEQ ID NO: 1727661 - DNA, 25 bp, Homo sapien
atagaagcattttatcactaactac

SEQ ID NO: 1727662 - DNA, 25 bp, Homo sapien
tatcactaactacatgacagtaata

SEQ ID NO: 1727663 - DNA, 25 bp, Homo sapien
aatttaagcaataatcacgagaatt

SEQ ID NO: 1727664 - DNA, 25 bp, Homo sapien
gctgcagtgagttacaatgatgcca

SEQ ID NO: 1727665 - DNA, 25 bp, Homo sapien
accagtcatgtaatgttttattttc

SEQ ID NO: 1727666 - DNA, 25 bp, Homo sapien
agtgagttacaatgatgccactaca

SEQ ID NO: 1727667 - DNA, 25 bp, Homo sapien
agttacaatgatgccactacattcc

SEQ ID NO: 1727668 - DNA, 25 bp, Homo sapien
gagtcattcgcaggaaggagctttt

SEQ ID NO: 1727669 - DNA, 25 bp, Homo sapien
gaaagttaagtgagtgatctacaca

SEQ ID NO: 1727670 - DNA, 25 bp, Homo sapien
tctgtgtccaggtcgccggatgtgt

SEQ ID NO: 1727671 - DNA, 25 bp, Homo sapien
tagaagaaatcacatgtggactgtt

SEQ ID NO: 1727672 - DNA, 25 bp, Homo sapien
cgtgatgagatatcctgaggtccag

SEQ ID NO: 1727673 - DNA, 25 bp, Homo sapien
taataatctgttcacgacaggtaca

SEQ ID NO: 1727674 - DNA, 25 bp, Homo sapien
gaattttgctcgtgatgagatatcc

SEQ ID NO: 1727675 - DNA, 25 bp, Homo sapien
tctgttcacgacaggtacagagacc

SEQ ID NO: 1727676 - DNA, 25 bp, Homo sapien
tcaattgatgagaaaacgtaatgct

SEQ ID NO: 1727677 - DNA, 25 bp, Homo sapien
ccttccaagtggcaaacagccttgc

SEQ ID NO: 1727678 - DNA, 25 bp, Homo sapien
gaaactgctggcaatattctaatca

SEQ ID NO: 1727679 - DNA, 25 bp, Homo sapien
tacattcttgaatattccccaccac

SEQ ID NO: 1727680 - DNA, 25 bp, Homo sapien
ggaaggctattgtcgctgcttgttc

SEQ ID NO: 1727681 - DNA, 25 bp, Homo sapien
gggttaaactgagtgacagaggctc

SEQ ID NO: 1727682 - DNA, 25 bp, Homo sapien
tgagatgagttgtttgtgaggtcat

SEQ ID NO: 1727683 - DNA, 25 bp, Homo sapien
catttgtggggttaaactgagtgac

SEQ ID NO: 1727684 - DNA, 25 bp, Homo sapien
tcagcttcttaggaggctgagacac

SEQ ID NO: 1727685 - DNA, 25 bp, Homo sapien
ctcagcttcttaggaggctgagaca

SEQ ID NO: 1727686 - DNA, 25 bp, Homo sapien
aactggagtaaagatgctgcgcaaa

SEQ ID NO: 1727687 - DNA, 25 bp, Homo sapien
gatgctgcgcaaaaggccaaaatga

SEQ ID NO: 1727688 - DNA, 25 bp, Homo sapien
gccaaaatgatgtcaaagcagtgta

SEQ ID NO: 1727689 - DNA, 25 bp, Homo sapien
ggccaaaatgatgtcaaagcagtgt

SEQ ID NO: 1727690 - DNA, 25 bp, Homo sapien
acaactgctgctgacaagtacccaa

SEQ ID NO: 1727691 - DNA, 25 bp, Homo sapien
cggagataacaatagtacttccatt

SEQ ID NO: 1727692 - DNA, 25 bp, Homo sapien
aagtacccaagagcatatctgtgcc

SEQ ID NO: 1727693 - DNA, 25 bp, Homo sapien
tgtaaacggagataacaatagtact

SEQ ID NO: 1727694 - DNA, 25 bp, Homo sapien
ctgagatttaagatatccagatatt

SEQ ID NO: 1727695 - DNA, 25 bp, Homo sapien
tgagatttaagatatccagatattt

SEQ ID NO: 1727696 - DNA, 25 bp, Homo sapien
gatgctgctagcacatatggcaaat

SEQ ID NO: 1727697 - DNA, 25 bp, Homo sapien
gaggccaccataatctcccaactga

SEQ ID NO: 1727698 - DNA, 25 bp, Homo sapien
cattgagcagtaatccagaggctaa

SEQ ID NO: 1727699 - DNA, 25 bp, Homo sapien
gatattccgatttaggaggtctgac

SEQ ID NO: 1727700 - DNA, 25 bp, Homo sapien
tcaatgcattggcagatgaagcatg

SEQ ID NO: 1727701 - DNA, 25 bp, Homo sapien
gcattggcagatgaagcatggtaac

SEQ ID NO: 1727702 - DNA, 25 bp, Homo sapien
aatgcattggcagatgaagcatggt

SEQ ID NO: 1727703 - DNA, 25 bp, Homo sapien
tgcattggcagatgaagcatggtaa

SEQ ID NO: 1727704 - DNA, 25 bp, Homo sapien
ctcctcagctaaatttctatgtttg

SEQ ID NO: 1727705 - DNA, 25 bp, Homo sapien
caaaacactagaagacaaggcagca

SEQ ID NO: 1727706 - DNA, 25 bp, Homo sapien
tccaatttccaagtacatgtccctc

SEQ ID NO: 1727707 - DNA, 25 bp, Homo sapien
tctgagaccacaacaaaatagactt

SEQ ID NO: 1727708 - DNA, 25 bp, Homo sapien
gatttcttctcggtttgggtctgct

SEQ ID NO: 1727709 - DNA, 25 bp, Homo sapien
cattaccttaataactaaccttctg

SEQ ID NO: 1727710 - DNA, 25 bp, Homo sapien
tcttctcggtttgggtctgctgctg

SEQ ID NO: 1727711 - DNA, 25 bp, Homo sapien
ttctcggtttgggtctgctgctggt

SEQ ID NO: 1727712 - DNA, 25 bp, Homo sapien
tgaacttgtcaatttgtcacctttc

SEQ ID NO: 1727713 - DNA, 25 bp, Homo sapien
tgatgggaggatttagccgtgtcac

SEQ ID NO: 1727714 - DNA, 25 bp, Homo sapien
tgtcattctggtacccagtctttgg

SEQ ID NO: 1727715 - DNA, 25 bp, Homo sapien
ttgtcaatttgtcacctttcagcag

SEQ ID NO: 1727716 - DNA, 25 bp, Homo sapien
tgtaaccttgagttgattcaacttc

SEQ ID NO: 1727717 - DNA, 25 bp, Homo sapien
cagtattttcaatacccttgtccag

SEQ ID NO: 1727718 - DNA, 25 bp, Homo sapien
aatacccttgtccagccaactctga

SEQ ID NO: 1727719 - DNA, 25 bp, Homo sapien
tctgtaaccttgagttgattcaact

SEQ ID NO: 1727720 - DNA, 25 bp, Homo sapien
cactcagaagcagcgcaagggaaag

SEQ ID NO: 1727721 - DNA, 25 bp, Homo sapien
tggtgaatccagttgtgccaagggt

SEQ ID NO: 1727722 - DNA, 25 bp, Homo sapien
gccaagggtaatgtcatggagacac

SEQ ID NO: 1727723 - DNA, 25 bp, Homo sapien
tagaagaagacgacatggtgaatcc

SEQ ID NO: 1727724 - DNA, 25 bp, Homo sapien
ttattgcgagtgtcatcattcggca

SEQ ID NO: 1727725 - DNA, 25 bp, Homo sapien
cttattgcgagtgtcatcattcggc

SEQ ID NO: 1727726 - DNA, 25 bp, Homo sapien
tacttattgcgagtgtcatcattcg

SEQ ID NO: 1727727 - DNA, 25 bp, Homo sapien
tattgcgagtgtcatcattcggcat

SEQ ID NO: 1727728 - DNA, 25 bp, Homo sapien
tattagtctgtaagagctgccataa

SEQ ID NO: 1727729 - DNA, 25 bp, Homo sapien
tgtctccaactgcaatcacactgag

SEQ ID NO: 1727730 - DNA, 25 bp, Homo sapien
gattagaaccccacacttatgagct

SEQ ID NO: 1727731 - DNA, 25 bp, Homo sapien
gacacgatcctattggattagaacc

SEQ ID NO: 1727732 - DNA, 25 bp, Homo sapien
tccttcagtcggaacaaagcaccca

SEQ ID NO: 1727733 - DNA, 25 bp, Homo sapien
gctctgctatctcccgttcttgtgg

SEQ ID NO: 1727734 - DNA, 25 bp, Homo sapien
gatgggcatccatagcggagctcaa

SEQ ID NO: 1727735 - DNA, 25 bp, Homo sapien
tcttgtggttagctgaggacagagc

SEQ ID NO: 1727736 - DNA, 25 bp, Homo sapien
agacatggccttattgctgtcacta

SEQ ID NO: 1727737 - DNA, 25 bp, Homo sapien
tgctgtcactatgacaggattgttg

SEQ ID NO: 1727738 - DNA, 25 bp, Homo sapien
tgccagcagtcatctcggcatcttg

SEQ ID NO: 1727739 - DNA, 25 bp, Homo sapien
caaatgccagcagtcatctcggcat

SEQ ID NO: 1727740 - DNA, 25 bp, Homo sapien
ctgccaggctatgtagtctgaaatc

SEQ ID NO: 1727741 - DNA, 25 bp, Homo sapien
gtcgtaataccagagagctgtcagt

SEQ ID NO: 1727742 - DNA, 25 bp, Homo sapien
ccatctaattggcttcttaccatct

SEQ ID NO: 1727743 - DNA, 25 bp, Homo sapien
tctgaaatctggagtcgtaatacca

SEQ ID NO: 1727744 - DNA, 25 bp, Homo sapien
gaactctccaatagcatatgtatga

SEQ ID NO: 1727745 - DNA, 25 bp, Homo sapien
tgcattgattaagagctcccagaga

SEQ ID NO: 1727746 - DNA, 25 bp, Homo sapien
tcttgtgcatctccgcagtctggca

SEQ ID NO: 1727747 - DNA, 25 bp, Homo sapien
acacccacaatttgagtagtgaggg

SEQ ID NO: 1727748 - DNA, 25 bp, Homo sapien
caaatcattccctttagtcatagca

SEQ ID NO: 1727749 - DNA, 25 bp, Homo sapien
caaggactagattcaatagagcaag

SEQ ID NO: 1727750 - DNA, 25 bp, Homo sapien
tagtagacatttccagcatgtgaga

SEQ ID NO: 1727751 - DNA, 25 bp, Homo sapien
tcagcatatctgcaggagccaataa

SEQ ID NO: 1727752 - DNA, 25 bp, Homo sapien
tcttctttatcagagcatatggtga

SEQ ID NO: 1727753 - DNA, 25 bp, Homo sapien
cacattatgtatggaacaacctaag

SEQ ID NO: 1727754 - DNA, 25 bp, Homo sapien
gcctgaggaacatgaatctcattca

SEQ ID NO: 1727755 - DNA, 25 bp, Homo sapien
gctacatattgaatgctaaccccag

SEQ ID NO: 1727756 - DNA, 25 bp, Homo sapien
ttttctgatgctccatgaaatcaaa

SEQ ID NO: 1727757 - DNA, 25 bp, Homo sapien
tgcttttctgatgctccatgaaatc

SEQ ID NO: 1727758 - DNA, 25 bp, Homo sapien
ctgatgctccatgaaatcaaatttc

SEQ ID NO: 1727759 - DNA, 25 bp, Homo sapien
tctgatgctccatgaaatcaaattt

SEQ ID NO: 1727760 - DNA, 25 bp, Homo sapien
ttgtatttccgggtttgccgataga

SEQ ID NO: 1727761 - DNA, 25 bp, Homo sapien
cttgtatttccgggtttgccgatag

SEQ ID NO: 1727762 - DNA, 25 bp, Homo sapien
gtatttccgggtttgccgatagaga

SEQ ID NO: 1727763 - DNA, 25 bp, Homo sapien
tgtatttccgggtttgccgatagag

SEQ ID NO: 1727764 - DNA, 25 bp, Homo sapien
gagagtcattgataggctgttttgt

SEQ ID NO: 1727765 - DNA, 25 bp, Homo sapien
ttgtgactggcattaccttgaattt

SEQ ID NO: 1727766 - DNA, 25 bp, Homo sapien
tactcactgaaaggactcggattcc

SEQ ID NO: 1727767 - DNA, 25 bp, Homo sapien
tgcttttgcatcttaagctgcaaat

SEQ ID NO: 1727768 - DNA, 25 bp, Homo sapien
tcctgaatgttgtgtaatagtatct

SEQ ID NO: 1727769 - DNA, 25 bp, Homo sapien
tgtttatgcctgattactagtgatg

SEQ ID NO: 1727770 - DNA, 25 bp, Homo sapien
tgctcagtaatattttgtcctaggg

SEQ ID NO: 1727771 - DNA, 25 bp, Homo sapien
tgttgagcacagtttcatgttgtct

SEQ ID NO: 1727772 - DNA, 25 bp, Homo sapien
gaatgacaatgaggatggtgcatcc

SEQ ID NO: 1727773 - DNA, 25 bp, Homo sapien
cagtgctcaggcagaatgacaatga

SEQ ID NO: 1727774 - DNA, 25 bp, Homo sapien
aggatggtgcatccaagaggtgcat

SEQ ID NO: 1727775 - DNA, 25 bp, Homo sapien
agcaggcagtgctcaggcagaatga

SEQ ID NO: 1727776 - DNA, 25 bp, Homo sapien
catgagcactaaatgaagcgaataa

SEQ ID NO: 1727777 - DNA, 25 bp, Homo sapien
taaatgaagcgaataatttggtgca

SEQ ID NO: 1727778 - DNA, 25 bp, Homo sapien
ttctcccaatttgcccacactgagc

SEQ ID NO: 1727779 - DNA, 25 bp, Homo sapien
tgagccatgagcactaaatgaagcg

SEQ ID NO: 1727780 - DNA, 25 bp, Homo sapien
caagctgtatttgcccaagatccag

SEQ ID NO: 1727781 - DNA, 25 bp, Homo sapien
caagatccagtttaaccagatgtgt

SEQ ID NO: 1727782 - DNA, 25 bp, Homo sapien
cctatgcaccgttccacaagctgta

SEQ ID NO: 1727783 - DNA, 25 bp, Homo sapien
agtcaggccttctcatccctatgca

SEQ ID NO: 1727784 - DNA, 25 bp, Homo sapien
ggccaatcgagtgtaagtgacatcc

SEQ ID NO: 1727785 - DNA, 25 bp, Homo sapien
tgacatcctgcttggcatgccacga

SEQ ID NO: 1727786 - DNA, 25 bp, Homo sapien
taaagtttctgaactgacacaaagg

SEQ ID NO: 1727787 - DNA, 25 bp, Homo sapien
gaaatgaaccttgacgatgtggcca

SEQ ID NO: 1727788 - DNA, 25 bp, Homo sapien
gccttatagcatacaggaacctggg

SEQ ID NO: 1727789 - DNA, 25 bp, Homo sapien
tagctaggccctcaatcttcatggg

SEQ ID NO: 1727790 - DNA, 25 bp, Homo sapien
tattataagggtatgctgggtcaca

SEQ ID NO: 1727791 - DNA, 25 bp, Homo sapien
taatgggagtgtgcttccaataccc

SEQ ID NO: 1727792 - DNA, 25 bp, Homo sapien
gtcttctcatagaatgtttctgcca

SEQ ID NO: 1727793 - DNA, 25 bp, Homo sapien
tgtcttctcatagaatgtttctgcc

SEQ ID NO: 1727794 - DNA, 25 bp, Homo sapien
tcttctcatagaatgtttctgccat

SEQ ID NO: 1727795 - DNA, 25 bp, Homo sapien
cttgtcttctcatagaatgtttctg

SEQ ID NO: 1727796 - DNA, 25 bp, Homo sapien
tctgaaaagtagtttgccctttgcc

SEQ ID NO: 1727797 - DNA, 25 bp, Homo sapien
ttccgtcactggaacaccatcagtc

SEQ ID NO: 1727798 - DNA, 25 bp, Homo sapien
ctcccttattaagttccgtcactgg

SEQ ID NO: 1727799 - DNA, 25 bp, Homo sapien
ttctgaaaagtagtttgccctttgc

SEQ ID NO: 1727800 - DNA, 25 bp, Homo sapien
ctatctctagaacggatgtatgcca

SEQ ID NO: 1727801 - DNA, 25 bp, Homo sapien
actctaaggatagggagggctgctg

SEQ ID NO: 1727802 - DNA, 25 bp, Homo sapien
tgactctaaggatagggagggctgc

SEQ ID NO: 1727803 - DNA, 25 bp, Homo sapien
tgctctatctctagaacggatgtat

SEQ ID NO: 1727804 - DNA, 25 bp, Homo sapien
ggtgtttaacattgtggctttctgt

SEQ ID NO: 1727805 - DNA, 25 bp, Homo sapien
tttggatgtctggaccaatttccat

SEQ ID NO: 1727806 - DNA, 25 bp, Homo sapien
ttctgttccccattaatttggatgt

SEQ ID NO: 1727807 - DNA, 25 bp, Homo sapien
acatttggtgtttaacattgtggct

SEQ ID NO: 1727808 - DNA, 25 bp, Homo sapien
ctgtgtaaaagttccatagccataa

SEQ ID NO: 1727809 - DNA, 25 bp, Homo sapien
gtgtaaaagttccatagccataatt

SEQ ID NO: 1727810 - DNA, 25 bp, Homo sapien
taaaagttccatagccataattaat

SEQ ID NO: 1727811 - DNA, 25 bp, Homo sapien
ttctgtgtaaaagttccatagccat

SEQ ID NO: 1727812 - DNA, 25 bp, Homo sapien
cagttaaccatgttttcatcaaagg

SEQ ID NO: 1727813 - DNA, 25 bp, Homo sapien
ggagctggccccttactgtagtgca

SEQ ID NO: 1727814 - DNA, 25 bp, Homo sapien
tactctctccccaggtcaactaatg

SEQ ID NO: 1727815 - DNA, 25 bp, Homo sapien
caactaatgagttgtcaggagctgg

SEQ ID NO: 1727816 - DNA, 25 bp, Homo sapien
ttacattctgctttgacagcaagcc

SEQ ID NO: 1727817 - DNA, 25 bp, Homo sapien
ttctattccagtgcctaaggacttc

SEQ ID NO: 1727818 - DNA, 25 bp, Homo sapien
tgagacatctgtggtctaatgtgat

SEQ ID NO: 1727819 - DNA, 25 bp, Homo sapien
ccatatcgagttggtcagattgaga

SEQ ID NO: 1727820 - DNA, 25 bp, Homo sapien
taacttttgagagtggaaccatatc

SEQ ID NO: 1727821 - DNA, 25 bp, Homo sapien
ttctgtactatgttaccagggccct

SEQ ID NO: 1727822 - DNA, 25 bp, Homo sapien
taatccttcaaccttggcatgggcc

SEQ ID NO: 1727823 - DNA, 25 bp, Homo sapien
acaactgcaggcatggtcttctggg

SEQ ID NO: 1727824 - DNA, 25 bp, Homo sapien
catgggcccattgtcgtttcagtta

SEQ ID NO: 1727825 - DNA, 25 bp, Homo sapien
cttgtgctttagcaagggtcccttt

SEQ ID NO: 1727826 - DNA, 25 bp, Homo sapien
tttgccagtatgaaaattatttcct

SEQ ID NO: 1727827 - DNA, 25 bp, Homo sapien
ctttgccagtatgaaaattatttcc

SEQ ID NO: 1727828 - DNA, 25 bp, Homo sapien
tctttgccagtatgaaaattatttc

SEQ ID NO: 1727829 - DNA, 25 bp, Homo sapien
tatctttgccagtatgaaaattatt

SEQ ID NO: 1727830 - DNA, 25 bp, Homo sapien
tcacggcagacataaaggccttcca

SEQ ID NO: 1727831 - DNA, 25 bp, Homo sapien
cacactgaattgaccctgttcacgg

SEQ ID NO: 1727832 - DNA, 25 bp, Homo sapien
agctgccacactgaattgaccctgt

SEQ ID NO: 1727833 - DNA, 25 bp, Homo sapien
tgaccctgttcacggcagacataaa

SEQ ID NO: 1727834 - DNA, 25 bp, Homo sapien
taactatcatcttatgtctgcccat

SEQ ID NO: 1727835 - DNA, 25 bp, Homo sapien
ctgaatgaatacttccaactttctg

SEQ ID NO: 1727836 - DNA, 25 bp, Homo sapien
tctggtgatgtctgttatagtctgt

SEQ ID NO: 1727837 - DNA, 25 bp, Homo sapien
tatagtctgttgacataactatcat

SEQ ID NO: 1727838 - DNA, 25 bp, Homo sapien
aagcaacaccttctgccagattctc

SEQ ID NO: 1727839 - DNA, 25 bp, Homo sapien
ccagattctctccagatctgccccc

SEQ ID NO: 1727840 - DNA, 25 bp, Homo sapien
agattctctccagatctgcccccag

SEQ ID NO: 1727841 - DNA, 25 bp, Homo sapien
tcaagcaacaccttctgccagattc

SEQ ID NO: 1727842 - DNA, 25 bp, Homo sapien
ccctttttttgcagctaggcagtta

SEQ ID NO: 1727843 - DNA, 25 bp, Homo sapien
gcagctaggcagttaggtttatctt

SEQ ID NO: 1727844 - DNA, 25 bp, Homo sapien
tttttgcagctaggcagttaggttt

SEQ ID NO: 1727845 - DNA, 25 bp, Homo sapien
tttgcagctaggcagttaggtttat

SEQ ID NO: 1727846 - DNA, 25 bp, Homo sapien
gttaacatgactctggacaagtctt

SEQ ID NO: 1727847 - DNA, 25 bp, Homo sapien
tgttaacatgactctggacaagtct

SEQ ID NO: 1727848 - DNA, 25 bp, Homo sapien
ctgttaacatgactctggacaagtc

SEQ ID NO: 1727849 - DNA, 25 bp, Homo sapien
tcacagcattctggtgcttcaaaat

SEQ ID NO: 1727850 - DNA, 25 bp, Homo sapien
cattgttttacagccaattcacagc

SEQ ID NO: 1727851 - DNA, 25 bp, Homo sapien
cattctggtgcttcaaaattagttc

SEQ ID NO: 1727852 - DNA, 25 bp, Homo sapien
ttacagccaattcacagcattctgg

SEQ ID NO: 1727853 - DNA, 25 bp, Homo sapien
caaagattcgactgcctatgtgagt

SEQ ID NO: 1727854 - DNA, 25 bp, Homo sapien
tcagtggaactctcaagcgacatca

SEQ ID NO: 1727855 - DNA, 25 bp, Homo sapien
gctaaaaatggctaggtcacctgaa

SEQ ID NO: 1727856 - DNA, 25 bp, Homo sapien
caagaaataatgtcaggagccagag

SEQ ID NO: 1727857 - DNA, 25 bp, Homo sapien
ttggaataggttgtcttgtctcatc

SEQ ID NO: 1727858 - DNA, 25 bp, Homo sapien
tggtctcagttaaggtactgccagt

SEQ ID NO: 1727859 - DNA, 25 bp, Homo sapien
tactgccagtttggaataggttgtc

SEQ ID NO: 1727860 - DNA, 25 bp, Homo sapien
tggatccatgggcatgcatcaacat

SEQ ID NO: 1727861 - DNA, 25 bp, Homo sapien
tccagctcaggtgattgcaactgag

SEQ ID NO: 1727862 - DNA, 25 bp, Homo sapien
caggaattcaagccttgctgcacac

SEQ ID NO: 1727863 - DNA, 25 bp, Homo sapien
ctcaaggaatagtgaagtcttcata

SEQ ID NO: 1727864 - DNA, 25 bp, Homo sapien
tcatagaaaactctgacacctgttg

SEQ ID NO: 1727865 - DNA, 25 bp, Homo sapien
tagaaaactctgacacctgttgtct

SEQ ID NO: 1727866 - DNA, 25 bp, Homo sapien
tcaaggaatagtgaagtcttcatag

SEQ ID NO: 1727867 - DNA, 25 bp, Homo sapien
tatccaagttagtatatgctggcaa

SEQ ID NO: 1727868 - DNA, 25 bp, Homo sapien
gaatgtaactcatatacaagtgtag

SEQ ID NO: 1727869 - DNA, 25 bp, Homo sapien
gaagaacccatagcattcactagat

SEQ ID NO: 1727870 - DNA, 25 bp, Homo sapien
cactagattatcaatgtgatgaatg

SEQ ID NO: 1727871 - DNA, 25 bp, Homo sapien
gggttgctaactccaataagagcag

SEQ ID NO: 1727872 - DNA, 25 bp, Homo sapien
tcctcaaggacaaaggaaccactat

SEQ ID NO: 1727873 - DNA, 25 bp, Homo sapien
taagacaaatcaggaagcgatcctc

SEQ ID NO: 1727874 - DNA, 25 bp, Homo sapien
taattgtgatacaactggagggaca

SEQ ID NO: 1727875 - DNA, 25 bp, Homo sapien
aatatatctggagccgctggttcct

SEQ ID NO: 1727876 - DNA, 25 bp, Homo sapien
ttaaaatatatctggagccgctggt

SEQ ID NO: 1727877 - DNA, 25 bp, Homo sapien
aaaatatatctggagccgctggttc

SEQ ID NO: 1727878 - DNA, 25 bp, Homo sapien
tatctggagccgctggttcctttgt

SEQ ID NO: 1727879 - DNA, 25 bp, Homo sapien
gattctgcaccaagctcaaatctca

SEQ ID NO: 1727880 - DNA, 25 bp, Homo sapien
acatcgtgattctgcaccaagctca

SEQ ID NO: 1727881 - DNA, 25 bp, Homo sapien
tcgtgattctgcaccaagctcaaat

SEQ ID NO: 1727882 - DNA, 25 bp, Homo sapien
cacactacatcgtgattctgcacca

SEQ ID NO: 1727883 - DNA, 25 bp, Homo sapien
tctgacccccatgcttaagaatcat

SEQ ID NO: 1727884 - DNA, 25 bp, Homo sapien
ttggtaggccttcctgaaggatggt

SEQ ID NO: 1727885 - DNA, 25 bp, Homo sapien
ccttcctgaaggatggtctggagag

SEQ ID NO: 1727886 - DNA, 25 bp, Homo sapien
taaagtgctgtctgagtctgacccc

SEQ ID NO: 1727887 - DNA, 25 bp, Homo sapien
tcaggccagtacaccgagggaaatc

SEQ ID NO: 1727888 - DNA, 25 bp, Homo sapien
aatccagagggttgagtttcagaga

SEQ ID NO: 1727889 - DNA, 25 bp, Homo sapien
ctgccctgttaagggagagagattc

SEQ ID NO: 1727890 - DNA, 25 bp, Homo sapien
cacatacattttttgctgaccagct

SEQ ID NO: 1727891 - DNA, 25 bp, Homo sapien
cagttgatgggaggacagaggacac

SEQ ID NO: 1727892 - DNA, 25 bp, Homo sapien
tcagttgatgggaggacagaggaca

SEQ ID NO: 1727893 - DNA, 25 bp, Homo sapien
tgtggtatgccagtctgatcaatag

SEQ ID NO: 1727894 - DNA, 25 bp, Homo sapien
ttattttggaactgggttgtgcaga

SEQ ID NO: 1727895 - DNA, 25 bp, Homo sapien
tgatcaatagcctgatgaggcatgt

SEQ ID NO: 1727896 - DNA, 25 bp, Homo sapien
ggttgtgcagatagccattactgca

SEQ ID NO: 1727897 - DNA, 25 bp, Homo sapien
cttgctcttggaaactgctccctct

SEQ ID NO: 1727898 - DNA, 25 bp, Homo sapien
tcttggaaactgctccctctaactt

SEQ ID NO: 1727899 - DNA, 25 bp, Homo sapien
ggaaactgctccctctaacttccat

SEQ ID NO: 1727900 - DNA, 25 bp, Homo sapien
tgctcttggaaactgctccctctaa

SEQ ID NO: 1727901 - DNA, 25 bp, Homo sapien
aatatgtttcttcgtatgacatccc

SEQ ID NO: 1727902 - DNA, 25 bp, Homo sapien
ttctctctaaatagcagaaaagctg

SEQ ID NO: 1727903 - DNA, 25 bp, Homo sapien
tgattatctccactgggattcaata

SEQ ID NO: 1727904 - DNA, 25 bp, Homo sapien
tctccactgggattcaatatgtttc

SEQ ID NO: 1727905 - DNA, 25 bp, Homo sapien
ccagtacgtaggtccaaggcttcat

SEQ ID NO: 1727906 - DNA, 25 bp, Homo sapien
gaatcctgagacatgtctattacct

SEQ ID NO: 1727907 - DNA, 25 bp, Homo sapien
gcttcttttcgtaacttgaaggcca

SEQ ID NO: 1727908 - DNA, 25 bp, Homo sapien
tgtgggacaataagaatcctgagac

SEQ ID NO: 1727909 - DNA, 25 bp, Homo sapien
gcacacagatcttgtgactctcctg

SEQ ID NO: 1727910 - DNA, 25 bp, Homo sapien
gcatacttgttcgtatcagctgtga

SEQ ID NO: 1727911 - DNA, 25 bp, Homo sapien
gctccattaaaaaagcgtggcttcc

SEQ ID NO: 1727912 - DNA, 25 bp, Homo sapien
gaaactaggcccatgaacaagagaa

SEQ ID NO: 1727913 - DNA, 25 bp, Homo sapien
gatcaggtgtagtgaggctccatta

SEQ ID NO: 1727914 - DNA, 25 bp, Homo sapien
tttattgtgctgtgtagaggatttt

SEQ ID NO: 1727915 - DNA, 25 bp, Homo sapien
ttattgtgctgtgtagaggattttg

SEQ ID NO: 1727916 - DNA, 25 bp, Homo sapien
tattgtgctgtgtagaggattttgc

SEQ ID NO: 1727917 - DNA, 25 bp, Homo sapien
ttttgtacttgaggcgagccgcccc

SEQ ID NO: 1727918 - DNA, 25 bp, Homo sapien
ggaacaggatatcggatgtgacaac

SEQ ID NO: 1727919 - DNA, 25 bp, Homo sapien
ccacctagaagactaacgtgagttg

SEQ ID NO: 1727920 - DNA, 25 bp, Homo sapien
gatacactttctctgccggaaggaa

SEQ ID NO: 1727921 - DNA, 25 bp, Homo sapien
tgagagtgtgacacaagtatgccat

SEQ ID NO: 1727922 - DNA, 25 bp, Homo sapien
ggctgccgacaatgagattgttctc

SEQ ID NO: 1727923 - DNA, 25 bp, Homo sapien
ggaggactccaggatccatcactga

SEQ ID NO: 1727924 - DNA, 25 bp, Homo sapien
atcactgagagtgtgacacaagtat

SEQ ID NO: 1727925 - DNA, 25 bp, Homo sapien
gacagcttcgccagggactaatgca

SEQ ID NO: 1727926 - DNA, 25 bp, Homo sapien
gactaatgcagtccgacataattga

SEQ ID NO: 1727927 - DNA, 25 bp, Homo sapien
gtccgacataattgaatgtggcctg

SEQ ID NO: 1727928 - DNA, 25 bp, Homo sapien
gccagggactaatgcagtccgacat

SEQ ID NO: 1727929 - DNA, 25 bp, Homo sapien
cagtaaggtcaccttggttcttata

SEQ ID NO: 1727930 - DNA, 25 bp, Homo sapien
cattgtagacaagatgctcatcctg

SEQ ID NO: 1727931 - DNA, 25 bp, Homo sapien
ggttcttatagatacacgttcacta

SEQ ID NO: 1727932 - DNA, 25 bp, Homo sapien
taatgtatcacttcgtaccccagga

SEQ ID NO: 1727933 - DNA, 25 bp, Homo sapien
caaagagttgtgttggcgtttagtg

SEQ ID NO: 1727934 - DNA, 25 bp, Homo sapien
aacatggagagctgtcatgatatct

SEQ ID NO: 1727935 - DNA, 25 bp, Homo sapien
ctgtcatgatatctttactcctttg

SEQ ID NO: 1727936 - DNA, 25 bp, Homo sapien
aagagttgtgttggcgtttagtgcc

SEQ ID NO: 1727937 - DNA, 25 bp, Homo sapien
agtccaaggactttgctggcataag

SEQ ID NO: 1727938 - DNA, 25 bp, Homo sapien
tggatcttgctcatctctcatggct

SEQ ID NO: 1727939 - DNA, 25 bp, Homo sapien
catttagaagcagggaaaagtccaa

SEQ ID NO: 1727940 - DNA, 25 bp, Homo sapien
tgagtccaggaccatattgactgga

SEQ ID NO: 1727941 - DNA, 25 bp, Homo sapien
tacagtgtactagggacaatacaga

SEQ ID NO: 1727942 - DNA, 25 bp, Homo sapien
cagtgtactagggacaatacagaaa

SEQ ID NO: 1727943 - DNA, 25 bp, Homo sapien
tgtactagggacaatacagaaaaca

SEQ ID NO: 1727944 - DNA, 25 bp, Homo sapien
ttacagtgtactagggacaatacag

SEQ ID NO: 1727945 - DNA, 25 bp, Homo sapien
aatattgtatcttcgcctaataagg

SEQ ID NO: 1727946 - DNA, 25 bp, Homo sapien
tggagagtatttgcacacattttat

SEQ ID NO: 1727947 - DNA, 25 bp, Homo sapien
tgcttttctataccgactgaggtgg

SEQ ID NO: 1727948 - DNA, 25 bp, Homo sapien
tcgcctaataaggaactggaggttc

SEQ ID NO: 1727949 - DNA, 25 bp, Homo sapien
aattttccctctgcacaaaagcagc

SEQ ID NO: 1727950 - DNA, 25 bp, Homo sapien
aagcagctccctggaacagattttg

SEQ ID NO: 1727951 - DNA, 25 bp, Homo sapien
tgaaaattaagcatcagcactgaga

SEQ ID NO: 1727952 - DNA, 25 bp, Homo sapien
ggctgatgtcgtaggtcccttggta

SEQ ID NO: 1727953 - DNA, 25 bp, Homo sapien
ccggatcagatagctccttgcctcg

SEQ ID NO: 1727954 - DNA, 25 bp, Homo sapien
ggtagatatctaaattgtaatggtt

SEQ ID NO: 1727955 - DNA, 25 bp, Homo sapien
tggttttgcccggatcagatagctc

SEQ ID NO: 1727956 - DNA, 25 bp, Homo sapien
aattgtaatggttttgcccggatca

SEQ ID NO: 1727957 - DNA, 25 bp, Homo sapien
tctccgaaagcttacgatgcaattt

SEQ ID NO: 1727958 - DNA, 25 bp, Homo sapien
gtttctccgaaagcttacgatgcaa

SEQ ID NO: 1727959 - DNA, 25 bp, Homo sapien
tgggtttctccgaaagcttacgatg

SEQ ID NO: 1727960 - DNA, 25 bp, Homo sapien
cgaaagcttacgatgcaatttcccc

SEQ ID NO: 1727961 - DNA, 25 bp, Homo sapien
ctagtcccggaaaggtagttgacat

SEQ ID NO: 1727962 - DNA, 25 bp, Homo sapien
ctcggcatcgtggactagtcccgga

SEQ ID NO: 1727963 - DNA, 25 bp, Homo sapien
cggcatcgtggactagtcccggaaa

SEQ ID NO: 1727964 - DNA, 25 bp, Homo sapien
catcgtggactagtcccggaaaggt

SEQ ID NO: 1727965 - DNA, 25 bp, Homo sapien
agcagaaaaacttgaggtttgtcat

SEQ ID NO: 1727966 - DNA, 25 bp, Homo sapien
gagcagaaaaacttgaggtttgtca

SEQ ID NO: 1727967 - DNA, 25 bp, Homo sapien
tgctgaaactcgtaatggaaggact

SEQ ID NO: 1727968 - DNA, 25 bp, Homo sapien
gcaggttaataaagtcggtgggctc

SEQ ID NO: 1727969 - DNA, 25 bp, Homo sapien
gacagccaagctgcatcaaacggta

SEQ ID NO: 1727970 - DNA, 25 bp, Homo sapien
tctgggtgcattccatactgagagc

SEQ ID NO: 1727971 - DNA, 25 bp, Homo sapien
tttaaatgttctgccttaaagtgat

SEQ ID NO: 1727972 - DNA, 25 bp, Homo sapien
gactgagcataaattaaagcggtga

SEQ ID NO: 1727973 - DNA, 25 bp, Homo sapien
agtttcctttgttggccatagcaaa

SEQ ID NO: 1727974 - DNA, 25 bp, Homo sapien
ggtgatgggaaaaggtgtgacagtt

SEQ ID NO: 1727975 - DNA, 25 bp, Homo sapien
tccaccttggccattgagaacaagc

SEQ ID NO: 1727976 - DNA, 25 bp, Homo sapien
ccttggccattgagaacaagcccac

SEQ ID NO: 1727977 - DNA, 25 bp, Homo sapien
tcactccaccttggccattgagaac

SEQ ID NO: 1727978 - DNA, 25 bp, Homo sapien
ccattgagaacaagcccacactggg

SEQ ID NO: 1727979 - DNA, 25 bp, Homo sapien
ccaacacagtgcattcaatattcat

SEQ ID NO: 1727980 - DNA, 25 bp, Homo sapien
tccaacacagtgcattcaatattca

SEQ ID NO: 1727981 - DNA, 25 bp, Homo sapien
tcacgcattctttggctatcgggcc

SEQ ID NO: 1727982 - DNA, 25 bp, Homo sapien
gcattctttggctatcgggccttca

SEQ ID NO: 1727983 - DNA, 25 bp, Homo sapien
ttctttggctatcgggccttcatta

SEQ ID NO: 1727984 - DNA, 25 bp, Homo sapien
ccctctttcacgcattctttggcta

SEQ ID NO: 1727985 - DNA, 25 bp, Homo sapien
tacgcccgaggcgaaagaagctatc

SEQ ID NO: 1727986 - DNA, 25 bp, Homo sapien
taacatatcaaagcctacgcccgag

SEQ ID NO: 1727987 - DNA, 25 bp, Homo sapien
gaaggcaaagctccactctgtacgt

SEQ ID NO: 1727988 - DNA, 25 bp, Homo sapien
gaagctatcgatacgcgagcacagg

SEQ ID NO: 1727989 - DNA, 25 bp, Homo sapien
aacacagacgactcctgtaaataga

SEQ ID NO: 1727990 - DNA, 25 bp, Homo sapien
ctcctgtaaatagaagcctcatttc

SEQ ID NO: 1727991 - DNA, 25 bp, Homo sapien
taaaaacacagacgactcctgtaaa

SEQ ID NO: 1727992 - DNA, 25 bp, Homo sapien
gattaaaaacacagacgactcctgt

SEQ ID NO: 1727993 - DNA, 25 bp, Homo sapien
gctgctgaaagaatccacggctttc

SEQ ID NO: 1727994 - DNA, 25 bp, Homo sapien
gaagaagagcaaggcttcccacgct

SEQ ID NO: 1727995 - DNA, 25 bp, Homo sapien
tttggctagcgagagtagtgattcc

SEQ ID NO: 1727996 - DNA, 25 bp, Homo sapien
tggaatccgaagagtactgacaaag

SEQ ID NO: 1727997 - DNA, 25 bp, Homo sapien
gagaggcgcctctttacctcagcaa

SEQ ID NO: 1727998 - DNA, 25 bp, Homo sapien
ttggaagtagaactaagaagggaca

SEQ ID NO: 1727999 - DNA, 25 bp, Homo sapien
ggacagagcaaaataagtctgtggg

SEQ ID NO: 1728000 - DNA, 25 bp, Homo sapien
agaagggacaaacggccagggacag

SEQ ID NO: 1728001 - DNA, 25 bp, Homo sapien
accaaggaagtaaggagggtgacat

SEQ ID NO: 1728002 - DNA, 25 bp, Homo sapien
taagccaagcctatccaatttctct

SEQ ID NO: 1728003 - DNA, 25 bp, Homo sapien
tgctggtaagtttaagccaagccta

SEQ ID NO: 1728004 - DNA, 25 bp, Homo sapien
cattagctgctttccgtcttcctgc

SEQ ID NO: 1728005 - DNA, 25 bp, Homo sapien
ggagtcatcagctgttaccaccaac

SEQ ID NO: 1728006 - DNA, 25 bp, Homo sapien
caggggccatgatctaattcagaac

SEQ ID NO: 1728007 - DNA, 25 bp, Homo sapien
tggaaaggagtcatcagctgttacc

SEQ ID NO: 1728008 - DNA, 25 bp, Homo sapien
acatggcatcttgctggctggaaag

SEQ ID NO: 1728009 - DNA, 25 bp, Homo sapien
ccatgttggatcaagttgccaaaaa

SEQ ID NO: 1728010 - DNA, 25 bp, Homo sapien
ttagacccatgttggatcaagttgc

SEQ ID NO: 1728011 - DNA, 25 bp, Homo sapien
atcagagttgggttactattattct

SEQ ID NO: 1728012 - DNA, 25 bp, Homo sapien
gagttgggttactattattctgtat

SEQ ID NO: 1728013 - DNA, 25 bp, Homo sapien
tcccttctggtaatactctgcgatg

SEQ ID NO: 1728014 - DNA, 25 bp, Homo sapien
tggtaatactctgcgatgtcattca

SEQ ID NO: 1728015 - DNA, 25 bp, Homo sapien
cttctggtaatactctgcgatgtca

SEQ ID NO: 1728016 - DNA, 25 bp, Homo sapien
agaattcccttctggtaatactctg

SEQ ID NO: 1728017 - DNA, 25 bp, Homo sapien
aatgattccggttttcaagcctaca

SEQ ID NO: 1728018 - DNA, 25 bp, Homo sapien
ccctaaacagatgttatccctaata

SEQ ID NO: 1728019 - DNA, 25 bp, Homo sapien
ttccctaaacagatgttatccctaa

SEQ ID NO: 1728020 - DNA, 25 bp, Homo sapien
aataattggcaaaatgattccggtt

SEQ ID NO: 1728021 - DNA, 25 bp, Homo sapien
cagactcttcggaaaggaatgcatt

SEQ ID NO: 1728022 - DNA, 25 bp, Homo sapien
gatttcccagactcttcggaaagga

SEQ ID NO: 1728023 - DNA, 25 bp, Homo sapien
tcccagactcttcggaaaggaatgc

SEQ ID NO: 1728024 - DNA, 25 bp, Homo sapien
gaaaggaatgcattctacagctcta

SEQ ID NO: 1728025 - DNA, 25 bp, Homo sapien
tccatatgttgtctggcaagatgtt

SEQ ID NO: 1728026 - DNA, 25 bp, Homo sapien
acaagtgtagccaaaatcccgagcc

SEQ ID NO: 1728027 - DNA, 25 bp, Homo sapien
actctgtttcacaagtgtagccaaa

SEQ ID NO: 1728028 - DNA, 25 bp, Homo sapien
tctgttccatatgttgtctggcaag

SEQ ID NO: 1728029 - DNA, 25 bp, Homo sapien
tattccttctgccaccaacttttgc

SEQ ID NO: 1728030 - DNA, 25 bp, Homo sapien
ctattcccttcctcttaatcttgtt

SEQ ID NO: 1728031 - DNA, 25 bp, Homo sapien
ctatctcttgatcttcatactctct

SEQ ID NO: 1728032 - DNA, 25 bp, Homo sapien
tatctcttgatcttcatactctctt

SEQ ID NO: 1728033 - DNA, 25 bp, Homo sapien
tgaatgtgcttggagactgctgcac

SEQ ID NO: 1728034 - DNA, 25 bp, Homo sapien
ttcaacagaatgatgggaatctcca

SEQ ID NO: 1728035 - DNA, 25 bp, Homo sapien
ttaaaacacaatctcggtgccaatt

SEQ ID NO: 1728036 - DNA, 25 bp, Homo sapien
tggtagtggtgaatacttccaaaac

SEQ ID NO: 1728037 - DNA, 25 bp, Homo sapien
caaggtctagaattggagtgggtct

SEQ ID NO: 1728038 - DNA, 25 bp, Homo sapien
ggctcaagaggtcttggaattcttt

SEQ ID NO: 1728039 - DNA, 25 bp, Homo sapien
tggtgatctatcttggctcaagagg

SEQ ID NO: 1728040 - DNA, 25 bp, Homo sapien
aaatgtctctggatgtcaaggtcta

SEQ ID NO: 1728041 - DNA, 25 bp, Homo sapien
cttgagctaatggttctatcgaaat

SEQ ID NO: 1728042 - DNA, 25 bp, Homo sapien
tgacaattgtctgctttcaaagtca

SEQ ID NO: 1728043 - DNA, 25 bp, Homo sapien
tcaaagtcagatgtgatatgtctcc

SEQ ID NO: 1728044 - DNA, 25 bp, Homo sapien
tggtggaaaatcacactctgacaat

SEQ ID NO: 1728045 - DNA, 25 bp, Homo sapien
ccaaaatatggatctgatcattagc

SEQ ID NO: 1728046 - DNA, 25 bp, Homo sapien
tctgatcattagcagtctgcattgt

SEQ ID NO: 1728047 - DNA, 25 bp, Homo sapien
aatatggatctgatcattagcagtc

SEQ ID NO: 1728048 - DNA, 25 bp, Homo sapien
cttgttccaaaatatggatctgatc

SEQ ID NO: 1728049 - DNA, 25 bp, Homo sapien
gagctttctccgagttggcatgtcc

SEQ ID NO: 1728050 - DNA, 25 bp, Homo sapien
gccggagtcccaaagccatgagtga

SEQ ID NO: 1728051 - DNA, 25 bp, Homo sapien
gcttagagctgcacatattgccgga

SEQ ID NO: 1728052 - DNA, 25 bp, Homo sapien
ggcagcctctgaagttttccgcagg

SEQ ID NO: 1728053 - DNA, 25 bp, Homo sapien
ggaagggtagagatttggtccactg

SEQ ID NO: 1728054 - DNA, 25 bp, Homo sapien
tgaagattagtcaccctcaatgata

SEQ ID NO: 1728055 - DNA, 25 bp, Homo sapien
ctgaagattagtcaccctcaatgat

SEQ ID NO: 1728056 - DNA, 25 bp, Homo sapien
gaagggtagagatttggtccactga

SEQ ID NO: 1728057 - DNA, 25 bp, Homo sapien
cgtggataggcgagagaaaagaagc

SEQ ID NO: 1728058 - DNA, 25 bp, Homo sapien
gaaagaaaaggttattcagtgaaga

SEQ ID NO: 1728059 - DNA, 25 bp, Homo sapien
ctggccgtggataggcgagagaaaa

SEQ ID NO: 1728060 - DNA, 25 bp, Homo sapien
tatcaattagccttccggtctcctg

SEQ ID NO: 1728061 - DNA, 25 bp, Homo sapien
tctgctgagttgaataataagacac

SEQ ID NO: 1728062 - DNA, 25 bp, Homo sapien
tattgtctgctgagttgaataataa

SEQ ID NO: 1728063 - DNA, 25 bp, Homo sapien
gttgaataataagacacgacatcca

SEQ ID NO: 1728064 - DNA, 25 bp, Homo sapien
gctgagttgaataataagacacgac

SEQ ID NO: 1728065 - DNA, 25 bp, Homo sapien
cagcgccctctgtcggaattttata

SEQ ID NO: 1728066 - DNA, 25 bp, Homo sapien
gaattttatagacgcaaaccctgca

SEQ ID NO: 1728067 - DNA, 25 bp, Homo sapien
cattgcaaggtaaaccgttcccacg

SEQ ID NO: 1728068 - DNA, 25 bp, Homo sapien
cctgtcattgaacgggcaacagcgc

SEQ ID NO: 1728069 - DNA, 25 bp, Homo sapien
cgcaacttatatctgttgtctcaaa

SEQ ID NO: 1728070 - DNA, 25 bp, Homo sapien
aaaaacattattgcacacacaggag

SEQ ID NO: 1728071 - DNA, 25 bp, Homo sapien
tcaaacaataggctggacaagtaag

SEQ ID NO: 1728072 - DNA, 25 bp, Homo sapien
caagtaagcctcagcaaagagaaaa

SEQ ID NO: 1728073 - DNA, 25 bp, Homo sapien
ctaggaggtgagtgcattcatgtga

SEQ ID NO: 1728074 - DNA, 25 bp, Homo sapien
aatgatccatctataattggaaatg

SEQ ID NO: 1728075 - DNA, 25 bp, Homo sapien
gggatacacaccaaatccgacgctc

SEQ ID NO: 1728076 - DNA, 25 bp, Homo sapien
cttctcaggactccgctgtctgtaa

SEQ ID NO: 1728077 - DNA, 25 bp, Homo sapien
ctcatagatatcttcgtacttgaca

SEQ ID NO: 1728078 - DNA, 25 bp, Homo sapien
acattctccacaagcttccagagca

SEQ ID NO: 1728079 - DNA, 25 bp, Homo sapien
cattctccacaagcttccagagcat

SEQ ID NO: 1728080 - DNA, 25 bp, Homo sapien
cagcagagaagcgagctggacacag

SEQ ID NO: 1728081 - DNA, 25 bp, Homo sapien
tctttcacccgaagctgggctcaga

SEQ ID NO: 1728082 - DNA, 25 bp, Homo sapien
tcacacacagacagaactattcatc

SEQ ID NO: 1728083 - DNA, 25 bp, Homo sapien
acaagattggcgatgcctgtcacac

SEQ ID NO: 1728084 - DNA, 25 bp, Homo sapien
tggatgaataggtgtggactaacat

SEQ ID NO: 1728085 - DNA, 25 bp, Homo sapien
atggatgaataggtgtggactaaca

SEQ ID NO: 1728086 - DNA, 25 bp, Homo sapien
catggatgaataggtgtggactaac

SEQ ID NO: 1728087 - DNA, 25 bp, Homo sapien
gagaagcccggcttttgtacgctct

SEQ ID NO: 1728088 - DNA, 25 bp, Homo sapien
gctcttcccgggacaagggaagcaa

SEQ ID NO: 1728089 - DNA, 25 bp, Homo sapien
tagacccccaagttgactcagaggg

SEQ ID NO: 1728090 - DNA, 25 bp, Homo sapien
tacaagtgacaaatggagaagcccg

SEQ ID NO: 1728091 - DNA, 25 bp, Homo sapien
ggctcgggacaccatcgtgccggtc

SEQ ID NO: 1728092 - DNA, 25 bp, Homo sapien
tggctcgggacaccatcgtgccggt

SEQ ID NO: 1728093 - DNA, 25 bp, Homo sapien
tgtggctcgggacaccatcgtgccg

SEQ ID NO: 1728094 - DNA, 25 bp, Homo sapien
ctgtggctcgggacaccatcgtgcc

SEQ ID NO: 1728095 - DNA, 25 bp, Homo sapien
agagagccggcttccgaacccactt

SEQ ID NO: 1728096 - DNA, 25 bp, Homo sapien
tggtgcgccgaatgcagcagcacgt

SEQ ID NO: 1728097 - DNA, 25 bp, Homo sapien
tggacgtcttccattccgggatggc

SEQ ID NO: 1728098 - DNA, 25 bp, Homo sapien
cgctcgagtagggtccttgggacac

SEQ ID NO: 1728099 - DNA, 25 bp, Homo sapien
tgtggtctgtattcccgacagcaac

SEQ ID NO: 1728100 - DNA, 25 bp, Homo sapien
gctccgttcacataaacactaaatc

SEQ ID NO: 1728101 - DNA, 25 bp, Homo sapien
acagcaacaacttggccccgaggtg

SEQ ID NO: 1728102 - DNA, 25 bp, Homo sapien
cactaaatcctttccgacgctttga

SEQ ID NO: 1728103 - DNA, 25 bp, Homo sapien
gggacaggagcagggtgtgtccctt

SEQ ID NO: 1728104 - DNA, 25 bp, Homo sapien
gacaggagcagggtgtgtcccttgc

SEQ ID NO: 1728105 - DNA, 25 bp, Homo sapien
ctagggacaggagcagggtgtgtcc

SEQ ID NO: 1728106 - DNA, 25 bp, Homo sapien
acaggagcagggtgtgtcccttgca

SEQ ID NO: 1728107 - DNA, 25 bp, Homo sapien
cacccattcgatagctgtagggaga

SEQ ID NO: 1728108 - DNA, 25 bp, Homo sapien
gctgtggtcctggaaacataacccc

SEQ ID NO: 1728109 - DNA, 25 bp, Homo sapien
gactggaccagtgcaggccctttta

SEQ ID NO: 1728110 - DNA, 25 bp, Homo sapien
cacacgaggtccttgagatcggaac

SEQ ID NO: 1728111 - DNA, 25 bp, Homo sapien
aacaaaaccctcgacccataggcag

SEQ ID NO: 1728112 - DNA, 25 bp, Homo sapien
cacaacaaaaccctcgacccatagg

SEQ ID NO: 1728113 - DNA, 25 bp, Homo sapien
aaccctcgacccataggcagggcag

SEQ ID NO: 1728114 - DNA, 25 bp, Homo sapien
caaaaccctcgacccataggcaggg

SEQ ID NO: 1728115 - DNA, 25 bp, Homo sapien
ggatattaaagaattgcacacataa

SEQ ID NO: 1728116 - DNA, 25 bp, Homo sapien
aaactttgagagacatctgggatgc

SEQ ID NO: 1728117 - DNA, 25 bp, Homo sapien
ttacctccaaatagacatagaaatg

SEQ ID NO: 1728118 - DNA, 25 bp, Homo sapien
aaacatcactattcaaattgacagg

SEQ ID NO: 1728119 - DNA, 25 bp, Homo sapien
taatgacagactggtccaatagatt

SEQ ID NO: 1728120 - DNA, 25 bp, Homo sapien
ttttttaatgacagactggtccaat

SEQ ID NO: 1728121 - DNA, 25 bp, Homo sapien
ggtccaatagattcatgccgctgtt

SEQ ID NO: 1728122 - DNA, 25 bp, Homo sapien
gattcatgccgctgttattggcatc

SEQ ID NO: 1728123 - DNA, 25 bp, Homo sapien
tctcaggatgcgcatatttagcaac

SEQ ID NO: 1728124 - DNA, 25 bp, Homo sapien
gcagctgcaatacacccaaaatgag

SEQ ID NO: 1728125 - DNA, 25 bp, Homo sapien
gtttaccagccaattccacacatga

SEQ ID NO: 1728126 - DNA, 25 bp, Homo sapien
tatcaagaatggctaccaaatatgc

SEQ ID NO: 1728127 - DNA, 25 bp, Homo sapien
tggcatcattgcaagtacagcttcc

SEQ ID NO: 1728128 - DNA, 25 bp, Homo sapien
tttagcagctacactaatcgccagg

SEQ ID NO: 1728129 - DNA, 25 bp, Homo sapien
tagaatacctcaccctgtttggaat

SEQ ID NO: 1728130 - DNA, 25 bp, Homo sapien
gacagaatttcttcgacatccatga

SEQ ID NO: 1728131 - DNA, 25 bp, Homo sapien
gagagatgtttgaagcaaccactaa

SEQ ID NO: 1728132 - DNA, 25 bp, Homo sapien
agagatgtttgaagcaaccactaaa

SEQ ID NO: 1728133 - DNA, 25 bp, Homo sapien
gagatgtttgaagcaaccactaaaa

SEQ ID NO: 1728134 - DNA, 25 bp, Homo sapien
ttattcctggagacaaccttgcaca

SEQ ID NO: 1728135 - DNA, 25 bp, Homo sapien
gcaattaaccgaaagaggagaccca

SEQ ID NO: 1728136 - DNA, 25 bp, Homo sapien
ttgcaaatttaagcaccgagcctgg

SEQ ID NO: 1728137 - DNA, 25 bp, Homo sapien
tgttgctaggatacagaaccctgag

SEQ ID NO: 1728138 - DNA, 25 bp, Homo sapien
cactgggatatgaggcctccaaatc

SEQ ID NO: 1728139 - DNA, 25 bp, Homo sapien
tccactgggatatgaggcctccaaa

SEQ ID NO: 1728140 - DNA, 25 bp, Homo sapien
cttccactgggatatgaggcctcca

SEQ ID NO: 1728141 - DNA, 25 bp, Homo sapien
gcttcttccactgggatatgaggcc

SEQ ID NO: 1728142 - DNA, 25 bp, Homo sapien
cctgatgaccggctgatagaatgtg

SEQ ID NO: 1728143 - DNA, 25 bp, Homo sapien
gaccggctgatagaatgtgtctctg

SEQ ID NO: 1728144 - DNA, 25 bp, Homo sapien
tgaccaagtttcgatcctgatgacc

SEQ ID NO: 1728145 - DNA, 25 bp, Homo sapien
gaaaaaattgccataaaggtgacca

SEQ ID NO: 1728146 - DNA, 25 bp, Homo sapien
gagaagtcaccgatttgggaggaac

SEQ ID NO: 1728147 - DNA, 25 bp, Homo sapien
ttagagaagtcaccgatttgggagg

SEQ ID NO: 1728148 - DNA, 25 bp, Homo sapien
agtcaccgatttgggaggaactgga

SEQ ID NO: 1728149 - DNA, 25 bp, Homo sapien
cattagagaagtcaccgatttggga

SEQ ID NO: 1728150 - DNA, 25 bp, Homo sapien
ctcccaggaagccgtctttattcat

SEQ ID NO: 1728151 - DNA, 25 bp, Homo sapien
aacacctcgccggtgttgacagaca

SEQ ID NO: 1728152 - DNA, 25 bp, Homo sapien
gactccgccgaggagagatgcattg

SEQ ID NO: 1728153 - DNA, 25 bp, Homo sapien
tgtacttcgaagttgaactgagcag

SEQ ID NO: 1728154 - DNA, 25 bp, Homo sapien
aactgagcagagacaaacggcctgg

SEQ ID NO: 1728155 - DNA, 25 bp, Homo sapien
agattgggttttgctggaaccttct

SEQ ID NO: 1728156 - DNA, 25 bp, Homo sapien
gcgctgcgcgaaagcaatgctccgg

SEQ ID NO: 1728157 - DNA, 25 bp, Homo sapien
gcgtcagactgcagattgggttttg

SEQ ID NO: 1728158 - DNA, 25 bp, Homo sapien
cggttgctaggcaactgcgtcagac

SEQ ID NO: 1728159 - DNA, 25 bp, Homo sapien
attcaaaatgagaaagttcctgggt

SEQ ID NO: 1728160 - DNA, 25 bp, Homo sapien
gggcagactgaaatcgaaatggtga

SEQ ID NO: 1728161 - DNA, 25 bp, Homo sapien
atatatacaggcttaatgttcaggg

SEQ ID NO: 1728162 - DNA, 25 bp, Homo sapien
ggaagtgtagttatgtgataagcac

SEQ ID NO: 1728163 - DNA, 25 bp, Homo sapien
gcagaaactgggcaagcacaacctt

SEQ ID NO: 1728164 - DNA, 25 bp, Homo sapien
ttagcaatctaaagcccagtggagc

SEQ ID NO: 1728165 - DNA, 25 bp, Homo sapien
tagagaaggtagaagctgcacatgc

SEQ ID NO: 1728166 - DNA, 25 bp, Homo sapien
ttagagaggagagcgcacttgctgc

SEQ ID NO: 1728167 - DNA, 25 bp, Homo sapien
agatctccccccatttttcgatttg

SEQ ID NO: 1728168 - DNA, 25 bp, Homo sapien
tctagcctttctcgcaaagatctcc

SEQ ID NO: 1728169 - DNA, 25 bp, Homo sapien
caccagggaggtgagtaacgtgaca

SEQ ID NO: 1728170 - DNA, 25 bp, Homo sapien
atttgctgctttgcgcctgcccgcg

SEQ ID NO: 1728171 - DNA, 25 bp, Homo sapien
tattctttcgggagtgcaggtcact

SEQ ID NO: 1728172 - DNA, 25 bp, Homo sapien
ccaaaatccctagctaagtgaacag

SEQ ID NO: 1728173 - DNA, 25 bp, Homo sapien
tcagagacggctttggcgggaaact

SEQ ID NO: 1728174 - DNA, 25 bp, Homo sapien
tgtgtgctgccggttcaaatactca

SEQ ID NO: 1728175 - DNA, 25 bp, Homo sapien
caacctcttggtgatcaggcgcaaa

SEQ ID NO: 1728176 - DNA, 25 bp, Homo sapien
tggcattagaaaggagacgctcaca

SEQ ID NO: 1728177 - DNA, 25 bp, Homo sapien
cgaggctaatgtgggcgattccgct

SEQ ID NO: 1728178 - DNA, 25 bp, Homo sapien
actcgctttgggacattcgctaggc

SEQ ID NO: 1728179 - DNA, 25 bp, Homo sapien
gccttccccagacgtgtgcctgtta

SEQ ID NO: 1728180 - DNA, 25 bp, Homo sapien
gaacatcttgtccatgcctttgagc

SEQ ID NO: 1728181 - DNA, 25 bp, Homo sapien
gcctttgagcgcctcggtgagatag

SEQ ID NO: 1728182 - DNA, 25 bp, Homo sapien
ggctgttccctatcggtgtccggtc

SEQ ID NO: 1728183 - DNA, 25 bp, Homo sapien
ctcctccttgtcgccagttttacta

SEQ ID NO: 1728184 - DNA, 25 bp, Homo sapien
tcctccttgtcgccagttttactac

SEQ ID NO: 1728185 - DNA, 25 bp, Homo sapien
tattggtccggattttcctcagccg

SEQ ID NO: 1728186 - DNA, 25 bp, Homo sapien
gatattgttgctccgttgtacgcct

SEQ ID NO: 1728187 - DNA, 25 bp, Homo sapien
taaaaagttcgtgcgtctcagtcaa

SEQ ID NO: 1728188 - DNA, 25 bp, Homo sapien
gtaccgagaggactgaaacaacgca

SEQ ID NO: 1728189 - DNA, 25 bp, Homo sapien
tgaagaagctcataaaccatgcggg

SEQ ID NO: 1728190 - DNA, 25 bp, Homo sapien
catacccctccgaaggaattacata

SEQ ID NO: 1728191 - DNA, 25 bp, Homo sapien
aaccatgcgggcaaagctttggaaa

SEQ ID NO: 1728192 - DNA, 25 bp, Homo sapien
tctctgtaccttatagattgtgtag

SEQ ID NO: 1728193 - DNA, 25 bp, Homo sapien
cttaaacagcaatcaccaaagaacc

SEQ ID NO: 1728194 - DNA, 25 bp, Homo sapien
aaatcaattttaaatgcagggcaat

SEQ ID NO: 1728195 - DNA, 25 bp, Homo sapien
tttaaatgcagggcaatactattag

SEQ ID NO: 1728196 - DNA, 25 bp, Homo sapien
agaacccagggaaatcaaatcaatt

SEQ ID NO: 1728197 - DNA, 25 bp, Homo sapien
tccactcgtaaagctgcttctttcc

SEQ ID NO: 1728198 - DNA, 25 bp, Homo sapien
actcgtaaagctgcttctttccttg

SEQ ID NO: 1728199 - DNA, 25 bp, Homo sapien
gtccactcgtaaagctgcttctttc

SEQ ID NO: 1728200 - DNA, 25 bp, Homo sapien
cactcgtaaagctgcttctttcctt

SEQ ID NO: 1728201 - DNA, 25 bp, Homo sapien
gaaatgtgggtgcttgtgccgccct

SEQ ID NO: 1728202 - DNA, 25 bp, Homo sapien
caaaacaagtgcacgtctgggaggg

SEQ ID NO: 1728203 - DNA, 25 bp, Homo sapien
ttctcactgcttttgcggaggtgca

SEQ ID NO: 1728204 - DNA, 25 bp, Homo sapien
tcatgataatgctaagatggagccc

SEQ ID NO: 1728205 - DNA, 25 bp, Homo sapien
gagacgatcgttttcagtgtggtct

SEQ ID NO: 1728206 - DNA, 25 bp, Homo sapien
ctctcggacgaaggcgcaggcctct

SEQ ID NO: 1728207 - DNA, 25 bp, Homo sapien
tgcaaggaaaggagacgatcgtttt

SEQ ID NO: 1728208 - DNA, 25 bp, Homo sapien
tcagaacacatctaatgcgatcggc

SEQ ID NO: 1728209 - DNA, 25 bp, Homo sapien
tctccccgctttaggattgtgacgg

SEQ ID NO: 1728210 - DNA, 25 bp, Homo sapien
tgcacagtaagagcaaggcgcgtcc

SEQ ID NO: 1728211 - DNA, 25 bp, Homo sapien
tagcccttagggtgagaccgagagc

SEQ ID NO: 1728212 - DNA, 25 bp, Homo sapien
tctatgtcctcaacacgactgggcg

SEQ ID NO: 1728213 - DNA, 25 bp, Homo sapien
aacacacaaatgagggcgtctggca

SEQ ID NO: 1728214 - DNA, 25 bp, Homo sapien
caaaaggttctatctcgctggagca

SEQ ID NO: 1728215 - DNA, 25 bp, Homo sapien
tagtgggctcactccacgaaacggg

SEQ ID NO: 1728216 - DNA, 25 bp, Homo sapien
tcagataaatgtagcgggcctggct

SEQ ID NO: 1728217 - DNA, 25 bp, Homo sapien
aggacatttcttgctccccagagac

SEQ ID NO: 1728218 - DNA, 25 bp, Homo sapien
aacaggacatttcttgctccccaga

SEQ ID NO: 1728219 - DNA, 25 bp, Homo sapien
agatctttttaggtgacggaatcct

SEQ ID NO: 1728220 - DNA, 25 bp, Homo sapien
gacggaatcctcacccaaacaggac

SEQ ID NO: 1728221 - DNA, 25 bp, Homo sapien
gctcttgaggcaacatcagacggtt

SEQ ID NO: 1728222 - DNA, 25 bp, Homo sapien
tttcacatacatcgtcaaaggtggg

SEQ ID NO: 1728223 - DNA, 25 bp, Homo sapien
gaacagtgtgtagataagctcgagg

SEQ ID NO: 1728224 - DNA, 25 bp, Homo sapien
ttaacatgaataccctccagagctc

SEQ ID NO: 1728225 - DNA, 25 bp, Homo sapien
tccctgtgcccggagcgtgtgttat

SEQ ID NO: 1728226 - DNA, 25 bp, Homo sapien
cgtgtgttattacccagtctcccaa

SEQ ID NO: 1728227 - DNA, 25 bp, Homo sapien
cagtctcccaactggtgtcggtgat

SEQ ID NO: 1728228 - DNA, 25 bp, Homo sapien
aactggtgtcggtgattgagctctg

SEQ ID NO: 1728229 - DNA, 25 bp, Homo sapien
agagcgtgcctagacgcgggctccc

SEQ ID NO: 1728230 - DNA, 25 bp, Homo sapien
gctcccggagccgtgtgcgacggct

SEQ ID NO: 1728231 - DNA, 25 bp, Homo sapien
ggcaacctggagagcgtgcctagac

SEQ ID NO: 1728232 - DNA, 25 bp, Homo sapien
gctcgacgcaggctggcgcggcgca

SEQ ID NO: 1728233 - DNA, 25 bp, Homo sapien
gaagtaaaatccaacgctgtgtaga

SEQ ID NO: 1728234 - DNA, 25 bp, Homo sapien
ttcacatggcaagtgctagggctca

SEQ ID NO: 1728235 - DNA, 25 bp, Homo sapien
tctagggcatctgatcgagagtccg

SEQ ID NO: 1728236 - DNA, 25 bp, Homo sapien
cgagagtccggacgctgaatttcca

SEQ ID NO: 1728237 - DNA, 25 bp, Homo sapien
gactccattactgttccaagctctg

SEQ ID NO: 1728238 - DNA, 25 bp, Homo sapien
attccagactccattactgttccaa

SEQ ID NO: 1728239 - DNA, 25 bp, Homo sapien
tccattactgttccaagctctgaca

SEQ ID NO: 1728240 - DNA, 25 bp, Homo sapien
tccagactccattactgttccaagc

SEQ ID NO: 1728241 - DNA, 25 bp, Homo sapien
tcagccttgcatatttgcattaaag

SEQ ID NO: 1728242 - DNA, 25 bp, Homo sapien
ataatgtacatttgaccagtgctgt

SEQ ID NO: 1728243 - DNA, 25 bp, Homo sapien
agtgattgtgaataatgtacatttg

SEQ ID NO: 1728244 - DNA, 25 bp, Homo sapien
agtgctgtctgcagaactaatgcct

SEQ ID NO: 1728245 - DNA, 25 bp, Homo sapien
acttcttaatcactctaggccatgg

SEQ ID NO: 1728246 - DNA, 25 bp, Homo sapien
tggagttccaagtcccacttcttaa

SEQ ID NO: 1728247 - DNA, 25 bp, Homo sapien
ccacttcttaatcactctaggccat

SEQ ID NO: 1728248 - DNA, 25 bp, Homo sapien
tcttaatcactctaggccatggcat

SEQ ID NO: 1728249 - DNA, 25 bp, Homo sapien
taggatttagactgcaaactccacc

SEQ ID NO: 1728250 - DNA, 25 bp, Homo sapien
gctgttgatgttctaaattaccacc

SEQ ID NO: 1728251 - DNA, 25 bp, Homo sapien
cttctgtaggatttagactgcaaac

SEQ ID NO: 1728252 - DNA, 25 bp, Homo sapien
acccccttgtaaatcctgctgtgac

SEQ ID NO: 1728253 - DNA, 25 bp, Homo sapien
gcagtgttttattatcgggtctaca

SEQ ID NO: 1728254 - DNA, 25 bp, Homo sapien
tgtattctgttcctctactcttgct

SEQ ID NO: 1728255 - DNA, 25 bp, Homo sapien
tgaaacacgtacatgtatatagtcc

SEQ ID NO: 1728256 - DNA, 25 bp, Homo sapien
tagactattatcctatcccctgaaa

SEQ ID NO: 1728257 - DNA, 25 bp, Homo sapien
ctttcacactgaagtctcccagaaa

SEQ ID NO: 1728258 - DNA, 25 bp, Homo sapien
ctcccagaaacttcaaaacctcatg

SEQ ID NO: 1728259 - DNA, 25 bp, Homo sapien
ccagaaacttcaaaacctcatggaa

SEQ ID NO: 1728260 - DNA, 25 bp, Homo sapien
gaaacttcaaaacctcatggaacat

SEQ ID NO: 1728261 - DNA, 25 bp, Homo sapien
ttggcaatttcctcccgacctgatc

SEQ ID NO: 1728262 - DNA, 25 bp, Homo sapien
gacttcatgcaaaacctgacaactg

SEQ ID NO: 1728263 - DNA, 25 bp, Homo sapien
taacactagagtgggagcaagacgc

SEQ ID NO: 1728264 - DNA, 25 bp, Homo sapien
agcaagacgccatcgccaatgtgac

SEQ ID NO: 1728265 - DNA, 25 bp, Homo sapien
aaatatgtaacggtgtgtgaaagct

SEQ ID NO: 1728266 - DNA, 25 bp, Homo sapien
ctcagtaaatatgtaacggtgtgtg

SEQ ID NO: 1728267 - DNA, 25 bp, Homo sapien
cggtgtgtgaaagctctgggagcat

SEQ ID NO: 1728268 - DNA, 25 bp, Homo sapien
tatgtaacggtgtgtgaaagctctg

SEQ ID NO: 1728269 - DNA, 25 bp, Homo sapien
cactcactcgtactccctgtgtgga

SEQ ID NO: 1728270 - DNA, 25 bp, Homo sapien
cttgtgggctctagagtttgtggct

SEQ ID NO: 1728271 - DNA, 25 bp, Homo sapien
ggctctagagtttgtggctccagac

SEQ ID NO: 1728272 - DNA, 25 bp, Homo sapien
tactccctgtgtggatcttgtgggc

SEQ ID NO: 1728273 - DNA, 25 bp, Homo sapien
cagcgactattaggccacgtggcta

SEQ ID NO: 1728274 - DNA, 25 bp, Homo sapien
tatggcagcgactattaggccacgt

SEQ ID NO: 1728275 - DNA, 25 bp, Homo sapien
tattaggccacgtggctacatgctt

SEQ ID NO: 1728276 - DNA, 25 bp, Homo sapien
cgtggctacatgctttttcacagcc

SEQ ID NO: 1728277 - DNA, 25 bp, Homo sapien
tggtcttgggtaacccatgtcagta

SEQ ID NO: 1728278 - DNA, 25 bp, Homo sapien
tgggtaacccatgtcagtagccagg

SEQ ID NO: 1728279 - DNA, 25 bp, Homo sapien
caggttcacctgcatattctcaaat

SEQ ID NO: 1728280 - DNA, 25 bp, Homo sapien
gtcagtagccaggttcacctgcata

SEQ ID NO: 1728281 - DNA, 25 bp, Homo sapien
taatgcgcgatgaacatgtttgtgc

SEQ ID NO: 1728282 - DNA, 25 bp, Homo sapien
catttgggcaaaatggccatcaggc

SEQ ID NO: 1728283 - DNA, 25 bp, Homo sapien
ttcagaaacaatgcatacacacagt

SEQ ID NO: 1728284 - DNA, 25 bp, Homo sapien
tattcccttatatgtccagtaacgg

SEQ ID NO: 1728285 - DNA, 25 bp, Homo sapien
caagattgtagccatacagaaggca

SEQ ID NO: 1728286 - DNA, 25 bp, Homo sapien
acgatgagttggttgcagtaaatgc

SEQ ID NO: 1728287 - DNA, 25 bp, Homo sapien
ctcttggacctccagggagtgctgc

SEQ ID NO: 1728288 - DNA, 25 bp, Homo sapien
gtcctcacaggatacaactgcagaa

SEQ ID NO: 1728289 - DNA, 25 bp, Homo sapien
ctttcaggtgaaaatcaattgcttc

SEQ ID NO: 1728290 - DNA, 25 bp, Homo sapien
atggaatgaccccatttggcccaaa

SEQ ID NO: 1728291 - DNA, 25 bp, Homo sapien
gaattagatattgctaccactttca

SEQ ID NO: 1728292 - DNA, 25 bp, Homo sapien
gaggttaagaatggaatgaccccat

SEQ ID NO: 1728293 - DNA, 25 bp, Homo sapien
cataagccatgaaaacaaagacaaa

SEQ ID NO: 1728294 - DNA, 25 bp, Homo sapien
catgtttatattcataagccatgaa

SEQ ID NO: 1728295 - DNA, 25 bp, Homo sapien
acaaagacaaagatattctcaagca

SEQ ID NO: 1728296 - DNA, 25 bp, Homo sapien
gtttatattcataagccatgaaaac

SEQ ID NO: 1728297 - DNA, 25 bp, Homo sapien
ttcacaatcttgatcagtatctctc

SEQ ID NO: 1728298 - DNA, 25 bp, Homo sapien
tgatggacgtatgttcttcacaatc

SEQ ID NO: 1728299 - DNA, 25 bp, Homo sapien
tctagggctgacactaaggaactga

SEQ ID NO: 1728300 - DNA, 25 bp, Homo sapien
cattggtgatggacgtatgttcttc

SEQ ID NO: 1728301 - DNA, 25 bp, Homo sapien
ggtagtgttcaatggccctcaagca

SEQ ID NO: 1728302 - DNA, 25 bp, Homo sapien
tgttaaggactgttgagcacccagc

SEQ ID NO: 1728303 - DNA, 25 bp, Homo sapien
gggtttccccacatgagtaggtcca

SEQ ID NO: 1728304 - DNA, 25 bp, Homo sapien
gctgcaaccaagttcactgccagga

SEQ ID NO: 1728305 - DNA, 25 bp, Homo sapien
caaaggtgctcagattgcaacccaa

SEQ ID NO: 1728306 - DNA, 25 bp, Homo sapien
cctttcatggatggcacaaaggtgc

SEQ ID NO: 1728307 - DNA, 25 bp, Homo sapien
gaaagcaagtaaagaagagctgaag

SEQ ID NO: 1728308 - DNA, 25 bp, Homo sapien
cagcggaatgcagatacattgagta

SEQ ID NO: 1728309 - DNA, 25 bp, Homo sapien
ttctaaaggtgtcttttgtccactc

SEQ ID NO: 1728310 - DNA, 25 bp, Homo sapien
gctaaaaggctttctggttgctggt

SEQ ID NO: 1728311 - DNA, 25 bp, Homo sapien
tgctggtttgtagtttctaaaggtg

SEQ ID NO: 1728312 - DNA, 25 bp, Homo sapien
gtccactcatggtttctgtatccat

SEQ ID NO: 1728313 - DNA, 25 bp, Homo sapien
taattggcaaaccaacctgaattgt

SEQ ID NO: 1728314 - DNA, 25 bp, Homo sapien
catagaagtgaacacgaggctggtt

SEQ ID NO: 1728315 - DNA, 25 bp, Homo sapien
ccagtccattggtatgatcatctta

SEQ ID NO: 1728316 - DNA, 25 bp, Homo sapien
gtggctgggccatacctttcccttg

SEQ ID NO: 1728317 - DNA, 25 bp, Homo sapien
tgatgtaggtttgttgaaccctggg

SEQ ID NO: 1728318 - DNA, 25 bp, Homo sapien
ttaagtgatgtaggtttgttgaacc

SEQ ID NO: 1728319 - DNA, 25 bp, Homo sapien
gtaactccggaataagactggctct

SEQ ID NO: 1728320 - DNA, 25 bp, Homo sapien
tattaggaagtattgacagagagga

SEQ ID NO: 1728321 - DNA, 25 bp, Homo sapien
aacgtgtacactttttccagagaag

SEQ ID NO: 1728322 - DNA, 25 bp, Homo sapien
cagccggccaacctctactggtgaa

SEQ ID NO: 1728323 - DNA, 25 bp, Homo sapien
tgatgcaaatggcatgccagagcat

SEQ ID NO: 1728324 - DNA, 25 bp, Homo sapien
ctaataaagaacagccggccaacct

SEQ ID NO: 1728325 - DNA, 25 bp, Homo sapien
aggttaagaaaatgtctctctcttt

SEQ ID NO: 1728326 - DNA, 25 bp, Homo sapien
ctgcagacatccaaaaggttaagaa

SEQ ID NO: 1728327 - DNA, 25 bp, Homo sapien
cctccttgtaactttactccattct

SEQ ID NO: 1728328 - DNA, 25 bp, Homo sapien
tcttcttcttcagaacccagagctg

SEQ ID NO: 1728329 - DNA, 25 bp, Homo sapien
ccaggcactgtcagacagccagtgg

SEQ ID NO: 1728330 - DNA, 25 bp, Homo sapien
gtggcagcccttggtagtcctgctg

SEQ ID NO: 1728331 - DNA, 25 bp, Homo sapien
aggcactgtcagacagccagtggca

SEQ ID NO: 1728332 - DNA, 25 bp, Homo sapien
agcccttggtagtcctgctggagct

SEQ ID NO: 1728333 - DNA, 25 bp, Homo sapien
ccatccaactctaagtgtgattcct

SEQ ID NO: 1728334 - DNA, 25 bp, Homo sapien
tgcacagtgactgcctgggtgctag

SEQ ID NO: 1728335 - DNA, 25 bp, Homo sapien
ccaactctaagtgtgattcctcctt

SEQ ID NO: 1728336 - DNA, 25 bp, Homo sapien
agtgcacagtgactgcctgggtgct

SEQ ID NO: 1728337 - DNA, 25 bp, Homo sapien
tggctgctgcctctgtatcaaacag

SEQ ID NO: 1728338 - DNA, 25 bp, Homo sapien
tctggctgctgcctctgtatcaaac

SEQ ID NO: 1728339 - DNA, 25 bp, Homo sapien
tttctggctgctgcctctgtatcaa

SEQ ID NO: 1728340 - DNA, 25 bp, Homo sapien
ctttctggctgctgcctctgtatca

SEQ ID NO: 1728341 - DNA, 25 bp, Homo sapien
gatggacaagctctgcgtgcttctc

SEQ ID NO: 1728342 - DNA, 25 bp, Homo sapien
tgtcataatgagcacacaaatgcag

SEQ ID NO: 1728343 - DNA, 25 bp, Homo sapien
tgccatttaagaccattatcccaaa

SEQ ID NO: 1728344 - DNA, 25 bp, Homo sapien
gcttctccactgaacatgctggatc

SEQ ID NO: 1728345 - DNA, 25 bp, Homo sapien
gtcccagtaattccaaggagatcat

SEQ ID NO: 1728346 - DNA, 25 bp, Homo sapien
ttgtatagccttacttggccacttg

SEQ ID NO: 1728347 - DNA, 25 bp, Homo sapien
tttcagttcaaatgtctgtcccagt

SEQ ID NO: 1728348 - DNA, 25 bp, Homo sapien
tattcatttgtatagccttacttgg

SEQ ID NO: 1728349 - DNA, 25 bp, Homo sapien
aatgaggtaccccagtattgtagtg

SEQ ID NO: 1728350 - DNA, 25 bp, Homo sapien
atgaggtaccccagtattgtagtgt

SEQ ID NO: 1728351 - DNA, 25 bp, Homo sapien
tgaggtaccccagtattgtagtgtt

SEQ ID NO: 1728352 - DNA, 25 bp, Homo sapien
ttaatgaggtaccccagtattgtag

SEQ ID NO: 1728353 - DNA, 25 bp, Homo sapien
ctgtttactgaatgatgttttctct

SEQ ID NO: 1728354 - DNA, 25 bp, Homo sapien
tttattgaaatagagttgcagccac

SEQ ID NO: 1728355 - DNA, 25 bp, Homo sapien
tattgaaatagagttgcagccactt

SEQ ID NO: 1728356 - DNA, 25 bp, Homo sapien
ttattgaaatagagttgcagccact

SEQ ID NO: 1728357 - DNA, 25 bp, Homo sapien
aaactccagcaatctggatttttcc

SEQ ID NO: 1728358 - DNA, 25 bp, Homo sapien
tctcagaagcatccagtgggaacat

SEQ ID NO: 1728359 - DNA, 25 bp, Homo sapien
tcagaaccgggtaaaatgcataacc

SEQ ID NO: 1728360 - DNA, 25 bp, Homo sapien
tgtctaccaatgatgaatttacatc

SEQ ID NO: 1728361 - DNA, 25 bp, Homo sapien
tctattagatttaaatgcagttccc

SEQ ID NO: 1728362 - DNA, 25 bp, Homo sapien
gcataaccagtagtccataaatgtc

SEQ ID NO: 1728363 - DNA, 25 bp, Homo sapien
cccacgtgttctttcatcaggagta

SEQ ID NO: 1728364 - DNA, 25 bp, Homo sapien
cacacacgtgaaagtcacagttccc

SEQ ID NO: 1728365 - DNA, 25 bp, Homo sapien
tcatcaggagtatggaaactacagc

SEQ ID NO: 1728366 - DNA, 25 bp, Homo sapien
gaaactacagctgaaattctatctg

SEQ ID NO: 1728367 - DNA, 25 bp, Homo sapien
gcagctcctacttgttccacgaaca

SEQ ID NO: 1728368 - DNA, 25 bp, Homo sapien
ctcctacttgttccacgaacaagtt

SEQ ID NO: 1728369 - DNA, 25 bp, Homo sapien
agctcctacttgttccacgaacaag

SEQ ID NO: 1728370 - DNA, 25 bp, Homo sapien
cagctcctacttgttccacgaacaa

SEQ ID NO: 1728371 - DNA, 25 bp, Homo sapien
aaagcatgctgcaaacaaaacgctt

SEQ ID NO: 1728372 - DNA, 25 bp, Homo sapien
agcatgctgcaaacaaaacgctttc

SEQ ID NO: 1728373 - DNA, 25 bp, Homo sapien
aagcatgctgcaaacaaaacgcttt

SEQ ID NO: 1728374 - DNA, 25 bp, Homo sapien
taccaggttatgtgaatcttccatc

SEQ ID NO: 1728375 - DNA, 25 bp, Homo sapien
aactggactgatcaaataggtttct

SEQ ID NO: 1728376 - DNA, 25 bp, Homo sapien
ccctcatggtgtgcaacgagagcta

SEQ ID NO: 1728377 - DNA, 25 bp, Homo sapien
tccatcattgcctccataaggtcct

SEQ ID NO: 1728378 - DNA, 25 bp, Homo sapien
tggttactaggtattcttccttcca

SEQ ID NO: 1728379 - DNA, 25 bp, Homo sapien
caagtagaagaaaaatggttactag

SEQ ID NO: 1728380 - DNA, 25 bp, Homo sapien
cctattcagtaataaaccataggcc

SEQ ID NO: 1728381 - DNA, 25 bp, Homo sapien
tattcagtaataaaccataggccat

SEQ ID NO: 1728382 - DNA, 25 bp, Homo sapien
ctattcagtaataaaccataggcca

SEQ ID NO: 1728383 - DNA, 25 bp, Homo sapien
gacttggaaaaacaatgccgaccat

SEQ ID NO: 1728384 - DNA, 25 bp, Homo sapien
agacttggaaaaacaatgccgacca

SEQ ID NO: 1728385 - DNA, 25 bp, Homo sapien
gccagcggagggattggagaaagac

SEQ ID NO: 1728386 - DNA, 25 bp, Homo sapien
gagggattggagaaagacttggaaa

SEQ ID NO: 1728387 - DNA, 25 bp, Homo sapien
cttggtgctgcgcagaaggatttcc

SEQ ID NO: 1728388 - DNA, 25 bp, Homo sapien
ggccatggccttgtaagctgtgaga

SEQ ID NO: 1728389 - DNA, 25 bp, Homo sapien
gtgagaactcgctgtgatccctgtc

SEQ ID NO: 1728390 - DNA, 25 bp, Homo sapien
ccctttctcttctagcccctgtctc

SEQ ID NO: 1728391 - DNA, 25 bp, Homo sapien
catccattcctttaactgtcttggc

SEQ ID NO: 1728392 - DNA, 25 bp, Homo sapien
tacttgctgaatgtctgtaaactca

SEQ ID NO: 1728393 - DNA, 25 bp, Homo sapien
aaaagtgcaatctgatcatacttgc

SEQ ID NO: 1728394 - DNA, 25 bp, Homo sapien
aaagaaagaatgcttgccctaggca

SEQ ID NO: 1728395 - DNA, 25 bp, Homo sapien
attaccgaagttccaagttggactg

SEQ ID NO: 1728396 - DNA, 25 bp, Homo sapien
gaagaacctgtaagcagtgctattg

SEQ ID NO: 1728397 - DNA, 25 bp, Homo sapien
gaatgaagaacctgtaagcagtgct

SEQ ID NO: 1728398 - DNA, 25 bp, Homo sapien
ctgtgaagaatgaagaacctgtaag

SEQ ID NO: 1728399 - DNA, 25 bp, Homo sapien
cctgtaagcagtgctattgcctgct

SEQ ID NO: 1728400 - DNA, 25 bp, Homo sapien
tcactgatacggagtcagtgtgagt

SEQ ID NO: 1728401 - DNA, 25 bp, Homo sapien
tgatacggagtcagtgtgagtttat

SEQ ID NO: 1728402 - DNA, 25 bp, Homo sapien
tgcccaaaaagaagtgtgcgtgtgt

SEQ ID NO: 1728403 - DNA, 25 bp, Homo sapien
ttttgcccaaaaagaagtgtgcgtg

SEQ ID NO: 1728404 - DNA, 25 bp, Homo sapien
ggagtactcatatctatcaagcagc

SEQ ID NO: 1728405 - DNA, 25 bp, Homo sapien
tgagggagaataatgctgcatcagc

SEQ ID NO: 1728406 - DNA, 25 bp, Homo sapien
tattgggccaactggctggagtact

SEQ ID NO: 1728407 - DNA, 25 bp, Homo sapien
catgcaatattagcacatggaccag

SEQ ID NO: 1728408 - DNA, 25 bp, Homo sapien
ttcattaaaatgttccgttctctgc

SEQ ID NO: 1728409 - DNA, 25 bp, Homo sapien
ggaaaatctgaaacccttcatccga

SEQ ID NO: 1728410 - DNA, 25 bp, Homo sapien
tcaaagtgatatgaagacaacaggg

SEQ ID NO: 1728411 - DNA, 25 bp, Homo sapien
catccgactggccaatgtgtagact

SEQ ID NO: 1728412 - DNA, 25 bp, Homo sapien
caagtagacacatagcgatggagtg

SEQ ID NO: 1728413 - DNA, 25 bp, Homo sapien
accaagtagacacatagcgatggag

SEQ ID NO: 1728414 - DNA, 25 bp, Homo sapien
agtagacacatagcgatggagtgga

SEQ ID NO: 1728415 - DNA, 25 bp, Homo sapien
ataaccaagtagacacatagcgatg

SEQ ID NO: 1728416 - DNA, 25 bp, Homo sapien
cttttgattcattgacttgtaggac

SEQ ID NO: 1728417 - DNA, 25 bp, Homo sapien
ttgtaggacaacataaattgttact

SEQ ID NO: 1728418 - DNA, 25 bp, Homo sapien
ggacaacataaattgttactaaaga

SEQ ID NO: 1728419 - DNA, 25 bp, Homo sapien
ttggtttgggttaagatgtaagaga

SEQ ID NO: 1728420 - DNA, 25 bp, Homo sapien
cagcaagtcacttggttctggggac

SEQ ID NO: 1728421 - DNA, 25 bp, Homo sapien
acccagcaagtcacttggttctggg

SEQ ID NO: 1728422 - DNA, 25 bp, Homo sapien
ccaacccagcaagtcacttggttct

SEQ ID NO: 1728423 - DNA, 25 bp, Homo sapien
gcaagtcacttggttctggggacat

SEQ ID NO: 1728424 - DNA, 25 bp, Homo sapien
cttctgctgttgtcctctgtactcc

SEQ ID NO: 1728425 - DNA, 25 bp, Homo sapien
ttctgctgttgtcctctgtactcca

SEQ ID NO: 1728426 - DNA, 25 bp, Homo sapien
tctgctgttgtcctctgtactccag

SEQ ID NO: 1728427 - DNA, 25 bp, Homo sapien
tccttctgctgttgtcctctgtact

SEQ ID NO: 1728428 - DNA, 25 bp, Homo sapien
tcccccactttgcttgtgctaacag

SEQ ID NO: 1728429 - DNA, 25 bp, Homo sapien
tatttgggaatgtatgcctttagat

SEQ ID NO: 1728430 - DNA, 25 bp, Homo sapien
gacactgaggaataatatatttggg

SEQ ID NO: 1728431 - DNA, 25 bp, Homo sapien
tatgcctttagattcccccactttg

SEQ ID NO: 1728432 - DNA, 25 bp, Homo sapien
ttagtgacagacatagacctcgagc

SEQ ID NO: 1728433 - DNA, 25 bp, Homo sapien
gacctcgagctaaattcctgtgcac

SEQ ID NO: 1728434 - DNA, 25 bp, Homo sapien
caacaagcgtagcacaattctggtc

SEQ ID NO: 1728435 - DNA, 25 bp, Homo sapien
tgtgcagagccataggcagttgtca

SEQ ID NO: 1728436 - DNA, 25 bp, Homo sapien
ggcttgcagctaatccagcctggtg

SEQ ID NO: 1728437 - DNA, 25 bp, Homo sapien
ggacgaatagatgtttcgtctcttc

SEQ ID NO: 1728438 - DNA, 25 bp, Homo sapien
ggaaaggcagaacggagggataaga

SEQ ID NO: 1728439 - DNA, 25 bp, Homo sapien
cagcggctgctaggaaacaggatgg

SEQ ID NO: 1728440 - DNA, 25 bp, Homo sapien
gaaacagagaaaccaatctccgtga

SEQ ID NO: 1728441 - DNA, 25 bp, Homo sapien
tgtgtgctgcagtaagggatgattc

SEQ ID NO: 1728442 - DNA, 25 bp, Homo sapien
gagcacacaatcatgtttttcagtc

SEQ ID NO: 1728443 - DNA, 25 bp, Homo sapien
ctcagtgtgtgctgcagtaagggat

SEQ ID NO: 1728444 - DNA, 25 bp, Homo sapien
gagttattttaaatgggtgtgtata

SEQ ID NO: 1728445 - DNA, 25 bp, Homo sapien
taaagatcctgttactggagttatt

SEQ ID NO: 1728446 - DNA, 25 bp, Homo sapien
aaagatcctgttactggagttattt

SEQ ID NO: 1728447 - DNA, 25 bp, Homo sapien
gatcctgttactggagttattttaa

SEQ ID NO: 1728448 - DNA, 25 bp, Homo sapien
tactcggacacaaggcacagaatca

SEQ ID NO: 1728449 - DNA, 25 bp, Homo sapien
ttactcggacacaaggcacagaatc

SEQ ID NO: 1728450 - DNA, 25 bp, Homo sapien
tctcctttgaaccaaaacgacaatc

SEQ ID NO: 1728451 - DNA, 25 bp, Homo sapien
gaaccaaaacgacaatcatactggg

SEQ ID NO: 1728452 - DNA, 25 bp, Homo sapien
gaaatctttactatggccacgccct

SEQ ID NO: 1728453 - DNA, 25 bp, Homo sapien
gaacatatgcttggcctttggtaga

SEQ ID NO: 1728454 - DNA, 25 bp, Homo sapien
tttagaagtttgaagctccctgtta

SEQ ID NO: 1728455 - DNA, 25 bp, Homo sapien
tacgggtttgaaatctactagctcc

SEQ ID NO: 1728456 - DNA, 25 bp, Homo sapien
ctgttcaatgctaatgtgtccaggg

SEQ ID NO: 1728457 - DNA, 25 bp, Homo sapien
ccagagaggcagtggcacgtgggag

SEQ ID NO: 1728458 - DNA, 25 bp, Homo sapien
actccagctgattgaaaataggcca

SEQ ID NO: 1728459 - DNA, 25 bp, Homo sapien
catttgtcctgttcaatgctaatgt

SEQ ID NO: 1728460 - DNA, 25 bp, Homo sapien
ccgacataataggtaattgcacata

SEQ ID NO: 1728461 - DNA, 25 bp, Homo sapien
tgagaaccaatttccgacataatag

SEQ ID NO: 1728462 - DNA, 25 bp, Homo sapien
ggtaattgcacataattacaggagt

SEQ ID NO: 1728463 - DNA, 25 bp, Homo sapien
tgcacataattacaggagtttcaga

SEQ ID NO: 1728464 - DNA, 25 bp, Homo sapien
ggtgttacagagctaatagattcca

SEQ ID NO: 1728465 - DNA, 25 bp, Homo sapien
tacagagctaatagattccacctgc

SEQ ID NO: 1728466 - DNA, 25 bp, Homo sapien
ctccggtgttacagagctaatagat

SEQ ID NO: 1728467 - DNA, 25 bp, Homo sapien
gagctaatagattccacctgcggca

SEQ ID NO: 1728468 - DNA, 25 bp, Homo sapien
ccacagagcaagtccgattatttac

SEQ ID NO: 1728469 - DNA, 25 bp, Homo sapien
gacaccgggaattccttccaggatc

SEQ ID NO: 1728470 - DNA, 25 bp, Homo sapien
ctgaggtgtccagggcataaatcca

SEQ ID NO: 1728471 - DNA, 25 bp, Homo sapien
taaatccagggaggtactctgtggg

SEQ ID NO: 1728472 - DNA, 25 bp, Homo sapien
tgtcagtaaggtaggcacgtcccag

SEQ ID NO: 1728473 - DNA, 25 bp, Homo sapien
cagtggactattccattgtcagtaa

SEQ ID NO: 1728474 - DNA, 25 bp, Homo sapien
ttcaatgaccgggagagtggcagca

SEQ ID NO: 1728475 - DNA, 25 bp, Homo sapien
tactaacggcatcgtggcccagaaa

SEQ ID NO: 1728476 - DNA, 25 bp, Homo sapien
cagaagtctgttgctgtctaacctg

SEQ ID NO: 1728477 - DNA, 25 bp, Homo sapien
agttggtgtaatatatcctggcttc

SEQ ID NO: 1728478 - DNA, 25 bp, Homo sapien
tccagtaaccaccagaggcaaaagc

SEQ ID NO: 1728479 - DNA, 25 bp, Homo sapien
caaaagcagttggtgtaatatatcc

SEQ ID NO: 1728480 - DNA, 25 bp, Homo sapien
ggtaaacatcagtggtattaccctg

SEQ ID NO: 1728481 - DNA, 25 bp, Homo sapien
cttcaatcttccactggtaaacatc

SEQ ID NO: 1728482 - DNA, 25 bp, Homo sapien
ggtattaccctgactttgtgctaag

SEQ ID NO: 1728483 - DNA, 25 bp, Homo sapien
tcaatcttccactggtaaacatcag

SEQ ID NO: 1728484 - DNA, 25 bp, Homo sapien
agctgttggtgcagaagtcgccgtc

SEQ ID NO: 1728485 - DNA, 25 bp, Homo sapien
tgtagcagaggagagacaagctgtt

SEQ ID NO: 1728486 - DNA, 25 bp, Homo sapien
gaagtcgccgtctgtgtctgtgctt

SEQ ID NO: 1728487 - DNA, 25 bp, Homo sapien
cagcctgtgtatatttggcactgac

SEQ ID NO: 1728488 - DNA, 25 bp, Homo sapien
gatttgtcccatgcctgtcttatag

SEQ ID NO: 1728489 - DNA, 25 bp, Homo sapien
catgcctgtcttatagatggcaaac

SEQ ID NO: 1728490 - DNA, 25 bp, Homo sapien
tctgatttgtcccatgcctgtctta

SEQ ID NO: 1728491 - DNA, 25 bp, Homo sapien
gtcccatgcctgtcttatagatggc

SEQ ID NO: 1728492 - DNA, 25 bp, Homo sapien
agaaaaaggcagtggtaggaactca

SEQ ID NO: 1728493 - DNA, 25 bp, Homo sapien
gaaaaaggcagtggtaggaactcac

SEQ ID NO: 1728494 - DNA, 25 bp, Homo sapien
agatgtggctcacattaggtttcac

SEQ ID NO: 1728495 - DNA, 25 bp, Homo sapien
ggagatgtggctcacattaggtttc

SEQ ID NO: 1728496 - DNA, 25 bp, Homo sapien
gaatggagatgtggctcacattagg

SEQ ID NO: 1728497 - DNA, 25 bp, Homo sapien
gaaggaatggagatgtggctcacat

SEQ ID NO: 1728498 - DNA, 25 bp, Homo sapien
ctgtactcgctctcctgctgccacc

SEQ ID NO: 1728499 - DNA, 25 bp, Homo sapien
tcgctctcctgctgccaccagcagg

SEQ ID NO: 1728500 - DNA, 25 bp, Homo sapien
tgtactcgctctcctgctgccacca

SEQ ID NO: 1728501 - DNA, 25 bp, Homo sapien
ctctcctgctgccaccagcagggca

SEQ ID NO: 1728502 - DNA, 25 bp, Homo sapien
ctggatctgacagccttgttctgtc

SEQ ID NO: 1728503 - DNA, 25 bp, Homo sapien
gatctgacagccttgttctgtccaa

SEQ ID NO: 1728504 - DNA, 25 bp, Homo sapien
gttctgtccaacacctaattgtgaa

SEQ ID NO: 1728505 - DNA, 25 bp, Homo sapien
tgtccaacacctaattgtgaattac

SEQ ID NO: 1728506 - DNA, 25 bp, Homo sapien
tatgagacaggcaggctatggaaaa

SEQ ID NO: 1728507 - DNA, 25 bp, Homo sapien
gattttgaggcctcgtctgccctgg

SEQ ID NO: 1728508 - DNA, 25 bp, Homo sapien
tgtgatggctttgcctcggtctgca

SEQ ID NO: 1728509 - DNA, 25 bp, Homo sapien
tgttccctcagcgaatatgagacag

SEQ ID NO: 1728510 - DNA, 25 bp, Homo sapien
taacatatttggcagtaatgagcat

SEQ ID NO: 1728511 - DNA, 25 bp, Homo sapien
gaaagtaacatatttggcagtaatg

SEQ ID NO: 1728512 - DNA, 25 bp, Homo sapien
taaggtaatgaaagtaacatatttg

SEQ ID NO: 1728513 - DNA, 25 bp, Homo sapien
aaggtaatgaaagtaacatatttgg

SEQ ID NO: 1728514 - DNA, 25 bp, Homo sapien
tactgctttcccgacagttgtctgg

SEQ ID NO: 1728515 - DNA, 25 bp, Homo sapien
gatgaatgtggtctgctcattgaag

SEQ ID NO: 1728516 - DNA, 25 bp, Homo sapien
caatcgagttgggtaaacactattc

SEQ ID NO: 1728517 - DNA, 25 bp, Homo sapien
tgccctacatcattgtcctgcttgt

SEQ ID NO: 1728518 - DNA, 25 bp, Homo sapien
ggagagatcctagaatgaatctctt

SEQ ID NO: 1728519 - DNA, 25 bp, Homo sapien
gaatggagagatcctagaatgaatc

SEQ ID NO: 1728520 - DNA, 25 bp, Homo sapien
gctcttctctaaagtctcctttcag

SEQ ID NO: 1728521 - DNA, 25 bp, Homo sapien
tggtgagaatggagagatcctagaa

SEQ ID NO: 1728522 - DNA, 25 bp, Homo sapien
cctaaaacccaaacattcagctgaa

SEQ ID NO: 1728523 - DNA, 25 bp, Homo sapien
ccctaaaacccaaacattcagctga

SEQ ID NO: 1728524 - DNA, 25 bp, Homo sapien
tccctaaaacccaaacattcagctg

SEQ ID NO: 1728525 - DNA, 25 bp, Homo sapien
tacattccctgatatgtgggcagga

SEQ ID NO: 1728526 - DNA, 25 bp, Homo sapien
taatgtgcaactacagacattttcc

SEQ ID NO: 1728527 - DNA, 25 bp, Homo sapien
gatcatccaatactgaatgttgcac

SEQ ID NO: 1728528 - DNA, 25 bp, Homo sapien
gaacatttatcagtctcgattcaca

SEQ ID NO: 1728529 - DNA, 25 bp, Homo sapien
cactgccttggtttctacgtctgta

SEQ ID NO: 1728530 - DNA, 25 bp, Homo sapien
tgccaccagacagacttcactcact

SEQ ID NO: 1728531 - DNA, 25 bp, Homo sapien
ctgccaccagacagacttcactcac

SEQ ID NO: 1728532 - DNA, 25 bp, Homo sapien
gccaccagacagacttcactcactg

SEQ ID NO: 1728533 - DNA, 25 bp, Homo sapien
caggagggcaagaacatcaactttt

SEQ ID NO: 1728534 - DNA, 25 bp, Homo sapien
tgccatgatttcaggagggcaagaa

SEQ ID NO: 1728535 - DNA, 25 bp, Homo sapien
atccccgtttttggtgccatgattt

SEQ ID NO: 1728536 - DNA, 25 bp, Homo sapien
ccccgtttttggtgccatgatttca

SEQ ID NO: 1728537 - DNA, 25 bp, Homo sapien
ggaggagtagactgggacaaggtca

SEQ ID NO: 1728538 - DNA, 25 bp, Homo sapien
aggagtagactgggacaaggtcact

SEQ ID NO: 1728539 - DNA, 25 bp, Homo sapien
gaggagtagactgggacaaggtcac

SEQ ID NO: 1728540 - DNA, 25 bp, Homo sapien
ggagtagactgggacaaggtcactt

SEQ ID NO: 1728541 - DNA, 25 bp, Homo sapien
ccaggtaattagaaaggccagattc

SEQ ID NO: 1728542 - DNA, 25 bp, Homo sapien
tcccaactccaaacaggatcacgca

SEQ ID NO: 1728543 - DNA, 25 bp, Homo sapien
tagaaaggccagattccctacattc

SEQ ID NO: 1728544 - DNA, 25 bp, Homo sapien
tgtgacagtacccaggtaattagaa

SEQ ID NO: 1728545 - DNA, 25 bp, Homo sapien
cttcaccagcctggggcgagggtcc

SEQ ID NO: 1728546 - DNA, 25 bp, Homo sapien
ctaggcaccttcaccagcctggggc

SEQ ID NO: 1728547 - DNA, 25 bp, Homo sapien
cagcctggggcgagggtccttccca

SEQ ID NO: 1728548 - DNA, 25 bp, Homo sapien
ggcaccttcaccagcctggggcgag

SEQ ID NO: 1728549 - DNA, 25 bp, Homo sapien
cccttagaatattgtagttactgta

SEQ ID NO: 1728550 - DNA, 25 bp, Homo sapien
ttccatacttagaaatgtgtccttc

SEQ ID NO: 1728551 - DNA, 25 bp, Homo sapien
ttttccatacttagaaatgtgtcct

SEQ ID NO: 1728552 - DNA, 25 bp, Homo sapien
ataatcccttagaatattgtagtta

SEQ ID NO: 1728553 - DNA, 25 bp, Homo sapien
tagaagatgcagtggattggcgccc

SEQ ID NO: 1728554 - DNA, 25 bp, Homo sapien
caaacaccggcatattggtaaggct

SEQ ID NO: 1728555 - DNA, 25 bp, Homo sapien
ccatgtgaggatctatgaacggctc

SEQ ID NO: 1728556 - DNA, 25 bp, Homo sapien
actgtgaaagaagtcaagggccacc

SEQ ID NO: 1728557 - DNA, 25 bp, Homo sapien
tagactcatgccattggcttgcaaa

SEQ ID NO: 1728558 - DNA, 25 bp, Homo sapien
taaaggttgcatgattgaatgccct

SEQ ID NO: 1728559 - DNA, 25 bp, Homo sapien
gatttgctcggtcaataaaggttgc

SEQ ID NO: 1728560 - DNA, 25 bp, Homo sapien
ccaaccttaggtacgtagatgtgaa

SEQ ID NO: 1728561 - DNA, 25 bp, Homo sapien
gatacagggataatagaagactcaa

SEQ ID NO: 1728562 - DNA, 25 bp, Homo sapien
catgttttatgagggccaagatgcc

SEQ ID NO: 1728563 - DNA, 25 bp, Homo sapien
tgtgaacgcctttaaaggatcatgt

SEQ ID NO: 1728564 - DNA, 25 bp, Homo sapien
tcatatactatttctgtgaacgcct

SEQ ID NO: 1728565 - DNA, 25 bp, Homo sapien
caggcacaagtctaatccggatctt

SEQ ID NO: 1728566 - DNA, 25 bp, Homo sapien
taggattatggagcgtggactaagc

SEQ ID NO: 1728567 - DNA, 25 bp, Homo sapien
tgtgagggctcaggcatctatttcc

SEQ ID NO: 1728568 - DNA, 25 bp, Homo sapien
ccggatcttgccaacaaaggaagct

SEQ ID NO: 1728569 - DNA, 25 bp, Homo sapien
tggagaggtcccatatagatgctga

SEQ ID NO: 1728570 - DNA, 25 bp, Homo sapien
tgcatagtgcagtactacagctcag

SEQ ID NO: 1728571 - DNA, 25 bp, Homo sapien
gctactctcgtaatcagcacaggag

SEQ ID NO: 1728572 - DNA, 25 bp, Homo sapien
catccctcctttggcaatggagtgg

SEQ ID NO: 1728573 - DNA, 25 bp, Homo sapien
gctttcttcacctccgcttcgagtt

SEQ ID NO: 1728574 - DNA, 25 bp, Homo sapien
tcttcacctccgcttcgagtttgtt

SEQ ID NO: 1728575 - DNA, 25 bp, Homo sapien
tgggttttattgacagtaggtttca

SEQ ID NO: 1728576 - DNA, 25 bp, Homo sapien
cacctccgcttcgagtttgttttgg

SEQ ID NO: 1728577 - DNA, 25 bp, Homo sapien
caaatgctgccacgctatttgttgg

SEQ ID NO: 1728578 - DNA, 25 bp, Homo sapien
ggtttagcaaatgctgccacgctat

SEQ ID NO: 1728579 - DNA, 25 bp, Homo sapien
tgcctggggtttagcaaatgctgcc

SEQ ID NO: 1728580 - DNA, 25 bp, Homo sapien
gctgccacgctatttgttggataaa

SEQ ID NO: 1728581 - DNA, 25 bp, Homo sapien
taagaaagtagatagaaatgtgtaa

SEQ ID NO: 1728582 - DNA, 25 bp, Homo sapien
gacaatttgccgattcacgaataac

SEQ ID NO: 1728583 - DNA, 25 bp, Homo sapien
taaggtaatgcaatcgtcagaggac

SEQ ID NO: 1728584 - DNA, 25 bp, Homo sapien
gggaaactggcagcggtctttttgc

SEQ ID NO: 1728585 - DNA, 25 bp, Homo sapien
aattacttcttgtagagtgttgtca

SEQ ID NO: 1728586 - DNA, 25 bp, Homo sapien
gcctgagtaacaatttttgtgctga

SEQ ID NO: 1728587 - DNA, 25 bp, Homo sapien
ccctgagtttgcatcataggcctga

SEQ ID NO: 1728588 - DNA, 25 bp, Homo sapien
tataagcactcataggaattacttc

SEQ ID NO: 1728589 - DNA, 25 bp, Homo sapien
tcagtcccagacatgtaaaagggga

SEQ ID NO: 1728590 - DNA, 25 bp, Homo sapien
ctgcagagaatatgagggtatagct

SEQ ID NO: 1728591 - DNA, 25 bp, Homo sapien
tgatgctgcagagaatatgagggta

SEQ ID NO: 1728592 - DNA, 25 bp, Homo sapien
aatatgagggtatagctgggccaca

SEQ ID NO: 1728593 - DNA, 25 bp, Homo sapien
tatttcaatgccacccactagggct

SEQ ID NO: 1728594 - DNA, 25 bp, Homo sapien
ctacttgtcgtagcgaggaactacc

SEQ ID NO: 1728595 - DNA, 25 bp, Homo sapien
gatggaggtcaccactgtttgactt

SEQ ID NO: 1728596 - DNA, 25 bp, Homo sapien
tgtaagctatttgcacctgtgctgc

SEQ ID NO: 1728597 - DNA, 25 bp, Homo sapien
ctccttcatctgactaaggaagaat

SEQ ID NO: 1728598 - DNA, 25 bp, Homo sapien
tggacgagaaacttcctgtgttccc

SEQ ID NO: 1728599 - DNA, 25 bp, Homo sapien
tgggcagagtggacgagaaacttcc

SEQ ID NO: 1728600 - DNA, 25 bp, Homo sapien
caggaatctcgtattgcccttgaga

SEQ ID NO: 1728601 - DNA, 25 bp, Homo sapien
cccttcaactgtgcatggaagtgaa

SEQ ID NO: 1728602 - DNA, 25 bp, Homo sapien
gctgttagaatgaatatcttgcttg

SEQ ID NO: 1728603 - DNA, 25 bp, Homo sapien
gaatgaatatcttgcttgtgctggg

SEQ ID NO: 1728604 - DNA, 25 bp, Homo sapien
gggtcttctacgtggcttctccagg

SEQ ID NO: 1728605 - DNA, 25 bp, Homo sapien
caggtttcttaggagcagctgttag

SEQ ID NO: 1728606 - DNA, 25 bp, Homo sapien
tggagacagagtggctaagaaactt

SEQ ID NO: 1728607 - DNA, 25 bp, Homo sapien
agccgtttgtttagaggattcatgc

SEQ ID NO: 1728608 - DNA, 25 bp, Homo sapien
gattcatgcttacaacaatcttgtg

SEQ ID NO: 1728609 - DNA, 25 bp, Homo sapien
gagggagccaacattatactaagcc

SEQ ID NO: 1728610 - DNA, 25 bp, Homo sapien
aggagaattggagctggaacttcag

SEQ ID NO: 1728611 - DNA, 25 bp, Homo sapien
tccaggagaattggagctggaactt

SEQ ID NO: 1728612 - DNA, 25 bp, Homo sapien
tcatccaggagaattggagctggaa

SEQ ID NO: 1728613 - DNA, 25 bp, Homo sapien
caggagaattggagctggaacttca

SEQ ID NO: 1728614 - DNA, 25 bp, Homo sapien
ttttgaactttgtggtatctgattc

SEQ ID NO: 1728615 - DNA, 25 bp, Homo sapien
tttgaactttgtggtatctgattct

SEQ ID NO: 1728616 - DNA, 25 bp, Homo sapien
tgaggcctgagcctcagaaggatga

SEQ ID NO: 1728617 - DNA, 25 bp, Homo sapien
cagctgttgagccactcagggtctg

SEQ ID NO: 1728618 - DNA, 25 bp, Homo sapien
gagcctcagaaggatgagggacatt

SEQ ID NO: 1728619 - DNA, 25 bp, Homo sapien
ctgccccacaatctgtgaggcctga

SEQ ID NO: 1728620 - DNA, 25 bp, Homo sapien
actgtgggaaggatccttttgtcgg

SEQ ID NO: 1728621 - DNA, 25 bp, Homo sapien
tacgtctatctgttttgggtgcttg

SEQ ID NO: 1728622 - DNA, 25 bp, Homo sapien
tcctgtacttcctactgtacgtcta

SEQ ID NO: 1728623 - DNA, 25 bp, Homo sapien
ctactgtacgtctatctgttttggg

SEQ ID NO: 1728624 - DNA, 25 bp, Homo sapien
cacttgccgaaaccacacacttcct

SEQ ID NO: 1728625 - DNA, 25 bp, Homo sapien
tagcaaagtaatccatatggggata

SEQ ID NO: 1728626 - DNA, 25 bp, Homo sapien
atatggggatataaagaagcatgtg

SEQ ID NO: 1728627 - DNA, 25 bp, Homo sapien
gccgaaaccacacacttccttacat

SEQ ID NO: 1728628 - DNA, 25 bp, Homo sapien
ggcacaaagccctgatgaggaagaa

SEQ ID NO: 1728629 - DNA, 25 bp, Homo sapien
caccaaacctgtgctccgggtggta

SEQ ID NO: 1728630 - DNA, 25 bp, Homo sapien
aaccttgggctgagcgaggacgcct

SEQ ID NO: 1728631 - DNA, 25 bp, Homo sapien
aaggtcaccaaacctgtgctccggg

SEQ ID NO: 1728632 - DNA, 25 bp, Homo sapien
ctcttcctctggctaacctctgctc

SEQ ID NO: 1728633 - DNA, 25 bp, Homo sapien
cttcctctggctaacctctgctcct

SEQ ID NO: 1728634 - DNA, 25 bp, Homo sapien
ctctggctaacctctgctccttctc

SEQ ID NO: 1728635 - DNA, 25 bp, Homo sapien
cagaatgagtttaaccagcgatgcc

SEQ ID NO: 1728636 - DNA, 25 bp, Homo sapien
caacttctgcaagatggactccagc

SEQ ID NO: 1728637 - DNA, 25 bp, Homo sapien
cttcctcagctgcaagtgtttgcac

SEQ ID NO: 1728638 - DNA, 25 bp, Homo sapien
gaataaataagatatcccagacatc

SEQ ID NO: 1728639 - DNA, 25 bp, Homo sapien
tgtgggaaagtcctagagacaatcc

SEQ ID NO: 1728640 - DNA, 25 bp, Homo sapien
ggtgtgggaaagtcctagagacaat

SEQ ID NO: 1728641 - DNA, 25 bp, Homo sapien
gagacaatcctgactgctttggagg

SEQ ID NO: 1728642 - DNA, 25 bp, Homo sapien
ggaaagtcctagagacaatcctgac

SEQ ID NO: 1728643 - DNA, 25 bp, Homo sapien
cctggctggcttagggttggcacaa

SEQ ID NO: 1728644 - DNA, 25 bp, Homo sapien
ggttccgtttgaccagccagagcag

SEQ ID NO: 1728645 - DNA, 25 bp, Homo sapien
gactgttagcccctagtgagcagga

SEQ ID NO: 1728646 - DNA, 25 bp, Homo sapien
cctctcaggaagacggacttggttc

SEQ ID NO: 1728647 - DNA, 25 bp, Homo sapien
tggtgggctctaggcacttatgcta

SEQ ID NO: 1728648 - DNA, 25 bp, Homo sapien
tctacatacaagtgcctgtggacac

SEQ ID NO: 1728649 - DNA, 25 bp, Homo sapien
aactgaggttggtatcattgtcccc

SEQ ID NO: 1728650 - DNA, 25 bp, Homo sapien
caatgttaattgagctgcggagagg

SEQ ID NO: 1728651 - DNA, 25 bp, Homo sapien
tcaacagcactcacaaatgaaggct

SEQ ID NO: 1728652 - DNA, 25 bp, Homo sapien
tttggaacacccactcaatggcctt

SEQ ID NO: 1728653 - DNA, 25 bp, Homo sapien
acttgagcccaggtagtgtgtcccc

SEQ ID NO: 1728654 - DNA, 25 bp, Homo sapien
cctacttgggaggacatgtgatctc

SEQ ID NO: 1728655 - DNA, 25 bp, Homo sapien
ttccgggtgacagctctgcgactgc

SEQ ID NO: 1728656 - DNA, 25 bp, Homo sapien
tgttaaggacagctggtatttggcc

SEQ ID NO: 1728657 - DNA, 25 bp, Homo sapien
ctgccaggtgacttccgggtgacag

SEQ ID NO: 1728658 - DNA, 25 bp, Homo sapien
tgcgactgcgcttcaagatcaccct

SEQ ID NO: 1728659 - DNA, 25 bp, Homo sapien
gacatcatgggctgccacttactgg

SEQ ID NO: 1728660 - DNA, 25 bp, Homo sapien
caagagtcgtcatgtttgaccggtg

SEQ ID NO: 1728661 - DNA, 25 bp, Homo sapien
tgtttgaccggtgtgacatcatggg

SEQ ID NO: 1728662 - DNA, 25 bp, Homo sapien
gggtccattctgagggtgaccaaga

SEQ ID NO: 1728663 - DNA, 25 bp, Homo sapien
ggctgtgagtacatcggcttctgta

SEQ ID NO: 1728664 - DNA, 25 bp, Homo sapien
gaaatttggctgtgagtacatcggc

SEQ ID NO: 1728665 - DNA, 25 bp, Homo sapien
atttggctgtgagtacatcggcttc

SEQ ID NO: 1728666 - DNA, 25 bp, Homo sapien
agtacatcggcttctgtatcttgga

SEQ ID NO: 1728667 - DNA, 25 bp, Homo sapien
ctggaagaggatgtggaatgacggg

SEQ ID NO: 1728668 - DNA, 25 bp, Homo sapien
ggtgcccacagttgctggttctgga

SEQ ID NO: 1728669 - DNA, 25 bp, Homo sapien
tattggggtggcatttttccagttc

SEQ ID NO: 1728670 - DNA, 25 bp, Homo sapien
tttccagttctccaaggtgcccaca

SEQ ID NO: 1728671 - DNA, 25 bp, Homo sapien
gtcaaaactgtaataccaagtgtct

SEQ ID NO: 1728672 - DNA, 25 bp, Homo sapien
aagagtcaaaactgtaataccaagt

SEQ ID NO: 1728673 - DNA, 25 bp, Homo sapien
aatgactacgtcatgggcttttgga

SEQ ID NO: 1728674 - DNA, 25 bp, Homo sapien
gagggagcacagatttctgttttag

SEQ ID NO: 1728675 - DNA, 25 bp, Homo sapien
cctccttgtcacaaagggcaaagcc

SEQ ID NO: 1728676 - DNA, 25 bp, Homo sapien
gtgcagaacttgtctctcccagaga

SEQ ID NO: 1728677 - DNA, 25 bp, Homo sapien
ttagtgtgcagaacttgtctctccc

SEQ ID NO: 1728678 - DNA, 25 bp, Homo sapien
tctgtgctggtcctcccacagtctg

SEQ ID NO: 1728679 - DNA, 25 bp, Homo sapien
cctactgagttgtctagtgccttgg

SEQ ID NO: 1728680 - DNA, 25 bp, Homo sapien
tactgagttgtctagtgccttggct

SEQ ID NO: 1728681 - DNA, 25 bp, Homo sapien
ctgagttgtctagtgccttggctct

SEQ ID NO: 1728682 - DNA, 25 bp, Homo sapien
ctactgagttgtctagtgccttggc

SEQ ID NO: 1728683 - DNA, 25 bp, Homo sapien
aatgaggtcatagaagaatctctcc

SEQ ID NO: 1728684 - DNA, 25 bp, Homo sapien
ccccaatgaggtcatagaagaatct

SEQ ID NO: 1728685 - DNA, 25 bp, Homo sapien
aatttccgcccccaatgaggtcata

SEQ ID NO: 1728686 - DNA, 25 bp, Homo sapien
gtggcgtgtcgcagtgggttcaggg

SEQ ID NO: 1728687 - DNA, 25 bp, Homo sapien
ctggggatggatgagtttgtgcctg

SEQ ID NO: 1728688 - DNA, 25 bp, Homo sapien
gggatggatgagtttgtgcctgcta

SEQ ID NO: 1728689 - DNA, 25 bp, Homo sapien
ggggatggatgagtttgtgcctgct

SEQ ID NO: 1728690 - DNA, 25 bp, Homo sapien
tggggatggatgagtttgtgcctgc

SEQ ID NO: 1728691 - DNA, 25 bp, Homo sapien
accaatgaggtcttcccaggagtca

SEQ ID NO: 1728692 - DNA, 25 bp, Homo sapien
ccaatgaggtcttcccaggagtcat

SEQ ID NO: 1728693 - DNA, 25 bp, Homo sapien
caccaatgaggtcttcccaggagtc

SEQ ID NO: 1728694 - DNA, 25 bp, Homo sapien
tcctggatctccatagtcagaaccc

SEQ ID NO: 1728695 - DNA, 25 bp, Homo sapien
catttcctatcctacatatacagta

SEQ ID NO: 1728696 - DNA, 25 bp, Homo sapien
tccatagtcagaacccagcgtttca

SEQ ID NO: 1728697 - DNA, 25 bp, Homo sapien
acatatacagtattcctggatctcc

SEQ ID NO: 1728698 - DNA, 25 bp, Homo sapien
cgtgggattgtgattcctgccttca

SEQ ID NO: 1728699 - DNA, 25 bp, Homo sapien
ttcaggttgaccatcacagtccggg

SEQ ID NO: 1728700 - DNA, 25 bp, Homo sapien
gaatttgggcatcctggatttcgtg

SEQ ID NO: 1728701 - DNA, 25 bp, Homo sapien
gattggtattggtattccggttatg

SEQ ID NO: 1728702 - DNA, 25 bp, Homo sapien
agattccaaggtgaggtggatcggt

SEQ ID NO: 1728703 - DNA, 25 bp, Homo sapien
caaggtgaggtggatcggttgtagt

SEQ ID NO: 1728704 - DNA, 25 bp, Homo sapien
aaggtgaggtggatcggttgtagta

SEQ ID NO: 1728705 - DNA, 25 bp, Homo sapien
aggtgaggtggatcggttgtagtaa

SEQ ID NO: 1728706 - DNA, 25 bp, Homo sapien
tggcagtctgatgcataagagggat

SEQ ID NO: 1728707 - DNA, 25 bp, Homo sapien
gtctgatgcataagagggatgaaga

SEQ ID NO: 1728708 - DNA, 25 bp, Homo sapien
aagagggatgaagaatatagcattt

SEQ ID NO: 1728709 - DNA, 25 bp, Homo sapien
ttaactggcagtctgatgcataaga

SEQ ID NO: 1728710 - DNA, 25 bp, Homo sapien
cagaggggagaaaaatcaggaggaa

SEQ ID NO: 1728711 - DNA, 25 bp, Homo sapien
gcagaggggagaaaaatcaggagga

SEQ ID NO: 1728712 - DNA, 25 bp, Homo sapien
ctgcagaggggagaaaaatcaggag

SEQ ID NO: 1728713 - DNA, 25 bp, Homo sapien
tgcagaggggagaaaaatcaggagg

SEQ ID NO: 1728714 - DNA, 25 bp, Homo sapien
tgatgcagcccaagtggcggcactt

SEQ ID NO: 1728715 - DNA, 25 bp, Homo sapien
cacagagggatatctctcagggtcc

SEQ ID NO: 1728716 - DNA, 25 bp, Homo sapien
tttgcctcccagatcacagagggat

SEQ ID NO: 1728717 - DNA, 25 bp, Homo sapien
tggtagtccacgttcccatcagcgt

SEQ ID NO: 1728718 - DNA, 25 bp, Homo sapien
tctccaaaggaagcctgagtctagg

SEQ ID NO: 1728719 - DNA, 25 bp, Homo sapien
gggtcggctctccatagtctaactg

SEQ ID NO: 1728720 - DNA, 25 bp, Homo sapien
tatcttggccaagtgttacctctga

SEQ ID NO: 1728721 - DNA, 25 bp, Homo sapien
ggtgccttgatcagacagaagccag

SEQ ID NO: 1728722 - DNA, 25 bp, Homo sapien
ggcttcaggggtattgctcaaacat

SEQ ID NO: 1728723 - DNA, 25 bp, Homo sapien
cttcaggggtattgctcaaacatcc

SEQ ID NO: 1728724 - DNA, 25 bp, Homo sapien
gcttcaggggtattgctcaaacatc

SEQ ID NO: 1728725 - DNA, 25 bp, Homo sapien
ttcaggggtattgctcaaacatcct

SEQ ID NO: 1728726 - DNA, 25 bp, Homo sapien
cctcagattcacaaaaccattccat

SEQ ID NO: 1728727 - DNA, 25 bp, Homo sapien
aatgcaggttcttaatttccacccg

SEQ ID NO: 1728728 - DNA, 25 bp, Homo sapien
atgcaggttcttaatttccacccga

SEQ ID NO: 1728729 - DNA, 25 bp, Homo sapien
tgcaggttcttaatttccacccgaa

SEQ ID NO: 1728730 - DNA, 25 bp, Homo sapien
gcttttctgagattttacaagagca

SEQ ID NO: 1728731 - DNA, 25 bp, Homo sapien
tagtctggcttcagcttttctgaga

SEQ ID NO: 1728732 - DNA, 25 bp, Homo sapien
cctttatcttgctcatagtctggct

SEQ ID NO: 1728733 - DNA, 25 bp, Homo sapien
ctgcttcctttatcttgctcatagt

SEQ ID NO: 1728734 - DNA, 25 bp, Homo sapien
ggcactagggacacagcattgaaca

SEQ ID NO: 1728735 - DNA, 25 bp, Homo sapien
cactagggacacagcattgaacaaa

SEQ ID NO: 1728736 - DNA, 25 bp, Homo sapien
gcactagggacacagcattgaacaa

SEQ ID NO: 1728737 - DNA, 25 bp, Homo sapien
ctagggacacagcattgaacaaagc

SEQ ID NO: 1728738 - DNA, 25 bp, Homo sapien
ggaaaacttgctggcagaaaggtca

SEQ ID NO: 1728739 - DNA, 25 bp, Homo sapien
tgataacctaaggaacatgcctggc

SEQ ID NO: 1728740 - DNA, 25 bp, Homo sapien
cctggcatatggaagggcttgtaag

SEQ ID NO: 1728741 - DNA, 25 bp, Homo sapien
gccatgagggctaaatatgataacc

SEQ ID NO: 1728742 - DNA, 25 bp, Homo sapien
ctttctggctggtagcctggaagaa

SEQ ID NO: 1728743 - DNA, 25 bp, Homo sapien
agactttctggctggtagcctggaa

SEQ ID NO: 1728744 - DNA, 25 bp, Homo sapien
gactttctggctggtagcctggaag

SEQ ID NO: 1728745 - DNA, 25 bp, Homo sapien
agacatggccttccaaccatgcaac

SEQ ID NO: 1728746 - DNA, 25 bp, Homo sapien
gccatcctcccaccgtgaaatccag

SEQ ID NO: 1728747 - DNA, 25 bp, Homo sapien
tcacaggtgggggtatgagccacac

SEQ ID NO: 1728748 - DNA, 25 bp, Homo sapien
gagcaggcctgcagtaggtctataa

SEQ ID NO: 1728749 - DNA, 25 bp, Homo sapien
gccgggtgtactgggttcacaggtg

SEQ ID NO: 1728750 - DNA, 25 bp, Homo sapien
tgcctgagtccacctgtaagcttct

SEQ ID NO: 1728751 - DNA, 25 bp, Homo sapien
gtccacctgtaagcttctcttatca

SEQ ID NO: 1728752 - DNA, 25 bp, Homo sapien
cctgagtccacctgtaagcttctct

SEQ ID NO: 1728753 - DNA, 25 bp, Homo sapien
tgagtccacctgtaagcttctctta

SEQ ID NO: 1728754 - DNA, 25 bp, Homo sapien
tgtagagtgacagcgggatctactc

SEQ ID NO: 1728755 - DNA, 25 bp, Homo sapien
gaggaatcgtcagaggctaacactt

SEQ ID NO: 1728756 - DNA, 25 bp, Homo sapien
tgtttcctggtagttctgcccctga

SEQ ID NO: 1728757 - DNA, 25 bp, Homo sapien
ggatctactcagcagcactatggtg

SEQ ID NO: 1728758 - DNA, 25 bp, Homo sapien
ctagacgctttgccttgtgggaaaa

SEQ ID NO: 1728759 - DNA, 25 bp, Homo sapien
cagcaaggatgctgtttcggtttga

SEQ ID NO: 1728760 - DNA, 25 bp, Homo sapien
tgtttcggtttgactgctgcatgcc

SEQ ID NO: 1728761 - DNA, 25 bp, Homo sapien
gatgctgtttcggtttgactgctgc

SEQ ID NO: 1728762 - DNA, 25 bp, Homo sapien
aaggatgctgtttcggtttgactgc

SEQ ID NO: 1728763 - DNA, 25 bp, Homo sapien
agctttctgggagagcctttgtttt

SEQ ID NO: 1728764 - DNA, 25 bp, Homo sapien
tcagctttctgggagagcctttgtt

SEQ ID NO: 1728765 - DNA, 25 bp, Homo sapien
cagctttctgggagagcctttgttt

SEQ ID NO: 1728766 - DNA, 25 bp, Homo sapien
gtcccttctaagagtctttgggaga

SEQ ID NO: 1728767 - DNA, 25 bp, Homo sapien
ctgtgatgtcccttctaagagtctt

SEQ ID NO: 1728768 - DNA, 25 bp, Homo sapien
gatgtcccttctaagagtctttggg

SEQ ID NO: 1728769 - DNA, 25 bp, Homo sapien
gtgatgtcccttctaagagtctttg

SEQ ID NO: 1728770 - DNA, 25 bp, Homo sapien
agcacacagcaaagatgggggtgac

SEQ ID NO: 1728771 - DNA, 25 bp, Homo sapien
gtgacaccgatgataggggcagcca

SEQ ID NO: 1728772 - DNA, 25 bp, Homo sapien
cacagcaaagatgggggtgacaccg

SEQ ID NO: 1728773 - DNA, 25 bp, Homo sapien
gataggggcagccattcccttatat

SEQ ID NO: 1728774 - DNA, 25 bp, Homo sapien
ctgtggtgaatgtaccagataacat

SEQ ID NO: 1728775 - DNA, 25 bp, Homo sapien
ggtgaatgtaccagataacatccca

SEQ ID NO: 1728776 - DNA, 25 bp, Homo sapien
tgtaacaaggacttgatgggttctc

SEQ ID NO: 1728777 - DNA, 25 bp, Homo sapien
aagaaggctgaaagtgtaacaagga

SEQ ID NO: 1728778 - DNA, 25 bp, Homo sapien
gctgaaagtgtaacaaggacttgat

SEQ ID NO: 1728779 - DNA, 25 bp, Homo sapien
caaggacttgatgggttctccaggg

SEQ ID NO: 1728780 - DNA, 25 bp, Homo sapien
tctgaaactcctggtacaacttctt

SEQ ID NO: 1728781 - DNA, 25 bp, Homo sapien
ctgaaactcctggtacaacttcttt

SEQ ID NO: 1728782 - DNA, 25 bp, Homo sapien
ttcatttgtcatgaaatacgttccg

SEQ ID NO: 1728783 - DNA, 25 bp, Homo sapien
cgttccgctagctggaacgtctcac

SEQ ID NO: 1728784 - DNA, 25 bp, Homo sapien
catgaaatacgttccgctagctgga

SEQ ID NO: 1728785 - DNA, 25 bp, Homo sapien
ttgtcatgaaatacgttccgctagc

SEQ ID NO: 1728786 - DNA, 25 bp, Homo sapien
ttcaaggcacactgagctcacagac

SEQ ID NO: 1728787 - DNA, 25 bp, Homo sapien
tgcaatgcacccagccaccaggatt

SEQ ID NO: 1728788 - DNA, 25 bp, Homo sapien
caggattcaaggcacactgagctca

SEQ ID NO: 1728789 - DNA, 25 bp, Homo sapien
ccaccaggattcaaggcacactgag

SEQ ID NO: 1728790 - DNA, 25 bp, Homo sapien
tgagcacatcttgcgggactgccat

SEQ ID NO: 1728791 - DNA, 25 bp, Homo sapien
cagaccctttagacaaggatgtgat

SEQ ID NO: 1728792 - DNA, 25 bp, Homo sapien
tctggaagggatacttgagcacatc

SEQ ID NO: 1728793 - DNA, 25 bp, Homo sapien
ggctcgggtcatcactgcatcagac

SEQ ID NO: 1728794 - DNA, 25 bp, Homo sapien
ttatcccagcaggctgggactgtcc

SEQ ID NO: 1728795 - DNA, 25 bp, Homo sapien
tatcccagcaggctgggactgtcct

SEQ ID NO: 1728796 - DNA, 25 bp, Homo sapien
catcccaaaactctgttggttgtca

SEQ ID NO: 1728797 - DNA, 25 bp, Homo sapien
ccaaaactctgttggttgtcagtgg

SEQ ID NO: 1728798 - DNA, 25 bp, Homo sapien
ggttgtcagtggagtttgttgtcct

SEQ ID NO: 1728799 - DNA, 25 bp, Homo sapien
tgtcagtggagtttgttgtccttgg

SEQ ID NO: 1728800 - DNA, 25 bp, Homo sapien
gaaacatacagttaagacacttgga

SEQ ID NO: 1728801 - DNA, 25 bp, Homo sapien
catacagttaagacacttggaattt

SEQ ID NO: 1728802 - DNA, 25 bp, Homo sapien
ttttagcatttggagtcatgtgatt

SEQ ID NO: 1728803 - DNA, 25 bp, Homo sapien
gttaagacacttggaatttttagca

SEQ ID NO: 1728804 - DNA, 25 bp, Homo sapien
acaagacgttagcactggcaccact

SEQ ID NO: 1728805 - DNA, 25 bp, Homo sapien
tggcaccacttgataaaacctgggt

SEQ ID NO: 1728806 - DNA, 25 bp, Homo sapien
aaacctgggttggactgcttggaga

SEQ ID NO: 1728807 - DNA, 25 bp, Homo sapien
gtgccagttccacccacaagacgtt

SEQ ID NO: 1728808 - DNA, 25 bp, Homo sapien
cagagcactttggtctagactaggc

SEQ ID NO: 1728809 - DNA, 25 bp, Homo sapien
gaagctctgaggcacgtcatgcagg

SEQ ID NO: 1728810 - DNA, 25 bp, Homo sapien
tccaattggtggagagaagctctga

SEQ ID NO: 1728811 - DNA, 25 bp, Homo sapien
tcaggactcggtggaccctttggga

SEQ ID NO: 1728812 - DNA, 25 bp, Homo sapien
aatgtctgacatggatcgcacagcc

SEQ ID NO: 1728813 - DNA, 25 bp, Homo sapien
ggtcgagtgaccattgccaaggctg

SEQ ID NO: 1728814 - DNA, 25 bp, Homo sapien
aaggctggcatccatgctcggctga

SEQ ID NO: 1728815 - DNA, 25 bp, Homo sapien
gaatgcccgctgcagtgttttggca

SEQ ID NO: 1728816 - DNA, 25 bp, Homo sapien
aaatcgcagggagtaagatagccgg

SEQ ID NO: 1728817 - DNA, 25 bp, Homo sapien
agaagctccaaacctcagtgggaaa

SEQ ID NO: 1728818 - DNA, 25 bp, Homo sapien
gagagcaattcgtgaatgcagcctg

SEQ ID NO: 1728819 - DNA, 25 bp, Homo sapien
tcagtgggaaacctaaagctctcaa

SEQ ID NO: 1728820 - DNA, 25 bp, Homo sapien
gatgtctcatcactatcatcaatgg

SEQ ID NO: 1728821 - DNA, 25 bp, Homo sapien
ggatctgctagttgatctccctgaa

SEQ ID NO: 1728822 - DNA, 25 bp, Homo sapien
tgttaggacagctttcaaggccctc

SEQ ID NO: 1728823 - DNA, 25 bp, Homo sapien
gcctgaacctacttgtctgatgtgg

SEQ ID NO: 1728824 - DNA, 25 bp, Homo sapien
ccacgagcttcccgcgggtggctgt

SEQ ID NO: 1728825 - DNA, 25 bp, Homo sapien
gcggccgagcccgtgcgcgtagccc

SEQ ID NO: 1728826 - DNA, 25 bp, Homo sapien
cccggccacgagcttcccgcgggtg

SEQ ID NO: 1728827 - DNA, 25 bp, Homo sapien
agcccgtgcgcgtagcccagcccgg

SEQ ID NO: 1728828 - DNA, 25 bp, Homo sapien
ccttccgggcttggattcggagact

SEQ ID NO: 1728829 - DNA, 25 bp, Homo sapien
cgggctgcccttcctcgggctctcc

SEQ ID NO: 1728830 - DNA, 25 bp, Homo sapien
ctacctcgggctgcccttcctcggg

SEQ ID NO: 1728831 - DNA, 25 bp, Homo sapien
ccctacctcgggctgcccttcctcg

SEQ ID NO: 1728832 - DNA, 25 bp, Homo sapien
ctcgggctgcccttcctcgggctct

SEQ ID NO: 1728833 - DNA, 25 bp, Homo sapien
taaaagcagtacacagcaggcaaga

SEQ ID NO: 1728834 - DNA, 25 bp, Homo sapien
gcagtaaaagcagtacacagcaggc

SEQ ID NO: 1728835 - DNA, 25 bp, Homo sapien
ctggcagtaaaagcagtacacagca

SEQ ID NO: 1728836 - DNA, 25 bp, Homo sapien
cagtaaaagcagtacacagcaggca

SEQ ID NO: 1728837 - DNA, 25 bp, Homo sapien
cctgttccagttacactaatggtga

SEQ ID NO: 1728838 - DNA, 25 bp, Homo sapien
tccagttacactaatggtgataacc

SEQ ID NO: 1728839 - DNA, 25 bp, Homo sapien
ccataccctgttccagttacactaa

SEQ ID NO: 1728840 - DNA, 25 bp, Homo sapien
gttacactaatggtgataacctcct

SEQ ID NO: 1728841 - DNA, 25 bp, Homo sapien
ccaatgttattgtagcctgctgtgc

SEQ ID NO: 1728842 - DNA, 25 bp, Homo sapien
gggcccacttctggttcaaacatga

SEQ ID NO: 1728843 - DNA, 25 bp, Homo sapien
gcgacagcctgaagtagaactcatc

SEQ ID NO: 1728844 - DNA, 25 bp, Homo sapien
agactgtcctgattgcctgaacaag

SEQ ID NO: 1728845 - DNA, 25 bp, Homo sapien
tcaaaacaatatagctattgccatg

SEQ ID NO: 1728846 - DNA, 25 bp, Homo sapien
caaaacaatatagctattgccatga

SEQ ID NO: 1728847 - DNA, 25 bp, Homo sapien
atcaaaacaatatagctattgccat

SEQ ID NO: 1728848 - DNA, 25 bp, Homo sapien
tattccaggctacaaaggccgcaga

SEQ ID NO: 1728849 - DNA, 25 bp, Homo sapien
ggccgcagaggaagaatacaataag

SEQ ID NO: 1728850 - DNA, 25 bp, Homo sapien
gagcaaggattatctattcaacact

SEQ ID NO: 1728851 - DNA, 25 bp, Homo sapien
gtaattttgatcaaccagaaatctt

SEQ ID NO: 1728852 - DNA, 25 bp, Homo sapien
gctaacacagctacaaaaatggtac

SEQ ID NO: 1728853 - DNA, 25 bp, Homo sapien
aattctccctttgagagcagctaac

SEQ ID NO: 1728854 - DNA, 25 bp, Homo sapien
tggtaccatgagttataattctttt

SEQ ID NO: 1728855 - DNA, 25 bp, Homo sapien
aaaatggtaccatgagttataattc

SEQ ID NO: 1728856 - DNA, 25 bp, Homo sapien
tagagacaaacactggttcacagag

SEQ ID NO: 1728857 - DNA, 25 bp, Homo sapien
aaatgtgcaataagtgctccattag

SEQ ID NO: 1728858 - DNA, 25 bp, Homo sapien
taggggaatcaacacaaaaatgtgc

SEQ ID NO: 1728859 - DNA, 25 bp, Homo sapien
gggggtatagccctcttgaagtgac

SEQ ID NO: 1728860 - DNA, 25 bp, Homo sapien
tccgtgccgcgccctcaggacaggg

SEQ ID NO: 1728861 - DNA, 25 bp, Homo sapien
gcactccgtgccgcgccctcaggac

SEQ ID NO: 1728862 - DNA, 25 bp, Homo sapien
ctccgtgccgcgccctcaggacagg

SEQ ID NO: 1728863 - DNA, 25 bp, Homo sapien
actccgtgccgcgccctcaggacag

SEQ ID NO: 1728864 - DNA, 25 bp, Homo sapien
cgatgtcacaggaacccgggaagta

SEQ ID NO: 1728865 - DNA, 25 bp, Homo sapien
tcctcatgactggataaggcctccg

SEQ ID NO: 1728866 - DNA, 25 bp, Homo sapien
ccagggctgccagtaaatgggtcca

SEQ ID NO: 1728867 - DNA, 25 bp, Homo sapien
tgaagaagtagtagcgccactcgtg

SEQ ID NO: 1728868 - DNA, 25 bp, Homo sapien
cagcttttaggaattgcccctggag

SEQ ID NO: 1728869 - DNA, 25 bp, Homo sapien
taggatagccattccaacagggtga

SEQ ID NO: 1728870 - DNA, 25 bp, Homo sapien
cagcaatgctccaaacaaaccaggg

SEQ ID NO: 1728871 - DNA, 25 bp, Homo sapien
caaatatggcgattccctggtgcaa

SEQ ID NO: 1728872 - DNA, 25 bp, Homo sapien
aaaactgtttctagggcaggcgtga

SEQ ID NO: 1728873 - DNA, 25 bp, Homo sapien
ggatccatttgaaactacagtgcag

SEQ ID NO: 1728874 - DNA, 25 bp, Homo sapien
taagacatgaatgccatctggagga

SEQ ID NO: 1728875 - DNA, 25 bp, Homo sapien
tactttttgtgaacaggtgggcaac

SEQ ID NO: 1728876 - DNA, 25 bp, Homo sapien
aatccttatgaagaagttctggccc

SEQ ID NO: 1728877 - DNA, 25 bp, Homo sapien
tgtgtcaaggatccccatgactgag

SEQ ID NO: 1728878 - DNA, 25 bp, Homo sapien
tatgtacctgggaagtcgctactgc

SEQ ID NO: 1728879 - DNA, 25 bp, Homo sapien
tgtattcaggttggaaccacacatc

SEQ ID NO: 1728880 - DNA, 25 bp, Homo sapien
cacaggaggtttgcgcgtgcgccat

SEQ ID NO: 1728881 - DNA, 25 bp, Homo sapien
gaaggcggggccaggaggcgcaggc

SEQ ID NO: 1728882 - DNA, 25 bp, Homo sapien
gagcggaaggcggggccaggaggcg

SEQ ID NO: 1728883 - DNA, 25 bp, Homo sapien
aggcggggccaggaggcgcaggcat

SEQ ID NO: 1728884 - DNA, 25 bp, Homo sapien
cggaaggcggggccaggaggcgcag

SEQ ID NO: 1728885 - DNA, 25 bp, Homo sapien
taacgctaaacatccggaactccca

SEQ ID NO: 1728886 - DNA, 25 bp, Homo sapien
tccaggatccatggtaacgctaaac

SEQ ID NO: 1728887 - DNA, 25 bp, Homo sapien
gcgacaagcagtgttcgcgggcacc

SEQ ID NO: 1728888 - DNA, 25 bp, Homo sapien
gcttcgtcctctccggttgcccagg

SEQ ID NO: 1728889 - DNA, 25 bp, Homo sapien
aagccatgcacgggattggacacca

SEQ ID NO: 1728890 - DNA, 25 bp, Homo sapien
gggcaagccatgcacgggattggac

SEQ ID NO: 1728891 - DNA, 25 bp, Homo sapien
gcaagccatgcacgggattggacac

SEQ ID NO: 1728892 - DNA, 25 bp, Homo sapien
agccatgcacgggattggacaccat

SEQ ID NO: 1728893 - DNA, 25 bp, Homo sapien
tttaagggcggcgatggacggagac

SEQ ID NO: 1728894 - DNA, 25 bp, Homo sapien
cgatggacggagacaggttatgatg

SEQ ID NO: 1728895 - DNA, 25 bp, Homo sapien
gggcggcgatggacggagacaggtt

SEQ ID NO: 1728896 - DNA, 25 bp, Homo sapien
cggcgatggacggagacaggttatg

SEQ ID NO: 1728897 - DNA, 25 bp, Homo sapien
agaatcacttcagccccagagttcg

SEQ ID NO: 1728898 - DNA, 25 bp, Homo sapien
gaatcacttcagccccagagttcga

SEQ ID NO: 1728899 - DNA, 25 bp, Homo sapien
agagggagaatcacttcagccccag

SEQ ID NO: 1728900 - DNA, 25 bp, Homo sapien
gctgaagagggagaatcacttcagc

SEQ ID NO: 1728901 - DNA, 25 bp, Homo sapien
catagccgttcctgtagctcagcgt

SEQ ID NO: 1728902 - DNA, 25 bp, Homo sapien
taagactggtgccttactggccaac

SEQ ID NO: 1728903 - DNA, 25 bp, Homo sapien
tggacgtcgaacaattgcatagccg

SEQ ID NO: 1728904 - DNA, 25 bp, Homo sapien
gccacatgcgcaggaataaaatccg

SEQ ID NO: 1728905 - DNA, 25 bp, Homo sapien
catatcagtagctcttctttacacc

SEQ ID NO: 1728906 - DNA, 25 bp, Homo sapien
gataaaagaattcagcgaagtttct

SEQ ID NO: 1728907 - DNA, 25 bp, Homo sapien
agaattcagcgaagtttctggatac

SEQ ID NO: 1728908 - DNA, 25 bp, Homo sapien
tatacacatatcagtagctcttctt

SEQ ID NO: 1728909 - DNA, 25 bp, Homo sapien
tctgagaactgggacaacataagga

SEQ ID NO: 1728910 - DNA, 25 bp, Homo sapien
gagaactgggacaacataaggatgc

SEQ ID NO: 1728911 - DNA, 25 bp, Homo sapien
cctcttcagcacagtactagaagaa

SEQ ID NO: 1728912 - DNA, 25 bp, Homo sapien
cttcagcacagtactagaagaagtc

SEQ ID NO: 1728913 - DNA, 25 bp, Homo sapien
caatggtaatggtcaccccggtcat

SEQ ID NO: 1728914 - DNA, 25 bp, Homo sapien
ggtcattcttggctagccgctggcg

SEQ ID NO: 1728915 - DNA, 25 bp, Homo sapien
tagtaaatgttcacctgacggatcc

SEQ ID NO: 1728916 - DNA, 25 bp, Homo sapien
tacaacaggctctatgacagacatg

SEQ ID NO: 1728917 - DNA, 25 bp, Homo sapien
ctgtgtgaattggtcacagtcaaca

SEQ ID NO: 1728918 - DNA, 25 bp, Homo sapien
gtgtgaattggtcacagtcaacaac

SEQ ID NO: 1728919 - DNA, 25 bp, Homo sapien
tgtgtgaattggtcacagtcaacaa

SEQ ID NO: 1728920 - DNA, 25 bp, Homo sapien
agtgtaaggatcaagagccatcttc

SEQ ID NO: 1728921 - DNA, 25 bp, Homo sapien
tgagaaattgcttgagttgatcaaa

SEQ ID NO: 1728922 - DNA, 25 bp, Homo sapien
gggtgacatacttacgaagaggctg

SEQ ID NO: 1728923 - DNA, 25 bp, Homo sapien
gaagaggctgttttcggagttcagt

SEQ ID NO: 1728924 - DNA, 25 bp, Homo sapien
ctattgtggttcctatgtcacttac

SEQ ID NO: 1728925 - DNA, 25 bp, Homo sapien
tcacatttggaaataagtaagccta

SEQ ID NO: 1728926 - DNA, 25 bp, Homo sapien
tagttaccaatacagctacccaaac

SEQ ID NO: 1728927 - DNA, 25 bp, Homo sapien
caaaatagttaccaatacagctacc

SEQ ID NO: 1728928 - DNA, 25 bp, Homo sapien
ttatacacatcagctcacaagggag

SEQ ID NO: 1728929 - DNA, 25 bp, Homo sapien
ggcattcctgtacctgtaacccttg

SEQ ID NO: 1728930 - DNA, 25 bp, Homo sapien
ccttaaaagaccatgctagtgctag

SEQ ID NO: 1728931 - DNA, 25 bp, Homo sapien
ttaacaaggaagcatctgtagtggg

SEQ ID NO: 1728932 - DNA, 25 bp, Homo sapien
gaagagctcactttgatccaaaata

SEQ ID NO: 1728933 - DNA, 25 bp, Homo sapien
tatgtactatatgtcagcagctgga

SEQ ID NO: 1728934 - DNA, 25 bp, Homo sapien
ggagttcaacttggctactttggca

SEQ ID NO: 1728935 - DNA, 25 bp, Homo sapien
cgatggaaagactagctggaaagac

SEQ ID NO: 1728936 - DNA, 25 bp, Homo sapien
gaatttccaccgtatcatccataag

SEQ ID NO: 1728937 - DNA, 25 bp, Homo sapien
caccaaaactttgggcacacgctgg

SEQ ID NO: 1728938 - DNA, 25 bp, Homo sapien
tcattccgttcgtggacctctcgaa

SEQ ID NO: 1728939 - DNA, 25 bp, Homo sapien
cacacgctggcggttcattaggagt

SEQ ID NO: 1728940 - DNA, 25 bp, Homo sapien
ttccagtctcactgaataatggtgc

SEQ ID NO: 1728941 - DNA, 25 bp, Homo sapien
ttcaaacaccgtggaaagcagtgtg

SEQ ID NO: 1728942 - DNA, 25 bp, Homo sapien
tattcttgcaataggtaatgatcct

SEQ ID NO: 1728943 - DNA, 25 bp, Homo sapien
taaagaaacgcaagtgtatgatcac

SEQ ID NO: 1728944 - DNA, 25 bp, Homo sapien
ggtcagagatttctagcacacactg

SEQ ID NO: 1728945 - DNA, 25 bp, Homo sapien
caatgaagtctttagcagtatacca

SEQ ID NO: 1728946 - DNA, 25 bp, Homo sapien
cgcttgctcacatcaatacgtggta

SEQ ID NO: 1728947 - DNA, 25 bp, Homo sapien
taataccgtcgagtaaatggatcac

SEQ ID NO: 1728948 - DNA, 25 bp, Homo sapien
catcttcaaccaagctagtagtacc

SEQ ID NO: 1728949 - DNA, 25 bp, Homo sapien
tcttcaaccaagctagtagtaccct

SEQ ID NO: 1728950 - DNA, 25 bp, Homo sapien
ggacatcttcaaccaagctagtagt

SEQ ID NO: 1728951 - DNA, 25 bp, Homo sapien
caaccaagctagtagtacccttaga

SEQ ID NO: 1728952 - DNA, 25 bp, Homo sapien
cagccaaataacgaagcaccttgtt

SEQ ID NO: 1728953 - DNA, 25 bp, Homo sapien
ttgttatcattcaccagcattttaa

SEQ ID NO: 1728954 - DNA, 25 bp, Homo sapien
cagtacagccaaataacgaagcacc

SEQ ID NO: 1728955 - DNA, 25 bp, Homo sapien
caaataacgaagcaccttgttatca

SEQ ID NO: 1728956 - DNA, 25 bp, Homo sapien
tgtttatccttgcaccaataacatg

SEQ ID NO: 1728957 - DNA, 25 bp, Homo sapien
tatttgtcatatgtcttttcctggg

SEQ ID NO: 1728958 - DNA, 25 bp, Homo sapien
tccaagagtatcttggctattcctg

SEQ ID NO: 1728959 - DNA, 25 bp, Homo sapien
ttttcctgggctgtctaatctgttc

SEQ ID NO: 1728960 - DNA, 25 bp, Homo sapien
tagacagggttgtccactgtagagt

SEQ ID NO: 1728961 - DNA, 25 bp, Homo sapien
taccagaattgcgaacaggaggctc

SEQ ID NO: 1728962 - DNA, 25 bp, Homo sapien
gctcaaagatactgatcatgtcggt

SEQ ID NO: 1728963 - DNA, 25 bp, Homo sapien
catgtcggtagctagaaagtaagag

SEQ ID NO: 1728964 - DNA, 25 bp, Homo sapien
caaggatgatgaaccggtgaccaaa

SEQ ID NO: 1728965 - DNA, 25 bp, Homo sapien
agcgttgctctccatgtatttcaaa

SEQ ID NO: 1728966 - DNA, 25 bp, Homo sapien
tcaaaacatactcgtctgtatcaag

SEQ ID NO: 1728967 - DNA, 25 bp, Homo sapien
ggcagcgttgctctccatgtatttc

SEQ ID NO: 1728968 - DNA, 25 bp, Homo sapien
tctcgctttcggacatggttctgaa

SEQ ID NO: 1728969 - DNA, 25 bp, Homo sapien
catggttctgaattgacgcgagtgc

SEQ ID NO: 1728970 - DNA, 25 bp, Homo sapien
gaattgacgcgagtgcttctggtga

SEQ ID NO: 1728971 - DNA, 25 bp, Homo sapien
gcttctggagcaggcgcttctcgct

SEQ ID NO: 1728972 - DNA, 25 bp, Homo sapien
cagtaaggcttacagtcaagagtag

SEQ ID NO: 1728973 - DNA, 25 bp, Homo sapien
gagtgtgccaaaccctagcaatcaa

SEQ ID NO: 1728974 - DNA, 25 bp, Homo sapien
tgtttatatctaataattcccacct

SEQ ID NO: 1728975 - DNA, 25 bp, Homo sapien
tactagctattacattgacacaggg

SEQ ID NO: 1728976 - DNA, 25 bp, Homo sapien
aagctgactgtaggaatgtcgacac

SEQ ID NO: 1728977 - DNA, 25 bp, Homo sapien
ggaatgtcgacacagctgcctttca

SEQ ID NO: 1728978 - DNA, 25 bp, Homo sapien
caaagatgcaagaagtgaattcaag

SEQ ID NO: 1728979 - DNA, 25 bp, Homo sapien
ataaatagagttatagaagagaaag

SEQ ID NO: 1728980 - DNA, 25 bp, Homo sapien
gagtggagggtaagaagtgggtaca

SEQ ID NO: 1728981 - DNA, 25 bp, Homo sapien
tccttggtcccttcatatctgtgtc

SEQ ID NO: 1728982 - DNA, 25 bp, Homo sapien
tcatttcacaagggttcatgataga

SEQ ID NO: 1728983 - DNA, 25 bp, Homo sapien
gagggtaagaagtgggtacatgaaa

SEQ ID NO: 1728984 - DNA, 25 bp, Homo sapien
tttcagttgcttctgaattgtgtct

SEQ ID NO: 1728985 - DNA, 25 bp, Homo sapien
gaattgtgtctattaatgcttccaa

SEQ ID NO: 1728986 - DNA, 25 bp, Homo sapien
gcttctgaattgtgtctattaatgc

SEQ ID NO: 1728987 - DNA, 25 bp, Homo sapien
cagttgcttctgaattgtgtctatt

SEQ ID NO: 1728988 - DNA, 25 bp, Homo sapien
tgtcataaatttgaaatgcctcacg

SEQ ID NO: 1728989 - DNA, 25 bp, Homo sapien
taagcgattcacagattttaaagaa

SEQ ID NO: 1728990 - DNA, 25 bp, Homo sapien
ggagtcatccactgggacgttaagc

SEQ ID NO: 1728991 - DNA, 25 bp, Homo sapien
tctctgtccacatatcctgaagctt

SEQ ID NO: 1728992 - DNA, 25 bp, Homo sapien
tcagtttgagaaagcacgaacaaag

SEQ ID NO: 1728993 - DNA, 25 bp, Homo sapien
gtttgagaaagcacgaacaaagtta

SEQ ID NO: 1728994 - DNA, 25 bp, Homo sapien
gcacgaacaaagttatagtagttaa

SEQ ID NO: 1728995 - DNA, 25 bp, Homo sapien
gaaagcacgaacaaagttatagtag

SEQ ID NO: 1728996 - DNA, 25 bp, Homo sapien
tagacattgctatacccctatcacc

SEQ ID NO: 1728997 - DNA, 25 bp, Homo sapien
ggcaccaatcttagatcctattaga

SEQ ID NO: 1728998 - DNA, 25 bp, Homo sapien
tatttcaaagcatagttccagtatc

SEQ ID NO: 1728999 - DNA, 25 bp, Homo sapien
caatttagtttcgacttcagtagga

SEQ ID NO: 1729000 - DNA, 25 bp, Homo sapien
cattagggaggactatctgttttac

SEQ ID NO: 1729001 - DNA, 25 bp, Homo sapien
ggctccagaccaacagctgatgttt

SEQ ID NO: 1729002 - DNA, 25 bp, Homo sapien
cagtctgaaggtcagcaggctccag

SEQ ID NO: 1729003 - DNA, 25 bp, Homo sapien
tgttccaatttgaagccagtcaggc

SEQ ID NO: 1729004 - DNA, 25 bp, Homo sapien
gctcaccagagaatagtaactgcaa

SEQ ID NO: 1729005 - DNA, 25 bp, Homo sapien
caataagctggttacaagtggctga

SEQ ID NO: 1729006 - DNA, 25 bp, Homo sapien
gagctcgttagggaaggaaacacca

SEQ ID NO: 1729007 - DNA, 25 bp, Homo sapien
tagtggctgacttcaaccaaagaga

SEQ ID NO: 1729008 - DNA, 25 bp, Homo sapien
gagtcagcctttcggcacatgtcac

SEQ ID NO: 1729009 - DNA, 25 bp, Homo sapien
cctacatgggctagaaacagcagca

SEQ ID NO: 1729010 - DNA, 25 bp, Homo sapien
gatagtccccaactttcaatggtcc

SEQ ID NO: 1729011 - DNA, 25 bp, Homo sapien
tggccccacattacgacattactag

SEQ ID NO: 1729012 - DNA, 25 bp, Homo sapien
ctaaaggaaagggattgagctgcct

SEQ ID NO: 1729013 - DNA, 25 bp, Homo sapien
ttgttaaggagtagcccaaagctcc

SEQ ID NO: 1729014 - DNA, 25 bp, Homo sapien
gagactacaggcctagctactcaga

SEQ ID NO: 1729015 - DNA, 25 bp, Homo sapien
caggctagaggatgctaaatgagac

SEQ ID NO: 1729016 - DNA, 25 bp, Homo sapien
tagctgcttgctgtgtttaccagaa

SEQ ID NO: 1729017 - DNA, 25 bp, Homo sapien
gtagctgcttgctgtgtttaccaga

SEQ ID NO: 1729018 - DNA, 25 bp, Homo sapien
tgcttgctgtgtttaccagaaccat

SEQ ID NO: 1729019 - DNA, 25 bp, Homo sapien
tgtagctgcttgctgtgtttaccag

SEQ ID NO: 1729020 - DNA, 25 bp, Homo sapien
gtgctgactagaagacatccaagta

SEQ ID NO: 1729021 - DNA, 25 bp, Homo sapien
tccagaaacaagcacatcatccttg

SEQ ID NO: 1729022 - DNA, 25 bp, Homo sapien
ccttgatgcctactatactatgatg

SEQ ID NO: 1729023 - DNA, 25 bp, Homo sapien
tttgtgggtaggaagctccagaaac

SEQ ID NO: 1729024 - DNA, 25 bp, Homo sapien
gagctacttgttcacgtggagagga

SEQ ID NO: 1729025 - DNA, 25 bp, Homo sapien
taagattggcgtggtgcccatgaca

SEQ ID NO: 1729026 - DNA, 25 bp, Homo sapien
gatattttgcgaagcaacagccgca

SEQ ID NO: 1729027 - DNA, 25 bp, Homo sapien
tggagagccctgttcacctgatagg

SEQ ID NO: 1729028 - DNA, 25 bp, Homo sapien
ccttgtgcctagaaaaggccttcgc

SEQ ID NO: 1729029 - DNA, 25 bp, Homo sapien
gaaagagtgcatctcctcccaggat

SEQ ID NO: 1729030 - DNA, 25 bp, Homo sapien
ttaagggcctatggcacaagtgcac

SEQ ID NO: 1729031 - DNA, 25 bp, Homo sapien
tcaagacaatggagtgctcttcctc

SEQ ID NO: 1729032 - DNA, 25 bp, Homo sapien
gctggtggaccaaggatctgtgcta

SEQ ID NO: 1729033 - DNA, 25 bp, Homo sapien
gacacctccaagcttgagagctcag

SEQ ID NO: 1729034 - DNA, 25 bp, Homo sapien
gttatttttaccatccgggcgctga

SEQ ID NO: 1729035 - DNA, 25 bp, Homo sapien
cgggcgctgatagctgcactattaa

SEQ ID NO: 1729036 - DNA, 25 bp, Homo sapien
tgcttcccagtggacgggtgtgcta

SEQ ID NO: 1729037 - DNA, 25 bp, Homo sapien
cccagtggacgggtgtgctaagggt

SEQ ID NO: 1729038 - DNA, 25 bp, Homo sapien
gcttcccagtggacgggtgtgctaa

SEQ ID NO: 1729039 - DNA, 25 bp, Homo sapien
ttcccagtggacgggtgtgctaagg

SEQ ID NO: 1729040 - DNA, 25 bp, Homo sapien
gcaagctccccgtgctgccagtact

SEQ ID NO: 1729041 - DNA, 25 bp, Homo sapien
tcttgcaagctccccgtgctgccag

SEQ ID NO: 1729042 - DNA, 25 bp, Homo sapien
ttgcaagctccccgtgctgccagta

SEQ ID NO: 1729043 - DNA, 25 bp, Homo sapien
aagctccccgtgctgccagtacttc

SEQ ID NO: 1729044 - DNA, 25 bp, Homo sapien
gcagacctgatatgggatcccttag

SEQ ID NO: 1729045 - DNA, 25 bp, Homo sapien
gatttgtttcctaacgccattggag

SEQ ID NO: 1729046 - DNA, 25 bp, Homo sapien
gctgcacagcagaaacgttggtaaa

SEQ ID NO: 1729047 - DNA, 25 bp, Homo sapien
gagtctataattgagttcaggcccc

SEQ ID NO: 1729048 - DNA, 25 bp, Homo sapien
gcagagtgcaaagcggagagtccca

SEQ ID NO: 1729049 - DNA, 25 bp, Homo sapien
cactggcgggaatactggaatgagc

SEQ ID NO: 1729050 - DNA, 25 bp, Homo sapien
gcggacgtgataagccatgggaact

SEQ ID NO: 1729051 - DNA, 25 bp, Homo sapien
tcctagctccctgattggcacgtgg

SEQ ID NO: 1729052 - DNA, 25 bp, Homo sapien
gctttgcagcttgaaggcctcccaa

SEQ ID NO: 1729053 - DNA, 25 bp, Homo sapien
gagctcgtagccctggaattccctt

SEQ ID NO: 1729054 - DNA, 25 bp, Homo sapien
ggatgtcggcctttgaaccatggct

SEQ ID NO: 1729055 - DNA, 25 bp, Homo sapien
ggacagttgagagtgatgaacacca

SEQ ID NO: 1729056 - DNA, 25 bp, Homo sapien
aagcagctatcttaagacacctgga

SEQ ID NO: 1729057 - DNA, 25 bp, Homo sapien
tggctgagatgcagctacgccactg

SEQ ID NO: 1729058 - DNA, 25 bp, Homo sapien
ttcctgacatcgaggctgccagtta

SEQ ID NO: 1729059 - DNA, 25 bp, Homo sapien
gcagtgggcctctgtattgaaagca

SEQ ID NO: 1729060 - DNA, 25 bp, Homo sapien
agtaaatggagataatcccgggatt

SEQ ID NO: 1729061 - DNA, 25 bp, Homo sapien
gtaaatggagataatcccgggatta

SEQ ID NO: 1729062 - DNA, 25 bp, Homo sapien
cagtaaatggagataatcccgggat

SEQ ID NO: 1729063 - DNA, 25 bp, Homo sapien
tttaatggaggtacaattcaaccca

SEQ ID NO: 1729064 - DNA, 25 bp, Homo sapien
ttaatggaggtacaattcaacccat

SEQ ID NO: 1729065 - DNA, 25 bp, Homo sapien
tgtgtgtatctgtgcttatgtgtct

SEQ ID NO: 1729066 - DNA, 25 bp, Homo sapien
ctacagggagggttacagctttata

SEQ ID NO: 1729067 - DNA, 25 bp, Homo sapien
tgcccaggcgatgttgtatgcagaa

SEQ ID NO: 1729068 - DNA, 25 bp, Homo sapien
gcattcttcacgtgaggcagcctat

SEQ ID NO: 1729069 - DNA, 25 bp, Homo sapien
tggagtctgtagtatgtgcctggca

SEQ ID NO: 1729070 - DNA, 25 bp, Homo sapien
tgaaacacttaacacctggatctcc

SEQ ID NO: 1729071 - DNA, 25 bp, Homo sapien
tggttcttgtagacaggaagccctg

SEQ ID NO: 1729072 - DNA, 25 bp, Homo sapien
tctgatctagaacaggtgagcccaa

SEQ ID NO: 1729073 - DNA, 25 bp, Homo sapien
gattttccgtagaccaacaccatcg

SEQ ID NO: 1729074 - DNA, 25 bp, Homo sapien
tagtgtatagcttgctcaactcaac

SEQ ID NO: 1729075 - DNA, 25 bp, Homo sapien
tgaattttagtagagccagtaactg

SEQ ID NO: 1729076 - DNA, 25 bp, Homo sapien
cagggtaaattctgacttctaaggt

SEQ ID NO: 1729077 - DNA, 25 bp, Homo sapien
ttcctcagcggatgttttcaagttc

SEQ ID NO: 1729078 - DNA, 25 bp, Homo sapien
tatgatgaacctttttgtgtgtcct

SEQ ID NO: 1729079 - DNA, 25 bp, Homo sapien
tgtgtgtcctcgattatcattccat

SEQ ID NO: 1729080 - DNA, 25 bp, Homo sapien
caaattatccaatcagccccatatg

SEQ ID NO: 1729081 - DNA, 25 bp, Homo sapien
gctgcaggatgtttcttaataggga

SEQ ID NO: 1729082 - DNA, 25 bp, Homo sapien
ttgcagtggtgcagcattaaccgct

SEQ ID NO: 1729083 - DNA, 25 bp, Homo sapien
gcctccaccactgagattgcagtgg

SEQ ID NO: 1729084 - DNA, 25 bp, Homo sapien
caccacgtggtgctttgtgcagctc

SEQ ID NO: 1729085 - DNA, 25 bp, Homo sapien
cattaaccgctaagaacttccctct

SEQ ID NO: 1729086 - DNA, 25 bp, Homo sapien
cctgcttgaaaaccatcagtggcta

SEQ ID NO: 1729087 - DNA, 25 bp, Homo sapien
aacaaaaacctggtcacgggctgct

SEQ ID NO: 1729088 - DNA, 25 bp, Homo sapien
tgtgcagctgactccttacaatggt

SEQ ID NO: 1729089 - DNA, 25 bp, Homo sapien
gtttcctgaacaagacctgagcacc

SEQ ID NO: 1729090 - DNA, 25 bp, Homo sapien
aaaaataggctgcagatttgaggct

SEQ ID NO: 1729091 - DNA, 25 bp, Homo sapien
ttatcaggacatacaccctgattct

SEQ ID NO: 1729092 - DNA, 25 bp, Homo sapien
cagttgccttatcaggacatacacc

SEQ ID NO: 1729093 - DNA, 25 bp, Homo sapien
aggctcagttgccttatcaggacat

SEQ ID NO: 1729094 - DNA, 25 bp, Homo sapien
ctgttggtgacaccacaattgtatt

SEQ ID NO: 1729095 - DNA, 25 bp, Homo sapien
gacaccacaattgtattagctccca

SEQ ID NO: 1729096 - DNA, 25 bp, Homo sapien
aattgtattagctcccataccacca

SEQ ID NO: 1729097 - DNA, 25 bp, Homo sapien
tggtgacaccacaattgtattagct

SEQ ID NO: 1729098 - DNA, 25 bp, Homo sapien
tgtttgcatctcatgtaacttctaa

SEQ ID NO: 1729099 - DNA, 25 bp, Homo sapien
gtttgcatctcatgtaacttctaat

SEQ ID NO: 1729100 - DNA, 25 bp, Homo sapien
tttgtttgcatctcatgtaacttct

SEQ ID NO: 1729101 - DNA, 25 bp, Homo sapien
ttgcatctcatgtaacttctaattt

SEQ ID NO: 1729102 - DNA, 25 bp, Homo sapien
tcttgcattgccttcgtatggcttt

SEQ ID NO: 1729103 - DNA, 25 bp, Homo sapien
taaccctgacgtgtgcagtgatgcc

SEQ ID NO: 1729104 - DNA, 25 bp, Homo sapien
gatgccagtggtgctcctgaacgtg

SEQ ID NO: 1729105 - DNA, 25 bp, Homo sapien
cgtatggctttatcactgaagtgtc

SEQ ID NO: 1729106 - DNA, 25 bp, Homo sapien
gcagctgtgtcatagctaagtgtaa

SEQ ID NO: 1729107 - DNA, 25 bp, Homo sapien
gttggtttctcagccctaccagttg

SEQ ID NO: 1729108 - DNA, 25 bp, Homo sapien
taccagttgggttgctgctcacatg

SEQ ID NO: 1729109 - DNA, 25 bp, Homo sapien
agtgtaacttgaccaatgttgttgg

SEQ ID NO: 1729110 - DNA, 25 bp, Homo sapien
cacctgctagtacatggcttccatg

SEQ ID NO: 1729111 - DNA, 25 bp, Homo sapien
tttgtagcatatacaatgggagccc

SEQ ID NO: 1729112 - DNA, 25 bp, Homo sapien
cctgaaatgtggctgcgggtcctgt

SEQ ID NO: 1729113 - DNA, 25 bp, Homo sapien
gacatacctgtaggcatcataacct

SEQ ID NO: 1729114 - DNA, 25 bp, Homo sapien
gggtatgtgtatcagatttgaaagt

SEQ ID NO: 1729115 - DNA, 25 bp, Homo sapien
cagatttgaaagtagcctcctcccc

SEQ ID NO: 1729116 - DNA, 25 bp, Homo sapien
tggcctgaccatcaaccagggtgtg

SEQ ID NO: 1729117 - DNA, 25 bp, Homo sapien
tcagtcctgtcttaggtggagtctg

SEQ ID NO: 1729118 - DNA, 25 bp, Homo sapien
tctgcaccccggctttgtgcactgt

SEQ ID NO: 1729119 - DNA, 25 bp, Homo sapien
tcctctgatcggaggctcctggctg

SEQ ID NO: 1729120 - DNA, 25 bp, Homo sapien
tcctggctgccgtgtacgttatctg

SEQ ID NO: 1729121 - DNA, 25 bp, Homo sapien
gtcagcgggccctcctctgatcgga

SEQ ID NO: 1729122 - DNA, 25 bp, Homo sapien
tgcggacatcggcttctgcctggtg

SEQ ID NO: 1729123 - DNA, 25 bp, Homo sapien
tgctctgcgtcctcatcgggcttat

SEQ ID NO: 1729124 - DNA, 25 bp, Homo sapien
gagttcgtcatccacaaccatgcgg

SEQ ID NO: 1729125 - DNA, 25 bp, Homo sapien
gctcttcagccaggagttcgtcatc

SEQ ID NO: 1729126 - DNA, 25 bp, Homo sapien
gcaagttctcgataaatacttgagt

SEQ ID NO: 1729127 - DNA, 25 bp, Homo sapien
actgatcgtccgtgcagggcgctgt

SEQ ID NO: 1729128 - DNA, 25 bp, Homo sapien
tacttgagtaatctccattcactga

SEQ ID NO: 1729129 - DNA, 25 bp, Homo sapien
tgtgcctagcccactgcaagttctc

SEQ ID NO: 1729130 - DNA, 25 bp, Homo sapien
ttaatggtggcatgagggtcccaaa

SEQ ID NO: 1729131 - DNA, 25 bp, Homo sapien
ccaaaaattactgggcaaaactgca

SEQ ID NO: 1729132 - DNA, 25 bp, Homo sapien
cattggagcgaaagctcccctaggg

SEQ ID NO: 1729133 - DNA, 25 bp, Homo sapien
tgtccttccaggagtacttttaaga

SEQ ID NO: 1729134 - DNA, 25 bp, Homo sapien
tctgttcctcacaagacgaaggttc

SEQ ID NO: 1729135 - DNA, 25 bp, Homo sapien
tgtggccgcacgttgcaaatttgaa

SEQ ID NO: 1729136 - DNA, 25 bp, Homo sapien
tgtctcaattacattccaccgcgtg

SEQ ID NO: 1729137 - DNA, 25 bp, Homo sapien
aaatgaggtttagtccaatctaggc

SEQ ID NO: 1729138 - DNA, 25 bp, Homo sapien
tgagaattgcttgaagccaggaggc

SEQ ID NO: 1729139 - DNA, 25 bp, Homo sapien
gtccagatctcgccactgcactcct

SEQ ID NO: 1729140 - DNA, 25 bp, Homo sapien
gttgcagtgagtccagatctcgcca

SEQ ID NO: 1729141 - DNA, 25 bp, Homo sapien
tgtagttccagctacaggctgaagc

SEQ ID NO: 1729142 - DNA, 25 bp, Homo sapien
tatgagtatcctcacaaagtggcag

SEQ ID NO: 1729143 - DNA, 25 bp, Homo sapien
gaggatatgcctccacaggactatg

SEQ ID NO: 1729144 - DNA, 25 bp, Homo sapien
tgttcgcaggaggtctcagccatat

SEQ ID NO: 1729145 - DNA, 25 bp, Homo sapien
ggcacactcatgtctggcaagtcag

SEQ ID NO: 1729146 - DNA, 25 bp, Homo sapien
ccttgtactcagagtgtgcatattt

SEQ ID NO: 1729147 - DNA, 25 bp, Homo sapien
cttttccttgtactcagagtgtgca

SEQ ID NO: 1729148 - DNA, 25 bp, Homo sapien
gtactcagagtgtgcatatttcagg

SEQ ID NO: 1729149 - DNA, 25 bp, Homo sapien
tactcagagtgtgcatatttcaggt

SEQ ID NO: 1729150 - DNA, 25 bp, Homo sapien
caggtgaaaggtagccaggctcttc

SEQ ID NO: 1729151 - DNA, 25 bp, Homo sapien
caaacgtgccacatatcttgtaagg

SEQ ID NO: 1729152 - DNA, 25 bp, Homo sapien
aaaatcctggcatagacactccggg

SEQ ID NO: 1729153 - DNA, 25 bp, Homo sapien
aaaatataaccggtgaaacgcactg

SEQ ID NO: 1729154 - DNA, 25 bp, Homo sapien
gacagtgactgttaggtaagcgaca

SEQ ID NO: 1729155 - DNA, 25 bp, Homo sapien
tggagattctttagccaggtactcc

SEQ ID NO: 1729156 - DNA, 25 bp, Homo sapien
tgaaaggtgctgttgagcctgatac

SEQ ID NO: 1729157 - DNA, 25 bp, Homo sapien
tctactttgtctagctggagattct

SEQ ID NO: 1729158 - DNA, 25 bp, Homo sapien
cacctgccttggtatacccctgatt

SEQ ID NO: 1729159 - DNA, 25 bp, Homo sapien
tctaatggcttcaagttagcaatgg

SEQ ID NO: 1729160 - DNA, 25 bp, Homo sapien
ttttccagggctaagtccaggatag

SEQ ID NO: 1729161 - DNA, 25 bp, Homo sapien
tttcatccagcttacataaccatgg

SEQ ID NO: 1729162 - DNA, 25 bp, Homo sapien
cagcatctgccaagatttccgatga

SEQ ID NO: 1729163 - DNA, 25 bp, Homo sapien
gatagaaacgtgttccattgtcatg

SEQ ID NO: 1729164 - DNA, 25 bp, Homo sapien
atgagtagacgggagtccttgcaca

SEQ ID NO: 1729165 - DNA, 25 bp, Homo sapien
caagatttccgatgaggctgataga

SEQ ID NO: 1729166 - DNA, 25 bp, Homo sapien
ggtgtcaccaaagatcaatgttgcc

SEQ ID NO: 1729167 - DNA, 25 bp, Homo sapien
tgcacagagcctttaggtgtcacca

SEQ ID NO: 1729168 - DNA, 25 bp, Homo sapien
gaggcagcagggattacaccaaagg

SEQ ID NO: 1729169 - DNA, 25 bp, Homo sapien
caccaaaggcttactctggacagag

SEQ ID NO: 1729170 - DNA, 25 bp, Homo sapien
tcacccacagtaagagaaactgcct

SEQ ID NO: 1729171 - DNA, 25 bp, Homo sapien
tgtgttctgcttgggtgaacccacc

SEQ ID NO: 1729172 - DNA, 25 bp, Homo sapien
gagcctggactgtctccaacttggc

SEQ ID NO: 1729173 - DNA, 25 bp, Homo sapien
caccttgaccttagaataactcaga

SEQ ID NO: 1729174 - DNA, 25 bp, Homo sapien
cctgagatgttaaacaatccattct

SEQ ID NO: 1729175 - DNA, 25 bp, Homo sapien
ccctgagatgttaaacaatccattc

SEQ ID NO: 1729176 - DNA, 25 bp, Homo sapien
gtgtccctcacaggccttccctggc

SEQ ID NO: 1729177 - DNA, 25 bp, Homo sapien
gaggcagagactgcgtgtccctcac

SEQ ID NO: 1729178 - DNA, 25 bp, Homo sapien
aacatggtcccgacctgaccaagct

SEQ ID NO: 1729179 - DNA, 25 bp, Homo sapien
tcagtgttaaacagtgattcaacat

SEQ ID NO: 1729180 - DNA, 25 bp, Homo sapien
ctttgtcacctaggtatacatgtgc

SEQ ID NO: 1729181 - DNA, 25 bp, Homo sapien
cccataatccaggttttaagcccag

SEQ ID NO: 1729182 - DNA, 25 bp, Homo sapien
catgtgctgaacgtgcagctttgtc

SEQ ID NO: 1729183 - DNA, 25 bp, Homo sapien
aatccaggttttaagcccagcatgc

SEQ ID NO: 1729184 - DNA, 25 bp, Homo sapien
cacggaaatattgaacaccggtggg

SEQ ID NO: 1729185 - DNA, 25 bp, Homo sapien
ggaagccacggaaatattgaacacc

SEQ ID NO: 1729186 - DNA, 25 bp, Homo sapien
aagaggaagccacggaaatattgaa

SEQ ID NO: 1729187 - DNA, 25 bp, Homo sapien
aagccacggaaatattgaacaccgg

SEQ ID NO: 1729188 - DNA, 25 bp, Homo sapien
aacatcctcagttaagttgagaggc

SEQ ID NO: 1729189 - DNA, 25 bp, Homo sapien
gaatcacatctgttctcagatcaga

SEQ ID NO: 1729190 - DNA, 25 bp, Homo sapien
aattgccccaatctaacatcctcag

SEQ ID NO: 1729191 - DNA, 25 bp, Homo sapien
tcctggagtcttttttaatcgaatc

SEQ ID NO: 1729192 - DNA, 25 bp, Homo sapien
tgtccaagcatggtcacaacctcag

SEQ ID NO: 1729193 - DNA, 25 bp, Homo sapien
gactagcagtcagtccagaggccag

SEQ ID NO: 1729194 - DNA, 25 bp, Homo sapien
tcaggagtgtccaagcatggtcaca

SEQ ID NO: 1729195 - DNA, 25 bp, Homo sapien
ggtcacaacctcaggactagcagtc

SEQ ID NO: 1729196 - DNA, 25 bp, Homo sapien
ggagccttatgtaaggaaccattca

SEQ ID NO: 1729197 - DNA, 25 bp, Homo sapien
gatcacaccatacaagggagcctta

SEQ ID NO: 1729198 - DNA, 25 bp, Homo sapien
aatctaaataaatgactgtttctgg

SEQ ID NO: 1729199 - DNA, 25 bp, Homo sapien
gaagttgttcagttcctgcaaatct

SEQ ID NO: 1729200 - DNA, 25 bp, Homo sapien
cctggaaacatcatgcgagcaagct

SEQ ID NO: 1729201 - DNA, 25 bp, Homo sapien
aacatcatgcgagcaagctgttgct

SEQ ID NO: 1729202 - DNA, 25 bp, Homo sapien
tggaaacatcatgcgagcaagctgt

SEQ ID NO: 1729203 - DNA, 25 bp, Homo sapien
ttcctggaaacatcatgcgagcaag

SEQ ID NO: 1729204 - DNA, 25 bp, Homo sapien
gcaatgcaaatgatggatgatgcca

SEQ ID NO: 1729205 - DNA, 25 bp, Homo sapien
aaatgatggatgatgccacaagcat

SEQ ID NO: 1729206 - DNA, 25 bp, Homo sapien
ctgcaatgcaaatgatggatgatgc

SEQ ID NO: 1729207 - DNA, 25 bp, Homo sapien
gcaaatgatggatgatgccacaagc

SEQ ID NO: 1729208 - DNA, 25 bp, Homo sapien
taggcctgagattcttgtctttttc

SEQ ID NO: 1729209 - DNA, 25 bp, Homo sapien
ttcagatgggactgaaaaataggcc

SEQ ID NO: 1729210 - DNA, 25 bp, Homo sapien
aaaaataggcctgagattcttgtct

SEQ ID NO: 1729211 - DNA, 25 bp, Homo sapien
gggactgaaaaataggcctgagatt

SEQ ID NO: 1729212 - DNA, 25 bp, Homo sapien
cacagtttgagagtcatcgctgcag

SEQ ID NO: 1729213 - DNA, 25 bp, Homo sapien
aatgaagcctggtggtgctacagcg

SEQ ID NO: 1729214 - DNA, 25 bp, Homo sapien
tacagcgggtgacaaaggcaaaccg

SEQ ID NO: 1729215 - DNA, 25 bp, Homo sapien
actgaaggaagtgcagagagcccgc

SEQ ID NO: 1729216 - DNA, 25 bp, Homo sapien
agccagtgaccgatgtgctgtagag

SEQ ID NO: 1729217 - DNA, 25 bp, Homo sapien
ccagtgaccgatgtgctgtagaggt

SEQ ID NO: 1729218 - DNA, 25 bp, Homo sapien
tgggagccagtgaccgatgtgctgt

SEQ ID NO: 1729219 - DNA, 25 bp, Homo sapien
ttgtgggagccagtgaccgatgtgc

SEQ ID NO: 1729220 - DNA, 25 bp, Homo sapien
agatgcgcttcctatccaggattca

SEQ ID NO: 1729221 - DNA, 25 bp, Homo sapien
tagttggtattagatgcgcttccta

SEQ ID NO: 1729222 - DNA, 25 bp, Homo sapien
ctagttggtattagatgcgcttcct

SEQ ID NO: 1729223 - DNA, 25 bp, Homo sapien
ttggtattagatgcgcttcctatcc

SEQ ID NO: 1729224 - DNA, 25 bp, Homo sapien
tggagttgcccaccaagactcgcat

SEQ ID NO: 1729225 - DNA, 25 bp, Homo sapien
gagttgcccaccaagactcgcatct

SEQ ID NO: 1729226 - DNA, 25 bp, Homo sapien
cccattgacaatccggggtggggca

SEQ ID NO: 1729227 - DNA, 25 bp, Homo sapien
cttggagttgcccaccaagactcgc

SEQ ID NO: 1729228 - DNA, 25 bp, Homo sapien
acagcctccatgaagagctcaaagc

SEQ ID NO: 1729229 - DNA, 25 bp, Homo sapien
aggaactcctgcagcatgttttgtt

SEQ ID NO: 1729230 - DNA, 25 bp, Homo sapien
agcatgttttgttccacagcctcca

SEQ ID NO: 1729231 - DNA, 25 bp, Homo sapien
ctccatgaagagctcaaagcctcca

SEQ ID NO: 1729232 - DNA, 25 bp, Homo sapien
gcaaagattctacctccgacagctg

SEQ ID NO: 1729233 - DNA, 25 bp, Homo sapien
tacaaataaagctaccacccatggc

SEQ ID NO: 1729234 - DNA, 25 bp, Homo sapien
aaggaaaggcaacctctcagggcgc

SEQ ID NO: 1729235 - DNA, 25 bp, Homo sapien
cacatggccacgagaagtcttacga

SEQ ID NO: 1729236 - DNA, 25 bp, Homo sapien
ttcttcatgacagtggctttttggg

SEQ ID NO: 1729237 - DNA, 25 bp, Homo sapien
tatttcttcatgacagtggcttttt

SEQ ID NO: 1729238 - DNA, 25 bp, Homo sapien
gggagttcaggtgccctgcaaagat

SEQ ID NO: 1729239 - DNA, 25 bp, Homo sapien
caggtgccctgcaaagattttcttc

SEQ ID NO: 1729240 - DNA, 25 bp, Homo sapien
cataaaccatatcctggggagaaat

SEQ ID NO: 1729241 - DNA, 25 bp, Homo sapien
ctccactgacaactccaccagccaa

SEQ ID NO: 1729242 - DNA, 25 bp, Homo sapien
gaactcagaaaaggcggccctccaa

SEQ ID NO: 1729243 - DNA, 25 bp, Homo sapien
ggagcataaaccatatcctggggag

SEQ ID NO: 1729244 - DNA, 25 bp, Homo sapien
caggcaaagctcagggccaatgcct

SEQ ID NO: 1729245 - DNA, 25 bp, Homo sapien
ttttgttagactttggatccactga

SEQ ID NO: 1729246 - DNA, 25 bp, Homo sapien
atttctccagaatatttctcacagg

SEQ ID NO: 1729247 - DNA, 25 bp, Homo sapien
aatttctccagaatatttctcacag

SEQ ID NO: 1729248 - DNA, 25 bp, Homo sapien
tctccagaatatttctcacaggttc

SEQ ID NO: 1729249 - DNA, 25 bp, Homo sapien
tttctccagaatatttctcacaggt

SEQ ID NO: 1729250 - DNA, 25 bp, Homo sapien
taaccaaagggctacctctccagag

SEQ ID NO: 1729251 - DNA, 25 bp, Homo sapien
gatagacaatgttgctttcagaccc

SEQ ID NO: 1729252 - DNA, 25 bp, Homo sapien
taatccacaggcaaagtcgaagatg

SEQ ID NO: 1729253 - DNA, 25 bp, Homo sapien
tatggttgccagtatcagtggtcaa

SEQ ID NO: 1729254 - DNA, 25 bp, Homo sapien
tcatggttgcattggtattataacc

SEQ ID NO: 1729255 - DNA, 25 bp, Homo sapien
tccatccatcatcaaaattacatag

SEQ ID NO: 1729256 - DNA, 25 bp, Homo sapien
catagtcgtttagccttcttcttca

SEQ ID NO: 1729257 - DNA, 25 bp, Homo sapien
ttataaccattctcattatctgacc

SEQ ID NO: 1729258 - DNA, 25 bp, Homo sapien
tatactgtaaggagccaacacatct

SEQ ID NO: 1729259 - DNA, 25 bp, Homo sapien
caagggaacgctatgacaatgcagg

SEQ ID NO: 1729260 - DNA, 25 bp, Homo sapien
tatttgcctggtatgcccatgctaa

SEQ ID NO: 1729261 - DNA, 25 bp, Homo sapien
ctagagggaacatatttttgctgcc

SEQ ID NO: 1729262 - DNA, 25 bp, Homo sapien
ttgcaggcacacgtctaaagaggtt

SEQ ID NO: 1729263 - DNA, 25 bp, Homo sapien
aaaatctccataagtgcttttgcac

SEQ ID NO: 1729264 - DNA, 25 bp, Homo sapien
gcatcgtttctatggctcacttaca

SEQ ID NO: 1729265 - DNA, 25 bp, Homo sapien
tggcaggccaacattttagcatcgt

SEQ ID NO: 1729266 - DNA, 25 bp, Homo sapien
aaggtgaagagcctcactgactggc

SEQ ID NO: 1729267 - DNA, 25 bp, Homo sapien
tgtgattcctagtgatgacagagac

SEQ ID NO: 1729268 - DNA, 25 bp, Homo sapien
ggcctcacgggatggttacaccctg

SEQ ID NO: 1729269 - DNA, 25 bp, Homo sapien
gatttctatcctctggcccctttag

SEQ ID NO: 1729270 - DNA, 25 bp, Homo sapien
gcagccaggaggccctgtgctgcaa

SEQ ID NO: 1729271 - DNA, 25 bp, Homo sapien
aggcagccaggaggccctgtgctgc

SEQ ID NO: 1729272 - DNA, 25 bp, Homo sapien
ctgtaggccaggcagccaggaggcc

SEQ ID NO: 1729273 - DNA, 25 bp, Homo sapien
gccaggaggccctgtgctgcaacat

SEQ ID NO: 1729274 - DNA, 25 bp, Homo sapien
cgcccagccgtctcgcgctgagcaa

SEQ ID NO: 1729275 - DNA, 25 bp, Homo sapien
ctccctcctggaaacgccctccctg

SEQ ID NO: 1729276 - DNA, 25 bp, Homo sapien
gcgctgtgtcccttctcgccttgca

SEQ ID NO: 1729277 - DNA, 25 bp, Homo sapien
ccctgccgcgcgcatgcgctgtgtc

SEQ ID NO: 1729278 - DNA, 25 bp, Homo sapien
tggagtccggaagcagtctccgcac

SEQ ID NO: 1729279 - DNA, 25 bp, Homo sapien
ctggagtccggaagcagtctccgca

SEQ ID NO: 1729280 - DNA, 25 bp, Homo sapien
ggccagctgccgccaagcgcggtac

SEQ ID NO: 1729281 - DNA, 25 bp, Homo sapien
ctgcagccccgagccttcactgcag

SEQ ID NO: 1729282 - DNA, 25 bp, Homo sapien
attcggagaattaagagattttcgg

SEQ ID NO: 1729283 - DNA, 25 bp, Homo sapien
ggagaattaagagattttcggtgaa

SEQ ID NO: 1729284 - DNA, 25 bp, Homo sapien
tcggagaattaagagattttcggtg

SEQ ID NO: 1729285 - DNA, 25 bp, Homo sapien
cggagaattaagagattttcggtga

SEQ ID NO: 1729286 - DNA, 25 bp, Homo sapien
caggagatgacagcaccaaaaagga

SEQ ID NO: 1729287 - DNA, 25 bp, Homo sapien
caaaaaggaggcaacactgaaaaat

SEQ ID NO: 1729288 - DNA, 25 bp, Homo sapien
aaaaaggaggcaacactgaaaaatg

SEQ ID NO: 1729289 - DNA, 25 bp, Homo sapien
cggaaaatcccttgaacctgcgagg

SEQ ID NO: 1729290 - DNA, 25 bp, Homo sapien
ggttgcaatcaactgtgatcgtgcc

SEQ ID NO: 1729291 - DNA, 25 bp, Homo sapien
ccggaaaatcccttgaacctgcgag

SEQ ID NO: 1729292 - DNA, 25 bp, Homo sapien
ggcagaggttgcaatcaactgtgat

SEQ ID NO: 1729293 - DNA, 25 bp, Homo sapien
tgcttccaaatgtcacgagggctgc

SEQ ID NO: 1729294 - DNA, 25 bp, Homo sapien
gcttccaaatgtcacgagggctgca

SEQ ID NO: 1729295 - DNA, 25 bp, Homo sapien
gcataaccaaaaccgatcaggtcca

SEQ ID NO: 1729296 - DNA, 25 bp, Homo sapien
tcacgagggctgcataaccaaaacc

SEQ ID NO: 1729297 - DNA, 25 bp, Homo sapien
ccagcaatcaaagacggaacaccac

SEQ ID NO: 1729298 - DNA, 25 bp, Homo sapien
catctcgtttgtcattggagacacg

SEQ ID NO: 1729299 - DNA, 25 bp, Homo sapien
gagacacggtaagctccatagccgg

SEQ ID NO: 1729300 - DNA, 25 bp, Homo sapien
cagtgacacttttacatctcgtttg

SEQ ID NO: 1729301 - DNA, 25 bp, Homo sapien
ggtatcaaaaagatcacctccaatg

SEQ ID NO: 1729302 - DNA, 25 bp, Homo sapien
aacacatgcatatggccatttgcca

SEQ ID NO: 1729303 - DNA, 25 bp, Homo sapien
tagtatatctagcatagggtatcaa

SEQ ID NO: 1729304 - DNA, 25 bp, Homo sapien
cctccaatgtttgagtctctgtaac

SEQ ID NO: 1729305 - DNA, 25 bp, Homo sapien
gtagctaaaaaagcgtcagccttgc

SEQ ID NO: 1729306 - DNA, 25 bp, Homo sapien
ggttaagtcttaaggcagtgcagaa

SEQ ID NO: 1729307 - DNA, 25 bp, Homo sapien
ttttttccatacacgaccaaggcac

SEQ ID NO: 1729308 - DNA, 25 bp, Homo sapien
agttggaaggcctggtagcagtacc

SEQ ID NO: 1729309 - DNA, 25 bp, Homo sapien
aaatctcacacccattatggtagcc

SEQ ID NO: 1729310 - DNA, 25 bp, Homo sapien
atctcacacccattatggtagccag

SEQ ID NO: 1729311 - DNA, 25 bp, Homo sapien
ctcacacccattatggtagccagga

SEQ ID NO: 1729312 - DNA, 25 bp, Homo sapien
ttaaatctcacacccattatggtag

SEQ ID NO: 1729313 - DNA, 25 bp, Homo sapien
cactgaatccatgctatcttaaggt

SEQ ID NO: 1729314 - DNA, 25 bp, Homo sapien
taagagaaacttgaggccctctgtt

SEQ ID NO: 1729315 - DNA, 25 bp, Homo sapien
gcaacactatgcgtatccaataaga

SEQ ID NO: 1729316 - DNA, 25 bp, Homo sapien
tgcctatgtgaccagatactacagc

SEQ ID NO: 1729317 - DNA, 25 bp, Homo sapien
gtcacttttatctggcataagacag

SEQ ID NO: 1729318 - DNA, 25 bp, Homo sapien
tgcactcgcctacccagtagtgtta

SEQ ID NO: 1729319 - DNA, 25 bp, Homo sapien
tagtgttactaatccttggcttggg

SEQ ID NO: 1729320 - DNA, 25 bp, Homo sapien
cataagacagaaagggccatgcact

SEQ ID NO: 1729321 - DNA, 25 bp, Homo sapien
gagcagcaacaagacaagtctcagg

SEQ ID NO: 1729322 - DNA, 25 bp, Homo sapien
tcagagcagcaacaagacaagtctc

SEQ ID NO: 1729323 - DNA, 25 bp, Homo sapien
gcaacaagacaagtctcaggatcat

SEQ ID NO: 1729324 - DNA, 25 bp, Homo sapien
aagacaagtctcaggatcatcatga

SEQ ID NO: 1729325 - DNA, 25 bp, Homo sapien
atgttcatattagaggtgacagtgc

SEQ ID NO: 1729326 - DNA, 25 bp, Homo sapien
tgttcatattagaggtgacagtgct

SEQ ID NO: 1729327 - DNA, 25 bp, Homo sapien
tcatattagaggtgacagtgctatt

SEQ ID NO: 1729328 - DNA, 25 bp, Homo sapien
gttcatattagaggtgacagtgcta

SEQ ID NO: 1729329 - DNA, 25 bp, Homo sapien
tgtgaactccacttaagacttcctt

SEQ ID NO: 1729330 - DNA, 25 bp, Homo sapien
gcttacttgagacatgagtatttgg

SEQ ID NO: 1729331 - DNA, 25 bp, Homo sapien
tagcactggcagcaatacaattaaa

SEQ ID NO: 1729332 - DNA, 25 bp, Homo sapien
tgacaagttgtagtttaagcttact

SEQ ID NO: 1729333 - DNA, 25 bp, Homo sapien
aaaggaagcctccactggatgaaga

SEQ ID NO: 1729334 - DNA, 25 bp, Homo sapien
ggaagccaaaggaagcctccactgg

SEQ ID NO: 1729335 - DNA, 25 bp, Homo sapien
gatgaagaatccattgagactgtga

SEQ ID NO: 1729336 - DNA, 25 bp, Homo sapien
gaagcctccactggatgaagaatcc

SEQ ID NO: 1729337 - DNA, 25 bp, Homo sapien
tgtgaggacgaggcaccgccaaagt

SEQ ID NO: 1729338 - DNA, 25 bp, Homo sapien
aggacgaggcaccgccaaagtggcc

SEQ ID NO: 1729339 - DNA, 25 bp, Homo sapien
acgaggcaccgccaaagtggccact

SEQ ID NO: 1729340 - DNA, 25 bp, Homo sapien
gccacagcctaacctgattttaaat

SEQ ID NO: 1729341 - DNA, 25 bp, Homo sapien
gactctggctttctagaacacgctt

SEQ ID NO: 1729342 - DNA, 25 bp, Homo sapien
tctggctttctagaacacgcttgct

SEQ ID NO: 1729343 - DNA, 25 bp, Homo sapien
taagaggggtcgctggagactctgg

SEQ ID NO: 1729344 - DNA, 25 bp, Homo sapien
ggctttctagaacacgcttgcttcc

SEQ ID NO: 1729345 - DNA, 25 bp, Homo sapien
cactgtttgcactgctgacatccaa

SEQ ID NO: 1729346 - DNA, 25 bp, Homo sapien
cagtggaactggatgaataagacct

SEQ ID NO: 1729347 - DNA, 25 bp, Homo sapien
gacatccaaaactatgtccctttgg

SEQ ID NO: 1729348 - DNA, 25 bp, Homo sapien
gggtctacttggagaaagttgcagc

SEQ ID NO: 1729349 - DNA, 25 bp, Homo sapien
atgctatccaaatagctcccaagaa

SEQ ID NO: 1729350 - DNA, 25 bp, Homo sapien
taatgactgaagagtgcaaacccag

SEQ ID NO: 1729351 - DNA, 25 bp, Homo sapien
gctgatacacagcaacctgaagtca

SEQ ID NO: 1729352 - DNA, 25 bp, Homo sapien
gggctttcctctgctacaggtaatg

SEQ ID NO: 1729353 - DNA, 25 bp, Homo sapien
gatggaatccatctgatggctcttg

SEQ ID NO: 1729354 - DNA, 25 bp, Homo sapien
ggaatccatctgatggctcttggct

SEQ ID NO: 1729355 - DNA, 25 bp, Homo sapien
caggatggaatccatctgatggctc

SEQ ID NO: 1729356 - DNA, 25 bp, Homo sapien
gaatccatctgatggctcttggctg

SEQ ID NO: 1729357 - DNA, 25 bp, Homo sapien
aatgcaagtagccttctagctgaga

SEQ ID NO: 1729358 - DNA, 25 bp, Homo sapien
tttggggcataagttgcaagtccac

SEQ ID NO: 1729359 - DNA, 25 bp, Homo sapien
tagccttctagctgagaagcagctt

SEQ ID NO: 1729360 - DNA, 25 bp, Homo sapien
cacagaatgcaagtagccttctagc

SEQ ID NO: 1729361 - DNA, 25 bp, Homo sapien
cacagcattcaaccacggagaacct

SEQ ID NO: 1729362 - DNA, 25 bp, Homo sapien
aaccacggagaacctccagtgagcc

SEQ ID NO: 1729363 - DNA, 25 bp, Homo sapien
acggagaacctccagtgagccaggc

SEQ ID NO: 1729364 - DNA, 25 bp, Homo sapien
attcaaccacggagaacctccagtg

SEQ ID NO: 1729365 - DNA, 25 bp, Homo sapien
ttgcccggaagcacaaggccctgcc

SEQ ID NO: 1729366 - DNA, 25 bp, Homo sapien
gcccggaagcacaaggccctgcctg

SEQ ID NO: 1729367 - DNA, 25 bp, Homo sapien
gaagcacaaggccctgcctgcccat

SEQ ID NO: 1729368 - DNA, 25 bp, Homo sapien
cggaagcacaaggccctgcctgccc

SEQ ID NO: 1729369 - DNA, 25 bp, Homo sapien
cacatgcagctgctcgaagactcag

SEQ ID NO: 1729370 - DNA, 25 bp, Homo sapien
gcagctgctcgaagactcagtgcca

SEQ ID NO: 1729371 - DNA, 25 bp, Homo sapien
cccacagtcgctgagcttttgtgct

SEQ ID NO: 1729372 - DNA, 25 bp, Homo sapien
cttcatgtgacacaatatgtctgtc

SEQ ID NO: 1729373 - DNA, 25 bp, Homo sapien
ctattacgtattgtaggtgaaagcc

SEQ ID NO: 1729374 - DNA, 25 bp, Homo sapien
acacagtaggaaggtggctattacg

SEQ ID NO: 1729375 - DNA, 25 bp, Homo sapien
cagtaggaaggtggctattacgtat

SEQ ID NO: 1729376 - DNA, 25 bp, Homo sapien
gaaggtggctattacgtattgtagg

SEQ ID NO: 1729377 - DNA, 25 bp, Homo sapien
caaatactggacattccaacaaggg

SEQ ID NO: 1729378 - DNA, 25 bp, Homo sapien
cttcacaaatactggacattccaac

SEQ ID NO: 1729379 - DNA, 25 bp, Homo sapien
tgctcccacgtcctcaagtgatagt

SEQ ID NO: 1729380 - DNA, 25 bp, Homo sapien
cgtcctcaagtgatagttttgtcat

SEQ ID NO: 1729381 - DNA, 25 bp, Homo sapien
tcatatgcaaatacagggcaccacc

SEQ ID NO: 1729382 - DNA, 25 bp, Homo sapien
tgagcggacctagtttctaatggcc

SEQ ID NO: 1729383 - DNA, 25 bp, Homo sapien
gtagcctgcggaaaaagctggccct

SEQ ID NO: 1729384 - DNA, 25 bp, Homo sapien
gggcgaccttgctgctaggcacatg

SEQ ID NO: 1729385 - DNA, 25 bp, Homo sapien
agtcatgtacaacttacttggtatg

SEQ ID NO: 1729386 - DNA, 25 bp, Homo sapien
aaatgtttcagtcggtgaatatcac

SEQ ID NO: 1729387 - DNA, 25 bp, Homo sapien
catgtacaacttacttggtatgtga

SEQ ID NO: 1729388 - DNA, 25 bp, Homo sapien
gctggaactcactatgcataaatgt

SEQ ID NO: 1729389 - DNA, 25 bp, Homo sapien
tcctagtttgttttgttatcagata

SEQ ID NO: 1729390 - DNA, 25 bp, Homo sapien
ttcctagtttgttttgttatcagat

SEQ ID NO: 1729391 - DNA, 25 bp, Homo sapien
cctagtttgttttgttatcagataa

SEQ ID NO: 1729392 - DNA, 25 bp, Homo sapien
tttcctagtttgttttgttatcaga

SEQ ID NO: 1729393 - DNA, 25 bp, Homo sapien
tgtaacttgtcccaacctcttccta

SEQ ID NO: 1729394 - DNA, 25 bp, Homo sapien
agagtcccactatgtatctggaggg

SEQ ID NO: 1729395 - DNA, 25 bp, Homo sapien
tcttgttgccagtcctattgtaact

SEQ ID NO: 1729396 - DNA, 25 bp, Homo sapien
acaaaaaatacaagagtcccactat

SEQ ID NO: 1729397 - DNA, 25 bp, Homo sapien
tctctgatactctgctatgttccac

SEQ ID NO: 1729398 - DNA, 25 bp, Homo sapien
tagagcaagggctatcaaacttcac

SEQ ID NO: 1729399 - DNA, 25 bp, Homo sapien
gatacaattagttgcatctgtccct

SEQ ID NO: 1729400 - DNA, 25 bp, Homo sapien
cactgatgagcccagtcaatttctc

SEQ ID NO: 1729401 - DNA, 25 bp, Homo sapien
cacactcaacaaccacaaaactttg

SEQ ID NO: 1729402 - DNA, 25 bp, Homo sapien
tgttccacactcaacaaccacaaaa

SEQ ID NO: 1729403 - DNA, 25 bp, Homo sapien
tccacactcaacaaccacaaaactt

SEQ ID NO: 1729404 - DNA, 25 bp, Homo sapien
ttgttccacactcaacaaccacaaa

SEQ ID NO: 1729405 - DNA, 25 bp, Homo sapien
aaacttctctaccacgtggaagagc

SEQ ID NO: 1729406 - DNA, 25 bp, Homo sapien
ctgaaggtgacccatttcccagtcc

SEQ ID NO: 1729407 - DNA, 25 bp, Homo sapien
ccatttcccagtcctcaagaggcag

SEQ ID NO: 1729408 - DNA, 25 bp, Homo sapien
tggtcaaacttctctaccacgtgga

SEQ ID NO: 1729409 - DNA, 25 bp, Homo sapien
gccacaagctgagccgggctgacat

SEQ ID NO: 1729410 - DNA, 25 bp, Homo sapien
cgttggccacaagctgagccgggct

SEQ ID NO: 1729411 - DNA, 25 bp, Homo sapien
ctcgttggccacaagctgagccggg

SEQ ID NO: 1729412 - DNA, 25 bp, Homo sapien
tggccacaagctgagccgggctgac

SEQ ID NO: 1729413 - DNA, 25 bp, Homo sapien
gttgaagagccatggacaagactac

SEQ ID NO: 1729414 - DNA, 25 bp, Homo sapien
aggtgttgaagagccatggacaaga

SEQ ID NO: 1729415 - DNA, 25 bp, Homo sapien
tgttgaagagccatggacaagacta

SEQ ID NO: 1729416 - DNA, 25 bp, Homo sapien
gtgttgaagagccatggacaagact

SEQ ID NO: 1729417 - DNA, 25 bp, Homo sapien
tatacagaaggtagggcaggtttga

SEQ ID NO: 1729418 - DNA, 25 bp, Homo sapien
gcttcttcattgctcattgcatcca

SEQ ID NO: 1729419 - DNA, 25 bp, Homo sapien
tgtatacagaaggtagggcaggttt

SEQ ID NO: 1729420 - DNA, 25 bp, Homo sapien
aaaagcttcttcattgctcattgca

SEQ ID NO: 1729421 - DNA, 25 bp, Homo sapien
tatgaactggtccacttgactaagg

SEQ ID NO: 1729422 - DNA, 25 bp, Homo sapien
gctggtgcccaagataccaggatta

SEQ ID NO: 1729423 - DNA, 25 bp, Homo sapien
caggttccagtaattccaagaatgg

SEQ ID NO: 1729424 - DNA, 25 bp, Homo sapien
actaaggtttgagaggctggtgccc

SEQ ID NO: 1729425 - DNA, 25 bp, Homo sapien
ggcatagaatgtttgagagtcggta

SEQ ID NO: 1729426 - DNA, 25 bp, Homo sapien
gattccaggtgctcgggacttcaga

SEQ ID NO: 1729427 - DNA, 25 bp, Homo sapien
gtttccaaacgctgatgaaccatga

SEQ ID NO: 1729428 - DNA, 25 bp, Homo sapien
cgctgatgaaccatgaactcaggag

SEQ ID NO: 1729429 - DNA, 25 bp, Homo sapien
gcaagtgccaatggttgagattgac

SEQ ID NO: 1729430 - DNA, 25 bp, Homo sapien
agattgacgggatgaagctgatgca

SEQ ID NO: 1729431 - DNA, 25 bp, Homo sapien
gagtttgttcttccagcaagtgcca

SEQ ID NO: 1729432 - DNA, 25 bp, Homo sapien
gaccagagccattctcaactacatt

SEQ ID NO: 1729433 - DNA, 25 bp, Homo sapien
acagacaatacaagcgacctattct

SEQ ID NO: 1729434 - DNA, 25 bp, Homo sapien
cacagacaatacaagcgacctattc

SEQ ID NO: 1729435 - DNA, 25 bp, Homo sapien
cagacaatacaagcgacctattctg

SEQ ID NO: 1729436 - DNA, 25 bp, Homo sapien
cattgcttcacgagggcctgggact

SEQ ID NO: 1729437 - DNA, 25 bp, Homo sapien
ttcttcattgcttcacgagggcctg

SEQ ID NO: 1729438 - DNA, 25 bp, Homo sapien
gagggcctgggactttagcctcacc

SEQ ID NO: 1729439 - DNA, 25 bp, Homo sapien
cttcacgagggcctgggactttagc

SEQ ID NO: 1729440 - DNA, 25 bp, Homo sapien
ttctaggcctaccttcattttcgtc

SEQ ID NO: 1729441 - DNA, 25 bp, Homo sapien
taacagccaaagaggtggtcctcct

SEQ ID NO: 1729442 - DNA, 25 bp, Homo sapien
tcatgggttctcagggccttcacct

SEQ ID NO: 1729443 - DNA, 25 bp, Homo sapien
cttcacctgggtgggttctaggcct

SEQ ID NO: 1729444 - DNA, 25 bp, Homo sapien
aggtgcagggtatgggagccttttt

SEQ ID NO: 1729445 - DNA, 25 bp, Homo sapien
ggtgcagggtatgggagcctttttc

SEQ ID NO: 1729446 - DNA, 25 bp, Homo sapien
cagggtatgggagcctttttccaga

SEQ ID NO: 1729447 - DNA, 25 bp, Homo sapien
tgcagggtatgggagcctttttcca

SEQ ID NO: 1729448 - DNA, 25 bp, Homo sapien
tgggacggccaggtagaggcactcc

SEQ ID NO: 1729449 - DNA, 25 bp, Homo sapien
cccagatgggacggccaggtagagg

SEQ ID NO: 1729450 - DNA, 25 bp, Homo sapien
cagatgggacggccaggtagaggca

SEQ ID NO: 1729451 - DNA, 25 bp, Homo sapien
gatgggacggccaggtagaggcact

SEQ ID NO: 1729452 - DNA, 25 bp, Homo sapien
taatgccaggccaagtttaaacagg

SEQ ID NO: 1729453 - DNA, 25 bp, Homo sapien
ggcaaatgccctaacagaagtattc

SEQ ID NO: 1729454 - DNA, 25 bp, Homo sapien
tattctaagattgcaatggcctttg

SEQ ID NO: 1729455 - DNA, 25 bp, Homo sapien
tatgtatgtattcagggaagttaag

SEQ ID NO: 1729456 - DNA, 25 bp, Homo sapien
ctgctcccctgtactgtgagctggt

SEQ ID NO: 1729457 - DNA, 25 bp, Homo sapien
atgacatctgcacagacccatacac

SEQ ID NO: 1729458 - DNA, 25 bp, Homo sapien
cccctgtactgtgagctggtggtgt

SEQ ID NO: 1729459 - DNA, 25 bp, Homo sapien
tacacagctctatgcacctccagaa

SEQ ID NO: 1729460 - DNA, 25 bp, Homo sapien
tgggggccaccgtcatgaacattcc

SEQ ID NO: 1729461 - DNA, 25 bp, Homo sapien
tctgtgggggccaccgtcatgaaca

SEQ ID NO: 1729462 - DNA, 25 bp, Homo sapien
tcagttccctcagtgccactcaggc

SEQ ID NO: 1729463 - DNA, 25 bp, Homo sapien
ttccctcagtgccactcaggcctgg

SEQ ID NO: 1729464 - DNA, 25 bp, Homo sapien
ttcacttggtggaacttctctacta

SEQ ID NO: 1729465 - DNA, 25 bp, Homo sapien
gaacttctctactacatggaagagc

SEQ ID NO: 1729466 - DNA, 25 bp, Homo sapien
ggaagagcttgactctagccttatc

SEQ ID NO: 1729467 - DNA, 25 bp, Homo sapien
gagcttgactctagccttatcttca

SEQ ID NO: 1729468 - DNA, 25 bp, Homo sapien
tagagccacgtcctaaatgtgaagg

SEQ ID NO: 1729469 - DNA, 25 bp, Homo sapien
gtcgctgcccaagggagattggaga

SEQ ID NO: 1729470 - DNA, 25 bp, Homo sapien
cttcagatccgagggagatagagca

SEQ ID NO: 1729471 - DNA, 25 bp, Homo sapien
tcatgaaggtggagtcgctgcccaa

SEQ ID NO: 1729472 - DNA, 25 bp, Homo sapien
gcagctcagggatgtgttcagagcc

SEQ ID NO: 1729473 - DNA, 25 bp, Homo sapien
ggatgtgttcagagcccgggtagga

SEQ ID NO: 1729474 - DNA, 25 bp, Homo sapien
tggtacaaatgaataccccgtttca

SEQ ID NO: 1729475 - DNA, 25 bp, Homo sapien
ccagacgtcagctctgcagctcagg

SEQ ID NO: 1729476 - DNA, 25 bp, Homo sapien
cattgcttcacgaaggctcgggacc

SEQ ID NO: 1729477 - DNA, 25 bp, Homo sapien
tcttccggagtgagtcttcgacaac

SEQ ID NO: 1729478 - DNA, 25 bp, Homo sapien
gactccgttgagtgctgccctctag

SEQ ID NO: 1729479 - DNA, 25 bp, Homo sapien
tgtcccttggatggtagcagaaaaa

SEQ ID NO: 1729480 - DNA, 25 bp, Homo sapien
tgtaaagtggaactgcgtactcacc

SEQ ID NO: 1729481 - DNA, 25 bp, Homo sapien
ccttaagcacacgttcccagaatct

SEQ ID NO: 1729482 - DNA, 25 bp, Homo sapien
ttccaggagaacacccaagcattcc

SEQ ID NO: 1729483 - DNA, 25 bp, Homo sapien
agtctctgccctcgggtagcctaca

SEQ ID NO: 1729484 - DNA, 25 bp, Homo sapien
tgaagggtctggtttatctgtagac

SEQ ID NO: 1729485 - DNA, 25 bp, Homo sapien
tgtccttgaagggtctggtttatct

SEQ ID NO: 1729486 - DNA, 25 bp, Homo sapien
agcctcttcaagtaaattttcatga

SEQ ID NO: 1729487 - DNA, 25 bp, Homo sapien
aaatcatctccagtttaatcagggc

SEQ ID NO: 1729488 - DNA, 25 bp, Homo sapien
tggcccatttacaaggtgactttgc

SEQ ID NO: 1729489 - DNA, 25 bp, Homo sapien
aagccactgggtatgctgtcccgtg

SEQ ID NO: 1729490 - DNA, 25 bp, Homo sapien
tttacaaggtgactttgcccatgcc

SEQ ID NO: 1729491 - DNA, 25 bp, Homo sapien
tatgctgtcccgtggtgcttttggc

SEQ ID NO: 1729492 - DNA, 25 bp, Homo sapien
caggtctctgggaaagacataatac

SEQ ID NO: 1729493 - DNA, 25 bp, Homo sapien
gcttagttcctcttgtggggctgca

SEQ ID NO: 1729494 - DNA, 25 bp, Homo sapien
catgaatgtacctctgcttagttcc

SEQ ID NO: 1729495 - DNA, 25 bp, Homo sapien
ggtttttgacatgaatgtacctctg

SEQ ID NO: 1729496 - DNA, 25 bp, Homo sapien
catccccacatacaaggtttttgac

SEQ ID NO: 1729497 - DNA, 25 bp, Homo sapien
cctggatttgggcatgtcagaggct

SEQ ID NO: 1729498 - DNA, 25 bp, Homo sapien
taaagaagcaattggccccttgtcc

SEQ ID NO: 1729499 - DNA, 25 bp, Homo sapien
cactggactcggaatttgccacagg

SEQ ID NO: 1729500 - DNA, 25 bp, Homo sapien
tgctccctggtgtaaacttggtatg

SEQ ID NO: 1729501 - DNA, 25 bp, Homo sapien
tctttggcaagaacctcaaggagag

SEQ ID NO: 1729502 - DNA, 25 bp, Homo sapien
ggtacagacccgaagcattctccac

SEQ ID NO: 1729503 - DNA, 25 bp, Homo sapien
aaggagagaaccctgtactgtggcc

SEQ ID NO: 1729504 - DNA, 25 bp, Homo sapien
tgacgggatgaagttggtacagacc

SEQ ID NO: 1729505 - DNA, 25 bp, Homo sapien
gctctcctgaatgaagttaaggtta

SEQ ID NO: 1729506 - DNA, 25 bp, Homo sapien
tcatctggaagctttacactatttc

SEQ ID NO: 1729507 - DNA, 25 bp, Homo sapien
gttaaggttatctgtcatctggaag

SEQ ID NO: 1729508 - DNA, 25 bp, Homo sapien
taaggccatgattccaccgtttctt

SEQ ID NO: 1729509 - DNA, 25 bp, Homo sapien
gaaaggcagactgccacatgcagcg

SEQ ID NO: 1729510 - DNA, 25 bp, Homo sapien
ttggaagcttgactaccctacgttc

SEQ ID NO: 1729511 - DNA, 25 bp, Homo sapien
acatgcagcgcctcatttggatgtg

SEQ ID NO: 1729512 - DNA, 25 bp, Homo sapien
tcttcgaccgagcgcgcagcttcgg

SEQ ID NO: 1729513 - DNA, 25 bp, Homo sapien
ggagcaaatggattgtttaatacca

SEQ ID NO: 1729514 - DNA, 25 bp, Homo sapien
gattgtttaataccatagtctcagt

SEQ ID NO: 1729515 - DNA, 25 bp, Homo sapien
aaatattccttagaggagcaaatgg

SEQ ID NO: 1729516 - DNA, 25 bp, Homo sapien
catagtctcagtaatctagcttata

SEQ ID NO: 1729517 - DNA, 25 bp, Homo sapien
tggttcaacctaatgacttggtaaa

SEQ ID NO: 1729518 - DNA, 25 bp, Homo sapien
tatgcaagcacaacttgaagctgaa

SEQ ID NO: 1729519 - DNA, 25 bp, Homo sapien
ttgaccaagcaccatgatccctagg

SEQ ID NO: 1729520 - DNA, 25 bp, Homo sapien
cctaaaatcggagagtaatttatgc

SEQ ID NO: 1729521 - DNA, 25 bp, Homo sapien
tgggtaaatcctgttgaatattgcc

SEQ ID NO: 1729522 - DNA, 25 bp, Homo sapien
cctttcccttcatctaagcggttgg

SEQ ID NO: 1729523 - DNA, 25 bp, Homo sapien
ctaagcggttggtgggtaaatcctg

SEQ ID NO: 1729524 - DNA, 25 bp, Homo sapien
tgaatattgccacatggctcttgtt

SEQ ID NO: 1729525 - DNA, 25 bp, Homo sapien
ttcaaaggtgaaccgtatggagcct

SEQ ID NO: 1729526 - DNA, 25 bp, Homo sapien
aggtgaaccgtatggagcctcttgg

SEQ ID NO: 1729527 - DNA, 25 bp, Homo sapien
gaacttcaaaggtgaaccgtatgga

SEQ ID NO: 1729528 - DNA, 25 bp, Homo sapien
ttgaacttcaaaggtgaaccgtatg

SEQ ID NO: 1729529 - DNA, 25 bp, Homo sapien
ttaaagaagctcaaccatgccaatg

SEQ ID NO: 1729530 - DNA, 25 bp, Homo sapien
ccaagtatacataggattacttttc

SEQ ID NO: 1729531 - DNA, 25 bp, Homo sapien
ataaatttcagaggtatactattaa

SEQ ID NO: 1729532 - DNA, 25 bp, Homo sapien
ggtatactattaaactgtcaataaa

SEQ ID NO: 1729533 - DNA, 25 bp, Homo sapien
ttcttccacagcctgaattccatca

SEQ ID NO: 1729534 - DNA, 25 bp, Homo sapien
aatagccttggtacattgcctggtg

SEQ ID NO: 1729535 - DNA, 25 bp, Homo sapien
gcttcttttattgattcccctctgg

SEQ ID NO: 1729536 - DNA, 25 bp, Homo sapien
cccaaaatagccttggtacattgcc

SEQ ID NO: 1729537 - DNA, 25 bp, Homo sapien
cacatgtacgcacatgttccaggaa

SEQ ID NO: 1729538 - DNA, 25 bp, Homo sapien
acagtgtgcacatggctatactcac

SEQ ID NO: 1729539 - DNA, 25 bp, Homo sapien
ataaggccacgcaccattttctgag

SEQ ID NO: 1729540 - DNA, 25 bp, Homo sapien
taggtatgtctgctgtacaagaaga

SEQ ID NO: 1729541 - DNA, 25 bp, Homo sapien
ggcagggaggggaatccctgctccc

SEQ ID NO: 1729542 - DNA, 25 bp, Homo sapien
gcagggaggggaatccctgctccca

SEQ ID NO: 1729543 - DNA, 25 bp, Homo sapien
cagggaggggaatccctgctcccat

SEQ ID NO: 1729544 - DNA, 25 bp, Homo sapien
gcctgtacatttgcatgtctgccca

SEQ ID NO: 1729545 - DNA, 25 bp, Homo sapien
ctgcctgtacatttgcatgtctgcc

SEQ ID NO: 1729546 - DNA, 25 bp, Homo sapien
gtggacttcagggatattctgcacc

SEQ ID NO: 1729547 - DNA, 25 bp, Homo sapien
atgaagaccctgtggacttcaggga

SEQ ID NO: 1729548 - DNA, 25 bp, Homo sapien
tgaaggcctcttatcactgtcgttt

SEQ ID NO: 1729549 - DNA, 25 bp, Homo sapien
aaggcctcttatcactgtcgtttct

SEQ ID NO: 1729550 - DNA, 25 bp, Homo sapien
gcctcttatcactgtcgtttctcat

SEQ ID NO: 1729551 - DNA, 25 bp, Homo sapien
ggcctcttatcactgtcgtttctca

SEQ ID NO: 1729552 - DNA, 25 bp, Homo sapien
tcacacagacttagcagcactgggc

SEQ ID NO: 1729553 - DNA, 25 bp, Homo sapien
acttagcagcactgggccacagcct

SEQ ID NO: 1729554 - DNA, 25 bp, Homo sapien
agcagcactgggccacagcctaacc

SEQ ID NO: 1729555 - DNA, 25 bp, Homo sapien
ttagcagcactgggccacagcctaa

SEQ ID NO: 1729556 - DNA, 25 bp, Homo sapien
agcattgtggagcaccgatctttac

SEQ ID NO: 1729557 - DNA, 25 bp, Homo sapien
ggagcaccgatctttacttttattc

SEQ ID NO: 1729558 - DNA, 25 bp, Homo sapien
gcagaagcgggtagaaaggaggcac

SEQ ID NO: 1729559 - DNA, 25 bp, Homo sapien
tgtggagcaccgatctttactttta

SEQ ID NO: 1729560 - DNA, 25 bp, Homo sapien
gctgtagcgcacagctctatgccca

SEQ ID NO: 1729561 - DNA, 25 bp, Homo sapien
gcagctgtagcgcacagctctatgc

SEQ ID NO: 1729562 - DNA, 25 bp, Homo sapien
ctgtagcgcacagctctatgcccat

SEQ ID NO: 1729563 - DNA, 25 bp, Homo sapien
ctgatgtcagtgcagctgtagcgca

SEQ ID NO: 1729564 - DNA, 25 bp, Homo sapien
acgtcctattgaataccttgtgctg

SEQ ID NO: 1729565 - DNA, 25 bp, Homo sapien
ttgggagacagtcacgtcctattga

SEQ ID NO: 1729566 - DNA, 25 bp, Homo sapien
gtatttgggagacagtcacgtccta

SEQ ID NO: 1729567 - DNA, 25 bp, Homo sapien
tcacgtcctattgaataccttgtgc

SEQ ID NO: 1729568 - DNA, 25 bp, Homo sapien
cagaatggttagtcagcagaaaagc

SEQ ID NO: 1729569 - DNA, 25 bp, Homo sapien
cagttatctctcagtgtttgcccag

SEQ ID NO: 1729570 - DNA, 25 bp, Homo sapien
cattgaattggagctgattcatttc

SEQ ID NO: 1729571 - DNA, 25 bp, Homo sapien
tcatcgaccacagttatctctcagt

SEQ ID NO: 1729572 - DNA, 25 bp, Homo sapien
atggagggggactttctgtgatcct

SEQ ID NO: 1729573 - DNA, 25 bp, Homo sapien
ctgaccgcatggagggggactttct

SEQ ID NO: 1729574 - DNA, 25 bp, Homo sapien
ctgatctgaccgcatggagggggac

SEQ ID NO: 1729575 - DNA, 25 bp, Homo sapien
ggagggggactttctgtgatcctct

SEQ ID NO: 1729576 - DNA, 25 bp, Homo sapien
attttttaggctgtgaatgagcaag

SEQ ID NO: 1729577 - DNA, 25 bp, Homo sapien
tctttgcctccaccgaggattgacg

SEQ ID NO: 1729578 - DNA, 25 bp, Homo sapien
gttctttgcctccaccgaggattga

SEQ ID NO: 1729579 - DNA, 25 bp, Homo sapien
ttttttaggctgtgaatgagcaagg

SEQ ID NO: 1729580 - DNA, 25 bp, Homo sapien
tgtacggagccctcggccggtccta

SEQ ID NO: 1729581 - DNA, 25 bp, Homo sapien
gctgcgccccgctcgtcgaggagct

SEQ ID NO: 1729582 - DNA, 25 bp, Homo sapien
tgctgcactaccatgcgccgtgcgg

SEQ ID NO: 1729583 - DNA, 25 bp, Homo sapien
gccggtcctagcagggattgtcccc

SEQ ID NO: 1729584 - DNA, 25 bp, Homo sapien
cccttaaagcaagccgccctgagaa

SEQ ID NO: 1729585 - DNA, 25 bp, Homo sapien
gacagtcgctacaaagtcctcggag

SEQ ID NO: 1729586 - DNA, 25 bp, Homo sapien
gaactggacgcttgggacagtcgct

SEQ ID NO: 1729587 - DNA, 25 bp, Homo sapien
agtcccgcgccaggaatgcaggaaa

SEQ ID NO: 1729588 - DNA, 25 bp, Homo sapien
attgtgcgagcaccggagcgtcagc

SEQ ID NO: 1729589 - DNA, 25 bp, Homo sapien
tcagctgcggaaacctgcgccgacg

SEQ ID NO: 1729590 - DNA, 25 bp, Homo sapien
gggagtggagggacgcccgttgcca

SEQ ID NO: 1729591 - DNA, 25 bp, Homo sapien
agcatgcgcagtgccggtgctgccc

SEQ ID NO: 1729592 - DNA, 25 bp, Homo sapien
tgcgggcccggcgtacggcagccat

SEQ ID NO: 1729593 - DNA, 25 bp, Homo sapien
tacggcagccatcttcgcggggcag

SEQ ID NO: 1729594 - DNA, 25 bp, Homo sapien
cagcggcaataactgcgggcccggc

SEQ ID NO: 1729595 - DNA, 25 bp, Homo sapien
gcagggggccagatcggggcgcgct

SEQ ID NO: 1729596 - DNA, 25 bp, Homo sapien
tagcagagttctcggtcggagaagc

SEQ ID NO: 1729597 - DNA, 25 bp, Homo sapien
ttagcagagttctcggtcggagaag

SEQ ID NO: 1729598 - DNA, 25 bp, Homo sapien
gcagagttctcggtcggagaagcgc

SEQ ID NO: 1729599 - DNA, 25 bp, Homo sapien
agagttctcggtcggagaagcgcac

SEQ ID NO: 1729600 - DNA, 25 bp, Homo sapien
gggtgctgggtgtccgggtgtctac

SEQ ID NO: 1729601 - DNA, 25 bp, Homo sapien
ctgggtgtccgggtgtctactcctg

SEQ ID NO: 1729602 - DNA, 25 bp, Homo sapien
ctgctgcgctcgaggggctctccgt

SEQ ID NO: 1729603 - DNA, 25 bp, Homo sapien
tccgggtgtctactcctgcctgtct

SEQ ID NO: 1729604 - DNA, 25 bp, Homo sapien
gatttatgattaatctaattaggta

SEQ ID NO: 1729605 - DNA, 25 bp, Homo sapien
caagtctattactattcataaatga

SEQ ID NO: 1729606 - DNA, 25 bp, Homo sapien
tcattaatatacataactactgata

SEQ ID NO: 1729607 - DNA, 25 bp, Homo sapien
taacaattcaagtctattactattc

SEQ ID NO: 1729608 - DNA, 25 bp, Homo sapien
actgtcaacactttgtggaacccac

SEQ ID NO: 1729609 - DNA, 25 bp, Homo sapien
tgagaccttactattaatttccaaa

SEQ ID NO: 1729610 - DNA, 25 bp, Homo sapien
agttgccctctgcaatctacatttc

SEQ ID NO: 1729611 - DNA, 25 bp, Homo sapien
tctatttagtaccatactgtcaaca

SEQ ID NO: 1729612 - DNA, 25 bp, Homo sapien
ggaaaacccaaataatgtcaggcat

SEQ ID NO: 1729613 - DNA, 25 bp, Homo sapien
gggaaaacccaaataatgtcaggca

SEQ ID NO: 1729614 - DNA, 25 bp, Homo sapien
gacagtatcagaatgacaatcttcc

SEQ ID NO: 1729615 - DNA, 25 bp, Homo sapien
catcatcatctgctctgacagtatc

SEQ ID NO: 1729616 - DNA, 25 bp, Homo sapien
tcagaatgacaatcttcctcagctt

SEQ ID NO: 1729617 - DNA, 25 bp, Homo sapien
tctgctctgacagtatcagaatgac

SEQ ID NO: 1729618 - DNA, 25 bp, Homo sapien
atgtatgggaacaatggaataaaaa

SEQ ID NO: 1729619 - DNA, 25 bp, Homo sapien
tatgtatgggaacaatggaataaaa

SEQ ID NO: 1729620 - DNA, 25 bp, Homo sapien
catatgtatgggaacaatggaataa

SEQ ID NO: 1729621 - DNA, 25 bp, Homo sapien
gcatatgtatgggaacaatggaata

SEQ ID NO: 1729622 - DNA, 25 bp, Homo sapien
caaacatccactgagctcggaacat

SEQ ID NO: 1729623 - DNA, 25 bp, Homo sapien
acctggagcaagttcaaacatccac

SEQ ID NO: 1729624 - DNA, 25 bp, Homo sapien
tggagcaagttcaaacatccactga

SEQ ID NO: 1729625 - DNA, 25 bp, Homo sapien
aagttcaaacatccactgagctcgg

SEQ ID NO: 1729626 - DNA, 25 bp, Homo sapien
tgcaaggtcgattttctaaattgct

SEQ ID NO: 1729627 - DNA, 25 bp, Homo sapien
tatctgccgatgttttctggagaga

SEQ ID NO: 1729628 - DNA, 25 bp, Homo sapien
ttcctttggtatctgccgatgtttt

SEQ ID NO: 1729629 - DNA, 25 bp, Homo sapien
ttggtatctgccgatgttttctgga

SEQ ID NO: 1729630 - DNA, 25 bp, Homo sapien
caagatatgtgtttatgtcccgaaa

SEQ ID NO: 1729631 - DNA, 25 bp, Homo sapien
ccatgcaggagtagtggtaccatcc

SEQ ID NO: 1729632 - DNA, 25 bp, Homo sapien
cccgaaagtctggttataatgccta

SEQ ID NO: 1729633 - DNA, 25 bp, Homo sapien
caatgaagacagtgtacccacagag

SEQ ID NO: 1729634 - DNA, 25 bp, Homo sapien
cttcatagagagctccattttgttc

SEQ ID NO: 1729635 - DNA, 25 bp, Homo sapien
aagacacagagttgaggaaaattaa

SEQ ID NO: 1729636 - DNA, 25 bp, Homo sapien
cagctgcctcttatttacctaagta

SEQ ID NO: 1729637 - DNA, 25 bp, Homo sapien
aatttaacttcttttagcccagctg

SEQ ID NO: 1729638 - DNA, 25 bp, Homo sapien
cttcttttagcccagctgcctctta

SEQ ID NO: 1729639 - DNA, 25 bp, Homo sapien
caccatctggagaccgggtataagt

SEQ ID NO: 1729640 - DNA, 25 bp, Homo sapien
aagtaatcttgaactctatatcagg

SEQ ID NO: 1729641 - DNA, 25 bp, Homo sapien
gagaccgggtataagtaatcttgaa

SEQ ID NO: 1729642 - DNA, 25 bp, Homo sapien
actctatatcaggtacaagttgcat

SEQ ID NO: 1729643 - DNA, 25 bp, Homo sapien
tcctgaaatgtgagttgctgctgga

SEQ ID NO: 1729644 - DNA, 25 bp, Homo sapien
tatgtgaatctgactgctctcaagc

SEQ ID NO: 1729645 - DNA, 25 bp, Homo sapien
tgctggaagtaggacaagagatctg

SEQ ID NO: 1729646 - DNA, 25 bp, Homo sapien
cagtttaagcacagactcctgaaat

SEQ ID NO: 1729647 - DNA, 25 bp, Homo sapien
caccatattctgaactaaagcagca

SEQ ID NO: 1729648 - DNA, 25 bp, Homo sapien
gttatctggcaaattatctgacctt

SEQ ID NO: 1729649 - DNA, 25 bp, Homo sapien
taagatatttctcactgagttatga

SEQ ID NO: 1729650 - DNA, 25 bp, Homo sapien
taactagatcttccaccatattctg

SEQ ID NO: 1729651 - DNA, 25 bp, Homo sapien
ctttactgaaaaaggtatggcatcc

SEQ ID NO: 1729652 - DNA, 25 bp, Homo sapien
tactgaaaaaggtatggcatcctta

SEQ ID NO: 1729653 - DNA, 25 bp, Homo sapien
ggcatccttaaacaacagcactaca

SEQ ID NO: 1729654 - DNA, 25 bp, Homo sapien
aaggtatggcatccttaaacaacag

SEQ ID NO: 1729655 - DNA, 25 bp, Homo sapien
caggacaattgtccaacatggctga

SEQ ID NO: 1729656 - DNA, 25 bp, Homo sapien
gtccaacatggctgaaatgcttcat

SEQ ID NO: 1729657 - DNA, 25 bp, Homo sapien
gcttcatgataccagtattcctcca

SEQ ID NO: 1729658 - DNA, 25 bp, Homo sapien
gacaattgtccaacatggctgaaat

SEQ ID NO: 1729659 - DNA, 25 bp, Homo sapien
tcagtatagatctgaagctactttt

SEQ ID NO: 1729660 - DNA, 25 bp, Homo sapien
gtgtgtgtgatccatattgcatcta

SEQ ID NO: 1729661 - DNA, 25 bp, Homo sapien
tgtcctcctctgaaaaagccccgaa

SEQ ID NO: 1729662 - DNA, 25 bp, Homo sapien
ctcaataataataatggttcttaac

SEQ ID NO: 1729663 - DNA, 25 bp, Homo sapien
ctctatgtcattctattgtcacaac

SEQ ID NO: 1729664 - DNA, 25 bp, Homo sapien
gtcacaactacattcccagtacatt

SEQ ID NO: 1729665 - DNA, 25 bp, Homo sapien
tctattgtcacaactacattcccag

SEQ ID NO: 1729666 - DNA, 25 bp, Homo sapien
tattgtcacaactacattcccagta

SEQ ID NO: 1729667 - DNA, 25 bp, Homo sapien
ccatcggaagatgtacatcaggacc

SEQ ID NO: 1729668 - DNA, 25 bp, Homo sapien
tgaggtccaagtcactagacaccac

SEQ ID NO: 1729669 - DNA, 25 bp, Homo sapien
ctctgcacaccagcgacaactgctc

SEQ ID NO: 1729670 - DNA, 25 bp, Homo sapien
caactgctccaatgatctgaggtcc

SEQ ID NO: 1729671 - DNA, 25 bp, Homo sapien
caagtaattttatcaggattggcaa

SEQ ID NO: 1729672 - DNA, 25 bp, Homo sapien
taagctagcatgtaaactctatggt

SEQ ID NO: 1729673 - DNA, 25 bp, Homo sapien
gctttaactcagaacaccaatcaag

SEQ ID NO: 1729674 - DNA, 25 bp, Homo sapien
tattctataccctagaaacctagca

SEQ ID NO: 1729675 - DNA, 25 bp, Homo sapien
tccaggattggactacaacacgcca

SEQ ID NO: 1729676 - DNA, 25 bp, Homo sapien
tttcctccaggattggactacaaca

SEQ ID NO: 1729677 - DNA, 25 bp, Homo sapien
ctgttgttatccacacgtacaccgg

SEQ ID NO: 1729678 - DNA, 25 bp, Homo sapien
cggactgtttgatgaattctcctag

SEQ ID NO: 1729679 - DNA, 25 bp, Homo sapien
actctacttccacggcttgcctttt

SEQ ID NO: 1729680 - DNA, 25 bp, Homo sapien
tgagcactctacttccacggcttgc

SEQ ID NO: 1729681 - DNA, 25 bp, Homo sapien
gctctgagcactctacttccacggc

SEQ ID NO: 1729682 - DNA, 25 bp, Homo sapien
tctgagcactctacttccacggctt

SEQ ID NO: 1729683 - DNA, 25 bp, Homo sapien
atcatgaatgtgaagaaaatcctga

SEQ ID NO: 1729684 - DNA, 25 bp, Homo sapien
ttacctccctgaataagcacatggt

SEQ ID NO: 1729685 - DNA, 25 bp, Homo sapien
ggcatgtgtattcccattgtgatgc

SEQ ID NO: 1729686 - DNA, 25 bp, Homo sapien
tgcctgtgcaaacttgaactggcat

SEQ ID NO: 1729687 - DNA, 25 bp, Homo sapien
aattagatgtaaacgaccactgcac

SEQ ID NO: 1729688 - DNA, 25 bp, Homo sapien
aagctaggcaaattaagcagtggga

SEQ ID NO: 1729689 - DNA, 25 bp, Homo sapien
gatgtaaacgaccactgcactcaga

SEQ ID NO: 1729690 - DNA, 25 bp, Homo sapien
tgatcaattagatgtaaacgaccac

SEQ ID NO: 1729691 - DNA, 25 bp, Homo sapien
gaatatttgcttaaccaattctttc

SEQ ID NO: 1729692 - DNA, 25 bp, Homo sapien
agattgaaaaagataagtcccctca

SEQ ID NO: 1729693 - DNA, 25 bp, Homo sapien
agcaaaaactatttagatcggtgtc

SEQ ID NO: 1729694 - DNA, 25 bp, Homo sapien
gataagtcccctcaaacttatgtta

SEQ ID NO: 1729695 - DNA, 25 bp, Homo sapien
tccttggagtttactacactgatgc

SEQ ID NO: 1729696 - DNA, 25 bp, Homo sapien
ggagtttactacactgatgctgaac

SEQ ID NO: 1729697 - DNA, 25 bp, Homo sapien
cttggagtttactacactgatgctg

SEQ ID NO: 1729698 - DNA, 25 bp, Homo sapien
gctccttggagtttactacactgat

SEQ ID NO: 1729699 - DNA, 25 bp, Homo sapien
gaaactaatggacaaggcaaaggcc

SEQ ID NO: 1729700 - DNA, 25 bp, Homo sapien
gaccaggtaggatgccactatgtaa

SEQ ID NO: 1729701 - DNA, 25 bp, Homo sapien
tctggtagtacgcttagtgcaaaaa

SEQ ID NO: 1729702 - DNA, 25 bp, Homo sapien
gataagtatctcaggcagcaaccag

SEQ ID NO: 1729703 - DNA, 25 bp, Homo sapien
ccaaactttcaagcaggccagacgc

SEQ ID NO: 1729704 - DNA, 25 bp, Homo sapien
catcaaaccgaacacgaggccgttc

SEQ ID NO: 1729705 - DNA, 25 bp, Homo sapien
tctccaggacgtgtacggaacaagt

SEQ ID NO: 1729706 - DNA, 25 bp, Homo sapien
caagtttaatacagcttctgcccca

SEQ ID NO: 1729707 - DNA, 25 bp, Homo sapien
tattcccagcattatatttactgtg

SEQ ID NO: 1729708 - DNA, 25 bp, Homo sapien
tggtttcctttaaacatgcttacag

SEQ ID NO: 1729709 - DNA, 25 bp, Homo sapien
gctgagttctacagaatccaactta

SEQ ID NO: 1729710 - DNA, 25 bp, Homo sapien
catcacagaaaatttaaacggcgta

SEQ ID NO: 1729711 - DNA, 25 bp, Homo sapien
ccaggctctatagaaaccatcaaga

SEQ ID NO: 1729712 - DNA, 25 bp, Homo sapien
ccttgacgaatatatgtggttttac

SEQ ID NO: 1729713 - DNA, 25 bp, Homo sapien
aaaccatcaagagactgttcccctt

SEQ ID NO: 1729714 - DNA, 25 bp, Homo sapien
caagagactgttccccttgacgaat

SEQ ID NO: 1729715 - DNA, 25 bp, Homo sapien
ccaacactgaaataccacgggctaa

SEQ ID NO: 1729716 - DNA, 25 bp, Homo sapien
gagggccattttgcgggtcaatcaa

SEQ ID NO: 1729717 - DNA, 25 bp, Homo sapien
tgagagccacacacaacggttaaca

SEQ ID NO: 1729718 - DNA, 25 bp, Homo sapien
ctagataaaaatactgagggccatt

SEQ ID NO: 1729719 - DNA, 25 bp, Homo sapien
gaacaatggactgaggctcttcagg

SEQ ID NO: 1729720 - DNA, 25 bp, Homo sapien
gccatcaggaaagaatcttatgtac

SEQ ID NO: 1729721 - DNA, 25 bp, Homo sapien
ctggtattcctagttcttaaacgtg

SEQ ID NO: 1729722 - DNA, 25 bp, Homo sapien
tcttaaacgtggaacaatggactga

SEQ ID NO: 1729723 - DNA, 25 bp, Homo sapien
ggtctgattgtctgtgtcttgtgac

SEQ ID NO: 1729724 - DNA, 25 bp, Homo sapien
tacagcaaatactttggtctgattg

SEQ ID NO: 1729725 - DNA, 25 bp, Homo sapien
caagcgatagtgacccagtagaatt

SEQ ID NO: 1729726 - DNA, 25 bp, Homo sapien
gtcttgtgacaagcgatagtgaccc

SEQ ID NO: 1729727 - DNA, 25 bp, Homo sapien
cagtgattgctagaagttaatatac

SEQ ID NO: 1729728 - DNA, 25 bp, Homo sapien
cctgtgattcgacatgagcagagcc

SEQ ID NO: 1729729 - DNA, 25 bp, Homo sapien
tgttgttctaatcgagactgcttgg

SEQ ID NO: 1729730 - DNA, 25 bp, Homo sapien
tagttatttcacaagagatttcagc

SEQ ID NO: 1729731 - DNA, 25 bp, Homo sapien
aaaacgtgcatatggagaaaggtga

SEQ ID NO: 1729732 - DNA, 25 bp, Homo sapien
ttttaaccaggattgaaaacgtgca

SEQ ID NO: 1729733 - DNA, 25 bp, Homo sapien
aactggcttcttgggtacatataac

SEQ ID NO: 1729734 - DNA, 25 bp, Homo sapien
gtgaaaaaattaggctaccaatctg

SEQ ID NO: 1729735 - DNA, 25 bp, Homo sapien
gcagtcacagtcaaagcaactctct

SEQ ID NO: 1729736 - DNA, 25 bp, Homo sapien
caggagcccatcagagggaagtgga

SEQ ID NO: 1729737 - DNA, 25 bp, Homo sapien
tggagacgccagcaacaggtggcca

SEQ ID NO: 1729738 - DNA, 25 bp, Homo sapien
ggtgataggactcgcagatgaaact

SEQ ID NO: 1729739 - DNA, 25 bp, Homo sapien
caagaatgtatgagtgctttaaaaa

SEQ ID NO: 1729740 - DNA, 25 bp, Homo sapien
actatcacaagaatgtatgagtgct

SEQ ID NO: 1729741 - DNA, 25 bp, Homo sapien
cacaagaatgtatgagtgctttaaa

SEQ ID NO: 1729742 - DNA, 25 bp, Homo sapien
tatcacaagaatgtatgagtgcttt

SEQ ID NO: 1729743 - DNA, 25 bp, Homo sapien
ataatgaaaccttacctcacttcta

SEQ ID NO: 1729744 - DNA, 25 bp, Homo sapien
taatgaaaccttacctcacttctat

SEQ ID NO: 1729745 - DNA, 25 bp, Homo sapien
cagatgagtttgttgaacctctggt

SEQ ID NO: 1729746 - DNA, 25 bp, Homo sapien
catgaaaactctgatctgcttcttg

SEQ ID NO: 1729747 - DNA, 25 bp, Homo sapien
tctggtgaccactggaacatagctg

SEQ ID NO: 1729748 - DNA, 25 bp, Homo sapien
tgtacagggacacgacgaaaatatc

SEQ ID NO: 1729749 - DNA, 25 bp, Homo sapien
taatgcctctggtaatgtccttttt

SEQ ID NO: 1729750 - DNA, 25 bp, Homo sapien
aaccatccattgttcatttgcttgg

SEQ ID NO: 1729751 - DNA, 25 bp, Homo sapien
tgggacttcaagatgcataccacca

SEQ ID NO: 1729752 - DNA, 25 bp, Homo sapien
gacaaacgaaagcagagaattcaag

SEQ ID NO: 1729753 - DNA, 25 bp, Homo sapien
tacatcttgtcaatctcaaaagcac

SEQ ID NO: 1729754 - DNA, 25 bp, Homo sapien
tctggcgaagaacaagggggtgtac

SEQ ID NO: 1729755 - DNA, 25 bp, Homo sapien
caagggggtgtacatcttgtcaatc

SEQ ID NO: 1729756 - DNA, 25 bp, Homo sapien
gggtgtacatcttgtcaatctcaaa

SEQ ID NO: 1729757 - DNA, 25 bp, Homo sapien
gaggcctttctgagaaagctgtgta

SEQ ID NO: 1729758 - DNA, 25 bp, Homo sapien
ttctgagaaagctgtgtagctcctt

SEQ ID NO: 1729759 - DNA, 25 bp, Homo sapien
ctacagaggcctttctgagaaagct

SEQ ID NO: 1729760 - DNA, 25 bp, Homo sapien
ctttctgagaaagctgtgtagctcc

SEQ ID NO: 1729761 - DNA, 25 bp, Homo sapien
gtgatagaggactggacttgaggct

SEQ ID NO: 1729762 - DNA, 25 bp, Homo sapien
ctgcttgaaaaagggcatgataaac

SEQ ID NO: 1729763 - DNA, 25 bp, Homo sapien
catattaaggtttctcacaacataa

SEQ ID NO: 1729764 - DNA, 25 bp, Homo sapien
gaaaaagggcatgataaacctcata

SEQ ID NO: 1729765 - DNA, 25 bp, Homo sapien
ccaggaatcaactatccctttaaat

SEQ ID NO: 1729766 - DNA, 25 bp, Homo sapien
gaagacgacttatgtgacagaaatc

SEQ ID NO: 1729767 - DNA, 25 bp, Homo sapien
aaaacattatgccatgcgggaaata

SEQ ID NO: 1729768 - DNA, 25 bp, Homo sapien
ggagcgctcccctgatgcattgaaa

SEQ ID NO: 1729769 - DNA, 25 bp, Homo sapien
aaatgcttatccagtggagcgctcc

SEQ ID NO: 1729770 - DNA, 25 bp, Homo sapien
taaagtctccgctggctatctagga

SEQ ID NO: 1729771 - DNA, 25 bp, Homo sapien
cactaataggactgttactgggcag

SEQ ID NO: 1729772 - DNA, 25 bp, Homo sapien
taacatacagttttcctaggtggct

SEQ ID NO: 1729773 - DNA, 25 bp, Homo sapien
caattaaaagtaacagtggctgcag

SEQ ID NO: 1729774 - DNA, 25 bp, Homo sapien
ttcaaggctaatgctttcccctggg

SEQ ID NO: 1729775 - DNA, 25 bp, Homo sapien
tgtaactgaagtctacactcccagc

SEQ ID NO: 1729776 - DNA, 25 bp, Homo sapien
gatcattcaatctagggatgttgca

SEQ ID NO: 1729777 - DNA, 25 bp, Homo sapien
ttaaacatgatggtgctcaggccag

SEQ ID NO: 1729778 - DNA, 25 bp, Homo sapien
tacttcttagaaacatcttaaagta

SEQ ID NO: 1729779 - DNA, 25 bp, Homo sapien
aaagtaataatacaagaagtatgca

SEQ ID NO: 1729780 - DNA, 25 bp, Homo sapien
actctttgattcagtcattctactt

SEQ ID NO: 1729781 - DNA, 25 bp, Homo sapien
tctttgattcagtcattctacttct

SEQ ID NO: 1729782 - DNA, 25 bp, Homo sapien
catcttctaaaaactctgagctcat

SEQ ID NO: 1729783 - DNA, 25 bp, Homo sapien
cctagtgacaccatcttctaaaaac

SEQ ID NO: 1729784 - DNA, 25 bp, Homo sapien
gacaccatcttctaaaaactctgag

SEQ ID NO: 1729785 - DNA, 25 bp, Homo sapien
caccatcttctaaaaactctgagct

SEQ ID NO: 1729786 - DNA, 25 bp, Homo sapien
tatgtggccttgaccccagatggca

SEQ ID NO: 1729787 - DNA, 25 bp, Homo sapien
cagtcattgcttttgtccacctgtc

SEQ ID NO: 1729788 - DNA, 25 bp, Homo sapien
ggtgaaggcaattggctgaggtgct

SEQ ID NO: 1729789 - DNA, 25 bp, Homo sapien
ctggacttagacatctgggctgggt

SEQ ID NO: 1729790 - DNA, 25 bp, Homo sapien
gattttaacagctacgtccagtctc

SEQ ID NO: 1729791 - DNA, 25 bp, Homo sapien
tgtgtcctttgagatgacccaaatc

SEQ ID NO: 1729792 - DNA, 25 bp, Homo sapien
ccaagcaagagcagcaaatgggatt

SEQ ID NO: 1729793 - DNA, 25 bp, Homo sapien
gacatacttgggtttggatcactgc

SEQ ID NO: 1729794 - DNA, 25 bp, Homo sapien
cctgagtaaagctgagaaaggtgcc

SEQ ID NO: 1729795 - DNA, 25 bp, Homo sapien
gcagcttgaaagtatagagcccctg

SEQ ID NO: 1729796 - DNA, 25 bp, Homo sapien
cagatggtgcatcagagggctgggc

SEQ ID NO: 1729797 - DNA, 25 bp, Homo sapien
gctttatctgtgaagagggctcaga

SEQ ID NO: 1729798 - DNA, 25 bp, Homo sapien
ttcttcccgccttcgaggccggaca

SEQ ID NO: 1729799 - DNA, 25 bp, Homo sapien
tcttcccgccttcgaggccggacat

SEQ ID NO: 1729800 - DNA, 25 bp, Homo sapien
acccatgttcagggagagggccctt

SEQ ID NO: 1729801 - DNA, 25 bp, Homo sapien
cacccatgttcagggagagggccct

SEQ ID NO: 1729802 - DNA, 25 bp, Homo sapien
tcacccatgttcagggagagggccc

SEQ ID NO: 1729803 - DNA, 25 bp, Homo sapien
ctaagggataggtcagcaagccctt

SEQ ID NO: 1729804 - DNA, 25 bp, Homo sapien
taagggataggtcagcaagcccttg

SEQ ID NO: 1729805 - DNA, 25 bp, Homo sapien
gctaagggataggtcagcaagccct

SEQ ID NO: 1729806 - DNA, 25 bp, Homo sapien
ggctaagggataggtcagcaagccc

SEQ ID NO: 1729807 - DNA, 25 bp, Homo sapien
ctggctcagagtcaagaacgtcctc

SEQ ID NO: 1729808 - DNA, 25 bp, Homo sapien
tactgctcgaatttgtaagcacccc

SEQ ID NO: 1729809 - DNA, 25 bp, Homo sapien
ctccctcacacaggagccctgagct

SEQ ID NO: 1729810 - DNA, 25 bp, Homo sapien
cctcctctcttactgctcgaatttg

SEQ ID NO: 1729811 - DNA, 25 bp, Homo sapien
tctgcaactgattcctgaaaaggga

SEQ ID NO: 1729812 - DNA, 25 bp, Homo sapien
tttgagatgcaacaacgaaactagc

SEQ ID NO: 1729813 - DNA, 25 bp, Homo sapien
gatcgccatcaagcggaacacagtt

SEQ ID NO: 1729814 - DNA, 25 bp, Homo sapien
tcaccttggtgggaggagttctaga

SEQ ID NO: 1729815 - DNA, 25 bp, Homo sapien
ttgatctcctcttgatttgaccaga

SEQ ID NO: 1729816 - DNA, 25 bp, Homo sapien
tgttttgtgatttcgcttcagaggg

SEQ ID NO: 1729817 - DNA, 25 bp, Homo sapien
ttgttttgtgatttcgcttcagagg

SEQ ID NO: 1729818 - DNA, 25 bp, Homo sapien
ctcctcttgatttgaccagaacacc

SEQ ID NO: 1729819 - DNA, 25 bp, Homo sapien
gagctgccttttcaacagctgtcat

SEQ ID NO: 1729820 - DNA, 25 bp, Homo sapien
tgagctgccttttcaacagctgtca

SEQ ID NO: 1729821 - DNA, 25 bp, Homo sapien
gatgatgtaagtgatgtcaaggccc

SEQ ID NO: 1729822 - DNA, 25 bp, Homo sapien
gcctgagaacctggagtccggtgat

SEQ ID NO: 1729823 - DNA, 25 bp, Homo sapien
ggaagggcagagtaaagccatgcct

SEQ ID NO: 1729824 - DNA, 25 bp, Homo sapien
tcaaggcccaaagtgcctgtgtggc

SEQ ID NO: 1729825 - DNA, 25 bp, Homo sapien
ctgggcagggcttgcggagagagaa

SEQ ID NO: 1729826 - DNA, 25 bp, Homo sapien
agaactagaggagaagccactctgg

SEQ ID NO: 1729827 - DNA, 25 bp, Homo sapien
tgggcagggcttgcggagagagaag

SEQ ID NO: 1729828 - DNA, 25 bp, Homo sapien
tgcagccctgggcctagaactagag

SEQ ID NO: 1729829 - DNA, 25 bp, Homo sapien
caggcctctcctagccctgagcact

SEQ ID NO: 1729830 - DNA, 25 bp, Homo sapien
ccatcagcatgacagaatccttttc

SEQ ID NO: 1729831 - DNA, 25 bp, Homo sapien
gcactctgccatttgtctttttccc

SEQ ID NO: 1729832 - DNA, 25 bp, Homo sapien
cctcctttctggaatcatcctggga

SEQ ID NO: 1729833 - DNA, 25 bp, Homo sapien
ctagtgcttcggctgcaatgaggag

SEQ ID NO: 1729834 - DNA, 25 bp, Homo sapien
tgggaagggacgcatcagtggaggt

SEQ ID NO: 1729835 - DNA, 25 bp, Homo sapien
gccgtgggaagggacgcatcagtgg

SEQ ID NO: 1729836 - DNA, 25 bp, Homo sapien
gtctcagagatggtccccggaaaag

SEQ ID NO: 1729837 - DNA, 25 bp, Homo sapien
cggagggcaatggatgagactcacc

SEQ ID NO: 1729838 - DNA, 25 bp, Homo sapien
tccggagggcaatggatgagactca

SEQ ID NO: 1729839 - DNA, 25 bp, Homo sapien
cggcggaaagcgtggacacagtccc

SEQ ID NO: 1729840 - DNA, 25 bp, Homo sapien
gaaagcgtggacacagtcccccatt

SEQ ID NO: 1729841 - DNA, 25 bp, Homo sapien
ggtgagcattcatgagcaacttcct

SEQ ID NO: 1729842 - DNA, 25 bp, Homo sapien
taaagtaagtgggtgagcattcatg

SEQ ID NO: 1729843 - DNA, 25 bp, Homo sapien
ctctttaaagtaagtgggtgagcat

SEQ ID NO: 1729844 - DNA, 25 bp, Homo sapien
taagtgggtgagcattcatgagcaa

SEQ ID NO: 1729845 - DNA, 25 bp, Homo sapien
aatggctgcatcaacaaggtttgga

SEQ ID NO: 1729846 - DNA, 25 bp, Homo sapien
tctgcaatcggagtgcatgtccagg

SEQ ID NO: 1729847 - DNA, 25 bp, Homo sapien
aggtggtcctgcctggcatccgctt

SEQ ID NO: 1729848 - DNA, 25 bp, Homo sapien
tctgtgccgtagcagcatgataacc

SEQ ID NO: 1729849 - DNA, 25 bp, Homo sapien
tggcctctgcattcttgtgtctgtc

SEQ ID NO: 1729850 - DNA, 25 bp, Homo sapien
aaggaagcagccaggtaagtcattg

SEQ ID NO: 1729851 - DNA, 25 bp, Homo sapien
cacattgtgttagggcagctctggc

SEQ ID NO: 1729852 - DNA, 25 bp, Homo sapien
tgttgcgagccgttctcccgttcca

SEQ ID NO: 1729853 - DNA, 25 bp, Homo sapien
tcagggtacagggtgaacgcaagta

SEQ ID NO: 1729854 - DNA, 25 bp, Homo sapien
ggtacagggtgaacgcaagtaagaa

SEQ ID NO: 1729855 - DNA, 25 bp, Homo sapien
tcattcagggtacagggtgaacgca

SEQ ID NO: 1729856 - DNA, 25 bp, Homo sapien
ggtgaacgcaagtaagaattctaaa

SEQ ID NO: 1729857 - DNA, 25 bp, Homo sapien
cacagaggcgattgagagttgctca

SEQ ID NO: 1729858 - DNA, 25 bp, Homo sapien
tgtaatcccagaagcagaagggacc

SEQ ID NO: 1729859 - DNA, 25 bp, Homo sapien
tttagctctggccacaatatccggt

SEQ ID NO: 1729860 - DNA, 25 bp, Homo sapien
catgaagcccatatttgtagcggac

SEQ ID NO: 1729861 - DNA, 25 bp, Homo sapien
cagtgcataggaatttatgcagcag

SEQ ID NO: 1729862 - DNA, 25 bp, Homo sapien
ggctaacatgtctagtcttccaagg

SEQ ID NO: 1729863 - DNA, 25 bp, Homo sapien
ttgcccttgtagaaagagggctaac

SEQ ID NO: 1729864 - DNA, 25 bp, Homo sapien
acatccagtgcataggaatttatgc

SEQ ID NO: 1729865 - DNA, 25 bp, Homo sapien
cacactacttttgctttaagacttt

SEQ ID NO: 1729866 - DNA, 25 bp, Homo sapien
tgcctggaattgcacactgacacac

SEQ ID NO: 1729867 - DNA, 25 bp, Homo sapien
taagactttcaatgtgagggcttgc

SEQ ID NO: 1729868 - DNA, 25 bp, Homo sapien
cttgcagaagataacagtttgtcca

SEQ ID NO: 1729869 - DNA, 25 bp, Homo sapien
tcctgcagcattcaccgagggcctt

SEQ ID NO: 1729870 - DNA, 25 bp, Homo sapien
tccccaacccttgcttgcaatcctg

SEQ ID NO: 1729871 - DNA, 25 bp, Homo sapien
gagggccttcgcagctccaggcatc

SEQ ID NO: 1729872 - DNA, 25 bp, Homo sapien
agaagcatgctgctctccccaaccc

SEQ ID NO: 1729873 - DNA, 25 bp, Homo sapien
tgcacattcgtactatagggagcct

SEQ ID NO: 1729874 - DNA, 25 bp, Homo sapien
gcagtggtcaaacaggtaaagccta

SEQ ID NO: 1729875 - DNA, 25 bp, Homo sapien
tgacagagtcccgtagatgagcaat

SEQ ID NO: 1729876 - DNA, 25 bp, Homo sapien
gctgtcaaagtgtgcttagctcacc

SEQ ID NO: 1729877 - DNA, 25 bp, Homo sapien
caagcaggctcaaatctagtggaac

SEQ ID NO: 1729878 - DNA, 25 bp, Homo sapien
tgatgtgaaatcagacacggcacct

SEQ ID NO: 1729879 - DNA, 25 bp, Homo sapien
cagcagtcgtgatgaaacttaaata

SEQ ID NO: 1729880 - DNA, 25 bp, Homo sapien
caattttgctttccaccagtgcgag

SEQ ID NO: 1729881 - DNA, 25 bp, Homo sapien
ctgcactgtgggacatacaccagct

SEQ ID NO: 1729882 - DNA, 25 bp, Homo sapien
tgaaaggataggacccgatgaagct

SEQ ID NO: 1729883 - DNA, 25 bp, Homo sapien
cagtgaggaacttttgaagacgaac

SEQ ID NO: 1729884 - DNA, 25 bp, Homo sapien
tcatgaaggctgagatagtcgccga

SEQ ID NO: 1729885 - DNA, 25 bp, Homo sapien
tggcaggtatggatgacccctcagc

SEQ ID NO: 1729886 - DNA, 25 bp, Homo sapien
tatgtgtagcccattactaggcagc

SEQ ID NO: 1729887 - DNA, 25 bp, Homo sapien
tcccctggtttactgccagggccag

SEQ ID NO: 1729888 - DNA, 25 bp, Homo sapien
accatccttgattaagccttctgca

SEQ ID NO: 1729889 - DNA, 25 bp, Homo sapien
catgggcatacagctagttgaattg

SEQ ID NO: 1729890 - DNA, 25 bp, Homo sapien
accatgggcatacagctagttgaat

SEQ ID NO: 1729891 - DNA, 25 bp, Homo sapien
tgggcatacagctagttgaattgta

SEQ ID NO: 1729892 - DNA, 25 bp, Homo sapien
ccatgggcatacagctagttgaatt

SEQ ID NO: 1729893 - DNA, 25 bp, Homo sapien
cagtgtttgtcagctccgttggaag

SEQ ID NO: 1729894 - DNA, 25 bp, Homo sapien
gcttcagtgtcagatgcccctctag

SEQ ID NO: 1729895 - DNA, 25 bp, Homo sapien
tgcagtcctgggaaataattagaag

SEQ ID NO: 1729896 - DNA, 25 bp, Homo sapien
taattagaagatggcttcagagacc

SEQ ID NO: 1729897 - DNA, 25 bp, Homo sapien
cagagaagccgtgaggataagcctt

SEQ ID NO: 1729898 - DNA, 25 bp, Homo sapien
ttagattatccgtgtcctctggtgg

SEQ ID NO: 1729899 - DNA, 25 bp, Homo sapien
tcagaggtgatattccagagaagcc

SEQ ID NO: 1729900 - DNA, 25 bp, Homo sapien
cgggcttctccgagttgacatcaga

SEQ ID NO: 1729901 - DNA, 25 bp, Homo sapien
aggagaggcccttcctataccagta

SEQ ID NO: 1729902 - DNA, 25 bp, Homo sapien
ggtcttcgctctcatgctactactc

SEQ ID NO: 1729903 - DNA, 25 bp, Homo sapien
agtatctcctctggatccgcctagg

SEQ ID NO: 1729904 - DNA, 25 bp, Homo sapien
catgctactactcctcagtttgtta

SEQ ID NO: 1729905 - DNA, 25 bp, Homo sapien
gatttcagcttcacggaaagagttt

SEQ ID NO: 1729906 - DNA, 25 bp, Homo sapien
cactgagatttcagcttcacggaaa

SEQ ID NO: 1729907 - DNA, 25 bp, Homo sapien
gagatttcagcttcacggaaagagt

SEQ ID NO: 1729908 - DNA, 25 bp, Homo sapien
cagcttcacggaaagagtttttatg

SEQ ID NO: 1729909 - DNA, 25 bp, Homo sapien
ccagacggagtggaggacagaaggc

SEQ ID NO: 1729910 - DNA, 25 bp, Homo sapien
gacggagtggaggacagaaggcctc

SEQ ID NO: 1729911 - DNA, 25 bp, Homo sapien
ctgggcaccagacggagtggaggac

SEQ ID NO: 1729912 - DNA, 25 bp, Homo sapien
caccagacggagtggaggacagaag

SEQ ID NO: 1729913 - DNA, 25 bp, Homo sapien
gaatgaaaagggcacgttgctggca

SEQ ID NO: 1729914 - DNA, 25 bp, Homo sapien
catgtggcatagcagatgaggctca

SEQ ID NO: 1729915 - DNA, 25 bp, Homo sapien
tctgaaaggtctcaagaaagctctc

SEQ ID NO: 1729916 - DNA, 25 bp, Homo sapien
cagtgtgagcagataaggattggca

SEQ ID NO: 1729917 - DNA, 25 bp, Homo sapien
tcactgcagccagcaccgcctgggc

SEQ ID NO: 1729918 - DNA, 25 bp, Homo sapien
tgcagccagcaccgcctgggctcaa

SEQ ID NO: 1729919 - DNA, 25 bp, Homo sapien
tgcccaggctggaagtatgtgcttt

SEQ ID NO: 1729920 - DNA, 25 bp, Homo sapien
ccttctgagtagctgcagccacagg

SEQ ID NO: 1729921 - DNA, 25 bp, Homo sapien
cgaaagttctattgtcccgcgattg

SEQ ID NO: 1729922 - DNA, 25 bp, Homo sapien
gatcacgaaagttctattgtcccgc

SEQ ID NO: 1729923 - DNA, 25 bp, Homo sapien
tattgtcccgcgattggctcccggg

SEQ ID NO: 1729924 - DNA, 25 bp, Homo sapien
aaagttctattgtcccgcgattggc

SEQ ID NO: 1729925 - DNA, 25 bp, Homo sapien
cagctttaacgatgaagtggatccc

SEQ ID NO: 1729926 - DNA, 25 bp, Homo sapien
agtggatccccttcagcatgacata

SEQ ID NO: 1729927 - DNA, 25 bp, Homo sapien
gatcttccgtttatgccctgaaccc

SEQ ID NO: 1729928 - DNA, 25 bp, Homo sapien
tacacggtaaatcctttgcaaggga

SEQ ID NO: 1729929 - DNA, 25 bp, Homo sapien
tggggagtcgtttcggctccactgt

SEQ ID NO: 1729930 - DNA, 25 bp, Homo sapien
ttggggagtcgtttcggctccactg

SEQ ID NO: 1729931 - DNA, 25 bp, Homo sapien
catgggctcacattgttggataggt

SEQ ID NO: 1729932 - DNA, 25 bp, Homo sapien
tggataggtgggttagaagggcaag

SEQ ID NO: 1729933 - DNA, 25 bp, Homo sapien
ggtgggttagaagggcaaggatggc

SEQ ID NO: 1729934 - DNA, 25 bp, Homo sapien
ttacatgggctcacattgttggata

SEQ ID NO: 1729935 - DNA, 25 bp, Homo sapien
cattataatgttggaagcataaggg

SEQ ID NO: 1729936 - DNA, 25 bp, Homo sapien
taaattctaattctgcactaactgg

SEQ ID NO: 1729937 - DNA, 25 bp, Homo sapien
ggaaagggagaactgatacttgaat

SEQ ID NO: 1729938 - DNA, 25 bp, Homo sapien
actcttctgtggctcaatttgtttg

SEQ ID NO: 1729939 - DNA, 25 bp, Homo sapien
acctgctatcaatgcgcacacttag

SEQ ID NO: 1729940 - DNA, 25 bp, Homo sapien
cctgctatcaatgcgcacacttaga

SEQ ID NO: 1729941 - DNA, 25 bp, Homo sapien
gctatcaatgcgcacacttagagtt

SEQ ID NO: 1729942 - DNA, 25 bp, Homo sapien
gaacctgctatcaatgcgcacactt

SEQ ID NO: 1729943 - DNA, 25 bp, Homo sapien
gtctgcacatttttgaaagtgctaa

SEQ ID NO: 1729944 - DNA, 25 bp, Homo sapien
catgcacatggactgtctgcacatt

SEQ ID NO: 1729945 - DNA, 25 bp, Homo sapien
tctcatgcacatggactgtctgcac

SEQ ID NO: 1729946 - DNA, 25 bp, Homo sapien
gttctcatgcacatggactgtctgc

SEQ ID NO: 1729947 - DNA, 25 bp, Homo sapien
atttgatgtatttgaggatcagcaa

SEQ ID NO: 1729948 - DNA, 25 bp, Homo sapien
agctccaggtttaggctgaactgcc

SEQ ID NO: 1729949 - DNA, 25 bp, Homo sapien
gatgaacgtcctaaactccagcctg

SEQ ID NO: 1729950 - DNA, 25 bp, Homo sapien
cggagggctcattcacgattataaa

SEQ ID NO: 1729951 - DNA, 25 bp, Homo sapien
cattaacagtctacaacggagggct

SEQ ID NO: 1729952 - DNA, 25 bp, Homo sapien
caacaggaggagtcttttattgttt

SEQ ID NO: 1729953 - DNA, 25 bp, Homo sapien
ggagtaacctttggcgtcaacagaa

SEQ ID NO: 1729954 - DNA, 25 bp, Homo sapien
tcatggaacttaggaggatacaaaa

SEQ ID NO: 1729955 - DNA, 25 bp, Homo sapien
ccctggtgagtgatactttttggaa

SEQ ID NO: 1729956 - DNA, 25 bp, Homo sapien
ttcctgtgggcagaaaagatttctc

SEQ ID NO: 1729957 - DNA, 25 bp, Homo sapien
caactgtaaccttttcctgtgggca

SEQ ID NO: 1729958 - DNA, 25 bp, Homo sapien
tgggcagaaaagatttctcagtcat

SEQ ID NO: 1729959 - DNA, 25 bp, Homo sapien
tgtgggcagaaaagatttctcagtc

SEQ ID NO: 1729960 - DNA, 25 bp, Homo sapien
tctctgagttctagaggcacatgct

SEQ ID NO: 1729961 - DNA, 25 bp, Homo sapien
ctctgagttctagaggcacatgctt

SEQ ID NO: 1729962 - DNA, 25 bp, Homo sapien
tctgagttctagaggcacatgcttt

SEQ ID NO: 1729963 - DNA, 25 bp, Homo sapien
ttctctgagttctagaggcacatgc

SEQ ID NO: 1729964 - DNA, 25 bp, Homo sapien
tgatactaatatgcacatctggagt

SEQ ID NO: 1729965 - DNA, 25 bp, Homo sapien
cctgatactaatatgcacatctgga

SEQ ID NO: 1729966 - DNA, 25 bp, Homo sapien
gatactaatatgcacatctggagtt

SEQ ID NO: 1729967 - DNA, 25 bp, Homo sapien
gcctgatactaatatgcacatctgg

SEQ ID NO: 1729968 - DNA, 25 bp, Homo sapien
ttaaaggttgtgacaggtacatagc

SEQ ID NO: 1729969 - DNA, 25 bp, Homo sapien
tgtgacaggtacatagctaccaaaa

SEQ ID NO: 1729970 - DNA, 25 bp, Homo sapien
gacaggtacatagctaccaaaatac

SEQ ID NO: 1729971 - DNA, 25 bp, Homo sapien
ggttgtgacaggtacatagctacca

SEQ ID NO: 1729972 - DNA, 25 bp, Homo sapien
ttcttgccctccttacaagaattat

SEQ ID NO: 1729973 - DNA, 25 bp, Homo sapien
tcttgccctccttacaagaattatc

SEQ ID NO: 1729974 - DNA, 25 bp, Homo sapien
cttcttgccctccttacaagaatta

SEQ ID NO: 1729975 - DNA, 25 bp, Homo sapien
cttgccctccttacaagaattatct

SEQ ID NO: 1729976 - DNA, 25 bp, Homo sapien
taggctccactgacgcagacatgag

SEQ ID NO: 1729977 - DNA, 25 bp, Homo sapien
gctccctgaatgaactagtctccac

SEQ ID NO: 1729978 - DNA, 25 bp, Homo sapien
gatggtggctaattctcctaactgc

SEQ ID NO: 1729979 - DNA, 25 bp, Homo sapien
cagacatgagcaaagttccaaaaaa

SEQ ID NO: 1729980 - DNA, 25 bp, Homo sapien
ctgaaagtatgcgtcacgtgggtgt

SEQ ID NO: 1729981 - DNA, 25 bp, Homo sapien
tatgcgtcacgtgggtgtctgtatc

SEQ ID NO: 1729982 - DNA, 25 bp, Homo sapien
aaagtatgcgtcacgtgggtgtctg

SEQ ID NO: 1729983 - DNA, 25 bp, Homo sapien
gcgtcacgtgggtgtctgtatctgc

SEQ ID NO: 1729984 - DNA, 25 bp, Homo sapien
cagatgggctggtcgatgaaccaag

SEQ ID NO: 1729985 - DNA, 25 bp, Homo sapien
tccattacgtctaccatgactacag

SEQ ID NO: 1729986 - DNA, 25 bp, Homo sapien
tgggctggtcgatgaaccaagtagc

SEQ ID NO: 1729987 - DNA, 25 bp, Homo sapien
tgactacagtccaagactgctgctg

SEQ ID NO: 1729988 - DNA, 25 bp, Homo sapien
ttcatgaaggggctccattaactca

SEQ ID NO: 1729989 - DNA, 25 bp, Homo sapien
tgaaggggctccattaactcaatga

SEQ ID NO: 1729990 - DNA, 25 bp, Homo sapien
atttcttcatgaaggggctccatta

SEQ ID NO: 1729991 - DNA, 25 bp, Homo sapien
ggctccattaactcaatgattccat

SEQ ID NO: 1729992 - DNA, 25 bp, Homo sapien
gaagggtctcctctaatagtattta

SEQ ID NO: 1729993 - DNA, 25 bp, Homo sapien
acataagatgcacacatgatggttg

SEQ ID NO: 1729994 - DNA, 25 bp, Homo sapien
aaacaagaagggtctcctctaatag

SEQ ID NO: 1729995 - DNA, 25 bp, Homo sapien
acatgatggttgccttggtgcttac

SEQ ID NO: 1729996 - DNA, 25 bp, Homo sapien
taatgggacttaggtgagagctgtc

SEQ ID NO: 1729997 - DNA, 25 bp, Homo sapien
tttataatgggacttaggtgagagc

SEQ ID NO: 1729998 - DNA, 25 bp, Homo sapien
atgggacttaggtgagagctgtcaa

SEQ ID NO: 1729999 - DNA, 25 bp, Homo sapien
tataatgggacttaggtgagagctg

SEQ ID NO: 1730000 - DNA, 25 bp, Homo sapien
aggtcgctttggtggttgttcccag

SEQ ID NO: 1730001 - DNA, 25 bp, Homo sapien
gaggtcgctttggtggttgttccca

SEQ ID NO: 1730002 - DNA, 25 bp, Homo sapien
gtcgctttggtggttgttcccagga

SEQ ID NO: 1730003 - DNA, 25 bp, Homo sapien
cagggggaggtcgctttggtggttg

SEQ ID NO: 1730004 - DNA, 25 bp, Homo sapien
tgtggaggcaccaaaggtggatcat

SEQ ID NO: 1730005 - DNA, 25 bp, Homo sapien
ctatgtggaggcaccaaaggtggat

SEQ ID NO: 1730006 - DNA, 25 bp, Homo sapien
gtggaggcaccaaaggtggatcatc

SEQ ID NO: 1730007 - DNA, 25 bp, Homo sapien
tatgtggaggcaccaaaggtggatc

SEQ ID NO: 1730008 - DNA, 25 bp, Homo sapien
gccgaatcaaggtgggtggtgcact

SEQ ID NO: 1730009 - DNA, 25 bp, Homo sapien
cacactcatatcatccaccttgggt

SEQ ID NO: 1730010 - DNA, 25 bp, Homo sapien
gaaaatcgcagggtttagcaaggga

SEQ ID NO: 1730011 - DNA, 25 bp, Homo sapien
gtggtgcactgaaaatcgcagggtt

SEQ ID NO: 1730012 - DNA, 25 bp, Homo sapien
cttgtcccctggtttcctcagacct

SEQ ID NO: 1730013 - DNA, 25 bp, Homo sapien
ccctggtttcctcagacctttcatg

SEQ ID NO: 1730014 - DNA, 25 bp, Homo sapien
tcctcagacctttcatgctaatgat

SEQ ID NO: 1730015 - DNA, 25 bp, Homo sapien
tcatgctaatgatattttccaacat

SEQ ID NO: 1730016 - DNA, 25 bp, Homo sapien
tccactggaggattatgtgcaaact

SEQ ID NO: 1730017 - DNA, 25 bp, Homo sapien
cctttcggattcaggcagagacttt

SEQ ID NO: 1730018 - DNA, 25 bp, Homo sapien
ccaacatggccatgaaaagtctttg

SEQ ID NO: 1730019 - DNA, 25 bp, Homo sapien
tgcaaactgggaaaggcctttcgga

SEQ ID NO: 1730020 - DNA, 25 bp, Homo sapien
tccaacatgtagcaaccagacctgg

SEQ ID NO: 1730021 - DNA, 25 bp, Homo sapien
caagatctggagcaatccaacatgt

SEQ ID NO: 1730022 - DNA, 25 bp, Homo sapien
gaacacgactgagaaccttccaatg

SEQ ID NO: 1730023 - DNA, 25 bp, Homo sapien
tctactattcctactgatgcttggt

SEQ ID NO: 1730024 - DNA, 25 bp, Homo sapien
gatggtgccatgttgcttaccttca

SEQ ID NO: 1730025 - DNA, 25 bp, Homo sapien
tggtgccatgttgcttaccttcagt

SEQ ID NO: 1730026 - DNA, 25 bp, Homo sapien
ttaacagaaatatggtgttgtaggg

SEQ ID NO: 1730027 - DNA, 25 bp, Homo sapien
acttaacagaaatatggtgttgtag

SEQ ID NO: 1730028 - DNA, 25 bp, Homo sapien
cactttataacaggctccgatggct

SEQ ID NO: 1730029 - DNA, 25 bp, Homo sapien
tgtatccacttggagaagcacagga

SEQ ID NO: 1730030 - DNA, 25 bp, Homo sapien
aatctgtccctctcctaacgttgct

SEQ ID NO: 1730031 - DNA, 25 bp, Homo sapien
catgttaggtgtgcagcccgggcac

SEQ ID NO: 1730032 - DNA, 25 bp, Homo sapien
cccaaggtcgctgaagaaatctgtt

SEQ ID NO: 1730033 - DNA, 25 bp, Homo sapien
tcagagctgccactagattctgtgc

SEQ ID NO: 1730034 - DNA, 25 bp, Homo sapien
gcctggtctttcaaggtgctggaaa

SEQ ID NO: 1730035 - DNA, 25 bp, Homo sapien
gatgaataaggcactgaaagtctac

SEQ ID NO: 1730036 - DNA, 25 bp, Homo sapien
agtaagtcattcttcaataagtcca

SEQ ID NO: 1730037 - DNA, 25 bp, Homo sapien
gtcattcttcaataagtccagggtt

SEQ ID NO: 1730038 - DNA, 25 bp, Homo sapien
gtaagtcattcttcaataagtccag

SEQ ID NO: 1730039 - DNA, 25 bp, Homo sapien
taagtcattcttcaataagtccagg

SEQ ID NO: 1730040 - DNA, 25 bp, Homo sapien
cagtatgttctcctgctacgtgctg

SEQ ID NO: 1730041 - DNA, 25 bp, Homo sapien
taagaagaataagcgcagtatgttc

SEQ ID NO: 1730042 - DNA, 25 bp, Homo sapien
aatgaatgtgtgaagttccaacatg

SEQ ID NO: 1730043 - DNA, 25 bp, Homo sapien
ctacgtgctgtgttctttgttggaa

SEQ ID NO: 1730044 - DNA, 25 bp, Homo sapien
aaaaatggcgttcttctcttgtggc

SEQ ID NO: 1730045 - DNA, 25 bp, Homo sapien
tactgatagactttcctctaaaagc

SEQ ID NO: 1730046 - DNA, 25 bp, Homo sapien
tttctcaactagttaagtcaactgc

SEQ ID NO: 1730047 - DNA, 25 bp, Homo sapien
gggaatattctacatactgcttact

SEQ ID NO: 1730048 - DNA, 25 bp, Homo sapien
acgatcaagtcaccggcagtttcgg

SEQ ID NO: 1730049 - DNA, 25 bp, Homo sapien
gggaagttcacgatcaagtcaccgg

SEQ ID NO: 1730050 - DNA, 25 bp, Homo sapien
ttcacgatcaagtcaccggcagttt

SEQ ID NO: 1730051 - DNA, 25 bp, Homo sapien
caagtcaccggcagtttcggtgtgt

SEQ ID NO: 1730052 - DNA, 25 bp, Homo sapien
tggcagacaatgagatttaagcccc

SEQ ID NO: 1730053 - DNA, 25 bp, Homo sapien
gagtagaatttcgacccatggaggt

SEQ ID NO: 1730054 - DNA, 25 bp, Homo sapien
tatgtgcatggtagcaagtcagtcc

SEQ ID NO: 1730055 - DNA, 25 bp, Homo sapien
tgtggtactgctcaccagagtgatc

SEQ ID NO: 1730056 - DNA, 25 bp, Homo sapien
tcttgggtcatcgaagcagcagcat

SEQ ID NO: 1730057 - DNA, 25 bp, Homo sapien
catcgggtcccaagatggtcaggac

SEQ ID NO: 1730058 - DNA, 25 bp, Homo sapien
tggtcaggacggagaaagaactctc

SEQ ID NO: 1730059 - DNA, 25 bp, Homo sapien
tgagaaacagctacccttcttaggc

SEQ ID NO: 1730060 - DNA, 25 bp, Homo sapien
ttttgaggtatcttctcagttttat

SEQ ID NO: 1730061 - DNA, 25 bp, Homo sapien
tatgcatttcacttcacaaaccaac

SEQ ID NO: 1730062 - DNA, 25 bp, Homo sapien
tcacaaaccaacatggggaggcagt

SEQ ID NO: 1730063 - DNA, 25 bp, Homo sapien
ccaacatggggaggcagttttctgt

SEQ ID NO: 1730064 - DNA, 25 bp, Homo sapien
tgtgtctaggtccacaccagtgccc

SEQ ID NO: 1730065 - DNA, 25 bp, Homo sapien
caggaaggtgggtttctactccatc

SEQ ID NO: 1730066 - DNA, 25 bp, Homo sapien
gtaaatcccgatatgactcaataga

SEQ ID NO: 1730067 - DNA, 25 bp, Homo sapien
ataaaacgctgacactcccgcagtg

SEQ ID NO: 1730068 - DNA, 25 bp, Homo sapien
taagtccagttaagacctcagtcag

SEQ ID NO: 1730069 - DNA, 25 bp, Homo sapien
tgaggccagatacctttatgatcag

SEQ ID NO: 1730070 - DNA, 25 bp, Homo sapien
taatgaagcgttgttaacttgcccc

SEQ ID NO: 1730071 - DNA, 25 bp, Homo sapien
aaaactcttgcgttaaatgttgcca

SEQ ID NO: 1730072 - DNA, 25 bp, Homo sapien
caaagaatttatgctcaccaagtta

SEQ ID NO: 1730073 - DNA, 25 bp, Homo sapien
tcttcaggacattctctgagcctac

SEQ ID NO: 1730074 - DNA, 25 bp, Homo sapien
ttggcctcgtaagtccatcatgtca

SEQ ID NO: 1730075 - DNA, 25 bp, Homo sapien
tgaagacctagccacttagagggcc

SEQ ID NO: 1730076 - DNA, 25 bp, Homo sapien
ggatagagatccttcccagggtgta

SEQ ID NO: 1730077 - DNA, 25 bp, Homo sapien
ctccttggcctgaccacctggatag

SEQ ID NO: 1730078 - DNA, 25 bp, Homo sapien
cttggcctgaccacctggatagaga

SEQ ID NO: 1730079 - DNA, 25 bp, Homo sapien
tgaccacctggatagagatccttcc

SEQ ID NO: 1730080 - DNA, 25 bp, Homo sapien
caggcttgtttaggagttagtgtaa

SEQ ID NO: 1730081 - DNA, 25 bp, Homo sapien
gaaaactaagtctctgagaagcaac

SEQ ID NO: 1730082 - DNA, 25 bp, Homo sapien
ggatcaaaactattgtttgggccat

SEQ ID NO: 1730083 - DNA, 25 bp, Homo sapien
cagttggttctagcaaaaggatcaa

SEQ ID NO: 1730084 - DNA, 25 bp, Homo sapien
tccacacaatactacgaaagagccc

SEQ ID NO: 1730085 - DNA, 25 bp, Homo sapien
gactaaggttctactctgatggatg

SEQ ID NO: 1730086 - DNA, 25 bp, Homo sapien
gagcctcagacttatagccaaaaga

SEQ ID NO: 1730087 - DNA, 25 bp, Homo sapien
tctgagcgagtttctatgactaagg

SEQ ID NO: 1730088 - DNA, 25 bp, Homo sapien
cataaacacggattgggcgctggga

SEQ ID NO: 1730089 - DNA, 25 bp, Homo sapien
gacattaggtgctgcgagtcttcaa

SEQ ID NO: 1730090 - DNA, 25 bp, Homo sapien
ggaccggcacaaggacgttctcaag

SEQ ID NO: 1730091 - DNA, 25 bp, Homo sapien
tcaacctagtgtatctgcagaccgg

SEQ ID NO: 1730092 - DNA, 25 bp, Homo sapien
tgtggtctgcctcccggagaaaagc

SEQ ID NO: 1730093 - DNA, 25 bp, Homo sapien
ggatcatgtaacctggaccctgaaa

SEQ ID NO: 1730094 - DNA, 25 bp, Homo sapien
acaactatgagggtgatgtgtgccg

SEQ ID NO: 1730095 - DNA, 25 bp, Homo sapien
ggtgggtttccagacctgagacatc

SEQ ID NO: 1730096 - DNA, 25 bp, Homo sapien
gacagggatttttagtcaagctcca

SEQ ID NO: 1730097 - DNA, 25 bp, Homo sapien
cccggatcacggagtaggcataaac

SEQ ID NO: 1730098 - DNA, 25 bp, Homo sapien
taaaggtcttgtgttcccggatcac

SEQ ID NO: 1730099 - DNA, 25 bp, Homo sapien
cagggacacagcttttgacggttcc

SEQ ID NO: 1730100 - DNA, 25 bp, Homo sapien
gacttttgttagcaggcgcccagtt

SEQ ID NO: 1730101 - DNA, 25 bp, Homo sapien
ctctgtggtacagttagtacaggaa

SEQ ID NO: 1730102 - DNA, 25 bp, Homo sapien
tttcattcgaatgtgcaaatactcg

SEQ ID NO: 1730103 - DNA, 25 bp, Homo sapien
cagaaccctctataggtgaccaaga

SEQ ID NO: 1730104 - DNA, 25 bp, Homo sapien
ggttacttcggtgtctgggatcatg

SEQ ID NO: 1730105 - DNA, 25 bp, Homo sapien
ctgggatcatgtatgtgccgcctgg

SEQ ID NO: 1730106 - DNA, 25 bp, Homo sapien
gtctgggatcatgtatgtgccgcct

SEQ ID NO: 1730107 - DNA, 25 bp, Homo sapien
agtgagacagaggttacttcggtgt

SEQ ID NO: 1730108 - DNA, 25 bp, Homo sapien
tagattcccgaacatgtcctcacat

SEQ ID NO: 1730109 - DNA, 25 bp, Homo sapien
ttctgcaaatagattcccgaacatg

SEQ ID NO: 1730110 - DNA, 25 bp, Homo sapien
cacttgagccagtttcagtttgttt

SEQ ID NO: 1730111 - DNA, 25 bp, Homo sapien
attcacttgagccagtttcagtttg

SEQ ID NO: 1730112 - DNA, 25 bp, Homo sapien
caaagtcatctcttggccttttgat

SEQ ID NO: 1730113 - DNA, 25 bp, Homo sapien
tcttggccttttgatgccaacagca

SEQ ID NO: 1730114 - DNA, 25 bp, Homo sapien
atctcttggccttttgatgccaaca

SEQ ID NO: 1730115 - DNA, 25 bp, Homo sapien
aagtcatctcttggccttttgatgc

SEQ ID NO: 1730116 - DNA, 25 bp, Homo sapien
aaatgcttattgtcatctattgcat

SEQ ID NO: 1730117 - DNA, 25 bp, Homo sapien
ctggagagattcacccaaatgctta

SEQ ID NO: 1730118 - DNA, 25 bp, Homo sapien
tggagagattcacccaaatgcttat

SEQ ID NO: 1730119 - DNA, 25 bp, Homo sapien
tattgtcatctattgcatcatcttc

SEQ ID NO: 1730120 - DNA, 25 bp, Homo sapien
gccttttgagctcttcagccagctg

SEQ ID NO: 1730121 - DNA, 25 bp, Homo sapien
tcttgccttttgagctcttcagcca

SEQ ID NO: 1730122 - DNA, 25 bp, Homo sapien
ttgccttttgagctcttcagccagc

SEQ ID NO: 1730123 - DNA, 25 bp, Homo sapien
ttcttgccttttgagctcttcagcc

SEQ ID NO: 1730124 - DNA, 25 bp, Homo sapien
ttaagccacggaaacaattttgtca

SEQ ID NO: 1730125 - DNA, 25 bp, Homo sapien
actgctaaaagtgagagacatcctg

SEQ ID NO: 1730126 - DNA, 25 bp, Homo sapien
cccaatactagcacagaaagaactg

SEQ ID NO: 1730127 - DNA, 25 bp, Homo sapien
ccttcaaaagcttcgtctaaaacag

SEQ ID NO: 1730128 - DNA, 25 bp, Homo sapien
caatttatttcagcggccactgggt

SEQ ID NO: 1730129 - DNA, 25 bp, Homo sapien
ggcactctcccaaggcggcatgttt

SEQ ID NO: 1730130 - DNA, 25 bp, Homo sapien
gaagaatttcacataccctgggagc

SEQ ID NO: 1730131 - DNA, 25 bp, Homo sapien
gacggaattcgttataggcactctc

SEQ ID NO: 1730132 - DNA, 25 bp, Homo sapien
tactgtcgcaatggccaagagaggt

SEQ ID NO: 1730133 - DNA, 25 bp, Homo sapien
tttactggctgagagagaaactcca

SEQ ID NO: 1730134 - DNA, 25 bp, Homo sapien
tcgatgcccaacaacgtgactcggg

SEQ ID NO: 1730135 - DNA, 25 bp, Homo sapien
gaagttataacaccagtaagcggca

SEQ ID NO: 1730136 - DNA, 25 bp, Homo sapien
gatctggcgttgctgctcattgagg

SEQ ID NO: 1730137 - DNA, 25 bp, Homo sapien
gatgcttcccctcacaagctgtctt

SEQ ID NO: 1730138 - DNA, 25 bp, Homo sapien
ctcattgaggttgagtgctcagggt

SEQ ID NO: 1730139 - DNA, 25 bp, Homo sapien
caaagggcacatggacggaacctct

SEQ ID NO: 1730140 - DNA, 25 bp, Homo sapien
catatcctgggcaagactttgagag

SEQ ID NO: 1730141 - DNA, 25 bp, Homo sapien
cacgggctctatgggctgaatccaa

SEQ ID NO: 1730142 - DNA, 25 bp, Homo sapien
aatgttgcagatagggtgtgccctc

SEQ ID NO: 1730143 - DNA, 25 bp, Homo sapien
caaaatccgactgtcttagagctgg

SEQ ID NO: 1730144 - DNA, 25 bp, Homo sapien
acattcattcccaggttttgaagga

SEQ ID NO: 1730145 - DNA, 25 bp, Homo sapien
tgctctgcttgagtgtgacattcat

SEQ ID NO: 1730146 - DNA, 25 bp, Homo sapien
ttgaaggattcttatcccttgggtg

SEQ ID NO: 1730147 - DNA, 25 bp, Homo sapien
ctctatgctctgcttgagtgtgaca

SEQ ID NO: 1730148 - DNA, 25 bp, Homo sapien
tcagggtttagctctttcaattctc

SEQ ID NO: 1730149 - DNA, 25 bp, Homo sapien
ggtttagctctttcaattctcaaaa

SEQ ID NO: 1730150 - DNA, 25 bp, Homo sapien
cagggtttagctctttcaattctca

SEQ ID NO: 1730151 - DNA, 25 bp, Homo sapien
agggtttagctctttcaattctcaa

SEQ ID NO: 1730152 - DNA, 25 bp, Homo sapien
gtcccagtgcatggaaagatgccct

SEQ ID NO: 1730153 - DNA, 25 bp, Homo sapien
ctttaacccatccacggccttgatg

SEQ ID NO: 1730154 - DNA, 25 bp, Homo sapien
aaatcagagttccaggtcccagtgc

SEQ ID NO: 1730155 - DNA, 25 bp, Homo sapien
gccctgcatcccatgtagctcttga

SEQ ID NO: 1730156 - DNA, 25 bp, Homo sapien
cagccctttgaaatcgtagcttaaa

SEQ ID NO: 1730157 - DNA, 25 bp, Homo sapien
cgtagcttaaatggggctttctgaa

SEQ ID NO: 1730158 - DNA, 25 bp, Homo sapien
taaatggggctttctgaactgaata

SEQ ID NO: 1730159 - DNA, 25 bp, Homo sapien
ctttgtggggcagccctttgaaatc

SEQ ID NO: 1730160 - DNA, 25 bp, Homo sapien
ccagttttgatcatcgatgattttc

SEQ ID NO: 1730161 - DNA, 25 bp, Homo sapien
tgacctctcattctcttaagctttg

SEQ ID NO: 1730162 - DNA, 25 bp, Homo sapien
acatgaagaggctgagtgcctccat

SEQ ID NO: 1730163 - DNA, 25 bp, Homo sapien
tattttccatgatctgacctctcat

SEQ ID NO: 1730164 - DNA, 25 bp, Homo sapien
cgcgcaccaccaagtccagctattt

SEQ ID NO: 1730165 - DNA, 25 bp, Homo sapien
ccaccgcacctggccttcaattttt

SEQ ID NO: 1730166 - DNA, 25 bp, Homo sapien
accgcacctggccttcaattttttg

SEQ ID NO: 1730167 - DNA, 25 bp, Homo sapien
ggcgcgcaccaccaagtccagctat

SEQ ID NO: 1730168 - DNA, 25 bp, Homo sapien
cttcattaatcacaatagcatttat

SEQ ID NO: 1730169 - DNA, 25 bp, Homo sapien
taatcacaatagcatttataaatac

SEQ ID NO: 1730170 - DNA, 25 bp, Homo sapien
tcattaatcacaatagcatttataa

SEQ ID NO: 1730171 - DNA, 25 bp, Homo sapien
cattaatcacaatagcatttataaa

SEQ ID NO: 1730172 - DNA, 25 bp, Homo sapien
acttatcttgttgcttgatcagttc

SEQ ID NO: 1730173 - DNA, 25 bp, Homo sapien
ttctgaggtagagtgaaacattgct

SEQ ID NO: 1730174 - DNA, 25 bp, Homo sapien
gcttgatcagttctgaggtagagtg

SEQ ID NO: 1730175 - DNA, 25 bp, Homo sapien
aggtagagtgaaacattgctacgtc

SEQ ID NO: 1730176 - DNA, 25 bp, Homo sapien
tcactgaaggccaaggtctactttg

SEQ ID NO: 1730177 - DNA, 25 bp, Homo sapien
gtcaagttagcactatccataaagt

SEQ ID NO: 1730178 - DNA, 25 bp, Homo sapien
gtgaaaccactccactgagcactgt

SEQ ID NO: 1730179 - DNA, 25 bp, Homo sapien
taacataagcctgaaagatctccta

SEQ ID NO: 1730180 - DNA, 25 bp, Homo sapien
tcccagtccgtaaggaggggtctga

SEQ ID NO: 1730181 - DNA, 25 bp, Homo sapien
ccgtaaggaggggtctgactttcat

SEQ ID NO: 1730182 - DNA, 25 bp, Homo sapien
ggcacaggagcgtttccccggtgaa

SEQ ID NO: 1730183 - DNA, 25 bp, Homo sapien
acaggagcgtttccccggtgaaatg

SEQ ID NO: 1730184 - DNA, 25 bp, Homo sapien
gaccacggccggaatcctgaactgc

SEQ ID NO: 1730185 - DNA, 25 bp, Homo sapien
tcattcctgcggaccacggccggaa

SEQ ID NO: 1730186 - DNA, 25 bp, Homo sapien
tgtaactgtttgcaacacagtcccc

SEQ ID NO: 1730187 - DNA, 25 bp, Homo sapien
tgggttataacaaccattccctcgc

SEQ ID NO: 1730188 - DNA, 25 bp, Homo sapien
ggcccagatgttggcccctgacaac

SEQ ID NO: 1730189 - DNA, 25 bp, Homo sapien
ggcaaacgcgagtttctgagccagt

SEQ ID NO: 1730190 - DNA, 25 bp, Homo sapien
aataagcaggcaaacgcgagtttct

SEQ ID NO: 1730191 - DNA, 25 bp, Homo sapien
tccagcccggcccagatgttggccc

SEQ ID NO: 1730192 - DNA, 25 bp, Homo sapien
gattctcatagatgtggttgcacct

SEQ ID NO: 1730193 - DNA, 25 bp, Homo sapien
gcgagattctcatagatgtggttgc

SEQ ID NO: 1730194 - DNA, 25 bp, Homo sapien
cataggagtctgagagtctgcgaga

SEQ ID NO: 1730195 - DNA, 25 bp, Homo sapien
tagatgtggttgcacctggcaagga

SEQ ID NO: 1730196 - DNA, 25 bp, Homo sapien
tggtttatgcagtgagtgatagtaa

SEQ ID NO: 1730197 - DNA, 25 bp, Homo sapien
tctggtgatcatggtttatgcagtg

SEQ ID NO: 1730198 - DNA, 25 bp, Homo sapien
ctctggtgatcatggtttatgcagt

SEQ ID NO: 1730199 - DNA, 25 bp, Homo sapien
ggtttatgcagtgagtgatagtaaa

SEQ ID NO: 1730200 - DNA, 25 bp, Homo sapien
ctctggtcctcgggcaccgcctgca

SEQ ID NO: 1730201 - DNA, 25 bp, Homo sapien
gccccagaagtgtgagctggccgcg

SEQ ID NO: 1730202 - DNA, 25 bp, Homo sapien
ccagaagtgtgagctggccgcgccc

SEQ ID NO: 1730203 - DNA, 25 bp, Homo sapien
tctggtcctcgggcaccgcctgcag

SEQ ID NO: 1730204 - DNA, 25 bp, Homo sapien
cgctgctgctttcgtggctgcccgt

SEQ ID NO: 1730205 - DNA, 25 bp, Homo sapien
tgaggtgtttgcaccaccctcgctg

SEQ ID NO: 1730206 - DNA, 25 bp, Homo sapien
accctcgctgctgctttcgtggctg

SEQ ID NO: 1730207 - DNA, 25 bp, Homo sapien
tactggattcggtgtagttttgagg

SEQ ID NO: 1730208 - DNA, 25 bp, Homo sapien
ggacaaagatgaggcggagtagagg

SEQ ID NO: 1730209 - DNA, 25 bp, Homo sapien
tgggacaaagatgaggcggagtaga

SEQ ID NO: 1730210 - DNA, 25 bp, Homo sapien
cttgggacaaagatgaggcggagta

SEQ ID NO: 1730211 - DNA, 25 bp, Homo sapien
aaagatgaggcggagtagaggcggc

SEQ ID NO: 1730212 - DNA, 25 bp, Homo sapien
ggtctgcttactccggcaaagacgg

SEQ ID NO: 1730213 - DNA, 25 bp, Homo sapien
gctggcggtctgcttactccggcaa

SEQ ID NO: 1730214 - DNA, 25 bp, Homo sapien
cggctgctggcggtctgcttactcc

SEQ ID NO: 1730215 - DNA, 25 bp, Homo sapien
cgcatcgggccgtttgaggaaggca

SEQ ID NO: 1730216 - DNA, 25 bp, Homo sapien
cttcaaggaacctggagcgggagcc

SEQ ID NO: 1730217 - DNA, 25 bp, Homo sapien
ggctcttgggttagctcgcttctcg

SEQ ID NO: 1730218 - DNA, 25 bp, Homo sapien
gcttcgcggtcggaagtgcttcaag

SEQ ID NO: 1730219 - DNA, 25 bp, Homo sapien
tccgcgctcgttgttggctcttggg

SEQ ID NO: 1730220 - DNA, 25 bp, Homo sapien
agaccagcgagcagtggcgcttgtc

SEQ ID NO: 1730221 - DNA, 25 bp, Homo sapien
tgctctccacatgacggttgcaccg

SEQ ID NO: 1730222 - DNA, 25 bp, Homo sapien
ccaggctccgggcatagcggtagat

SEQ ID NO: 1730223 - DNA, 25 bp, Homo sapien
agcagtggcgcttgtcgatgctctc

SEQ ID NO: 1730224 - DNA, 25 bp, Homo sapien
acaagtgccaggtgtcagtacctag

SEQ ID NO: 1730225 - DNA, 25 bp, Homo sapien
taagttacttaacagtccagaacgc

SEQ ID NO: 1730226 - DNA, 25 bp, Homo sapien
cagaacgcttctccaatagcacgag

SEQ ID NO: 1730227 - DNA, 25 bp, Homo sapien
agtgactacgcgcaaaatatccggt

SEQ ID NO: 1730228 - DNA, 25 bp, Homo sapien
tggaaacagcccgaatcacccggct

SEQ ID NO: 1730229 - DNA, 25 bp, Homo sapien
ccagatggaaacagcccgaatcacc

SEQ ID NO: 1730230 - DNA, 25 bp, Homo sapien
agatggaaacagcccgaatcacccg

SEQ ID NO: 1730231 - DNA, 25 bp, Homo sapien
atggaaacagcccgaatcacccggc

SEQ ID NO: 1730232 - DNA, 25 bp, Homo sapien
caagttcggcggcaatggagtgatc

SEQ ID NO: 1730233 - DNA, 25 bp, Homo sapien
tcagaggtgagacaacagatagccc

SEQ ID NO: 1730234 - DNA, 25 bp, Homo sapien
tactctagctaagttcccgaggcaa

SEQ ID NO: 1730235 - DNA, 25 bp, Homo sapien
caaagctcaggcctaaaacaggtcc

SEQ ID NO: 1730236 - DNA, 25 bp, Homo sapien
gattagggaagtaaccatcaagtcc

SEQ ID NO: 1730237 - DNA, 25 bp, Homo sapien
gcaaccaaactgaagatgagggatc

SEQ ID NO: 1730238 - DNA, 25 bp, Homo sapien
ccaaaaaggatcaaactgcgggtat

SEQ ID NO: 1730239 - DNA, 25 bp, Homo sapien
gagactgcctttgttagcacagagc

SEQ ID NO: 1730240 - DNA, 25 bp, Homo sapien
gggtgtcacaaggatgagattctgt

SEQ ID NO: 1730241 - DNA, 25 bp, Homo sapien
gcaagacctattgggtgtcacaagg

SEQ ID NO: 1730242 - DNA, 25 bp, Homo sapien
taactgtttattgagcaagacctat

SEQ ID NO: 1730243 - DNA, 25 bp, Homo sapien
tattgagcaagacctattgggtgtc

SEQ ID NO: 1730244 - DNA, 25 bp, Homo sapien
taggactcactgacacatctttgtg

SEQ ID NO: 1730245 - DNA, 25 bp, Homo sapien
ttatgacggctaagaaacagggccc

SEQ ID NO: 1730246 - DNA, 25 bp, Homo sapien
taaatactgtcctaggtccagccgt

SEQ ID NO: 1730247 - DNA, 25 bp, Homo sapien
tacaaaagtctgaccataggaaggg

SEQ ID NO: 1730248 - DNA, 25 bp, Homo sapien
cagatgaagcctaccagatgggagt

SEQ ID NO: 1730249 - DNA, 25 bp, Homo sapien
aacagaggcttgaacagagtctcca

SEQ ID NO: 1730250 - DNA, 25 bp, Homo sapien
agcctcagcagaagacaaccagcaa

SEQ ID NO: 1730251 - DNA, 25 bp, Homo sapien
cagcaacgcacaacataaatccaga

SEQ ID NO: 1730252 - DNA, 25 bp, Homo sapien
atcttgccacagtatccagaaagat

SEQ ID NO: 1730253 - DNA, 25 bp, Homo sapien
gatcttgccacagtatccagaaaga

SEQ ID NO: 1730254 - DNA, 25 bp, Homo sapien
atgtcttcaaactccagtttaagaa

SEQ ID NO: 1730255 - DNA, 25 bp, Homo sapien
gaatattaaaaatgtaattctggct

SEQ ID NO: 1730256 - DNA, 25 bp, Homo sapien
tattaaaaatgtaattctggcttta

SEQ ID NO: 1730257 - DNA, 25 bp, Homo sapien
aataactcccaggaaaatgtcttca

SEQ ID NO: 1730258 - DNA, 25 bp, Homo sapien
tgcttctcttggaccagatttacct

SEQ ID NO: 1730259 - DNA, 25 bp, Homo sapien
tgatgcttctcttggaccagattta

SEQ ID NO: 1730260 - DNA, 25 bp, Homo sapien
tggaccagatttaccttgtacctgt

SEQ ID NO: 1730261 - DNA, 25 bp, Homo sapien
gaccagatttaccttgtacctgtat

SEQ ID NO: 1730262 - DNA, 25 bp, Homo sapien
aacatttatctactactccctgacg

SEQ ID NO: 1730263 - DNA, 25 bp, Homo sapien
cagatggtccttatgcttttggcag

SEQ ID NO: 1730264 - DNA, 25 bp, Homo sapien
gacatagggttaaacgagagacata

SEQ ID NO: 1730265 - DNA, 25 bp, Homo sapien
ctagagatttttcctgagcagatgg

SEQ ID NO: 1730266 - DNA, 25 bp, Homo sapien
caaactctcggcttcaaatccagtc

SEQ ID NO: 1730267 - DNA, 25 bp, Homo sapien
aattcaactgttatccttcactccc

SEQ ID NO: 1730268 - DNA, 25 bp, Homo sapien
tctgaaggtggtacccagtcactca

SEQ ID NO: 1730269 - DNA, 25 bp, Homo sapien
gtcactcaaaccaataattcaactg

SEQ ID NO: 1730270 - DNA, 25 bp, Homo sapien
catggccacaatccactatgctgct

SEQ ID NO: 1730271 - DNA, 25 bp, Homo sapien
agtaccttttcatcggcatcctcag

SEQ ID NO: 1730272 - DNA, 25 bp, Homo sapien
ggatctggccatgacctctcccatg

SEQ ID NO: 1730273 - DNA, 25 bp, Homo sapien
tcaactccagtatcctggatctggc

SEQ ID NO: 1730274 - DNA, 25 bp, Homo sapien
ctcggagatgacaagtagctttgct

SEQ ID NO: 1730275 - DNA, 25 bp, Homo sapien
aaatctcaaataatggcccaggagg

SEQ ID NO: 1730276 - DNA, 25 bp, Homo sapien
tcatgacctggagctatatgccgtg

SEQ ID NO: 1730277 - DNA, 25 bp, Homo sapien
gagataagacatgaacctaggccca

SEQ ID NO: 1730278 - DNA, 25 bp, Homo sapien
aaaatgctaacgctatcctcctggg

SEQ ID NO: 1730279 - DNA, 25 bp, Homo sapien
tactgatattgaccagcactgtgcc

SEQ ID NO: 1730280 - DNA, 25 bp, Homo sapien
tagtgttcccatagtaagtgctgac

SEQ ID NO: 1730281 - DNA, 25 bp, Homo sapien
cctgagccaggtgacttagccatta

SEQ ID NO: 1730282 - DNA, 25 bp, Homo sapien
tgaggtggccatttgtctggtaatc

SEQ ID NO: 1730283 - DNA, 25 bp, Homo sapien
atgaggtggccatttgtctggtaat

SEQ ID NO: 1730284 - DNA, 25 bp, Homo sapien
taagatcactgggtcctaagcctgg

SEQ ID NO: 1730285 - DNA, 25 bp, Homo sapien
cgggaggcactatcaactttggagg

SEQ ID NO: 1730286 - DNA, 25 bp, Homo sapien
tgcataatctccaggcacaagggtt

SEQ ID NO: 1730287 - DNA, 25 bp, Homo sapien
tagaggctaactgcacatgggcacc

SEQ ID NO: 1730288 - DNA, 25 bp, Homo sapien
ctttctaacttctgccccacaaata

SEQ ID NO: 1730289 - DNA, 25 bp, Homo sapien
cacaaatatccatggcctttctgac

SEQ ID NO: 1730290 - DNA, 25 bp, Homo sapien
tgccccacaaatatccatggccttt

SEQ ID NO: 1730291 - DNA, 25 bp, Homo sapien
taacttctgccccacaaatatccat

SEQ ID NO: 1730292 - DNA, 25 bp, Homo sapien
taataatattaaagagcaatggcat

SEQ ID NO: 1730293 - DNA, 25 bp, Homo sapien
taatattaaagagcaatggcattag

SEQ ID NO: 1730294 - DNA, 25 bp, Homo sapien
atattaaagagcaatggcattagat

SEQ ID NO: 1730295 - DNA, 25 bp, Homo sapien
aataatattaaagagcaatggcatt

SEQ ID NO: 1730296 - DNA, 25 bp, Homo sapien
aatttcattatcactaagtccaagc

SEQ ID NO: 1730297 - DNA, 25 bp, Homo sapien
cagctgcatgaagtttgctatttct

SEQ ID NO: 1730298 - DNA, 25 bp, Homo sapien
tggagggagccgctgaatttcatta

SEQ ID NO: 1730299 - DNA, 25 bp, Homo sapien
catttcgagacacatctagttccac

SEQ ID NO: 1730300 - DNA, 25 bp, Homo sapien
tatttttctacattaactcttcttc

SEQ ID NO: 1730301 - DNA, 25 bp, Homo sapien
acttatggctaatgtcaaatgggca

SEQ ID NO: 1730302 - DNA, 25 bp, Homo sapien
cttcttaaagcaaaggtgctccctg

SEQ ID NO: 1730303 - DNA, 25 bp, Homo sapien
atttccatggcatttgactccactt

SEQ ID NO: 1730304 - DNA, 25 bp, Homo sapien
tttccatggcatttgactccactta

SEQ ID NO: 1730305 - DNA, 25 bp, Homo sapien
aaaaggagacctctttaccatgctc

SEQ ID NO: 1730306 - DNA, 25 bp, Homo sapien
tcagaagatgccaatgagctgcaaa

SEQ ID NO: 1730307 - DNA, 25 bp, Homo sapien
tcttctccaacgacataatgcatag

SEQ ID NO: 1730308 - DNA, 25 bp, Homo sapien
ggctgagtagtttgagacaagaccc

SEQ ID NO: 1730309 - DNA, 25 bp, Homo sapien
aattgtgtgtcacaggaatctggtg

SEQ ID NO: 1730310 - DNA, 25 bp, Homo sapien
gaatctggtgtaccaggtaatcagc

SEQ ID NO: 1730311 - DNA, 25 bp, Homo sapien
ttaattcccgtaggatagtggcctc

SEQ ID NO: 1730312 - DNA, 25 bp, Homo sapien
tgttgccctgcccattttagtgtgg

SEQ ID NO: 1730313 - DNA, 25 bp, Homo sapien
agccttgatctcgaggctccaataa

SEQ ID NO: 1730314 - DNA, 25 bp, Homo sapien
gcagccttgatctcgaggctccaat

SEQ ID NO: 1730315 - DNA, 25 bp, Homo sapien
cagccttgatctcgaggctccaata

SEQ ID NO: 1730316 - DNA, 25 bp, Homo sapien
agctacctgcagtgctttacagaat

SEQ ID NO: 1730317 - DNA, 25 bp, Homo sapien
gctacctgcagtgctttacagaatg

SEQ ID NO: 1730318 - DNA, 25 bp, Homo sapien
ctacctgcagtgctttacagaatga

SEQ ID NO: 1730319 - DNA, 25 bp, Homo sapien
tagagactgtagtgagatgtcattt

SEQ ID NO: 1730320 - DNA, 25 bp, Homo sapien
ggtagagactgtagtgagatgtcat

SEQ ID NO: 1730321 - DNA, 25 bp, Homo sapien
aggtagagactgtagtgagatgtca

SEQ ID NO: 1730322 - DNA, 25 bp, Homo sapien
gtagagactgtagtgagatgtcatt

SEQ ID NO: 1730323 - DNA, 25 bp, Homo sapien
cctagagtgtattgagggcttcctg

SEQ ID NO: 1730324 - DNA, 25 bp, Homo sapien
taagggaattaaactccagacatcc

SEQ ID NO: 1730325 - DNA, 25 bp, Homo sapien
tccattaaaatagtacagtagaggg

SEQ ID NO: 1730326 - DNA, 25 bp, Homo sapien
ctaggcagctgcagactaagaatga

SEQ ID NO: 1730327 - DNA, 25 bp, Homo sapien
tcccaggactcaaaaaagaacatta

SEQ ID NO: 1730328 - DNA, 25 bp, Homo sapien
taatataggtaagctgcctagcact

SEQ ID NO: 1730329 - DNA, 25 bp, Homo sapien
tcttacggtggctttgctctagaaa

SEQ ID NO: 1730330 - DNA, 25 bp, Homo sapien
caaacaaacaagtggcagttcactg

SEQ ID NO: 1730331 - DNA, 25 bp, Homo sapien
ggagagcacacctaacaagctcctg

SEQ ID NO: 1730332 - DNA, 25 bp, Homo sapien
tacacaatactgctggaatgacctc

SEQ ID NO: 1730333 - DNA, 25 bp, Homo sapien
taatagcagggacaaaagttgcact

SEQ ID NO: 1730334 - DNA, 25 bp, Homo sapien
taagtcagaatgtaggccaactgta

SEQ ID NO: 1730335 - DNA, 25 bp, Homo sapien
gagtgttatgccaagtttccacagc

SEQ ID NO: 1730336 - DNA, 25 bp, Homo sapien
tgccaagtttccacagccatgctct

SEQ ID NO: 1730337 - DNA, 25 bp, Homo sapien
gctgagtgttatgccaagtttccac

SEQ ID NO: 1730338 - DNA, 25 bp, Homo sapien
gttatgccaagtttccacagccatg

SEQ ID NO: 1730339 - DNA, 25 bp, Homo sapien
atcactgaaagcatcttgcaaagca

SEQ ID NO: 1730340 - DNA, 25 bp, Homo sapien
ctgaaagcatcttgcaaagcagttt

SEQ ID NO: 1730341 - DNA, 25 bp, Homo sapien
tgcaaagcagtttcacacagcctca

SEQ ID NO: 1730342 - DNA, 25 bp, Homo sapien
gcaaagcagtttcacacagcctcat

SEQ ID NO: 1730343 - DNA, 25 bp, Homo sapien
tatgtaagaagattctctctcagtt

SEQ ID NO: 1730344 - DNA, 25 bp, Homo sapien
tcaggaagatatgtaagaagattct

SEQ ID NO: 1730345 - DNA, 25 bp, Homo sapien
ttccagtgaagccaggttataaaga

SEQ ID NO: 1730346 - DNA, 25 bp, Homo sapien
ctcagttccagtgaagccaggttat

SEQ ID NO: 1730347 - DNA, 25 bp, Homo sapien
ttcttctagtcttcgcagctgggta

SEQ ID NO: 1730348 - DNA, 25 bp, Homo sapien
agatgtaagagggctccaattgatt

SEQ ID NO: 1730349 - DNA, 25 bp, Homo sapien
ttagatgtaagagggctccaattga

SEQ ID NO: 1730350 - DNA, 25 bp, Homo sapien
tagatgtaagagggctccaattgat

SEQ ID NO: 1730351 - DNA, 25 bp, Homo sapien
ctgaggtaattctgacagttgattt

SEQ ID NO: 1730352 - DNA, 25 bp, Homo sapien
gaggtaattctgacagttgatttcc

SEQ ID NO: 1730353 - DNA, 25 bp, Homo sapien
taattctgacagttgatttccatcc

SEQ ID NO: 1730354 - DNA, 25 bp, Homo sapien
ggtaattctgacagttgatttccat

SEQ ID NO: 1730355 - DNA, 25 bp, Homo sapien
ccctttcctgagaccattccataaa

SEQ ID NO: 1730356 - DNA, 25 bp, Homo sapien
tcctgagaccattccataaactgtg

SEQ ID NO: 1730357 - DNA, 25 bp, Homo sapien
gaccattccataaactgtgcttcct

SEQ ID NO: 1730358 - DNA, 25 bp, Homo sapien
tcttgggctctagtcttaacttccc

SEQ ID NO: 1730359 - DNA, 25 bp, Homo sapien
gaagtctttccaacctgttttcaga

SEQ ID NO: 1730360 - DNA, 25 bp, Homo sapien
ctgggaaatgactaaatccgttaat

SEQ ID NO: 1730361 - DNA, 25 bp, Homo sapien
gaagtcaggccactgatttcttcag

SEQ ID NO: 1730362 - DNA, 25 bp, Homo sapien
gccatccggaatcgtttctaataag

SEQ ID NO: 1730363 - DNA, 25 bp, Homo sapien
aactaactcagtgagactttcacat

SEQ ID NO: 1730364 - DNA, 25 bp, Homo sapien
gagtctattctgatccaccttcaag

SEQ ID NO: 1730365 - DNA, 25 bp, Homo sapien
taactcagtgagactttcacattcc

SEQ ID NO: 1730366 - DNA, 25 bp, Homo sapien
ccccaactgcttcaggcaactgtgt

SEQ ID NO: 1730367 - DNA, 25 bp, Homo sapien
ctgcattcaagttgctcaacttctt

SEQ ID NO: 1730368 - DNA, 25 bp, Homo sapien
gtctgcattcaagttgctcaacttc

SEQ ID NO: 1730369 - DNA, 25 bp, Homo sapien
agttttccaatgcttttaggcaggg

SEQ ID NO: 1730370 - DNA, 25 bp, Homo sapien
tctgcattcaagttgctcaacttct

SEQ ID NO: 1730371 - DNA, 25 bp, Homo sapien
tggtgtcaccattctctgtatatca

SEQ ID NO: 1730372 - DNA, 25 bp, Homo sapien
tctttgacataattcctccagttgg

SEQ ID NO: 1730373 - DNA, 25 bp, Homo sapien
cagaaatatggttgcatcaagatca

SEQ ID NO: 1730374 - DNA, 25 bp, Homo sapien
aacaacacatgcgtcttttcaaagc

SEQ ID NO: 1730375 - DNA, 25 bp, Homo sapien
tgttcaacctcatccaagacatgag

SEQ ID NO: 1730376 - DNA, 25 bp, Homo sapien
tcatccaagacatgagcatggccca

SEQ ID NO: 1730377 - DNA, 25 bp, Homo sapien
agacatgagcatggcccaatgtaaa

SEQ ID NO: 1730378 - DNA, 25 bp, Homo sapien
gaacagtttgttcaacctcatccaa

SEQ ID NO: 1730379 - DNA, 25 bp, Homo sapien
aaaagtcctaggaagctggctttag

SEQ ID NO: 1730380 - DNA, 25 bp, Homo sapien
aaagtcctaggaagctggctttagc

SEQ ID NO: 1730381 - DNA, 25 bp, Homo sapien
aagtcctaggaagctggctttagct

SEQ ID NO: 1730382 - DNA, 25 bp, Homo sapien
tcccttgccagaatttaaatgcctc

SEQ ID NO: 1730383 - DNA, 25 bp, Homo sapien
taaatgcctctcagtccatacagct

SEQ ID NO: 1730384 - DNA, 25 bp, Homo sapien
ttaaacaacacactagacacctcct

SEQ ID NO: 1730385 - DNA, 25 bp, Homo sapien
tccacaacagatggtgatgtctcat

SEQ ID NO: 1730386 - DNA, 25 bp, Homo sapien
gaggaagttcagataccctgagatg

SEQ ID NO: 1730387 - DNA, 25 bp, Homo sapien
ctgggacactgtgggccgaacacca

SEQ ID NO: 1730388 - DNA, 25 bp, Homo sapien
agactgggacactgtgggccgaaca

SEQ ID NO: 1730389 - DNA, 25 bp, Homo sapien
agaggaagttcagataccctgagat

SEQ ID NO: 1730390 - DNA, 25 bp, Homo sapien
aatttagtgaacacatagcatggac

SEQ ID NO: 1730391 - DNA, 25 bp, Homo sapien
tagcatggactagatataaccctct

SEQ ID NO: 1730392 - DNA, 25 bp, Homo sapien
ggaccgatgctgaaatgatggtgaa

SEQ ID NO: 1730393 - DNA, 25 bp, Homo sapien
ataaccctctagtcagaaactcttg

SEQ ID NO: 1730394 - DNA, 25 bp, Homo sapien
gaaaggcgcagactatttctttcta

SEQ ID NO: 1730395 - DNA, 25 bp, Homo sapien
aaatggacaaaatatgactaaaacg

SEQ ID NO: 1730396 - DNA, 25 bp, Homo sapien
aggaaaggcgcagactatttctttc

SEQ ID NO: 1730397 - DNA, 25 bp, Homo sapien
atgactaaaacgctttgaagttaga

SEQ ID NO: 1730398 - DNA, 25 bp, Homo sapien
cattttcctacgctgggagctgagt

SEQ ID NO: 1730399 - DNA, 25 bp, Homo sapien
gaattggagacatgtgctcagcaca

SEQ ID NO: 1730400 - DNA, 25 bp, Homo sapien
taggcagcaaactgtgatccgaggg

SEQ ID NO: 1730401 - DNA, 25 bp, Homo sapien
gaggcaagcactcaaccatttctgc

SEQ ID NO: 1730402 - DNA, 25 bp, Homo sapien
ggagctgtgccctaaaactggcaac

SEQ ID NO: 1730403 - DNA, 25 bp, Homo sapien
ggcatatgaattgaatcggtcagca

SEQ ID NO: 1730404 - DNA, 25 bp, Homo sapien
tacacagcataccagaccaatggca

SEQ ID NO: 1730405 - DNA, 25 bp, Homo sapien
tgctgctacagactaaggagctgtg

SEQ ID NO: 1730406 - DNA, 25 bp, Homo sapien
taagtgtggcttagttggcgtctct

SEQ ID NO: 1730407 - DNA, 25 bp, Homo sapien
tcagaggcatgccaggtgtagcaaa

SEQ ID NO: 1730408 - DNA, 25 bp, Homo sapien
caaaaactctttatggtctggctct

SEQ ID NO: 1730409 - DNA, 25 bp, Homo sapien
cctcatctgactgggtaagtgtggc

SEQ ID NO: 1730410 - DNA, 25 bp, Homo sapien
taattgaacacacaccccattggca

SEQ ID NO: 1730411 - DNA, 25 bp, Homo sapien
gaaactgcccaggttagacaatgct

SEQ ID NO: 1730412 - DNA, 25 bp, Homo sapien
tgcagaatcaaagggtacgcacatt

SEQ ID NO: 1730413 - DNA, 25 bp, Homo sapien
tcctagacgtggaattgcagaatca

SEQ ID NO: 1730414 - DNA, 25 bp, Homo sapien
ttaacttcagcattcttggtgttcc

SEQ ID NO: 1730415 - DNA, 25 bp, Homo sapien
tacacacataattcaagacttgccc

SEQ ID NO: 1730416 - DNA, 25 bp, Homo sapien
taggccaaaggtgatactgatacac

SEQ ID NO: 1730417 - DNA, 25 bp, Homo sapien
tgaactgagtaaatccatacatcca

SEQ ID NO: 1730418 - DNA, 25 bp, Homo sapien
cataactcaccggtctcactgatga

SEQ ID NO: 1730419 - DNA, 25 bp, Homo sapien
ggatgcataaacttataccacataa

SEQ ID NO: 1730420 - DNA, 25 bp, Homo sapien
aggatcagagtaccttgtttaccaa

SEQ ID NO: 1730421 - DNA, 25 bp, Homo sapien
taaatcttacaaaacgcagccccat

SEQ ID NO: 1730422 - DNA, 25 bp, Homo sapien
tgttgtcacgtacacagaacacagt

SEQ ID NO: 1730423 - DNA, 25 bp, Homo sapien
ttgtcacgtacacagaacacagtga

SEQ ID NO: 1730424 - DNA, 25 bp, Homo sapien
ctgttgtcacgtacacagaacacag

SEQ ID NO: 1730425 - DNA, 25 bp, Homo sapien
gttgtcacgtacacagaacacagtg

SEQ ID NO: 1730426 - DNA, 25 bp, Homo sapien
catccaggacatgaagttctgttgc

SEQ ID NO: 1730427 - DNA, 25 bp, Homo sapien
cacctctgcaggtatccgagttagt

SEQ ID NO: 1730428 - DNA, 25 bp, Homo sapien
tgtgacacctctgcaggtatccgag

SEQ ID NO: 1730429 - DNA, 25 bp, Homo sapien
ctgttgcctgtgacacctctgcagg

SEQ ID NO: 1730430 - DNA, 25 bp, Homo sapien
gcagagtatatcaaggtcccctggt

SEQ ID NO: 1730431 - DNA, 25 bp, Homo sapien
catgacctctgctccggaacttgag

SEQ ID NO: 1730432 - DNA, 25 bp, Homo sapien
tcactgtactgtcattctgggaagc

SEQ ID NO: 1730433 - DNA, 25 bp, Homo sapien
ggttcagagtcaccagcagagtata

SEQ ID NO: 1730434 - DNA, 25 bp, Homo sapien
tgatataagacattctgcagtgggc

SEQ ID NO: 1730435 - DNA, 25 bp, Homo sapien
gcttagttcagcagaaatccgaggt

SEQ ID NO: 1730436 - DNA, 25 bp, Homo sapien
taaaaaatggtgacccgtgcctgac

SEQ ID NO: 1730437 - DNA, 25 bp, Homo sapien
tagggttacccatatgaaaacaggc

SEQ ID NO: 1730438 - DNA, 25 bp, Homo sapien
ctcaagaattgaggcaaattcatgc

SEQ ID NO: 1730439 - DNA, 25 bp, Homo sapien
aaaacagtttttcggcatcacagcc

SEQ ID NO: 1730440 - DNA, 25 bp, Homo sapien
catctttcggctcaagaattgaggc

SEQ ID NO: 1730441 - DNA, 25 bp, Homo sapien
gctcagtagtgtggcaagaaccagc

SEQ ID NO: 1730442 - DNA, 25 bp, Homo sapien
gaatcaacgcacaagaaaccacagc

SEQ ID NO: 1730443 - DNA, 25 bp, Homo sapien
gagttgcctgaaacaccagttttgc

SEQ ID NO: 1730444 - DNA, 25 bp, Homo sapien
tgtcttgcggacagaagtgttgcca

SEQ ID NO: 1730445 - DNA, 25 bp, Homo sapien
taacactgcaagtaaggaagatcct

SEQ ID NO: 1730446 - DNA, 25 bp, Homo sapien
tgtcaaagcatttaagttgcagcca

SEQ ID NO: 1730447 - DNA, 25 bp, Homo sapien
tgcctgcggtgtcaaagcatttaag

SEQ ID NO: 1730448 - DNA, 25 bp, Homo sapien
gaaggaggtgcctgcggtgtcaaag

SEQ ID NO: 1730449 - DNA, 25 bp, Homo sapien
gcggtgtcaaagcatttaagttgca

SEQ ID NO: 1730450 - DNA, 25 bp, Homo sapien
ctgacagggctggtgtgaagctgca

SEQ ID NO: 1730451 - DNA, 25 bp, Homo sapien
gcctcactgacagggctggtgtgaa

SEQ ID NO: 1730452 - DNA, 25 bp, Homo sapien
ggctggtgtgaagctgcaggattac

SEQ ID NO: 1730453 - DNA, 25 bp, Homo sapien
acagcctcactgacagggctggtgt

SEQ ID NO: 1730454 - DNA, 25 bp, Homo sapien
caaggtgattttggaaggacccaga

SEQ ID NO: 1730455 - DNA, 25 bp, Homo sapien
tggaaggacccagaaggaggagttc

SEQ ID NO: 1730456 - DNA, 25 bp, Homo sapien
gtttcaatgtaaagagagaaagtca

SEQ ID NO: 1730457 - DNA, 25 bp, Homo sapien
agagaaagtcaaggtgattttggaa

SEQ ID NO: 1730458 - DNA, 25 bp, Homo sapien
catactctttgcaagtggattcctc

SEQ ID NO: 1730459 - DNA, 25 bp, Homo sapien
gagagaaaattacaggacacatttt

SEQ ID NO: 1730460 - DNA, 25 bp, Homo sapien
cattagaacctccagattacagagc

SEQ ID NO: 1730461 - DNA, 25 bp, Homo sapien
tcaatccctatcaacaaaatgagga

SEQ ID NO: 1730462 - DNA, 25 bp, Homo sapien
ctctcctgtggtgtagtctgtgtct

SEQ ID NO: 1730463 - DNA, 25 bp, Homo sapien
tgtgtctgtctggaatgtaagcagg

SEQ ID NO: 1730464 - DNA, 25 bp, Homo sapien
gctgggactggttgtcagatagcca

SEQ ID NO: 1730465 - DNA, 25 bp, Homo sapien
ccacagagccttcaacttcaaggca

SEQ ID NO: 1730466 - DNA, 25 bp, Homo sapien
cttgacaagtaggttcagaaggcag

SEQ ID NO: 1730467 - DNA, 25 bp, Homo sapien
cagggaattgcgtttcatgtgatca

SEQ ID NO: 1730468 - DNA, 25 bp, Homo sapien
tgctatgaactttgcggctgacaag

SEQ ID NO: 1730469 - DNA, 25 bp, Homo sapien
aatgctatgaactttgcggctgaca

SEQ ID NO: 1730470 - DNA, 25 bp, Homo sapien
ctgcagtgacaaagaccacataagc

SEQ ID NO: 1730471 - DNA, 25 bp, Homo sapien
gactctgttgacagcacgctcgttc

SEQ ID NO: 1730472 - DNA, 25 bp, Homo sapien
cagtgcaccacagcgaggcagattc

SEQ ID NO: 1730473 - DNA, 25 bp, Homo sapien
tcctccacaaatcggatcgcactga

SEQ ID NO: 1730474 - DNA, 25 bp, Homo sapien
gacatcatttaccaagttctccagt

SEQ ID NO: 1730475 - DNA, 25 bp, Homo sapien
gaggcaaagaatctgcatttccata

SEQ ID NO: 1730476 - DNA, 25 bp, Homo sapien
agaggcaaagaatctgcatttccat

SEQ ID NO: 1730477 - DNA, 25 bp, Homo sapien
aggcaaagaatctgcatttccatac

SEQ ID NO: 1730478 - DNA, 25 bp, Homo sapien
aaaagctttctttggatgtatgtgc

SEQ ID NO: 1730479 - DNA, 25 bp, Homo sapien
aacatgcagcttcaaggcattagca

SEQ ID NO: 1730480 - DNA, 25 bp, Homo sapien
tgctgtgtgtactatttctatgacc

SEQ ID NO: 1730481 - DNA, 25 bp, Homo sapien
tactattacccaaagcgattctggc

SEQ ID NO: 1730482 - DNA, 25 bp, Homo sapien
tcatgtgctttaactcccctgggtg

SEQ ID NO: 1730483 - DNA, 25 bp, Homo sapien
tttgtttgagtccagtcctttagca

SEQ ID NO: 1730484 - DNA, 25 bp, Homo sapien
gagtggctcgccttagaagtgttct

SEQ ID NO: 1730485 - DNA, 25 bp, Homo sapien
ctttagcagcattcatgtcattccg

SEQ ID NO: 1730486 - DNA, 25 bp, Homo sapien
cataccatcagagtaggcacagtct

SEQ ID NO: 1730487 - DNA, 25 bp, Homo sapien
caggaacgtctcgacagcagaggaa

SEQ ID NO: 1730488 - DNA, 25 bp, Homo sapien
tatctctcatcagtaggtccaaggg

SEQ ID NO: 1730489 - DNA, 25 bp, Homo sapien
tacaactgattggacatgacacagg

SEQ ID NO: 1730490 - DNA, 25 bp, Homo sapien
ttaaattgcacttataaagatagca

SEQ ID NO: 1730491 - DNA, 25 bp, Homo sapien
tgattttcctagacaccacacagtg

SEQ ID NO: 1730492 - DNA, 25 bp, Homo sapien
cagtattttgtgatactttgattca

SEQ ID NO: 1730493 - DNA, 25 bp, Homo sapien
gatactttgattcaaactctattta

SEQ ID NO: 1730494 - DNA, 25 bp, Homo sapien
ggaggtcactcacaactgacgggta

SEQ ID NO: 1730495 - DNA, 25 bp, Homo sapien
caaagaatttggctacctgctatca

SEQ ID NO: 1730496 - DNA, 25 bp, Homo sapien
taaggagtccaattggccagatagc

SEQ ID NO: 1730497 - DNA, 25 bp, Homo sapien
gatatttaacagaccagagcacact

SEQ ID NO: 1730498 - DNA, 25 bp, Homo sapien
gacatcaagctggtatctcatctag

SEQ ID NO: 1730499 - DNA, 25 bp, Homo sapien
aaatgccttcccgagtgcctctggc

SEQ ID NO: 1730500 - DNA, 25 bp, Homo sapien
tgctggcaggcatcaagacgaagac

SEQ ID NO: 1730501 - DNA, 25 bp, Homo sapien
tctgtcagagccctggcaaatgcct

SEQ ID NO: 1730502 - DNA, 25 bp, Homo sapien
tttgcctcttcgtggtatggcaggc

SEQ ID NO: 1730503 - DNA, 25 bp, Homo sapien
ttgcctcttcgtggtatggcaggca

SEQ ID NO: 1730504 - DNA, 25 bp, Homo sapien
tgcctcttcgtggtatggcaggcat

SEQ ID NO: 1730505 - DNA, 25 bp, Homo sapien
tcaaagttgactcatcggcaaaatc

SEQ ID NO: 1730506 - DNA, 25 bp, Homo sapien
ggcacacttcaaagttgactcatcg

SEQ ID NO: 1730507 - DNA, 25 bp, Homo sapien
caaaatcaggtgagccaggttctaa

SEQ ID NO: 1730508 - DNA, 25 bp, Homo sapien
tacgtgattcactttccagaatgag

SEQ ID NO: 1730509 - DNA, 25 bp, Homo sapien
gaaagatcgtgcacagttcctatgg

SEQ ID NO: 1730510 - DNA, 25 bp, Homo sapien
tccttgtgactctgtggtaagaaag

SEQ ID NO: 1730511 - DNA, 25 bp, Homo sapien
ctctgtggtaagaaagatcgtgcac

SEQ ID NO: 1730512 - DNA, 25 bp, Homo sapien
gttcctatggttcctccacaaagca

SEQ ID NO: 1730513 - DNA, 25 bp, Homo sapien
tatggccgctatatactgctgggac

SEQ ID NO: 1730514 - DNA, 25 bp, Homo sapien
tgaatccagttagggctagtaagcc

SEQ ID NO: 1730515 - DNA, 25 bp, Homo sapien
taagcagctgaaatacgaaggccac

SEQ ID NO: 1730516 - DNA, 25 bp, Homo sapien
tgaataagggagcacatcaccactg

SEQ ID NO: 1730517 - DNA, 25 bp, Homo sapien
cagctccagcttactgttgccatat

SEQ ID NO: 1730518 - DNA, 25 bp, Homo sapien
aaatctcttgattgtgaaatgttgg

SEQ ID NO: 1730519 - DNA, 25 bp, Homo sapien
atctcttgattgtgaaatgttggaa

SEQ ID NO: 1730520 - DNA, 25 bp, Homo sapien
actgttgccatatgggaatgcaggc

SEQ ID NO: 1730521 - DNA, 25 bp, Homo sapien
taagatgtgcttggaatgcttgcct

SEQ ID NO: 1730522 - DNA, 25 bp, Homo sapien
gatttttagcggtgaagattcttcc

SEQ ID NO: 1730523 - DNA, 25 bp, Homo sapien
gaggattgaagacctatgactccaa

SEQ ID NO: 1730524 - DNA, 25 bp, Homo sapien
gactccaacagccaaaagagtaaga

SEQ ID NO: 1730525 - DNA, 25 bp, Homo sapien
gggatttgcaatactagaggcagta

SEQ ID NO: 1730526 - DNA, 25 bp, Homo sapien
cagtaaaacatctggaccatgaggt

SEQ ID NO: 1730527 - DNA, 25 bp, Homo sapien
catggttcaaccaggaaccttctcc

SEQ ID NO: 1730528 - DNA, 25 bp, Homo sapien
aattcatggttcaaccaggaacctt

SEQ ID NO: 1730529 - DNA, 25 bp, Homo sapien
tgttcatgtctctcaatccaaggca

SEQ ID NO: 1730530 - DNA, 25 bp, Homo sapien
tccagtttgcccaccatgagtcagg

SEQ ID NO: 1730531 - DNA, 25 bp, Homo sapien
ttccaagtctaattcccagaagaaa

SEQ ID NO: 1730532 - DNA, 25 bp, Homo sapien
tccaaggcatgcatacaaactgact

SEQ ID NO: 1730533 - DNA, 25 bp, Homo sapien
taatccatcagggaggtcaacggcc

SEQ ID NO: 1730534 - DNA, 25 bp, Homo sapien
ggcataaacctcattcccactggga

SEQ ID NO: 1730535 - DNA, 25 bp, Homo sapien
gctgaccctgtcagtcttcggaaaa

SEQ ID NO: 1730536 - DNA, 25 bp, Homo sapien
tggataccaggcacaagaggcagaa

SEQ ID NO: 1730537 - DNA, 25 bp, Homo sapien
gcaaattcatggaatgagaaagatc

SEQ ID NO: 1730538 - DNA, 25 bp, Homo sapien
gatcatttgtggtttccagtggtag

SEQ ID NO: 1730539 - DNA, 25 bp, Homo sapien
tcatttgtggtttccagtggtagga

SEQ ID NO: 1730540 - DNA, 25 bp, Homo sapien
gactgctaacgggaacagagttact

SEQ ID NO: 1730541 - DNA, 25 bp, Homo sapien
tcagagagccctagcgataatttct

SEQ ID NO: 1730542 - DNA, 25 bp, Homo sapien
taaaatcagcagatctagcgcttcc

SEQ ID NO: 1730543 - DNA, 25 bp, Homo sapien
gagagcctaggacactatcagagag

SEQ ID NO: 1730544 - DNA, 25 bp, Homo sapien
gaatgttccaacaggttaggctccc

SEQ ID NO: 1730545 - DNA, 25 bp, Homo sapien
tctaaattcttgtttaataagcttc

SEQ ID NO: 1730546 - DNA, 25 bp, Homo sapien
cgtcagtttctcctctaaattcttg

SEQ ID NO: 1730547 - DNA, 25 bp, Homo sapien
agcttcttttttcacgcttttcaag

SEQ ID NO: 1730548 - DNA, 25 bp, Homo sapien
taagcttcttttttcacgcttttca

SEQ ID NO: 1730549 - DNA, 25 bp, Homo sapien
taaaacaatcttccagtgctgaggc

SEQ ID NO: 1730550 - DNA, 25 bp, Homo sapien
ggttagctctacaaggacacatggc

SEQ ID NO: 1730551 - DNA, 25 bp, Homo sapien
gaggccggctagcacaacttttcca

SEQ ID NO: 1730552 - DNA, 25 bp, Homo sapien
gcttaggctagggacttcacataca

SEQ ID NO: 1730553 - DNA, 25 bp, Homo sapien
gaaagtgaaatgctaatacatcgaa

SEQ ID NO: 1730554 - DNA, 25 bp, Homo sapien
tcgaatcacttcgaataagaagagt

SEQ ID NO: 1730555 - DNA, 25 bp, Homo sapien
tgtcctctgtttactcgcaaaactt

SEQ ID NO: 1730556 - DNA, 25 bp, Homo sapien
ggcatgcacaatgtctgactttcca

SEQ ID NO: 1730557 - DNA, 25 bp, Homo sapien
actgggctttcatgtgttcctgcca

SEQ ID NO: 1730558 - DNA, 25 bp, Homo sapien
tgtcttcagcaacctagccagtcat

SEQ ID NO: 1730559 - DNA, 25 bp, Homo sapien
cgtatgcctctgatgtgccgccata

SEQ ID NO: 1730560 - DNA, 25 bp, Homo sapien
gaaacataatgctcgatgaactgaa

SEQ ID NO: 1730561 - DNA, 25 bp, Homo sapien
agatgaaggtaagaggcatatagta

SEQ ID NO: 1730562 - DNA, 25 bp, Homo sapien
gatgaaggtaagaggcatatagtat

SEQ ID NO: 1730563 - DNA, 25 bp, Homo sapien
caggccaaatgcattgggtttgcac

SEQ ID NO: 1730564 - DNA, 25 bp, Homo sapien
tggggagaccttcttgaaaaagtgc

SEQ ID NO: 1730565 - DNA, 25 bp, Homo sapien
gagaccttcttgaaaaagtgccttg

SEQ ID NO: 1730566 - DNA, 25 bp, Homo sapien
gaaaaagtgccttgagctagtttta

SEQ ID NO: 1730567 - DNA, 25 bp, Homo sapien
gagctagttttattgttgggttgga

SEQ ID NO: 1730568 - DNA, 25 bp, Homo sapien
agtgtgggatgtaaattcttgtgag

SEQ ID NO: 1730569 - DNA, 25 bp, Homo sapien
gtgtgggatgtaaattcttgtgaga

SEQ ID NO: 1730570 - DNA, 25 bp, Homo sapien
tgcttgccgggaagcactaaactta

SEQ ID NO: 1730571 - DNA, 25 bp, Homo sapien
gcttgccgggaagcactaaacttac

SEQ ID NO: 1730572 - DNA, 25 bp, Homo sapien
gctgcttgccgggaagcactaaact

SEQ ID NO: 1730573 - DNA, 25 bp, Homo sapien
ctgcttgccgggaagcactaaactt

SEQ ID NO: 1730574 - DNA, 25 bp, Homo sapien
tttgacctgatgaagccaaatgttt

SEQ ID NO: 1730575 - DNA, 25 bp, Homo sapien
cttaacaatatttgacctgatgaag

SEQ ID NO: 1730576 - DNA, 25 bp, Homo sapien
aacaatatttgacctgatgaagcca

SEQ ID NO: 1730577 - DNA, 25 bp, Homo sapien
gtttaatgcctatttgttgtacatt

SEQ ID NO: 1730578 - DNA, 25 bp, Homo sapien
cagagaggaactgggtaacccatgg

SEQ ID NO: 1730579 - DNA, 25 bp, Homo sapien
ctagggtgatgctccagagaggaac

SEQ ID NO: 1730580 - DNA, 25 bp, Homo sapien
tccagagaggaactgggtaacccat

SEQ ID NO: 1730581 - DNA, 25 bp, Homo sapien
gctccagagaggaactgggtaaccc

SEQ ID NO: 1730582 - DNA, 25 bp, Homo sapien
tgtcagctgctgatattgatgagct

SEQ ID NO: 1730583 - DNA, 25 bp, Homo sapien
tcagctgctgatattgatgagctgc

SEQ ID NO: 1730584 - DNA, 25 bp, Homo sapien
tgtgtcagctgctgatattgatgag

SEQ ID NO: 1730585 - DNA, 25 bp, Homo sapien
gcaaagatgacaaagcactgtacaa

SEQ ID NO: 1730586 - DNA, 25 bp, Homo sapien
tgccacgtgtcaaactagcagatgt

SEQ ID NO: 1730587 - DNA, 25 bp, Homo sapien
cggtgccacgtgtcaaactagcaga

SEQ ID NO: 1730588 - DNA, 25 bp, Homo sapien
ggtgccacgtgtcaaactagcagat

SEQ ID NO: 1730589 - DNA, 25 bp, Homo sapien
gccacgtgtcaaactagcagatgtc

SEQ ID NO: 1730590 - DNA, 25 bp, Homo sapien
caaatccaaggtaccagctgcacat

SEQ ID NO: 1730591 - DNA, 25 bp, Homo sapien
tcaaatccaaggtaccagctgcaca

SEQ ID NO: 1730592 - DNA, 25 bp, Homo sapien
ttcctctcactttgtcctgactcct

SEQ ID NO: 1730593 - DNA, 25 bp, Homo sapien
tcctctcactttgtcctgactcctt

SEQ ID NO: 1730594 - DNA, 25 bp, Homo sapien
cttcctctcactttgtcctgactcc

SEQ ID NO: 1730595 - DNA, 25 bp, Homo sapien
ttcatcacataagggagcgagcaaa

SEQ ID NO: 1730596 - DNA, 25 bp, Homo sapien
tcacataagggagcgagcaaaccaa

SEQ ID NO: 1730597 - DNA, 25 bp, Homo sapien
catcacataagggagcgagcaaacc

SEQ ID NO: 1730598 - DNA, 25 bp, Homo sapien
tgattcatcacataagggagcgagc

SEQ ID NO: 1730599 - DNA, 25 bp, Homo sapien
ggaagtaattgttcccgcagtcact

SEQ ID NO: 1730600 - DNA, 25 bp, Homo sapien
aattgttcccgcagtcactcagaag

SEQ ID NO: 1730601 - DNA, 25 bp, Homo sapien
aatgctccctgataagatgcacgag

SEQ ID NO: 1730602 - DNA, 25 bp, Homo sapien
tgataagatgcacgaggtcatttgg

SEQ ID NO: 1730603 - DNA, 25 bp, Homo sapien
cacgcaggctaacagctcctttgct

SEQ ID NO: 1730604 - DNA, 25 bp, Homo sapien
agaaactgttttcccgcatgccacg

SEQ ID NO: 1730605 - DNA, 25 bp, Homo sapien
cctaaaagttctcttccttcagatg

SEQ ID NO: 1730606 - DNA, 25 bp, Homo sapien
tcagttttgggctgtaatgccttcc

SEQ ID NO: 1730607 - DNA, 25 bp, Homo sapien
acagcaggttggcaagctgatcagc

SEQ ID NO: 1730608 - DNA, 25 bp, Homo sapien
ggcaagctgatcagctggaatctca

SEQ ID NO: 1730609 - DNA, 25 bp, Homo sapien
aaaacagcaggttggcaagctgatc

SEQ ID NO: 1730610 - DNA, 25 bp, Homo sapien
caggttggcaagctgatcagctgga

SEQ ID NO: 1730611 - DNA, 25 bp, Homo sapien
gaagatcagaggtttggcttcagaa

SEQ ID NO: 1730612 - DNA, 25 bp, Homo sapien
gacaaatgtgaagatcagaggtttg

SEQ ID NO: 1730613 - DNA, 25 bp, Homo sapien
gatcagaggtttggcttcagaacca

SEQ ID NO: 1730614 - DNA, 25 bp, Homo sapien
cagtggggacaaatgtgaagatcag

SEQ ID NO: 1730615 - DNA, 25 bp, Homo sapien
ggtgtcagccaactgagtatgggtt

SEQ ID NO: 1730616 - DNA, 25 bp, Homo sapien
ccaactgagtatgggttggtagtct

SEQ ID NO: 1730617 - DNA, 25 bp, Homo sapien
aacaaggaatttagaggtgtcagcc

SEQ ID NO: 1730618 - DNA, 25 bp, Homo sapien
gtttctggactcttatcacttgatt

SEQ ID NO: 1730619 - DNA, 25 bp, Homo sapien
ctttcttgtaaaatcgttccactga

SEQ ID NO: 1730620 - DNA, 25 bp, Homo sapien
gctcccagcattcaaggtcaagtag

SEQ ID NO: 1730621 - DNA, 25 bp, Homo sapien
tccactgacctctgaaggacaagtc

SEQ ID NO: 1730622 - DNA, 25 bp, Homo sapien
gacaagtcaatttcgcttggtctct

SEQ ID NO: 1730623 - DNA, 25 bp, Homo sapien
gatagctagagacttgggccggaca

SEQ ID NO: 1730624 - DNA, 25 bp, Homo sapien
tttgggacgcactacatcagagacc

SEQ ID NO: 1730625 - DNA, 25 bp, Homo sapien
gaggtcttgagatcagtcccctgtg

SEQ ID NO: 1730626 - DNA, 25 bp, Homo sapien
gaccagactggacgagatagctaga

SEQ ID NO: 1730627 - DNA, 25 bp, Homo sapien
gatggcctttgcagaccgcccaaga

SEQ ID NO: 1730628 - DNA, 25 bp, Homo sapien
aaacaggatggcctttgcagaccgc

SEQ ID NO: 1730629 - DNA, 25 bp, Homo sapien
caagacaaagggtgcataaacgctt

SEQ ID NO: 1730630 - DNA, 25 bp, Homo sapien
ttgcagaccgcccaagacaaagggt

SEQ ID NO: 1730631 - DNA, 25 bp, Homo sapien
ggaggtgcccttcgatgcagaaaag

SEQ ID NO: 1730632 - DNA, 25 bp, Homo sapien
cagaggctccctcgaggttaactgg

SEQ ID NO: 1730633 - DNA, 25 bp, Homo sapien
caggtggtttacaggcaagctgctc

SEQ ID NO: 1730634 - DNA, 25 bp, Homo sapien
gaaacagtaacgtcgaggaggtgcc

SEQ ID NO: 1730635 - DNA, 25 bp, Homo sapien
tgacaatgcggactggtatgtacga

SEQ ID NO: 1730636 - DNA, 25 bp, Homo sapien
acaatgcggactggtatgtacgagg

SEQ ID NO: 1730637 - DNA, 25 bp, Homo sapien
cgaattcgacttcagagaagcactg

SEQ ID NO: 1730638 - DNA, 25 bp, Homo sapien
atgtacgaggccgaattcgacttca

SEQ ID NO: 1730639 - DNA, 25 bp, Homo sapien
agagagattttttaggcgtgggtgg

SEQ ID NO: 1730640 - DNA, 25 bp, Homo sapien
tacccctgactttgaaagatttcca

SEQ ID NO: 1730641 - DNA, 25 bp, Homo sapien
ggaagaagagccgtggaaagaggag

SEQ ID NO: 1730642 - DNA, 25 bp, Homo sapien
gtgagaagggcaagccgggaaggca

SEQ ID NO: 1730643 - DNA, 25 bp, Homo sapien
tggtgacccggctctcagggaacaa

SEQ ID NO: 1730644 - DNA, 25 bp, Homo sapien
tcttgaaggcaaggtaccactgccg

SEQ ID NO: 1730645 - DNA, 25 bp, Homo sapien
tctacattcatggaagcaaggctgc

SEQ ID NO: 1730646 - DNA, 25 bp, Homo sapien
gcgcctgagaaagcggagtagactt

SEQ ID NO: 1730647 - DNA, 25 bp, Homo sapien
ttgacatggacaatgcacaaggtga

SEQ ID NO: 1730648 - DNA, 25 bp, Homo sapien
gacaatgcacaaggtgaaatcagct

SEQ ID NO: 1730649 - DNA, 25 bp, Homo sapien
catggacaatgcacaaggtgaaatc

SEQ ID NO: 1730650 - DNA, 25 bp, Homo sapien
gcctgttgacatggacaatgcacaa

SEQ ID NO: 1730651 - DNA, 25 bp, Homo sapien
aagctctttgatttcaaaaagagtc

SEQ ID NO: 1730652 - DNA, 25 bp, Homo sapien
agctctttgatttcaaaaagagtcc

SEQ ID NO: 1730653 - DNA, 25 bp, Homo sapien
gctctttgatttcaaaaagagtcct

SEQ ID NO: 1730654 - DNA, 25 bp, Homo sapien
gagtgcgaaccgttactaggatcaa

SEQ ID NO: 1730655 - DNA, 25 bp, Homo sapien
gagagaagcacaggagtggtacaca

SEQ ID NO: 1730656 - DNA, 25 bp, Homo sapien
caatcattgaacacctgagtgcgaa

SEQ ID NO: 1730657 - DNA, 25 bp, Homo sapien
taggatcaattcagagaggctagct

SEQ ID NO: 1730658 - DNA, 25 bp, Homo sapien
ttcatagggattgcccagacacttc

SEQ ID NO: 1730659 - DNA, 25 bp, Homo sapien
tatatctggattactggcagagcac

SEQ ID NO: 1730660 - DNA, 25 bp, Homo sapien
aaccaagccctgatcccgttcatag

SEQ ID NO: 1730661 - DNA, 25 bp, Homo sapien
tcagtcctgagatgaaagctcaacc

SEQ ID NO: 1730662 - DNA, 25 bp, Homo sapien
gcaaaagccttgtagcttgacttgg

SEQ ID NO: 1730663 - DNA, 25 bp, Homo sapien
attgctgcaaaagccttgtagcttg

SEQ ID NO: 1730664 - DNA, 25 bp, Homo sapien
aaagccttgtagcttgacttggtct

SEQ ID NO: 1730665 - DNA, 25 bp, Homo sapien
gctgcaaaagccttgtagcttgact

SEQ ID NO: 1730666 - DNA, 25 bp, Homo sapien
gattcaggtctgaataacatacacc

SEQ ID NO: 1730667 - DNA, 25 bp, Homo sapien
taatataaaaccatgtgtaggatag

SEQ ID NO: 1730668 - DNA, 25 bp, Homo sapien
aatctcactttgattgtctagttgg

SEQ ID NO: 1730669 - DNA, 25 bp, Homo sapien
ggatagtagatattgttagaaaaat

SEQ ID NO: 1730670 - DNA, 25 bp, Homo sapien
ccaggtccagatgctagaactgcca

SEQ ID NO: 1730671 - DNA, 25 bp, Homo sapien
aactattagccttgaccaagaggta

SEQ ID NO: 1730672 - DNA, 25 bp, Homo sapien
cttctaacaaccagggatctccatc

SEQ ID NO: 1730673 - DNA, 25 bp, Homo sapien
tagccttgaccaagaggtaccaggt

SEQ ID NO: 1730674 - DNA, 25 bp, Homo sapien
ctccactggtggttctaatgtgttg

SEQ ID NO: 1730675 - DNA, 25 bp, Homo sapien
ttctaatgtgttgtccttggagaca

SEQ ID NO: 1730676 - DNA, 25 bp, Homo sapien
gtccttggagacactttcagtcttg

SEQ ID NO: 1730677 - DNA, 25 bp, Homo sapien
cttggagacactttcagtcttggct

SEQ ID NO: 1730678 - DNA, 25 bp, Homo sapien
tatcaatggtagcacagagctcttc

SEQ ID NO: 1730679 - DNA, 25 bp, Homo sapien
ttcagtttgctgcctgagctgtgca

SEQ ID NO: 1730680 - DNA, 25 bp, Homo sapien
taagaccttatcaatggtagcacag

SEQ ID NO: 1730681 - DNA, 25 bp, Homo sapien
catagacaaggaatcctgtaagacc

SEQ ID NO: 1730682 - DNA, 25 bp, Homo sapien
tttggggaccttgaaggagaatcag

SEQ ID NO: 1730683 - DNA, 25 bp, Homo sapien
tttgactgtgtcagaacccaacaat

SEQ ID NO: 1730684 - DNA, 25 bp, Homo sapien
caacaatgtctttggggaccttgaa

SEQ ID NO: 1730685 - DNA, 25 bp, Homo sapien
gactgtgtcagaacccaacaatgtc

SEQ ID NO: 1730686 - DNA, 25 bp, Homo sapien
gctgctcttggaagagttgtaggag

SEQ ID NO: 1730687 - DNA, 25 bp, Homo sapien
ctgctcttggaagagttgtaggagt

SEQ ID NO: 1730688 - DNA, 25 bp, Homo sapien
agctgctcttggaagagttgtagga

SEQ ID NO: 1730689 - DNA, 25 bp, Homo sapien
tgatgttttatctctgacataacct

SEQ ID NO: 1730690 - DNA, 25 bp, Homo sapien
catcactctaacagacaccatcttg

SEQ ID NO: 1730691 - DNA, 25 bp, Homo sapien
tttggtcggcatcactctaacagac

SEQ ID NO: 1730692 - DNA, 25 bp, Homo sapien
atttcacattcatgacaggtatccc

SEQ ID NO: 1730693 - DNA, 25 bp, Homo sapien
caggtatccctttggtcggcatcac

SEQ ID NO: 1730694 - DNA, 25 bp, Homo sapien
tgactctcagatactgtagaagatg

SEQ ID NO: 1730695 - DNA, 25 bp, Homo sapien
actctcagatactgtagaagatggt

SEQ ID NO: 1730696 - DNA, 25 bp, Homo sapien
tcagatactgtagaagatggtgagg

SEQ ID NO: 1730697 - DNA, 25 bp, Homo sapien
cagctgactctcagatactgtagaa

SEQ ID NO: 1730698 - DNA, 25 bp, Homo sapien
gctggatgcatcagctggcattcag

SEQ ID NO: 1730699 - DNA, 25 bp, Homo sapien
ctggatgcatcagctggcattcaga

SEQ ID NO: 1730700 - DNA, 25 bp, Homo sapien
tggatgcatcagctggcattcagaa

SEQ ID NO: 1730701 - DNA, 25 bp, Homo sapien
aagctggatgcatcagctggcattc

SEQ ID NO: 1730702 - DNA, 25 bp, Homo sapien
gagaacctgttatgagtgccaaagc

SEQ ID NO: 1730703 - DNA, 25 bp, Homo sapien
agtgcccgacctaagcctactgaat

SEQ ID NO: 1730704 - DNA, 25 bp, Homo sapien
tccctaagcgattcatgtacacatt

SEQ ID NO: 1730705 - DNA, 25 bp, Homo sapien
gacattgtctgctagcactttgacc

SEQ ID NO: 1730706 - DNA, 25 bp, Homo sapien
ctggattttacaggtactgggcgaa

SEQ ID NO: 1730707 - DNA, 25 bp, Homo sapien
actgggcgaattactccaggcttag

SEQ ID NO: 1730708 - DNA, 25 bp, Homo sapien
tactgaaagggttgggttcatagac

SEQ ID NO: 1730709 - DNA, 25 bp, Homo sapien
agaggtcgctgttatcttccaagta

SEQ ID NO: 1730710 - DNA, 25 bp, Homo sapien
tgtgatgtctttatagagagcaaca

SEQ ID NO: 1730711 - DNA, 25 bp, Homo sapien
gatgtctttatagagagcaacatct

SEQ ID NO: 1730712 - DNA, 25 bp, Homo sapien
ctttatagagagcaacatcttggtc

SEQ ID NO: 1730713 - DNA, 25 bp, Homo sapien
ttttgtgatgtctttatagagagca

SEQ ID NO: 1730714 - DNA, 25 bp, Homo sapien
cattgagcttaccatgaaagaactg

SEQ ID NO: 1730715 - DNA, 25 bp, Homo sapien
cctgaggccagtcacaattattgaa

SEQ ID NO: 1730716 - DNA, 25 bp, Homo sapien
tgaaacgtatgtaggaactgtgtcc

SEQ ID NO: 1730717 - DNA, 25 bp, Homo sapien
cttgttacctaatgagtgcccctcc

SEQ ID NO: 1730718 - DNA, 25 bp, Homo sapien
tatctgatggaggtacactcaaggg

SEQ ID NO: 1730719 - DNA, 25 bp, Homo sapien
taactagccacaaggatagggttcc

SEQ ID NO: 1730720 - DNA, 25 bp, Homo sapien
ttccgttgcagtaggagtccacaga

SEQ ID NO: 1730721 - DNA, 25 bp, Homo sapien
tacagggatcataaaacagtcttgg

SEQ ID NO: 1730722 - DNA, 25 bp, Homo sapien
actgaggagggtgtgagaattctcc

SEQ ID NO: 1730723 - DNA, 25 bp, Homo sapien
cagtgacttagcaggaggatagagt

SEQ ID NO: 1730724 - DNA, 25 bp, Homo sapien
tataaaggatggagcgagacaggct

SEQ ID NO: 1730725 - DNA, 25 bp, Homo sapien
tcatcactcaaggagaaggacagat

SEQ ID NO: 1730726 - DNA, 25 bp, Homo sapien
accacgttggatgttggtcaggctg

SEQ ID NO: 1730727 - DNA, 25 bp, Homo sapien
tcaaatgatcggcatacctcagcct

SEQ ID NO: 1730728 - DNA, 25 bp, Homo sapien
tataatgtttctattcatatatgtg

SEQ ID NO: 1730729 - DNA, 25 bp, Homo sapien
aaatagaacaaaacattgtatacat

SEQ ID NO: 1730730 - DNA, 25 bp, Homo sapien
cgaatgagtatcattatttgatggc

SEQ ID NO: 1730731 - DNA, 25 bp, Homo sapien
gctttcattagtcacacattggtaa

SEQ ID NO: 1730732 - DNA, 25 bp, Homo sapien
tggcttatatgaaggcgaatgagta

SEQ ID NO: 1730733 - DNA, 25 bp, Homo sapien
gttaaatgtctgagttgtgctttca

SEQ ID NO: 1730734 - DNA, 25 bp, Homo sapien
gtctataggtaacagaagggcttct

SEQ ID NO: 1730735 - DNA, 25 bp, Homo sapien
ggcattgggccacattcctccattc

SEQ ID NO: 1730736 - DNA, 25 bp, Homo sapien
ttggcaggcagatgagctaaggact

SEQ ID NO: 1730737 - DNA, 25 bp, Homo sapien
ctttctatatggtgcctgccagacc

SEQ ID NO: 1730738 - DNA, 25 bp, Homo sapien
tcactagcatgctcaaaaatatcac

SEQ ID NO: 1730739 - DNA, 25 bp, Homo sapien
cagctgccaccaaactaacataaag

SEQ ID NO: 1730740 - DNA, 25 bp, Homo sapien
tatcactgcctcttccaaggtaata

SEQ ID NO: 1730741 - DNA, 25 bp, Homo sapien
cataaagccttgtgaagtgtttgtc

SEQ ID NO: 1730742 - DNA, 25 bp, Homo sapien
caacaacctggtaaggtgagcacta

SEQ ID NO: 1730743 - DNA, 25 bp, Homo sapien
catgctggaatctagactgagagta

SEQ ID NO: 1730744 - DNA, 25 bp, Homo sapien
tatgcccatgggaagttatgcagga

SEQ ID NO: 1730745 - DNA, 25 bp, Homo sapien
tgttcaaggcccaaaactagtgagt

SEQ ID NO: 1730746 - DNA, 25 bp, Homo sapien
ctctttggaatcaagagcttcatgt

SEQ ID NO: 1730747 - DNA, 25 bp, Homo sapien
aggaatagccaccattggatgactc

SEQ ID NO: 1730748 - DNA, 25 bp, Homo sapien
gaatagccaccattggatgactcag

SEQ ID NO: 1730749 - DNA, 25 bp, Homo sapien
ggaatcaagagcttcatgttcagga

SEQ ID NO: 1730750 - DNA, 25 bp, Homo sapien
cttgctaacagaattgttatgttgt

SEQ ID NO: 1730751 - DNA, 25 bp, Homo sapien
tgttatgttgtaaaccattaaatgt

SEQ ID NO: 1730752 - DNA, 25 bp, Homo sapien
acagaattgttatgttgtaaaccat

SEQ ID NO: 1730753 - DNA, 25 bp, Homo sapien
gaattgttatgttgtaaaccattaa

SEQ ID NO: 1730754 - DNA, 25 bp, Homo sapien
gattacaaccttcaactctcagcaa

SEQ ID NO: 1730755 - DNA, 25 bp, Homo sapien
gatgggtccattgctatcaaatccg

SEQ ID NO: 1730756 - DNA, 25 bp, Homo sapien
gaaaggtggctatctactcaggtac

SEQ ID NO: 1730757 - DNA, 25 bp, Homo sapien
tcaaatccgagtataggaatatcct

SEQ ID NO: 1730758 - DNA, 25 bp, Homo sapien
ttaattctggttcttgccaaccaag

SEQ ID NO: 1730759 - DNA, 25 bp, Homo sapien
gaaaggcttaattcttgctgctgag

SEQ ID NO: 1730760 - DNA, 25 bp, Homo sapien
gccaaccaagtgtaagaacaattgg

SEQ ID NO: 1730761 - DNA, 25 bp, Homo sapien
ttttattggctacttcagaaccaga

SEQ ID NO: 1730762 - DNA, 25 bp, Homo sapien
gctcaacttgacaatgactcactac

SEQ ID NO: 1730763 - DNA, 25 bp, Homo sapien
gaaactagaaatagtcttcccaagc

SEQ ID NO: 1730764 - DNA, 25 bp, Homo sapien
caaaattgtcaaacgcccacttctc

SEQ ID NO: 1730765 - DNA, 25 bp, Homo sapien
ccaactttaatctgttgagatgact

SEQ ID NO: 1730766 - DNA, 25 bp, Homo sapien
aagctgtagctttcatcatctggaa

SEQ ID NO: 1730767 - DNA, 25 bp, Homo sapien
gtaagctgtagctttcatcatctgg

SEQ ID NO: 1730768 - DNA, 25 bp, Homo sapien
agtaagaagtaagctgtagctttca

SEQ ID NO: 1730769 - DNA, 25 bp, Homo sapien
gaagtaagctgtagctttcatcatc

SEQ ID NO: 1730770 - DNA, 25 bp, Homo sapien
aggttccaactcatgactaacatgg

SEQ ID NO: 1730771 - DNA, 25 bp, Homo sapien
ctaacatgggaaccttccgaaatgc

SEQ ID NO: 1730772 - DNA, 25 bp, Homo sapien
tccaggttccaactcatgactaaca

SEQ ID NO: 1730773 - DNA, 25 bp, Homo sapien
catgactaacatgggaaccttccga

SEQ ID NO: 1730774 - DNA, 25 bp, Homo sapien
tccatgacttggctgatgacttaac

SEQ ID NO: 1730775 - DNA, 25 bp, Homo sapien
gctgccttaaggaacagcactgtta

SEQ ID NO: 1730776 - DNA, 25 bp, Homo sapien
aatctcttggcagttcagcagagca

SEQ ID NO: 1730777 - DNA, 25 bp, Homo sapien
gcagagcagttctggcctcctacaa

SEQ ID NO: 1730778 - DNA, 25 bp, Homo sapien
taaatctagcaagtggttagcacca

SEQ ID NO: 1730779 - DNA, 25 bp, Homo sapien
cacgttagtattgcggtcagcttaa

SEQ ID NO: 1730780 - DNA, 25 bp, Homo sapien
ggtaaatctcttctatgctggctgt

SEQ ID NO: 1730781 - DNA, 25 bp, Homo sapien
cagtggtgcaaaaagctgtaggtaa

SEQ ID NO: 1730782 - DNA, 25 bp, Homo sapien
ccaaaaatgactgcgtaaataacta

SEQ ID NO: 1730783 - DNA, 25 bp, Homo sapien
gaatgtgtgcatacagcagagaagg

SEQ ID NO: 1730784 - DNA, 25 bp, Homo sapien
tcacccttttacactggagatccaa

SEQ ID NO: 1730785 - DNA, 25 bp, Homo sapien
ctgccatgagctgaggagtgtaatc

SEQ ID NO: 1730786 - DNA, 25 bp, Homo sapien
caaattccacatcatctgtccccat

SEQ ID NO: 1730787 - DNA, 25 bp, Homo sapien
ctggcaaattccacatcatctgtcc

SEQ ID NO: 1730788 - DNA, 25 bp, Homo sapien
tggcaaattccacatcatctgtccc

SEQ ID NO: 1730789 - DNA, 25 bp, Homo sapien
gcaaattccacatcatctgtcccca

SEQ ID NO: 1730790 - DNA, 25 bp, Homo sapien
taactcagctcgaagttgaaaaggc

SEQ ID NO: 1730791 - DNA, 25 bp, Homo sapien
gcctggcctactacgcattcttcaa

SEQ ID NO: 1730792 - DNA, 25 bp, Homo sapien
caaaaagactgaactgtgactcaaa

SEQ ID NO: 1730793 - DNA, 25 bp, Homo sapien
ctagaatttctacgcccttaagtga

SEQ ID NO: 1730794 - DNA, 25 bp, Homo sapien
gtgaacacccactccgacactcagg

SEQ ID NO: 1730795 - DNA, 25 bp, Homo sapien
gagatctccacagccgtaccagtga

SEQ ID NO: 1730796 - DNA, 25 bp, Homo sapien
ctagtgaacacccactccgacactc

SEQ ID NO: 1730797 - DNA, 25 bp, Homo sapien
tgagatctccacagccgtaccagtg

SEQ ID NO: 1730798 - DNA, 25 bp, Homo sapien
tccttgtttctgcatctcttgcacc

SEQ ID NO: 1730799 - DNA, 25 bp, Homo sapien
ccttgtttctgcatctcttgcacca

SEQ ID NO: 1730800 - DNA, 25 bp, Homo sapien
cttgtttctgcatctcttgcaccat

SEQ ID NO: 1730801 - DNA, 25 bp, Homo sapien
ttccttgtttctgcatctcttgcac

SEQ ID NO: 1730802 - DNA, 25 bp, Homo sapien
gactgggaaagctgactcattttga

SEQ ID NO: 1730803 - DNA, 25 bp, Homo sapien
gaggcaggaaccatagctgactggg

SEQ ID NO: 1730804 - DNA, 25 bp, Homo sapien
tgactgggaaagctgactcattttg

SEQ ID NO: 1730805 - DNA, 25 bp, Homo sapien
ggaaccatagctgactgggaaagct

SEQ ID NO: 1730806 - DNA, 25 bp, Homo sapien
gcttagtggaacctaattcagcaag

SEQ ID NO: 1730807 - DNA, 25 bp, Homo sapien
gcaagaaattccctgagggtgacct

SEQ ID NO: 1730808 - DNA, 25 bp, Homo sapien
cagaagcgttttgatttcaaggctt

SEQ ID NO: 1730809 - DNA, 25 bp, Homo sapien
cacctgagtccctgcttagcacaaa

SEQ ID NO: 1730810 - DNA, 25 bp, Homo sapien
aataacagttgctctaaatcatgcc

SEQ ID NO: 1730811 - DNA, 25 bp, Homo sapien
gaggttgcctgctaggatctgtcat

SEQ ID NO: 1730812 - DNA, 25 bp, Homo sapien
ggtttgatttcccatctgtactcca

SEQ ID NO: 1730813 - DNA, 25 bp, Homo sapien
taaatcatgcccagtcacacactgg

SEQ ID NO: 1730814 - DNA, 25 bp, Homo sapien
ctgcattgaaacgaacatccaggct

SEQ ID NO: 1730815 - DNA, 25 bp, Homo sapien
cattgaaacgaacatccaggctctc

SEQ ID NO: 1730816 - DNA, 25 bp, Homo sapien
ctgcctgcattgaaacgaacatcca

SEQ ID NO: 1730817 - DNA, 25 bp, Homo sapien
tgcctgcattgaaacgaacatccag

SEQ ID NO: 1730818 - DNA, 25 bp, Homo sapien
gcctgaaccctgaaactgatccttt

SEQ ID NO: 1730819 - DNA, 25 bp, Homo sapien
agtcaggtatagcttccactttccg

SEQ ID NO: 1730820 - DNA, 25 bp, Homo sapien
tatccaatacccttagccttgtggg

SEQ ID NO: 1730821 - DNA, 25 bp, Homo sapien
gaacctgaattctagtcattaagac

SEQ ID NO: 1730822 - DNA, 25 bp, Homo sapien
gattaagatcttatatccggtccac

SEQ ID NO: 1730823 - DNA, 25 bp, Homo sapien
ttaagatcttatatccggtccacat

SEQ ID NO: 1730824 - DNA, 25 bp, Homo sapien
gaagattaagatcttatatccggtc

SEQ ID NO: 1730825 - DNA, 25 bp, Homo sapien
tgtagtaagataagagaagattaag

SEQ ID NO: 1730826 - DNA, 25 bp, Homo sapien
tagtgaaataagcctctaggtccac

SEQ ID NO: 1730827 - DNA, 25 bp, Homo sapien
aacggtgtgattcctagtgaaataa

SEQ ID NO: 1730828 - DNA, 25 bp, Homo sapien
tcctagtgaaataagcctctaggtc

SEQ ID NO: 1730829 - DNA, 25 bp, Homo sapien
ctctttgagataaatactgcttctc

SEQ ID NO: 1730830 - DNA, 25 bp, Homo sapien
cagccaaaatttctacagtattgcc

SEQ ID NO: 1730831 - DNA, 25 bp, Homo sapien
caacagccaaaatttctacagtatt

SEQ ID NO: 1730832 - DNA, 25 bp, Homo sapien
caaaatttctacagtattgcccttg

SEQ ID NO: 1730833 - DNA, 25 bp, Homo sapien
gccaaaatttctacagtattgccct

SEQ ID NO: 1730834 - DNA, 25 bp, Homo sapien
gaatttatcacagtagcacaacgca

SEQ ID NO: 1730835 - DNA, 25 bp, Homo sapien
tctggataccaaggctgtgtgtgag

SEQ ID NO: 1730836 - DNA, 25 bp, Homo sapien
tgtgtgtgaggaggccattctttct

SEQ ID NO: 1730837 - DNA, 25 bp, Homo sapien
tctcttcacggcaaaaggacttgta

SEQ ID NO: 1730838 - DNA, 25 bp, Homo sapien
gattccgatcagcacgcaggactgt

SEQ ID NO: 1730839 - DNA, 25 bp, Homo sapien
tcactgatcaggattccgatcagca

SEQ ID NO: 1730840 - DNA, 25 bp, Homo sapien
tcagcacgcaggactgtcagatcag

SEQ ID NO: 1730841 - DNA, 25 bp, Homo sapien
caggactgtcagatcagaactttcc

SEQ ID NO: 1730842 - DNA, 25 bp, Homo sapien
tactcctgttgatattccaacatcc

SEQ ID NO: 1730843 - DNA, 25 bp, Homo sapien
ttaaatactatcgattactcctgtt

SEQ ID NO: 1730844 - DNA, 25 bp, Homo sapien
aaatactatcgattactcctgttga

SEQ ID NO: 1730845 - DNA, 25 bp, Homo sapien
ctcctgttgatattccaacatccaa

SEQ ID NO: 1730846 - DNA, 25 bp, Homo sapien
aattactgatccctcttcataatgt

SEQ ID NO: 1730847 - DNA, 25 bp, Homo sapien
ctttaattactgatccctcttcata

SEQ ID NO: 1730848 - DNA, 25 bp, Homo sapien
actgatccctcttcataatgttgac

SEQ ID NO: 1730849 - DNA, 25 bp, Homo sapien
ttctttaattactgatccctcttca

SEQ ID NO: 1730850 - DNA, 25 bp, Homo sapien
agacctgttgtatgatgaagaccca

SEQ ID NO: 1730851 - DNA, 25 bp, Homo sapien
caagccaaattggacagtagattca

SEQ ID NO: 1730852 - DNA, 25 bp, Homo sapien
gctgtaatcctctactccaggcaat

SEQ ID NO: 1730853 - DNA, 25 bp, Homo sapien
tgcaggctagtccttttaaagcagc

SEQ ID NO: 1730854 - DNA, 25 bp, Homo sapien
atagtctcctttattgacctgttca

SEQ ID NO: 1730855 - DNA, 25 bp, Homo sapien
gacctgttcaattaattctgaacga

SEQ ID NO: 1730856 - DNA, 25 bp, Homo sapien
tctgaacgaacaaggcatacatgct

SEQ ID NO: 1730857 - DNA, 25 bp, Homo sapien
gaacaaggcatacatgctgggaaca

SEQ ID NO: 1730858 - DNA, 25 bp, Homo sapien
tcagtggttgttgtgcttcagcctc

SEQ ID NO: 1730859 - DNA, 25 bp, Homo sapien
cgggccagtgcctacatcttaattt

SEQ ID NO: 1730860 - DNA, 25 bp, Homo sapien
cagattctacccatgatagctaagc

SEQ ID NO: 1730861 - DNA, 25 bp, Homo sapien
ctatgtaaatggagacgccacctaa

SEQ ID NO: 1730862 - DNA, 25 bp, Homo sapien
caaaattggctgtaattctgtgctg

SEQ ID NO: 1730863 - DNA, 25 bp, Homo sapien
cccaaaattggctgtaattctgtgc

SEQ ID NO: 1730864 - DNA, 25 bp, Homo sapien
tccccaaaattggctgtaattctgt

SEQ ID NO: 1730865 - DNA, 25 bp, Homo sapien
ttggctgtaattctgtgctgtccat

SEQ ID NO: 1730866 - DNA, 25 bp, Homo sapien
gctcaggagcatgggactaggtggc

SEQ ID NO: 1730867 - DNA, 25 bp, Homo sapien
aggagcatgggactaggtggcaaag

SEQ ID NO: 1730868 - DNA, 25 bp, Homo sapien
tcaggagcatgggactaggtggcaa

SEQ ID NO: 1730869 - DNA, 25 bp, Homo sapien
atgctcaggagcatgggactaggtg

SEQ ID NO: 1730870 - DNA, 25 bp, Homo sapien
tacatgcacatacgtgaatcagaag

SEQ ID NO: 1730871 - DNA, 25 bp, Homo sapien
acatgcacatacgtgaatcagaagg

SEQ ID NO: 1730872 - DNA, 25 bp, Homo sapien
aatacatgcacatacgtgaatcaga

SEQ ID NO: 1730873 - DNA, 25 bp, Homo sapien
atgcacatacgtgaatcagaaggaa

SEQ ID NO: 1730874 - DNA, 25 bp, Homo sapien
taattgcttttaatgcacacacaaa

SEQ ID NO: 1730875 - DNA, 25 bp, Homo sapien
tagtgatttataattgcttttaatg

SEQ ID NO: 1730876 - DNA, 25 bp, Homo sapien
tttataattgcttttaatgcacaca

SEQ ID NO: 1730877 - DNA, 25 bp, Homo sapien
agtgatttataattgcttttaatgc

SEQ ID NO: 1730878 - DNA, 25 bp, Homo sapien
ctgttcttgatcggccatcttgcca

SEQ ID NO: 1730879 - DNA, 25 bp, Homo sapien
gctgccaaccagagctgttcttgat

SEQ ID NO: 1730880 - DNA, 25 bp, Homo sapien
aaccagagctgttcttgatcggcca

SEQ ID NO: 1730881 - DNA, 25 bp, Homo sapien
gctgttcttgatcggccatcttgcc

SEQ ID NO: 1730882 - DNA, 25 bp, Homo sapien
tagtgattatgtgtctcgggcttgc

SEQ ID NO: 1730883 - DNA, 25 bp, Homo sapien
cttcaggtacaccaaccaaaggtgg

SEQ ID NO: 1730884 - DNA, 25 bp, Homo sapien
ggcttccctttgtggataatctgat

SEQ ID NO: 1730885 - DNA, 25 bp, Homo sapien
cattttaaccgtggtgaatctagtg

SEQ ID NO: 1730886 - DNA, 25 bp, Homo sapien
tgatgttcaatgtgaacagtctccc

SEQ ID NO: 1730887 - DNA, 25 bp, Homo sapien
tacaattgagtctgtatccacacaa

SEQ ID NO: 1730888 - DNA, 25 bp, Homo sapien
tctctaaaagagtggtggaaatgta

SEQ ID NO: 1730889 - DNA, 25 bp, Homo sapien
caatatcctctatgtgcatcagccc

SEQ ID NO: 1730890 - DNA, 25 bp, Homo sapien
tgagtccatccaggccatttataag

SEQ ID NO: 1730891 - DNA, 25 bp, Homo sapien
tggaagatcagttgttgcaggtaaa

SEQ ID NO: 1730892 - DNA, 25 bp, Homo sapien
tggaaaatgcccaggatgcagcaca

SEQ ID NO: 1730893 - DNA, 25 bp, Homo sapien
ttttgatccaatgggccatgagtcc

SEQ ID NO: 1730894 - DNA, 25 bp, Homo sapien
aattgctattcggtcagcagccaca

SEQ ID NO: 1730895 - DNA, 25 bp, Homo sapien
gatagattggccgtgtatcgaccct

SEQ ID NO: 1730896 - DNA, 25 bp, Homo sapien
ggcacagcaagagatcaaattctga

SEQ ID NO: 1730897 - DNA, 25 bp, Homo sapien
tccatgacggttcttggcacagcaa

SEQ ID NO: 1730898 - DNA, 25 bp, Homo sapien
attatctgttcatcaatctgggtaa

SEQ ID NO: 1730899 - DNA, 25 bp, Homo sapien
gacattatctgttcatcaatctggg

SEQ ID NO: 1730900 - DNA, 25 bp, Homo sapien
ctgacattatctgttcatcaatctg

SEQ ID NO: 1730901 - DNA, 25 bp, Homo sapien
cattatctgttcatcaatctgggta

SEQ ID NO: 1730902 - DNA, 25 bp, Homo sapien
agtgggtagcatgcgtgggatacca

SEQ ID NO: 1730903 - DNA, 25 bp, Homo sapien
ctttgaaaagtgggtagcatgcgtg

SEQ ID NO: 1730904 - DNA, 25 bp, Homo sapien
tgaaaagtgggtagcatgcgtggga

SEQ ID NO: 1730905 - DNA, 25 bp, Homo sapien
aaagtgggtagcatgcgtgggatac

SEQ ID NO: 1730906 - DNA, 25 bp, Homo sapien
cacatccattgttggtagcattttg

SEQ ID NO: 1730907 - DNA, 25 bp, Homo sapien
ggcacatccattgttggtagcattt

SEQ ID NO: 1730908 - DNA, 25 bp, Homo sapien
catccattgttggtagcattttggt

SEQ ID NO: 1730909 - DNA, 25 bp, Homo sapien
acatccattgttggtagcattttgg

SEQ ID NO: 1730910 - DNA, 25 bp, Homo sapien
tagatttttctacgttgttgggaca

SEQ ID NO: 1730911 - DNA, 25 bp, Homo sapien
gtggcatgccgttttcctcgcccat

SEQ ID NO: 1730912 - DNA, 25 bp, Homo sapien
gagaacattgatagatcctgttaga

SEQ ID NO: 1730913 - DNA, 25 bp, Homo sapien
tctgtatggaggagaacattgatag

SEQ ID NO: 1730914 - DNA, 25 bp, Homo sapien
tgatttctttcattatctcagtttc

SEQ ID NO: 1730915 - DNA, 25 bp, Homo sapien
tttgcatgatttctttcattatctc

SEQ ID NO: 1730916 - DNA, 25 bp, Homo sapien
gcatgatttctttcattatctcagt

SEQ ID NO: 1730917 - DNA, 25 bp, Homo sapien
cttgaactggtccattttgcatgat

SEQ ID NO: 1730918 - DNA, 25 bp, Homo sapien
tacactctttcgtactgagacaggg

SEQ ID NO: 1730919 - DNA, 25 bp, Homo sapien
gaaatgccgtatgccaggccaggca

SEQ ID NO: 1730920 - DNA, 25 bp, Homo sapien
agacaggggaaatgccgtatgccag

SEQ ID NO: 1730921 - DNA, 25 bp, Homo sapien
tattcattcagggttctattggctt

SEQ ID NO: 1730922 - DNA, 25 bp, Homo sapien
aaatcttcacggacttgcattatgg

SEQ ID NO: 1730923 - DNA, 25 bp, Homo sapien
tatttgtgctggtaacatgtctgta

SEQ ID NO: 1730924 - DNA, 25 bp, Homo sapien
tgtctgaagctttcgatatttttct

SEQ ID NO: 1730925 - DNA, 25 bp, Homo sapien
ccctgtcttataatggaagaaatct

SEQ ID NO: 1730926 - DNA, 25 bp, Homo sapien
tgtgtagccctacccatgctcaact

SEQ ID NO: 1730927 - DNA, 25 bp, Homo sapien
taaactatgagatcccacagtagac

SEQ ID NO: 1730928 - DNA, 25 bp, Homo sapien
cataattctaaaggtggatcactct

SEQ ID NO: 1730929 - DNA, 25 bp, Homo sapien
tctcattgtatgacaccgttccctg

SEQ ID NO: 1730930 - DNA, 25 bp, Homo sapien
agagttcctgtcttcttgagggcat

SEQ ID NO: 1730931 - DNA, 25 bp, Homo sapien
aagagttcctgtcttcttgagggca

SEQ ID NO: 1730932 - DNA, 25 bp, Homo sapien
gaaagagttcctgtcttcttgaggg

SEQ ID NO: 1730933 - DNA, 25 bp, Homo sapien
aggaaagagttcctgtcttcttgag

SEQ ID NO: 1730934 - DNA, 25 bp, Homo sapien
ttgtgctcctctcagtgtgccccat

SEQ ID NO: 1730935 - DNA, 25 bp, Homo sapien
tctgcccttgtgctcctctcagtgt

SEQ ID NO: 1730936 - DNA, 25 bp, Homo sapien
tgcccttgtgctcctctcagtgtgc

SEQ ID NO: 1730937 - DNA, 25 bp, Homo sapien
ttttctttctgcccttgtgctcctc

SEQ ID NO: 1730938 - DNA, 25 bp, Homo sapien
gcaaaccatggctcgtggaccaaat

SEQ ID NO: 1730939 - DNA, 25 bp, Homo sapien
caaatgtggctcaagaagcccctta

SEQ ID NO: 1730940 - DNA, 25 bp, Homo sapien
gtaaaactctgtgtgagggagccac

SEQ ID NO: 1730941 - DNA, 25 bp, Homo sapien
cacatggaaggaacttcaggcatcc

SEQ ID NO: 1730942 - DNA, 25 bp, Homo sapien
gataatcaacttttcaatgtcggac

SEQ ID NO: 1730943 - DNA, 25 bp, Homo sapien
agaactcgtcagttggccccaagct

SEQ ID NO: 1730944 - DNA, 25 bp, Homo sapien
caatgtcggactcatttactcctcg

SEQ ID NO: 1730945 - DNA, 25 bp, Homo sapien
cctcgaagaatcctgaaatagccat

SEQ ID NO: 1730946 - DNA, 25 bp, Homo sapien
gaatgtcatattgctaaacttcaat

SEQ ID NO: 1730947 - DNA, 25 bp, Homo sapien
tgaagagacaaagattccactgtca

SEQ ID NO: 1730948 - DNA, 25 bp, Homo sapien
gatagattatgttaacacggtgaag

SEQ ID NO: 1730949 - DNA, 25 bp, Homo sapien
cctttattggtgttgttaatgctca

SEQ ID NO: 1730950 - DNA, 25 bp, Homo sapien
aaccatacttccagcactcttgctt

SEQ ID NO: 1730951 - DNA, 25 bp, Homo sapien
accatacttccagcactcttgcttg

SEQ ID NO: 1730952 - DNA, 25 bp, Homo sapien
taaccatacttccagcactcttgct

SEQ ID NO: 1730953 - DNA, 25 bp, Homo sapien
tgagcatcagcctatgtatctgttt

SEQ ID NO: 1730954 - DNA, 25 bp, Homo sapien
ccttctattccttccctattgtgta

SEQ ID NO: 1730955 - DNA, 25 bp, Homo sapien
taactctgaccatgtgcatgtgggt

SEQ ID NO: 1730956 - DNA, 25 bp, Homo sapien
ccaggaccatagtgttttgcgtact

SEQ ID NO: 1730957 - DNA, 25 bp, Homo sapien
tctggtagaatcactattgtttcct

SEQ ID NO: 1730958 - DNA, 25 bp, Homo sapien
gtggataccagaaaccaataaagag

SEQ ID NO: 1730959 - DNA, 25 bp, Homo sapien
ttttcttgcccctcattaccatttc

SEQ ID NO: 1730960 - DNA, 25 bp, Homo sapien
tcttgtctggtagaatcactattgt

SEQ ID NO: 1730961 - DNA, 25 bp, Homo sapien
cagaagaggacacttaaccagaatt

SEQ ID NO: 1730962 - DNA, 25 bp, Homo sapien
gaattatcaccgtctgtccaactga

SEQ ID NO: 1730963 - DNA, 25 bp, Homo sapien
tccagaagaggacacttaaccagaa

SEQ ID NO: 1730964 - DNA, 25 bp, Homo sapien
cttaaccagaattatcaccgtctgt

SEQ ID NO: 1730965 - DNA, 25 bp, Homo sapien
tgtgtctggacataggaatttggaa

SEQ ID NO: 1730966 - DNA, 25 bp, Homo sapien
tgaaaatgtcaagtaggcagttgaa

SEQ ID NO: 1730967 - DNA, 25 bp, Homo sapien
ccagagtaggctgacgcacaaaact

SEQ ID NO: 1730968 - DNA, 25 bp, Homo sapien
aaattgtcagattatatttgtcctg

SEQ ID NO: 1730969 - DNA, 25 bp, Homo sapien
ttcagggccaagtaggaggtagagg

SEQ ID NO: 1730970 - DNA, 25 bp, Homo sapien
tcagggccaagtaggaggtagagga

SEQ ID NO: 1730971 - DNA, 25 bp, Homo sapien
atcagcaatcaagagtgagcatact

SEQ ID NO: 1730972 - DNA, 25 bp, Homo sapien
cagcaatcaagagtgagcatacttg

SEQ ID NO: 1730973 - DNA, 25 bp, Homo sapien
aagagtgagcatacttgtttggtca

SEQ ID NO: 1730974 - DNA, 25 bp, Homo sapien
gcaatcaagagtgagcatacttgtt

SEQ ID NO: 1730975 - DNA, 25 bp, Homo sapien
tccaagtcatgcagaacagtaagat

SEQ ID NO: 1730976 - DNA, 25 bp, Homo sapien
tgtggccagggttcgcatgagccaa

SEQ ID NO: 1730977 - DNA, 25 bp, Homo sapien
taagatgttgtcctgcgctagagct

SEQ ID NO: 1730978 - DNA, 25 bp, Homo sapien
ctccagatgggtatgaaagatgcct

SEQ ID NO: 1730979 - DNA, 25 bp, Homo sapien
tcctccatttgcaggacatcaaggg

SEQ ID NO: 1730980 - DNA, 25 bp, Homo sapien
gcaggacatcaagggctctgtacac

SEQ ID NO: 1730981 - DNA, 25 bp, Homo sapien
ggaacttaaggacatcctcctcctc

SEQ ID NO: 1730982 - DNA, 25 bp, Homo sapien
ctcctcctccatttgcaggacatca

SEQ ID NO: 1730983 - DNA, 25 bp, Homo sapien
gatttatgatatagacgccgtcaca

SEQ ID NO: 1730984 - DNA, 25 bp, Homo sapien
tatagacgccgtcacatttcttttt

SEQ ID NO: 1730985 - DNA, 25 bp, Homo sapien
ttatgatatagacgccgtcacattt

SEQ ID NO: 1730986 - DNA, 25 bp, Homo sapien
gatatagacgccgtcacatttcttt

SEQ ID NO: 1730987 - DNA, 25 bp, Homo sapien
cacacatgtgcagaagtttccaggc

SEQ ID NO: 1730988 - DNA, 25 bp, Homo sapien
gtagaagaagagatcaggcatcccc

SEQ ID NO: 1730989 - DNA, 25 bp, Homo sapien
tagaagaagagatcaggcatcccct

SEQ ID NO: 1730990 - DNA, 25 bp, Homo sapien
aagaagagatcaggcatcccctccc

SEQ ID NO: 1730991 - DNA, 25 bp, Homo sapien
gtagcggtgaactcaggagatggag

SEQ ID NO: 1730992 - DNA, 25 bp, Homo sapien
tagcggtgaactcaggagatggaga

SEQ ID NO: 1730993 - DNA, 25 bp, Homo sapien
gcaacttcaggctgagtagcggtga

SEQ ID NO: 1730994 - DNA, 25 bp, Homo sapien
tctgcaacttcaggctgagtagcgg

SEQ ID NO: 1730995 - DNA, 25 bp, Homo sapien
ggcttcagaaggaaactgctgaata

SEQ ID NO: 1730996 - DNA, 25 bp, Homo sapien
cactccaggcttcagaaggaaactg

SEQ ID NO: 1730997 - DNA, 25 bp, Homo sapien
ctgagcactccaggcttcagaagga

SEQ ID NO: 1730998 - DNA, 25 bp, Homo sapien
gcttcagaaggaaactgctgaatag

SEQ ID NO: 1730999 - DNA, 25 bp, Homo sapien
ttcagtggttgctcctacctgttca

SEQ ID NO: 1731000 - DNA, 25 bp, Homo sapien
cattcagtggttgctcctacctgtt

SEQ ID NO: 1731001 - DNA, 25 bp, Homo sapien
agtggttgctcctacctgttcagtg

SEQ ID NO: 1731002 - DNA, 25 bp, Homo sapien
cagtggttgctcctacctgttcagt

SEQ ID NO: 1731003 - DNA, 25 bp, Homo sapien
taagtagggtcaccttttcaatgac

SEQ ID NO: 1731004 - DNA, 25 bp, Homo sapien
caatcaggagttttctccaacacaa

SEQ ID NO: 1731005 - DNA, 25 bp, Homo sapien
gaagatctggctttattttcccaca

SEQ ID NO: 1731006 - DNA, 25 bp, Homo sapien
gcctgtttgagctgaacggaacact

SEQ ID NO: 1731007 - DNA, 25 bp, Homo sapien
taagttactgcgagtgtcactgtga

SEQ ID NO: 1731008 - DNA, 25 bp, Homo sapien
tctgatcagggctaccaagagttgg

SEQ ID NO: 1731009 - DNA, 25 bp, Homo sapien
agagtccttgccaggttttccgagg

SEQ ID NO: 1731010 - DNA, 25 bp, Homo sapien
ttaaaatgtctgatcagggctacca

SEQ ID NO: 1731011 - DNA, 25 bp, Homo sapien
gaatgtcctcataggaagagcagga

SEQ ID NO: 1731012 - DNA, 25 bp, Homo sapien
gagcaggagttataacttcagtgat

SEQ ID NO: 1731013 - DNA, 25 bp, Homo sapien
taattgcttagtagtggcccagcca

SEQ ID NO: 1731014 - DNA, 25 bp, Homo sapien
taaagtatcaaatcaagggatccac

SEQ ID NO: 1731015 - DNA, 25 bp, Homo sapien
catagcatatccttactggtattga

SEQ ID NO: 1731016 - DNA, 25 bp, Homo sapien
cctaaaaccagttgacacaggttgc

SEQ ID NO: 1731017 - DNA, 25 bp, Homo sapien
ggcttaaagcaccatttgccaatat

SEQ ID NO: 1731018 - DNA, 25 bp, Homo sapien
ccaatatcattcatttggcaagaga

SEQ ID NO: 1731019 - DNA, 25 bp, Homo sapien
gttgtcccatagaacctttggccat

SEQ ID NO: 1731020 - DNA, 25 bp, Homo sapien
tcttttctctccaaaggacatggat

SEQ ID NO: 1731021 - DNA, 25 bp, Homo sapien
ttttatgggaatattcctctggttg

SEQ ID NO: 1731022 - DNA, 25 bp, Homo sapien
tctggttgtcccatagaacctttgg

SEQ ID NO: 1731023 - DNA, 25 bp, Homo sapien
ttcctgggtcctccaggactccttg

SEQ ID NO: 1731024 - DNA, 25 bp, Homo sapien
ctttgcaagactttcctgggtcctc

SEQ ID NO: 1731025 - DNA, 25 bp, Homo sapien
caggactccttgtccaattttattc

SEQ ID NO: 1731026 - DNA, 25 bp, Homo sapien
tgggtcctccaggactccttgtcca

SEQ ID NO: 1731027 - DNA, 25 bp, Homo sapien
tagaatcacagctttggggagacag

SEQ ID NO: 1731028 - DNA, 25 bp, Homo sapien
aaaagtcccctgctattcactgagg

SEQ ID NO: 1731029 - DNA, 25 bp, Homo sapien
gaggggaaacccacagcaaaatgct

SEQ ID NO: 1731030 - DNA, 25 bp, Homo sapien
gagacagttcagaggtctttttgtc

SEQ ID NO: 1731031 - DNA, 25 bp, Homo sapien
ttcttcaatcattccaaagtcactc

SEQ ID NO: 1731032 - DNA, 25 bp, Homo sapien
acattcttcaatcattccaaagtca

SEQ ID NO: 1731033 - DNA, 25 bp, Homo sapien
cttcaatcattccaaagtcactcct

SEQ ID NO: 1731034 - DNA, 25 bp, Homo sapien
cattcttcaatcattccaaagtcac

SEQ ID NO: 1731035 - DNA, 25 bp, Homo sapien
ctggctggttcgtggaagagtcaat

SEQ ID NO: 1731036 - DNA, 25 bp, Homo sapien
ggctggttcgtggaagagtcaatcc

SEQ ID NO: 1731037 - DNA, 25 bp, Homo sapien
ctggttcgtggaagagtcaatcctt

SEQ ID NO: 1731038 - DNA, 25 bp, Homo sapien
gctggttcgtggaagagtcaatcct

SEQ ID NO: 1731039 - DNA, 25 bp, Homo sapien
gaggcttggtaagttgtacaaataa

SEQ ID NO: 1731040 - DNA, 25 bp, Homo sapien
atgtgaagaaacatctaattcgagg

SEQ ID NO: 1731041 - DNA, 25 bp, Homo sapien
aaataaatgcatgaagtggctgggt

SEQ ID NO: 1731042 - DNA, 25 bp, Homo sapien
gaagaaacatctaattcgagggttg

SEQ ID NO: 1731043 - DNA, 25 bp, Homo sapien
acatgtggtttagattatgatcctc

SEQ ID NO: 1731044 - DNA, 25 bp, Homo sapien
aatgcaaatgctaccaactctgaac

SEQ ID NO: 1731045 - DNA, 25 bp, Homo sapien
tctttacttatcaaggtctcatcca

SEQ ID NO: 1731046 - DNA, 25 bp, Homo sapien
agaggtcaggtctttcatcaaatac

SEQ ID NO: 1731047 - DNA, 25 bp, Homo sapien
ctctagtgaatccttaagcacagca

SEQ ID NO: 1731048 - DNA, 25 bp, Homo sapien
ccttaagcacagcatggatcatagc

SEQ ID NO: 1731049 - DNA, 25 bp, Homo sapien
gtgaatccttaagcacagcatggat

SEQ ID NO: 1731050 - DNA, 25 bp, Homo sapien
taagcacagcatggatcatagccaa

SEQ ID NO: 1731051 - DNA, 25 bp, Homo sapien
tccatgctggcaaaaggtctaaaag

SEQ ID NO: 1731052 - DNA, 25 bp, Homo sapien
gatgaccctccatgctggcaaaagg

SEQ ID NO: 1731053 - DNA, 25 bp, Homo sapien
tttctaaatggagtacgatgaccct

SEQ ID NO: 1731054 - DNA, 25 bp, Homo sapien
aaggtctaaaaggatgtgacttgac

SEQ ID NO: 1731055 - DNA, 25 bp, Homo sapien
gccgggagtactggcccagcttcat

SEQ ID NO: 1731056 - DNA, 25 bp, Homo sapien
tcccagtccgaaatggcggaggccg

SEQ ID NO: 1731057 - DNA, 25 bp, Homo sapien
tttcagcaggtctgggagccgctga

SEQ ID NO: 1731058 - DNA, 25 bp, Homo sapien
gtgcctgcgccacggagctcccagt

SEQ ID NO: 1731059 - DNA, 25 bp, Homo sapien
tcaagacacttttgcttacgccacc

SEQ ID NO: 1731060 - DNA, 25 bp, Homo sapien
gacacttttgcttacgccaccagct

SEQ ID NO: 1731061 - DNA, 25 bp, Homo sapien
aagacacttttgcttacgccaccag

SEQ ID NO: 1731062 - DNA, 25 bp, Homo sapien
acacttttgcttacgccaccagctc

SEQ ID NO: 1731063 - DNA, 25 bp, Homo sapien
actggtcctcattgcattgtactct

SEQ ID NO: 1731064 - DNA, 25 bp, Homo sapien
tggtcctcattgcattgtactcttc

SEQ ID NO: 1731065 - DNA, 25 bp, Homo sapien
tactggtcctcattgcattgtactc

SEQ ID NO: 1731066 - DNA, 25 bp, Homo sapien
gtcctcattgcattgtactcttctt

SEQ ID NO: 1731067 - DNA, 25 bp, Homo sapien
gaattccctaactccttgctaagtc

SEQ ID NO: 1731068 - DNA, 25 bp, Homo sapien
cataggcacatcttcagagtcctta

SEQ ID NO: 1731069 - DNA, 25 bp, Homo sapien
gagccttttgtgtctactgttctag

SEQ ID NO: 1731070 - DNA, 25 bp, Homo sapien
ggaccataggcacatcttcagagtc

SEQ ID NO: 1731071 - DNA, 25 bp, Homo sapien
tgccctgccaactttaaactctttg

SEQ ID NO: 1731072 - DNA, 25 bp, Homo sapien
gccctgccaactttaaactctttga

SEQ ID NO: 1731073 - DNA, 25 bp, Homo sapien
tatgggacactttatgactttgtgt

SEQ ID NO: 1731074 - DNA, 25 bp, Homo sapien
gagccatactaatctcctatgttgt

SEQ ID NO: 1731075 - DNA, 25 bp, Homo sapien
gcatatgtgttactaaagcaagcac

SEQ ID NO: 1731076 - DNA, 25 bp, Homo sapien
actaatctcctatgttgtatagtat

SEQ ID NO: 1731077 - DNA, 25 bp, Homo sapien
gccataccatctggctagcgtagga

SEQ ID NO: 1731078 - DNA, 25 bp, Homo sapien
ttgccataccatctggctagcgtag

SEQ ID NO: 1731079 - DNA, 25 bp, Homo sapien
tcattgccataccatctggctagcg

SEQ ID NO: 1731080 - DNA, 25 bp, Homo sapien
ataccatctggctagcgtaggagtg

SEQ ID NO: 1731081 - DNA, 25 bp, Homo sapien
gctttgtaagctctaatttcataat

SEQ ID NO: 1731082 - DNA, 25 bp, Homo sapien
tcacatgactctactggcaggcata

SEQ ID NO: 1731083 - DNA, 25 bp, Homo sapien
gacatcgcagttgcaaggctttcaa

SEQ ID NO: 1731084 - DNA, 25 bp, Homo sapien
ttttcagggtaagatggataggaca

SEQ ID NO: 1731085 - DNA, 25 bp, Homo sapien
taaaaccaatctcgatggtttgacc

SEQ ID NO: 1731086 - DNA, 25 bp, Homo sapien
tagcaacgagaagtaaaaccaatct

SEQ ID NO: 1731087 - DNA, 25 bp, Homo sapien
agggcccatagcaacgagaagtaaa

SEQ ID NO: 1731088 - DNA, 25 bp, Homo sapien
aaccaatctcgatggtttgacccat

SEQ ID NO: 1731089 - DNA, 25 bp, Homo sapien
atgtagagagccttacttatctctg

SEQ ID NO: 1731090 - DNA, 25 bp, Homo sapien
gatgtagagagccttacttatctct

SEQ ID NO: 1731091 - DNA, 25 bp, Homo sapien
gaggccctcacattcggtggttcct

SEQ ID NO: 1731092 - DNA, 25 bp, Homo sapien
aatagaggccctcacattcggtggt

SEQ ID NO: 1731093 - DNA, 25 bp, Homo sapien
cctcacattcggtggttccttttct

SEQ ID NO: 1731094 - DNA, 25 bp, Homo sapien
tttggtaatagaggccctcacattc

SEQ ID NO: 1731095 - DNA, 25 bp, Homo sapien
cagactgcctcttcaggtgggttcc

SEQ ID NO: 1731096 - DNA, 25 bp, Homo sapien
tgacagctacctcatacagaagaac

SEQ ID NO: 1731097 - DNA, 25 bp, Homo sapien
gaactctggctagcatcaggccggt

SEQ ID NO: 1731098 - DNA, 25 bp, Homo sapien
ctgacaatgctaaggaggccgggaa

SEQ ID NO: 1731099 - DNA, 25 bp, Homo sapien
ctactgggatgcaccgggacagggt

SEQ ID NO: 1731100 - DNA, 25 bp, Homo sapien
atgcaccgggacagggtacagaccg

SEQ ID NO: 1731101 - DNA, 25 bp, Homo sapien
cagggtacagaccggttcaccttca

SEQ ID NO: 1731102 - DNA, 25 bp, Homo sapien
gggatgcaccgggacagggtacaga

SEQ ID NO: 1731103 - DNA, 25 bp, Homo sapien
gcgcgcaaccgcgcccgccgcacag

SEQ ID NO: 1731104 - DNA, 25 bp, Homo sapien
gcgccggccgccgaaggtttgcctc

SEQ ID NO: 1731105 - DNA, 25 bp, Homo sapien
acagcgccggccgccgaaggtttgc

SEQ ID NO: 1731106 - DNA, 25 bp, Homo sapien
ccaagccgcgcgcaaccgcgcccgc

SEQ ID NO: 1731107 - DNA, 25 bp, Homo sapien
tatgccatgtaagctgagcagacca

SEQ ID NO: 1731108 - DNA, 25 bp, Homo sapien
gacttaataaagcactctcagcagt

SEQ ID NO: 1731109 - DNA, 25 bp, Homo sapien
tgcatggaatacttgtgaaggaacc

SEQ ID NO: 1731110 - DNA, 25 bp, Homo sapien
gaactacagggtaatggcacttgca

SEQ ID NO: 1731111 - DNA, 25 bp, Homo sapien
gcttgcaagtgtttggctatggcac

SEQ ID NO: 1731112 - DNA, 25 bp, Homo sapien
ggcactttcaaatgtccattcatgc

SEQ ID NO: 1731113 - DNA, 25 bp, Homo sapien
atggcactttcaaatgtccattcat

SEQ ID NO: 1731114 - DNA, 25 bp, Homo sapien
ccattcatgcagtggtgagaagtat

SEQ ID NO: 1731115 - DNA, 25 bp, Homo sapien
gaaagtctgaaactcgttcctggac

SEQ ID NO: 1731116 - DNA, 25 bp, Homo sapien
aaaaggagatctatatgggtgcccc

SEQ ID NO: 1731117 - DNA, 25 bp, Homo sapien
catcagactcaacaggccagtaggt

SEQ ID NO: 1731118 - DNA, 25 bp, Homo sapien
taagagtccgggcatcacatatggc

SEQ ID NO: 1731119 - DNA, 25 bp, Homo sapien
tatcctgatgactattaggctccca

SEQ ID NO: 1731120 - DNA, 25 bp, Homo sapien
gcttatcctgatgactattaggctc

SEQ ID NO: 1731121 - DNA, 25 bp, Homo sapien
tgatgactattaggctcccattgat

SEQ ID NO: 1731122 - DNA, 25 bp, Homo sapien
gaaagcttatcctgatgactattag

SEQ ID NO: 1731123 - DNA, 25 bp, Homo sapien
ctgtagagttttacagtgtttatta

SEQ ID NO: 1731124 - DNA, 25 bp, Homo sapien
tacagtgtttattaccaaaagattc

SEQ ID NO: 1731125 - DNA, 25 bp, Homo sapien
tagagttttacagtgtttattacca

SEQ ID NO: 1731126 - DNA, 25 bp, Homo sapien
cagtgtttattaccaaaagattctc

SEQ ID NO: 1731127 - DNA, 25 bp, Homo sapien
ttttgacggtgtctagtcctactgg

SEQ ID NO: 1731128 - DNA, 25 bp, Homo sapien
cggtgtctagtcctactggtttggc

SEQ ID NO: 1731129 - DNA, 25 bp, Homo sapien
ggttctgttttgacggtgtctagtc

SEQ ID NO: 1731130 - DNA, 25 bp, Homo sapien
gtcctactggtttggcttcatatct

SEQ ID NO: 1731131 - DNA, 25 bp, Homo sapien
tctatagaattcttatggtggcagg

SEQ ID NO: 1731132 - DNA, 25 bp, Homo sapien
taaacacagggatttgttgagggaa

SEQ ID NO: 1731133 - DNA, 25 bp, Homo sapien
gcagtgatacacaggttacagtaat

SEQ ID NO: 1731134 - DNA, 25 bp, Homo sapien
taggcttttgagactgggaagacag

SEQ ID NO: 1731135 - DNA, 25 bp, Homo sapien
gctgtccccaggtttgttgtgagag

SEQ ID NO: 1731136 - DNA, 25 bp, Homo sapien
tgtccccaggtttgttgtgagagtg

SEQ ID NO: 1731137 - DNA, 25 bp, Homo sapien
gtccccaggtttgttgtgagagtgg

SEQ ID NO: 1731138 - DNA, 25 bp, Homo sapien
aagctgtccccaggtttgttgtgag

SEQ ID NO: 1731139 - DNA, 25 bp, Homo sapien
tgtgaacaacattcagtttggtatt

SEQ ID NO: 1731140 - DNA, 25 bp, Homo sapien
atgaacatgtgaacaacattcagtt

SEQ ID NO: 1731141 - DNA, 25 bp, Homo sapien
catgtgaacaacattcagtttggta

SEQ ID NO: 1731142 - DNA, 25 bp, Homo sapien
gaacatgtgaacaacattcagtttg

SEQ ID NO: 1731143 - DNA, 25 bp, Homo sapien
aacgtggatggcgaaagcaggaata

SEQ ID NO: 1731144 - DNA, 25 bp, Homo sapien
gaaatgtgagtttctaccagtaggt

SEQ ID NO: 1731145 - DNA, 25 bp, Homo sapien
gggttttcagtcctagtctagcatg

SEQ ID NO: 1731146 - DNA, 25 bp, Homo sapien
tagtctagcatgagatgccaacgtg

SEQ ID NO: 1731147 - DNA, 25 bp, Homo sapien
ctgtgcaagtaggcatctttgattt

SEQ ID NO: 1731148 - DNA, 25 bp, Homo sapien
ctctgtgcaagtaggcatctttgat

SEQ ID NO: 1731149 - DNA, 25 bp, Homo sapien
tgtgcaagtaggcatctttgatttt

SEQ ID NO: 1731150 - DNA, 25 bp, Homo sapien
tctgtgcaagtaggcatctttgatt

SEQ ID NO: 1731151 - DNA, 25 bp, Homo sapien
tgcctcaacgatttctttgaaaatg

SEQ ID NO: 1731152 - DNA, 25 bp, Homo sapien
gagacgctgaactgaacaaccttgt

SEQ ID NO: 1731153 - DNA, 25 bp, Homo sapien
gattaaaattggactcatcaagcag

SEQ ID NO: 1731154 - DNA, 25 bp, Homo sapien
tactcctcgagttgatgcctcaacg

SEQ ID NO: 1731155 - DNA, 25 bp, Homo sapien
tttgaaagataatcttggcctttta

SEQ ID NO: 1731156 - DNA, 25 bp, Homo sapien
ccatggaattttgcccctgtttttg

SEQ ID NO: 1731157 - DNA, 25 bp, Homo sapien
tctggcagtcaactaacaaaaattt

SEQ ID NO: 1731158 - DNA, 25 bp, Homo sapien
taagaaccgtacatcactttctggc

SEQ ID NO: 1731159 - DNA, 25 bp, Homo sapien
ctgtggtaaatacagattctgggcc

SEQ ID NO: 1731160 - DNA, 25 bp, Homo sapien
gaatccaatgatatcccatggcaaa

SEQ ID NO: 1731161 - DNA, 25 bp, Homo sapien
tgagctgtcacacaatgtgtaactg

SEQ ID NO: 1731162 - DNA, 25 bp, Homo sapien
tcatcagcatgtgagtgagctgtca

SEQ ID NO: 1731163 - DNA, 25 bp, Homo sapien
gaggtgagctttctcaaatgaccac

SEQ ID NO: 1731164 - DNA, 25 bp, Homo sapien
ggtgagctttctcaaatgaccacat

SEQ ID NO: 1731165 - DNA, 25 bp, Homo sapien
gctgaggtgagctttctcaaatgac

SEQ ID NO: 1731166 - DNA, 25 bp, Homo sapien
tgaggtgagctttctcaaatgacca

SEQ ID NO: 1731167 - DNA, 25 bp, Homo sapien
gaacttgctttcaactggacctgga

SEQ ID NO: 1731168 - DNA, 25 bp, Homo sapien
tcgtagaagctcactggacgttggc

SEQ ID NO: 1731169 - DNA, 25 bp, Homo sapien
taatgaccttaacttctgagacccc

SEQ ID NO: 1731170 - DNA, 25 bp, Homo sapien
tgatgaggacgccacactgagacta

SEQ ID NO: 1731171 - DNA, 25 bp, Homo sapien
agcagaccctaactttatcacacag

SEQ ID NO: 1731172 - DNA, 25 bp, Homo sapien
tattggcatgttacaaagactgtcc

SEQ ID NO: 1731173 - DNA, 25 bp, Homo sapien
cacatgttataaagggttactgagg

SEQ ID NO: 1731174 - DNA, 25 bp, Homo sapien
taactttatactaggacactggtga

SEQ ID NO: 1731175 - DNA, 25 bp, Homo sapien
cagactgggcatactagtgaaaacc

SEQ ID NO: 1731176 - DNA, 25 bp, Homo sapien
tattcgggatacagggtcacttgca

SEQ ID NO: 1731177 - DNA, 25 bp, Homo sapien
tgctcagtcttatccctggagaggt

SEQ ID NO: 1731178 - DNA, 25 bp, Homo sapien
gctgtgcaaagcctaagtcacctgt

SEQ ID NO: 1731179 - DNA, 25 bp, Homo sapien
ttcccaggtccaattactcaagatg

SEQ ID NO: 1731180 - DNA, 25 bp, Homo sapien
tcaagtgtttccctggacaggatac

SEQ ID NO: 1731181 - DNA, 25 bp, Homo sapien
tcactgcttgaagctcgggtaattc

SEQ ID NO: 1731182 - DNA, 25 bp, Homo sapien
cacttggaacaaagtaggtccccag

SEQ ID NO: 1731183 - DNA, 25 bp, Homo sapien
ctgatgaatgttcctccacaatcat

SEQ ID NO: 1731184 - DNA, 25 bp, Homo sapien
cacacatgcacatttctacagccat

SEQ ID NO: 1731185 - DNA, 25 bp, Homo sapien
gaatagacaggaatgagtcacattc

SEQ ID NO: 1731186 - DNA, 25 bp, Homo sapien
aatagacaggaatgagtcacattct

SEQ ID NO: 1731187 - DNA, 25 bp, Homo sapien
ctgcagcattcagccaaaaagccat

SEQ ID NO: 1731188 - DNA, 25 bp, Homo sapien
aaggctgttcgtaaccagcagatgg

SEQ ID NO: 1731189 - DNA, 25 bp, Homo sapien
atttcttgatattaactagatccaa

SEQ ID NO: 1731190 - DNA, 25 bp, Homo sapien
cttgatattaactagatccaaaaca

SEQ ID NO: 1731191 - DNA, 25 bp, Homo sapien
agaacaaggctgttcgtaaccagca

SEQ ID NO: 1731192 - DNA, 25 bp, Homo sapien
cctctatgtccactttaccaattaa

SEQ ID NO: 1731193 - DNA, 25 bp, Homo sapien
cctatatctataagagcctttagca

SEQ ID NO: 1731194 - DNA, 25 bp, Homo sapien
ttgtgttctgtctcctatatctata

SEQ ID NO: 1731195 - DNA, 25 bp, Homo sapien
tatgtccactttaccaattaatcca

SEQ ID NO: 1731196 - DNA, 25 bp, Homo sapien
gagtcacactagaaggtgctttcat

SEQ ID NO: 1731197 - DNA, 25 bp, Homo sapien
agagtcacactagaaggtgctttca

SEQ ID NO: 1731198 - DNA, 25 bp, Homo sapien
gagagtcacactagaaggtgctttc

SEQ ID NO: 1731199 - DNA, 25 bp, Homo sapien
ctcagacaaggttctctccgttcca

SEQ ID NO: 1731200 - DNA, 25 bp, Homo sapien
tcagacaaggttctctccgttccat

SEQ ID NO: 1731201 - DNA, 25 bp, Homo sapien
ggctcccgagcagaaaatgacgtga

SEQ ID NO: 1731202 - DNA, 25 bp, Homo sapien
aagttactgagccaatgcctccgga

SEQ ID NO: 1731203 - DNA, 25 bp, Homo sapien
tctttacaggcgatgttgcaccggg

SEQ ID NO: 1731204 - DNA, 25 bp, Homo sapien
gagaaagctacgtccggctcagctg

SEQ ID NO: 1731205 - DNA, 25 bp, Homo sapien
cggttccgctcaatgctgcaagctc

SEQ ID NO: 1731206 - DNA, 25 bp, Homo sapien
agtccggttccgctcaatgctgcaa

SEQ ID NO: 1731207 - DNA, 25 bp, Homo sapien
tcaagtccggttccgctcaatgctg

SEQ ID NO: 1731208 - DNA, 25 bp, Homo sapien
gctcaagtccggttccgctcaatgc

SEQ ID NO: 1731209 - DNA, 25 bp, Homo sapien
aatgagagccacgacgaacacgatg

SEQ ID NO: 1731210 - DNA, 25 bp, Homo sapien
gaattcctcgtcgtcatagtcggtg

SEQ ID NO: 1731211 - DNA, 25 bp, Homo sapien
gctccgaagcagatgaccagttgcg

SEQ ID NO: 1731212 - DNA, 25 bp, Homo sapien
gaacacgatgatgtacccggcgatc

SEQ ID NO: 1731213 - DNA, 25 bp, Homo sapien
ccgcggcccctctccctgcgcttgt

SEQ ID NO: 1731214 - DNA, 25 bp, Homo sapien
ctggagatccctgccgcggcccctc

SEQ ID NO: 1731215 - DNA, 25 bp, Homo sapien
cggcccctctccctgcgcttgtaat

SEQ ID NO: 1731216 - DNA, 25 bp, Homo sapien
ctgccgcggcccctctccctgcgct

SEQ ID NO: 1731217 - DNA, 25 bp, Homo sapien
tccttagggatgtagctttgtattc

SEQ ID NO: 1731218 - DNA, 25 bp, Homo sapien
ttgctccttagggatgtagctttgt

SEQ ID NO: 1731219 - DNA, 25 bp, Homo sapien
tagggatgtagctttgtattctgca

SEQ ID NO: 1731220 - DNA, 25 bp, Homo sapien
gatgtagctttgtattctgcaagct

SEQ ID NO: 1731221 - DNA, 25 bp, Homo sapien
gagaggtggcatagtgataaagagg

SEQ ID NO: 1731222 - DNA, 25 bp, Homo sapien
gtggagaggtggcatagtgataaag

SEQ ID NO: 1731223 - DNA, 25 bp, Homo sapien
tggagaggtggcatagtgataaaga

SEQ ID NO: 1731224 - DNA, 25 bp, Homo sapien
gaggtggcatagtgataaagaggga

SEQ ID NO: 1731225 - DNA, 25 bp, Homo sapien
agtaaccctagcccgaccttgattg

SEQ ID NO: 1731226 - DNA, 25 bp, Homo sapien
cctagcccgaccttgattggcttat

SEQ ID NO: 1731227 - DNA, 25 bp, Homo sapien
tcaaccccctgaacaggtaaaagca

SEQ ID NO: 1731228 - DNA, 25 bp, Homo sapien
gcccgaccttgattggcttatcaaa

SEQ ID NO: 1731229 - DNA, 25 bp, Homo sapien
gagtgcaagaagaatattacattgg

SEQ ID NO: 1731230 - DNA, 25 bp, Homo sapien
tggagtgcaagaagaatattacatt

SEQ ID NO: 1731231 - DNA, 25 bp, Homo sapien
agtgcaagaagaatattacattgga

SEQ ID NO: 1731232 - DNA, 25 bp, Homo sapien
tgcaagaagaatattacattggaaa

SEQ ID NO: 1731233 - DNA, 25 bp, Homo sapien
cattctccgtaagacatggaaagtg

SEQ ID NO: 1731234 - DNA, 25 bp, Homo sapien
aagaatctgatgatatatagctcct

SEQ ID NO: 1731235 - DNA, 25 bp, Homo sapien
ctcctgcacattctccgtaagacat

SEQ ID NO: 1731236 - DNA, 25 bp, Homo sapien
gaaagaatctgatgatatatagctc

SEQ ID NO: 1731237 - DNA, 25 bp, Homo sapien
gtggtggttcttccacactgccaca

SEQ ID NO: 1731238 - DNA, 25 bp, Homo sapien
tggtggttcttccacactgccacac

SEQ ID NO: 1731239 - DNA, 25 bp, Homo sapien
tggttcttccacactgccacacaaa

SEQ ID NO: 1731240 - DNA, 25 bp, Homo sapien
ggtggttcttccacactgccacaca

SEQ ID NO: 1731241 - DNA, 25 bp, Homo sapien
tggtcacgagcacatcagccagaga

SEQ ID NO: 1731242 - DNA, 25 bp, Homo sapien
tcagtgatatccacgaccagtgtgg

SEQ ID NO: 1731243 - DNA, 25 bp, Homo sapien
tgtccaaaaaaccaggtctcagtga

SEQ ID NO: 1731244 - DNA, 25 bp, Homo sapien
gataaggaatcactttgcaaaggga

SEQ ID NO: 1731245 - DNA, 25 bp, Homo sapien
tgctgcactccatgacgatggcctg

SEQ ID NO: 1731246 - DNA, 25 bp, Homo sapien
gattgcataccaccgatccaaggcg

SEQ ID NO: 1731247 - DNA, 25 bp, Homo sapien
gatgacaatgctgttacgggcccgc

SEQ ID NO: 1731248 - DNA, 25 bp, Homo sapien
cattataatgcaggagacaatccag

SEQ ID NO: 1731249 - DNA, 25 bp, Homo sapien
ttttccactgcagctatggatagca

SEQ ID NO: 1731250 - DNA, 25 bp, Homo sapien
tagcatcactgtgataacagtttgg

SEQ ID NO: 1731251 - DNA, 25 bp, Homo sapien
tggcgttttgaatagatggtagcaa

SEQ ID NO: 1731252 - DNA, 25 bp, Homo sapien
gcgaagccctgttgtctgcataaga

SEQ ID NO: 1731253 - DNA, 25 bp, Homo sapien
catcagtttccaactttctttcaag

SEQ ID NO: 1731254 - DNA, 25 bp, Homo sapien
tttccaactttctttcaagttgatc

SEQ ID NO: 1731255 - DNA, 25 bp, Homo sapien
ctcatcagtttccaactttctttca

SEQ ID NO: 1731256 - DNA, 25 bp, Homo sapien
cagtttccaactttctttcaagttg

SEQ ID NO: 1731257 - DNA, 25 bp, Homo sapien
tgtctttatccgctgcagtcttcag

SEQ ID NO: 1731258 - DNA, 25 bp, Homo sapien
taggatgcatgtgttggcaggtcta

SEQ ID NO: 1731259 - DNA, 25 bp, Homo sapien
cttcagcagggtcagtaggatgcat

SEQ ID NO: 1731260 - DNA, 25 bp, Homo sapien
tctaagagaccaatttgaggtgtca

SEQ ID NO: 1731261 - DNA, 25 bp, Homo sapien
tgccatgtatgtcaccagaaagaaa

SEQ ID NO: 1731262 - DNA, 25 bp, Homo sapien
ccagagtttgcgaaatatttgcaga

SEQ ID NO: 1731263 - DNA, 25 bp, Homo sapien
ctgtcgacaccagagtttgcgaaat

SEQ ID NO: 1731264 - DNA, 25 bp, Homo sapien
acagtggtgccatgtatgtcaccag

SEQ ID NO: 1731265 - DNA, 25 bp, Homo sapien
gagacagacccttattgcaatttga

SEQ ID NO: 1731266 - DNA, 25 bp, Homo sapien
caatttgacttaggaaagttccact

SEQ ID NO: 1731267 - DNA, 25 bp, Homo sapien
ttgcaatttgacttaggaaagttcc

SEQ ID NO: 1731268 - DNA, 25 bp, Homo sapien
tattgcaatttgacttaggaaagtt

SEQ ID NO: 1731269 - DNA, 25 bp, Homo sapien
ccttctggctcggatctgctttatt

SEQ ID NO: 1731270 - DNA, 25 bp, Homo sapien
ctgctttatttcagccgccacagcg

SEQ ID NO: 1731271 - DNA, 25 bp, Homo sapien
catccgggacttcgttggctgtcct

SEQ ID NO: 1731272 - DNA, 25 bp, Homo sapien
tcctggccctcgaggctgtgaaaca

SEQ ID NO: 1731273 - DNA, 25 bp, Homo sapien
tgtcttcagtatgggcaaacatccc

SEQ ID NO: 1731274 - DNA, 25 bp, Homo sapien
cactattggcatatacaagccagtg

SEQ ID NO: 1731275 - DNA, 25 bp, Homo sapien
tcagtatgggcaaacatcccaaata

SEQ ID NO: 1731276 - DNA, 25 bp, Homo sapien
taaataattggattcgcagcactat

SEQ ID NO: 1731277 - DNA, 25 bp, Homo sapien
tcctcatccttggttacaattgtgg

SEQ ID NO: 1731278 - DNA, 25 bp, Homo sapien
tagcaactaaactcctcatatagtt

SEQ ID NO: 1731279 - DNA, 25 bp, Homo sapien
tagttgaagagtgttcattgattcc

SEQ ID NO: 1731280 - DNA, 25 bp, Homo sapien
tatggaagaacagttgaaaactcac

SEQ ID NO: 1731281 - DNA, 25 bp, Homo sapien
tcctcctggcgatggtgaactccaa

SEQ ID NO: 1731282 - DNA, 25 bp, Homo sapien
tctctgtgctagttcgtcccctggt

SEQ ID NO: 1731283 - DNA, 25 bp, Homo sapien
ggcaacagcaagaaaacgcagcttt

SEQ ID NO: 1731284 - DNA, 25 bp, Homo sapien
tgatttgagtggtcaaggacttccg

SEQ ID NO: 1731285 - DNA, 25 bp, Homo sapien
gagtgtgcttatgctagtgagcaca

SEQ ID NO: 1731286 - DNA, 25 bp, Homo sapien
ggagtgtgcttatgctagtgagcac

SEQ ID NO: 1731287 - DNA, 25 bp, Homo sapien
ctgggagtgtgcttatgctagtgag

SEQ ID NO: 1731288 - DNA, 25 bp, Homo sapien
taccagttttgaagtggtcctgctc

SEQ ID NO: 1731289 - DNA, 25 bp, Homo sapien
gcttcacatcataggataataaaat

SEQ ID NO: 1731290 - DNA, 25 bp, Homo sapien
gatccacaagtaattttagcttcac

SEQ ID NO: 1731291 - DNA, 25 bp, Homo sapien
ttatttccaaagagcaatagattaa

SEQ ID NO: 1731292 - DNA, 25 bp, Homo sapien
ttactcaggtatccttgtcatatga

SEQ ID NO: 1731293 - DNA, 25 bp, Homo sapien
catgaaactaaaagtgaaatagcct

SEQ ID NO: 1731294 - DNA, 25 bp, Homo sapien
gaaatagcctgaaataagctcaatt

SEQ ID NO: 1731295 - DNA, 25 bp, Homo sapien
caattgaaggttaaacttctaacat

SEQ ID NO: 1731296 - DNA, 25 bp, Homo sapien
agctcaattgaaggttaaacttcta

SEQ ID NO: 1731297 - DNA, 25 bp, Homo sapien
tatcacattataacaacagtcttgt

SEQ ID NO: 1731298 - DNA, 25 bp, Homo sapien
tattttctcagatatcacattataa

SEQ ID NO: 1731299 - DNA, 25 bp, Homo sapien
aaaaatcattggatagattctggta

SEQ ID NO: 1731300 - DNA, 25 bp, Homo sapien
ctaacatgtctattgttaattcaga

SEQ ID NO: 1731301 - DNA, 25 bp, Homo sapien
taaagcagtgccttaaaccagtgcc

SEQ ID NO: 1731302 - DNA, 25 bp, Homo sapien
ggcccctgttgtagacacctgtgca

SEQ ID NO: 1731303 - DNA, 25 bp, Homo sapien
aagattggcagagtttgggaacacc

SEQ ID NO: 1731304 - DNA, 25 bp, Homo sapien
tccaaccacgttgacggtagcgatg

SEQ ID NO: 1731305 - DNA, 25 bp, Homo sapien
tgatcattaggtactgcaccagagg

SEQ ID NO: 1731306 - DNA, 25 bp, Homo sapien
tgttgtccccttgttagtagcagta

SEQ ID NO: 1731307 - DNA, 25 bp, Homo sapien
cagtagttgcgtagaaaacaattcc

SEQ ID NO: 1731308 - DNA, 25 bp, Homo sapien
gacacagtacaatcaggcataaaga

SEQ ID NO: 1731309 - DNA, 25 bp, Homo sapien
tatgttagaataaatagtgctgaat

SEQ ID NO: 1731310 - DNA, 25 bp, Homo sapien
atgttagaataaatagtgctgaata

SEQ ID NO: 1731311 - DNA, 25 bp, Homo sapien
tatatatgttagaataaatagtgct

SEQ ID NO: 1731312 - DNA, 25 bp, Homo sapien
tatatgttagaataaatagtgctga

SEQ ID NO: 1731313 - DNA, 25 bp, Homo sapien
aaataaagagctaggaagatggctc

SEQ ID NO: 1731314 - DNA, 25 bp, Homo sapien
gaaataaagagctaggaagatggct

SEQ ID NO: 1731315 - DNA, 25 bp, Homo sapien
gattgcctattttgcacaatactac

SEQ ID NO: 1731316 - DNA, 25 bp, Homo sapien
tgagggtcatccgattgcctatttt

SEQ ID NO: 1731317 - DNA, 25 bp, Homo sapien
ttcctctccttgtattcctccccat

SEQ ID NO: 1731318 - DNA, 25 bp, Homo sapien
tttgcacaatactactttcctctcc

SEQ ID NO: 1731319 - DNA, 25 bp, Homo sapien
ctcacggcagttcacctggaaaaaa

SEQ ID NO: 1731320 - DNA, 25 bp, Homo sapien
gacaactcacggcagttcacctgga

SEQ ID NO: 1731321 - DNA, 25 bp, Homo sapien
gctggacaactcacggcagttcacc

SEQ ID NO: 1731322 - DNA, 25 bp, Homo sapien
aaaaaggcagatgcgtttcttctga

SEQ ID NO: 1731323 - DNA, 25 bp, Homo sapien
tacatccatttgcatcacgtaagca

SEQ ID NO: 1731324 - DNA, 25 bp, Homo sapien
gcatcacgtaagcattgctctctta

SEQ ID NO: 1731325 - DNA, 25 bp, Homo sapien
gcaattattggtttgggaagtgtat

SEQ ID NO: 1731326 - DNA, 25 bp, Homo sapien
cattactctccaagcatgtttacat

SEQ ID NO: 1731327 - DNA, 25 bp, Homo sapien
cagtacaatagaagtcatcagtgca

SEQ ID NO: 1731328 - DNA, 25 bp, Homo sapien
tctttaaattggaaattgctttcca

SEQ ID NO: 1731329 - DNA, 25 bp, Homo sapien
catcagtgcaaagacactctttaaa

SEQ ID NO: 1731330 - DNA, 25 bp, Homo sapien
ccaagcagtttgttcacagtacaat

SEQ ID NO: 1731331 - DNA, 25 bp, Homo sapien
tccaggtcaggtcctttacgaagtc

SEQ ID NO: 1731332 - DNA, 25 bp, Homo sapien
tataataaatcagctgaatgctttc

SEQ ID NO: 1731333 - DNA, 25 bp, Homo sapien
ctcctttaggtcttgtccatatgaa

SEQ ID NO: 1731334 - DNA, 25 bp, Homo sapien
ccatcgggaatatttaggctttctc

SEQ ID NO: 1731335 - DNA, 25 bp, Homo sapien
gccttccagactccttatattgtcc

SEQ ID NO: 1731336 - DNA, 25 bp, Homo sapien
ttgtccaagctattctcattatgca

SEQ ID NO: 1731337 - DNA, 25 bp, Homo sapien
atattgtccaagctattctcattat

SEQ ID NO: 1731338 - DNA, 25 bp, Homo sapien
tggccttccagactccttatattgt

SEQ ID NO: 1731339 - DNA, 25 bp, Homo sapien
gaacgtgtagttagattccatttga

SEQ ID NO: 1731340 - DNA, 25 bp, Homo sapien
ggaacgtgtagttagattccatttg

SEQ ID NO: 1731341 - DNA, 25 bp, Homo sapien
gatgggaacgtgtagttagattcca

SEQ ID NO: 1731342 - DNA, 25 bp, Homo sapien
tgggaacgtgtagttagattccatt

SEQ ID NO: 1731343 - DNA, 25 bp, Homo sapien
gatatgcccaggtcgtggaaaagta

SEQ ID NO: 1731344 - DNA, 25 bp, Homo sapien
tatgcccaggtcgtggaaaagtaaa

SEQ ID NO: 1731345 - DNA, 25 bp, Homo sapien
atgatatgcccaggtcgtggaaaag

SEQ ID NO: 1731346 - DNA, 25 bp, Homo sapien
tgcccaggtcgtggaaaagtaaaca

SEQ ID NO: 1731347 - DNA, 25 bp, Homo sapien
caagctttaaggtaagaggccaact

SEQ ID NO: 1731348 - DNA, 25 bp, Homo sapien
gaagaaccgtatggctgcttggcac

SEQ ID NO: 1731349 - DNA, 25 bp, Homo sapien
tggcagctgcgaattacactgaggc

SEQ ID NO: 1731350 - DNA, 25 bp, Homo sapien
gaagagcttctttggactgctgaca

SEQ ID NO: 1731351 - DNA, 25 bp, Homo sapien
tataacaaataaggtgccgaaataa

SEQ ID NO: 1731352 - DNA, 25 bp, Homo sapien
ctataacaaataaggtgccgaaata

SEQ ID NO: 1731353 - DNA, 25 bp, Homo sapien
caaataaggtgccgaaataagaaag

SEQ ID NO: 1731354 - DNA, 25 bp, Homo sapien
taacaaataaggtgccgaaataaga

SEQ ID NO: 1731355 - DNA, 25 bp, Homo sapien
tcccaaggatatctatgtaagcagc

SEQ ID NO: 1731356 - DNA, 25 bp, Homo sapien
cttcctgaacaagtgaggtcctgtt

SEQ ID NO: 1731357 - DNA, 25 bp, Homo sapien
cattgcacttgaaggaccgtcccaa

SEQ ID NO: 1731358 - DNA, 25 bp, Homo sapien
catggcactttctagtcacacgctg

SEQ ID NO: 1731359 - DNA, 25 bp, Homo sapien
tgaagcatgtgctggaaaatcttac

SEQ ID NO: 1731360 - DNA, 25 bp, Homo sapien
tctatgaagcatgtgctggaaaatc

SEQ ID NO: 1731361 - DNA, 25 bp, Homo sapien
ttctatgaagcatgtgctggaaaat

SEQ ID NO: 1731362 - DNA, 25 bp, Homo sapien
tatgaagcatgtgctggaaaatctt

SEQ ID NO: 1731363 - DNA, 25 bp, Homo sapien
tatggtagttacagctagggatcta

SEQ ID NO: 1731364 - DNA, 25 bp, Homo sapien
gatatggtagttacagctagggatc

SEQ ID NO: 1731365 - DNA, 25 bp, Homo sapien
cagatatggtagttacagctaggga

SEQ ID NO: 1731366 - DNA, 25 bp, Homo sapien
tggtagttacagctagggatctagg

SEQ ID NO: 1731367 - DNA, 25 bp, Homo sapien
tattagctctaagggccacaaattt

SEQ ID NO: 1731368 - DNA, 25 bp, Homo sapien
tctcatttccctattagctctaagg

SEQ ID NO: 1731369 - DNA, 25 bp, Homo sapien
tccctattagctctaagggccacaa

SEQ ID NO: 1731370 - DNA, 25 bp, Homo sapien
tctaagggccacaaatttgttctgt

SEQ ID NO: 1731371 - DNA, 25 bp, Homo sapien
ctgccactgaagcacgaaatgtggg

SEQ ID NO: 1731372 - DNA, 25 bp, Homo sapien
gtggggtcaccccaaatcagtgagg

SEQ ID NO: 1731373 - DNA, 25 bp, Homo sapien
catacactgtatgcgagtttgaggg

SEQ ID NO: 1731374 - DNA, 25 bp, Homo sapien
tgagggacaggatccaaaggtcaaa

SEQ ID NO: 1731375 - DNA, 25 bp, Homo sapien
ctaagagtgcttcatcttggacatt

SEQ ID NO: 1731376 - DNA, 25 bp, Homo sapien
agagtgcttcatcttggacattgta

SEQ ID NO: 1731377 - DNA, 25 bp, Homo sapien
taagagtgcttcatcttggacattg

SEQ ID NO: 1731378 - DNA, 25 bp, Homo sapien
gagtgcttcatcttggacattgtac

SEQ ID NO: 1731379 - DNA, 25 bp, Homo sapien
tctgttgagggtttgtacacttcag

SEQ ID NO: 1731380 - DNA, 25 bp, Homo sapien
tagagtagagttaggagaaaatgaa

SEQ ID NO: 1731381 - DNA, 25 bp, Homo sapien
gaagacagccgttctcctgttgttt

SEQ ID NO: 1731382 - DNA, 25 bp, Homo sapien
tatttccagattatagccctgtgaa

SEQ ID NO: 1731383 - DNA, 25 bp, Homo sapien
gccatgcctttgacattagacaggg

SEQ ID NO: 1731384 - DNA, 25 bp, Homo sapien
gggaatgaaatccagttaaagtgat

SEQ ID NO: 1731385 - DNA, 25 bp, Homo sapien
ctttgacattagacagggttggata

SEQ ID NO: 1731386 - DNA, 25 bp, Homo sapien
ttttcttgtatacaatgccatgcct

SEQ ID NO: 1731387 - DNA, 25 bp, Homo sapien
gaccataaccaacagaaggattcca

SEQ ID NO: 1731388 - DNA, 25 bp, Homo sapien
ccataaccaacagaaggattccaca

SEQ ID NO: 1731389 - DNA, 25 bp, Homo sapien
accataaccaacagaaggattccac

SEQ ID NO: 1731390 - DNA, 25 bp, Homo sapien
ccaggtatttggatcgatgaaggat

SEQ ID NO: 1731391 - DNA, 25 bp, Homo sapien
gatgaaggatctcttgctttacttg

SEQ ID NO: 1731392 - DNA, 25 bp, Homo sapien
tttggatcgatgaaggatctcttgc

SEQ ID NO: 1731393 - DNA, 25 bp, Homo sapien
gttctccaggtatttggatcgatga

SEQ ID NO: 1731394 - DNA, 25 bp, Homo sapien
gaaaagagtgattgttataggtcca

SEQ ID NO: 1731395 - DNA, 25 bp, Homo sapien
gttgtcttgacgtggttgctcacgc

SEQ ID NO: 1731396 - DNA, 25 bp, Homo sapien
tccagtgttgtaaaagataccacca

SEQ ID NO: 1731397 - DNA, 25 bp, Homo sapien
ttttctttctcgatgacagatggaa

SEQ ID NO: 1731398 - DNA, 25 bp, Homo sapien
ttgcagagttccagcttgtacagct

SEQ ID NO: 1731399 - DNA, 25 bp, Homo sapien
cagagttccagcttgtacagctcgg

SEQ ID NO: 1731400 - DNA, 25 bp, Homo sapien
gcttgtacagctcggctgactcccg

SEQ ID NO: 1731401 - DNA, 25 bp, Homo sapien
ttccagcttgtacagctcggctgac

SEQ ID NO: 1731402 - DNA, 25 bp, Homo sapien
tcaaagaggcactttgggaacaact

SEQ ID NO: 1731403 - DNA, 25 bp, Homo sapien
ccagtgcagtaaatcattgcagccc

SEQ ID NO: 1731404 - DNA, 25 bp, Homo sapien
tcattgcagcccagatggtattcat

SEQ ID NO: 1731405 - DNA, 25 bp, Homo sapien
gaggcactttgggaacaacttgaga

SEQ ID NO: 1731406 - DNA, 25 bp, Homo sapien
tagtggaaggaaggggatgaatttc

SEQ ID NO: 1731407 - DNA, 25 bp, Homo sapien
ggatgaatttccaactccttcccca

SEQ ID NO: 1731408 - DNA, 25 bp, Homo sapien
tggaaggaaggggatgaatttccaa

SEQ ID NO: 1731409 - DNA, 25 bp, Homo sapien
cttgagattcttgtagtggaaggaa

SEQ ID NO: 1731410 - DNA, 25 bp, Homo sapien
tcttgaaatgctgaccagtcctggt

SEQ ID NO: 1731411 - DNA, 25 bp, Homo sapien
gaatcatccacatttcgggctgaag

SEQ ID NO: 1731412 - DNA, 25 bp, Homo sapien
cctcagtagcgagaaaaggaacatg

SEQ ID NO: 1731413 - DNA, 25 bp, Homo sapien
tggttaactgtttgctgccccaggg

SEQ ID NO: 1731414 - DNA, 25 bp, Homo sapien
ttctttgaataactggcttcaactg

SEQ ID NO: 1731415 - DNA, 25 bp, Homo sapien
cttctttgaataactggcttcaact

SEQ ID NO: 1731416 - DNA, 25 bp, Homo sapien
aataactggcttcaactgcaccatt

SEQ ID NO: 1731417 - DNA, 25 bp, Homo sapien
actggcttcaactgcaccatttcgg

SEQ ID NO: 1731418 - DNA, 25 bp, Homo sapien
ttgcaatagcagtgagccctatagg

SEQ ID NO: 1731419 - DNA, 25 bp, Homo sapien
gaatggcttcctacgatttgcaccc

SEQ ID NO: 1731420 - DNA, 25 bp, Homo sapien
tagcaggaacccaccgttgcaatag

SEQ ID NO: 1731421 - DNA, 25 bp, Homo sapien
cactgttaaggaggcactcctggag

SEQ ID NO: 1731422 - DNA, 25 bp, Homo sapien
taacaggaggaattgggtgtaggtc

SEQ ID NO: 1731423 - DNA, 25 bp, Homo sapien
gaacagcactatcaagcagtttgtt

SEQ ID NO: 1731424 - DNA, 25 bp, Homo sapien
caagtcacaatgtgggaaaagatat

SEQ ID NO: 1731425 - DNA, 25 bp, Homo sapien
ggtgtaggtctatggtaattatctg

SEQ ID NO: 1731426 - DNA, 25 bp, Homo sapien
tgattttcggtagaactttgaattc

SEQ ID NO: 1731427 - DNA, 25 bp, Homo sapien
ttctgttcgaaagcctttattgatt

SEQ ID NO: 1731428 - DNA, 25 bp, Homo sapien
caaattctgttcgaaagcctttatt

SEQ ID NO: 1731429 - DNA, 25 bp, Homo sapien
tattgattttcggtagaactttgaa

SEQ ID NO: 1731430 - DNA, 25 bp, Homo sapien
ctgacagttaaagttcccatgacag

SEQ ID NO: 1731431 - DNA, 25 bp, Homo sapien
cagatactagactgcctgacagtta

SEQ ID NO: 1731432 - DNA, 25 bp, Homo sapien
ccatgacagatgtggaaaggctgcc

SEQ ID NO: 1731433 - DNA, 25 bp, Homo sapien
gcctggtgaggatagtccctagctc

SEQ ID NO: 1731434 - DNA, 25 bp, Homo sapien
ccatttgtctattgatggacacagg

SEQ ID NO: 1731435 - DNA, 25 bp, Homo sapien
ttgtctattgatggacacaggttgc

SEQ ID NO: 1731436 - DNA, 25 bp, Homo sapien
atccatttgtctattgatggacaca

SEQ ID NO: 1731437 - DNA, 25 bp, Homo sapien
catttgtctattgatggacacaggt

SEQ ID NO: 1731438 - DNA, 25 bp, Homo sapien
ccttttactttgatctcacagtaac

SEQ ID NO: 1731439 - DNA, 25 bp, Homo sapien
ctacagataactaaataaagctcac

SEQ ID NO: 1731440 - DNA, 25 bp, Homo sapien
ctttgatctcacagtaactacagat

SEQ ID NO: 1731441 - DNA, 25 bp, Homo sapien
atgttttcagttcagtaaacattct

SEQ ID NO: 1731442 - DNA, 25 bp, Homo sapien
cttctgattgggatcattgtaatac

SEQ ID NO: 1731443 - DNA, 25 bp, Homo sapien
tgagttctatcaatcgctcttccct

SEQ ID NO: 1731444 - DNA, 25 bp, Homo sapien
tttcctataggaggcccatgattcc

SEQ ID NO: 1731445 - DNA, 25 bp, Homo sapien
gaaccttttcttgcgggatatggaa

SEQ ID NO: 1731446 - DNA, 25 bp, Homo sapien
tacacagggaagtaaagtcgaggct

SEQ ID NO: 1731447 - DNA, 25 bp, Homo sapien
tccagaggctgaaaaggtcataggc

SEQ ID NO: 1731448 - DNA, 25 bp, Homo sapien
tcttcgagtgcagatatacacaggg

SEQ ID NO: 1731449 - DNA, 25 bp, Homo sapien
ctctaggataaaagggtaggcacag

SEQ ID NO: 1731450 - DNA, 25 bp, Homo sapien
cttttgaagtacttgggatacccat

SEQ ID NO: 1731451 - DNA, 25 bp, Homo sapien
tgaagtacttgggatacccatcctt

SEQ ID NO: 1731452 - DNA, 25 bp, Homo sapien
tgggatacccatccttgttttcttc

SEQ ID NO: 1731453 - DNA, 25 bp, Homo sapien
agtacttgggatacccatccttgtt

SEQ ID NO: 1731454 - DNA, 25 bp, Homo sapien
ggcactccgacgctagcagggctgt

SEQ ID NO: 1731455 - DNA, 25 bp, Homo sapien
tgggttctggcactccgacgctagc

SEQ ID NO: 1731456 - DNA, 25 bp, Homo sapien
ctccgacgctagcagggctgtaagt

SEQ ID NO: 1731457 - DNA, 25 bp, Homo sapien
ttctggcactccgacgctagcaggg

SEQ ID NO: 1731458 - DNA, 25 bp, Homo sapien
tatacttttggcctgcaactgtgta

SEQ ID NO: 1731459 - DNA, 25 bp, Homo sapien
aattgctgtctataagatgtcaaca

SEQ ID NO: 1731460 - DNA, 25 bp, Homo sapien
cagggaccaaactgccatcatactg

SEQ ID NO: 1731461 - DNA, 25 bp, Homo sapien
gatgtcaacatacaaccgtggctta

SEQ ID NO: 1731462 - DNA, 25 bp, Homo sapien
tgtagtgcggaaaatgagacacccc

SEQ ID NO: 1731463 - DNA, 25 bp, Homo sapien
acagctctggtcctcacagccagtg

SEQ ID NO: 1731464 - DNA, 25 bp, Homo sapien
tttctgtcgattcccgcaggtgccc

SEQ ID NO: 1731465 - DNA, 25 bp, Homo sapien
ggaatgtgccatccgcggtgaagca

SEQ ID NO: 1731466 - DNA, 25 bp, Homo sapien
tacccaatcctctcgaatgtggtct

SEQ ID NO: 1731467 - DNA, 25 bp, Homo sapien
caatcctctcgaatgtggtctcttt

SEQ ID NO: 1731468 - DNA, 25 bp, Homo sapien
ctacccaatcctctcgaatgtggtc

SEQ ID NO: 1731469 - DNA, 25 bp, Homo sapien
cccaatcctctcgaatgtggtctct

SEQ ID NO: 1731470 - DNA, 25 bp, Homo sapien
ggagtcgtagacaccaaagcagggc

SEQ ID NO: 1731471 - DNA, 25 bp, Homo sapien
aaagcctgtctcagcgtcctgacgc

SEQ ID NO: 1731472 - DNA, 25 bp, Homo sapien
caattgttctagaaacagtgcgctc

SEQ ID NO: 1731473 - DNA, 25 bp, Homo sapien
tagttctagtttaggatcacgaggc

SEQ ID NO: 1731474 - DNA, 25 bp, Homo sapien
cattcctgtggcctgttgctcggca

SEQ ID NO: 1731475 - DNA, 25 bp, Homo sapien
gggcctgagctgaataaagtgttga

SEQ ID NO: 1731476 - DNA, 25 bp, Homo sapien
tgacatcagatgaatgggcgaggcc

SEQ ID NO: 1731477 - DNA, 25 bp, Homo sapien
tgctagctccactcttggctttgtg

SEQ ID NO: 1731478 - DNA, 25 bp, Homo sapien
ctctgttctgtactttgatgacagc

SEQ ID NO: 1731479 - DNA, 25 bp, Homo sapien
gccttgttgtgctccaaccaaatta

SEQ ID NO: 1731480 - DNA, 25 bp, Homo sapien
caaagccttgttgtgctccaaccaa

SEQ ID NO: 1731481 - DNA, 25 bp, Homo sapien
tgtgctccaaccaaattaaatgcca

SEQ ID NO: 1731482 - DNA, 25 bp, Homo sapien
ttgttgtgctccaaccaaattaaat

SEQ ID NO: 1731483 - DNA, 25 bp, Homo sapien
gccaaaactgtaagaggctgtattt

SEQ ID NO: 1731484 - DNA, 25 bp, Homo sapien
tcagccaggacgttgtacagccaaa

SEQ ID NO: 1731485 - DNA, 25 bp, Homo sapien
tcagtgggatttcccataaactcct

SEQ ID NO: 1731486 - DNA, 25 bp, Homo sapien
tggatcccgtaagactcatcagtgg

SEQ ID NO: 1731487 - DNA, 25 bp, Homo sapien
ctgtggcccgcatctggtccataga

SEQ ID NO: 1731488 - DNA, 25 bp, Homo sapien
tttattgaattctgggaatacaggc

SEQ ID NO: 1731489 - DNA, 25 bp, Homo sapien
ttattgaattctgggaatacaggct

SEQ ID NO: 1731490 - DNA, 25 bp, Homo sapien
atctggtccatagaaacctttaagt

SEQ ID NO: 1731491 - DNA, 25 bp, Homo sapien
ctgagacaacagtcagtccataacg

SEQ ID NO: 1731492 - DNA, 25 bp, Homo sapien
caacagtcagtccataacggcagtg

SEQ ID NO: 1731493 - DNA, 25 bp, Homo sapien
gacaacagtcagtccataacggcag

SEQ ID NO: 1731494 - DNA, 25 bp, Homo sapien
acagtcagtccataacggcagtggg

SEQ ID NO: 1731495 - DNA, 25 bp, Homo sapien
ggcagaggcgctgcagagatggctc

SEQ ID NO: 1731496 - DNA, 25 bp, Homo sapien
ccttggagttatcccagagaagatt

SEQ ID NO: 1731497 - DNA, 25 bp, Homo sapien
ttcctgcgcactaggccatagccat

SEQ ID NO: 1731498 - DNA, 25 bp, Homo sapien
catgcttgggagactcaagctccac

SEQ ID NO: 1731499 - DNA, 25 bp, Homo sapien
taggccatagccatcatgcttggga

SEQ ID NO: 1731500 - DNA, 25 bp, Homo sapien
tttgcaggaacatctcacatccgac

SEQ ID NO: 1731501 - DNA, 25 bp, Homo sapien
tgatttgcaggaacatctcacatcc

SEQ ID NO: 1731502 - DNA, 25 bp, Homo sapien
caggaacatctcacatccgacaact

SEQ ID NO: 1731503 - DNA, 25 bp, Homo sapien
tgcaggaacatctcacatccgacaa

SEQ ID NO: 1731504 - DNA, 25 bp, Homo sapien
gggcactactaagtttaagactcga

SEQ ID NO: 1731505 - DNA, 25 bp, Homo sapien
tcatgcttccgtatggttgctatgg

SEQ ID NO: 1731506 - DNA, 25 bp, Homo sapien
cactactaagtttaagactcgaagg

SEQ ID NO: 1731507 - DNA, 25 bp, Homo sapien
tatggttgctatgggcactactaag

SEQ ID NO: 1731508 - DNA, 25 bp, Homo sapien
ctttcgtcaagtgggcacagccagt

SEQ ID NO: 1731509 - DNA, 25 bp, Homo sapien
aggaccctgactctgatcttcttgt

SEQ ID NO: 1731510 - DNA, 25 bp, Homo sapien
ctgtgtctcttgcagaaaggttgac

SEQ ID NO: 1731511 - DNA, 25 bp, Homo sapien
ttgacggagagatgaggccagcttt

SEQ ID NO: 1731512 - DNA, 25 bp, Homo sapien
tcatcattggaagtaagatcagggc

SEQ ID NO: 1731513 - DNA, 25 bp, Homo sapien
ggctgatattcacctgggatagaca

SEQ ID NO: 1731514 - DNA, 25 bp, Homo sapien
aaatccaccattgcctgttagccag

SEQ ID NO: 1731515 - DNA, 25 bp, Homo sapien
ggagcccttggattagcagcattaa

SEQ ID NO: 1731516 - DNA, 25 bp, Homo sapien
tgtgcatgcttgtggtattatatta

SEQ ID NO: 1731517 - DNA, 25 bp, Homo sapien
tactttgcgatcaacaaactgttaa

SEQ ID NO: 1731518 - DNA, 25 bp, Homo sapien
gttaacctctccctcaataagctgg

SEQ ID NO: 1731519 - DNA, 25 bp, Homo sapien
tcaatacacatattgggagcccagg

SEQ ID NO: 1731520 - DNA, 25 bp, Homo sapien
tgcaagtagggaaaggcaaggtaga

SEQ ID NO: 1731521 - DNA, 25 bp, Homo sapien
gcatcatcctacatataatggacat

SEQ ID NO: 1731522 - DNA, 25 bp, Homo sapien
gactttagattgctagcatcatcct

SEQ ID NO: 1731523 - DNA, 25 bp, Homo sapien
gattgctagcatcatcctacatata

SEQ ID NO: 1731524 - DNA, 25 bp, Homo sapien
tggcagtgcaggatacttttccagg

SEQ ID NO: 1731525 - DNA, 25 bp, Homo sapien
gcctttggaagattgttccacacaa

SEQ ID NO: 1731526 - DNA, 25 bp, Homo sapien
caggtatcacgcagtcgcctttgga

SEQ ID NO: 1731527 - DNA, 25 bp, Homo sapien
cacacaatactgttccccattagga

SEQ ID NO: 1731528 - DNA, 25 bp, Homo sapien
tcaacttcttcgaagaggagagaca

SEQ ID NO: 1731529 - DNA, 25 bp, Homo sapien
acagcagcatttgatcttttatgaa

SEQ ID NO: 1731530 - DNA, 25 bp, Homo sapien
tgttaaaatgaaatgcgtcctctat

SEQ ID NO: 1731531 - DNA, 25 bp, Homo sapien
ggaacacagttagggcatctccaag

SEQ ID NO: 1731532 - DNA, 25 bp, Homo sapien
aactgccttatttgggcagaggaat

SEQ ID NO: 1731533 - DNA, 25 bp, Homo sapien
ttaactgccttatttgggcagagga

SEQ ID NO: 1731534 - DNA, 25 bp, Homo sapien
taactgccttatttgggcagaggaa

SEQ ID NO: 1731535 - DNA, 25 bp, Homo sapien
cttgttctttagtgattttaagcat

SEQ ID NO: 1731536 - DNA, 25 bp, Homo sapien
tttcactgagcacatcttgttcttt

SEQ ID NO: 1731537 - DNA, 25 bp, Homo sapien
cttttcactgagcacatcttgttct

SEQ ID NO: 1731538 - DNA, 25 bp, Homo sapien
catcttgttctttagtgattttaag

SEQ ID NO: 1731539 - DNA, 25 bp, Homo sapien
agtatgcacgaactgaagtccttga

SEQ ID NO: 1731540 - DNA, 25 bp, Homo sapien
taagatgtttcagtatgcacgaact

SEQ ID NO: 1731541 - DNA, 25 bp, Homo sapien
ttaggtgcggagaagtaggaaataa

SEQ ID NO: 1731542 - DNA, 25 bp, Homo sapien
tttcagtatgcacgaactgaagtcc

SEQ ID NO: 1731543 - DNA, 25 bp, Homo sapien
gcttgcagtgaatggccaactagga

SEQ ID NO: 1731544 - DNA, 25 bp, Homo sapien
aatgttctgatgagagttacctggc

SEQ ID NO: 1731545 - DNA, 25 bp, Homo sapien
gaatgatcaatattgcaatgcccca

SEQ ID NO: 1731546 - DNA, 25 bp, Homo sapien
tatagggtccagagcagatataatc

SEQ ID NO: 1731547 - DNA, 25 bp, Homo sapien
ggagggcagccaatccgtttcagcg

SEQ ID NO: 1731548 - DNA, 25 bp, Homo sapien
ggagcgcgaaccttatctcccgggc

SEQ ID NO: 1731549 - DNA, 25 bp, Homo sapien
gctgagagcgagtttctgagcctct

SEQ ID NO: 1731550 - DNA, 25 bp, Homo sapien
gtttcagcgcaggtcttgctcgggt

SEQ ID NO: 1731551 - DNA, 25 bp, Homo sapien
gacactagcagttcgcccttcaaga

SEQ ID NO: 1731552 - DNA, 25 bp, Homo sapien
caaggaacatcagtccgctgcaacg

SEQ ID NO: 1731553 - DNA, 25 bp, Homo sapien
caggcgatgctctggtgttgcccaa

SEQ ID NO: 1731554 - DNA, 25 bp, Homo sapien
ggcaggcctccttcgatcagtgcag

SEQ ID NO: 1731555 - DNA, 25 bp, Homo sapien
ttgatacatttaagctgaagctcat

SEQ ID NO: 1731556 - DNA, 25 bp, Homo sapien
ggagaaattgatacatttaagctga

SEQ ID NO: 1731557 - DNA, 25 bp, Homo sapien
ctaggagaaattgatacatttaagc

SEQ ID NO: 1731558 - DNA, 25 bp, Homo sapien
tgatacatttaagctgaagctcatt

SEQ ID NO: 1731559 - DNA, 25 bp, Homo sapien
aagggacagttgtctccttagttgg

SEQ ID NO: 1731560 - DNA, 25 bp, Homo sapien
gcccttgaatcaggcccttctggta

SEQ ID NO: 1731561 - DNA, 25 bp, Homo sapien
agttggctctgttgtagcccctggg

SEQ ID NO: 1731562 - DNA, 25 bp, Homo sapien
gtctgcccttgaatcaggcccttct

SEQ ID NO: 1731563 - DNA, 25 bp, Homo sapien
tactccaagctctggctaacagggc

SEQ ID NO: 1731564 - DNA, 25 bp, Homo sapien
tgagctactatgttctcccacctgg

SEQ ID NO: 1731565 - DNA, 25 bp, Homo sapien
gatgcctggtagagggagatactcc

SEQ ID NO: 1731566 - DNA, 25 bp, Homo sapien
tatcccttgtggtgaaccaggcaca

SEQ ID NO: 1731567 - DNA, 25 bp, Homo sapien
ctaggagaatatgctgatgccccta

SEQ ID NO: 1731568 - DNA, 25 bp, Homo sapien
taggagaatatgctgatgcccctaa

SEQ ID NO: 1731569 - DNA, 25 bp, Homo sapien
aggagaatatgctgatgcccctaag

SEQ ID NO: 1731570 - DNA, 25 bp, Homo sapien
tctacactaaaagaatccttaatgt

SEQ ID NO: 1731571 - DNA, 25 bp, Homo sapien
aaaagaatccttaatgtcatatgtc

SEQ ID NO: 1731572 - DNA, 25 bp, Homo sapien
gaatccttaatgtcatatgtcatgg

SEQ ID NO: 1731573 - DNA, 25 bp, Homo sapien
ccttaatgtcatatgtcatggaaac

SEQ ID NO: 1731574 - DNA, 25 bp, Homo sapien
gacttaaatgttagacctaaatcca

SEQ ID NO: 1731575 - DNA, 25 bp, Homo sapien
cttaaatgttagacctaaatccata

SEQ ID NO: 1731576 - DNA, 25 bp, Homo sapien
cattcaggacataggtgtgggcaag

SEQ ID NO: 1731577 - DNA, 25 bp, Homo sapien
ggacataggtgtgggcaaggacttc

SEQ ID NO: 1731578 - DNA, 25 bp, Homo sapien
cactcccgcctgggtaacagagaca

SEQ ID NO: 1731579 - DNA, 25 bp, Homo sapien
actcccgcctgggtaacagagacag

SEQ ID NO: 1731580 - DNA, 25 bp, Homo sapien
taattggccttgtgcagtaactcat

SEQ ID NO: 1731581 - DNA, 25 bp, Homo sapien
gggctgcagtctttgtatactaaat

SEQ ID NO: 1731582 - DNA, 25 bp, Homo sapien
cagaagaaatatgccccagtgacta

SEQ ID NO: 1731583 - DNA, 25 bp, Homo sapien
attttgtacaccctaacccagcctg

SEQ ID NO: 1731584 - DNA, 25 bp, Homo sapien
tttgccactctagatttactctcca

SEQ ID NO: 1731585 - DNA, 25 bp, Homo sapien
ggaaaccttcctttgccactctaga

SEQ ID NO: 1731586 - DNA, 25 bp, Homo sapien
tctggaaaccttcctttgccactct

SEQ ID NO: 1731587 - DNA, 25 bp, Homo sapien
ttgccactctagatttactctccat

SEQ ID NO: 1731588 - DNA, 25 bp, Homo sapien
aggtgctttggtgccctctggtggg

SEQ ID NO: 1731589 - DNA, 25 bp, Homo sapien
tattgtgaggtgctttggtgccctc

SEQ ID NO: 1731590 - DNA, 25 bp, Homo sapien
attcagggaactgagttgaagaaag

SEQ ID NO: 1731591 - DNA, 25 bp, Homo sapien
tgaagaaaggtattgtgaggtgctt

SEQ ID NO: 1731592 - DNA, 25 bp, Homo sapien
gttcatgtctttcatcgggtttgca

SEQ ID NO: 1731593 - DNA, 25 bp, Homo sapien
tgagtctagcatctgttctccctga

SEQ ID NO: 1731594 - DNA, 25 bp, Homo sapien
taatctcagtatcatgcacatccct

SEQ ID NO: 1731595 - DNA, 25 bp, Homo sapien
tattgtaaccttcaaagtggtccac

SEQ ID NO: 1731596 - DNA, 25 bp, Homo sapien
tgcccctgtggtagtaggagatggt

SEQ ID NO: 1731597 - DNA, 25 bp, Homo sapien
gggcaagcgctcattgtgttcagtt

SEQ ID NO: 1731598 - DNA, 25 bp, Homo sapien
tcattgtgttcagttaacctggaga

SEQ ID NO: 1731599 - DNA, 25 bp, Homo sapien
ttgtcaatggtttgtcatctggcaa

SEQ ID NO: 1731600 - DNA, 25 bp, Homo sapien
acagctagggacttgcacagcaaca

SEQ ID NO: 1731601 - DNA, 25 bp, Homo sapien
ggctgctgaggttcttaacagaggg

SEQ ID NO: 1731602 - DNA, 25 bp, Homo sapien
ctgctgaggttcttaacagaggggc

SEQ ID NO: 1731603 - DNA, 25 bp, Homo sapien
aaacagctagggacttgcacagcaa

SEQ ID NO: 1731604 - DNA, 25 bp, Homo sapien
tcatcagcagcaactcaagggacaa

SEQ ID NO: 1731605 - DNA, 25 bp, Homo sapien
gatggttccctctgccaattacaaa

SEQ ID NO: 1731606 - DNA, 25 bp, Homo sapien
ggcacacactccgtcaaagatgtag

SEQ ID NO: 1731607 - DNA, 25 bp, Homo sapien
tcttttctgaaaggtcgccgcctag

SEQ ID NO: 1731608 - DNA, 25 bp, Homo sapien
atttatccttttgagaggtgttggc

SEQ ID NO: 1731609 - DNA, 25 bp, Homo sapien
ctggaagaaacttgaatttatcctt

SEQ ID NO: 1731610 - DNA, 25 bp, Homo sapien
cttgaatttatccttttgagaggtg

SEQ ID NO: 1731611 - DNA, 25 bp, Homo sapien
aacttgaatttatccttttgagagg

SEQ ID NO: 1731612 - DNA, 25 bp, Homo sapien
aacagttttccactcgtggaagtgt

SEQ ID NO: 1731613 - DNA, 25 bp, Homo sapien
tagttgctaaaagtgttgtgctgtt

SEQ ID NO: 1731614 - DNA, 25 bp, Homo sapien
tacaaactattgctgcaatagttgc

SEQ ID NO: 1731615 - DNA, 25 bp, Homo sapien
cactcgtggaagtgtggaaacactc

SEQ ID NO: 1731616 - DNA, 25 bp, Homo sapien
gaacagttctgctaagcacgcaaac

SEQ ID NO: 1731617 - DNA, 25 bp, Homo sapien
agcacgcaaactggcccaatgggaa

SEQ ID NO: 1731618 - DNA, 25 bp, Homo sapien
tgctaagcacgcaaactggcccaat

SEQ ID NO: 1731619 - DNA, 25 bp, Homo sapien
atggttgaacagttctgctaagcac

SEQ ID NO: 1731620 - DNA, 25 bp, Homo sapien
gctctgccattctcagggtctgaga

SEQ ID NO: 1731621 - DNA, 25 bp, Homo sapien
caaggaattcagaggttaatgttcc

SEQ ID NO: 1731622 - DNA, 25 bp, Homo sapien
ccttattgtctcaaagcgtcctttg

SEQ ID NO: 1731623 - DNA, 25 bp, Homo sapien
tctgagagggattggttatctcccc

SEQ ID NO: 1731624 - DNA, 25 bp, Homo sapien
tgaggcgggaggatctcttgtgctc

SEQ ID NO: 1731625 - DNA, 25 bp, Homo sapien
tctcttgtgctcaggagttcgaggc

SEQ ID NO: 1731626 - DNA, 25 bp, Homo sapien
aatagctgggcacagaggcgtatgc

SEQ ID NO: 1731627 - DNA, 25 bp, Homo sapien
aaaaatagctgggcacagaggcgta

SEQ ID NO: 1731628 - DNA, 25 bp, Homo sapien
caaactttccctggcagccaatggc

SEQ ID NO: 1731629 - DNA, 25 bp, Homo sapien
acaaactttccctggcagccaatgg

SEQ ID NO: 1731630 - DNA, 25 bp, Homo sapien
aactttccctggcagccaatggcag

SEQ ID NO: 1731631 - DNA, 25 bp, Homo sapien
aaactttccctggcagccaatggca

SEQ ID NO: 1731632 - DNA, 25 bp, Homo sapien
tgagcagaagttgtggtcagcatgt

SEQ ID NO: 1731633 - DNA, 25 bp, Homo sapien
caaacagcaacttgatggcatttaa

SEQ ID NO: 1731634 - DNA, 25 bp, Homo sapien
gacatgagtaactggtgagcagaag

SEQ ID NO: 1731635 - DNA, 25 bp, Homo sapien
aatatatcacacttattggctgaat

SEQ ID NO: 1731636 - DNA, 25 bp, Homo sapien
agtttttatactgggagggcacacg

SEQ ID NO: 1731637 - DNA, 25 bp, Homo sapien
gggcacacgcctcaccaagagttat

SEQ ID NO: 1731638 - DNA, 25 bp, Homo sapien
caagagttatgaggcaggaaattcc

SEQ ID NO: 1731639 - DNA, 25 bp, Homo sapien
gatccccagctgcaaaggcatatgg

SEQ ID NO: 1731640 - DNA, 25 bp, Homo sapien
actgggaacagtagacttgtaggaa

SEQ ID NO: 1731641 - DNA, 25 bp, Homo sapien
ggcacagagctctatttaatacttg

SEQ ID NO: 1731642 - DNA, 25 bp, Homo sapien
tggtcttaataccactgagagcagg

SEQ ID NO: 1731643 - DNA, 25 bp, Homo sapien
tgtaggaaaagatgtcatggctcat

SEQ ID NO: 1731644 - DNA, 25 bp, Homo sapien
tctgtagatgggtccagaagcacaa

SEQ ID NO: 1731645 - DNA, 25 bp, Homo sapien
gttccaagtgtctgtagatgggtcc

SEQ ID NO: 1731646 - DNA, 25 bp, Homo sapien
gaagcacaaggcaatctttcaaata

SEQ ID NO: 1731647 - DNA, 25 bp, Homo sapien
tgggtccagaagcacaaggcaatct

SEQ ID NO: 1731648 - DNA, 25 bp, Homo sapien
ggctttagtgtaggcaaccaagagc

SEQ ID NO: 1731649 - DNA, 25 bp, Homo sapien
gagcttcagctgtactcttggagga

SEQ ID NO: 1731650 - DNA, 25 bp, Homo sapien
gggcagcaagagcaatggctttagt

SEQ ID NO: 1731651 - DNA, 25 bp, Homo sapien
tagatgaaatcaggggcagcaagag

SEQ ID NO: 1731652 - DNA, 25 bp, Homo sapien
atagtttgctgagtgtgtggcagat

SEQ ID NO: 1731653 - DNA, 25 bp, Homo sapien
tgatagtttgctgagtgtgtggcag

SEQ ID NO: 1731654 - DNA, 25 bp, Homo sapien
gatagtttgctgagtgtgtggcaga

SEQ ID NO: 1731655 - DNA, 25 bp, Homo sapien
agtttgctgagtgtgtggcagatgt

SEQ ID NO: 1731656 - DNA, 25 bp, Homo sapien
tccaacagcccctctagtgtgaacg

SEQ ID NO: 1731657 - DNA, 25 bp, Homo sapien
agtgtgaacgggttctggcagcccc

SEQ ID NO: 1731658 - DNA, 25 bp, Homo sapien
tgagcctttagtgctctgaggagga

SEQ ID NO: 1731659 - DNA, 25 bp, Homo sapien
tctgaggaggatggctccaacagcc

SEQ ID NO: 1731660 - DNA, 25 bp, Homo sapien
ctctgagggctgatctgcaggatgt

SEQ ID NO: 1731661 - DNA, 25 bp, Homo sapien
tctgcaggatgtggtctctgggtcc

SEQ ID NO: 1731662 - DNA, 25 bp, Homo sapien
cgctctgagggctgatctgcaggat

SEQ ID NO: 1731663 - DNA, 25 bp, Homo sapien
cttccgctctgagggctgatctgca

SEQ ID NO: 1731664 - DNA, 25 bp, Homo sapien
tggaggccacatagcagtgtctgtc

SEQ ID NO: 1731665 - DNA, 25 bp, Homo sapien
cacatagcagtgtctgtcgcgccag

SEQ ID NO: 1731666 - DNA, 25 bp, Homo sapien
catagcagtgtctgtcgcgccagtc

SEQ ID NO: 1731667 - DNA, 25 bp, Homo sapien
ggccacatagcagtgtctgtcgcgc

SEQ ID NO: 1731668 - DNA, 25 bp, Homo sapien
tcttggtttccagagggtctggact

SEQ ID NO: 1731669 - DNA, 25 bp, Homo sapien
ggctcttggtttccagagggtctgg

SEQ ID NO: 1731670 - DNA, 25 bp, Homo sapien
cagagggtctggactggtttgggcg

SEQ ID NO: 1731671 - DNA, 25 bp, Homo sapien
ctggacgcaaaacgggggacagctc

SEQ ID NO: 1731672 - DNA, 25 bp, Homo sapien
gagttcccttccttgcgcatcagca

SEQ ID NO: 1731673 - DNA, 25 bp, Homo sapien
cgtgtccccatcaagtgcccgagct

SEQ ID NO: 1731674 - DNA, 25 bp, Homo sapien
tgcccgagctctctgcgtgtgcgct

SEQ ID NO: 1731675 - DNA, 25 bp, Homo sapien
tgcgtgtgcgctgtgctgagtgagt

SEQ ID NO: 1731676 - DNA, 25 bp, Homo sapien
tcggcagtaacagaaacatttggcc

SEQ ID NO: 1731677 - DNA, 25 bp, Homo sapien
cggcagtaacagaaacatttggccc

SEQ ID NO: 1731678 - DNA, 25 bp, Homo sapien
ggcagtaacagaaacatttggcccc

SEQ ID NO: 1731679 - DNA, 25 bp, Homo sapien
gcagtaacagaaacatttggccccc

SEQ ID NO: 1731680 - DNA, 25 bp, Homo sapien
gagaacgattgtatttccaggtgct

SEQ ID NO: 1731681 - DNA, 25 bp, Homo sapien
aaaatatcagtgctcccatggagat

SEQ ID NO: 1731682 - DNA, 25 bp, Homo sapien
ccatggagatgtggtattgaggatc

SEQ ID NO: 1731683 - DNA, 25 bp, Homo sapien
ccaggtgctggtaatcgaaaatatc

SEQ ID NO: 1731684 - DNA, 25 bp, Homo sapien
ttggaaatagtggactgtcctcttt

SEQ ID NO: 1731685 - DNA, 25 bp, Homo sapien
ccaagtctcggatataggtgggaga

SEQ ID NO: 1731686 - DNA, 25 bp, Homo sapien
tgcagaagtagatgggcctggccaa

SEQ ID NO: 1731687 - DNA, 25 bp, Homo sapien
taattcgcatgtactgctaccttct

SEQ ID NO: 1731688 - DNA, 25 bp, Homo sapien
cacgcagtctttgcagtatctgaca

SEQ ID NO: 1731689 - DNA, 25 bp, Homo sapien
cctgacgttagggatacctcatgac

SEQ ID NO: 1731690 - DNA, 25 bp, Homo sapien
ggtaagtctacatcctctctgacag

SEQ ID NO: 1731691 - DNA, 25 bp, Homo sapien
tgccgggcacacactaaactcagtt

SEQ ID NO: 1731692 - DNA, 25 bp, Homo sapien
ccaggatatttatcagggaaaggct

SEQ ID NO: 1731693 - DNA, 25 bp, Homo sapien
tgctggttaaatacagggaacgcca

SEQ ID NO: 1731694 - DNA, 25 bp, Homo sapien
gcagcatggtcatctgaggattaaa

SEQ ID NO: 1731695 - DNA, 25 bp, Homo sapien
gccagagtccgaacacagtttgctg

SEQ ID NO: 1731696 - DNA, 25 bp, Homo sapien
tccctatgttcctcaagatacttgt

SEQ ID NO: 1731697 - DNA, 25 bp, Homo sapien
aatgttgtgatctggaaaaagtgca

SEQ ID NO: 1731698 - DNA, 25 bp, Homo sapien
aacttctccaaatgttgcctatgta

SEQ ID NO: 1731699 - DNA, 25 bp, Homo sapien
gcatttcctccaaatagttctctgg

SEQ ID NO: 1731700 - DNA, 25 bp, Homo sapien
taaacggttgctggattgtactgcc

SEQ ID NO: 1731701 - DNA, 25 bp, Homo sapien
tgatgtgaacaataccaggtccctg

SEQ ID NO: 1731702 - DNA, 25 bp, Homo sapien
gaagactgttacgtcccacagcggt

SEQ ID NO: 1731703 - DNA, 25 bp, Homo sapien
tgccctgggtgtctaaaagtctggt

SEQ ID NO: 1731704 - DNA, 25 bp, Homo sapien
cagactgcctgtatgtcatctcagt

SEQ ID NO: 1731705 - DNA, 25 bp, Homo sapien
atagaaagccaaaagggatgacttc

SEQ ID NO: 1731706 - DNA, 25 bp, Homo sapien
tcaagcactgatctaggcactagta

SEQ ID NO: 1731707 - DNA, 25 bp, Homo sapien
agattagttgaggaaatttttgcca

SEQ ID NO: 1731708 - DNA, 25 bp, Homo sapien
cctatttagtaattgctgcagaaga

SEQ ID NO: 1731709 - DNA, 25 bp, Homo sapien
tgcagaagactcttacagtcctaag

SEQ ID NO: 1731710 - DNA, 25 bp, Homo sapien
ccatgagactactacaaaaaatcga

SEQ ID NO: 1731711 - DNA, 25 bp, Homo sapien
ttttatgaggattaggtggcctcca

SEQ ID NO: 1731712 - DNA, 25 bp, Homo sapien
gaaagagcacgtcatgaagcaccat

SEQ ID NO: 1731713 - DNA, 25 bp, Homo sapien
gctgggaggttagaccaatcattaa

SEQ ID NO: 1731714 - DNA, 25 bp, Homo sapien
tgtaatgctaatgcaaaggcagcaa

SEQ ID NO: 1731715 - DNA, 25 bp, Homo sapien
gataaattgcactcgctgaaagagc

SEQ ID NO: 1731716 - DNA, 25 bp, Homo sapien
tatgaagcgcatcttttccagagcc

SEQ ID NO: 1731717 - DNA, 25 bp, Homo sapien
aacttccgaaggtcagggaggctgc

SEQ ID NO: 1731718 - DNA, 25 bp, Homo sapien
cgcaatcagttggaggaaaacacct

SEQ ID NO: 1731719 - DNA, 25 bp, Homo sapien
tgaggcagctcaccatagaggccga

SEQ ID NO: 1731720 - DNA, 25 bp, Homo sapien
gaggagcaagaggaatcagtttata

SEQ ID NO: 1731721 - DNA, 25 bp, Homo sapien
cattagacttcggttagagaactgt

SEQ ID NO: 1731722 - DNA, 25 bp, Homo sapien
tctacatctctgaagttcgaaacat

SEQ ID NO: 1731723 - DNA, 25 bp, Homo sapien
gagaactgtgaagatcggctgatta

SEQ ID NO: 1731724 - DNA, 25 bp, Homo sapien
tacctttgtggtgcttacatgctag

SEQ ID NO: 1731725 - DNA, 25 bp, Homo sapien
tattccgatcaaagctatctgtgac

SEQ ID NO: 1731726 - DNA, 25 bp, Homo sapien
tacatgctagagagggagttagaca

SEQ ID NO: 1731727 - DNA, 25 bp, Homo sapien
gaagccaaggaattctgactgtcca

SEQ ID NO: 1731728 - DNA, 25 bp, Homo sapien
taatgtgatagctttgatattttaa

SEQ ID NO: 1731729 - DNA, 25 bp, Homo sapien
aagatggtttttagtgtcgtgtgtg

SEQ ID NO: 1731730 - DNA, 25 bp, Homo sapien
atgtgatagctttgatattttaaga

SEQ ID NO: 1731731 - DNA, 25 bp, Homo sapien
taagatggtttttagtgtcgtgtgt

SEQ ID NO: 1731732 - DNA, 25 bp, Homo sapien
gaccttggtattggagtgtgacaac

SEQ ID NO: 1731733 - DNA, 25 bp, Homo sapien
aagatgccattcagcggaagtacag

SEQ ID NO: 1731734 - DNA, 25 bp, Homo sapien
gaagtacagctgtgatagatcaagc

SEQ ID NO: 1731735 - DNA, 25 bp, Homo sapien
gatcaagcagcattcacaagctaga

SEQ ID NO: 1731736 - DNA, 25 bp, Homo sapien
tagagaattaagactcaaaaccagc

SEQ ID NO: 1731737 - DNA, 25 bp, Homo sapien
taaatgctatactcgtgttctctca

SEQ ID NO: 1731738 - DNA, 25 bp, Homo sapien
tctgtttgatttgacatcccgttct

SEQ ID NO: 1731739 - DNA, 25 bp, Homo sapien
tatgtcaggttgttgaataacttgc

SEQ ID NO: 1731740 - DNA, 25 bp, Homo sapien
acatttccactacttagaggccatg

SEQ ID NO: 1731741 - DNA, 25 bp, Homo sapien
tcacatttccactacttagaggcca

SEQ ID NO: 1731742 - DNA, 25 bp, Homo sapien
cacatttccactacttagaggccat

SEQ ID NO: 1731743 - DNA, 25 bp, Homo sapien
gtgttgagtgtggttcctaaagccc

SEQ ID NO: 1731744 - DNA, 25 bp, Homo sapien
ttgctcatctgtactcctgggtgtg

SEQ ID NO: 1731745 - DNA, 25 bp, Homo sapien
tttccttttgctcatctgtactcct

SEQ ID NO: 1731746 - DNA, 25 bp, Homo sapien
gggtgcagcgatggtggtggtagcg

SEQ ID NO: 1731747 - DNA, 25 bp, Homo sapien
taggatgacccctctgggaggtgtc

SEQ ID NO: 1731748 - DNA, 25 bp, Homo sapien
caggccgtgtcccacattgatgtga

SEQ ID NO: 1731749 - DNA, 25 bp, Homo sapien
taccaagcagaaccaagggtagcct

SEQ ID NO: 1731750 - DNA, 25 bp, Homo sapien
cctttacacggtaccagatagggag

SEQ ID NO: 1731751 - DNA, 25 bp, Homo sapien
tccaggactccaagatgcaaataag

SEQ ID NO: 1731752 - DNA, 25 bp, Homo sapien
tgataccatctaacatacaatatgc

SEQ ID NO: 1731753 - DNA, 25 bp, Homo sapien
taaggattgctagaacagtgccctc

SEQ ID NO: 1731754 - DNA, 25 bp, Homo sapien
aacaattctatgataccatctaaca

SEQ ID NO: 1731755 - DNA, 25 bp, Homo sapien
taaggaaggtatttgatttgctgac

SEQ ID NO: 1731756 - DNA, 25 bp, Homo sapien
tcttggctgcctcgtttgtttcccc

SEQ ID NO: 1731757 - DNA, 25 bp, Homo sapien
tttctttagaaactgcatgatgcac

SEQ ID NO: 1731758 - DNA, 25 bp, Homo sapien
taaactaactcagtcataaggaagg

SEQ ID NO: 1731759 - DNA, 25 bp, Homo sapien
atgccacagcttttgggtgctcttc

SEQ ID NO: 1731760 - DNA, 25 bp, Homo sapien
ttctcctcagagtatcgaagtactt

SEQ ID NO: 1731761 - DNA, 25 bp, Homo sapien
tgaatctgcatgaagtggatgaagc

SEQ ID NO: 1731762 - DNA, 25 bp, Homo sapien
agaaacaggtctcactattctcctc

SEQ ID NO: 1731763 - DNA, 25 bp, Homo sapien
tttgagagtatgctggatctggatc

SEQ ID NO: 1731764 - DNA, 25 bp, Homo sapien
gctacatgcatcagttctaacacag

SEQ ID NO: 1731765 - DNA, 25 bp, Homo sapien
tccccatggcctgcattttgagagt

SEQ ID NO: 1731766 - DNA, 25 bp, Homo sapien
aaaggagaatgtgatgctacatgca

SEQ ID NO: 1731767 - DNA, 25 bp, Homo sapien
gagaggtacaaaggtatgtggtccc

SEQ ID NO: 1731768 - DNA, 25 bp, Homo sapien
gaggtacaaaggtatgtggtccctg

SEQ ID NO: 1731769 - DNA, 25 bp, Homo sapien
ggtacaaaggtatgtggtccctgcc

SEQ ID NO: 1731770 - DNA, 25 bp, Homo sapien
ctggagaggtacaaaggtatgtggt

SEQ ID NO: 1731771 - DNA, 25 bp, Homo sapien
agtatctccaggcctacgaggatgt

SEQ ID NO: 1731772 - DNA, 25 bp, Homo sapien
gagtatctccaggcctacgaggatg

SEQ ID NO: 1731773 - DNA, 25 bp, Homo sapien
gtatctccaggcctacgaggatgtc

SEQ ID NO: 1731774 - DNA, 25 bp, Homo sapien
tctgcgtcttcggcttccgtgcttc

SEQ ID NO: 1731775 - DNA, 25 bp, Homo sapien
gcgcccccgctctgcgtcttcggct

SEQ ID NO: 1731776 - DNA, 25 bp, Homo sapien
ccccgctctgcgtcttcggcttccg

SEQ ID NO: 1731777 - DNA, 25 bp, Homo sapien
tgcgtcttcggcttccgtgcttctc

SEQ ID NO: 1731778 - DNA, 25 bp, Homo sapien
tcaggcacctgttgtggatcccaaa

SEQ ID NO: 1731779 - DNA, 25 bp, Homo sapien
gtggagcgatctgcggctttgtttc

SEQ ID NO: 1731780 - DNA, 25 bp, Homo sapien
atcccaaatagaaacgtcgcccttg

SEQ ID NO: 1731781 - DNA, 25 bp, Homo sapien
gggctgcgcacagcggtggagcgat

SEQ ID NO: 1731782 - DNA, 25 bp, Homo sapien
cattgatgaattaagcagcaggcta

SEQ ID NO: 1731783 - DNA, 25 bp, Homo sapien
tgtttttacgattggagacttggcc

SEQ ID NO: 1731784 - DNA, 25 bp, Homo sapien
caagaaaagatggtgagctccgggt

SEQ ID NO: 1731785 - DNA, 25 bp, Homo sapien
gatggtgcaggatatgccagaccca

SEQ ID NO: 1731786 - DNA, 25 bp, Homo sapien
cagaattgtgttaaggttctggggt

SEQ ID NO: 1731787 - DNA, 25 bp, Homo sapien
cctcagaattgtgttaaggttctgg

SEQ ID NO: 1731788 - DNA, 25 bp, Homo sapien
ccacctcagaattgtgttaaggttc

SEQ ID NO: 1731789 - DNA, 25 bp, Homo sapien
cacctcagaattgtgttaaggttct

SEQ ID NO: 1731790 - DNA, 25 bp, Homo sapien
cattaccagcatgctaccatctcag

SEQ ID NO: 1731791 - DNA, 25 bp, Homo sapien
acacttcattaccagcatgctacca

SEQ ID NO: 1731792 - DNA, 25 bp, Homo sapien
cataacacttcattaccagcatgct

SEQ ID NO: 1731793 - DNA, 25 bp, Homo sapien
gaataaaggatggagtggctccata

SEQ ID NO: 1731794 - DNA, 25 bp, Homo sapien
catgcaattgggctgggagatctaa

SEQ ID NO: 1731795 - DNA, 25 bp, Homo sapien
ggagaaggcccacccactatatgga

SEQ ID NO: 1731796 - DNA, 25 bp, Homo sapien
cacttgcaaattctgtagctggttc

SEQ ID NO: 1731797 - DNA, 25 bp, Homo sapien
ttaaccgtcacatcaatagccagag

SEQ ID NO: 1731798 - DNA, 25 bp, Homo sapien
ggttctctgggtcaagtaaatagtg

SEQ ID NO: 1731799 - DNA, 25 bp, Homo sapien
tgcatgactttgtgtggttctctgg

SEQ ID NO: 1731800 - DNA, 25 bp, Homo sapien
tgatttgcatgactttgtgtggttc

SEQ ID NO: 1731801 - DNA, 25 bp, Homo sapien
tatgcatacccttggtgtcctgggc

SEQ ID NO: 1731802 - DNA, 25 bp, Homo sapien
cagcattgtaacgttggaatggtac

SEQ ID NO: 1731803 - DNA, 25 bp, Homo sapien
ctgccaactccagcattgtaacgtt

SEQ ID NO: 1731804 - DNA, 25 bp, Homo sapien
gcattgtaacgttggaatggtacac

SEQ ID NO: 1731805 - DNA, 25 bp, Homo sapien
gccaactccagcattgtaacgttgg

SEQ ID NO: 1731806 - DNA, 25 bp, Homo sapien
ccagcagtgtgtcttaggtgctttg

SEQ ID NO: 1731807 - DNA, 25 bp, Homo sapien
cagcagtgtgtcttaggtgctttgt

SEQ ID NO: 1731808 - DNA, 25 bp, Homo sapien
gtaaggatcatctcgatgtggcaga

SEQ ID NO: 1731809 - DNA, 25 bp, Homo sapien
atcatctcgatgtggcagagagagc

SEQ ID NO: 1731810 - DNA, 25 bp, Homo sapien
ggatcatctcgatgtggcagagaga

SEQ ID NO: 1731811 - DNA, 25 bp, Homo sapien
aaggatcatctcgatgtggcagaga

SEQ ID NO: 1731812 - DNA, 25 bp, Homo sapien
cagtttcttctgggatatctttttc

SEQ ID NO: 1731813 - DNA, 25 bp, Homo sapien
ttactcctgtgctgtaagtttttgt

SEQ ID NO: 1731814 - DNA, 25 bp, Homo sapien
ttcttcagtttcttctgggatatct

SEQ ID NO: 1731815 - DNA, 25 bp, Homo sapien
ttcagtttcttctgggatatctttt

SEQ ID NO: 1731816 - DNA, 25 bp, Homo sapien
gacaccaataatctgtagcctttgc

SEQ ID NO: 1731817 - DNA, 25 bp, Homo sapien
cactctggtctgtccttagggtcca

SEQ ID NO: 1731818 - DNA, 25 bp, Homo sapien
cattagacactctggtctgtcctta

SEQ ID NO: 1731819 - DNA, 25 bp, Homo sapien
gtgtccattagacactctggtctgt

SEQ ID NO: 1731820 - DNA, 25 bp, Homo sapien
ttaacaaatacaacgtggaatgatt

SEQ ID NO: 1731821 - DNA, 25 bp, Homo sapien
gagatggcactttcgtgaggagtta

SEQ ID NO: 1731822 - DNA, 25 bp, Homo sapien
cactttcgtgaggagttagagcttc

SEQ ID NO: 1731823 - DNA, 25 bp, Homo sapien
caacgtggaatgattaaggtaaggc

SEQ ID NO: 1731824 - DNA, 25 bp, Homo sapien
tccaattccagttcctgaatttgtg

SEQ ID NO: 1731825 - DNA, 25 bp, Homo sapien
tataaccagtactgtcatccaattc

SEQ ID NO: 1731826 - DNA, 25 bp, Homo sapien
tgtgttttacttacagtcacattag

SEQ ID NO: 1731827 - DNA, 25 bp, Homo sapien
ccaagtggtattgctttaactgtca

SEQ ID NO: 1731828 - DNA, 25 bp, Homo sapien
atttcagtgtttcatccttgtgcag

SEQ ID NO: 1731829 - DNA, 25 bp, Homo sapien
tttcagtgtttcatccttgtgcagg

SEQ ID NO: 1731830 - DNA, 25 bp, Homo sapien
ttatatttcagtgtttcatccttgt

SEQ ID NO: 1731831 - DNA, 25 bp, Homo sapien
atatttcagtgtttcatccttgtgc

SEQ ID NO: 1731832 - DNA, 25 bp, Homo sapien
tgatcgccgcggctttcctcgtctt

SEQ ID NO: 1731833 - DNA, 25 bp, Homo sapien
ggcaccgcaagctccagaaagggag

SEQ ID NO: 1731834 - DNA, 25 bp, Homo sapien
gagtcgcagcctcgtcgctgtctgc

SEQ ID NO: 1731835 - DNA, 25 bp, Homo sapien
tgagaccctacagcatccaatgtgc

SEQ ID NO: 1731836 - DNA, 25 bp, Homo sapien
ggccgtgatgtcatcagccgagccc

SEQ ID NO: 1731837 - DNA, 25 bp, Homo sapien
cgcgcccgcgctgccgcagcctggc

SEQ ID NO: 1731838 - DNA, 25 bp, Homo sapien
ccgcagccatgtccgcgcgcccgcg

SEQ ID NO: 1731839 - DNA, 25 bp, Homo sapien
cgccgcagccatgtccgcgcgcccg

SEQ ID NO: 1731840 - DNA, 25 bp, Homo sapien
gctccgcagcaatttggccgaggga

SEQ ID NO: 1731841 - DNA, 25 bp, Homo sapien
gaggctcctgtcagcgcctctcggt

SEQ ID NO: 1731842 - DNA, 25 bp, Homo sapien
aagctagaggcacccggccaatgca

SEQ ID NO: 1731843 - DNA, 25 bp, Homo sapien
tggataggcggaagctccgggtgtc

SEQ ID NO: 1731844 - DNA, 25 bp, Homo sapien
tatgaatctggcactaagagactgc

SEQ ID NO: 1731845 - DNA, 25 bp, Homo sapien
gctttcatgcagagctgtacggttt

SEQ ID NO: 1731846 - DNA, 25 bp, Homo sapien
cactgattttgagatcactacaagc

SEQ ID NO: 1731847 - DNA, 25 bp, Homo sapien
taatatgttactggctttaaggaca

SEQ ID NO: 1731848 - DNA, 25 bp, Homo sapien
ggagtgtcgggttggccttcattaa

SEQ ID NO: 1731849 - DNA, 25 bp, Homo sapien
ctcttgtgtacaaggaaacatctga

SEQ ID NO: 1731850 - DNA, 25 bp, Homo sapien
taggtaaattcctcacaggctaaag

SEQ ID NO: 1731851 - DNA, 25 bp, Homo sapien
catctgacgttctgctggagtgtcg

SEQ ID NO: 1731852 - DNA, 25 bp, Homo sapien
gatggttgcaaaatactgtgagtat

SEQ ID NO: 1731853 - DNA, 25 bp, Homo sapien
agataagtgatttcttatgggtgag

SEQ ID NO: 1731854 - DNA, 25 bp, Homo sapien
gcaaaatactgtgagtatacaaaaa

SEQ ID NO: 1731855 - DNA, 25 bp, Homo sapien
tgtaagagacttagaatggccaaaa

SEQ ID NO: 1731856 - DNA, 25 bp, Homo sapien
tattctggacgtagctcaaaagtta

SEQ ID NO: 1731857 - DNA, 25 bp, Homo sapien
gatgctattctggacgtagctcaaa

SEQ ID NO: 1731858 - DNA, 25 bp, Homo sapien
gaagatgatgctattctggacgtag

SEQ ID NO: 1731859 - DNA, 25 bp, Homo sapien
tctcaattagttatcaaaggttttc

SEQ ID NO: 1731860 - DNA, 25 bp, Homo sapien
tgtcctttatccatgtcactatttg

SEQ ID NO: 1731861 - DNA, 25 bp, Homo sapien
aaaagcttgtgtattggtaatttca

SEQ ID NO: 1731862 - DNA, 25 bp, Homo sapien
attttctgagtccattgtctctgtt

SEQ ID NO: 1731863 - DNA, 25 bp, Homo sapien
ggtaatttcatctgtctgcacgatc

SEQ ID NO: 1731864 - DNA, 25 bp, Homo sapien
tttattttggcgcacaattcttcct

SEQ ID NO: 1731865 - DNA, 25 bp, Homo sapien
cctttgacaattctgctaaaggctc

SEQ ID NO: 1731866 - DNA, 25 bp, Homo sapien
tgaccaaagactgtcgaagtcggct

SEQ ID NO: 1731867 - DNA, 25 bp, Homo sapien
ttcaccaggcagaaaggcatttccc

SEQ ID NO: 1731868 - DNA, 25 bp, Homo sapien
gcggtggcggtggctacacggagct

SEQ ID NO: 1731869 - DNA, 25 bp, Homo sapien
cggtggctacacggagctggagcgg

SEQ ID NO: 1731870 - DNA, 25 bp, Homo sapien
tggcggtggctacacggagctggag

SEQ ID NO: 1731871 - DNA, 25 bp, Homo sapien
gtggcggtggctacacggagctgga

SEQ ID NO: 1731872 - DNA, 25 bp, Homo sapien
gatctggaggttgatgttggcctct

SEQ ID NO: 1731873 - DNA, 25 bp, Homo sapien
caggttgatctggaggttgatgttg

SEQ ID NO: 1731874 - DNA, 25 bp, Homo sapien
ggttgatctggaggttgatgttggc

SEQ ID NO: 1731875 - DNA, 25 bp, Homo sapien
ttgatctggaggttgatgttggcct

SEQ ID NO: 1731876 - DNA, 25 bp, Homo sapien
gctcattcaggtgatgtgtctcagt

SEQ ID NO: 1731877 - DNA, 25 bp, Homo sapien
ctcattcaggtgatgtgtctcagtg

SEQ ID NO: 1731878 - DNA, 25 bp, Homo sapien
ttccaaatgtaatgcccactccatt

SEQ ID NO: 1731879 - DNA, 25 bp, Homo sapien
aaatgtaatgcccactccattgcat

SEQ ID NO: 1731880 - DNA, 25 bp, Homo sapien
tacaagggcacatctaattgctagg

SEQ ID NO: 1731881 - DNA, 25 bp, Homo sapien
aacgatgctgtctccatagtggctg

SEQ ID NO: 1731882 - DNA, 25 bp, Homo sapien
tgattcctagcaccaggacccgtat

SEQ ID NO: 1731883 - DNA, 25 bp, Homo sapien
tagtaatggcaggatacacgcttga

SEQ ID NO: 1731884 - DNA, 25 bp, Homo sapien
ttttcattttagttgaaagtagcag

SEQ ID NO: 1731885 - DNA, 25 bp, Homo sapien
ttcattttagttgaaagtagcagtc

SEQ ID NO: 1731886 - DNA, 25 bp, Homo sapien
attttcattttagttgaaagtagca

SEQ ID NO: 1731887 - DNA, 25 bp, Homo sapien
tttcattttagttgaaagtagcagt

SEQ ID NO: 1731888 - DNA, 25 bp, Homo sapien
ctagcaatacaagaaactggccatt

SEQ ID NO: 1731889 - DNA, 25 bp, Homo sapien
aaagtggttacaagagtgcctagca

SEQ ID NO: 1731890 - DNA, 25 bp, Homo sapien
ctattggagcatgggatattggtac

SEQ ID NO: 1731891 - DNA, 25 bp, Homo sapien
catattgctgaattgctctctagaa

SEQ ID NO: 1731892 - DNA, 25 bp, Homo sapien
caaccactacgctaggtgtgaggga

SEQ ID NO: 1731893 - DNA, 25 bp, Homo sapien
catagttagtgaagagaagagccaa

SEQ ID NO: 1731894 - DNA, 25 bp, Homo sapien
gcctcccaagtccatgttacacaga

SEQ ID NO: 1731895 - DNA, 25 bp, Homo sapien
gggagcaaaaccagatgtgatccat

SEQ ID NO: 1731896 - DNA, 25 bp, Homo sapien
tctgttgttatatctagtttgtttc

SEQ ID NO: 1731897 - DNA, 25 bp, Homo sapien
tcatgcctccatgtaaaatggtctt

SEQ ID NO: 1731898 - DNA, 25 bp, Homo sapien
gttttcatgcctccatgtaaaatgg

SEQ ID NO: 1731899 - DNA, 25 bp, Homo sapien
tcaaagttttcatgcctccatgtaa

SEQ ID NO: 1731900 - DNA, 25 bp, Homo sapien
acccttaagcagagcctcggccata

SEQ ID NO: 1731901 - DNA, 25 bp, Homo sapien
caattcttcaaactgggtgactgct

SEQ ID NO: 1731902 - DNA, 25 bp, Homo sapien
aactgggtgactgcttgtggtaaca

SEQ ID NO: 1731903 - DNA, 25 bp, Homo sapien
agagcctcggccataccaaccaatt

SEQ ID NO: 1731904 - DNA, 25 bp, Homo sapien
gcaaatgaatctggcgaggagttgt

SEQ ID NO: 1731905 - DNA, 25 bp, Homo sapien
gaggagttgtttgttgctctccaga

SEQ ID NO: 1731906 - DNA, 25 bp, Homo sapien
tctccagagggtggatgcagatgta

SEQ ID NO: 1731907 - DNA, 25 bp, Homo sapien
aattagaattactgcatgttgaggc

SEQ ID NO: 1731908 - DNA, 25 bp, Homo sapien
gctcttgttacaacgggcaatctgc

SEQ ID NO: 1731909 - DNA, 25 bp, Homo sapien
tattcatttgtgtaaagtacttgca

SEQ ID NO: 1731910 - DNA, 25 bp, Homo sapien
tggccatgtattcatttgtgtaaag

SEQ ID NO: 1731911 - DNA, 25 bp, Homo sapien
cattaataaacttctgaggcttgct

SEQ ID NO: 1731912 - DNA, 25 bp, Homo sapien
gctttgtcccttgaagtagaggatt

SEQ ID NO: 1731913 - DNA, 25 bp, Homo sapien
tgtcccttgaagtagaggattttgc

SEQ ID NO: 1731914 - DNA, 25 bp, Homo sapien
ctttgtcccttgaagtagaggattt

SEQ ID NO: 1731915 - DNA, 25 bp, Homo sapien
cagctttgtcccttgaagtagagga

SEQ ID NO: 1731916 - DNA, 25 bp, Homo sapien
tatgatttcttggacttcattctga

SEQ ID NO: 1731917 - DNA, 25 bp, Homo sapien
ctatgatttcttggacttcattctg

SEQ ID NO: 1731918 - DNA, 25 bp, Homo sapien
acttcattctgattcatagctggtt

SEQ ID NO: 1731919 - DNA, 25 bp, Homo sapien
gatttcttggacttcattctgattc

SEQ ID NO: 1731920 - DNA, 25 bp, Homo sapien
gacaatataacgcaatcatattatc

SEQ ID NO: 1731921 - DNA, 25 bp, Homo sapien
acaatataacgcaatcatattatca

SEQ ID NO: 1731922 - DNA, 25 bp, Homo sapien
caatataacgcaatcatattatcac

SEQ ID NO: 1731923 - DNA, 25 bp, Homo sapien
tcttgaccttgagtggtaacatgat

SEQ ID NO: 1731924 - DNA, 25 bp, Homo sapien
ttgaccttgagtggtaacatgattt

SEQ ID NO: 1731925 - DNA, 25 bp, Homo sapien
tgaccttgagtggtaacatgattta

SEQ ID NO: 1731926 - DNA, 25 bp, Homo sapien
cttgaccttgagtggtaacatgatt

SEQ ID NO: 1731927 - DNA, 25 bp, Homo sapien
tatttaatatcctgagagttaagat

SEQ ID NO: 1731928 - DNA, 25 bp, Homo sapien
ttttgccctatcattctcctaattg

SEQ ID NO: 1731929 - DNA, 25 bp, Homo sapien
gaaacatcatccgtattgggaaata

SEQ ID NO: 1731930 - DNA, 25 bp, Homo sapien
tatcctgagagttaagatttttgct

SEQ ID NO: 1731931 - DNA, 25 bp, Homo sapien
gttggatgttatagaggtgatagcc

SEQ ID NO: 1731932 - DNA, 25 bp, Homo sapien
ggcagtttggtcacttagttggatg

SEQ ID NO: 1731933 - DNA, 25 bp, Homo sapien
ggtcacttagttggatgttatagag

SEQ ID NO: 1731934 - DNA, 25 bp, Homo sapien
gaggtgatagcctaatattctgtaa

SEQ ID NO: 1731935 - DNA, 25 bp, Homo sapien
gaagtatggcttcgcattgcacagt

SEQ ID NO: 1731936 - DNA, 25 bp, Homo sapien
tggtcccttaggagagctcagcaat

SEQ ID NO: 1731937 - DNA, 25 bp, Homo sapien
tgtgacaacctgacaccaagcgaga

SEQ ID NO: 1731938 - DNA, 25 bp, Homo sapien
tgagggtggaatctacatgcagctt

SEQ ID NO: 1731939 - DNA, 25 bp, Homo sapien
tcctggacgttgtctatatatccta

SEQ ID NO: 1731940 - DNA, 25 bp, Homo sapien
tagtcaaatcgtaatggtaatgcct

SEQ ID NO: 1731941 - DNA, 25 bp, Homo sapien
catagcatggctctttacaagaaaa

SEQ ID NO: 1731942 - DNA, 25 bp, Homo sapien
aatgagtcagagctacatagtcaaa

SEQ ID NO: 1731943 - DNA, 25 bp, Homo sapien
tctacaccttttgtcacggtctgta

SEQ ID NO: 1731944 - DNA, 25 bp, Homo sapien
actactaagcgcaaagtctcagccg

SEQ ID NO: 1731945 - DNA, 25 bp, Homo sapien
gtctcagccgtaagtgtagtgattg

SEQ ID NO: 1731946 - DNA, 25 bp, Homo sapien
aatgagactctacaccttttgtcac

SEQ ID NO: 1731947 - DNA, 25 bp, Homo sapien
tcaggtgaggcgtgaaacactttat

SEQ ID NO: 1731948 - DNA, 25 bp, Homo sapien
caggtgaggcgtgaaacactttatc

SEQ ID NO: 1731949 - DNA, 25 bp, Homo sapien
ggtgaggcgtgaaacactttatctg

SEQ ID NO: 1731950 - DNA, 25 bp, Homo sapien
aggtgaggcgtgaaacactttatct

SEQ ID NO: 1731951 - DNA, 25 bp, Homo sapien
gaagagggatccattggaggtcttc

SEQ ID NO: 1731952 - DNA, 25 bp, Homo sapien
gactgagttccatgccctttttcca

SEQ ID NO: 1731953 - DNA, 25 bp, Homo sapien
ttctctttcttgcaatggggcttca

SEQ ID NO: 1731954 - DNA, 25 bp, Homo sapien
aagatgtgtttcatagagatacagg

SEQ ID NO: 1731955 - DNA, 25 bp, Homo sapien
agctgggaggccactggcggaaaga

SEQ ID NO: 1731956 - DNA, 25 bp, Homo sapien
gcggaaagagacgaaaaccgcttca

SEQ ID NO: 1731957 - DNA, 25 bp, Homo sapien
gggacccgcccctgcgtgagctggg

SEQ ID NO: 1731958 - DNA, 25 bp, Homo sapien
ctcactggtccgctatctccccgga

SEQ ID NO: 1731959 - DNA, 25 bp, Homo sapien
accaggcctcagaccgcagaaaaca

SEQ ID NO: 1731960 - DNA, 25 bp, Homo sapien
actgaagaggtatcgccccgaggct

SEQ ID NO: 1731961 - DNA, 25 bp, Homo sapien
tgagaacgccaggaccctcactcga

SEQ ID NO: 1731962 - DNA, 25 bp, Homo sapien
aacccttcgcggttcgcctctgaga

SEQ ID NO: 1731963 - DNA, 25 bp, Homo sapien
agccgcggccacaacgaacgccagg

SEQ ID NO: 1731964 - DNA, 25 bp, Homo sapien
acaacgaacgccagggcccgtgcgg

SEQ ID NO: 1731965 - DNA, 25 bp, Homo sapien
cggccacaacgaacgccagggcccg

SEQ ID NO: 1731966 - DNA, 25 bp, Homo sapien
tggcccagccgcggccacaacgaac

SEQ ID NO: 1731967 - DNA, 25 bp, Homo sapien
gacaaactgaatgtcgtcttcattt

SEQ ID NO: 1731968 - DNA, 25 bp, Homo sapien
actgacaaactgaatgtcgtcttca

SEQ ID NO: 1731969 - DNA, 25 bp, Homo sapien
ccgttgttgactcagatgcctcagg

SEQ ID NO: 1731970 - DNA, 25 bp, Homo sapien
cttcattttcatccgttgttgactc

SEQ ID NO: 1731971 - DNA, 25 bp, Homo sapien
taataggcgctagggttttcatcat

SEQ ID NO: 1731972 - DNA, 25 bp, Homo sapien
catcatcaccacagaccagatcgat

SEQ ID NO: 1731973 - DNA, 25 bp, Homo sapien
atcaccacagaccagatcgatgtat

SEQ ID NO: 1731974 - DNA, 25 bp, Homo sapien
atcactataataggcgctagggttt

SEQ ID NO: 1731975 - DNA, 25 bp, Homo sapien
tatactcgaaatgtggttcctttgc

SEQ ID NO: 1731976 - DNA, 25 bp, Homo sapien
caaatgccgaactgctgaacaatcc

SEQ ID NO: 1731977 - DNA, 25 bp, Homo sapien
ttctgctttcgatcccaaatgccga

SEQ ID NO: 1731978 - DNA, 25 bp, Homo sapien
cctttgccttagacaatctgcagtg

SEQ ID NO: 1731979 - DNA, 25 bp, Homo sapien
caatacactctgctatagttgacac

SEQ ID NO: 1731980 - DNA, 25 bp, Homo sapien
actggagataaatcactagggtggt

SEQ ID NO: 1731981 - DNA, 25 bp, Homo sapien
caggtgcaggagctgactgaattgt

SEQ ID NO: 1731982 - DNA, 25 bp, Homo sapien
gccacaaataacataacaggtgcag

SEQ ID NO: 1731983 - DNA, 25 bp, Homo sapien
tttctaacaattttgtagctactcc

SEQ ID NO: 1731984 - DNA, 25 bp, Homo sapien
tcaagtgacaattgtaatcgatgat

SEQ ID NO: 1731985 - DNA, 25 bp, Homo sapien
caattttgtagctactccagacttt

SEQ ID NO: 1731986 - DNA, 25 bp, Homo sapien
gtaatcgatgatttaaacagttcca

SEQ ID NO: 1731987 - DNA, 25 bp, Homo sapien
tttttattaggttgatgataaatag

SEQ ID NO: 1731988 - DNA, 25 bp, Homo sapien
ttattaggttgatgataaatagaat

SEQ ID NO: 1731989 - DNA, 25 bp, Homo sapien
ttcgccaaaccagagtaagaatgag

SEQ ID NO: 1731990 - DNA, 25 bp, Homo sapien
catcttggtcccattactcgaccaa

SEQ ID NO: 1731991 - DNA, 25 bp, Homo sapien
tatataatataggatatgcatgcca

SEQ ID NO: 1731992 - DNA, 25 bp, Homo sapien
tgtaaactacatgccgcccatcttg

SEQ ID NO: 1731993 - DNA, 25 bp, Homo sapien
tgtaagaaattaatgttagctaatc

SEQ ID NO: 1731994 - DNA, 25 bp, Homo sapien
gtcaatcattaaagcaaggtcttgt

SEQ ID NO: 1731995 - DNA, 25 bp, Homo sapien
tcttcaagaatgtcaatcattaaag

SEQ ID NO: 1731996 - DNA, 25 bp, Homo sapien
cattaaagcaaggtcttgtaagaaa

SEQ ID NO: 1731997 - DNA, 25 bp, Homo sapien
taaaaggcgtaggttcatgtgctga

SEQ ID NO: 1731998 - DNA, 25 bp, Homo sapien
aagctcttatggtacgtttgatcaa

SEQ ID NO: 1731999 - DNA, 25 bp, Homo sapien
cagctatccatggtgaagttatttc

SEQ ID NO: 1732000 - DNA, 25 bp, Homo sapien
catggtttctgtcagataaaaggcg

SEQ ID NO: 1732001 - DNA, 25 bp, Homo sapien
cgaactcttgtatctgtagccaacc

SEQ ID NO: 1732002 - DNA, 25 bp, Homo sapien
tacaaacggtgttgcatcccaatct

SEQ ID NO: 1732003 - DNA, 25 bp, Homo sapien
ccaacctgtggttgcaatttgacca

SEQ ID NO: 1732004 - DNA, 25 bp, Homo sapien
tagccaattgattctcatggaagac

SEQ ID NO: 1732005 - DNA, 25 bp, Homo sapien
cctccagggcttagaacttagctga

SEQ ID NO: 1732006 - DNA, 25 bp, Homo sapien
caagattatcttcttaaagaacgcc

SEQ ID NO: 1732007 - DNA, 25 bp, Homo sapien
gctgagtcctgctattttttgcatc

SEQ ID NO: 1732008 - DNA, 25 bp, Homo sapien
tatgacccactctagcaaacatggg

SEQ ID NO: 1732009 - DNA, 25 bp, Homo sapien
taccatactagatagcacagatatg

SEQ ID NO: 1732010 - DNA, 25 bp, Homo sapien
tactagatagcacagatatggaaat

SEQ ID NO: 1732011 - DNA, 25 bp, Homo sapien
catactagatagcacagatatggaa

SEQ ID NO: 1732012 - DNA, 25 bp, Homo sapien
ctagatagcacagatatggaaatga

SEQ ID NO: 1732013 - DNA, 25 bp, Homo sapien
tactgagtatactgaaaagcaaccc

SEQ ID NO: 1732014 - DNA, 25 bp, Homo sapien
tccacaatatgaccaactgacaggg

SEQ ID NO: 1732015 - DNA, 25 bp, Homo sapien
taatatcggcattctgggaggctaa

SEQ ID NO: 1732016 - DNA, 25 bp, Homo sapien
taacctaacttagctggagtgccat

SEQ ID NO: 1732017 - DNA, 25 bp, Homo sapien
ccacaccagctaatttttcgtattt

SEQ ID NO: 1732018 - DNA, 25 bp, Homo sapien
ccaggccatcttgatattaaaaggt

SEQ ID NO: 1732019 - DNA, 25 bp, Homo sapien
aattcaataatcaacaggccccata

SEQ ID NO: 1732020 - DNA, 25 bp, Homo sapien
gaaccgttcaagatgcaattattat

SEQ ID NO: 1732021 - DNA, 25 bp, Homo sapien
aacctgaaactaggctgaatgtggg

SEQ ID NO: 1732022 - DNA, 25 bp, Homo sapien
cggatatacctctttggtatgagca

SEQ ID NO: 1732023 - DNA, 25 bp, Homo sapien
gcttctgattagcaacaccggatat

SEQ ID NO: 1732024 - DNA, 25 bp, Homo sapien
gcacattggtaggtagccttaccct

SEQ ID NO: 1732025 - DNA, 25 bp, Homo sapien
ctttggtatgagcacattggtaggt

SEQ ID NO: 1732026 - DNA, 25 bp, Homo sapien
catccagagataagcatagtattaa

SEQ ID NO: 1732027 - DNA, 25 bp, Homo sapien
agaggataaatcaaaggcatccaga

SEQ ID NO: 1732028 - DNA, 25 bp, Homo sapien
ggcatccagagataagcatagtatt

SEQ ID NO: 1732029 - DNA, 25 bp, Homo sapien
ggataaatcaaaggcatccagagat

SEQ ID NO: 1732030 - DNA, 25 bp, Homo sapien
tgacaccgcatacaatgaatgatgg

SEQ ID NO: 1732031 - DNA, 25 bp, Homo sapien
caggacatcacatgcagttgcgagc

SEQ ID NO: 1732032 - DNA, 25 bp, Homo sapien
taagttcaaaggattcacccatggc

SEQ ID NO: 1732033 - DNA, 25 bp, Homo sapien
gaaaggctgaaagactccatacgca

SEQ ID NO: 1732034 - DNA, 25 bp, Homo sapien
tacctgggacattctagcttaaagc

SEQ ID NO: 1732035 - DNA, 25 bp, Homo sapien
caaaggtcccagatattagaatctc

SEQ ID NO: 1732036 - DNA, 25 bp, Homo sapien
attagtaagtgtgtagggcctacct

SEQ ID NO: 1732037 - DNA, 25 bp, Homo sapien
tatgtgcagccaacaaatatcagtc

SEQ ID NO: 1732038 - DNA, 25 bp, Homo sapien
ctaagaagtaatacagtcaggactg

SEQ ID NO: 1732039 - DNA, 25 bp, Homo sapien
tcaggactgtttggtataggagaaa

SEQ ID NO: 1732040 - DNA, 25 bp, Homo sapien
ccttgccggcatttggtgttaccag

SEQ ID NO: 1732041 - DNA, 25 bp, Homo sapien
tcctgggtcatagggtttaacatgt

SEQ ID NO: 1732042 - DNA, 25 bp, Homo sapien
gatgtgtacttgacctagcgattgt

SEQ ID NO: 1732043 - DNA, 25 bp, Homo sapien
ataaaccggaccattgtgagctggc

SEQ ID NO: 1732044 - DNA, 25 bp, Homo sapien
actgccatgagccaatggtccaggc

SEQ ID NO: 1732045 - DNA, 25 bp, Homo sapien
agctggcataaaccggaccattacc

SEQ ID NO: 1732046 - DNA, 25 bp, Homo sapien
tgacaaaactagagaaggataccac

SEQ ID NO: 1732047 - DNA, 25 bp, Homo sapien
gcaaggctggtttagcatacaaaaa

SEQ ID NO: 1732048 - DNA, 25 bp, Homo sapien
gaccaagtgaaacttctcccaggaa

SEQ ID NO: 1732049 - DNA, 25 bp, Homo sapien
taaagtcagtattacactaatgaca

SEQ ID NO: 1732050 - DNA, 25 bp, Homo sapien
aaaaaacatcccgacactgggtgcg

SEQ ID NO: 1732051 - DNA, 25 bp, Homo sapien
aacatcccgacactgggtgcggtgg

SEQ ID NO: 1732052 - DNA, 25 bp, Homo sapien
caaaagacagaagatcttcaattga

SEQ ID NO: 1732053 - DNA, 25 bp, Homo sapien
ttcaattgataacctaacattccac

SEQ ID NO: 1732054 - DNA, 25 bp, Homo sapien
catagatagcagatcaactaggaaa

SEQ ID NO: 1732055 - DNA, 25 bp, Homo sapien
cattaggaagatacaccaatttgca

SEQ ID NO: 1732056 - DNA, 25 bp, Homo sapien
cacctagttgagagtcattttgtaa

SEQ ID NO: 1732057 - DNA, 25 bp, Homo sapien
aaatacatgacacaaagactgacag

SEQ ID NO: 1732058 - DNA, 25 bp, Homo sapien
ctcagtctctggagtcactaggact

SEQ ID NO: 1732059 - DNA, 25 bp, Homo sapien
tcagtctctggagtcactaggacta

SEQ ID NO: 1732060 - DNA, 25 bp, Homo sapien
cggtctctcactctgctgcagtgca

SEQ ID NO: 1732061 - DNA, 25 bp, Homo sapien
ttttattttgaaacacggtctctca

SEQ ID NO: 1732062 - DNA, 25 bp, Homo sapien
taaagaaaggtacgacaatgttgca

SEQ ID NO: 1732063 - DNA, 25 bp, Homo sapien
caacacagaggctttacgctggagg

SEQ ID NO: 1732064 - DNA, 25 bp, Homo sapien
attacaaggcatgcaaagaaacagc

SEQ ID NO: 1732065 - DNA, 25 bp, Homo sapien
gatgctgcatctccccgaggagcaa

SEQ ID NO: 1732066 - DNA, 25 bp, Homo sapien
tgggtccaatttttccaccatgaga

SEQ ID NO: 1732067 - DNA, 25 bp, Homo sapien
cattttgcagatatcaatggttcag

SEQ ID NO: 1732068 - DNA, 25 bp, Homo sapien
tacacagtgtgcagatatacagggt

SEQ ID NO: 1732069 - DNA, 25 bp, Homo sapien
tatacagggtaacatcaatagcctt

SEQ ID NO: 1732070 - DNA, 25 bp, Homo sapien
gcaggttagaccagacaaaatacta

SEQ ID NO: 1732071 - DNA, 25 bp, Homo sapien
gaccagacaaaatactatcagtgac

SEQ ID NO: 1732072 - DNA, 25 bp, Homo sapien
gattagacgcaggttagaccagaca

SEQ ID NO: 1732073 - DNA, 25 bp, Homo sapien
ttcttcatgattagacgcaggttag

SEQ ID NO: 1732074 - DNA, 25 bp, Homo sapien
gctcttagcaacctggtgtcatagt

SEQ ID NO: 1732075 - DNA, 25 bp, Homo sapien
taaggtttagtaaagcacagatact

SEQ ID NO: 1732076 - DNA, 25 bp, Homo sapien
ggaactggaatattctcattaacaa

SEQ ID NO: 1732077 - DNA, 25 bp, Homo sapien
catagtcattgcctggagttatggg

SEQ ID NO: 1732078 - DNA, 25 bp, Homo sapien
cccaggccctgccagtattaataca

SEQ ID NO: 1732079 - DNA, 25 bp, Homo sapien
ctcttccctagcgtcagtctcccag

SEQ ID NO: 1732080 - DNA, 25 bp, Homo sapien
tctcccaggccctgccagtattaat

SEQ ID NO: 1732081 - DNA, 25 bp, Homo sapien
ccaggccctgccagtattaatacac

SEQ ID NO: 1732082 - DNA, 25 bp, Homo sapien
ctgggtcctgtgagatagcgaagca

SEQ ID NO: 1732083 - DNA, 25 bp, Homo sapien
gtggggcgaagccaggggccagctg

SEQ ID NO: 1732084 - DNA, 25 bp, Homo sapien
ccagctgggtcctgtgagatagcga

SEQ ID NO: 1732085 - DNA, 25 bp, Homo sapien
cagctgggtcctgtgagatagcgaa

SEQ ID NO: 1732086 - DNA, 25 bp, Homo sapien
agaggaaaagaaccatgcgcctaaa

SEQ ID NO: 1732087 - DNA, 25 bp, Homo sapien
ctttctctcactcccgggcttcctt

SEQ ID NO: 1732088 - DNA, 25 bp, Homo sapien
gaaccatgcgcctaaaagacgccag

SEQ ID NO: 1732089 - DNA, 25 bp, Homo sapien
gagccgctttctctcactcccgggc

SEQ ID NO: 1732090 - DNA, 25 bp, Homo sapien
ggacccgcccctgcgtgagcgccga

SEQ ID NO: 1732091 - DNA, 25 bp, Homo sapien
agcgccgacgccaccggcggaaaga

SEQ ID NO: 1732092 - DNA, 25 bp, Homo sapien
cggaaagagacgcaaaacctcttca

SEQ ID NO: 1732093 - DNA, 25 bp, Homo sapien
gagacgcaaaacctcttcaaaggag

SEQ ID NO: 1732094 - DNA, 25 bp, Homo sapien
gccgccgtcgccacgaatccccttc

SEQ ID NO: 1732095 - DNA, 25 bp, Homo sapien
cgccgccgtcgccacgaatcccctt

SEQ ID NO: 1732096 - DNA, 25 bp, Homo sapien
actgaagaggtatcgccccgaggct

SEQ ID NO: 1732097 - DNA, 25 bp, Homo sapien
accaggcctcagaccgcagaaaaca

SEQ ID NO: 1732098 - DNA, 25 bp, Homo sapien
aacccttcgcggttcgcctctgaga

SEQ ID NO: 1732099 - DNA, 25 bp, Homo sapien
tgagaacgccaggaccctcactcga

SEQ ID NO: 1732100 - DNA, 25 bp, Homo sapien
cttcattttcatccgttgttgactc

SEQ ID NO: 1732101 - DNA, 25 bp, Homo sapien
gacaaactgaatgtcgtcttcattt

SEQ ID NO: 1732102 - DNA, 25 bp, Homo sapien
ccgttgttgactcagatgcctcagg

SEQ ID NO: 1732103 - DNA, 25 bp, Homo sapien
actgacaaactgaatgtcgtcttca

SEQ ID NO: 1732104 - DNA, 25 bp, Homo sapien
tcttcatcaaccaggccttgaatgt

SEQ ID NO: 1732105 - DNA, 25 bp, Homo sapien
ttcttcatcaaccaggccttgaatg

SEQ ID NO: 1732106 - DNA, 25 bp, Homo sapien
attcaagaacaggtcgtaatggtcc

SEQ ID NO: 1732107 - DNA, 25 bp, Homo sapien
atcaatgtattcaagaacaggtcgt

SEQ ID NO: 1732108 - DNA, 25 bp, Homo sapien
ctgctgaccagatcaatgtattcaa

SEQ ID NO: 1732109 - DNA, 25 bp, Homo sapien
tgctgaccagatcaatgtattcaag

SEQ ID NO: 1732110 - DNA, 25 bp, Homo sapien
caaaagaatcctgttgtatagggca

SEQ ID NO: 1732111 - DNA, 25 bp, Homo sapien
aaaagaatcctgttgtatagggcac

SEQ ID NO: 1732112 - DNA, 25 bp, Homo sapien
aacaaaagaatcctgttgtataggg

SEQ ID NO: 1732113 - DNA, 25 bp, Homo sapien
acaaaagaatcctgttgtatagggc

SEQ ID NO: 1732114 - DNA, 25 bp, Homo sapien
tcctaaaaggatctctacatatcct

SEQ ID NO: 1732115 - DNA, 25 bp, Homo sapien
cctaaaaggatctctacatatcctt

SEQ ID NO: 1732116 - DNA, 25 bp, Homo sapien
taaaaggatctctacatatcctttt

SEQ ID NO: 1732117 - DNA, 25 bp, Homo sapien
ctaaaaggatctctacatatccttt

SEQ ID NO: 1732118 - DNA, 25 bp, Homo sapien
tcaatcccctatatcacagagcaag

SEQ ID NO: 1732119 - DNA, 25 bp, Homo sapien
cagaagtttgggctaaagcaaggac

SEQ ID NO: 1732120 - DNA, 25 bp, Homo sapien
cagagcaagaagtttgtggccactc

SEQ ID NO: 1732121 - DNA, 25 bp, Homo sapien
ggcaagactgttacaaagggctcaa

SEQ ID NO: 1732122 - DNA, 25 bp, Homo sapien
gactgcagatcacgtatcactcggg

SEQ ID NO: 1732123 - DNA, 25 bp, Homo sapien
tagtagtacaaagttgccaaaggcc

SEQ ID NO: 1732124 - DNA, 25 bp, Homo sapien
gagatgtaagtcgaagccaggcctg

SEQ ID NO: 1732125 - DNA, 25 bp, Homo sapien
tataggccatgtagctagcagctcg

SEQ ID NO: 1732126 - DNA, 25 bp, Homo sapien
gaagatctgtcaaactgaagcctga

SEQ ID NO: 1732127 - DNA, 25 bp, Homo sapien
gattcaaaatctgctagtcctcagt

SEQ ID NO: 1732128 - DNA, 25 bp, Homo sapien
tcttgaatgactactctgctgaaca

SEQ ID NO: 1732129 - DNA, 25 bp, Homo sapien
tacggactcttggtgagttgaccat

SEQ ID NO: 1732130 - DNA, 25 bp, Homo sapien
agacctgcgacatctagccattcca

SEQ ID NO: 1732131 - DNA, 25 bp, Homo sapien
cataatagacctgcgacatctagcc

SEQ ID NO: 1732132 - DNA, 25 bp, Homo sapien
taatagacctgcgacatctagccat

SEQ ID NO: 1732133 - DNA, 25 bp, Homo sapien
ggtgtccataatagacctgcgacat

SEQ ID NO: 1732134 - DNA, 25 bp, Homo sapien
taaaatatcaccaaatacaggccgg

SEQ ID NO: 1732135 - DNA, 25 bp, Homo sapien
caatcaggtcacttaggtagcactc

SEQ ID NO: 1732136 - DNA, 25 bp, Homo sapien
gcaggttctgaacatggcaggcata

SEQ ID NO: 1732137 - DNA, 25 bp, Homo sapien
catataattgaggtatctgctgcca

SEQ ID NO: 1732138 - DNA, 25 bp, Homo sapien
gaacgggctgcatacctaacagtag

SEQ ID NO: 1732139 - DNA, 25 bp, Homo sapien
caagtgacttgctaatgctgagggt

SEQ ID NO: 1732140 - DNA, 25 bp, Homo sapien
taaagaaagatcaatacacaggccg

SEQ ID NO: 1732141 - DNA, 25 bp, Homo sapien
tcaaaaaggaaatctgcatcaggct

SEQ ID NO: 1732142 - DNA, 25 bp, Homo sapien
caggcattcttccaaaaaggacatc

SEQ ID NO: 1732143 - DNA, 25 bp, Homo sapien
tagcttgtacttgagaaaagagact

SEQ ID NO: 1732144 - DNA, 25 bp, Homo sapien
tcacacacttggtaagaaaagcttt

SEQ ID NO: 1732145 - DNA, 25 bp, Homo sapien
tcaatacctgcctgcacatagcagg

SEQ ID NO: 1732146 - DNA, 25 bp, Homo sapien
accaggccaactaactcttgcctaa

SEQ ID NO: 1732147 - DNA, 25 bp, Homo sapien
ggccaactaactcttgcctaatcat

SEQ ID NO: 1732148 - DNA, 25 bp, Homo sapien
caggccaactaactcttgcctaatc

SEQ ID NO: 1732149 - DNA, 25 bp, Homo sapien
tctccaccaggccaactaactcttg

SEQ ID NO: 1732150 - DNA, 25 bp, Homo sapien
gtaatggctgtacaaacttagcaca

SEQ ID NO: 1732151 - DNA, 25 bp, Homo sapien
gagacaactcctagaaccttacaag

SEQ ID NO: 1732152 - DNA, 25 bp, Homo sapien
caaaccaacccctagagagacaact

SEQ ID NO: 1732153 - DNA, 25 bp, Homo sapien
taatggactatggtacaaaccaacc

SEQ ID NO: 1732154 - DNA, 25 bp, Homo sapien
tatgcaaccatttaaccatgaaggg

SEQ ID NO: 1732155 - DNA, 25 bp, Homo sapien
cacttcaggaacattatcctgttca

SEQ ID NO: 1732156 - DNA, 25 bp, Homo sapien
cctgaggacacctttccataggtga

SEQ ID NO: 1732157 - DNA, 25 bp, Homo sapien
ccataggtgaccctgaagtatgcaa

SEQ ID NO: 1732158 - DNA, 25 bp, Homo sapien
gaaggtaaaggtggccaacagcaag

SEQ ID NO: 1732159 - DNA, 25 bp, Homo sapien
agttagccgatatgaccccactgta

SEQ ID NO: 1732160 - DNA, 25 bp, Homo sapien
tattactgggacaaggtctacaacc

SEQ ID NO: 1732161 - DNA, 25 bp, Homo sapien
tattcagtgaataaggctagtccca

SEQ ID NO: 1732162 - DNA, 25 bp, Homo sapien
tgtatcctggtagagttacagcaaa

SEQ ID NO: 1732163 - DNA, 25 bp, Homo sapien
caaaatcccataatcaacgaaatga

SEQ ID NO: 1732164 - DNA, 25 bp, Homo sapien
taccaacactcccagcaagtttttc

SEQ ID NO: 1732165 - DNA, 25 bp, Homo sapien
ctagaaatgacaacctgacacaaaa

SEQ ID NO: 1732166 - DNA, 25 bp, Homo sapien
taaagggtccataccgacagtgaat

SEQ ID NO: 1732167 - DNA, 25 bp, Homo sapien
tcaatgctagccaatcagtgttggg

SEQ ID NO: 1732168 - DNA, 25 bp, Homo sapien
gaagtatttcctatggtcaccctgg

SEQ ID NO: 1732169 - DNA, 25 bp, Homo sapien
tattagcagctataggatcttcagg

SEQ ID NO: 1732170 - DNA, 25 bp, Homo sapien
tacaagtgtgtgtcaccatcccggc

SEQ ID NO: 1732171 - DNA, 25 bp, Homo sapien
ggggctacaagtgtgtgtcaccatc

SEQ ID NO: 1732172 - DNA, 25 bp, Homo sapien
acaagtgtgtgtcaccatcccggct

SEQ ID NO: 1732173 - DNA, 25 bp, Homo sapien
gctacaagtgtgtgtcaccatcccg

SEQ ID NO: 1732174 - DNA, 25 bp, Homo sapien
ttccctgtgaggagaaagtttcttc

SEQ ID NO: 1732175 - DNA, 25 bp, Homo sapien
tcttccctgtgaggagaaagtttct

SEQ ID NO: 1732176 - DNA, 25 bp, Homo sapien
ccctgtgaggagaaagtttcttcat

SEQ ID NO: 1732177 - DNA, 25 bp, Homo sapien
ttcttccctgtgaggagaaagtttc

SEQ ID NO: 1732178 - DNA, 25 bp, Homo sapien
ccttgtagtataattcgacattagg

SEQ ID NO: 1732179 - DNA, 25 bp, Homo sapien
ctgtgctgctttattcctgggttcc

SEQ ID NO: 1732180 - DNA, 25 bp, Homo sapien
tcaggctttttggttacatatacat

SEQ ID NO: 1732181 - DNA, 25 bp, Homo sapien
actttgttgaacatgagttggtgag

SEQ ID NO: 1732182 - DNA, 25 bp, Homo sapien
tatactgcatggtgccgaagtttgg

SEQ ID NO: 1732183 - DNA, 25 bp, Homo sapien
cgaagtttggccttctactgatccc

SEQ ID NO: 1732184 - DNA, 25 bp, Homo sapien
tctccatgtgaacccaagatttagc

SEQ ID NO: 1732185 - DNA, 25 bp, Homo sapien
tatgtacattagtactccctccaga

SEQ ID NO: 1732186 - DNA, 25 bp, Homo sapien
gggtcatcaggcaaagcgccgaccc

SEQ ID NO: 1732187 - DNA, 25 bp, Homo sapien
tcagagaggtagggtcatcaggcaa

SEQ ID NO: 1732188 - DNA, 25 bp, Homo sapien
cagagaggtagggtcatcaggcaaa

SEQ ID NO: 1732189 - DNA, 25 bp, Homo sapien
aggtagggtcatcaggcaaagcgcc

SEQ ID NO: 1732190 - DNA, 25 bp, Homo sapien
gctgaagagtaaactcttctcagat

SEQ ID NO: 1732191 - DNA, 25 bp, Homo sapien
atctttattcacttaaaagctgaag

SEQ ID NO: 1732192 - DNA, 25 bp, Homo sapien
aaagctgaagagtaaactcttctca

SEQ ID NO: 1732193 - DNA, 25 bp, Homo sapien
tttatcatctttattcacttaaaag

SEQ ID NO: 1732194 - DNA, 25 bp, Homo sapien
ggtctgtcaattatccaccagcatc

SEQ ID NO: 1732195 - DNA, 25 bp, Homo sapien
acttgagttataagaacctattttg

SEQ ID NO: 1732196 - DNA, 25 bp, Homo sapien
tatactaaagaaccatttacttgag

SEQ ID NO: 1732197 - DNA, 25 bp, Homo sapien
tatgtggtattttgtaggtctgtca

SEQ ID NO: 1732198 - DNA, 25 bp, Homo sapien
tatggtctttacgtttaatattctc

SEQ ID NO: 1732199 - DNA, 25 bp, Homo sapien
cgagccagagttaaagcaactttat

SEQ ID NO: 1732200 - DNA, 25 bp, Homo sapien
aacatggcgggctagacgagccaga

SEQ ID NO: 1732201 - DNA, 25 bp, Homo sapien
tctccacttcaacatggcgggctag

SEQ ID NO: 1732202 - DNA, 25 bp, Homo sapien
tcatgagctatctagggtacatact

SEQ ID NO: 1732203 - DNA, 25 bp, Homo sapien
attcatgagctatctagggtacata

SEQ ID NO: 1732204 - DNA, 25 bp, Homo sapien
tagggtacatactgagctttgatta

SEQ ID NO: 1732205 - DNA, 25 bp, Homo sapien
agggtacatactgagctttgattaa

SEQ ID NO: 1732206 - DNA, 25 bp, Homo sapien
tacatagagtatgcagtatcccaac

SEQ ID NO: 1732207 - DNA, 25 bp, Homo sapien
aagttagcctatccaaagaaagcaa

SEQ ID NO: 1732208 - DNA, 25 bp, Homo sapien
taggactactaaagccctaaagtgc

SEQ ID NO: 1732209 - DNA, 25 bp, Homo sapien
cctaaagtgctaatgtgcaccccta

SEQ ID NO: 1732210 - DNA, 25 bp, Homo sapien
cctcgaataaattccaattcttgta

SEQ ID NO: 1732211 - DNA, 25 bp, Homo sapien
tctgtatcagaatgtcctcgaataa

SEQ ID NO: 1732212 - DNA, 25 bp, Homo sapien
aacccatgagcatgctgaaaatcaa

SEQ ID NO: 1732213 - DNA, 25 bp, Homo sapien
tagccactggtccacacacagtctt

SEQ ID NO: 1732214 - DNA, 25 bp, Homo sapien
ctggtccattcttcatccctttctt

SEQ ID NO: 1732215 - DNA, 25 bp, Homo sapien
tcctttatcctggtccattcttcat

SEQ ID NO: 1732216 - DNA, 25 bp, Homo sapien
taatcctcctttatcctggtccatt

SEQ ID NO: 1732217 - DNA, 25 bp, Homo sapien
atcctggtccattcttcatcccttt

SEQ ID NO: 1732218 - DNA, 25 bp, Homo sapien
tacttattgttgatacctctcccct

SEQ ID NO: 1732219 - DNA, 25 bp, Homo sapien
tttctgaggaatcaagccactgatc

SEQ ID NO: 1732220 - DNA, 25 bp, Homo sapien
gatcaatcagttccagtctagacac

SEQ ID NO: 1732221 - DNA, 25 bp, Homo sapien
gctatattatagagggtctgagctc

SEQ ID NO: 1732222 - DNA, 25 bp, Homo sapien
tgcattataggacataaaattggtt

SEQ ID NO: 1732223 - DNA, 25 bp, Homo sapien
ttgtcaaactccttgttacagtgca

SEQ ID NO: 1732224 - DNA, 25 bp, Homo sapien
tggcctcctcttcggaatgaacttt

SEQ ID NO: 1732225 - DNA, 25 bp, Homo sapien
tgttccacaattaattgtgcctgtt

SEQ ID NO: 1732226 - DNA, 25 bp, Homo sapien
gaaaggtccatgtagtgtaattgtt

SEQ ID NO: 1732227 - DNA, 25 bp, Homo sapien
taacatactacacaagcaaaggagc

SEQ ID NO: 1732228 - DNA, 25 bp, Homo sapien
aaaaggtgatctctatattgttgtt

SEQ ID NO: 1732229 - DNA, 25 bp, Homo sapien
caaaggagctgaagaaaggtccatg

SEQ ID NO: 1732230 - DNA, 25 bp, Homo sapien
tattctcaagagtggccctacaggg

SEQ ID NO: 1732231 - DNA, 25 bp, Homo sapien
tatcccctagtactgaatgagcctg

SEQ ID NO: 1732232 - DNA, 25 bp, Homo sapien
ccttctggtcagtttgtatcagtcc

SEQ ID NO: 1732233 - DNA, 25 bp, Homo sapien
gctacccagatgtgttcttatgtga

SEQ ID NO: 1732234 - DNA, 25 bp, Homo sapien
gacatatgctttgaacactcctcct

SEQ ID NO: 1732235 - DNA, 25 bp, Homo sapien
gaaggttgttgttatgtccatcatc

SEQ ID NO: 1732236 - DNA, 25 bp, Homo sapien
cctttctgctaaaaagaaggaagca

SEQ ID NO: 1732237 - DNA, 25 bp, Homo sapien
gcaatttggacatgcaaaacactga

SEQ ID NO: 1732238 - DNA, 25 bp, Homo sapien
tggcaggccacacacttaacttgaa

SEQ ID NO: 1732239 - DNA, 25 bp, Homo sapien
gaaagatattggatgtgcaattcct

SEQ ID NO: 1732240 - DNA, 25 bp, Homo sapien
ggaacatctttgcacagagagatca

SEQ ID NO: 1732241 - DNA, 25 bp, Homo sapien
gaacgcagtgtcttgtggcaggcca

SEQ ID NO: 1732242 - DNA, 25 bp, Homo sapien
tgggtgctggtttcatccacaaaga

SEQ ID NO: 1732243 - DNA, 25 bp, Homo sapien
taaatgcaagtcagaagaaggatcc

SEQ ID NO: 1732244 - DNA, 25 bp, Homo sapien
tctggacacaagcaacaccttcatg

SEQ ID NO: 1732245 - DNA, 25 bp, Homo sapien
tcccttcgctgctgtggcaatagag

SEQ ID NO: 1732246 - DNA, 25 bp, Homo sapien
taaatgtgcccctccgtgaatccgg

SEQ ID NO: 1732247 - DNA, 25 bp, Homo sapien
gcatcttcacttgggaatcgctgat

SEQ ID NO: 1732248 - DNA, 25 bp, Homo sapien
tgtgtaaacgaatgacccctgaatc

SEQ ID NO: 1732249 - DNA, 25 bp, Homo sapien
cctttttgcatgtccgacaccagaa

SEQ ID NO: 1732250 - DNA, 25 bp, Homo sapien
aattatccaatgttgtagaggatga

SEQ ID NO: 1732251 - DNA, 25 bp, Homo sapien
ggatgatggcaaagtttcaccttct

SEQ ID NO: 1732252 - DNA, 25 bp, Homo sapien
ttgccggggaatgatcaataacagt

SEQ ID NO: 1732253 - DNA, 25 bp, Homo sapien
taatagctgatgaaggcttgttagc

SEQ ID NO: 1732254 - DNA, 25 bp, Homo sapien
tacagatgtaactctcacggcaacc

SEQ ID NO: 1732255 - DNA, 25 bp, Homo sapien
tgtgctgttgccgaacataaactgc

SEQ ID NO: 1732256 - DNA, 25 bp, Homo sapien
tggcttgccaaagacatgcagtgct

SEQ ID NO: 1732257 - DNA, 25 bp, Homo sapien
tatctatgaaacttgtggcttgcca

SEQ ID NO: 1732258 - DNA, 25 bp, Homo sapien
cagatccaaaatgagccacactggg

SEQ ID NO: 1732259 - DNA, 25 bp, Homo sapien
ccacactgggtttctgtaagaagca

SEQ ID NO: 1732260 - DNA, 25 bp, Homo sapien
ggcactagcagtaaacttgtacagg

SEQ ID NO: 1732261 - DNA, 25 bp, Homo sapien
tctctctgtatgtgaggcactagca

SEQ ID NO: 1732262 - DNA, 25 bp, Homo sapien
tgccctggtagatgaccaaaaaagt

SEQ ID NO: 1732263 - DNA, 25 bp, Homo sapien
caggtaatccaaatctggaagctca

SEQ ID NO: 1732264 - DNA, 25 bp, Homo sapien
ctatatgagtcatggttcgcaggta

SEQ ID NO: 1732265 - DNA, 25 bp, Homo sapien
aatgttccttggtttagatgccctg

SEQ ID NO: 1732266 - DNA, 25 bp, Homo sapien
gaaaacgattctagcagagtaacta

SEQ ID NO: 1732267 - DNA, 25 bp, Homo sapien
tcagtaaccatgttagtacaaagcc

SEQ ID NO: 1732268 - DNA, 25 bp, Homo sapien
ccacagaggcatgtaaagaaaacga

SEQ ID NO: 1732269 - DNA, 25 bp, Homo sapien
tatccaggaaggtttaagaggagcc

SEQ ID NO: 1732270 - DNA, 25 bp, Homo sapien
gaaaaggcaaaaatgataatcaaac

SEQ ID NO: 1732271 - DNA, 25 bp, Homo sapien
aaaaggcaaaaatgataatcaaaca

SEQ ID NO: 1732272 - DNA, 25 bp, Homo sapien
ggaagaagcatccaatcctgttcag

SEQ ID NO: 1732273 - DNA, 25 bp, Homo sapien
tataaatcttacagttgagcggagg

SEQ ID NO: 1732274 - DNA, 25 bp, Homo sapien
tactacagcgaggatgaaggaagaa

SEQ ID NO: 1732275 - DNA, 25 bp, Homo sapien
aatcctgttcaggtagttataaatc

SEQ ID NO: 1732276 - DNA, 25 bp, Homo sapien
ttacatctatttcagaatgaacaca

SEQ ID NO: 1732277 - DNA, 25 bp, Homo sapien
aaatcagcatgagtttcaaaacaag

SEQ ID NO: 1732278 - DNA, 25 bp, Homo sapien
caagttacatctatttcagaatgaa

SEQ ID NO: 1732279 - DNA, 25 bp, Homo sapien
ctaagttagaacaaatggcacaggt

SEQ ID NO: 1732280 - DNA, 25 bp, Homo sapien
gtagttgttcatctagacggccagc

SEQ ID NO: 1732281 - DNA, 25 bp, Homo sapien
catcatatctccctctaagtggtga

SEQ ID NO: 1732282 - DNA, 25 bp, Homo sapien
gctatttaacaaggcacacatcata

SEQ ID NO: 1732283 - DNA, 25 bp, Homo sapien
gattctctagctccagaaaaccttg

SEQ ID NO: 1732284 - DNA, 25 bp, Homo sapien
actagcggacagcagtttattggtt

SEQ ID NO: 1732285 - DNA, 25 bp, Homo sapien
cactagcggacagcagtttattggt

SEQ ID NO: 1732286 - DNA, 25 bp, Homo sapien
gatagaagtaagagaacatgatggt

SEQ ID NO: 1732287 - DNA, 25 bp, Homo sapien
taagatagaagtaagagaacatgat

SEQ ID NO: 1732288 - DNA, 25 bp, Homo sapien
gataagtaagatagaagtaagagaa

SEQ ID NO: 1732289 - DNA, 25 bp, Homo sapien
taagagaacatgatggtttagcaag

SEQ ID NO: 1732290 - DNA, 25 bp, Homo sapien
aattgtagtaacatactgtaacaca

SEQ ID NO: 1732291 - DNA, 25 bp, Homo sapien
gtagtaacatactgtaacacatgaa

SEQ ID NO: 1732292 - DNA, 25 bp, Homo sapien
tagtaacatactgtaacacatgaat

SEQ ID NO: 1732293 - DNA, 25 bp, Homo sapien
attgtagtaacatactgtaacacat

SEQ ID NO: 1732294 - DNA, 25 bp, Homo sapien
tgagaactgggaaagcgatggcaaa

SEQ ID NO: 1732295 - DNA, 25 bp, Homo sapien
taatatacccatgcaagtctactcg

SEQ ID NO: 1732296 - DNA, 25 bp, Homo sapien
cataagagtcatttggaagggcata

SEQ ID NO: 1732297 - DNA, 25 bp, Homo sapien
acagaatatggttttgcctctgcaa

SEQ ID NO: 1732298 - DNA, 25 bp, Homo sapien
gccttaagaaactgactggctgtca

SEQ ID NO: 1732299 - DNA, 25 bp, Homo sapien
ccttaagaaactgactggctgtcaa

SEQ ID NO: 1732300 - DNA, 25 bp, Homo sapien
cttaagaaactgactggctgtcaaa

SEQ ID NO: 1732301 - DNA, 25 bp, Homo sapien
tcaccccaaaaaccacattgcctta

SEQ ID NO: 1732302 - DNA, 25 bp, Homo sapien
tagtataaacttaggttacatccca

SEQ ID NO: 1732303 - DNA, 25 bp, Homo sapien
gggactgttgacttatagtataaac

SEQ ID NO: 1732304 - DNA, 25 bp, Homo sapien
tgttgacttatagtataaacttagg

SEQ ID NO: 1732305 - DNA, 25 bp, Homo sapien
aatggttggggactgttgacttata

SEQ ID NO: 1732306 - DNA, 25 bp, Homo sapien
ggcttctctgattgggattaccaga

SEQ ID NO: 1732307 - DNA, 25 bp, Homo sapien
gattaccagaaaggatccatgtatc

SEQ ID NO: 1732308 - DNA, 25 bp, Homo sapien
ggtctaagaaagtctacctggcttc

SEQ ID NO: 1732309 - DNA, 25 bp, Homo sapien
catctctgaaacatgaggcttgagt

SEQ ID NO: 1732310 - DNA, 25 bp, Homo sapien
tcccacactaggttttttccagtgc

SEQ ID NO: 1732311 - DNA, 25 bp, Homo sapien
tgctcatacccaagcttactcatta

SEQ ID NO: 1732312 - DNA, 25 bp, Homo sapien
tcaatacatgcagttattgtgccat

SEQ ID NO: 1732313 - DNA, 25 bp, Homo sapien
tacagttcattagtgttacactact

SEQ ID NO: 1732314 - DNA, 25 bp, Homo sapien
tctcctattgaagtatttttggcac

SEQ ID NO: 1732315 - DNA, 25 bp, Homo sapien
cttctcctattgaagtatttttggc

SEQ ID NO: 1732316 - DNA, 25 bp, Homo sapien
ttctcctattgaagtatttttggca

SEQ ID NO: 1732317 - DNA, 25 bp, Homo sapien
ttcttctcctattgaagtatttttg

SEQ ID NO: 1732318 - DNA, 25 bp, Homo sapien
atgggattgttatgactggcctgcg

SEQ ID NO: 1732319 - DNA, 25 bp, Homo sapien
gttatgactggcctgcgtggtcaga

SEQ ID NO: 1732320 - DNA, 25 bp, Homo sapien
tatgactggcctgcgtggtcagagt

SEQ ID NO: 1732321 - DNA, 25 bp, Homo sapien
gattgttatgactggcctgcgtggt

SEQ ID NO: 1732322 - DNA, 25 bp, Homo sapien
gtgttccccttaccattctttctgc

SEQ ID NO: 1732323 - DNA, 25 bp, Homo sapien
gacatcagacagtaacttgaagcca

SEQ ID NO: 1732324 - DNA, 25 bp, Homo sapien
caaaagctacagaatttactagtag

SEQ ID NO: 1732325 - DNA, 25 bp, Homo sapien
tttactagtagacctgccctacaag

SEQ ID NO: 1732326 - DNA, 25 bp, Homo sapien
tcagggtaagtaccttatacaggta

SEQ ID NO: 1732327 - DNA, 25 bp, Homo sapien
taagccaactgtcttatgtatgttc

SEQ ID NO: 1732328 - DNA, 25 bp, Homo sapien
tagtatagcctaatcgtacagtgtt

SEQ ID NO: 1732329 - DNA, 25 bp, Homo sapien
catgggtgacaaagactttaagcca

SEQ ID NO: 1732330 - DNA, 25 bp, Homo sapien
tttcctcaagacttcttctaatagc

SEQ ID NO: 1732331 - DNA, 25 bp, Homo sapien
tcctcaagacttcttctaatagctt

SEQ ID NO: 1732332 - DNA, 25 bp, Homo sapien
atttcctcaagacttcttctaatag

SEQ ID NO: 1732333 - DNA, 25 bp, Homo sapien
ttcctcaagacttcttctaatagct

SEQ ID NO: 1732334 - DNA, 25 bp, Homo sapien
taaccaggagaccatacaagtcaca

SEQ ID NO: 1732335 - DNA, 25 bp, Homo sapien
tctctggcaacaaggtgctgtctcc

SEQ ID NO: 1732336 - DNA, 25 bp, Homo sapien
taatttacatatgcatggcacccac

SEQ ID NO: 1732337 - DNA, 25 bp, Homo sapien
gactacctcctagagccttgcttga

SEQ ID NO: 1732338 - DNA, 25 bp, Homo sapien
tgatgttacacagcgattacatctc

SEQ ID NO: 1732339 - DNA, 25 bp, Homo sapien
cgataatccatatagctttctctga

SEQ ID NO: 1732340 - DNA, 25 bp, Homo sapien
cagcgattacatctccttgtgtcta

SEQ ID NO: 1732341 - DNA, 25 bp, Homo sapien
tgtcaatgttagaaacatttacttc

SEQ ID NO: 1732342 - DNA, 25 bp, Homo sapien
acaccgcggctgcagcgtagccaaa

SEQ ID NO: 1732343 - DNA, 25 bp, Homo sapien
tgggctgcaggcgtcgccgtcacca

SEQ ID NO: 1732344 - DNA, 25 bp, Homo sapien
ctggagttagaggttcgcgagccac

SEQ ID NO: 1732345 - DNA, 25 bp, Homo sapien
gcctaatgtggctagcggatcgtct

SEQ ID NO: 1732346 - DNA, 25 bp, Homo sapien
gctttagcgttgatcttcgcctgag

SEQ ID NO: 1732347 - DNA, 25 bp, Homo sapien
ccctcgttggctttagcgttgatct

SEQ ID NO: 1732348 - DNA, 25 bp, Homo sapien
gcgcccctcgttggctttagcgttg

SEQ ID NO: 1732349 - DNA, 25 bp, Homo sapien
cagaagcgcccctcgttggctttag

SEQ ID NO: 1732350 - DNA, 25 bp, Homo sapien
gcctccgtccgctaaccgcccgcga

SEQ ID NO: 1732351 - DNA, 25 bp, Homo sapien
cgaaccgcccgcgcggcgagcagaa

SEQ ID NO: 1732352 - DNA, 25 bp, Homo sapien
gcgcggcgagcagaacgcccgagac

SEQ ID NO: 1732353 - DNA, 25 bp, Homo sapien
cggcccgccacacgcggcctccgtc

SEQ ID NO: 1732354 - DNA, 25 bp, Homo sapien
gaatgcgttttctctcggactaggg

SEQ ID NO: 1732355 - DNA, 25 bp, Homo sapien
tgctgcacgaagcacccggtaactt

SEQ ID NO: 1732356 - DNA, 25 bp, Homo sapien
tcaaagtgtggccaccgataacgcc

SEQ ID NO: 1732357 - DNA, 25 bp, Homo sapien
aagcggcaacgtctctgctgcacga

SEQ ID NO: 1732358 - DNA, 25 bp, Homo sapien
gtcttctatgtagggaggtgcccaa

SEQ ID NO: 1732359 - DNA, 25 bp, Homo sapien
tagcacttagtcttctatgtaggga

SEQ ID NO: 1732360 - DNA, 25 bp, Homo sapien
ttcaggccagtaactagcacttagt

SEQ ID NO: 1732361 - DNA, 25 bp, Homo sapien
ggccagtaactagcacttagtcttc

SEQ ID NO: 1732362 - DNA, 25 bp, Homo sapien
tgagacaaacgttcacaggaagtag

SEQ ID NO: 1732363 - DNA, 25 bp, Homo sapien
gacaaaactatgtaaccaactcctg

SEQ ID NO: 1732364 - DNA, 25 bp, Homo sapien
gctcatgcacaacctagacaaaact

SEQ ID NO: 1732365 - DNA, 25 bp, Homo sapien
tacagtttcacggaattgcaggtgc

SEQ ID NO: 1732366 - DNA, 25 bp, Homo sapien
gaaggcggagtggagtaacaacctc

SEQ ID NO: 1732367 - DNA, 25 bp, Homo sapien
tgccctcaacgttctgaagacatgg

SEQ ID NO: 1732368 - DNA, 25 bp, Homo sapien
tgtgtgttacttgttatgtggctcc

SEQ ID NO: 1732369 - DNA, 25 bp, Homo sapien
tcaagttggaggacaatgactcagc

SEQ ID NO: 1732370 - DNA, 25 bp, Homo sapien
tcaaaacccaattgcttcagcagga

SEQ ID NO: 1732371 - DNA, 25 bp, Homo sapien
ttttactaacagatcccggaagcag

SEQ ID NO: 1732372 - DNA, 25 bp, Homo sapien
tttatttggcaacatgggcttttca

SEQ ID NO: 1732373 - DNA, 25 bp, Homo sapien
tattttcgtctggaactctggttag

SEQ ID NO: 1732374 - DNA, 25 bp, Homo sapien
caaactatagaagcactactttccc

SEQ ID NO: 1732375 - DNA, 25 bp, Homo sapien
cacacatgaatatacccagtcacta

SEQ ID NO: 1732376 - DNA, 25 bp, Homo sapien
gtgtaaagccctgatcaaactatag

SEQ ID NO: 1732377 - DNA, 25 bp, Homo sapien
cacttcactcaattgcacacacatg

SEQ ID NO: 1732378 - DNA, 25 bp, Homo sapien
tatgactattctgcagaacacctgt

SEQ ID NO: 1732379 - DNA, 25 bp, Homo sapien
ggacatataccaggacagaactgct

SEQ ID NO: 1732380 - DNA, 25 bp, Homo sapien
tatgaatacatctcccctttggacc

SEQ ID NO: 1732381 - DNA, 25 bp, Homo sapien
actctcccagagatggacacttagg

SEQ ID NO: 1732382 - DNA, 25 bp, Homo sapien
tactgtggatcatttccagaaggat

SEQ ID NO: 1732383 - DNA, 25 bp, Homo sapien
tttggatactgtggatcatttccag

SEQ ID NO: 1732384 - DNA, 25 bp, Homo sapien
gatactgtggatcatttccagaagg

SEQ ID NO: 1732385 - DNA, 25 bp, Homo sapien
cgtcactgatctgcctcatgtcctg

SEQ ID NO: 1732386 - DNA, 25 bp, Homo sapien
ttaaaggagtgtaaaagatgagccc

SEQ ID NO: 1732387 - DNA, 25 bp, Homo sapien
gatgagccccttctgtggagatggc

SEQ ID NO: 1732388 - DNA, 25 bp, Homo sapien
aaaacacatggccttactgcttggg

SEQ ID NO: 1732389 - DNA, 25 bp, Homo sapien
tgctgtggcctggtgtacgcatacc

SEQ ID NO: 1732390 - DNA, 25 bp, Homo sapien
gagttcttcccatcaaacggtttgc

SEQ ID NO: 1732391 - DNA, 25 bp, Homo sapien
tgtggcacctcagatgaacatgcac

SEQ ID NO: 1732392 - DNA, 25 bp, Homo sapien
tgcagagttttggaaccagctcctt

SEQ ID NO: 1732393 - DNA, 25 bp, Homo sapien
gaacatgcactgtagagcgacatta

SEQ ID NO: 1732394 - DNA, 25 bp, Homo sapien
gactgcgtgattccatgccagacag

SEQ ID NO: 1732395 - DNA, 25 bp, Homo sapien
tatgtgtgaggccatgaaaacgtct

SEQ ID NO: 1732396 - DNA, 25 bp, Homo sapien
cactgctgggcctttatacagagaa

SEQ ID NO: 1732397 - DNA, 25 bp, Homo sapien
aaactaaatgcccaaggtgactgcg

SEQ ID NO: 1732398 - DNA, 25 bp, Homo sapien
actgaaaaaagtataaattgctgta

SEQ ID NO: 1732399 - DNA, 25 bp, Homo sapien
cagtgaaatagctatattttaatta

SEQ ID NO: 1732400 - DNA, 25 bp, Homo sapien
attactgaaaaaagtataaattgct

SEQ ID NO: 1732401 - DNA, 25 bp, Homo sapien
agtgaaatagctatattttaattac

SEQ ID NO: 1732402 - DNA, 25 bp, Homo sapien
tcagtctgctaacaaaccaagtggc

SEQ ID NO: 1732403 - DNA, 25 bp, Homo sapien
gaataccaaggtcaaggaggcagag

SEQ ID NO: 1732404 - DNA, 25 bp, Homo sapien
ttgtgtagaaaaagtcctggactga

SEQ ID NO: 1732405 - DNA, 25 bp, Homo sapien
catctcacagtctgatgacagcaaa

SEQ ID NO: 1732406 - DNA, 25 bp, Homo sapien
cagctataaaacatgtaagtctctc

SEQ ID NO: 1732407 - DNA, 25 bp, Homo sapien
tgtctctcgaaatatctacagtagg

SEQ ID NO: 1732408 - DNA, 25 bp, Homo sapien
acatgtactattgtcactccttagg

SEQ ID NO: 1732409 - DNA, 25 bp, Homo sapien
gaaatatccagtcatcaaactcctg

SEQ ID NO: 1732410 - DNA, 25 bp, Homo sapien
gtagacatatcgctgtggaataact

SEQ ID NO: 1732411 - DNA, 25 bp, Homo sapien
gctgtgtggctaaaagcgtgttacc

SEQ ID NO: 1732412 - DNA, 25 bp, Homo sapien
tccaggtgattgtgcatttgtgctc

SEQ ID NO: 1732413 - DNA, 25 bp, Homo sapien
cggctaatcttttgcgtagacatat

SEQ ID NO: 1732414 - DNA, 25 bp, Homo sapien
tacctggtttttacagcattgcaaa

SEQ ID NO: 1732415 - DNA, 25 bp, Homo sapien
gcattgcaaaatctgtaaaaataac

SEQ ID NO: 1732416 - DNA, 25 bp, Homo sapien
ttattggaaaatgtcatgaagtcat

SEQ ID NO: 1732417 - DNA, 25 bp, Homo sapien
aatgttttatgtactccttttgtgt

SEQ ID NO: 1732418 - DNA, 25 bp, Homo sapien
gatatagtcacccataagcatggtg

SEQ ID NO: 1732419 - DNA, 25 bp, Homo sapien
ccaggtgagccttattgcagatctt

SEQ ID NO: 1732420 - DNA, 25 bp, Homo sapien
tcacttgggacagtagctttccagc

SEQ ID NO: 1732421 - DNA, 25 bp, Homo sapien
aggtcagccaaagccccttaagaag

SEQ ID NO: 1732422 - DNA, 25 bp, Homo sapien
catgtagcttttctgcgaaatagta

SEQ ID NO: 1732423 - DNA, 25 bp, Homo sapien
gcagatgtctggtactggagtaagc

SEQ ID NO: 1732424 - DNA, 25 bp, Homo sapien
taaaccctaaatcttgccagactgc

SEQ ID NO: 1732425 - DNA, 25 bp, Homo sapien
tactgtggatcaaggaaagatagca

SEQ ID NO: 1732426 - DNA, 25 bp, Homo sapien
gtttgtaaaggaatgctataagaaa

SEQ ID NO: 1732427 - DNA, 25 bp, Homo sapien
aagtcactccggtcagaattcaggt

SEQ ID NO: 1732428 - DNA, 25 bp, Homo sapien
tggaaaaattattgccctgtggact

SEQ ID NO: 1732429 - DNA, 25 bp, Homo sapien
gcagctgtagcataccctaagatgt

SEQ ID NO: 1732430 - DNA, 25 bp, Homo sapien
ggtaccctcaatggtggagatgtca

SEQ ID NO: 1732431 - DNA, 25 bp, Homo sapien
tcttgccatcagagacctcaaatgc

SEQ ID NO: 1732432 - DNA, 25 bp, Homo sapien
catttactggttctctcagaggtct

SEQ ID NO: 1732433 - DNA, 25 bp, Homo sapien
gatctttcctgagtatgccccatgc

SEQ ID NO: 1732434 - DNA, 25 bp, Homo sapien
tataataagcctctacctggtgtga

SEQ ID NO: 1732435 - DNA, 25 bp, Homo sapien
tggtccttgattgggtctctaacaa

SEQ ID NO: 1732436 - DNA, 25 bp, Homo sapien
ggatcccaagtgatttctctaaagc

SEQ ID NO: 1732437 - DNA, 25 bp, Homo sapien
taggttacaacagagcacagattag

SEQ ID NO: 1732438 - DNA, 25 bp, Homo sapien
gattaggaagcctctgggatcccaa

SEQ ID NO: 1732439 - DNA, 25 bp, Homo sapien
aggtagcagagactgccaggtagca

SEQ ID NO: 1732440 - DNA, 25 bp, Homo sapien
ggagaatgcggcctcaacaggagtg

SEQ ID NO: 1732441 - DNA, 25 bp, Homo sapien
aatgcggcctcaacaggagtggaca

SEQ ID NO: 1732442 - DNA, 25 bp, Homo sapien
ggtgaggtagcagagactgccaggt

SEQ ID NO: 1732443 - DNA, 25 bp, Homo sapien
tttgcttctctaatttattagaccg

SEQ ID NO: 1732444 - DNA, 25 bp, Homo sapien
tgcttctctaatttattagaccgca

SEQ ID NO: 1732445 - DNA, 25 bp, Homo sapien
cctttgcttctctaatttattagac

SEQ ID NO: 1732446 - DNA, 25 bp, Homo sapien
gcttctctaatttattagaccgcat

SEQ ID NO: 1732447 - DNA, 25 bp, Homo sapien
gagagcgtgtgagagtaagaacttc

SEQ ID NO: 1732448 - DNA, 25 bp, Homo sapien
gagcgtgtgagagtaagaacttcat

SEQ ID NO: 1732449 - DNA, 25 bp, Homo sapien
ctgagagcgtgtgagagtaagaact

SEQ ID NO: 1732450 - DNA, 25 bp, Homo sapien
agagcgtgtgagagtaagaacttca

SEQ ID NO: 1732451 - DNA, 25 bp, Homo sapien
ccgaggagccatcggcagttcccag

SEQ ID NO: 1732452 - DNA, 25 bp, Homo sapien
aggagccatcggcagttcccaggag

SEQ ID NO: 1732453 - DNA, 25 bp, Homo sapien
gagccatcggcagttcccaggagta

SEQ ID NO: 1732454 - DNA, 25 bp, Homo sapien
gatccgaggagccatcggcagttcc

SEQ ID NO: 1732455 - DNA, 25 bp, Homo sapien
ctggttgctacagaattaactttac

SEQ ID NO: 1732456 - DNA, 25 bp, Homo sapien
ttcatagagtgctggaatatgaatg

SEQ ID NO: 1732457 - DNA, 25 bp, Homo sapien
atatgaatgagccaaattgtgctgt

SEQ ID NO: 1732458 - DNA, 25 bp, Homo sapien
tgtgctgttccattgacactggttg

SEQ ID NO: 1732459 - DNA, 25 bp, Homo sapien
gcgctgcgtccccagtctggccgaa

SEQ ID NO: 1732460 - DNA, 25 bp, Homo sapien
cccagtctggccgaacgttcggctt

SEQ ID NO: 1732461 - DNA, 25 bp, Homo sapien
tgcgtccccagtctggccgaacgtt

SEQ ID NO: 1732462 - DNA, 25 bp, Homo sapien
tctggccgaacgttcggctttttgc

SEQ ID NO: 1732463 - DNA, 25 bp, Homo sapien
agagaaggtgggcggcagcgccagc

SEQ ID NO: 1732464 - DNA, 25 bp, Homo sapien
agaaggtgggcggcagcgccagccc

SEQ ID NO: 1732465 - DNA, 25 bp, Homo sapien
ctagagaaggtgggcggcagcgcca

SEQ ID NO: 1732466 - DNA, 25 bp, Homo sapien
cctcccagctcccagcggtgggtac

SEQ ID NO: 1732467 - DNA, 25 bp, Homo sapien
tgtgccttactctccggagtgggca

SEQ ID NO: 1732468 - DNA, 25 bp, Homo sapien
ctgggggttcgtccggctccactgg

SEQ ID NO: 1732469 - DNA, 25 bp, Homo sapien
ccgggttgtgccttactctccggag

SEQ ID NO: 1732470 - DNA, 25 bp, Homo sapien
cctgagcaccgatcccaagttccag

SEQ ID NO: 1732471 - DNA, 25 bp, Homo sapien
ctcttaatctttatcttagggacca

SEQ ID NO: 1732472 - DNA, 25 bp, Homo sapien
tagggaccaacatcattcctttcct

SEQ ID NO: 1732473 - DNA, 25 bp, Homo sapien
ttaatctttatcttagggaccaaca

SEQ ID NO: 1732474 - DNA, 25 bp, Homo sapien
cttagggaccaacatcattcctttc

SEQ ID NO: 1732475 - DNA, 25 bp, Homo sapien
gtaactgtgcgctctggggttttga

SEQ ID NO: 1732476 - DNA, 25 bp, Homo sapien
cctgattagtgcattgggggtaact

SEQ ID NO: 1732477 - DNA, 25 bp, Homo sapien
tacaccctgattagtgcattggggg

SEQ ID NO: 1732478 - DNA, 25 bp, Homo sapien
catcaccgataggacggcgtatctc

SEQ ID NO: 1732479 - DNA, 25 bp, Homo sapien
cactccctcatccataactcctttt

SEQ ID NO: 1732480 - DNA, 25 bp, Homo sapien
aactgctggacacgctttccctcct

SEQ ID NO: 1732481 - DNA, 25 bp, Homo sapien
ctctttcatggatcccttcctggct

SEQ ID NO: 1732482 - DNA, 25 bp, Homo sapien
tcatccataactccttttttctcta

SEQ ID NO: 1732483 - DNA, 25 bp, Homo sapien
gaagctgtgagactccatgacacct

SEQ ID NO: 1732484 - DNA, 25 bp, Homo sapien
gctgaagctgtgagactccatgaca

SEQ ID NO: 1732485 - DNA, 25 bp, Homo sapien
tagctgaagctgtgagactccatga

SEQ ID NO: 1732486 - DNA, 25 bp, Homo sapien
ttagctgaagctgtgagactccatg

SEQ ID NO: 1732487 - DNA, 25 bp, Homo sapien
ttctctggcagaatttccatgaatc

SEQ ID NO: 1732488 - DNA, 25 bp, Homo sapien
ctctggcagaatttccatgaatcat

SEQ ID NO: 1732489 - DNA, 25 bp, Homo sapien
tctctggcagaatttccatgaatca

SEQ ID NO: 1732490 - DNA, 25 bp, Homo sapien
taaatccgcatatcacggtagcaat

SEQ ID NO: 1732491 - DNA, 25 bp, Homo sapien
ttctgaatccagaggcaattgcaat

SEQ ID NO: 1732492 - DNA, 25 bp, Homo sapien
catatcacggtagcaataatgcaca

SEQ ID NO: 1732493 - DNA, 25 bp, Homo sapien
ggcaattgcaatataaatccgcata

SEQ ID NO: 1732494 - DNA, 25 bp, Homo sapien
agcgcgcagctgaattatctgtgga

SEQ ID NO: 1732495 - DNA, 25 bp, Homo sapien
ctcgcacagaggaagcgcgcagctg

SEQ ID NO: 1732496 - DNA, 25 bp, Homo sapien
cgcacagaggaagcgcgcagctgaa

SEQ ID NO: 1732497 - DNA, 25 bp, Homo sapien
tcgcacagaggaagcgcgcagctga

SEQ ID NO: 1732498 - DNA, 25 bp, Homo sapien
ttccacgttcaattcgctccccgct

SEQ ID NO: 1732499 - DNA, 25 bp, Homo sapien
catattttgaatttcgtattgggcg

SEQ ID NO: 1732500 - DNA, 25 bp, Homo sapien
attgggcggcaagcccctactggca

SEQ ID NO: 1732501 - DNA, 25 bp, Homo sapien
cccctactggcaggttccacgttca

SEQ ID NO: 1732502 - DNA, 25 bp, Homo sapien
ttgaaccaatgtaacttcgtctggg

SEQ ID NO: 1732503 - DNA, 25 bp, Homo sapien
tatgtggagtcggtagctttaacgg

SEQ ID NO: 1732504 - DNA, 25 bp, Homo sapien
taagatgcatttcctgtatgtggag

SEQ ID NO: 1732505 - DNA, 25 bp, Homo sapien
ctgaatgctagtggcgaaaactccc

SEQ ID NO: 1732506 - DNA, 25 bp, Homo sapien
gtggcgggagagttcatatgaaacc

SEQ ID NO: 1732507 - DNA, 25 bp, Homo sapien
tgcaagaattcaaactcgggaaaac

SEQ ID NO: 1732508 - DNA, 25 bp, Homo sapien
cacaaacggtggcagccactgttcc

SEQ ID NO: 1732509 - DNA, 25 bp, Homo sapien
tcgggaaaacacaaacggtggcagc

SEQ ID NO: 1732510 - DNA, 25 bp, Homo sapien
caagtctgtccttctgctactgctg

SEQ ID NO: 1732511 - DNA, 25 bp, Homo sapien
tgcctgcaaagtgatccatctctcc

SEQ ID NO: 1732512 - DNA, 25 bp, Homo sapien
gacttgcaagccttaataacaggat

SEQ ID NO: 1732513 - DNA, 25 bp, Homo sapien
gattgctctctgtcctaaattcgcg

SEQ ID NO: 1732514 - DNA, 25 bp, Homo sapien
ctgcaagtaaaactgaaggcaatga

SEQ ID NO: 1732515 - DNA, 25 bp, Homo sapien
gtaggaagcattcctctggtcacct

SEQ ID NO: 1732516 - DNA, 25 bp, Homo sapien
aaactgaaggcaatgagggtaggaa

SEQ ID NO: 1732517 - DNA, 25 bp, Homo sapien
ctggtcacctgccaacctcagcttc

SEQ ID NO: 1732518 - DNA, 25 bp, Homo sapien
atttaactctatcaatagccaagtt

SEQ ID NO: 1732519 - DNA, 25 bp, Homo sapien
ctatcaatagccaagttttcaaatt

SEQ ID NO: 1732520 - DNA, 25 bp, Homo sapien
actctatcaatagccaagttttcaa

SEQ ID NO: 1732521 - DNA, 25 bp, Homo sapien
ttaaagatatgttttcagaaggtgg

SEQ ID NO: 1732522 - DNA, 25 bp, Homo sapien
tgagcttccgaagctcactctccaa

SEQ ID NO: 1732523 - DNA, 25 bp, Homo sapien
tctggtattgttcagttcctttcac

SEQ ID NO: 1732524 - DNA, 25 bp, Homo sapien
tccaacttactctggtattgttcag

SEQ ID NO: 1732525 - DNA, 25 bp, Homo sapien
tctgtaggaaaacttgagcttccga

SEQ ID NO: 1732526 - DNA, 25 bp, Homo sapien
tatgatctcttcttcgtggttcata

SEQ ID NO: 1732527 - DNA, 25 bp, Homo sapien
ggcaataagcaagccgcaaaataaa

SEQ ID NO: 1732528 - DNA, 25 bp, Homo sapien
tctcttcttcgtggttcatattcat

SEQ ID NO: 1732529 - DNA, 25 bp, Homo sapien
gactggcaataagcaagccgcaaaa

SEQ ID NO: 1732530 - DNA, 25 bp, Homo sapien
aatgaaccagcgtctaagttcttca

SEQ ID NO: 1732531 - DNA, 25 bp, Homo sapien
aaatactaaatctaaatcgaaggag

SEQ ID NO: 1732532 - DNA, 25 bp, Homo sapien
taaatctaaatcgaaggagatccat

SEQ ID NO: 1732533 - DNA, 25 bp, Homo sapien
taaatcgaaggagatccatttcttg

SEQ ID NO: 1732534 - DNA, 25 bp, Homo sapien
aaatgaatggtgagaacaattagaa

SEQ ID NO: 1732535 - DNA, 25 bp, Homo sapien
atgaatggtgagaacaattagaaat

SEQ ID NO: 1732536 - DNA, 25 bp, Homo sapien
aatgaatggtgagaacaattagaaa

SEQ ID NO: 1732537 - DNA, 25 bp, Homo sapien
aaaatgaatggtgagaacaattaga

SEQ ID NO: 1732538 - DNA, 25 bp, Homo sapien
aaagctattagctactgtttcaggc

SEQ ID NO: 1732539 - DNA, 25 bp, Homo sapien
cagagcaagtaagtgtgagactttg

SEQ ID NO: 1732540 - DNA, 25 bp, Homo sapien
gaacacactacacattagtaccagc

SEQ ID NO: 1732541 - DNA, 25 bp, Homo sapien
tctagtcatagagaaggaaagatat

SEQ ID NO: 1732542 - DNA, 25 bp, Homo sapien
cgcccggcccaacacaccatattaa

SEQ ID NO: 1732543 - DNA, 25 bp, Homo sapien
aaagcactgacaaaatacaacatcc

SEQ ID NO: 1732544 - DNA, 25 bp, Homo sapien
tattaataaaggacagaaaccacat

SEQ ID NO: 1732545 - DNA, 25 bp, Homo sapien
ctcaattggtgcaggaaaagcactg

SEQ ID NO: 1732546 - DNA, 25 bp, Homo sapien
catctcttagatatgtaagaggaag

SEQ ID NO: 1732547 - DNA, 25 bp, Homo sapien
cttagatatgtaagaggaagatttg

SEQ ID NO: 1732548 - DNA, 25 bp, Homo sapien
ttcctgccacatctcttagatatgt

SEQ ID NO: 1732549 - DNA, 25 bp, Homo sapien
gccacatctcttagatatgtaagag

SEQ ID NO: 1732550 - DNA, 25 bp, Homo sapien
aactccatatatcaagagccaatat

SEQ ID NO: 1732551 - DNA, 25 bp, Homo sapien
tccaaactccatatatcaagagcca

SEQ ID NO: 1732552 - DNA, 25 bp, Homo sapien
taatccaaactccatatatcaagag

SEQ ID NO: 1732553 - DNA, 25 bp, Homo sapien
tccataatccaaactccatatatca

SEQ ID NO: 1732554 - DNA, 25 bp, Homo sapien
gtgatacagcttaaggtatccagaa

SEQ ID NO: 1732555 - DNA, 25 bp, Homo sapien
tgtttcttgcctccagtaaaatcat

SEQ ID NO: 1732556 - DNA, 25 bp, Homo sapien
caaaagtgatacagcttaaggtatc

SEQ ID NO: 1732557 - DNA, 25 bp, Homo sapien
ttgtttcttgcctccagtaaaatca

SEQ ID NO: 1732558 - DNA, 25 bp, Homo sapien
cacagaagaacgaagggcaagctga

SEQ ID NO: 1732559 - DNA, 25 bp, Homo sapien
taaccacagaagaacgaagggcaag

SEQ ID NO: 1732560 - DNA, 25 bp, Homo sapien
aagaacgaagggcaagctgacttgt

SEQ ID NO: 1732561 - DNA, 25 bp, Homo sapien
accacagaagaacgaagggcaagct

SEQ ID NO: 1732562 - DNA, 25 bp, Homo sapien
caaaatgtggaacggatgagactaa

SEQ ID NO: 1732563 - DNA, 25 bp, Homo sapien
aatgtggaacggatgagactaaaaa

SEQ ID NO: 1732564 - DNA, 25 bp, Homo sapien
cccaaaatgtggaacggatgagact

SEQ ID NO: 1732565 - DNA, 25 bp, Homo sapien
gtggaacggatgagactaaaaatat

SEQ ID NO: 1732566 - DNA, 25 bp, Homo sapien
tctcctgttctcgaagagtcttctc

SEQ ID NO: 1732567 - DNA, 25 bp, Homo sapien
ggcaacaatctcctgttctcgaaga

SEQ ID NO: 1732568 - DNA, 25 bp, Homo sapien
aacaatctcctgttctcgaagagtc

SEQ ID NO: 1732569 - DNA, 25 bp, Homo sapien
ctgttctcgaagagtcttctcttca

SEQ ID NO: 1732570 - DNA, 25 bp, Homo sapien
gaaagtcaaacagacctacagggta

SEQ ID NO: 1732571 - DNA, 25 bp, Homo sapien
catatcagatgagcaggtaagaggg

SEQ ID NO: 1732572 - DNA, 25 bp, Homo sapien
tcatgggcacacacggaaagtcaaa

SEQ ID NO: 1732573 - DNA, 25 bp, Homo sapien
cacaggctaactgacccttagggat

SEQ ID NO: 1732574 - DNA, 25 bp, Homo sapien
cacaatgtccttaagtggtacgtaa

SEQ ID NO: 1732575 - DNA, 25 bp, Homo sapien
ttcctcgaaacaaatccagagcatc

SEQ ID NO: 1732576 - DNA, 25 bp, Homo sapien
cttaagtggtacgtaagcaaagcca

SEQ ID NO: 1732577 - DNA, 25 bp, Homo sapien
tcattcaggatgattgccacaatgt

SEQ ID NO: 1732578 - DNA, 25 bp, Homo sapien
tacagaaatcaagtaaaatactcac

SEQ ID NO: 1732579 - DNA, 25 bp, Homo sapien
ctcagcattggtattagtaggatca

SEQ ID NO: 1732580 - DNA, 25 bp, Homo sapien
taaaaaccaactatggatagtaaca

SEQ ID NO: 1732581 - DNA, 25 bp, Homo sapien
gaattttgggattaacagtacaaca

SEQ ID NO: 1732582 - DNA, 25 bp, Homo sapien
catgaagaaacccacagaggttact

SEQ ID NO: 1732583 - DNA, 25 bp, Homo sapien
cagtatggagctactcattgcagca

SEQ ID NO: 1732584 - DNA, 25 bp, Homo sapien
catatttaggtaaccccagagagtc

SEQ ID NO: 1732585 - DNA, 25 bp, Homo sapien
tctaggagttatatctaccacaggc

SEQ ID NO: 1732586 - DNA, 25 bp, Homo sapien
ggccaaacagtagacaagtatcagt

SEQ ID NO: 1732587 - DNA, 25 bp, Homo sapien
tgtcaagcctcattatcagcaaggg

SEQ ID NO: 1732588 - DNA, 25 bp, Homo sapien
tatactgcctacttaagttcacagg

SEQ ID NO: 1732589 - DNA, 25 bp, Homo sapien
taagagagagccttgcaaaatccag

SEQ ID NO: 1732590 - DNA, 25 bp, Homo sapien
catggacggtactcatctgtctgaa

SEQ ID NO: 1732591 - DNA, 25 bp, Homo sapien
caattcactgcctcaagggatcagt

SEQ ID NO: 1732592 - DNA, 25 bp, Homo sapien
aaatagggtacatgtgctcacaggt

SEQ ID NO: 1732593 - DNA, 25 bp, Homo sapien
tctagtcagcccaaaattaaaagca

SEQ ID NO: 1732594 - DNA, 25 bp, Homo sapien
cctgcactgactgggcaattcactg

SEQ ID NO: 1732595 - DNA, 25 bp, Homo sapien
tatgaatcacctagggtccatcccc

SEQ ID NO: 1732596 - DNA, 25 bp, Homo sapien
gcatgccgcctagtgcctataatcc

SEQ ID NO: 1732597 - DNA, 25 bp, Homo sapien
tattcagaacagagtagagggccca

SEQ ID NO: 1732598 - DNA, 25 bp, Homo sapien
ccatccccagagactttttattcag

SEQ ID NO: 1732599 - DNA, 25 bp, Homo sapien
gagcagaagcccatatttcagaagt

SEQ ID NO: 1732600 - DNA, 25 bp, Homo sapien
taaattcttcagtcccttcaacagg

SEQ ID NO: 1732601 - DNA, 25 bp, Homo sapien
ggatcttaggagcagaagcccatat

SEQ ID NO: 1732602 - DNA, 25 bp, Homo sapien
gtcccttcaacaggatcttaggagc

SEQ ID NO: 1732603 - DNA, 25 bp, Homo sapien
ggcaaaaggcactccaagcaaaagt

SEQ ID NO: 1732604 - DNA, 25 bp, Homo sapien
tctgtctggtggaatagatatctac

SEQ ID NO: 1732605 - DNA, 25 bp, Homo sapien
caaaagtactcaatgcaccacacag

SEQ ID NO: 1732606 - DNA, 25 bp, Homo sapien
tatctacaaagaatgatggctgact

SEQ ID NO: 1732607 - DNA, 25 bp, Homo sapien
tattaggtcccattcccaatcctta

SEQ ID NO: 1732608 - DNA, 25 bp, Homo sapien
cccattcccaatccttacacaggga

SEQ ID NO: 1732609 - DNA, 25 bp, Homo sapien
cttgagggagcagttattaggtccc

SEQ ID NO: 1732610 - DNA, 25 bp, Homo sapien
ttgagggagcagttattaggtccca

SEQ ID NO: 1732611 - DNA, 25 bp, Homo sapien
gagatggccagctgactcgcaactc

SEQ ID NO: 1732612 - DNA, 25 bp, Homo sapien
agatggccagctgactcgcaactca

SEQ ID NO: 1732613 - DNA, 25 bp, Homo sapien
ggagatggccagctgactcgcaact

SEQ ID NO: 1732614 - DNA, 25 bp, Homo sapien
gatggccagctgactcgcaactcac

SEQ ID NO: 1732615 - DNA, 25 bp, Homo sapien
ctggaaggtacatcaaggtaatgca

SEQ ID NO: 1732616 - DNA, 25 bp, Homo sapien
tggaaggtacatcaaggtaatgcat

SEQ ID NO: 1732617 - DNA, 25 bp, Homo sapien
tgtacccagatctggaccaacatct

SEQ ID NO: 1732618 - DNA, 25 bp, Homo sapien
ttgctcccaagaggtaccacaaggg

SEQ ID NO: 1732619 - DNA, 25 bp, Homo sapien
ccttccatcatggaacagtaggtgc

SEQ ID NO: 1732620 - DNA, 25 bp, Homo sapien
gcctggtgcacaagcagatggtgga

SEQ ID NO: 1732621 - DNA, 25 bp, Homo sapien
tggccaatggatatcaaactacaca

SEQ ID NO: 1732622 - DNA, 25 bp, Homo sapien
ccaacaggtttctgagtactagaca

SEQ ID NO: 1732623 - DNA, 25 bp, Homo sapien
tattatggttggcactatgttggca

SEQ ID NO: 1732624 - DNA, 25 bp, Homo sapien
tattaactattaagctgcagtggtc

SEQ ID NO: 1732625 - DNA, 25 bp, Homo sapien
tatgcaagccttaagtacctactac

SEQ ID NO: 1732626 - DNA, 25 bp, Homo sapien
aacatatgcagattctgtaatgaac

SEQ ID NO: 1732627 - DNA, 25 bp, Homo sapien
tcttacttgtaaagctaaggaaaga

SEQ ID NO: 1732628 - DNA, 25 bp, Homo sapien
tacctactacaatactggactcaga

SEQ ID NO: 1732629 - DNA, 25 bp, Homo sapien
ggaaatgagcaagccagtatgtagt

SEQ ID NO: 1732630 - DNA, 25 bp, Homo sapien
atgagcaagccagtatgtagttaga

SEQ ID NO: 1732631 - DNA, 25 bp, Homo sapien
aaatgagcaagccagtatgtagtta

SEQ ID NO: 1732632 - DNA, 25 bp, Homo sapien
aatgagcaagccagtatgtagttag

SEQ ID NO: 1732633 - DNA, 25 bp, Homo sapien
tcaaatactaatcgaggtggcactg

SEQ ID NO: 1732634 - DNA, 25 bp, Homo sapien
cctggataacatggctggctctcat

SEQ ID NO: 1732635 - DNA, 25 bp, Homo sapien
ggaggccttccctatgaatttcaga

SEQ ID NO: 1732636 - DNA, 25 bp, Homo sapien
tcttacctgagtttccgggcagccc

SEQ ID NO: 1732637 - DNA, 25 bp, Homo sapien
gacagaacttacgagcattacagaa

SEQ ID NO: 1732638 - DNA, 25 bp, Homo sapien
tttgatggttttcgagtgtactgcc

SEQ ID NO: 1732639 - DNA, 25 bp, Homo sapien
taaggagaagcttactgagactcag

SEQ ID NO: 1732640 - DNA, 25 bp, Homo sapien
ccttctgtggaattgcagagactct

SEQ ID NO: 1732641 - DNA, 25 bp, Homo sapien
ggcttcatggaataggttttgctgg

SEQ ID NO: 1732642 - DNA, 25 bp, Homo sapien
gcttcatggaataggttttgctggc

SEQ ID NO: 1732643 - DNA, 25 bp, Homo sapien
ttgagcatggaaaatggaagtctca

SEQ ID NO: 1732644 - DNA, 25 bp, Homo sapien
gaaaatggaagtctcatcttcatca

SEQ ID NO: 1732645 - DNA, 25 bp, Homo sapien
taaagacaaccaacatgcattggac

SEQ ID NO: 1732646 - DNA, 25 bp, Homo sapien
ccatcataaagacaaccaacatgca

SEQ ID NO: 1732647 - DNA, 25 bp, Homo sapien
gttttggctagggaaatcaggcaag

SEQ ID NO: 1732648 - DNA, 25 bp, Homo sapien
aagttttggctagggaaatcaggca

SEQ ID NO: 1732649 - DNA, 25 bp, Homo sapien
tttggctagggaaatcaggcaagag

SEQ ID NO: 1732650 - DNA, 25 bp, Homo sapien
tagtattggaagttttggctaggga

SEQ ID NO: 1732651 - DNA, 25 bp, Homo sapien
gcattggcacgatctcgccttacag

SEQ ID NO: 1732652 - DNA, 25 bp, Homo sapien
attggcacgatctcgccttacagca

SEQ ID NO: 1732653 - DNA, 25 bp, Homo sapien
ctccatgttcttctggctgatctcg

SEQ ID NO: 1732654 - DNA, 25 bp, Homo sapien
ttctccatgttcttctggctgatct

SEQ ID NO: 1732655 - DNA, 25 bp, Homo sapien
gggatacactggactcctctataca

SEQ ID NO: 1732656 - DNA, 25 bp, Homo sapien
tacttccaagtgaatctttgcccta

SEQ ID NO: 1732657 - DNA, 25 bp, Homo sapien
gattctctctacctacagcatctgc

SEQ ID NO: 1732658 - DNA, 25 bp, Homo sapien
tgccctactctaaacacatgtcatg

SEQ ID NO: 1732659 - DNA, 25 bp, Homo sapien
caatcacactgatagtgtttgatgg

SEQ ID NO: 1732660 - DNA, 25 bp, Homo sapien
tgatggataactagacaagcaaagg

SEQ ID NO: 1732661 - DNA, 25 bp, Homo sapien
ccatcctttatatttgacgtcttca

SEQ ID NO: 1732662 - DNA, 25 bp, Homo sapien
gtctgagcaattgccatcctttata

SEQ ID NO: 1732663 - DNA, 25 bp, Homo sapien
ggtgtagattctagaccactgtgac

SEQ ID NO: 1732664 - DNA, 25 bp, Homo sapien
acaactgcctatttttctgactgcc

SEQ ID NO: 1732665 - DNA, 25 bp, Homo sapien
tgatggaatggaccctagctaatac

SEQ ID NO: 1732666 - DNA, 25 bp, Homo sapien
taccatactgcaagcaggaaaggtg

SEQ ID NO: 1732667 - DNA, 25 bp, Homo sapien
cggaaatttctctatcagctggctg

SEQ ID NO: 1732668 - DNA, 25 bp, Homo sapien
gaccttgtcaagcaaaacgcataga

SEQ ID NO: 1732669 - DNA, 25 bp, Homo sapien
tgaagaaccgaggaagcaaacctgg

SEQ ID NO: 1732670 - DNA, 25 bp, Homo sapien
gcaaacctgggaatagtgcaagcag

SEQ ID NO: 1732671 - DNA, 25 bp, Homo sapien
catacaatttggcataacttatagc

SEQ ID NO: 1732672 - DNA, 25 bp, Homo sapien
tctaagtttgggctatttcatgaaa

SEQ ID NO: 1732673 - DNA, 25 bp, Homo sapien
cggacacataaatcaccaagaatga

SEQ ID NO: 1732674 - DNA, 25 bp, Homo sapien
cacagtttgcatctgcaaagcctaa

SEQ ID NO: 1732675 - DNA, 25 bp, Homo sapien
agaatgattcctaaaccagggagag

SEQ ID NO: 1732676 - DNA, 25 bp, Homo sapien
gattcctaaaccagggagaggccaa

SEQ ID NO: 1732677 - DNA, 25 bp, Homo sapien
gaggccaatgctctgagtaaaatta

SEQ ID NO: 1732678 - DNA, 25 bp, Homo sapien
ttcaaggaagatttctgagttttcc

SEQ ID NO: 1732679 - DNA, 25 bp, Homo sapien
cagcaggcaaggacctggctgttaa

SEQ ID NO: 1732680 - DNA, 25 bp, Homo sapien
tgaggtgattgagcagaggctgaag

SEQ ID NO: 1732681 - DNA, 25 bp, Homo sapien
gaggctgaagtctttcatcagactg

SEQ ID NO: 1732682 - DNA, 25 bp, Homo sapien
ctgcacagcaggcaaggacctggct

SEQ ID NO: 1732683 - DNA, 25 bp, Homo sapien
caagagtggtattcaccagctccac

SEQ ID NO: 1732684 - DNA, 25 bp, Homo sapien
cactactgtgatataaatgccacag

SEQ ID NO: 1732685 - DNA, 25 bp, Homo sapien
ctactgtgatataaatgccacaggg

SEQ ID NO: 1732686 - DNA, 25 bp, Homo sapien
agtggtattcaccagctccactact

SEQ ID NO: 1732687 - DNA, 25 bp, Homo sapien
atttccctgggtactgtaatcttgg

SEQ ID NO: 1732688 - DNA, 25 bp, Homo sapien
tcaatctgatctaaagaaatcttcc

SEQ ID NO: 1732689 - DNA, 25 bp, Homo sapien
aatctgatctaaagaaatcttccca

SEQ ID NO: 1732690 - DNA, 25 bp, Homo sapien
caacatttccctgggtactgtaatc

SEQ ID NO: 1732691 - DNA, 25 bp, Homo sapien
atgcccagctgattttggtatttgt

SEQ ID NO: 1732692 - DNA, 25 bp, Homo sapien
tgcccagctgattttggtatttgta

SEQ ID NO: 1732693 - DNA, 25 bp, Homo sapien
aaagatggtgattttcccgcaaggc

SEQ ID NO: 1732694 - DNA, 25 bp, Homo sapien
tgcattcggcctccatgacaaagat

SEQ ID NO: 1732695 - DNA, 25 bp, Homo sapien
gcaatgtctgttccaaagttaaacc

SEQ ID NO: 1732696 - DNA, 25 bp, Homo sapien
cccgcaaggctttatgtaactgatg

SEQ ID NO: 1732697 - DNA, 25 bp, Homo sapien
aaattctataacttgttagaaacag

SEQ ID NO: 1732698 - DNA, 25 bp, Homo sapien
ttctataacttgttagaaacagctc

SEQ ID NO: 1732699 - DNA, 25 bp, Homo sapien
tataacttgttagaaacagctctat

SEQ ID NO: 1732700 - DNA, 25 bp, Homo sapien
tctataacttgttagaaacagctct

SEQ ID NO: 1732701 - DNA, 25 bp, Homo sapien
tacttaacaaagctagtcgccgaag

SEQ ID NO: 1732702 - DNA, 25 bp, Homo sapien
tagacacggaggactattagaggca

SEQ ID NO: 1732703 - DNA, 25 bp, Homo sapien
tagagataggaccaatagacacgga

SEQ ID NO: 1732704 - DNA, 25 bp, Homo sapien
tacctgggagatgacgtcacagcac

SEQ ID NO: 1732705 - DNA, 25 bp, Homo sapien
gacttagcacacttatggaaggtat

SEQ ID NO: 1732706 - DNA, 25 bp, Homo sapien
atccttctggtaagcgattcccctg

SEQ ID NO: 1732707 - DNA, 25 bp, Homo sapien
caagtgctgggtatatcacggtaag

SEQ ID NO: 1732708 - DNA, 25 bp, Homo sapien
caggtgtgagataaactaaactccc

SEQ ID NO: 1732709 - DNA, 25 bp, Homo sapien
tagatgacttggtagctgttaaggg

SEQ ID NO: 1732710 - DNA, 25 bp, Homo sapien
tcatgaaagcaagcccaacctgttc

SEQ ID NO: 1732711 - DNA, 25 bp, Homo sapien
tccacatgctatggaaagcatcaag

SEQ ID NO: 1732712 - DNA, 25 bp, Homo sapien
caacctgttcaagtcaatgtttaaa

SEQ ID NO: 1732713 - DNA, 25 bp, Homo sapien
tgtacactggaaacatgctaataga

SEQ ID NO: 1732714 - DNA, 25 bp, Homo sapien
agactaaatcagacaatttaggctg

SEQ ID NO: 1732715 - DNA, 25 bp, Homo sapien
gcacagactaaatcagacaatttag

SEQ ID NO: 1732716 - DNA, 25 bp, Homo sapien
actgtacactggaaacatgctaata

SEQ ID NO: 1732717 - DNA, 25 bp, Homo sapien
ggaaaccatcattctcagtaaacta

SEQ ID NO: 1732718 - DNA, 25 bp, Homo sapien
gtcgtttatggggacgtggatgaaa

SEQ ID NO: 1732719 - DNA, 25 bp, Homo sapien
ttcatgtcgtttatggggacgtgga

SEQ ID NO: 1732720 - DNA, 25 bp, Homo sapien
cgtttatggggacgtggatgaaact

SEQ ID NO: 1732721 - DNA, 25 bp, Homo sapien
ggtggagcttctactattcatcatt

SEQ ID NO: 1732722 - DNA, 25 bp, Homo sapien
acaggtggagcttctactattcatc

SEQ ID NO: 1732723 - DNA, 25 bp, Homo sapien
ctgtgtgttcaatatctgggtcatg

SEQ ID NO: 1732724 - DNA, 25 bp, Homo sapien
ggtcatggtatttcagctgcaggta

SEQ ID NO: 1732725 - DNA, 25 bp, Homo sapien
ttatgccccaacgatttactaaggc

SEQ ID NO: 1732726 - DNA, 25 bp, Homo sapien
acaatacacctggactgttatgccc

SEQ ID NO: 1732727 - DNA, 25 bp, Homo sapien
caacgatttactaaggccctacata

SEQ ID NO: 1732728 - DNA, 25 bp, Homo sapien
taaagaatctcactactttgccttc

SEQ ID NO: 1732729 - DNA, 25 bp, Homo sapien
ggtggattggatagaataatcttca

SEQ ID NO: 1732730 - DNA, 25 bp, Homo sapien
tgataatccccttggcttggtggat

SEQ ID NO: 1732731 - DNA, 25 bp, Homo sapien
tggatagaataatcttcaggcaact

SEQ ID NO: 1732732 - DNA, 25 bp, Homo sapien
tcaggcaactgaaaggtgtatagtc

SEQ ID NO: 1732733 - DNA, 25 bp, Homo sapien
atcgccctctaagacactcgcagaa

SEQ ID NO: 1732734 - DNA, 25 bp, Homo sapien
tcgccctctaagacactcgcagaac

SEQ ID NO: 1732735 - DNA, 25 bp, Homo sapien
cgccctctaagacactcgcagaaca

SEQ ID NO: 1732736 - DNA, 25 bp, Homo sapien
atccctccaggagagatcttgtatg

SEQ ID NO: 1732737 - DNA, 25 bp, Homo sapien
ggagagatcttgtatgactgcaact

SEQ ID NO: 1732738 - DNA, 25 bp, Homo sapien
ggatcactgtgacggaatgggcacc

SEQ ID NO: 1732739 - DNA, 25 bp, Homo sapien
ctggatcactgtgacggaatgggca

SEQ ID NO: 1732740 - DNA, 25 bp, Homo sapien
tctcaatccattgccaatgctggag

SEQ ID NO: 1732741 - DNA, 25 bp, Homo sapien
taaggctacagttgaatgccaccac

SEQ ID NO: 1732742 - DNA, 25 bp, Homo sapien
acagggtctcaatccattgccaatg

SEQ ID NO: 1732743 - DNA, 25 bp, Homo sapien
gcctccctactaagtgctagcatta

SEQ ID NO: 1732744 - DNA, 25 bp, Homo sapien
atgataacaagcttgcttcttccta

SEQ ID NO: 1732745 - DNA, 25 bp, Homo sapien
ttttgaacatatgactttgctccca

SEQ ID NO: 1732746 - DNA, 25 bp, Homo sapien
aactagactgggctgatatttttcc

SEQ ID NO: 1732747 - DNA, 25 bp, Homo sapien
aaactgtggtggagatgccaagtct

SEQ ID NO: 1732748 - DNA, 25 bp, Homo sapien
gctacctggtaatgtgtccccttta

SEQ ID NO: 1732749 - DNA, 25 bp, Homo sapien
taatgtgtcccctttactaaatcca

SEQ ID NO: 1732750 - DNA, 25 bp, Homo sapien
tcaaagtatttttgacaggctacct

SEQ ID NO: 1732751 - DNA, 25 bp, Homo sapien
ttttgacaggctacctggtaatgtg

SEQ ID NO: 1732752 - DNA, 25 bp, Homo sapien
taaatctaagttctatcccctataa

SEQ ID NO: 1732753 - DNA, 25 bp, Homo sapien
cccctataagtagtgtgaccccaca

SEQ ID NO: 1732754 - DNA, 25 bp, Homo sapien
taacaagctttagatgagttagaca

SEQ ID NO: 1732755 - DNA, 25 bp, Homo sapien
tacagtcatagttatgctaacaagc

SEQ ID NO: 1732756 - DNA, 25 bp, Homo sapien
taaaactctcaagcggagcaaccaa

SEQ ID NO: 1732757 - DNA, 25 bp, Homo sapien
tagagtccctacctgtttaccatgc

SEQ ID NO: 1732758 - DNA, 25 bp, Homo sapien
taaagaatgcagtctccgagagagt

SEQ ID NO: 1732759 - DNA, 25 bp, Homo sapien
cagcatgtaaggcaagttagagtcc

SEQ ID NO: 1732760 - DNA, 25 bp, Homo sapien
gatgcctctagcgttgttgtttttt

SEQ ID NO: 1732761 - DNA, 25 bp, Homo sapien
ctgaagttgctgatcagcttgtgaa

SEQ ID NO: 1732762 - DNA, 25 bp, Homo sapien
tgcttatgattttgcacagagattt

SEQ ID NO: 1732763 - DNA, 25 bp, Homo sapien
gaagttgctgatcagcttgtgaagt

SEQ ID NO: 1732764 - DNA, 25 bp, Homo sapien
ctaatacattttaatcagaaggctt

SEQ ID NO: 1732765 - DNA, 25 bp, Homo sapien
gggaatccattaaattcaatctcct

SEQ ID NO: 1732766 - DNA, 25 bp, Homo sapien
aatcagagattagaaagaccttggg

SEQ ID NO: 1732767 - DNA, 25 bp, Homo sapien
tgtacagaggcctaaggagaataga

SEQ ID NO: 1732768 - DNA, 25 bp, Homo sapien
tatagtaattccagtgtgtaacaga

SEQ ID NO: 1732769 - DNA, 25 bp, Homo sapien
tatttaagcaccctaggaatctctg

SEQ ID NO: 1732770 - DNA, 25 bp, Homo sapien
taacagatggatagtatacagactg

SEQ ID NO: 1732771 - DNA, 25 bp, Homo sapien
tgagtcttttctggtaatacttatt

SEQ ID NO: 1732772 - DNA, 25 bp, Homo sapien
tatattgcattaatacatggcaaag

SEQ ID NO: 1732773 - DNA, 25 bp, Homo sapien
acttaatacctgaaacatggattct

SEQ ID NO: 1732774 - DNA, 25 bp, Homo sapien
tacctgaaacatggattctagctgt

SEQ ID NO: 1732775 - DNA, 25 bp, Homo sapien
aatacctgaaacatggattctagct

SEQ ID NO: 1732776 - DNA, 25 bp, Homo sapien
gtaatcctctagtccttccatatcc

SEQ ID NO: 1732777 - DNA, 25 bp, Homo sapien
ttaccaccatttagaatacgttggc

SEQ ID NO: 1732778 - DNA, 25 bp, Homo sapien
tacgttggctctcacaaaagaaatg

SEQ ID NO: 1732779 - DNA, 25 bp, Homo sapien
cactaaagtaatcctctagtccttc

SEQ ID NO: 1732780 - DNA, 25 bp, Homo sapien
gtgtcacaattacacaacagagtgc

SEQ ID NO: 1732781 - DNA, 25 bp, Homo sapien
tagtgaaagtctcgttacctcaaac

SEQ ID NO: 1732782 - DNA, 25 bp, Homo sapien
tcctaataagtgtgcatgcctgtag

SEQ ID NO: 1732783 - DNA, 25 bp, Homo sapien
cctaaaataggacttgaatgacatc

SEQ ID NO: 1732784 - DNA, 25 bp, Homo sapien
gaaaaggattgagtcaaaattacaa

SEQ ID NO: 1732785 - DNA, 25 bp, Homo sapien
tggtccagaaaaggattgagtcaaa

SEQ ID NO: 1732786 - DNA, 25 bp, Homo sapien
tatttattaacaaaaatggtccaga

SEQ ID NO: 1732787 - DNA, 25 bp, Homo sapien
caaaaatggtccagaaaaggattga

SEQ ID NO: 1732788 - DNA, 25 bp, Homo sapien
cctattggtgagtgagtagagcccc

SEQ ID NO: 1732789 - DNA, 25 bp, Homo sapien
ggcattgctccacaaggcatacgtg

SEQ ID NO: 1732790 - DNA, 25 bp, Homo sapien
tcccttgacaaacgcaggcagagag

SEQ ID NO: 1732791 - DNA, 25 bp, Homo sapien
tagatgagggtatccacaatggcat

SEQ ID NO: 1732792 - DNA, 25 bp, Homo sapien
taaccagcccctgtgtagtctcggt

SEQ ID NO: 1732793 - DNA, 25 bp, Homo sapien
cattccatgaagacagcaaaggttt

SEQ ID NO: 1732794 - DNA, 25 bp, Homo sapien
ttccatgaagacagcaaaggtttaa

SEQ ID NO: 1732795 - DNA, 25 bp, Homo sapien
accagcccctgtgtagtctcggtca

SEQ ID NO: 1732796 - DNA, 25 bp, Homo sapien
gaatactctggtagcctctggagcc

SEQ ID NO: 1732797 - DNA, 25 bp, Homo sapien
aagacttcagggcaactcagaatac

SEQ ID NO: 1732798 - DNA, 25 bp, Homo sapien
ggcttgaagtatccaagaagatcct

SEQ ID NO: 1732799 - DNA, 25 bp, Homo sapien
tccttagatggatccaggaagactt

SEQ ID NO: 1732800 - DNA, 25 bp, Homo sapien
ttttttgaataagccagacagcaac

SEQ ID NO: 1732801 - DNA, 25 bp, Homo sapien
ttgaataagccagacagcaacttta

SEQ ID NO: 1732802 - DNA, 25 bp, Homo sapien
ttttgaataagccagacagcaactt

SEQ ID NO: 1732803 - DNA, 25 bp, Homo sapien
tattttttgaataagccagacagca

SEQ ID NO: 1732804 - DNA, 25 bp, Homo sapien
tctaaaggagcaagtagcaatggtc

SEQ ID NO: 1732805 - DNA, 25 bp, Homo sapien
ccaatttctgagcaggttagtgcca

SEQ ID NO: 1732806 - DNA, 25 bp, Homo sapien
ccatcgttggatttcttgctagtac

SEQ ID NO: 1732807 - DNA, 25 bp, Homo sapien
tgtgaccttatccagcccagaggag

SEQ ID NO: 1732808 - DNA, 25 bp, Homo sapien
gcaaagtggttattgtcaccatcag

SEQ ID NO: 1732809 - DNA, 25 bp, Homo sapien
tttaactgtagcaaagtggttattg

SEQ ID NO: 1732810 - DNA, 25 bp, Homo sapien
gcctgatcactaggacagttttaac

SEQ ID NO: 1732811 - DNA, 25 bp, Homo sapien
tgggtgcctgatcactaggacagtt

SEQ ID NO: 1732812 - DNA, 25 bp, Homo sapien
cagtcttatatatgctagcaccatc

SEQ ID NO: 1732813 - DNA, 25 bp, Homo sapien
tcagtcttatatatgctagcaccat

SEQ ID NO: 1732814 - DNA, 25 bp, Homo sapien
taatatgtaaagctcaatctggagt

SEQ ID NO: 1732815 - DNA, 25 bp, Homo sapien
gatgcagcaacttgaagtatgtgcc

SEQ ID NO: 1732816 - DNA, 25 bp, Homo sapien
caaatactccgctgaagaatccaac

SEQ ID NO: 1732817 - DNA, 25 bp, Homo sapien
tgcctcaaggcatggctcaaatact

SEQ ID NO: 1732818 - DNA, 25 bp, Homo sapien
ctgctgttactatatcgccaaaggc

SEQ ID NO: 1732819 - DNA, 25 bp, Homo sapien
ctgttactatatcgccaaaggccat

SEQ ID NO: 1732820 - DNA, 25 bp, Homo sapien
gctgttactatatcgccaaaggcca

SEQ ID NO: 1732821 - DNA, 25 bp, Homo sapien
tgctgttactatatcgccaaaggcc

SEQ ID NO: 1732822 - DNA, 25 bp, Homo sapien
cggatgatgattcgtcttggttgca

SEQ ID NO: 1732823 - DNA, 25 bp, Homo sapien
gaatttttacggatgatgattcgtc

SEQ ID NO: 1732824 - DNA, 25 bp, Homo sapien
gaagatatagtggaatttttacgga

SEQ ID NO: 1732825 - DNA, 25 bp, Homo sapien
cgtcttggttgcaaactttgagatc

SEQ ID NO: 1732826 - DNA, 25 bp, Homo sapien
ctgcggtgcaagcagggaaggaatt

SEQ ID NO: 1732827 - DNA, 25 bp, Homo sapien
tgcaagcagggaaggaattttgagg

SEQ ID NO: 1732828 - DNA, 25 bp, Homo sapien
gatgaaaattttggatataatgttg

SEQ ID NO: 1732829 - DNA, 25 bp, Homo sapien
ttttgaggatgaaaattttggatat

SEQ ID NO: 1732830 - DNA, 25 bp, Homo sapien
aatccagctagatctgtttttcgtg

SEQ ID NO: 1732831 - DNA, 25 bp, Homo sapien
gtcatttccaggagcaacaagcaag

SEQ ID NO: 1732832 - DNA, 25 bp, Homo sapien
tgttccctgaagaaatgcgtacaaa

SEQ ID NO: 1732833 - DNA, 25 bp, Homo sapien
gcaacacaaagaagtattttagtgt

SEQ ID NO: 1732834 - DNA, 25 bp, Homo sapien
ttttagtgttccctgaagaaatgcg

SEQ ID NO: 1732835 - DNA, 25 bp, Homo sapien
tccctgaagaaatgcgtacaaaaag

SEQ ID NO: 1732836 - DNA, 25 bp, Homo sapien
ggctctttaaatgccacctggccat

SEQ ID NO: 1732837 - DNA, 25 bp, Homo sapien
cactgggcagtaattgagaatgttg

SEQ ID NO: 1732838 - DNA, 25 bp, Homo sapien
cgttccaggccctctgagacagggc

SEQ ID NO: 1732839 - DNA, 25 bp, Homo sapien
ggcagctgcaatgtatcttttgaca

SEQ ID NO: 1732840 - DNA, 25 bp, Homo sapien
tatagtaaagtcaccatagctaaga

SEQ ID NO: 1732841 - DNA, 25 bp, Homo sapien
taaagtcaccatagctaagactttc

SEQ ID NO: 1732842 - DNA, 25 bp, Homo sapien
ccatagctaagactttcttgatttc

SEQ ID NO: 1732843 - DNA, 25 bp, Homo sapien
ggaaatatagtaaagtcaccatagc

SEQ ID NO: 1732844 - DNA, 25 bp, Homo sapien
gcagaagcatgagcaagaatatcca

SEQ ID NO: 1732845 - DNA, 25 bp, Homo sapien
gggacctggcgttctcatacattgc

SEQ ID NO: 1732846 - DNA, 25 bp, Homo sapien
aaagatcttccctcactaaagtggg

SEQ ID NO: 1732847 - DNA, 25 bp, Homo sapien
gagatattacagcattcccattaga

SEQ ID NO: 1732848 - DNA, 25 bp, Homo sapien
ggactggactattaatgctgcctca

SEQ ID NO: 1732849 - DNA, 25 bp, Homo sapien
cagctgtgaagctagggactggact

SEQ ID NO: 1732850 - DNA, 25 bp, Homo sapien
agtgtgctggcaaaatggatgaccc

SEQ ID NO: 1732851 - DNA, 25 bp, Homo sapien
aagtgccttgtgcaatactgcagct

SEQ ID NO: 1732852 - DNA, 25 bp, Homo sapien
tggcataagggacctttgattcagg

SEQ ID NO: 1732853 - DNA, 25 bp, Homo sapien
ggcataagggacctttgattcaggt

SEQ ID NO: 1732854 - DNA, 25 bp, Homo sapien
gcataagggacctttgattcaggtc

SEQ ID NO: 1732855 - DNA, 25 bp, Homo sapien
ttggcataagggacctttgattcag

SEQ ID NO: 1732856 - DNA, 25 bp, Homo sapien
ctttttgagcagtcttaaaagtaga

SEQ ID NO: 1732857 - DNA, 25 bp, Homo sapien
tctttttgagcagtcttaaaagtag

SEQ ID NO: 1732858 - DNA, 25 bp, Homo sapien
ttctttttgagcagtcttaaaagta

SEQ ID NO: 1732859 - DNA, 25 bp, Homo sapien
tccccagtgagtgccgtaagttgtt

SEQ ID NO: 1732860 - DNA, 25 bp, Homo sapien
aagattgtcctgctgagcactctgc

SEQ ID NO: 1732861 - DNA, 25 bp, Homo sapien
cttaacataagaagattgtcctgct

SEQ ID NO: 1732862 - DNA, 25 bp, Homo sapien
ctgcttccccagtgagtgccgtaag

SEQ ID NO: 1732863 - DNA, 25 bp, Homo sapien
ttcgggtatttggtctctaaagcca

SEQ ID NO: 1732864 - DNA, 25 bp, Homo sapien
tcaatctggaatatactggctgcgg

SEQ ID NO: 1732865 - DNA, 25 bp, Homo sapien
gaatatactggctgcggagtcctaa

SEQ ID NO: 1732866 - DNA, 25 bp, Homo sapien
atttcaattcgggtatttggtctct

SEQ ID NO: 1732867 - DNA, 25 bp, Homo sapien
caaatagaacaatcacacccatgag

SEQ ID NO: 1732868 - DNA, 25 bp, Homo sapien
tgagtcgtataaacaattccaaata

SEQ ID NO: 1732869 - DNA, 25 bp, Homo sapien
ctaatgtgcaaccaaataataggct

SEQ ID NO: 1732870 - DNA, 25 bp, Homo sapien
tcaaaaacttgagtcgtataaacaa

SEQ ID NO: 1732871 - DNA, 25 bp, Homo sapien
aataataaaaccattcttgaacttg

SEQ ID NO: 1732872 - DNA, 25 bp, Homo sapien
ataataaaaccattcttgaacttga

SEQ ID NO: 1732873 - DNA, 25 bp, Homo sapien
tattccacttgtttagaaaggcaat

SEQ ID NO: 1732874 - DNA, 25 bp, Homo sapien
attccacttgtttagaaaggcaata

SEQ ID NO: 1732875 - DNA, 25 bp, Homo sapien
tccagagagtcttgagcatcgcatt

SEQ ID NO: 1732876 - DNA, 25 bp, Homo sapien
cactgaaaggtggactcatcagtgg

SEQ ID NO: 1732877 - DNA, 25 bp, Homo sapien
gaaataaaacctgcaccgaaaggca

SEQ ID NO: 1732878 - DNA, 25 bp, Homo sapien
gacttcagattcaaccctatccttg

SEQ ID NO: 1732879 - DNA, 25 bp, Homo sapien
tctagaacctagaatctgcttctcc

SEQ ID NO: 1732880 - DNA, 25 bp, Homo sapien
tcagccttcttttctagaacctaga

SEQ ID NO: 1732881 - DNA, 25 bp, Homo sapien
ttctagaacctagaatctgcttctc

SEQ ID NO: 1732882 - DNA, 25 bp, Homo sapien
acagcttttccgttggtgcctttct

SEQ ID NO: 1732883 - DNA, 25 bp, Homo sapien
ctgccacagcttttccgttggtgcc

SEQ ID NO: 1732884 - DNA, 25 bp, Homo sapien
tctaaagtctattttctgccacagc

SEQ ID NO: 1732885 - DNA, 25 bp, Homo sapien
taaagtctattttctgccacagctt

SEQ ID NO: 1732886 - DNA, 25 bp, Homo sapien
cagtttctaggtctttgtttaagag

SEQ ID NO: 1732887 - DNA, 25 bp, Homo sapien
tcaaggatagtctcccataggcatc

SEQ ID NO: 1732888 - DNA, 25 bp, Homo sapien
agtaagagttctatccctgctgtcc

SEQ ID NO: 1732889 - DNA, 25 bp, Homo sapien
tggtagtggcccagaggttcctcaa

SEQ ID NO: 1732890 - DNA, 25 bp, Homo sapien
ctgcagctgggcatacccactggta

SEQ ID NO: 1732891 - DNA, 25 bp, Homo sapien
tttaaagagagtgccattggtgcct

SEQ ID NO: 1732892 - DNA, 25 bp, Homo sapien
caaatttgaacatggctaatcgagg

SEQ ID NO: 1732893 - DNA, 25 bp, Homo sapien
gactcaacgggccaaatactggaaa

SEQ ID NO: 1732894 - DNA, 25 bp, Homo sapien
tacagactgtcgctctcacagagag

SEQ ID NO: 1732895 - DNA, 25 bp, Homo sapien
gaccttggcgttattagcgccacgc

SEQ ID NO: 1732896 - DNA, 25 bp, Homo sapien
acccgcgaccttggcgttattagcg

SEQ ID NO: 1732897 - DNA, 25 bp, Homo sapien
cgttattagcgccacgctctaacca

SEQ ID NO: 1732898 - DNA, 25 bp, Homo sapien
gttattagcgccacgctctaaccaa

SEQ ID NO: 1732899 - DNA, 25 bp, Homo sapien
gttttcttcaccatgaagtgtgaag

SEQ ID NO: 1732900 - DNA, 25 bp, Homo sapien
tttcttcaccatgaagtgtgaaggg

SEQ ID NO: 1732901 - DNA, 25 bp, Homo sapien
tctttatccatgctatgatgttcat

SEQ ID NO: 1732902 - DNA, 25 bp, Homo sapien
ttctttatccatgctatgatgttca

SEQ ID NO: 1732903 - DNA, 25 bp, Homo sapien
ctttcccacttagcagctttggcac

SEQ ID NO: 1732904 - DNA, 25 bp, Homo sapien
aattcgggctttcccacttagcagc

SEQ ID NO: 1732905 - DNA, 25 bp, Homo sapien
tcaattcgggctttcccacttagca

SEQ ID NO: 1732906 - DNA, 25 bp, Homo sapien
ttcgggctttcccacttagcagctt

SEQ ID NO: 1732907 - DNA, 25 bp, Homo sapien
tgcaccacaaagtataatgggcact

SEQ ID NO: 1732908 - DNA, 25 bp, Homo sapien
tatggaggacgtagtctgcaccaca

SEQ ID NO: 1732909 - DNA, 25 bp, Homo sapien
gtttctcttgcccattctaccacgt

SEQ ID NO: 1732910 - DNA, 25 bp, Homo sapien
gcactggagctacggaaagactcat

SEQ ID NO: 1732911 - DNA, 25 bp, Homo sapien
cttgcccttggccatttttgagtag

SEQ ID NO: 1732912 - DNA, 25 bp, Homo sapien
gacatttcctttgttccgagacgca

SEQ ID NO: 1732913 - DNA, 25 bp, Homo sapien
gaggaatagccatcatgcccttgcc

SEQ ID NO: 1732914 - DNA, 25 bp, Homo sapien
tcgccttaggtcgagtcctggttcc

SEQ ID NO: 1732915 - DNA, 25 bp, Homo sapien
tctatacactaacagcaacctaacc

SEQ ID NO: 1732916 - DNA, 25 bp, Homo sapien
tttcagtatagtttcagaatacaaa

SEQ ID NO: 1732917 - DNA, 25 bp, Homo sapien
tatacactaacagcaacctaaccaa

SEQ ID NO: 1732918 - DNA, 25 bp, Homo sapien
tacactaacagcaacctaaccaaaa

SEQ ID NO: 1732919 - DNA, 25 bp, Homo sapien
gcaaggcatctggatagctcctcat

SEQ ID NO: 1732920 - DNA, 25 bp, Homo sapien
aggcatctggatagctcctcatttt

SEQ ID NO: 1732921 - DNA, 25 bp, Homo sapien
ttgagcaaggcatctggatagctcc

SEQ ID NO: 1732922 - DNA, 25 bp, Homo sapien
catttttaaatgtaactgtggatac

SEQ ID NO: 1732923 - DNA, 25 bp, Homo sapien
tttaaagcgcctcatactcgtgacc

SEQ ID NO: 1732924 - DNA, 25 bp, Homo sapien
tgaccatctagcaaccattcagtgg

SEQ ID NO: 1732925 - DNA, 25 bp, Homo sapien
gaatgaatgaaggtgtctaactcca

SEQ ID NO: 1732926 - DNA, 25 bp, Homo sapien
tcagtggctgaatcctcagacaggc

SEQ ID NO: 1732927 - DNA, 25 bp, Homo sapien
cacgatttcataacggatagaggac

SEQ ID NO: 1732928 - DNA, 25 bp, Homo sapien
aaatcatcacgagcgaggcgaagca

SEQ ID NO: 1732929 - DNA, 25 bp, Homo sapien
gaatgcaccgggaaccctagtcaag

SEQ ID NO: 1732930 - DNA, 25 bp, Homo sapien
tgggagacgagaccttcactcagga

SEQ ID NO: 1732931 - DNA, 25 bp, Homo sapien
tcaagaagaccatgaatcttttcat

SEQ ID NO: 1732932 - DNA, 25 bp, Homo sapien
tgacacttcaagaagaccatgaatc

SEQ ID NO: 1732933 - DNA, 25 bp, Homo sapien
actgaggtcaaggacccgaggctgg

SEQ ID NO: 1732934 - DNA, 25 bp, Homo sapien
gctgctttcacgttcctcaccactg

SEQ ID NO: 1732935 - DNA, 25 bp, Homo sapien
tctgtcccggaatactctaaacttg

SEQ ID NO: 1732936 - DNA, 25 bp, Homo sapien
agcgtgaagttttcccgttgtgact

SEQ ID NO: 1732937 - DNA, 25 bp, Homo sapien
gaagtgtgatgggcactgacgctgc

SEQ ID NO: 1732938 - DNA, 25 bp, Homo sapien
aagtgtgatgggcactgacgctgca

SEQ ID NO: 1732939 - DNA, 25 bp, Homo sapien
atgaagtgtgatgggcactgacgct

SEQ ID NO: 1732940 - DNA, 25 bp, Homo sapien
gcatgaagtgtgatgggcactgacg

SEQ ID NO: 1732941 - DNA, 25 bp, Homo sapien
gacaaatactgtagatccttcctgc

SEQ ID NO: 1732942 - DNA, 25 bp, Homo sapien
atctctccacccaatgtcttgacaa

SEQ ID NO: 1732943 - DNA, 25 bp, Homo sapien
cccaatgtcttgacaaatactgtag

SEQ ID NO: 1732944 - DNA, 25 bp, Homo sapien
aaatactgtagatccttcctgcaca

SEQ ID NO: 1732945 - DNA, 25 bp, Homo sapien
aaaatggaattcaaacactgtgatt

SEQ ID NO: 1732946 - DNA, 25 bp, Homo sapien
taactgtgatataggcactgaattc

SEQ ID NO: 1732947 - DNA, 25 bp, Homo sapien
tcaaaggttacaggcttttcgtgtg

SEQ ID NO: 1732948 - DNA, 25 bp, Homo sapien
ggtaagatccatctgaactatgaag

SEQ ID NO: 1732949 - DNA, 25 bp, Homo sapien
ggcatcaatgacagcagttacagta

SEQ ID NO: 1732950 - DNA, 25 bp, Homo sapien
cattttcttacatactcagtagaag

SEQ ID NO: 1732951 - DNA, 25 bp, Homo sapien
gcatctcattttagaagaagaggca

SEQ ID NO: 1732952 - DNA, 25 bp, Homo sapien
taaatacaagatgctgtgttcagca

SEQ ID NO: 1732953 - DNA, 25 bp, Homo sapien
cattaagcttgaaacgtgaggcaga

SEQ ID NO: 1732954 - DNA, 25 bp, Homo sapien
caaaacgtgatgatgggcagctagc

SEQ ID NO: 1732955 - DNA, 25 bp, Homo sapien
ggacaagtgttctatgagcagagac

SEQ ID NO: 1732956 - DNA, 25 bp, Homo sapien
gagactgggactagccaaaacgtga

SEQ ID NO: 1732957 - DNA, 25 bp, Homo sapien
taaagttgctttattaaattcatac

SEQ ID NO: 1732958 - DNA, 25 bp, Homo sapien
tgctgggcttctggcaaaattataa

SEQ ID NO: 1732959 - DNA, 25 bp, Homo sapien
tgtgctgggcttctggcaaaattat

SEQ ID NO: 1732960 - DNA, 25 bp, Homo sapien
attaaattcatacatgcggaaatct

SEQ ID NO: 1732961 - DNA, 25 bp, Homo sapien
gtttattactaatattatacatccc

SEQ ID NO: 1732962 - DNA, 25 bp, Homo sapien
tattatacatccctcaattggcata

SEQ ID NO: 1732963 - DNA, 25 bp, Homo sapien
catccctcaattggcataattataa

SEQ ID NO: 1732964 - DNA, 25 bp, Homo sapien
ctaatattatacatccctcaattgg

SEQ ID NO: 1732965 - DNA, 25 bp, Homo sapien
ttctctctcttttgacttcaaaatc

SEQ ID NO: 1732966 - DNA, 25 bp, Homo sapien
ctccttgccaaatattctctctctt

SEQ ID NO: 1732967 - DNA, 25 bp, Homo sapien
ctctctcttttgacttcaaaatcat

SEQ ID NO: 1732968 - DNA, 25 bp, Homo sapien
ccctccttgccaaatattctctctc

SEQ ID NO: 1732969 - DNA, 25 bp, Homo sapien
tggcccaaacaggaatgaggggcac

SEQ ID NO: 1732970 - DNA, 25 bp, Homo sapien
gcagaatcaccaggatggaacacag

SEQ ID NO: 1732971 - DNA, 25 bp, Homo sapien
ctgtacagtgaaattgaaggcagaa

SEQ ID NO: 1732972 - DNA, 25 bp, Homo sapien
tacagtgaaattgaaggcagaatca

SEQ ID NO: 1732973 - DNA, 25 bp, Homo sapien
gaacacaggttttgcaggatcacgg

SEQ ID NO: 1732974 - DNA, 25 bp, Homo sapien
cagtgacctcggggactcttctctg

SEQ ID NO: 1732975 - DNA, 25 bp, Homo sapien
cttgtgctcagtgtagtggctgagc

SEQ ID NO: 1732976 - DNA, 25 bp, Homo sapien
aaaatgcagaccgtgcatccccagt

SEQ ID NO: 1732977 - DNA, 25 bp, Homo sapien
tccttgtgctcagtgtagtggctga

SEQ ID NO: 1732978 - DNA, 25 bp, Homo sapien
aggtatgtctgcagatgcccgggac

SEQ ID NO: 1732979 - DNA, 25 bp, Homo sapien
gggccgaactgtagaccgtgcatcc

SEQ ID NO: 1732980 - DNA, 25 bp, Homo sapien
tcttttgctccgctggccccctcct

SEQ ID NO: 1732981 - DNA, 25 bp, Homo sapien
ctgccctgctcttttgctccgctgg

SEQ ID NO: 1732982 - DNA, 25 bp, Homo sapien
tgtatctgccgccttttcacaccgt

SEQ ID NO: 1732983 - DNA, 25 bp, Homo sapien
tctgccgccttttcacaccgtgtgt

SEQ ID NO: 1732984 - DNA, 25 bp, Homo sapien
tgccgccttttcacaccgtgtgtga

SEQ ID NO: 1732985 - DNA, 25 bp, Homo sapien
tatctgccgccttttcacaccgtgt

SEQ ID NO: 1732986 - DNA, 25 bp, Homo sapien
gcctagagccctgggatctggggga

SEQ ID NO: 1732987 - DNA, 25 bp, Homo sapien
agagccctgggatctgggggagcca

SEQ ID NO: 1732988 - DNA, 25 bp, Homo sapien
gggcctagagccctgggatctgggg

SEQ ID NO: 1732989 - DNA, 25 bp, Homo sapien
ctagagccctgggatctgggggagc

SEQ ID NO: 1732990 - DNA, 25 bp, Homo sapien
tcacctgtgtggcagcagggcaatc

SEQ ID NO: 1732991 - DNA, 25 bp, Homo sapien
cccctcacctgtgtggcagcagggc

SEQ ID NO: 1732992 - DNA, 25 bp, Homo sapien
cctcacctgtgtggcagcagggcaa

SEQ ID NO: 1732993 - DNA, 25 bp, Homo sapien
acctgtgtggcagcagggcaatctt

SEQ ID NO: 1732994 - DNA, 25 bp, Homo sapien
cattgagtagtgaccccgacgtggg

SEQ ID NO: 1732995 - DNA, 25 bp, Homo sapien
tccactgcattgagtagtgaccccg

SEQ ID NO: 1732996 - DNA, 25 bp, Homo sapien
gatccgctggaatgccccctctttt

SEQ ID NO: 1732997 - DNA, 25 bp, Homo sapien
ctgcagcgcactgttgatccgctgg

SEQ ID NO: 1732998 - DNA, 25 bp, Homo sapien
ttttgtttgcggcacgatctggtcc

SEQ ID NO: 1732999 - DNA, 25 bp, Homo sapien
cgagctggcattttgtttgcggcac

SEQ ID NO: 1733000 - DNA, 25 bp, Homo sapien
tttgtttgcggcacgatctggtccg

SEQ ID NO: 1733001 - DNA, 25 bp, Homo sapien
agctcgagctggcattttgtttgcg

SEQ ID NO: 1733002 - DNA, 25 bp, Homo sapien
tcatgccggcatcctttcgttccgg

SEQ ID NO: 1733003 - DNA, 25 bp, Homo sapien
cttgagtcatataattgcaaagcag

SEQ ID NO: 1733004 - DNA, 25 bp, Homo sapien
taaagagtagttgctgtagttcctc

SEQ ID NO: 1733005 - DNA, 25 bp, Homo sapien
taatagttaacggagccagaatgct

SEQ ID NO: 1733006 - DNA, 25 bp, Homo sapien
tctttgggtcgtaggagcagttgtc

SEQ ID NO: 1733007 - DNA, 25 bp, Homo sapien
gactctgacatgtgcccatagctag

SEQ ID NO: 1733008 - DNA, 25 bp, Homo sapien
ctgacatgtgcccatagctagggtg

SEQ ID NO: 1733009 - DNA, 25 bp, Homo sapien
tgggactctgacatgtgcccatagc

SEQ ID NO: 1733010 - DNA, 25 bp, Homo sapien
ttacatgggactctgacatgtgccc

SEQ ID NO: 1733011 - DNA, 25 bp, Homo sapien
gacttcttcacttagggacaagact

SEQ ID NO: 1733012 - DNA, 25 bp, Homo sapien
ctgataaagagataacaccctgtct

SEQ ID NO: 1733013 - DNA, 25 bp, Homo sapien
accctgtctccaagacacaggcttt

SEQ ID NO: 1733014 - DNA, 25 bp, Homo sapien
ccaagacacaggctttacataaaca

SEQ ID NO: 1733015 - DNA, 25 bp, Homo sapien
gaattcacgggatcagagcactgag

SEQ ID NO: 1733016 - DNA, 25 bp, Homo sapien
tctcagggtcagtccagctctggag

SEQ ID NO: 1733017 - DNA, 25 bp, Homo sapien
ggttcaccgccctgattccacagat

SEQ ID NO: 1733018 - DNA, 25 bp, Homo sapien
gttggaatggacaagcctgccctct

SEQ ID NO: 1733019 - DNA, 25 bp, Homo sapien
agcagctgctcacataagccggggt

SEQ ID NO: 1733020 - DNA, 25 bp, Homo sapien
ggtggaggatgcctaggcgtatttg

SEQ ID NO: 1733021 - DNA, 25 bp, Homo sapien
ctaggcgtatttgtggtattgacca

SEQ ID NO: 1733022 - DNA, 25 bp, Homo sapien
agctgctcacataagccggggtgga

SEQ ID NO: 1733023 - DNA, 25 bp, Homo sapien
catttgtcttctattctgcgtatcc

SEQ ID NO: 1733024 - DNA, 25 bp, Homo sapien
gcgtatccgttggaaccaactcagg

SEQ ID NO: 1733025 - DNA, 25 bp, Homo sapien
tattctgcgtatccgttggaaccaa

SEQ ID NO: 1733026 - DNA, 25 bp, Homo sapien
tccgttggaaccaactcaggtgaca

SEQ ID NO: 1733027 - DNA, 25 bp, Homo sapien
gaccggacccgcagcttgtggtcac

SEQ ID NO: 1733028 - DNA, 25 bp, Homo sapien
ctcttgctccagtgacaggctcaga

SEQ ID NO: 1733029 - DNA, 25 bp, Homo sapien
gggttcggtgagtgactgccccagg

SEQ ID NO: 1733030 - DNA, 25 bp, Homo sapien
tcaccatgggcttcacggggttcgg

SEQ ID NO: 1733031 - DNA, 25 bp, Homo sapien
tctgggcccagcgaaggtgggtttc

SEQ ID NO: 1733032 - DNA, 25 bp, Homo sapien
cgctctgggcccagcgaaggtgggt

SEQ ID NO: 1733033 - DNA, 25 bp, Homo sapien
tgggcccagcgaaggtgggtttcat

SEQ ID NO: 1733034 - DNA, 25 bp, Homo sapien
gctctgggcccagcgaaggtgggtt

SEQ ID NO: 1733035 - DNA, 25 bp, Homo sapien
ggaaggcgccgctcttggcttcggc

SEQ ID NO: 1733036 - DNA, 25 bp, Homo sapien
tctgcggaaggcgccgctcttggct

SEQ ID NO: 1733037 - DNA, 25 bp, Homo sapien
tgcggaaggcgccgctcttggcttc

SEQ ID NO: 1733038 - DNA, 25 bp, Homo sapien
aaggcgccgctcttggcttcggcgg

SEQ ID NO: 1733039 - DNA, 25 bp, Homo sapien
tgaatgctgagtaaggccctgcgtt

SEQ ID NO: 1733040 - DNA, 25 bp, Homo sapien
ttcatcccacttctgtatctctagg

SEQ ID NO: 1733041 - DNA, 25 bp, Homo sapien
gcagcacgttagtattccattctga

SEQ ID NO: 1733042 - DNA, 25 bp, Homo sapien
aatgctgagtaaggccctgcgttca

SEQ ID NO: 1733043 - DNA, 25 bp, Homo sapien
tcagtcttatatatgctagcaccat

SEQ ID NO: 1733044 - DNA, 25 bp, Homo sapien
cagtcttatatatgctagcaccatc

SEQ ID NO: 1733045 - DNA, 25 bp, Homo sapien
gatgcagcaacttgaagtatgtgcc

SEQ ID NO: 1733046 - DNA, 25 bp, Homo sapien
tgcctcaaggcatggctcaaatact

SEQ ID NO: 1733047 - DNA, 25 bp, Homo sapien
caaatactccgctgaagaatccaac

SEQ ID NO: 1733048 - DNA, 25 bp, Homo sapien
taatatgtaaagctcaatctggagt

SEQ ID NO: 1733049 - DNA, 25 bp, Homo sapien
gcttggaaaaattcagcccacgaga

SEQ ID NO: 1733050 - DNA, 25 bp, Homo sapien
gactgttactgacgcagatcttcgc

SEQ ID NO: 1733051 - DNA, 25 bp, Homo sapien
tgcattcaaaatagtccctgggtct

SEQ ID NO: 1733052 - DNA, 25 bp, Homo sapien
tatcagattccacgctgtgaggcct

SEQ ID NO: 1733053 - DNA, 25 bp, Homo sapien
aaagtgcttagctaaaaggtgtcct

SEQ ID NO: 1733054 - DNA, 25 bp, Homo sapien
cataaaaacgtctgagcacctgagt

SEQ ID NO: 1733055 - DNA, 25 bp, Homo sapien
gattgtcgagaaagagcagcctaca

SEQ ID NO: 1733056 - DNA, 25 bp, Homo sapien
ttggcagtaacagccactacatggc

SEQ ID NO: 1733057 - DNA, 25 bp, Homo sapien
gattccattgttcccaactgagtag

SEQ ID NO: 1733058 - DNA, 25 bp, Homo sapien
ggtgcttcagttagctccttcagac

SEQ ID NO: 1733059 - DNA, 25 bp, Homo sapien
caagtctagttatttgcctccagta

SEQ ID NO: 1733060 - DNA, 25 bp, Homo sapien
tcaccaaatggttgggtatagctcc

SEQ ID NO: 1733061 - DNA, 25 bp, Homo sapien
ctgaactttctattacttacaatgg

SEQ ID NO: 1733062 - DNA, 25 bp, Homo sapien
tgtgccagtatgttccgtttttcaa

SEQ ID NO: 1733063 - DNA, 25 bp, Homo sapien
gacattaagactgaacatgtgaaaa

SEQ ID NO: 1733064 - DNA, 25 bp, Homo sapien
tatactgtacttttgctaccaacat

SEQ ID NO: 1733065 - DNA, 25 bp, Homo sapien
tgggcactgccgtaaatgtggctac

SEQ ID NO: 1733066 - DNA, 25 bp, Homo sapien
tgcattttcctatccggatccgggt

SEQ ID NO: 1733067 - DNA, 25 bp, Homo sapien
tcatcagctgggtaactatgggcac

SEQ ID NO: 1733068 - DNA, 25 bp, Homo sapien
cagtagctaccggtgagagatcatc

SEQ ID NO: 1733069 - DNA, 25 bp, Homo sapien
cacttattaggtattatctgtatca

SEQ ID NO: 1733070 - DNA, 25 bp, Homo sapien
cttggaggaaataagccacttatta

SEQ ID NO: 1733071 - DNA, 25 bp, Homo sapien
aacaacttcctggatgcatattaat

SEQ ID NO: 1733072 - DNA, 25 bp, Homo sapien
caacttcctggatgcatattaatgt

SEQ ID NO: 1733073 - DNA, 25 bp, Homo sapien
gaagggatgctttgcctaggaacaa

SEQ ID NO: 1733074 - DNA, 25 bp, Homo sapien
tgaccccacgaaaaacagatctagc

SEQ ID NO: 1733075 - DNA, 25 bp, Homo sapien
tgcttgttgctcctggaaatgaccc

SEQ ID NO: 1733076 - DNA, 25 bp, Homo sapien
tagcagatccgaacatgatgcagca

SEQ ID NO: 1733077 - DNA, 25 bp, Homo sapien
caatccagctagatctgtttttcgt

SEQ ID NO: 1733078 - DNA, 25 bp, Homo sapien
gtcatttccaggagcaacaagcaag

SEQ ID NO: 1733079 - DNA, 25 bp, Homo sapien
aatccagctagatctgtttttcgtg

SEQ ID NO: 1733080 - DNA, 25 bp, Homo sapien
caaacgacaaatgtgccaaagacag

SEQ ID NO: 1733081 - DNA, 25 bp, Homo sapien
gcacagcttccttcatgccaaagca

SEQ ID NO: 1733082 - DNA, 25 bp, Homo sapien
atgaaacggctgagtcctggcacca

SEQ ID NO: 1733083 - DNA, 25 bp, Homo sapien
catgacggatgctgagaagaagtag

SEQ ID NO: 1733084 - DNA, 25 bp, Homo sapien
aagagagaatcaggaagacggaaaa

SEQ ID NO: 1733085 - DNA, 25 bp, Homo sapien
ctggcaaagagagaatcaggaagac

SEQ ID NO: 1733086 - DNA, 25 bp, Homo sapien
gcaaagagagaatcaggaagacgga

SEQ ID NO: 1733087 - DNA, 25 bp, Homo sapien
tggcagctggcaaagagagaatcag

SEQ ID NO: 1733088 - DNA, 25 bp, Homo sapien
ctttgaggacgctgtgacaggcagt

SEQ ID NO: 1733089 - DNA, 25 bp, Homo sapien
aggacgctgtgacaggcagttccag

SEQ ID NO: 1733090 - DNA, 25 bp, Homo sapien
cctggtatgtatagttccttcccaa

SEQ ID NO: 1733091 - DNA, 25 bp, Homo sapien
gtatgtatagttccttcccaatcct

SEQ ID NO: 1733092 - DNA, 25 bp, Homo sapien
aatattgcaaccagtattcagctgc

SEQ ID NO: 1733093 - DNA, 25 bp, Homo sapien
catgttccaaactaatcaagatgct

SEQ ID NO: 1733094 - DNA, 25 bp, Homo sapien
tgtccaatacctaggccaaatcaac

SEQ ID NO: 1733095 - DNA, 25 bp, Homo sapien
tgcagcaaccagtaatgtaacagtc

SEQ ID NO: 1733096 - DNA, 25 bp, Homo sapien
gtcctgactcagcctcctgagtagc

SEQ ID NO: 1733097 - DNA, 25 bp, Homo sapien
tacagccatgtgccactatgcctgc

SEQ ID NO: 1733098 - DNA, 25 bp, Homo sapien
cagccatgtgccactatgcctgctt

SEQ ID NO: 1733099 - DNA, 25 bp, Homo sapien
tgcctcgcccgttcaagcaattgtc

SEQ ID NO: 1733100 - DNA, 25 bp, Homo sapien
taaaaggtcataaagtgatttctcc

SEQ ID NO: 1733101 - DNA, 25 bp, Homo sapien
tctaaaaggtcataaagtgatttct

SEQ ID NO: 1733102 - DNA, 25 bp, Homo sapien
ctaaaaggtcataaagtgatttctc

SEQ ID NO: 1733103 - DNA, 25 bp, Homo sapien
gcccacaaggctgtggcagcctccc

SEQ ID NO: 1733104 - DNA, 25 bp, Homo sapien
ccacaaggctgtggcagcctccctc

SEQ ID NO: 1733105 - DNA, 25 bp, Homo sapien
aagcccacaaggctgtggcagcctc

SEQ ID NO: 1733106 - DNA, 25 bp, Homo sapien
ctgaagcccacaaggctgtggcagc

SEQ ID NO: 1733107 - DNA, 25 bp, Homo sapien
ggtgtaggacgtttggatgtgggag

SEQ ID NO: 1733108 - DNA, 25 bp, Homo sapien
cttggtgtaggacgtttggatgtgg

SEQ ID NO: 1733109 - DNA, 25 bp, Homo sapien
gtgtaggacgtttggatgtgggagc

SEQ ID NO: 1733110 - DNA, 25 bp, Homo sapien
ttggtgtaggacgtttggatgtggg

SEQ ID NO: 1733111 - DNA, 25 bp, Homo sapien
cctgcgaggagcagttgctgtcact

SEQ ID NO: 1733112 - DNA, 25 bp, Homo sapien
gtcactgttcttcgcgccctgcagg

SEQ ID NO: 1733113 - DNA, 25 bp, Homo sapien
gaaccttctccgcagtaaggagtgg

SEQ ID NO: 1733114 - DNA, 25 bp, Homo sapien
gagcgcctcagtgcgccattctctg

SEQ ID NO: 1733115 - DNA, 25 bp, Homo sapien
cagagattctggcaggttgtatttt

SEQ ID NO: 1733116 - DNA, 25 bp, Homo sapien
tttagagcatgtggcatatgcagat

SEQ ID NO: 1733117 - DNA, 25 bp, Homo sapien
tcctctgaacactagtttagctgtg

SEQ ID NO: 1733118 - DNA, 25 bp, Homo sapien
tctgtctaacgctttcagtggtatg

SEQ ID NO: 1733119 - DNA, 25 bp, Homo sapien
tatacacatggcttgctttggctat

SEQ ID NO: 1733120 - DNA, 25 bp, Homo sapien
gtttcaatcttatacacatggcttg

SEQ ID NO: 1733121 - DNA, 25 bp, Homo sapien
tcttatacacatggcttgctttggc

SEQ ID NO: 1733122 - DNA, 25 bp, Homo sapien
gaatagcatcaaatcagttaattgt

SEQ ID NO: 1733123 - DNA, 25 bp, Homo sapien
gagacaaaggcattgggatagaaat

SEQ ID NO: 1733124 - DNA, 25 bp, Homo sapien
ggagacaaaggcattgggatagaaa

SEQ ID NO: 1733125 - DNA, 25 bp, Homo sapien
caccacgggaatagctcgaaagaat

SEQ ID NO: 1733126 - DNA, 25 bp, Homo sapien
ctctggagtatgtgagctggattca

SEQ ID NO: 1733127 - DNA, 25 bp, Homo sapien
ggcagctgagttgaacaccacggga

SEQ ID NO: 1733128 - DNA, 25 bp, Homo sapien
cccttgctggaaagatggctctgga

SEQ ID NO: 1733129 - DNA, 25 bp, Homo sapien
tatcgaggctcaaaaatccaaatag

SEQ ID NO: 1733130 - DNA, 25 bp, Homo sapien
tgggcccatgttaaggtgccgcctc

SEQ ID NO: 1733131 - DNA, 25 bp, Homo sapien
cagtcttggaatagtagtctatgcc

SEQ ID NO: 1733132 - DNA, 25 bp, Homo sapien
ggaaaactgccaatcacagccatac

SEQ ID NO: 1733133 - DNA, 25 bp, Homo sapien
ctggaagggtcccttgcccaggtat

SEQ ID NO: 1733134 - DNA, 25 bp, Homo sapien
ctgcatcagcagatatccaatattc

SEQ ID NO: 1733135 - DNA, 25 bp, Homo sapien
catggaggaaggactccgatctctg

SEQ ID NO: 1733136 - DNA, 25 bp, Homo sapien
tccaatattcagtggttcactgtct

SEQ ID NO: 1733137 - DNA, 25 bp, Homo sapien
ttctttttgagcagtcttaaaagta

SEQ ID NO: 1733138 - DNA, 25 bp, Homo sapien
tctttttgagcagtcttaaaagtag

SEQ ID NO: 1733139 - DNA, 25 bp, Homo sapien
ctttttgagcagtcttaaaagtaga

SEQ ID NO: 1733140 - DNA, 25 bp, Homo sapien
tggagccgaaccataggggcagatt

SEQ ID NO: 1733141 - DNA, 25 bp, Homo sapien
tatacctgggtcatcctaggagagt

SEQ ID NO: 1733142 - DNA, 25 bp, Homo sapien
gggcagattctatacctgggtcatc

SEQ ID NO: 1733143 - DNA, 25 bp, Homo sapien
tgggtcatcctaggagagtgaaaac

SEQ ID NO: 1733144 - DNA, 25 bp, Homo sapien
ctctctattaccaagcccccagtga

SEQ ID NO: 1733145 - DNA, 25 bp, Homo sapien
ccagtgaccaacaataagcaacatc

SEQ ID NO: 1733146 - DNA, 25 bp, Homo sapien
gacgagagggaggaccatagaagca

SEQ ID NO: 1733147 - DNA, 25 bp, Homo sapien
caacatcattggctgacgagaggga

SEQ ID NO: 1733148 - DNA, 25 bp, Homo sapien
tcagtgacccaaacagcatattcat

SEQ ID NO: 1733149 - DNA, 25 bp, Homo sapien
gagtgaaatcagtgacccaaacagc

SEQ ID NO: 1733150 - DNA, 25 bp, Homo sapien
caatcgcagccaagagtgaaatcag

SEQ ID NO: 1733151 - DNA, 25 bp, Homo sapien
cctgttcaatcgcagccaagagtga

SEQ ID NO: 1733152 - DNA, 25 bp, Homo sapien
tgctgatgatcagagactgaggaag

SEQ ID NO: 1733153 - DNA, 25 bp, Homo sapien
gaagggtagagcttcctactggctg

SEQ ID NO: 1733154 - DNA, 25 bp, Homo sapien
ggtagagcttcctactggctgagga

SEQ ID NO: 1733155 - DNA, 25 bp, Homo sapien
gtgctgatgatcagagactgaggaa

SEQ ID NO: 1733156 - DNA, 25 bp, Homo sapien
attccacttgtttagaaaggcaata

SEQ ID NO: 1733157 - DNA, 25 bp, Homo sapien
ataataaaaccattcttgaacttga

SEQ ID NO: 1733158 - DNA, 25 bp, Homo sapien
aataataaaaccattcttgaacttg

SEQ ID NO: 1733159 - DNA, 25 bp, Homo sapien
tattccacttgtttagaaaggcaat

SEQ ID NO: 1733160 - DNA, 25 bp, Homo sapien
tctagaacctagaatctgcttctcc

SEQ ID NO: 1733161 - DNA, 25 bp, Homo sapien
tcagccttcttttctagaacctaga

SEQ ID NO: 1733162 - DNA, 25 bp, Homo sapien
ttctagaacctagaatctgcttctc

SEQ ID NO: 1733163 - DNA, 25 bp, Homo sapien
tgaaccccagaaataatactcttgg

SEQ ID NO: 1733164 - DNA, 25 bp, Homo sapien
gtactacacaataggtttatagacc

SEQ ID NO: 1733165 - DNA, 25 bp, Homo sapien
agcatggagtttatacagatagatc

SEQ ID NO: 1733166 - DNA, 25 bp, Homo sapien
aaagcctatgtatttatgtactaca

SEQ ID NO: 1733167 - DNA, 25 bp, Homo sapien
tgaagcagggctatgtagtgctcca

SEQ ID NO: 1733168 - DNA, 25 bp, Homo sapien
ccctgggtgagatattctggcaagc

SEQ ID NO: 1733169 - DNA, 25 bp, Homo sapien
tgtcaatcaagtacccaagtccagc

SEQ ID NO: 1733170 - DNA, 25 bp, Homo sapien
ccgctttcaaagaagccctgggtga

SEQ ID NO: 1733171 - DNA, 25 bp, Homo sapien
tcaatgaaatcctttcccacttgtt

SEQ ID NO: 1733172 - DNA, 25 bp, Homo sapien
tggcactgaaagacccatgtgccca

SEQ ID NO: 1733173 - DNA, 25 bp, Homo sapien
cccatcagcattagcaaagctggac

SEQ ID NO: 1733174 - DNA, 25 bp, Homo sapien
cccatgtgcccatcagcattagcaa

SEQ ID NO: 1733175 - DNA, 25 bp, Homo sapien
cagcaggctttaacttcactgcagc

SEQ ID NO: 1733176 - DNA, 25 bp, Homo sapien
taatgaagagtttacagaaagcccc

SEQ ID NO: 1733177 - DNA, 25 bp, Homo sapien
tgtctggaggtggatttggatacta

SEQ ID NO: 1733178 - DNA, 25 bp, Homo sapien
ggtggatttggatactaaatgccat

SEQ ID NO: 1733179 - DNA, 25 bp, Homo sapien
tatttgttccatcagtcgccccgaa

SEQ ID NO: 1733180 - DNA, 25 bp, Homo sapien
taaacgccctaatgtccctatggat

SEQ ID NO: 1733181 - DNA, 25 bp, Homo sapien
ccaaggctacagtttgtccaaccat

SEQ ID NO: 1733182 - DNA, 25 bp, Homo sapien
tcccctccagtgaattagatccaag

SEQ ID NO: 1733183 - DNA, 25 bp, Homo sapien
gccttcttgcatttgatcctccatt

SEQ ID NO: 1733184 - DNA, 25 bp, Homo sapien
tgccttcttgcatttgatcctccat

SEQ ID NO: 1733185 - DNA, 25 bp, Homo sapien
ctgccttcttgcatttgatcctcca

SEQ ID NO: 1733186 - DNA, 25 bp, Homo sapien
tttatcaccccatagttcagggcca

SEQ ID NO: 1733187 - DNA, 25 bp, Homo sapien
cttttatcaccccatagttcagggc

SEQ ID NO: 1733188 - DNA, 25 bp, Homo sapien
tatcaccccatagttcagggccatt

SEQ ID NO: 1733189 - DNA, 25 bp, Homo sapien
agcagaagcaaaggtgtcaagttgg

SEQ ID NO: 1733190 - DNA, 25 bp, Homo sapien
tcaggtgatgatgtgtgtgctcttg

SEQ ID NO: 1733191 - DNA, 25 bp, Homo sapien
ccacccagaatttgactcctcttgg

SEQ ID NO: 1733192 - DNA, 25 bp, Homo sapien
tgtgtgctcttggtgactcccctcc

SEQ ID NO: 1733193 - DNA, 25 bp, Homo sapien
gaatttgactcctcttgggctccaa

SEQ ID NO: 1733194 - DNA, 25 bp, Homo sapien
gaataaccccagtgtggtacacagg

SEQ ID NO: 1733195 - DNA, 25 bp, Homo sapien
tctggcaatgagagatgaataaccc

SEQ ID NO: 1733196 - DNA, 25 bp, Homo sapien
tgtgtcacatcccacttgaaggctg

SEQ ID NO: 1733197 - DNA, 25 bp, Homo sapien
taagcactatcactacaaacaggga

SEQ ID NO: 1733198 - DNA, 25 bp, Homo sapien
tttggaggaatcagctaaaacaggg

SEQ ID NO: 1733199 - DNA, 25 bp, Homo sapien
actcgccatcacttgcttcaccacc

SEQ ID NO: 1733200 - DNA, 25 bp, Homo sapien
taaaggtttggaggaatcagctaaa

SEQ ID NO: 1733201 - DNA, 25 bp, Homo sapien
taaatattcttgtaccacagggact

SEQ ID NO: 1733202 - DNA, 25 bp, Homo sapien
tggtcatcaagctttgttgaacaca

SEQ ID NO: 1733203 - DNA, 25 bp, Homo sapien
tgtggcaattctggtcatcaagctt

SEQ ID NO: 1733204 - DNA, 25 bp, Homo sapien
ctggtcatcaagctttgttgaacac

SEQ ID NO: 1733205 - DNA, 25 bp, Homo sapien
gtatgtggcaattctggtcatcaag

SEQ ID NO: 1733206 - DNA, 25 bp, Homo sapien
gctggtacgtagctatgtgagccat

SEQ ID NO: 1733207 - DNA, 25 bp, Homo sapien
ctgctgctggtacgtagctatgtga

SEQ ID NO: 1733208 - DNA, 25 bp, Homo sapien
gctgctggtacgtagctatgtgagc

SEQ ID NO: 1733209 - DNA, 25 bp, Homo sapien
tgctgctgctggtacgtagctatgt

SEQ ID NO: 1733210 - DNA, 25 bp, Homo sapien
tacgtaacagctcctcatcattcca

SEQ ID NO: 1733211 - DNA, 25 bp, Homo sapien
tcctcatcattccataaagactttg

SEQ ID NO: 1733212 - DNA, 25 bp, Homo sapien
ctgaattacgtaacagctcctcatc

SEQ ID NO: 1733213 - DNA, 25 bp, Homo sapien
cctcatcattccataaagactttgt

SEQ ID NO: 1733214 - DNA, 25 bp, Homo sapien
acgcaattccaaagtgcccatgatg

SEQ ID NO: 1733215 - DNA, 25 bp, Homo sapien
ccaaagtgcccatgatgcagatcac

SEQ ID NO: 1733216 - DNA, 25 bp, Homo sapien
tagtttcaggtccactttcttagta

SEQ ID NO: 1733217 - DNA, 25 bp, Homo sapien
atttcaggggcatatcttgggtatc

SEQ ID NO: 1733218 - DNA, 25 bp, Homo sapien
ttatatccgactgaagcaggcgcat

SEQ ID NO: 1733219 - DNA, 25 bp, Homo sapien
gaagataagcgataaattatatccg

SEQ ID NO: 1733220 - DNA, 25 bp, Homo sapien
tttttcttgaagataagcgataaat

SEQ ID NO: 1733221 - DNA, 25 bp, Homo sapien
gcgataaattatatccgactgaagc

SEQ ID NO: 1733222 - DNA, 25 bp, Homo sapien
tgcagtctcttgtcatcacagacca

SEQ ID NO: 1733223 - DNA, 25 bp, Homo sapien
tgtcacttgcagtctcttgtcatca

SEQ ID NO: 1733224 - DNA, 25 bp, Homo sapien
tctcttgtcatcacagaccacatct

SEQ ID NO: 1733225 - DNA, 25 bp, Homo sapien
gtcatcacagaccacatctagaatc

SEQ ID NO: 1733226 - DNA, 25 bp, Homo sapien
ttccccactctacacctgccaagag

SEQ ID NO: 1733227 - DNA, 25 bp, Homo sapien
atccaagctaccatgggtaacttct

SEQ ID NO: 1733228 - DNA, 25 bp, Homo sapien
ctctacacctgccaagagatccaag

SEQ ID NO: 1733229 - DNA, 25 bp, Homo sapien
cccactctacacctgccaagagatc

SEQ ID NO: 1733230 - DNA, 25 bp, Homo sapien
ggtaaatgcattttgacgaatagcc

SEQ ID NO: 1733231 - DNA, 25 bp, Homo sapien
cagttgtggtaaatgcattttgacg

SEQ ID NO: 1733232 - DNA, 25 bp, Homo sapien
gattggcagttgtggtaaatgcatt

SEQ ID NO: 1733233 - DNA, 25 bp, Homo sapien
aaagattggcagttgtggtaaatgc

SEQ ID NO: 1733234 - DNA, 25 bp, Homo sapien
atttggcccgttgagtctttttgct

SEQ ID NO: 1733235 - DNA, 25 bp, Homo sapien
ccagtatttggcccgttgagtcttt

SEQ ID NO: 1733236 - DNA, 25 bp, Homo sapien
cccgttgagtctttttgctcctcga

SEQ ID NO: 1733237 - DNA, 25 bp, Homo sapien
gtctttttgctcctcgattagccat

SEQ ID NO: 1733238 - DNA, 25 bp, Homo sapien
gaagtaggatgaatcttagcaatgg

SEQ ID NO: 1733239 - DNA, 25 bp, Homo sapien
aagtaggatgaatcttagcaatgga

SEQ ID NO: 1733240 - DNA, 25 bp, Homo sapien
ccaaatgaccattggcagaatggca

SEQ ID NO: 1733241 - DNA, 25 bp, Homo sapien
aggcctccacgagctcccaaataat

SEQ ID NO: 1733242 - DNA, 25 bp, Homo sapien
aggtttaactcagggagataaatgc

SEQ ID NO: 1733243 - DNA, 25 bp, Homo sapien
tttttcaccatcagactcaatgggc

SEQ ID NO: 1733244 - DNA, 25 bp, Homo sapien
ttttacatcataggcatcaatgtgc

SEQ ID NO: 1733245 - DNA, 25 bp, Homo sapien
catagccctcaatatgctccaaaat

SEQ ID NO: 1733246 - DNA, 25 bp, Homo sapien
cataggcctcaaagcacttcaaaat

SEQ ID NO: 1733247 - DNA, 25 bp, Homo sapien
tgaggtgaatgcacccatcacagag

SEQ ID NO: 1733248 - DNA, 25 bp, Homo sapien
gaaggcctcaaggtggtccaaatac

SEQ ID NO: 1733249 - DNA, 25 bp, Homo sapien
gaggaatgttccactcggtgagttg

SEQ ID NO: 1733250 - DNA, 25 bp, Homo sapien
taaagacggtgagttcaacgcacac

SEQ ID NO: 1733251 - DNA, 25 bp, Homo sapien
tctaccatagaactcaaagcgctct

SEQ ID NO: 1733252 - DNA, 25 bp, Homo sapien
atctttatctcggtgagttgaaagc

SEQ ID NO: 1733253 - DNA, 25 bp, Homo sapien
cataggcctgaaagcactctcaggg

SEQ ID NO: 1733254 - DNA, 25 bp, Homo sapien
ctttatctcggtgagttgaaagcac

SEQ ID NO: 1733255 - DNA, 25 bp, Homo sapien
tcagggtacccttgcaaattctaca

SEQ ID NO: 1733256 - DNA, 25 bp, Homo sapien
taacattcggtcactagctgtcatc

SEQ ID NO: 1733257 - DNA, 25 bp, Homo sapien
cctgccaactttgcggcttgtttca

SEQ ID NO: 1733258 - DNA, 25 bp, Homo sapien
actttgcggcttgtttcaaataaca

SEQ ID NO: 1733259 - DNA, 25 bp, Homo sapien
ggtcactagctgtcatcagtccatc

SEQ ID NO: 1733260 - DNA, 25 bp, Homo sapien
cagatgttcctgttggtctggaaat

SEQ ID NO: 1733261 - DNA, 25 bp, Homo sapien
tagtattacacaaggcgagtgcaga

SEQ ID NO: 1733262 - DNA, 25 bp, Homo sapien
ctaagctagtattacacaaggcgag

SEQ ID NO: 1733263 - DNA, 25 bp, Homo sapien
gtgctctcacagtaggttctgcccc

SEQ ID NO: 1733264 - DNA, 25 bp, Homo sapien
caacatccacaaacatctctttttg

SEQ ID NO: 1733265 - DNA, 25 bp, Homo sapien
catccacaaacatctctttttggca

SEQ ID NO: 1733266 - DNA, 25 bp, Homo sapien
tttccaacatccacaaacatctctt

SEQ ID NO: 1733267 - DNA, 25 bp, Homo sapien
ttattttccaacatccacaaacatc

SEQ ID NO: 1733268 - DNA, 25 bp, Homo sapien
gggggccttcaccaaaatgcagcca

SEQ ID NO: 1733269 - DNA, 25 bp, Homo sapien
ttgctgctgggggccttcaccaaaa

SEQ ID NO: 1733270 - DNA, 25 bp, Homo sapien
tgctgggggccttcaccaaaatgca

SEQ ID NO: 1733271 - DNA, 25 bp, Homo sapien
ggggccttcaccaaaatgcagccat

SEQ ID NO: 1733272 - DNA, 25 bp, Homo sapien
ttgagtgcccatgcatataccagcc

SEQ ID NO: 1733273 - DNA, 25 bp, Homo sapien
gacctagatattctatgtcacatag

SEQ ID NO: 1733274 - DNA, 25 bp, Homo sapien
gatgtggtcctagtatttcaaaggc

SEQ ID NO: 1733275 - DNA, 25 bp, Homo sapien
tcaaaggcttgtattctactacaga

SEQ ID NO: 1733276 - DNA, 25 bp, Homo sapien
tgaaagtattccacacttgccacaa

SEQ ID NO: 1733277 - DNA, 25 bp, Homo sapien
catagatgaaagtattccacacttg

SEQ ID NO: 1733278 - DNA, 25 bp, Homo sapien
gatctttccccattcatcattctga

SEQ ID NO: 1733279 - DNA, 25 bp, Homo sapien
gatttcatcatagaaaaacatagat

SEQ ID NO: 1733280 - DNA, 25 bp, Homo sapien
tatattttcgttcatgtaataccga

SEQ ID NO: 1733281 - DNA, 25 bp, Homo sapien
attttcgttcatgtaataccgaagt

SEQ ID NO: 1733282 - DNA, 25 bp, Homo sapien
ctatattttcgttcatgtaataccg

SEQ ID NO: 1733283 - DNA, 25 bp, Homo sapien
tattttcgttcatgtaataccgaag

SEQ ID NO: 1733284 - DNA, 25 bp, Homo sapien
atgttgcatcagtaacaaaagctgc

SEQ ID NO: 1733285 - DNA, 25 bp, Homo sapien
atatcatcccaagccagcaatctag

SEQ ID NO: 1733286 - DNA, 25 bp, Homo sapien
gggagtaaccattgccatatcatcc

SEQ ID NO: 1733287 - DNA, 25 bp, Homo sapien
aatacataatgacttcccatgttgc

SEQ ID NO: 1733288 - DNA, 25 bp, Homo sapien
ttgtcactttaagaactttatcaga

SEQ ID NO: 1733289 - DNA, 25 bp, Homo sapien
cagacatctcaaagcataaggccat

SEQ ID NO: 1733290 - DNA, 25 bp, Homo sapien
ttaagaactttatcagacatctcaa

SEQ ID NO: 1733291 - DNA, 25 bp, Homo sapien
actttatcagacatctcaaagcata

SEQ ID NO: 1733292 - DNA, 25 bp, Homo sapien
tcaaaggatgcccataaccattcag

SEQ ID NO: 1733293 - DNA, 25 bp, Homo sapien
caccttgattcttacacttcttaat

SEQ ID NO: 1733294 - DNA, 25 bp, Homo sapien
attcagtccctctctgaacagtgtg

SEQ ID NO: 1733295 - DNA, 25 bp, Homo sapien
tgggaatcaccttgattcttacact

SEQ ID NO: 1733296 - DNA, 25 bp, Homo sapien
gaatcttcacaatgatgaaactaaa

SEQ ID NO: 1733297 - DNA, 25 bp, Homo sapien
tgtatatgccacatgcttgctactg

SEQ ID NO: 1733298 - DNA, 25 bp, Homo sapien
caaagtgaaagcagtgtccaggatc

SEQ ID NO: 1733299 - DNA, 25 bp, Homo sapien
tatgccattccaagtagtgtgattc

SEQ ID NO: 1733300 - DNA, 25 bp, Homo sapien
agtgttcacagaggccatatttcca

SEQ ID NO: 1733301 - DNA, 25 bp, Homo sapien
ctcacatcagacatgcatgtcagtg

SEQ ID NO: 1733302 - DNA, 25 bp, Homo sapien
ggcaaaggatagagaggtctgaaca

SEQ ID NO: 1733303 - DNA, 25 bp, Homo sapien
tgtcagtgccagaatgatcagtgat

SEQ ID NO: 1733304 - DNA, 25 bp, Homo sapien
tcagtgccagaatgatcagtgatgt

SEQ ID NO: 1733305 - DNA, 25 bp, Homo sapien
ttgaagttttattgtgacactctcc

SEQ ID NO: 1733306 - DNA, 25 bp, Homo sapien
tcaatttgaagttttattgtgacac

SEQ ID NO: 1733307 - DNA, 25 bp, Homo sapien
cactctcctccagtaaaacaatagc

SEQ ID NO: 1733308 - DNA, 25 bp, Homo sapien
ctgactcatgtctagctgttggtgc

SEQ ID NO: 1733309 - DNA, 25 bp, Homo sapien
tacataaggcagtagtctgctgtat

SEQ ID NO: 1733310 - DNA, 25 bp, Homo sapien
ctgtacataaggcagtagtctgctg

SEQ ID NO: 1733311 - DNA, 25 bp, Homo sapien
taaggcagtagtctgctgtatgctg

SEQ ID NO: 1733312 - DNA, 25 bp, Homo sapien
gctgtatgctgttaattgtttgttc

SEQ ID NO: 1733313 - DNA, 25 bp, Homo sapien
ctgagttgttaaatgagggttgttc

SEQ ID NO: 1733314 - DNA, 25 bp, Homo sapien
taaatgagggttgttcacagaagtt

SEQ ID NO: 1733315 - DNA, 25 bp, Homo sapien
gttaaatgagggttgttcacagaag

SEQ ID NO: 1733316 - DNA, 25 bp, Homo sapien
gttgttaaatgagggttgttcacag

SEQ ID NO: 1733317 - DNA, 25 bp, Homo sapien
ctggtttggatggtatgcaggtgtt

SEQ ID NO: 1733318 - DNA, 25 bp, Homo sapien
tggatggtatgcaggtgttatatag

SEQ ID NO: 1733319 - DNA, 25 bp, Homo sapien
tttggatggtatgcaggtgttatat

SEQ ID NO: 1733320 - DNA, 25 bp, Homo sapien
gtttggatggtatgcaggtgttata

SEQ ID NO: 1733321 - DNA, 25 bp, Homo sapien
gatagagcatctaccatactgctgt

SEQ ID NO: 1733322 - DNA, 25 bp, Homo sapien
tcttctttgatcagctgatagagca

SEQ ID NO: 1733323 - DNA, 25 bp, Homo sapien
gctgtcataggtgcacaggttcttg

SEQ ID NO: 1733324 - DNA, 25 bp, Homo sapien
tagagcatctaccatactgctgtca

SEQ ID NO: 1733325 - DNA, 25 bp, Homo sapien
attccggtaaaagcgccctaatctg

SEQ ID NO: 1733326 - DNA, 25 bp, Homo sapien
gagctgagaaaattccagttctctt

SEQ ID NO: 1733327 - DNA, 25 bp, Homo sapien
taaaagcgccctaatctgtttgtag

SEQ ID NO: 1733328 - DNA, 25 bp, Homo sapien
cctaatctgtttgtaggagctgaga

SEQ ID NO: 1733329 - DNA, 25 bp, Homo sapien
taagttgcaggtagctcccatgggt

SEQ ID NO: 1733330 - DNA, 25 bp, Homo sapien
gtattccgctcgcataacacgtgga

SEQ ID NO: 1733331 - DNA, 25 bp, Homo sapien
ggcctggtcctggatgtttatagca

SEQ ID NO: 1733332 - DNA, 25 bp, Homo sapien
tgagctgaatagtcgagtttcttct

SEQ ID NO: 1733333 - DNA, 25 bp, Homo sapien
gcttccagacccataaaggctatga

SEQ ID NO: 1733334 - DNA, 25 bp, Homo sapien
cagtcctagcggttgaccataccca

SEQ ID NO: 1733335 - DNA, 25 bp, Homo sapien
tcaagtgccctgaaattggcccctg

SEQ ID NO: 1733336 - DNA, 25 bp, Homo sapien
tcaggaatgagcaggatgcctaata

SEQ ID NO: 1733337 - DNA, 25 bp, Homo sapien
atgacatcaacagcaaatttgttct

SEQ ID NO: 1733338 - DNA, 25 bp, Homo sapien
ttaaatccaggtaaggtctattcat

SEQ ID NO: 1733339 - DNA, 25 bp, Homo sapien
acatcaacagcaaatttgttctttt

SEQ ID NO: 1733340 - DNA, 25 bp, Homo sapien
tttaaatccaggtaaggtctattca

SEQ ID NO: 1733341 - DNA, 25 bp, Homo sapien
ctcacaggaggatctagaagggcaa

SEQ ID NO: 1733342 - DNA, 25 bp, Homo sapien
gatgcctcacaggaggatctagaag

SEQ ID NO: 1733343 - DNA, 25 bp, Homo sapien
tggtgtgatgcctcacaggaggatc

SEQ ID NO: 1733344 - DNA, 25 bp, Homo sapien
tggtgatggtgtgatgcctcacagg

SEQ ID NO: 1733345 - DNA, 25 bp, Homo sapien
gatacacttagctacatgtgcaaaa

SEQ ID NO: 1733346 - DNA, 25 bp, Homo sapien
gtgatacacttagctacatgtgcaa

SEQ ID NO: 1733347 - DNA, 25 bp, Homo sapien
tttgtgatacacttagctacatgtg

SEQ ID NO: 1733348 - DNA, 25 bp, Homo sapien
tgtgatacacttagctacatgtgca

SEQ ID NO: 1733349 - DNA, 25 bp, Homo sapien
tgtcatcgggttccagaaacacaga

SEQ ID NO: 1733350 - DNA, 25 bp, Homo sapien
gatactgtgggaatggtgtctggtg

SEQ ID NO: 1733351 - DNA, 25 bp, Homo sapien
ttaaaccgttctgcgatttgccaca

SEQ ID NO: 1733352 - DNA, 25 bp, Homo sapien
taacattaatggtgatactgtggga

SEQ ID NO: 1733353 - DNA, 25 bp, Homo sapien
tagtgacactctcgtcacacataac

SEQ ID NO: 1733354 - DNA, 25 bp, Homo sapien
tctgtagtgacactctcgtcacaca

SEQ ID NO: 1733355 - DNA, 25 bp, Homo sapien
tcaaaactctgtagtgacactctcg

SEQ ID NO: 1733356 - DNA, 25 bp, Homo sapien
aaactctgtagtgacactctcgtca

SEQ ID NO: 1733357 - DNA, 25 bp, Homo sapien
gttaaaagtacagtgctgtttggtg

SEQ ID NO: 1733358 - DNA, 25 bp, Homo sapien
agcagtctcatgattatatgttaaa

SEQ ID NO: 1733359 - DNA, 25 bp, Homo sapien
gcttggctgaaattacgaaatgggg

SEQ ID NO: 1733360 - DNA, 25 bp, Homo sapien
tattttggcatttctgttaataagc

SEQ ID NO: 1733361 - DNA, 25 bp, Homo sapien
ctattgtccttaaatggaaatcaca

SEQ ID NO: 1733362 - DNA, 25 bp, Homo sapien
agaaaatcagacaatagctgaacac

SEQ ID NO: 1733363 - DNA, 25 bp, Homo sapien
atcagacaatagctgaacacaccca

SEQ ID NO: 1733364 - DNA, 25 bp, Homo sapien
aaatcagacaatagctgaacacacc

SEQ ID NO: 1733365 - DNA, 25 bp, Homo sapien
aggaaaataggagatcttgaaagca

SEQ ID NO: 1733366 - DNA, 25 bp, Homo sapien
ctgctggtttcactggtagttgctt

SEQ ID NO: 1733367 - DNA, 25 bp, Homo sapien
ctgtagcttcagatagagtgttgct

SEQ ID NO: 1733368 - DNA, 25 bp, Homo sapien
tctgagcaatgttcagggtaactta

SEQ ID NO: 1733369 - DNA, 25 bp, Homo sapien
aacaaccacaaagctgctggtttca

SEQ ID NO: 1733370 - DNA, 25 bp, Homo sapien
tctggtgaccgttatgttaaataca

SEQ ID NO: 1733371 - DNA, 25 bp, Homo sapien
tgaccgttatgttaaatacagccat

SEQ ID NO: 1733372 - DNA, 25 bp, Homo sapien
tgtgttctggtgaccgttatgttaa

SEQ ID NO: 1733373 - DNA, 25 bp, Homo sapien
acttgtgttctggtgaccgttatgt

SEQ ID NO: 1733374 - DNA, 25 bp, Homo sapien
tgtacccacctgctactgtgttcag

SEQ ID NO: 1733375 - DNA, 25 bp, Homo sapien
gtacccacctgctactgtgttcaga

SEQ ID NO: 1733376 - DNA, 25 bp, Homo sapien
gccttgtacccacctgctactgtgt

SEQ ID NO: 1733377 - DNA, 25 bp, Homo sapien
tgggtgccttgtacccacctgctac

SEQ ID NO: 1733378 - DNA, 25 bp, Homo sapien
ggtcatccaatcaggcacccagata

SEQ ID NO: 1733379 - DNA, 25 bp, Homo sapien
acggtcatccaatcaggcacccaga

SEQ ID NO: 1733380 - DNA, 25 bp, Homo sapien
cttttacagaggtgttgtgctccac

SEQ ID NO: 1733381 - DNA, 25 bp, Homo sapien
ggtgttgtgctccacggtcatccaa

SEQ ID NO: 1733382 - DNA, 25 bp, Homo sapien
gagagtacagagagattcactatat

SEQ ID NO: 1733383 - DNA, 25 bp, Homo sapien
ttcattagcttcttaatattgggcc

SEQ ID NO: 1733384 - DNA, 25 bp, Homo sapien
atccttccagtttgtatgcatacaa

SEQ ID NO: 1733385 - DNA, 25 bp, Homo sapien
tttctgatttaacagtagcccatct

SEQ ID NO: 1733386 - DNA, 25 bp, Homo sapien
ggacttcagttcaccacctaacagg

SEQ ID NO: 1733387 - DNA, 25 bp, Homo sapien
ggttgttgagttaatctgtatctcc

SEQ ID NO: 1733388 - DNA, 25 bp, Homo sapien
gatgggtgccattgtctgtttcaga

SEQ ID NO: 1733389 - DNA, 25 bp, Homo sapien
ctaacaggttgagtatgccactgcc

SEQ ID NO: 1733390 - DNA, 25 bp, Homo sapien
tatatagtcagaattgggtgtcatc

SEQ ID NO: 1733391 - DNA, 25 bp, Homo sapien
tcccagactcccagtataaatattg

SEQ ID NO: 1733392 - DNA, 25 bp, Homo sapien
cacctgaatgtctctaagatggctc

SEQ ID NO: 1733393 - DNA, 25 bp, Homo sapien
taacttagttgatatctccacctga

SEQ ID NO: 1733394 - DNA, 25 bp, Homo sapien
cttttcattaaccttcatgatcccc

SEQ ID NO: 1733395 - DNA, 25 bp, Homo sapien
tcatgatcccccctctgctggatcc

SEQ ID NO: 1733396 - DNA, 25 bp, Homo sapien
tatcttttcattaaccttcatgatc

SEQ ID NO: 1733397 - DNA, 25 bp, Homo sapien
ttcatgatcccccctctgctggatc

SEQ ID NO: 1733398 - DNA, 25 bp, Homo sapien
cagagtgctctccagtttctcagtt

SEQ ID NO: 1733399 - DNA, 25 bp, Homo sapien
ttaaagctccagagtgctctccagt

SEQ ID NO: 1733400 - DNA, 25 bp, Homo sapien
ctccagagtgctctccagtttctca

SEQ ID NO: 1733401 - DNA, 25 bp, Homo sapien
aagctccagagtgctctccagtttc

SEQ ID NO: 1733402 - DNA, 25 bp, Homo sapien
tggaagccagattttcctctggcat

SEQ ID NO: 1733403 - DNA, 25 bp, Homo sapien
tcattacaccttccttcttttcaat

SEQ ID NO: 1733404 - DNA, 25 bp, Homo sapien
ttttcaatggaagccagattttcct

SEQ ID NO: 1733405 - DNA, 25 bp, Homo sapien
caatggaagccagattttcctctgg

SEQ ID NO: 1733406 - DNA, 25 bp, Homo sapien
ggagcacgggcagatgaatttaaac

SEQ ID NO: 1733407 - DNA, 25 bp, Homo sapien
cagggtaccacagccctgaggttgt

SEQ ID NO: 1733408 - DNA, 25 bp, Homo sapien
gtaccacagccctgaggttgtgaag

SEQ ID NO: 1733409 - DNA, 25 bp, Homo sapien
agggtaccacagccctgaggttgtg

SEQ ID NO: 1733410 - DNA, 25 bp, Homo sapien
gggtaccacagccctgaggttgtga

SEQ ID NO: 1733411 - DNA, 25 bp, Homo sapien
tttcttggtgtgagcaaggtttgca

SEQ ID NO: 1733412 - DNA, 25 bp, Homo sapien
caaggtttgcagttcctgctgcatg

SEQ ID NO: 1733413 - DNA, 25 bp, Homo sapien
cacctttactttcttggtgtgagca

SEQ ID NO: 1733414 - DNA, 25 bp, Homo sapien
ctttactttcttggtgtgagcaagg

SEQ ID NO: 1733415 - DNA, 25 bp, Homo sapien
gcaggcggttttcaattacagttaa

SEQ ID NO: 1733416 - DNA, 25 bp, Homo sapien
gcattggttttcatatggacagcaa

SEQ ID NO: 1733417 - DNA, 25 bp, Homo sapien
taaatggccgcctgcattccacaaa

SEQ ID NO: 1733418 - DNA, 25 bp, Homo sapien
tatggacagcaagcaggcggttttc

SEQ ID NO: 1733419 - DNA, 25 bp, Homo sapien
cctctaattccaaaagagggatgat

SEQ ID NO: 1733420 - DNA, 25 bp, Homo sapien
cacgggcatacctggagtgaatttt

SEQ ID NO: 1733421 - DNA, 25 bp, Homo sapien
aagagggatgatacacgggcatacc

SEQ ID NO: 1733422 - DNA, 25 bp, Homo sapien
atcctctaattccaaaagagggatg

SEQ ID NO: 1733423 - DNA, 25 bp, Homo sapien
tgacttttctctattggcaaagcca

SEQ ID NO: 1733424 - DNA, 25 bp, Homo sapien
gtgacttttctctattggcaaagcc

SEQ ID NO: 1733425 - DNA, 25 bp, Homo sapien
ctgggattaccagcaggtactgaat

SEQ ID NO: 1733426 - DNA, 25 bp, Homo sapien
atcttctacctgacatctgggatta

SEQ ID NO: 1733427 - DNA, 25 bp, Homo sapien
caggtactgaatagctgttgaaatt

SEQ ID NO: 1733428 - DNA, 25 bp, Homo sapien
tctacctgacatctgggattaccag

SEQ ID NO: 1733429 - DNA, 25 bp, Homo sapien
tcttatcagcagacgtgatcaagca

SEQ ID NO: 1733430 - DNA, 25 bp, Homo sapien
taaaaattgtaacatgcctgcaaga

SEQ ID NO: 1733431 - DNA, 25 bp, Homo sapien
caacaaaatccaggataacacagag

SEQ ID NO: 1733432 - DNA, 25 bp, Homo sapien
taaagaatgcatcagaacctcttat

SEQ ID NO: 1733433 - DNA, 25 bp, Homo sapien
gggccacaatcagtgaagaaacacc

SEQ ID NO: 1733434 - DNA, 25 bp, Homo sapien
tgtcctccaatagcatatttgtgat

SEQ ID NO: 1733435 - DNA, 25 bp, Homo sapien
atgtcctccaatagcatatttgtga

SEQ ID NO: 1733436 - DNA, 25 bp, Homo sapien
ttcagaccgcaaattttcattctgg

SEQ ID NO: 1733437 - DNA, 25 bp, Homo sapien
cctctggcattacgaggtagttggg

SEQ ID NO: 1733438 - DNA, 25 bp, Homo sapien
tcctaagccctctggcattacgagg

SEQ ID NO: 1733439 - DNA, 25 bp, Homo sapien
ctgtcctttcagaccgcaaattttc

SEQ ID NO: 1733440 - DNA, 25 bp, Homo sapien
ccagtttgggtttcacactcttctt

SEQ ID NO: 1733441 - DNA, 25 bp, Homo sapien
ttatccaccagtttgggtttcacac

SEQ ID NO: 1733442 - DNA, 25 bp, Homo sapien
atgtcctttcttcagcttgatcaat

SEQ ID NO: 1733443 - DNA, 25 bp, Homo sapien
gaagttcttgtgctgtggttttcag

SEQ ID NO: 1733444 - DNA, 25 bp, Homo sapien
ttagaaaatactcctttagctcaga

SEQ ID NO: 1733445 - DNA, 25 bp, Homo sapien
tatcaaggttcttaacttcctttca

SEQ ID NO: 1733446 - DNA, 25 bp, Homo sapien
atccataggtaaggatcttgcagca

SEQ ID NO: 1733447 - DNA, 25 bp, Homo sapien
tctgccaattaaatacattcccaag

SEQ ID NO: 1733448 - DNA, 25 bp, Homo sapien
gccatgctccattcactagctttgg

SEQ ID NO: 1733449 - DNA, 25 bp, Homo sapien
tgctgcagcggtatgtacctgagtc

SEQ ID NO: 1733450 - DNA, 25 bp, Homo sapien
cctgagtctgactgtctaaggagca

SEQ ID NO: 1733451 - DNA, 25 bp, Homo sapien
cttcacggtttttggtgcgattgcg

SEQ ID NO: 1733452 - DNA, 25 bp, Homo sapien
ggtttttggtgcgattgcggcccat

SEQ ID NO: 1733453 - DNA, 25 bp, Homo sapien
ttgttcctgtggaagttgctaccca

SEQ ID NO: 1733454 - DNA, 25 bp, Homo sapien
gttgctacccacatgatgacccggg

SEQ ID NO: 1733455 - DNA, 25 bp, Homo sapien
cttcttgctggggataatggcgatc

SEQ ID NO: 1733456 - DNA, 25 bp, Homo sapien
gctggggataatggcgatctcctta

SEQ ID NO: 1733457 - DNA, 25 bp, Homo sapien
cttgttgcggagcttcttgctgggg

SEQ ID NO: 1733458 - DNA, 25 bp, Homo sapien
tgcggagcttcttgctggggataat

SEQ ID NO: 1733459 - DNA, 25 bp, Homo sapien
tagcctgatggagatacatctcacc

SEQ ID NO: 1733460 - DNA, 25 bp, Homo sapien
tggagatacatctcaccggacccct

SEQ ID NO: 1733461 - DNA, 25 bp, Homo sapien
agaccacaggatcctaattatctct

SEQ ID NO: 1733462 - DNA, 25 bp, Homo sapien
aatctgcctcatgagatgtgtgaca

SEQ ID NO: 1733463 - DNA, 25 bp, Homo sapien
cttagtgtcaggatccacttcagtg

SEQ ID NO: 1733464 - DNA, 25 bp, Homo sapien
ttaatcctaacatagactgagtgac

SEQ ID NO: 1733465 - DNA, 25 bp, Homo sapien
attaatcctaacatagactgagtga

SEQ ID NO: 1733466 - DNA, 25 bp, Homo sapien
aattaatcctaacatagactgagtg

SEQ ID NO: 1733467 - DNA, 25 bp, Homo sapien
tctgaagatcaaatagtaagctggc

SEQ ID NO: 1733468 - DNA, 25 bp, Homo sapien
ggcatggggaggtactagctttaca

SEQ ID NO: 1733469 - DNA, 25 bp, Homo sapien
taaaccttcatgttgtaggagaaac

SEQ ID NO: 1733470 - DNA, 25 bp, Homo sapien
gccagagagccagtgtatctctgaa

SEQ ID NO: 1733471 - DNA, 25 bp, Homo sapien
gaaataattctcgagtgtcataaga

SEQ ID NO: 1733472 - DNA, 25 bp, Homo sapien
cttacttgaatatgtgtactggtca

SEQ ID NO: 1733473 - DNA, 25 bp, Homo sapien
tattgaaatgcatgtcgtccttact

SEQ ID NO: 1733474 - DNA, 25 bp, Homo sapien
tgcagaaataattctcgagtgtcat

SEQ ID NO: 1733475 - DNA, 25 bp, Homo sapien
gtgacttgcggccatttgaggaact

SEQ ID NO: 1733476 - DNA, 25 bp, Homo sapien
cttgcggccatttgaggaactatga

SEQ ID NO: 1733477 - DNA, 25 bp, Homo sapien
tgctcagtgacttgcggccatttga

SEQ ID NO: 1733478 - DNA, 25 bp, Homo sapien
gcggccatttgaggaactatgatcc

SEQ ID NO: 1733479 - DNA, 25 bp, Homo sapien
ctccaactggttcttcagctgtcaa

SEQ ID NO: 1733480 - DNA, 25 bp, Homo sapien
tccaactggttcttcagctgtcaac

SEQ ID NO: 1733481 - DNA, 25 bp, Homo sapien
cattgaaagagtcaaagagtgcttt

SEQ ID NO: 1733482 - DNA, 25 bp, Homo sapien
cactgagctatatgaaacattgaaa

SEQ ID NO: 1733483 - DNA, 25 bp, Homo sapien
aacattgaaagagtcaaagagtgct

SEQ ID NO: 1733484 - DNA, 25 bp, Homo sapien
attgtcactgagctatatgaaacat

SEQ ID NO: 1733485 - DNA, 25 bp, Homo sapien
tgttttggtgttcataagattctga

SEQ ID NO: 1733486 - DNA, 25 bp, Homo sapien
gcagagaagttggtgcccacctatg

SEQ ID NO: 1733487 - DNA, 25 bp, Homo sapien
gtcctctctggtaatgggaagggca

SEQ ID NO: 1733488 - DNA, 25 bp, Homo sapien
tggtgttcataagattctgatgtat

SEQ ID NO: 1733489 - DNA, 25 bp, Homo sapien
ccaccataacgctttgttgaacttc

SEQ ID NO: 1733490 - DNA, 25 bp, Homo sapien
tcacatccaccataacgctttgttg

SEQ ID NO: 1733491 - DNA, 25 bp, Homo sapien
acctccaatcacatccaccataacg

SEQ ID NO: 1733492 - DNA, 25 bp, Homo sapien
catggcaacatatccaacctccaat

SEQ ID NO: 1733493 - DNA, 25 bp, Homo sapien
tcatgcaggggatgctttctcctct

SEQ ID NO: 1733494 - DNA, 25 bp, Homo sapien
cctcttccttctcatggactctatc

SEQ ID NO: 1733495 - DNA, 25 bp, Homo sapien
catgcaggggatgctttctcctctt

SEQ ID NO: 1733496 - DNA, 25 bp, Homo sapien
tctcctcttccttctcatggactct

SEQ ID NO: 1733497 - DNA, 25 bp, Homo sapien
agtcagtaatataatctctgccacc

SEQ ID NO: 1733498 - DNA, 25 bp, Homo sapien
cagcacacagtcagtaatataatct

SEQ ID NO: 1733499 - DNA, 25 bp, Homo sapien
cacagtcagtaatataatctctgcc

SEQ ID NO: 1733500 - DNA, 25 bp, Homo sapien
gcacacagtcagtaatataatctct

SEQ ID NO: 1733501 - DNA, 25 bp, Homo sapien
gaaatgtgaacagtacaattgcaac

SEQ ID NO: 1733502 - DNA, 25 bp, Homo sapien
taatgcgtgcaattatagtagtcaa

SEQ ID NO: 1733503 - DNA, 25 bp, Homo sapien
ctttggtaatgcgtgcaattatagt

SEQ ID NO: 1733504 - DNA, 25 bp, Homo sapien
tgcgtgcaattatagtagtcaatat

SEQ ID NO: 1733505 - DNA, 25 bp, Homo sapien
gggattcctgtcacacatgcagcct

SEQ ID NO: 1733506 - DNA, 25 bp, Homo sapien
gaatcatatacagggattcctgtca

SEQ ID NO: 1733507 - DNA, 25 bp, Homo sapien
ttaaagagggaatcatatacaggga

SEQ ID NO: 1733508 - DNA, 25 bp, Homo sapien
ggattcctgtcacacatgcagcctc

SEQ ID NO: 1733509 - DNA, 25 bp, Homo sapien
acatctccctcttcccaatcttcaa

SEQ ID NO: 1733510 - DNA, 25 bp, Homo sapien
ctccctcttcccaatcttcaatgct

SEQ ID NO: 1733511 - DNA, 25 bp, Homo sapien
atctccctcttcccaatcttcaatg

SEQ ID NO: 1733512 - DNA, 25 bp, Homo sapien
cctcttcccaatcttcaatgctcat

SEQ ID NO: 1733513 - DNA, 25 bp, Homo sapien
tgctgtcccataagtatatgaataa

SEQ ID NO: 1733514 - DNA, 25 bp, Homo sapien
atgctgtcccataagtatatgaata

SEQ ID NO: 1733515 - DNA, 25 bp, Homo sapien
ccagaattaatccaagaaagtggct

SEQ ID NO: 1733516 - DNA, 25 bp, Homo sapien
aattaatccaagaaagtggcttcct

SEQ ID NO: 1733517 - DNA, 25 bp, Homo sapien
aatacagtctagtgattcctcaaag

SEQ ID NO: 1733518 - DNA, 25 bp, Homo sapien
cacgaacacatggaggaaaacaaca

SEQ ID NO: 1733519 - DNA, 25 bp, Homo sapien
ggtactgagcttaatgtctgggtga

SEQ ID NO: 1733520 - DNA, 25 bp, Homo sapien
tacatgcccaccaataaaagcaaga

SEQ ID NO: 1733521 - DNA, 25 bp, Homo sapien
gcctagtccctcagcgcgttgcctg

SEQ ID NO: 1733522 - DNA, 25 bp, Homo sapien
cttcgggaaggtgcgccagtctcct

SEQ ID NO: 1733523 - DNA, 25 bp, Homo sapien
cgcttcgggaaggtgcgccagtctc

SEQ ID NO: 1733524 - DNA, 25 bp, Homo sapien
tggcaccataggcataatctggaga

SEQ ID NO: 1733525 - DNA, 25 bp, Homo sapien
gaagctccacatcgaagacgagagt

SEQ ID NO: 1733526 - DNA, 25 bp, Homo sapien
aatctggagatatagtcagtttggc

SEQ ID NO: 1733527 - DNA, 25 bp, Homo sapien
agtcagtttggctctctgacccaca

SEQ ID NO: 1733528 - DNA, 25 bp, Homo sapien
aaatattcttgcaaccccctcaaca

SEQ ID NO: 1733529 - DNA, 25 bp, Homo sapien
ctaacgttaacttatcacttgtgct

SEQ ID NO: 1733530 - DNA, 25 bp, Homo sapien
tatcctaacgttaacttatcacttg

SEQ ID NO: 1733531 - DNA, 25 bp, Homo sapien
ttcctatcctaacgttaacttatca

SEQ ID NO: 1733532 - DNA, 25 bp, Homo sapien
gggtgttaagtctacaaacagcacc

SEQ ID NO: 1733533 - DNA, 25 bp, Homo sapien
gcccagggacagatacctgtagtgt

SEQ ID NO: 1733534 - DNA, 25 bp, Homo sapien
caaggatttgtcatgatggctgggc

SEQ ID NO: 1733535 - DNA, 25 bp, Homo sapien
tcaccaaatcactacacaggacagc

SEQ ID NO: 1733536 - DNA, 25 bp, Homo sapien
ccagaacccactgctccgtggaggt

SEQ ID NO: 1733537 - DNA, 25 bp, Homo sapien
gaacccactgctccgtggaggtcgc

SEQ ID NO: 1733538 - DNA, 25 bp, Homo sapien
atccccaccagaacccactgctccg

SEQ ID NO: 1733539 - DNA, 25 bp, Homo sapien
accagaacccactgctccgtggagg

SEQ ID NO: 1733540 - DNA, 25 bp, Homo sapien
tgtaagtcttagagaaaagaagtct

SEQ ID NO: 1733541 - DNA, 25 bp, Homo sapien
atttgtaagtcttagagaaaagaag

SEQ ID NO: 1733542 - DNA, 25 bp, Homo sapien
gagcaaaaggttgagaaatacaact

SEQ ID NO: 1733543 - DNA, 25 bp, Homo sapien
ctgtgtcattaggaattatatttag

SEQ ID NO: 1733544 - DNA, 25 bp, Homo sapien
caacttcttcaactgtgtcattagg

SEQ ID NO: 1733545 - DNA, 25 bp, Homo sapien
ggcctctaatatggcaaagcctaag

SEQ ID NO: 1733546 - DNA, 25 bp, Homo sapien
tgccaaaacgatataaagtgagctt

SEQ ID NO: 1733547 - DNA, 25 bp, Homo sapien
tattgtattagcttttgccaaaacg

SEQ ID NO: 1733548 - DNA, 25 bp, Homo sapien
tggcaaactcaacttttggaggcct

SEQ ID NO: 1733549 - DNA, 25 bp, Homo sapien
tcagtgtccccaggtaaactgtgct

SEQ ID NO: 1733550 - DNA, 25 bp, Homo sapien
atcattgtggcatcaagatcgagga

SEQ ID NO: 1733551 - DNA, 25 bp, Homo sapien
gcatcaagatcgaggatgggctgca

SEQ ID NO: 1733552 - DNA, 25 bp, Homo sapien
caagatcgaggatgggctgcaagat

SEQ ID NO: 1733553 - DNA, 25 bp, Homo sapien
catttgtacatagggggataaattt

SEQ ID NO: 1733554 - DNA, 25 bp, Homo sapien
gaaattggctgagaacctgctacac

SEQ ID NO: 1733555 - DNA, 25 bp, Homo sapien
tttcaaacataagctagagggcagc

SEQ ID NO: 1733556 - DNA, 25 bp, Homo sapien
tattgggcatatccaagagactact

SEQ ID NO: 1733557 - DNA, 25 bp, Homo sapien
gaaaatagccaacctatatggaggc

SEQ ID NO: 1733558 - DNA, 25 bp, Homo sapien
gatcagcccttcatgcaggaacttg

SEQ ID NO: 1733559 - DNA, 25 bp, Homo sapien
gataatgcatttaccctcagaacag

SEQ ID NO: 1733560 - DNA, 25 bp, Homo sapien
actgagcagctcacgatcactggga

SEQ ID NO: 1733561 - DNA, 25 bp, Homo sapien
cgaaagcgttattccaaggacagga

SEQ ID NO: 1733562 - DNA, 25 bp, Homo sapien
ctgaacatacatgacgtatcttgga

SEQ ID NO: 1733563 - DNA, 25 bp, Homo sapien
tactttctcgtatgctactttcaca

SEQ ID NO: 1733564 - DNA, 25 bp, Homo sapien
tattataatgaaggtggcactgaac

SEQ ID NO: 1733565 - DNA, 25 bp, Homo sapien
gaaaagaattgccacgtgtatttaa

SEQ ID NO: 1733566 - DNA, 25 bp, Homo sapien
gtccaggattccaggtgatacagct

SEQ ID NO: 1733567 - DNA, 25 bp, Homo sapien
tcccatgaaagtccttaaaagccat

SEQ ID NO: 1733568 - DNA, 25 bp, Homo sapien
tcccacaattttagtccaggattcc

SEQ ID NO: 1733569 - DNA, 25 bp, Homo sapien
ggtgatacagctcccatgaaagtcc

SEQ ID NO: 1733570 - DNA, 25 bp, Homo sapien
aaaagtgttgagatgaataatgaag

SEQ ID NO: 1733571 - DNA, 25 bp, Homo sapien
tgagatgaataatgaagaggacctt

SEQ ID NO: 1733572 - DNA, 25 bp, Homo sapien
tctttgttgtaggtacacatataaa

SEQ ID NO: 1733573 - DNA, 25 bp, Homo sapien
gatattgtggtttctaacgctgaac

SEQ ID NO: 1733574 - DNA, 25 bp, Homo sapien
cagaattaatttggaggccagaggg

SEQ ID NO: 1733575 - DNA, 25 bp, Homo sapien
ttctgtgttcattgtgcacagtggg

SEQ ID NO: 1733576 - DNA, 25 bp, Homo sapien
gatttgtcacagactgacatcggag

SEQ ID NO: 1733577 - DNA, 25 bp, Homo sapien
gggcagcctgtagatgattctgtgt

SEQ ID NO: 1733578 - DNA, 25 bp, Homo sapien
taggtccaaattcaagatctggttg

SEQ ID NO: 1733579 - DNA, 25 bp, Homo sapien
aaaacagccatattcaggatgcagt

SEQ ID NO: 1733580 - DNA, 25 bp, Homo sapien
gaggttcaagagtccaaaacagcca

SEQ ID NO: 1733581 - DNA, 25 bp, Homo sapien
tactaggataggagatagaatccct

SEQ ID NO: 1733582 - DNA, 25 bp, Homo sapien
aacaacatgttggttgaccctgcgg

SEQ ID NO: 1733583 - DNA, 25 bp, Homo sapien
gactcgcccatctatactatctatc

SEQ ID NO: 1733584 - DNA, 25 bp, Homo sapien
gctctggggtcccaacaacatgttg

SEQ ID NO: 1733585 - DNA, 25 bp, Homo sapien
ttaccttctttaggcacccaggctc

SEQ ID NO: 1733586 - DNA, 25 bp, Homo sapien
taaagattggaagacaattggtcat

SEQ ID NO: 1733587 - DNA, 25 bp, Homo sapien
tgtaaccataaagatgctttaaaga

SEQ ID NO: 1733588 - DNA, 25 bp, Homo sapien
aagatgctttaaagattggaagaca

SEQ ID NO: 1733589 - DNA, 25 bp, Homo sapien
ccataaagatgctttaaagattgga

SEQ ID NO: 1733590 - DNA, 25 bp, Homo sapien
cccttctttaagagtgatctgatgg

SEQ ID NO: 1733591 - DNA, 25 bp, Homo sapien
gatctgatggcactggatgtctgct

SEQ ID NO: 1733592 - DNA, 25 bp, Homo sapien
ctgtggatgctacgctgaggccctt

SEQ ID NO: 1733593 - DNA, 25 bp, Homo sapien
tccctgaggaagtagtgaccagctg

SEQ ID NO: 1733594 - DNA, 25 bp, Homo sapien
tagtgctgctctcatttacagaagg

SEQ ID NO: 1733595 - DNA, 25 bp, Homo sapien
tgctgggtaggtaggtttccgcctc

SEQ ID NO: 1733596 - DNA, 25 bp, Homo sapien
cctccggaggcaatttgaagttgag

SEQ ID NO: 1733597 - DNA, 25 bp, Homo sapien
ttagtccacatgatagcagtgatgc

SEQ ID NO: 1733598 - DNA, 25 bp, Homo sapien
gtggcggaggtttccgccctcgcta

SEQ ID NO: 1733599 - DNA, 25 bp, Homo sapien
cgccctcgctatctgcgttggtcat

SEQ ID NO: 1733600 - DNA, 25 bp, Homo sapien
cagctggtggcggaggtttccgccc

SEQ ID NO: 1733601 - DNA, 25 bp, Homo sapien
gaggtttccgccctcgctatctgcg

SEQ ID NO: 1733602 - DNA, 25 bp, Homo sapien
caagacagatccagtgtggtagtct

SEQ ID NO: 1733603 - DNA, 25 bp, Homo sapien
gatccagtgtggtagtctttggaag

SEQ ID NO: 1733604 - DNA, 25 bp, Homo sapien
acaagacagatccagtgtggtagtc

SEQ ID NO: 1733605 - DNA, 25 bp, Homo sapien
gacagatccagtgtggtagtctttg

SEQ ID NO: 1733606 - DNA, 25 bp, Homo sapien
agaaatccgacgggagaatagtcat

SEQ ID NO: 1733607 - DNA, 25 bp, Homo sapien
ttctaaggtctagcttcgccaggtg

SEQ ID NO: 1733608 - DNA, 25 bp, Homo sapien
tgggtgctgcggcttgttctttcta

SEQ ID NO: 1733609 - DNA, 25 bp, Homo sapien
tgttctttctaaggtctagcttcgc

SEQ ID NO: 1733610 - DNA, 25 bp, Homo sapien
ccaggccgggatccagaggttattc

SEQ ID NO: 1733611 - DNA, 25 bp, Homo sapien
caggccgggatccagaggttattct

SEQ ID NO: 1733612 - DNA, 25 bp, Homo sapien
cagaggttattcttcaggtccagcc

SEQ ID NO: 1733613 - DNA, 25 bp, Homo sapien
ccagaggttattcttcaggtccagc

SEQ ID NO: 1733614 - DNA, 25 bp, Homo sapien
gatgccttgtttgcatgctgtttcc

SEQ ID NO: 1733615 - DNA, 25 bp, Homo sapien
tgctgcctctcccacttgtggtctg

SEQ ID NO: 1733616 - DNA, 25 bp, Homo sapien
tctcgttctacttccaaccctgctg

SEQ ID NO: 1733617 - DNA, 25 bp, Homo sapien
gtctgtacagccttcatgtgttgtg

SEQ ID NO: 1733618 - DNA, 25 bp, Homo sapien
tccttggtaggtatgatctgctccc

SEQ ID NO: 1733619 - DNA, 25 bp, Homo sapien
ttccttggtaggtatgatctgctcc

SEQ ID NO: 1733620 - DNA, 25 bp, Homo sapien
cttggtaggtatgatctgctcccgc

SEQ ID NO: 1733621 - DNA, 25 bp, Homo sapien
ccttggtaggtatgatctgctcccg

SEQ ID NO: 1733622 - DNA, 25 bp, Homo sapien
tcagcacagcccagaaacgagtgtg

SEQ ID NO: 1733623 - DNA, 25 bp, Homo sapien
gcccagaaacgagtgtgcttccggg

SEQ ID NO: 1733624 - DNA, 25 bp, Homo sapien
cagcccagaaacgagtgtgcttccg

SEQ ID NO: 1733625 - DNA, 25 bp, Homo sapien
cacagcccagaaacgagtgtgcttc

SEQ ID NO: 1733626 - DNA, 25 bp, Homo sapien
cagcgcccccgctgcacaaagcagc

SEQ ID NO: 1733627 - DNA, 25 bp, Homo sapien
ctgacaagcaaccagcgcccccgct

SEQ ID NO: 1733628 - DNA, 25 bp, Homo sapien
ggggcagctgctgtagctgtgtcac

SEQ ID NO: 1733629 - DNA, 25 bp, Homo sapien
cagcaagaccaagaacccattattc

SEQ ID NO: 1733630 - DNA, 25 bp, Homo sapien
gcaagaccaagaacccattattccg

SEQ ID NO: 1733631 - DNA, 25 bp, Homo sapien
gtcagcaagaccaagaacccattat

SEQ ID NO: 1733632 - DNA, 25 bp, Homo sapien
caagaccaagaacccattattccgg

SEQ ID NO: 1733633 - DNA, 25 bp, Homo sapien
ggtgcagaccctggaccacattgtc

SEQ ID NO: 1733634 - DNA, 25 bp, Homo sapien
tggtgcagaccctggaccacattgt

SEQ ID NO: 1733635 - DNA, 25 bp, Homo sapien
gtggtgcagaccctggaccacattg

SEQ ID NO: 1733636 - DNA, 25 bp, Homo sapien
tggtggtgcagaccctggaccacat

SEQ ID NO: 1733637 - DNA, 25 bp, Homo sapien
ccatttgatgatggcaggtaggtct

SEQ ID NO: 1733638 - DNA, 25 bp, Homo sapien
gccatttgatgatggcaggtaggtc

SEQ ID NO: 1733639 - DNA, 25 bp, Homo sapien
cagccatttgatgatggcaggtagg

SEQ ID NO: 1733640 - DNA, 25 bp, Homo sapien
gcagccatttgatgatggcaggtag

SEQ ID NO: 1733641 - DNA, 25 bp, Homo sapien
tcatgtacactttgtaggccattgt

SEQ ID NO: 1733642 - DNA, 25 bp, Homo sapien
acacccggctgatcatgtacacttt

SEQ ID NO: 1733643 - DNA, 25 bp, Homo sapien
gatcactatggctgtgttatgaatg

SEQ ID NO: 1733644 - DNA, 25 bp, Homo sapien
cttcagaaggatcactatggctgtg

SEQ ID NO: 1733645 - DNA, 25 bp, Homo sapien
gcttcgtagactaggacgagacccc

SEQ ID NO: 1733646 - DNA, 25 bp, Homo sapien
tatgtgacgaaaaacatttttgaag

SEQ ID NO: 1733647 - DNA, 25 bp, Homo sapien
gtgatttatgtgacgaaaaacattt

SEQ ID NO: 1733648 - DNA, 25 bp, Homo sapien
catttttgaagcttcgtagactagg

SEQ ID NO: 1733649 - DNA, 25 bp, Homo sapien
caaaaggaaggaacacaggttgtga

SEQ ID NO: 1733650 - DNA, 25 bp, Homo sapien
gaacacaggttgtgaatgcctagca

SEQ ID NO: 1733651 - DNA, 25 bp, Homo sapien
ggaaggaacacaggttgtgaatgcc

SEQ ID NO: 1733652 - DNA, 25 bp, Homo sapien
aggaacacaggttgtgaatgcctag

SEQ ID NO: 1733653 - DNA, 25 bp, Homo sapien
tggtcagccaggtaaccattgtgca

SEQ ID NO: 1733654 - DNA, 25 bp, Homo sapien
taaccattgtgcacctggaggccag

SEQ ID NO: 1733655 - DNA, 25 bp, Homo sapien
cttgttgcagctctggtcagccagg

SEQ ID NO: 1733656 - DNA, 25 bp, Homo sapien
gcacataccccttgttgcagctctg

SEQ ID NO: 1733657 - DNA, 25 bp, Homo sapien
tgacacaaattaccggacaatggac

SEQ ID NO: 1733658 - DNA, 25 bp, Homo sapien
tcatactatgcagggtattcttccc

SEQ ID NO: 1733659 - DNA, 25 bp, Homo sapien
gacaatggactggagactgcttcaa

SEQ ID NO: 1733660 - DNA, 25 bp, Homo sapien
taccaatgtagagcatgacacaaat

SEQ ID NO: 1733661 - DNA, 25 bp, Homo sapien
cactgtaactagttgagaggagccc

SEQ ID NO: 1733662 - DNA, 25 bp, Homo sapien
gtaactagttgagaggagccccaga

SEQ ID NO: 1733663 - DNA, 25 bp, Homo sapien
tgtaactagttgagaggagccccag

SEQ ID NO: 1733664 - DNA, 25 bp, Homo sapien
ctgtaactagttgagaggagcccca

SEQ ID NO: 1733665 - DNA, 25 bp, Homo sapien
tgcatatagttctcaaagcagtgat

SEQ ID NO: 1733666 - DNA, 25 bp, Homo sapien
ggattgcatatagttctcaaagcag

SEQ ID NO: 1733667 - DNA, 25 bp, Homo sapien
catccatggattgcatatagttctc

SEQ ID NO: 1733668 - DNA, 25 bp, Homo sapien
catggattgcatatagttctcaaag

SEQ ID NO: 1733669 - DNA, 25 bp, Homo sapien
tgataacatgacaagttttgggttt

SEQ ID NO: 1733670 - DNA, 25 bp, Homo sapien
ccactacctttgataacatgacaag

SEQ ID NO: 1733671 - DNA, 25 bp, Homo sapien
tgtgtccactacctttgataacatg

SEQ ID NO: 1733672 - DNA, 25 bp, Homo sapien
ctacctttgataacatgacaagttt

SEQ ID NO: 1733673 - DNA, 25 bp, Homo sapien
cgacagaacaatgtaacagggagaa

SEQ ID NO: 1733674 - DNA, 25 bp, Homo sapien
aaacattgcttcactgtcctgtcct

SEQ ID NO: 1733675 - DNA, 25 bp, Homo sapien
aatgtaacagggagaaaccacatga

SEQ ID NO: 1733676 - DNA, 25 bp, Homo sapien
gaacaatgtaacagggagaaaccac

SEQ ID NO: 1733677 - DNA, 25 bp, Homo sapien
tgaactcctgtaaatgagcacttgt

SEQ ID NO: 1733678 - DNA, 25 bp, Homo sapien
tatagtcttccctgcgttaatcaac

SEQ ID NO: 1733679 - DNA, 25 bp, Homo sapien
cataaagttcctcaattaattcctg

SEQ ID NO: 1733680 - DNA, 25 bp, Homo sapien
tcattccctacccacatgaactcct

SEQ ID NO: 1733681 - DNA, 25 bp, Homo sapien
ctgcagttatgaagatttttatgca

SEQ ID NO: 1733682 - DNA, 25 bp, Homo sapien
tgcagttatgaagatttttatgcac

SEQ ID NO: 1733683 - DNA, 25 bp, Homo sapien
taacgacataaaacacattatcagg

SEQ ID NO: 1733684 - DNA, 25 bp, Homo sapien
ctacagcagaaggcttttaacgaca

SEQ ID NO: 1733685 - DNA, 25 bp, Homo sapien
tatttggagattgcgctgaactgga

SEQ ID NO: 1733686 - DNA, 25 bp, Homo sapien
tgttccataggtgatgtacagagaa

SEQ ID NO: 1733687 - DNA, 25 bp, Homo sapien
tgtttaagagtagcttttcagattg

SEQ ID NO: 1733688 - DNA, 25 bp, Homo sapien
cagttcattctgcataaggatacca

SEQ ID NO: 1733689 - DNA, 25 bp, Homo sapien
tcagattgatgattatttcagttca

SEQ ID NO: 1733690 - DNA, 25 bp, Homo sapien
ttcattctgcataaggataccagac

SEQ ID NO: 1733691 - DNA, 25 bp, Homo sapien
gactccctgacctgattgttaggct

SEQ ID NO: 1733692 - DNA, 25 bp, Homo sapien
ccagtgggtttctttcataaacaca

SEQ ID NO: 1733693 - DNA, 25 bp, Homo sapien
aggcttgtggtcagaatcccagcac

SEQ ID NO: 1733694 - DNA, 25 bp, Homo sapien
tcccatagccatgctcttggctggg

SEQ ID NO: 1733695 - DNA, 25 bp, Homo sapien
tagttctgtattcaaatgtcctcag

SEQ ID NO: 1733696 - DNA, 25 bp, Homo sapien
cagtggagaaatgtatcaggtttac

SEQ ID NO: 1733697 - DNA, 25 bp, Homo sapien
tgttattaccttcactcagtggaga

SEQ ID NO: 1733698 - DNA, 25 bp, Homo sapien
taacttagagtgaacctggatccca

SEQ ID NO: 1733699 - DNA, 25 bp, Homo sapien
cttatgttacaaaaagactatgctg

SEQ ID NO: 1733700 - DNA, 25 bp, Homo sapien
tcactaggtctggaatagggcctga

SEQ ID NO: 1733701 - DNA, 25 bp, Homo sapien
gagggttagttttggcactcagcca

SEQ ID NO: 1733702 - DNA, 25 bp, Homo sapien
gaaaaggtacgctctaaggcaatgg

SEQ ID NO: 1733703 - DNA, 25 bp, Homo sapien
ggcaatggttctctactgggagcgt

SEQ ID NO: 1733704 - DNA, 25 bp, Homo sapien
aacttctctctcactacggccgtgg

SEQ ID NO: 1733705 - DNA, 25 bp, Homo sapien
ggtgtcctcattgtgccctacgggt

SEQ ID NO: 1733706 - DNA, 25 bp, Homo sapien
ggttctgatctgctgacaagggtgt

SEQ ID NO: 1733707 - DNA, 25 bp, Homo sapien
gattcttggcggttgaggtgtcctc

SEQ ID NO: 1733708 - DNA, 25 bp, Homo sapien
aaacaccaaggctcatattccaaag

SEQ ID NO: 1733709 - DNA, 25 bp, Homo sapien
tggtggtgattaggcacaaccttgc

SEQ ID NO: 1733710 - DNA, 25 bp, Homo sapien
gaatggaaatccctgtaacaatgtt

SEQ ID NO: 1733711 - DNA, 25 bp, Homo sapien
gaacaacctgtcatttccctactgg

SEQ ID NO: 1733712 - DNA, 25 bp, Homo sapien
tggttgtaagctggatggaaatgac

SEQ ID NO: 1733713 - DNA, 25 bp, Homo sapien
tggaaatgacatagtacagagggaa

SEQ ID NO: 1733714 - DNA, 25 bp, Homo sapien
taaggaggttggctttcagaaggca

SEQ ID NO: 1733715 - DNA, 25 bp, Homo sapien
gattgcttctaattgcttggtgaaa

SEQ ID NO: 1733716 - DNA, 25 bp, Homo sapien
tgctagagacaagtagacacaaata

SEQ ID NO: 1733717 - DNA, 25 bp, Homo sapien
gaaagctagaatgaatctcagagta

SEQ ID NO: 1733718 - DNA, 25 bp, Homo sapien
tggattgaattttgagcacgtctaa

SEQ ID NO: 1733719 - DNA, 25 bp, Homo sapien
caggccttattgagaaatgacttgt

SEQ ID NO: 1733720 - DNA, 25 bp, Homo sapien
agagtcgtctgaagaacgcttcaac

SEQ ID NO: 1733721 - DNA, 25 bp, Homo sapien
caacctttgtagcttcaccctcagc

SEQ ID NO: 1733722 - DNA, 25 bp, Homo sapien
gcttcaccctcaggtagagtcgtct

SEQ ID NO: 1733723 - DNA, 25 bp, Homo sapien
agagtcgtctgaagaacgcttcaat

SEQ ID NO: 1733724 - DNA, 25 bp, Homo sapien
accggttgatgaatggctaagcgcc

SEQ ID NO: 1733725 - DNA, 25 bp, Homo sapien
ttatgtcgcaagaccgctgtacccg

SEQ ID NO: 1733726 - DNA, 25 bp, Homo sapien
cacatgaggagactcgaagtttgcc

SEQ ID NO: 1733727 - DNA, 25 bp, Homo sapien
taattaaaacggtccaggagtgcac

SEQ ID NO: 1733728 - DNA, 25 bp, Homo sapien
aatcgcggcctggaaccgcgggcca

SEQ ID NO: 1733729 - DNA, 25 bp, Homo sapien
aggagccgacaggcgggggcggagg

SEQ ID NO: 1733730 - DNA, 25 bp, Homo sapien
ccaatcgcggcctggaaccgcgggc

SEQ ID NO: 1733731 - DNA, 25 bp, Homo sapien
atcgcggcctggaaccgcgggccag

SEQ ID NO: 1733732 - DNA, 25 bp, Homo sapien
gattgtggcctaatcatacagccgg

SEQ ID NO: 1733733 - DNA, 25 bp, Homo sapien
tatagccggcgcgacgtgcaaccct

SEQ ID NO: 1733734 - DNA, 25 bp, Homo sapien
aaggagccaatacacgcgccgaggc

SEQ ID NO: 1733735 - DNA, 25 bp, Homo sapien
gggcaccagactctaccatgcagtg

SEQ ID NO: 1733736 - DNA, 25 bp, Homo sapien
acgcccgcccggatctggaggcgaa

SEQ ID NO: 1733737 - DNA, 25 bp, Homo sapien
agctcgcggaatgccccagagggcc

SEQ ID NO: 1733738 - DNA, 25 bp, Homo sapien
tggaaccagatcgttaccacccgtg

SEQ ID NO: 1733739 - DNA, 25 bp, Homo sapien
cccggccgtcgagcacaagagtgta

SEQ ID NO: 1733740 - DNA, 25 bp, Homo sapien
gtgaaatgaacctcctaacaagaag

SEQ ID NO: 1733741 - DNA, 25 bp, Homo sapien
tctgcatagaggtcgtgctgtgcct

SEQ ID NO: 1733742 - DNA, 25 bp, Homo sapien
tgtccaggataaccactcttatggg

SEQ ID NO: 1733743 - DNA, 25 bp, Homo sapien
tgaggtttaccccatccaggtcaga

SEQ ID NO: 1733744 - DNA, 25 bp, Homo sapien
caggagctgggcggttcattcgagc

SEQ ID NO: 1733745 - DNA, 25 bp, Homo sapien
ggagctgggcggttcattcgagcca

SEQ ID NO: 1733746 - DNA, 25 bp, Homo sapien
aggagctgggcggttcattcgagcc

SEQ ID NO: 1733747 - DNA, 25 bp, Homo sapien
gagctgggcggttcattcgagccat

SEQ ID NO: 1733748 - DNA, 25 bp, Homo sapien
ttttgttagctataagtcccactat

SEQ ID NO: 1733749 - DNA, 25 bp, Homo sapien
gctataagtcccactattatattgc

SEQ ID NO: 1733750 - DNA, 25 bp, Homo sapien
taagtcccactattatattgcaatc

SEQ ID NO: 1733751 - DNA, 25 bp, Homo sapien
tattgcaatcaatttaagctactaa

SEQ ID NO: 1733752 - DNA, 25 bp, Homo sapien
tctgagaggcctatttgctatttct

SEQ ID NO: 1733753 - DNA, 25 bp, Homo sapien
tactgtccacataccaattcaagca

SEQ ID NO: 1733754 - DNA, 25 bp, Homo sapien
ggctacatagctaccattaggaagg

SEQ ID NO: 1733755 - DNA, 25 bp, Homo sapien
tgcacatcccgatatattattcagc

SEQ ID NO: 1733756 - DNA, 25 bp, Homo sapien
cagtaaaaaagcccacataccattt

SEQ ID NO: 1733757 - DNA, 25 bp, Homo sapien
attgaatgaagtcttaactacagta

SEQ ID NO: 1733758 - DNA, 25 bp, Homo sapien
gaatgaagtcttaactacagtaaaa

SEQ ID NO: 1733759 - DNA, 25 bp, Homo sapien
acagtaaaaaagcccacataccatt

SEQ ID NO: 1733760 - DNA, 25 bp, Homo sapien
cactgaagttgtttacagtcatggt

SEQ ID NO: 1733761 - DNA, 25 bp, Homo sapien
taataccggattgggatgaaacatt

SEQ ID NO: 1733762 - DNA, 25 bp, Homo sapien
taagtatgctggttaacagaagatc

SEQ ID NO: 1733763 - DNA, 25 bp, Homo sapien
gggctagcagcaatgcagacaaagg

SEQ ID NO: 1733764 - DNA, 25 bp, Homo sapien
tccacaagagtagtgtcataagttg

SEQ ID NO: 1733765 - DNA, 25 bp, Homo sapien
gagtagtgtcataagttgcttcaca

SEQ ID NO: 1733766 - DNA, 25 bp, Homo sapien
actattgtggtaactccatacttct

SEQ ID NO: 1733767 - DNA, 25 bp, Homo sapien
acatactcttactattgtggtaact

SEQ ID NO: 1733768 - DNA, 25 bp, Homo sapien
tcttattaaaccctgttgtctacca

SEQ ID NO: 1733769 - DNA, 25 bp, Homo sapien
gcaccataaacccataagaactgtt

SEQ ID NO: 1733770 - DNA, 25 bp, Homo sapien
taccaaatgtgactaaatgctcaat

SEQ ID NO: 1733771 - DNA, 25 bp, Homo sapien
taaacttttgtagcacagcaccata

SEQ ID NO: 1733772 - DNA, 25 bp, Homo sapien
tttcacaagacttaaccagtcatca

SEQ ID NO: 1733773 - DNA, 25 bp, Homo sapien
ttttcacaagacttaaccagtcatc

SEQ ID NO: 1733774 - DNA, 25 bp, Homo sapien
ttcacaagacttaaccagtcatcaa

SEQ ID NO: 1733775 - DNA, 25 bp, Homo sapien
gaagtattatctaccacccttccta

SEQ ID NO: 1733776 - DNA, 25 bp, Homo sapien
agtaatacctatgacaaatgttgac

SEQ ID NO: 1733777 - DNA, 25 bp, Homo sapien
tccccaactcagaagtattatctac

SEQ ID NO: 1733778 - DNA, 25 bp, Homo sapien
gatttttacctagaatcaaattgat

SEQ ID NO: 1733779 - DNA, 25 bp, Homo sapien
tgctagggcaacaagtactggagct

SEQ ID NO: 1733780 - DNA, 25 bp, Homo sapien
cagggaagatgactacaaaagccac

SEQ ID NO: 1733781 - DNA, 25 bp, Homo sapien
caaaggcatgttctacagcactcaa

SEQ ID NO: 1733782 - DNA, 25 bp, Homo sapien
tattggttacaacagtcgactcaca

SEQ ID NO: 1733783 - DNA, 25 bp, Homo sapien
taattaggctgtgacctgatgcaga

SEQ ID NO: 1733784 - DNA, 25 bp, Homo sapien
gcaacagttgtttctatgaccgttg

SEQ ID NO: 1733785 - DNA, 25 bp, Homo sapien
tctatgaccgttggaatctttgaaa

SEQ ID NO: 1733786 - DNA, 25 bp, Homo sapien
ccgttggaatctttgaaacgcagcc

SEQ ID NO: 1733787 - DNA, 25 bp, Homo sapien
acagttgtttctatgaccgttggaa

SEQ ID NO: 1733788 - DNA, 25 bp, Homo sapien
tgagcaggcaaataaccatgtaggc

SEQ ID NO: 1733789 - DNA, 25 bp, Homo sapien
gcacattttatatgctgacagcaag

SEQ ID NO: 1733790 - DNA, 25 bp, Homo sapien
gcaaacctgacgtatattggtatga

SEQ ID NO: 1733791 - DNA, 25 bp, Homo sapien
cagcacaaagtgagatacatggaaa

SEQ ID NO: 1733792 - DNA, 25 bp, Homo sapien
tattaagttacacagctcaaaaggc

SEQ ID NO: 1733793 - DNA, 25 bp, Homo sapien
tatttagatgtttcagctctcgcac

SEQ ID NO: 1733794 - DNA, 25 bp, Homo sapien
tttttacaagctggtgaacactgac

SEQ ID NO: 1733795 - DNA, 25 bp, Homo sapien
cctccctgttaagttgcacctcaga

SEQ ID NO: 1733796 - DNA, 25 bp, Homo sapien
tatgttctcaagactaggctgcatt

SEQ ID NO: 1733797 - DNA, 25 bp, Homo sapien
tctctcaataaacgcaaatgctgtt

SEQ ID NO: 1733798 - DNA, 25 bp, Homo sapien
cacaaggtggagtatcactttttac

SEQ ID NO: 1733799 - DNA, 25 bp, Homo sapien
tgaggctcagaagttgcacaaaacc

SEQ ID NO: 1733800 - DNA, 25 bp, Homo sapien
tagccaagttgagggactacatcat

SEQ ID NO: 1733801 - DNA, 25 bp, Homo sapien
taatcatggcaacgggtcgggtact

SEQ ID NO: 1733802 - DNA, 25 bp, Homo sapien
tcattggtgaccaaaatctggtgac

SEQ ID NO: 1733803 - DNA, 25 bp, Homo sapien
tatagacaagcctaggtagctagcc

SEQ ID NO: 1733804 - DNA, 25 bp, Homo sapien
taatttaaggaagcaagaatgtaga

SEQ ID NO: 1733805 - DNA, 25 bp, Homo sapien
tgtatggcagacactacttcatgta

SEQ ID NO: 1733806 - DNA, 25 bp, Homo sapien
taacttcattgtttacatgtaaaag

SEQ ID NO: 1733807 - DNA, 25 bp, Homo sapien
aattttcaattcaggtgtgaggcac

SEQ ID NO: 1733808 - DNA, 25 bp, Homo sapien
ttccaagattccacttaggctggtt

SEQ ID NO: 1733809 - DNA, 25 bp, Homo sapien
taacacatatcactggtttaattca

SEQ ID NO: 1733810 - DNA, 25 bp, Homo sapien
cacatatcactggtttaattcattg

SEQ ID NO: 1733811 - DNA, 25 bp, Homo sapien
caagattccacttaggctggttacc

SEQ ID NO: 1733812 - DNA, 25 bp, Homo sapien
atttattaactggttactgcggcaa

SEQ ID NO: 1733813 - DNA, 25 bp, Homo sapien
tggtagctatcaatttattaactgg

SEQ ID NO: 1733814 - DNA, 25 bp, Homo sapien
taactggttactgcggcaatatata

SEQ ID NO: 1733815 - DNA, 25 bp, Homo sapien
gttactgcggcaatatatataatta

SEQ ID NO: 1733816 - DNA, 25 bp, Homo sapien
cagtaaataatgtctaagttagccc

SEQ ID NO: 1733817 - DNA, 25 bp, Homo sapien
gtttgccaaacttattcatgagacc

SEQ ID NO: 1733818 - DNA, 25 bp, Homo sapien
gaacaatctgtcttcttccgggaca

SEQ ID NO: 1733819 - DNA, 25 bp, Homo sapien
tccgggacactgattgatacaatgg

SEQ ID NO: 1733820 - DNA, 25 bp, Homo sapien
caatgaggcaaggaccgttaggcgc

SEQ ID NO: 1733821 - DNA, 25 bp, Homo sapien
tactcggtgtttggctgagctcatg

SEQ ID NO: 1733822 - DNA, 25 bp, Homo sapien
cacatgggcctttccatagggtgct

SEQ ID NO: 1733823 - DNA, 25 bp, Homo sapien
ttagttaacagcaagatgtggcagc

SEQ ID NO: 1733824 - DNA, 25 bp, Homo sapien
agatctaagagttatccagctacag

SEQ ID NO: 1733825 - DNA, 25 bp, Homo sapien
tggagaggggccgtgtcacgtgacc

SEQ ID NO: 1733826 - DNA, 25 bp, Homo sapien
tggggacggtgcgacggcgcgagac

SEQ ID NO: 1733827 - DNA, 25 bp, Homo sapien
tattcttggcttccgcgccgccctc

SEQ ID NO: 1733828 - DNA, 25 bp, Homo sapien
gccgccctcctaatcctcgttgcag

SEQ ID NO: 1733829 - DNA, 25 bp, Homo sapien
gccctgagcccgaaggtcgcttgcc

SEQ ID NO: 1733830 - DNA, 25 bp, Homo sapien
gggtacgcgcaggacgtcggcgtcg

SEQ ID NO: 1733831 - DNA, 25 bp, Homo sapien
agcgctaccactggcagcaagagga

SEQ ID NO: 1733832 - DNA, 25 bp, Homo sapien
gccagacgagcgctaccactggcag

SEQ ID NO: 1733833 - DNA, 25 bp, Homo sapien
gtcggcgtcgctgccacagcctctt

SEQ ID NO: 1733834 - DNA, 25 bp, Homo sapien
ttatcggaaggcaagagtctaggct

SEQ ID NO: 1733835 - DNA, 25 bp, Homo sapien
caaaagcgcgcggtaactggaggat

SEQ ID NO: 1733836 - DNA, 25 bp, Homo sapien
caaactaagcaaaaggagtccacag

SEQ ID NO: 1733837 - DNA, 25 bp, Homo sapien
cacagtttgagtcccgggcacaaaa

SEQ ID NO: 1733838 - DNA, 25 bp, Homo sapien
taaaataagcaatttcatcaggcat

SEQ ID NO: 1733839 - DNA, 25 bp, Homo sapien
catcgtttaaaataagcaatttcat

SEQ ID NO: 1733840 - DNA, 25 bp, Homo sapien
tttaaaataagcaatttcatcaggc

SEQ ID NO: 1733841 - DNA, 25 bp, Homo sapien
cgtttaaaataagcaatttcatcag

SEQ ID NO: 1733842 - DNA, 25 bp, Homo sapien
ccaagatttttgagattagctccaa

SEQ ID NO: 1733843 - DNA, 25 bp, Homo sapien
ggaagaatttcagatacatgctaac

SEQ ID NO: 1733844 - DNA, 25 bp, Homo sapien
tgattaacctataacatcctgggct

SEQ ID NO: 1733845 - DNA, 25 bp, Homo sapien
attgtacctacattgctcagcaaag

SEQ ID NO: 1733846 - DNA, 25 bp, Homo sapien
tagaacgaatctttactaaataatg

SEQ ID NO: 1733847 - DNA, 25 bp, Homo sapien
tggaaatgtagaacgaatctttact

SEQ ID NO: 1733848 - DNA, 25 bp, Homo sapien
acatttggaaatgtagaacgaatct

SEQ ID NO: 1733849 - DNA, 25 bp, Homo sapien
gaaatgtagaacgaatctttactaa

SEQ ID NO: 1733850 - DNA, 25 bp, Homo sapien
gaagacttctgtgtgtctttcagcc

SEQ ID NO: 1733851 - DNA, 25 bp, Homo sapien
atgattaaatgtatcaactatatcc

SEQ ID NO: 1733852 - DNA, 25 bp, Homo sapien
ctagaaatagggcatcatctaagtg

SEQ ID NO: 1733853 - DNA, 25 bp, Homo sapien
gggcatcatctaagtgttcagtagg

SEQ ID NO: 1733854 - DNA, 25 bp, Homo sapien
gaaatagggcatcatctaagtgttc

SEQ ID NO: 1733855 - DNA, 25 bp, Homo sapien
cagcgagtcctctaagacattttga

SEQ ID NO: 1733856 - DNA, 25 bp, Homo sapien
cataggatccttatcgctgagcatg

SEQ ID NO: 1733857 - DNA, 25 bp, Homo sapien
ggttacttgcagatcctagcatagg

SEQ ID NO: 1733858 - DNA, 25 bp, Homo sapien
tgaacaaggcatctggaaattggga

SEQ ID NO: 1733859 - DNA, 25 bp, Homo sapien
cagctagtaaaagcccattgtgcca

SEQ ID NO: 1733860 - DNA, 25 bp, Homo sapien
tgtccacacagggttttcatcaata

SEQ ID NO: 1733861 - DNA, 25 bp, Homo sapien
tactgacccaaatatcccaaaagga

SEQ ID NO: 1733862 - DNA, 25 bp, Homo sapien
ccagcactctgtgagacataggccg

SEQ ID NO: 1733863 - DNA, 25 bp, Homo sapien
tgtactagtcttggtccaaggtgtc

SEQ ID NO: 1733864 - DNA, 25 bp, Homo sapien
tcaactggaaagctccggccttggg

SEQ ID NO: 1733865 - DNA, 25 bp, Homo sapien
tatattatgtcaagctatggaaagc

SEQ ID NO: 1733866 - DNA, 25 bp, Homo sapien
gccagaaattccctactctggattt

SEQ ID NO: 1733867 - DNA, 25 bp, Homo sapien
cagagcatgaaaaagtcatagccta

SEQ ID NO: 1733868 - DNA, 25 bp, Homo sapien
aaagtcatagcctagagtccaaagg

SEQ ID NO: 1733869 - DNA, 25 bp, Homo sapien
tactaaaacagagcatgaaaaagtc

SEQ ID NO: 1733870 - DNA, 25 bp, Homo sapien
aagattactaaaacagagcatgaaa

SEQ ID NO: 1733871 - DNA, 25 bp, Homo sapien
aggaacctcaaggagttatctagtc

SEQ ID NO: 1733872 - DNA, 25 bp, Homo sapien
ggagttatctagtcctcatctttgt

SEQ ID NO: 1733873 - DNA, 25 bp, Homo sapien
tctgtaaactttagagcactataca

SEQ ID NO: 1733874 - DNA, 25 bp, Homo sapien
tctttgtgtccaagtagaacttcat

SEQ ID NO: 1733875 - DNA, 25 bp, Homo sapien
cttgtgccattaaacgaggtgattt

SEQ ID NO: 1733876 - DNA, 25 bp, Homo sapien
catccataatatcgtcaagaccaac

SEQ ID NO: 1733877 - DNA, 25 bp, Homo sapien
tcctgttaggtaaaatcagttcttc

SEQ ID NO: 1733878 - DNA, 25 bp, Homo sapien
catcaatggtatcattgccactttc

SEQ ID NO: 1733879 - DNA, 25 bp, Homo sapien
tctttcaagcaaccaggatgagcgt

SEQ ID NO: 1733880 - DNA, 25 bp, Homo sapien
taaaatgctcaacgcctgggtgttc

SEQ ID NO: 1733881 - DNA, 25 bp, Homo sapien
taagaaacgctacttgactggctgt

SEQ ID NO: 1733882 - DNA, 25 bp, Homo sapien
caatggactaccaacaggcttggct

SEQ ID NO: 1733883 - DNA, 25 bp, Homo sapien
ttttcagtttcagtttatcctcttc

SEQ ID NO: 1733884 - DNA, 25 bp, Homo sapien
tctcttcttatggtagctatgttat

SEQ ID NO: 1733885 - DNA, 25 bp, Homo sapien
tggttttttgcaaaacccacactgc

SEQ ID NO: 1733886 - DNA, 25 bp, Homo sapien
ctgcttcttctttggcggggttgta

SEQ ID NO: 1733887 - DNA, 25 bp, Homo sapien
tgttatctggaatgaacaatggtgg

SEQ ID NO: 1733888 - DNA, 25 bp, Homo sapien
gcacaggtctctgtgtatcaaataa

SEQ ID NO: 1733889 - DNA, 25 bp, Homo sapien
ttgcagatgcagtggctaaattaca

SEQ ID NO: 1733890 - DNA, 25 bp, Homo sapien
tcagctgttggccagactatgcttt

SEQ ID NO: 1733891 - DNA, 25 bp, Homo sapien
tatataacttacagacccaaagcag

SEQ ID NO: 1733892 - DNA, 25 bp, Homo sapien
ttcctcgcccatctgctgtgcttga

SEQ ID NO: 1733893 - DNA, 25 bp, Homo sapien
gacttaacccaacacaatcaccatg

SEQ ID NO: 1733894 - DNA, 25 bp, Homo sapien
gataatccaagcttttcacactcca

SEQ ID NO: 1733895 - DNA, 25 bp, Homo sapien
ttcttcagcacaacattttacacag

SEQ ID NO: 1733896 - DNA, 25 bp, Homo sapien
tatggccaagaagctgtacgtaaga

SEQ ID NO: 1733897 - DNA, 25 bp, Homo sapien
taaggaggcttcaattcagggatgc

SEQ ID NO: 1733898 - DNA, 25 bp, Homo sapien
ccagatttgtcgtacaaggaatgcc

SEQ ID NO: 1733899 - DNA, 25 bp, Homo sapien
gattctggagaacacatcctcatgc

SEQ ID NO: 1733900 - DNA, 25 bp, Homo sapien
tcttacgaagaggagctagctgcca

SEQ ID NO: 1733901 - DNA, 25 bp, Homo sapien
ctggttgtcccatcttacgaagagg

SEQ ID NO: 1733902 - DNA, 25 bp, Homo sapien
gatctccgaggtaaaactggttgtc

SEQ ID NO: 1733903 - DNA, 25 bp, Homo sapien
tgtgcaagtaacagttgtagactct

SEQ ID NO: 1733904 - DNA, 25 bp, Homo sapien
tctttcctaggatattgctacggac

SEQ ID NO: 1733905 - DNA, 25 bp, Homo sapien
tagccccaaaggtcccatgaggtag

SEQ ID NO: 1733906 - DNA, 25 bp, Homo sapien
taaaactggaattctgggatccttg

SEQ ID NO: 1733907 - DNA, 25 bp, Homo sapien
tgctacggactaatcaggctactct

SEQ ID NO: 1733908 - DNA, 25 bp, Homo sapien
agcaggatgtacattaagcactcct

SEQ ID NO: 1733909 - DNA, 25 bp, Homo sapien
aggatgtacattaagcactcctttt

SEQ ID NO: 1733910 - DNA, 25 bp, Homo sapien
gcaggatgtacattaagcactcctt

SEQ ID NO: 1733911 - DNA, 25 bp, Homo sapien
caggatgtacattaagcactccttt

SEQ ID NO: 1733912 - DNA, 25 bp, Homo sapien
taagaatgtctttgagagaatgtct

SEQ ID NO: 1733913 - DNA, 25 bp, Homo sapien
tcataagaatgtctttgagagaatg

SEQ ID NO: 1733914 - DNA, 25 bp, Homo sapien
cataagaatgtctttgagagaatgt

SEQ ID NO: 1733915 - DNA, 25 bp, Homo sapien
gaatgtctttgagagaatgtctgac

SEQ ID NO: 1733916 - DNA, 25 bp, Homo sapien
tagcatctgtgtcccgaaaaaaaga

SEQ ID NO: 1733917 - DNA, 25 bp, Homo sapien
gcatctgtgtcccgaaaaaaagaga

SEQ ID NO: 1733918 - DNA, 25 bp, Homo sapien
catctgtgtcccgaaaaaaagagaa

SEQ ID NO: 1733919 - DNA, 25 bp, Homo sapien
ttagcatctgtgtcccgaaaaaaag

SEQ ID NO: 1733920 - DNA, 25 bp, Homo sapien
tttctcttcgtctccaagcagctaa

SEQ ID NO: 1733921 - DNA, 25 bp, Homo sapien
cttctggactcattctgataagatg

SEQ ID NO: 1733922 - DNA, 25 bp, Homo sapien
gatcaggagttacttctcctttcag

SEQ ID NO: 1733923 - DNA, 25 bp, Homo sapien
cagctaactctttagaagctagttc

SEQ ID NO: 1733924 - DNA, 25 bp, Homo sapien
cacagatgacttttaatcttaaggt

SEQ ID NO: 1733925 - DNA, 25 bp, Homo sapien
cagatgacttttaatcttaaggtaa

SEQ ID NO: 1733926 - DNA, 25 bp, Homo sapien
cttttaatcttaaggtaatgtctca

SEQ ID NO: 1733927 - DNA, 25 bp, Homo sapien
tgacttttaatcttaaggtaatgtc

SEQ ID NO: 1733928 - DNA, 25 bp, Homo sapien
ttggccgtcgttccacttctctctg

SEQ ID NO: 1733929 - DNA, 25 bp, Homo sapien
ttattttggtgattggccgtcgttc

SEQ ID NO: 1733930 - DNA, 25 bp, Homo sapien
atttcacctttatgagttattttgg

SEQ ID NO: 1733931 - DNA, 25 bp, Homo sapien
tcctgttctttcattggggcatcac

SEQ ID NO: 1733932 - DNA, 25 bp, Homo sapien
tctgtgttgactagtggtatcttta

SEQ ID NO: 1733933 - DNA, 25 bp, Homo sapien
tctccaatgacttattggcggctgg

SEQ ID NO: 1733934 - DNA, 25 bp, Homo sapien
tctttagacatagagtcaacctcct

SEQ ID NO: 1733935 - DNA, 25 bp, Homo sapien
gattttgcagttgagatcaaaaaga

SEQ ID NO: 1733936 - DNA, 25 bp, Homo sapien
gcgagctactcctacaacaactttt

SEQ ID NO: 1733937 - DNA, 25 bp, Homo sapien
taatgcatctgctatactttctgct

SEQ ID NO: 1733938 - DNA, 25 bp, Homo sapien
ggagagaacgttgactttggagact

SEQ ID NO: 1733939 - DNA, 25 bp, Homo sapien
gtctgaatgtttgcgagctactcct

SEQ ID NO: 1733940 - DNA, 25 bp, Homo sapien
gttcaatcgagccagaaaggtagac

SEQ ID NO: 1733941 - DNA, 25 bp, Homo sapien
gataaaacctttccagatgaagttc

SEQ ID NO: 1733942 - DNA, 25 bp, Homo sapien
ttcaacagttccaggcatctctgga

SEQ ID NO: 1733943 - DNA, 25 bp, Homo sapien
ctctgtcaggtattctggggagcca

SEQ ID NO: 1733944 - DNA, 25 bp, Homo sapien
ccaaactgtctgaggtgatatcctg

SEQ ID NO: 1733945 - DNA, 25 bp, Homo sapien
ctacttgaatactatctggtaggtc

SEQ ID NO: 1733946 - DNA, 25 bp, Homo sapien
tgccacctacttgaatactatctgg

SEQ ID NO: 1733947 - DNA, 25 bp, Homo sapien
gaggtgatatcctgccacctacttg

SEQ ID NO: 1733948 - DNA, 25 bp, Homo sapien
tattattgtgatagagccatttcgc

SEQ ID NO: 1733949 - DNA, 25 bp, Homo sapien
taggtactatcacatcccgtggagg

SEQ ID NO: 1733950 - DNA, 25 bp, Homo sapien
gaaaagctagagacttctgaaaaag

SEQ ID NO: 1733951 - DNA, 25 bp, Homo sapien
gccatttcgcagtatcttttctcct

SEQ ID NO: 1733952 - DNA, 25 bp, Homo sapien
aaaggcacaagagggtgtggaattt

SEQ ID NO: 1733953 - DNA, 25 bp, Homo sapien
tgcaaagagcaaagtataagaaatt

SEQ ID NO: 1733954 - DNA, 25 bp, Homo sapien
cagttactggtgtgaagcgaaccac

SEQ ID NO: 1733955 - DNA, 25 bp, Homo sapien
tccatagcgctttctgctactgaag

SEQ ID NO: 1733956 - DNA, 25 bp, Homo sapien
gtttctgacgaataattaagcccaa

SEQ ID NO: 1733957 - DNA, 25 bp, Homo sapien
caatgctattggtggtgcactttca

SEQ ID NO: 1733958 - DNA, 25 bp, Homo sapien
agattaggtctatgcagttcaagcc

SEQ ID NO: 1733959 - DNA, 25 bp, Homo sapien
cagccaatcaacacgccaggaagaa

SEQ ID NO: 1733960 - DNA, 25 bp, Homo sapien
caaaatgagatgtcgctactgctga

SEQ ID NO: 1733961 - DNA, 25 bp, Homo sapien
gaaccatgggattttgagcaaagcc

SEQ ID NO: 1733962 - DNA, 25 bp, Homo sapien
gatcctcttcgaaatgggtgcacag

SEQ ID NO: 1733963 - DNA, 25 bp, Homo sapien
cctgcagaaatggaagaggacccta

SEQ ID NO: 1733964 - DNA, 25 bp, Homo sapien
aggacccatcatacgctgtggctga

SEQ ID NO: 1733965 - DNA, 25 bp, Homo sapien
agaggacccatcatacgctgtggct

SEQ ID NO: 1733966 - DNA, 25 bp, Homo sapien
gaggacccatcatacgctgtggctg

SEQ ID NO: 1733967 - DNA, 25 bp, Homo sapien
ggacccatcatacgctgtggctgac

SEQ ID NO: 1733968 - DNA, 25 bp, Homo sapien
ctggtaaaaattctgcgggcctata

SEQ ID NO: 1733969 - DNA, 25 bp, Homo sapien
tggcctccgaatgtctttaacctgg

SEQ ID NO: 1733970 - DNA, 25 bp, Homo sapien
cccaagggtcactatggcgcctttc

SEQ ID NO: 1733971 - DNA, 25 bp, Homo sapien
ttctgcgggcctatataccttgatg

SEQ ID NO: 1733972 - DNA, 25 bp, Homo sapien
tattaaatggcctatccagttgctg

SEQ ID NO: 1733973 - DNA, 25 bp, Homo sapien
ccctattaaatggcctatccagttg

SEQ ID NO: 1733974 - DNA, 25 bp, Homo sapien
atggcctatccagttgctgttggtc

SEQ ID NO: 1733975 - DNA, 25 bp, Homo sapien
taaatggcctatccagttgctgttg

SEQ ID NO: 1733976 - DNA, 25 bp, Homo sapien
catgtgataaccgtgccctctcttt

SEQ ID NO: 1733977 - DNA, 25 bp, Homo sapien
catgtcgctctcttttcaaatggtg

SEQ ID NO: 1733978 - DNA, 25 bp, Homo sapien
aaatggtgtgaatcactataaaatc

SEQ ID NO: 1733979 - DNA, 25 bp, Homo sapien
tctctttatctttgtgcccttcctc

SEQ ID NO: 1733980 - DNA, 25 bp, Homo sapien
ttatctggcttcttgtctacattcc

SEQ ID NO: 1733981 - DNA, 25 bp, Homo sapien
ccctatctttgtggtacctatccct

SEQ ID NO: 1733982 - DNA, 25 bp, Homo sapien
tttagttctgtcagtgtggtcccta

SEQ ID NO: 1733983 - DNA, 25 bp, Homo sapien
ttgtctacattcctactatctctgc

SEQ ID NO: 1733984 - DNA, 25 bp, Homo sapien
taaagatggcacaatcctagcaggc

SEQ ID NO: 1733985 - DNA, 25 bp, Homo sapien
gagcactctgtaccaacacacagaa

SEQ ID NO: 1733986 - DNA, 25 bp, Homo sapien
ttttaaagatggcacaatcctagca

SEQ ID NO: 1733987 - DNA, 25 bp, Homo sapien
ttacaagatacaacattttaacagt

SEQ ID NO: 1733988 - DNA, 25 bp, Homo sapien
tctaagcctttattgcatattaata

SEQ ID NO: 1733989 - DNA, 25 bp, Homo sapien
acaaatctttgaatatacagcaatg

SEQ ID NO: 1733990 - DNA, 25 bp, Homo sapien
aaaacaaatctttgaatatacagca

SEQ ID NO: 1733991 - DNA, 25 bp, Homo sapien
cctataactagggaccgttggtatg

SEQ ID NO: 1733992 - DNA, 25 bp, Homo sapien
taaaactggcatatgaaactgtaca

SEQ ID NO: 1733993 - DNA, 25 bp, Homo sapien
tggtcaaaaactgctcaactaaatg

SEQ ID NO: 1733994 - DNA, 25 bp, Homo sapien
tagtgagtcagagtaccaaattgcg

SEQ ID NO: 1733995 - DNA, 25 bp, Homo sapien
tataaagtgggctatagctgcacag

SEQ ID NO: 1733996 - DNA, 25 bp, Homo sapien
caaagaattagggtgtttggcacct

SEQ ID NO: 1733997 - DNA, 25 bp, Homo sapien
tactagagaaagactgggtcccaca

SEQ ID NO: 1733998 - DNA, 25 bp, Homo sapien
cacacgttaacatggagtggcttca

SEQ ID NO: 1733999 - DNA, 25 bp, Homo sapien
tagtaagttgtagcctgaccagtgt

SEQ ID NO: 1734000 - DNA, 25 bp, Homo sapien
cttggcaaccggcaacatatgactg

SEQ ID NO: 1734001 - DNA, 25 bp, Homo sapien
cagttactgctgttgttacctgaca

SEQ ID NO: 1734002 - DNA, 25 bp, Homo sapien
ggctacagacattcctaaaaggacc

SEQ ID NO: 1734003 - DNA, 25 bp, Homo sapien
catatgactgacttggtgaactaac

SEQ ID NO: 1734004 - DNA, 25 bp, Homo sapien
tcttcgcagaagctatccttgctct

SEQ ID NO: 1734005 - DNA, 25 bp, Homo sapien
tgtgttcacttgcaggccacaaagt

SEQ ID NO: 1734006 - DNA, 25 bp, Homo sapien
gccaatgtgtacttatgacccataa

SEQ ID NO: 1734007 - DNA, 25 bp, Homo sapien
tacaggaacactctacaacacaagg

SEQ ID NO: 1734008 - DNA, 25 bp, Homo sapien
taataaagcacggtgggatagcaga

SEQ ID NO: 1734009 - DNA, 25 bp, Homo sapien
caacgtgtataaaaaggcctagtca

SEQ ID NO: 1734010 - DNA, 25 bp, Homo sapien
tctaatgcgaatccaaggccaggtg

SEQ ID NO: 1734011 - DNA, 25 bp, Homo sapien
tagttataatcctcccaacgtgtat

SEQ ID NO: 1734012 - DNA, 25 bp, Homo sapien
tatgccatcagacactacttacaga

SEQ ID NO: 1734013 - DNA, 25 bp, Homo sapien
tgcagaaaatgcagctgacagtcct

SEQ ID NO: 1734014 - DNA, 25 bp, Homo sapien
ccttctctaagaactgtgcctgatg

SEQ ID NO: 1734015 - DNA, 25 bp, Homo sapien
taagtgggacctatgtaagagggca

SEQ ID NO: 1734016 - DNA, 25 bp, Homo sapien
gtcagatagtatcggccaaaaaggc

SEQ ID NO: 1734017 - DNA, 25 bp, Homo sapien
ttcccattgggtcagttatacacag

SEQ ID NO: 1734018 - DNA, 25 bp, Homo sapien
ggctaagctatgtcctgaaccaggg

SEQ ID NO: 1734019 - DNA, 25 bp, Homo sapien
gggataaaaactggccaaatgtgca

SEQ ID NO: 1734020 - DNA, 25 bp, Homo sapien
tacccttctgaatagcaataagtcg

SEQ ID NO: 1734021 - DNA, 25 bp, Homo sapien
cattcttggcaacacgatcaggtga

SEQ ID NO: 1734022 - DNA, 25 bp, Homo sapien
gaggtatagcgctttgcattcttgg

SEQ ID NO: 1734023 - DNA, 25 bp, Homo sapien
taaatcaggccctctaggaatgagg

SEQ ID NO: 1734024 - DNA, 25 bp, Homo sapien
cagggtcccactccgtcgcccaagc

SEQ ID NO: 1734025 - DNA, 25 bp, Homo sapien
gggtcccactccgtcgcccaagctg

SEQ ID NO: 1734026 - DNA, 25 bp, Homo sapien
acagggtcccactccgtcgcccaag

SEQ ID NO: 1734027 - DNA, 25 bp, Homo sapien
agggtcccactccgtcgcccaagct

SEQ ID NO: 1734028 - DNA, 25 bp, Homo sapien
gagtcagaggtaagaattcactgtg

SEQ ID NO: 1734029 - DNA, 25 bp, Homo sapien
gatgcctaaaagctacaatcaactt

SEQ ID NO: 1734030 - DNA, 25 bp, Homo sapien
ttcatcaagcctccctacactgtgg

SEQ ID NO: 1734031 - DNA, 25 bp, Homo sapien
gatgtcagttactttctaccagacc

SEQ ID NO: 1734032 - DNA, 25 bp, Homo sapien
ctgtgactgaggacaatatgcagat

SEQ ID NO: 1734033 - DNA, 25 bp, Homo sapien
aacacaagacattgttactaaccat

SEQ ID NO: 1734034 - DNA, 25 bp, Homo sapien
agaaaaacacagtgtagccctgtca

SEQ ID NO: 1734035 - DNA, 25 bp, Homo sapien
catgttgtatagtaacctgtgactg

SEQ ID NO: 1734036 - DNA, 25 bp, Homo sapien
tcagatcttccatttcgagggtcaa

SEQ ID NO: 1734037 - DNA, 25 bp, Homo sapien
gccccagagactgtgagtaattcga

SEQ ID NO: 1734038 - DNA, 25 bp, Homo sapien
taccttacaattgcacaggactttg

SEQ ID NO: 1734039 - DNA, 25 bp, Homo sapien
ccctgtgagtagtacagcaggaccc

SEQ ID NO: 1734040 - DNA, 25 bp, Homo sapien
caggttgtttgcactctaactggta

SEQ ID NO: 1734041 - DNA, 25 bp, Homo sapien
gagtagacagaaatgttaaccacac

SEQ ID NO: 1734042 - DNA, 25 bp, Homo sapien
gctttcatatgtaggtttgagcccc

SEQ ID NO: 1734043 - DNA, 25 bp, Homo sapien
caaactaggaacacaaacagatgca

SEQ ID NO: 1734044 - DNA, 25 bp, Homo sapien
ccacccaaatgctggacgcagtgtt

SEQ ID NO: 1734045 - DNA, 25 bp, Homo sapien
tcttctgtttgttaacacgaagtgt

SEQ ID NO: 1734046 - DNA, 25 bp, Homo sapien
ttcactcttcaagttcgcactgaga

SEQ ID NO: 1734047 - DNA, 25 bp, Homo sapien
agaaggatggccatttcagaggact

SEQ ID NO: 1734048 - DNA, 25 bp, Homo sapien
aaaaatttctctgcgcatttctgta

SEQ ID NO: 1734049 - DNA, 25 bp, Homo sapien
tgactaagcatagaaaaaataccac

SEQ ID NO: 1734050 - DNA, 25 bp, Homo sapien
tgtctgctgtgaaatgatatcatga

SEQ ID NO: 1734051 - DNA, 25 bp, Homo sapien
tttctacagcttagtgcagattgca

SEQ ID NO: 1734052 - DNA, 25 bp, Homo sapien
gccgagaagttctttctaaagatgt

SEQ ID NO: 1734053 - DNA, 25 bp, Homo sapien
cggccgagaagttctttctaaagat

SEQ ID NO: 1734054 - DNA, 25 bp, Homo sapien
cgagaagttctttctaaagatgtat

SEQ ID NO: 1734055 - DNA, 25 bp, Homo sapien
ggccgagaagttctttctaaagatg

SEQ ID NO: 1734056 - DNA, 25 bp, Homo sapien
cagtaaggactttcactcgtttggg

SEQ ID NO: 1734057 - DNA, 25 bp, Homo sapien
gatacatcttgttccggcagtaagg

SEQ ID NO: 1734058 - DNA, 25 bp, Homo sapien
catatgtagccccaagaaatgcatt

SEQ ID NO: 1734059 - DNA, 25 bp, Homo sapien
caaaagtttgccactatgaacagga

SEQ ID NO: 1734060 - DNA, 25 bp, Homo sapien
ctccggaaatttacaagcatggtgg

SEQ ID NO: 1734061 - DNA, 25 bp, Homo sapien
ccggaaatttacaagcatggtggaa

SEQ ID NO: 1734062 - DNA, 25 bp, Homo sapien
gcctccggaaatttacaagcatggt

SEQ ID NO: 1734063 - DNA, 25 bp, Homo sapien
aggcctccggaaatttacaagcatg

SEQ ID NO: 1734064 - DNA, 25 bp, Homo sapien
actgaccgatttccttcctatttct

SEQ ID NO: 1734065 - DNA, 25 bp, Homo sapien
caatgatgatagaaaactgaccgat

SEQ ID NO: 1734066 - DNA, 25 bp, Homo sapien
taaaggtgcaggattagaaaagcac

SEQ ID NO: 1734067 - DNA, 25 bp, Homo sapien
gagctcctctctaagtcatatccag

SEQ ID NO: 1734068 - DNA, 25 bp, Homo sapien
tcctgtcaggaggttgcagctcttg

SEQ ID NO: 1734069 - DNA, 25 bp, Homo sapien
cctgtcaggaggttgcagctcttgg

SEQ ID NO: 1734070 - DNA, 25 bp, Homo sapien
ctcctgtcaggaggttgcagctctt

SEQ ID NO: 1734071 - DNA, 25 bp, Homo sapien
gaaaaggcatatccattccagctgg

SEQ ID NO: 1734072 - DNA, 25 bp, Homo sapien
gaggaattcaagagtcaccagctgg

SEQ ID NO: 1734073 - DNA, 25 bp, Homo sapien
caggcagaagtcagtacactacgtc

SEQ ID NO: 1734074 - DNA, 25 bp, Homo sapien
tttcacggatgctttggagacccca

SEQ ID NO: 1734075 - DNA, 25 bp, Homo sapien
attacagttcatggccacccaaatg

SEQ ID NO: 1734076 - DNA, 25 bp, Homo sapien
ccttggaagtcattacagttcatgg

SEQ ID NO: 1734077 - DNA, 25 bp, Homo sapien
gagtgttccacacgccttcctttgt

SEQ ID NO: 1734078 - DNA, 25 bp, Homo sapien
gttttcccacaatgttgagtgttcc

SEQ ID NO: 1734079 - DNA, 25 bp, Homo sapien
tgcattaagattatccagtgtatcc

SEQ ID NO: 1734080 - DNA, 25 bp, Homo sapien
cagtgtatccaaaatctacatgttt

SEQ ID NO: 1734081 - DNA, 25 bp, Homo sapien
tctcttgaagagtagcatgacctcc

SEQ ID NO: 1734082 - DNA, 25 bp, Homo sapien
cttgacagagctagcaattgcgtgc

SEQ ID NO: 1734083 - DNA, 25 bp, Homo sapien
tggagcaccctaggaaacatacact

SEQ ID NO: 1734084 - DNA, 25 bp, Homo sapien
taagccgggcacttcagggaatcct

SEQ ID NO: 1734085 - DNA, 25 bp, Homo sapien
caaacaagtagtgcttgagtagcat

SEQ ID NO: 1734086 - DNA, 25 bp, Homo sapien
tattggcaaacaagtagtgcttgag

SEQ ID NO: 1734087 - DNA, 25 bp, Homo sapien
tggcaaacaagtagtgcttgagtag

SEQ ID NO: 1734088 - DNA, 25 bp, Homo sapien
aacaagtagtgcttgagtagcatcc

SEQ ID NO: 1734089 - DNA, 25 bp, Homo sapien
tgtgtatcctccttattattcataa

SEQ ID NO: 1734090 - DNA, 25 bp, Homo sapien
gaaccagataaggatattttttgtg

SEQ ID NO: 1734091 - DNA, 25 bp, Homo sapien
tgacaagaaaactaagagtccccac

SEQ ID NO: 1734092 - DNA, 25 bp, Homo sapien
ctagccaatggtgttctgcagaaaa

SEQ ID NO: 1734093 - DNA, 25 bp, Homo sapien
gaaagccacacttgaaggtgctgct

SEQ ID NO: 1734094 - DNA, 25 bp, Homo sapien
cactgggacacctagaagctggaaa

SEQ ID NO: 1734095 - DNA, 25 bp, Homo sapien
tgctgaacttgctaagaatttgccc

SEQ ID NO: 1734096 - DNA, 25 bp, Homo sapien
tagaagctggaaagttgggtgggtc

SEQ ID NO: 1734097 - DNA, 25 bp, Homo sapien
gagtgtggccattgagtgacagaaa

SEQ ID NO: 1734098 - DNA, 25 bp, Homo sapien
gcagagcacgatggagagtgtggcc

SEQ ID NO: 1734099 - DNA, 25 bp, Homo sapien
aagttcactgtgataccccagtcca

SEQ ID NO: 1734100 - DNA, 25 bp, Homo sapien
ctggtatgcagagcacgatggagag

SEQ ID NO: 1734101 - DNA, 25 bp, Homo sapien
tgcaaaagcaccataccctggtgta

SEQ ID NO: 1734102 - DNA, 25 bp, Homo sapien
aagcaccataccctggtgtatagac

SEQ ID NO: 1734103 - DNA, 25 bp, Homo sapien
ctgggaaatgcaaaagcaccatacc

SEQ ID NO: 1734104 - DNA, 25 bp, Homo sapien
aaatgcaaaagcaccataccctggt

SEQ ID NO: 1734105 - DNA, 25 bp, Homo sapien
gctgcttcatctccctcagaaacaa

SEQ ID NO: 1734106 - DNA, 25 bp, Homo sapien
caaaggtgatgattccacttccctg

SEQ ID NO: 1734107 - DNA, 25 bp, Homo sapien
tgctttacaatctctgctggctcct

SEQ ID NO: 1734108 - DNA, 25 bp, Homo sapien
gataatcttattaatgtctctgctt

SEQ ID NO: 1734109 - DNA, 25 bp, Homo sapien
gatctgtggatgagctccttaggat

SEQ ID NO: 1734110 - DNA, 25 bp, Homo sapien
tgagcacctattgccaatgaaatat

SEQ ID NO: 1734111 - DNA, 25 bp, Homo sapien
gatgagctccttaggatgagcacct

SEQ ID NO: 1734112 - DNA, 25 bp, Homo sapien
tccttaggatgagcacctattgcca

SEQ ID NO: 1734113 - DNA, 25 bp, Homo sapien
cagccacacggcctgtcctaggtgg

SEQ ID NO: 1734114 - DNA, 25 bp, Homo sapien
ttagacattcccaatgtttgagtgc

SEQ ID NO: 1734115 - DNA, 25 bp, Homo sapien
cctgtcctaggtggaccaagtgtga

SEQ ID NO: 1734116 - DNA, 25 bp, Homo sapien
ccaagtgtgaaattagacattccca

SEQ ID NO: 1734117 - DNA, 25 bp, Homo sapien
ctggtattaaactgagttttgattc

SEQ ID NO: 1734118 - DNA, 25 bp, Homo sapien
ccacacgaagcatttcaagggtagc

SEQ ID NO: 1734119 - DNA, 25 bp, Homo sapien
ttccacacgaagcatttcaagggta

SEQ ID NO: 1734120 - DNA, 25 bp, Homo sapien
atagaaactggtattaaactgagtt

SEQ ID NO: 1734121 - DNA, 25 bp, Homo sapien
cagtggctccaatgatcaaggcaca

SEQ ID NO: 1734122 - DNA, 25 bp, Homo sapien
agtggctccaatgatcaaggcacag

SEQ ID NO: 1734123 - DNA, 25 bp, Homo sapien
tcctggagcagccatagcgccaagg

SEQ ID NO: 1734124 - DNA, 25 bp, Homo sapien
ctcctggagcagccatagcgccaag

SEQ ID NO: 1734125 - DNA, 25 bp, Homo sapien
cctggagcagccatagcgccaaggt

SEQ ID NO: 1734126 - DNA, 25 bp, Homo sapien
ctacagaggtagcttcagtgtccat

SEQ ID NO: 1734127 - DNA, 25 bp, Homo sapien
tctacagaggtagcttcagtgtcca

SEQ ID NO: 1734128 - DNA, 25 bp, Homo sapien
ttctacagaggtagcttcagtgtcc

SEQ ID NO: 1734129 - DNA, 25 bp, Homo sapien
cttctacagaggtagcttcagtgtc

SEQ ID NO: 1734130 - DNA, 25 bp, Homo sapien
catgtgcagagcaaccactgttcct

SEQ ID NO: 1734131 - DNA, 25 bp, Homo sapien
tcatgtgcagagcaaccactgttcc

SEQ ID NO: 1734132 - DNA, 25 bp, Homo sapien
gggatccctccatggtactcaatga

SEQ ID NO: 1734133 - DNA, 25 bp, Homo sapien
tcaatgaccctcttgaggaagatct

SEQ ID NO: 1734134 - DNA, 25 bp, Homo sapien
caccacttattgtccggtctgcttt

SEQ ID NO: 1734135 - DNA, 25 bp, Homo sapien
ggactcctaggcattcaccacttat

SEQ ID NO: 1734136 - DNA, 25 bp, Homo sapien
ttctgcactgactgctatacctcat

SEQ ID NO: 1734137 - DNA, 25 bp, Homo sapien
gccaaatccattcttaaatacttct

SEQ ID NO: 1734138 - DNA, 25 bp, Homo sapien
ctggccaaatccattcttaaatact

SEQ ID NO: 1734139 - DNA, 25 bp, Homo sapien
atacttctcgttttccctttctgca

SEQ ID NO: 1734140 - DNA, 25 bp, Homo sapien
ctgccaactaagagaagtgtaaata

SEQ ID NO: 1734141 - DNA, 25 bp, Homo sapien
cacggttctgccaactaagagaagt

SEQ ID NO: 1734142 - DNA, 25 bp, Homo sapien
tctgccaactaagagaagtgtaaat

SEQ ID NO: 1734143 - DNA, 25 bp, Homo sapien
ggttctgccaactaagagaagtgta

SEQ ID NO: 1734144 - DNA, 25 bp, Homo sapien
tcatcaattggatcccagaaaatct

SEQ ID NO: 1734145 - DNA, 25 bp, Homo sapien
tcaattggatcccagaaaatctcag

SEQ ID NO: 1734146 - DNA, 25 bp, Homo sapien
ttggatcccagaaaatctcaggcat

SEQ ID NO: 1734147 - DNA, 25 bp, Homo sapien
ctcatcatcaattggatcccagaaa

SEQ ID NO: 1734148 - DNA, 25 bp, Homo sapien
aagtggtttccacatagccatccat

SEQ ID NO: 1734149 - DNA, 25 bp, Homo sapien
aagacaatagtagccaaatccacag

SEQ ID NO: 1734150 - DNA, 25 bp, Homo sapien
aatatcaagcactacctcttcagta

SEQ ID NO: 1734151 - DNA, 25 bp, Homo sapien
acaggagctgcttaaatgaaatatc

SEQ ID NO: 1734152 - DNA, 25 bp, Homo sapien
cataccgcctcattacatctgagaa

SEQ ID NO: 1734153 - DNA, 25 bp, Homo sapien
ctggtggccataccgcctcattaca

SEQ ID NO: 1734154 - DNA, 25 bp, Homo sapien
tggccataccgcctcattacatctg

SEQ ID NO: 1734155 - DNA, 25 bp, Homo sapien
tgctggtggccataccgcctcatta

SEQ ID NO: 1734156 - DNA, 25 bp, Homo sapien
cctgttattaagagggaactcagac

SEQ ID NO: 1734157 - DNA, 25 bp, Homo sapien
tctagccatctggatttttggaccc

SEQ ID NO: 1734158 - DNA, 25 bp, Homo sapien
tgtgaggttgctcctcatgcaagcc

SEQ ID NO: 1734159 - DNA, 25 bp, Homo sapien
aaacatggctttgaattgggtgaac

SEQ ID NO: 1734160 - DNA, 25 bp, Homo sapien
gataaggcaaggtaattgatgtctg

SEQ ID NO: 1734161 - DNA, 25 bp, Homo sapien
tgttagctttggtccctagaagagc

SEQ ID NO: 1734162 - DNA, 25 bp, Homo sapien
ggcaaggtaattgatgtctgagaga

SEQ ID NO: 1734163 - DNA, 25 bp, Homo sapien
agaagagcaattcttcttaatgttt

SEQ ID NO: 1734164 - DNA, 25 bp, Homo sapien
ttcttgttcttggacccttagtatc

SEQ ID NO: 1734165 - DNA, 25 bp, Homo sapien
tcaccaaattgaatgttcttcaatg

SEQ ID NO: 1734166 - DNA, 25 bp, Homo sapien
cttgttcttggacccttagtatctt

SEQ ID NO: 1734167 - DNA, 25 bp, Homo sapien
aattgaatgttcttcaatgtacttc

SEQ ID NO: 1734168 - DNA, 25 bp, Homo sapien
tctcatttgctagccagtagctcat

SEQ ID NO: 1734169 - DNA, 25 bp, Homo sapien
ctctcatttgctagccagtagctca

SEQ ID NO: 1734170 - DNA, 25 bp, Homo sapien
tctctcatttgctagccagtagctc

SEQ ID NO: 1734171 - DNA, 25 bp, Homo sapien
gctggttgtaactttcctgtgagtg

SEQ ID NO: 1734172 - DNA, 25 bp, Homo sapien
catggctgctcttatacgttgtctt

SEQ ID NO: 1734173 - DNA, 25 bp, Homo sapien
ttgtcttactcccataaaagtggcc

SEQ ID NO: 1734174 - DNA, 25 bp, Homo sapien
tttcctgtgagtgtccatggctgct

SEQ ID NO: 1734175 - DNA, 25 bp, Homo sapien
cccagtcagcatagctccaacatct

SEQ ID NO: 1734176 - DNA, 25 bp, Homo sapien
agtgatggtatgaggatttgaaccc

SEQ ID NO: 1734177 - DNA, 25 bp, Homo sapien
agtaatttgttcaagcttatacaac

SEQ ID NO: 1734178 - DNA, 25 bp, Homo sapien
agcttatacaactaggcagtgatgg

SEQ ID NO: 1734179 - DNA, 25 bp, Homo sapien
tcactttcatgtgatatccctgagg

SEQ ID NO: 1734180 - DNA, 25 bp, Homo sapien
actttcatgtgatatccctgaggac

SEQ ID NO: 1734181 - DNA, 25 bp, Homo sapien
tttcacttaattctaaaagatctca

SEQ ID NO: 1734182 - DNA, 25 bp, Homo sapien
cacctcactttcatgtgatatccct

SEQ ID NO: 1734183 - DNA, 25 bp, Homo sapien
tgaggtgattattgaaatcccaaac

SEQ ID NO: 1734184 - DNA, 25 bp, Homo sapien
gtttcctacagctattatacatgag

SEQ ID NO: 1734185 - DNA, 25 bp, Homo sapien
gtttcaagcatatagttattaagca

SEQ ID NO: 1734186 - DNA, 25 bp, Homo sapien
gtttgtacaagttgttgtttcaagc

SEQ ID NO: 1734187 - DNA, 25 bp, Homo sapien
aggatgcgtgtcaacctttttcagc

SEQ ID NO: 1734188 - DNA, 25 bp, Homo sapien
ggatgcgtgtcaacctttttcagct

SEQ ID NO: 1734189 - DNA, 25 bp, Homo sapien
gggtaatttatttcagataagataa

SEQ ID NO: 1734190 - DNA, 25 bp, Homo sapien
ttcctgcaacatagctgccagctct

SEQ ID NO: 1734191 - DNA, 25 bp, Homo sapien
ccttgtattcatttacaatgggtaa

SEQ ID NO: 1734192 - DNA, 25 bp, Homo sapien
gagaaaagatgatgtgccatccttg

SEQ ID NO: 1734193 - DNA, 25 bp, Homo sapien
caagattgcctctgctctaataagc

SEQ ID NO: 1734194 - DNA, 25 bp, Homo sapien
caataatgttgtaggactgtttttc

SEQ ID NO: 1734195 - DNA, 25 bp, Homo sapien
catcagcaaatgctaaacaataatg

SEQ ID NO: 1734196 - DNA, 25 bp, Homo sapien
gattcaatcgagcacaatcagcaca

SEQ ID NO: 1734197 - DNA, 25 bp, Homo sapien
caattaacttttgcgataatatcca

SEQ ID NO: 1734198 - DNA, 25 bp, Homo sapien
catttgtgatatagtggccatgcta

SEQ ID NO: 1734199 - DNA, 25 bp, Homo sapien
gccatgctaatttccaccagaagaa

SEQ ID NO: 1734200 - DNA, 25 bp, Homo sapien
cagtacatgcttcacagctgacaca

SEQ ID NO: 1734201 - DNA, 25 bp, Homo sapien
tgtactctctgttatgaccttgcat

SEQ ID NO: 1734202 - DNA, 25 bp, Homo sapien
gtgtactctctgttatgaccttgca

SEQ ID NO: 1734203 - DNA, 25 bp, Homo sapien
ttggtgtactctctgttatgacctt

SEQ ID NO: 1734204 - DNA, 25 bp, Homo sapien
ggtgtactctctgttatgaccttgc

SEQ ID NO: 1734205 - DNA, 25 bp, Homo sapien
tcacccggcgtactggcgcataatg

SEQ ID NO: 1734206 - DNA, 25 bp, Homo sapien
cacccggcgtactggcgcataatgc

SEQ ID NO: 1734207 - DNA, 25 bp, Homo sapien
gttggccattgcctcatggccaaga

SEQ ID NO: 1734208 - DNA, 25 bp, Homo sapien
tttcccgttggccattgcctcatgg

SEQ ID NO: 1734209 - DNA, 25 bp, Homo sapien
gccattgcctcatggccaagagacc

SEQ ID NO: 1734210 - DNA, 25 bp, Homo sapien
ctatatttcccgttggccattgcct

SEQ ID NO: 1734211 - DNA, 25 bp, Homo sapien
gaactctaacatcgcacaaagatta

SEQ ID NO: 1734212 - DNA, 25 bp, Homo sapien
gcacaaagattaactttttcttcac

SEQ ID NO: 1734213 - DNA, 25 bp, Homo sapien
ttagctgaactctaacatcgcacaa

SEQ ID NO: 1734214 - DNA, 25 bp, Homo sapien
ctaacatcgcacaaagattaacttt

SEQ ID NO: 1734215 - DNA, 25 bp, Homo sapien
agcgtcagcttttcctatatctttc

SEQ ID NO: 1734216 - DNA, 25 bp, Homo sapien
tcctatatctttctgtgacttgaca

SEQ ID NO: 1734217 - DNA, 25 bp, Homo sapien
ttttcctatatctttctgtgacttg

SEQ ID NO: 1734218 - DNA, 25 bp, Homo sapien
gcgtcagcttttcctatatctttct

SEQ ID NO: 1734219 - DNA, 25 bp, Homo sapien
gctctaatatctgtccctaaggccc

SEQ ID NO: 1734220 - DNA, 25 bp, Homo sapien
taatatctgtccctaaggccctttc

SEQ ID NO: 1734221 - DNA, 25 bp, Homo sapien
tctaatatctgtccctaaggccctt

SEQ ID NO: 1734222 - DNA, 25 bp, Homo sapien
caaagctctaatatctgtccctaag

SEQ ID NO: 1734223 - DNA, 25 bp, Homo sapien
ttgcacttgaattcccaagtaagga

SEQ ID NO: 1734224 - DNA, 25 bp, Homo sapien
tgtcatttgcacttgaattcccaag

SEQ ID NO: 1734225 - DNA, 25 bp, Homo sapien
actttctgactataaggctgactca

SEQ ID NO: 1734226 - DNA, 25 bp, Homo sapien
tgaagactagcttcaaagactttct

SEQ ID NO: 1734227 - DNA, 25 bp, Homo sapien
ttctgagcttcgtgttccaatggca

SEQ ID NO: 1734228 - DNA, 25 bp, Homo sapien
attctgagcttcgtgttccaatggc

SEQ ID NO: 1734229 - DNA, 25 bp, Homo sapien
tctgagcttcgtgttccaatggcat

SEQ ID NO: 1734230 - DNA, 25 bp, Homo sapien
gattctgagcttcgtgttccaatgg

SEQ ID NO: 1734231 - DNA, 25 bp, Homo sapien
gcccctgccggtttctcttgattct

SEQ ID NO: 1734232 - DNA, 25 bp, Homo sapien
cttgtagcccctgccggtttctctt

SEQ ID NO: 1734233 - DNA, 25 bp, Homo sapien
tgcttccacgactgggttggaaaat

SEQ ID NO: 1734234 - DNA, 25 bp, Homo sapien
agggcagacgtgatgcttccacgac

SEQ ID NO: 1734235 - DNA, 25 bp, Homo sapien
tttgacttggttagttccatataat

SEQ ID NO: 1734236 - DNA, 25 bp, Homo sapien
tgacttggttagttccatataattc

SEQ ID NO: 1734237 - DNA, 25 bp, Homo sapien
acttggttagttccatataattcat

SEQ ID NO: 1734238 - DNA, 25 bp, Homo sapien
ctttgacttggttagttccatataa

SEQ ID NO: 1734239 - DNA, 25 bp, Homo sapien
ctttgtagggttcccaccgaagcat

SEQ ID NO: 1734240 - DNA, 25 bp, Homo sapien
gtagggttcccaccgaagcatccat

SEQ ID NO: 1734241 - DNA, 25 bp, Homo sapien
gagtcagcctctgactttgtagggt

SEQ ID NO: 1734242 - DNA, 25 bp, Homo sapien
ctctgactttgtagggttcccaccg

SEQ ID NO: 1734243 - DNA, 25 bp, Homo sapien
agtgaaacagtgaacctcagaagca

SEQ ID NO: 1734244 - DNA, 25 bp, Homo sapien
gctgcacctagtttcgacgattgag

SEQ ID NO: 1734245 - DNA, 25 bp, Homo sapien
ctagtttcgacgattgagtttaaag

SEQ ID NO: 1734246 - DNA, 25 bp, Homo sapien
tgtaaagctgcacctagtttcgacg

SEQ ID NO: 1734247 - DNA, 25 bp, Homo sapien
tacaagttgataatagtaaagggtg

SEQ ID NO: 1734248 - DNA, 25 bp, Homo sapien
gatagaacctgatatagatgtgttc

SEQ ID NO: 1734249 - DNA, 25 bp, Homo sapien
agatagaacctgatatagatgtgtt

SEQ ID NO: 1734250 - DNA, 25 bp, Homo sapien
tagtaaagggtgtgtagagatagaa

SEQ ID NO: 1734251 - DNA, 25 bp, Homo sapien
gcccgttttgatttagtgctttctg

SEQ ID NO: 1734252 - DNA, 25 bp, Homo sapien
tttcagcagcccgttttgatttagt

SEQ ID NO: 1734253 - DNA, 25 bp, Homo sapien
cagcagcccgttttgatttagtgct

SEQ ID NO: 1734254 - DNA, 25 bp, Homo sapien
cagcccgttttgatttagtgctttc

SEQ ID NO: 1734255 - DNA, 25 bp, Homo sapien
atcatcaattttccgcttacacaca

SEQ ID NO: 1734256 - DNA, 25 bp, Homo sapien
catcatcaattttccgcttacacac

SEQ ID NO: 1734257 - DNA, 25 bp, Homo sapien
tcatcatcaattttccgcttacaca

SEQ ID NO: 1734258 - DNA, 25 bp, Homo sapien
ttcatcatcaattttccgcttacac

SEQ ID NO: 1734259 - DNA, 25 bp, Homo sapien
tagttctaagcttggccaaactctg

SEQ ID NO: 1734260 - DNA, 25 bp, Homo sapien
ggagacacagccactggtaacatct

SEQ ID NO: 1734261 - DNA, 25 bp, Homo sapien
cactggtaacatctggcagtagttc

SEQ ID NO: 1734262 - DNA, 25 bp, Homo sapien
ttaattctttggagacacagccact

SEQ ID NO: 1734263 - DNA, 25 bp, Homo sapien
tgcactgagaggtgtagcaagaacc

SEQ ID NO: 1734264 - DNA, 25 bp, Homo sapien
atgattccggaaatcatctgctaac

SEQ ID NO: 1734265 - DNA, 25 bp, Homo sapien
tatctgcatggaagcttgcactgag

SEQ ID NO: 1734266 - DNA, 25 bp, Homo sapien
taacaggtgataggacttagccaca

SEQ ID NO: 1734267 - DNA, 25 bp, Homo sapien
gaaactcacagagtctatactcatg

SEQ ID NO: 1734268 - DNA, 25 bp, Homo sapien
tatcatcggatgctgaggctcttgg

SEQ ID NO: 1734269 - DNA, 25 bp, Homo sapien
tatactcatgcccagattccagaga

SEQ ID NO: 1734270 - DNA, 25 bp, Homo sapien
taaggcttgctgtgagattgctgca

SEQ ID NO: 1734271 - DNA, 25 bp, Homo sapien
cttgtttacaggaattctgatggca

SEQ ID NO: 1734272 - DNA, 25 bp, Homo sapien
ttgtttacaggaattctgatggcat

SEQ ID NO: 1734273 - DNA, 25 bp, Homo sapien
ctgaacagaaaacatggtaccggca

SEQ ID NO: 1734274 - DNA, 25 bp, Homo sapien
catgaagcttttgctcatggcaggg

SEQ ID NO: 1734275 - DNA, 25 bp, Homo sapien
taggccctattagagcattgcattc

SEQ ID NO: 1734276 - DNA, 25 bp, Homo sapien
tgcattctcagaccttatgacaggt

SEQ ID NO: 1734277 - DNA, 25 bp, Homo sapien
cagctttgtgttgtggatccctgta

SEQ ID NO: 1734278 - DNA, 25 bp, Homo sapien
cacactggtagagactgcatcagcc

SEQ ID NO: 1734279 - DNA, 25 bp, Homo sapien
tgctccagaagccagttattgccct

SEQ ID NO: 1734280 - DNA, 25 bp, Homo sapien
gccataagcagttccttgtcacgtt

SEQ ID NO: 1734281 - DNA, 25 bp, Homo sapien
ggcttcccacagagatagattatct

SEQ ID NO: 1734282 - DNA, 25 bp, Homo sapien
tgtcacgttcaatagccagcatctt

SEQ ID NO: 1734283 - DNA, 25 bp, Homo sapien
gtttaatggctacaacttcaagaca

SEQ ID NO: 1734284 - DNA, 25 bp, Homo sapien
taatggctacaacttcaagacaaaa

SEQ ID NO: 1734285 - DNA, 25 bp, Homo sapien
atggctacaacttcaagacaaaaga

SEQ ID NO: 1734286 - DNA, 25 bp, Homo sapien
gcagtttaatggctacaacttcaag

SEQ ID NO: 1734287 - DNA, 25 bp, Homo sapien
gcttgacgagctgcaaacacatgtg

SEQ ID NO: 1734288 - DNA, 25 bp, Homo sapien
caaagcaggcatggtagtcccatta

SEQ ID NO: 1734289 - DNA, 25 bp, Homo sapien
cacatgtgatgccaaagggctcagc

SEQ ID NO: 1734290 - DNA, 25 bp, Homo sapien
caggttccgagacagagctataggg

SEQ ID NO: 1734291 - DNA, 25 bp, Homo sapien
aagtcattcagaaagacaattgctt

SEQ ID NO: 1734292 - DNA, 25 bp, Homo sapien
aaaagtcattcagaaagacaattgc

SEQ ID NO: 1734293 - DNA, 25 bp, Homo sapien
cattcagaaagacaattgcttccat

SEQ ID NO: 1734294 - DNA, 25 bp, Homo sapien
gtcattcagaaagacaattgcttcc

SEQ ID NO: 1734295 - DNA, 25 bp, Homo sapien
gaagcccactcaagtaaaacaagca

SEQ ID NO: 1734296 - DNA, 25 bp, Homo sapien
ttggctaaaggttttgactttgcag

SEQ ID NO: 1734297 - DNA, 25 bp, Homo sapien
gttttgactttgcagtggaagccca

SEQ ID NO: 1734298 - DNA, 25 bp, Homo sapien
gtggaagcccactcaagtaaaacaa

SEQ ID NO: 1734299 - DNA, 25 bp, Homo sapien
tcccctgctggagatcaggccgcag

SEQ ID NO: 1734300 - DNA, 25 bp, Homo sapien
tgacagtgtggactcctcccctgct

SEQ ID NO: 1734301 - DNA, 25 bp, Homo sapien
gatcaggccgcagatgtcatcttca

SEQ ID NO: 1734302 - DNA, 25 bp, Homo sapien
actgtgtgctagagttctggggaac

SEQ ID NO: 1734303 - DNA, 25 bp, Homo sapien
ccaagctttccacaactgagatcat

SEQ ID NO: 1734304 - DNA, 25 bp, Homo sapien
tgtccccttccaagctttccacaac

SEQ ID NO: 1734305 - DNA, 25 bp, Homo sapien
aacgctgctgtccccttccaagctt

SEQ ID NO: 1734306 - DNA, 25 bp, Homo sapien
ccttccaagctttccacaactgaga

SEQ ID NO: 1734307 - DNA, 25 bp, Homo sapien
ccctagctgactgacaggaaagtaa

SEQ ID NO: 1734308 - DNA, 25 bp, Homo sapien
aggaaagtaaatataggttctacag

SEQ ID NO: 1734309 - DNA, 25 bp, Homo sapien
tgtatggtcccctagctgactgaca

SEQ ID NO: 1734310 - DNA, 25 bp, Homo sapien
tataggttctacaggtgttgcaata

SEQ ID NO: 1734311 - DNA, 25 bp, Homo sapien
agcaccaggagtccgtattttcaaa

SEQ ID NO: 1734312 - DNA, 25 bp, Homo sapien
aaagccgaggtacttgtctgcttga

SEQ ID NO: 1734313 - DNA, 25 bp, Homo sapien
ttatagccttgcataaagcaccagg

SEQ ID NO: 1734314 - DNA, 25 bp, Homo sapien
cacacatgcttctgaaaagccgagg

SEQ ID NO: 1734315 - DNA, 25 bp, Homo sapien
cctcagacataagtttgtcatttcc

SEQ ID NO: 1734316 - DNA, 25 bp, Homo sapien
tcaatatgtttgtccctcagacata

SEQ ID NO: 1734317 - DNA, 25 bp, Homo sapien
tgtcatttcctacaggtccatttat

SEQ ID NO: 1734318 - DNA, 25 bp, Homo sapien
caggtccatttatactccttacatt

SEQ ID NO: 1734319 - DNA, 25 bp, Homo sapien
acaagctccaaagtagtgggacccg

SEQ ID NO: 1734320 - DNA, 25 bp, Homo sapien
caagctccaaagtagtgggacccga

SEQ ID NO: 1734321 - DNA, 25 bp, Homo sapien
acttaatactagtcaattttccagg

SEQ ID NO: 1734322 - DNA, 25 bp, Homo sapien
atactagtcaattttccaggaattt

SEQ ID NO: 1734323 - DNA, 25 bp, Homo sapien
caggaattttttgggcagggaatat

SEQ ID NO: 1734324 - DNA, 25 bp, Homo sapien
taatactagtcaattttccaggaat

SEQ ID NO: 1734325 - DNA, 25 bp, Homo sapien
caggctccaagtcctcgtgaaatgg

SEQ ID NO: 1734326 - DNA, 25 bp, Homo sapien
gctgggtagattcttagatcagaag

SEQ ID NO: 1734327 - DNA, 25 bp, Homo sapien
gtcttcactgagttccaatctatta

SEQ ID NO: 1734328 - DNA, 25 bp, Homo sapien
tgggtttaatcttccaaatgacaac

SEQ ID NO: 1734329 - DNA, 25 bp, Homo sapien
cgaaaacagcgcccttcttgccata

SEQ ID NO: 1734330 - DNA, 25 bp, Homo sapien
gtcgaaaacagcgcccttcttgcca

SEQ ID NO: 1734331 - DNA, 25 bp, Homo sapien
aatagcagtcttctccttgattagg

SEQ ID NO: 1734332 - DNA, 25 bp, Homo sapien
tagcagtcttctccttgattaggca

SEQ ID NO: 1734333 - DNA, 25 bp, Homo sapien
tcaatctccatgtgccgaaacctgc

SEQ ID NO: 1734334 - DNA, 25 bp, Homo sapien
atcaatctccatgtgccgaaacctg

SEQ ID NO: 1734335 - DNA, 25 bp, Homo sapien
caatctccatgtgccgaaacctgca

SEQ ID NO: 1734336 - DNA, 25 bp, Homo sapien
catatcgtcctctattgtgatggaa

SEQ ID NO: 1734337 - DNA, 25 bp, Homo sapien
gaaagttggctagccttcacttcct

SEQ ID NO: 1734338 - DNA, 25 bp, Homo sapien
ttcctcttctggtgactcaggcaca

SEQ ID NO: 1734339 - DNA, 25 bp, Homo sapien
tgacatcctgttggctgattttccc

SEQ ID NO: 1734340 - DNA, 25 bp, Homo sapien
tggtggatgcttggggctaggaaca

SEQ ID NO: 1734341 - DNA, 25 bp, Homo sapien
aactggtggatgcttggggctagga

SEQ ID NO: 1734342 - DNA, 25 bp, Homo sapien
ggatgcttggggctaggaacatttt

SEQ ID NO: 1734343 - DNA, 25 bp, Homo sapien
gcttggggctaggaacattttcgga

SEQ ID NO: 1734344 - DNA, 25 bp, Homo sapien
tcatcatcatctgcagcattaatta

SEQ ID NO: 1734345 - DNA, 25 bp, Homo sapien
cttcatcatcatctgcagcattaat

SEQ ID NO: 1734346 - DNA, 25 bp, Homo sapien
catcatcatctgcagcattaattac

SEQ ID NO: 1734347 - DNA, 25 bp, Homo sapien
tcttcatcatcatctgcagcattaa

SEQ ID NO: 1734348 - DNA, 25 bp, Homo sapien
aacttcaggagttggttgcagggta

SEQ ID NO: 1734349 - DNA, 25 bp, Homo sapien
tgtgaacttcaggagttggttgcag

SEQ ID NO: 1734350 - DNA, 25 bp, Homo sapien
ttgcagggtaggtgttttggtttca

SEQ ID NO: 1734351 - DNA, 25 bp, Homo sapien
tcgtaatccattgtgaacttcagga

SEQ ID NO: 1734352 - DNA, 25 bp, Homo sapien
gactgcaggtttccggacagaagtc

SEQ ID NO: 1734353 - DNA, 25 bp, Homo sapien
tgactgcaggtttccggacagaagt

SEQ ID NO: 1734354 - DNA, 25 bp, Homo sapien
cctcaagagtttttattccaaaatg

SEQ ID NO: 1734355 - DNA, 25 bp, Homo sapien
tttattccaaaatgcaaacattcac

SEQ ID NO: 1734356 - DNA, 25 bp, Homo sapien
tttttattccaaaatgcaaacattc

SEQ ID NO: 1734357 - DNA, 25 bp, Homo sapien
tcaagagtttttattccaaaatgca

SEQ ID NO: 1734358 - DNA, 25 bp, Homo sapien
cttgctcctcagatttttccttcat

SEQ ID NO: 1734359 - DNA, 25 bp, Homo sapien
gctcctcagatttttccttcatttt

SEQ ID NO: 1734360 - DNA, 25 bp, Homo sapien
ctcagatttttccttcattttcttt

SEQ ID NO: 1734361 - DNA, 25 bp, Homo sapien
tcctcagatttttccttcattttct

SEQ ID NO: 1734362 - DNA, 25 bp, Homo sapien
gctcagggtggagtaaaagactgga

SEQ ID NO: 1734363 - DNA, 25 bp, Homo sapien
ggctcagggtggagtaaaagactgg

SEQ ID NO: 1734364 - DNA, 25 bp, Homo sapien
cccagtgtctcagtaaggcccaatc

SEQ ID NO: 1734365 - DNA, 25 bp, Homo sapien
gtgtctcagtaaggcccaatctaac

SEQ ID NO: 1734366 - DNA, 25 bp, Homo sapien
gtttccccagtgtctcagtaaggcc

SEQ ID NO: 1734367 - DNA, 25 bp, Homo sapien
ttccccagtgtctcagtaaggccca

SEQ ID NO: 1734368 - DNA, 25 bp, Homo sapien
cttcacatggatctcaccaacttta

SEQ ID NO: 1734369 - DNA, 25 bp, Homo sapien
ctgacatgcctaatcgctccttaag

SEQ ID NO: 1734370 - DNA, 25 bp, Homo sapien
taatcgctccttaagagacttggaa

SEQ ID NO: 1734371 - DNA, 25 bp, Homo sapien
catggatctcaccaactttattaac

SEQ ID NO: 1734372 - DNA, 25 bp, Homo sapien
tttagtttgcgattccccatgtttc

SEQ ID NO: 1734373 - DNA, 25 bp, Homo sapien
tgagtttagtttgcgattccccatg

SEQ ID NO: 1734374 - DNA, 25 bp, Homo sapien
cgattccccatgtttctgactggct

SEQ ID NO: 1734375 - DNA, 25 bp, Homo sapien
tttgcgattccccatgtttctgact

SEQ ID NO: 1734376 - DNA, 25 bp, Homo sapien
taacacggctcagaaaatcaacttc

SEQ ID NO: 1734377 - DNA, 25 bp, Homo sapien
tctgtagcttccattctaacacggc

SEQ ID NO: 1734378 - DNA, 25 bp, Homo sapien
tgcatgcgcgtctctctcatgatct

SEQ ID NO: 1734379 - DNA, 25 bp, Homo sapien
tcaactgaagcctctgtagcttcca

SEQ ID NO: 1734380 - DNA, 25 bp, Homo sapien
ccttctgggatgactttgtgggaag

SEQ ID NO: 1734381 - DNA, 25 bp, Homo sapien
cttctgggatgactttgtgggaagc

SEQ ID NO: 1734382 - DNA, 25 bp, Homo sapien
ggagctgagtggcttcacagcggca

SEQ ID NO: 1734383 - DNA, 25 bp, Homo sapien
gggggatgacacaactttaaccaca

SEQ ID NO: 1734384 - DNA, 25 bp, Homo sapien
gtgcatctccactgccttacgtttt

SEQ ID NO: 1734385 - DNA, 25 bp, Homo sapien
catctccactgccttacgttttggg

SEQ ID NO: 1734386 - DNA, 25 bp, Homo sapien
caatttgcctcctgaaatctcccat

SEQ ID NO: 1734387 - DNA, 25 bp, Homo sapien
tgaggaagggccagacacctccggg

SEQ ID NO: 1734388 - DNA, 25 bp, Homo sapien
ggcgagttttcatgctcatttggga

SEQ ID NO: 1734389 - DNA, 25 bp, Homo sapien
ttcaggcacagtgactgatttgtcc

SEQ ID NO: 1734390 - DNA, 25 bp, Homo sapien
tgttaattcaatgccagcaaggagg

SEQ ID NO: 1734391 - DNA, 25 bp, Homo sapien
catataatgaatccagggaatccca

SEQ ID NO: 1734392 - DNA, 25 bp, Homo sapien
cagcagaagcatcaagatcaggtcc

SEQ ID NO: 1734393 - DNA, 25 bp, Homo sapien
tctgaccccaaggaatccaggacac

SEQ ID NO: 1734394 - DNA, 25 bp, Homo sapien
agtgtactgctacagcccatagata

SEQ ID NO: 1734395 - DNA, 25 bp, Homo sapien
tccttaggagccaacatgacaggtg

SEQ ID NO: 1734396 - DNA, 25 bp, Homo sapien
gggctatcatacaacattcagtcag

SEQ ID NO: 1734397 - DNA, 25 bp, Homo sapien
tgatgagccgcttacaacagcagtt

SEQ ID NO: 1734398 - DNA, 25 bp, Homo sapien
ccttgaggtgatatgaaggaaacca

SEQ ID NO: 1734399 - DNA, 25 bp, Homo sapien
cacttgaatacgttcaaggagcagt

SEQ ID NO: 1734400 - DNA, 25 bp, Homo sapien
tcaaggagccaaatgtgccacttga

SEQ ID NO: 1734401 - DNA, 25 bp, Homo sapien
ccaagaggcatctcttcccagtgaa

SEQ ID NO: 1734402 - DNA, 25 bp, Homo sapien
gcagttcctccactgtaccaagagg

SEQ ID NO: 1734403 - DNA, 25 bp, Homo sapien
caaatgagatcttggcttgtaacat

SEQ ID NO: 1734404 - DNA, 25 bp, Homo sapien
ggttggcacgtttagcagatccatt

SEQ ID NO: 1734405 - DNA, 25 bp, Homo sapien
ccatttgtcaactgcttagtgaaac

SEQ ID NO: 1734406 - DNA, 25 bp, Homo sapien
cttgacatggttggcacgtttagca

SEQ ID NO: 1734407 - DNA, 25 bp, Homo sapien
tcagtcttcggagacagtttcttca

SEQ ID NO: 1734408 - DNA, 25 bp, Homo sapien
agtcttcggagacagtttcttcaca

SEQ ID NO: 1734409 - DNA, 25 bp, Homo sapien
cagtcttcggagacagtttcttcac

SEQ ID NO: 1734410 - DNA, 25 bp, Homo sapien
ggttgtcagtgccataatttgtgct

SEQ ID NO: 1734411 - DNA, 25 bp, Homo sapien
tacaagtgagggaagatattgatct

SEQ ID NO: 1734412 - DNA, 25 bp, Homo sapien
ccatttgcagcagaatactgctgtg

SEQ ID NO: 1734413 - DNA, 25 bp, Homo sapien
tgctgtgtcacaaatggtttacaag

SEQ ID NO: 1734414 - DNA, 25 bp, Homo sapien
agatattgatctggttcctttagca

SEQ ID NO: 1734415 - DNA, 25 bp, Homo sapien
caaggtagtgtatactatacttaat

SEQ ID NO: 1734416 - DNA, 25 bp, Homo sapien
tctcaggatgctaatgaaactttat

SEQ ID NO: 1734417 - DNA, 25 bp, Homo sapien
gaaactttattgcttgtattgagaa

SEQ ID NO: 1734418 - DNA, 25 bp, Homo sapien
tattgataattatgagatctcagga

SEQ ID NO: 1734419 - DNA, 25 bp, Homo sapien
tcctttgctaccgtattccatccag

SEQ ID NO: 1734420 - DNA, 25 bp, Homo sapien
cctccatagatttattggcaaaaca

SEQ ID NO: 1734421 - DNA, 25 bp, Homo sapien
ttgctaccgtattccatccagataa

SEQ ID NO: 1734422 - DNA, 25 bp, Homo sapien
tcttccattgtgatgaatcctccat

SEQ ID NO: 1734423 - DNA, 25 bp, Homo sapien
tcaaaatctttagatgtagatgctc

SEQ ID NO: 1734424 - DNA, 25 bp, Homo sapien
ctttagatgtagatgctctctcctg

SEQ ID NO: 1734425 - DNA, 25 bp, Homo sapien
cacctcaaaatctttagatgtagat

SEQ ID NO: 1734426 - DNA, 25 bp, Homo sapien
aatctttagatgtagatgctctctc

SEQ ID NO: 1734427 - DNA, 25 bp, Homo sapien
gataaaatgtagatgaccctgggct

SEQ ID NO: 1734428 - DNA, 25 bp, Homo sapien
gccaaaattggcaccctggttatag

SEQ ID NO: 1734429 - DNA, 25 bp, Homo sapien
cctatatgtggaaaactaaactctg

SEQ ID NO: 1734430 - DNA, 25 bp, Homo sapien
gaatagatagtccaaacatagaccc

SEQ ID NO: 1734431 - DNA, 25 bp, Homo sapien
gctatcagcaaagtccaatctgtct

SEQ ID NO: 1734432 - DNA, 25 bp, Homo sapien
ctgctatcagcaaagtccaatctgt

SEQ ID NO: 1734433 - DNA, 25 bp, Homo sapien
tatcagcaaagtccaatctgtcttc

SEQ ID NO: 1734434 - DNA, 25 bp, Homo sapien
agcaaagtccaatctgtcttcatat

SEQ ID NO: 1734435 - DNA, 25 bp, Homo sapien
gcgatcatctggccttatttaaaaa

SEQ ID NO: 1734436 - DNA, 25 bp, Homo sapien
gaatattagaagacattcagcgatc

SEQ ID NO: 1734437 - DNA, 25 bp, Homo sapien
cagagtttagatagaatgttgacta

SEQ ID NO: 1734438 - DNA, 25 bp, Homo sapien
aaatgtatctgttagaacaggtaac

SEQ ID NO: 1734439 - DNA, 25 bp, Homo sapien
cccttgtccttccacatcagtgtaa

SEQ ID NO: 1734440 - DNA, 25 bp, Homo sapien
tcagtgtaaccactcaacaggttca

SEQ ID NO: 1734441 - DNA, 25 bp, Homo sapien
aattcacacagagcagtctgaaagg

SEQ ID NO: 1734442 - DNA, 25 bp, Homo sapien
acctagagctgaaaacctgccaggc

SEQ ID NO: 1734443 - DNA, 25 bp, Homo sapien
gaatacctgcgtgaacatatgcatg

SEQ ID NO: 1734444 - DNA, 25 bp, Homo sapien
tgcagagcagacttgtggagaccac

SEQ ID NO: 1734445 - DNA, 25 bp, Homo sapien
cagcagccaattcttgtgtgggaga

SEQ ID NO: 1734446 - DNA, 25 bp, Homo sapien
gaagagtaaacagtggcgtctccct

SEQ ID NO: 1734447 - DNA, 25 bp, Homo sapien
gtccttcctttgatcctgtgtgctg

SEQ ID NO: 1734448 - DNA, 25 bp, Homo sapien
ggtccttcctttgatcctgtgtgct

SEQ ID NO: 1734449 - DNA, 25 bp, Homo sapien
ttctgaagtgaccttgcattgagat

SEQ ID NO: 1734450 - DNA, 25 bp, Homo sapien
cttctgaagtgaccttgcattgaga

SEQ ID NO: 1734451 - DNA, 25 bp, Homo sapien
gaagtagcttgatatctgcttgttc

SEQ ID NO: 1734452 - DNA, 25 bp, Homo sapien
taagaggatattgttctgaagtagc

SEQ ID NO: 1734453 - DNA, 25 bp, Homo sapien
gttctagtatcctgccaatctccat

SEQ ID NO: 1734454 - DNA, 25 bp, Homo sapien
tggcaactaagaggatattgttctg

SEQ ID NO: 1734455 - DNA, 25 bp, Homo sapien
ggttcgagctcagttgtttctaaat

SEQ ID NO: 1734456 - DNA, 25 bp, Homo sapien
tcaaggcagaagaaactcttaagct

SEQ ID NO: 1734457 - DNA, 25 bp, Homo sapien
gtgagatgactaattccaggccaga

SEQ ID NO: 1734458 - DNA, 25 bp, Homo sapien
aactggtccaagctttggttcgagc

SEQ ID NO: 1734459 - DNA, 25 bp, Homo sapien
ttcttcagtatgaaggactgtcaga

SEQ ID NO: 1734460 - DNA, 25 bp, Homo sapien
aaaatggcagctcgggttgtggtgg

SEQ ID NO: 1734461 - DNA, 25 bp, Homo sapien
atgaaaatggcagctcgggttgtgg

SEQ ID NO: 1734462 - DNA, 25 bp, Homo sapien
gactgtcagatatccatggcaggaa

SEQ ID NO: 1734463 - DNA, 25 bp, Homo sapien
ttccttctcagcgacccccactttc

SEQ ID NO: 1734464 - DNA, 25 bp, Homo sapien
tcagcgacccccactttcaattcgc

SEQ ID NO: 1734465 - DNA, 25 bp, Homo sapien
tcaattcgctcagtcgttctccaga

SEQ ID NO: 1734466 - DNA, 25 bp, Homo sapien
tttcaattcgctcagtcgttctcca

SEQ ID NO: 1734467 - DNA, 25 bp, Homo sapien
agactctgcctaatattgcttccat

SEQ ID NO: 1734468 - DNA, 25 bp, Homo sapien
tggttccactttccccttctgtagc

SEQ ID NO: 1734469 - DNA, 25 bp, Homo sapien
gttccactttccccttctgtagcat

SEQ ID NO: 1734470 - DNA, 25 bp, Homo sapien
ggttccactttccccttctgtagca

SEQ ID NO: 1734471 - DNA, 25 bp, Homo sapien
tgatttcagctgcttatgatgctta

SEQ ID NO: 1734472 - DNA, 25 bp, Homo sapien
tctcattttcgcttgatttcagctg

SEQ ID NO: 1734473 - DNA, 25 bp, Homo sapien
gaaggtgacatatctagagcaccga

SEQ ID NO: 1734474 - DNA, 25 bp, Homo sapien
taagatgtatagatgctgtagctct

SEQ ID NO: 1734475 - DNA, 25 bp, Homo sapien
ggtcaggaggccgaaatcagtctcc

SEQ ID NO: 1734476 - DNA, 25 bp, Homo sapien
gataaacacccgcaacaggcgggag

SEQ ID NO: 1734477 - DNA, 25 bp, Homo sapien
taacctgtaagacaatctgagcctg

SEQ ID NO: 1734478 - DNA, 25 bp, Homo sapien
gacaagatcactaagtcctcctccg

SEQ ID NO: 1734479 - DNA, 25 bp, Homo sapien
ctgaagatgttagtgttggtggcct

SEQ ID NO: 1734480 - DNA, 25 bp, Homo sapien
tcttgttctgaagatgttagtgttg

SEQ ID NO: 1734481 - DNA, 25 bp, Homo sapien
tgttctgaagatgttagtgttggtg

SEQ ID NO: 1734482 - DNA, 25 bp, Homo sapien
ttctgaagatgttagtgttggtggc

SEQ ID NO: 1734483 - DNA, 25 bp, Homo sapien
ggatatgtgattgcgatgttgttga

SEQ ID NO: 1734484 - DNA, 25 bp, Homo sapien
gcagccacacaagtaatgcttcatt

SEQ ID NO: 1734485 - DNA, 25 bp, Homo sapien
cgatgttgttgaaggctgcgcagca

SEQ ID NO: 1734486 - DNA, 25 bp, Homo sapien
cgtctgaatgggatatgtgattgcg

SEQ ID NO: 1734487 - DNA, 25 bp, Homo sapien
atattgcatcccgggttttgatgcc

SEQ ID NO: 1734488 - DNA, 25 bp, Homo sapien
gatgccatacagctgttgtcgaaag

SEQ ID NO: 1734489 - DNA, 25 bp, Homo sapien
catacagctgttgtcgaaagaggac

SEQ ID NO: 1734490 - DNA, 25 bp, Homo sapien
aaaatattgcatcccgggttttgat

SEQ ID NO: 1734491 - DNA, 25 bp, Homo sapien
gccgccatgcaacaggttgcaaact

SEQ ID NO: 1734492 - DNA, 25 bp, Homo sapien
cgtctgaactatttccggtggagtg

SEQ ID NO: 1734493 - DNA, 25 bp, Homo sapien
ggtcttgaatcaacgtctgaactat

SEQ ID NO: 1734494 - DNA, 25 bp, Homo sapien
agcactgccgccatgcaacaggttg

SEQ ID NO: 1734495 - DNA, 25 bp, Homo sapien
tcaaagcccgcaaaacaagacatta

SEQ ID NO: 1734496 - DNA, 25 bp, Homo sapien
gcccgcaaaacaagacattactgag

SEQ ID NO: 1734497 - DNA, 25 bp, Homo sapien
aagcccgcaaaacaagacattactg

SEQ ID NO: 1734498 - DNA, 25 bp, Homo sapien
cccgcaaaacaagacattactgagt

SEQ ID NO: 1734499 - DNA, 25 bp, Homo sapien
tctaagagataagggactgatggta

SEQ ID NO: 1734500 - DNA, 25 bp, Homo sapien
ctctaagagataagggactgatggt

SEQ ID NO: 1734501 - DNA, 25 bp, Homo sapien
aagggactgatggtaattcaaatgg

SEQ ID NO: 1734502 - DNA, 25 bp, Homo sapien
ggtgctgtatggttacttagcttca

SEQ ID NO: 1734503 - DNA, 25 bp, Homo sapien
aatatccagcacaatatcgtcagac

SEQ ID NO: 1734504 - DNA, 25 bp, Homo sapien
cagaggtgctgtatggttacttagc

SEQ ID NO: 1734505 - DNA, 25 bp, Homo sapien
caatatcgtcagacagaggtgctgt

SEQ ID NO: 1734506 - DNA, 25 bp, Homo sapien
cacaccgcctgagaatttcaattca

SEQ ID NO: 1734507 - DNA, 25 bp, Homo sapien
ccccacaccgcctgagaatttcaat

SEQ ID NO: 1734508 - DNA, 25 bp, Homo sapien
cccacaccgcctgagaatttcaatt

SEQ ID NO: 1734509 - DNA, 25 bp, Homo sapien
caccgcctgagaatttcaattcaaa

SEQ ID NO: 1734510 - DNA, 25 bp, Homo sapien
tatctcatttgaattgcctccacag

SEQ ID NO: 1734511 - DNA, 25 bp, Homo sapien
ccaatgaacacattcgtttatctca

SEQ ID NO: 1734512 - DNA, 25 bp, Homo sapien
gaacacattcgtttatctcatttga

SEQ ID NO: 1734513 - DNA, 25 bp, Homo sapien
atctcatttgaattgcctccacagt

SEQ ID NO: 1734514 - DNA, 25 bp, Homo sapien
gcaactctcagggccttaacccaag

SEQ ID NO: 1734515 - DNA, 25 bp, Homo sapien
ctctcagggccttaacccaagaagt

SEQ ID NO: 1734516 - DNA, 25 bp, Homo sapien
caatattgctcaggctttttcacca

SEQ ID NO: 1734517 - DNA, 25 bp, Homo sapien
tgtggtgtgtgtcttgcaatattgc

SEQ ID NO: 1734518 - DNA, 25 bp, Homo sapien
ctttttgaaaatattgagagacaga

SEQ ID NO: 1734519 - DNA, 25 bp, Homo sapien
gagagacagagacttcctggatgac

SEQ ID NO: 1734520 - DNA, 25 bp, Homo sapien
agacagagacttcctggatgactca

SEQ ID NO: 1734521 - DNA, 25 bp, Homo sapien
attgagagacagagacttcctggat

SEQ ID NO: 1734522 - DNA, 25 bp, Homo sapien
tcttttcttgatcaagaacaatttt

SEQ ID NO: 1734523 - DNA, 25 bp, Homo sapien
gtcttttcttgatcaagaacaattt

SEQ ID NO: 1734524 - DNA, 25 bp, Homo sapien
tgtcttttcttgatcaagaacaatt

SEQ ID NO: 1734525 - DNA, 25 bp, Homo sapien
aaatttggcatgtgaggcagccagc

SEQ ID NO: 1734526 - DNA, 25 bp, Homo sapien
taaatttggcatgtgaggcagccag

SEQ ID NO: 1734527 - DNA, 25 bp, Homo sapien
gggtgtggagctgccaatgccagag

SEQ ID NO: 1734528 - DNA, 25 bp, Homo sapien
gccaatgccagagggtttgttgcat

SEQ ID NO: 1734529 - DNA, 25 bp, Homo sapien
gtggagctgccaatgccagagggtt

SEQ ID NO: 1734530 - DNA, 25 bp, Homo sapien
ttcaatgatcacttccacctctggg

SEQ ID NO: 1734531 - DNA, 25 bp, Homo sapien
tctggattagaatctaatgatagaa

SEQ ID NO: 1734532 - DNA, 25 bp, Homo sapien
ctggattagaatctaatgatagaaa

SEQ ID NO: 1734533 - DNA, 25 bp, Homo sapien
tggattagaatctaatgatagaaat

SEQ ID NO: 1734534 - DNA, 25 bp, Homo sapien
ggattagaatctaatgatagaaatg

SEQ ID NO: 1734535 - DNA, 25 bp, Homo sapien
ggtgtatttagagtgatatgcctgc

SEQ ID NO: 1734536 - DNA, 25 bp, Homo sapien
tcaggtgtatttagagtgatatgcc

SEQ ID NO: 1734537 - DNA, 25 bp, Homo sapien
tatttagagtgatatgcctgcagac

SEQ ID NO: 1734538 - DNA, 25 bp, Homo sapien
atgagatcaggtgtatttagagtga

SEQ ID NO: 1734539 - DNA, 25 bp, Homo sapien
tccataacaaatttgctggctctca

SEQ ID NO: 1734540 - DNA, 25 bp, Homo sapien
tggtccaccactaacgtcaactttg

SEQ ID NO: 1734541 - DNA, 25 bp, Homo sapien
aataagtcttataatggtaggctcc

SEQ ID NO: 1734542 - DNA, 25 bp, Homo sapien
tctcaacttagtgtggccatgcagc

SEQ ID NO: 1734543 - DNA, 25 bp, Homo sapien
tgtaagcacagggaaacaactaggc

SEQ ID NO: 1734544 - DNA, 25 bp, Homo sapien
cttgggagcaagtctgcctattaaa

SEQ ID NO: 1734545 - DNA, 25 bp, Homo sapien
ttgtcttactcttcaccctcttggg

SEQ ID NO: 1734546 - DNA, 25 bp, Homo sapien
tctcttcagctattccatgacatct

SEQ ID NO: 1734547 - DNA, 25 bp, Homo sapien
acaacacaatatggcaagatgaagg

SEQ ID NO: 1734548 - DNA, 25 bp, Homo sapien
tgagcagtactgacaacaacacaat

SEQ ID NO: 1734549 - DNA, 25 bp, Homo sapien
gaaggggatgtccagacattcacaa

SEQ ID NO: 1734550 - DNA, 25 bp, Homo sapien
gccaactctggccaatattgaaagg

SEQ ID NO: 1734551 - DNA, 25 bp, Homo sapien
tactgcccacaatgtccaatttaag

SEQ ID NO: 1734552 - DNA, 25 bp, Homo sapien
tttactgcccacaatgtccaattta

SEQ ID NO: 1734553 - DNA, 25 bp, Homo sapien
ttactgcccacaatgtccaatttaa

SEQ ID NO: 1734554 - DNA, 25 bp, Homo sapien
cacagaggcagttaattaagaggta

SEQ ID NO: 1734555 - DNA, 25 bp, Homo sapien
gcagttaattaagaggtagccatga

SEQ ID NO: 1734556 - DNA, 25 bp, Homo sapien
ctgcagctgtaatgtaggatctgca

SEQ ID NO: 1734557 - DNA, 25 bp, Homo sapien
taatgtaggatctgcatgggacaga

SEQ ID NO: 1734558 - DNA, 25 bp, Homo sapien
ccacagaagcatgtagatcacccat

SEQ ID NO: 1734559 - DNA, 25 bp, Homo sapien
gacaaccacagaagcatgtagatca

SEQ ID NO: 1734560 - DNA, 25 bp, Homo sapien
tcaagattggcaatatggacaacca

SEQ ID NO: 1734561 - DNA, 25 bp, Homo sapien
gattggcaatatggacaaccacaga

SEQ ID NO: 1734562 - DNA, 25 bp, Homo sapien
ccttcattggcattagggcattcac

SEQ ID NO: 1734563 - DNA, 25 bp, Homo sapien
gatgtccaaaaggttaaaggcttca

SEQ ID NO: 1734564 - DNA, 25 bp, Homo sapien
taaaggcttcacagaccttcattgg

SEQ ID NO: 1734565 - DNA, 25 bp, Homo sapien
tctttttgcttagaagaagttgtga

SEQ ID NO: 1734566 - DNA, 25 bp, Homo sapien
tagctatctaaaagatgcatgaagc

SEQ ID NO: 1734567 - DNA, 25 bp, Homo sapien
tgggctttaaacacagatgctacac

SEQ ID NO: 1734568 - DNA, 25 bp, Homo sapien
gatgctacaccaccctatggatcta

SEQ ID NO: 1734569 - DNA, 25 bp, Homo sapien
tccacgggaggacttagacttgcca

SEQ ID NO: 1734570 - DNA, 25 bp, Homo sapien
gcttgttaacgccaccttggattca

SEQ ID NO: 1734571 - DNA, 25 bp, Homo sapien
gatagaatcaaatttcctagtgact

SEQ ID NO: 1734572 - DNA, 25 bp, Homo sapien
aatgatagaatcaaatttcctagtg

SEQ ID NO: 1734573 - DNA, 25 bp, Homo sapien
ccaccttggattcaggaatgataga

SEQ ID NO: 1734574 - DNA, 25 bp, Homo sapien
ggttcataggcgtaagcagaaaaac

SEQ ID NO: 1734575 - DNA, 25 bp, Homo sapien
tacttcttatgttctggttcatagg

SEQ ID NO: 1734576 - DNA, 25 bp, Homo sapien
tacagcttagattagtaacagaggc

SEQ ID NO: 1734577 - DNA, 25 bp, Homo sapien
cttagattagtaacagaggctgctt

SEQ ID NO: 1734578 - DNA, 25 bp, Homo sapien
accaaatttcttaagtgcaccctag

SEQ ID NO: 1734579 - DNA, 25 bp, Homo sapien
tttgagacaggttgatcatcttgag

SEQ ID NO: 1734580 - DNA, 25 bp, Homo sapien
gaaaatctatactatgtgacacatt

SEQ ID NO: 1734581 - DNA, 25 bp, Homo sapien
gatcatcttgagtacaccaaatttc

SEQ ID NO: 1734582 - DNA, 25 bp, Homo sapien
tgaataatctgaacaacttcagaac

SEQ ID NO: 1734583 - DNA, 25 bp, Homo sapien
taatctgaacaacttcagaacttga

SEQ ID NO: 1734584 - DNA, 25 bp, Homo sapien
ataatctgaacaacttcagaacttg

SEQ ID NO: 1734585 - DNA, 25 bp, Homo sapien
gaataatctgaacaacttcagaact

SEQ ID NO: 1734586 - DNA, 25 bp, Homo sapien
gaggcagtttatctagttcctgact

SEQ ID NO: 1734587 - DNA, 25 bp, Homo sapien
gtcagccaagtctacttctgcaaga

SEQ ID NO: 1734588 - DNA, 25 bp, Homo sapien
cattccttaacagatatgtcagcca

SEQ ID NO: 1734589 - DNA, 25 bp, Homo sapien
tcctgactgtacttggtattgtagt

SEQ ID NO: 1734590 - DNA, 25 bp, Homo sapien
cacatggttgccatcatcagggatc

SEQ ID NO: 1734591 - DNA, 25 bp, Homo sapien
tgtagtataacaggacttctgaggc

SEQ ID NO: 1734592 - DNA, 25 bp, Homo sapien
ggttctgtagtataacaggacttct

SEQ ID NO: 1734593 - DNA, 25 bp, Homo sapien
ctgatgcagtgaactgtagactagg

SEQ ID NO: 1734594 - DNA, 25 bp, Homo sapien
gaactgtagactaggttctgtagta

SEQ ID NO: 1734595 - DNA, 25 bp, Homo sapien
tcagcctaaattttgctctatcttc

SEQ ID NO: 1734596 - DNA, 25 bp, Homo sapien
acatcctgtctatgatcaggtctgt

SEQ ID NO: 1734597 - DNA, 25 bp, Homo sapien
tatgatcaggtctgtagcggtagta

SEQ ID NO: 1734598 - DNA, 25 bp, Homo sapien
tcctgtctatgatcaggtctgtagc

SEQ ID NO: 1734599 - DNA, 25 bp, Homo sapien
tgtctatgatcaggtctgtagcggt

SEQ ID NO: 1734600 - DNA, 25 bp, Homo sapien
cagggcccttactgggtagagttat

SEQ ID NO: 1734601 - DNA, 25 bp, Homo sapien
ccttactgggtagagttataaccat

SEQ ID NO: 1734602 - DNA, 25 bp, Homo sapien
tgcagggcccttactgggtagagtt

SEQ ID NO: 1734603 - DNA, 25 bp, Homo sapien
tctgcagggcccttactgggtagag

SEQ ID NO: 1734604 - DNA, 25 bp, Homo sapien
ctaagtaacaatatccgagtcaata

SEQ ID NO: 1734605 - DNA, 25 bp, Homo sapien
gtaacaatatccgagtcaataatga

SEQ ID NO: 1734606 - DNA, 25 bp, Homo sapien
aagtaacaatatccgagtcaataat

SEQ ID NO: 1734607 - DNA, 25 bp, Homo sapien
aacaatatccgagtcaataatgact

SEQ ID NO: 1734608 - DNA, 25 bp, Homo sapien
acatgaatctgggttgtttgtttgc

SEQ ID NO: 1734609 - DNA, 25 bp, Homo sapien
cagttctctggtttatacatgaatc

SEQ ID NO: 1734610 - DNA, 25 bp, Homo sapien
cttgttttggaacgagaaagtggag

SEQ ID NO: 1734611 - DNA, 25 bp, Homo sapien
ggcaatctaaattccagttctctgg

SEQ ID NO: 1734612 - DNA, 25 bp, Homo sapien
agtaatggtgtcagttcttgaaatg

SEQ ID NO: 1734613 - DNA, 25 bp, Homo sapien
taagtaatggtgtcagttcttgaaa

SEQ ID NO: 1734614 - DNA, 25 bp, Homo sapien
ttaagtaatggtgtcagttcttgaa

SEQ ID NO: 1734615 - DNA, 25 bp, Homo sapien
aagtaatggtgtcagttcttgaaat

SEQ ID NO: 1734616 - DNA, 25 bp, Homo sapien
ttcttaggcgaaggcatttgaaaga

SEQ ID NO: 1734617 - DNA, 25 bp, Homo sapien
atcttcttaggcgaaggcatttgaa

SEQ ID NO: 1734618 - DNA, 25 bp, Homo sapien
cttaggcgaaggcatttgaaagaac

SEQ ID NO: 1734619 - DNA, 25 bp, Homo sapien
gattgatcttcttaggcgaaggcat

SEQ ID NO: 1734620 - DNA, 25 bp, Homo sapien
tatatactcaaagtggaatactcgg

SEQ ID NO: 1734621 - DNA, 25 bp, Homo sapien
ctaatactgagtataagttatatac

SEQ ID NO: 1734622 - DNA, 25 bp, Homo sapien
tggaatactcggtactgttgccaga

SEQ ID NO: 1734623 - DNA, 25 bp, Homo sapien
ctcggtactgttgccagaatttagg

SEQ ID NO: 1734624 - DNA, 25 bp, Homo sapien
taatcaaagagataaagtgttcgtt

SEQ ID NO: 1734625 - DNA, 25 bp, Homo sapien
gttattatctgccaaaaattttcag

SEQ ID NO: 1734626 - DNA, 25 bp, Homo sapien
cctaactaaatctgactgaaataag

SEQ ID NO: 1734627 - DNA, 25 bp, Homo sapien
actgaatcttttacccagaggcaag

SEQ ID NO: 1734628 - DNA, 25 bp, Homo sapien
tacttaaaatttacatccatgaaaa

SEQ ID NO: 1734629 - DNA, 25 bp, Homo sapien
atttacatccatgaaaaaatttact

SEQ ID NO: 1734630 - DNA, 25 bp, Homo sapien
cagtacttaaaatttacatccatga

SEQ ID NO: 1734631 - DNA, 25 bp, Homo sapien
gtacttaaaatttacatccatgaaa

SEQ ID NO: 1734632 - DNA, 25 bp, Homo sapien
ctgtagttccaacaattaaatataa

SEQ ID NO: 1734633 - DNA, 25 bp, Homo sapien
caattaaatataattgactgaaatt

SEQ ID NO: 1734634 - DNA, 25 bp, Homo sapien
tccaacaattaaatataattgactg

SEQ ID NO: 1734635 - DNA, 25 bp, Homo sapien
taaatataattgactgaaatttatc

SEQ ID NO: 1734636 - DNA, 25 bp, Homo sapien
ggatttgagtggaagtataactcag

SEQ ID NO: 1734637 - DNA, 25 bp, Homo sapien
gcaacaaaggtgttagattctgatt

SEQ ID NO: 1734638 - DNA, 25 bp, Homo sapien
ctcagatgacagaatccatgatata

SEQ ID NO: 1734639 - DNA, 25 bp, Homo sapien
ctaataccagaatgtttgaacaagg

SEQ ID NO: 1734640 - DNA, 25 bp, Homo sapien
cgtgcatctccatgtgttgactcat

SEQ ID NO: 1734641 - DNA, 25 bp, Homo sapien
tgactgtgtgccgtgcatctccatg

SEQ ID NO: 1734642 - DNA, 25 bp, Homo sapien
ggatttttagtttgccctgactgtg

SEQ ID NO: 1734643 - DNA, 25 bp, Homo sapien
gtttgccctgactgtgtgccgtgca

SEQ ID NO: 1734644 - DNA, 25 bp, Homo sapien
aatctcactgttcatatgttccttt

SEQ ID NO: 1734645 - DNA, 25 bp, Homo sapien
aaatctcactgttcatatgttcctt

SEQ ID NO: 1734646 - DNA, 25 bp, Homo sapien
aaagggttgaggacttcccagacag

SEQ ID NO: 1734647 - DNA, 25 bp, Homo sapien
ggcaccgcatttgtatagccatcag

SEQ ID NO: 1734648 - DNA, 25 bp, Homo sapien
gtatagccatcagtgtttataaaat

SEQ ID NO: 1734649 - DNA, 25 bp, Homo sapien
aacaaaagctgcagcaaaagggttg

SEQ ID NO: 1734650 - DNA, 25 bp, Homo sapien
tgatgagcgccctacattcctgcag

SEQ ID NO: 1734651 - DNA, 25 bp, Homo sapien
tctcttctcggagattacttcacac

SEQ ID NO: 1734652 - DNA, 25 bp, Homo sapien
cacacggcatgtgatgagcgcccta

SEQ ID NO: 1734653 - DNA, 25 bp, Homo sapien
cctgcagttcagtggctgtatgacc

SEQ ID NO: 1734654 - DNA, 25 bp, Homo sapien
gattagatgtacatcagagctgtca

SEQ ID NO: 1734655 - DNA, 25 bp, Homo sapien
gtcacactctgtcttatcttttacc

SEQ ID NO: 1734656 - DNA, 25 bp, Homo sapien
ttctgattagatgtacatcagagct

SEQ ID NO: 1734657 - DNA, 25 bp, Homo sapien
cacactctgtcttatcttttaccct

SEQ ID NO: 1734658 - DNA, 25 bp, Homo sapien
ctctgtcatctttgaactagcattt

SEQ ID NO: 1734659 - DNA, 25 bp, Homo sapien
gcaacaaaattccaagctgtgggta

SEQ ID NO: 1734660 - DNA, 25 bp, Homo sapien
gctgtgggtaaacctgaattacacg

SEQ ID NO: 1734661 - DNA, 25 bp, Homo sapien
gaaatctcttcccttaatctctgtc

SEQ ID NO: 1734662 - DNA, 25 bp, Homo sapien
agtctccctgaaagattcatctctg

SEQ ID NO: 1734663 - DNA, 25 bp, Homo sapien
tgttgtccccatctgaactggacga

SEQ ID NO: 1734664 - DNA, 25 bp, Homo sapien
aaccccaggttgctgttgtccccat

SEQ ID NO: 1734665 - DNA, 25 bp, Homo sapien
tcatctctgagtttgcaggtgccag

SEQ ID NO: 1734666 - DNA, 25 bp, Homo sapien
tgagtgagacaatcatcaaatccaa

SEQ ID NO: 1734667 - DNA, 25 bp, Homo sapien
cacttctctgagtgagacaatcatc

SEQ ID NO: 1734668 - DNA, 25 bp, Homo sapien
tctctgagtgagacaatcatcaaat

SEQ ID NO: 1734669 - DNA, 25 bp, Homo sapien
tctgagtgagacaatcatcaaatcc

SEQ ID NO: 1734670 - DNA, 25 bp, Homo sapien
actttgagaattagttcctcattcc

SEQ ID NO: 1734671 - DNA, 25 bp, Homo sapien
gaaacactactttgagaattagttc

SEQ ID NO: 1734672 - DNA, 25 bp, Homo sapien
cttctgtaaggatattccttgaatg

SEQ ID NO: 1734673 - DNA, 25 bp, Homo sapien
aagaagaaacactactttgagaatt

SEQ ID NO: 1734674 - DNA, 25 bp, Homo sapien
tagtctcatcactgaaagggcaaac

SEQ ID NO: 1734675 - DNA, 25 bp, Homo sapien
ttgactagtctcatcactgaaaggg

SEQ ID NO: 1734676 - DNA, 25 bp, Homo sapien
aagtaacagatccacatcagcttca

SEQ ID NO: 1734677 - DNA, 25 bp, Homo sapien
cattgactcaggcttgctaaagatt

SEQ ID NO: 1734678 - DNA, 25 bp, Homo sapien
actttcggagcctcagattgtgcat

SEQ ID NO: 1734679 - DNA, 25 bp, Homo sapien
ctccagatctctttgtatctgctgt

SEQ ID NO: 1734680 - DNA, 25 bp, Homo sapien
gtgtctctgagttgataaggagcat

SEQ ID NO: 1734681 - DNA, 25 bp, Homo sapien
tctccagatctctttgtatctgctg

SEQ ID NO: 1734682 - DNA, 25 bp, Homo sapien
tggacacagcatccgataataacaa

SEQ ID NO: 1734683 - DNA, 25 bp, Homo sapien
acacagcatccgataataacaactg

SEQ ID NO: 1734684 - DNA, 25 bp, Homo sapien
ctattggacacagcatccgataata

SEQ ID NO: 1734685 - DNA, 25 bp, Homo sapien
ttggacacagcatccgataataaca

SEQ ID NO: 1734686 - DNA, 25 bp, Homo sapien
tgatggtagacaggggcactcctac

SEQ ID NO: 1734687 - DNA, 25 bp, Homo sapien
aggtagctaagtgtgatggtagaca

SEQ ID NO: 1734688 - DNA, 25 bp, Homo sapien
gggcactcctactttcaccactgag

SEQ ID NO: 1734689 - DNA, 25 bp, Homo sapien
gagtggctagacacaagtttttgac

SEQ ID NO: 1734690 - DNA, 25 bp, Homo sapien
ttagcacaaggagcctacactgatc

SEQ ID NO: 1734691 - DNA, 25 bp, Homo sapien
tcattgacatgggaagtacaaaatc

SEQ ID NO: 1734692 - DNA, 25 bp, Homo sapien
ttagagttatcgttacagcctccgg

SEQ ID NO: 1734693 - DNA, 25 bp, Homo sapien
ccagaacctgatgttattagagtta

SEQ ID NO: 1734694 - DNA, 25 bp, Homo sapien
caatacgctgttgataattgtgatc

SEQ ID NO: 1734695 - DNA, 25 bp, Homo sapien
catctgatgagccacatatctccct

SEQ ID NO: 1734696 - DNA, 25 bp, Homo sapien
aattgtgatcaataacactagaaag

SEQ ID NO: 1734697 - DNA, 25 bp, Homo sapien
aaattttaacagcagcccaatacgc

SEQ ID NO: 1734698 - DNA, 25 bp, Homo sapien
aatgcaagtccacatattatctgtg

SEQ ID NO: 1734699 - DNA, 25 bp, Homo sapien
caatttgccttgagaatatgatata

SEQ ID NO: 1734700 - DNA, 25 bp, Homo sapien
caaagctcactatgtagacttcttg

SEQ ID NO: 1734701 - DNA, 25 bp, Homo sapien
gatgcaggagatatgatcagaacag

SEQ ID NO: 1734702 - DNA, 25 bp, Homo sapien
tcaggtatcccaaaagtcttaattc

SEQ ID NO: 1734703 - DNA, 25 bp, Homo sapien
tgttttcaaggtgggtggtggagta

SEQ ID NO: 1734704 - DNA, 25 bp, Homo sapien
gggtggtggagtataagttctcaaa

SEQ ID NO: 1734705 - DNA, 25 bp, Homo sapien
tgggtggtggagtataagttctcaa

SEQ ID NO: 1734706 - DNA, 25 bp, Homo sapien
aggcttgttaattcccagtactcca

SEQ ID NO: 1734707 - DNA, 25 bp, Homo sapien
caaggcttgttaattcccagtactc

SEQ ID NO: 1734708 - DNA, 25 bp, Homo sapien
tttagctctgcttggtactgaaacc

SEQ ID NO: 1734709 - DNA, 25 bp, Homo sapien
ctttagctctgcttggtactgaaac

SEQ ID NO: 1734710 - DNA, 25 bp, Homo sapien
tagcacactgtgactacacctcttg

SEQ ID NO: 1734711 - DNA, 25 bp, Homo sapien
tgtgactacacctcttgcttctgca

SEQ ID NO: 1734712 - DNA, 25 bp, Homo sapien
actgtgactacacctcttgcttctg

SEQ ID NO: 1734713 - DNA, 25 bp, Homo sapien
tctgctctagcacactgtgactaca

SEQ ID NO: 1734714 - DNA, 25 bp, Homo sapien
tgtaagtccacaataacttatccat

SEQ ID NO: 1734715 - DNA, 25 bp, Homo sapien
ctgttttatgagcttgggtattttt

SEQ ID NO: 1734716 - DNA, 25 bp, Homo sapien
cctaggtctgaatgatctaagtgca

SEQ ID NO: 1734717 - DNA, 25 bp, Homo sapien
taattagatccaaagcgtccggagg

SEQ ID NO: 1734718 - DNA, 25 bp, Homo sapien
tagaagtgctataatccctcagaat

SEQ ID NO: 1734719 - DNA, 25 bp, Homo sapien
gaatcgacttcatgctgtagacaca

SEQ ID NO: 1734720 - DNA, 25 bp, Homo sapien
taggatttttcttccgaactttgca

SEQ ID NO: 1734721 - DNA, 25 bp, Homo sapien
tgctgtaggatttttcttccgaact

SEQ ID NO: 1734722 - DNA, 25 bp, Homo sapien
gtgctgtaggatttttcttccgaac

SEQ ID NO: 1734723 - DNA, 25 bp, Homo sapien
ctgcaaaggaggggcacccagctcc

SEQ ID NO: 1734724 - DNA, 25 bp, Homo sapien
tgcaaaggaggggcacccagctccc

SEQ ID NO: 1734725 - DNA, 25 bp, Homo sapien
caaaggaggggcacccagctcccat

SEQ ID NO: 1734726 - DNA, 25 bp, Homo sapien
gcaaaggaggggcacccagctccca

SEQ ID NO: 1734727 - DNA, 25 bp, Homo sapien
tgtccagccctcaggttatagactt

SEQ ID NO: 1734728 - DNA, 25 bp, Homo sapien
cactggcagcatgctagaacagcta

SEQ ID NO: 1734729 - DNA, 25 bp, Homo sapien
cgattgtgatgccattccaggatga

SEQ ID NO: 1734730 - DNA, 25 bp, Homo sapien
aaagcagtctgcattccgattgtga

SEQ ID NO: 1734731 - DNA, 25 bp, Homo sapien
catgatatttgtgcccatatcatgc

SEQ ID NO: 1734732 - DNA, 25 bp, Homo sapien
gcatgatatttgtgcccatatcatg

SEQ ID NO: 1734733 - DNA, 25 bp, Homo sapien
agcatgatatttgtgcccatatcat

SEQ ID NO: 1734734 - DNA, 25 bp, Homo sapien
tgatatttgtgcccatatcatgcct

SEQ ID NO: 1734735 - DNA, 25 bp, Homo sapien
ggtccttctcctagggcttggctga

SEQ ID NO: 1734736 - DNA, 25 bp, Homo sapien
gcttggctgaccaacagatatcatg

SEQ ID NO: 1734737 - DNA, 25 bp, Homo sapien
gggcttagctacttcatgcatttga

SEQ ID NO: 1734738 - DNA, 25 bp, Homo sapien
ggttaattaaatgcaggctggctta

SEQ ID NO: 1734739 - DNA, 25 bp, Homo sapien
gctggcaggctcagttgggccaaaa

SEQ ID NO: 1734740 - DNA, 25 bp, Homo sapien
gctcagttgggccaaaagtctccac

SEQ ID NO: 1734741 - DNA, 25 bp, Homo sapien
cactgggctggcaggctcagttggg

SEQ ID NO: 1734742 - DNA, 25 bp, Homo sapien
gcaggctcagttgggccaaaagtct

SEQ ID NO: 1734743 - DNA, 25 bp, Homo sapien
catttccagaattgggaacccagtt

SEQ ID NO: 1734744 - DNA, 25 bp, Homo sapien
cagcatttccagaattgggaaccca

SEQ ID NO: 1734745 - DNA, 25 bp, Homo sapien
ttcagcatttccagaattgggaacc

SEQ ID NO: 1734746 - DNA, 25 bp, Homo sapien
gcatttccagaattgggaacccagt

SEQ ID NO: 1734747 - DNA, 25 bp, Homo sapien
gctaccaccatcattaggtcacttg

SEQ ID NO: 1734748 - DNA, 25 bp, Homo sapien
attaggtcacttgctccaacactat

SEQ ID NO: 1734749 - DNA, 25 bp, Homo sapien
cattaggtcacttgctccaacacta

SEQ ID NO: 1734750 - DNA, 25 bp, Homo sapien
tctcagggcaatggagctcctctgg

SEQ ID NO: 1734751 - DNA, 25 bp, Homo sapien
cacataccccagtagacttctcagg

SEQ ID NO: 1734752 - DNA, 25 bp, Homo sapien
acataagctgttctactctccacat

SEQ ID NO: 1734753 - DNA, 25 bp, Homo sapien
tgtcagccgaatggtcaatctcagc

SEQ ID NO: 1734754 - DNA, 25 bp, Homo sapien
atgaggagaagcgatgcgtgtactt

SEQ ID NO: 1734755 - DNA, 25 bp, Homo sapien
aggagaagcgatgcgtgtacttcta

SEQ ID NO: 1734756 - DNA, 25 bp, Homo sapien
tgcatgaggagaagcgatgcgtgta

SEQ ID NO: 1734757 - DNA, 25 bp, Homo sapien
gaagcgatgcgtgtacttctaggca

SEQ ID NO: 1734758 - DNA, 25 bp, Homo sapien
aactaaaggcttcaatgaaaaatgt

SEQ ID NO: 1734759 - DNA, 25 bp, Homo sapien
actaaaggcttcaatgaaaaatgta

SEQ ID NO: 1734760 - DNA, 25 bp, Homo sapien
ctaaaggcttcaatgaaaaatgtat

SEQ ID NO: 1734761 - DNA, 25 bp, Homo sapien
aaaggcttcaatgaaaaatgtataa

SEQ ID NO: 1734762 - DNA, 25 bp, Homo sapien
ctttcagcactagttttgctgccaa

SEQ ID NO: 1734763 - DNA, 25 bp, Homo sapien
ctcttgtgctgataatgagcttctg

SEQ ID NO: 1734764 - DNA, 25 bp, Homo sapien
gctgccaactcttgtgctgataatg

SEQ ID NO: 1734765 - DNA, 25 bp, Homo sapien
gcactagttttgctgccaactcttg

SEQ ID NO: 1734766 - DNA, 25 bp, Homo sapien
tatattttaatcgaatgggggccat

SEQ ID NO: 1734767 - DNA, 25 bp, Homo sapien
ggacttgccctttctatatttctat

SEQ ID NO: 1734768 - DNA, 25 bp, Homo sapien
aaagacagagtagtcaagctttcag

SEQ ID NO: 1734769 - DNA, 25 bp, Homo sapien
aatgatgtttgatcttataatggcc

SEQ ID NO: 1734770 - DNA, 25 bp, Homo sapien
caaaaatggcagtattctcgtcttc

SEQ ID NO: 1734771 - DNA, 25 bp, Homo sapien
caggtagagcctccattatttgact

SEQ ID NO: 1734772 - DNA, 25 bp, Homo sapien
cagcagataacttgaatgtgcacca

SEQ ID NO: 1734773 - DNA, 25 bp, Homo sapien
ttgactatccttggccactatgtgt

SEQ ID NO: 1734774 - DNA, 25 bp, Homo sapien
ttctatttggagagttatctactgg

SEQ ID NO: 1734775 - DNA, 25 bp, Homo sapien
gttctcttctatttggagagttatc

SEQ ID NO: 1734776 - DNA, 25 bp, Homo sapien
tcttctatttggagagttatctact

SEQ ID NO: 1734777 - DNA, 25 bp, Homo sapien
tatttggagagttatctactggcat

SEQ ID NO: 1734778 - DNA, 25 bp, Homo sapien
ttttctaaatctagatgactccgtc

SEQ ID NO: 1734779 - DNA, 25 bp, Homo sapien
tcagctgatcctccgtaactctatg

SEQ ID NO: 1734780 - DNA, 25 bp, Homo sapien
gactccgtctaagtaactgatagaa

SEQ ID NO: 1734781 - DNA, 25 bp, Homo sapien
gaaagtccatatctttatctatgga

SEQ ID NO: 1734782 - DNA, 25 bp, Homo sapien
ttccatcacccacatatccgtcctc

SEQ ID NO: 1734783 - DNA, 25 bp, Homo sapien
catcacccacatatccgtcctcctt

SEQ ID NO: 1734784 - DNA, 25 bp, Homo sapien
tccatcacccacatatccgtcctcc

SEQ ID NO: 1734785 - DNA, 25 bp, Homo sapien
tcacccacatatccgtcctccttct

SEQ ID NO: 1734786 - DNA, 25 bp, Homo sapien
tcacaataatgctgtatgcagttct

SEQ ID NO: 1734787 - DNA, 25 bp, Homo sapien
tatatgtctaacataaggtggtcca

SEQ ID NO: 1734788 - DNA, 25 bp, Homo sapien
ttccttccataatcaatgggttggg

SEQ ID NO: 1734789 - DNA, 25 bp, Homo sapien
gggttggggtatatgtctaacataa

SEQ ID NO: 1734790 - DNA, 25 bp, Homo sapien
ggttgttgacatgatgtcaacccca

SEQ ID NO: 1734791 - DNA, 25 bp, Homo sapien
tgttgacatgatgtcaaccccaaat

SEQ ID NO: 1734792 - DNA, 25 bp, Homo sapien
tgacatgatgtcaaccccaaatttg

SEQ ID NO: 1734793 - DNA, 25 bp, Homo sapien
tttggttgttgacatgatgtcaacc

SEQ ID NO: 1734794 - DNA, 25 bp, Homo sapien
gcagaggaggacacttgttgttcca

SEQ ID NO: 1734795 - DNA, 25 bp, Homo sapien
cagaggaggacacttgttgttccat

SEQ ID NO: 1734796 - DNA, 25 bp, Homo sapien
ggcagaggaggacacttgttgttcc

SEQ ID NO: 1734797 - DNA, 25 bp, Homo sapien
caggcagaggaggacacttgttgtt

SEQ ID NO: 1734798 - DNA, 25 bp, Homo sapien
ttatgtctgtatccgtccaatttta

SEQ ID NO: 1734799 - DNA, 25 bp, Homo sapien
tgtttatgtctgtatccgtccaatt

SEQ ID NO: 1734800 - DNA, 25 bp, Homo sapien
gggccatgtttatgtctgtatccgt

SEQ ID NO: 1734801 - DNA, 25 bp, Homo sapien
catgtttatgtctgtatccgtccaa

SEQ ID NO: 1734802 - DNA, 25 bp, Homo sapien
tgtattccctaacaagataaaaggc

SEQ ID NO: 1734803 - DNA, 25 bp, Homo sapien
caggaaggttagtatggactcaaat

SEQ ID NO: 1734804 - DNA, 25 bp, Homo sapien
gactcagtcagagcaagcataccta

SEQ ID NO: 1734805 - DNA, 25 bp, Homo sapien
tgtgtgtcatgagtccaaccaagaa

SEQ ID NO: 1734806 - DNA, 25 bp, Homo sapien
caaaaagtttgacctgtaacagact

SEQ ID NO: 1734807 - DNA, 25 bp, Homo sapien
gtaacagactgagtaatcaattgcg

SEQ ID NO: 1734808 - DNA, 25 bp, Homo sapien
gtttgacctgtaacagactgagtaa

SEQ ID NO: 1734809 - DNA, 25 bp, Homo sapien
cagactgagtaatcaattgcgataa

SEQ ID NO: 1734810 - DNA, 25 bp, Homo sapien
ggcttactggtattgtttgttgaaa

SEQ ID NO: 1734811 - DNA, 25 bp, Homo sapien
tcctcaccaaagtttgcagtactct

SEQ ID NO: 1734812 - DNA, 25 bp, Homo sapien
tttgcagtactctttattctatcca

SEQ ID NO: 1734813 - DNA, 25 bp, Homo sapien
actttaataaagatagcttgttcct

SEQ ID NO: 1734814 - DNA, 25 bp, Homo sapien
aatatttcaattaccaagacggcca

SEQ ID NO: 1734815 - DNA, 25 bp, Homo sapien
tgagcccacaatttcgagacaaccc

SEQ ID NO: 1734816 - DNA, 25 bp, Homo sapien
tcaattaccaagacggccaggtgca

SEQ ID NO: 1734817 - DNA, 25 bp, Homo sapien
caatttcgagacaaccctgggcaat

SEQ ID NO: 1734818 - DNA, 25 bp, Homo sapien
tcttacacagttccggtagagatct

SEQ ID NO: 1734819 - DNA, 25 bp, Homo sapien
gcataatgcggaagaaacacgtaag

SEQ ID NO: 1734820 - DNA, 25 bp, Homo sapien
gatctattagagaagcgagcttgca

SEQ ID NO: 1734821 - DNA, 25 bp, Homo sapien
gggcaaactggcacccagaatctga

SEQ ID NO: 1734822 - DNA, 25 bp, Homo sapien
gaaaaggatagacatcattcctgga

SEQ ID NO: 1734823 - DNA, 25 bp, Homo sapien
tatagtgagtttggctaatccaaaa

SEQ ID NO: 1734824 - DNA, 25 bp, Homo sapien
agtagagtttatagtgagtttggct

SEQ ID NO: 1734825 - DNA, 25 bp, Homo sapien
gaggcaagattttgacaattgtcaa

SEQ ID NO: 1734826 - DNA, 25 bp, Homo sapien
tttacttttccaagaggatctctca

SEQ ID NO: 1734827 - DNA, 25 bp, Homo sapien
ttttacttttccaagaggatctctc

SEQ ID NO: 1734828 - DNA, 25 bp, Homo sapien
tccctctcccaagaggtgatgaaag

SEQ ID NO: 1734829 - DNA, 25 bp, Homo sapien
gaggctatggagtagagttttttgc

SEQ ID NO: 1734830 - DNA, 25 bp, Homo sapien
caaattctttataagtgctagctac

SEQ ID NO: 1734831 - DNA, 25 bp, Homo sapien
tgctagctacagtgggaaatcgaat

SEQ ID NO: 1734832 - DNA, 25 bp, Homo sapien
tttgccaagcattatagggtcttat

SEQ ID NO: 1734833 - DNA, 25 bp, Homo sapien
ttaagctccaatgaaatgacattta

SEQ ID NO: 1734834 - DNA, 25 bp, Homo sapien
cattatagggtcttataacatgact

SEQ ID NO: 1734835 - DNA, 25 bp, Homo sapien
ttctttatcatgtcatcccagcttt

SEQ ID NO: 1734836 - DNA, 25 bp, Homo sapien
tgaggtccacattgacagattgaga

SEQ ID NO: 1734837 - DNA, 25 bp, Homo sapien
gtacaatcctattggtacagtgagg

SEQ ID NO: 1734838 - DNA, 25 bp, Homo sapien
tgaaggtgggccttctaagtgaacc

SEQ ID NO: 1734839 - DNA, 25 bp, Homo sapien
agcttcaccaagacaacatttttca

SEQ ID NO: 1734840 - DNA, 25 bp, Homo sapien
gagggctcagtaagtccaatatgaa

SEQ ID NO: 1734841 - DNA, 25 bp, Homo sapien
aataaaagtattctggcccaattca

SEQ ID NO: 1734842 - DNA, 25 bp, Homo sapien
cagtaagtccaatatgaataaaagt

SEQ ID NO: 1734843 - DNA, 25 bp, Homo sapien
tattctggcccaattcatcagacat

SEQ ID NO: 1734844 - DNA, 25 bp, Homo sapien
gatgtctcaggagacttccgatcat

SEQ ID NO: 1734845 - DNA, 25 bp, Homo sapien
gggatgtctcaggagacttccgatc

SEQ ID NO: 1734846 - DNA, 25 bp, Homo sapien
atgtctcaggagacttccgatcatg

SEQ ID NO: 1734847 - DNA, 25 bp, Homo sapien
ggatgtctcaggagacttccgatca

SEQ ID NO: 1734848 - DNA, 25 bp, Homo sapien
aggagggggcatcacaggtactacc

SEQ ID NO: 1734849 - DNA, 25 bp, Homo sapien
cttctgcagaagtttaagtagttct

SEQ ID NO: 1734850 - DNA, 25 bp, Homo sapien
ccatagttgattcttatgttgctaa

SEQ ID NO: 1734851 - DNA, 25 bp, Homo sapien
aagtagttcttctaggattccagag

SEQ ID NO: 1734852 - DNA, 25 bp, Homo sapien
ggctgccaatggtagcggttatgac

SEQ ID NO: 1734853 - DNA, 25 bp, Homo sapien
aatgttgagctgtgatgcagtccca

SEQ ID NO: 1734854 - DNA, 25 bp, Homo sapien
ggtgaatcgactgaagtgcctaagg

SEQ ID NO: 1734855 - DNA, 25 bp, Homo sapien
taacaacactcccagtagctaaggg

SEQ ID NO: 1734856 - DNA, 25 bp, Homo sapien
tttctcgctctggtaacatctcgcc

SEQ ID NO: 1734857 - DNA, 25 bp, Homo sapien
ggcagtcacataatctaactctggc

SEQ ID NO: 1734858 - DNA, 25 bp, Homo sapien
gatctaagacatgttacaaacggtt

SEQ ID NO: 1734859 - DNA, 25 bp, Homo sapien
taagatcccgtctcctttgccatgc

SEQ ID NO: 1734860 - DNA, 25 bp, Homo sapien
aaagctgtgaaagtcactcatttcc

SEQ ID NO: 1734861 - DNA, 25 bp, Homo sapien
gaaagctgtgaaagtcactcatttc

SEQ ID NO: 1734862 - DNA, 25 bp, Homo sapien
agaaagctgtgaaagtcactcattt

SEQ ID NO: 1734863 - DNA, 25 bp, Homo sapien
cttcagtatgtagttaggttaagcg

SEQ ID NO: 1734864 - DNA, 25 bp, Homo sapien
tatgtagttaggttaagcgccagtg

SEQ ID NO: 1734865 - DNA, 25 bp, Homo sapien
taggttaagcgccagtggtcaaact

SEQ ID NO: 1734866 - DNA, 25 bp, Homo sapien
taagcgccagtggtcaaactggaaa

SEQ ID NO: 1734867 - DNA, 25 bp, Homo sapien
gtttcagtatcggttccagatgtaa

SEQ ID NO: 1734868 - DNA, 25 bp, Homo sapien
tcagtatcggttccagatgtaaaat

SEQ ID NO: 1734869 - DNA, 25 bp, Homo sapien
aaagtttcagtatcggttccagatg

SEQ ID NO: 1734870 - DNA, 25 bp, Homo sapien
cagaaagtttcagtatcggttccag

SEQ ID NO: 1734871 - DNA, 25 bp, Homo sapien
ttatgcttcgcaacactttctgctt

SEQ ID NO: 1734872 - DNA, 25 bp, Homo sapien
ttttcctcgctccaagtttgtctcc

SEQ ID NO: 1734873 - DNA, 25 bp, Homo sapien
tctgcttttcctcgctccaagtttg

SEQ ID NO: 1734874 - DNA, 25 bp, Homo sapien
tgcttttcctcgctccaagtttgtc

SEQ ID NO: 1734875 - DNA, 25 bp, Homo sapien
gaaaagactctgtgaggttgccact

SEQ ID NO: 1734876 - DNA, 25 bp, Homo sapien
gcattttctctgctattatgttgac

SEQ ID NO: 1734877 - DNA, 25 bp, Homo sapien
gaatcctttacttctatgtcaggag

SEQ ID NO: 1734878 - DNA, 25 bp, Homo sapien
tctgttgatcccaaagaaaagactc

SEQ ID NO: 1734879 - DNA, 25 bp, Homo sapien
tctaggcagtatttgtgtgcagttt

SEQ ID NO: 1734880 - DNA, 25 bp, Homo sapien
tcctgctggactggtttcttgcttc

SEQ ID NO: 1734881 - DNA, 25 bp, Homo sapien
ttactaagattactacacagagttc

SEQ ID NO: 1734882 - DNA, 25 bp, Homo sapien
tatgatggatagtaggattgtctcc

SEQ ID NO: 1734883 - DNA, 25 bp, Homo sapien
gctcgagcaatcctcttgctttggc

SEQ ID NO: 1734884 - DNA, 25 bp, Homo sapien
aggtttactatgttgtccagtctgg

SEQ ID NO: 1734885 - DNA, 25 bp, Homo sapien
tccagtctggtctcaaactcctggg

SEQ ID NO: 1734886 - DNA, 25 bp, Homo sapien
ctgggctcgagcaatcctcttgctt

SEQ ID NO: 1734887 - DNA, 25 bp, Homo sapien
caatatagtgtctgcagaaccaagt

SEQ ID NO: 1734888 - DNA, 25 bp, Homo sapien
tagtgtctgcagaaccaagtttaca

SEQ ID NO: 1734889 - DNA, 25 bp, Homo sapien
tcttgtgcaatatagtgtctgcaga

SEQ ID NO: 1734890 - DNA, 25 bp, Homo sapien
cagtttcttgtgcaatatagtgtct

SEQ ID NO: 1734891 - DNA, 25 bp, Homo sapien
tgtgcttactgcaatttaactttcc

SEQ ID NO: 1734892 - DNA, 25 bp, Homo sapien
ccagaaaagtacctgtcctcgtcat

SEQ ID NO: 1734893 - DNA, 25 bp, Homo sapien
gcaatttaactttcctaacatgttc

SEQ ID NO: 1734894 - DNA, 25 bp, Homo sapien
cctcgtcattgctgtgatgtgctta

SEQ ID NO: 1734895 - DNA, 25 bp, Homo sapien
agattttgacgagaagaaccttggc

SEQ ID NO: 1734896 - DNA, 25 bp, Homo sapien
gaagaaccttggcaaacacaaccac

SEQ ID NO: 1734897 - DNA, 25 bp, Homo sapien
tccagtgcagattttgacgagaaga

SEQ ID NO: 1734898 - DNA, 25 bp, Homo sapien
aaccttggcaaacacaaccacgcag

SEQ ID NO: 1734899 - DNA, 25 bp, Homo sapien
tatggaagcatacctgactaaagtc

SEQ ID NO: 1734900 - DNA, 25 bp, Homo sapien
tgatcctcatatgtctaccagatgg

SEQ ID NO: 1734901 - DNA, 25 bp, Homo sapien
aatggaaccaagaacgccttgaggc

SEQ ID NO: 1734902 - DNA, 25 bp, Homo sapien
gctgttgctgttaatctccggagga

SEQ ID NO: 1734903 - DNA, 25 bp, Homo sapien
ccattctcatgacaacagagcctag

SEQ ID NO: 1734904 - DNA, 25 bp, Homo sapien
cagagcctagaggatagtgctaacc

SEQ ID NO: 1734905 - DNA, 25 bp, Homo sapien
cttatgataaatcatttatgttccc

SEQ ID NO: 1734906 - DNA, 25 bp, Homo sapien
acatagatccaaaccataacacctc

SEQ ID NO: 1734907 - DNA, 25 bp, Homo sapien
tgcatgaattggcattgctccacca

SEQ ID NO: 1734908 - DNA, 25 bp, Homo sapien
gacactctcttgctgattgcagtaa

SEQ ID NO: 1734909 - DNA, 25 bp, Homo sapien
gaagctggcttagcctgtggcacag

SEQ ID NO: 1734910 - DNA, 25 bp, Homo sapien
cacagtctagagcagagtgcctcag

SEQ ID NO: 1734911 - DNA, 25 bp, Homo sapien
aaagcaaacacttcctcacctgatg

SEQ ID NO: 1734912 - DNA, 25 bp, Homo sapien
gattctgtgtggaggcctaaagcaa

SEQ ID NO: 1734913 - DNA, 25 bp, Homo sapien
cagaaggctcacataagtcctggaa

SEQ ID NO: 1734914 - DNA, 25 bp, Homo sapien
gatgtgatatgaaggagtccaactg

SEQ ID NO: 1734915 - DNA, 25 bp, Homo sapien
tatagattcagctgtagtcagttgc

SEQ ID NO: 1734916 - DNA, 25 bp, Homo sapien
ttgttagaacacatatagattcagc

SEQ ID NO: 1734917 - DNA, 25 bp, Homo sapien
gctgtagtcagttgcttttcaaaga

SEQ ID NO: 1734918 - DNA, 25 bp, Homo sapien
agaacacatatagattcagctgtag

SEQ ID NO: 1734919 - DNA, 25 bp, Homo sapien
ggatagggctgttctcggcgcaaac

SEQ ID NO: 1734920 - DNA, 25 bp, Homo sapien
tctcggcgcaaacaacatttctctc

SEQ ID NO: 1734921 - DNA, 25 bp, Homo sapien
tagggctgttctcggcgcaaacaac

SEQ ID NO: 1734922 - DNA, 25 bp, Homo sapien
tgttctcggcgcaaacaacatttct

SEQ ID NO: 1734923 - DNA, 25 bp, Homo sapien
tccattcttcagcatgcttagcagc

SEQ ID NO: 1734924 - DNA, 25 bp, Homo sapien
cattcttcagcatgcttagcagcct

SEQ ID NO: 1734925 - DNA, 25 bp, Homo sapien
ccattcttcagcatgcttagcagcc

SEQ ID NO: 1734926 - DNA, 25 bp, Homo sapien
tccattcacaaataattgaggtcac

SEQ ID NO: 1734927 - DNA, 25 bp, Homo sapien
tctccattcacaaataattgaggtc

SEQ ID NO: 1734928 - DNA, 25 bp, Homo sapien
tcatacacccattctccattcacaa

SEQ ID NO: 1734929 - DNA, 25 bp, Homo sapien
atacacccattctccattcacaaat

SEQ ID NO: 1734930 - DNA, 25 bp, Homo sapien
ttgtaataccacagagccacccctt

SEQ ID NO: 1734931 - DNA, 25 bp, Homo sapien
tgtaataccacagagccaccccttt

SEQ ID NO: 1734932 - DNA, 25 bp, Homo sapien
tcactcatgctgctgctatagcatg

SEQ ID NO: 1734933 - DNA, 25 bp, Homo sapien
ggaaacattgcgctggcttcactca

SEQ ID NO: 1734934 - DNA, 25 bp, Homo sapien
ctatttgctgatgtatggaaacatt

SEQ ID NO: 1734935 - DNA, 25 bp, Homo sapien
gctgctgctatagcatgctctcttt

SEQ ID NO: 1734936 - DNA, 25 bp, Homo sapien
caatatgtaatgtaggtcatcttca

SEQ ID NO: 1734937 - DNA, 25 bp, Homo sapien
aaatcttgaataacttgtttgattc

SEQ ID NO: 1734938 - DNA, 25 bp, Homo sapien
attcaaatcttgaataacttgtttg

SEQ ID NO: 1734939 - DNA, 25 bp, Homo sapien
tatgtaatgtaggtcatcttcaaaa

SEQ ID NO: 1734940 - DNA, 25 bp, Homo sapien
cttgtagttcctatgttttccgtga

SEQ ID NO: 1734941 - DNA, 25 bp, Homo sapien
tgtagttcctatgttttccgtgaat

SEQ ID NO: 1734942 - DNA, 25 bp, Homo sapien
tttccgtgaattttgctacatccca

SEQ ID NO: 1734943 - DNA, 25 bp, Homo sapien
ctgacttgtagttcctatgttttcc

SEQ ID NO: 1734944 - DNA, 25 bp, Homo sapien
caacatgaatcaggggaaggatgga

SEQ ID NO: 1734945 - DNA, 25 bp, Homo sapien
aatcaggggaaggatggatctctga

SEQ ID NO: 1734946 - DNA, 25 bp, Homo sapien
catgaatcaggggaaggatggatct

SEQ ID NO: 1734947 - DNA, 25 bp, Homo sapien
tgaatcaggggaaggatggatctct

SEQ ID NO: 1734948 - DNA, 25 bp, Homo sapien
gcttttgtctattttgcatggaaaa

SEQ ID NO: 1734949 - DNA, 25 bp, Homo sapien
tattttgcatggaaaagtcaacctt

SEQ ID NO: 1734950 - DNA, 25 bp, Homo sapien
ctgtagcagtatatcttggtttgga

SEQ ID NO: 1734951 - DNA, 25 bp, Homo sapien
gttgagcaaagtggtcttttatgac

SEQ ID NO: 1734952 - DNA, 25 bp, Homo sapien
caactgtgtctttggtcctcactcc

SEQ ID NO: 1734953 - DNA, 25 bp, Homo sapien
cacactttgaataggatttatcccc

SEQ ID NO: 1734954 - DNA, 25 bp, Homo sapien
tgtcacacattgctgcacactttga

SEQ ID NO: 1734955 - DNA, 25 bp, Homo sapien
aataggatttatccccttccaactg

SEQ ID NO: 1734956 - DNA, 25 bp, Homo sapien
agaaatggtaagaagctccaggcac

SEQ ID NO: 1734957 - DNA, 25 bp, Homo sapien
gcacactaccacattaggattccag

SEQ ID NO: 1734958 - DNA, 25 bp, Homo sapien
gataaggtagacaacttcttctgga

SEQ ID NO: 1734959 - DNA, 25 bp, Homo sapien
cctccaggttagtggaaagatcagc

SEQ ID NO: 1734960 - DNA, 25 bp, Homo sapien
gattccttactctgggaaaccaggc

SEQ ID NO: 1734961 - DNA, 25 bp, Homo sapien
gattggtggcattcagattccttac

SEQ ID NO: 1734962 - DNA, 25 bp, Homo sapien
gaaggctgaacattgatactggtta

SEQ ID NO: 1734963 - DNA, 25 bp, Homo sapien
gatagtgaagggtatcttctaaaga

SEQ ID NO: 1734964 - DNA, 25 bp, Homo sapien
tgctataggcaaatgccggatacag

SEQ ID NO: 1734965 - DNA, 25 bp, Homo sapien
aatattctaattccctggccgcctg

SEQ ID NO: 1734966 - DNA, 25 bp, Homo sapien
actcagctctatgtagcgtaaaatt

SEQ ID NO: 1734967 - DNA, 25 bp, Homo sapien
gcgtaaaatttatgcatctatggct

SEQ ID NO: 1734968 - DNA, 25 bp, Homo sapien
tctcctagtggggataatgtctttc

SEQ ID NO: 1734969 - DNA, 25 bp, Homo sapien
gaccagagtttgatagagagagcaa

SEQ ID NO: 1734970 - DNA, 25 bp, Homo sapien
gtggggataatgtctttcagactcc

SEQ ID NO: 1734971 - DNA, 25 bp, Homo sapien
accagagtttgatagagagagcaaa

SEQ ID NO: 1734972 - DNA, 25 bp, Homo sapien
taccttctatctcattttcctccat

SEQ ID NO: 1734973 - DNA, 25 bp, Homo sapien
aataccttctatctcattttcctcc

SEQ ID NO: 1734974 - DNA, 25 bp, Homo sapien
ctctaataccttctatctcattttc

SEQ ID NO: 1734975 - DNA, 25 bp, Homo sapien
taataccttctatctcattttcctc

SEQ ID NO: 1734976 - DNA, 25 bp, Homo sapien
cttgggtctcatgctaagaagctct

SEQ ID NO: 1734977 - DNA, 25 bp, Homo sapien
acataaatagacattggagcatgag

SEQ ID NO: 1734978 - DNA, 25 bp, Homo sapien
gatggacataaatagacattggagc

SEQ ID NO: 1734979 - DNA, 25 bp, Homo sapien
gacatagatcagaggcttgggtctc

SEQ ID NO: 1734980 - DNA, 25 bp, Homo sapien
acctgaacatccacccagttttgtg

SEQ ID NO: 1734981 - DNA, 25 bp, Homo sapien
agtgtctacctgaacatccacccag

SEQ ID NO: 1734982 - DNA, 25 bp, Homo sapien
tcagtgtctacctgaacatccaccc

SEQ ID NO: 1734983 - DNA, 25 bp, Homo sapien
caggtgcctctggggtattgaaaaa

SEQ ID NO: 1734984 - DNA, 25 bp, Homo sapien
gtctgtcaactcctgttgggagttt

SEQ ID NO: 1734985 - DNA, 25 bp, Homo sapien
ttatcccagaggggagcccgccaga

SEQ ID NO: 1734986 - DNA, 25 bp, Homo sapien
ggagttttctcccagttaggaggca

SEQ ID NO: 1734987 - DNA, 25 bp, Homo sapien
gttttctcccagttaggaggcatgg

SEQ ID NO: 1734988 - DNA, 25 bp, Homo sapien
caaagccataggatttcataaattc

SEQ ID NO: 1734989 - DNA, 25 bp, Homo sapien
agttagcaaagccataggatttcat

SEQ ID NO: 1734990 - DNA, 25 bp, Homo sapien
gttagcaaagccataggatttcata

SEQ ID NO: 1734991 - DNA, 25 bp, Homo sapien
tagcaaagccataggatttcataaa

SEQ ID NO: 1734992 - DNA, 25 bp, Homo sapien
cctgatacaggatccccttgcgctg

SEQ ID NO: 1734993 - DNA, 25 bp, Homo sapien
gttcgcagagaaacatctacggttg

SEQ ID NO: 1734994 - DNA, 25 bp, Homo sapien
gtcataactctcagttccaacagca

SEQ ID NO: 1734995 - DNA, 25 bp, Homo sapien
tcctgaagggacatatgtactacag

SEQ ID NO: 1734996 - DNA, 25 bp, Homo sapien
ccataaaatgtgctctcccagattt

SEQ ID NO: 1734997 - DNA, 25 bp, Homo sapien
gtttaattgctcctcagagatgtcc

SEQ ID NO: 1734998 - DNA, 25 bp, Homo sapien
tctagcagaaatgccattgtctctg

SEQ ID NO: 1734999 - DNA, 25 bp, Homo sapien
ttagtttaattgctcctcagagatg

SEQ ID NO: 1735000 - DNA, 25 bp, Homo sapien
gaaccttgcgccgtatccaactgaa

SEQ ID NO: 1735001 - DNA, 25 bp, Homo sapien
aaagcgctgagacgagaagtgaccg

SEQ ID NO: 1735002 - DNA, 25 bp, Homo sapien
tacaggagtattcgtggtcggatcg

SEQ ID NO: 1735003 - DNA, 25 bp, Homo sapien
ggtcggatcggaaggctcaagctta

SEQ ID NO: 1735004 - DNA, 25 bp, Homo sapien
ttgtttagcctttgagctgataaaa

SEQ ID NO: 1735005 - DNA, 25 bp, Homo sapien
tttagcctttgagctgataaaagtg

SEQ ID NO: 1735006 - DNA, 25 bp, Homo sapien
aaagtctttaggctgcagtctcttc

SEQ ID NO: 1735007 - DNA, 25 bp, Homo sapien
gcctttgagctgataaaagtgatgc

SEQ ID NO: 1735008 - DNA, 25 bp, Homo sapien
tgatcaaactgataagccaggagtg

SEQ ID NO: 1735009 - DNA, 25 bp, Homo sapien
gaagtcttgggcagcattaaatcca

SEQ ID NO: 1735010 - DNA, 25 bp, Homo sapien
gattttccagcgtccaagtgcagtt

SEQ ID NO: 1735011 - DNA, 25 bp, Homo sapien
taaatcagcaggttacgaacagcct

SEQ ID NO: 1735012 - DNA, 25 bp, Homo sapien
tacatggcaaccaaactggcttggg

SEQ ID NO: 1735013 - DNA, 25 bp, Homo sapien
tgtagaaaaacgaaagcattcttgg

SEQ ID NO: 1735014 - DNA, 25 bp, Homo sapien
gcttgggctgaccttgttcaatacc

SEQ ID NO: 1735015 - DNA, 25 bp, Homo sapien
ttctgtaatcctgggaaattagttg

SEQ ID NO: 1735016 - DNA, 25 bp, Homo sapien
tctgctcattcaggggtaacaccac

SEQ ID NO: 1735017 - DNA, 25 bp, Homo sapien
ttctttgggtggtcgcttggcctcc

SEQ ID NO: 1735018 - DNA, 25 bp, Homo sapien
tggcctccctggtaagattgcagac

SEQ ID NO: 1735019 - DNA, 25 bp, Homo sapien
caaaatcagcgactggtcgtcgatc

SEQ ID NO: 1735020 - DNA, 25 bp, Homo sapien
tcctttcccccagctagctctgaga

SEQ ID NO: 1735021 - DNA, 25 bp, Homo sapien
cctctcttcgtgtacgtcaaccggg

SEQ ID NO: 1735022 - DNA, 25 bp, Homo sapien
gctagctctgagacattccctctct

SEQ ID NO: 1735023 - DNA, 25 bp, Homo sapien
ttcttccgcatttccgttgcacttc

SEQ ID NO: 1735024 - DNA, 25 bp, Homo sapien
agcttggcgactggagtttggctgt

SEQ ID NO: 1735025 - DNA, 25 bp, Homo sapien
gatctttgtggcaatcagaaaacat

SEQ ID NO: 1735026 - DNA, 25 bp, Homo sapien
ggactggagcttggcgactggagtt

SEQ ID NO: 1735027 - DNA, 25 bp, Homo sapien
gggatctttgtggcaatcagaaaac

SEQ ID NO: 1735028 - DNA, 25 bp, Homo sapien
tagcattaggctatttcggttctcc

SEQ ID NO: 1735029 - DNA, 25 bp, Homo sapien
gaaaattctccaacaacgtgtcaat

SEQ ID NO: 1735030 - DNA, 25 bp, Homo sapien
cagccagcagagaaatagcattagg

SEQ ID NO: 1735031 - DNA, 25 bp, Homo sapien
caaagccttggctacacttaaagaa

SEQ ID NO: 1735032 - DNA, 25 bp, Homo sapien
gcttcttattctaggggacactaat

SEQ ID NO: 1735033 - DNA, 25 bp, Homo sapien
taaatggtgttaaataccatccctg

SEQ ID NO: 1735034 - DNA, 25 bp, Homo sapien
taccatccctgcagttgcaaatgct

SEQ ID NO: 1735035 - DNA, 25 bp, Homo sapien
cactgccattagtctgcattcattt

SEQ ID NO: 1735036 - DNA, 25 bp, Homo sapien
tgagggcaaacagaacaaaggtaaa

SEQ ID NO: 1735037 - DNA, 25 bp, Homo sapien
ctgagggcaaacagaacaaaggtaa

SEQ ID NO: 1735038 - DNA, 25 bp, Homo sapien
catcctggcagtgacatacgaaaaa

SEQ ID NO: 1735039 - DNA, 25 bp, Homo sapien
tatgtgcaaaggtctgtgggatcca

SEQ ID NO: 1735040 - DNA, 25 bp, Homo sapien
gcgaccagccgagatgaaaatattg

SEQ ID NO: 1735041 - DNA, 25 bp, Homo sapien
ttacaggtgcaagacactgcgacca

SEQ ID NO: 1735042 - DNA, 25 bp, Homo sapien
tctggtagagttagatggaattttt

SEQ ID NO: 1735043 - DNA, 25 bp, Homo sapien
tttacttgaagaactcagtctggta

SEQ ID NO: 1735044 - DNA, 25 bp, Homo sapien
caatatttactaaaaccatgttcag

SEQ ID NO: 1735045 - DNA, 25 bp, Homo sapien
tggataattgaaagcctcagggttt

SEQ ID NO: 1735046 - DNA, 25 bp, Homo sapien
gatcataatcaagagtgaataacag

SEQ ID NO: 1735047 - DNA, 25 bp, Homo sapien
taatcaagagtgaataacagtaaca

SEQ ID NO: 1735048 - DNA, 25 bp, Homo sapien
ctaacatagatcataatcaagagtg

SEQ ID NO: 1735049 - DNA, 25 bp, Homo sapien
caagagtgaataacagtaacactga

SEQ ID NO: 1735050 - DNA, 25 bp, Homo sapien
gacacatatctctatggctttatga

SEQ ID NO: 1735051 - DNA, 25 bp, Homo sapien
caaaacagacacatatctctatggc

SEQ ID NO: 1735052 - DNA, 25 bp, Homo sapien
acagacacatatctctatggcttta

SEQ ID NO: 1735053 - DNA, 25 bp, Homo sapien
acatatctctatggctttatgatcc

SEQ ID NO: 1735054 - DNA, 25 bp, Homo sapien
cagccgtgtagctaggtcattctct

SEQ ID NO: 1735055 - DNA, 25 bp, Homo sapien
cgtgtagctaggtcattctctgcaa

SEQ ID NO: 1735056 - DNA, 25 bp, Homo sapien
gctaggtcattctctgcaagtgcac

SEQ ID NO: 1735057 - DNA, 25 bp, Homo sapien
ttacagccgtgtagctaggtcattc

SEQ ID NO: 1735058 - DNA, 25 bp, Homo sapien
cttggcatacaagttaattagttca

SEQ ID NO: 1735059 - DNA, 25 bp, Homo sapien
ctctggtcctagagaataaacacca

SEQ ID NO: 1735060 - DNA, 25 bp, Homo sapien
acagtaagctagcaggcgatgagga

SEQ ID NO: 1735061 - DNA, 25 bp, Homo sapien
ctagcaggcgatgaggatgaagact

SEQ ID NO: 1735062 - DNA, 25 bp, Homo sapien
gtgccctggcgatgaaaactcctct

SEQ ID NO: 1735063 - DNA, 25 bp, Homo sapien
agctggtgccctggcgatgaaaact

SEQ ID NO: 1735064 - DNA, 25 bp, Homo sapien
cctcttgcagtggatatctctgtag

SEQ ID NO: 1735065 - DNA, 25 bp, Homo sapien
gcgatgaaaactcctcttgcagtgg

SEQ ID NO: 1735066 - DNA, 25 bp, Homo sapien
ggctagaaatctaacttcgaggtag

SEQ ID NO: 1735067 - DNA, 25 bp, Homo sapien
gaggtagatcctttctttggcaaga

SEQ ID NO: 1735068 - DNA, 25 bp, Homo sapien
taagggcgctaatcccactgtcatc

SEQ ID NO: 1735069 - DNA, 25 bp, Homo sapien
tctcagtccacttttgtaagggcgc

SEQ ID NO: 1735070 - DNA, 25 bp, Homo sapien
tctatttgctttcctagcaccctct

SEQ ID NO: 1735071 - DNA, 25 bp, Homo sapien
aagcagatcacaacaccgtctattt

SEQ ID NO: 1735072 - DNA, 25 bp, Homo sapien
tccacaggctggaataaatatcttt

SEQ ID NO: 1735073 - DNA, 25 bp, Homo sapien
gcaccctctcactaaaccacatttt

SEQ ID NO: 1735074 - DNA, 25 bp, Homo sapien
tataaacgactagctatgggtagac

SEQ ID NO: 1735075 - DNA, 25 bp, Homo sapien
gactagctatgggtagactacaata

SEQ ID NO: 1735076 - DNA, 25 bp, Homo sapien
tcttaattataaacgactagctatg

SEQ ID NO: 1735077 - DNA, 25 bp, Homo sapien
gctatgggtagactacaatattata

SEQ ID NO: 1735078 - DNA, 25 bp, Homo sapien
ctcactagaacaggacatattgccg

SEQ ID NO: 1735079 - DNA, 25 bp, Homo sapien
catattgccgaaaaggagtttctta

SEQ ID NO: 1735080 - DNA, 25 bp, Homo sapien
ggagtttcttaagtacctggatgaa

SEQ ID NO: 1735081 - DNA, 25 bp, Homo sapien
agtacctggatgaatccagatgtgc

SEQ ID NO: 1735082 - DNA, 25 bp, Homo sapien
ttagccataatcacttgtgcaaaat

SEQ ID NO: 1735083 - DNA, 25 bp, Homo sapien
tatgaattagccataatcacttgtg

SEQ ID NO: 1735084 - DNA, 25 bp, Homo sapien
aaatagagattggaaatcagttttc

SEQ ID NO: 1735085 - DNA, 25 bp, Homo sapien
agcattctggaaggaataggaattc

SEQ ID NO: 1735086 - DNA, 25 bp, Homo sapien
gaaatggaccatcaagcatgctttt

SEQ ID NO: 1735087 - DNA, 25 bp, Homo sapien
gaagggatgggctaacagcagaccc

SEQ ID NO: 1735088 - DNA, 25 bp, Homo sapien
tgtcactgacatagagcttaggtat

SEQ ID NO: 1735089 - DNA, 25 bp, Homo sapien
ccagcagtcaagtcaacctcagttt

SEQ ID NO: 1735090 - DNA, 25 bp, Homo sapien
aaaggcagccttaaacaatgtgtca

SEQ ID NO: 1735091 - DNA, 25 bp, Homo sapien
tctgctgttacagcgcaaaggcagc

SEQ ID NO: 1735092 - DNA, 25 bp, Homo sapien
tatggaaacacagggttgagagaca

SEQ ID NO: 1735093 - DNA, 25 bp, Homo sapien
tgtgtcatcaaatagacgtggctgt

SEQ ID NO: 1735094 - DNA, 25 bp, Homo sapien
tcttcctaggacaataaactattga

SEQ ID NO: 1735095 - DNA, 25 bp, Homo sapien
aactattgaaatatagaaactgacc

SEQ ID NO: 1735096 - DNA, 25 bp, Homo sapien
gaaatgtttgttttcaccataagca

SEQ ID NO: 1735097 - DNA, 25 bp, Homo sapien
tataaaagatgctgctagtctccaa

SEQ ID NO: 1735098 - DNA, 25 bp, Homo sapien
gctttgggagctaccaaacatcacc

SEQ ID NO: 1735099 - DNA, 25 bp, Homo sapien
aaagttcaacagtcatctctggtga

SEQ ID NO: 1735100 - DNA, 25 bp, Homo sapien
gatgagaacgattatatcacccaga

SEQ ID NO: 1735101 - DNA, 25 bp, Homo sapien
aaatctcatctggacatgttactgg

SEQ ID NO: 1735102 - DNA, 25 bp, Homo sapien
tatgcatgcccaagattgaaccaca

SEQ ID NO: 1735103 - DNA, 25 bp, Homo sapien
gacggctctttctgagattcatgac

SEQ ID NO: 1735104 - DNA, 25 bp, Homo sapien
taatctttacgtttgcagtgctcag

SEQ ID NO: 1735105 - DNA, 25 bp, Homo sapien
tcaaattcaccctacctgggagagg

SEQ ID NO: 1735106 - DNA, 25 bp, Homo sapien
gcgtccatggaataatgatctcaca

SEQ ID NO: 1735107 - DNA, 25 bp, Homo sapien
cagtctaatgccataagcgtccatg

SEQ ID NO: 1735108 - DNA, 25 bp, Homo sapien
gtgattgctgctctataaagactgc

SEQ ID NO: 1735109 - DNA, 25 bp, Homo sapien
catggtaaaaagacaatccctgggt

SEQ ID NO: 1735110 - DNA, 25 bp, Homo sapien
ctcagggcacattacattacacaga

SEQ ID NO: 1735111 - DNA, 25 bp, Homo sapien
taattacagtatgcccccttgcgtt

SEQ ID NO: 1735112 - DNA, 25 bp, Homo sapien
atatcactatatcacatcctcaggg

SEQ ID NO: 1735113 - DNA, 25 bp, Homo sapien
ggagggcttatagttgtatcacacc

SEQ ID NO: 1735114 - DNA, 25 bp, Homo sapien
aattttttcattggtggcatttaag

SEQ ID NO: 1735115 - DNA, 25 bp, Homo sapien
catctttgattgcataaggaactac

SEQ ID NO: 1735116 - DNA, 25 bp, Homo sapien
catttgcaacgaataagtgattttc

SEQ ID NO: 1735117 - DNA, 25 bp, Homo sapien
taccatcatttgcaacgaataagtg

SEQ ID NO: 1735118 - DNA, 25 bp, Homo sapien
taaggaactaccatcatttgcaacg

SEQ ID NO: 1735119 - DNA, 25 bp, Homo sapien
cgaattgggactgcaggaattgtac

SEQ ID NO: 1735120 - DNA, 25 bp, Homo sapien
ggagttcctgccttaacagggtatg

SEQ ID NO: 1735121 - DNA, 25 bp, Homo sapien
ctgtttactaccgtcagcagctgtc

SEQ ID NO: 1735122 - DNA, 25 bp, Homo sapien
tgtactgctgtttactaccgtcagc

SEQ ID NO: 1735123 - DNA, 25 bp, Homo sapien
cattagagtactggcaaaataagac

SEQ ID NO: 1735124 - DNA, 25 bp, Homo sapien
gcaactggaatttcacagagccttc

SEQ ID NO: 1735125 - DNA, 25 bp, Homo sapien
tcatacaacatctcaagcagagtcc

SEQ ID NO: 1735126 - DNA, 25 bp, Homo sapien
cccaatccgcagtttcaggagactc

SEQ ID NO: 1735127 - DNA, 25 bp, Homo sapien
cctcttagttaatacatggacagcc

SEQ ID NO: 1735128 - DNA, 25 bp, Homo sapien
tctcttcccatggaggtctttcctg

SEQ ID NO: 1735129 - DNA, 25 bp, Homo sapien
acatctaagtctccaggtcttgctg

SEQ ID NO: 1735130 - DNA, 25 bp, Homo sapien
gctgctaccgtaatgagcccaagtt

SEQ ID NO: 1735131 - DNA, 25 bp, Homo sapien
tggaccatgctagctccgtttagac

SEQ ID NO: 1735132 - DNA, 25 bp, Homo sapien
tagctccgtttagactccctctgag

SEQ ID NO: 1735133 - DNA, 25 bp, Homo sapien
actccctctgagagtgatgttggca

SEQ ID NO: 1735134 - DNA, 25 bp, Homo sapien
ttttaattggaccatgctagctccg

SEQ ID NO: 1735135 - DNA, 25 bp, Homo sapien
cacttacatgctattacagtgcggg

SEQ ID NO: 1735136 - DNA, 25 bp, Homo sapien
taacatgatgcttgttggcaatggc

SEQ ID NO: 1735137 - DNA, 25 bp, Homo sapien
gcatcatagtgcaagtgaaccaagg

SEQ ID NO: 1735138 - DNA, 25 bp, Homo sapien
ctagcagaattttgggtcaggcatc

SEQ ID NO: 1735139 - DNA, 25 bp, Homo sapien
aataacgctgcatatctacaactat

SEQ ID NO: 1735140 - DNA, 25 bp, Homo sapien
gccctcagaaataacgctgcatatc

SEQ ID NO: 1735141 - DNA, 25 bp, Homo sapien
tcagaaataacgctgcatatctaca

SEQ ID NO: 1735142 - DNA, 25 bp, Homo sapien
gaaataacgctgcatatctacaact

SEQ ID NO: 1735143 - DNA, 25 bp, Homo sapien
agacgaaattaatgaaatgcagcga

SEQ ID NO: 1735144 - DNA, 25 bp, Homo sapien
gacaaatgcagaagcctcaatagcc

SEQ ID NO: 1735145 - DNA, 25 bp, Homo sapien
aaatgcagaagcctcaatagccgat

SEQ ID NO: 1735146 - DNA, 25 bp, Homo sapien
cgaaattaatgaaatgcagcgagaa

SEQ ID NO: 1735147 - DNA, 25 bp, Homo sapien
gggacatggattcctaaatgctatg

SEQ ID NO: 1735148 - DNA, 25 bp, Homo sapien
gacatatacatgaaatgccagcaca

SEQ ID NO: 1735149 - DNA, 25 bp, Homo sapien
gcacatagctaatatcactgaccac

SEQ ID NO: 1735150 - DNA, 25 bp, Homo sapien
gattcctaaatgctatgtatgtgct

SEQ ID NO: 1735151 - DNA, 25 bp, Homo sapien
caggcctaacccttaagtactctga

SEQ ID NO: 1735152 - DNA, 25 bp, Homo sapien
catttggtgaggtggttaaatccct

SEQ ID NO: 1735153 - DNA, 25 bp, Homo sapien
gctgctactaggattaagtgccctg

SEQ ID NO: 1735154 - DNA, 25 bp, Homo sapien
gttcaaggtcagtgatttagctcct

SEQ ID NO: 1735155 - DNA, 25 bp, Homo sapien
catatacgtatatgtctactatata

SEQ ID NO: 1735156 - DNA, 25 bp, Homo sapien
ctcacttaccctggtgtgaccgtta

SEQ ID NO: 1735157 - DNA, 25 bp, Homo sapien
ttataacagtggaaggagagttttg

SEQ ID NO: 1735158 - DNA, 25 bp, Homo sapien
ggtgtgaccgttacacattctccat

SEQ ID NO: 1735159 - DNA, 25 bp, Homo sapien
tgtcaaggacggctttgtgctcttt

SEQ ID NO: 1735160 - DNA, 25 bp, Homo sapien
aaggacggctttgtgctcttttctg

SEQ ID NO: 1735161 - DNA, 25 bp, Homo sapien
ctgtcaaggacggctttgtgctctt

SEQ ID NO: 1735162 - DNA, 25 bp, Homo sapien
tcaaggacggctttgtgctcttttc

SEQ ID NO: 1735163 - DNA, 25 bp, Homo sapien
tccattggacacgagtgtaagagca

SEQ ID NO: 1735164 - DNA, 25 bp, Homo sapien
cgagtgtaagagcatgtgcaaaggc

SEQ ID NO: 1735165 - DNA, 25 bp, Homo sapien
tggacacgagtgtaagagcatgtgc

SEQ ID NO: 1735166 - DNA, 25 bp, Homo sapien
gggtaagttccattggacacgagtg

SEQ ID NO: 1735167 - DNA, 25 bp, Homo sapien
gagtctaagtacacaggtggctcaa

SEQ ID NO: 1735168 - DNA, 25 bp, Homo sapien
catctagtcagttttgggtgtccct

SEQ ID NO: 1735169 - DNA, 25 bp, Homo sapien
tgtcatcctggtagcagttggcaga

SEQ ID NO: 1735170 - DNA, 25 bp, Homo sapien
taacctcaggagctatattactgcg

SEQ ID NO: 1735171 - DNA, 25 bp, Homo sapien
tctttcctttcgtgagtctttatta

SEQ ID NO: 1735172 - DNA, 25 bp, Homo sapien
agtctttcctttcgtgagtctttat

SEQ ID NO: 1735173 - DNA, 25 bp, Homo sapien
tgatgtaggcactcagaactataaa

SEQ ID NO: 1735174 - DNA, 25 bp, Homo sapien
tttgatgtaggcactcagaactata

SEQ ID NO: 1735175 - DNA, 25 bp, Homo sapien
tagcatgagaaaaaccggcaacaat

SEQ ID NO: 1735176 - DNA, 25 bp, Homo sapien
cctgtgaagtcaaaagaaagctagt

SEQ ID NO: 1735177 - DNA, 25 bp, Homo sapien
cagaaatccagtgggacagtctaat

SEQ ID NO: 1735178 - DNA, 25 bp, Homo sapien
gggacagtctaattgaaagctccaa

SEQ ID NO: 1735179 - DNA, 25 bp, Homo sapien
ttccccaacctcaatagttgacttc

SEQ ID NO: 1735180 - DNA, 25 bp, Homo sapien
cttctggaatgcaggataccaagtc

SEQ ID NO: 1735181 - DNA, 25 bp, Homo sapien
aggataccaagtctgcagtctgcac

SEQ ID NO: 1735182 - DNA, 25 bp, Homo sapien
gaagctgccaataccttggacttcc

SEQ ID NO: 1735183 - DNA, 25 bp, Homo sapien
ttggagtgttgcactgtcacctggg

SEQ ID NO: 1735184 - DNA, 25 bp, Homo sapien
tgggctcaccgcatgttccttagac

SEQ ID NO: 1735185 - DNA, 25 bp, Homo sapien
gcatgcagttagttagggattacct

SEQ ID NO: 1735186 - DNA, 25 bp, Homo sapien
aatgtttatgccaaaattactgggc

SEQ ID NO: 1735187 - DNA, 25 bp, Homo sapien
tacctactgataatgggatcttgtc

SEQ ID NO: 1735188 - DNA, 25 bp, Homo sapien
ggcctgctactgctcttagagtgtt

SEQ ID NO: 1735189 - DNA, 25 bp, Homo sapien
tcggcttcccactcaaagcgatggg

SEQ ID NO: 1735190 - DNA, 25 bp, Homo sapien
atgacagcagttaggcacaggagca

SEQ ID NO: 1735191 - DNA, 25 bp, Homo sapien
tagtaattagaaagcatcagaggtg

SEQ ID NO: 1735192 - DNA, 25 bp, Homo sapien
gtgtgtttcttctgccaaagtttac

SEQ ID NO: 1735193 - DNA, 25 bp, Homo sapien
tgtttcttctgccaaagtttacgtc

SEQ ID NO: 1735194 - DNA, 25 bp, Homo sapien
ctaaccaagtgtgtttcttctgcca

SEQ ID NO: 1735195 - DNA, 25 bp, Homo sapien
tcttctgccaaagtttacgtcccat

SEQ ID NO: 1735196 - DNA, 25 bp, Homo sapien
gaataaaggtatatgaaagcttgtg

SEQ ID NO: 1735197 - DNA, 25 bp, Homo sapien
tatatgaaagcttgtgtgtagacat

SEQ ID NO: 1735198 - DNA, 25 bp, Homo sapien
ggtatatgaaagcttgtgtgtagac

SEQ ID NO: 1735199 - DNA, 25 bp, Homo sapien
taaaggtatatgaaagcttgtgtgt

SEQ ID NO: 1735200 - DNA, 25 bp, Homo sapien
gatcgaggtcgctgacttttaattg

SEQ ID NO: 1735201 - DNA, 25 bp, Homo sapien
cccttttttcatgaacagatcgagg

SEQ ID NO: 1735202 - DNA, 25 bp, Homo sapien
tgtgccataaatttagcagcatcag

SEQ ID NO: 1735203 - DNA, 25 bp, Homo sapien
cagcttgttcctgagggaccctttt

SEQ ID NO: 1735204 - DNA, 25 bp, Homo sapien
cccattagatggtgccgacaaagat

SEQ ID NO: 1735205 - DNA, 25 bp, Homo sapien
gcccatgcccgtgtgccttgactta

SEQ ID NO: 1735206 - DNA, 25 bp, Homo sapien
gctcagtggttgagactttttgctc

SEQ ID NO: 1735207 - DNA, 25 bp, Homo sapien
aagatgagtagtcagcccatgcccg

SEQ ID NO: 1735208 - DNA, 25 bp, Homo sapien
tgggaccactcttccacaccagatt

SEQ ID NO: 1735209 - DNA, 25 bp, Homo sapien
ttgaccacaagtaaccgaacatgtg

SEQ ID NO: 1735210 - DNA, 25 bp, Homo sapien
accgaacatgtgctccactgggacc

SEQ ID NO: 1735211 - DNA, 25 bp, Homo sapien
aagtaaccgaacatgtgctccactg

SEQ ID NO: 1735212 - DNA, 25 bp, Homo sapien
cagtgtgtcccgtaaggtgatacac

SEQ ID NO: 1735213 - DNA, 25 bp, Homo sapien
ggtgatacacaagttctggttcgca

SEQ ID NO: 1735214 - DNA, 25 bp, Homo sapien
aaggtgatacacaagttctggttcg

SEQ ID NO: 1735215 - DNA, 25 bp, Homo sapien
ttaatgggccgctgcagtgtgtccc

SEQ ID NO: 1735216 - DNA, 25 bp, Homo sapien
gtgttattgcaaacccttgattctc

SEQ ID NO: 1735217 - DNA, 25 bp, Homo sapien
gggcagtgttattgcaaacccttga

SEQ ID NO: 1735218 - DNA, 25 bp, Homo sapien
cagagggcagtgttattgcaaaccc

SEQ ID NO: 1735219 - DNA, 25 bp, Homo sapien
gacagagggcagtgttattgcaaac

SEQ ID NO: 1735220 - DNA, 25 bp, Homo sapien
taacatccacagttgtagttgctgc

SEQ ID NO: 1735221 - DNA, 25 bp, Homo sapien
catccacagttgtagttgctgctaa

SEQ ID NO: 1735222 - DNA, 25 bp, Homo sapien
ccacagttgtagttgctgctaacac

SEQ ID NO: 1735223 - DNA, 25 bp, Homo sapien
tcaataacatccacagttgtagttg

SEQ ID NO: 1735224 - DNA, 25 bp, Homo sapien
tgttctttggcctcgaccacatgta

SEQ ID NO: 1735225 - DNA, 25 bp, Homo sapien
ttggcctcgaccacatgtaaatgaa

SEQ ID NO: 1735226 - DNA, 25 bp, Homo sapien
ggaggtgtgcatgaccttgttcttg

SEQ ID NO: 1735227 - DNA, 25 bp, Homo sapien
gaccattcctcccatactccgtgta

SEQ ID NO: 1735228 - DNA, 25 bp, Homo sapien
gcaaagagcaatattacaaggctta

SEQ ID NO: 1735229 - DNA, 25 bp, Homo sapien
gggcaaagagcaatattacaaggct

SEQ ID NO: 1735230 - DNA, 25 bp, Homo sapien
ggcaaagagcaatattacaaggctt

SEQ ID NO: 1735231 - DNA, 25 bp, Homo sapien
gctcagcagcgaggtagtagagaca

SEQ ID NO: 1735232 - DNA, 25 bp, Homo sapien
ctccttgtgtatggcttacttccaa

SEQ ID NO: 1735233 - DNA, 25 bp, Homo sapien
atatttgtaagagggacctctcagg

SEQ ID NO: 1735234 - DNA, 25 bp, Homo sapien
aatcaatgtctctccccactcaatg

SEQ ID NO: 1735235 - DNA, 25 bp, Homo sapien
cctggtaaaaccacccttgaagatg

SEQ ID NO: 1735236 - DNA, 25 bp, Homo sapien
tggtaaaaccacccttgaagatgaa

SEQ ID NO: 1735237 - DNA, 25 bp, Homo sapien
ctggtaaaaccacccttgaagatga

SEQ ID NO: 1735238 - DNA, 25 bp, Homo sapien
aagagacagcatgaggatatcttcc

SEQ ID NO: 1735239 - DNA, 25 bp, Homo sapien
aaaagagacagcatgaggatatctt

SEQ ID NO: 1735240 - DNA, 25 bp, Homo sapien
aaagagacagcatgaggatatcttc

SEQ ID NO: 1735241 - DNA, 25 bp, Homo sapien
aaaaagagacagcatgaggatatct

SEQ ID NO: 1735242 - DNA, 25 bp, Homo sapien
gctgcagtgcactgccggcttctct

SEQ ID NO: 1735243 - DNA, 25 bp, Homo sapien
tctctgctgagtcccattcgagcac

SEQ ID NO: 1735244 - DNA, 25 bp, Homo sapien
attcagggttatagcactctctgct

SEQ ID NO: 1735245 - DNA, 25 bp, Homo sapien
attcgagcacgttactgagcactgg

SEQ ID NO: 1735246 - DNA, 25 bp, Homo sapien
tcacaggacttggaacaaccactcc

SEQ ID NO: 1735247 - DNA, 25 bp, Homo sapien
gacaggtccttattcgcctttccca

SEQ ID NO: 1735248 - DNA, 25 bp, Homo sapien
cattgctgccctgttatcactgcac

SEQ ID NO: 1735249 - DNA, 25 bp, Homo sapien
cagggcatcgctgctcattgcatct

SEQ ID NO: 1735250 - DNA, 25 bp, Homo sapien
gatgctggggctgacaacatcagga

SEQ ID NO: 1735251 - DNA, 25 bp, Homo sapien
catcagacttgttcaaatgataccc

SEQ ID NO: 1735252 - DNA, 25 bp, Homo sapien
gtgcctggttttacatcagacttgt

SEQ ID NO: 1735253 - DNA, 25 bp, Homo sapien
gcagggaaaatatactgctcaggaa

SEQ ID NO: 1735254 - DNA, 25 bp, Homo sapien
ctactcatgtgaagaattcatgctg

SEQ ID NO: 1735255 - DNA, 25 bp, Homo sapien
gaagaattcatgctgctgctaaggt

SEQ ID NO: 1735256 - DNA, 25 bp, Homo sapien
tcatgtgaagaattcatgctgctgc

SEQ ID NO: 1735257 - DNA, 25 bp, Homo sapien
tgtgaagaattcatgctgctgctaa

SEQ ID NO: 1735258 - DNA, 25 bp, Homo sapien
ccacagaggtccttggaagtgtctc

SEQ ID NO: 1735259 - DNA, 25 bp, Homo sapien
cagcgggccacagaggtccttggaa

SEQ ID NO: 1735260 - DNA, 25 bp, Homo sapien
cgggccacagaggtccttggaagtg

SEQ ID NO: 1735261 - DNA, 25 bp, Homo sapien
ggccacagaggtccttggaagtgtc

SEQ ID NO: 1735262 - DNA, 25 bp, Homo sapien
gaagcttgtctaaggagacagagct

SEQ ID NO: 1735263 - DNA, 25 bp, Homo sapien
cagtgtcactgaagatcaactattc

SEQ ID NO: 1735264 - DNA, 25 bp, Homo sapien
tttaagatagtcctctccctctgag

SEQ ID NO: 1735265 - DNA, 25 bp, Homo sapien
gaacacatgggtattacaaagctga

SEQ ID NO: 1735266 - DNA, 25 bp, Homo sapien
gacattgattgaatgccaagtcgcc

SEQ ID NO: 1735267 - DNA, 25 bp, Homo sapien
tgccaagtcgcctgctggagttctt

SEQ ID NO: 1735268 - DNA, 25 bp, Homo sapien
gacatcagataatcctcagggcata

SEQ ID NO: 1735269 - DNA, 25 bp, Homo sapien
ctggagttcttttccacaccatcga

SEQ ID NO: 1735270 - DNA, 25 bp, Homo sapien
gactgagagagcagcgtctgctagt

SEQ ID NO: 1735271 - DNA, 25 bp, Homo sapien
atttgatatgcatcttgcaaagctc

SEQ ID NO: 1735272 - DNA, 25 bp, Homo sapien
agactgagagagcagcgtctgctag

SEQ ID NO: 1735273 - DNA, 25 bp, Homo sapien
aagtgtctgtactcatttgatatgc

SEQ ID NO: 1735274 - DNA, 25 bp, Homo sapien
acagagcaagtactaaagctggctt

SEQ ID NO: 1735275 - DNA, 25 bp, Homo sapien
aacagagcaagtactaaagctggct

SEQ ID NO: 1735276 - DNA, 25 bp, Homo sapien
agagcaagtactaaagctggctttg

SEQ ID NO: 1735277 - DNA, 25 bp, Homo sapien
cagagcaagtactaaagctggcttt

SEQ ID NO: 1735278 - DNA, 25 bp, Homo sapien
catggaactagcaacttctgaaggc

SEQ ID NO: 1735279 - DNA, 25 bp, Homo sapien
cctcaagacagttgatagattttga

SEQ ID NO: 1735280 - DNA, 25 bp, Homo sapien
gcttgggcagaaagctagaacatgg

SEQ ID NO: 1735281 - DNA, 25 bp, Homo sapien
tgacaggatgggcacatataggctc

SEQ ID NO: 1735282 - DNA, 25 bp, Homo sapien
aggactccatttcctttgggtagca

SEQ ID NO: 1735283 - DNA, 25 bp, Homo sapien
ggactccatttcctttgggtagcat

SEQ ID NO: 1735284 - DNA, 25 bp, Homo sapien
ggacattccatcacctgccagcatt

SEQ ID NO: 1735285 - DNA, 25 bp, Homo sapien
cagacatcagaagatcgcctgcata

SEQ ID NO: 1735286 - DNA, 25 bp, Homo sapien
gctgccccttagcaaggtgctcttt

SEQ ID NO: 1735287 - DNA, 25 bp, Homo sapien
taaatccaacagtgtcttggtcacc

SEQ ID NO: 1735288 - DNA, 25 bp, Homo sapien
tccaagacggctgcactggcttcgt

SEQ ID NO: 1735289 - DNA, 25 bp, Homo sapien
ctggcttcgtgggaccaaaaactga

SEQ ID NO: 1735290 - DNA, 25 bp, Homo sapien
gactaagggaactgaggtcatttcc

SEQ ID NO: 1735291 - DNA, 25 bp, Homo sapien
gagctcacactaagcataacttgga

SEQ ID NO: 1735292 - DNA, 25 bp, Homo sapien
cgttcacggtaggatttaaccatgt

SEQ ID NO: 1735293 - DNA, 25 bp, Homo sapien
tgggttgtgaagcaagatctattgc

SEQ ID NO: 1735294 - DNA, 25 bp, Homo sapien
gttatcttccagattcgttcacggt

SEQ ID NO: 1735295 - DNA, 25 bp, Homo sapien
taaccatgttgggttgtgaagcaag

SEQ ID NO: 1735296 - DNA, 25 bp, Homo sapien
caagcaaggaatgggcctcttcttc

SEQ ID NO: 1735297 - DNA, 25 bp, Homo sapien
ctcttcttccataaacccacgaact

SEQ ID NO: 1735298 - DNA, 25 bp, Homo sapien
ttcttccataaacccacgaacttca

SEQ ID NO: 1735299 - DNA, 25 bp, Homo sapien
caacaagcaaggaatgggcctcttc

SEQ ID NO: 1735300 - DNA, 25 bp, Homo sapien
ttttcttcatctagaaggttgctaa

SEQ ID NO: 1735301 - DNA, 25 bp, Homo sapien
ttgttttcttcatctagaaggttgc

SEQ ID NO: 1735302 - DNA, 25 bp, Homo sapien
ttgtgcatcttcccatttttccttg

SEQ ID NO: 1735303 - DNA, 25 bp, Homo sapien
tgtgcatcttcccatttttccttgt

SEQ ID NO: 1735304 - DNA, 25 bp, Homo sapien
catcatccccattccaacaatgtgt

SEQ ID NO: 1735305 - DNA, 25 bp, Homo sapien
tcttcaatcacctgcattaactcta

SEQ ID NO: 1735306 - DNA, 25 bp, Homo sapien
catccccattccaacaatgtgtata

SEQ ID NO: 1735307 - DNA, 25 bp, Homo sapien
gcattaactctattgaccctggata

SEQ ID NO: 1735308 - DNA, 25 bp, Homo sapien
aagtgaggcagctatacatatagac

SEQ ID NO: 1735309 - DNA, 25 bp, Homo sapien
gagggccaattcacatgtttcacaa

SEQ ID NO: 1735310 - DNA, 25 bp, Homo sapien
tcaatataatgagcagactgttgga

SEQ ID NO: 1735311 - DNA, 25 bp, Homo sapien
aatggccataaggaacaaactttct

SEQ ID NO: 1735312 - DNA, 25 bp, Homo sapien
tgatgacaccggagtgaaaatgctt

SEQ ID NO: 1735313 - DNA, 25 bp, Homo sapien
tctgagtttcttgcccagtcaacca

SEQ ID NO: 1735314 - DNA, 25 bp, Homo sapien
tctgttagaacagaggctgcaggaa

SEQ ID NO: 1735315 - DNA, 25 bp, Homo sapien
ggaattactaccctatcttctgagt

SEQ ID NO: 1735316 - DNA, 25 bp, Homo sapien
tctgcaaaagtgagtacgatgtcac

SEQ ID NO: 1735317 - DNA, 25 bp, Homo sapien
cgacatctgcaaaagtgagtacgat

SEQ ID NO: 1735318 - DNA, 25 bp, Homo sapien
cttttaaggtcgacatctgcaaaag

SEQ ID NO: 1735319 - DNA, 25 bp, Homo sapien
taaggtcgacatctgcaaaagtgag

SEQ ID NO: 1735320 - DNA, 25 bp, Homo sapien
ttgtataggactgcgccaagaacaa

SEQ ID NO: 1735321 - DNA, 25 bp, Homo sapien
tttgtataggactgcgccaagaaca

SEQ ID NO: 1735322 - DNA, 25 bp, Homo sapien
gtataggactgcgccaagaacaaat

SEQ ID NO: 1735323 - DNA, 25 bp, Homo sapien
ataggactgcgccaagaacaaatac

SEQ ID NO: 1735324 - DNA, 25 bp, Homo sapien
catgacactcctttaatttcacgtc

SEQ ID NO: 1735325 - DNA, 25 bp, Homo sapien
taatttcacgtcatgttgatgaaca

SEQ ID NO: 1735326 - DNA, 25 bp, Homo sapien
tgatgaacagtaccattaagtacaa

SEQ ID NO: 1735327 - DNA, 25 bp, Homo sapien
ttttcccagtcatcatgacactcct

SEQ ID NO: 1735328 - DNA, 25 bp, Homo sapien
tattgtgaccacgatgattttggaa

SEQ ID NO: 1735329 - DNA, 25 bp, Homo sapien
gccaaatgagctagttctatctcca

SEQ ID NO: 1735330 - DNA, 25 bp, Homo sapien
tctatctccagaaacgaatcggttg

SEQ ID NO: 1735331 - DNA, 25 bp, Homo sapien
ttgggttcaggccttattgtgacca

SEQ ID NO: 1735332 - DNA, 25 bp, Homo sapien
cagttggatagatttaagaatgggt

SEQ ID NO: 1735333 - DNA, 25 bp, Homo sapien
gctgcagttggatagatttaagaat

SEQ ID NO: 1735334 - DNA, 25 bp, Homo sapien
tgcagttggatagatttaagaatgg

SEQ ID NO: 1735335 - DNA, 25 bp, Homo sapien
tcagctgcagttggatagatttaag

SEQ ID NO: 1735336 - DNA, 25 bp, Homo sapien
ttggaaagtcacagtaggcccagac

SEQ ID NO: 1735337 - DNA, 25 bp, Homo sapien
ttccaaatggataaagctagggcag

SEQ ID NO: 1735338 - DNA, 25 bp, Homo sapien
tgaaagcagcagtaccctacctata

SEQ ID NO: 1735339 - DNA, 25 bp, Homo sapien
taccatttggagttgatgcccagag

SEQ ID NO: 1735340 - DNA, 25 bp, Homo sapien
gatttacaaaggtcatagggtcatg

SEQ ID NO: 1735341 - DNA, 25 bp, Homo sapien
tttcaagactctccataaaagttac

SEQ ID NO: 1735342 - DNA, 25 bp, Homo sapien
taatctccttgtctagtagcatttc

SEQ ID NO: 1735343 - DNA, 25 bp, Homo sapien
gtagcatttcaagactctccataaa

SEQ ID NO: 1735344 - DNA, 25 bp, Homo sapien
cttgtctagtagcatttcaagactc

SEQ ID NO: 1735345 - DNA, 25 bp, Homo sapien
caccatatttcagtggatgtgacag

SEQ ID NO: 1735346 - DNA, 25 bp, Homo sapien
tttggcttgtaacacagcacagtca

SEQ ID NO: 1735347 - DNA, 25 bp, Homo sapien
gaggagtcactattctgcgtatcac

SEQ ID NO: 1735348 - DNA, 25 bp, Homo sapien
gccattatggctctcatgtctgaaa

SEQ ID NO: 1735349 - DNA, 25 bp, Homo sapien
tacctctcagcaagcaaatgggtct

SEQ ID NO: 1735350 - DNA, 25 bp, Homo sapien
gtctggtgtacctctcagcaagcaa

SEQ ID NO: 1735351 - DNA, 25 bp, Homo sapien
cacaaagtctggtgtacctctcagc

SEQ ID NO: 1735352 - DNA, 25 bp, Homo sapien
gtgtacctctcagcaagcaaatggg

SEQ ID NO: 1735353 - DNA, 25 bp, Homo sapien
atccatcacagtccgctaatagttg

SEQ ID NO: 1735354 - DNA, 25 bp, Homo sapien
cagtcaaatccatcacagtccgcta

SEQ ID NO: 1735355 - DNA, 25 bp, Homo sapien
cgctaatagttgatcagtgagaggg

SEQ ID NO: 1735356 - DNA, 25 bp, Homo sapien
tcacagtccgctaatagttgatcag

SEQ ID NO: 1735357 - DNA, 25 bp, Homo sapien
ccataattttaatgatacttcagaa

SEQ ID NO: 1735358 - DNA, 25 bp, Homo sapien
caggaattgctaagggaagcaagac

SEQ ID NO: 1735359 - DNA, 25 bp, Homo sapien
aggacacattaaaaacatctcagga

SEQ ID NO: 1735360 - DNA, 25 bp, Homo sapien
tttaatgatacttcagaaggacaca

SEQ ID NO: 1735361 - DNA, 25 bp, Homo sapien
caatacacaatagggattcaaagta

SEQ ID NO: 1735362 - DNA, 25 bp, Homo sapien
aatacacaatagggattcaaagtac

SEQ ID NO: 1735363 - DNA, 25 bp, Homo sapien
gttttggagtcatcccacaatacac

SEQ ID NO: 1735364 - DNA, 25 bp, Homo sapien
atacacaatagggattcaaagtacc

SEQ ID NO: 1735365 - DNA, 25 bp, Homo sapien
caaggcttccctaggacactatgga

SEQ ID NO: 1735366 - DNA, 25 bp, Homo sapien
ggagtctctgaaacacataattgtc

SEQ ID NO: 1735367 - DNA, 25 bp, Homo sapien
taaggaaattagcacaggaggtagg

SEQ ID NO: 1735368 - DNA, 25 bp, Homo sapien
tgctgacagtaacatagcaggagtc

SEQ ID NO: 1735369 - DNA, 25 bp, Homo sapien
gagaaaaatttccatgcccaggagg

SEQ ID NO: 1735370 - DNA, 25 bp, Homo sapien
gagagcatccgtgaaaaccttgaat

SEQ ID NO: 1735371 - DNA, 25 bp, Homo sapien
taagctctatcctgaaccattgcgg

SEQ ID NO: 1735372 - DNA, 25 bp, Homo sapien
tacatgctgcaacaagggttatgcc

SEQ ID NO: 1735373 - DNA, 25 bp, Homo sapien
tctagattcattgcatggtactgag

SEQ ID NO: 1735374 - DNA, 25 bp, Homo sapien
cgcagtcctcagtagttggtttttc

SEQ ID NO: 1735375 - DNA, 25 bp, Homo sapien
tatgaatgatcccaggtactgagcg

SEQ ID NO: 1735376 - DNA, 25 bp, Homo sapien
gctgcatccacattgctacaaggga

SEQ ID NO: 1735377 - DNA, 25 bp, Homo sapien
taacttgtccccagtgctctcatct

SEQ ID NO: 1735378 - DNA, 25 bp, Homo sapien
ctaacttgtccccagtgctctcatc

SEQ ID NO: 1735379 - DNA, 25 bp, Homo sapien
tttagaactgaggtaaaggaggaga

SEQ ID NO: 1735380 - DNA, 25 bp, Homo sapien
gatgggtgacagacatccatattgt

SEQ ID NO: 1735381 - DNA, 25 bp, Homo sapien
tgggcctttactctggtagcctgag

SEQ ID NO: 1735382 - DNA, 25 bp, Homo sapien
tccatattgtctggtgtacctgggc

SEQ ID NO: 1735383 - DNA, 25 bp, Homo sapien
tcttctaaagatgggacacccgtct

SEQ ID NO: 1735384 - DNA, 25 bp, Homo sapien
tttggcctgagaacgacagcagtgg

SEQ ID NO: 1735385 - DNA, 25 bp, Homo sapien
ccacagttctgaggccgttgggctt

SEQ ID NO: 1735386 - DNA, 25 bp, Homo sapien
tccaatgttggcaggcaccatctaa

SEQ ID NO: 1735387 - DNA, 25 bp, Homo sapien
tcaggaaactggatgctaatcttca

SEQ ID NO: 1735388 - DNA, 25 bp, Homo sapien
tagagaaatagccagaccaccgcac

SEQ ID NO: 1735389 - DNA, 25 bp, Homo sapien
tcaaatgatatgtcccaagtcactc

SEQ ID NO: 1735390 - DNA, 25 bp, Homo sapien
gcaagacaccgaaaagtcaaatgat

SEQ ID NO: 1735391 - DNA, 25 bp, Homo sapien
tatagacagttcacagtcagccggc

SEQ ID NO: 1735392 - DNA, 25 bp, Homo sapien
tctcttatgagtagacaggtgacag

SEQ ID NO: 1735393 - DNA, 25 bp, Homo sapien
agtcacagaccacaagatcccctaa

SEQ ID NO: 1735394 - DNA, 25 bp, Homo sapien
tgtattacaggcagagaagcaacat

SEQ ID NO: 1735395 - DNA, 25 bp, Homo sapien
cagccccggtaaagcgctaccttgg

SEQ ID NO: 1735396 - DNA, 25 bp, Homo sapien
ccttgggaaagctccggactatcaa

SEQ ID NO: 1735397 - DNA, 25 bp, Homo sapien
tatcaagtgcgaccaggtacctggt

SEQ ID NO: 1735398 - DNA, 25 bp, Homo sapien
tccggactatcaagtgcgaccaggt

SEQ ID NO: 1735399 - DNA, 25 bp, Homo sapien
ctgatggatcccatttgaaatttcc

SEQ ID NO: 1735400 - DNA, 25 bp, Homo sapien
atttcccacatttgtttatggccat

SEQ ID NO: 1735401 - DNA, 25 bp, Homo sapien
ggatcccatttgaaatttcccacat

SEQ ID NO: 1735402 - DNA, 25 bp, Homo sapien
atcccatttgaaatttcccacattt

SEQ ID NO: 1735403 - DNA, 25 bp, Homo sapien
tttctagaatcacaggaccaaaccc

SEQ ID NO: 1735404 - DNA, 25 bp, Homo sapien
tctgggatagaatgtatgtgatatt

SEQ ID NO: 1735405 - DNA, 25 bp, Homo sapien
gccacacatacatgttccccatagg

SEQ ID NO: 1735406 - DNA, 25 bp, Homo sapien
catgttccccataggccttttctag

SEQ ID NO: 1735407 - DNA, 25 bp, Homo sapien
gatcctctcctgtctcatgggtgca

SEQ ID NO: 1735408 - DNA, 25 bp, Homo sapien
tatacgtgtgtcataagatcctctc

SEQ ID NO: 1735409 - DNA, 25 bp, Homo sapien
gatttttgcatcactcataacccag

SEQ ID NO: 1735410 - DNA, 25 bp, Homo sapien
gaacaactgtcataaaggtcctctc

SEQ ID NO: 1735411 - DNA, 25 bp, Homo sapien
caatacgccatgttctgttctgtgc

SEQ ID NO: 1735412 - DNA, 25 bp, Homo sapien
gataagtatgtcctgcctttgaaag

SEQ ID NO: 1735413 - DNA, 25 bp, Homo sapien
tcttcagagggcatacagtacgaat

SEQ ID NO: 1735414 - DNA, 25 bp, Homo sapien
gataccagattcttatgcgaagctg

SEQ ID NO: 1735415 - DNA, 25 bp, Homo sapien
caaggcaatattaatcacctaacag

SEQ ID NO: 1735416 - DNA, 25 bp, Homo sapien
tactttcagaatgaccccaaattaa

SEQ ID NO: 1735417 - DNA, 25 bp, Homo sapien
gattttagaactatctggacaagca

SEQ ID NO: 1735418 - DNA, 25 bp, Homo sapien
tatcaactgtttagtcatcacttgg

SEQ ID NO: 1735419 - DNA, 25 bp, Homo sapien
aagaacgaccaccaacttgatttct

SEQ ID NO: 1735420 - DNA, 25 bp, Homo sapien
cagtttaggactcgtgatattgaaa

SEQ ID NO: 1735421 - DNA, 25 bp, Homo sapien
cttgacagtttaggactcgtgatat

SEQ ID NO: 1735422 - DNA, 25 bp, Homo sapien
gactcgtgatattgaaaagtaagaa

SEQ ID NO: 1735423 - DNA, 25 bp, Homo sapien
catcatgattattgcagcctccaac

SEQ ID NO: 1735424 - DNA, 25 bp, Homo sapien
ttacttgctctgctctctcattatg

SEQ ID NO: 1735425 - DNA, 25 bp, Homo sapien
tgttacagactgaatcatgctctcc

SEQ ID NO: 1735426 - DNA, 25 bp, Homo sapien
ctcattatgtaagtgttacagactg

SEQ ID NO: 1735427 - DNA, 25 bp, Homo sapien
tgaacaatagagaccttacttgctc

SEQ ID NO: 1735428 - DNA, 25 bp, Homo sapien
agcctggcacttgagcttgattcat

SEQ ID NO: 1735429 - DNA, 25 bp, Homo sapien
gagcctggcacttgagcttgattca

SEQ ID NO: 1735430 - DNA, 25 bp, Homo sapien
cgagcctggcacttgagcttgattc

SEQ ID NO: 1735431 - DNA, 25 bp, Homo sapien
aggtaatggacctgcatttagccac

SEQ ID NO: 1735432 - DNA, 25 bp, Homo sapien
acacgctcagttgctctgcctgtct

SEQ ID NO: 1735433 - DNA, 25 bp, Homo sapien
tagctgttccgaagcccatcatcat

SEQ ID NO: 1735434 - DNA, 25 bp, Homo sapien
tgctttgacagaaccaggtaatgga

SEQ ID NO: 1735435 - DNA, 25 bp, Homo sapien
gcaaatgccagaacgatgtgctttt

SEQ ID NO: 1735436 - DNA, 25 bp, Homo sapien
acatttgaacaaggctataaaggtt

SEQ ID NO: 1735437 - DNA, 25 bp, Homo sapien
tcaacattgaatggctcaaaaactt

SEQ ID NO: 1735438 - DNA, 25 bp, Homo sapien
gaaaaccaatgacatcaagctctag

SEQ ID NO: 1735439 - DNA, 25 bp, Homo sapien
ggttctagcagtgtcagcttaaaaa

SEQ ID NO: 1735440 - DNA, 25 bp, Homo sapien
ctgacatggatagataatggttcta

SEQ ID NO: 1735441 - DNA, 25 bp, Homo sapien
gcttcttgcgtgtagatttctggtt

SEQ ID NO: 1735442 - DNA, 25 bp, Homo sapien
aaagcttcttgcgtgtagatttctg

SEQ ID NO: 1735443 - DNA, 25 bp, Homo sapien
acacagccactactccattggatct

SEQ ID NO: 1735444 - DNA, 25 bp, Homo sapien
ccacacagccactactccattggat

SEQ ID NO: 1735445 - DNA, 25 bp, Homo sapien
ttaaacccacacagccactactcca

SEQ ID NO: 1735446 - DNA, 25 bp, Homo sapien
cagccactactccattggatcttaa

SEQ ID NO: 1735447 - DNA, 25 bp, Homo sapien
aggctcttcaatctgactgccaaag

SEQ ID NO: 1735448 - DNA, 25 bp, Homo sapien
gcaatataagtctgtgcttacttcc

SEQ ID NO: 1735449 - DNA, 25 bp, Homo sapien
gtggaaaagcaatataagtctgtgc

SEQ ID NO: 1735450 - DNA, 25 bp, Homo sapien
tagctgcatggcaactacaccagag

SEQ ID NO: 1735451 - DNA, 25 bp, Homo sapien
gtcatttgccagactactcactgtt

SEQ ID NO: 1735452 - DNA, 25 bp, Homo sapien
ctaagcttcctactccacacttcac

SEQ ID NO: 1735453 - DNA, 25 bp, Homo sapien
taagcttcctactccacacttcact

SEQ ID NO: 1735454 - DNA, 25 bp, Homo sapien
cttcctactccacacttcactcagt

SEQ ID NO: 1735455 - DNA, 25 bp, Homo sapien
cctactccacacttcactcagtcca

SEQ ID NO: 1735456 - DNA, 25 bp, Homo sapien
tgtccagccctatgcgaggaacagc

SEQ ID NO: 1735457 - DNA, 25 bp, Homo sapien
taaatacgcctgatagccaaatccg

SEQ ID NO: 1735458 - DNA, 25 bp, Homo sapien
tactcagggtgtaaagaggcttttc

SEQ ID NO: 1735459 - DNA, 25 bp, Homo sapien
gaggtgctgaaaccgggactagctc

SEQ ID NO: 1735460 - DNA, 25 bp, Homo sapien
tctctaggttgctgagccaaaatgg

SEQ ID NO: 1735461 - DNA, 25 bp, Homo sapien
taagcatttcgtatgggatgcatcg

SEQ ID NO: 1735462 - DNA, 25 bp, Homo sapien
ccaaaatggcgaaggtagagagacg

SEQ ID NO: 1735463 - DNA, 25 bp, Homo sapien
gatgcatcggtaagcacagttttac

SEQ ID NO: 1735464 - DNA, 25 bp, Homo sapien
tgcatagacaactgctagggtaatc

SEQ ID NO: 1735465 - DNA, 25 bp, Homo sapien
tagggtaatcaaggccaagcaagaa

SEQ ID NO: 1735466 - DNA, 25 bp, Homo sapien
gaccactgcctactattagggtaac

SEQ ID NO: 1735467 - DNA, 25 bp, Homo sapien
gaaggtgtgccagaggattccatga

SEQ ID NO: 1735468 - DNA, 25 bp, Homo sapien
gatagacaggcagaagttaattagt

SEQ ID NO: 1735469 - DNA, 25 bp, Homo sapien
ttagtattatggatctctcagagcg

SEQ ID NO: 1735470 - DNA, 25 bp, Homo sapien
tctgagtctgtccaaccagtatgag

SEQ ID NO: 1735471 - DNA, 25 bp, Homo sapien
tattggatgagatgatagacaggca

SEQ ID NO: 1735472 - DNA, 25 bp, Homo sapien
ccaattctgattggcatccctctca

SEQ ID NO: 1735473 - DNA, 25 bp, Homo sapien
ttattctgttggtcattttgtacct

SEQ ID NO: 1735474 - DNA, 25 bp, Homo sapien
tggcatccctctcacctttagtcat

SEQ ID NO: 1735475 - DNA, 25 bp, Homo sapien
tgtaccttcttgtctcccaattctg

SEQ ID NO: 1735476 - DNA, 25 bp, Homo sapien
aagctctctcggatgtttatacttt

SEQ ID NO: 1735477 - DNA, 25 bp, Homo sapien
gagcccatccttcatattgatcttt

SEQ ID NO: 1735478 - DNA, 25 bp, Homo sapien
gatctttgccctatttacaataatg

SEQ ID NO: 1735479 - DNA, 25 bp, Homo sapien
ccctgagcccatccttcatattgat

SEQ ID NO: 1735480 - DNA, 25 bp, Homo sapien
tatttacaataatgtggtctctggc

SEQ ID NO: 1735481 - DNA, 25 bp, Homo sapien
aacttgagagaaattttctgtatca

SEQ ID NO: 1735482 - DNA, 25 bp, Homo sapien
ttttctgtatcatcaccaattatat

SEQ ID NO: 1735483 - DNA, 25 bp, Homo sapien
catcatgatttttggaagaaaaact

SEQ ID NO: 1735484 - DNA, 25 bp, Homo sapien
tgatttttggaagaaaaacttgaga

SEQ ID NO: 1735485 - DNA, 25 bp, Homo sapien
acttgatagccacaagtcccgagtg

SEQ ID NO: 1735486 - DNA, 25 bp, Homo sapien
gtcccgagtgccttgtggctttgtc

SEQ ID NO: 1735487 - DNA, 25 bp, Homo sapien
cacaagtcccgagtgccttgtggct

SEQ ID NO: 1735488 - DNA, 25 bp, Homo sapien
gggatgatttaaaacttgatagcca

SEQ ID NO: 1735489 - DNA, 25 bp, Homo sapien
cagtggaagaaagttgtgttagggc

SEQ ID NO: 1735490 - DNA, 25 bp, Homo sapien
ttccagtggaagaaagttgtgttag

SEQ ID NO: 1735491 - DNA, 25 bp, Homo sapien
cttccagtggaagaaagttgtgtta

SEQ ID NO: 1735492 - DNA, 25 bp, Homo sapien
tccagtggaagaaagttgtgttagg

SEQ ID NO: 1735493 - DNA, 25 bp, Homo sapien
caaatgttggcagtgtctaccaggt

SEQ ID NO: 1735494 - DNA, 25 bp, Homo sapien
agtgtctaccaggtcagtcagagca

SEQ ID NO: 1735495 - DNA, 25 bp, Homo sapien
taccaggtcagtcagagcaggcttg

SEQ ID NO: 1735496 - DNA, 25 bp, Homo sapien
gccaaatgttggcagtgtctaccag

SEQ ID NO: 1735497 - DNA, 25 bp, Homo sapien
ctgcctttctggcatattcatgtct

SEQ ID NO: 1735498 - DNA, 25 bp, Homo sapien
tcatgtctagattcctaggcttcat

SEQ ID NO: 1735499 - DNA, 25 bp, Homo sapien
catattcatgtctagattcctaggc

SEQ ID NO: 1735500 - DNA, 25 bp, Homo sapien
tctggcatattcatgtctagattcc

SEQ ID NO: 1735501 - DNA, 25 bp, Homo sapien
gacacactccttgtaacataagaat

SEQ ID NO: 1735502 - DNA, 25 bp, Homo sapien
tgaaaccacatattccagtcctctg

SEQ ID NO: 1735503 - DNA, 25 bp, Homo sapien
tgcaacgatacagaaatactggttt

SEQ ID NO: 1735504 - DNA, 25 bp, Homo sapien
taacataagaatagacaaagtagct

SEQ ID NO: 1735505 - DNA, 25 bp, Homo sapien
tgctctcctcttttcttcttgccgt

SEQ ID NO: 1735506 - DNA, 25 bp, Homo sapien
tcctcttttcttcttgccgtctagc

SEQ ID NO: 1735507 - DNA, 25 bp, Homo sapien
ctcttttcttcttgccgtctagcat

SEQ ID NO: 1735508 - DNA, 25 bp, Homo sapien
tctcctcttttcttcttgccgtcta

SEQ ID NO: 1735509 - DNA, 25 bp, Homo sapien
ctctcatgtacatccttcacaccaa

SEQ ID NO: 1735510 - DNA, 25 bp, Homo sapien
catgtacatccttcacaccaaattc

SEQ ID NO: 1735511 - DNA, 25 bp, Homo sapien
tcatgtacatccttcacaccaaatt

SEQ ID NO: 1735512 - DNA, 25 bp, Homo sapien
aacactctcatgtacatccttcaca

SEQ ID NO: 1735513 - DNA, 25 bp, Homo sapien
ataagccgtgtcctaatttttccag

SEQ ID NO: 1735514 - DNA, 25 bp, Homo sapien
tacagccatatatgattgccacgcc

SEQ ID NO: 1735515 - DNA, 25 bp, Homo sapien
caaggcacaaaaagcgttttcttat

SEQ ID NO: 1735516 - DNA, 25 bp, Homo sapien
aatgcagtggtggttgtgcagatac

SEQ ID NO: 1735517 - DNA, 25 bp, Homo sapien
gagccttctctagtggcatcacatt

SEQ ID NO: 1735518 - DNA, 25 bp, Homo sapien
tctgtgagccttctctagtggcatc

SEQ ID NO: 1735519 - DNA, 25 bp, Homo sapien
tcttctgtgagccttctctagtggc

SEQ ID NO: 1735520 - DNA, 25 bp, Homo sapien
tgtgagccttctctagtggcatcac

SEQ ID NO: 1735521 - DNA, 25 bp, Homo sapien
gtggccactactaatgctggtaaac

SEQ ID NO: 1735522 - DNA, 25 bp, Homo sapien
gtgaagcctactgatgtggccacta

SEQ ID NO: 1735523 - DNA, 25 bp, Homo sapien
tgatcagtgccatatccttttgttc

SEQ ID NO: 1735524 - DNA, 25 bp, Homo sapien
tactgatgtggccactactaatgct

SEQ ID NO: 1735525 - DNA, 25 bp, Homo sapien
gctcttcctcgaggtcattgaaata

SEQ ID NO: 1735526 - DNA, 25 bp, Homo sapien
ctgctcttcctcgaggtcattgaaa

SEQ ID NO: 1735527 - DNA, 25 bp, Homo sapien
cttcctcgaggtcattgaaatattg

SEQ ID NO: 1735528 - DNA, 25 bp, Homo sapien
cctcgaggtcattgaaatattggga

SEQ ID NO: 1735529 - DNA, 25 bp, Homo sapien
ccacaaaagcatagagtagtcctcc

SEQ ID NO: 1735530 - DNA, 25 bp, Homo sapien
ggtcccacaaaagcatagagtagtc

SEQ ID NO: 1735531 - DNA, 25 bp, Homo sapien
catagagtagtcctccttcaagaga

SEQ ID NO: 1735532 - DNA, 25 bp, Homo sapien
ctgcaggtcccacaaaagcatagag

SEQ ID NO: 1735533 - DNA, 25 bp, Homo sapien
atctaggattccatctctggaaaca

SEQ ID NO: 1735534 - DNA, 25 bp, Homo sapien
tatctaggattccatctctggaaac

SEQ ID NO: 1735535 - DNA, 25 bp, Homo sapien
tctaggattccatctctggaaacaa

SEQ ID NO: 1735536 - DNA, 25 bp, Homo sapien
tttatctaggattccatctctggaa

SEQ ID NO: 1735537 - DNA, 25 bp, Homo sapien
tccacacttggcacatttgagcgtc

SEQ ID NO: 1735538 - DNA, 25 bp, Homo sapien
gtcaaaccgctatgaggctcactca

SEQ ID NO: 1735539 - DNA, 25 bp, Homo sapien
tttgagcgtcaaaccgctatgaggc

SEQ ID NO: 1735540 - DNA, 25 bp, Homo sapien
tggtggctgacaaagctgttgttga

SEQ ID NO: 1735541 - DNA, 25 bp, Homo sapien
gacatccacgtcaaagccagaaggg

SEQ ID NO: 1735542 - DNA, 25 bp, Homo sapien
tgtcatggccagaaccgcagacatc

SEQ ID NO: 1735543 - DNA, 25 bp, Homo sapien
ctctctccgaagaatgcagtggacc

SEQ ID NO: 1735544 - DNA, 25 bp, Homo sapien
ggaccatgactataacaaagccttg

SEQ ID NO: 1735545 - DNA, 25 bp, Homo sapien
tctctatcacaagaatgcttctcac

SEQ ID NO: 1735546 - DNA, 25 bp, Homo sapien
aagatcattctttttagcaaggaaa

SEQ ID NO: 1735547 - DNA, 25 bp, Homo sapien
aaataccattccaaccatcactgtt

SEQ ID NO: 1735548 - DNA, 25 bp, Homo sapien
ttccaaccatcactgttctctatca

SEQ ID NO: 1735549 - DNA, 25 bp, Homo sapien
atagagctgtaagactgtcttagag

SEQ ID NO: 1735550 - DNA, 25 bp, Homo sapien
tatttcaaaggtttcataactcttg

SEQ ID NO: 1735551 - DNA, 25 bp, Homo sapien
agctgtaagactgtcttagagccag

SEQ ID NO: 1735552 - DNA, 25 bp, Homo sapien
gtttcctagcaacagtaactatttc

SEQ ID NO: 1735553 - DNA, 25 bp, Homo sapien
ttcagacaaacctcacaggaaagag

SEQ ID NO: 1735554 - DNA, 25 bp, Homo sapien
tgaaggcagctggtagcgcgtcatt

SEQ ID NO: 1735555 - DNA, 25 bp, Homo sapien
aaagagctccacagtttgaaacggg

SEQ ID NO: 1735556 - DNA, 25 bp, Homo sapien
tcaaatatctgcaggagtagcaagg

SEQ ID NO: 1735557 - DNA, 25 bp, Homo sapien
ctggcccaataatgagacctctgtc

SEQ ID NO: 1735558 - DNA, 25 bp, Homo sapien
tccggtcctaatcctactgatgtgg

SEQ ID NO: 1735559 - DNA, 25 bp, Homo sapien
tctaatcacaaccaaagactggcca

SEQ ID NO: 1735560 - DNA, 25 bp, Homo sapien
caataatgagacctctgtccacttc

SEQ ID NO: 1735561 - DNA, 25 bp, Homo sapien
tgacagtttctcaatcggcatctaa

SEQ ID NO: 1735562 - DNA, 25 bp, Homo sapien
tttgagcatgcccattaggaaacga

SEQ ID NO: 1735563 - DNA, 25 bp, Homo sapien
aatctgcattgatgggatcctgaca

SEQ ID NO: 1735564 - DNA, 25 bp, Homo sapien
gaaacgaactcgaagaatctgcatt

SEQ ID NO: 1735565 - DNA, 25 bp, Homo sapien
gatcgacaggcaatgtctacatcct

SEQ ID NO: 1735566 - DNA, 25 bp, Homo sapien
ctgatcgacaggcaatgtctacatc

SEQ ID NO: 1735567 - DNA, 25 bp, Homo sapien
caggcaatgtctacatccttttcaa

SEQ ID NO: 1735568 - DNA, 25 bp, Homo sapien
tcgacaggcaatgtctacatccttt

SEQ ID NO: 1735569 - DNA, 25 bp, Homo sapien
aataaccccagtcctatgaatgcct

SEQ ID NO: 1735570 - DNA, 25 bp, Homo sapien
tcataggctatgaggcacatagcac

SEQ ID NO: 1735571 - DNA, 25 bp, Homo sapien
tacacataaatatggagacagtgac

SEQ ID NO: 1735572 - DNA, 25 bp, Homo sapien
tatataaaccctgtgtctgaagagt

SEQ ID NO: 1735573 - DNA, 25 bp, Homo sapien
tgcaatagcctttcatgcggcaagg

SEQ ID NO: 1735574 - DNA, 25 bp, Homo sapien
tgctaagctcattcatactcatggg

SEQ ID NO: 1735575 - DNA, 25 bp, Homo sapien
cacagctgtgcgaggttcaaagggc

SEQ ID NO: 1735576 - DNA, 25 bp, Homo sapien
tgttgaatagcttagcccttcaggg

SEQ ID NO: 1735577 - DNA, 25 bp, Homo sapien
aaaaatttaatcttctgtggctcac

SEQ ID NO: 1735578 - DNA, 25 bp, Homo sapien
tcatatttcaactatcaaggaaaaa

SEQ ID NO: 1735579 - DNA, 25 bp, Homo sapien
caaggaaaaatttaatcttctgtgg

SEQ ID NO: 1735580 - DNA, 25 bp, Homo sapien
catatttcaactatcaaggaaaaat

SEQ ID NO: 1735581 - DNA, 25 bp, Homo sapien
gagtgccttagttcccatgatgaca

SEQ ID NO: 1735582 - DNA, 25 bp, Homo sapien
tactcagtttgagggtgatccagaa

SEQ ID NO: 1735583 - DNA, 25 bp, Homo sapien
ttgtaatgccacgtagacactgtgc

SEQ ID NO: 1735584 - DNA, 25 bp, Homo sapien
catgaaacaattgcctctgggaact

SEQ ID NO: 1735585 - DNA, 25 bp, Homo sapien
ctttattaatcataagaccaaatgc

SEQ ID NO: 1735586 - DNA, 25 bp, Homo sapien
tgttagttgtacacacttaaaggac

SEQ ID NO: 1735587 - DNA, 25 bp, Homo sapien
tccaaaatgtgttagttgtacacac

SEQ ID NO: 1735588 - DNA, 25 bp, Homo sapien
tgtacacacttaaaggacaagggct

SEQ ID NO: 1735589 - DNA, 25 bp, Homo sapien
caactggcagtgtttaccttcttct

SEQ ID NO: 1735590 - DNA, 25 bp, Homo sapien
ttccatgctggcagtttgtgaaaac

SEQ ID NO: 1735591 - DNA, 25 bp, Homo sapien
gacttaaattgtcctattgcttagg

SEQ ID NO: 1735592 - DNA, 25 bp, Homo sapien
cctctggaggtaaaatgtgagcgtc

SEQ ID NO: 1735593 - DNA, 25 bp, Homo sapien
caaagtcaaggtctgaatatcgtga

SEQ ID NO: 1735594 - DNA, 25 bp, Homo sapien
tcaaggtctgaatatcgtgattttc

SEQ ID NO: 1735595 - DNA, 25 bp, Homo sapien
agtcaaggtctgaatatcgtgattt

SEQ ID NO: 1735596 - DNA, 25 bp, Homo sapien
aggtctgaatatcgtgattttcttc

SEQ ID NO: 1735597 - DNA, 25 bp, Homo sapien
tgggaacaaaatcccaagccctgcc

SEQ ID NO: 1735598 - DNA, 25 bp, Homo sapien
gccctgccattaaggctgaatcaaa

SEQ ID NO: 1735599 - DNA, 25 bp, Homo sapien
tagctggctgtactaaagtgggaac

SEQ ID NO: 1735600 - DNA, 25 bp, Homo sapien
cacccagtccctgatgtttgtcatg

SEQ ID NO: 1735601 - DNA, 25 bp, Homo sapien
tcccgaaatctgtccaaagtttgaa

SEQ ID NO: 1735602 - DNA, 25 bp, Homo sapien
tatttggtatatcccgaaatctgtc

SEQ ID NO: 1735603 - DNA, 25 bp, Homo sapien
ggtatatcccgaaatctgtccaaag

SEQ ID NO: 1735604 - DNA, 25 bp, Homo sapien
cttgtatttggtatatcccgaaatc

SEQ ID NO: 1735605 - DNA, 25 bp, Homo sapien
cccatggattcttgtttggtgcggg

SEQ ID NO: 1735606 - DNA, 25 bp, Homo sapien
catccagaggcaaattcagacactt

SEQ ID NO: 1735607 - DNA, 25 bp, Homo sapien
cattgattgtggtgtaatgcgggta

SEQ ID NO: 1735608 - DNA, 25 bp, Homo sapien
aacttctgtttgaaagtcaccctct

SEQ ID NO: 1735609 - DNA, 25 bp, Homo sapien
cgggtacttacaacacaggatggtc

SEQ ID NO: 1735610 - DNA, 25 bp, Homo sapien
tagcctgactagtgagaagttacca

SEQ ID NO: 1735611 - DNA, 25 bp, Homo sapien
cactgtccagatagaaatgtcaggc

SEQ ID NO: 1735612 - DNA, 25 bp, Homo sapien
tcccaagtcttaagtgtcagtgcaa

SEQ ID NO: 1735613 - DNA, 25 bp, Homo sapien
tattttatacacagctgcagcagag

SEQ ID NO: 1735614 - DNA, 25 bp, Homo sapien
gcagcagagaaagcttctcagagct

SEQ ID NO: 1735615 - DNA, 25 bp, Homo sapien
gagctttctagagaaaactgcaata

SEQ ID NO: 1735616 - DNA, 25 bp, Homo sapien
aaagtttatttacaccatacaacat

SEQ ID NO: 1735617 - DNA, 25 bp, Homo sapien
taaatatgtaaatttctggtcaaca

SEQ ID NO: 1735618 - DNA, 25 bp, Homo sapien
aaatatgtaaatttctggtcaacaa

SEQ ID NO: 1735619 - DNA, 25 bp, Homo sapien
taaggctctagcttagaggcgcact

SEQ ID NO: 1735620 - DNA, 25 bp, Homo sapien
tgcatttggctcaactcaggcttcc

SEQ ID NO: 1735621 - DNA, 25 bp, Homo sapien
tggcgttaacacaagagaagacact

SEQ ID NO: 1735622 - DNA, 25 bp, Homo sapien
gaatgttgaagcaccgtagtctctg

SEQ ID NO: 1735623 - DNA, 25 bp, Homo sapien
tacacaactaaatgtagtttccgta

SEQ ID NO: 1735624 - DNA, 25 bp, Homo sapien
aagcatgagggttaacaagaggcac

SEQ ID NO: 1735625 - DNA, 25 bp, Homo sapien
gcttttattttagaggcactgtgaa

SEQ ID NO: 1735626 - DNA, 25 bp, Homo sapien
caagaggcacctcttggttttctgt

SEQ ID NO: 1735627 - DNA, 25 bp, Homo sapien
tcctcttggttcttcttctcagctc

SEQ ID NO: 1735628 - DNA, 25 bp, Homo sapien
cttcctcaaactcctcttggttctt

SEQ ID NO: 1735629 - DNA, 25 bp, Homo sapien
ctcttggttcttcttctcagctccc

SEQ ID NO: 1735630 - DNA, 25 bp, Homo sapien
cttggttcttcttctcagctcccat

SEQ ID NO: 1735631 - DNA, 25 bp, Homo sapien
tgaccctttaccttctcaccttcag

SEQ ID NO: 1735632 - DNA, 25 bp, Homo sapien
tggtattgaccctttaccttctcac

SEQ ID NO: 1735633 - DNA, 25 bp, Homo sapien
ttggtattgaccctttaccttctca

SEQ ID NO: 1735634 - DNA, 25 bp, Homo sapien
tttaccttctcaccttcaggctttc

SEQ ID NO: 1735635 - DNA, 25 bp, Homo sapien
ctgacaccaaatattcacacttatt

SEQ ID NO: 1735636 - DNA, 25 bp, Homo sapien
attttcatcatcagtctctgctttc

SEQ ID NO: 1735637 - DNA, 25 bp, Homo sapien
tattcacacttattttcatcatcag

SEQ ID NO: 1735638 - DNA, 25 bp, Homo sapien
catcatcagtctctgctttctgtgc

SEQ ID NO: 1735639 - DNA, 25 bp, Homo sapien
tcactgagattgacaagggagccat

SEQ ID NO: 1735640 - DNA, 25 bp, Homo sapien
ggttgcctagcaactgatactgcaa

SEQ ID NO: 1735641 - DNA, 25 bp, Homo sapien
gcacagcagatgaacaggttgccta

SEQ ID NO: 1735642 - DNA, 25 bp, Homo sapien
tactgctgccgaattgaaatatcag

SEQ ID NO: 1735643 - DNA, 25 bp, Homo sapien
gtctgctgcctggagattctggctc

SEQ ID NO: 1735644 - DNA, 25 bp, Homo sapien
tgtagacaggaaggttttcgtctcc

SEQ ID NO: 1735645 - DNA, 25 bp, Homo sapien
gacaggaaggttttcgtctccctgc

SEQ ID NO: 1735646 - DNA, 25 bp, Homo sapien
cactgtagacaggaaggttttcgtc

SEQ ID NO: 1735647 - DNA, 25 bp, Homo sapien
ttctctccaaaaagtgaccaatctt

SEQ ID NO: 1735648 - DNA, 25 bp, Homo sapien
ataaggaaggagatattctctccaa

SEQ ID NO: 1735649 - DNA, 25 bp, Homo sapien
taaggaaggagatattctctccaaa

SEQ ID NO: 1735650 - DNA, 25 bp, Homo sapien
caaaaagtgaccaatctttcctgct

SEQ ID NO: 1735651 - DNA, 25 bp, Homo sapien
caccaaatactcttttagatctttc

SEQ ID NO: 1735652 - DNA, 25 bp, Homo sapien
tatgatatttcatttgcacgatcaa

SEQ ID NO: 1735653 - DNA, 25 bp, Homo sapien
tttcatttgcacgatcaaatacacg

SEQ ID NO: 1735654 - DNA, 25 bp, Homo sapien
gatcaaatacacgtgctcctttcac

SEQ ID NO: 1735655 - DNA, 25 bp, Homo sapien
tggcccataggtgcctccagccagt

SEQ ID NO: 1735656 - DNA, 25 bp, Homo sapien
ggctggaattggcccataggtgcct

SEQ ID NO: 1735657 - DNA, 25 bp, Homo sapien
gaattggcccataggtgcctccagc

SEQ ID NO: 1735658 - DNA, 25 bp, Homo sapien
ccagttggctgagaaacttgccaga

SEQ ID NO: 1735659 - DNA, 25 bp, Homo sapien
tggcttttcatctataaacctgagt

SEQ ID NO: 1735660 - DNA, 25 bp, Homo sapien
tttggcttttcatctataaacctga

SEQ ID NO: 1735661 - DNA, 25 bp, Homo sapien
ttggcttttcatctataaacctgag

SEQ ID NO: 1735662 - DNA, 25 bp, Homo sapien
ctttggcttttcatctataaacctg

SEQ ID NO: 1735663 - DNA, 25 bp, Homo sapien
ctgtcagcagaagtggtgcactcac

SEQ ID NO: 1735664 - DNA, 25 bp, Homo sapien
tttatcttgggctttaatctctcca

SEQ ID NO: 1735665 - DNA, 25 bp, Homo sapien
ttatcttgggctttaatctctccat

SEQ ID NO: 1735666 - DNA, 25 bp, Homo sapien
tatcttgggctttaatctctccatc

SEQ ID NO: 1735667 - DNA, 25 bp, Homo sapien
cagataaatgagtcagtagaaagca

SEQ ID NO: 1735668 - DNA, 25 bp, Homo sapien
tgataaatgctgttcgattgcgtga

SEQ ID NO: 1735669 - DNA, 25 bp, Homo sapien
tgagctttccagtacgtcagataaa

SEQ ID NO: 1735670 - DNA, 25 bp, Homo sapien
gattgcgtgattccgaatgaccagg

SEQ ID NO: 1735671 - DNA, 25 bp, Homo sapien
tgaagaccccgattttgagagaagg

SEQ ID NO: 1735672 - DNA, 25 bp, Homo sapien
ttcagttccctgagtgaacttttct

SEQ ID NO: 1735673 - DNA, 25 bp, Homo sapien
ggattgttacaatgtttgacctaca

SEQ ID NO: 1735674 - DNA, 25 bp, Homo sapien
ggtgatgaggatatgtgtgacatta

SEQ ID NO: 1735675 - DNA, 25 bp, Homo sapien
ggctacaacggctttgctgagctac

SEQ ID NO: 1735676 - DNA, 25 bp, Homo sapien
aagcctggggatcttagctcgctgg

SEQ ID NO: 1735677 - DNA, 25 bp, Homo sapien
gccgttgagcaagaccacttcactc

SEQ ID NO: 1735678 - DNA, 25 bp, Homo sapien
cattggagtgggagccgttgagcaa

SEQ ID NO: 1735679 - DNA, 25 bp, Homo sapien
taatgaactgaaggactggtgtgtg

SEQ ID NO: 1735680 - DNA, 25 bp, Homo sapien
aagtgctctacaagcaatggaagct

SEQ ID NO: 1735681 - DNA, 25 bp, Homo sapien
cacagttgacatggctgaagtgctc

SEQ ID NO: 1735682 - DNA, 25 bp, Homo sapien
tatcagccctttcctcgcacagttg

SEQ ID NO: 1735683 - DNA, 25 bp, Homo sapien
gcagcttgttactttctagggtgaa

SEQ ID NO: 1735684 - DNA, 25 bp, Homo sapien
cattggtgcttctggcatgttggcc

SEQ ID NO: 1735685 - DNA, 25 bp, Homo sapien
gctgcctaagtgaaccatagttgaa

SEQ ID NO: 1735686 - DNA, 25 bp, Homo sapien
tggcagcccctagacatttttatcg

SEQ ID NO: 1735687 - DNA, 25 bp, Homo sapien
ggcttctgagtcaccggcttattgg

SEQ ID NO: 1735688 - DNA, 25 bp, Homo sapien
gagtcaccggcttattggaatcctt

SEQ ID NO: 1735689 - DNA, 25 bp, Homo sapien
tggaatccttttctaccaggatttg

SEQ ID NO: 1735690 - DNA, 25 bp, Homo sapien
ctgagtcaccggcttattggaatcc

SEQ ID NO: 1735691 - DNA, 25 bp, Homo sapien
tttttcatcaagattgtcttctcta

SEQ ID NO: 1735692 - DNA, 25 bp, Homo sapien
ttttgaatagaattgcaccgaatct

SEQ ID NO: 1735693 - DNA, 25 bp, Homo sapien
aatgtttagtagtgtaatgtcttca

SEQ ID NO: 1735694 - DNA, 25 bp, Homo sapien
catatttagtagtagaagtcattta

SEQ ID NO: 1735695 - DNA, 25 bp, Homo sapien
cagcttacggcatttctgagttacc

SEQ ID NO: 1735696 - DNA, 25 bp, Homo sapien
tatggagaattgaccatgaagtgga

SEQ ID NO: 1735697 - DNA, 25 bp, Homo sapien
ttttcccagaagtgcaagtacaagt

SEQ ID NO: 1735698 - DNA, 25 bp, Homo sapien
tccagggaacttaccactaattcat

SEQ ID NO: 1735699 - DNA, 25 bp, Homo sapien
tcactgctatcagcagggagtcagg

SEQ ID NO: 1735700 - DNA, 25 bp, Homo sapien
gaatcactgctatcagcagggagtc

SEQ ID NO: 1735701 - DNA, 25 bp, Homo sapien
cactgctatcagcagggagtcaggc

SEQ ID NO: 1735702 - DNA, 25 bp, Homo sapien
ctgaatcactgctatcagcagggag

SEQ ID NO: 1735703 - DNA, 25 bp, Homo sapien
tctttctcatcaatgctcactttga

SEQ ID NO: 1735704 - DNA, 25 bp, Homo sapien
ttctcatcaatgctcactttgaggt

SEQ ID NO: 1735705 - DNA, 25 bp, Homo sapien
ctttctcatcaatgctcactttgag

SEQ ID NO: 1735706 - DNA, 25 bp, Homo sapien
tttctcatcaatgctcactttgagg

SEQ ID NO: 1735707 - DNA, 25 bp, Homo sapien
tagtgtagttagtgcattattgtaa

SEQ ID NO: 1735708 - DNA, 25 bp, Homo sapien
cttcctcaagctgtaaggctttaca

SEQ ID NO: 1735709 - DNA, 25 bp, Homo sapien
aaatcactaacagagcttccactcc

SEQ ID NO: 1735710 - DNA, 25 bp, Homo sapien
tgttccccaatctctcttatcttcc

SEQ ID NO: 1735711 - DNA, 25 bp, Homo sapien
caaccagtatcaccaagagccactc

SEQ ID NO: 1735712 - DNA, 25 bp, Homo sapien
tcaaccagtatcaccaagagccact

SEQ ID NO: 1735713 - DNA, 25 bp, Homo sapien
gcttgacagccttctgtcttaaagg

SEQ ID NO: 1735714 - DNA, 25 bp, Homo sapien
cagacataagtgatgatgagccctc

SEQ ID NO: 1735715 - DNA, 25 bp, Homo sapien
tcaaaaatgggagcatggctataag

SEQ ID NO: 1735716 - DNA, 25 bp, Homo sapien
tgagccctctgtctattctgcttga

SEQ ID NO: 1735717 - DNA, 25 bp, Homo sapien
catttaggccgtgtagtgaaggtca

SEQ ID NO: 1735718 - DNA, 25 bp, Homo sapien
actgtaagagggtgatgggatttcc

SEQ ID NO: 1735719 - DNA, 25 bp, Homo sapien
tatcagcagaatgggcagagacgag

SEQ ID NO: 1735720 - DNA, 25 bp, Homo sapien
tttccaatgatgacaggtttccagt

SEQ ID NO: 1735721 - DNA, 25 bp, Homo sapien
ggcattgctgaccatcttaatgcca

SEQ ID NO: 1735722 - DNA, 25 bp, Homo sapien
atccatggtcttctgagtgccagtg

SEQ ID NO: 1735723 - DNA, 25 bp, Homo sapien
aggcattgctgaccatcttaatgcc

SEQ ID NO: 1735724 - DNA, 25 bp, Homo sapien
gttgtccagggtggctaagcagttg

SEQ ID NO: 1735725 - DNA, 25 bp, Homo sapien
tgttctagagagccccacagctgtc

SEQ ID NO: 1735726 - DNA, 25 bp, Homo sapien
accttgcacacagcttcggcaacac

SEQ ID NO: 1735727 - DNA, 25 bp, Homo sapien
acacagcttcggcaacacagaggca

SEQ ID NO: 1735728 - DNA, 25 bp, Homo sapien
tctagagagccccacagctgtcaca

SEQ ID NO: 1735729 - DNA, 25 bp, Homo sapien
cagaatgcctttgaagggaccctcc

SEQ ID NO: 1735730 - DNA, 25 bp, Homo sapien
ggaccctccaatgcctgttttacca

SEQ ID NO: 1735731 - DNA, 25 bp, Homo sapien
gaaggaatgagtatcactagtaaag

SEQ ID NO: 1735732 - DNA, 25 bp, Homo sapien
gtatcactagtaaagttggaggaga

SEQ ID NO: 1735733 - DNA, 25 bp, Homo sapien
cttggaagccgggtggaacatgagt

SEQ ID NO: 1735734 - DNA, 25 bp, Homo sapien
ggtggaacatgagttccaccaccct

SEQ ID NO: 1735735 - DNA, 25 bp, Homo sapien
gaagccgggtggaacatgagttcca

SEQ ID NO: 1735736 - DNA, 25 bp, Homo sapien
gccgggtggaacatgagttccacca

SEQ ID NO: 1735737 - DNA, 25 bp, Homo sapien
gaaaccagtggcctaagtcagtggc

SEQ ID NO: 1735738 - DNA, 25 bp, Homo sapien
taaagatgtctcgtgcatgtgcaat

SEQ ID NO: 1735739 - DNA, 25 bp, Homo sapien
gaatggtagattgtatcccgagaga

SEQ ID NO: 1735740 - DNA, 25 bp, Homo sapien
taaggcggctaagcattgactccat

SEQ ID NO: 1735741 - DNA, 25 bp, Homo sapien
tcaaatttctggcacacttggcagt

SEQ ID NO: 1735742 - DNA, 25 bp, Homo sapien
tctggcacacttggcagtccgatac

SEQ ID NO: 1735743 - DNA, 25 bp, Homo sapien
tggcacacttggcagtccgatacat

SEQ ID NO: 1735744 - DNA, 25 bp, Homo sapien
aatttctggcacacttggcagtccg

SEQ ID NO: 1735745 - DNA, 25 bp, Homo sapien
tggggctagtgagtctccaacctct

SEQ ID NO: 1735746 - DNA, 25 bp, Homo sapien
tgagttgctcgttctgacttccagg

SEQ ID NO: 1735747 - DNA, 25 bp, Homo sapien
tgtgcccattgtgtgattctgcctt

SEQ ID NO: 1735748 - DNA, 25 bp, Homo sapien
gatgacgtgagttgctcgttctgac

SEQ ID NO: 1735749 - DNA, 25 bp, Homo sapien
ttctctgtatgttttttccctcatt

SEQ ID NO: 1735750 - DNA, 25 bp, Homo sapien
tctctgtatgttttttccctcattt

SEQ ID NO: 1735751 - DNA, 25 bp, Homo sapien
tctgtatgttttttccctcattttc

SEQ ID NO: 1735752 - DNA, 25 bp, Homo sapien
cttctctgtatgttttttccctcat

SEQ ID NO: 1735753 - DNA, 25 bp, Homo sapien
tcaccgatgacgtctagggttgcag

SEQ ID NO: 1735754 - DNA, 25 bp, Homo sapien
tcctttttggaagctcttgccgtca

SEQ ID NO: 1735755 - DNA, 25 bp, Homo sapien
tgacgtctagggttgcagggtcctt

SEQ ID NO: 1735756 - DNA, 25 bp, Homo sapien
gaagtatgtggtggcctttcgtccc

SEQ ID NO: 1735757 - DNA, 25 bp, Homo sapien
ggtgtcgatttccggtctcttttgc

SEQ ID NO: 1735758 - DNA, 25 bp, Homo sapien
tgtcgatttccggtctcttttgctg

SEQ ID NO: 1735759 - DNA, 25 bp, Homo sapien
gtcgatttccggtctcttttgctgt

SEQ ID NO: 1735760 - DNA, 25 bp, Homo sapien
tcgatttccggtctcttttgctgtc

SEQ ID NO: 1735761 - DNA, 25 bp, Homo sapien
gtaactagtaatcaacctgtcattg

SEQ ID NO: 1735762 - DNA, 25 bp, Homo sapien
aggtaactagtaatcaacctgtcat

SEQ ID NO: 1735763 - DNA, 25 bp, Homo sapien
gctttctgtttgcaggtaactagta

SEQ ID NO: 1735764 - DNA, 25 bp, Homo sapien
ctgtcgggtgctttctgtttgcagg

SEQ ID NO: 1735765 - DNA, 25 bp, Homo sapien
gcaacaaagggttatgagcagggtt

SEQ ID NO: 1735766 - DNA, 25 bp, Homo sapien
ctgcaacaaagggttatgagcaggg

SEQ ID NO: 1735767 - DNA, 25 bp, Homo sapien
caaagggttatgagcagggttcaaa

SEQ ID NO: 1735768 - DNA, 25 bp, Homo sapien
aacaaagggttatgagcagggttca

SEQ ID NO: 1735769 - DNA, 25 bp, Homo sapien
tgggcaaaactcttgggcctgaccc

SEQ ID NO: 1735770 - DNA, 25 bp, Homo sapien
tactcattgtcattttgggcaaaac

SEQ ID NO: 1735771 - DNA, 25 bp, Homo sapien
aattttatcatctggccaagaaacc

SEQ ID NO: 1735772 - DNA, 25 bp, Homo sapien
taacatggccactaatgtgttccac

SEQ ID NO: 1735773 - DNA, 25 bp, Homo sapien
tgttatccactttcttatcccctaa

SEQ ID NO: 1735774 - DNA, 25 bp, Homo sapien
gaatgttatccactttcttatcccc

SEQ ID NO: 1735775 - DNA, 25 bp, Homo sapien
ctgaatgttatccactttcttatcc

SEQ ID NO: 1735776 - DNA, 25 bp, Homo sapien
tatccactttcttatcccctaagaa

SEQ ID NO: 1735777 - DNA, 25 bp, Homo sapien
tgcggcaccgccgaggagtgagctc

SEQ ID NO: 1735778 - DNA, 25 bp, Homo sapien
tttgagcccctcagaggcgcagtgg

SEQ ID NO: 1735779 - DNA, 25 bp, Homo sapien
gcgcagtggagtccggacagggctg

SEQ ID NO: 1735780 - DNA, 25 bp, Homo sapien
cttgaattcgtatttgagcccctca

SEQ ID NO: 1735781 - DNA, 25 bp, Homo sapien
cgctgtggccgaccgcgctgcgcat

SEQ ID NO: 1735782 - DNA, 25 bp, Homo sapien
gcggcggcgctgtggccgaccgcgc

SEQ ID NO: 1735783 - DNA, 25 bp, Homo sapien
ggcggcgctgtggccgaccgcgctg

SEQ ID NO: 1735784 - DNA, 25 bp, Homo sapien
ggcgctgtggccgaccgcgctgcgc

SEQ ID NO: 1735785 - DNA, 25 bp, Homo sapien
tccgggccaacaaacttcctcgcga

SEQ ID NO: 1735786 - DNA, 25 bp, Homo sapien
cgacggcgtgcttggttccgggcca

SEQ ID NO: 1735787 - DNA, 25 bp, Homo sapien
cgctctcggcggtggcctcgggact

SEQ ID NO: 1735788 - DNA, 25 bp, Homo sapien
ctctcggggagctagcgtgcccgac

SEQ ID NO: 1735789 - DNA, 25 bp, Homo sapien
ccatttcagtttcaggttcactttc

SEQ ID NO: 1735790 - DNA, 25 bp, Homo sapien
ttagtcctgtccatttcagtttcag

SEQ ID NO: 1735791 - DNA, 25 bp, Homo sapien
tttgctctttcttagtcctgtccat

SEQ ID NO: 1735792 - DNA, 25 bp, Homo sapien
gctctttcttagtcctgtccatttc

SEQ ID NO: 1735793 - DNA, 25 bp, Homo sapien
taagaaggctatggagaatattggt

SEQ ID NO: 1735794 - DNA, 25 bp, Homo sapien
ggcaagaggtctgcataccatatgt

SEQ ID NO: 1735795 - DNA, 25 bp, Homo sapien
taaggcattgggttaattattatga

SEQ ID NO: 1735796 - DNA, 25 bp, Homo sapien
taattattatgagggtgggtacagg

SEQ ID NO: 1735797 - DNA, 25 bp, Homo sapien
cttgaaaccatgtgaacggccacgg

SEQ ID NO: 1735798 - DNA, 25 bp, Homo sapien
ttgaaaccatgtgaacggccacgga

SEQ ID NO: 1735799 - DNA, 25 bp, Homo sapien
tgaaaccatgtgaacggccacggat

SEQ ID NO: 1735800 - DNA, 25 bp, Homo sapien
ctaacggtcacggaagtggaagcag

SEQ ID NO: 1735801 - DNA, 25 bp, Homo sapien
gtttccaagggccagtgagtctcat

SEQ ID NO: 1735802 - DNA, 25 bp, Homo sapien
ctgtcttgtccctaacggtcacgga

SEQ ID NO: 1735803 - DNA, 25 bp, Homo sapien
agccaaagtttccaagggccagtga

SEQ ID NO: 1735804 - DNA, 25 bp, Homo sapien
gtacattaatctatggccttttcaa

SEQ ID NO: 1735805 - DNA, 25 bp, Homo sapien
aacatttggtgattaggcaaagagt

SEQ ID NO: 1735806 - DNA, 25 bp, Homo sapien
ttatagtacattaatctatggcctt

SEQ ID NO: 1735807 - DNA, 25 bp, Homo sapien
catttggtgattaggcaaagagttg

SEQ ID NO: 1735808 - DNA, 25 bp, Homo sapien
cagccacaggatgtcttttgtacaa

SEQ ID NO: 1735809 - DNA, 25 bp, Homo sapien
taggcacaataatacagtctcagag

SEQ ID NO: 1735810 - DNA, 25 bp, Homo sapien
ccccaaattgtatgacagccacagg

SEQ ID NO: 1735811 - DNA, 25 bp, Homo sapien
tattttaggaaatgcaccttctgcc

SEQ ID NO: 1735812 - DNA, 25 bp, Homo sapien
gaatttaccagtgtccaaggtctag

SEQ ID NO: 1735813 - DNA, 25 bp, Homo sapien
gaccaagtgactgctttccaggtgt

SEQ ID NO: 1735814 - DNA, 25 bp, Homo sapien
tgtgacataaggctaccaagaggta

SEQ ID NO: 1735815 - DNA, 25 bp, Homo sapien
tatccgggaagggtcctacatggca

SEQ ID NO: 1735816 - DNA, 25 bp, Homo sapien
tagaagtgttaaatctgacatgcca

SEQ ID NO: 1735817 - DNA, 25 bp, Homo sapien
tcctatgtaaaactgtgtccggagt

SEQ ID NO: 1735818 - DNA, 25 bp, Homo sapien
tggcaaggcgtaagttaatctgtag

SEQ ID NO: 1735819 - DNA, 25 bp, Homo sapien
tgaagtacatttgggagtgactgac

SEQ ID NO: 1735820 - DNA, 25 bp, Homo sapien
tgtttctaactgtaattaccctgga

SEQ ID NO: 1735821 - DNA, 25 bp, Homo sapien
ggactcatgaaaagctgaaacattc

SEQ ID NO: 1735822 - DNA, 25 bp, Homo sapien
aaggaaaatagtacaggactcatga

SEQ ID NO: 1735823 - DNA, 25 bp, Homo sapien
taagctatagaactgtaacaggtgc

SEQ ID NO: 1735824 - DNA, 25 bp, Homo sapien
gttgtcatatgtcagctgatgtccc

SEQ ID NO: 1735825 - DNA, 25 bp, Homo sapien
tgtcagctgatgtccctctattctc

SEQ ID NO: 1735826 - DNA, 25 bp, Homo sapien
gtccctctattctcaggatagggca

SEQ ID NO: 1735827 - DNA, 25 bp, Homo sapien
tattctcaggatagggcatgactct

SEQ ID NO: 1735828 - DNA, 25 bp, Homo sapien
atagtgtctctaataagaagtgcac

SEQ ID NO: 1735829 - DNA, 25 bp, Homo sapien
caaaatgcacgtcttagagaaaagc

SEQ ID NO: 1735830 - DNA, 25 bp, Homo sapien
tgtctctaataagaagtgcacttcc

SEQ ID NO: 1735831 - DNA, 25 bp, Homo sapien
atcactttcacaaaatgcacgtctt

SEQ ID NO: 1735832 - DNA, 25 bp, Homo sapien
aagctcaggcacagaaagcatcccc

SEQ ID NO: 1735833 - DNA, 25 bp, Homo sapien
gaagctcaggcacagaaagcatccc

SEQ ID NO: 1735834 - DNA, 25 bp, Homo sapien
ctgggatatgccagaacaataaaag

SEQ ID NO: 1735835 - DNA, 25 bp, Homo sapien
caagctgagtgtgttgctccttcag

SEQ ID NO: 1735836 - DNA, 25 bp, Homo sapien
caatttcttcatcggccagtcaagc

SEQ ID NO: 1735837 - DNA, 25 bp, Homo sapien
gccagtcaagctgagtgtgttgctc

SEQ ID NO: 1735838 - DNA, 25 bp, Homo sapien
aatcaatttcttcatcggccagtca

SEQ ID NO: 1735839 - DNA, 25 bp, Homo sapien
tcataagccacagggtaattctggc

SEQ ID NO: 1735840 - DNA, 25 bp, Homo sapien
ataagccacagggtaattctggcac

SEQ ID NO: 1735841 - DNA, 25 bp, Homo sapien
ctcacacagtcataagccacagggt

SEQ ID NO: 1735842 - DNA, 25 bp, Homo sapien
agtcataagccacagggtaattctg

SEQ ID NO: 1735843 - DNA, 25 bp, Homo sapien
tactcgaaacatggcagctactgag

SEQ ID NO: 1735844 - DNA, 25 bp, Homo sapien
gaaacatggcagctactgagtactc

SEQ ID NO: 1735845 - DNA, 25 bp, Homo sapien
tcttcgtactcgaaacatggcagct

SEQ ID NO: 1735846 - DNA, 25 bp, Homo sapien
ttggcgtttcttcgtactcgaaaca

SEQ ID NO: 1735847 - DNA, 25 bp, Homo sapien
cttgccatctgaagctcgcgtagca

SEQ ID NO: 1735848 - DNA, 25 bp, Homo sapien
gatcaaacaaaggacggagttctcg

SEQ ID NO: 1735849 - DNA, 25 bp, Homo sapien
tgtccgtccatggaaatccacagtg

SEQ ID NO: 1735850 - DNA, 25 bp, Homo sapien
tcgcgtagcaataactgtccgtcca

SEQ ID NO: 1735851 - DNA, 25 bp, Homo sapien
ctgatatttcacaacatgtttcttg

SEQ ID NO: 1735852 - DNA, 25 bp, Homo sapien
gagctatgaggtttgcactgcagta

SEQ ID NO: 1735853 - DNA, 25 bp, Homo sapien
tagattttaagttggtgaagttcaa

SEQ ID NO: 1735854 - DNA, 25 bp, Homo sapien
catgtttcttgagctatgaggtttg

SEQ ID NO: 1735855 - DNA, 25 bp, Homo sapien
ctttgctggcagatatgaagacatt

SEQ ID NO: 1735856 - DNA, 25 bp, Homo sapien
catgatgatgcaatatttccaaagc

SEQ ID NO: 1735857 - DNA, 25 bp, Homo sapien
cactggcactggtctttaagttcct

SEQ ID NO: 1735858 - DNA, 25 bp, Homo sapien
tttactggcatgagcagttacccat

SEQ ID NO: 1735859 - DNA, 25 bp, Homo sapien
cctttctcgtagagcttactatgca

SEQ ID NO: 1735860 - DNA, 25 bp, Homo sapien
agctgtttctctatggacccccgaa

SEQ ID NO: 1735861 - DNA, 25 bp, Homo sapien
accttccatgagctggaacacaagc

SEQ ID NO: 1735862 - DNA, 25 bp, Homo sapien
ccgaaccttgcctttctcgtagagc

SEQ ID NO: 1735863 - DNA, 25 bp, Homo sapien
tttctgcccaggtgaacccggagct

SEQ ID NO: 1735864 - DNA, 25 bp, Homo sapien
ttctgcccaggtgaacccggagctc

SEQ ID NO: 1735865 - DNA, 25 bp, Homo sapien
cctttctgcccaggtgaacccggag

SEQ ID NO: 1735866 - DNA, 25 bp, Homo sapien
ctgcccaggtgaacccggagctcct

SEQ ID NO: 1735867 - DNA, 25 bp, Homo sapien
gaatcctggagcaccatgtaaacca

SEQ ID NO: 1735868 - DNA, 25 bp, Homo sapien
gggaatcctggagcaccatgtaaac

SEQ ID NO: 1735869 - DNA, 25 bp, Homo sapien
cagggaatcctggagcaccatgtaa

SEQ ID NO: 1735870 - DNA, 25 bp, Homo sapien
aatcctggagcaccatgtaaaccat

SEQ ID NO: 1735871 - DNA, 25 bp, Homo sapien
tttctcctttgctgccttcaaaacc

SEQ ID NO: 1735872 - DNA, 25 bp, Homo sapien
tcctttgctgccttcaaaaccttgc

SEQ ID NO: 1735873 - DNA, 25 bp, Homo sapien
ctcctttgctgccttcaaaaccttg

SEQ ID NO: 1735874 - DNA, 25 bp, Homo sapien
cttttcaccagtttctcctttgctg

SEQ ID NO: 1735875 - DNA, 25 bp, Homo sapien
aggcagagggccctgctgccttcca

SEQ ID NO: 1735876 - DNA, 25 bp, Homo sapien
gccctgctgccttccacagtgtttg

SEQ ID NO: 1735877 - DNA, 25 bp, Homo sapien
agagggccctgctgccttccacagt

SEQ ID NO: 1735878 - DNA, 25 bp, Homo sapien
gagagggggatttggcggggtcata

SEQ ID NO: 1735879 - DNA, 25 bp, Homo sapien
cacgaagaagtgctcatttgattgt

SEQ ID NO: 1735880 - DNA, 25 bp, Homo sapien
tcaaacttaagaggccctcaagaga

SEQ ID NO: 1735881 - DNA, 25 bp, Homo sapien
tatgccacatgtttgatgctctcca

SEQ ID NO: 1735882 - DNA, 25 bp, Homo sapien
tccacctctccttcagtcttatgat

SEQ ID NO: 1735883 - DNA, 25 bp, Homo sapien
gaaagaagttcacatgccggtagct

SEQ ID NO: 1735884 - DNA, 25 bp, Homo sapien
gtacaacatccacttggaacagcag

SEQ ID NO: 1735885 - DNA, 25 bp, Homo sapien
gaagcaatagaccaccataagccta

SEQ ID NO: 1735886 - DNA, 25 bp, Homo sapien
cggtctggtaggacacacttgttca

SEQ ID NO: 1735887 - DNA, 25 bp, Homo sapien
taaagcacaggattccgaaaaagga

SEQ ID NO: 1735888 - DNA, 25 bp, Homo sapien
attttctccattaaggccagccaga

SEQ ID NO: 1735889 - DNA, 25 bp, Homo sapien
ccagccagagctggatctccttttt

SEQ ID NO: 1735890 - DNA, 25 bp, Homo sapien
tttctccattaaggccagccagagc

SEQ ID NO: 1735891 - DNA, 25 bp, Homo sapien
ttaaggccagccagagctggatctc

SEQ ID NO: 1735892 - DNA, 25 bp, Homo sapien
tacataaagattcccaaaagcacag

SEQ ID NO: 1735893 - DNA, 25 bp, Homo sapien
cggtatctgttatgaaggttttcaa

SEQ ID NO: 1735894 - DNA, 25 bp, Homo sapien
gagccaaatggaatagactctgaat

SEQ ID NO: 1735895 - DNA, 25 bp, Homo sapien
gattctacatgtaatgtggaggcag

SEQ ID NO: 1735896 - DNA, 25 bp, Homo sapien
ttaaggccatggcattgtaatagcc

SEQ ID NO: 1735897 - DNA, 25 bp, Homo sapien
gcttttctcaaatgcggtttttctc

SEQ ID NO: 1735898 - DNA, 25 bp, Homo sapien
cattgtaatagcctctgagaaacac

SEQ ID NO: 1735899 - DNA, 25 bp, Homo sapien
catggcattgtaatagcctctgaga

SEQ ID NO: 1735900 - DNA, 25 bp, Homo sapien
accattaaagtaggcccatgtaact

SEQ ID NO: 1735901 - DNA, 25 bp, Homo sapien
gaccattaaagtaggcccatgtaac

SEQ ID NO: 1735902 - DNA, 25 bp, Homo sapien
tatgaccattaaagtaggcccatgt

SEQ ID NO: 1735903 - DNA, 25 bp, Homo sapien
ttttatgaccattaaagtaggccca

SEQ ID NO: 1735904 - DNA, 25 bp, Homo sapien
tctccttttgggccaggtggaccat

SEQ ID NO: 1735905 - DNA, 25 bp, Homo sapien
ttttgggccaggtggaccatgagga

SEQ ID NO: 1735906 - DNA, 25 bp, Homo sapien
caccttcatgtttactttcccagga

SEQ ID NO: 1735907 - DNA, 25 bp, Homo sapien
ctatgtcaccttcatgtttactttc

SEQ ID NO: 1735908 - DNA, 25 bp, Homo sapien
ttctatgtcaccttcatgtttactt

SEQ ID NO: 1735909 - DNA, 25 bp, Homo sapien
gtcaccttcatgtttactttcccag

SEQ ID NO: 1735910 - DNA, 25 bp, Homo sapien
tcaacaaactattcaacatctttaa

SEQ ID NO: 1735911 - DNA, 25 bp, Homo sapien
atcaacaaactattcaacatcttta

SEQ ID NO: 1735912 - DNA, 25 bp, Homo sapien
tatcaacaaactattcaacatcttt

SEQ ID NO: 1735913 - DNA, 25 bp, Homo sapien
aaatttccaggtggatatatcaaca

SEQ ID NO: 1735914 - DNA, 25 bp, Homo sapien
tggtggtcctgggggtcctgtatct

SEQ ID NO: 1735915 - DNA, 25 bp, Homo sapien
gctggtggtcctgggggtcctgtat

SEQ ID NO: 1735916 - DNA, 25 bp, Homo sapien
ggctggtggtcctgggggtcctgta

SEQ ID NO: 1735917 - DNA, 25 bp, Homo sapien
gtggtcctgggggtcctgtatctcc

SEQ ID NO: 1735918 - DNA, 25 bp, Homo sapien
gaaaaagtgttcagctcttcgccct

SEQ ID NO: 1735919 - DNA, 25 bp, Homo sapien
tagtgccaaccgtctgtagtccctg

SEQ ID NO: 1735920 - DNA, 25 bp, Homo sapien
ggtggatcacgtaagcccatgaggt

SEQ ID NO: 1735921 - DNA, 25 bp, Homo sapien
tcataaaggattgcccctgcatcag

SEQ ID NO: 1735922 - DNA, 25 bp, Homo sapien
tttattgttagaataatctggaaag

SEQ ID NO: 1735923 - DNA, 25 bp, Homo sapien
ttattgttagaataatctggaaagt

SEQ ID NO: 1735924 - DNA, 25 bp, Homo sapien
gaagcctcttggacactgttttaca

SEQ ID NO: 1735925 - DNA, 25 bp, Homo sapien
taagggaagcctcttggacactgtt

SEQ ID NO: 1735926 - DNA, 25 bp, Homo sapien
agcctcttggacactgttttacaaa

SEQ ID NO: 1735927 - DNA, 25 bp, Homo sapien
gggaagcctcttggacactgtttta

SEQ ID NO: 1735928 - DNA, 25 bp, Homo sapien
catttgagattggatttagcatttt

SEQ ID NO: 1735929 - DNA, 25 bp, Homo sapien
attttcacaaggtaaacatctgcat

SEQ ID NO: 1735930 - DNA, 25 bp, Homo sapien
aaacatctgcataggtctacatagg

SEQ ID NO: 1735931 - DNA, 25 bp, Homo sapien
taggtctacataggtattcattttc

SEQ ID NO: 1735932 - DNA, 25 bp, Homo sapien
ctgaccctcttttccaggtggacct

SEQ ID NO: 1735933 - DNA, 25 bp, Homo sapien
cctctgaccctcttttccaggtgga

SEQ ID NO: 1735934 - DNA, 25 bp, Homo sapien
caggtggaccttgggggccttgtat

SEQ ID NO: 1735935 - DNA, 25 bp, Homo sapien
tctgaccctcttttccaggtggacc

SEQ ID NO: 1735936 - DNA, 25 bp, Homo sapien
catagagcatggctagactatgagg

SEQ ID NO: 1735937 - DNA, 25 bp, Homo sapien
cattactgtcttgctgtgttctaca

SEQ ID NO: 1735938 - DNA, 25 bp, Homo sapien
gactatgagggcacaatttcacttg

SEQ ID NO: 1735939 - DNA, 25 bp, Homo sapien
gcatggctagactatgagggcacaa

SEQ ID NO: 1735940 - DNA, 25 bp, Homo sapien
caccaagcggccaaagtccaccatg

SEQ ID NO: 1735941 - DNA, 25 bp, Homo sapien
gcttcagtaactatatttgatccaa

SEQ ID NO: 1735942 - DNA, 25 bp, Homo sapien
gacaccaagcggccaaagtccacca

SEQ ID NO: 1735943 - DNA, 25 bp, Homo sapien
ggagacaccaagcggccaaagtcca

SEQ ID NO: 1735944 - DNA, 25 bp, Homo sapien
ttttggcctcttccggtatgtctgg

SEQ ID NO: 1735945 - DNA, 25 bp, Homo sapien
ggcctcttccggtatgtctggataa

SEQ ID NO: 1735946 - DNA, 25 bp, Homo sapien
ttggcctcttccggtatgtctggat

SEQ ID NO: 1735947 - DNA, 25 bp, Homo sapien
cctcttccggtatgtctggataatt

SEQ ID NO: 1735948 - DNA, 25 bp, Homo sapien
ttaaatctcagcatcctcgtgccag

SEQ ID NO: 1735949 - DNA, 25 bp, Homo sapien
gcttgtttggctgtccacataccta

SEQ ID NO: 1735950 - DNA, 25 bp, Homo sapien
tcgtgccagtcaacattaagtctaa

SEQ ID NO: 1735951 - DNA, 25 bp, Homo sapien
ttatcttcaccaaccgttacctgga

SEQ ID NO: 1735952 - DNA, 25 bp, Homo sapien
taatattcatctgcacaagctgtac

SEQ ID NO: 1735953 - DNA, 25 bp, Homo sapien
atattcatctgcacaagctgtacat

SEQ ID NO: 1735954 - DNA, 25 bp, Homo sapien
aatattcatctgcacaagctgtaca

SEQ ID NO: 1735955 - DNA, 25 bp, Homo sapien
ctaatattcatctgcacaagctgta

SEQ ID NO: 1735956 - DNA, 25 bp, Homo sapien
gctaactggcttaatgactcaggag

SEQ ID NO: 1735957 - DNA, 25 bp, Homo sapien
gatacagtgctttccctattagctg

SEQ ID NO: 1735958 - DNA, 25 bp, Homo sapien
gatccaggtaccagtttcttagagc

SEQ ID NO: 1735959 - DNA, 25 bp, Homo sapien
gagacagagctccatttagcagata

SEQ ID NO: 1735960 - DNA, 25 bp, Homo sapien
cagtatctatagctttggcctctgt

SEQ ID NO: 1735961 - DNA, 25 bp, Homo sapien
tcagacttgaatagcatttgaccta

SEQ ID NO: 1735962 - DNA, 25 bp, Homo sapien
gacctaaggagtcagtatctatagc

SEQ ID NO: 1735963 - DNA, 25 bp, Homo sapien
cattgctggcgaggttagaattgaa

SEQ ID NO: 1735964 - DNA, 25 bp, Homo sapien
gaactctctgtgaaaggtctaccca

SEQ ID NO: 1735965 - DNA, 25 bp, Homo sapien
gaatgaactctctgtgaaaggtcta

SEQ ID NO: 1735966 - DNA, 25 bp, Homo sapien
tgccacggaatgaactctctgtgaa

SEQ ID NO: 1735967 - DNA, 25 bp, Homo sapien
gtagctgccacggaatgaactctct

SEQ ID NO: 1735968 - DNA, 25 bp, Homo sapien
tggtccattcattacaaggctctct

SEQ ID NO: 1735969 - DNA, 25 bp, Homo sapien
gaagaaggctcctgatgccaatggg

SEQ ID NO: 1735970 - DNA, 25 bp, Homo sapien
cagaggaaagtctaatctgtgaatc

SEQ ID NO: 1735971 - DNA, 25 bp, Homo sapien
cacttctatctctggctgttttggt

SEQ ID NO: 1735972 - DNA, 25 bp, Homo sapien
gctgttttgtctgggaccattaccc

SEQ ID NO: 1735973 - DNA, 25 bp, Homo sapien
tcacacaaggtgacactggaatttt

SEQ ID NO: 1735974 - DNA, 25 bp, Homo sapien
atgcatgtctatgtattctgtggtc

SEQ ID NO: 1735975 - DNA, 25 bp, Homo sapien
gaattttagcaatgttgggaacagc

SEQ ID NO: 1735976 - DNA, 25 bp, Homo sapien
gggtgggagaatatgcacggctcag

SEQ ID NO: 1735977 - DNA, 25 bp, Homo sapien
ggagaatatgcacggctcagtgcag

SEQ ID NO: 1735978 - DNA, 25 bp, Homo sapien
tgggagaatatgcacggctcagtgc

SEQ ID NO: 1735979 - DNA, 25 bp, Homo sapien
ggtgggagaatatgcacggctcagt

SEQ ID NO: 1735980 - DNA, 25 bp, Homo sapien
ttgttataatatccaccaagagttt

SEQ ID NO: 1735981 - DNA, 25 bp, Homo sapien
tgttatccttgttataatatccacc

SEQ ID NO: 1735982 - DNA, 25 bp, Homo sapien
tccttgttataatatccaccaagag

SEQ ID NO: 1735983 - DNA, 25 bp, Homo sapien
tatccttgttataatatccaccaag

SEQ ID NO: 1735984 - DNA, 25 bp, Homo sapien
aaatccacatctggccacttcaact

SEQ ID NO: 1735985 - DNA, 25 bp, Homo sapien
tactccaaatccacatctggccact

SEQ ID NO: 1735986 - DNA, 25 bp, Homo sapien
caaatccacatctggccacttcaac

SEQ ID NO: 1735987 - DNA, 25 bp, Homo sapien
tccaaatccacatctggccacttca

SEQ ID NO: 1735988 - DNA, 25 bp, Homo sapien
ctccagcttcatgttcatcatttcc

SEQ ID NO: 1735989 - DNA, 25 bp, Homo sapien
cttgtctcctttcaggcctccagct

SEQ ID NO: 1735990 - DNA, 25 bp, Homo sapien
gcctccagcttcatgttcatcattt

SEQ ID NO: 1735991 - DNA, 25 bp, Homo sapien
tgtctcctttcaggcctccagcttc

SEQ ID NO: 1735992 - DNA, 25 bp, Homo sapien
attcacatggaatccaaggtcatta

SEQ ID NO: 1735993 - DNA, 25 bp, Homo sapien
ggagtgaaacatcttattgaatggg

SEQ ID NO: 1735994 - DNA, 25 bp, Homo sapien
gaatccaaggtcattacaatttcag

SEQ ID NO: 1735995 - DNA, 25 bp, Homo sapien
acaatttcagaatcaaacaggagtg

SEQ ID NO: 1735996 - DNA, 25 bp, Homo sapien
aggtagagttgatttcacccttcca

SEQ ID NO: 1735997 - DNA, 25 bp, Homo sapien
taggtagagttgatttcacccttcc

SEQ ID NO: 1735998 - DNA, 25 bp, Homo sapien
ataggtagagttgatttcacccttc

SEQ ID NO: 1735999 - DNA, 25 bp, Homo sapien
ggtagagttgatttcacccttccag

SEQ ID NO: 1736000 - DNA, 25 bp, Homo sapien
tgtcctttagggccaacagaccctg

SEQ ID NO: 1736001 - DNA, 25 bp, Homo sapien
ggtgtggataaaccctataggccaa

SEQ ID NO: 1736002 - DNA, 25 bp, Homo sapien
gcctagtccacatagaaaacgatca

SEQ ID NO: 1736003 - DNA, 25 bp, Homo sapien
aaaaatacccagagtgtcacacagt

SEQ ID NO: 1736004 - DNA, 25 bp, Homo sapien
caagtggctgacaaattggaatgct

SEQ ID NO: 1736005 - DNA, 25 bp, Homo sapien
aaagtaaaatgctcatggaccttat

SEQ ID NO: 1736006 - DNA, 25 bp, Homo sapien
agagagaaacaaatcaatgaagtag

SEQ ID NO: 1736007 - DNA, 25 bp, Homo sapien
tagactccaaagtaaacataccaga

SEQ ID NO: 1736008 - DNA, 25 bp, Homo sapien
tgaagtagaaaacccaaggtagtga

SEQ ID NO: 1736009 - DNA, 25 bp, Homo sapien
tactccctgtgatcctattacccca

SEQ ID NO: 1736010 - DNA, 25 bp, Homo sapien
ctccctgtgatcctattaccccagg

SEQ ID NO: 1736011 - DNA, 25 bp, Homo sapien
tttactccctgtgatcctattaccc

SEQ ID NO: 1736012 - DNA, 25 bp, Homo sapien
ctttactccctgtgatcctattacc

SEQ ID NO: 1736013 - DNA, 25 bp, Homo sapien
agtcctgggcttcctattaaaccag

SEQ ID NO: 1736014 - DNA, 25 bp, Homo sapien
tagtcctgggcttcctattaaacca

SEQ ID NO: 1736015 - DNA, 25 bp, Homo sapien
aacatctcctggcggtcctctgggt

SEQ ID NO: 1736016 - DNA, 25 bp, Homo sapien
tggcggtcctctgggtcccatggag

SEQ ID NO: 1736017 - DNA, 25 bp, Homo sapien
tggagcctgcagatccttgctgacc

SEQ ID NO: 1736018 - DNA, 25 bp, Homo sapien
gtcccatggagcctgcagatccttg

SEQ ID NO: 1736019 - DNA, 25 bp, Homo sapien
ctcctttaatgccttgttttcctgg

SEQ ID NO: 1736020 - DNA, 25 bp, Homo sapien
taatgccttgttttcctgggatacc

SEQ ID NO: 1736021 - DNA, 25 bp, Homo sapien
ttcctgggataccatgttctcctgg

SEQ ID NO: 1736022 - DNA, 25 bp, Homo sapien
gttttcctgggataccatgttctcc

SEQ ID NO: 1736023 - DNA, 25 bp, Homo sapien
ctgtagaaaacaaggtaagattctt

SEQ ID NO: 1736024 - DNA, 25 bp, Homo sapien
tgtagaaaacaaggtaagattctta

SEQ ID NO: 1736025 - DNA, 25 bp, Homo sapien
ggaagcccgggagggcctatgatcc

SEQ ID NO: 1736026 - DNA, 25 bp, Homo sapien
aagcccgggagggcctatgatccca

SEQ ID NO: 1736027 - DNA, 25 bp, Homo sapien
gcccgggagggcctatgatcccacc

SEQ ID NO: 1736028 - DNA, 25 bp, Homo sapien
ggcctatgatcccacccggatctcc

SEQ ID NO: 1736029 - DNA, 25 bp, Homo sapien
ttggcccacgtggaccaggtgctcc

SEQ ID NO: 1736030 - DNA, 25 bp, Homo sapien
ctttggcccacgtggaccaggtgct

SEQ ID NO: 1736031 - DNA, 25 bp, Homo sapien
ggtgctccaggatttccatctaatc

SEQ ID NO: 1736032 - DNA, 25 bp, Homo sapien
caggtgctccaggatttccatctaa

SEQ ID NO: 1736033 - DNA, 25 bp, Homo sapien
ttcctatcccttgtgggcctatgtc

SEQ ID NO: 1736034 - DNA, 25 bp, Homo sapien
ctggggaaccgtgaacacctggaag

SEQ ID NO: 1736035 - DNA, 25 bp, Homo sapien
tcccttgtgggcctatgtcccctgg

SEQ ID NO: 1736036 - DNA, 25 bp, Homo sapien
tatcccttgtgggcctatgtcccct

SEQ ID NO: 1736037 - DNA, 25 bp, Homo sapien
ctgaatacctggctctccagctggt

SEQ ID NO: 1736038 - DNA, 25 bp, Homo sapien
cctggctctccagctggtccttggg

SEQ ID NO: 1736039 - DNA, 25 bp, Homo sapien
tggctctccagctggtccttgggcg

SEQ ID NO: 1736040 - DNA, 25 bp, Homo sapien
gctctccagctggtccttgggcgcc

SEQ ID NO: 1736041 - DNA, 25 bp, Homo sapien
gtccctggagttcctggcaacccag

SEQ ID NO: 1736042 - DNA, 25 bp, Homo sapien
gagtccctggagttcctggcaaccc

SEQ ID NO: 1736043 - DNA, 25 bp, Homo sapien
agtccctggagttcctggcaaccca

SEQ ID NO: 1736044 - DNA, 25 bp, Homo sapien
tccctggagttcctggcaacccagg

SEQ ID NO: 1736045 - DNA, 25 bp, Homo sapien
gcctggcaggcctggctttccatct

SEQ ID NO: 1736046 - DNA, 25 bp, Homo sapien
ggcaggcctggctttccatctctcc

SEQ ID NO: 1736047 - DNA, 25 bp, Homo sapien
ctggcaggcctggctttccatctct

SEQ ID NO: 1736048 - DNA, 25 bp, Homo sapien
cgggtcacctggggggcctggcagg

SEQ ID NO: 1736049 - DNA, 25 bp, Homo sapien
aagcaccgatgtctcccaagagagg

SEQ ID NO: 1736050 - DNA, 25 bp, Homo sapien
aaagcaccgatgtctcccaagagag

SEQ ID NO: 1736051 - DNA, 25 bp, Homo sapien
caaagcaccgatgtctcccaagaga

SEQ ID NO: 1736052 - DNA, 25 bp, Homo sapien
tggcttggcagttgccacagaaatt

SEQ ID NO: 1736053 - DNA, 25 bp, Homo sapien
ctgggacactggcttggcagttgcc

SEQ ID NO: 1736054 - DNA, 25 bp, Homo sapien
tgttgcttttcagccctgggacact

SEQ ID NO: 1736055 - DNA, 25 bp, Homo sapien
catggaatcatactttccaggctca

SEQ ID NO: 1736056 - DNA, 25 bp, Homo sapien
tcctggaggaccccgtggccctata

SEQ ID NO: 1736057 - DNA, 25 bp, Homo sapien
tttggtccctctcttcctgggattc

SEQ ID NO: 1736058 - DNA, 25 bp, Homo sapien
ggaggaccccgtggccctatatcac

SEQ ID NO: 1736059 - DNA, 25 bp, Homo sapien
tggtccctctcttcctgggattcct

SEQ ID NO: 1736060 - DNA, 25 bp, Homo sapien
ggtatcccagggtagccccgctctc

SEQ ID NO: 1736061 - DNA, 25 bp, Homo sapien
tatcccagggtagccccgctctcct

SEQ ID NO: 1736062 - DNA, 25 bp, Homo sapien
ggtagccccgctctcctttgcttcc

SEQ ID NO: 1736063 - DNA, 25 bp, Homo sapien
agggtagccccgctctcctttgctt

SEQ ID NO: 1736064 - DNA, 25 bp, Homo sapien
ggaatgcctggaattccttgaagac

SEQ ID NO: 1736065 - DNA, 25 bp, Homo sapien
gcctggagcacctggaatgcctgga

SEQ ID NO: 1736066 - DNA, 25 bp, Homo sapien
agggggtccagtcgggcctggagca

SEQ ID NO: 1736067 - DNA, 25 bp, Homo sapien
gagcacctggaatgcctggaattcc

SEQ ID NO: 1736068 - DNA, 25 bp, Homo sapien
ggaccaggatgtccagttcttccca

SEQ ID NO: 1736069 - DNA, 25 bp, Homo sapien
cactccaagccccagtttggatggt

SEQ ID NO: 1736070 - DNA, 25 bp, Homo sapien
ccccagtttggatggtaagtgaggc

SEQ ID NO: 1736071 - DNA, 25 bp, Homo sapien
atttctacttttaggctttgcttga

SEQ ID NO: 1736072 - DNA, 25 bp, Homo sapien
ttgattttatggctctctctgtgaa

SEQ ID NO: 1736073 - DNA, 25 bp, Homo sapien
tccactacaagaataggtactttct

SEQ ID NO: 1736074 - DNA, 25 bp, Homo sapien
tcttccaaatccactacaagaatag

SEQ ID NO: 1736075 - DNA, 25 bp, Homo sapien
cactacaagaataggtactttctac

SEQ ID NO: 1736076 - DNA, 25 bp, Homo sapien
caaatccactacaagaataggtact

SEQ ID NO: 1736077 - DNA, 25 bp, Homo sapien
tgccgtttcgttcattaaatggaat

SEQ ID NO: 1736078 - DNA, 25 bp, Homo sapien
taaactgctcatgccgtttcgttca

SEQ ID NO: 1736079 - DNA, 25 bp, Homo sapien
ttttatataaactgctcatgccgtt

SEQ ID NO: 1736080 - DNA, 25 bp, Homo sapien
tgctcatgccgtttcgttcattaaa

SEQ ID NO: 1736081 - DNA, 25 bp, Homo sapien
tggccctgggtaactgggaacattc

SEQ ID NO: 1736082 - DNA, 25 bp, Homo sapien
gggtaactgggaacattcacacctc

SEQ ID NO: 1736083 - DNA, 25 bp, Homo sapien
ccctgggtaactgggaacattcaca

SEQ ID NO: 1736084 - DNA, 25 bp, Homo sapien
ctgggtaactgggaacattcacacc

SEQ ID NO: 1736085 - DNA, 25 bp, Homo sapien
ctgggccaggatcgccttttgggcc

SEQ ID NO: 1736086 - DNA, 25 bp, Homo sapien
cactgggccaggatcgccttttggg

SEQ ID NO: 1736087 - DNA, 25 bp, Homo sapien
actgggccaggatcgccttttgggc

SEQ ID NO: 1736088 - DNA, 25 bp, Homo sapien
cctggcaaccccattgcaccaggct

SEQ ID NO: 1736089 - DNA, 25 bp, Homo sapien
acacctggaaatccttctaatcctg

SEQ ID NO: 1736090 - DNA, 25 bp, Homo sapien
ctggaaatccttctaatcctggcaa

SEQ ID NO: 1736091 - DNA, 25 bp, Homo sapien
tggcaaccccattgcaccaggctct

SEQ ID NO: 1736092 - DNA, 25 bp, Homo sapien
gggggacctgctgggcctcgatctc

SEQ ID NO: 1736093 - DNA, 25 bp, Homo sapien
cgacatccctgctattcctggggga

SEQ ID NO: 1736094 - DNA, 25 bp, Homo sapien
cctgctattcctgggggacctgctg

SEQ ID NO: 1736095 - DNA, 25 bp, Homo sapien
atccctgctattcctgggggacctg

SEQ ID NO: 1736096 - DNA, 25 bp, Homo sapien
atgatgtgaagtaatctgaactcac

SEQ ID NO: 1736097 - DNA, 25 bp, Homo sapien
ctgtgaaaatgatgtgaagtaatct

SEQ ID NO: 1736098 - DNA, 25 bp, Homo sapien
gtgaaaatgatgtgaagtaatctga

SEQ ID NO: 1736099 - DNA, 25 bp, Homo sapien
aaaatgatgtgaagtaatctgaact

SEQ ID NO: 1736100 - DNA, 25 bp, Homo sapien
gtatagagggctcgggccttgagat

SEQ ID NO: 1736101 - DNA, 25 bp, Homo sapien
ctgaagggtcttattgtgggacatg

SEQ ID NO: 1736102 - DNA, 25 bp, Homo sapien
attgtgggacatggcgggtatagag

SEQ ID NO: 1736103 - DNA, 25 bp, Homo sapien
tggcgggtatagagggctcgggcct

SEQ ID NO: 1736104 - DNA, 25 bp, Homo sapien
tcctggaggccctggggcaccaggt

SEQ ID NO: 1736105 - DNA, 25 bp, Homo sapien
actcctggaggccctggggcaccag

SEQ ID NO: 1736106 - DNA, 25 bp, Homo sapien
ccctggaactcctggaggccctggg

SEQ ID NO: 1736107 - DNA, 25 bp, Homo sapien
ctggaggccctggggcaccaggttt

SEQ ID NO: 1736108 - DNA, 25 bp, Homo sapien
tggtccagggaaacctatatctcca

SEQ ID NO: 1736109 - DNA, 25 bp, Homo sapien
aacctatatctccaacaggtcctct

SEQ ID NO: 1736110 - DNA, 25 bp, Homo sapien
gggaaacctatatctccaacaggtc

SEQ ID NO: 1736111 - DNA, 25 bp, Homo sapien
tggctttcctgagggtccttctggt

SEQ ID NO: 1736112 - DNA, 25 bp, Homo sapien
agcacctggtattccatcttttcca

SEQ ID NO: 1736113 - DNA, 25 bp, Homo sapien
ctgagcacctggtattccatctttt

SEQ ID NO: 1736114 - DNA, 25 bp, Homo sapien
cctggtattccatcttttccattta

SEQ ID NO: 1736115 - DNA, 25 bp, Homo sapien
cacctggtattccatcttttccatt

SEQ ID NO: 1736116 - DNA, 25 bp, Homo sapien
ctctgtctccaggcttacccatgat

SEQ ID NO: 1736117 - DNA, 25 bp, Homo sapien
ggtggacccataggaccgatggccc

SEQ ID NO: 1736118 - DNA, 25 bp, Homo sapien
gttcaccttgtgagcctctgtctcc

SEQ ID NO: 1736119 - DNA, 25 bp, Homo sapien
tcctggtggacccataggaccgatg

SEQ ID NO: 1736120 - DNA, 25 bp, Homo sapien
atggcccccttcatgcctgtaaggc

SEQ ID NO: 1736121 - DNA, 25 bp, Homo sapien
atccttaggacctcttgattaatat

SEQ ID NO: 1736122 - DNA, 25 bp, Homo sapien
aatccttaggacctcttgattaata

SEQ ID NO: 1736123 - DNA, 25 bp, Homo sapien
aaatccttaggacctcttgattaat

SEQ ID NO: 1736124 - DNA, 25 bp, Homo sapien
gaagactgatagcccttcatgagag

SEQ ID NO: 1736125 - DNA, 25 bp, Homo sapien
agactgatagcccttcatgagagta

SEQ ID NO: 1736126 - DNA, 25 bp, Homo sapien
aagactgatagcccttcatgagagt

SEQ ID NO: 1736127 - DNA, 25 bp, Homo sapien
gagacaatggctctcgaggctgcag

SEQ ID NO: 1736128 - DNA, 25 bp, Homo sapien
gatgcgtgcagcagagatagcatta

SEQ ID NO: 1736129 - DNA, 25 bp, Homo sapien
tgcgacttgccgctcggagacaatg

SEQ ID NO: 1736130 - DNA, 25 bp, Homo sapien
tccctgctgacagtctgcgacttgc

SEQ ID NO: 1736131 - DNA, 25 bp, Homo sapien
catccagatgaattgtaaaggcctt

SEQ ID NO: 1736132 - DNA, 25 bp, Homo sapien
gaagagttccgatataagcatgcat

SEQ ID NO: 1736133 - DNA, 25 bp, Homo sapien
tgagccactgagaccggtcacaatt

SEQ ID NO: 1736134 - DNA, 25 bp, Homo sapien
catttagcataagggtaattacctc

SEQ ID NO: 1736135 - DNA, 25 bp, Homo sapien
cagcttgagctgggataggaataca

SEQ ID NO: 1736136 - DNA, 25 bp, Homo sapien
tgagctgggataggaatacagccat

SEQ ID NO: 1736137 - DNA, 25 bp, Homo sapien
gtggcccaggcaacccatccttccc

SEQ ID NO: 1736138 - DNA, 25 bp, Homo sapien
cttgagctgggataggaatacagcc

SEQ ID NO: 1736139 - DNA, 25 bp, Homo sapien
tctactcttgaatttcctattaagg

SEQ ID NO: 1736140 - DNA, 25 bp, Homo sapien
tgcacaagtactttctactcttgaa

SEQ ID NO: 1736141 - DNA, 25 bp, Homo sapien
gataaagcgactgaattgcacaagt

SEQ ID NO: 1736142 - DNA, 25 bp, Homo sapien
ctattaaggtcccaagctcattcat

SEQ ID NO: 1736143 - DNA, 25 bp, Homo sapien
cctggcagcccaattccaggttcac

SEQ ID NO: 1736144 - DNA, 25 bp, Homo sapien
gactccctggcagcccaattccagg

SEQ ID NO: 1736145 - DNA, 25 bp, Homo sapien
actccctggcagcccaattccaggt

SEQ ID NO: 1736146 - DNA, 25 bp, Homo sapien
tccctggcagcccaattccaggttc

SEQ ID NO: 1736147 - DNA, 25 bp, Homo sapien
caatcttctgggttacatcttccac

SEQ ID NO: 1736148 - DNA, 25 bp, Homo sapien
gctgatgggcatgagacacaggata

SEQ ID NO: 1736149 - DNA, 25 bp, Homo sapien
gacacaggatagaggcaatcttctg

SEQ ID NO: 1736150 - DNA, 25 bp, Homo sapien
ctgtgcgctgatgggcatgagacac

SEQ ID NO: 1736151 - DNA, 25 bp, Homo sapien
gaaatcaaaggccaaccacatgttg

SEQ ID NO: 1736152 - DNA, 25 bp, Homo sapien
gctccagtggcaaggaaatgttacc

SEQ ID NO: 1736153 - DNA, 25 bp, Homo sapien
tttgacggtattaagagagctccag

SEQ ID NO: 1736154 - DNA, 25 bp, Homo sapien
tgggctccctgataaaacagtttcc

SEQ ID NO: 1736155 - DNA, 25 bp, Homo sapien
gccactgaagctttaagagtaccaa

SEQ ID NO: 1736156 - DNA, 25 bp, Homo sapien
aagctttaagagtaccaaagacagc

SEQ ID NO: 1736157 - DNA, 25 bp, Homo sapien
cataaggataatggatacaagggcc

SEQ ID NO: 1736158 - DNA, 25 bp, Homo sapien
cccaaagatcttgctaggccactga

SEQ ID NO: 1736159 - DNA, 25 bp, Homo sapien
ctatacgtatcccatcctttgtttt

SEQ ID NO: 1736160 - DNA, 25 bp, Homo sapien
taacatgcatttgctgacactacac

SEQ ID NO: 1736161 - DNA, 25 bp, Homo sapien
tgctgacactacacattcatcttct

SEQ ID NO: 1736162 - DNA, 25 bp, Homo sapien
tgagtccattctatacgtatcccat

SEQ ID NO: 1736163 - DNA, 25 bp, Homo sapien
taatattaatcgtcgtcatggccca

SEQ ID NO: 1736164 - DNA, 25 bp, Homo sapien
tattaaaggaattgggcaactgccg

SEQ ID NO: 1736165 - DNA, 25 bp, Homo sapien
gaggtatatcacaggttcccaacag

SEQ ID NO: 1736166 - DNA, 25 bp, Homo sapien
tgttctagagaatcagtgcctgcca

SEQ ID NO: 1736167 - DNA, 25 bp, Homo sapien
tctgtaaatacacacgcttaagtgc

SEQ ID NO: 1736168 - DNA, 25 bp, Homo sapien
taaacatataaatcctctggcacgt

SEQ ID NO: 1736169 - DNA, 25 bp, Homo sapien
tgttcaataaacataggtcaagccc

SEQ ID NO: 1736170 - DNA, 25 bp, Homo sapien
ccaggacatggcagtataaagtacc

SEQ ID NO: 1736171 - DNA, 25 bp, Homo sapien
aaccaatagaaattctgatttccaa

SEQ ID NO: 1736172 - DNA, 25 bp, Homo sapien
tccaaatatcaagaaaattacttaa

SEQ ID NO: 1736173 - DNA, 25 bp, Homo sapien
ccaacataggtggaaaaccaataga

SEQ ID NO: 1736174 - DNA, 25 bp, Homo sapien
ttctgatttccaaatatcaagaaaa

SEQ ID NO: 1736175 - DNA, 25 bp, Homo sapien
tgactgagcacataaattccctggc

SEQ ID NO: 1736176 - DNA, 25 bp, Homo sapien
gaaatcacttccgagactgactgag

SEQ ID NO: 1736177 - DNA, 25 bp, Homo sapien
ggttgtacaacaagctccacagata

SEQ ID NO: 1736178 - DNA, 25 bp, Homo sapien
ggcaactagagcactcactgggaga

SEQ ID NO: 1736179 - DNA, 25 bp, Homo sapien
gataagaaagggctacatctcccga

SEQ ID NO: 1736180 - DNA, 25 bp, Homo sapien
gaagaaaccccactacattcaatgg

SEQ ID NO: 1736181 - DNA, 25 bp, Homo sapien
tactagactagttatgaagaaaccc

SEQ ID NO: 1736182 - DNA, 25 bp, Homo sapien
ggtgcttaaaatctcatcgatgtgc

SEQ ID NO: 1736183 - DNA, 25 bp, Homo sapien
tgcaaccttctttgttgttcctgtt

SEQ ID NO: 1736184 - DNA, 25 bp, Homo sapien
ctgcaaccttctttgttgttcctgt

SEQ ID NO: 1736185 - DNA, 25 bp, Homo sapien
ggcctgcctgctcatgtattttggt

SEQ ID NO: 1736186 - DNA, 25 bp, Homo sapien
tattttgttatgagagtgaagtcag

SEQ ID NO: 1736187 - DNA, 25 bp, Homo sapien
ttgttatgagagtgaagtcagggaa

SEQ ID NO: 1736188 - DNA, 25 bp, Homo sapien
tttgttgtcaacagtataactaaat

SEQ ID NO: 1736189 - DNA, 25 bp, Homo sapien
aacagtataactaaatttcattggc

SEQ ID NO: 1736190 - DNA, 25 bp, Homo sapien
tacatggtaatactctaatgtcctc

SEQ ID NO: 1736191 - DNA, 25 bp, Homo sapien
cattggcagttataccattgaaaaa

SEQ ID NO: 1736192 - DNA, 25 bp, Homo sapien
ttattttagacacaagtcaacacac

SEQ ID NO: 1736193 - DNA, 25 bp, Homo sapien
cacaagtcaacacacccaaggttgt

SEQ ID NO: 1736194 - DNA, 25 bp, Homo sapien
tttcagtgttgcagtgacagtaact

SEQ ID NO: 1736195 - DNA, 25 bp, Homo sapien
gtgttgcagtgacagtaactccggg

SEQ ID NO: 1736196 - DNA, 25 bp, Homo sapien
cataatctaagtgagggcttaaaac

SEQ ID NO: 1736197 - DNA, 25 bp, Homo sapien
cttaaaacatggacacaaataacca

SEQ ID NO: 1736198 - DNA, 25 bp, Homo sapien
gaggtttaagatcatttgccagatg

SEQ ID NO: 1736199 - DNA, 25 bp, Homo sapien
gttgaaagtgactaattgccatttc

SEQ ID NO: 1736200 - DNA, 25 bp, Homo sapien
gaggttaatagaccgcttctttctc

SEQ ID NO: 1736201 - DNA, 25 bp, Homo sapien
cctctgaggttaatagaccgcttct

SEQ ID NO: 1736202 - DNA, 25 bp, Homo sapien
ttcaggatgtcaggaaggtccccag

SEQ ID NO: 1736203 - DNA, 25 bp, Homo sapien
cttcaggatgtcaggaaggtcccca

SEQ ID NO: 1736204 - DNA, 25 bp, Homo sapien
tcagatggtttatcagtcagaaggg

SEQ ID NO: 1736205 - DNA, 25 bp, Homo sapien
gcatactcaatgacttggacagtga

SEQ ID NO: 1736206 - DNA, 25 bp, Homo sapien
cagaagggagagcatactcaatgac

SEQ ID NO: 1736207 - DNA, 25 bp, Homo sapien
caatgacttggacagtgagaagtcc

SEQ ID NO: 1736208 - DNA, 25 bp, Homo sapien
ccaaagcaccaggtaggtggaaggt

SEQ ID NO: 1736209 - DNA, 25 bp, Homo sapien
tacgtggtacctggacggcctctct

SEQ ID NO: 1736210 - DNA, 25 bp, Homo sapien
gcatgctgctagcacaagtggcctt

SEQ ID NO: 1736211 - DNA, 25 bp, Homo sapien
tcttcacagggtacatatcttccgg

SEQ ID NO: 1736212 - DNA, 25 bp, Homo sapien
tctatcttgtttcaggacagtggaa

SEQ ID NO: 1736213 - DNA, 25 bp, Homo sapien
tctctatcttgtttcaggacagtgg

SEQ ID NO: 1736214 - DNA, 25 bp, Homo sapien
ctatcttgtttcaggacagtggaaa

SEQ ID NO: 1736215 - DNA, 25 bp, Homo sapien
atcttgtttcaggacagtggaaaag

SEQ ID NO: 1736216 - DNA, 25 bp, Homo sapien
gatgtgacagcaaactttccaggac

SEQ ID NO: 1736217 - DNA, 25 bp, Homo sapien
tctgttcggcacaatgcttttgtca

SEQ ID NO: 1736218 - DNA, 25 bp, Homo sapien
gcggcagcacttagggcagatgact

SEQ ID NO: 1736219 - DNA, 25 bp, Homo sapien
aggacattcagtcttcggcggcagc

SEQ ID NO: 1736220 - DNA, 25 bp, Homo sapien
tcacagcaaccgcaaacaccgcaac

SEQ ID NO: 1736221 - DNA, 25 bp, Homo sapien
agcgcggccagcgagcatgcgcagt

SEQ ID NO: 1736222 - DNA, 25 bp, Homo sapien
ttcgtcaccgcggctcggctactgg

SEQ ID NO: 1736223 - DNA, 25 bp, Homo sapien
caaacaccgcaaccgcggagccggt

SEQ ID NO: 1736224 - DNA, 25 bp, Homo sapien
gaagacggcccgacccgggtcagca

SEQ ID NO: 1736225 - DNA, 25 bp, Homo sapien
cccgcctgtcgaacggaggagctcg

SEQ ID NO: 1736226 - DNA, 25 bp, Homo sapien
tgtcgaacggaggagctcgttgtcc

SEQ ID NO: 1736227 - DNA, 25 bp, Homo sapien
agctgcaagaagacggcccgacccg

SEQ ID NO: 1736228 - DNA, 25 bp, Homo sapien
gcggcgggcgaacggcggacgaaga

SEQ ID NO: 1736229 - DNA, 25 bp, Homo sapien
ctccgaccgccagcagtcgggtgag

SEQ ID NO: 1736230 - DNA, 25 bp, Homo sapien
gcgaacggcggacgaagaggaggcc

SEQ ID NO: 1736231 - DNA, 25 bp, Homo sapien
ggacgaagaggaggccgcttccttc

SEQ ID NO: 1736232 - DNA, 25 bp, Homo sapien
ctccctcagagcgctccgcaccgcc

SEQ ID NO: 1736233 - DNA, 25 bp, Homo sapien
gctccgcaccgccgtccccaccgac

SEQ ID NO: 1736234 - DNA, 25 bp, Homo sapien
gcctccctcagagcgctccgcaccg

SEQ ID NO: 1736235 - DNA, 25 bp, Homo sapien
tccctcagagcgctccgcaccgccg

SEQ ID NO: 1736236 - DNA, 25 bp, Homo sapien
gaaccaaatacataatccagttgat

SEQ ID NO: 1736237 - DNA, 25 bp, Homo sapien
ctgctttgagattccagaaccaaat

SEQ ID NO: 1736238 - DNA, 25 bp, Homo sapien
gaatttgtttgtggactgctttgag

SEQ ID NO: 1736239 - DNA, 25 bp, Homo sapien
cagacaacataaggaagaatttgtt

SEQ ID NO: 1736240 - DNA, 25 bp, Homo sapien
gaaacagctgcatcctataggcaac

SEQ ID NO: 1736241 - DNA, 25 bp, Homo sapien
gatagcagtatttccaatgtaagcc

SEQ ID NO: 1736242 - DNA, 25 bp, Homo sapien
tgctggcaatctgaagacatcaaag

SEQ ID NO: 1736243 - DNA, 25 bp, Homo sapien
gtcccagactacagccaggcatagt

SEQ ID NO: 1736244 - DNA, 25 bp, Homo sapien
tattaaataaccaatcttgtacttc

SEQ ID NO: 1736245 - DNA, 25 bp, Homo sapien
taaataaccaatcttgtacttccag

SEQ ID NO: 1736246 - DNA, 25 bp, Homo sapien
cattattaaataaccaatcttgtac

SEQ ID NO: 1736247 - DNA, 25 bp, Homo sapien
taaccaatcttgtacttccagttac

SEQ ID NO: 1736248 - DNA, 25 bp, Homo sapien
cctattgttgggtgacttcagtagt

SEQ ID NO: 1736249 - DNA, 25 bp, Homo sapien
taaacaatcccctattgttgggtga

SEQ ID NO: 1736250 - DNA, 25 bp, Homo sapien
ccccggccattaattgttaactatg

SEQ ID NO: 1736251 - DNA, 25 bp, Homo sapien
aactatgacactgggaacatgttat

SEQ ID NO: 1736252 - DNA, 25 bp, Homo sapien
aatttatacccagaagactattctg

SEQ ID NO: 1736253 - DNA, 25 bp, Homo sapien
tacccagaagactattctgataaca

SEQ ID NO: 1736254 - DNA, 25 bp, Homo sapien
ttaatttatacccagaagactattc

SEQ ID NO: 1736255 - DNA, 25 bp, Homo sapien
ttatacccagaagactattctgata

SEQ ID NO: 1736256 - DNA, 25 bp, Homo sapien
ttagctccacagagaattctaccat

SEQ ID NO: 1736257 - DNA, 25 bp, Homo sapien
gtttagctccacagagaattctacc

SEQ ID NO: 1736258 - DNA, 25 bp, Homo sapien
tttagctccacagagaattctacca

SEQ ID NO: 1736259 - DNA, 25 bp, Homo sapien
tctgaaacaaatccacattgtagaa

SEQ ID NO: 1736260 - DNA, 25 bp, Homo sapien
tgaaacaaatccacattgtagaact

SEQ ID NO: 1736261 - DNA, 25 bp, Homo sapien
tctctgaaacaaatccacattgtag

SEQ ID NO: 1736262 - DNA, 25 bp, Homo sapien
cctctctgaaacaaatccacattgt

SEQ ID NO: 1736263 - DNA, 25 bp, Homo sapien
ggccaatctgccatctgactgtgca

SEQ ID NO: 1736264 - DNA, 25 bp, Homo sapien
cagtagaaccgttgagatgatccac

SEQ ID NO: 1736265 - DNA, 25 bp, Homo sapien
tgagccaagccaccctagatcagta

SEQ ID NO: 1736266 - DNA, 25 bp, Homo sapien
gcattcatgaagtgagcccagcaaa

SEQ ID NO: 1736267 - DNA, 25 bp, Homo sapien
aactgtgttacagggcatggtgacg

SEQ ID NO: 1736268 - DNA, 25 bp, Homo sapien
tgtgttgtatcaaacctggtttaca

SEQ ID NO: 1736269 - DNA, 25 bp, Homo sapien
actcttagctgatagtccttttaaa

SEQ ID NO: 1736270 - DNA, 25 bp, Homo sapien
ccataagtttaacaacctcagaatc

SEQ ID NO: 1736271 - DNA, 25 bp, Homo sapien
tcgtgctctggaacatatcacaagt

SEQ ID NO: 1736272 - DNA, 25 bp, Homo sapien
gaaatttcacaattcctccgccatc

SEQ ID NO: 1736273 - DNA, 25 bp, Homo sapien
tgggtcactacaactttcctgcaaa

SEQ ID NO: 1736274 - DNA, 25 bp, Homo sapien
agtatctccctattgttacaaaaag

SEQ ID NO: 1736275 - DNA, 25 bp, Homo sapien
gactaattggctggtggtatatgca

SEQ ID NO: 1736276 - DNA, 25 bp, Homo sapien
gcttctcgtgaatccaaattgtcag

SEQ ID NO: 1736277 - DNA, 25 bp, Homo sapien
aagagggacgtgcacgatttcatcc

SEQ ID NO: 1736278 - DNA, 25 bp, Homo sapien
aacagtactcttgcactcttgggcc

SEQ ID NO: 1736279 - DNA, 25 bp, Homo sapien
tgctcaatgcaacctgtaccaccca

SEQ ID NO: 1736280 - DNA, 25 bp, Homo sapien
tggaacccacaggcatgcttattta

SEQ ID NO: 1736281 - DNA, 25 bp, Homo sapien
agtaggtgaggtgataaatacgtta

SEQ ID NO: 1736282 - DNA, 25 bp, Homo sapien
taggtgaggtgataaatacgttaat

SEQ ID NO: 1736283 - DNA, 25 bp, Homo sapien
tacaaagttgcagttggacaggagt

SEQ ID NO: 1736284 - DNA, 25 bp, Homo sapien
acaggagtagtaagttttagtgatc

SEQ ID NO: 1736285 - DNA, 25 bp, Homo sapien
tttcatagaagcacgaatctggtaa

SEQ ID NO: 1736286 - DNA, 25 bp, Homo sapien
tcatagaagcacgaatctggtaaaa

SEQ ID NO: 1736287 - DNA, 25 bp, Homo sapien
attttcatagaagcacgaatctggt

SEQ ID NO: 1736288 - DNA, 25 bp, Homo sapien
catagaagcacgaatctggtaaaaa

SEQ ID NO: 1736289 - DNA, 25 bp, Homo sapien
tcaaaagctatggaaaggttgttac

SEQ ID NO: 1736290 - DNA, 25 bp, Homo sapien
cttaccacaggtgcccagaggatga

SEQ ID NO: 1736291 - DNA, 25 bp, Homo sapien
caacattcaaaagctatggaaaggt

SEQ ID NO: 1736292 - DNA, 25 bp, Homo sapien
accacaggtgcccagaggatgaaac

SEQ ID NO: 1736293 - DNA, 25 bp, Homo sapien
tttcagtggctctcaaaggaaggcc

SEQ ID NO: 1736294 - DNA, 25 bp, Homo sapien
ggagagcatgcacaaaatatgagca

SEQ ID NO: 1736295 - DNA, 25 bp, Homo sapien
tccattgaatccacaagaatggtgg

SEQ ID NO: 1736296 - DNA, 25 bp, Homo sapien
gaaagatatggttctgctaacagca

SEQ ID NO: 1736297 - DNA, 25 bp, Homo sapien
acatctaactgcttaggggagttac

SEQ ID NO: 1736298 - DNA, 25 bp, Homo sapien
aacatctaactgcttaggggagtta

SEQ ID NO: 1736299 - DNA, 25 bp, Homo sapien
gagaggctgatgtgggattatcact

SEQ ID NO: 1736300 - DNA, 25 bp, Homo sapien
tttgagaggctgatgtgggattatc

SEQ ID NO: 1736301 - DNA, 25 bp, Homo sapien
caggtgttcaaggctatagtgaact

SEQ ID NO: 1736302 - DNA, 25 bp, Homo sapien
ggtgttcaaggctatagtgaactat

SEQ ID NO: 1736303 - DNA, 25 bp, Homo sapien
ctcctagttctactcctacctcatg

SEQ ID NO: 1736304 - DNA, 25 bp, Homo sapien
catgggccacccctttttcgtctct

SEQ ID NO: 1736305 - DNA, 25 bp, Homo sapien
ctcatgggccacccctttttcgtct

SEQ ID NO: 1736306 - DNA, 25 bp, Homo sapien
ctagttctactcctacctcatgggc

SEQ ID NO: 1736307 - DNA, 25 bp, Homo sapien
gcaaattagagaatcatgaactgag

SEQ ID NO: 1736308 - DNA, 25 bp, Homo sapien
tactgcaaattagagaatcatgaac

SEQ ID NO: 1736309 - DNA, 25 bp, Homo sapien
gttttactgcaaattagagaatcat

SEQ ID NO: 1736310 - DNA, 25 bp, Homo sapien
aattagagaatcatgaactgaggct

SEQ ID NO: 1736311 - DNA, 25 bp, Homo sapien
tctgtgaagtgtagatccaaggata

SEQ ID NO: 1736312 - DNA, 25 bp, Homo sapien
catctgtgaagtgtagatccaagga

SEQ ID NO: 1736313 - DNA, 25 bp, Homo sapien
gaagtgtagatccaaggataataga

SEQ ID NO: 1736314 - DNA, 25 bp, Homo sapien
tgtgaagtgtagatccaaggataat

SEQ ID NO: 1736315 - DNA, 25 bp, Homo sapien
gtgcagcttcaatgttcggctactt

SEQ ID NO: 1736316 - DNA, 25 bp, Homo sapien
agttgcaaggcattcagatcatctg

SEQ ID NO: 1736317 - DNA, 25 bp, Homo sapien
tgttcggctacttattagttgcaag

SEQ ID NO: 1736318 - DNA, 25 bp, Homo sapien
tctatgggggctaaagtgcagcttc

SEQ ID NO: 1736319 - DNA, 25 bp, Homo sapien
tgtagtgcaaccaatgatgcatgaa

SEQ ID NO: 1736320 - DNA, 25 bp, Homo sapien
tagtggctggtgtagtgcaaccaat

SEQ ID NO: 1736321 - DNA, 25 bp, Homo sapien
cttattagtggctggtgtagtgcaa

SEQ ID NO: 1736322 - DNA, 25 bp, Homo sapien
gctggtgtagtgcaaccaatgatgc

SEQ ID NO: 1736323 - DNA, 25 bp, Homo sapien
tttgttttgtgctggtgcatttcta

SEQ ID NO: 1736324 - DNA, 25 bp, Homo sapien
accacactttcaagagtaggaatca

SEQ ID NO: 1736325 - DNA, 25 bp, Homo sapien
gagtaggaatcacggaatctttgtt

SEQ ID NO: 1736326 - DNA, 25 bp, Homo sapien
caagttgtcttcacagggcgaggaa

SEQ ID NO: 1736327 - DNA, 25 bp, Homo sapien
tgtaatgaagtagctgtgcaatccc

SEQ ID NO: 1736328 - DNA, 25 bp, Homo sapien
ctagcagcaaagtggcacaaagtgt

SEQ ID NO: 1736329 - DNA, 25 bp, Homo sapien
tacgcatgatgtaggaaggagtctg

SEQ ID NO: 1736330 - DNA, 25 bp, Homo sapien
agtctgcaatgatgaagctacaacc

SEQ ID NO: 1736331 - DNA, 25 bp, Homo sapien
tttcttctgagaagacgctcatata

SEQ ID NO: 1736332 - DNA, 25 bp, Homo sapien
tcttctgagaagacgctcatatagg

SEQ ID NO: 1736333 - DNA, 25 bp, Homo sapien
agaagacgctcatataggagctgca

SEQ ID NO: 1736334 - DNA, 25 bp, Homo sapien
tctgagaagacgctcatataggagc

SEQ ID NO: 1736335 - DNA, 25 bp, Homo sapien
gatggtttactgaacgcaaagtgaa

SEQ ID NO: 1736336 - DNA, 25 bp, Homo sapien
ttttctactcaaccaagatctggcc

SEQ ID NO: 1736337 - DNA, 25 bp, Homo sapien
catgcataacatatccagagagtgg

SEQ ID NO: 1736338 - DNA, 25 bp, Homo sapien
cacatgtaaactgataggctggcaa

SEQ ID NO: 1736339 - DNA, 25 bp, Homo sapien
tagttcagtaagtcgagcttctaca

SEQ ID NO: 1736340 - DNA, 25 bp, Homo sapien
cacatagttcagtaagtcgagcttc

SEQ ID NO: 1736341 - DNA, 25 bp, Homo sapien
cttcacatagttcagtaagtcgagc

SEQ ID NO: 1736342 - DNA, 25 bp, Homo sapien
tcagtaagtcgagcttctacatcca

SEQ ID NO: 1736343 - DNA, 25 bp, Homo sapien
ccaagagtgaatgcatagtgaaaca

SEQ ID NO: 1736344 - DNA, 25 bp, Homo sapien
tccattaatgtagctgaccaagagt

SEQ ID NO: 1736345 - DNA, 25 bp, Homo sapien
tccagaaattgagtgagtgaacaga

SEQ ID NO: 1736346 - DNA, 25 bp, Homo sapien
caaaactgatgtatcctgcgtatgt

SEQ ID NO: 1736347 - DNA, 25 bp, Homo sapien
ttttcagcacgcaaacagtatcaag

SEQ ID NO: 1736348 - DNA, 25 bp, Homo sapien
tacaaaccttattcgtcacgccact

SEQ ID NO: 1736349 - DNA, 25 bp, Homo sapien
ataccatcaccaacagggtatgcag

SEQ ID NO: 1736350 - DNA, 25 bp, Homo sapien
catagagatccacctaatgctttta

SEQ ID NO: 1736351 - DNA, 25 bp, Homo sapien
gattacaagtatcccataatttgtt

SEQ ID NO: 1736352 - DNA, 25 bp, Homo sapien
taactattctaccattgggcattta

SEQ ID NO: 1736353 - DNA, 25 bp, Homo sapien
tgtttaactattctaccattgggca

SEQ ID NO: 1736354 - DNA, 25 bp, Homo sapien
taacttagattacaagtatcccata

SEQ ID NO: 1736355 - DNA, 25 bp, Homo sapien
cgtgtagcgttataacttccagaaa

SEQ ID NO: 1736356 - DNA, 25 bp, Homo sapien
cctcaaagtatggtgctcttgtgct

SEQ ID NO: 1736357 - DNA, 25 bp, Homo sapien
tgtccccataaagccatcaaaagtg

SEQ ID NO: 1736358 - DNA, 25 bp, Homo sapien
tataagttctgccagttcatcagga

SEQ ID NO: 1736359 - DNA, 25 bp, Homo sapien
cagtgctcaactgcatgggtaatca

SEQ ID NO: 1736360 - DNA, 25 bp, Homo sapien
tatttcagagaaactggtatgccag

SEQ ID NO: 1736361 - DNA, 25 bp, Homo sapien
tatatgtgtaatgtgtggactgccc

SEQ ID NO: 1736362 - DNA, 25 bp, Homo sapien
aataggcacttcatatggagcaaac

SEQ ID NO: 1736363 - DNA, 25 bp, Homo sapien
taccctgtctgcttgcgggaactaa

SEQ ID NO: 1736364 - DNA, 25 bp, Homo sapien
taaagttgcctctaatccttgcgac

SEQ ID NO: 1736365 - DNA, 25 bp, Homo sapien
tgggagccagataacacagtatgct

SEQ ID NO: 1736366 - DNA, 25 bp, Homo sapien
cagtttttgtgatacactgcaggga

SEQ ID NO: 1736367 - DNA, 25 bp, Homo sapien
taactgaatagcagagtcaccatat

SEQ ID NO: 1736368 - DNA, 25 bp, Homo sapien
ctacaaggtgagagagatgttagtc

SEQ ID NO: 1736369 - DNA, 25 bp, Homo sapien
taaaagaggctaacctcatagaagc

SEQ ID NO: 1736370 - DNA, 25 bp, Homo sapien
cagagttccattttatagttcaagg

SEQ ID NO: 1736371 - DNA, 25 bp, Homo sapien
gctatgaaatcaaaaacataaacag

SEQ ID NO: 1736372 - DNA, 25 bp, Homo sapien
tatgaaatcaaaaacataaacaggc

SEQ ID NO: 1736373 - DNA, 25 bp, Homo sapien
tgaaatcaaaaacataaacaggcaa

SEQ ID NO: 1736374 - DNA, 25 bp, Homo sapien
ctgttgctatgaaatcaaaaacata

SEQ ID NO: 1736375 - DNA, 25 bp, Homo sapien
gaaatgtggaaatatcaggtctgca

SEQ ID NO: 1736376 - DNA, 25 bp, Homo sapien
catgtacaagatatgcaactttggc

SEQ ID NO: 1736377 - DNA, 25 bp, Homo sapien
tccttgggcttacaggcagtggtcc

SEQ ID NO: 1736378 - DNA, 25 bp, Homo sapien
tctgcatctactgcctgggttccca

SEQ ID NO: 1736379 - DNA, 25 bp, Homo sapien
gatataagcacaatactttctctca

SEQ ID NO: 1736380 - DNA, 25 bp, Homo sapien
aaagaacattatcaagagagctaaa

SEQ ID NO: 1736381 - DNA, 25 bp, Homo sapien
aattatgtatcagataagggcctag

SEQ ID NO: 1736382 - DNA, 25 bp, Homo sapien
tatcatgacgataactgctgaatat

SEQ ID NO: 1736383 - DNA, 25 bp, Homo sapien
gcactagacaggcaaagcatcagga

SEQ ID NO: 1736384 - DNA, 25 bp, Homo sapien
gctattacctggctgcaagacttag

SEQ ID NO: 1736385 - DNA, 25 bp, Homo sapien
tgtataacaggccaatgcaacagga

SEQ ID NO: 1736386 - DNA, 25 bp, Homo sapien
tcatgaaaagtatgggatcccctaa

SEQ ID NO: 1736387 - DNA, 25 bp, Homo sapien
aatcctcttgactcgccactgcttt

SEQ ID NO: 1736388 - DNA, 25 bp, Homo sapien
ttagcatgtgatgcagtttaacagc

SEQ ID NO: 1736389 - DNA, 25 bp, Homo sapien
atttctccttagcatgtgatgcagt

SEQ ID NO: 1736390 - DNA, 25 bp, Homo sapien
gagccttcggctacttttgctgctg

SEQ ID NO: 1736391 - DNA, 25 bp, Homo sapien
ctggtatgcaatggcagcttctctt

SEQ ID NO: 1736392 - DNA, 25 bp, Homo sapien
cctggtatgcaatggcagcttctct

SEQ ID NO: 1736393 - DNA, 25 bp, Homo sapien
ggtatgcaatggcagcttctcttgg

SEQ ID NO: 1736394 - DNA, 25 bp, Homo sapien
tcctggtatgcaatggcagcttctc

SEQ ID NO: 1736395 - DNA, 25 bp, Homo sapien
tgcaagacataaccttcttatgaga

SEQ ID NO: 1736396 - DNA, 25 bp, Homo sapien
tctatgcttaatgtctcaacttcta

SEQ ID NO: 1736397 - DNA, 25 bp, Homo sapien
gcttggtcagcgataaaaactggta

SEQ ID NO: 1736398 - DNA, 25 bp, Homo sapien
ttgacttattaaattacagactgct

SEQ ID NO: 1736399 - DNA, 25 bp, Homo sapien
agtatttttgatagcggtgcacatc

SEQ ID NO: 1736400 - DNA, 25 bp, Homo sapien
gatagcggtgcacatctgtagatga

SEQ ID NO: 1736401 - DNA, 25 bp, Homo sapien
tagcggtgcacatctgtagatgact

SEQ ID NO: 1736402 - DNA, 25 bp, Homo sapien
tttttgatagcggtgcacatctgta

SEQ ID NO: 1736403 - DNA, 25 bp, Homo sapien
aatacctatcttcaaagattatagg

SEQ ID NO: 1736404 - DNA, 25 bp, Homo sapien
catctaattcactacattcaatagg

SEQ ID NO: 1736405 - DNA, 25 bp, Homo sapien
cagtaactgaatctaaatacctatc

SEQ ID NO: 1736406 - DNA, 25 bp, Homo sapien
ttataggtaatgaattgagatctcc

SEQ ID NO: 1736407 - DNA, 25 bp, Homo sapien
cacatagcttgtatattttagttag

SEQ ID NO: 1736408 - DNA, 25 bp, Homo sapien
tatattttagttagattacacttac

SEQ ID NO: 1736409 - DNA, 25 bp, Homo sapien
atacacatagcttgtatattttagt

SEQ ID NO: 1736410 - DNA, 25 bp, Homo sapien
ctatacacatagcttgtatatttta

SEQ ID NO: 1736411 - DNA, 25 bp, Homo sapien
ccacattagggaatggttttatgta

SEQ ID NO: 1736412 - DNA, 25 bp, Homo sapien
tgtatattaggaagaatatactgaa

SEQ ID NO: 1736413 - DNA, 25 bp, Homo sapien
catatgattaagacttctttttcta

SEQ ID NO: 1736414 - DNA, 25 bp, Homo sapien
ctataacttctaatatcctcaaaca

SEQ ID NO: 1736415 - DNA, 25 bp, Homo sapien
gaggcaccagcaggtctgactttca

SEQ ID NO: 1736416 - DNA, 25 bp, Homo sapien
cacaaagatttaggttgccagagtt

SEQ ID NO: 1736417 - DNA, 25 bp, Homo sapien
tgggctagaaagtcctgctacagag

SEQ ID NO: 1736418 - DNA, 25 bp, Homo sapien
cagagttcaaaggatcaaactggtc

SEQ ID NO: 1736419 - DNA, 25 bp, Homo sapien
tatttcctcttgtcgaagctctgtc

SEQ ID NO: 1736420 - DNA, 25 bp, Homo sapien
tcgtcctgggagatatcaagtttac

SEQ ID NO: 1736421 - DNA, 25 bp, Homo sapien
ggcaatcgtctgatgaccttctgga

SEQ ID NO: 1736422 - DNA, 25 bp, Homo sapien
caattgttctaactcccaaagatgg

SEQ ID NO: 1736423 - DNA, 25 bp, Homo sapien
tagttaatgattctccaatagaaag

SEQ ID NO: 1736424 - DNA, 25 bp, Homo sapien
ttctccaatagaaagacactttgct

SEQ ID NO: 1736425 - DNA, 25 bp, Homo sapien
ggcaggtagattacttcgtaattta

SEQ ID NO: 1736426 - DNA, 25 bp, Homo sapien
taatgattctccaatagaaagacac

SEQ ID NO: 1736427 - DNA, 25 bp, Homo sapien
catcaggtgacagttcatcatcgga

SEQ ID NO: 1736428 - DNA, 25 bp, Homo sapien
catcatcggagggtagagagtttat

SEQ ID NO: 1736429 - DNA, 25 bp, Homo sapien
tctagatgaggcatatgtggcacta

SEQ ID NO: 1736430 - DNA, 25 bp, Homo sapien
gatgtgtcgcaaaagaactcggttc

SEQ ID NO: 1736431 - DNA, 25 bp, Homo sapien
taatgtaattgctgtccctgtagag

SEQ ID NO: 1736432 - DNA, 25 bp, Homo sapien
gcacatgtgtcagaaatatccgtac

SEQ ID NO: 1736433 - DNA, 25 bp, Homo sapien
tcacttgtacccagatgagtttcac

SEQ ID NO: 1736434 - DNA, 25 bp, Homo sapien
cctgaaatgacacaaggagtgccta

SEQ ID NO: 1736435 - DNA, 25 bp, Homo sapien
caaggagactctcgtggtgcagacg

SEQ ID NO: 1736436 - DNA, 25 bp, Homo sapien
gtgcagacgggaaggacaaacaacc

SEQ ID NO: 1736437 - DNA, 25 bp, Homo sapien
cagaagtacagacagtaggcatgtt

SEQ ID NO: 1736438 - DNA, 25 bp, Homo sapien
ggtgaactttcataccaggaaatcg

SEQ ID NO: 1736439 - DNA, 25 bp, Homo sapien
aaccgtgcacacagacaatcagatg

SEQ ID NO: 1736440 - DNA, 25 bp, Homo sapien
atgaacccaggaagttttagtagct

SEQ ID NO: 1736441 - DNA, 25 bp, Homo sapien
tcttctacactaaaataaggtactg

SEQ ID NO: 1736442 - DNA, 25 bp, Homo sapien
ggatgccagcagaggaacttcactg

SEQ ID NO: 1736443 - DNA, 25 bp, Homo sapien
gaaggaatctaatattacacttagg

SEQ ID NO: 1736444 - DNA, 25 bp, Homo sapien
acaaaatgttggcacatgagtgtca

SEQ ID NO: 1736445 - DNA, 25 bp, Homo sapien
aatgttggcacatgagtgtcagttc

SEQ ID NO: 1736446 - DNA, 25 bp, Homo sapien
atttacttacgaaggaatctaatat

SEQ ID NO: 1736447 - DNA, 25 bp, Homo sapien
ggagacaaaataactgccaggaggt

SEQ ID NO: 1736448 - DNA, 25 bp, Homo sapien
aaaaaatccactgagctcaggtcct

SEQ ID NO: 1736449 - DNA, 25 bp, Homo sapien
cagcactaaagccaggtacctgtat

SEQ ID NO: 1736450 - DNA, 25 bp, Homo sapien
tatgacaatttagtaccagggacat

SEQ ID NO: 1736451 - DNA, 25 bp, Homo sapien
tagatttaatctgttgaccttcctt

SEQ ID NO: 1736452 - DNA, 25 bp, Homo sapien
ccttcctttggtgatactggcacag

SEQ ID NO: 1736453 - DNA, 25 bp, Homo sapien
aaaggcatctacacatatacttaca

SEQ ID NO: 1736454 - DNA, 25 bp, Homo sapien
cagatataagacacaagtgttcttc

SEQ ID NO: 1736455 - DNA, 25 bp, Homo sapien
actaatcggagatctgcactgtttc

SEQ ID NO: 1736456 - DNA, 25 bp, Homo sapien
agaaaatcaattcttcccccaggca

SEQ ID NO: 1736457 - DNA, 25 bp, Homo sapien
tgtaagtttttactaatcggagatc

SEQ ID NO: 1736458 - DNA, 25 bp, Homo sapien
tcccccaggcaatccaagttcaatg

SEQ ID NO: 1736459 - DNA, 25 bp, Homo sapien
gatcagtcatgctatcaaaatcagc

SEQ ID NO: 1736460 - DNA, 25 bp, Homo sapien
tcatccaaaagacgatcagtcatgc

SEQ ID NO: 1736461 - DNA, 25 bp, Homo sapien
atctcatccaaaagacgatcagtca

SEQ ID NO: 1736462 - DNA, 25 bp, Homo sapien
caaaagacgatcagtcatgctatca

SEQ ID NO: 1736463 - DNA, 25 bp, Homo sapien
taggacaaccctatcacaaattctg

SEQ ID NO: 1736464 - DNA, 25 bp, Homo sapien
tacatatatgtaactcacagagcct

SEQ ID NO: 1736465 - DNA, 25 bp, Homo sapien
taatcatcatgtcttgcttgtggaa

SEQ ID NO: 1736466 - DNA, 25 bp, Homo sapien
gaaactcatactggtgtaatcatca

SEQ ID NO: 1736467 - DNA, 25 bp, Homo sapien
tattaaattgcccaacgaatgtcca

SEQ ID NO: 1736468 - DNA, 25 bp, Homo sapien
caagagcactgctgttgtagagtgt

SEQ ID NO: 1736469 - DNA, 25 bp, Homo sapien
taaaccttggccttgtaagcactga

SEQ ID NO: 1736470 - DNA, 25 bp, Homo sapien
tagagtgtaccaaggtgaggtccag

SEQ ID NO: 1736471 - DNA, 25 bp, Homo sapien
ctgctttgttactaagcttatataa

SEQ ID NO: 1736472 - DNA, 25 bp, Homo sapien
aaaagtttggcgagggtctgagtga

SEQ ID NO: 1736473 - DNA, 25 bp, Homo sapien
gagtgatctcgacatgtcagctgca

SEQ ID NO: 1736474 - DNA, 25 bp, Homo sapien
tgtcagctgcaaaagcgaacctgat

SEQ ID NO: 1736475 - DNA, 25 bp, Homo sapien
gaactccatagctccacacaacggt

SEQ ID NO: 1736476 - DNA, 25 bp, Homo sapien
tataaagacatagacctcaggaaca

SEQ ID NO: 1736477 - DNA, 25 bp, Homo sapien
tagactagtacaaccagatcacgca

SEQ ID NO: 1736478 - DNA, 25 bp, Homo sapien
cctgtcagcaaagggtatgaactcc

SEQ ID NO: 1736479 - DNA, 25 bp, Homo sapien
tagcttatgatatttccgcacctag

SEQ ID NO: 1736480 - DNA, 25 bp, Homo sapien
gatatttccgcacctagcttattta

SEQ ID NO: 1736481 - DNA, 25 bp, Homo sapien
ttccgcacctagcttatttaagtca

SEQ ID NO: 1736482 - DNA, 25 bp, Homo sapien
gcacctagcttatgatatttccgca

SEQ ID NO: 1736483 - DNA, 25 bp, Homo sapien
ggtgattttctgctccaaggaatat

SEQ ID NO: 1736484 - DNA, 25 bp, Homo sapien
gctgatgctggttctttcccgcact

SEQ ID NO: 1736485 - DNA, 25 bp, Homo sapien
tactttctggaactggctaaagcag

SEQ ID NO: 1736486 - DNA, 25 bp, Homo sapien
caatgttcaagacaacccctgaaaa

SEQ ID NO: 1736487 - DNA, 25 bp, Homo sapien
taccagtgttggctacagaaggcag

SEQ ID NO: 1736488 - DNA, 25 bp, Homo sapien
tactgctttagactgagatccctgc

SEQ ID NO: 1736489 - DNA, 25 bp, Homo sapien
tgaatacttcactgagcccctcaag

SEQ ID NO: 1736490 - DNA, 25 bp, Homo sapien
tcatgttcacgcagctcagtggaag

SEQ ID NO: 1736491 - DNA, 25 bp, Homo sapien
tttaagcccacagttgagacctata

SEQ ID NO: 1736492 - DNA, 25 bp, Homo sapien
gatgaaagatcaaacctgctgcaac

SEQ ID NO: 1736493 - DNA, 25 bp, Homo sapien
gatgtttccatgtgggctaacacaa

SEQ ID NO: 1736494 - DNA, 25 bp, Homo sapien
gaagctatggcaagttatctggaag

SEQ ID NO: 1736495 - DNA, 25 bp, Homo sapien
gaattgttttgcaatgccatgaacc

SEQ ID NO: 1736496 - DNA, 25 bp, Homo sapien
ggaagtggactgatcaataacccca

SEQ ID NO: 1736497 - DNA, 25 bp, Homo sapien
ccatgcctatgtaagacagtgaact

SEQ ID NO: 1736498 - DNA, 25 bp, Homo sapien
taaccccacaatggcatctaaatgc

SEQ ID NO: 1736499 - DNA, 25 bp, Homo sapien
cacattggactagggatcaggagac

SEQ ID NO: 1736500 - DNA, 25 bp, Homo sapien
tattggctcccacatattaaggtcc

SEQ ID NO: 1736501 - DNA, 25 bp, Homo sapien
tgtgcagttataggtgggtccagaa

SEQ ID NO: 1736502 - DNA, 25 bp, Homo sapien
tttggtgggaactaggaacttatca

SEQ ID NO: 1736503 - DNA, 25 bp, Homo sapien
aaatttaaggatcaattctcaggcc

SEQ ID NO: 1736504 - DNA, 25 bp, Homo sapien
tactccatgtaaattgctctttcaa

SEQ ID NO: 1736505 - DNA, 25 bp, Homo sapien
acaatggttatttcaggccagtata

SEQ ID NO: 1736506 - DNA, 25 bp, Homo sapien
gatcaccaatgacctagacaatgct

SEQ ID NO: 1736507 - DNA, 25 bp, Homo sapien
tcaatatttaggactatttccaaag

SEQ ID NO: 1736508 - DNA, 25 bp, Homo sapien
tccaaaaggtattcatcaatattta

SEQ ID NO: 1736509 - DNA, 25 bp, Homo sapien
cttccaaaaggtattcatcaatatt

SEQ ID NO: 1736510 - DNA, 25 bp, Homo sapien
ccaaaaggtattcatcaatatttag

SEQ ID NO: 1736511 - DNA, 25 bp, Homo sapien
tccttagcagtactaagtttctgac

SEQ ID NO: 1736512 - DNA, 25 bp, Homo sapien
tgactttgtcaatacttgatgatcc

SEQ ID NO: 1736513 - DNA, 25 bp, Homo sapien
taggcgggaacagaatatgtggact

SEQ ID NO: 1736514 - DNA, 25 bp, Homo sapien
cttgatgctgatataagaatgtgtg

SEQ ID NO: 1736515 - DNA, 25 bp, Homo sapien
ggatcccactagcacaacatttttg

SEQ ID NO: 1736516 - DNA, 25 bp, Homo sapien
caatgcgggcagagtgataaggaac

SEQ ID NO: 1736517 - DNA, 25 bp, Homo sapien
gataaggaacatagcgatcctgtag

SEQ ID NO: 1736518 - DNA, 25 bp, Homo sapien
cgatcctgtagggatcccactagca

SEQ ID NO: 1736519 - DNA, 25 bp, Homo sapien
tgtcctttaaagctgttttacacat

SEQ ID NO: 1736520 - DNA, 25 bp, Homo sapien
ttgtcctttaaagctgttttacaca

SEQ ID NO: 1736521 - DNA, 25 bp, Homo sapien
ctgactgtttgtcctttaaagctgt

SEQ ID NO: 1736522 - DNA, 25 bp, Homo sapien
tgactgtttgtcctttaaagctgtt

SEQ ID NO: 1736523 - DNA, 25 bp, Homo sapien
gaactacttctgaggcagcaaaatg

SEQ ID NO: 1736524 - DNA, 25 bp, Homo sapien
cagatacgagagaaagtgactacaa

SEQ ID NO: 1736525 - DNA, 25 bp, Homo sapien
cctttgcgtaaaagcgaggtacagc

SEQ ID NO: 1736526 - DNA, 25 bp, Homo sapien
gtaattaactgattcgggctaagcc

SEQ ID NO: 1736527 - DNA, 25 bp, Homo sapien
tagcgaaccaaattacagtccttgc

SEQ ID NO: 1736528 - DNA, 25 bp, Homo sapien
gaacagctatatgtgcagctctccc

SEQ ID NO: 1736529 - DNA, 25 bp, Homo sapien
tccttgctttgcagaacgggtcgaa

SEQ ID NO: 1736530 - DNA, 25 bp, Homo sapien
aatgagtgaatcagctgtattgggc

SEQ ID NO: 1736531 - DNA, 25 bp, Homo sapien
tcagacacaggtatgggcttaaagt

SEQ ID NO: 1736532 - DNA, 25 bp, Homo sapien
cacaattagtgagtgcaaacagaac

SEQ ID NO: 1736533 - DNA, 25 bp, Homo sapien
gaatgaggtaattgtccagtcgcta

SEQ ID NO: 1736534 - DNA, 25 bp, Homo sapien
tgcacagccacattacctagaaagt

SEQ ID NO: 1736535 - DNA, 25 bp, Homo sapien
agagaataagcaaaggattacaagg

SEQ ID NO: 1736536 - DNA, 25 bp, Homo sapien
tatatatacctctagtattcagaga

SEQ ID NO: 1736537 - DNA, 25 bp, Homo sapien
tacctctagtattcagagaataagc

SEQ ID NO: 1736538 - DNA, 25 bp, Homo sapien
aataagcaaaggattacaagggttg

SEQ ID NO: 1736539 - DNA, 25 bp, Homo sapien
ccgtggccgagacccagctaagcaa

SEQ ID NO: 1736540 - DNA, 25 bp, Homo sapien
tggccgagacccagctaagcaacca

SEQ ID NO: 1736541 - DNA, 25 bp, Homo sapien
cgtggccgagacccagctaagcaac

SEQ ID NO: 1736542 - DNA, 25 bp, Homo sapien
gtggccgagacccagctaagcaacc

SEQ ID NO: 1736543 - DNA, 25 bp, Homo sapien
tctgtactgacaattcctggcttca

SEQ ID NO: 1736544 - DNA, 25 bp, Homo sapien
ttggctcacttctgcacttttccca

SEQ ID NO: 1736545 - DNA, 25 bp, Homo sapien
gcatagtctgggctgctaactgtat

SEQ ID NO: 1736546 - DNA, 25 bp, Homo sapien
taaactgtaaactgccacaaatcct

SEQ ID NO: 1736547 - DNA, 25 bp, Homo sapien
taacttgagcctaactctgggatgt

SEQ ID NO: 1736548 - DNA, 25 bp, Homo sapien
gacttctgaaggactttatctgtag

SEQ ID NO: 1736549 - DNA, 25 bp, Homo sapien
tgtaagttggagaaactggtcccta

SEQ ID NO: 1736550 - DNA, 25 bp, Homo sapien
tatgtgtacacattgagcaagtgca

SEQ ID NO: 1736551 - DNA, 25 bp, Homo sapien
taggtgttggatgttggtcaagtta

SEQ ID NO: 1736552 - DNA, 25 bp, Homo sapien
ggtgttggatgttggtcaagttacc

SEQ ID NO: 1736553 - DNA, 25 bp, Homo sapien
gtgttggatgttggtcaagttaccc

SEQ ID NO: 1736554 - DNA, 25 bp, Homo sapien
aggtgttggatgttggtcaagttac

SEQ ID NO: 1736555 - DNA, 25 bp, Homo sapien
cttctggtaacttcggcttcttaag

SEQ ID NO: 1736556 - DNA, 25 bp, Homo sapien
cagagaatgacacagaaggggtgat

SEQ ID NO: 1736557 - DNA, 25 bp, Homo sapien
gcttcttaagggactgtttgacaag

SEQ ID NO: 1736558 - DNA, 25 bp, Homo sapien
gtttgacaagttcagactttcctcc

SEQ ID NO: 1736559 - DNA, 25 bp, Homo sapien
catgtatcgatggtcaatatggtga

SEQ ID NO: 1736560 - DNA, 25 bp, Homo sapien
cttttcgttgagttattggagtcct

SEQ ID NO: 1736561 - DNA, 25 bp, Homo sapien
taagttaagactcaagtgctttgct

SEQ ID NO: 1736562 - DNA, 25 bp, Homo sapien
caatcaaatacctgtcagaatcttg

SEQ ID NO: 1736563 - DNA, 25 bp, Homo sapien
catgctttactgcaatgcaagttgg

SEQ ID NO: 1736564 - DNA, 25 bp, Homo sapien
tctgtggctcactggatgtcttagc

SEQ ID NO: 1736565 - DNA, 25 bp, Homo sapien
tgaaggcctctctaacggaagttct

SEQ ID NO: 1736566 - DNA, 25 bp, Homo sapien
tcaccaaaatcataaagcccctcag

SEQ ID NO: 1736567 - DNA, 25 bp, Homo sapien
catatcgggtaggttctgggcccct

SEQ ID NO: 1736568 - DNA, 25 bp, Homo sapien
gttcccaatctccatatcgggtagg

SEQ ID NO: 1736569 - DNA, 25 bp, Homo sapien
ggtcactggattaacatcatctgga

SEQ ID NO: 1736570 - DNA, 25 bp, Homo sapien
tacagcgtccttttcgttcccaatc

SEQ ID NO: 1736571 - DNA, 25 bp, Homo sapien
tatacaaactacacgacataaagga

SEQ ID NO: 1736572 - DNA, 25 bp, Homo sapien
cacattatacaaactacacgacata

SEQ ID NO: 1736573 - DNA, 25 bp, Homo sapien
ttaaacacattatacaaactacacg

SEQ ID NO: 1736574 - DNA, 25 bp, Homo sapien
ttatacaaactacacgacataaagg

SEQ ID NO: 1736575 - DNA, 25 bp, Homo sapien
ttagccaggcgcaatggtgggtgtc

SEQ ID NO: 1736576 - DNA, 25 bp, Homo sapien
acagctctaagaatcatttctaggc

SEQ ID NO: 1736577 - DNA, 25 bp, Homo sapien
ctacagctctaagaatcatttctag

SEQ ID NO: 1736578 - DNA, 25 bp, Homo sapien
tacagctctaagaatcatttctagg

SEQ ID NO: 1736579 - DNA, 25 bp, Homo sapien
cacctctcactactgagacattggg

SEQ ID NO: 1736580 - DNA, 25 bp, Homo sapien
ccagggccttgaagctagtgaaagc

SEQ ID NO: 1736581 - DNA, 25 bp, Homo sapien
cctcgtaaaggccaatcacctctta

SEQ ID NO: 1736582 - DNA, 25 bp, Homo sapien
cagatgctaacatgccagcttaagt

SEQ ID NO: 1736583 - DNA, 25 bp, Homo sapien
tgccttggtcatacgcttggtttcc

SEQ ID NO: 1736584 - DNA, 25 bp, Homo sapien
gcagcaagcccttagagagtgccct

SEQ ID NO: 1736585 - DNA, 25 bp, Homo sapien
ctggctcctttctagccatattaat

SEQ ID NO: 1736586 - DNA, 25 bp, Homo sapien
catgtctaggcttagaatttcccaa

SEQ ID NO: 1736587 - DNA, 25 bp, Homo sapien
tggaagctgctatgcctcacagctc

SEQ ID NO: 1736588 - DNA, 25 bp, Homo sapien
aagtctctgcgtgggcccacaagct

SEQ ID NO: 1736589 - DNA, 25 bp, Homo sapien
caagctgtctgatacatcctttgaa

SEQ ID NO: 1736590 - DNA, 25 bp, Homo sapien
tctgcagtggttgtgcccttgcagt

SEQ ID NO: 1736591 - DNA, 25 bp, Homo sapien
tgggtctccaaaacattgggcaatc

SEQ ID NO: 1736592 - DNA, 25 bp, Homo sapien
catgctggcatcctgtgaacactga

SEQ ID NO: 1736593 - DNA, 25 bp, Homo sapien
aacccttgaagctggaaaataatct

SEQ ID NO: 1736594 - DNA, 25 bp, Homo sapien
tctcatgcctatggctttgcttgct

SEQ ID NO: 1736595 - DNA, 25 bp, Homo sapien
caagtccagcctaacatactatttt

SEQ ID NO: 1736596 - DNA, 25 bp, Homo sapien
actgatataaggaccaaatgactag

SEQ ID NO: 1736597 - DNA, 25 bp, Homo sapien
gcagttggaggttgactgaattata

SEQ ID NO: 1736598 - DNA, 25 bp, Homo sapien
tgtagcacacatagtaattgcaact

SEQ ID NO: 1736599 - DNA, 25 bp, Homo sapien
cagatggcaagatggcattaagtct

SEQ ID NO: 1736600 - DNA, 25 bp, Homo sapien
gggacctagtagacataattcaatc

SEQ ID NO: 1736601 - DNA, 25 bp, Homo sapien
tccatggcatgagccttgtacataa

SEQ ID NO: 1736602 - DNA, 25 bp, Homo sapien
tccctcaagcgatataaaagtgttt

SEQ ID NO: 1736603 - DNA, 25 bp, Homo sapien
gcgtgaagtatagtcacctgccatc

SEQ ID NO: 1736604 - DNA, 25 bp, Homo sapien
taataaatatcccacagagcctgtt

SEQ ID NO: 1736605 - DNA, 25 bp, Homo sapien
ttccagaggttgtggccaccaaaaa

SEQ ID NO: 1736606 - DNA, 25 bp, Homo sapien
tcttcttggaccaggaagggcttaa

SEQ ID NO: 1736607 - DNA, 25 bp, Homo sapien
ccacgacatccggcctgcaaatgaa

SEQ ID NO: 1736608 - DNA, 25 bp, Homo sapien
gacatccggcctgcaaatgaaagat

SEQ ID NO: 1736609 - DNA, 25 bp, Homo sapien
acgacatccggcctgcaaatgaaag

SEQ ID NO: 1736610 - DNA, 25 bp, Homo sapien
gagccacgacatccggcctgcaaat

SEQ ID NO: 1736611 - DNA, 25 bp, Homo sapien
cagtaagtgtggatagatatcgtac

SEQ ID NO: 1736612 - DNA, 25 bp, Homo sapien
cttcaaaagcttctaagagtaaagg

SEQ ID NO: 1736613 - DNA, 25 bp, Homo sapien
gtcgtcttcatctaaaaaccttgca

SEQ ID NO: 1736614 - DNA, 25 bp, Homo sapien
aacatgtaataggtttgctaccggc

SEQ ID NO: 1736615 - DNA, 25 bp, Homo sapien
ctccgctctggcctcgctcgaggag

SEQ ID NO: 1736616 - DNA, 25 bp, Homo sapien
tcttcacaggcatcagtgagaggtg

SEQ ID NO: 1736617 - DNA, 25 bp, Homo sapien
gacaacatgctagcagccctcggtt

SEQ ID NO: 1736618 - DNA, 25 bp, Homo sapien
gaggtttaattcacagtgctgcatg

SEQ ID NO: 1736619 - DNA, 25 bp, Homo sapien
cagcctgaaggcctaaggcatgctc

SEQ ID NO: 1736620 - DNA, 25 bp, Homo sapien
aggcctaaggcatgctccctgactc

SEQ ID NO: 1736621 - DNA, 25 bp, Homo sapien
cctgaaggcctaaggcatgctccct

SEQ ID NO: 1736622 - DNA, 25 bp, Homo sapien
ctgggcagcctgaaggcctaaggca

SEQ ID NO: 1736623 - DNA, 25 bp, Homo sapien
gaccgcgggcggactcagcccagga

SEQ ID NO: 1736624 - DNA, 25 bp, Homo sapien
agagtgaacgcacctggcgccgccg

SEQ ID NO: 1736625 - DNA, 25 bp, Homo sapien
cacgcaccaccctagccggcgaggg

SEQ ID NO: 1736626 - DNA, 25 bp, Homo sapien
gtggtagcgccgacgtgtcccgcct

SEQ ID NO: 1736627 - DNA, 25 bp, Homo sapien
ctcggcagcggggcggggagcctgg

SEQ ID NO: 1736628 - DNA, 25 bp, Homo sapien
gggagcctggggcagctacggcggc

SEQ ID NO: 1736629 - DNA, 25 bp, Homo sapien
gggcagctacggcggcggcggacgc

SEQ ID NO: 1736630 - DNA, 25 bp, Homo sapien
ggcggggagcctggggcagctacgg

SEQ ID NO: 1736631 - DNA, 25 bp, Homo sapien
tctcccgacaggagcgcgtcgccat

SEQ ID NO: 1736632 - DNA, 25 bp, Homo sapien
ccttctcccgacaggagcgcgtcgc

SEQ ID NO: 1736633 - DNA, 25 bp, Homo sapien
gcttctgagccttctcccgacagga

SEQ ID NO: 1736634 - DNA, 25 bp, Homo sapien
gagccttctcccgacaggagcgcgt

SEQ ID NO: 1736635 - DNA, 25 bp, Homo sapien
ccctcagaagcttggataggatgag

SEQ ID NO: 1736636 - DNA, 25 bp, Homo sapien
agtcggcgcagtacttgttgtcctc

SEQ ID NO: 1736637 - DNA, 25 bp, Homo sapien
ctccctcagaagcttggataggatg

SEQ ID NO: 1736638 - DNA, 25 bp, Homo sapien
cctcgcagtcggcgcagtacttgtt

SEQ ID NO: 1736639 - DNA, 25 bp, Homo sapien
cgtgggcagcgacgacgtccaagct

SEQ ID NO: 1736640 - DNA, 25 bp, Homo sapien
tgggcagcgacgacgtccaagctac

SEQ ID NO: 1736641 - DNA, 25 bp, Homo sapien
gtgggcagcgacgacgtccaagcta

SEQ ID NO: 1736642 - DNA, 25 bp, Homo sapien
ccgcctctggcggacttgagggtcg

SEQ ID NO: 1736643 - DNA, 25 bp, Homo sapien
agccacccgccctccagtcagggca

SEQ ID NO: 1736644 - DNA, 25 bp, Homo sapien
cagcgaagccgaggcgtccgctcgg

SEQ ID NO: 1736645 - DNA, 25 bp, Homo sapien
acttgagggtcgacaggagccccgc

SEQ ID NO: 1736646 - DNA, 25 bp, Homo sapien
tcaggtgggcaggcaggtagggctc

SEQ ID NO: 1736647 - DNA, 25 bp, Homo sapien
ggtgggcaggcaggtagggctccat

SEQ ID NO: 1736648 - DNA, 25 bp, Homo sapien
caggtgggcaggcaggtagggctcc

SEQ ID NO: 1736649 - DNA, 25 bp, Homo sapien
aggtgggcaggcaggtagggctcca

SEQ ID NO: 1736650 - DNA, 25 bp, Homo sapien
aaacacaaaacatagcagctaaaaa

SEQ ID NO: 1736651 - DNA, 25 bp, Homo sapien
gaggcagaagccctccaaccgaaaa

SEQ ID NO: 1736652 - DNA, 25 bp, Homo sapien
gatctttaaaatgaaccttcagcat

SEQ ID NO: 1736653 - DNA, 25 bp, Homo sapien
caaaacatagcagctaaaaatagta

SEQ ID NO: 1736654 - DNA, 25 bp, Homo sapien
gagctgctttaaactcccactgagt

SEQ ID NO: 1736655 - DNA, 25 bp, Homo sapien
agagcaggaaactggcgcctatgcc

SEQ ID NO: 1736656 - DNA, 25 bp, Homo sapien
tttggtaagagcaggatcaagagca

SEQ ID NO: 1736657 - DNA, 25 bp, Homo sapien
cagttgttcaacagatttggtaaga

SEQ ID NO: 1736658 - DNA, 25 bp, Homo sapien
acctgtcttcagaaaggtacgtaca

SEQ ID NO: 1736659 - DNA, 25 bp, Homo sapien
tcttcagaaaggtacgtacaaagca

SEQ ID NO: 1736660 - DNA, 25 bp, Homo sapien
tgtcttcagaaaggtacgtacaaag

SEQ ID NO: 1736661 - DNA, 25 bp, Homo sapien
cttcagaaaggtacgtacaaagcat

SEQ ID NO: 1736662 - DNA, 25 bp, Homo sapien
ctgtcttcatttagattagggtaag

SEQ ID NO: 1736663 - DNA, 25 bp, Homo sapien
gtcttcatttagattagggtaagaa

SEQ ID NO: 1736664 - DNA, 25 bp, Homo sapien
tgtcttcatttagattagggtaaga

SEQ ID NO: 1736665 - DNA, 25 bp, Homo sapien
cactgtgtaaatgagcagacacatc

SEQ ID NO: 1736666 - DNA, 25 bp, Homo sapien
ggcttagctttattaaacttccaga

SEQ ID NO: 1736667 - DNA, 25 bp, Homo sapien
caagtacatcaggatatggcttagc

SEQ ID NO: 1736668 - DNA, 25 bp, Homo sapien
taatctgatctgctgggttccagga

SEQ ID NO: 1736669 - DNA, 25 bp, Homo sapien
gctagacgaaatggataatttccta

SEQ ID NO: 1736670 - DNA, 25 bp, Homo sapien
gataagccagacgaagaaagaagac

SEQ ID NO: 1736671 - DNA, 25 bp, Homo sapien
gtaatacaaagtatcccagcaaaga

SEQ ID NO: 1736672 - DNA, 25 bp, Homo sapien
attggaaaagctagacgaaatggat

SEQ ID NO: 1736673 - DNA, 25 bp, Homo sapien
cccgggtaagactcagtgctatgct

SEQ ID NO: 1736674 - DNA, 25 bp, Homo sapien
tggtcacatgggtacttgtttcatc

SEQ ID NO: 1736675 - DNA, 25 bp, Homo sapien
cagtggtcgccacaggtcccgggta

SEQ ID NO: 1736676 - DNA, 25 bp, Homo sapien
acatgggtacttgtttcatccctcc

SEQ ID NO: 1736677 - DNA, 25 bp, Homo sapien
ctgaagggaggatacaagccaggcc

SEQ ID NO: 1736678 - DNA, 25 bp, Homo sapien
ttgggccagtggagagctcgctgtc

SEQ ID NO: 1736679 - DNA, 25 bp, Homo sapien
ggatacaagccaggccggattcact

SEQ ID NO: 1736680 - DNA, 25 bp, Homo sapien
tcgctgtcctgaagggaggatacaa

SEQ ID NO: 1736681 - DNA, 25 bp, Homo sapien
ttcctgtaaagaagcctcggcaatg

SEQ ID NO: 1736682 - DNA, 25 bp, Homo sapien
tatctgtgtcacgttcatgttttcc

SEQ ID NO: 1736683 - DNA, 25 bp, Homo sapien
tgtgtcacgttcatgttttcctgta

SEQ ID NO: 1736684 - DNA, 25 bp, Homo sapien
ctgtggttatctgtgtcacgttcat

SEQ ID NO: 1736685 - DNA, 25 bp, Homo sapien
tttgaccctggatatatgaacccca

SEQ ID NO: 1736686 - DNA, 25 bp, Homo sapien
gatttctatgaattccagcacatct

SEQ ID NO: 1736687 - DNA, 25 bp, Homo sapien
aaacacaccaatattccaggaagcc

SEQ ID NO: 1736688 - DNA, 25 bp, Homo sapien
gctgtccattggtctaggttgactg

SEQ ID NO: 1736689 - DNA, 25 bp, Homo sapien
cagcacgggacccggtgcatcagtg

SEQ ID NO: 1736690 - DNA, 25 bp, Homo sapien
acgggacccggtgcatcagtgtgat

SEQ ID NO: 1736691 - DNA, 25 bp, Homo sapien
ccagcacgggacccggtgcatcagt

SEQ ID NO: 1736692 - DNA, 25 bp, Homo sapien
gcacgggacccggtgcatcagtgtg

SEQ ID NO: 1736693 - DNA, 25 bp, Homo sapien
gacagcacgactgtgtaacttctac

SEQ ID NO: 1736694 - DNA, 25 bp, Homo sapien
gacagtcttcgattccctctaacat

SEQ ID NO: 1736695 - DNA, 25 bp, Homo sapien
tctctgggtcaatcctgtcacaggg

SEQ ID NO: 1736696 - DNA, 25 bp, Homo sapien
gcaagtcactatactgacagcacga

SEQ ID NO: 1736697 - DNA, 25 bp, Homo sapien
tctctcttatctgcaatataatcta

SEQ ID NO: 1736698 - DNA, 25 bp, Homo sapien
ttctcccagtgaagcaaaagggtct

SEQ ID NO: 1736699 - DNA, 25 bp, Homo sapien
cagacactcaccagtatcatctgag

SEQ ID NO: 1736700 - DNA, 25 bp, Homo sapien
caggtctaacagaattactctgcca

SEQ ID NO: 1736701 - DNA, 25 bp, Homo sapien
ctgatgagaacatcagaaataaggc

SEQ ID NO: 1736702 - DNA, 25 bp, Homo sapien
gatgagaacatcagaaataaggcaa

SEQ ID NO: 1736703 - DNA, 25 bp, Homo sapien
tgacactgatgagaacatcagaaat

SEQ ID NO: 1736704 - DNA, 25 bp, Homo sapien
gatgtgacactgatgagaacatcag

SEQ ID NO: 1736705 - DNA, 25 bp, Homo sapien
tggtacagccaaagctatttgttgt

SEQ ID NO: 1736706 - DNA, 25 bp, Homo sapien
cagccaaagctatttgttgtaaagc

SEQ ID NO: 1736707 - DNA, 25 bp, Homo sapien
acagccaaagctatttgttgtaaag

SEQ ID NO: 1736708 - DNA, 25 bp, Homo sapien
gtacagccaaagctatttgttgtaa

SEQ ID NO: 1736709 - DNA, 25 bp, Homo sapien
ttcaagatcttttggattccagctg

SEQ ID NO: 1736710 - DNA, 25 bp, Homo sapien
ggatttcttgcataggagcaagcct

SEQ ID NO: 1736711 - DNA, 25 bp, Homo sapien
tggtttcaagatcttttggattcca

SEQ ID NO: 1736712 - DNA, 25 bp, Homo sapien
caggatttcttgcataggagcaagc

SEQ ID NO: 1736713 - DNA, 25 bp, Homo sapien
ttgaaattttcgagaaatttctcta

SEQ ID NO: 1736714 - DNA, 25 bp, Homo sapien
ttttcgagaaatttctctatcttcc

SEQ ID NO: 1736715 - DNA, 25 bp, Homo sapien
gaaattttcgagaaatttctctatc

SEQ ID NO: 1736716 - DNA, 25 bp, Homo sapien
aaattttcgagaaatttctctatct

SEQ ID NO: 1736717 - DNA, 25 bp, Homo sapien
attttgccctcatcaatccataatc

SEQ ID NO: 1736718 - DNA, 25 bp, Homo sapien
tgccctcatcaatccataatcgatg

SEQ ID NO: 1736719 - DNA, 25 bp, Homo sapien
catcaatccataatcgatgtgtttt

SEQ ID NO: 1736720 - DNA, 25 bp, Homo sapien
cctcatcaatccataatcgatgtgt

SEQ ID NO: 1736721 - DNA, 25 bp, Homo sapien
tctctggaagattggcttcatagag

SEQ ID NO: 1736722 - DNA, 25 bp, Homo sapien
agtagtcttgctttagtatttccca

SEQ ID NO: 1736723 - DNA, 25 bp, Homo sapien
tctgtctgtggtcttcgaaagttct

SEQ ID NO: 1736724 - DNA, 25 bp, Homo sapien
tgatctgtctgtggtcttcgaaagt

SEQ ID NO: 1736725 - DNA, 25 bp, Homo sapien
tgctctagggatgagacaactatat

SEQ ID NO: 1736726 - DNA, 25 bp, Homo sapien
gcaagccggttttcttaccagcctc

SEQ ID NO: 1736727 - DNA, 25 bp, Homo sapien
tagtttggttatacttgctctaggg

SEQ ID NO: 1736728 - DNA, 25 bp, Homo sapien
aacatgttagacaaagaccctcttt

SEQ ID NO: 1736729 - DNA, 25 bp, Homo sapien
attcacgccactccacaaagctggg

SEQ ID NO: 1736730 - DNA, 25 bp, Homo sapien
gctgtacatactttgggtcctttaa

SEQ ID NO: 1736731 - DNA, 25 bp, Homo sapien
gagccagacatcctatactatatat

SEQ ID NO: 1736732 - DNA, 25 bp, Homo sapien
taacatctatgcaagtacccacact

SEQ ID NO: 1736733 - DNA, 25 bp, Homo sapien
catatttatctctgatgaaaaattc

SEQ ID NO: 1736734 - DNA, 25 bp, Homo sapien
atttatctctgatgaaaaattccac

SEQ ID NO: 1736735 - DNA, 25 bp, Homo sapien
atctctgatgaaaaattccactgct

SEQ ID NO: 1736736 - DNA, 25 bp, Homo sapien
tcttttcatatttatctctgatgaa

SEQ ID NO: 1736737 - DNA, 25 bp, Homo sapien
agctatggcatttttatcgtagtat

SEQ ID NO: 1736738 - DNA, 25 bp, Homo sapien
gctatggcatttttatcgtagtatt

SEQ ID NO: 1736739 - DNA, 25 bp, Homo sapien
tatggcatttttatcgtagtatttc

SEQ ID NO: 1736740 - DNA, 25 bp, Homo sapien
tagctatggcatttttatcgtagta

SEQ ID NO: 1736741 - DNA, 25 bp, Homo sapien
ctcatgcaaaagaaaaactgaccac

SEQ ID NO: 1736742 - DNA, 25 bp, Homo sapien
tcatgcaaaagaaaaactgaccacg

SEQ ID NO: 1736743 - DNA, 25 bp, Homo sapien
catgcaaaagaaaaactgaccacgt

SEQ ID NO: 1736744 - DNA, 25 bp, Homo sapien
tgcaaaagaaaaactgaccacgtaa

SEQ ID NO: 1736745 - DNA, 25 bp, Homo sapien
cagagaaggagaggataccaaaggc

SEQ ID NO: 1736746 - DNA, 25 bp, Homo sapien
gaaggagaggataccaaaggctgaa

SEQ ID NO: 1736747 - DNA, 25 bp, Homo sapien
ttgcagagaaggagaggataccaaa

SEQ ID NO: 1736748 - DNA, 25 bp, Homo sapien
agaggataccaaaggctgaagagga

SEQ ID NO: 1736749 - DNA, 25 bp, Homo sapien
ttcagctgtaagtggttttgccggc

SEQ ID NO: 1736750 - DNA, 25 bp, Homo sapien
agctgtaagtggttttgccggcttt

SEQ ID NO: 1736751 - DNA, 25 bp, Homo sapien
tcagctgtaagtggttttgccggct

SEQ ID NO: 1736752 - DNA, 25 bp, Homo sapien
ttttcagctgtaagtggttttgccg

SEQ ID NO: 1736753 - DNA, 25 bp, Homo sapien
ttcttctatcgagacccagtttcat

SEQ ID NO: 1736754 - DNA, 25 bp, Homo sapien
cggtgccctcccgaggatcgcgtaa

SEQ ID NO: 1736755 - DNA, 25 bp, Homo sapien
caggttttcattcttctatcgagac

SEQ ID NO: 1736756 - DNA, 25 bp, Homo sapien
ggatcgcgtaacaggcaggttttca

SEQ ID NO: 1736757 - DNA, 25 bp, Homo sapien
tccacaacgaagaatgtcaaatgat

SEQ ID NO: 1736758 - DNA, 25 bp, Homo sapien
caaatgatgggtcagtaatgggtcc

SEQ ID NO: 1736759 - DNA, 25 bp, Homo sapien
tatttcttccgatccacaacgaaga

SEQ ID NO: 1736760 - DNA, 25 bp, Homo sapien
ccaggctgatagtaggaggccataa

SEQ ID NO: 1736761 - DNA, 25 bp, Homo sapien
atccctatagctccaaacacatgag

SEQ ID NO: 1736762 - DNA, 25 bp, Homo sapien
taagattagtcaggctcagaaccga

SEQ ID NO: 1736763 - DNA, 25 bp, Homo sapien
tcatcaatatatggctccagaacct

SEQ ID NO: 1736764 - DNA, 25 bp, Homo sapien
tcagaaccgaggtaagtatcttcct

SEQ ID NO: 1736765 - DNA, 25 bp, Homo sapien
cttttcttgcttctttccttcccat

SEQ ID NO: 1736766 - DNA, 25 bp, Homo sapien
tttcttgcttctttccttcccattc

SEQ ID NO: 1736767 - DNA, 25 bp, Homo sapien
tactcctggagaagtatgttgtgca

SEQ ID NO: 1736768 - DNA, 25 bp, Homo sapien
tgtggaaggacctaaataaatagcc

SEQ ID NO: 1736769 - DNA, 25 bp, Homo sapien
gctgtcaacacatagagtactcttt

SEQ ID NO: 1736770 - DNA, 25 bp, Homo sapien
aaaatctgaccaccattgttgtagg

SEQ ID NO: 1736771 - DNA, 25 bp, Homo sapien
tatctgtgttctaaaagcttctcat

SEQ ID NO: 1736772 - DNA, 25 bp, Homo sapien
atctgtgttctaaaagcttctcatc

SEQ ID NO: 1736773 - DNA, 25 bp, Homo sapien
gtatctgtgttctaaaagcttctca

SEQ ID NO: 1736774 - DNA, 25 bp, Homo sapien
tctgtgttctaaaagcttctcatct

SEQ ID NO: 1736775 - DNA, 25 bp, Homo sapien
gactttggaacctcttcaggctaaa

SEQ ID NO: 1736776 - DNA, 25 bp, Homo sapien
gctcagatgttatgtgccaaatagg

SEQ ID NO: 1736777 - DNA, 25 bp, Homo sapien
tggccaaacactttcattccgcaaa

SEQ ID NO: 1736778 - DNA, 25 bp, Homo sapien
ttccgcaaattaactgaggctcaga

SEQ ID NO: 1736779 - DNA, 25 bp, Homo sapien
caactgattactcaatctgctacta

SEQ ID NO: 1736780 - DNA, 25 bp, Homo sapien
taatacaggttcagacttatcttgc

SEQ ID NO: 1736781 - DNA, 25 bp, Homo sapien
taactctctcaaataaagaattagc

SEQ ID NO: 1736782 - DNA, 25 bp, Homo sapien
ggaatctgagaatcgtgtggccacg

SEQ ID NO: 1736783 - DNA, 25 bp, Homo sapien
tttaggctccagttgctgatctttc

SEQ ID NO: 1736784 - DNA, 25 bp, Homo sapien
tccacagtgggctccgcagcttttt

SEQ ID NO: 1736785 - DNA, 25 bp, Homo sapien
ttttttaggctccagttgctgatct

SEQ ID NO: 1736786 - DNA, 25 bp, Homo sapien
cgcagcttttttagggctggtactt

SEQ ID NO: 1736787 - DNA, 25 bp, Homo sapien
atgaaggtcaactcttccacttcaa

SEQ ID NO: 1736788 - DNA, 25 bp, Homo sapien
ggtcaactcttccacttcaactaac

SEQ ID NO: 1736789 - DNA, 25 bp, Homo sapien
cacttcaactaactgcctttcactc

SEQ ID NO: 1736790 - DNA, 25 bp, Homo sapien
gaaggtcaactcttccacttcaact

SEQ ID NO: 1736791 - DNA, 25 bp, Homo sapien
caacaatttattcaataacaactag

SEQ ID NO: 1736792 - DNA, 25 bp, Homo sapien
acaatttattcaataacaactagga

SEQ ID NO: 1736793 - DNA, 25 bp, Homo sapien
agacaacaatttattcaataacaac

SEQ ID NO: 1736794 - DNA, 25 bp, Homo sapien
tataattcttaaaacagacaacaat

SEQ ID NO: 1736795 - DNA, 25 bp, Homo sapien
tagtacacccttgctacaatgaaaa

SEQ ID NO: 1736796 - DNA, 25 bp, Homo sapien
aattcttcttccataactagtgaag

SEQ ID NO: 1736797 - DNA, 25 bp, Homo sapien
gaagcgtcatcataaccagtgatga

SEQ ID NO: 1736798 - DNA, 25 bp, Homo sapien
tgctacaatgaaaactcccaaatct

SEQ ID NO: 1736799 - DNA, 25 bp, Homo sapien
actgtcctaacatagcacttgtgtg

SEQ ID NO: 1736800 - DNA, 25 bp, Homo sapien
aactgtcctaacatagcacttgtgt

SEQ ID NO: 1736801 - DNA, 25 bp, Homo sapien
caactgtcctaacatagcacttgtg

SEQ ID NO: 1736802 - DNA, 25 bp, Homo sapien
ccaactgtcctaacatagcacttgt

SEQ ID NO: 1736803 - DNA, 25 bp, Homo sapien
catgacagttgcaggtaagggatta

SEQ ID NO: 1736804 - DNA, 25 bp, Homo sapien
taagggattagaaatcatcggtcca

SEQ ID NO: 1736805 - DNA, 25 bp, Homo sapien
ggcaccgttgtgttcccgttggtca

SEQ ID NO: 1736806 - DNA, 25 bp, Homo sapien
cagatcatcgttcaggggtggcacc

SEQ ID NO: 1736807 - DNA, 25 bp, Homo sapien
tgtagtttgctcagtgaataaatct

SEQ ID NO: 1736808 - DNA, 25 bp, Homo sapien
aataaatctagatccccagatgtta

SEQ ID NO: 1736809 - DNA, 25 bp, Homo sapien
caggagtactttgctgttgaatggt

SEQ ID NO: 1736810 - DNA, 25 bp, Homo sapien
gttactgtagacagggttgcagctg

SEQ ID NO: 1736811 - DNA, 25 bp, Homo sapien
tcaataggtgtagtgggctgcccaa

SEQ ID NO: 1736812 - DNA, 25 bp, Homo sapien
ccccagtacgaaacagggaagtgag

SEQ ID NO: 1736813 - DNA, 25 bp, Homo sapien
taatccatgtggtaactcaagactg

SEQ ID NO: 1736814 - DNA, 25 bp, Homo sapien
tgaagaccaaactatgtagcatgac

SEQ ID NO: 1736815 - DNA, 25 bp, Homo sapien
tgagcttgcggcaggccaaacttac

SEQ ID NO: 1736816 - DNA, 25 bp, Homo sapien
cacaggcacgcccatcgatggaaag

SEQ ID NO: 1736817 - DNA, 25 bp, Homo sapien
tcccataaacccattgggcatgggc

SEQ ID NO: 1736818 - DNA, 25 bp, Homo sapien
catcacatttcctataaggccagga

SEQ ID NO: 1736819 - DNA, 25 bp, Homo sapien
aacctgagctgggtgtgcttcagca

SEQ ID NO: 1736820 - DNA, 25 bp, Homo sapien
agagaccaatgttttacctatattc

SEQ ID NO: 1736821 - DNA, 25 bp, Homo sapien
gaaatcactctagactattccctga

SEQ ID NO: 1736822 - DNA, 25 bp, Homo sapien
aagagccagtattaactccttcctg

SEQ ID NO: 1736823 - DNA, 25 bp, Homo sapien
cattggccagtagattgcactgatg

SEQ ID NO: 1736824 - DNA, 25 bp, Homo sapien
caccttgtcattggccagtagattg

SEQ ID NO: 1736825 - DNA, 25 bp, Homo sapien
cttgtcattggccagtagattgcac

SEQ ID NO: 1736826 - DNA, 25 bp, Homo sapien
gccagtagattgcactgatggagtg

SEQ ID NO: 1736827 - DNA, 25 bp, Homo sapien
actgatactcatgccagccatctgc

SEQ ID NO: 1736828 - DNA, 25 bp, Homo sapien
tactgatactcatgccagccatctg

SEQ ID NO: 1736829 - DNA, 25 bp, Homo sapien
ctactgatactcatgccagccatct

SEQ ID NO: 1736830 - DNA, 25 bp, Homo sapien
ctgatactcatgccagccatctgct

SEQ ID NO: 1736831 - DNA, 25 bp, Homo sapien
ctgatgagcttccagaccatcctgc

SEQ ID NO: 1736832 - DNA, 25 bp, Homo sapien
cagaccatcctgctgttgtgctgga

SEQ ID NO: 1736833 - DNA, 25 bp, Homo sapien
gatgagcttccagaccatcctgctg

SEQ ID NO: 1736834 - DNA, 25 bp, Homo sapien
ccagaccatcctgctgttgtgctgg

SEQ ID NO: 1736835 - DNA, 25 bp, Homo sapien
tttccacagttgtgtgctgagagtc

SEQ ID NO: 1736836 - DNA, 25 bp, Homo sapien
tcatttccacagttgtgtgctgaga

SEQ ID NO: 1736837 - DNA, 25 bp, Homo sapien
ccacagttgtgtgctgagagtctga

SEQ ID NO: 1736838 - DNA, 25 bp, Homo sapien
cacagttgtgtgctgagagtctgac

SEQ ID NO: 1736839 - DNA, 25 bp, Homo sapien
ttgaatcagtacagaccaacacggt

SEQ ID NO: 1736840 - DNA, 25 bp, Homo sapien
cgtttcagcaaggaatgtcaggtgg

SEQ ID NO: 1736841 - DNA, 25 bp, Homo sapien
gatcatacagtaccttcctacagga

SEQ ID NO: 1736842 - DNA, 25 bp, Homo sapien
aaatatgagcaaagctgcccttgac

SEQ ID NO: 1736843 - DNA, 25 bp, Homo sapien
cattttgtcaatactaggcaccata

SEQ ID NO: 1736844 - DNA, 25 bp, Homo sapien
ggtcttcatgttagcactatgtaca

SEQ ID NO: 1736845 - DNA, 25 bp, Homo sapien
gcatatagtgcagaaaaaggtcttc

SEQ ID NO: 1736846 - DNA, 25 bp, Homo sapien
cgaagttttggagtaacatccacgt

SEQ ID NO: 1736847 - DNA, 25 bp, Homo sapien
gaaggttaatctagccaacgagcca

SEQ ID NO: 1736848 - DNA, 25 bp, Homo sapien
tatttaagcgtcgtggatcccagcc

SEQ ID NO: 1736849 - DNA, 25 bp, Homo sapien
tgaagagtgcgctacccaagctatt

SEQ ID NO: 1736850 - DNA, 25 bp, Homo sapien
ccttcaggttctcgtgtggcacact

SEQ ID NO: 1736851 - DNA, 25 bp, Homo sapien
aaagagttgtttaggagcagatacg

SEQ ID NO: 1736852 - DNA, 25 bp, Homo sapien
tgagatttgcaaggcatttggtgcc

SEQ ID NO: 1736853 - DNA, 25 bp, Homo sapien
acagcacttgagctttcagaagaaa

SEQ ID NO: 1736854 - DNA, 25 bp, Homo sapien
tgatcaacaggagaaaatcgaagcc

SEQ ID NO: 1736855 - DNA, 25 bp, Homo sapien
gtctctgagcctgcagaacagtttc

SEQ ID NO: 1736856 - DNA, 25 bp, Homo sapien
tggtctctgagcctgcagaacagtt

SEQ ID NO: 1736857 - DNA, 25 bp, Homo sapien
agcctgcagaacagtttcttggttt

SEQ ID NO: 1736858 - DNA, 25 bp, Homo sapien
tgagcctgcagaacagtttcttggt

SEQ ID NO: 1736859 - DNA, 25 bp, Homo sapien
catcaaagccaaatgagcagtcaaa

SEQ ID NO: 1736860 - DNA, 25 bp, Homo sapien
tctcagtagataatgctgtgatcag

SEQ ID NO: 1736861 - DNA, 25 bp, Homo sapien
ccagcccggatcagatgatcatcaa

SEQ ID NO: 1736862 - DNA, 25 bp, Homo sapien
agataatgctgtgatcagcttcagc

SEQ ID NO: 1736863 - DNA, 25 bp, Homo sapien
tgcagtaggaccacacgttctaaaa

SEQ ID NO: 1736864 - DNA, 25 bp, Homo sapien
tactataaatctgagggagccagag

SEQ ID NO: 1736865 - DNA, 25 bp, Homo sapien
gagccagaggacgaagaataccagg

SEQ ID NO: 1736866 - DNA, 25 bp, Homo sapien
gcatatttcccagccgtagtcaaga

SEQ ID NO: 1736867 - DNA, 25 bp, Homo sapien
tgctcttcttcgctgacgacgacaa

SEQ ID NO: 1736868 - DNA, 25 bp, Homo sapien
agcccggcgtgctcttcttcgctga

SEQ ID NO: 1736869 - DNA, 25 bp, Homo sapien
tcttcgctgacgacgacaacaccta

SEQ ID NO: 1736870 - DNA, 25 bp, Homo sapien
gcgccactgagcagcgcaacgcggg

SEQ ID NO: 1736871 - DNA, 25 bp, Homo sapien
cgtgcaccatgaagtccgcgctttt

SEQ ID NO: 1736872 - DNA, 25 bp, Homo sapien
catcatcatgctcgacgtggacacg

SEQ ID NO: 1736873 - DNA, 25 bp, Homo sapien
gcagcgagctggtgagccgcttcct

SEQ ID NO: 1736874 - DNA, 25 bp, Homo sapien
tggccaacacgttccgccaggtggc

SEQ ID NO: 1736875 - DNA, 25 bp, Homo sapien
tgcaaggtcccctctgaattcatgt

SEQ ID NO: 1736876 - DNA, 25 bp, Homo sapien
gccttgaccccagaagcacatcttc

SEQ ID NO: 1736877 - DNA, 25 bp, Homo sapien
ttcatgttcttccagtcgccttgac

SEQ ID NO: 1736878 - DNA, 25 bp, Homo sapien
gaattcatgttcttccagtcgcctt

SEQ ID NO: 1736879 - DNA, 25 bp, Homo sapien
gagttgctagtggttaacttcccaa

SEQ ID NO: 1736880 - DNA, 25 bp, Homo sapien
tgctagtggttaacttcccaaaaca

SEQ ID NO: 1736881 - DNA, 25 bp, Homo sapien
aatagttctttgttgattaataact

SEQ ID NO: 1736882 - DNA, 25 bp, Homo sapien
gggcagagttgctagtggttaactt

SEQ ID NO: 1736883 - DNA, 25 bp, Homo sapien
ttcctggatctctgagtaggccatt

SEQ ID NO: 1736884 - DNA, 25 bp, Homo sapien
tcctggatctctgagtaggccattc

SEQ ID NO: 1736885 - DNA, 25 bp, Homo sapien
ctggatctctgagtaggccattcct

SEQ ID NO: 1736886 - DNA, 25 bp, Homo sapien
cctggatctctgagtaggccattcc

SEQ ID NO: 1736887 - DNA, 25 bp, Homo sapien
tggaagctcacttgagcccaggagt

SEQ ID NO: 1736888 - DNA, 25 bp, Homo sapien
atttcagctactcaggaggctgagg

SEQ ID NO: 1736889 - DNA, 25 bp, Homo sapien
gaggttacaggaagctatgattgca

SEQ ID NO: 1736890 - DNA, 25 bp, Homo sapien
ccagacatgctggctcaggcctgta

SEQ ID NO: 1736891 - DNA, 25 bp, Homo sapien
caggatctgagcaccaaagttgtct

SEQ ID NO: 1736892 - DNA, 25 bp, Homo sapien
cacacagtgggtcagttatatctct

SEQ ID NO: 1736893 - DNA, 25 bp, Homo sapien
tgatgcccaagaggctatcatgcca

SEQ ID NO: 1736894 - DNA, 25 bp, Homo sapien
tttccacagggaacaagtcaatgcc

SEQ ID NO: 1736895 - DNA, 25 bp, Homo sapien
tattgaggcactcagtaatgctact

SEQ ID NO: 1736896 - DNA, 25 bp, Homo sapien
ttaagggaagagttatgaaagtgcc

SEQ ID NO: 1736897 - DNA, 25 bp, Homo sapien
ggcacagtccaggtatattgaggca

SEQ ID NO: 1736898 - DNA, 25 bp, Homo sapien
tgctgcataagtttcagggttgctg

SEQ ID NO: 1736899 - DNA, 25 bp, Homo sapien
aaacagttggcacctctcatacccg

SEQ ID NO: 1736900 - DNA, 25 bp, Homo sapien
tttctgggcatgtgatgtataaaca

SEQ ID NO: 1736901 - DNA, 25 bp, Homo sapien
cacagtggtggatgctttcacaagt

SEQ ID NO: 1736902 - DNA, 25 bp, Homo sapien
ctcatacccgggctacacagtggtg

SEQ ID NO: 1736903 - DNA, 25 bp, Homo sapien
ctcagtttatccacttgcaaaatca

SEQ ID NO: 1736904 - DNA, 25 bp, Homo sapien
gtgcccaggctccaatcagtatttt

SEQ ID NO: 1736905 - DNA, 25 bp, Homo sapien
taactgttatacttagaagaagaca

SEQ ID NO: 1736906 - DNA, 25 bp, Homo sapien
aatttacttttagtgtcagttggag

SEQ ID NO: 1736907 - DNA, 25 bp, Homo sapien
ttggtttcacgtcacttgcagactc

SEQ ID NO: 1736908 - DNA, 25 bp, Homo sapien
actctgcaacttgaaggaaaggcca

SEQ ID NO: 1736909 - DNA, 25 bp, Homo sapien
cagactctgcaacttgaaggaaagg

SEQ ID NO: 1736910 - DNA, 25 bp, Homo sapien
ttgcagactctgcaacttgaaggaa

SEQ ID NO: 1736911 - DNA, 25 bp, Homo sapien
gcagcggggttgacatgttattgcc

SEQ ID NO: 1736912 - DNA, 25 bp, Homo sapien
gctcacagcgcaagcggaaggaaga

SEQ ID NO: 1736913 - DNA, 25 bp, Homo sapien
tcagctcacagcgcaagcggaagga

SEQ ID NO: 1736914 - DNA, 25 bp, Homo sapien
gggttgacatgttattgccgcacat

SEQ ID NO: 1736915 - DNA, 25 bp, Homo sapien
gggcagatatatttgatatgtgaac

SEQ ID NO: 1736916 - DNA, 25 bp, Homo sapien
tatttgatatgtgaacttatgatac

SEQ ID NO: 1736917 - DNA, 25 bp, Homo sapien
gatatatttgatatgtgaacttatg

SEQ ID NO: 1736918 - DNA, 25 bp, Homo sapien
gcgggcagatatatttgatatgtga

SEQ ID NO: 1736919 - DNA, 25 bp, Homo sapien
aaatatctctattagcaccaccgat

SEQ ID NO: 1736920 - DNA, 25 bp, Homo sapien
tcacattggctggattcaccaatgt

SEQ ID NO: 1736921 - DNA, 25 bp, Homo sapien
ccaaagggtcacaatccccgtggca

SEQ ID NO: 1736922 - DNA, 25 bp, Homo sapien
ctctattagcaccaccgataggacc

SEQ ID NO: 1736923 - DNA, 25 bp, Homo sapien
aaagtaaactctatgctatgggaaa

SEQ ID NO: 1736924 - DNA, 25 bp, Homo sapien
actctatgctatgggaaagtgaaat

SEQ ID NO: 1736925 - DNA, 25 bp, Homo sapien
aagtaaactctatgctatgggaaag

SEQ ID NO: 1736926 - DNA, 25 bp, Homo sapien
cattttatgtgtagggttctgacta

SEQ ID NO: 1736927 - DNA, 25 bp, Homo sapien
taacatcctataaggtccattacta

SEQ ID NO: 1736928 - DNA, 25 bp, Homo sapien
catcctataaggtccattactaaat

SEQ ID NO: 1736929 - DNA, 25 bp, Homo sapien
cattattaacatcctataaggtcca

SEQ ID NO: 1736930 - DNA, 25 bp, Homo sapien
cttcatgagtttggctgtcattctt

SEQ ID NO: 1736931 - DNA, 25 bp, Homo sapien
tgagtttggctgtcattcttgtgca

SEQ ID NO: 1736932 - DNA, 25 bp, Homo sapien
atgagtttggctgtcattcttgtgc

SEQ ID NO: 1736933 - DNA, 25 bp, Homo sapien
atgcttcatgagtttggctgtcatt

SEQ ID NO: 1736934 - DNA, 25 bp, Homo sapien
aagtcttcacaacatctacctgcag

SEQ ID NO: 1736935 - DNA, 25 bp, Homo sapien
ttggatacggtttgcttacccctca

SEQ ID NO: 1736936 - DNA, 25 bp, Homo sapien
agtcttaatcctgacatatccctgg

SEQ ID NO: 1736937 - DNA, 25 bp, Homo sapien
gggactattataataccacctttgc

SEQ ID NO: 1736938 - DNA, 25 bp, Homo sapien
aaaggaaaggcacagcgatatcaga

SEQ ID NO: 1736939 - DNA, 25 bp, Homo sapien
gaaggcaagatcaatcctgcagggg

SEQ ID NO: 1736940 - DNA, 25 bp, Homo sapien
catcagggaaaattgcacagtcaca

SEQ ID NO: 1736941 - DNA, 25 bp, Homo sapien
gcacagcgatatcagaaagaaggca

SEQ ID NO: 1736942 - DNA, 25 bp, Homo sapien
ttgcttgtgattacattcttgttta

SEQ ID NO: 1736943 - DNA, 25 bp, Homo sapien
ctttttgcttgtgattacattcttg

SEQ ID NO: 1736944 - DNA, 25 bp, Homo sapien
tttgcttgtgattacattcttgttt

SEQ ID NO: 1736945 - DNA, 25 bp, Homo sapien
agagtcctcagcaacaatgagtccc

SEQ ID NO: 1736946 - DNA, 25 bp, Homo sapien
catagttattggtgtcaagagagtc

SEQ ID NO: 1736947 - DNA, 25 bp, Homo sapien
aggttgcatagttattggtgtcaag

SEQ ID NO: 1736948 - DNA, 25 bp, Homo sapien
gagtcctcagcaacaatgagtcccc

SEQ ID NO: 1736949 - DNA, 25 bp, Homo sapien
gctcttggagtcattgcaaaatggt

SEQ ID NO: 1736950 - DNA, 25 bp, Homo sapien
tgccagaccttcttaagggacctga

SEQ ID NO: 1736951 - DNA, 25 bp, Homo sapien
ccttcttaagggacctgagtcagaa

SEQ ID NO: 1736952 - DNA, 25 bp, Homo sapien
tgactgccagaccttcttaagggac

SEQ ID NO: 1736953 - DNA, 25 bp, Homo sapien
tgacaatcggattggtggcaacctg

SEQ ID NO: 1736954 - DNA, 25 bp, Homo sapien
tcggattggtggcaacctggtttca

SEQ ID NO: 1736955 - DNA, 25 bp, Homo sapien
cacagtgacaatcggattggtggca

SEQ ID NO: 1736956 - DNA, 25 bp, Homo sapien
cagcacagtgacaatcggattggtg

SEQ ID NO: 1736957 - DNA, 25 bp, Homo sapien
ctgcttctgacagcaatagtagcct

SEQ ID NO: 1736958 - DNA, 25 bp, Homo sapien
gacagcaatagtagccttctgtggt

SEQ ID NO: 1736959 - DNA, 25 bp, Homo sapien
aaacagcagtaaagccggcaggctg

SEQ ID NO: 1736960 - DNA, 25 bp, Homo sapien
gctgagccctctgcggcttttggca

SEQ ID NO: 1736961 - DNA, 25 bp, Homo sapien
gctcagctgatttcatcaccagtga

SEQ ID NO: 1736962 - DNA, 25 bp, Homo sapien
tctttttggacaatgcaattgtgca

SEQ ID NO: 1736963 - DNA, 25 bp, Homo sapien
tgtgcaattcagtgtttttctgcat

SEQ ID NO: 1736964 - DNA, 25 bp, Homo sapien
gcaattgtgcaattcagtgtttttc

SEQ ID NO: 1736965 - DNA, 25 bp, Homo sapien
acaatgcaattgtgcaattcagtgt

SEQ ID NO: 1736966 - DNA, 25 bp, Homo sapien
ccgttggtagaagaccggaacacat

SEQ ID NO: 1736967 - DNA, 25 bp, Homo sapien
agctgggaattcgattttccgttgg

SEQ ID NO: 1736968 - DNA, 25 bp, Homo sapien
ccaactgctcaaagctgggaattcg

SEQ ID NO: 1736969 - DNA, 25 bp, Homo sapien
tccgttggtagaagaccggaacaca

SEQ ID NO: 1736970 - DNA, 25 bp, Homo sapien
cagctgagcgggatgagggatcccg

SEQ ID NO: 1736971 - DNA, 25 bp, Homo sapien
cccagctgagcgggatgagggatcc

SEQ ID NO: 1736972 - DNA, 25 bp, Homo sapien
tgagcgggatgagggatcccgccca

SEQ ID NO: 1736973 - DNA, 25 bp, Homo sapien
gcgggatgagggatcccgcccagct

SEQ ID NO: 1736974 - DNA, 25 bp, Homo sapien
ctgggcggcagcctaggcgcgcccg

SEQ ID NO: 1736975 - DNA, 25 bp, Homo sapien
cctgaacccgcccatccggctcctt

SEQ ID NO: 1736976 - DNA, 25 bp, Homo sapien
tccccacaggcgggagctgccgccg

SEQ ID NO: 1736977 - DNA, 25 bp, Homo sapien
ccgcactgcctcagcgcggcgagcg

SEQ ID NO: 1736978 - DNA, 25 bp, Homo sapien
tggagtcgcagtcctccacggtggt

SEQ ID NO: 1736979 - DNA, 25 bp, Homo sapien
tccgagtcggtctgccaggtggagt

SEQ ID NO: 1736980 - DNA, 25 bp, Homo sapien
cggtggtgggctcgcggaagctgac

SEQ ID NO: 1736981 - DNA, 25 bp, Homo sapien
ggaagctgaccccgccgagcaggtt

SEQ ID NO: 1736982 - DNA, 25 bp, Homo sapien
ccgcctcggcgtcctcgtccggcgc

SEQ ID NO: 1736983 - DNA, 25 bp, Homo sapien
cgcctcggcgtcctcgtccggcgcg

SEQ ID NO: 1736984 - DNA, 25 bp, Homo sapien
cgggccgcccgccggcttgctccgg

SEQ ID NO: 1736985 - DNA, 25 bp, Homo sapien
gcctcggcgtcctcgtccggcgcgg

SEQ ID NO: 1736986 - DNA, 25 bp, Homo sapien
ccgaggccaccgctgggccgcgtac

SEQ ID NO: 1736987 - DNA, 25 bp, Homo sapien
cgacccgaggccaccgctgggccgc

SEQ ID NO: 1736988 - DNA, 25 bp, Homo sapien
gcccgacccgaggccaccgctgggc

SEQ ID NO: 1736989 - DNA, 25 bp, Homo sapien
cagcccgacccgaggccaccgctgg

SEQ ID NO: 1736990 - DNA, 25 bp, Homo sapien
tcaagttgggttctgccttgaggga

SEQ ID NO: 1736991 - DNA, 25 bp, Homo sapien
cgagggcggcttggcacttgcccct

SEQ ID NO: 1736992 - DNA, 25 bp, Homo sapien
gagggtccggcgctttgggctcctg

SEQ ID NO: 1736993 - DNA, 25 bp, Homo sapien
ttgagggacttcctcgccgtgccct

SEQ ID NO: 1736994 - DNA, 25 bp, Homo sapien
gttgtcaaaatcctctatttttaga

SEQ ID NO: 1736995 - DNA, 25 bp, Homo sapien
tgtcaaaatcctctatttttagaca

SEQ ID NO: 1736996 - DNA, 25 bp, Homo sapien
caaaatcctctatttttagacaggt

SEQ ID NO: 1736997 - DNA, 25 bp, Homo sapien
tctatttttagacaggttcctccca

SEQ ID NO: 1736998 - DNA, 25 bp, Homo sapien
ttttcagtccatcagaggttaaggg

SEQ ID NO: 1736999 - DNA, 25 bp, Homo sapien
ctgattattttcagtccatcagagg

SEQ ID NO: 1737000 - DNA, 25 bp, Homo sapien
gggcttatctcttgactaacctctc

SEQ ID NO: 1737001 - DNA, 25 bp, Homo sapien
ggcttatctcttgactaacctctcc

SEQ ID NO: 1737002 - DNA, 25 bp, Homo sapien
cagggggtcggctacatatttcctc

SEQ ID NO: 1737003 - DNA, 25 bp, Homo sapien
acttcttcagggggtcggctacata

SEQ ID NO: 1737004 - DNA, 25 bp, Homo sapien
ttcttcagggggtcggctacatatt

SEQ ID NO: 1737005 - DNA, 25 bp, Homo sapien
ccaggatgcacacttcttcaggggg

SEQ ID NO: 1737006 - DNA, 25 bp, Homo sapien
ctgataaagagaagggcctaatgtg

SEQ ID NO: 1737007 - DNA, 25 bp, Homo sapien
tctccatcgcccctagctgataaag

SEQ ID NO: 1737008 - DNA, 25 bp, Homo sapien
catcgcccctagctgataaagagaa

SEQ ID NO: 1737009 - DNA, 25 bp, Homo sapien
aagggcctaatgtggagcggcaaac

SEQ ID NO: 1737010 - DNA, 25 bp, Homo sapien
ccacaggtccaaggcgctgatatca

SEQ ID NO: 1737011 - DNA, 25 bp, Homo sapien
tagacttgggtttgcatcatcctct

SEQ ID NO: 1737012 - DNA, 25 bp, Homo sapien
taacacgtttaacacagagcctgca

SEQ ID NO: 1737013 - DNA, 25 bp, Homo sapien
tgcaaaacaacagcggcaaaccaga

SEQ ID NO: 1737014 - DNA, 25 bp, Homo sapien
aaccttggtgtagtatcagtagccc

SEQ ID NO: 1737015 - DNA, 25 bp, Homo sapien
ttctcgatctcaaacaaacatgctg

SEQ ID NO: 1737016 - DNA, 25 bp, Homo sapien
gaagactagcaatctgaacgctgct

SEQ ID NO: 1737017 - DNA, 25 bp, Homo sapien
tgaggccttaagcaaatcatttagc

SEQ ID NO: 1737018 - DNA, 25 bp, Homo sapien
aatgctcttaaatggaatggtgtcc

SEQ ID NO: 1737019 - DNA, 25 bp, Homo sapien
gaaactccgtttacatgttgacgca

SEQ ID NO: 1737020 - DNA, 25 bp, Homo sapien
ggaagatccataaagaaagcctgaa

SEQ ID NO: 1737021 - DNA, 25 bp, Homo sapien
tacatttgtatagaaggcactctcc

SEQ ID NO: 1737022 - DNA, 25 bp, Homo sapien
gcagttgcttcagtggaatcaccac

SEQ ID NO: 1737023 - DNA, 25 bp, Homo sapien
tggtgtcggtacttgtacaaatccc

SEQ ID NO: 1737024 - DNA, 25 bp, Homo sapien
tgggtactggtgtcggtacttgtac

SEQ ID NO: 1737025 - DNA, 25 bp, Homo sapien
aacttctctttggtttggcagttgc

SEQ ID NO: 1737026 - DNA, 25 bp, Homo sapien
tattcttataaaaacgaagattgct

SEQ ID NO: 1737027 - DNA, 25 bp, Homo sapien
gaagattgctcaagtcattttgata

SEQ ID NO: 1737028 - DNA, 25 bp, Homo sapien
caagtcattttgatatcggatatct

SEQ ID NO: 1737029 - DNA, 25 bp, Homo sapien
tataaaaacgaagattgctcaagtc

SEQ ID NO: 1737030 - DNA, 25 bp, Homo sapien
caaggctttgttggacaatgtactc

SEQ ID NO: 1737031 - DNA, 25 bp, Homo sapien
cccagtcctaggagttatatagttc

SEQ ID NO: 1737032 - DNA, 25 bp, Homo sapien
cagtagcagagctgtgtagttgcaa

SEQ ID NO: 1737033 - DNA, 25 bp, Homo sapien
tttgcccctgtatagaaagtttgcc

SEQ ID NO: 1737034 - DNA, 25 bp, Homo sapien
aagtgtggttgtgctccagtttttc

SEQ ID NO: 1737035 - DNA, 25 bp, Homo sapien
gtggttgtgctccagtttttcataa

SEQ ID NO: 1737036 - DNA, 25 bp, Homo sapien
attgaatgtaagtgtggttgtgctc

SEQ ID NO: 1737037 - DNA, 25 bp, Homo sapien
atctcctttccatttacttagaact

SEQ ID NO: 1737038 - DNA, 25 bp, Homo sapien
catagaagttcaagccttgttctct

SEQ ID NO: 1737039 - DNA, 25 bp, Homo sapien
tgtagttagttctttggcatagaag

SEQ ID NO: 1737040 - DNA, 25 bp, Homo sapien
ctcaatttcatatgtagttagttct

SEQ ID NO: 1737041 - DNA, 25 bp, Homo sapien
tctttggcatagaagttcaagcctt

SEQ ID NO: 1737042 - DNA, 25 bp, Homo sapien
taacagcccgagcaacatttccagt

SEQ ID NO: 1737043 - DNA, 25 bp, Homo sapien
catttccagttttatcagtcagttt

SEQ ID NO: 1737044 - DNA, 25 bp, Homo sapien
gctgaaatctttcctgccagttaac

SEQ ID NO: 1737045 - DNA, 25 bp, Homo sapien
cattttataagccaggaggaatctt

SEQ ID NO: 1737046 - DNA, 25 bp, Homo sapien
tgtttctgggcgaaccgcaggagct

SEQ ID NO: 1737047 - DNA, 25 bp, Homo sapien
gagcactctgcttaatattgggaat

SEQ ID NO: 1737048 - DNA, 25 bp, Homo sapien
cgaggcggtccccagataaagttct

SEQ ID NO: 1737049 - DNA, 25 bp, Homo sapien
tccgactgttcttttcgaggcggtc

SEQ ID NO: 1737050 - DNA, 25 bp, Homo sapien
tttccaccttcttcgttattctcag

SEQ ID NO: 1737051 - DNA, 25 bp, Homo sapien
actagtacaacatcatggcaatttg

SEQ ID NO: 1737052 - DNA, 25 bp, Homo sapien
cattgtcttggttatcatttccacc

SEQ ID NO: 1737053 - DNA, 25 bp, Homo sapien
tattctcaggagatacactctcctt

SEQ ID NO: 1737054 - DNA, 25 bp, Homo sapien
tcatctctgttctttaggataaatg

SEQ ID NO: 1737055 - DNA, 25 bp, Homo sapien
aaacaacaaaatgcttatgacagaa

SEQ ID NO: 1737056 - DNA, 25 bp, Homo sapien
cctctctagcctaaactggcttctg

SEQ ID NO: 1737057 - DNA, 25 bp, Homo sapien
taaaatttgaaattgacctcatctc

SEQ ID NO: 1737058 - DNA, 25 bp, Homo sapien
gatgctggacccctgaatatggagg

SEQ ID NO: 1737059 - DNA, 25 bp, Homo sapien
atggagggccaactacactagaaac

SEQ ID NO: 1737060 - DNA, 25 bp, Homo sapien
gaaacacacacgctagctgagaaag

SEQ ID NO: 1737061 - DNA, 25 bp, Homo sapien
tcatcctaatgtgtatagtggtccc

SEQ ID NO: 1737062 - DNA, 25 bp, Homo sapien
tctacggagacacagctacaagcac

SEQ ID NO: 1737063 - DNA, 25 bp, Homo sapien
tacaagcaccacgtaagagtgtcca

SEQ ID NO: 1737064 - DNA, 25 bp, Homo sapien
gccactatttaagatggatgccagg

SEQ ID NO: 1737065 - DNA, 25 bp, Homo sapien
gaactatttactgagctctacggag

SEQ ID NO: 1737066 - DNA, 25 bp, Homo sapien
cagtctactggagggcttcaacgca

SEQ ID NO: 1737067 - DNA, 25 bp, Homo sapien
tattaatgggatctgtttgcacacc

SEQ ID NO: 1737068 - DNA, 25 bp, Homo sapien
tattggtactaacgaacatgcacag

SEQ ID NO: 1737069 - DNA, 25 bp, Homo sapien
tccccagaagtcagagctcacagtg

SEQ ID NO: 1737070 - DNA, 25 bp, Homo sapien
tgttagtcttatgtgttaatcataa

SEQ ID NO: 1737071 - DNA, 25 bp, Homo sapien
gttagtcttatgtgttaatcataaa

SEQ ID NO: 1737072 - DNA, 25 bp, Homo sapien
aatgttagtcttatgtgttaatcat

SEQ ID NO: 1737073 - DNA, 25 bp, Homo sapien
ataatgttagtcttatgtgttaatc

SEQ ID NO: 1737074 - DNA, 25 bp, Homo sapien
tggctgcttacacaccacagggtag

SEQ ID NO: 1737075 - DNA, 25 bp, Homo sapien
gaagcagcacatatcacatccctca

SEQ ID NO: 1737076 - DNA, 25 bp, Homo sapien
agccagcattgcaaggcccaagctc

SEQ ID NO: 1737077 - DNA, 25 bp, Homo sapien
gaggcagatttaagttccagcttgt

SEQ ID NO: 1737078 - DNA, 25 bp, Homo sapien
tttatgcccattcctttctttgatc

SEQ ID NO: 1737079 - DNA, 25 bp, Homo sapien
tgcttgggctcctctccttttatgc

SEQ ID NO: 1737080 - DNA, 25 bp, Homo sapien
aggctctctccctatcattcctcat

SEQ ID NO: 1737081 - DNA, 25 bp, Homo sapien
tgatcctttatgtccaactgttgac

SEQ ID NO: 1737082 - DNA, 25 bp, Homo sapien
agcagagacattttctatcctgttt

SEQ ID NO: 1737083 - DNA, 25 bp, Homo sapien
taatttgaattaagatccactagag

SEQ ID NO: 1737084 - DNA, 25 bp, Homo sapien
gagacattttctatcctgtttacca

SEQ ID NO: 1737085 - DNA, 25 bp, Homo sapien
ctaatttgaattaagatccactaga

SEQ ID NO: 1737086 - DNA, 25 bp, Homo sapien
tgcctccaatgctcacatcaaagtt

SEQ ID NO: 1737087 - DNA, 25 bp, Homo sapien
caggaatagggtgggataggtgaac

SEQ ID NO: 1737088 - DNA, 25 bp, Homo sapien
acaaatttcatcagatctccctcca

SEQ ID NO: 1737089 - DNA, 25 bp, Homo sapien
caacttaaagggctgctgggagaaa

SEQ ID NO: 1737090 - DNA, 25 bp, Homo sapien
caacatttgtattcctcttccttca

SEQ ID NO: 1737091 - DNA, 25 bp, Homo sapien
atccaacatttgtattcctcttcct

SEQ ID NO: 1737092 - DNA, 25 bp, Homo sapien
tccaacatttgtattcctcttcctt

SEQ ID NO: 1737093 - DNA, 25 bp, Homo sapien
gaaagccgtgaatttctggctgtac

SEQ ID NO: 1737094 - DNA, 25 bp, Homo sapien
aagctttcaacactagggttaggtg

SEQ ID NO: 1737095 - DNA, 25 bp, Homo sapien
taatgcccattatttgagaatctga

SEQ ID NO: 1737096 - DNA, 25 bp, Homo sapien
tccaagtttcatcgagtagattagt

SEQ ID NO: 1737097 - DNA, 25 bp, Homo sapien
ggccagaagccctgatggagaaagc

SEQ ID NO: 1737098 - DNA, 25 bp, Homo sapien
cagtgctttgggttatagtgacacc

SEQ ID NO: 1737099 - DNA, 25 bp, Homo sapien
tcaactaggatgacaagaggcctct

SEQ ID NO: 1737100 - DNA, 25 bp, Homo sapien
tactgacagggaaagccttgtaaga

SEQ ID NO: 1737101 - DNA, 25 bp, Homo sapien
atgaaaactatttgcgaattaacct

SEQ ID NO: 1737102 - DNA, 25 bp, Homo sapien
tgcttacctcccgtctatcctttgg

SEQ ID NO: 1737103 - DNA, 25 bp, Homo sapien
tataaatcttgcaacactaaagttc

SEQ ID NO: 1737104 - DNA, 25 bp, Homo sapien
aaaatgcagtgctacaagtttgtct

SEQ ID NO: 1737105 - DNA, 25 bp, Homo sapien
caggttgggcttagtgtcagaactc

SEQ ID NO: 1737106 - DNA, 25 bp, Homo sapien
cccacttttctgttggtgcttagaa

SEQ ID NO: 1737107 - DNA, 25 bp, Homo sapien
cattgccttgatagttgagactgtc

SEQ ID NO: 1737108 - DNA, 25 bp, Homo sapien
caatgccagtaaaagttccgtaaat

SEQ ID NO: 1737109 - DNA, 25 bp, Homo sapien
caatgcagtctcttatttcaaggag

SEQ ID NO: 1737110 - DNA, 25 bp, Homo sapien
cctgggcaaatgtatcaatggagca

SEQ ID NO: 1737111 - DNA, 25 bp, Homo sapien
gattgcatgagagaacctgtagtag

SEQ ID NO: 1737112 - DNA, 25 bp, Homo sapien
gacaacccagaaagctaaagagctt

SEQ ID NO: 1737113 - DNA, 25 bp, Homo sapien
caatggcctgagttgttgttagtcc

SEQ ID NO: 1737114 - DNA, 25 bp, Homo sapien
catgccagcgtaatgagcttcagca

SEQ ID NO: 1737115 - DNA, 25 bp, Homo sapien
caactagggccttctaatgctgcca

SEQ ID NO: 1737116 - DNA, 25 bp, Homo sapien
gatacttctaaatcacaatggcctg

SEQ ID NO: 1737117 - DNA, 25 bp, Homo sapien
tggttagggttgctcttcccgagag

SEQ ID NO: 1737118 - DNA, 25 bp, Homo sapien
tgccagggaactgctgacagtgact

SEQ ID NO: 1737119 - DNA, 25 bp, Homo sapien
caatagaagggcgtttcttggttag

SEQ ID NO: 1737120 - DNA, 25 bp, Homo sapien
ccagcaggtggtctaagggaggtgc

SEQ ID NO: 1737121 - DNA, 25 bp, Homo sapien
aatggagatacggtcagagaggccc

SEQ ID NO: 1737122 - DNA, 25 bp, Homo sapien
caggaatatggcaggctcaacacta

SEQ ID NO: 1737123 - DNA, 25 bp, Homo sapien
tttttgcctggcttataaggtggcc

SEQ ID NO: 1737124 - DNA, 25 bp, Homo sapien
gaatagatccacagttcctctccag

SEQ ID NO: 1737125 - DNA, 25 bp, Homo sapien
gtgccaggtaataactttgatcatg

SEQ ID NO: 1737126 - DNA, 25 bp, Homo sapien
gggataagtacctctggacacaatg

SEQ ID NO: 1737127 - DNA, 25 bp, Homo sapien
gactcactttgagacacactgatta

SEQ ID NO: 1737128 - DNA, 25 bp, Homo sapien
gattatgtggtctgcctcaaagaca

SEQ ID NO: 1737129 - DNA, 25 bp, Homo sapien
tgacatgccactgacttgggaaccg

SEQ ID NO: 1737130 - DNA, 25 bp, Homo sapien
aaaattgcggtagcttgaagggcac

SEQ ID NO: 1737131 - DNA, 25 bp, Homo sapien
ggtcatcgcgggtgactttctcgac

SEQ ID NO: 1737132 - DNA, 25 bp, Homo sapien
gcgactggctcagcttgaccttgga

SEQ ID NO: 1737133 - DNA, 25 bp, Homo sapien
tccgaggccgcgcagacaatgcggc

SEQ ID NO: 1737134 - DNA, 25 bp, Homo sapien
accgccggccgtgcttgttccgagg

SEQ ID NO: 1737135 - DNA, 25 bp, Homo sapien
agctgtcaggcgagcggcgaagcgg

SEQ ID NO: 1737136 - DNA, 25 bp, Homo sapien
gagacacacaaagaacgcggtgggc

SEQ ID NO: 1737137 - DNA, 25 bp, Homo sapien
tgggctttccgacacctgattgggc

SEQ ID NO: 1737138 - DNA, 25 bp, Homo sapien
tgatctgggctccaggatcggtccc

SEQ ID NO: 1737139 - DNA, 25 bp, Homo sapien
tctgtacgccgacatcattggaggg

SEQ ID NO: 1737140 - DNA, 25 bp, Homo sapien
tttgcgacacagctttggccggact

SEQ ID NO: 1737141 - DNA, 25 bp, Homo sapien
tcgtcatggtgtagtccactttcag

SEQ ID NO: 1737142 - DNA, 25 bp, Homo sapien
tgtgcctattatttgtaaggtcctg

SEQ ID NO: 1737143 - DNA, 25 bp, Homo sapien
ccagtgctttactcaagtcctttct

SEQ ID NO: 1737144 - DNA, 25 bp, Homo sapien
ggtacagtcgtttatagccagtgct

SEQ ID NO: 1737145 - DNA, 25 bp, Homo sapien
aagtttcacactgggatgatgggga

SEQ ID NO: 1737146 - DNA, 25 bp, Homo sapien
acaagtttcacactgggatgatggg

SEQ ID NO: 1737147 - DNA, 25 bp, Homo sapien
accacaagtttcacactgggatgat

SEQ ID NO: 1737148 - DNA, 25 bp, Homo sapien
cacaagtttcacactgggatgatgg

SEQ ID NO: 1737149 - DNA, 25 bp, Homo sapien
caaatcagcgaaacttaattccaac

SEQ ID NO: 1737150 - DNA, 25 bp, Homo sapien
tgaggttagaaatcagaacgacttt

SEQ ID NO: 1737151 - DNA, 25 bp, Homo sapien
cccagtattgttgaatgtgaggtta

SEQ ID NO: 1737152 - DNA, 25 bp, Homo sapien
tgttgaatgtgaggttagaaatcag

SEQ ID NO: 1737153 - DNA, 25 bp, Homo sapien
tgacagtgacacatctctcttggcg

SEQ ID NO: 1737154 - DNA, 25 bp, Homo sapien
cttcttatgggtgacagtgacacat

SEQ ID NO: 1737155 - DNA, 25 bp, Homo sapien
gggtgacagtgacacatctctcttg

SEQ ID NO: 1737156 - DNA, 25 bp, Homo sapien
ttcttatgggtgacagtgacacatc

SEQ ID NO: 1737157 - DNA, 25 bp, Homo sapien
tgtttagttgcttttgtgacaataa

SEQ ID NO: 1737158 - DNA, 25 bp, Homo sapien
cttttgtgacaataaataataactc

SEQ ID NO: 1737159 - DNA, 25 bp, Homo sapien
ataataactccttaggtgtatttat

SEQ ID NO: 1737160 - DNA, 25 bp, Homo sapien
tgcttttgtgacaataaataataac

SEQ ID NO: 1737161 - DNA, 25 bp, Homo sapien
ggccatgaagacaagggaatccttc

SEQ ID NO: 1737162 - DNA, 25 bp, Homo sapien
ccttcagagtggagtgattcctagc

SEQ ID NO: 1737163 - DNA, 25 bp, Homo sapien
tcagagtggagtgattcctagcacc

SEQ ID NO: 1737164 - DNA, 25 bp, Homo sapien
gacaagggaatccttcagagtggag

SEQ ID NO: 1737165 - DNA, 25 bp, Homo sapien
tctttcactagaaatttctgtttag

SEQ ID NO: 1737166 - DNA, 25 bp, Homo sapien
tccgatttctagtaccatatggtta

SEQ ID NO: 1737167 - DNA, 25 bp, Homo sapien
taatagcactgtaacattccgattt

SEQ ID NO: 1737168 - DNA, 25 bp, Homo sapien
tttagtagtgacatacttggaagca

SEQ ID NO: 1737169 - DNA, 25 bp, Homo sapien
gacacctggttgattatgttccctg

SEQ ID NO: 1737170 - DNA, 25 bp, Homo sapien
tgtggccttaacatgaacacagtgg

SEQ ID NO: 1737171 - DNA, 25 bp, Homo sapien
tccctgagcaggagatatgagccat

SEQ ID NO: 1737172 - DNA, 25 bp, Homo sapien
tgctgcttgagtagcctgtgggaaa

SEQ ID NO: 1737173 - DNA, 25 bp, Homo sapien
aggaactcttcagcctgtcatgaag

SEQ ID NO: 1737174 - DNA, 25 bp, Homo sapien
aactcttcagcctgtcatgaaggtc

SEQ ID NO: 1737175 - DNA, 25 bp, Homo sapien
tcttcagcctgtcatgaaggtctga

SEQ ID NO: 1737176 - DNA, 25 bp, Homo sapien
cttcagcctgtcatgaaggtctgac

SEQ ID NO: 1737177 - DNA, 25 bp, Homo sapien
ggtttgatgactggattcacaagaa

SEQ ID NO: 1737178 - DNA, 25 bp, Homo sapien
cgaaactgccattgtaagaccagtt

SEQ ID NO: 1737179 - DNA, 25 bp, Homo sapien
tcacaagaatcctatagtcatcaag

SEQ ID NO: 1737180 - DNA, 25 bp, Homo sapien
ggaaaacctcatcaatcgaaactgc

SEQ ID NO: 1737181 - DNA, 25 bp, Homo sapien
gctctttggaattctgtgggtggca

SEQ ID NO: 1737182 - DNA, 25 bp, Homo sapien
gaagacacctcatttgttaccagca

SEQ ID NO: 1737183 - DNA, 25 bp, Homo sapien
gaaaggacaagtgatagtcacaaat

SEQ ID NO: 1737184 - DNA, 25 bp, Homo sapien
aactctgacactttccttttgcgaa

SEQ ID NO: 1737185 - DNA, 25 bp, Homo sapien
tcaccggtactcagagaaatcttcc

SEQ ID NO: 1737186 - DNA, 25 bp, Homo sapien
caatgtggcagcacatttctcagcc

SEQ ID NO: 1737187 - DNA, 25 bp, Homo sapien
cagtgaacgagacagatgtagcccc

SEQ ID NO: 1737188 - DNA, 25 bp, Homo sapien
tcagcctcaagtatactacagtgaa

SEQ ID NO: 1737189 - DNA, 25 bp, Homo sapien
ctcacccaaacctctaccagtgtcg

SEQ ID NO: 1737190 - DNA, 25 bp, Homo sapien
aacctctaccagtgtcgctgcacca

SEQ ID NO: 1737191 - DNA, 25 bp, Homo sapien
ctaccagtgtcgctgcaccaagctt

SEQ ID NO: 1737192 - DNA, 25 bp, Homo sapien
ccagtgtcgctgcaccaagcttatg

SEQ ID NO: 1737193 - DNA, 25 bp, Homo sapien
tcagttgatcgtgctgttgcgacca

SEQ ID NO: 1737194 - DNA, 25 bp, Homo sapien
tggcccagataattcaagaaagtgt

SEQ ID NO: 1737195 - DNA, 25 bp, Homo sapien
tgttgcgaccacttcgcaggctcca

SEQ ID NO: 1737196 - DNA, 25 bp, Homo sapien
tccacttcagctggctaaaaccttg

SEQ ID NO: 1737197 - DNA, 25 bp, Homo sapien
tgtttaccgctaagttctgcaaatg

SEQ ID NO: 1737198 - DNA, 25 bp, Homo sapien
ttctgcaaatggggcaaaaagcctt

SEQ ID NO: 1737199 - DNA, 25 bp, Homo sapien
ttcgaggggcagacttgtccctcat

SEQ ID NO: 1737200 - DNA, 25 bp, Homo sapien
gcaaaaagccttcgaggggcagact

SEQ ID NO: 1737201 - DNA, 25 bp, Homo sapien
atgttcaaacatggtatcagcgatg

SEQ ID NO: 1737202 - DNA, 25 bp, Homo sapien
tcaccagcaacttcatgttcaaaca

SEQ ID NO: 1737203 - DNA, 25 bp, Homo sapien
ggtatcagcgatgatttcattagag

SEQ ID NO: 1737204 - DNA, 25 bp, Homo sapien
caaacatggtatcagcgatgatttc

SEQ ID NO: 1737205 - DNA, 25 bp, Homo sapien
gaagaactgacgatggtaggctgcc

SEQ ID NO: 1737206 - DNA, 25 bp, Homo sapien
gggagccgggtcgcttcagcagcaa

SEQ ID NO: 1737207 - DNA, 25 bp, Homo sapien
agaactgacgatggtaggctgccaa

SEQ ID NO: 1737208 - DNA, 25 bp, Homo sapien
accagaagaactgacgatggtaggc

SEQ ID NO: 1737209 - DNA, 25 bp, Homo sapien
gagcagctccaagctggcagatacg

SEQ ID NO: 1737210 - DNA, 25 bp, Homo sapien
cactagtgacatatttcatcaccag

SEQ ID NO: 1737211 - DNA, 25 bp, Homo sapien
agagcacagtgtcaggtgtccagct

SEQ ID NO: 1737212 - DNA, 25 bp, Homo sapien
gaccgattgcccttgctatcaaaga

SEQ ID NO: 1737213 - DNA, 25 bp, Homo sapien
caattctgactaggagccagaggaa

SEQ ID NO: 1737214 - DNA, 25 bp, Homo sapien
ctggaacacaattctgactaggagc

SEQ ID NO: 1737215 - DNA, 25 bp, Homo sapien
cacaattctgactaggagccagagg

SEQ ID NO: 1737216 - DNA, 25 bp, Homo sapien
gaacacaattctgactaggagccag

SEQ ID NO: 1737217 - DNA, 25 bp, Homo sapien
gcaggcccaggccctatcatctggg

SEQ ID NO: 1737218 - DNA, 25 bp, Homo sapien
ctagtacgcattgacgtggtggtta

SEQ ID NO: 1737219 - DNA, 25 bp, Homo sapien
tggtggttactctgagtctctagct

SEQ ID NO: 1737220 - DNA, 25 bp, Homo sapien
cactgtgggttcatgatctacgggg

SEQ ID NO: 1737221 - DNA, 25 bp, Homo sapien
tggctcttgtcaactggtagcatga

SEQ ID NO: 1737222 - DNA, 25 bp, Homo sapien
tgtcaactggtagcatgaaaggact

SEQ ID NO: 1737223 - DNA, 25 bp, Homo sapien
caactggtagcatgaaaggactgag

SEQ ID NO: 1737224 - DNA, 25 bp, Homo sapien
tcttgtcaactggtagcatgaaagg

SEQ ID NO: 1737225 - DNA, 25 bp, Homo sapien
cagagcaaagttatctctatctcta

SEQ ID NO: 1737226 - DNA, 25 bp, Homo sapien
cattccagagcaaagttatctctat

SEQ ID NO: 1737227 - DNA, 25 bp, Homo sapien
gataggattggttcacattccagag

SEQ ID NO: 1737228 - DNA, 25 bp, Homo sapien
tggccccagataggattggttcaca

SEQ ID NO: 1737229 - DNA, 25 bp, Homo sapien
ctgcagctagtaggaccaactgcaa

SEQ ID NO: 1737230 - DNA, 25 bp, Homo sapien
ggaccaactgcaagatgcaggcaac

SEQ ID NO: 1737231 - DNA, 25 bp, Homo sapien
aggcaaccttgattgcacctgacat

SEQ ID NO: 1737232 - DNA, 25 bp, Homo sapien
caactgcaagatgcaggcaaccttg

SEQ ID NO: 1737233 - DNA, 25 bp, Homo sapien
tgccacaaaactcacggagccacca

SEQ ID NO: 1737234 - DNA, 25 bp, Homo sapien
gactacttggcctacgactggcgat

SEQ ID NO: 1737235 - DNA, 25 bp, Homo sapien
aacctctgccacaaaactcacggag

SEQ ID NO: 1737236 - DNA, 25 bp, Homo sapien
tacttggcctacgactggcgatagc

SEQ ID NO: 1737237 - DNA, 25 bp, Homo sapien
gcagcccgtaggacacggccaagac

SEQ ID NO: 1737238 - DNA, 25 bp, Homo sapien
aggacgaggacagacacgaagcggg

SEQ ID NO: 1737239 - DNA, 25 bp, Homo sapien
ggacacggccaagacgccgccgtag

SEQ ID NO: 1737240 - DNA, 25 bp, Homo sapien
gaggacacggacacgccgcagcctc

SEQ ID NO: 1737241 - DNA, 25 bp, Homo sapien
gccagagggtcgctgaggttctgca

SEQ ID NO: 1737242 - DNA, 25 bp, Homo sapien
aggccagagggtcgctgaggttctg

SEQ ID NO: 1737243 - DNA, 25 bp, Homo sapien
ggccagagggtcgctgaggttctgc

SEQ ID NO: 1737244 - DNA, 25 bp, Homo sapien
ccagagggtcgctgaggttctgcat

SEQ ID NO: 1737245 - DNA, 25 bp, Homo sapien
atcttgtaccgcaggtcctggatag

SEQ ID NO: 1737246 - DNA, 25 bp, Homo sapien
tcttgtaccgcaggtcctggatagt

SEQ ID NO: 1737247 - DNA, 25 bp, Homo sapien
ggccgttgatgtcggcctccgcgct

SEQ ID NO: 1737248 - DNA, 25 bp, Homo sapien
cgctcatgcgcagagcctgctccgt

SEQ ID NO: 1737249 - DNA, 25 bp, Homo sapien
tgatgtcggcctccgcgctcatgcg

SEQ ID NO: 1737250 - DNA, 25 bp, Homo sapien
gcaggccgttgatgtcggcctccgc

SEQ ID NO: 1737251 - DNA, 25 bp, Homo sapien
gcatctccaggtcggtaatggccag

SEQ ID NO: 1737252 - DNA, 25 bp, Homo sapien
ctccaggtcggtaatggccagggtc

SEQ ID NO: 1737253 - DNA, 25 bp, Homo sapien
ttcaggccttagatctgcatctcca

SEQ ID NO: 1737254 - DNA, 25 bp, Homo sapien
gctcttccttcaggccttagatctg

SEQ ID NO: 1737255 - DNA, 25 bp, Homo sapien
ctcagcccactgatttccttctcat

SEQ ID NO: 1737256 - DNA, 25 bp, Homo sapien
gcccactgatttccttctcatggtt

SEQ ID NO: 1737257 - DNA, 25 bp, Homo sapien
cagcccactgatttccttctcatgg

SEQ ID NO: 1737258 - DNA, 25 bp, Homo sapien
ccactgatttccttctcatggttct

SEQ ID NO: 1737259 - DNA, 25 bp, Homo sapien
actgacctggcctcccacttggccc

SEQ ID NO: 1737260 - DNA, 25 bp, Homo sapien
ctgagccgaatccacctccccactg

SEQ ID NO: 1737261 - DNA, 25 bp, Homo sapien
tccacctccccactgacctggcctc

SEQ ID NO: 1737262 - DNA, 25 bp, Homo sapien
cactgacctggcctcccacttggcc

SEQ ID NO: 1737263 - DNA, 25 bp, Homo sapien
tctgctccgccatgacctcgtattg

SEQ ID NO: 1737264 - DNA, 25 bp, Homo sapien
atgacctcgtattggcttcgcatgt

SEQ ID NO: 1737265 - DNA, 25 bp, Homo sapien
cctcgtattggcttcgcatgtaact

SEQ ID NO: 1737266 - DNA, 25 bp, Homo sapien
tattggcttcgcatgtaactcagga

SEQ ID NO: 1737267 - DNA, 25 bp, Homo sapien
ggttcaattcttcagtccggctggt

SEQ ID NO: 1737268 - DNA, 25 bp, Homo sapien
ccggttcaattcttcagtccggctg

SEQ ID NO: 1737269 - DNA, 25 bp, Homo sapien
ctcccggttcaattcttcagtccgg

SEQ ID NO: 1737270 - DNA, 25 bp, Homo sapien
ttcaattcttcagtccggctggtga

SEQ ID NO: 1737271 - DNA, 25 bp, Homo sapien
ccgcaggtcagcgaccttggaccgg

SEQ ID NO: 1737272 - DNA, 25 bp, Homo sapien
ggtcagcgaccttggaccggctcat

SEQ ID NO: 1737273 - DNA, 25 bp, Homo sapien
agcgaccttggaccggctcatctgg

SEQ ID NO: 1737274 - DNA, 25 bp, Homo sapien
tgcgccgcaggtcagcgaccttgga

SEQ ID NO: 1737275 - DNA, 25 bp, Homo sapien
ggcggctttcatgctcagccgtgac

SEQ ID NO: 1737276 - DNA, 25 bp, Homo sapien
ggcttcaatacagttgatcagcggc

SEQ ID NO: 1737277 - DNA, 25 bp, Homo sapien
ttcaatacagttgatcagcggctgg

SEQ ID NO: 1737278 - DNA, 25 bp, Homo sapien
caatacagttgatcagcggctggat

SEQ ID NO: 1737279 - DNA, 25 bp, Homo sapien
tacagttgatcagcggctggatctg

SEQ ID NO: 1737280 - DNA, 25 bp, Homo sapien
ttaatcctgattctgccgctcacta

SEQ ID NO: 1737281 - DNA, 25 bp, Homo sapien
tctgccgctcactatcagctcgcac

SEQ ID NO: 1737282 - DNA, 25 bp, Homo sapien
attctgccgctcactatcagctcgc

SEQ ID NO: 1737283 - DNA, 25 bp, Homo sapien
aatcctgattctgccgctcactatc

SEQ ID NO: 1737284 - DNA, 25 bp, Homo sapien
gccgcgacttgatgtccatgaactg

SEQ ID NO: 1737285 - DNA, 25 bp, Homo sapien
ccagccgcgacttgatgtccatgaa

SEQ ID NO: 1737286 - DNA, 25 bp, Homo sapien
gttgtagtgatctttctggccctcg

SEQ ID NO: 1737287 - DNA, 25 bp, Homo sapien
gaggaccttggaggcggacaggttg

SEQ ID NO: 1737288 - DNA, 25 bp, Homo sapien
ttattggcagatcaggggaagagca

SEQ ID NO: 1737289 - DNA, 25 bp, Homo sapien
ataaaattttattggcagatcaggg

SEQ ID NO: 1737290 - DNA, 25 bp, Homo sapien
acaccctccaaaggacagtagaagc

SEQ ID NO: 1737291 - DNA, 25 bp, Homo sapien
aaggacagtagaagccccttagcct

SEQ ID NO: 1737292 - DNA, 25 bp, Homo sapien
tatgaatttctgattagttcgccat

SEQ ID NO: 1737293 - DNA, 25 bp, Homo sapien
ttttccacatttctacaacgagcat

SEQ ID NO: 1737294 - DNA, 25 bp, Homo sapien
catttctacaacgagcatgtattgt

SEQ ID NO: 1737295 - DNA, 25 bp, Homo sapien
tgattagttcgccatgttttccaca

SEQ ID NO: 1737296 - DNA, 25 bp, Homo sapien
tgaaggtcttcctgcgctgaggaga

SEQ ID NO: 1737297 - DNA, 25 bp, Homo sapien
gaaggtcttcctgcgctgaggagac

SEQ ID NO: 1737298 - DNA, 25 bp, Homo sapien
ggtcttcctgcgctgaggagacgga

SEQ ID NO: 1737299 - DNA, 25 bp, Homo sapien
cttcctgcgctgaggagacggagtt

SEQ ID NO: 1737300 - DNA, 25 bp, Homo sapien
agctgcatacaagctgcacagtgct

SEQ ID NO: 1737301 - DNA, 25 bp, Homo sapien
taaagagaacatcctgattgagatt

SEQ ID NO: 1737302 - DNA, 25 bp, Homo sapien
gttaaagagaacatcctgattgaga

SEQ ID NO: 1737303 - DNA, 25 bp, Homo sapien
gaacatcctgattgagattttctac

SEQ ID NO: 1737304 - DNA, 25 bp, Homo sapien
agagaacatcctgattgagattttc

SEQ ID NO: 1737305 - DNA, 25 bp, Homo sapien
tatgctgcgaggttcaccccgcaat

SEQ ID NO: 1737306 - DNA, 25 bp, Homo sapien
tccattcatcaattgcactgtgaaa

SEQ ID NO: 1737307 - DNA, 25 bp, Homo sapien
caagtggctactctctgatatgctg

SEQ ID NO: 1737308 - DNA, 25 bp, Homo sapien
caatctctgaccatgccactgctat

SEQ ID NO: 1737309 - DNA, 25 bp, Homo sapien
acattccatatgtgttcttctccaa

SEQ ID NO: 1737310 - DNA, 25 bp, Homo sapien
tgttgtagacagctttagcttatct

SEQ ID NO: 1737311 - DNA, 25 bp, Homo sapien
tagtttaaatgcacaccgcacagaa

SEQ ID NO: 1737312 - DNA, 25 bp, Homo sapien
cacactactatccaggattcctatc

SEQ ID NO: 1737313 - DNA, 25 bp, Homo sapien
agaagcgaatgtttgtctgggatcc

SEQ ID NO: 1737314 - DNA, 25 bp, Homo sapien
gaaattcagaggctcggggcagtag

SEQ ID NO: 1737315 - DNA, 25 bp, Homo sapien
cccaagtgcgcaggctgggaaagca

SEQ ID NO: 1737316 - DNA, 25 bp, Homo sapien
agcgaatgtttgtctgggatcccaa

SEQ ID NO: 1737317 - DNA, 25 bp, Homo sapien
caagtctctggatcttcaacagctt

SEQ ID NO: 1737318 - DNA, 25 bp, Homo sapien
gatacttgaaagatacctttccaag

SEQ ID NO: 1737319 - DNA, 25 bp, Homo sapien
aagatacttgaaagatacctttcca

SEQ ID NO: 1737320 - DNA, 25 bp, Homo sapien
tacttgaaagatacctttccaagtc

SEQ ID NO: 1737321 - DNA, 25 bp, Homo sapien
gtagagggtcctgcttccacgatgc

SEQ ID NO: 1737322 - DNA, 25 bp, Homo sapien
cgatgctggctgctgacttatcagg

SEQ ID NO: 1737323 - DNA, 25 bp, Homo sapien
agtaacaatcctccgagcctgcagt

SEQ ID NO: 1737324 - DNA, 25 bp, Homo sapien
tgctggtagagggtcctgcttccac

SEQ ID NO: 1737325 - DNA, 25 bp, Homo sapien
tcagtacagctgttttctgttttct

SEQ ID NO: 1737326 - DNA, 25 bp, Homo sapien
cagtacagctgttttctgttttctt

SEQ ID NO: 1737327 - DNA, 25 bp, Homo sapien
ggacccattggtgtatttcgtgaca

SEQ ID NO: 1737328 - DNA, 25 bp, Homo sapien
catctagcagagagtggacccattg

SEQ ID NO: 1737329 - DNA, 25 bp, Homo sapien
ggtcatatgtgtccaagccaggaac

SEQ ID NO: 1737330 - DNA, 25 bp, Homo sapien
gccaggaactacataaagcgttgct

SEQ ID NO: 1737331 - DNA, 25 bp, Homo sapien
ccctcttctaagcatgtctctagag

SEQ ID NO: 1737332 - DNA, 25 bp, Homo sapien
cacgtggaagaatcttccctcttct

SEQ ID NO: 1737333 - DNA, 25 bp, Homo sapien
taagcatgtctctagagatgccaca

SEQ ID NO: 1737334 - DNA, 25 bp, Homo sapien
atgtctctagagatgccacagtttc

SEQ ID NO: 1737335 - DNA, 25 bp, Homo sapien
gacatcgagttacctctttaatgag

SEQ ID NO: 1737336 - DNA, 25 bp, Homo sapien
tcatatctgaaaccgtgactgatag

SEQ ID NO: 1737337 - DNA, 25 bp, Homo sapien
gatgtgattaggtgcagtctcaaga

SEQ ID NO: 1737338 - DNA, 25 bp, Homo sapien
agtctcaagacatcgagttacctct

SEQ ID NO: 1737339 - DNA, 25 bp, Homo sapien
gccagcaccaatgtgcgttgtcaca

SEQ ID NO: 1737340 - DNA, 25 bp, Homo sapien
cagcaccaatgtgcgttgtcacaag

SEQ ID NO: 1737341 - DNA, 25 bp, Homo sapien
agcaccaatgtgcgttgtcacaagc

SEQ ID NO: 1737342 - DNA, 25 bp, Homo sapien
ccagcaccaatgtgcgttgtcacaa

SEQ ID NO: 1737343 - DNA, 25 bp, Homo sapien
tgcaatagagccgtaggtcccagtg

SEQ ID NO: 1737344 - DNA, 25 bp, Homo sapien
tcacagacattcttgcaatagagcc

SEQ ID NO: 1737345 - DNA, 25 bp, Homo sapien
taagcagtacttttggtcacagaca

SEQ ID NO: 1737346 - DNA, 25 bp, Homo sapien
taggtcccagtgcacaaccactgaa

SEQ ID NO: 1737347 - DNA, 25 bp, Homo sapien
ccagggtaatcggataagaaccaga

SEQ ID NO: 1737348 - DNA, 25 bp, Homo sapien
ttctcattcaggttgtataagcgcc

SEQ ID NO: 1737349 - DNA, 25 bp, Homo sapien
cgcttggaattggagccagggcacc

SEQ ID NO: 1737350 - DNA, 25 bp, Homo sapien
ccagggcaccgtgagtcattagaca

SEQ ID NO: 1737351 - DNA, 25 bp, Homo sapien
ggctccgccgatccgggcgtctccg

SEQ ID NO: 1737352 - DNA, 25 bp, Homo sapien
ctcgcgccaggctccgccgatccgg

SEQ ID NO: 1737353 - DNA, 25 bp, Homo sapien
tcgcgccaggctccgccgatccggg

SEQ ID NO: 1737354 - DNA, 25 bp, Homo sapien
ccaggctccgccgatccgggcgtct

SEQ ID NO: 1737355 - DNA, 25 bp, Homo sapien
tgcctttgttttggtcgccctagcg

SEQ ID NO: 1737356 - DNA, 25 bp, Homo sapien
tcatggttgtttgcatccacccagc

SEQ ID NO: 1737357 - DNA, 25 bp, Homo sapien
atggttgtttgcatccacccagccc

SEQ ID NO: 1737358 - DNA, 25 bp, Homo sapien
tttggtcgccctagcgaagctcggg

SEQ ID NO: 1737359 - DNA, 25 bp, Homo sapien
gagccggggagagcgagaacccagt

SEQ ID NO: 1737360 - DNA, 25 bp, Homo sapien
cctcacagcggagccctagcggcgg

SEQ ID NO: 1737361 - DNA, 25 bp, Homo sapien
tctggctctcacctttcggatgcac

SEQ ID NO: 1737362 - DNA, 25 bp, Homo sapien
ctttcggatgcacgcccagcagctg

SEQ ID NO: 1737363 - DNA, 25 bp, Homo sapien
ggcaccgtgggtgggcgaggaccgc

SEQ ID NO: 1737364 - DNA, 25 bp, Homo sapien
caccgtgggtgggcgaggaccgcgg

SEQ ID NO: 1737365 - DNA, 25 bp, Homo sapien
gcaccgtgggtgggcgaggaccgcg

SEQ ID NO: 1737366 - DNA, 25 bp, Homo sapien
tgttcctctcctcttcggtcaggtg

SEQ ID NO: 1737367 - DNA, 25 bp, Homo sapien
atgttcctctcctcttcggtcaggt

SEQ ID NO: 1737368 - DNA, 25 bp, Homo sapien
ttccttctgccggtccatcactgcc

SEQ ID NO: 1737369 - DNA, 25 bp, Homo sapien
tgccggtccatcactgccatgataa

SEQ ID NO: 1737370 - DNA, 25 bp, Homo sapien
tgaagacttcccaagaaaaggcagg

SEQ ID NO: 1737371 - DNA, 25 bp, Homo sapien
cccttgaagggttgatgcgctctaa

SEQ ID NO: 1737372 - DNA, 25 bp, Homo sapien
gaacctctatgttattcaggccaga

SEQ ID NO: 1737373 - DNA, 25 bp, Homo sapien
tgatgctaagcaaggaaagccccgt

SEQ ID NO: 1737374 - DNA, 25 bp, Homo sapien
gggaaccatcggtctgtgaatgcag

SEQ ID NO: 1737375 - DNA, 25 bp, Homo sapien
gtctgtgaatgcagcctccctccat

SEQ ID NO: 1737376 - DNA, 25 bp, Homo sapien
cctggttggggaaccatcggtctgt

SEQ ID NO: 1737377 - DNA, 25 bp, Homo sapien
gcagaagaaatcttcttcggcagca

SEQ ID NO: 1737378 - DNA, 25 bp, Homo sapien
aggcagcagattaacgagggttctg

SEQ ID NO: 1737379 - DNA, 25 bp, Homo sapien
ttaacgagggttctgcctccctcaa

SEQ ID NO: 1737380 - DNA, 25 bp, Homo sapien
ttccactagggacaggcagcagatt

SEQ ID NO: 1737381 - DNA, 25 bp, Homo sapien
cctcaagccggcaggcttaaagtat

SEQ ID NO: 1737382 - DNA, 25 bp, Homo sapien
gcaaacagcaaaaggaacagcagca

SEQ ID NO: 1737383 - DNA, 25 bp, Homo sapien
aggaacagcagcaaacctgtaaatc

SEQ ID NO: 1737384 - DNA, 25 bp, Homo sapien
ctgcagcaaacagcaaaaggaacag

SEQ ID NO: 1737385 - DNA, 25 bp, Homo sapien
aaggaacagcagcaaacctgtaaat

SEQ ID NO: 1737386 - DNA, 25 bp, Homo sapien
ctactggaggcctccatccacctgc

SEQ ID NO: 1737387 - DNA, 25 bp, Homo sapien
tactggaggcctccatccacctgct

SEQ ID NO: 1737388 - DNA, 25 bp, Homo sapien
ctggaggcctccatccacctgctgt

SEQ ID NO: 1737389 - DNA, 25 bp, Homo sapien
actggaggcctccatccacctgctg

SEQ ID NO: 1737390 - DNA, 25 bp, Homo sapien
tacataggaacgctatcctcatccc

SEQ ID NO: 1737391 - DNA, 25 bp, Homo sapien
cgctatcctcatccccctcaaggtt

SEQ ID NO: 1737392 - DNA, 25 bp, Homo sapien
ctgcatacataggaacgctatcctc

SEQ ID NO: 1737393 - DNA, 25 bp, Homo sapien
catacataggaacgctatcctcatc

SEQ ID NO: 1737394 - DNA, 25 bp, Homo sapien
catgtacgagctatttaatgagagg

SEQ ID NO: 1737395 - DNA, 25 bp, Homo sapien
ttgtcaaattctcacactgggagct

SEQ ID NO: 1737396 - DNA, 25 bp, Homo sapien
aatatagtctcagaccaagccctga

SEQ ID NO: 1737397 - DNA, 25 bp, Homo sapien
gatgaggaaattaccccaagctaat

SEQ ID NO: 1737398 - DNA, 25 bp, Homo sapien
ccattagtccagttagctacagcca

SEQ ID NO: 1737399 - DNA, 25 bp, Homo sapien
gatcatatggatgtagggctgcttc

SEQ ID NO: 1737400 - DNA, 25 bp, Homo sapien
gctacagccatgttgggatcatatg

SEQ ID NO: 1737401 - DNA, 25 bp, Homo sapien
gccactgccataaaatccacagaaa

SEQ ID NO: 1737402 - DNA, 25 bp, Homo sapien
tagtatttggccagtcgataaatta

SEQ ID NO: 1737403 - DNA, 25 bp, Homo sapien
ttagtatttggccagtcgataaatt

SEQ ID NO: 1737404 - DNA, 25 bp, Homo sapien
agtatttggccagtcgataaattac

SEQ ID NO: 1737405 - DNA, 25 bp, Homo sapien
aatgattctccatttggctaccaga

SEQ ID NO: 1737406 - DNA, 25 bp, Homo sapien
tcagcaggcaactgtcaaccttcat

SEQ ID NO: 1737407 - DNA, 25 bp, Homo sapien
tgctcttgacaagggtactagtgac

SEQ ID NO: 1737408 - DNA, 25 bp, Homo sapien
tactagtgacctccacagtgtctaa

SEQ ID NO: 1737409 - DNA, 25 bp, Homo sapien
gcatgctgaggtgtggaacttgccc

SEQ ID NO: 1737410 - DNA, 25 bp, Homo sapien
tggagatgacagtgacgcatgcccc

SEQ ID NO: 1737411 - DNA, 25 bp, Homo sapien
tttcaatcaaacaaagagcactgca

SEQ ID NO: 1737412 - DNA, 25 bp, Homo sapien
gaaaatccgcactacataagacagt

SEQ ID NO: 1737413 - DNA, 25 bp, Homo sapien
tcagcctgtctaccaaacgttttgt

SEQ ID NO: 1737414 - DNA, 25 bp, Homo sapien
actaacctgagggtaagtccctgca

SEQ ID NO: 1737415 - DNA, 25 bp, Homo sapien
taccaagctggttactgggtgggca

SEQ ID NO: 1737416 - DNA, 25 bp, Homo sapien
aatcagtcggtctttgcctcccaaa

SEQ ID NO: 1737417 - DNA, 25 bp, Homo sapien
gatacctcaggtagaagtggagtca

SEQ ID NO: 1737418 - DNA, 25 bp, Homo sapien
gtttcacaacagacatagccccaga

SEQ ID NO: 1737419 - DNA, 25 bp, Homo sapien
gatgaatgccgaggtgaaaacagac

SEQ ID NO: 1737420 - DNA, 25 bp, Homo sapien
tccgtttccagtgtaatgcagatgg

SEQ ID NO: 1737421 - DNA, 25 bp, Homo sapien
tgttagaatggaaatctgattggaa

SEQ ID NO: 1737422 - DNA, 25 bp, Homo sapien
tctgattggaagaaagtcctatgaa

SEQ ID NO: 1737423 - DNA, 25 bp, Homo sapien
tttcaaatggatagtaattggatgg

SEQ ID NO: 1737424 - DNA, 25 bp, Homo sapien
tggaacgactgtgttagaatggaaa

SEQ ID NO: 1737425 - DNA, 25 bp, Homo sapien
ccttttactcccacatcccggatct

SEQ ID NO: 1737426 - DNA, 25 bp, Homo sapien
cttttactcccacatcccggatctt

SEQ ID NO: 1737427 - DNA, 25 bp, Homo sapien
ttttgcaggcagcaggcttcgccat

SEQ ID NO: 1737428 - DNA, 25 bp, Homo sapien
gggctggttttcagcatttcttggt

SEQ ID NO: 1737429 - DNA, 25 bp, Homo sapien
tggttttcagcatttcttggtgttt

SEQ ID NO: 1737430 - DNA, 25 bp, Homo sapien
ttcttggtgttttgcaggcagcagg

SEQ ID NO: 1737431 - DNA, 25 bp, Homo sapien
tggtccccctaacatatgtgcctga

SEQ ID NO: 1737432 - DNA, 25 bp, Homo sapien
gaagagtagccaagtctttctcgga

SEQ ID NO: 1737433 - DNA, 25 bp, Homo sapien
ctttctcggactttttaaatccatg

SEQ ID NO: 1737434 - DNA, 25 bp, Homo sapien
catatgtgcctgagactgaagagta

SEQ ID NO: 1737435 - DNA, 25 bp, Homo sapien
acagctctgcgggttccacaggcat

SEQ ID NO: 1737436 - DNA, 25 bp, Homo sapien
tgtggcagcgtctgcacactcctac

SEQ ID NO: 1737437 - DNA, 25 bp, Homo sapien
ccctgactgggatgatgtgcttata

SEQ ID NO: 1737438 - DNA, 25 bp, Homo sapien
tttgctcagtgaaatccaactttgt

SEQ ID NO: 1737439 - DNA, 25 bp, Homo sapien
acacatgttgtctctgcctatgtct

SEQ ID NO: 1737440 - DNA, 25 bp, Homo sapien
aacacatgttgtctctgcctatgtc

SEQ ID NO: 1737441 - DNA, 25 bp, Homo sapien
gaacacatgttgtctctgcctatgt

SEQ ID NO: 1737442 - DNA, 25 bp, Homo sapien
ccacaaaccatcaaataccattgaa

SEQ ID NO: 1737443 - DNA, 25 bp, Homo sapien
gccacaaaccatcaaataccattga

SEQ ID NO: 1737444 - DNA, 25 bp, Homo sapien
atttcatgggaagaatagtccaaca

SEQ ID NO: 1737445 - DNA, 25 bp, Homo sapien
ttcatgggaagaatagtccaacatt

SEQ ID NO: 1737446 - DNA, 25 bp, Homo sapien
tgcgtagcagccaataaaccagaag

SEQ ID NO: 1737447 - DNA, 25 bp, Homo sapien
taaaccagaagaatgccagtttggt

SEQ ID NO: 1737448 - DNA, 25 bp, Homo sapien
gttccgggttcatctatttccgatg

SEQ ID NO: 1737449 - DNA, 25 bp, Homo sapien
tttccgatgtaagattgagtttgcg

SEQ ID NO: 1737450 - DNA, 25 bp, Homo sapien
ttgtttccccacaacagggcaaggc

SEQ ID NO: 1737451 - DNA, 25 bp, Homo sapien
gaatcagtgtaagcttggtctgctc

SEQ ID NO: 1737452 - DNA, 25 bp, Homo sapien
gagttcccaaatacgggctctgaac

SEQ ID NO: 1737453 - DNA, 25 bp, Homo sapien
gaagttcattccaacccagtcagtg

SEQ ID NO: 1737454 - DNA, 25 bp, Homo sapien
ctctcctctacatgaacctctagga

SEQ ID NO: 1737455 - DNA, 25 bp, Homo sapien
cctctcctctacatgaacctctagg

SEQ ID NO: 1737456 - DNA, 25 bp, Homo sapien
tctcctctacatgaacctctaggag

SEQ ID NO: 1737457 - DNA, 25 bp, Homo sapien
accctctcctctacatgaacctcta

SEQ ID NO: 1737458 - DNA, 25 bp, Homo sapien
ctgcattaatgcaggtgctcaggaa

SEQ ID NO: 1737459 - DNA, 25 bp, Homo sapien
ggtgctcaggaaacaaagcattgac

SEQ ID NO: 1737460 - DNA, 25 bp, Homo sapien
tcaggaaacaaagcattgacttcat

SEQ ID NO: 1737461 - DNA, 25 bp, Homo sapien
gctcaggaaacaaagcattgacttc

SEQ ID NO: 1737462 - DNA, 25 bp, Homo sapien
gcagccactaccagttttgtaagga

SEQ ID NO: 1737463 - DNA, 25 bp, Homo sapien
tcaacttccgatataggcactagtc

SEQ ID NO: 1737464 - DNA, 25 bp, Homo sapien
catagtaagctctgggcatggctgc

SEQ ID NO: 1737465 - DNA, 25 bp, Homo sapien
gctgctgcagccactaccagttttg

SEQ ID NO: 1737466 - DNA, 25 bp, Homo sapien
tcttgaccccaagaagtgagtgcac

SEQ ID NO: 1737467 - DNA, 25 bp, Homo sapien
gaacacccacttatccctagtgagg

SEQ ID NO: 1737468 - DNA, 25 bp, Homo sapien
taatgaagatatgccgctcctactc

SEQ ID NO: 1737469 - DNA, 25 bp, Homo sapien
ctggttaccagggtctctatgtggc

SEQ ID NO: 1737470 - DNA, 25 bp, Homo sapien
accttcaaaggtaggatatgtatta

SEQ ID NO: 1737471 - DNA, 25 bp, Homo sapien
cttcaaaggtaggatatgtattagc

SEQ ID NO: 1737472 - DNA, 25 bp, Homo sapien
ttaccttcaaaggtaggatatgtat

SEQ ID NO: 1737473 - DNA, 25 bp, Homo sapien
ttcaaaggtaggatatgtattagca

SEQ ID NO: 1737474 - DNA, 25 bp, Homo sapien
ttatgacagattccacaagtcggag

SEQ ID NO: 1737475 - DNA, 25 bp, Homo sapien
gaacttagtgcgacaataggagcag

SEQ ID NO: 1737476 - DNA, 25 bp, Homo sapien
tgtttgaccgtagagacacgcggcc

SEQ ID NO: 1737477 - DNA, 25 bp, Homo sapien
tccgcagcgcgcacagaacttagtg

SEQ ID NO: 1737478 - DNA, 25 bp, Homo sapien
tccttaccacatgggttgttaagta

SEQ ID NO: 1737479 - DNA, 25 bp, Homo sapien
atctgcgcctcattgttcactgcca

SEQ ID NO: 1737480 - DNA, 25 bp, Homo sapien
gactgaacaatgtccttaccacatg

SEQ ID NO: 1737481 - DNA, 25 bp, Homo sapien
gccaacatcttttcagactgaacaa

SEQ ID NO: 1737482 - DNA, 25 bp, Homo sapien
taacaatactaggtgcaacattcac

SEQ ID NO: 1737483 - DNA, 25 bp, Homo sapien
aggctgactgaacattctacttgga

SEQ ID NO: 1737484 - DNA, 25 bp, Homo sapien
gcaaaatgtggttcagtatgacaac

SEQ ID NO: 1737485 - DNA, 25 bp, Homo sapien
caaatcacctgcctttgcatgctga

SEQ ID NO: 1737486 - DNA, 25 bp, Homo sapien
tgcgaggaagtttacaccaaatgaa

SEQ ID NO: 1737487 - DNA, 25 bp, Homo sapien
tttttgaacaaaggcagctcagttg

SEQ ID NO: 1737488 - DNA, 25 bp, Homo sapien
tgtcacacttgctaattatgcactg

SEQ ID NO: 1737489 - DNA, 25 bp, Homo sapien
tattggtagattaatgagctgcgag

SEQ ID NO: 1737490 - DNA, 25 bp, Homo sapien
ggtgatgatgtagtcaaagagtaac

SEQ ID NO: 1737491 - DNA, 25 bp, Homo sapien
tcctcaatctccatgaaaagacaga

SEQ ID NO: 1737492 - DNA, 25 bp, Homo sapien
tgtagttaacccacagtgagggcag

SEQ ID NO: 1737493 - DNA, 25 bp, Homo sapien
tgaaatagtaagttaggtgatagta

SEQ ID NO: 1737494 - DNA, 25 bp, Homo sapien
actgcattttctcactcataggtag

SEQ ID NO: 1737495 - DNA, 25 bp, Homo sapien
tgcattttctcactcataggtagga

SEQ ID NO: 1737496 - DNA, 25 bp, Homo sapien
actgaacaatgagaacacatggaca

SEQ ID NO: 1737497 - DNA, 25 bp, Homo sapien
accagacactgcattttctcactca

SEQ ID NO: 1737498 - DNA, 25 bp, Homo sapien
acatggatgaaatgggaaatcttca

SEQ ID NO: 1737499 - DNA, 25 bp, Homo sapien
gatgaaatgggaaatcttcattctc

SEQ ID NO: 1737500 - DNA, 25 bp, Homo sapien
tggatgaaatgggaaatcttcattc

SEQ ID NO: 1737501 - DNA, 25 bp, Homo sapien
tgaaatgggaaatcttcattctcag

SEQ ID NO: 1737502 - DNA, 25 bp, Homo sapien
tcataatcggttcctatcttgatat

SEQ ID NO: 1737503 - DNA, 25 bp, Homo sapien
aatcggttcctatcttgatattata

SEQ ID NO: 1737504 - DNA, 25 bp, Homo sapien
tttcataatcggttcctatcttgat

SEQ ID NO: 1737505 - DNA, 25 bp, Homo sapien
cataatcggttcctatcttgatatt

SEQ ID NO: 1737506 - DNA, 25 bp, Homo sapien
ggttgctttagaagttcctgattca

SEQ ID NO: 1737507 - DNA, 25 bp, Homo sapien
tggttgctttagaagttcctgattc

SEQ ID NO: 1737508 - DNA, 25 bp, Homo sapien
gttgctttagaagttcctgattcag

SEQ ID NO: 1737509 - DNA, 25 bp, Homo sapien
tgctttagaagttcctgattcagtt

SEQ ID NO: 1737510 - DNA, 25 bp, Homo sapien
cgatcgctcttggagtcgtgctttc

SEQ ID NO: 1737511 - DNA, 25 bp, Homo sapien
gctttcgacataaattgcataccca

SEQ ID NO: 1737512 - DNA, 25 bp, Homo sapien
ttccaaagaaccatgccccagattt

SEQ ID NO: 1737513 - DNA, 25 bp, Homo sapien
tctcttggtacctcagagccagcac

SEQ ID NO: 1737514 - DNA, 25 bp, Homo sapien
aaggcttgctgcgagggctcagccc

SEQ ID NO: 1737515 - DNA, 25 bp, Homo sapien
ccccaaggcttgctgcgagggctca

SEQ ID NO: 1737516 - DNA, 25 bp, Homo sapien
ggaggttcacttctagacctggatg

SEQ ID NO: 1737517 - DNA, 25 bp, Homo sapien
ggttcacttctagacctggatgaag

SEQ ID NO: 1737518 - DNA, 25 bp, Homo sapien
gcggtacctggtctgataatcctcc

SEQ ID NO: 1737519 - DNA, 25 bp, Homo sapien
tgaggtctttggcacgcgtttccgc

SEQ ID NO: 1737520 - DNA, 25 bp, Homo sapien
taccgagctaggttcgggtcgctgc

SEQ ID NO: 1737521 - DNA, 25 bp, Homo sapien
tgccattctgctcggaaagccctgg

SEQ ID NO: 1737522 - DNA, 25 bp, Homo sapien
ttcgttagctgcttggcgcccggcg

SEQ ID NO: 1737523 - DNA, 25 bp, Homo sapien
gcgccggcgggctgtggttcgttag

SEQ ID NO: 1737524 - DNA, 25 bp, Homo sapien
tccgcagttctctcagccgagtaag

SEQ ID NO: 1737525 - DNA, 25 bp, Homo sapien
cttctgcgggaaccggcccatgtct

SEQ ID NO: 1737526 - DNA, 25 bp, Homo sapien
tggtctccaccttctcgcgcttggc

SEQ ID NO: 1737527 - DNA, 25 bp, Homo sapien
atggtctccaccttctcgcgcttgg

SEQ ID NO: 1737528 - DNA, 25 bp, Homo sapien
gcaccgactcggactggtctgagct

SEQ ID NO: 1737529 - DNA, 25 bp, Homo sapien
tctgagctcaaagagtcgttccgca

SEQ ID NO: 1737530 - DNA, 25 bp, Homo sapien
gcctctcttggaccggtgcggcttg

SEQ ID NO: 1737531 - DNA, 25 bp, Homo sapien
tcctcgcagctggtgtactcgggcg

SEQ ID NO: 1737532 - DNA, 25 bp, Homo sapien
tcttcacttggctgaagtccccgca

SEQ ID NO: 1737533 - DNA, 25 bp, Homo sapien
tcacttggctgaagtccccgcacgg

SEQ ID NO: 1737534 - DNA, 25 bp, Homo sapien
ccacgcctcttcacttggctgaagt

SEQ ID NO: 1737535 - DNA, 25 bp, Homo sapien
tctgcccacgcctcttcacttggct

SEQ ID NO: 1737536 - DNA, 25 bp, Homo sapien
cgagcaccaggctttttggctagtt

SEQ ID NO: 1737537 - DNA, 25 bp, Homo sapien
tcgagcaccaggctttttggctagt

SEQ ID NO: 1737538 - DNA, 25 bp, Homo sapien
tcattctcgagcaccaggctttttg

SEQ ID NO: 1737539 - DNA, 25 bp, Homo sapien
ttctcgagcaccaggctttttggct

SEQ ID NO: 1737540 - DNA, 25 bp, Homo sapien
tcaaaggcaagaaattcggcagatc

SEQ ID NO: 1737541 - DNA, 25 bp, Homo sapien
gaaccctcttccaggtctgagattt

SEQ ID NO: 1737542 - DNA, 25 bp, Homo sapien
ccttctctgatcaacagtgtgtgaa

SEQ ID NO: 1737543 - DNA, 25 bp, Homo sapien
gcagatctcaatacccatgtttcct

SEQ ID NO: 1737544 - DNA, 25 bp, Homo sapien
agacatgaatcccaggtgcacacat

SEQ ID NO: 1737545 - DNA, 25 bp, Homo sapien
gaagagacatgaatcccaggtgcac

SEQ ID NO: 1737546 - DNA, 25 bp, Homo sapien
agagacatgaatcccaggtgcacac

SEQ ID NO: 1737547 - DNA, 25 bp, Homo sapien
aagagacatgaatcccaggtgcaca

SEQ ID NO: 1737548 - DNA, 25 bp, Homo sapien
tgctcgtcgagcttcaattgttccc

SEQ ID NO: 1737549 - DNA, 25 bp, Homo sapien
ttccctcttcggaatcaacagacct

SEQ ID NO: 1737550 - DNA, 25 bp, Homo sapien
cagcaactgctcgtcgagcttcaat

SEQ ID NO: 1737551 - DNA, 25 bp, Homo sapien
ttcggaatcaacagacctcacttct

SEQ ID NO: 1737552 - DNA, 25 bp, Homo sapien
tcaggcttttctggtacggccagcc

SEQ ID NO: 1737553 - DNA, 25 bp, Homo sapien
caccagaaagcataaaccaagagta

SEQ ID NO: 1737554 - DNA, 25 bp, Homo sapien
tcagctcaatgacaactggcaccag

SEQ ID NO: 1737555 - DNA, 25 bp, Homo sapien
agtgctaacggtggctcatctccag

SEQ ID NO: 1737556 - DNA, 25 bp, Homo sapien
cacaggcatttccacgaatgtgttc

SEQ ID NO: 1737557 - DNA, 25 bp, Homo sapien
tttagtccacagcttaacatcaccg

SEQ ID NO: 1737558 - DNA, 25 bp, Homo sapien
tgttcccctcatctgaacagtttcc

SEQ ID NO: 1737559 - DNA, 25 bp, Homo sapien
aatctctgatgcaaaagattacact

SEQ ID NO: 1737560 - DNA, 25 bp, Homo sapien
atatcataagcttgagcgtgtacat

SEQ ID NO: 1737561 - DNA, 25 bp, Homo sapien
ttcttcgatctataaagagttttaa

SEQ ID NO: 1737562 - DNA, 25 bp, Homo sapien
ttaatatcataagcttgagcgtgta

SEQ ID NO: 1737563 - DNA, 25 bp, Homo sapien
taatatcataagcttgagcgtgtac

SEQ ID NO: 1737564 - DNA, 25 bp, Homo sapien
gctgtgccacgtggcaggatccaac

SEQ ID NO: 1737565 - DNA, 25 bp, Homo sapien
cgaactaataggtgatgtctcccgg

SEQ ID NO: 1737566 - DNA, 25 bp, Homo sapien
ataggtgatgtctcccggctgtgcc

SEQ ID NO: 1737567 - DNA, 25 bp, Homo sapien
tggcaggatccaaccagtaataatc

SEQ ID NO: 1737568 - DNA, 25 bp, Homo sapien
gttctcttgttaagaataacacgtc

SEQ ID NO: 1737569 - DNA, 25 bp, Homo sapien
atcggtccccctctttagatggttg

SEQ ID NO: 1737570 - DNA, 25 bp, Homo sapien
gaataacacgtccaattaatcggtc

SEQ ID NO: 1737571 - DNA, 25 bp, Homo sapien
agtctttgggcatggttgttctctt

SEQ ID NO: 1737572 - DNA, 25 bp, Homo sapien
caagtcgtcctaagtcagtcatttt

SEQ ID NO: 1737573 - DNA, 25 bp, Homo sapien
tctttactttggtgatgaaagcacc

SEQ ID NO: 1737574 - DNA, 25 bp, Homo sapien
tgctaggctacccttctttactttg

SEQ ID NO: 1737575 - DNA, 25 bp, Homo sapien
ggtgtccaactacatctgctaggct

SEQ ID NO: 1737576 - DNA, 25 bp, Homo sapien
aattcatgttcatgcatggagaaca

SEQ ID NO: 1737577 - DNA, 25 bp, Homo sapien
gttcatgcatggagaacacactgtt

SEQ ID NO: 1737578 - DNA, 25 bp, Homo sapien
gcatggagaacacactgtttaaata

SEQ ID NO: 1737579 - DNA, 25 bp, Homo sapien
catgcatggagaacacactgtttaa

SEQ ID NO: 1737580 - DNA, 25 bp, Homo sapien
tttcaacttgaggttctgattttga

SEQ ID NO: 1737581 - DNA, 25 bp, Homo sapien
caggggtttaccattccattctaga

SEQ ID NO: 1737582 - DNA, 25 bp, Homo sapien
tgaggttctgattttgattctaaaa

SEQ ID NO: 1737583 - DNA, 25 bp, Homo sapien
cggcaggggtttaccattccattct

SEQ ID NO: 1737584 - DNA, 25 bp, Homo sapien
gctctcaggaatccggggaatgtca

SEQ ID NO: 1737585 - DNA, 25 bp, Homo sapien
agctctcaggaatccggggaatgtc

SEQ ID NO: 1737586 - DNA, 25 bp, Homo sapien
tcttctgagattcaaaggaacttga

SEQ ID NO: 1737587 - DNA, 25 bp, Homo sapien
gcatcttttagagctccaggacttg

SEQ ID NO: 1737588 - DNA, 25 bp, Homo sapien
ccaggacttgttggagaaataacag

SEQ ID NO: 1737589 - DNA, 25 bp, Homo sapien
gaaagttgccctggtaagacttgtg

SEQ ID NO: 1737590 - DNA, 25 bp, Homo sapien
tttacatagggatttcgaggacgtc

SEQ ID NO: 1737591 - DNA, 25 bp, Homo sapien
cagaacatttacaatcagctggtgt

SEQ ID NO: 1737592 - DNA, 25 bp, Homo sapien
tctagcaggtagatctgttgcttgc

SEQ ID NO: 1737593 - DNA, 25 bp, Homo sapien
ggacgtccatctactctagcaggta

SEQ ID NO: 1737594 - DNA, 25 bp, Homo sapien
cgatgtacatgtgaatagacaaaag

SEQ ID NO: 1737595 - DNA, 25 bp, Homo sapien
tacatgtgaatagacaaaagtttga

SEQ ID NO: 1737596 - DNA, 25 bp, Homo sapien
ctacgatgtacatgtgaatagacaa

SEQ ID NO: 1737597 - DNA, 25 bp, Homo sapien
tgattccattttggttctagtattt

SEQ ID NO: 1737598 - DNA, 25 bp, Homo sapien
ttcttgcactcttggttggtcccac

SEQ ID NO: 1737599 - DNA, 25 bp, Homo sapien
cacagttatttctaacattcgttct

SEQ ID NO: 1737600 - DNA, 25 bp, Homo sapien
ttggtcccacacagttatttctaac

SEQ ID NO: 1737601 - DNA, 25 bp, Homo sapien
cttcttcttgcactcttggttggtc

SEQ ID NO: 1737602 - DNA, 25 bp, Homo sapien
gagctttctccatgaatatgtcgcc

SEQ ID NO: 1737603 - DNA, 25 bp, Homo sapien
taaaagcgctgtctccaattctatg

SEQ ID NO: 1737604 - DNA, 25 bp, Homo sapien
gaggcagaggtagtgaagactcatc

SEQ ID NO: 1737605 - DNA, 25 bp, Homo sapien
tgtctgaagtttataccaatgcggt

SEQ ID NO: 1737606 - DNA, 25 bp, Homo sapien
gcacaacagtaaggcaaagagatac

SEQ ID NO: 1737607 - DNA, 25 bp, Homo sapien
tgcacaacagtaaggcaaagagata

SEQ ID NO: 1737608 - DNA, 25 bp, Homo sapien
ctgcacaacagtaaggcaaagagat

SEQ ID NO: 1737609 - DNA, 25 bp, Homo sapien
acaacagtaaggcaaagagatactt

SEQ ID NO: 1737610 - DNA, 25 bp, Homo sapien
tgtcactatcactgattcgctgaga

SEQ ID NO: 1737611 - DNA, 25 bp, Homo sapien
tcactatcactgattcgctgagatc

SEQ ID NO: 1737612 - DNA, 25 bp, Homo sapien
ctggaggaactacgccaataccatc

SEQ ID NO: 1737613 - DNA, 25 bp, Homo sapien
gatgtcactatcactgattcgctga

SEQ ID NO: 1737614 - DNA, 25 bp, Homo sapien
agatactgaacgtgagcggtgatga

SEQ ID NO: 1737615 - DNA, 25 bp, Homo sapien
cattgccgcgatgaggagatactga

SEQ ID NO: 1737616 - DNA, 25 bp, Homo sapien
gttctttgctgttctggcacagtta

SEQ ID NO: 1737617 - DNA, 25 bp, Homo sapien
cacatttggtaaacgtgaacgcggc

SEQ ID NO: 1737618 - DNA, 25 bp, Homo sapien
catcatggtgtctggttggagaacg

SEQ ID NO: 1737619 - DNA, 25 bp, Homo sapien
ggttctatgatcaactggacttcgg

SEQ ID NO: 1737620 - DNA, 25 bp, Homo sapien
gaacgtgaccttcttgttggatgaa

SEQ ID NO: 1737621 - DNA, 25 bp, Homo sapien
tgactatccacatctctggttctat

SEQ ID NO: 1737622 - DNA, 25 bp, Homo sapien
cacttcgtcctcgttttgctctggg

SEQ ID NO: 1737623 - DNA, 25 bp, Homo sapien
cgtcctcgttttgctctgggcagca

SEQ ID NO: 1737624 - DNA, 25 bp, Homo sapien
ctggtagtatgtaggcattctgcac

SEQ ID NO: 1737625 - DNA, 25 bp, Homo sapien
taggcattctgcacttcgtcctcgt

SEQ ID NO: 1737626 - DNA, 25 bp, Homo sapien
ggagagacggaagaataatagaatg

SEQ ID NO: 1737627 - DNA, 25 bp, Homo sapien
gggagagacggaagaataatagaat

SEQ ID NO: 1737628 - DNA, 25 bp, Homo sapien
gaggcccactagtctctggattttt

SEQ ID NO: 1737629 - DNA, 25 bp, Homo sapien
tttgaatctacagatggcaaagcag

SEQ ID NO: 1737630 - DNA, 25 bp, Homo sapien
ttttaggaacgcaaacagtcccaga

SEQ ID NO: 1737631 - DNA, 25 bp, Homo sapien
gcctgaatcggaactgaaatatatt

SEQ ID NO: 1737632 - DNA, 25 bp, Homo sapien
taattcgattaagtctccaagcctg

SEQ ID NO: 1737633 - DNA, 25 bp, Homo sapien
gtttcgcactgacacatttggctag

SEQ ID NO: 1737634 - DNA, 25 bp, Homo sapien
tattgtcgtagtacctgtccacagg

SEQ ID NO: 1737635 - DNA, 25 bp, Homo sapien
tctgacaactggtgggctaggatag

SEQ ID NO: 1737636 - DNA, 25 bp, Homo sapien
taagataggcattagatgcaaacca

SEQ ID NO: 1737637 - DNA, 25 bp, Homo sapien
tacttatcagcttctgtctggatcc

SEQ ID NO: 1737638 - DNA, 25 bp, Homo sapien
gaattggcagaaaattggcccaacg

SEQ ID NO: 1737639 - DNA, 25 bp, Homo sapien
tgattcctttaaaatctgtgagggt

SEQ ID NO: 1737640 - DNA, 25 bp, Homo sapien
atgttttatagtgcctaacaagatg

SEQ ID NO: 1737641 - DNA, 25 bp, Homo sapien
aggtaatgttttatagtgcctaaca

SEQ ID NO: 1737642 - DNA, 25 bp, Homo sapien
taatgttttatagtgcctaacaaga

SEQ ID NO: 1737643 - DNA, 25 bp, Homo sapien
tgtaataaaggcatcttgggaggta

SEQ ID NO: 1737644 - DNA, 25 bp, Homo sapien
tgtaaatattccagtgagaactgct

SEQ ID NO: 1737645 - DNA, 25 bp, Homo sapien
ctgtaaatattccagtgagaactgc

SEQ ID NO: 1737646 - DNA, 25 bp, Homo sapien
aatctcaatactgttgagttaaagc

SEQ ID NO: 1737647 - DNA, 25 bp, Homo sapien
tggtcttagtatgtgcaggcagaat

SEQ ID NO: 1737648 - DNA, 25 bp, Homo sapien
tactgttgagttaaagcattcatga

SEQ ID NO: 1737649 - DNA, 25 bp, Homo sapien
aatgtcctgtctagtcactgatttg

SEQ ID NO: 1737650 - DNA, 25 bp, Homo sapien
gaatgcaaactagtatctggtctca

SEQ ID NO: 1737651 - DNA, 25 bp, Homo sapien
ggtactagcactcctagccctgtca

SEQ ID NO: 1737652 - DNA, 25 bp, Homo sapien
gccctgtcaagaaagggctgcagtt

SEQ ID NO: 1737653 - DNA, 25 bp, Homo sapien
tctcaagcagttggtactagcactc

SEQ ID NO: 1737654 - DNA, 25 bp, Homo sapien
agaggaaagtgatcctccccttcgg

SEQ ID NO: 1737655 - DNA, 25 bp, Homo sapien
tttatcagtggtactaagaggaaag

SEQ ID NO: 1737656 - DNA, 25 bp, Homo sapien
ccttcggataattcactggacctta

SEQ ID NO: 1737657 - DNA, 25 bp, Homo sapien
aggtttcctgaatagtcaataaaat

SEQ ID NO: 1737658 - DNA, 25 bp, Homo sapien
aagaaaaggaagtatgtgcgtgtgt

SEQ ID NO: 1737659 - DNA, 25 bp, Homo sapien
gacacaaacatactacagtactaaa

SEQ ID NO: 1737660 - DNA, 25 bp, Homo sapien
tgaacagtgagcagaatttttaatc

SEQ ID NO: 1737661 - DNA, 25 bp, Homo sapien
cacaatatagtggaagacacaaaca

SEQ ID NO: 1737662 - DNA, 25 bp, Homo sapien
aaacaagatctatgatacatatttc

SEQ ID NO: 1737663 - DNA, 25 bp, Homo sapien
catgtttccattttgagggaaattc

SEQ ID NO: 1737664 - DNA, 25 bp, Homo sapien
ctcatgtttccattttgagggaaat

SEQ ID NO: 1737665 - DNA, 25 bp, Homo sapien
ttgaaacaagatctatgatacatat

SEQ ID NO: 1737666 - DNA, 25 bp, Homo sapien
gtcaattaaatggatgctttttagc

SEQ ID NO: 1737667 - DNA, 25 bp, Homo sapien
acaatacttttcttgcgattaacag

SEQ ID NO: 1737668 - DNA, 25 bp, Homo sapien
taaacgatactgataaataaaagca

SEQ ID NO: 1737669 - DNA, 25 bp, Homo sapien
ccacagggctaattactgaacttta

SEQ ID NO: 1737670 - DNA, 25 bp, Homo sapien
aggaggtcgtctcctatctagggag

SEQ ID NO: 1737671 - DNA, 25 bp, Homo sapien
tcctatctagggagggggaccatct

SEQ ID NO: 1737672 - DNA, 25 bp, Homo sapien
gactaggaggtcgtctcctatctag

SEQ ID NO: 1737673 - DNA, 25 bp, Homo sapien
cctgggactaggaggtcgtctccta

SEQ ID NO: 1737674 - DNA, 25 bp, Homo sapien
gtttttggatgctagatctttcaga

SEQ ID NO: 1737675 - DNA, 25 bp, Homo sapien
tgtttttggatgctagatctttcag

SEQ ID NO: 1737676 - DNA, 25 bp, Homo sapien
tttttggatgctagatctttcagac

SEQ ID NO: 1737677 - DNA, 25 bp, Homo sapien
gaacacagtgttctgatactagagt

SEQ ID NO: 1737678 - DNA, 25 bp, Homo sapien
gggacaaggtggtgcatagaacaca

SEQ ID NO: 1737679 - DNA, 25 bp, Homo sapien
agcaggatgttttcccctaatgact

SEQ ID NO: 1737680 - DNA, 25 bp, Homo sapien
gctcactcgaccttgagcgagcagg

SEQ ID NO: 1737681 - DNA, 25 bp, Homo sapien
gctgagggggacactgaatagcgac

SEQ ID NO: 1737682 - DNA, 25 bp, Homo sapien
ggaggcaggacatgaatgctgaggg

SEQ ID NO: 1737683 - DNA, 25 bp, Homo sapien
ccggaggcaggacatgaatgctgag

SEQ ID NO: 1737684 - DNA, 25 bp, Homo sapien
aggacatgaatgctgagggggacac

SEQ ID NO: 1737685 - DNA, 25 bp, Homo sapien
tgcaggcaaaaagcaaagcgggcat

SEQ ID NO: 1737686 - DNA, 25 bp, Homo sapien
actgctgaacgatgtgtctgctgga

SEQ ID NO: 1737687 - DNA, 25 bp, Homo sapien
tgtgttggacttctctgtcggtgca

SEQ ID NO: 1737688 - DNA, 25 bp, Homo sapien
cttgttctatactgccgcttctcac

SEQ ID NO: 1737689 - DNA, 25 bp, Homo sapien
gtcttcccctgcgactgctgaacga

SEQ ID NO: 1737690 - DNA, 25 bp, Homo sapien
tagtgagagactttgatgtagtgca

SEQ ID NO: 1737691 - DNA, 25 bp, Homo sapien
gatgttaaggattatgctacagtaa

SEQ ID NO: 1737692 - DNA, 25 bp, Homo sapien
caataaaagaacatctatccagcat

SEQ ID NO: 1737693 - DNA, 25 bp, Homo sapien
ttttgactacatagaaatgccctag

SEQ ID NO: 1737694 - DNA, 25 bp, Homo sapien
tgttcgctcctccactactaagctt

SEQ ID NO: 1737695 - DNA, 25 bp, Homo sapien
gttcgctcctccactactaagcttg

SEQ ID NO: 1737696 - DNA, 25 bp, Homo sapien
tctgtcttgttcgctcctccactac

SEQ ID NO: 1737697 - DNA, 25 bp, Homo sapien
cttgttcgctcctccactactaagc

SEQ ID NO: 1737698 - DNA, 25 bp, Homo sapien
cgcgatcaagttcttgactagaacc

SEQ ID NO: 1737699 - DNA, 25 bp, Homo sapien
gaaccagaccctgttgtctgcttaa

SEQ ID NO: 1737700 - DNA, 25 bp, Homo sapien
cttggaatattgctcgcgatcaagt

SEQ ID NO: 1737701 - DNA, 25 bp, Homo sapien
tgtctgcttaaatcgatgcactttc

SEQ ID NO: 1737702 - DNA, 25 bp, Homo sapien
gcttcgtccaaaatgtcaaatggat

SEQ ID NO: 1737703 - DNA, 25 bp, Homo sapien
tcaactaatgttcattgcttcgtcc

SEQ ID NO: 1737704 - DNA, 25 bp, Homo sapien
tgttcattgcttcgtccaaaatgtc

SEQ ID NO: 1737705 - DNA, 25 bp, Homo sapien
ttgcttcgtccaaaatgtcaaatgg

SEQ ID NO: 1737706 - DNA, 25 bp, Homo sapien
ttggcagagacgttatcacagcttc

SEQ ID NO: 1737707 - DNA, 25 bp, Homo sapien
cgggaaatggcggaaacatcactga

SEQ ID NO: 1737708 - DNA, 25 bp, Homo sapien
tgaggcactgctggttcgggaaatg

SEQ ID NO: 1737709 - DNA, 25 bp, Homo sapien
gggcgctcagattgctctgacataa

SEQ ID NO: 1737710 - DNA, 25 bp, Homo sapien
cagaatggcagacctgagatggtcc

SEQ ID NO: 1737711 - DNA, 25 bp, Homo sapien
ggcagacctgagatggtcctcttct

SEQ ID NO: 1737712 - DNA, 25 bp, Homo sapien
cacattgattcctatatacagtccc

SEQ ID NO: 1737713 - DNA, 25 bp, Homo sapien
tgagatggtcctcttctgagtccat

SEQ ID NO: 1737714 - DNA, 25 bp, Homo sapien
ttgtgcttggctctttggccttcca

SEQ ID NO: 1737715 - DNA, 25 bp, Homo sapien
tcatacccctctaactatgggaact

SEQ ID NO: 1737716 - DNA, 25 bp, Homo sapien
tttgtgcttggctctttggccttcc

SEQ ID NO: 1737717 - DNA, 25 bp, Homo sapien
ccctctaactatgggaacttgaagt

SEQ ID NO: 1737718 - DNA, 25 bp, Homo sapien
taattcagtattcaagtgttgcttc

SEQ ID NO: 1737719 - DNA, 25 bp, Homo sapien
tatcagtcctggaaaattgtcggtc

SEQ ID NO: 1737720 - DNA, 25 bp, Homo sapien
tgtcttttatcagtcctggaaaatt

SEQ ID NO: 1737721 - DNA, 25 bp, Homo sapien
gaaaattgtcggtctgtaattcagt

SEQ ID NO: 1737722 - DNA, 25 bp, Homo sapien
taattttaaccctatagctgtgtgg

SEQ ID NO: 1737723 - DNA, 25 bp, Homo sapien
taatactttcccaactagtggcagt

SEQ ID NO: 1737724 - DNA, 25 bp, Homo sapien
aaatctgtcagacggctggccagca

SEQ ID NO: 1737725 - DNA, 25 bp, Homo sapien
gaatacattgaaagctgggtggcag

SEQ ID NO: 1737726 - DNA, 25 bp, Homo sapien
atttacaaagtaaaaacatatatgc

SEQ ID NO: 1737727 - DNA, 25 bp, Homo sapien
tttacaaagtaaaaacatatatgca

SEQ ID NO: 1737728 - DNA, 25 bp, Homo sapien
tacaaagtaaaaacatatatgcatc

SEQ ID NO: 1737729 - DNA, 25 bp, Homo sapien
caaagtaaaaacatatatgcatcca

SEQ ID NO: 1737730 - DNA, 25 bp, Homo sapien
ccttcgagacactatggcaaccact

SEQ ID NO: 1737731 - DNA, 25 bp, Homo sapien
catgatggatcttcctgaagtcccc

SEQ ID NO: 1737732 - DNA, 25 bp, Homo sapien
ggatgtgcttctactccttcgagac

SEQ ID NO: 1737733 - DNA, 25 bp, Homo sapien
caaccactttggcactaaggctgga

SEQ ID NO: 1737734 - DNA, 25 bp, Homo sapien
tggtttcgccaacttgagaatcatt

SEQ ID NO: 1737735 - DNA, 25 bp, Homo sapien
attcatttgatggtttcgccaactt

SEQ ID NO: 1737736 - DNA, 25 bp, Homo sapien
catttctggtaccatgattttgtgt

SEQ ID NO: 1737737 - DNA, 25 bp, Homo sapien
tgagaatcatttctggtaccatgat

SEQ ID NO: 1737738 - DNA, 25 bp, Homo sapien
acgtcccaccctactgccacgagaa

SEQ ID NO: 1737739 - DNA, 25 bp, Homo sapien
tttccctgtgtcgtttcacgtccca

SEQ ID NO: 1737740 - DNA, 25 bp, Homo sapien
tactgccacgagaaaaacactagaa

SEQ ID NO: 1737741 - DNA, 25 bp, Homo sapien
agctgctttccctgtgtcgtttcac

SEQ ID NO: 1737742 - DNA, 25 bp, Homo sapien
tgccaaagaagctttgacctggttt

SEQ ID NO: 1737743 - DNA, 25 bp, Homo sapien
ctgaatgccaaagaagctttgacct

SEQ ID NO: 1737744 - DNA, 25 bp, Homo sapien
tatcagcattaaattgttctctggg

SEQ ID NO: 1737745 - DNA, 25 bp, Homo sapien
cttgtctatcttgaaaaaattaagt

SEQ ID NO: 1737746 - DNA, 25 bp, Homo sapien
taacagctcttactggagactcaat

SEQ ID NO: 1737747 - DNA, 25 bp, Homo sapien
ggtttacgatcctcacataattggg

SEQ ID NO: 1737748 - DNA, 25 bp, Homo sapien
cagactaaaacaagggtatgctagc

SEQ ID NO: 1737749 - DNA, 25 bp, Homo sapien
tagggtagcaaaacttacacttcac

SEQ ID NO: 1737750 - DNA, 25 bp, Homo sapien
gtggtttgatttagaatagaagcta

SEQ ID NO: 1737751 - DNA, 25 bp, Homo sapien
gggtggtttgatttagaatagaagc

SEQ ID NO: 1737752 - DNA, 25 bp, Homo sapien
tggggtggtttgatttagaatagaa

SEQ ID NO: 1737753 - DNA, 25 bp, Homo sapien
ggtggtttgatttagaatagaagct

SEQ ID NO: 1737754 - DNA, 25 bp, Homo sapien
tacaaagcaggtacctaaatacact

SEQ ID NO: 1737755 - DNA, 25 bp, Homo sapien
tcaaagatataataggttatgctat

SEQ ID NO: 1737756 - DNA, 25 bp, Homo sapien
gctgatccttcctacacatttagta

SEQ ID NO: 1737757 - DNA, 25 bp, Homo sapien
tgctatatgaacttaatgctgatcc

SEQ ID NO: 1737758 - DNA, 25 bp, Homo sapien
gcttctctggatggtactttttaac

SEQ ID NO: 1737759 - DNA, 25 bp, Homo sapien
gtttctgtgcttctctggatggtac

SEQ ID NO: 1737760 - DNA, 25 bp, Homo sapien
gtgcttctctggatggtacttttta

SEQ ID NO: 1737761 - DNA, 25 bp, Homo sapien
ttctgtgcttctctggatggtactt

SEQ ID NO: 1737762 - DNA, 25 bp, Homo sapien
atcagtagactctcggctcggctgc

SEQ ID NO: 1737763 - DNA, 25 bp, Homo sapien
tgttgatgctgccatcagtagactc

SEQ ID NO: 1737764 - DNA, 25 bp, Homo sapien
tcagagctgtaactgttgatgctgc

SEQ ID NO: 1737765 - DNA, 25 bp, Homo sapien
gatgctgccatcagtagactctcgg

SEQ ID NO: 1737766 - DNA, 25 bp, Homo sapien
tcccagtcgcactccaggaaatatt

SEQ ID NO: 1737767 - DNA, 25 bp, Homo sapien
gtttggcggccaacaagctgggctg

SEQ ID NO: 1737768 - DNA, 25 bp, Homo sapien
gctggtcccaatccatcaagaaaat

SEQ ID NO: 1737769 - DNA, 25 bp, Homo sapien
cactgaattgactgtcagctcccag

SEQ ID NO: 1737770 - DNA, 25 bp, Homo sapien
ttgtgtaggcgtgagggaattccat

SEQ ID NO: 1737771 - DNA, 25 bp, Homo sapien
ttcccactgcaagattacagacaga

SEQ ID NO: 1737772 - DNA, 25 bp, Homo sapien
cttgaaattagaatagttgtttgca

SEQ ID NO: 1737773 - DNA, 25 bp, Homo sapien
tgtgaaatgccacccatgtcctaca

SEQ ID NO: 1737774 - DNA, 25 bp, Homo sapien
tgaggcttcgtgctctaatgacttc

SEQ ID NO: 1737775 - DNA, 25 bp, Homo sapien
taatgacttccacttctaattggcc

SEQ ID NO: 1737776 - DNA, 25 bp, Homo sapien
tgacttccacttctaattggccctt

SEQ ID NO: 1737777 - DNA, 25 bp, Homo sapien
tttgtgtgaggcttcgtgctctaat

SEQ ID NO: 1737778 - DNA, 25 bp, Homo sapien
taacatacttcctaacaccttctga

SEQ ID NO: 1737779 - DNA, 25 bp, Homo sapien
gacttacttgggttacaatgcaggt

SEQ ID NO: 1737780 - DNA, 25 bp, Homo sapien
ctaacaccttctgaaagaataactg

SEQ ID NO: 1737781 - DNA, 25 bp, Homo sapien
taattgacacaagctaagaaacgac

SEQ ID NO: 1737782 - DNA, 25 bp, Homo sapien
gtttttcgtgcaattcttgtcttct

SEQ ID NO: 1737783 - DNA, 25 bp, Homo sapien
aaaagatatactttgacatatggag

SEQ ID NO: 1737784 - DNA, 25 bp, Homo sapien
tatacaggccccattttccaaaaga

SEQ ID NO: 1737785 - DNA, 25 bp, Homo sapien
aaggatcaagggtttttcgtgcaat

SEQ ID NO: 1737786 - DNA, 25 bp, Homo sapien
tctgcttcacattcgaagggctcaa

SEQ ID NO: 1737787 - DNA, 25 bp, Homo sapien
ttcacattcgaagggctcaaagcaa

SEQ ID NO: 1737788 - DNA, 25 bp, Homo sapien
tctctctgcttcacattcgaagggc

SEQ ID NO: 1737789 - DNA, 25 bp, Homo sapien
cattcgaagggctcaaagcaactat

SEQ ID NO: 1737790 - DNA, 25 bp, Homo sapien
ctgagccacacccataaagcatttg

SEQ ID NO: 1737791 - DNA, 25 bp, Homo sapien
gctggacaggtcgagttcttccaac

SEQ ID NO: 1737792 - DNA, 25 bp, Homo sapien
cacccataaagcatttgtggtccat

SEQ ID NO: 1737793 - DNA, 25 bp, Homo sapien
ccatgctggacaggtcgagttcttc

SEQ ID NO: 1737794 - DNA, 25 bp, Homo sapien
gtgaggacggtgggaacaatttgta

SEQ ID NO: 1737795 - DNA, 25 bp, Homo sapien
tccagagatgactgggaagcccgcc

SEQ ID NO: 1737796 - DNA, 25 bp, Homo sapien
agggaggcccagttgaactttccag

SEQ ID NO: 1737797 - DNA, 25 bp, Homo sapien
gcccagttgaactttccagagatga

SEQ ID NO: 1737798 - DNA, 25 bp, Homo sapien
tgactgggaagcccgccgggtgagg

SEQ ID NO: 1737799 - DNA, 25 bp, Homo sapien
tattatcctgaaaagtagagtttta

SEQ ID NO: 1737800 - DNA, 25 bp, Homo sapien
tattggaatgactctggtatgagtt

SEQ ID NO: 1737801 - DNA, 25 bp, Homo sapien
gttttattggaatgactctggtatg

SEQ ID NO: 1737802 - DNA, 25 bp, Homo sapien
ttggaatgactctggtatgagttca

SEQ ID NO: 1737803 - DNA, 25 bp, Homo sapien
ggcaaaacacaagttgattgtctgt

SEQ ID NO: 1737804 - DNA, 25 bp, Homo sapien
gtctgtctccaacaatgctttcgat

SEQ ID NO: 1737805 - DNA, 25 bp, Homo sapien
cctgtaaatttgatagattgccttg

SEQ ID NO: 1737806 - DNA, 25 bp, Homo sapien
gccttgttctgtcatatgaagccat

SEQ ID NO: 1737807 - DNA, 25 bp, Homo sapien
tgaaagctagtgaaacccttccttg

SEQ ID NO: 1737808 - DNA, 25 bp, Homo sapien
tatgcagttagttttagtccccagc

SEQ ID NO: 1737809 - DNA, 25 bp, Homo sapien
tacactgaggtatggctgagaagcc

SEQ ID NO: 1737810 - DNA, 25 bp, Homo sapien
tctgttagcatcatgaggcctgtca

SEQ ID NO: 1737811 - DNA, 25 bp, Homo sapien
agtacatgcaacatacaagctggcc

SEQ ID NO: 1737812 - DNA, 25 bp, Homo sapien
tctggctaaaacctgcaaaatgtct

SEQ ID NO: 1737813 - DNA, 25 bp, Homo sapien
caagctggcctatgtggaactaaca

SEQ ID NO: 1737814 - DNA, 25 bp, Homo sapien
gcatgcagctctgaacagttccaag

SEQ ID NO: 1737815 - DNA, 25 bp, Homo sapien
gtaggaatctacaccaaaatattta

SEQ ID NO: 1737816 - DNA, 25 bp, Homo sapien
tacagccccacagtaggaatctaca

SEQ ID NO: 1737817 - DNA, 25 bp, Homo sapien
tgtacacagtgtctacatgtgttac

SEQ ID NO: 1737818 - DNA, 25 bp, Homo sapien
gtctacatgtgttacagccccacag

SEQ ID NO: 1737819 - DNA, 25 bp, Homo sapien
cagttgattgttggccactaagaca

SEQ ID NO: 1737820 - DNA, 25 bp, Homo sapien
gaatctagtagaagtgcaccaatgc

SEQ ID NO: 1737821 - DNA, 25 bp, Homo sapien
tgagcagtggtcaatctgtgccctg

SEQ ID NO: 1737822 - DNA, 25 bp, Homo sapien
cagttcctcctactcagcatggtga

SEQ ID NO: 1737823 - DNA, 25 bp, Homo sapien
gacaagtcaagtcaaatgcccgcag

SEQ ID NO: 1737824 - DNA, 25 bp, Homo sapien
tgtgctcacttagacaggctgacga

SEQ ID NO: 1737825 - DNA, 25 bp, Homo sapien
tatgtgatgcaaagtaccctttggg

SEQ ID NO: 1737826 - DNA, 25 bp, Homo sapien
cctttgggccatcgattaagacata

SEQ ID NO: 1737827 - DNA, 25 bp, Homo sapien
ggtccagccttgagaagttctctcc

SEQ ID NO: 1737828 - DNA, 25 bp, Homo sapien
gtccagccttgagaagttctctccc

SEQ ID NO: 1737829 - DNA, 25 bp, Homo sapien
gccttggcgtggcctgtccacacat

SEQ ID NO: 1737830 - DNA, 25 bp, Homo sapien
ctgtcccgggtacttggccttggcg

SEQ ID NO: 1737831 - DNA, 25 bp, Homo sapien
catggtcttatgacagccgaaaaac

SEQ ID NO: 1737832 - DNA, 25 bp, Homo sapien
caagaccatggtcttatgacagccg

SEQ ID NO: 1737833 - DNA, 25 bp, Homo sapien
cttatgacagccgaaaaacacagta

SEQ ID NO: 1737834 - DNA, 25 bp, Homo sapien
tccacaagaccatggtcttatgaca

SEQ ID NO: 1737835 - DNA, 25 bp, Homo sapien
tctggatggggatgttcagttgact

SEQ ID NO: 1737836 - DNA, 25 bp, Homo sapien
agccatgagtctaaaaccacttggc

SEQ ID NO: 1737837 - DNA, 25 bp, Homo sapien
cttggctgtagggttggcagaggtt

SEQ ID NO: 1737838 - DNA, 25 bp, Homo sapien
ggctgtagggttggcagaggttctt

SEQ ID NO: 1737839 - DNA, 25 bp, Homo sapien
ttaaccaggggagagtcagattcta

SEQ ID NO: 1737840 - DNA, 25 bp, Homo sapien
tcccacttaaccaggggagagtcag

SEQ ID NO: 1737841 - DNA, 25 bp, Homo sapien
catccttcccacttaaccaggggag

SEQ ID NO: 1737842 - DNA, 25 bp, Homo sapien
caggggagagtcagattctagacct

SEQ ID NO: 1737843 - DNA, 25 bp, Homo sapien
gaatgctccagggttgtgttgaaag

SEQ ID NO: 1737844 - DNA, 25 bp, Homo sapien
tgttgtgtctgaatgctccagggtt

SEQ ID NO: 1737845 - DNA, 25 bp, Homo sapien
tgtgtctgaatgctccagggttgtg

SEQ ID NO: 1737846 - DNA, 25 bp, Homo sapien
tctgaatgctccagggttgtgttga

SEQ ID NO: 1737847 - DNA, 25 bp, Homo sapien
ttccattttcacaaatttctcaatt

SEQ ID NO: 1737848 - DNA, 25 bp, Homo sapien
tcagatgatcagtttcttttccatt

SEQ ID NO: 1737849 - DNA, 25 bp, Homo sapien
attttcacaaatttctcaattcctc

SEQ ID NO: 1737850 - DNA, 25 bp, Homo sapien
ccattttcacaaatttctcaattcc

SEQ ID NO: 1737851 - DNA, 25 bp, Homo sapien
tccactaggattcttagcagaataa

SEQ ID NO: 1737852 - DNA, 25 bp, Homo sapien
ggattcttagcagaataatatatct

SEQ ID NO: 1737853 - DNA, 25 bp, Homo sapien
ctttgatgattccactaggattctt

SEQ ID NO: 1737854 - DNA, 25 bp, Homo sapien
tgattccactaggattcttagcaga

SEQ ID NO: 1737855 - DNA, 25 bp, Homo sapien
ctgacattttgatagagtggaaatc

SEQ ID NO: 1737856 - DNA, 25 bp, Homo sapien
tgccttccttcattcccagtaagga

SEQ ID NO: 1737857 - DNA, 25 bp, Homo sapien
aggaaataaaggagatatgctgaca

SEQ ID NO: 1737858 - DNA, 25 bp, Homo sapien
gagtggaaatcaatacctatatttc

SEQ ID NO: 1737859 - DNA, 25 bp, Homo sapien
agaagtggcagctataaaaatagac

SEQ ID NO: 1737860 - DNA, 25 bp, Homo sapien
attctatcttcatcatgtgggtgtt

SEQ ID NO: 1737861 - DNA, 25 bp, Homo sapien
gaagtggcagctataaaaatagaca

SEQ ID NO: 1737862 - DNA, 25 bp, Homo sapien
cctctgctgaaatggagattgcagt

SEQ ID NO: 1737863 - DNA, 25 bp, Homo sapien
taggcataggtgagggcaagccctc

SEQ ID NO: 1737864 - DNA, 25 bp, Homo sapien
ctttattttggttaggcataggtga

SEQ ID NO: 1737865 - DNA, 25 bp, Homo sapien
tattgcaatcctttatgcgtgcagg

SEQ ID NO: 1737866 - DNA, 25 bp, Homo sapien
gggctacttgcaatacccttgcctt

SEQ ID NO: 1737867 - DNA, 25 bp, Homo sapien
cacttggttacattagggctacttg

SEQ ID NO: 1737868 - DNA, 25 bp, Homo sapien
ttcacaattattaagtcactcttcc

SEQ ID NO: 1737869 - DNA, 25 bp, Homo sapien
cacaaactaaccctccatcccattg

SEQ ID NO: 1737870 - DNA, 25 bp, Homo sapien
gggctgtccttctatgcaaaacctc

SEQ ID NO: 1737871 - DNA, 25 bp, Homo sapien
gctgtccttctatgcaaaacctcct

SEQ ID NO: 1737872 - DNA, 25 bp, Homo sapien
gtccttctatgcaaaacctcctcat

SEQ ID NO: 1737873 - DNA, 25 bp, Homo sapien
ggggctgtccttctatgcaaaacct

SEQ ID NO: 1737874 - DNA, 25 bp, Homo sapien
cactgtagctaccaccttctgcatc

SEQ ID NO: 1737875 - DNA, 25 bp, Homo sapien
gtcccctgagcagtcccctatgtcc

SEQ ID NO: 1737876 - DNA, 25 bp, Homo sapien
tgcaccgacatccttcttgctccgc

SEQ ID NO: 1737877 - DNA, 25 bp, Homo sapien
tccgccggggtctgacgccacttgc

SEQ ID NO: 1737878 - DNA, 25 bp, Homo sapien
ctacgtgctaactgaggcatcagtc

SEQ ID NO: 1737879 - DNA, 25 bp, Homo sapien
tatgggtggtctaaaggcatgcgtc

SEQ ID NO: 1737880 - DNA, 25 bp, Homo sapien
aaggcatgcgtcttcacaagcactg

SEQ ID NO: 1737881 - DNA, 25 bp, Homo sapien
agaaacactgacaaattccagagaa

SEQ ID NO: 1737882 - DNA, 25 bp, Homo sapien
gagttttatgggtggtctaaaggca

SEQ ID NO: 1737883 - DNA, 25 bp, Homo sapien
catggctggcgtcaattaccttcta

SEQ ID NO: 1737884 - DNA, 25 bp, Homo sapien
gactggcttggcagctatggtccca

SEQ ID NO: 1737885 - DNA, 25 bp, Homo sapien
gaggtcgccaccttgcttgtcagaa

SEQ ID NO: 1737886 - DNA, 25 bp, Homo sapien
ttaccttctagtgtgtgcagcctcc

SEQ ID NO: 1737887 - DNA, 25 bp, Homo sapien
tggccactgtgagaggcagaaacag

SEQ ID NO: 1737888 - DNA, 25 bp, Homo sapien
gccactgtgagaggcagaaacagca

SEQ ID NO: 1737889 - DNA, 25 bp, Homo sapien
ttggccactgtgagaggcagaaaca

SEQ ID NO: 1737890 - DNA, 25 bp, Homo sapien
cttggccactgtgagaggcagaaac

SEQ ID NO: 1737891 - DNA, 25 bp, Homo sapien
cgtaggaccaatgcaaaagtgaaca

SEQ ID NO: 1737892 - DNA, 25 bp, Homo sapien
tattgtcttcaaacgcgtaggacca

SEQ ID NO: 1737893 - DNA, 25 bp, Homo sapien
cacaggaaaacaatgcgcaagagtt

SEQ ID NO: 1737894 - DNA, 25 bp, Homo sapien
gaaggattcatgcagagagctgaac

SEQ ID NO: 1737895 - DNA, 25 bp, Homo sapien
tgcggactgtgactttccatcccag

SEQ ID NO: 1737896 - DNA, 25 bp, Homo sapien
gctcgcgagtaactgaacatccttt

SEQ ID NO: 1737897 - DNA, 25 bp, Homo sapien
tcccagtatcagacaagctcgcgag

SEQ ID NO: 1737898 - DNA, 25 bp, Homo sapien
ctccaaagtggctcctccgcggtga

SEQ ID NO: 1737899 - DNA, 25 bp, Homo sapien
tgccaagtccgcgaggcaaggacca

SEQ ID NO: 1737900 - DNA, 25 bp, Homo sapien
aggcaaggaccaggcatcttcccgc

SEQ ID NO: 1737901 - DNA, 25 bp, Homo sapien
acgcggctgccaagtccgcgaggca

SEQ ID NO: 1737902 - DNA, 25 bp, Homo sapien
agtccgcgaggcaaggaccaggcat

SEQ ID NO: 1737903 - DNA, 25 bp, Homo sapien
ggcgagtcctcagcagttcagtgga

SEQ ID NO: 1737904 - DNA, 25 bp, Homo sapien
gaagtcagccttgtgtcctgaggag

SEQ ID NO: 1737905 - DNA, 25 bp, Homo sapien
gctttgcagctgtccggaaggtgaa

SEQ ID NO: 1737906 - DNA, 25 bp, Homo sapien
caaggtaacgctccgggaagtggca

SEQ ID NO: 1737907 - DNA, 25 bp, Homo sapien
ggcagcggcctcatgtgcgccggcg

SEQ ID NO: 1737908 - DNA, 25 bp, Homo sapien
gcctcatgtgcgccggcgggtttca

SEQ ID NO: 1737909 - DNA, 25 bp, Homo sapien
ctcatgtgcgccggcgggtttcaag

SEQ ID NO: 1737910 - DNA, 25 bp, Homo sapien
gcggcctcatgtgcgccggcgggtt

SEQ ID NO: 1737911 - DNA, 25 bp, Homo sapien
ctcctcccgcgtggtggcggggcat

SEQ ID NO: 1737912 - DNA, 25 bp, Homo sapien
cgctgcgccgctcttcacccagagc

SEQ ID NO: 1737913 - DNA, 25 bp, Homo sapien
tcttcacccagagcccggcggcgcc

SEQ ID NO: 1737914 - DNA, 25 bp, Homo sapien
ctcctctcctcccgcgtggtggcgg

SEQ ID NO: 1737915 - DNA, 25 bp, Homo sapien
tactcgtgtaagagagcggcttccc

SEQ ID NO: 1737916 - DNA, 25 bp, Homo sapien
gggtctctccagcacgttgtacagg

SEQ ID NO: 1737917 - DNA, 25 bp, Homo sapien
ttgtacaggtagttctgcacccgcc

SEQ ID NO: 1737918 - DNA, 25 bp, Homo sapien
tgcacccgccggtacttgacgttgc

SEQ ID NO: 1737919 - DNA, 25 bp, Homo sapien
gcatagcagggggcgcgggtactca

SEQ ID NO: 1737920 - DNA, 25 bp, Homo sapien
ggcatagcagggggcgcgggtactc

SEQ ID NO: 1737921 - DNA, 25 bp, Homo sapien
gggcatagcagggggcgcgggtact

SEQ ID NO: 1737922 - DNA, 25 bp, Homo sapien
cgggcatagcagggggcgcgggtac

SEQ ID NO: 1737923 - DNA, 25 bp, Homo sapien
gaaggaagaccacgaacacgtgcga

SEQ ID NO: 1737924 - DNA, 25 bp, Homo sapien
taaaagaaacctagtccgtgtgctc

SEQ ID NO: 1737925 - DNA, 25 bp, Homo sapien
ggaagggctacatgcactgacagat

SEQ ID NO: 1737926 - DNA, 25 bp, Homo sapien
tccgggcgcgcttaaaacctagcag

SEQ ID NO: 1737927 - DNA, 25 bp, Homo sapien
tgaggtcaggtccacatcgttcctt

SEQ ID NO: 1737928 - DNA, 25 bp, Homo sapien
ctgtataggaaaagtaaagttgatc

SEQ ID NO: 1737929 - DNA, 25 bp, Homo sapien
cattaaatctaaatctgtcatattc

SEQ ID NO: 1737930 - DNA, 25 bp, Homo sapien
atattctccaatggatttctttgag

SEQ ID NO: 1737931 - DNA, 25 bp, Homo sapien
tcatttctatacaggattgaccacc

SEQ ID NO: 1737932 - DNA, 25 bp, Homo sapien
acagatctacaactgaagtcatttc

SEQ ID NO: 1737933 - DNA, 25 bp, Homo sapien
caccaatgctggctccaatagtact

SEQ ID NO: 1737934 - DNA, 25 bp, Homo sapien
ggtaagtaaggaaggtcacagatct

SEQ ID NO: 1737935 - DNA, 25 bp, Homo sapien
cagaagtgttttggcctctccaggt

SEQ ID NO: 1737936 - DNA, 25 bp, Homo sapien
tttccactaggagcaatgagtcggt

SEQ ID NO: 1737937 - DNA, 25 bp, Homo sapien
tatttgcagtgaccttatggaacag

SEQ ID NO: 1737938 - DNA, 25 bp, Homo sapien
gtgacaaatacataacagctgtggc

SEQ ID NO: 1737939 - DNA, 25 bp, Homo sapien
gaataagaaggactacgggatgcac

SEQ ID NO: 1737940 - DNA, 25 bp, Homo sapien
tcttcagaaaatgcactggcttgct

SEQ ID NO: 1737941 - DNA, 25 bp, Homo sapien
gcttgctgagagaatgacgatgata

SEQ ID NO: 1737942 - DNA, 25 bp, Homo sapien
cgggatgcacacagtaaaaaagtca

SEQ ID NO: 1737943 - DNA, 25 bp, Homo sapien
taaaggactcaccatgacatatgca

SEQ ID NO: 1737944 - DNA, 25 bp, Homo sapien
ttacagattaacaatggacataggg

SEQ ID NO: 1737945 - DNA, 25 bp, Homo sapien
tcaaactcattcaagaagccaagca

SEQ ID NO: 1737946 - DNA, 25 bp, Homo sapien
catagggtgatagtccatgggatac

SEQ ID NO: 1737947 - DNA, 25 bp, Homo sapien
aagtatagttttctggcctaggcca

SEQ ID NO: 1737948 - DNA, 25 bp, Homo sapien
tgcctacacggcaaggacacatgat

SEQ ID NO: 1737949 - DNA, 25 bp, Homo sapien
cccagatttacaagacgtgattaga

SEQ ID NO: 1737950 - DNA, 25 bp, Homo sapien
tactgatgattgactcaccatgtcc

SEQ ID NO: 1737951 - DNA, 25 bp, Homo sapien
tgcccactgcacgatgttccatgat

SEQ ID NO: 1737952 - DNA, 25 bp, Homo sapien
tcttgatggcaagaagtgatcctca

SEQ ID NO: 1737953 - DNA, 25 bp, Homo sapien
aataaatttgcctcattatggcgca

SEQ ID NO: 1737954 - DNA, 25 bp, Homo sapien
tgttcttccaacgtcaaaggctcag

SEQ ID NO: 1737955 - DNA, 25 bp, Homo sapien
tgtgcacctattctgaaagtcagct

SEQ ID NO: 1737956 - DNA, 25 bp, Homo sapien
tctttcttgtaaaaaggtatgcatt

SEQ ID NO: 1737957 - DNA, 25 bp, Homo sapien
ttacatagctatataaatgtgcacc

SEQ ID NO: 1737958 - DNA, 25 bp, Homo sapien
cctggcagaggaaaacagtaaagtg

SEQ ID NO: 1737959 - DNA, 25 bp, Homo sapien
catatgatgtggtgttatttagata

SEQ ID NO: 1737960 - DNA, 25 bp, Homo sapien
taaagcttataaaagccgcttctta

SEQ ID NO: 1737961 - DNA, 25 bp, Homo sapien
taaagttgcctacacattacagaat

SEQ ID NO: 1737962 - DNA, 25 bp, Homo sapien
caatgtcccggagaatatttggaat

SEQ ID NO: 1737963 - DNA, 25 bp, Homo sapien
tctagcacatagtatcggcccacag

SEQ ID NO: 1737964 - DNA, 25 bp, Homo sapien
ccttggttactgtaccaatgcacag

SEQ ID NO: 1737965 - DNA, 25 bp, Homo sapien
aatgaacaatgttaaagttctggtc

SEQ ID NO: 1737966 - DNA, 25 bp, Homo sapien
catccttggtttactgtaccttggt

SEQ ID NO: 1737967 - DNA, 25 bp, Homo sapien
gaaatttgccttgctaagtttgact

SEQ ID NO: 1737968 - DNA, 25 bp, Homo sapien
tggcagtgatgctgccaaccccagg

SEQ ID NO: 1737969 - DNA, 25 bp, Homo sapien
gccaaagacaattattctccaacct

SEQ ID NO: 1737970 - DNA, 25 bp, Homo sapien
aagtttgacttgttcgggatccatc

SEQ ID NO: 1737971 - DNA, 25 bp, Homo sapien
caatatatagcccactttcttaagg

SEQ ID NO: 1737972 - DNA, 25 bp, Homo sapien
caatgtgcactgtacacaatatata

SEQ ID NO: 1737973 - DNA, 25 bp, Homo sapien
tccattctgcaattaatctagttaa

SEQ ID NO: 1737974 - DNA, 25 bp, Homo sapien
gatttctgaggttttgttgtacctg

SEQ ID NO: 1737975 - DNA, 25 bp, Homo sapien
tacaacggaaacatcttctccctcc

SEQ ID NO: 1737976 - DNA, 25 bp, Homo sapien
atacaacggaaacatcttctccctc

SEQ ID NO: 1737977 - DNA, 25 bp, Homo sapien
catacaacggaaacatcttctccct

SEQ ID NO: 1737978 - DNA, 25 bp, Homo sapien
caacggaaacatcttctccctcctg

SEQ ID NO: 1737979 - DNA, 25 bp, Homo sapien
acgccatgcggttttggttgaccca

SEQ ID NO: 1737980 - DNA, 25 bp, Homo sapien
gtaactgatgtagctgatgtgagta

SEQ ID NO: 1737981 - DNA, 25 bp, Homo sapien
cttcagagagtagtacgccatgcgg

SEQ ID NO: 1737982 - DNA, 25 bp, Homo sapien
cctggcttgcctgaccacatgtcaa

SEQ ID NO: 1737983 - DNA, 25 bp, Homo sapien
tagcaatacttctgagagagtcaat

SEQ ID NO: 1737984 - DNA, 25 bp, Homo sapien
cattgcttaatgtccttttatagga

SEQ ID NO: 1737985 - DNA, 25 bp, Homo sapien
ggattatttcttctcctagcaatac

SEQ ID NO: 1737986 - DNA, 25 bp, Homo sapien
gtcaatagatttcagctagagaagc

SEQ ID NO: 1737987 - DNA, 25 bp, Homo sapien
tggggtctatctgatttgaatcctg

SEQ ID NO: 1737988 - DNA, 25 bp, Homo sapien
taatgtagggtaatgtggtgttgaa

SEQ ID NO: 1737989 - DNA, 25 bp, Homo sapien
tttggaaatgccactaatgcaaggt

SEQ ID NO: 1737990 - DNA, 25 bp, Homo sapien
tttatggcctggagaaagtttcttg

SEQ ID NO: 1737991 - DNA, 25 bp, Homo sapien
agagagactcactccatgtcaaaaa

SEQ ID NO: 1737992 - DNA, 25 bp, Homo sapien
cagagagagactcactccatgtcaa

SEQ ID NO: 1737993 - DNA, 25 bp, Homo sapien
caaactggagctcttatgggttctt

SEQ ID NO: 1737994 - DNA, 25 bp, Homo sapien
gcaaactggagctcttatgggttct

SEQ ID NO: 1737995 - DNA, 25 bp, Homo sapien
gtctagacttagacaatgggaaaga

SEQ ID NO: 1737996 - DNA, 25 bp, Homo sapien
tatttatttacaagcgggaactcca

SEQ ID NO: 1737997 - DNA, 25 bp, Homo sapien
caactgtattgaacattgctgagag

SEQ ID NO: 1737998 - DNA, 25 bp, Homo sapien
gaagtaaacttggatcttagtctag

SEQ ID NO: 1737999 - DNA, 25 bp, Homo sapien
aattatagacgtaagcaaccgcgcc

SEQ ID NO: 1738000 - DNA, 25 bp, Homo sapien
ttttactctgttagcgaggctgccg

SEQ ID NO: 1738001 - DNA, 25 bp, Homo sapien
gaggctgccgtttgggattccccat

SEQ ID NO: 1738002 - DNA, 25 bp, Homo sapien
tgtgaaggctagctatgtcccaggg

SEQ ID NO: 1738003 - DNA, 25 bp, Homo sapien
acctctggcttctgggttcaggcga

SEQ ID NO: 1738004 - DNA, 25 bp, Homo sapien
tctggcttctgggttcaggcgattc

SEQ ID NO: 1738005 - DNA, 25 bp, Homo sapien
cctctggcttctgggttcaggcgat

SEQ ID NO: 1738006 - DNA, 25 bp, Homo sapien
tggcttctgggttcaggcgattctc

SEQ ID NO: 1738007 - DNA, 25 bp, Homo sapien
gcctttatgttgacacttcacaggc

SEQ ID NO: 1738008 - DNA, 25 bp, Homo sapien
cattagagttctgtatgcagttggg

SEQ ID NO: 1738009 - DNA, 25 bp, Homo sapien
agcagcctttatgttgacacttcac

SEQ ID NO: 1738010 - DNA, 25 bp, Homo sapien
atgggctgccccattagagttctgt

SEQ ID NO: 1738011 - DNA, 25 bp, Homo sapien
gcgtcagtaccagttgcccttagca

SEQ ID NO: 1738012 - DNA, 25 bp, Homo sapien
tacgactaaagggtcaaccgcagag

SEQ ID NO: 1738013 - DNA, 25 bp, Homo sapien
gatagagtattcgtcttcggcgtca

SEQ ID NO: 1738014 - DNA, 25 bp, Homo sapien
accgcagagcaattgtaaagggcag

SEQ ID NO: 1738015 - DNA, 25 bp, Homo sapien
gcagtaactaaactcatgtcctaag

SEQ ID NO: 1738016 - DNA, 25 bp, Homo sapien
tcaattggtacccagaagtgcataa

SEQ ID NO: 1738017 - DNA, 25 bp, Homo sapien
tgctccttccacagttcaattggta

SEQ ID NO: 1738018 - DNA, 25 bp, Homo sapien
taaaaacaaccatcctatctgagct

SEQ ID NO: 1738019 - DNA, 25 bp, Homo sapien
gaaagctatgactgtgatgcatcca

SEQ ID NO: 1738020 - DNA, 25 bp, Homo sapien
gacactatctttggtgattaaacac

SEQ ID NO: 1738021 - DNA, 25 bp, Homo sapien
gataaatgcataactgattttgtag

SEQ ID NO: 1738022 - DNA, 25 bp, Homo sapien
tttcttagataatgtgagatgagga

SEQ ID NO: 1738023 - DNA, 25 bp, Homo sapien
tacttatgattaaaagtatgggaat

SEQ ID NO: 1738024 - DNA, 25 bp, Homo sapien
tgaacttgatttcatacttatgatt

SEQ ID NO: 1738025 - DNA, 25 bp, Homo sapien
agaagaactgcatctggaacaggta

SEQ ID NO: 1738026 - DNA, 25 bp, Homo sapien
taacaggcctccagatcaagaagaa

SEQ ID NO: 1738027 - DNA, 25 bp, Homo sapien
caccaaggcaagtgttgatacaatc

SEQ ID NO: 1738028 - DNA, 25 bp, Homo sapien
cagggaacagaagtaacacctaatc

SEQ ID NO: 1738029 - DNA, 25 bp, Homo sapien
gaacattaccttcttccagaatagg

SEQ ID NO: 1738030 - DNA, 25 bp, Homo sapien
tggcttctgaatacattcaccaagg

SEQ ID NO: 1738031 - DNA, 25 bp, Homo sapien
acaggggcaggtttgtctcagatac

SEQ ID NO: 1738032 - DNA, 25 bp, Homo sapien
attcactgagtttgcctggtacagc

SEQ ID NO: 1738033 - DNA, 25 bp, Homo sapien
tttgcctggtacagcaccaacaggg

SEQ ID NO: 1738034 - DNA, 25 bp, Homo sapien
caggggcaggtttgtctcagatacc

SEQ ID NO: 1738035 - DNA, 25 bp, Homo sapien
gttcaaagagtgatatgcccctcaa

SEQ ID NO: 1738036 - DNA, 25 bp, Homo sapien
aatatctaggaactccacccacagg

SEQ ID NO: 1738037 - DNA, 25 bp, Homo sapien
caggaaacgagagagaggtccctgc

SEQ ID NO: 1738038 - DNA, 25 bp, Homo sapien
caaggcagccaagtaaattaagttc

SEQ ID NO: 1738039 - DNA, 25 bp, Homo sapien
ccaactctggatgttgtgcagtggt

SEQ ID NO: 1738040 - DNA, 25 bp, Homo sapien
gctctgtgatagacaggcagcttca

SEQ ID NO: 1738041 - DNA, 25 bp, Homo sapien
cattcccagagaggaatcttaacga

SEQ ID NO: 1738042 - DNA, 25 bp, Homo sapien
tatggatcagagtctttgagtttag

SEQ ID NO: 1738043 - DNA, 25 bp, Homo sapien
tttgaagacaaagcctgtcatctgg

SEQ ID NO: 1738044 - DNA, 25 bp, Homo sapien
tcatttcttcagaggagcgtgccat

SEQ ID NO: 1738045 - DNA, 25 bp, Homo sapien
tgtcatctggaaaggggacccttct

SEQ ID NO: 1738046 - DNA, 25 bp, Homo sapien
ggacccttctccttcgtatggaatc

SEQ ID NO: 1738047 - DNA, 25 bp, Homo sapien
taagatcgctgtctgtgagacccac

SEQ ID NO: 1738048 - DNA, 25 bp, Homo sapien
taacccagctctagcgataagatcg

SEQ ID NO: 1738049 - DNA, 25 bp, Homo sapien
gatttacctggcacttctactggag

SEQ ID NO: 1738050 - DNA, 25 bp, Homo sapien
tccctctgggtatagcgaatgtctc

SEQ ID NO: 1738051 - DNA, 25 bp, Homo sapien
cagctcatgtttacccctcaaggga

SEQ ID NO: 1738052 - DNA, 25 bp, Homo sapien
aaatggtggaatcagaattcaaccc

SEQ ID NO: 1738053 - DNA, 25 bp, Homo sapien
aaatgcagcctttctagtgacttgg

SEQ ID NO: 1738054 - DNA, 25 bp, Homo sapien
tacttgcacagtaacttagaggtac

SEQ ID NO: 1738055 - DNA, 25 bp, Homo sapien
aagatgcccagactacagcacagag

SEQ ID NO: 1738056 - DNA, 25 bp, Homo sapien
gccaccagaggtaatagagccagga

SEQ ID NO: 1738057 - DNA, 25 bp, Homo sapien
tggctgaatgtgtacccgacccttg

SEQ ID NO: 1738058 - DNA, 25 bp, Homo sapien
tcagttctttttgggctacacggcc

SEQ ID NO: 1738059 - DNA, 25 bp, Homo sapien
gagcaacatcgtctgacatagcagc

SEQ ID NO: 1738060 - DNA, 25 bp, Homo sapien
gaagccactacctttcctcaatgag

SEQ ID NO: 1738061 - DNA, 25 bp, Homo sapien
tatagtctgtaagctctagagcaac

SEQ ID NO: 1738062 - DNA, 25 bp, Homo sapien
tggagaactgactagagaagccact

SEQ ID NO: 1738063 - DNA, 25 bp, Homo sapien
caaatagatgcaataaaaactgata

SEQ ID NO: 1738064 - DNA, 25 bp, Homo sapien
atcaaatagatgcaataaaaactga

SEQ ID NO: 1738065 - DNA, 25 bp, Homo sapien
atagatgcaataaaaactgataaag

SEQ ID NO: 1738066 - DNA, 25 bp, Homo sapien
tagatgcaataaaaactgataaagg

SEQ ID NO: 1738067 - DNA, 25 bp, Homo sapien
cttggaagacccagtcaagtgcttg

SEQ ID NO: 1738068 - DNA, 25 bp, Homo sapien
ttggaagacccagtcaagtgcttgg

SEQ ID NO: 1738069 - DNA, 25 bp, Homo sapien
tgcctttgctcatgtcttctccacc

SEQ ID NO: 1738070 - DNA, 25 bp, Homo sapien
ttgctcatgtcttctccacccacaa

SEQ ID NO: 1738071 - DNA, 25 bp, Homo sapien
cttgctgcctttgctcatgtcttct

SEQ ID NO: 1738072 - DNA, 25 bp, Homo sapien
ccacaaagccacatattctgcacat

SEQ ID NO: 1738073 - DNA, 25 bp, Homo sapien
gtctggctctgctagtggcaccatc

SEQ ID NO: 1738074 - DNA, 25 bp, Homo sapien
tctggctctgctagtggcaccatcg

SEQ ID NO: 1738075 - DNA, 25 bp, Homo sapien
ctggctctgctagtggcaccatcgt

SEQ ID NO: 1738076 - DNA, 25 bp, Homo sapien
tttataccctgaattgctttgtgca

SEQ ID NO: 1738077 - DNA, 25 bp, Homo sapien
ccaccagagaagtgtgattgcttgc

SEQ ID NO: 1738078 - DNA, 25 bp, Homo sapien
ttgctttgtgcaaattacagtctcc

SEQ ID NO: 1738079 - DNA, 25 bp, Homo sapien
caggcacaacgcttaaggttgaccc

SEQ ID NO: 1738080 - DNA, 25 bp, Homo sapien
gcaaaactagcatcgaaagcttctg

SEQ ID NO: 1738081 - DNA, 25 bp, Homo sapien
catgaaaaaattatcccggagtggt

SEQ ID NO: 1738082 - DNA, 25 bp, Homo sapien
ttctcaaggcattatggaataggca

SEQ ID NO: 1738083 - DNA, 25 bp, Homo sapien
ctgtgtcatatcagagagccttgga

SEQ ID NO: 1738084 - DNA, 25 bp, Homo sapien
tctgaagtcttgtgtgttgaggctc

SEQ ID NO: 1738085 - DNA, 25 bp, Homo sapien
ttttccaccacaagactctccaatt

SEQ ID NO: 1738086 - DNA, 25 bp, Homo sapien
ccaccacaagactctccaattatta

SEQ ID NO: 1738087 - DNA, 25 bp, Homo sapien
ggcatgtcccactgtacttggttaa

SEQ ID NO: 1738088 - DNA, 25 bp, Homo sapien
tttaagtttgcttgttacaactaca

SEQ ID NO: 1738089 - DNA, 25 bp, Homo sapien
ttgttacaactacaagcgagttatt

SEQ ID NO: 1738090 - DNA, 25 bp, Homo sapien
tctgtaattagtggatcaacatgtt

SEQ ID NO: 1738091 - DNA, 25 bp, Homo sapien
tcaacatgttggcttttagtttaca

SEQ ID NO: 1738092 - DNA, 25 bp, Homo sapien
caaaagactacttgacaccgcagca

SEQ ID NO: 1738093 - DNA, 25 bp, Homo sapien
agactacttgacaccgcagcagatg

SEQ ID NO: 1738094 - DNA, 25 bp, Homo sapien
gtgagagtgataattaagggatgca

SEQ ID NO: 1738095 - DNA, 25 bp, Homo sapien
gatgcatacgggacagaccatgaaa

SEQ ID NO: 1738096 - DNA, 25 bp, Homo sapien
ccataaataatgtaagcctgctagt

SEQ ID NO: 1738097 - DNA, 25 bp, Homo sapien
ggtagcccttagatattgctcattg

SEQ ID NO: 1738098 - DNA, 25 bp, Homo sapien
gaatattagtgttgttggtagccct

SEQ ID NO: 1738099 - DNA, 25 bp, Homo sapien
gaggcttagggagtcattaggtacc

SEQ ID NO: 1738100 - DNA, 25 bp, Homo sapien
gacctgccccatgttaaagagatga

SEQ ID NO: 1738101 - DNA, 25 bp, Homo sapien
tagtacaaatgtaacccaggtagca

SEQ ID NO: 1738102 - DNA, 25 bp, Homo sapien
tgaaacacattgtaaggaatccaca

SEQ ID NO: 1738103 - DNA, 25 bp, Homo sapien
tgcacatagttcctacatcactggg

SEQ ID NO: 1738104 - DNA, 25 bp, Homo sapien
gaagccatgactcaaacacaggtag

SEQ ID NO: 1738105 - DNA, 25 bp, Homo sapien
cacagggagttacagcatacagata

SEQ ID NO: 1738106 - DNA, 25 bp, Homo sapien
tacagagctagtacgtgcagaagcc

SEQ ID NO: 1738107 - DNA, 25 bp, Homo sapien
ttaacgcaggttatcatatgccagc

SEQ ID NO: 1738108 - DNA, 25 bp, Homo sapien
cactatgtggtgtgtatctagaacc

SEQ ID NO: 1738109 - DNA, 25 bp, Homo sapien
gagcacattactggatcctcaggaa

SEQ ID NO: 1738110 - DNA, 25 bp, Homo sapien
tgtaagtcaggctaaagtccacctg

SEQ ID NO: 1738111 - DNA, 25 bp, Homo sapien
gaatcagatggaaatagcctactgg

SEQ ID NO: 1738112 - DNA, 25 bp, Homo sapien
aaaggcatacaggtctgcatctgac

SEQ ID NO: 1738113 - DNA, 25 bp, Homo sapien
ctcttgaacagcagtaaaggcatac

SEQ ID NO: 1738114 - DNA, 25 bp, Homo sapien
cagcagtaaaggcatacaggtctgc

SEQ ID NO: 1738115 - DNA, 25 bp, Homo sapien
ttgaacagcagtaaaggcatacagg

SEQ ID NO: 1738116 - DNA, 25 bp, Homo sapien
gaactctgccaagagacttctccta

SEQ ID NO: 1738117 - DNA, 25 bp, Homo sapien
tagatctgctctggtactcaacttg

SEQ ID NO: 1738118 - DNA, 25 bp, Homo sapien
gatgctactgacttaactgcctttg

SEQ ID NO: 1738119 - DNA, 25 bp, Homo sapien
acttgctgccaaatttccatgatgc

SEQ ID NO: 1738120 - DNA, 25 bp, Homo sapien
cacattcccgatgaggccataatag

SEQ ID NO: 1738121 - DNA, 25 bp, Homo sapien
tcccgatgaggccataatagttcac

SEQ ID NO: 1738122 - DNA, 25 bp, Homo sapien
acacttcacattcccgatgaggcca

SEQ ID NO: 1738123 - DNA, 25 bp, Homo sapien
gaggccataatagttcacgatgaaa

SEQ ID NO: 1738124 - DNA, 25 bp, Homo sapien
ctacacatgaaagtacctgcccaag

SEQ ID NO: 1738125 - DNA, 25 bp, Homo sapien
gagtaaagtactcttggcagtagac

SEQ ID NO: 1738126 - DNA, 25 bp, Homo sapien
cacttgttgctcttggtgaccagag

SEQ ID NO: 1738127 - DNA, 25 bp, Homo sapien
tctctagggattgacctacaatggc

SEQ ID NO: 1738128 - DNA, 25 bp, Homo sapien
ttctaggcaggtccggctggtttct

SEQ ID NO: 1738129 - DNA, 25 bp, Homo sapien
gatgcttttgtgtgctacttcccct

SEQ ID NO: 1738130 - DNA, 25 bp, Homo sapien
caagctcatactctttgtgtcccag

SEQ ID NO: 1738131 - DNA, 25 bp, Homo sapien
caagtcagatgtcagctgatcccca

SEQ ID NO: 1738132 - DNA, 25 bp, Homo sapien
atgtggctcttataggagaaacatt

SEQ ID NO: 1738133 - DNA, 25 bp, Homo sapien
gattgggtgacttctctgaccgtct

SEQ ID NO: 1738134 - DNA, 25 bp, Homo sapien
tgggattgggtgacttctctgaccg

SEQ ID NO: 1738135 - DNA, 25 bp, Homo sapien
cctgggattgggtgacttctctgac

SEQ ID NO: 1738136 - DNA, 25 bp, Homo sapien
ttgggtgacttctctgaccgtctgg

SEQ ID NO: 1738137 - DNA, 25 bp, Homo sapien
ggctcttctgcttccgttatctgcc

SEQ ID NO: 1738138 - DNA, 25 bp, Homo sapien
gggctcttctgcttccgttatctgc

SEQ ID NO: 1738139 - DNA, 25 bp, Homo sapien
cttctgcttccgttatctgccccaa

SEQ ID NO: 1738140 - DNA, 25 bp, Homo sapien
tcttctgcttccgttatctgcccca

SEQ ID NO: 1738141 - DNA, 25 bp, Homo sapien
gcatctccctcctggtggatttttg

SEQ ID NO: 1738142 - DNA, 25 bp, Homo sapien
atctccctcctggtggatttttgtt

SEQ ID NO: 1738143 - DNA, 25 bp, Homo sapien
gagggcatctccctcctggtggatt

SEQ ID NO: 1738144 - DNA, 25 bp, Homo sapien
gggcatctccctcctggtggatttt

SEQ ID NO: 1738145 - DNA, 25 bp, Homo sapien
accacctctaagtccgtctctgttt

SEQ ID NO: 1738146 - DNA, 25 bp, Homo sapien
gattggctgctctaccttcttggac

SEQ ID NO: 1738147 - DNA, 25 bp, Homo sapien
gagcctcaactttggcttcgtttta

SEQ ID NO: 1738148 - DNA, 25 bp, Homo sapien
cagagccggctcctcaatgattggc

SEQ ID NO: 1738149 - DNA, 25 bp, Homo sapien
acaagcttccgttttgcctgactct

SEQ ID NO: 1738150 - DNA, 25 bp, Homo sapien
tcgatcgatctctccttgcaaggcc

SEQ ID NO: 1738151 - DNA, 25 bp, Homo sapien
ttttgcctgactctcgatcgatctc

SEQ ID NO: 1738152 - DNA, 25 bp, Homo sapien
gactctcgatcgatctctccttgca

SEQ ID NO: 1738153 - DNA, 25 bp, Homo sapien
ttgcaatcgtgctgcggggcttgga

SEQ ID NO: 1738154 - DNA, 25 bp, Homo sapien
cagagacgggctccgcggctgtact

SEQ ID NO: 1738155 - DNA, 25 bp, Homo sapien
ttggaagcgttcctatgaatataaa

SEQ ID NO: 1738156 - DNA, 25 bp, Homo sapien
agccaccagtaagtttgagaaactt

SEQ ID NO: 1738157 - DNA, 25 bp, Homo sapien
aggatcaagaggcaacttgaggcca

SEQ ID NO: 1738158 - DNA, 25 bp, Homo sapien
gatcaagaggcaacttgaggccaat

SEQ ID NO: 1738159 - DNA, 25 bp, Homo sapien
ttttgtgtgctcagggatggtagaa

SEQ ID NO: 1738160 - DNA, 25 bp, Homo sapien
cttgaggccaattttgtgtgctcag

SEQ ID NO: 1738161 - DNA, 25 bp, Homo sapien
tccctatgaggtctccattaaacat

SEQ ID NO: 1738162 - DNA, 25 bp, Homo sapien
acatggaagatcccatgatgatcat

SEQ ID NO: 1738163 - DNA, 25 bp, Homo sapien
ccattaaacatggaagatcccatga

SEQ ID NO: 1738164 - DNA, 25 bp, Homo sapien
gtacttgtgtccctatgaggtctcc

SEQ ID NO: 1738165 - DNA, 25 bp, Homo sapien
tatgcatatgtagaagctgtcaaac

SEQ ID NO: 1738166 - DNA, 25 bp, Homo sapien
atctggatgtttgggaaagcctgga

SEQ ID NO: 1738167 - DNA, 25 bp, Homo sapien
tccagatgctgagcacgatccattt

SEQ ID NO: 1738168 - DNA, 25 bp, Homo sapien
gcctggatagagtactcatccagat

SEQ ID NO: 1738169 - DNA, 25 bp, Homo sapien
gccatgaacggacaagtttccaaga

SEQ ID NO: 1738170 - DNA, 25 bp, Homo sapien
gaaacaatgtgagatttggtattgt

SEQ ID NO: 1738171 - DNA, 25 bp, Homo sapien
ccctggtcctcaacgtggccatgaa

SEQ ID NO: 1738172 - DNA, 25 bp, Homo sapien
ctttgaggagatgagaaacaatgtg

SEQ ID NO: 1738173 - DNA, 25 bp, Homo sapien
ctggcaacacgacacttgatttgga

SEQ ID NO: 1738174 - DNA, 25 bp, Homo sapien
gcaacacgacacttgatttggagac

SEQ ID NO: 1738175 - DNA, 25 bp, Homo sapien
ggcaacacgacacttgatttggaga

SEQ ID NO: 1738176 - DNA, 25 bp, Homo sapien
tggcaacacgacacttgatttggag

SEQ ID NO: 1738177 - DNA, 25 bp, Homo sapien
tatccacagcaggatgaattgccat

SEQ ID NO: 1738178 - DNA, 25 bp, Homo sapien
tctgatgggtgacggcctctatcca

SEQ ID NO: 1738179 - DNA, 25 bp, Homo sapien
gtgacggcctctatccacagcagga

SEQ ID NO: 1738180 - DNA, 25 bp, Homo sapien
caaacaacctctgatgggtgacggc

SEQ ID NO: 1738181 - DNA, 25 bp, Homo sapien
ttcactaatggttacaccgttgttc

SEQ ID NO: 1738182 - DNA, 25 bp, Homo sapien
tacattttactagcctgaaaggatt

SEQ ID NO: 1738183 - DNA, 25 bp, Homo sapien
ttacattttactagcctgaaaggat

SEQ ID NO: 1738184 - DNA, 25 bp, Homo sapien
aagctgaagtggtgccctttgtgga

SEQ ID NO: 1738185 - DNA, 25 bp, Homo sapien
ccaagctgaagtggtgccctttgtg

SEQ ID NO: 1738186 - DNA, 25 bp, Homo sapien
ctgaagtggtgccctttgtggagga

SEQ ID NO: 1738187 - DNA, 25 bp, Homo sapien
gaagtggtgccctttgtggaggagc

SEQ ID NO: 1738188 - DNA, 25 bp, Homo sapien
actccaaaccaaagacgacaatcat

SEQ ID NO: 1738189 - DNA, 25 bp, Homo sapien
caacccgcagaccagattcgaatga

SEQ ID NO: 1738190 - DNA, 25 bp, Homo sapien
ctatatcgacaacagcaacccgcag

SEQ ID NO: 1738191 - DNA, 25 bp, Homo sapien
gaagggctttcgagcaaacctcagt

SEQ ID NO: 1738192 - DNA, 25 bp, Homo sapien
aggtatctgagactctgatattcac

SEQ ID NO: 1738193 - DNA, 25 bp, Homo sapien
agtccaggtatctgagactctgata

SEQ ID NO: 1738194 - DNA, 25 bp, Homo sapien
gtccaggtatctgagactctgatat

SEQ ID NO: 1738195 - DNA, 25 bp, Homo sapien
ccaggtatctgagactctgatattc

SEQ ID NO: 1738196 - DNA, 25 bp, Homo sapien
ccatggatgttagcttttaatatta

SEQ ID NO: 1738197 - DNA, 25 bp, Homo sapien
catggatgttagcttttaatattaa

SEQ ID NO: 1738198 - DNA, 25 bp, Homo sapien
tccatggatgttagcttttaatatt

SEQ ID NO: 1738199 - DNA, 25 bp, Homo sapien
ctccatggatgttagcttttaatat

SEQ ID NO: 1738200 - DNA, 25 bp, Homo sapien
gcccatggatggtgatacactttct

SEQ ID NO: 1738201 - DNA, 25 bp, Homo sapien
gaagattacgcaacaattcctgact

SEQ ID NO: 1738202 - DNA, 25 bp, Homo sapien
gaataaaggattcttcttaacagtg

SEQ ID NO: 1738203 - DNA, 25 bp, Homo sapien
gatgtgcatactatgaaagaagtat

SEQ ID NO: 1738204 - DNA, 25 bp, Homo sapien
tagctgaccactctagcagcttcag

SEQ ID NO: 1738205 - DNA, 25 bp, Homo sapien
tcaatagggtgcaatagtacatggg

SEQ ID NO: 1738206 - DNA, 25 bp, Homo sapien
gggcttgttagctgaccactctagc

SEQ ID NO: 1738207 - DNA, 25 bp, Homo sapien
aaaacctctatcaattgggcctttg

SEQ ID NO: 1738208 - DNA, 25 bp, Homo sapien
ctcgctgtgctggatctgcaccagt

SEQ ID NO: 1738209 - DNA, 25 bp, Homo sapien
tggatctgcaccagtttgtaggtgg

SEQ ID NO: 1738210 - DNA, 25 bp, Homo sapien
tgctggatctgcaccagtttgtagg

SEQ ID NO: 1738211 - DNA, 25 bp, Homo sapien
tctcgctgtgctggatctgcaccag

SEQ ID NO: 1738212 - DNA, 25 bp, Homo sapien
cagccgctgaagtggttctccaggt

SEQ ID NO: 1738213 - DNA, 25 bp, Homo sapien
ccgctgaagtggttctccaggttcc

SEQ ID NO: 1738214 - DNA, 25 bp, Homo sapien
tgaagtggttctccaggttccactc

SEQ ID NO: 1738215 - DNA, 25 bp, Homo sapien
aagtggttctccaggttccactcac

SEQ ID NO: 1738216 - DNA, 25 bp, Homo sapien
agccagcatctcgccgtgcctgctt

SEQ ID NO: 1738217 - DNA, 25 bp, Homo sapien
gcatctcgccgtgcctgctttgccg

SEQ ID NO: 1738218 - DNA, 25 bp, Homo sapien
ccgtgcctgctttgccgcctcatgg

SEQ ID NO: 1738219 - DNA, 25 bp, Homo sapien
tttgccgcctcatggcccgctgggc

SEQ ID NO: 1738220 - DNA, 25 bp, Homo sapien
ccggctagagccccatagtgctgct

SEQ ID NO: 1738221 - DNA, 25 bp, Homo sapien
gaccggctagagccccatagtgctg

SEQ ID NO: 1738222 - DNA, 25 bp, Homo sapien
accggctagagccccatagtgctgc

SEQ ID NO: 1738223 - DNA, 25 bp, Homo sapien
agaccggctagagccccatagtgct

SEQ ID NO: 1738224 - DNA, 25 bp, Homo sapien
catcataggagcacctgcagatctt

SEQ ID NO: 1738225 - DNA, 25 bp, Homo sapien
cataggagcacctgcagatcttcac

SEQ ID NO: 1738226 - DNA, 25 bp, Homo sapien
tggtgggacatcataggagcacctg

SEQ ID NO: 1738227 - DNA, 25 bp, Homo sapien
gggacatcataggagcacctgcaga

SEQ ID NO: 1738228 - DNA, 25 bp, Homo sapien
tgtagaaaggatggtagggctccat

SEQ ID NO: 1738229 - DNA, 25 bp, Homo sapien
ctgtagaaaggatggtagggctcca

SEQ ID NO: 1738230 - DNA, 25 bp, Homo sapien
gtcagtgccccagaggctgttgcca

SEQ ID NO: 1738231 - DNA, 25 bp, Homo sapien
ccttcagatgcttgtcagtgcccca

SEQ ID NO: 1738232 - DNA, 25 bp, Homo sapien
ctcacaggagggtaggtgattttct

SEQ ID NO: 1738233 - DNA, 25 bp, Homo sapien
tgggctgcagtcagtacccatttcc

SEQ ID NO: 1738234 - DNA, 25 bp, Homo sapien
gaactgcgtgggctgggcttgatgg

SEQ ID NO: 1738235 - DNA, 25 bp, Homo sapien
agacaatgagaatgccagttggcag

SEQ ID NO: 1738236 - DNA, 25 bp, Homo sapien
catcccctaggaactgcgtgggctg

SEQ ID NO: 1738237 - DNA, 25 bp, Homo sapien
ttcatagacaatgagaatgccagtt

SEQ ID NO: 1738238 - DNA, 25 bp, Homo sapien
ttggagaggaccaagaggcatttca

SEQ ID NO: 1738239 - DNA, 25 bp, Homo sapien
gagaggaccaagaggcatttcactg

SEQ ID NO: 1738240 - DNA, 25 bp, Homo sapien
ggaccaagaggcatttcactgccat

SEQ ID NO: 1738241 - DNA, 25 bp, Homo sapien
agaggaccaagaggcatttcactgc

SEQ ID NO: 1738242 - DNA, 25 bp, Homo sapien
ttccagaaacaggatcagaattcat

SEQ ID NO: 1738243 - DNA, 25 bp, Homo sapien
tttatgtattgctgtttatgaacgc

SEQ ID NO: 1738244 - DNA, 25 bp, Homo sapien
gctgcaaagtgtattgctgctctta

SEQ ID NO: 1738245 - DNA, 25 bp, Homo sapien
ccctcactggcactagattagagca

SEQ ID NO: 1738246 - DNA, 25 bp, Homo sapien
tgaacgctgcaaagtgtattgctgc

SEQ ID NO: 1738247 - DNA, 25 bp, Homo sapien
caagaaggaactaaatgtgttgaca

SEQ ID NO: 1738248 - DNA, 25 bp, Homo sapien
agagttaccactcttggcagctgtt

SEQ ID NO: 1738249 - DNA, 25 bp, Homo sapien
caaagagagttaccactcttggcag

SEQ ID NO: 1738250 - DNA, 25 bp, Homo sapien
agagagttaccactcttggcagctg

SEQ ID NO: 1738251 - DNA, 25 bp, Homo sapien
aaacaactgctattgaagcgataag

SEQ ID NO: 1738252 - DNA, 25 bp, Homo sapien
tctgagtgcagacgtggcaaaaata

SEQ ID NO: 1738253 - DNA, 25 bp, Homo sapien
taggaaacggagacttctgagtgca

SEQ ID NO: 1738254 - DNA, 25 bp, Homo sapien
tgaacccagtaatttccaagtgcct

SEQ ID NO: 1738255 - DNA, 25 bp, Homo sapien
ccagatagacaaggaaagacgaaaa

SEQ ID NO: 1738256 - DNA, 25 bp, Homo sapien
tcctatgtaccaagctgtgattaat

SEQ ID NO: 1738257 - DNA, 25 bp, Homo sapien
actctttattggcatccttttccac

SEQ ID NO: 1738258 - DNA, 25 bp, Homo sapien
cttttccaccagatagacaaggaaa

SEQ ID NO: 1738259 - DNA, 25 bp, Homo sapien
gttaggggagttttgtctccatagc

SEQ ID NO: 1738260 - DNA, 25 bp, Homo sapien
agttaggggagttttgtctccatag

SEQ ID NO: 1738261 - DNA, 25 bp, Homo sapien
agcctgcagaaagcaatcttcccag

SEQ ID NO: 1738262 - DNA, 25 bp, Homo sapien
atgccaaggagtgcaaagcctgcag

SEQ ID NO: 1738263 - DNA, 25 bp, Homo sapien
agtctctaagatctaatttaaactg

SEQ ID NO: 1738264 - DNA, 25 bp, Homo sapien
tcactctaataagtctctaagatct

SEQ ID NO: 1738265 - DNA, 25 bp, Homo sapien
tctaataagtctctaagatctaatt

SEQ ID NO: 1738266 - DNA, 25 bp, Homo sapien
aactgctttattggtgcaaagatac

SEQ ID NO: 1738267 - DNA, 25 bp, Homo sapien
cttgggttggcttttggagcttgct

SEQ ID NO: 1738268 - DNA, 25 bp, Homo sapien
aacaagatgctttgtctcagccttg

SEQ ID NO: 1738269 - DNA, 25 bp, Homo sapien
agcttgctaaattcagtctctgggc

SEQ ID NO: 1738270 - DNA, 25 bp, Homo sapien
tctttaactcttgagtttattagca

SEQ ID NO: 1738271 - DNA, 25 bp, Homo sapien
gtacttttaatgcaaaacctgagcc

SEQ ID NO: 1738272 - DNA, 25 bp, Homo sapien
caaagtgtttctggcggtgttgttc

SEQ ID NO: 1738273 - DNA, 25 bp, Homo sapien
ctcaaagtgtttctggcggtgttgt

SEQ ID NO: 1738274 - DNA, 25 bp, Homo sapien
cttgtacttttaatgcaaaacctga

SEQ ID NO: 1738275 - DNA, 25 bp, Homo sapien
caagaccctccagtttagaaattcg

SEQ ID NO: 1738276 - DNA, 25 bp, Homo sapien
tttcctagggccttggagcaccact

SEQ ID NO: 1738277 - DNA, 25 bp, Homo sapien
tactgcagctttaaggcaagtttcc

SEQ ID NO: 1738278 - DNA, 25 bp, Homo sapien
tagaaattcggtagcttccacttcc

SEQ ID NO: 1738279 - DNA, 25 bp, Homo sapien
ttctcatcagctgcgtaactacgcc

SEQ ID NO: 1738280 - DNA, 25 bp, Homo sapien
tttctcatcagctgcgtaactacgc

SEQ ID NO: 1738281 - DNA, 25 bp, Homo sapien
cagctgcgtaactacgccaaacaca

SEQ ID NO: 1738282 - DNA, 25 bp, Homo sapien
tcatcagctgcgtaactacgccaaa

SEQ ID NO: 1738283 - DNA, 25 bp, Homo sapien
aattttaatccgctgggtcccattg

SEQ ID NO: 1738284 - DNA, 25 bp, Homo sapien
gctggtgggctttacgaaatgagac

SEQ ID NO: 1738285 - DNA, 25 bp, Homo sapien
aagtaaaagcttgaggaccatccag

SEQ ID NO: 1738286 - DNA, 25 bp, Homo sapien
caagaactgtggtgcttacctttag

SEQ ID NO: 1738287 - DNA, 25 bp, Homo sapien
gaaatccctggagtgctatgaatat

SEQ ID NO: 1738288 - DNA, 25 bp, Homo sapien
attttagataccacccaccaggagg

SEQ ID NO: 1738289 - DNA, 25 bp, Homo sapien
tatgaatatctctgtcctaggtgct

SEQ ID NO: 1738290 - DNA, 25 bp, Homo sapien
gaggcatttcccattagagcttagg

SEQ ID NO: 1738291 - DNA, 25 bp, Homo sapien
gttttgccctttgcagcttcactct

SEQ ID NO: 1738292 - DNA, 25 bp, Homo sapien
ctgtgttttgccctttgcagcttca

SEQ ID NO: 1738293 - DNA, 25 bp, Homo sapien
tgtgttttgccctttgcagcttcac

SEQ ID NO: 1738294 - DNA, 25 bp, Homo sapien
tgttttgccctttgcagcttcactc

SEQ ID NO: 1738295 - DNA, 25 bp, Homo sapien
gcttgatgcttccccttgttctttc

SEQ ID NO: 1738296 - DNA, 25 bp, Homo sapien
ctgcttgatgcttccccttgttctt

SEQ ID NO: 1738297 - DNA, 25 bp, Homo sapien
tgcttgatgcttccccttgttcttt

SEQ ID NO: 1738298 - DNA, 25 bp, Homo sapien
ataaacaaacatgtagcaagagaga

SEQ ID NO: 1738299 - DNA, 25 bp, Homo sapien
taaacaaacatgtagcaagagagaa

SEQ ID NO: 1738300 - DNA, 25 bp, Homo sapien
tgttgatcgattttactcacatgag

SEQ ID NO: 1738301 - DNA, 25 bp, Homo sapien
gattttactcacatgagacacattt

SEQ ID NO: 1738302 - DNA, 25 bp, Homo sapien
gatcgattttactcacatgagacac

SEQ ID NO: 1738303 - DNA, 25 bp, Homo sapien
tgtatttgttgatcgattttactca

SEQ ID NO: 1738304 - DNA, 25 bp, Homo sapien
tccgtgaggtgtacattctgaagag

SEQ ID NO: 1738305 - DNA, 25 bp, Homo sapien
gagcttctgcttattactacagaac

SEQ ID NO: 1738306 - DNA, 25 bp, Homo sapien
gaagagcttctgcttattactacag

SEQ ID NO: 1738307 - DNA, 25 bp, Homo sapien
cgtgaggtgtacattctgaagagct

SEQ ID NO: 1738308 - DNA, 25 bp, Homo sapien
cgcaatgtccactgtccccaactgc

SEQ ID NO: 1738309 - DNA, 25 bp, Homo sapien
gcaatgtccactgtccccaactgca

SEQ ID NO: 1738310 - DNA, 25 bp, Homo sapien
tgtccactgtccccaactgcagcat

SEQ ID NO: 1738311 - DNA, 25 bp, Homo sapien
aatgtccactgtccccaactgcagc

SEQ ID NO: 1738312 - DNA, 25 bp, Homo sapien
tctgagagagtaaagccgcagcctt

SEQ ID NO: 1738313 - DNA, 25 bp, Homo sapien
gggtatgaaagcagcgttctcatgg

SEQ ID NO: 1738314 - DNA, 25 bp, Homo sapien
cgaagtggaggccttgttttgtcca

SEQ ID NO: 1738315 - DNA, 25 bp, Homo sapien
catggataaggcttatttgagacga

SEQ ID NO: 1738316 - DNA, 25 bp, Homo sapien
tggagaacagaggcatgattattcc

SEQ ID NO: 1738317 - DNA, 25 bp, Homo sapien
gcgcactcgctccttaaaacttagc

SEQ ID NO: 1738318 - DNA, 25 bp, Homo sapien
ctgagaacttttgaggcgcagcgag

SEQ ID NO: 1738319 - DNA, 25 bp, Homo sapien
ggctcttaatactctggcccctggg

SEQ ID NO: 1738320 - DNA, 25 bp, Homo sapien
tctgcactttggtgggactgccctc

SEQ ID NO: 1738321 - DNA, 25 bp, Homo sapien
tgtcacctactgaggcttgtcggct

SEQ ID NO: 1738322 - DNA, 25 bp, Homo sapien
tggtcagacgtcacaaatacatcag

SEQ ID NO: 1738323 - DNA, 25 bp, Homo sapien
gaaatgatcatcctccttactgtgt

SEQ ID NO: 1738324 - DNA, 25 bp, Homo sapien
tctctaaggaagataagcagtggtc

SEQ ID NO: 1738325 - DNA, 25 bp, Homo sapien
gaaagagcaccttcattgttgacca

SEQ ID NO: 1738326 - DNA, 25 bp, Homo sapien
cctcagatcattgtgattatgaccc

SEQ ID NO: 1738327 - DNA, 25 bp, Homo sapien
cattgtgattatgacccctggttgt

SEQ ID NO: 1738328 - DNA, 25 bp, Homo sapien
gatcattgtgattatgacccctggt

SEQ ID NO: 1738329 - DNA, 25 bp, Homo sapien
tgattatgacccctggttgttaatt

SEQ ID NO: 1738330 - DNA, 25 bp, Homo sapien
ggtgacttgtgttgctcacttgagc

SEQ ID NO: 1738331 - DNA, 25 bp, Homo sapien
cacttgagcgtggaagagatatccc

SEQ ID NO: 1738332 - DNA, 25 bp, Homo sapien
tgagagggacccgtggactgcggtt

SEQ ID NO: 1738333 - DNA, 25 bp, Homo sapien
cctgaggacctttgagtaagctgag

SEQ ID NO: 1738334 - DNA, 25 bp, Homo sapien
caagctccgccaggaggagccacgt

SEQ ID NO: 1738335 - DNA, 25 bp, Homo sapien
gccacgtcagtgcagccactagggg

SEQ ID NO: 1738336 - DNA, 25 bp, Homo sapien
gtcagtgcagccactaggggtcgcc

SEQ ID NO: 1738337 - DNA, 25 bp, Homo sapien
gcaagctccgccaggaggagccacg

SEQ ID NO: 1738338 - DNA, 25 bp, Homo sapien
tcagccgtcttgcgcccatatggga

SEQ ID NO: 1738339 - DNA, 25 bp, Homo sapien
cagccgtcttgcgcccatatgggac

SEQ ID NO: 1738340 - DNA, 25 bp, Homo sapien
aggagtgtcccgtgttggtggcgga

SEQ ID NO: 1738341 - DNA, 25 bp, Homo sapien
ggctcgatggaggagtgtcccgtgt

SEQ ID NO: 1738342 - DNA, 25 bp, Homo sapien
gtgactcagatcctgcaagtggctc

SEQ ID NO: 1738343 - DNA, 25 bp, Homo sapien
tcagatcctgcaagtggctcgatgg

SEQ ID NO: 1738344 - DNA, 25 bp, Homo sapien
gctctggctgccttgagatgatgta

SEQ ID NO: 1738345 - DNA, 25 bp, Homo sapien
ccttgagatgatgtagttgagaggt

SEQ ID NO: 1738346 - DNA, 25 bp, Homo sapien
ctggctgccttgagatgatgtagtt

SEQ ID NO: 1738347 - DNA, 25 bp, Homo sapien
tagttgagaggtttggcagctgagg

SEQ ID NO: 1738348 - DNA, 25 bp, Homo sapien
ttctcgcttgcaatctgccaccttc

SEQ ID NO: 1738349 - DNA, 25 bp, Homo sapien
tcgcttgcaatctgccaccttccac

SEQ ID NO: 1738350 - DNA, 25 bp, Homo sapien
tgcaatctgccaccttccacttgct

SEQ ID NO: 1738351 - DNA, 25 bp, Homo sapien
cttgcaatctgccaccttccacttg

SEQ ID NO: 1738352 - DNA, 25 bp, Homo sapien
ttagtatcattcttgtggattttgg

SEQ ID NO: 1738353 - DNA, 25 bp, Homo sapien
cttagtatcattcttgtggattttg

SEQ ID NO: 1738354 - DNA, 25 bp, Homo sapien
cctctgaaagtgttgcatctataga

SEQ ID NO: 1738355 - DNA, 25 bp, Homo sapien
aagatattgcaactgctgtagccat

SEQ ID NO: 1738356 - DNA, 25 bp, Homo sapien
ctctgaaagtgttgcatctatagaa

SEQ ID NO: 1738357 - DNA, 25 bp, Homo sapien
ttcaaacaagggttgtggtagactg

SEQ ID NO: 1738358 - DNA, 25 bp, Homo sapien
actgttttcagtgatcttgatattt

SEQ ID NO: 1738359 - DNA, 25 bp, Homo sapien
ggttgtggtagactggtgggcctag

SEQ ID NO: 1738360 - DNA, 25 bp, Homo sapien
caaacaagggttgtggtagactggt

SEQ ID NO: 1738361 - DNA, 25 bp, Homo sapien
ttaaggcagcactcgaaggtcattt

SEQ ID NO: 1738362 - DNA, 25 bp, Homo sapien
ggcagcactcgaaggtcatttggca

SEQ ID NO: 1738363 - DNA, 25 bp, Homo sapien
tcgaaggtcatttggcagctcagtt

SEQ ID NO: 1738364 - DNA, 25 bp, Homo sapien
cactcgaaggtcatttggcagctca

SEQ ID NO: 1738365 - DNA, 25 bp, Homo sapien
gggtagcacttttctcggtatcaaa

SEQ ID NO: 1738366 - DNA, 25 bp, Homo sapien
gaagcagcgggtagcacttttctcg

SEQ ID NO: 1738367 - DNA, 25 bp, Homo sapien
aaaggactatggctgacagtgaaag

SEQ ID NO: 1738368 - DNA, 25 bp, Homo sapien
ttctcggtatcaaagagacgtgaaa

SEQ ID NO: 1738369 - DNA, 25 bp, Homo sapien
acccagcaaggatggaagtatcgtc

SEQ ID NO: 1738370 - DNA, 25 bp, Homo sapien
tcttcagtctggtcaccggggagtt

SEQ ID NO: 1738371 - DNA, 25 bp, Homo sapien
tcgtcagttctgttagttcttcagt

SEQ ID NO: 1738372 - DNA, 25 bp, Homo sapien
gatggaagtatcgtcagttctgtta

SEQ ID NO: 1738373 - DNA, 25 bp, Homo sapien
cagctgccactaccgttgccgccgc

SEQ ID NO: 1738374 - DNA, 25 bp, Homo sapien
ccagctgccactaccgttgccgccg

SEQ ID NO: 1738375 - DNA, 25 bp, Homo sapien
gctgccactaccgttgccgccgccc

SEQ ID NO: 1738376 - DNA, 25 bp, Homo sapien
tgccactaccgttgccgccgccctc

SEQ ID NO: 1738377 - DNA, 25 bp, Homo sapien
gaggcctgggcccttatcctttgta

SEQ ID NO: 1738378 - DNA, 25 bp, Homo sapien
tgatgcctgcatgcccagaggcctg

SEQ ID NO: 1738379 - DNA, 25 bp, Homo sapien
agccatcacccatgctgcgttcacc

SEQ ID NO: 1738380 - DNA, 25 bp, Homo sapien
tatcctttgtacaccacagagctga

SEQ ID NO: 1738381 - DNA, 25 bp, Homo sapien
cctaggagcacacttacttcatcgc

SEQ ID NO: 1738382 - DNA, 25 bp, Homo sapien
taggagcacacttacttcatcgctc

SEQ ID NO: 1738383 - DNA, 25 bp, Homo sapien
ccacctaggagcacacttacttcat

SEQ ID NO: 1738384 - DNA, 25 bp, Homo sapien
ggagcacacttacttcatcgctcgg

SEQ ID NO: 1738385 - DNA, 25 bp, Homo sapien
tagagtttgccaaagccaacaccaa

SEQ ID NO: 1738386 - DNA, 25 bp, Homo sapien
ctaatggcaactccaaatcccacca

SEQ ID NO: 1738387 - DNA, 25 bp, Homo sapien
tggccaagagcaagctaatggcaac

SEQ ID NO: 1738388 - DNA, 25 bp, Homo sapien
ccaaagccaacaccaagatggccaa

SEQ ID NO: 1738389 - DNA, 25 bp, Homo sapien
tttgtgatctttgacagcggggcag

SEQ ID NO: 1738390 - DNA, 25 bp, Homo sapien
gaagcggccaaaaatgcgctgaacg

SEQ ID NO: 1738391 - DNA, 25 bp, Homo sapien
gaacgatattcgcttagatcccgaa

SEQ ID NO: 1738392 - DNA, 25 bp, Homo sapien
gcttagatcccgaaaacccacagat

SEQ ID NO: 1738393 - DNA, 25 bp, Homo sapien
cagagaaccctacttgatcttccgg

SEQ ID NO: 1738394 - DNA, 25 bp, Homo sapien
agcggcctccccatggacattaaac

SEQ ID NO: 1738395 - DNA, 25 bp, Homo sapien
tatgaagagtccctactcaagctca

SEQ ID NO: 1738396 - DNA, 25 bp, Homo sapien
gaggtccggacactatcagcggcct

SEQ ID NO: 1738397 - DNA, 25 bp, Homo sapien
caacatcctgtaccccaataagaga

SEQ ID NO: 1738398 - DNA, 25 bp, Homo sapien
ctcccagcctaatgttgcactcccc

SEQ ID NO: 1738399 - DNA, 25 bp, Homo sapien
agcctaatgttgcactccccatcaa

SEQ ID NO: 1738400 - DNA, 25 bp, Homo sapien
tcaacatcctgtaccccaataagag

SEQ ID NO: 1738401 - DNA, 25 bp, Homo sapien
gattagcgaccttatagaagggctg

SEQ ID NO: 1738402 - DNA, 25 bp, Homo sapien
tacaccaggtacttaggtgcagctt

SEQ ID NO: 1738403 - DNA, 25 bp, Homo sapien
gctggagtgaactaggtaggccctc

SEQ ID NO: 1738404 - DNA, 25 bp, Homo sapien
tgtagacacatggatcttcacagct

SEQ ID NO: 1738405 - DNA, 25 bp, Homo sapien
tattgccagttaaataacaccacca

SEQ ID NO: 1738406 - DNA, 25 bp, Homo sapien
aaatggcgggatactcacagagtaa

SEQ ID NO: 1738407 - DNA, 25 bp, Homo sapien
caccatccgcaatttgaaacatgtt

SEQ ID NO: 1738408 - DNA, 25 bp, Homo sapien
ttctcacgtggaaatggcgggatac

SEQ ID NO: 1738409 - DNA, 25 bp, Homo sapien
catatacatcatcagtgccaagggc

SEQ ID NO: 1738410 - DNA, 25 bp, Homo sapien
tgatagctcgaatgacagttttaag

SEQ ID NO: 1738411 - DNA, 25 bp, Homo sapien
cttccactgatacatcacactggca

SEQ ID NO: 1738412 - DNA, 25 bp, Homo sapien
catcacactggcatcctttttcatc

SEQ ID NO: 1738413 - DNA, 25 bp, Homo sapien
atcacgttgttcaagattttcacca

SEQ ID NO: 1738414 - DNA, 25 bp, Homo sapien
cacgttgttcaagattttcaccaac

SEQ ID NO: 1738415 - DNA, 25 bp, Homo sapien
tcacgttgttcaagattttcaccaa

SEQ ID NO: 1738416 - DNA, 25 bp, Homo sapien
gaatcacgttgttcaagattttcac

SEQ ID NO: 1738417 - DNA, 25 bp, Homo sapien
tatagttactcagcattccttgaca

SEQ ID NO: 1738418 - DNA, 25 bp, Homo sapien
gcatgcagcaattcatctagtccag

SEQ ID NO: 1738419 - DNA, 25 bp, Homo sapien
caaaagggttaaactgggccagctg

SEQ ID NO: 1738420 - DNA, 25 bp, Homo sapien
tagctctctgccatcagtagaggaa

SEQ ID NO: 1738421 - DNA, 25 bp, Homo sapien
gaaatatgaatggtgcgactgatcc

SEQ ID NO: 1738422 - DNA, 25 bp, Homo sapien
tgtctaatgaagtagccactggcca

SEQ ID NO: 1738423 - DNA, 25 bp, Homo sapien
tcagtagcctcaagtagccagtggt

SEQ ID NO: 1738424 - DNA, 25 bp, Homo sapien
aaaaccctccggcaactgatgttga

SEQ ID NO: 1738425 - DNA, 25 bp, Homo sapien
tacacaacatgtccagatgaccagc

SEQ ID NO: 1738426 - DNA, 25 bp, Homo sapien
ttaaacttccgttttgcaacatgaa

SEQ ID NO: 1738427 - DNA, 25 bp, Homo sapien
cagatgaccagcagaatattgttca

SEQ ID NO: 1738428 - DNA, 25 bp, Homo sapien
catatggacgtaatgtttccttaaa

SEQ ID NO: 1738429 - DNA, 25 bp, Homo sapien
agagaaagaggagatctgattatga

SEQ ID NO: 1738430 - DNA, 25 bp, Homo sapien
tatcagagaaagaggagatctgatt

SEQ ID NO: 1738431 - DNA, 25 bp, Homo sapien
gaaagaggagatctgattatgaggg

SEQ ID NO: 1738432 - DNA, 25 bp, Homo sapien
ctatcagagaaagaggagatctgat

SEQ ID NO: 1738433 - DNA, 25 bp, Homo sapien
ttgaccacccgaccgagcatactga

SEQ ID NO: 1738434 - DNA, 25 bp, Homo sapien
catactgagatcgtctgtggtctca

SEQ ID NO: 1738435 - DNA, 25 bp, Homo sapien
tctgtggtctcatgttctgctgtta

SEQ ID NO: 1738436 - DNA, 25 bp, Homo sapien
tctcggctcttcttatctgatgtga

SEQ ID NO: 1738437 - DNA, 25 bp, Homo sapien
tgtgcggaacccgaaagatctttgc

SEQ ID NO: 1738438 - DNA, 25 bp, Homo sapien
cagttcctcggtcgacctgatcagg

SEQ ID NO: 1738439 - DNA, 25 bp, Homo sapien
gggtaaaaatcttggctgcctctgg

SEQ ID NO: 1738440 - DNA, 25 bp, Homo sapien
taagcgcgtagaaagtctgggcact

SEQ ID NO: 1738441 - DNA, 25 bp, Homo sapien
ttcatacaccccatagcattagctg

SEQ ID NO: 1738442 - DNA, 25 bp, Homo sapien
gggttaatgtcgatgcaccttggaa

SEQ ID NO: 1738443 - DNA, 25 bp, Homo sapien
taaagaactgctatgcctggaaaga

SEQ ID NO: 1738444 - DNA, 25 bp, Homo sapien
gaagggctttcgaaatagttcatgc

SEQ ID NO: 1738445 - DNA, 25 bp, Homo sapien
gttctggtgacctaagatagctaga

SEQ ID NO: 1738446 - DNA, 25 bp, Homo sapien
tttgctgccatgatatatttaagtg

SEQ ID NO: 1738447 - DNA, 25 bp, Homo sapien
tgcagactctgccagtactatctag

SEQ ID NO: 1738448 - DNA, 25 bp, Homo sapien
gacattcagggcatattaaaaaata

SEQ ID NO: 1738449 - DNA, 25 bp, Homo sapien
tccacagagagtaacacgacagaca

SEQ ID NO: 1738450 - DNA, 25 bp, Homo sapien
aatcttcagtcgtcagcaatgctgg

SEQ ID NO: 1738451 - DNA, 25 bp, Homo sapien
gcttagtgtaaatgggagacccctc

SEQ ID NO: 1738452 - DNA, 25 bp, Homo sapien
gaaggcagacacacttgtactcaga

SEQ ID NO: 1738453 - DNA, 25 bp, Homo sapien
agtgattggttgttcgggtttccat

SEQ ID NO: 1738454 - DNA, 25 bp, Homo sapien
taattaaggactgatctcccctggg

SEQ ID NO: 1738455 - DNA, 25 bp, Homo sapien
agtttgaacttgtggccgggacctg

SEQ ID NO: 1738456 - DNA, 25 bp, Homo sapien
gagttcactgtatccgtaattaagg

SEQ ID NO: 1738457 - DNA, 25 bp, Homo sapien
cagcctcaggttggggtaactgctg

SEQ ID NO: 1738458 - DNA, 25 bp, Homo sapien
agcagcctcaggttggggtaactgc

SEQ ID NO: 1738459 - DNA, 25 bp, Homo sapien
ggttggggtaactgctgtgctgctg

SEQ ID NO: 1738460 - DNA, 25 bp, Homo sapien
ctcaggttggggtaactgctgtgct

SEQ ID NO: 1738461 - DNA, 25 bp, Homo sapien
tccctgaacagacttgttggaggca

SEQ ID NO: 1738462 - DNA, 25 bp, Homo sapien
aacagacttgttggaggcattcaca

SEQ ID NO: 1738463 - DNA, 25 bp, Homo sapien
ctgaacagacttgttggaggcattc

SEQ ID NO: 1738464 - DNA, 25 bp, Homo sapien
ctgtccctgaacagacttgttggag

SEQ ID NO: 1738465 - DNA, 25 bp, Homo sapien
atgggaggatcgaatgagcccggga

SEQ ID NO: 1738466 - DNA, 25 bp, Homo sapien
aaatgggaggatcgaatgagcccgg

SEQ ID NO: 1738467 - DNA, 25 bp, Homo sapien
tgaaatgggaggatcgaatgagccc

SEQ ID NO: 1738468 - DNA, 25 bp, Homo sapien
ctgaaatgggaggatcgaatgagcc

SEQ ID NO: 1738469 - DNA, 25 bp, Homo sapien
gattcgatttaggttgttaggtata

SEQ ID NO: 1738470 - DNA, 25 bp, Homo sapien
ggtgtgattcgatttaggttgttag

SEQ ID NO: 1738471 - DNA, 25 bp, Homo sapien
taaggtgtgattcgatttaggttgt

SEQ ID NO: 1738472 - DNA, 25 bp, Homo sapien
tcctaaggtgtgattcgatttaggt

SEQ ID NO: 1738473 - DNA, 25 bp, Homo sapien
ctgaattctgccctccattaggatt

SEQ ID NO: 1738474 - DNA, 25 bp, Homo sapien
ggttcccggcggcatcactgagatg

SEQ ID NO: 1738475 - DNA, 25 bp, Homo sapien
cattaggattatctgctttgtggga

SEQ ID NO: 1738476 - DNA, 25 bp, Homo sapien
cccctgtggtctcgaactcggttag

SEQ ID NO: 1738477 - DNA, 25 bp, Homo sapien
ttcctaccgtcaaagcccagccttg

SEQ ID NO: 1738478 - DNA, 25 bp, Homo sapien
ggtaccgctgtctcctcacaatcgg

SEQ ID NO: 1738479 - DNA, 25 bp, Homo sapien
cgcggcccaggaggtaccgctgtct

SEQ ID NO: 1738480 - DNA, 25 bp, Homo sapien
gccgccctactcagggagtggccca

SEQ ID NO: 1738481 - DNA, 25 bp, Homo sapien
tacacagagcaggcgggaggagggc

SEQ ID NO: 1738482 - DNA, 25 bp, Homo sapien
acacagagcaggcgggaggagggct

SEQ ID NO: 1738483 - DNA, 25 bp, Homo sapien
ctacacagagcaggcgggaggaggg

SEQ ID NO: 1738484 - DNA, 25 bp, Homo sapien
gggtcattgccactggctcgtccct

SEQ ID NO: 1738485 - DNA, 25 bp, Homo sapien
tcagcaatgggggtcgtccgggtct

SEQ ID NO: 1738486 - DNA, 25 bp, Homo sapien
tgggctctctgcgcgccggcagtgg

SEQ ID NO: 1738487 - DNA, 25 bp, Homo sapien
gtcgtccgggtctgggtcattgcca

SEQ ID NO: 1738488 - DNA, 25 bp, Homo sapien
ctctagggtttttcaccccatatcg

SEQ ID NO: 1738489 - DNA, 25 bp, Homo sapien
agagatgccgcctggaggccactca

SEQ ID NO: 1738490 - DNA, 25 bp, Homo sapien
ggagtctggacctcccttggtggac

SEQ ID NO: 1738491 - DNA, 25 bp, Homo sapien
tggtggaccgacacccgagggtctc

SEQ ID NO: 1738492 - DNA, 25 bp, Homo sapien
caaaggaatgcactcagagcagctc

SEQ ID NO: 1738493 - DNA, 25 bp, Homo sapien
tacaggcgttcttcatcaagggtgg

SEQ ID NO: 1738494 - DNA, 25 bp, Homo sapien
tagataagattgcaaggtcccatac

SEQ ID NO: 1738495 - DNA, 25 bp, Homo sapien
tgtactggcttgagactcctaggct

SEQ ID NO: 1738496 - DNA, 25 bp, Homo sapien
tatcctagagtgcactagtctctgg

SEQ ID NO: 1738497 - DNA, 25 bp, Homo sapien
gaaactacaggtaatcatctccggg

SEQ ID NO: 1738498 - DNA, 25 bp, Homo sapien
tcaaaggcctatgcagaacagctaa

SEQ ID NO: 1738499 - DNA, 25 bp, Homo sapien
tgccttgctcactcaagagtccagg

SEQ ID NO: 1738500 - DNA, 25 bp, Homo sapien
cattctaatgggtatgaactggtat

SEQ ID NO: 1738501 - DNA, 25 bp, Homo sapien
ttgatgacagccattctaatgggta

SEQ ID NO: 1738502 - DNA, 25 bp, Homo sapien
gacagccattctaatgggtatgaac

SEQ ID NO: 1738503 - DNA, 25 bp, Homo sapien
ggccccatttttttgatgacagcca

SEQ ID NO: 1738504 - DNA, 25 bp, Homo sapien
gaaaaggcggattactcaatcaagg

SEQ ID NO: 1738505 - DNA, 25 bp, Homo sapien
tgaaaaaggcttagtcctatctgcg

SEQ ID NO: 1738506 - DNA, 25 bp, Homo sapien
tgagacccgcctgactgagaggtga

SEQ ID NO: 1738507 - DNA, 25 bp, Homo sapien
tgtccaaaacagaccacttggccct

SEQ ID NO: 1738508 - DNA, 25 bp, Homo sapien
ggttggagtgtagtcgcaaaatctc

SEQ ID NO: 1738509 - DNA, 25 bp, Homo sapien
gttggagtgtagtcgcaaaatctca

SEQ ID NO: 1738510 - DNA, 25 bp, Homo sapien
ctgtgtagaaaggaaggttgaagtt

SEQ ID NO: 1738511 - DNA, 25 bp, Homo sapien
gagatgaggatctcaacattgccct

SEQ ID NO: 1738512 - DNA, 25 bp, Homo sapien
caccaggaggaagactctgcttgag

SEQ ID NO: 1738513 - DNA, 25 bp, Homo sapien
tctagctgtcccatatggagcagga

SEQ ID NO: 1738514 - DNA, 25 bp, Homo sapien
ctcagaatctagctgtcccatatgg

SEQ ID NO: 1738515 - DNA, 25 bp, Homo sapien
gcctggcccgtcaatcagccttttg

SEQ ID NO: 1738516 - DNA, 25 bp, Homo sapien
cgcctggcccgtcaatcagcctttt

SEQ ID NO: 1738517 - DNA, 25 bp, Homo sapien
gcgcctggcccgtcaatcagccttt

SEQ ID NO: 1738518 - DNA, 25 bp, Homo sapien
gcaacctcctcctcccggttcaagc

SEQ ID NO: 1738519 - DNA, 25 bp, Homo sapien
gacagaatctcactcagtctgccgc

SEQ ID NO: 1738520 - DNA, 25 bp, Homo sapien
gtctgccgcccaggctggagagcag

SEQ ID NO: 1738521 - DNA, 25 bp, Homo sapien
agcagtggcacgatctctgctcact

SEQ ID NO: 1738522 - DNA, 25 bp, Homo sapien
ttcactgcaacttccacactctggg

SEQ ID NO: 1738523 - DNA, 25 bp, Homo sapien
ggttcactgcaacttccacactctg

SEQ ID NO: 1738524 - DNA, 25 bp, Homo sapien
gcaacttccacactctgggttcaag

SEQ ID NO: 1738525 - DNA, 25 bp, Homo sapien
cactgcaacttccacactctgggtt

SEQ ID NO: 1738526 - DNA, 25 bp, Homo sapien
gctgccctttagctacaggtgcaaa

SEQ ID NO: 1738527 - DNA, 25 bp, Homo sapien
tgaggtggtgcaaccactgctcact

SEQ ID NO: 1738528 - DNA, 25 bp, Homo sapien
tgtcaatcgataccaattgctaggt

SEQ ID NO: 1738529 - DNA, 25 bp, Homo sapien
gaggccaaggctactggacagtttt

SEQ ID NO: 1738530 - DNA, 25 bp, Homo sapien
gatttatcatccatgccaaaaagga

SEQ ID NO: 1738531 - DNA, 25 bp, Homo sapien
tacctagggtctcagtagtagaaga

SEQ ID NO: 1738532 - DNA, 25 bp, Homo sapien
ccaccatgccagattgacctggttt

SEQ ID NO: 1738533 - DNA, 25 bp, Homo sapien
aaggagtttgtagccaagtgtgaga

SEQ ID NO: 1738534 - DNA, 25 bp, Homo sapien
tgaccttcaggaaatgctgggatta

SEQ ID NO: 1738535 - DNA, 25 bp, Homo sapien
actcttgaccttcaggaaatgctgg

SEQ ID NO: 1738536 - DNA, 25 bp, Homo sapien
tcttgaccttcaggaaatgctggga

SEQ ID NO: 1738537 - DNA, 25 bp, Homo sapien
tgaactcttgaccttcaggaaatgc

SEQ ID NO: 1738538 - DNA, 25 bp, Homo sapien
gagttgagacttgcatggatcactt

SEQ ID NO: 1738539 - DNA, 25 bp, Homo sapien
atactgcagttatcaaagaggaaag

SEQ ID NO: 1738540 - DNA, 25 bp, Homo sapien
actagtaacacttgagtccacacag

SEQ ID NO: 1738541 - DNA, 25 bp, Homo sapien
ccagtgaggtaaagcttcaactcca

SEQ ID NO: 1738542 - DNA, 25 bp, Homo sapien
aaatggtccttgtgcactaagccca

SEQ ID NO: 1738543 - DNA, 25 bp, Homo sapien
tatgaccacataccttctgagcagt

SEQ ID NO: 1738544 - DNA, 25 bp, Homo sapien
aatttaattaatgcaaggccagcca

SEQ ID NO: 1738545 - DNA, 25 bp, Homo sapien
ccccggtagggtatgtcagttgcca

SEQ ID NO: 1738546 - DNA, 25 bp, Homo sapien
aatccagcaatgttgtaatcatcca

SEQ ID NO: 1738547 - DNA, 25 bp, Homo sapien
tcaatccagcaatgttgtaatcatc

SEQ ID NO: 1738548 - DNA, 25 bp, Homo sapien
ctgctatcaatccagcaatgttgta

SEQ ID NO: 1738549 - DNA, 25 bp, Homo sapien
gttgtaatcatccaacagattcttc

SEQ ID NO: 1738550 - DNA, 25 bp, Homo sapien
gatagtggctatcatcgcaattgct

SEQ ID NO: 1738551 - DNA, 25 bp, Homo sapien
catctttcaggatcctagtcagggc

SEQ ID NO: 1738552 - DNA, 25 bp, Homo sapien
gcatctcctactgtaagtcccggct

SEQ ID NO: 1738553 - DNA, 25 bp, Homo sapien
tagagaccagttttatcacggcatc

SEQ ID NO: 1738554 - DNA, 25 bp, Homo sapien
catttttagatgtactatcattcca

SEQ ID NO: 1738555 - DNA, 25 bp, Homo sapien
tcatttttagatgtactatcattcc

SEQ ID NO: 1738556 - DNA, 25 bp, Homo sapien
atttttagatgtactatcattccat

SEQ ID NO: 1738557 - DNA, 25 bp, Homo sapien
catgggagatggtgcaacacatgca

SEQ ID NO: 1738558 - DNA, 25 bp, Homo sapien
tcattcatggtaggctaagtgctcc

SEQ ID NO: 1738559 - DNA, 25 bp, Homo sapien
gcagtaaacttgcactacagcagtc

SEQ ID NO: 1738560 - DNA, 25 bp, Homo sapien
gcagtggaagttgcagaccagtcat

SEQ ID NO: 1738561 - DNA, 25 bp, Homo sapien
agcttgtggaagaacagcttaaggc

SEQ ID NO: 1738562 - DNA, 25 bp, Homo sapien
catcagcgttatttccatcttgttt

SEQ ID NO: 1738563 - DNA, 25 bp, Homo sapien
tccatcagcgttatttccatcttgt

SEQ ID NO: 1738564 - DNA, 25 bp, Homo sapien
ccatcagcgttatttccatcttgtt

SEQ ID NO: 1738565 - DNA, 25 bp, Homo sapien
aatccaccttaacgtaggtcctgat

SEQ ID NO: 1738566 - DNA, 25 bp, Homo sapien
gggcttccagtgtgcccatcacaca

SEQ ID NO: 1738567 - DNA, 25 bp, Homo sapien
gatcttgggaccctttagcaaccat

SEQ ID NO: 1738568 - DNA, 25 bp, Homo sapien
cagaaactgggtacaccaggcacgg

SEQ ID NO: 1738569 - DNA, 25 bp, Homo sapien
tggaaccaacactctgaaaaaataa

SEQ ID NO: 1738570 - DNA, 25 bp, Homo sapien
aaaggtgcgtgatgcgagtagttaa

SEQ ID NO: 1738571 - DNA, 25 bp, Homo sapien
gcaacaactgtggttctattctctt

SEQ ID NO: 1738572 - DNA, 25 bp, Homo sapien
caactgtggttctattctctttcaa

SEQ ID NO: 1738573 - DNA, 25 bp, Homo sapien
atgtgtggacacattaagatgctgt

SEQ ID NO: 1738574 - DNA, 25 bp, Homo sapien
tgtgtggacacattaagatgctgtg

SEQ ID NO: 1738575 - DNA, 25 bp, Homo sapien
taattgggtctttatatgtgtaaga

SEQ ID NO: 1738576 - DNA, 25 bp, Homo sapien
tgtaattgggtctttatatgtgtaa

SEQ ID NO: 1738577 - DNA, 25 bp, Homo sapien
gtaattgggtctttatatgtgtaag

SEQ ID NO: 1738578 - DNA, 25 bp, Homo sapien
ctgtaattgggtctttatatgtgta

SEQ ID NO: 1738579 - DNA, 25 bp, Homo sapien
caagccaccaagaagtcgttcacaa

SEQ ID NO: 1738580 - DNA, 25 bp, Homo sapien
ccaagaagtcgttcacaagcactga

SEQ ID NO: 1738581 - DNA, 25 bp, Homo sapien
atgggcattgtcaatgaaatcctta

SEQ ID NO: 1738582 - DNA, 25 bp, Homo sapien
ccaccaagaagtcgttcacaagcac

SEQ ID NO: 1738583 - DNA, 25 bp, Homo sapien
tgatagggtgagagtacattgttac

SEQ ID NO: 1738584 - DNA, 25 bp, Homo sapien
cttgctgatagggtgagagtacatt

SEQ ID NO: 1738585 - DNA, 25 bp, Homo sapien
tcacttgctgatagggtgagagtac

SEQ ID NO: 1738586 - DNA, 25 bp, Homo sapien
tgctgatagggtgagagtacattgt

SEQ ID NO: 1738587 - DNA, 25 bp, Homo sapien
ttcacaatttacactcaatatgttg

SEQ ID NO: 1738588 - DNA, 25 bp, Homo sapien
atttacactcaatatgttgtttcca

SEQ ID NO: 1738589 - DNA, 25 bp, Homo sapien
catggccaaaatctagcttctaaaa

SEQ ID NO: 1738590 - DNA, 25 bp, Homo sapien
ggccaaaatctagcttctaaaagaa

SEQ ID NO: 1738591 - DNA, 25 bp, Homo sapien
gagtggcatgttgctaggttcctaa

SEQ ID NO: 1738592 - DNA, 25 bp, Homo sapien
ccatgatccagtcaactcccgtgag

SEQ ID NO: 1738593 - DNA, 25 bp, Homo sapien
tcacaaaagtcctgttaatacggga

SEQ ID NO: 1738594 - DNA, 25 bp, Homo sapien
ctaggtgctgtggatatactggtga

SEQ ID NO: 1738595 - DNA, 25 bp, Homo sapien
tgaatgttacatatgccaggagtgt

SEQ ID NO: 1738596 - DNA, 25 bp, Homo sapien
gcactgccgcactctgcctaggtga

SEQ ID NO: 1738597 - DNA, 25 bp, Homo sapien
catatgtgatgtggatttgcaaact

SEQ ID NO: 1738598 - DNA, 25 bp, Homo sapien
tccccaactcttgggatctgatgag

SEQ ID NO: 1738599 - DNA, 25 bp, Homo sapien
tatcaattggaaaggtacacacccc

SEQ ID NO: 1738600 - DNA, 25 bp, Homo sapien
tataatgttagcaacaaggctagtg

SEQ ID NO: 1738601 - DNA, 25 bp, Homo sapien
gacacagcaaatctacgtttggaat

SEQ ID NO: 1738602 - DNA, 25 bp, Homo sapien
cctacttgtaagaattgacgtgtac

SEQ ID NO: 1738603 - DNA, 25 bp, Homo sapien
catctggtggctctagtcttggagg

SEQ ID NO: 1738604 - DNA, 25 bp, Homo sapien
tgtgcgccagagaacggtcagactc

SEQ ID NO: 1738605 - DNA, 25 bp, Homo sapien
aataggtctgacaccagcctcgtgg

SEQ ID NO: 1738606 - DNA, 25 bp, Homo sapien
tctcactaacgcagagggtctccca

SEQ ID NO: 1738607 - DNA, 25 bp, Homo sapien
tctgtgtagattatgatagaaatgg

SEQ ID NO: 1738608 - DNA, 25 bp, Homo sapien
aacagtgagttagagttatgtatac

SEQ ID NO: 1738609 - DNA, 25 bp, Homo sapien
gcatatgcaagtgtcatttaatgga

SEQ ID NO: 1738610 - DNA, 25 bp, Homo sapien
tgttcaaaactctgtgtagattatg

SEQ ID NO: 1738611 - DNA, 25 bp, Homo sapien
ctgggcaacgtagtggggtccctct

SEQ ID NO: 1738612 - DNA, 25 bp, Homo sapien
aaatgtacattatatatggcagcag

SEQ ID NO: 1738613 - DNA, 25 bp, Homo sapien
tatatggcagcagacagggtgcagt

SEQ ID NO: 1738614 - DNA, 25 bp, Homo sapien
gcacccagcccattccagaattttt

SEQ ID NO: 1738615 - DNA, 25 bp, Homo sapien
tttctgcctaaaccatcacccgtga

SEQ ID NO: 1738616 - DNA, 25 bp, Homo sapien
cagtgcatcgtatttcaggacaggt

SEQ ID NO: 1738617 - DNA, 25 bp, Homo sapien
cacttggctaggaaattgcttgtgt

SEQ ID NO: 1738618 - DNA, 25 bp, Homo sapien
tcacccgtgagttttagcatcaggg

SEQ ID NO: 1738619 - DNA, 25 bp, Homo sapien
tccgcagaaatcgaggtgagtggct

SEQ ID NO: 1738620 - DNA, 25 bp, Homo sapien
gagctgtactactcgtgccttagcg

SEQ ID NO: 1738621 - DNA, 25 bp, Homo sapien
gcgaaatgctgtcggccttccagag

SEQ ID NO: 1738622 - DNA, 25 bp, Homo sapien
tcccaggccagaaacgcgaaatgct

SEQ ID NO: 1738623 - DNA, 25 bp, Homo sapien
ccgttgtttggtgaccgagcctgga

SEQ ID NO: 1738624 - DNA, 25 bp, Homo sapien
tggcgcgttaatccacctagactgt

SEQ ID NO: 1738625 - DNA, 25 bp, Homo sapien
ttgagccctgggacgtcttgccagc

SEQ ID NO: 1738626 - DNA, 25 bp, Homo sapien
gaacttcgcttctccgtcggtgtct

SEQ ID NO: 1738627 - DNA, 25 bp, Homo sapien
gttattggaaaacgatcaaggccca

SEQ ID NO: 1738628 - DNA, 25 bp, Homo sapien
ggtcacgccctcagttcagtcggtt

SEQ ID NO: 1738629 - DNA, 25 bp, Homo sapien
cggtgtaattaaggcgcggagccca

SEQ ID NO: 1738630 - DNA, 25 bp, Homo sapien
tgctacagtgcctcgggctttcctg

SEQ ID NO: 1738631 - DNA, 25 bp, Homo sapien
ccgcagggagggcaaccaaatggca

SEQ ID NO: 1738632 - DNA, 25 bp, Homo sapien
agcatccctgaacggtaaaaagtcg

SEQ ID NO: 1738633 - DNA, 25 bp, Homo sapien
aggcggtaacggagagcatccctga

SEQ ID NO: 1738634 - DNA, 25 bp, Homo sapien
gtggcggcgctgtaggctggagccc

SEQ ID NO: 1738635 - DNA, 25 bp, Homo sapien
cagccccattttcgacgccctctac

SEQ ID NO: 1738636 - DNA, 25 bp, Homo sapien
ttcaattcccacctgagcgagaaca

SEQ ID NO: 1738637 - DNA, 25 bp, Homo sapien
ggctgtttgtctaggaagaaactgc

SEQ ID NO: 1738638 - DNA, 25 bp, Homo sapien
ctatggtagggacggcgcggacctt

SEQ ID NO: 1738639 - DNA, 25 bp, Homo sapien
tatggtagggacggcgcggaccttg

SEQ ID NO: 1738640 - DNA, 25 bp, Homo sapien
tggtagggacggcgcggaccttgga

SEQ ID NO: 1738641 - DNA, 25 bp, Homo sapien
tagggacggcgcggaccttggagcc

SEQ ID NO: 1738642 - DNA, 25 bp, Homo sapien
ttccagtgcccagcgaagccgctgc

SEQ ID NO: 1738643 - DNA, 25 bp, Homo sapien
tgccgccgcgtatctgcgctctgtt

SEQ ID NO: 1738644 - DNA, 25 bp, Homo sapien
cccgcgcggattcgtgtgtgtaaaa

SEQ ID NO: 1738645 - DNA, 25 bp, Homo sapien
tgtgtaaaatggaacgctcgaacgg

SEQ ID NO: 1738646 - DNA, 25 bp, Homo sapien
tggagcagccgaggcgcagagcaga

SEQ ID NO: 1738647 - DNA, 25 bp, Homo sapien
agaggcgggcgcctgagtgtgctgg

SEQ ID NO: 1738648 - DNA, 25 bp, Homo sapien
aggctatacattggcaccagcacct

SEQ ID NO: 1738649 - DNA, 25 bp, Homo sapien
ctaggctatacattggcaccagcac

SEQ ID NO: 1738650 - DNA, 25 bp, Homo sapien
ccaacaccaggggtcggagaagcga

SEQ ID NO: 1738651 - DNA, 25 bp, Homo sapien
taaagccacagggattggggctcgc

SEQ ID NO: 1738652 - DNA, 25 bp, Homo sapien
acagatcccattccgctgctctgag

SEQ ID NO: 1738653 - DNA, 25 bp, Homo sapien
tctgagggttcccgcgatcgccagg

SEQ ID NO: 1738654 - DNA, 25 bp, Homo sapien
ctaaatcggtaaggctggtgggcat

SEQ ID NO: 1738655 - DNA, 25 bp, Homo sapien
taaatcggtaaggctggtgggcatc

SEQ ID NO: 1738656 - DNA, 25 bp, Homo sapien
tgagacagcagtttgcagacaccag

SEQ ID NO: 1738657 - DNA, 25 bp, Homo sapien
ctgagacagcagtttgcagacacca

SEQ ID NO: 1738658 - DNA, 25 bp, Homo sapien
ttcctccaccccctgggctggctag

SEQ ID NO: 1738659 - DNA, 25 bp, Homo sapien
cctccaccccctgggctggctagga

SEQ ID NO: 1738660 - DNA, 25 bp, Homo sapien
tccaccccctgggctggctaggaaa

SEQ ID NO: 1738661 - DNA, 25 bp, Homo sapien
gcccaggctgttcctccaccccctg

SEQ ID NO: 1738662 - DNA, 25 bp, Homo sapien
tgttgtgtacctgggccttgatctc

SEQ ID NO: 1738663 - DNA, 25 bp, Homo sapien
atgttgtgtacctgggccttgatct

SEQ ID NO: 1738664 - DNA, 25 bp, Homo sapien
gatgttgtgtacctgggccttgatc

SEQ ID NO: 1738665 - DNA, 25 bp, Homo sapien
catctgccagatgggctttttccat

SEQ ID NO: 1738666 - DNA, 25 bp, Homo sapien
cataacaatcttcttggccaattcc

SEQ ID NO: 1738667 - DNA, 25 bp, Homo sapien
tgttccacttggcacagtcatgccc

SEQ ID NO: 1738668 - DNA, 25 bp, Homo sapien
aatctgtaggatttggtccccaaag

SEQ ID NO: 1738669 - DNA, 25 bp, Homo sapien
ggttggtgaagagtccttgaggacc

SEQ ID NO: 1738670 - DNA, 25 bp, Homo sapien
tggtggttggtgaagagtccttgag

SEQ ID NO: 1738671 - DNA, 25 bp, Homo sapien
cagagctccctttgaccacagggaa

SEQ ID NO: 1738672 - DNA, 25 bp, Homo sapien
acatggtggttggtgaagagtcctt

SEQ ID NO: 1738673 - DNA, 25 bp, Homo sapien
cagtgcttgttaaacgttcttgaac

SEQ ID NO: 1738674 - DNA, 25 bp, Homo sapien
gcacagtgcttgttaaacgttcttg

SEQ ID NO: 1738675 - DNA, 25 bp, Homo sapien
cacagtgcttgttaaacgttcttga

SEQ ID NO: 1738676 - DNA, 25 bp, Homo sapien
ctgcacagtgcttgttaaacgttct

SEQ ID NO: 1738677 - DNA, 25 bp, Homo sapien
tgactatgtgctcatagatcacagt

SEQ ID NO: 1738678 - DNA, 25 bp, Homo sapien
gtggccagaatctctgagatctctt

SEQ ID NO: 1738679 - DNA, 25 bp, Homo sapien
tgatgatcagggtgacaatgttcct

SEQ ID NO: 1738680 - DNA, 25 bp, Homo sapien
atgatcagggtgacaatgttcctgg

SEQ ID NO: 1738681 - DNA, 25 bp, Homo sapien
gtgggagggcctaagctgccctcct

SEQ ID NO: 1738682 - DNA, 25 bp, Homo sapien
gggtgggagggcctaagctgccctc

SEQ ID NO: 1738683 - DNA, 25 bp, Homo sapien
aagtggtccatatgtggtggcgatg

SEQ ID NO: 1738684 - DNA, 25 bp, Homo sapien
tccatatgtggtggcgatgggtcag

SEQ ID NO: 1738685 - DNA, 25 bp, Homo sapien
cacacagtagagaaggatataagat

SEQ ID NO: 1738686 - DNA, 25 bp, Homo sapien
cggtgcccaggcttaatgctgtatt

SEQ ID NO: 1738687 - DNA, 25 bp, Homo sapien
tataagatgacaagtaaaatacccc

SEQ ID NO: 1738688 - DNA, 25 bp, Homo sapien
tttcctttccgtatctggctataga

SEQ ID NO: 1738689 - DNA, 25 bp, Homo sapien
ctttatgaacctgggaagttttgca

SEQ ID NO: 1738690 - DNA, 25 bp, Homo sapien
tttatgaacctgggaagttttgcag

SEQ ID NO: 1738691 - DNA, 25 bp, Homo sapien
tctttcgagaaacaaaccagttgct

SEQ ID NO: 1738692 - DNA, 25 bp, Homo sapien
ccacttcacactagggtgcaatgaa

SEQ ID NO: 1738693 - DNA, 25 bp, Homo sapien
gcaattgggtccttggacttcagga

SEQ ID NO: 1738694 - DNA, 25 bp, Homo sapien
gctgcattaaccactgcaattgggt

SEQ ID NO: 1738695 - DNA, 25 bp, Homo sapien
ggcttcaatctcgtaatggccagtc

SEQ ID NO: 1738696 - DNA, 25 bp, Homo sapien
ttgagctcccagtaagactgtttgt

SEQ ID NO: 1738697 - DNA, 25 bp, Homo sapien
tcaatctcgtaatggccagtctcca

SEQ ID NO: 1738698 - DNA, 25 bp, Homo sapien
atatcaaccagggtatagttctggg

SEQ ID NO: 1738699 - DNA, 25 bp, Homo sapien
tctacagaccttgatgttttcacag

SEQ ID NO: 1738700 - DNA, 25 bp, Homo sapien
ttctacagaccttgatgttttcaca

SEQ ID NO: 1738701 - DNA, 25 bp, Homo sapien
atccccttcacacgcagctttaatt

SEQ ID NO: 1738702 - DNA, 25 bp, Homo sapien
cactaggtactcaaagagagaccac

SEQ ID NO: 1738703 - DNA, 25 bp, Homo sapien
ggtcctctatgtgtggatagttcac

SEQ ID NO: 1738704 - DNA, 25 bp, Homo sapien
gccaagaccactaggtactcaaaga

SEQ ID NO: 1738705 - DNA, 25 bp, Homo sapien
taatccaaatactgagccgcaaact

SEQ ID NO: 1738706 - DNA, 25 bp, Homo sapien
aatccaaatactgagccgcaaactg

SEQ ID NO: 1738707 - DNA, 25 bp, Homo sapien
tccaaatactgagccgcaaactgac

SEQ ID NO: 1738708 - DNA, 25 bp, Homo sapien
ttaatccaaatactgagccgcaaac

SEQ ID NO: 1738709 - DNA, 25 bp, Homo sapien
atctcttgaactgaatccttgctct

SEQ ID NO: 1738710 - DNA, 25 bp, Homo sapien
cacataacatgatttctctcaaaag

SEQ ID NO: 1738711 - DNA, 25 bp, Homo sapien
tttttgcagcctggcacataacatg

SEQ ID NO: 1738712 - DNA, 25 bp, Homo sapien
aggaaccctgtctaatcatttttgc

SEQ ID NO: 1738713 - DNA, 25 bp, Homo sapien
gattatctaccagcaagtcatttgg

SEQ ID NO: 1738714 - DNA, 25 bp, Homo sapien
ccttcatgcaaaacttcagtatgtc

SEQ ID NO: 1738715 - DNA, 25 bp, Homo sapien
ttggtaatgtaaataggattgaggg

SEQ ID NO: 1738716 - DNA, 25 bp, Homo sapien
ggtcatgtccttcatgcaaaacttc

SEQ ID NO: 1738717 - DNA, 25 bp, Homo sapien
tagaattccagcgttggaatttgtc

SEQ ID NO: 1738718 - DNA, 25 bp, Homo sapien
cagcgttggaatttgtccagagagg

SEQ ID NO: 1738719 - DNA, 25 bp, Homo sapien
ccaagtcttgtagccattttgcaat

SEQ ID NO: 1738720 - DNA, 25 bp, Homo sapien
accaagtcttgtagccattttgcaa

SEQ ID NO: 1738721 - DNA, 25 bp, Homo sapien
ccaggaatccgctggtgcccagcgg

SEQ ID NO: 1738722 - DNA, 25 bp, Homo sapien
tctgggcaccaggaatccgctggtg

SEQ ID NO: 1738723 - DNA, 25 bp, Homo sapien
ctggtgcccagcgggagtcttaacc

SEQ ID NO: 1738724 - DNA, 25 bp, Homo sapien
ggtgcccagcgggagtcttaaccat

SEQ ID NO: 1738725 - DNA, 25 bp, Homo sapien
caaggacaccacagcaaacccaaag

SEQ ID NO: 1738726 - DNA, 25 bp, Homo sapien
gaactaccttcggattcttcaggaa

SEQ ID NO: 1738727 - DNA, 25 bp, Homo sapien
aaaccgcctgggagcgtccatgctg

SEQ ID NO: 1738728 - DNA, 25 bp, Homo sapien
tgcatcagttgcacgagcgtcggaa

SEQ ID NO: 1738729 - DNA, 25 bp, Homo sapien
cactggcattgcttttggctgcatc

SEQ ID NO: 1738730 - DNA, 25 bp, Homo sapien
agccagagggcattggctactggtg

SEQ ID NO: 1738731 - DNA, 25 bp, Homo sapien
agacagccagagggcattggctact

SEQ ID NO: 1738732 - DNA, 25 bp, Homo sapien
gcattggctactggtgaggatcgcc

SEQ ID NO: 1738733 - DNA, 25 bp, Homo sapien
acagccagagggcattggctactgg

SEQ ID NO: 1738734 - DNA, 25 bp, Homo sapien
gaggctgtgagggaccggtggctcc

SEQ ID NO: 1738735 - DNA, 25 bp, Homo sapien
agaggctgtgagggaccggtggctc

SEQ ID NO: 1738736 - DNA, 25 bp, Homo sapien
aggctgtgagggaccggtggctccc

SEQ ID NO: 1738737 - DNA, 25 bp, Homo sapien
gagaggctgtgagggaccggtggct

SEQ ID NO: 1738738 - DNA, 25 bp, Homo sapien
tagggtccaatcgattcacgtgaat

SEQ ID NO: 1738739 - DNA, 25 bp, Homo sapien
taccctggacgtgcgggatgcgttc

SEQ ID NO: 1738740 - DNA, 25 bp, Homo sapien
gtcctcctggtaagaaggcctccca

SEQ ID NO: 1738741 - DNA, 25 bp, Homo sapien
caagatttgggacataccctggacg

SEQ ID NO: 1738742 - DNA, 25 bp, Homo sapien
gctggcggtgatagtcagccaggtt

SEQ ID NO: 1738743 - DNA, 25 bp, Homo sapien
gagctggcggtgatagtcagccagg

SEQ ID NO: 1738744 - DNA, 25 bp, Homo sapien
tggcggtgatagtcagccaggttca

SEQ ID NO: 1738745 - DNA, 25 bp, Homo sapien
ctggcggtgatagtcagccaggttc

SEQ ID NO: 1738746 - DNA, 25 bp, Homo sapien
ccggcctcccggacttctattgaag

SEQ ID NO: 1738747 - DNA, 25 bp, Homo sapien
tattgaagaccgctgggtctcggcc

SEQ ID NO: 1738748 - DNA, 25 bp, Homo sapien
ctcctggacttccaccgaacgctgg

SEQ ID NO: 1738749 - DNA, 25 bp, Homo sapien
cggacctccaccgaacgctgcgtcc

SEQ ID NO: 1738750 - DNA, 25 bp, Homo sapien
agagactgctgggtcccggcctcct

SEQ ID NO: 1738751 - DNA, 25 bp, Homo sapien
tcactgccttgctggcagcttcggg

SEQ ID NO: 1738752 - DNA, 25 bp, Homo sapien
gggcatcctcgcgaaaccgctgggt

SEQ ID NO: 1738753 - DNA, 25 bp, Homo sapien
gtccccgacttgttggcagcctgga

SEQ ID NO: 1738754 - DNA, 25 bp, Homo sapien
gctttcactttaacccctgactggc

SEQ ID NO: 1738755 - DNA, 25 bp, Homo sapien
cagggcctgagatgccttcataatc

SEQ ID NO: 1738756 - DNA, 25 bp, Homo sapien
tctgggcggaaatacgggctttcac

SEQ ID NO: 1738757 - DNA, 25 bp, Homo sapien
agcttctgggcggaaatacgggctt

SEQ ID NO: 1738758 - DNA, 25 bp, Homo sapien
tgcaattctttattagaactcaagt

SEQ ID NO: 1738759 - DNA, 25 bp, Homo sapien
caagtttgtgtttgcaaccatgcaa

SEQ ID NO: 1738760 - DNA, 25 bp, Homo sapien
ttctttattagaactcaagtttgtg

SEQ ID NO: 1738761 - DNA, 25 bp, Homo sapien
ttagaactcaagtttgtgtttgcaa

SEQ ID NO: 1738762 - DNA, 25 bp, Homo sapien
ccattcaacagaaggtgtaaaacaa

SEQ ID NO: 1738763 - DNA, 25 bp, Homo sapien
ttggcaaccattcaacagaaggtgt

SEQ ID NO: 1738764 - DNA, 25 bp, Homo sapien
caaccattcaacagaaggtgtaaaa

SEQ ID NO: 1738765 - DNA, 25 bp, Homo sapien
tgtgttggcaaccattcaacagaag

SEQ ID NO: 1738766 - DNA, 25 bp, Homo sapien
tgaccctagggaagccaaagtgttc

SEQ ID NO: 1738767 - DNA, 25 bp, Homo sapien
tcaccttgagtagaacgacagcggg

SEQ ID NO: 1738768 - DNA, 25 bp, Homo sapien
tctgtgacagagtagcaatacaccc

SEQ ID NO: 1738769 - DNA, 25 bp, Homo sapien
tgggtgacccaagcaagacctgaag

SEQ ID NO: 1738770 - DNA, 25 bp, Homo sapien
tccttctagattaattcgcaggctc

SEQ ID NO: 1738771 - DNA, 25 bp, Homo sapien
gattaattcgcaggctcagggacct

SEQ ID NO: 1738772 - DNA, 25 bp, Homo sapien
taattcgcaggctcagggacctgca

SEQ ID NO: 1738773 - DNA, 25 bp, Homo sapien
tctagattaattcgcaggctcaggg

SEQ ID NO: 1738774 - DNA, 25 bp, Homo sapien
caggaagtgtccaatggtgccgcta

SEQ ID NO: 1738775 - DNA, 25 bp, Homo sapien
tgacgaaggagagcattggagaccc

SEQ ID NO: 1738776 - DNA, 25 bp, Homo sapien
tatggtaaaagagagcccgagcttc

SEQ ID NO: 1738777 - DNA, 25 bp, Homo sapien
ggaagaggtcttgcgaaagccgcct

SEQ ID NO: 1738778 - DNA, 25 bp, Homo sapien
gatttcgacgtgttttcctctctga

SEQ ID NO: 1738779 - DNA, 25 bp, Homo sapien
tcaccactatctggagatttcgacg

SEQ ID NO: 1738780 - DNA, 25 bp, Homo sapien
gatcatgttaccatatcaagctgaa

SEQ ID NO: 1738781 - DNA, 25 bp, Homo sapien
tatgaacacgttggttggctggatt

SEQ ID NO: 1738782 - DNA, 25 bp, Homo sapien
cgtcccattccccagtggattcgga

SEQ ID NO: 1738783 - DNA, 25 bp, Homo sapien
gacattggagaagaaccaagctggg

SEQ ID NO: 1738784 - DNA, 25 bp, Homo sapien
atcgtcccattccccagtggattcg

SEQ ID NO: 1738785 - DNA, 25 bp, Homo sapien
ggattaagcgattcctggccaagaa

SEQ ID NO: 1738786 - DNA, 25 bp, Homo sapien
agccgctacttaaggagcccgcacg

SEQ ID NO: 1738787 - DNA, 25 bp, Homo sapien
ctgaccgtgacgtcgtaagagtagc

SEQ ID NO: 1738788 - DNA, 25 bp, Homo sapien
ttaaggagcccgcacgaggctagcc

SEQ ID NO: 1738789 - DNA, 25 bp, Homo sapien
tgacgtcgtaagagtagcgtgccag

SEQ ID NO: 1738790 - DNA, 25 bp, Homo sapien
agaaggggcgcgtccgacgtcgttg

SEQ ID NO: 1738791 - DNA, 25 bp, Homo sapien
gcgtccgacgtcgttgccgtccagc

SEQ ID NO: 1738792 - DNA, 25 bp, Homo sapien
gcgcgtccgacgtcgttgccgtcca

SEQ ID NO: 1738793 - DNA, 25 bp, Homo sapien
gggcgcgtccgacgtcgttgccgtc

SEQ ID NO: 1738794 - DNA, 25 bp, Homo sapien
tagcaacgacccacgtagaggcctt

SEQ ID NO: 1738795 - DNA, 25 bp, Homo sapien
aagcaaaacacagcggcagttcctc

SEQ ID NO: 1738796 - DNA, 25 bp, Homo sapien
ggacactgtcgagcttcgccgacta

SEQ ID NO: 1738797 - DNA, 25 bp, Homo sapien
gggcctagaggtgcctctccagcga

SEQ ID NO: 1738798 - DNA, 25 bp, Homo sapien
ttggattgtggtgtttgttgtactt

SEQ ID NO: 1738799 - DNA, 25 bp, Homo sapien
gattgtggtgtttgttgtactttgt

SEQ ID NO: 1738800 - DNA, 25 bp, Homo sapien
ggtgtttgttgtactttgtatattc

SEQ ID NO: 1738801 - DNA, 25 bp, Homo sapien
tgtggtgtttgttgtactttgtata

SEQ ID NO: 1738802 - DNA, 25 bp, Homo sapien
aaattttgactaatgattctggttg

SEQ ID NO: 1738803 - DNA, 25 bp, Homo sapien
tttgcattgccttgctgccaaaaat

SEQ ID NO: 1738804 - DNA, 25 bp, Homo sapien
cattgccttgctgccaaaaattttg

SEQ ID NO: 1738805 - DNA, 25 bp, Homo sapien
gccaaaaattttgactaatgattct

SEQ ID NO: 1738806 - DNA, 25 bp, Homo sapien
caatctatcaatggccgatctcctg

SEQ ID NO: 1738807 - DNA, 25 bp, Homo sapien
acaacattgttatctgtgcttccat

SEQ ID NO: 1738808 - DNA, 25 bp, Homo sapien
tctaatttgatcccaatctatcaat

SEQ ID NO: 1738809 - DNA, 25 bp, Homo sapien
ctgcaacaacattgttatctgtgct

SEQ ID NO: 1738810 - DNA, 25 bp, Homo sapien
ttctacttttgacatggcacttgtg

SEQ ID NO: 1738811 - DNA, 25 bp, Homo sapien
ggcacttgtggcagtggactcttta

SEQ ID NO: 1738812 - DNA, 25 bp, Homo sapien
tttgacatggcacttgtggcagtgg

SEQ ID NO: 1738813 - DNA, 25 bp, Homo sapien
catggcacttgtggcagtggactct

SEQ ID NO: 1738814 - DNA, 25 bp, Homo sapien
tggggataggtcgtttctccccatc

SEQ ID NO: 1738815 - DNA, 25 bp, Homo sapien
caagtcatcccacgttatattaaaa

SEQ ID NO: 1738816 - DNA, 25 bp, Homo sapien
gttttccataacctcaggataacat

SEQ ID NO: 1738817 - DNA, 25 bp, Homo sapien
gataacattgaaaggcgtcatcaaa

SEQ ID NO: 1738818 - DNA, 25 bp, Homo sapien
tctgggctactcctataagatctat

SEQ ID NO: 1738819 - DNA, 25 bp, Homo sapien
tccagtctgggctactcctataaga

SEQ ID NO: 1738820 - DNA, 25 bp, Homo sapien
ctgggttgaaggaccagatgaataa

SEQ ID NO: 1738821 - DNA, 25 bp, Homo sapien
aggaccagatgaataaatccaggca

SEQ ID NO: 1738822 - DNA, 25 bp, Homo sapien
aacattctccttctacttgaagtgc

SEQ ID NO: 1738823 - DNA, 25 bp, Homo sapien
acttgaagtgctaattcccgagtgg

SEQ ID NO: 1738824 - DNA, 25 bp, Homo sapien
aacatgccgggtctattcctttgac

SEQ ID NO: 1738825 - DNA, 25 bp, Homo sapien
tcccgagtgggagttagaactaaca

SEQ ID NO: 1738826 - DNA, 25 bp, Homo sapien
tccgggagttgcaattatgatatct

SEQ ID NO: 1738827 - DNA, 25 bp, Homo sapien
gcagatcattcaatcttccgggagt

SEQ ID NO: 1738828 - DNA, 25 bp, Homo sapien
tattcttcagattgacgaagttact

SEQ ID NO: 1738829 - DNA, 25 bp, Homo sapien
gattgacgaagttactcatttgcag

SEQ ID NO: 1738830 - DNA, 25 bp, Homo sapien
ccatgtccaacatcttgtctgcttc

SEQ ID NO: 1738831 - DNA, 25 bp, Homo sapien
atcccatgtccaacatcttgtctgc

SEQ ID NO: 1738832 - DNA, 25 bp, Homo sapien
catgtccaacatcttgtctgcttca

SEQ ID NO: 1738833 - DNA, 25 bp, Homo sapien
ctggtcataactgtctgcctatctg

SEQ ID NO: 1738834 - DNA, 25 bp, Homo sapien
taccaacatagacaatcattggttc

SEQ ID NO: 1738835 - DNA, 25 bp, Homo sapien
ctttcaaataagattgtgcgaggcg

SEQ ID NO: 1738836 - DNA, 25 bp, Homo sapien
aactagatccaatgtaccaacatag

SEQ ID NO: 1738837 - DNA, 25 bp, Homo sapien
attgtgcgaggcgatgaactgaatg

SEQ ID NO: 1738838 - DNA, 25 bp, Homo sapien
cagcttttcgagaaacgaagacaat

SEQ ID NO: 1738839 - DNA, 25 bp, Homo sapien
tgtagaaaagtttgcatgtgactcc

SEQ ID NO: 1738840 - DNA, 25 bp, Homo sapien
ttcgagaaacgaagacaatgacttt

SEQ ID NO: 1738841 - DNA, 25 bp, Homo sapien
ctcttcctcggtggttacaattata

SEQ ID NO: 1738842 - DNA, 25 bp, Homo sapien
ctaatgctttctcccgatctctctg

SEQ ID NO: 1738843 - DNA, 25 bp, Homo sapien
taggtcacttgataagtgatccgca

SEQ ID NO: 1738844 - DNA, 25 bp, Homo sapien
cagagactctactgatatatttcca

SEQ ID NO: 1738845 - DNA, 25 bp, Homo sapien
tttccaagtattaggtcacttgata

SEQ ID NO: 1738846 - DNA, 25 bp, Homo sapien
tgaaccattctggtataaaccaacc

SEQ ID NO: 1738847 - DNA, 25 bp, Homo sapien
cattctggtataaaccaacccaaga

SEQ ID NO: 1738848 - DNA, 25 bp, Homo sapien
gaacactgaaccattctggtataaa

SEQ ID NO: 1738849 - DNA, 25 bp, Homo sapien
cactgaaccattctggtataaacca

SEQ ID NO: 1738850 - DNA, 25 bp, Homo sapien
gatcagttgcaattagtattctcac

SEQ ID NO: 1738851 - DNA, 25 bp, Homo sapien
tcaagtcctctagaggctagatcag

SEQ ID NO: 1738852 - DNA, 25 bp, Homo sapien
ccgtgcgccctattcggtgtacgta

SEQ ID NO: 1738853 - DNA, 25 bp, Homo sapien
gacatgtgtaacgtcatggacatca

SEQ ID NO: 1738854 - DNA, 25 bp, Homo sapien
gaggcaaccctccaatcatttctag

SEQ ID NO: 1738855 - DNA, 25 bp, Homo sapien
gaatattaatcaattcagaggcaac

SEQ ID NO: 1738856 - DNA, 25 bp, Homo sapien
catttctagtcaaagttgtaatgga

SEQ ID NO: 1738857 - DNA, 25 bp, Homo sapien
aagttgtaatggaaacaccagtcct

SEQ ID NO: 1738858 - DNA, 25 bp, Homo sapien
aacgtgttgttattaggattctgag

SEQ ID NO: 1738859 - DNA, 25 bp, Homo sapien
ctgaaattattcaacgtgttgttat

SEQ ID NO: 1738860 - DNA, 25 bp, Homo sapien
attcaacgtgttgttattaggattc

SEQ ID NO: 1738861 - DNA, 25 bp, Homo sapien
tcaacgtgttgttattaggattctg

SEQ ID NO: 1738862 - DNA, 25 bp, Homo sapien
ttgatacaagctcctctggaatact

SEQ ID NO: 1738863 - DNA, 25 bp, Homo sapien
ttctgttgatgtgccttaaacctct

SEQ ID NO: 1738864 - DNA, 25 bp, Homo sapien
gccattgatacaagctcctctggaa

SEQ ID NO: 1738865 - DNA, 25 bp, Homo sapien
aacctctcagccattgatacaagct

SEQ ID NO: 1738866 - DNA, 25 bp, Homo sapien
ctctaccccactagtacagaagaca

SEQ ID NO: 1738867 - DNA, 25 bp, Homo sapien
tcttcatactgccaacatgtccaat

SEQ ID NO: 1738868 - DNA, 25 bp, Homo sapien
tgtccaatacttccgtcttactata

SEQ ID NO: 1738869 - DNA, 25 bp, Homo sapien
acatgtccaatacttccgtcttact

SEQ ID NO: 1738870 - DNA, 25 bp, Homo sapien
caaatcagtccggtctcttcatact

SEQ ID NO: 1738871 - DNA, 25 bp, Homo sapien
ttcaaacactattattttaagaatc

SEQ ID NO: 1738872 - DNA, 25 bp, Homo sapien
aacactggattctatattttcaaac

SEQ ID NO: 1738873 - DNA, 25 bp, Homo sapien
taaaacactggattctatattttca

SEQ ID NO: 1738874 - DNA, 25 bp, Homo sapien
aagaaagtataaaacactggattct

SEQ ID NO: 1738875 - DNA, 25 bp, Homo sapien
gactggccttatgacatacagcaaa

SEQ ID NO: 1738876 - DNA, 25 bp, Homo sapien
ttatcacagaaacgaacatttatta

SEQ ID NO: 1738877 - DNA, 25 bp, Homo sapien
aagactggccttatgacatacagca

SEQ ID NO: 1738878 - DNA, 25 bp, Homo sapien
ctttttatcacagaaacgaacattt

SEQ ID NO: 1738879 - DNA, 25 bp, Homo sapien
actatgggtgccggccaccacgcaa

SEQ ID NO: 1738880 - DNA, 25 bp, Homo sapien
tgggtgccggccaccacgcaaggct

SEQ ID NO: 1738881 - DNA, 25 bp, Homo sapien
tttagtagagaccatattggtcagg

SEQ ID NO: 1738882 - DNA, 25 bp, Homo sapien
tatgggtgccggccaccacgcaagg

SEQ ID NO: 1738883 - DNA, 25 bp, Homo sapien
gcgcggccatcttgctttaatatca

SEQ ID NO: 1738884 - DNA, 25 bp, Homo sapien
ggccatcttgctttaatatcacggg

SEQ ID NO: 1738885 - DNA, 25 bp, Homo sapien
aagagacaatctgcagggcgcggcc

SEQ ID NO: 1738886 - DNA, 25 bp, Homo sapien
gcaacaagagacaatctgcagggcg

SEQ ID NO: 1738887 - DNA, 25 bp, Homo sapien
gctgacacgagtgacggtcaaaaaa

SEQ ID NO: 1738888 - DNA, 25 bp, Homo sapien
actttgaagctgacacgagtgacgg

SEQ ID NO: 1738889 - DNA, 25 bp, Homo sapien
gaagctgacacgagtgacggtcaaa

SEQ ID NO: 1738890 - DNA, 25 bp, Homo sapien
ctgactttgaagctgacacgagtga

SEQ ID NO: 1738891 - DNA, 25 bp, Homo sapien
tatcacgtcgaagtgcggagtccgg

SEQ ID NO: 1738892 - DNA, 25 bp, Homo sapien
ccgtgccaacggaaattgctgcttg

SEQ ID NO: 1738893 - DNA, 25 bp, Homo sapien
agcagagtccgagagccgcaccgag

SEQ ID NO: 1738894 - DNA, 25 bp, Homo sapien
cacgcggtgagtgaggagcagagtc

SEQ ID NO: 1738895 - DNA, 25 bp, Homo sapien
cgggaaggaagcagcctgcgtccta

SEQ ID NO: 1738896 - DNA, 25 bp, Homo sapien
ggggaggcgggaaggaagcagcctg

SEQ ID NO: 1738897 - DNA, 25 bp, Homo sapien
ggcgggaaggaagcagcctgcgtcc

SEQ ID NO: 1738898 - DNA, 25 bp, Homo sapien
ggaggcgggaaggaagcagcctgcg

SEQ ID NO: 1738899 - DNA, 25 bp, Homo sapien
cattccaactttagtttatgttgtt

SEQ ID NO: 1738900 - DNA, 25 bp, Homo sapien
ttagtttatgttgttgccaaagcaa

SEQ ID NO: 1738901 - DNA, 25 bp, Homo sapien
ggggctatgctaatccctatatcat

SEQ ID NO: 1738902 - DNA, 25 bp, Homo sapien
ccaactttagtttatgttgttgcca

SEQ ID NO: 1738903 - DNA, 25 bp, Homo sapien
gtttcctatcaatctgagctctcag

SEQ ID NO: 1738904 - DNA, 25 bp, Homo sapien
ctttataatgtacaccagactggtc

SEQ ID NO: 1738905 - DNA, 25 bp, Homo sapien
cagactggtcacagatgcgagaaca

SEQ ID NO: 1738906 - DNA, 25 bp, Homo sapien
ccaccaaaggaaggattacatgaca

SEQ ID NO: 1738907 - DNA, 25 bp, Homo sapien
aaacaaccccactgacacggcattt

SEQ ID NO: 1738908 - DNA, 25 bp, Homo sapien
taagaataagatcttctacagctcc

SEQ ID NO: 1738909 - DNA, 25 bp, Homo sapien
gtaagcagtggtgtattcaagattt

SEQ ID NO: 1738910 - DNA, 25 bp, Homo sapien
cagctccctcctgaacagtaagcag

SEQ ID NO: 1738911 - DNA, 25 bp, Homo sapien
aagatcacttgggtccaggtggtcg

SEQ ID NO: 1738912 - DNA, 25 bp, Homo sapien
ggaagatcacttgggtccaggtggt

SEQ ID NO: 1738913 - DNA, 25 bp, Homo sapien
taatatgaacactttgagagactgg

SEQ ID NO: 1738914 - DNA, 25 bp, Homo sapien
tataatatgaacactttgagagact

SEQ ID NO: 1738915 - DNA, 25 bp, Homo sapien
ccatactgctcactagattgctaga

SEQ ID NO: 1738916 - DNA, 25 bp, Homo sapien
taagcaatctaggagagagaataca

SEQ ID NO: 1738917 - DNA, 25 bp, Homo sapien
taacctttgagcagtatcttcccat

SEQ ID NO: 1738918 - DNA, 25 bp, Homo sapien
tctgtgatgatacccataatcaagc

SEQ ID NO: 1738919 - DNA, 25 bp, Homo sapien
ggtggagtcccagtcttcaaccttc

SEQ ID NO: 1738920 - DNA, 25 bp, Homo sapien
tagaaggctgatcccctaaacgtcc

SEQ ID NO: 1738921 - DNA, 25 bp, Homo sapien
catactgtctcattggtaaagctga

SEQ ID NO: 1738922 - DNA, 25 bp, Homo sapien
cagtgtctgagccaatcctatagaa

SEQ ID NO: 1738923 - DNA, 25 bp, Homo sapien
aaatgcattgtgtaatgggcaaggg

SEQ ID NO: 1738924 - DNA, 25 bp, Homo sapien
tatgtctgaaatcccaccccagaag

SEQ ID NO: 1738925 - DNA, 25 bp, Homo sapien
gcaggtcatctaagaatggttcagt

SEQ ID NO: 1738926 - DNA, 25 bp, Homo sapien
cagtgtcgggttctccataaaaatg

SEQ ID NO: 1738927 - DNA, 25 bp, Homo sapien
tgagtcaagtaacatggcagctgat

SEQ ID NO: 1738928 - DNA, 25 bp, Homo sapien
tgtgagtcaagtaacatggcagctg

SEQ ID NO: 1738929 - DNA, 25 bp, Homo sapien
ctagggttggtgtgagtcaagtaac

SEQ ID NO: 1738930 - DNA, 25 bp, Homo sapien
ggtgtgagtcaagtaacatggcagc

SEQ ID NO: 1738931 - DNA, 25 bp, Homo sapien
gaaggttcttaaggacaatctcatc

SEQ ID NO: 1738932 - DNA, 25 bp, Homo sapien
ggtgaaggttcttaaggacaatctc

SEQ ID NO: 1738933 - DNA, 25 bp, Homo sapien
catgactattaaggtgaaggttctt

SEQ ID NO: 1738934 - DNA, 25 bp, Homo sapien
ggttcttaaggacaatctcatccac

SEQ ID NO: 1738935 - DNA, 25 bp, Homo sapien
cattccttaaagtaactgagcactg

SEQ ID NO: 1738936 - DNA, 25 bp, Homo sapien
gattgacgtcattccttaaagtaac

SEQ ID NO: 1738937 - DNA, 25 bp, Homo sapien
ccttaaagtaactgagcactgacat

SEQ ID NO: 1738938 - DNA, 25 bp, Homo sapien
gacgtcattccttaaagtaactgag

SEQ ID NO: 1738939 - DNA, 25 bp, Homo sapien
cccctgtgggtagataaggtcagaa

SEQ ID NO: 1738940 - DNA, 25 bp, Homo sapien
ttttgattcaatggagggacagtat

SEQ ID NO: 1738941 - DNA, 25 bp, Homo sapien
tagcgtcatagataacccctgtggg

SEQ ID NO: 1738942 - DNA, 25 bp, Homo sapien
ttccaaccaaacctgatgtagacgg

SEQ ID NO: 1738943 - DNA, 25 bp, Homo sapien
aaatgtataggtgttgggcttcatc

SEQ ID NO: 1738944 - DNA, 25 bp, Homo sapien
gaagggcacttgtgatcttctttac

SEQ ID NO: 1738945 - DNA, 25 bp, Homo sapien
ttaaaacaatgctgaccttatactg

SEQ ID NO: 1738946 - DNA, 25 bp, Homo sapien
gactgtagctaaggcctcctcactg

SEQ ID NO: 1738947 - DNA, 25 bp, Homo sapien
tggtgccattgatctgtccagcaaa

SEQ ID NO: 1738948 - DNA, 25 bp, Homo sapien
aaccaaatgagtctccaaggaaggg

SEQ ID NO: 1738949 - DNA, 25 bp, Homo sapien
tccagcaaagaagagtcgttgaacc

SEQ ID NO: 1738950 - DNA, 25 bp, Homo sapien
ctgcagcttcctcataaccagtggt

SEQ ID NO: 1738951 - DNA, 25 bp, Homo sapien
gatcgcttgaagctgggagatcata

SEQ ID NO: 1738952 - DNA, 25 bp, Homo sapien
gcttgaagctgggagatcatatcac

SEQ ID NO: 1738953 - DNA, 25 bp, Homo sapien
ttgaagctgggagatcatatcactg

SEQ ID NO: 1738954 - DNA, 25 bp, Homo sapien
tcgcttgaagctgggagatcatatc

SEQ ID NO: 1738955 - DNA, 25 bp, Homo sapien
tgttcggctaaccacaaagggaggc

SEQ ID NO: 1738956 - DNA, 25 bp, Homo sapien
acatgcggtatggttcactggtgcc

SEQ ID NO: 1738957 - DNA, 25 bp, Homo sapien
gacaaacggaactctactcggctgg

SEQ ID NO: 1738958 - DNA, 25 bp, Homo sapien
ttatcagggcgcagtgacaaacgga

SEQ ID NO: 1738959 - DNA, 25 bp, Homo sapien
tactagtacttatagaagcctctgg

SEQ ID NO: 1738960 - DNA, 25 bp, Homo sapien
catatcgttgttgggacacacagcc

SEQ ID NO: 1738961 - DNA, 25 bp, Homo sapien
tgacaggcagacttctactagtact

SEQ ID NO: 1738962 - DNA, 25 bp, Homo sapien
tccaacaagctctttcatatcgttg

SEQ ID NO: 1738963 - DNA, 25 bp, Homo sapien
tcttgtccctcaggtttgggtgcaa

SEQ ID NO: 1738964 - DNA, 25 bp, Homo sapien
tctcactcttgtccctcaggtttgg

SEQ ID NO: 1738965 - DNA, 25 bp, Homo sapien
cctcaggtttgggtgcaatggcttg

SEQ ID NO: 1738966 - DNA, 25 bp, Homo sapien
gtccctcaggtttgggtgcaatggc

SEQ ID NO: 1738967 - DNA, 25 bp, Homo sapien
taatgaatccatgtcaacttcctca

SEQ ID NO: 1738968 - DNA, 25 bp, Homo sapien
agccagctctctacatttagtatac

SEQ ID NO: 1738969 - DNA, 25 bp, Homo sapien
tagtatacttcttcaagggctctgg

SEQ ID NO: 1738970 - DNA, 25 bp, Homo sapien
tggaacagccttggctaatgaatcc

SEQ ID NO: 1738971 - DNA, 25 bp, Homo sapien
tgtggacgactaaaatgtagtttct

SEQ ID NO: 1738972 - DNA, 25 bp, Homo sapien
gtttctctcgaacttcatgggacaa

SEQ ID NO: 1738973 - DNA, 25 bp, Homo sapien
ccctgatagtcaaataatctaggtc

SEQ ID NO: 1738974 - DNA, 25 bp, Homo sapien
taaaatgtagtttctctcgaacttc

SEQ ID NO: 1738975 - DNA, 25 bp, Homo sapien
aaatctcagcagattgatgatggcg

SEQ ID NO: 1738976 - DNA, 25 bp, Homo sapien
tgatgatggcggcaggtgttactcc

SEQ ID NO: 1738977 - DNA, 25 bp, Homo sapien
gcaggtgttactccgggtatgcgac

SEQ ID NO: 1738978 - DNA, 25 bp, Homo sapien
cgggtatgcgactagcagccccgat

SEQ ID NO: 1738979 - DNA, 25 bp, Homo sapien
ggatgattcattcatagccgactgt

SEQ ID NO: 1738980 - DNA, 25 bp, Homo sapien
actgtcttcgttgagtggtcttcac

SEQ ID NO: 1738981 - DNA, 25 bp, Homo sapien
cacataagtattgatcagtcttgga

SEQ ID NO: 1738982 - DNA, 25 bp, Homo sapien
gtctgtctgcatcacataagtattg

SEQ ID NO: 1738983 - DNA, 25 bp, Homo sapien
taatggcaaacccatagtaacctaa

SEQ ID NO: 1738984 - DNA, 25 bp, Homo sapien
tctgtcccactcagaaattaatggc

SEQ ID NO: 1738985 - DNA, 25 bp, Homo sapien
tattccaggttcagttttaggttca

SEQ ID NO: 1738986 - DNA, 25 bp, Homo sapien
tcatatacacgaaaaagcacaatta

SEQ ID NO: 1738987 - DNA, 25 bp, Homo sapien
tttggtagacttaataggcaaagtc

SEQ ID NO: 1738988 - DNA, 25 bp, Homo sapien
caaagtccctatgagtaggcaaatc

SEQ ID NO: 1738989 - DNA, 25 bp, Homo sapien
tggtagacttaataggcaaagtccc

SEQ ID NO: 1738990 - DNA, 25 bp, Homo sapien
taatttggtagacttaataggcaaa

SEQ ID NO: 1738991 - DNA, 25 bp, Homo sapien
gaattttgcccaggagtagctatga

SEQ ID NO: 1738992 - DNA, 25 bp, Homo sapien
gaaaactaagctacctccaagtggc

SEQ ID NO: 1738993 - DNA, 25 bp, Homo sapien
cctaggctgacaccagagatctggg

SEQ ID NO: 1738994 - DNA, 25 bp, Homo sapien
tatctgagtcaaaaggcccagctga

SEQ ID NO: 1738995 - DNA, 25 bp, Homo sapien
gcatgcaaactgaggaactggttct

SEQ ID NO: 1738996 - DNA, 25 bp, Homo sapien
ttctgaggcctggattgtaaccata

SEQ ID NO: 1738997 - DNA, 25 bp, Homo sapien
ccatatgggtataacagtgcagcta

SEQ ID NO: 1738998 - DNA, 25 bp, Homo sapien
caacaaaagaagaacctcgtggagc

SEQ ID NO: 1738999 - DNA, 25 bp, Homo sapien
gcggtgggtgtcatcaaagcagtgg

SEQ ID NO: 1739000 - DNA, 25 bp, Homo sapien
ttgcggtgggtgtcatcaaagcagt

SEQ ID NO: 1739001 - DNA, 25 bp, Homo sapien
gtgggtgtcatcaaagcagtggaca

SEQ ID NO: 1739002 - DNA, 25 bp, Homo sapien
cggtgggtgtcatcaaagcagtgga

SEQ ID NO: 1739003 - DNA, 25 bp, Homo sapien
tgagagcttctcagactatccacct

SEQ ID NO: 1739004 - DNA, 25 bp, Homo sapien
aaggaaaagattgatcgccgttctg

SEQ ID NO: 1739005 - DNA, 25 bp, Homo sapien
tgatcgccgttctggtaaaaagctg

SEQ ID NO: 1739006 - DNA, 25 bp, Homo sapien
agcttctcagactatccacctttgg

SEQ ID NO: 1739007 - DNA, 25 bp, Homo sapien
aaatctgtcgaaatgcaccatgaag

SEQ ID NO: 1739008 - DNA, 25 bp, Homo sapien
gtaaaatctgtcgaaatgcaccatg

SEQ ID NO: 1739009 - DNA, 25 bp, Homo sapien
gaagtaaaatctgtcgaaatgcacc

SEQ ID NO: 1739010 - DNA, 25 bp, Homo sapien
taaaatctgtcgaaatgcaccatga

SEQ ID NO: 1739011 - DNA, 25 bp, Homo sapien
actgacaagcccttgcgcctgcctc

SEQ ID NO: 1739012 - DNA, 25 bp, Homo sapien
ctgacaagcccttgcgcctgcctct

SEQ ID NO: 1739013 - DNA, 25 bp, Homo sapien
ggaatggtgacaacatgctggagcc

SEQ ID NO: 1739014 - DNA, 25 bp, Homo sapien
tgggtgtgaaacaactaattgtcgg

SEQ ID NO: 1739015 - DNA, 25 bp, Homo sapien
gaggaaattgttaaggaagtcagca

SEQ ID NO: 1739016 - DNA, 25 bp, Homo sapien
aagaatgggcagacccgagagcatg

SEQ ID NO: 1739017 - DNA, 25 bp, Homo sapien
ccagcaagtactatgtgactatcat

SEQ ID NO: 1739018 - DNA, 25 bp, Homo sapien
aaacatgattacagggacatctcag

SEQ ID NO: 1739019 - DNA, 25 bp, Homo sapien
ccccaggacacagagactttatcaa

SEQ ID NO: 1739020 - DNA, 25 bp, Homo sapien
aaagggctccttcaagtatgcctgg

SEQ ID NO: 1739021 - DNA, 25 bp, Homo sapien
tactggccatctgatctataaatgc

SEQ ID NO: 1739022 - DNA, 25 bp, Homo sapien
tgtcgtcattggacacgtagattcg

SEQ ID NO: 1739023 - DNA, 25 bp, Homo sapien
atctgatctataaatgcggtggcat

SEQ ID NO: 1739024 - DNA, 25 bp, Homo sapien
tctataaatgcggtggcatcgacaa

SEQ ID NO: 1739025 - DNA, 25 bp, Homo sapien
ccctggctgcagtacgtgattcttg

SEQ ID NO: 1739026 - DNA, 25 bp, Homo sapien
gtgattcttgatcccgagcttcggg

SEQ ID NO: 1739027 - DNA, 25 bp, Homo sapien
aatttttgatgacctgctgcgacgc

SEQ ID NO: 1739028 - DNA, 25 bp, Homo sapien
caagatagtcttgtaaatgcgggcc

SEQ ID NO: 1739029 - DNA, 25 bp, Homo sapien
ggagaagagcatgcgtgaggctccg

SEQ ID NO: 1739030 - DNA, 25 bp, Homo sapien
gctccggtgcccgtcagtgggcaga

SEQ ID NO: 1739031 - DNA, 25 bp, Homo sapien
aggctccggtgcccgtcagtgggca

SEQ ID NO: 1739032 - DNA, 25 bp, Homo sapien
tcgtcatcactgaggtggagaagag

SEQ ID NO: 1739033 - DNA, 25 bp, Homo sapien
cgcaagtccgtgagccgttaaggag

SEQ ID NO: 1739034 - DNA, 25 bp, Homo sapien
ctggtactccttgccacacgggagg

SEQ ID NO: 1739035 - DNA, 25 bp, Homo sapien
tgagacccgcagaggaagacgctct

SEQ ID NO: 1739036 - DNA, 25 bp, Homo sapien
gattcgtcgctttcacggccatcga

SEQ ID NO: 1739037 - DNA, 25 bp, Homo sapien
ggagatgacgtgttacgggcttcca

SEQ ID NO: 1739038 - DNA, 25 bp, Homo sapien
gtgttacgggcttccataaaagcag

SEQ ID NO: 1739039 - DNA, 25 bp, Homo sapien
ttctaaactgaaagcctggacatct

SEQ ID NO: 1739040 - DNA, 25 bp, Homo sapien
ctattctaaactgaaagcctggaca

SEQ ID NO: 1739041 - DNA, 25 bp, Homo sapien
cctcaaattatacgtccgcctcggc

SEQ ID NO: 1739042 - DNA, 25 bp, Homo sapien
ctcaaattatacgtccgcctcggcc

SEQ ID NO: 1739043 - DNA, 25 bp, Homo sapien
cacagagctcaaggcaaggtcatta

SEQ ID NO: 1739044 - DNA, 25 bp, Homo sapien
gatgctagttaatgaggaatcccaa

SEQ ID NO: 1739045 - DNA, 25 bp, Homo sapien
ttaatccttacaacgagcctatggg

SEQ ID NO: 1739046 - DNA, 25 bp, Homo sapien
catgcccagcgaacagcatctttaa

SEQ ID NO: 1739047 - DNA, 25 bp, Homo sapien
caagtacattcgtctctcagaggag

SEQ ID NO: 1739048 - DNA, 25 bp, Homo sapien
catcatgctatgtaggaaggccaag

SEQ ID NO: 1739049 - DNA, 25 bp, Homo sapien
acaatggaaggcaacaactaaggtg

SEQ ID NO: 1739050 - DNA, 25 bp, Homo sapien
gaggagccatctgtaacaatggaag

SEQ ID NO: 1739051 - DNA, 25 bp, Homo sapien
taaccaactataaatgccctgacaa

SEQ ID NO: 1739052 - DNA, 25 bp, Homo sapien
cagtagtcattcatcacaacaccca

SEQ ID NO: 1739053 - DNA, 25 bp, Homo sapien
tgaatgtactgccacagccatttgt

SEQ ID NO: 1739054 - DNA, 25 bp, Homo sapien
cgcagcaaatagagaggttccaaat

SEQ ID NO: 1739055 - DNA, 25 bp, Homo sapien
gtgtttctggatcactaaggctaca

SEQ ID NO: 1739056 - DNA, 25 bp, Homo sapien
tttgtgtttctggatcactaaggct

SEQ ID NO: 1739057 - DNA, 25 bp, Homo sapien
actaaggctacagctactccttggg

SEQ ID NO: 1739058 - DNA, 25 bp, Homo sapien
tcactaaggctacagctactccttg

SEQ ID NO: 1739059 - DNA, 25 bp, Homo sapien
gccctccagagggtgaaggacctga

SEQ ID NO: 1739060 - DNA, 25 bp, Homo sapien
ccctccagagggtgaaggacctgac

SEQ ID NO: 1739061 - DNA, 25 bp, Homo sapien
ctgccctccagagggtgaaggacct

SEQ ID NO: 1739062 - DNA, 25 bp, Homo sapien
tgccctccagagggtgaaggacctg

SEQ ID NO: 1739063 - DNA, 25 bp, Homo sapien
ataccgtcacccaaaatagccactg

SEQ ID NO: 1739064 - DNA, 25 bp, Homo sapien
tgactctaggcgctgcagctttctg

SEQ ID NO: 1739065 - DNA, 25 bp, Homo sapien
tgttgaaaaccctggtagtggcaga

SEQ ID NO: 1739066 - DNA, 25 bp, Homo sapien
aatagtccagggctaacgacgacct

SEQ ID NO: 1739067 - DNA, 25 bp, Homo sapien
cttctgataaggttagaaggtagta

SEQ ID NO: 1739068 - DNA, 25 bp, Homo sapien
tctgataaggttagaaggtagtaac

SEQ ID NO: 1739069 - DNA, 25 bp, Homo sapien
tagaaggtagtaacccctgaatgta

SEQ ID NO: 1739070 - DNA, 25 bp, Homo sapien
ttctgataaggttagaaggtagtaa

SEQ ID NO: 1739071 - DNA, 25 bp, Homo sapien
caacctcaatttgtcaccaagctgg

SEQ ID NO: 1739072 - DNA, 25 bp, Homo sapien
gcaacctcaatttgtcaccaagctg

SEQ ID NO: 1739073 - DNA, 25 bp, Homo sapien
atttgtcaccaagctggctgagcat

SEQ ID NO: 1739074 - DNA, 25 bp, Homo sapien
tcaatttgtcaccaagctggctgag

SEQ ID NO: 1739075 - DNA, 25 bp, Homo sapien
tagcaagattgctggaacccacagg

SEQ ID NO: 1739076 - DNA, 25 bp, Homo sapien
aaccacaacagctgggagccagaat

SEQ ID NO: 1739077 - DNA, 25 bp, Homo sapien
gaataaagggcaggcaatgtaataa

SEQ ID NO: 1739078 - DNA, 25 bp, Homo sapien
tggaacccacaggatttgaccacat

SEQ ID NO: 1739079 - DNA, 25 bp, Homo sapien
ctgtaggccaatacacatattcagg

SEQ ID NO: 1739080 - DNA, 25 bp, Homo sapien
tgctacggttcttggcccttctgag

SEQ ID NO: 1739081 - DNA, 25 bp, Homo sapien
gagtccctggagctatgtgcctctg

SEQ ID NO: 1739082 - DNA, 25 bp, Homo sapien
gactgcctcagttgaaagcctgctt

SEQ ID NO: 1739083 - DNA, 25 bp, Homo sapien
tttggagcaagatcagtgcagcggt

SEQ ID NO: 1739084 - DNA, 25 bp, Homo sapien
ttgctctgtgcctcgggtccctggt

SEQ ID NO: 1739085 - DNA, 25 bp, Homo sapien
tgcctcgggtccctggttcacaaaa

SEQ ID NO: 1739086 - DNA, 25 bp, Homo sapien
aagtacctgtcctgcacaatgctga

SEQ ID NO: 1739087 - DNA, 25 bp, Homo sapien
cacaaaaacagacctcaagtacctg

SEQ ID NO: 1739088 - DNA, 25 bp, Homo sapien
ggaagccacactttccactgtgata

SEQ ID NO: 1739089 - DNA, 25 bp, Homo sapien
catgttctaggccaactgctggtgc

SEQ ID NO: 1739090 - DNA, 25 bp, Homo sapien
gccttttctgtcagggtgctgaaga

SEQ ID NO: 1739091 - DNA, 25 bp, Homo sapien
gagcactgacaactgcacggccata

SEQ ID NO: 1739092 - DNA, 25 bp, Homo sapien
agcccttcaacacctctcctggaac

SEQ ID NO: 1739093 - DNA, 25 bp, Homo sapien
aacacctctcctggaactgatagac

SEQ ID NO: 1739094 - DNA, 25 bp, Homo sapien
tctcctggaactgatagaccctggg

SEQ ID NO: 1739095 - DNA, 25 bp, Homo sapien
tggaactgatagaccctggggctga

SEQ ID NO: 1739096 - DNA, 25 bp, Homo sapien
gcacataaatagttctcagtgaatg

SEQ ID NO: 1739097 - DNA, 25 bp, Homo sapien
tacatatcttatcttccctacgtgg

SEQ ID NO: 1739098 - DNA, 25 bp, Homo sapien
tatagtctctcattgtttgccctcc

SEQ ID NO: 1739099 - DNA, 25 bp, Homo sapien
cctacgtggtcagcaatttcttttc

SEQ ID NO: 1739100 - DNA, 25 bp, Homo sapien
gctctgcatgtcaagtggcacaaga

SEQ ID NO: 1739101 - DNA, 25 bp, Homo sapien
ggcccttccagtatccccagggaga

SEQ ID NO: 1739102 - DNA, 25 bp, Homo sapien
gatgtccaggctgcgccctaaatat

SEQ ID NO: 1739103 - DNA, 25 bp, Homo sapien
tttctgcaggttgcacccaggctct

SEQ ID NO: 1739104 - DNA, 25 bp, Homo sapien
agaacccgggtctacaccctcagcg

SEQ ID NO: 1739105 - DNA, 25 bp, Homo sapien
ctcagaacccgggtctacaccctca

SEQ ID NO: 1739106 - DNA, 25 bp, Homo sapien
tcagaacccgggtctacaccctcag

SEQ ID NO: 1739107 - DNA, 25 bp, Homo sapien
tacaccctcagcgtcagaggctgct

SEQ ID NO: 1739108 - DNA, 25 bp, Homo sapien
gaagaagcgtgccaactgaccttga

SEQ ID NO: 1739109 - DNA, 25 bp, Homo sapien
cagcagtttgtattagccatggtaa

SEQ ID NO: 1739110 - DNA, 25 bp, Homo sapien
acttgagacaaacgctgaagacagc

SEQ ID NO: 1739111 - DNA, 25 bp, Homo sapien
tattgggaccaaagctatcacaaaa

SEQ ID NO: 1739112 - DNA, 25 bp, Homo sapien
catttctgctaccacaaagccgagg

SEQ ID NO: 1739113 - DNA, 25 bp, Homo sapien
gctttcagaacacctatgtggctta

SEQ ID NO: 1739114 - DNA, 25 bp, Homo sapien
ggccacatcacctgagactagggta

SEQ ID NO: 1739115 - DNA, 25 bp, Homo sapien
tgcatcctgctcgagccatcgtctt

SEQ ID NO: 1739116 - DNA, 25 bp, Homo sapien
aagaaaagtgcgatgcccagtcaat

SEQ ID NO: 1739117 - DNA, 25 bp, Homo sapien
aaatctactctcacatggatcacag

SEQ ID NO: 1739118 - DNA, 25 bp, Homo sapien
tgcaaaagaaaaatgcgaagcggcc

SEQ ID NO: 1739119 - DNA, 25 bp, Homo sapien
agaaaaatgcgaagcggccgggcac

SEQ ID NO: 1739120 - DNA, 25 bp, Homo sapien
gaatgagctgaaacagacctcctga

SEQ ID NO: 1739121 - DNA, 25 bp, Homo sapien
taaagccctgagtaggcaagagcag

SEQ ID NO: 1739122 - DNA, 25 bp, Homo sapien
tcagggtcagagtgcccagcgttta

SEQ ID NO: 1739123 - DNA, 25 bp, Homo sapien
cagcgtttatcagaggcagcatcca

SEQ ID NO: 1739124 - DNA, 25 bp, Homo sapien
aaaactatctaatcagttaggcatg

SEQ ID NO: 1739125 - DNA, 25 bp, Homo sapien
ggactacaggtcacgccacagcacc

SEQ ID NO: 1739126 - DNA, 25 bp, Homo sapien
ttggccaggatggacaaccatggct

SEQ ID NO: 1739127 - DNA, 25 bp, Homo sapien
tctaatcagttaggcatgatggtat

SEQ ID NO: 1739128 - DNA, 25 bp, Homo sapien
catagggcaacatatgtgggaccgg

SEQ ID NO: 1739129 - DNA, 25 bp, Homo sapien
cgggtagggagttttcatgccctct

SEQ ID NO: 1739130 - DNA, 25 bp, Homo sapien
tacaaaagacactgttaccactcca

SEQ ID NO: 1739131 - DNA, 25 bp, Homo sapien
tggtgccaaaagtcccagacctcta

SEQ ID NO: 1739132 - DNA, 25 bp, Homo sapien
gagtaaagaccgtgatgattttata

SEQ ID NO: 1739133 - DNA, 25 bp, Homo sapien
aggaattagtgctctgcaccaggca

SEQ ID NO: 1739134 - DNA, 25 bp, Homo sapien
gtttgtgcatgagtaaagaccgtga

SEQ ID NO: 1739135 - DNA, 25 bp, Homo sapien
aggaaattttttgcaagaggtgtgt

SEQ ID NO: 1739136 - DNA, 25 bp, Homo sapien
tttaaccaggtggagagctcatatc

SEQ ID NO: 1739137 - DNA, 25 bp, Homo sapien
caagcagctgaactttaagaattat

SEQ ID NO: 1739138 - DNA, 25 bp, Homo sapien
ttgatctttgccaaagattggcaaa

SEQ ID NO: 1739139 - DNA, 25 bp, Homo sapien
ttaagaattatgacctgtcttgatc

SEQ ID NO: 1739140 - DNA, 25 bp, Homo sapien
aattctgtatgggtatctgctcagc

SEQ ID NO: 1739141 - DNA, 25 bp, Homo sapien
cactagggcagattgttcccaccaa

SEQ ID NO: 1739142 - DNA, 25 bp, Homo sapien
gcttatgaagttacacactagggca

SEQ ID NO: 1739143 - DNA, 25 bp, Homo sapien
catccatctcggtgccagctatctg

SEQ ID NO: 1739144 - DNA, 25 bp, Homo sapien
gagcccgttcagagtgccgctcagt

SEQ ID NO: 1739145 - DNA, 25 bp, Homo sapien
taggcgtcatgaggtctccggttcg

SEQ ID NO: 1739146 - DNA, 25 bp, Homo sapien
gagtacacctgctcacgtaggcgtc

SEQ ID NO: 1739147 - DNA, 25 bp, Homo sapien
ttctctgccaggtggcgagtacacc

SEQ ID NO: 1739148 - DNA, 25 bp, Homo sapien
gcacttttagctcatgtctaaaggt

SEQ ID NO: 1739149 - DNA, 25 bp, Homo sapien
gctttgcatgcacttttagctcatg

SEQ ID NO: 1739150 - DNA, 25 bp, Homo sapien
tttttacttgctttgcatgcacttt

SEQ ID NO: 1739151 - DNA, 25 bp, Homo sapien
tacttgctttgcatgcacttttagc

SEQ ID NO: 1739152 - DNA, 25 bp, Homo sapien
catcatcatgctggtgtccatagaa

SEQ ID NO: 1739153 - DNA, 25 bp, Homo sapien
aagaagagaactcgcactgcagacg

SEQ ID NO: 1739154 - DNA, 25 bp, Homo sapien
agaactgtaaagcttggagcaatct

SEQ ID NO: 1739155 - DNA, 25 bp, Homo sapien
gagcaatctctgaacacagttaggg

SEQ ID NO: 1739156 - DNA, 25 bp, Homo sapien
tattgatgcccaacgctgtctggct

SEQ ID NO: 1739157 - DNA, 25 bp, Homo sapien
attacaatggcgcttctcgctgctg

SEQ ID NO: 1739158 - DNA, 25 bp, Homo sapien
gtctgcctgggctacagtccgctgc

SEQ ID NO: 1739159 - DNA, 25 bp, Homo sapien
gtaatctgaaatgggcgcgcctaac

SEQ ID NO: 1739160 - DNA, 25 bp, Homo sapien
tgtggcaaacatcgcaaatccaggg

SEQ ID NO: 1739161 - DNA, 25 bp, Homo sapien
gcgcggcggtgcacacgcagaggag

SEQ ID NO: 1739162 - DNA, 25 bp, Homo sapien
ccacggccagcgcggcggtgcacac

SEQ ID NO: 1739163 - DNA, 25 bp, Homo sapien
cagcgcggcggtgcacacgcagagg

SEQ ID NO: 1739164 - DNA, 25 bp, Homo sapien
gccagcgcggcggtgcacacgcaga

SEQ ID NO: 1739165 - DNA, 25 bp, Homo sapien
atttcctccgggcctgatgatccct

SEQ ID NO: 1739166 - DNA, 25 bp, Homo sapien
agaagctccaccccaatagtcacat

SEQ ID NO: 1739167 - DNA, 25 bp, Homo sapien
tcctccgggcctgatgatccctggg

SEQ ID NO: 1739168 - DNA, 25 bp, Homo sapien
gaagctccaccccaatagtcacatt

SEQ ID NO: 1739169 - DNA, 25 bp, Homo sapien
ggctaaaccacactatttaacatgt

SEQ ID NO: 1739170 - DNA, 25 bp, Homo sapien
tagatgatagatgtataccttatgg

SEQ ID NO: 1739171 - DNA, 25 bp, Homo sapien
gaaattattcctcccgtataactga

SEQ ID NO: 1739172 - DNA, 25 bp, Homo sapien
tacctcacataactacttgtggaaa

SEQ ID NO: 1739173 - DNA, 25 bp, Homo sapien
atggaagagtaagtgtcttaaaaga

SEQ ID NO: 1739174 - DNA, 25 bp, Homo sapien
tcatcctgggtacgtccggttacac

SEQ ID NO: 1739175 - DNA, 25 bp, Homo sapien
aatctgagaagagtgtaacaatgcg

SEQ ID NO: 1739176 - DNA, 25 bp, Homo sapien
taaatctcatctgcactgttcagag

SEQ ID NO: 1739177 - DNA, 25 bp, Homo sapien
tcttggtctcaaatgataagcgggt

SEQ ID NO: 1739178 - DNA, 25 bp, Homo sapien
agctgccatcgcagtgtcagaggca

SEQ ID NO: 1739179 - DNA, 25 bp, Homo sapien
catcgcagtgtcagaggcactcaat

SEQ ID NO: 1739180 - DNA, 25 bp, Homo sapien
cgtactagcaccaacaacttctgga

SEQ ID NO: 1739181 - DNA, 25 bp, Homo sapien
gttcccctacaagatcattcacccg

SEQ ID NO: 1739182 - DNA, 25 bp, Homo sapien
tctgctgctacgacacagccatgta

SEQ ID NO: 1739183 - DNA, 25 bp, Homo sapien
acagcggagcccagcatttgcatgc

SEQ ID NO: 1739184 - DNA, 25 bp, Homo sapien
tgtacagtatgagcaatacccccgt

SEQ ID NO: 1739185 - DNA, 25 bp, Homo sapien
caagcatggtgatgtcacagcggag

SEQ ID NO: 1739186 - DNA, 25 bp, Homo sapien
gagggagagaatgcagaaacaccag

SEQ ID NO: 1739187 - DNA, 25 bp, Homo sapien
ttaccaataaggcagagggagagaa

SEQ ID NO: 1739188 - DNA, 25 bp, Homo sapien
gggagagaatgcagaaacaccagaa

SEQ ID NO: 1739189 - DNA, 25 bp, Homo sapien
gagagaatgcagaaacaccagaagt

SEQ ID NO: 1739190 - DNA, 25 bp, Homo sapien
cattgatggctttgtacctggggga

SEQ ID NO: 1739191 - DNA, 25 bp, Homo sapien
cctgtcttggacctaggtctaactg

SEQ ID NO: 1739192 - DNA, 25 bp, Homo sapien
tttcccaagcctgtcttggacctag

SEQ ID NO: 1739193 - DNA, 25 bp, Homo sapien
tgggggagaatgagataattcctct

SEQ ID NO: 1739194 - DNA, 25 bp, Homo sapien
tgttgtgacaaccactgttggatca

SEQ ID NO: 1739195 - DNA, 25 bp, Homo sapien
ccagtcaccaagtattggatgggaa

SEQ ID NO: 1739196 - DNA, 25 bp, Homo sapien
ggaaatgactccaagatcactttgt

SEQ ID NO: 1739197 - DNA, 25 bp, Homo sapien
tgaacttgaatagaccagtcaccaa

SEQ ID NO: 1739198 - DNA, 25 bp, Homo sapien
gttctcagacaccaacattagcctt

SEQ ID NO: 1739199 - DNA, 25 bp, Homo sapien
caaaaacattcgcaaccaaatgtgg

SEQ ID NO: 1739200 - DNA, 25 bp, Homo sapien
cgtgggtcacgcaaagacctggagc

SEQ ID NO: 1739201 - DNA, 25 bp, Homo sapien
tacaacatgggtgagccataataac

SEQ ID NO: 1739202 - DNA, 25 bp, Homo sapien
agggctgccgtcatcaaatgaccag

SEQ ID NO: 1739203 - DNA, 25 bp, Homo sapien
gccgtcatcaaatgaccaggaatct

SEQ ID NO: 1739204 - DNA, 25 bp, Homo sapien
cttccatctgacaatgaggaaagac

SEQ ID NO: 1739205 - DNA, 25 bp, Homo sapien
aagaagagacttccatctgacaatg

SEQ ID NO: 1739206 - DNA, 25 bp, Homo sapien
aaggctggaactaaacacctgaaga

SEQ ID NO: 1739207 - DNA, 25 bp, Homo sapien
ggaactaaacacctgaagaactgaa

SEQ ID NO: 1739208 - DNA, 25 bp, Homo sapien
gaagataatctactgagtgtgagga

SEQ ID NO: 1739209 - DNA, 25 bp, Homo sapien
agggaggaatcagaacctccccagg

SEQ ID NO: 1739210 - DNA, 25 bp, Homo sapien
gattctgcctttaagtgtctcttga

SEQ ID NO: 1739211 - DNA, 25 bp, Homo sapien
taatcctaatgattctgcctttaag

SEQ ID NO: 1739212 - DNA, 25 bp, Homo sapien
tcgaaatccagtcactaatcctaat

SEQ ID NO: 1739213 - DNA, 25 bp, Homo sapien
ctctgctccaatcgaaatccagtca

SEQ ID NO: 1739214 - DNA, 25 bp, Homo sapien
tgattctcccaaagacccaacttga

SEQ ID NO: 1739215 - DNA, 25 bp, Homo sapien
caaactgagcttccatccctaactt

SEQ ID NO: 1739216 - DNA, 25 bp, Homo sapien
tgatatgggtgattctcccaaagac

SEQ ID NO: 1739217 - DNA, 25 bp, Homo sapien
cttccctagaactgatatgggtgat

SEQ ID NO: 1739218 - DNA, 25 bp, Homo sapien
atgtaagacggccttgattagattt

SEQ ID NO: 1739219 - DNA, 25 bp, Homo sapien
ttctactggatgtaagacggccttg

SEQ ID NO: 1739220 - DNA, 25 bp, Homo sapien
taaaaacctgctccaaagcacatcc

SEQ ID NO: 1739221 - DNA, 25 bp, Homo sapien
agcacatccagtagaaactctctgt

SEQ ID NO: 1739222 - DNA, 25 bp, Homo sapien
ctgaaatgattgatagtatgtctgg

SEQ ID NO: 1739223 - DNA, 25 bp, Homo sapien
acctgaaatgattgatagtatgtct

SEQ ID NO: 1739224 - DNA, 25 bp, Homo sapien
tgaaacctgaaatgattgatagtat

SEQ ID NO: 1739225 - DNA, 25 bp, Homo sapien
gaaatgattgatagtatgtctggtc

SEQ ID NO: 1739226 - DNA, 25 bp, Homo sapien
attcatagaacaatataatggtgtc

SEQ ID NO: 1739227 - DNA, 25 bp, Homo sapien
taagcgttacgtctcctttcactgg

SEQ ID NO: 1739228 - DNA, 25 bp, Homo sapien
tgtaagcgttacgtctcctttcact

SEQ ID NO: 1739229 - DNA, 25 bp, Homo sapien
aagcgttacgtctcctttcactggc

SEQ ID NO: 1739230 - DNA, 25 bp, Homo sapien
aatgtaagcgttacgtctcctttca

SEQ ID NO: 1739231 - DNA, 25 bp, Homo sapien
aagagaagtttgcagatccatttat

SEQ ID NO: 1739232 - DNA, 25 bp, Homo sapien
taaaagagaagtttgcagatccatt

SEQ ID NO: 1739233 - DNA, 25 bp, Homo sapien
ttaaaagagaagtttgcagatccat

SEQ ID NO: 1739234 - DNA, 25 bp, Homo sapien
ctcttcatcattaaaagagaagttt

SEQ ID NO: 1739235 - DNA, 25 bp, Homo sapien
cactgtggttaaaatttctactggt

SEQ ID NO: 1739236 - DNA, 25 bp, Homo sapien
ccaggggaagatagatccaggtatt

SEQ ID NO: 1739237 - DNA, 25 bp, Homo sapien
tagatccaggtattcagaaagtcca

SEQ ID NO: 1739238 - DNA, 25 bp, Homo sapien
tgtggttaaaatttctactggtcca

SEQ ID NO: 1739239 - DNA, 25 bp, Homo sapien
gaagaacacattagtgcttacattt

SEQ ID NO: 1739240 - DNA, 25 bp, Homo sapien
gtagtataatcaaaaaactcaatga

SEQ ID NO: 1739241 - DNA, 25 bp, Homo sapien
tgttgcttgaagaacacattagtgc

SEQ ID NO: 1739242 - DNA, 25 bp, Homo sapien
cagtagtataatcaaaaaactcaat

SEQ ID NO: 1739243 - DNA, 25 bp, Homo sapien
tgctatggactggaaataaatatac

SEQ ID NO: 1739244 - DNA, 25 bp, Homo sapien
gactggaaataaatataccaactta

SEQ ID NO: 1739245 - DNA, 25 bp, Homo sapien
tggactggaaataaatataccaact

SEQ ID NO: 1739246 - DNA, 25 bp, Homo sapien
ctatggactggaaataaatatacca

SEQ ID NO: 1739247 - DNA, 25 bp, Homo sapien
tggttgccatcagcacgagttacct

SEQ ID NO: 1739248 - DNA, 25 bp, Homo sapien
tcctccaggattgggaattcaatct

SEQ ID NO: 1739249 - DNA, 25 bp, Homo sapien
tctctgtgtcactgttatgactaca

SEQ ID NO: 1739250 - DNA, 25 bp, Homo sapien
agatccgctccagtactcagtatag

SEQ ID NO: 1739251 - DNA, 25 bp, Homo sapien
tcttactaggagacttaaacagact

SEQ ID NO: 1739252 - DNA, 25 bp, Homo sapien
tgccatgctacttttactaccaagg

SEQ ID NO: 1739253 - DNA, 25 bp, Homo sapien
gtttttagttggatgtatgtcttac

SEQ ID NO: 1739254 - DNA, 25 bp, Homo sapien
taaacagactatgaactgccatgct

SEQ ID NO: 1739255 - DNA, 25 bp, Homo sapien
taaccaccaactcaaaaggcgatcc

SEQ ID NO: 1739256 - DNA, 25 bp, Homo sapien
cttaactccttcaatcgtttgttgc

SEQ ID NO: 1739257 - DNA, 25 bp, Homo sapien
caatcgtttgttgccactaaccacc

SEQ ID NO: 1739258 - DNA, 25 bp, Homo sapien
tgccactaaccaccaactcaaaagg

SEQ ID NO: 1739259 - DNA, 25 bp, Homo sapien
tttgttttcctacagccaccaactg

SEQ ID NO: 1739260 - DNA, 25 bp, Homo sapien
tacacaggcttttggagtccaagaa

SEQ ID NO: 1739261 - DNA, 25 bp, Homo sapien
gaacatcacttataatttccccatc

SEQ ID NO: 1739262 - DNA, 25 bp, Homo sapien
caagctgaacaggaatttttagaac

SEQ ID NO: 1739263 - DNA, 25 bp, Homo sapien
tacaatcccaactatggagtcaggc

SEQ ID NO: 1739264 - DNA, 25 bp, Homo sapien
gattcacacttttgtcaacagctac

SEQ ID NO: 1739265 - DNA, 25 bp, Homo sapien
gctgtgtcacagagatcctaagaga

SEQ ID NO: 1739266 - DNA, 25 bp, Homo sapien
taatatcattagaggcattcatcag

SEQ ID NO: 1739267 - DNA, 25 bp, Homo sapien
tttctgcaatgctaacaacaaccat

SEQ ID NO: 1739268 - DNA, 25 bp, Homo sapien
tgcaaccactatttctgcaatgcta

SEQ ID NO: 1739269 - DNA, 25 bp, Homo sapien
ttctgcaatgctaacaacaaccatg

SEQ ID NO: 1739270 - DNA, 25 bp, Homo sapien
ctgcaaccactatttctgcaatgct

SEQ ID NO: 1739271 - DNA, 25 bp, Homo sapien
tgtgttataaagttccaactcatgg

SEQ ID NO: 1739272 - DNA, 25 bp, Homo sapien
tataaagttccaactcatggaccac

SEQ ID NO: 1739273 - DNA, 25 bp, Homo sapien
catgcctaaataatatcctgtgtta

SEQ ID NO: 1739274 - DNA, 25 bp, Homo sapien
atgaacatgcctaaataatatcctg

SEQ ID NO: 1739275 - DNA, 25 bp, Homo sapien
gaggtttgcatctgtcaatacccag

SEQ ID NO: 1739276 - DNA, 25 bp, Homo sapien
caatataatccttcgtgaggtttgc

SEQ ID NO: 1739277 - DNA, 25 bp, Homo sapien
taatccttcgtgaggtttgcatctg

SEQ ID NO: 1739278 - DNA, 25 bp, Homo sapien
aaacaccatcaatataatccttcgt

SEQ ID NO: 1739279 - DNA, 25 bp, Homo sapien
tcctccataaacctctcagcatatt

SEQ ID NO: 1739280 - DNA, 25 bp, Homo sapien
ctccataaacctctcagcatattct

SEQ ID NO: 1739281 - DNA, 25 bp, Homo sapien
ttcattttcctccataaacctctca

SEQ ID NO: 1739282 - DNA, 25 bp, Homo sapien
ttttcctccataaacctctcagcat

SEQ ID NO: 1739283 - DNA, 25 bp, Homo sapien
ggactgctacccaaagaaaagtcat

SEQ ID NO: 1739284 - DNA, 25 bp, Homo sapien
tcggacatgtggactgctacccaaa

SEQ ID NO: 1739285 - DNA, 25 bp, Homo sapien
aaaatgctttcggacatgtggactg

SEQ ID NO: 1739286 - DNA, 25 bp, Homo sapien
tgtggactgctacccaaagaaaagt

SEQ ID NO: 1739287 - DNA, 25 bp, Homo sapien
gatcacaaaaccagtagccacccaa

SEQ ID NO: 1739288 - DNA, 25 bp, Homo sapien
actggagtagttgttagtccaagac

SEQ ID NO: 1739289 - DNA, 25 bp, Homo sapien
ctccactggagtagttgttagtcca

SEQ ID NO: 1739290 - DNA, 25 bp, Homo sapien
gtagccacccaagaagtgatagaat

SEQ ID NO: 1739291 - DNA, 25 bp, Homo sapien
ctcagtggcatctttcaaataattg

SEQ ID NO: 1739292 - DNA, 25 bp, Homo sapien
cagtggcatctttcaaataattgaa

SEQ ID NO: 1739293 - DNA, 25 bp, Homo sapien
aaattcttcacctctgataacagag

SEQ ID NO: 1739294 - DNA, 25 bp, Homo sapien
gataacagagtagggaagattcaaa

SEQ ID NO: 1739295 - DNA, 25 bp, Homo sapien
catttgaagtcattagaatatcaaa

SEQ ID NO: 1739296 - DNA, 25 bp, Homo sapien
ctcccagatgtgttggcctgatggg

SEQ ID NO: 1739297 - DNA, 25 bp, Homo sapien
ttactaaaatcatctgggtgacagc

SEQ ID NO: 1739298 - DNA, 25 bp, Homo sapien
aaatcatctgggtgacagcatcaga

SEQ ID NO: 1739299 - DNA, 25 bp, Homo sapien
tttctcccagatgtgttggcctgat

SEQ ID NO: 1739300 - DNA, 25 bp, Homo sapien
ttggccgtgttttaataggatccca

SEQ ID NO: 1739301 - DNA, 25 bp, Homo sapien
tccaaatctacaaatcgacttggcc

SEQ ID NO: 1739302 - DNA, 25 bp, Homo sapien
tctacaaatcgacttggccgtgttt

SEQ ID NO: 1739303 - DNA, 25 bp, Homo sapien
taataggatcccaacgtaacacagt

SEQ ID NO: 1739304 - DNA, 25 bp, Homo sapien
caagtctaataagatggattgtgaa

SEQ ID NO: 1739305 - DNA, 25 bp, Homo sapien
atctgaactctttcactgccagtca

SEQ ID NO: 1739306 - DNA, 25 bp, Homo sapien
tgtagcctattgtcagtcaagtcta

SEQ ID NO: 1739307 - DNA, 25 bp, Homo sapien
aactcaaagttttcagggtactctg

SEQ ID NO: 1739308 - DNA, 25 bp, Homo sapien
aaggcatccgaatcaatgaggctaa

SEQ ID NO: 1739309 - DNA, 25 bp, Homo sapien
ttgatggaaggaccaagaacatctc

SEQ ID NO: 1739310 - DNA, 25 bp, Homo sapien
catccgaatcaatgaggctaagcca

SEQ ID NO: 1739311 - DNA, 25 bp, Homo sapien
tgaggctaagccattgatggaagga

SEQ ID NO: 1739312 - DNA, 25 bp, Homo sapien
aatttatcatgttctgttcaccaca

SEQ ID NO: 1739313 - DNA, 25 bp, Homo sapien
atttatcatgttctgttcaccacag

SEQ ID NO: 1739314 - DNA, 25 bp, Homo sapien
aaatgtaggtctctaaaatgcttac

SEQ ID NO: 1739315 - DNA, 25 bp, Homo sapien
tacgaacaaatgtaggtctctaaaa

SEQ ID NO: 1739316 - DNA, 25 bp, Homo sapien
gaacaaatgtaggtctctaaaatgc

SEQ ID NO: 1739317 - DNA, 25 bp, Homo sapien
ttttctacgaacaaatgtaggtctc

SEQ ID NO: 1739318 - DNA, 25 bp, Homo sapien
tacacggtggtgatactcaagcatc

SEQ ID NO: 1739319 - DNA, 25 bp, Homo sapien
gattctaaacgctggtctcccttgg

SEQ ID NO: 1739320 - DNA, 25 bp, Homo sapien
tacatgggcaactctatacaggaaa

SEQ ID NO: 1739321 - DNA, 25 bp, Homo sapien
tgtgccatcctatcccagggagatc

SEQ ID NO: 1739322 - DNA, 25 bp, Homo sapien
ctggccaggactgacctgagggact

SEQ ID NO: 1739323 - DNA, 25 bp, Homo sapien
ggactgacctgagggactagcactg

SEQ ID NO: 1739324 - DNA, 25 bp, Homo sapien
ggctgctgatccacagcaaaagtat

SEQ ID NO: 1739325 - DNA, 25 bp, Homo sapien
ggatttggaccattcattttgtagg

SEQ ID NO: 1739326 - DNA, 25 bp, Homo sapien
taaatcttcaattaacaggttctgg

SEQ ID NO: 1739327 - DNA, 25 bp, Homo sapien
ttaaaaagttgaactgcaggcactg

SEQ ID NO: 1739328 - DNA, 25 bp, Homo sapien
taaaaagttgaactgcaggcactgt

SEQ ID NO: 1739329 - DNA, 25 bp, Homo sapien
gtgttttcaattagacttggtttga

SEQ ID NO: 1739330 - DNA, 25 bp, Homo sapien
gagccatcttccctctgatagagaa

SEQ ID NO: 1739331 - DNA, 25 bp, Homo sapien
cagaagggtcataattcccaaaagc

SEQ ID NO: 1739332 - DNA, 25 bp, Homo sapien
catcttccctctgatagagaagttc

SEQ ID NO: 1739333 - DNA, 25 bp, Homo sapien
caagtgctcccagaagggtcataat

SEQ ID NO: 1739334 - DNA, 25 bp, Homo sapien
taattgccagtgctatagactccag

SEQ ID NO: 1739335 - DNA, 25 bp, Homo sapien
cctggagcctccttttggagacgtg

SEQ ID NO: 1739336 - DNA, 25 bp, Homo sapien
agacgtggacacgttggcagctgca

SEQ ID NO: 1739337 - DNA, 25 bp, Homo sapien
ctctttccgggctgtggcaaacctg

SEQ ID NO: 1739338 - DNA, 25 bp, Homo sapien
ctatgtaaggatcggcttcaaggaa

SEQ ID NO: 1739339 - DNA, 25 bp, Homo sapien
gtaaggatcggcttcaaggaaacat

SEQ ID NO: 1739340 - DNA, 25 bp, Homo sapien
caatatctatgtaaggatcggcttc

SEQ ID NO: 1739341 - DNA, 25 bp, Homo sapien
tctgatcaatatctatgtaaggatc

SEQ ID NO: 1739342 - DNA, 25 bp, Homo sapien
caccttgaagctcactatgaatcac

SEQ ID NO: 1739343 - DNA, 25 bp, Homo sapien
tacaatataggctgtaagtgttact

SEQ ID NO: 1739344 - DNA, 25 bp, Homo sapien
aagttacaatataggctgtaagtgt

SEQ ID NO: 1739345 - DNA, 25 bp, Homo sapien
tgaagctcactatgaatcactcttc

SEQ ID NO: 1739346 - DNA, 25 bp, Homo sapien
ccaaaaaatggatagactcttgcac

SEQ ID NO: 1739347 - DNA, 25 bp, Homo sapien
gctctccaagtcagcatattcaaag

SEQ ID NO: 1739348 - DNA, 25 bp, Homo sapien
taggactccccactgatgacaatgc

SEQ ID NO: 1739349 - DNA, 25 bp, Homo sapien
caaagcttccttcgctttaggactc

SEQ ID NO: 1739350 - DNA, 25 bp, Homo sapien
cttcaatatccagggagcgtggctg

SEQ ID NO: 1739351 - DNA, 25 bp, Homo sapien
gaaagtttggactctgatgacaccc

SEQ ID NO: 1739352 - DNA, 25 bp, Homo sapien
cctgcttagccacctcataattggg

SEQ ID NO: 1739353 - DNA, 25 bp, Homo sapien
gatgacacccagaattgcatgccac

SEQ ID NO: 1739354 - DNA, 25 bp, Homo sapien
aggacttggtgagctaggccccgtc

SEQ ID NO: 1739355 - DNA, 25 bp, Homo sapien
gtcacggtcacttggatatttgtcc

SEQ ID NO: 1739356 - DNA, 25 bp, Homo sapien
cattagggctgcaaattcagacaga

SEQ ID NO: 1739357 - DNA, 25 bp, Homo sapien
ttcagacagagcctttaaagccaca

SEQ ID NO: 1739358 - DNA, 25 bp, Homo sapien
ggttgtgtgtgtcaatcagaaactt

SEQ ID NO: 1739359 - DNA, 25 bp, Homo sapien
tgtgtgtgtcaatcagaaactttac

SEQ ID NO: 1739360 - DNA, 25 bp, Homo sapien
gcggttgtgtgtgtcaatcagaaac

SEQ ID NO: 1739361 - DNA, 25 bp, Homo sapien
tctgaaggagtaagcggttgtgtgt

SEQ ID NO: 1739362 - DNA, 25 bp, Homo sapien
aactgccgttggctgtaccacagca

SEQ ID NO: 1739363 - DNA, 25 bp, Homo sapien
aaaccatttgcggaaatattaactg

SEQ ID NO: 1739364 - DNA, 25 bp, Homo sapien
ccatttgcggaaatattaactgccg

SEQ ID NO: 1739365 - DNA, 25 bp, Homo sapien
ggaaatattaactgccgttggctgt

SEQ ID NO: 1739366 - DNA, 25 bp, Homo sapien
tttggatagatcttcgtcttctaga

SEQ ID NO: 1739367 - DNA, 25 bp, Homo sapien
gaagacccagaagccttcacattat

SEQ ID NO: 1739368 - DNA, 25 bp, Homo sapien
gatcttcgtcttctagaagacccag

SEQ ID NO: 1739369 - DNA, 25 bp, Homo sapien
tccacatgattgagatcatctttat

SEQ ID NO: 1739370 - DNA, 25 bp, Homo sapien
gagaaattgcttctgaaggcaccat

SEQ ID NO: 1739371 - DNA, 25 bp, Homo sapien
tttcttcactgtctcgctcagagaa

SEQ ID NO: 1739372 - DNA, 25 bp, Homo sapien
atctaaatagaggttgagttttcca

SEQ ID NO: 1739373 - DNA, 25 bp, Homo sapien
taggttaacttccataagagccatg

SEQ ID NO: 1739374 - DNA, 25 bp, Homo sapien
cactatggacactgaagcatcttgg

SEQ ID NO: 1739375 - DNA, 25 bp, Homo sapien
tggctcatagtaatccactatggac

SEQ ID NO: 1739376 - DNA, 25 bp, Homo sapien
gcatcttgggtatttgaaactttaa

SEQ ID NO: 1739377 - DNA, 25 bp, Homo sapien
gcaggaatattaacacaaaactggg

SEQ ID NO: 1739378 - DNA, 25 bp, Homo sapien
gttgtaacttctcaccgcctgtctc

SEQ ID NO: 1739379 - DNA, 25 bp, Homo sapien
ttcagagttgtaacttctcaccgcc

SEQ ID NO: 1739380 - DNA, 25 bp, Homo sapien
gagttgtaacttctcaccgcctgtc

SEQ ID NO: 1739381 - DNA, 25 bp, Homo sapien
ttcacttcagagttgtaacttctca

SEQ ID NO: 1739382 - DNA, 25 bp, Homo sapien
tcacagccaaagttccataaagtac

SEQ ID NO: 1739383 - DNA, 25 bp, Homo sapien
atgactgaagagtgatgatgggagc

SEQ ID NO: 1739384 - DNA, 25 bp, Homo sapien
gactgaagagtgatgatgggagcct

SEQ ID NO: 1739385 - DNA, 25 bp, Homo sapien
acagccaaagttccataaagtacag

SEQ ID NO: 1739386 - DNA, 25 bp, Homo sapien
cacacaaagatcaggtgaagaaatc

SEQ ID NO: 1739387 - DNA, 25 bp, Homo sapien
gaagaaatctatgcagctatacatg

SEQ ID NO: 1739388 - DNA, 25 bp, Homo sapien
gacctgttgtacaccatccctgcaa

SEQ ID NO: 1739389 - DNA, 25 bp, Homo sapien
gaagcagtattcttctacgaaaaca

SEQ ID NO: 1739390 - DNA, 25 bp, Homo sapien
aattcaccacctagattctgaaaag

SEQ ID NO: 1739391 - DNA, 25 bp, Homo sapien
cagggaaatccatctttaagcaaac

SEQ ID NO: 1739392 - DNA, 25 bp, Homo sapien
caagcagaaaaagaccgtgccactt

SEQ ID NO: 1739393 - DNA, 25 bp, Homo sapien
agaagtatctactgagaccactggg

SEQ ID NO: 1739394 - DNA, 25 bp, Homo sapien
cagggcaattttcagtatgctcctc

SEQ ID NO: 1739395 - DNA, 25 bp, Homo sapien
caccccccagggcaattttcagtat

SEQ ID NO: 1739396 - DNA, 25 bp, Homo sapien
ccccagggcaattttcagtatgctc

SEQ ID NO: 1739397 - DNA, 25 bp, Homo sapien
caattttcagtatgctcctcaacct

SEQ ID NO: 1739398 - DNA, 25 bp, Homo sapien
aggatgtgggaaggagacagcacac

SEQ ID NO: 1739399 - DNA, 25 bp, Homo sapien
tgaggatgtgggaaggagacagcac

SEQ ID NO: 1739400 - DNA, 25 bp, Homo sapien
gaggatgtgggaaggagacagcaca

SEQ ID NO: 1739401 - DNA, 25 bp, Homo sapien
ctgaggatgtgggaaggagacagca

SEQ ID NO: 1739402 - DNA, 25 bp, Homo sapien
aatcccatgaagcacatattgcagt

SEQ ID NO: 1739403 - DNA, 25 bp, Homo sapien
gaatcgaaatcccatgaagcacata

SEQ ID NO: 1739404 - DNA, 25 bp, Homo sapien
ctaggatcttcgaatcgaaatccca

SEQ ID NO: 1739405 - DNA, 25 bp, Homo sapien
gaagcacatattgcagtgctctctg

SEQ ID NO: 1739406 - DNA, 25 bp, Homo sapien
gtattttgttgtatccctggctcac

SEQ ID NO: 1739407 - DNA, 25 bp, Homo sapien
agtattttgttgtatccctggctca

SEQ ID NO: 1739408 - DNA, 25 bp, Homo sapien
ctagtattttgttgtatccctggct

SEQ ID NO: 1739409 - DNA, 25 bp, Homo sapien
tagtattttgttgtatccctggctc

SEQ ID NO: 1739410 - DNA, 25 bp, Homo sapien
gcagggaggtcggtctgcagtgact

SEQ ID NO: 1739411 - DNA, 25 bp, Homo sapien
gggaggtcggtctgcagtgacttac

SEQ ID NO: 1739412 - DNA, 25 bp, Homo sapien
ctgcagggaggtcggtctgcagtga

SEQ ID NO: 1739413 - DNA, 25 bp, Homo sapien
cagggaggtcggtctgcagtgactt

SEQ ID NO: 1739414 - DNA, 25 bp, Homo sapien
gccaatgccagggatctttaggtca

SEQ ID NO: 1739415 - DNA, 25 bp, Homo sapien
agatgctctgattctccacaaaccc

SEQ ID NO: 1739416 - DNA, 25 bp, Homo sapien
taggtcagcagtcatgtcaagatgc

SEQ ID NO: 1739417 - DNA, 25 bp, Homo sapien
gtcaagatgctctgattctccacaa

SEQ ID NO: 1739418 - DNA, 25 bp, Homo sapien
gatgtcactagacaactggcagtct

SEQ ID NO: 1739419 - DNA, 25 bp, Homo sapien
tatattacccttcggaatacagggc

SEQ ID NO: 1739420 - DNA, 25 bp, Homo sapien
ttcacagcaagcatcagatgtcact

SEQ ID NO: 1739421 - DNA, 25 bp, Homo sapien
taaagattgaggtgctcaggattcg

SEQ ID NO: 1739422 - DNA, 25 bp, Homo sapien
tattttctatgtacaggtttgccag

SEQ ID NO: 1739423 - DNA, 25 bp, Homo sapien
agatacaacctgtcttccaatggcc

SEQ ID NO: 1739424 - DNA, 25 bp, Homo sapien
gattgtcagtataaggttcccaggc

SEQ ID NO: 1739425 - DNA, 25 bp, Homo sapien
aaggaggccccaacattacaagtgc

SEQ ID NO: 1739426 - DNA, 25 bp, Homo sapien
ggagacagtgctagctaacccttta

SEQ ID NO: 1739427 - DNA, 25 bp, Homo sapien
tctctggaagcatcggccagtcaga

SEQ ID NO: 1739428 - DNA, 25 bp, Homo sapien
gaatatttccacgtgcaggatacag

SEQ ID NO: 1739429 - DNA, 25 bp, Homo sapien
tttactaaggttcccagtgagtgga

SEQ ID NO: 1739430 - DNA, 25 bp, Homo sapien
cacttggcagactcaaataataact

SEQ ID NO: 1739431 - DNA, 25 bp, Homo sapien
aagaatacatcatggcaccttgccc

SEQ ID NO: 1739432 - DNA, 25 bp, Homo sapien
tttacaatgcgcaaaaaaccaatgc

SEQ ID NO: 1739433 - DNA, 25 bp, Homo sapien
cttgccaagggagaatttacaacat

SEQ ID NO: 1739434 - DNA, 25 bp, Homo sapien
caaacgtggtaaatcttggcctcaa

SEQ ID NO: 1739435 - DNA, 25 bp, Homo sapien
ggaatacactcttctgcctgtccga

SEQ ID NO: 1739436 - DNA, 25 bp, Homo sapien
aattcaatacactgggcaaacgtgg

SEQ ID NO: 1739437 - DNA, 25 bp, Homo sapien
gacagaagcctctaccgagaacgta

SEQ ID NO: 1739438 - DNA, 25 bp, Homo sapien
gtacaattaacaataacataacatt

SEQ ID NO: 1739439 - DNA, 25 bp, Homo sapien
taaagcttcctgtgtaccaaagaga

SEQ ID NO: 1739440 - DNA, 25 bp, Homo sapien
caatatataaagctttagttcctta

SEQ ID NO: 1739441 - DNA, 25 bp, Homo sapien
agcttcccaaaataagagattcgtg

SEQ ID NO: 1739442 - DNA, 25 bp, Homo sapien
gaggctggtaatcaaatttcttcaa

SEQ ID NO: 1739443 - DNA, 25 bp, Homo sapien
gggaggtaaaggaggctggtaatca

SEQ ID NO: 1739444 - DNA, 25 bp, Homo sapien
aggtaaaggaggctggtaatcaaat

SEQ ID NO: 1739445 - DNA, 25 bp, Homo sapien
taaaggaggctggtaatcaaatttc

SEQ ID NO: 1739446 - DNA, 25 bp, Homo sapien
tgggcaccagggctaatgctcatgt

SEQ ID NO: 1739447 - DNA, 25 bp, Homo sapien
cgtggcttgagagcaattaagcctc

SEQ ID NO: 1739448 - DNA, 25 bp, Homo sapien
tggcagaactgagggagtagtgggc

SEQ ID NO: 1739449 - DNA, 25 bp, Homo sapien
cagcgaacacagctcatctttggca

SEQ ID NO: 1739450 - DNA, 25 bp, Homo sapien
gcttggaggcaaccttaggcattcc

SEQ ID NO: 1739451 - DNA, 25 bp, Homo sapien
ggctgggtctgaatcaagatgtctg

SEQ ID NO: 1739452 - DNA, 25 bp, Homo sapien
cttcctagcttttggcggcttggag

SEQ ID NO: 1739453 - DNA, 25 bp, Homo sapien
gaatcaagatgtctgtagtgccatg

SEQ ID NO: 1739454 - DNA, 25 bp, Homo sapien
cacaaattctaggtcaaactttact

SEQ ID NO: 1739455 - DNA, 25 bp, Homo sapien
taggtcaaactttacttgccataac

SEQ ID NO: 1739456 - DNA, 25 bp, Homo sapien
caaattctaggtcaaactttacttg

SEQ ID NO: 1739457 - DNA, 25 bp, Homo sapien
attctaggtcaaactttacttgcca

SEQ ID NO: 1739458 - DNA, 25 bp, Homo sapien
cattgtcccacatttgtccaatcac

SEQ ID NO: 1739459 - DNA, 25 bp, Homo sapien
ctcttggtctcagagctaaatgtga

SEQ ID NO: 1739460 - DNA, 25 bp, Homo sapien
tatttcctctgtttgagagaacaac

SEQ ID NO: 1739461 - DNA, 25 bp, Homo sapien
tttgagagaacaaccactgtcttga

SEQ ID NO: 1739462 - DNA, 25 bp, Homo sapien
catggcttgtaggacaaccagagag

SEQ ID NO: 1739463 - DNA, 25 bp, Homo sapien
ggtctccatggcttgtaggacaacc

SEQ ID NO: 1739464 - DNA, 25 bp, Homo sapien
agccgtcagagcacaggtctccatg

SEQ ID NO: 1739465 - DNA, 25 bp, Homo sapien
tgaagatttcaaacaaagccgtcag

SEQ ID NO: 1739466 - DNA, 25 bp, Homo sapien
gaattgtgtcagatccccatgccta

SEQ ID NO: 1739467 - DNA, 25 bp, Homo sapien
tgtcttcggcaacttcatcctctga

SEQ ID NO: 1739468 - DNA, 25 bp, Homo sapien
gacagccacagtttctacacatcat

SEQ ID NO: 1739469 - DNA, 25 bp, Homo sapien
taatttagcagctcaactggcacca

SEQ ID NO: 1739470 - DNA, 25 bp, Homo sapien
taacaaacaagatatctgggaagtg

SEQ ID NO: 1739471 - DNA, 25 bp, Homo sapien
tagtggattggtgtaatagcaggta

SEQ ID NO: 1739472 - DNA, 25 bp, Homo sapien
tacagagtacaaaactagatgtagc

SEQ ID NO: 1739473 - DNA, 25 bp, Homo sapien
gaagtttccccggaaggcagtgaga

SEQ ID NO: 1739474 - DNA, 25 bp, Homo sapien
catttatagtcagtttcacatattg

SEQ ID NO: 1739475 - DNA, 25 bp, Homo sapien
tagtcagtttcacatattgctatgt

SEQ ID NO: 1739476 - DNA, 25 bp, Homo sapien
ttatagtcagtttcacatattgcta

SEQ ID NO: 1739477 - DNA, 25 bp, Homo sapien
gtcagtttcacatattgctatgtaa

SEQ ID NO: 1739478 - DNA, 25 bp, Homo sapien
taacgtttaagtcttcaatgcatgt

SEQ ID NO: 1739479 - DNA, 25 bp, Homo sapien
cgtttaagtcttcaatgcatgttga

SEQ ID NO: 1739480 - DNA, 25 bp, Homo sapien
acgtttaagtcttcaatgcatgttg

SEQ ID NO: 1739481 - DNA, 25 bp, Homo sapien
gtttaagtcttcaatgcatgttgaa

SEQ ID NO: 1739482 - DNA, 25 bp, Homo sapien
ctggctgccatcacgaagcctcttg

SEQ ID NO: 1739483 - DNA, 25 bp, Homo sapien
gaagcctcttgcttggcagcctact

SEQ ID NO: 1739484 - DNA, 25 bp, Homo sapien
gcttggcagcctactcagaacatca

SEQ ID NO: 1739485 - DNA, 25 bp, Homo sapien
acatcactgtcactaattagccttt

SEQ ID NO: 1739486 - DNA, 25 bp, Homo sapien
gactgttaagttggcactgccctcc

SEQ ID NO: 1739487 - DNA, 25 bp, Homo sapien
attccatttagccagaaacacatag

SEQ ID NO: 1739488 - DNA, 25 bp, Homo sapien
catagcttgatgactgactgttaag

SEQ ID NO: 1739489 - DNA, 25 bp, Homo sapien
ccagaaacacatagcttgatgactg

SEQ ID NO: 1739490 - DNA, 25 bp, Homo sapien
caactgccttgatcagggtgttatg

SEQ ID NO: 1739491 - DNA, 25 bp, Homo sapien
tctggtggtgaaaaatctgtatgaa

SEQ ID NO: 1739492 - DNA, 25 bp, Homo sapien
tgacagtttctacatgcacagctga

SEQ ID NO: 1739493 - DNA, 25 bp, Homo sapien
tgtatgaaaccatctaactctgtca

SEQ ID NO: 1739494 - DNA, 25 bp, Homo sapien
gcgctggtggcaggtagagtggccc

SEQ ID NO: 1739495 - DNA, 25 bp, Homo sapien
gggttagcgctggtggcaggtagag

SEQ ID NO: 1739496 - DNA, 25 bp, Homo sapien
tagcgctggtggcaggtagagtggc

SEQ ID NO: 1739497 - DNA, 25 bp, Homo sapien
gttagcgctggtggcaggtagagtg

SEQ ID NO: 1739498 - DNA, 25 bp, Homo sapien
tccatacaggtctgatgtcctggct

SEQ ID NO: 1739499 - DNA, 25 bp, Homo sapien
tgcttgtgctatgccagatctgcaa

SEQ ID NO: 1739500 - DNA, 25 bp, Homo sapien
aggcctgattatccctctccataca

SEQ ID NO: 1739501 - DNA, 25 bp, Homo sapien
aacttctaaacctctcattctttca

SEQ ID NO: 1739502 - DNA, 25 bp, Homo sapien
cagtgcttaggggtgctgcttggag

SEQ ID NO: 1739503 - DNA, 25 bp, Homo sapien
agtgcttaggggtgctgcttggagg

SEQ ID NO: 1739504 - DNA, 25 bp, Homo sapien
gtgcttaggggtgctgcttggaggt

SEQ ID NO: 1739505 - DNA, 25 bp, Homo sapien
tgcttaggggtgctgcttggaggtg

SEQ ID NO: 1739506 - DNA, 25 bp, Homo sapien
cagagcagctaatgatacccacaaa

SEQ ID NO: 1739507 - DNA, 25 bp, Homo sapien
gctgcagaaagtggtcgggttccaa

SEQ ID NO: 1739508 - DNA, 25 bp, Homo sapien
tgtgttttccttatagctcctgcaa

SEQ ID NO: 1739509 - DNA, 25 bp, Homo sapien
gcaactagactttgtcccagctcca

SEQ ID NO: 1739510 - DNA, 25 bp, Homo sapien
tactagttacactacaacagtagaa

SEQ ID NO: 1739511 - DNA, 25 bp, Homo sapien
taatctaataccaatgggaggaaat

SEQ ID NO: 1739512 - DNA, 25 bp, Homo sapien
ctctgattctcatggttttgcctct

SEQ ID NO: 1739513 - DNA, 25 bp, Homo sapien
tgcctcttactagttacactacaac

SEQ ID NO: 1739514 - DNA, 25 bp, Homo sapien
cattgtttaagtagaatttgtcctc

SEQ ID NO: 1739515 - DNA, 25 bp, Homo sapien
aatttgtcctcttggttctattcct

SEQ ID NO: 1739516 - DNA, 25 bp, Homo sapien
taaggatggcattgtttaagtagaa

SEQ ID NO: 1739517 - DNA, 25 bp, Homo sapien
ctctcatttaaggatggcattgttt

SEQ ID NO: 1739518 - DNA, 25 bp, Homo sapien
aacacctggataatagattcttgtc

SEQ ID NO: 1739519 - DNA, 25 bp, Homo sapien
gcctgccaaattccagattcccaga

SEQ ID NO: 1739520 - DNA, 25 bp, Homo sapien
cagaaacacctggataatagattct

SEQ ID NO: 1739521 - DNA, 25 bp, Homo sapien
ggcccactggcagttctaaaggcct

SEQ ID NO: 1739522 - DNA, 25 bp, Homo sapien
cttctgctgaatgcctatttatatt

SEQ ID NO: 1739523 - DNA, 25 bp, Homo sapien
tctgctgaatgcctatttatattgg

SEQ ID NO: 1739524 - DNA, 25 bp, Homo sapien
gctgaatgcctatttatattgggca

SEQ ID NO: 1739525 - DNA, 25 bp, Homo sapien
cttttctctgcatcggtgtcctctt

SEQ ID NO: 1739526 - DNA, 25 bp, Homo sapien
tatattccaggagaatgctagcaag

SEQ ID NO: 1739527 - DNA, 25 bp, Homo sapien
cactctaattcatgggtcagtctga

SEQ ID NO: 1739528 - DNA, 25 bp, Homo sapien
tgtctcctgatttaacgcaatgtgg

SEQ ID NO: 1739529 - DNA, 25 bp, Homo sapien
gagggaccaggcttttatcactcta

SEQ ID NO: 1739530 - DNA, 25 bp, Homo sapien
tggattctgggaacaggtgccacaa

SEQ ID NO: 1739531 - DNA, 25 bp, Homo sapien
tgccaagcttataccagttcactag

SEQ ID NO: 1739532 - DNA, 25 bp, Homo sapien
cactagcctcttggattctgggaac

SEQ ID NO: 1739533 - DNA, 25 bp, Homo sapien
acaaagaaccttgcgtactggatgc

SEQ ID NO: 1739534 - DNA, 25 bp, Homo sapien
cagagaagaaccaaccttcccctgg

SEQ ID NO: 1739535 - DNA, 25 bp, Homo sapien
tgcacaacacaaggcacaagtagaa

SEQ ID NO: 1739536 - DNA, 25 bp, Homo sapien
taaaagagccccttactgtcagtat

SEQ ID NO: 1739537 - DNA, 25 bp, Homo sapien
tatggctaaggatcaactagaggac

SEQ ID NO: 1739538 - DNA, 25 bp, Homo sapien
tgaaccagcatcgtctagcagctta

SEQ ID NO: 1739539 - DNA, 25 bp, Homo sapien
cattcaggaatgtaaggaggataca

SEQ ID NO: 1739540 - DNA, 25 bp, Homo sapien
gattgaacaagcacatagaatagga

SEQ ID NO: 1739541 - DNA, 25 bp, Homo sapien
tcagaaaccctggttgaagagccag

SEQ ID NO: 1739542 - DNA, 25 bp, Homo sapien
ctagtcattaggaagtcttgggacc

SEQ ID NO: 1739543 - DNA, 25 bp, Homo sapien
cctgaggtatggaaatgggagtccc

SEQ ID NO: 1739544 - DNA, 25 bp, Homo sapien
cagttgctgcaatgtcaatagtttg

SEQ ID NO: 1739545 - DNA, 25 bp, Homo sapien
tcagagtgtaaggagaatccacagt

SEQ ID NO: 1739546 - DNA, 25 bp, Homo sapien
cataaagatgcgtttggcattttta

SEQ ID NO: 1739547 - DNA, 25 bp, Homo sapien
tcacataaagatgcgtttggcattt

SEQ ID NO: 1739548 - DNA, 25 bp, Homo sapien
taaaatgtgtagagcataaagatac

SEQ ID NO: 1739549 - DNA, 25 bp, Homo sapien
gtgtctgttaaaatgtgtagagcat

SEQ ID NO: 1739550 - DNA, 25 bp, Homo sapien
tttgctcaactctattaaggctggg

SEQ ID NO: 1739551 - DNA, 25 bp, Homo sapien
tatgcaagcatataaacagctgcca

SEQ ID NO: 1739552 - DNA, 25 bp, Homo sapien
cacacatcaaagacatcgttgccag

SEQ ID NO: 1739553 - DNA, 25 bp, Homo sapien
tgaactgctatgtatccaatcgact

SEQ ID NO: 1739554 - DNA, 25 bp, Homo sapien
ggagtccaccgtctcctgcacccgc

SEQ ID NO: 1739555 - DNA, 25 bp, Homo sapien
gagtccaccgtctcctgcacccgca

SEQ ID NO: 1739556 - DNA, 25 bp, Homo sapien
cgcagctgctgcaactccgccatga

SEQ ID NO: 1739557 - DNA, 25 bp, Homo sapien
agctgctgcaactccgccatgacga

SEQ ID NO: 1739558 - DNA, 25 bp, Homo sapien
gaacataagactctgcatcttctgg

SEQ ID NO: 1739559 - DNA, 25 bp, Homo sapien
cactggtgcacttactgcatggatg

SEQ ID NO: 1739560 - DNA, 25 bp, Homo sapien
ggtgctgcacgggaacataagactc

SEQ ID NO: 1739561 - DNA, 25 bp, Homo sapien
gcactggtgcacttactgcatggat

SEQ ID NO: 1739562 - DNA, 25 bp, Homo sapien
cttggtcacacgacagtccagctac

SEQ ID NO: 1739563 - DNA, 25 bp, Homo sapien
ccaggcctggcggtcatggaacttc

SEQ ID NO: 1739564 - DNA, 25 bp, Homo sapien
ctggcggtcatggaacttctccaac

SEQ ID NO: 1739565 - DNA, 25 bp, Homo sapien
tggtcacacgacagtccagctaccg

SEQ ID NO: 1739566 - DNA, 25 bp, Homo sapien
cttccagataagatatttcagtaaa

SEQ ID NO: 1739567 - DNA, 25 bp, Homo sapien
tagagctctttgaaaatgttcaagt

SEQ ID NO: 1739568 - DNA, 25 bp, Homo sapien
tgctgagctgccttatagagctctt

SEQ ID NO: 1739569 - DNA, 25 bp, Homo sapien
ttgaaaatgttcaagttgatgaagt

SEQ ID NO: 1739570 - DNA, 25 bp, Homo sapien
gaatacaagcaaccattggcttgtg

SEQ ID NO: 1739571 - DNA, 25 bp, Homo sapien
tatgaatacaagcaaccattggctt

SEQ ID NO: 1739572 - DNA, 25 bp, Homo sapien
accattggcttgtgaaggtccaggt

SEQ ID NO: 1739573 - DNA, 25 bp, Homo sapien
caagcaaccattggcttgtgaaggt

SEQ ID NO: 1739574 - DNA, 25 bp, Homo sapien
gacaatgcattatccctctgatgtt

SEQ ID NO: 1739575 - DNA, 25 bp, Homo sapien
tcaactatctctaacattaactcca

SEQ ID NO: 1739576 - DNA, 25 bp, Homo sapien
tgggatgcaggcagtcattgatctc

SEQ ID NO: 1739577 - DNA, 25 bp, Homo sapien
cttcctgttcatcaaatgggatgca

SEQ ID NO: 1739578 - DNA, 25 bp, Homo sapien
agggtcttgaggtgcatgttgttgc

SEQ ID NO: 1739579 - DNA, 25 bp, Homo sapien
gaggtgcatgttgttgcagaaggtt

SEQ ID NO: 1739580 - DNA, 25 bp, Homo sapien
ttggaaaataggatgctggcaagag

SEQ ID NO: 1739581 - DNA, 25 bp, Homo sapien
gttgagggtcttgaggtgcatgttg

SEQ ID NO: 1739582 - DNA, 25 bp, Homo sapien
tggggattgcatagcatcatgaagg

SEQ ID NO: 1739583 - DNA, 25 bp, Homo sapien
gggattgcatagcatcatgaaggga

SEQ ID NO: 1739584 - DNA, 25 bp, Homo sapien
gattgcatagcatcatgaagggaag

SEQ ID NO: 1739585 - DNA, 25 bp, Homo sapien
gcatagcatcatgaagggaagttct

SEQ ID NO: 1739586 - DNA, 25 bp, Homo sapien
ggaaagatccatccggattcagtgc

SEQ ID NO: 1739587 - DNA, 25 bp, Homo sapien
gggatgaaggtggaaagatccatcc

SEQ ID NO: 1739588 - DNA, 25 bp, Homo sapien
ccatccggattcagtgcattctgtt

SEQ ID NO: 1739589 - DNA, 25 bp, Homo sapien
tgaaggtggaaagatccatccggat

SEQ ID NO: 1739590 - DNA, 25 bp, Homo sapien
accttgtaactgtttgatttgaagc

SEQ ID NO: 1739591 - DNA, 25 bp, Homo sapien
ccattgctattggttgtaatagata

SEQ ID NO: 1739592 - DNA, 25 bp, Homo sapien
atgaaaagcccattgctattggttg

SEQ ID NO: 1739593 - DNA, 25 bp, Homo sapien
tctggtattccctgggggcttcaat

SEQ ID NO: 1739594 - DNA, 25 bp, Homo sapien
gaatatttctcctcacgcattagag

SEQ ID NO: 1739595 - DNA, 25 bp, Homo sapien
cattagaggtgacatggtatcccta

SEQ ID NO: 1739596 - DNA, 25 bp, Homo sapien
gacatgctgtaccaattgaaaccag

SEQ ID NO: 1739597 - DNA, 25 bp, Homo sapien
cactgaatgccaagctttctcgaca

SEQ ID NO: 1739598 - DNA, 25 bp, Homo sapien
tatacctttgcactggcttttactg

SEQ ID NO: 1739599 - DNA, 25 bp, Homo sapien
ccaaaattagacacacttatatctc

SEQ ID NO: 1739600 - DNA, 25 bp, Homo sapien
ttatctatcactatgcttcctcaag

SEQ ID NO: 1739601 - DNA, 25 bp, Homo sapien
tatcagttaagatgtgaataacaca

SEQ ID NO: 1739602 - DNA, 25 bp, Homo sapien
gtttgtccaggatagtctgctttat

SEQ ID NO: 1739603 - DNA, 25 bp, Homo sapien
ggtttgtccaggatagtctgcttta

SEQ ID NO: 1739604 - DNA, 25 bp, Homo sapien
tggtttgtccaggatagtctgcttt

SEQ ID NO: 1739605 - DNA, 25 bp, Homo sapien
ttggtttgtccaggatagtctgctt

SEQ ID NO: 1739606 - DNA, 25 bp, Homo sapien
tgtttgtggccagaattggttcttc

SEQ ID NO: 1739607 - DNA, 25 bp, Homo sapien
ggttcttcacacaggcaaacgagtg

SEQ ID NO: 1739608 - DNA, 25 bp, Homo sapien
aaaaggtcaatagtgggctggcaca

SEQ ID NO: 1739609 - DNA, 25 bp, Homo sapien
acagggcctccatttcagtgttgcg

SEQ ID NO: 1739610 - DNA, 25 bp, Homo sapien
gatctgggctccttccacgtagtgg

SEQ ID NO: 1739611 - DNA, 25 bp, Homo sapien
cttccacgtagtggttgctccaaat

SEQ ID NO: 1739612 - DNA, 25 bp, Homo sapien
tgggctccttccacgtagtggttgc

SEQ ID NO: 1739613 - DNA, 25 bp, Homo sapien
gctccttccacgtagtggttgctcc

SEQ ID NO: 1739614 - DNA, 25 bp, Homo sapien
agccatgcacgtgaattacatggga

SEQ ID NO: 1739615 - DNA, 25 bp, Homo sapien
cctttgaactgttaagacagttttg

SEQ ID NO: 1739616 - DNA, 25 bp, Homo sapien
ggctttggggtcttcatggttaatg

SEQ ID NO: 1739617 - DNA, 25 bp, Homo sapien
ctgtgggtacagaatagtagtgagg

SEQ ID NO: 1739618 - DNA, 25 bp, Homo sapien
cagaatagtagtgaggagtaaacaa

SEQ ID NO: 1739619 - DNA, 25 bp, Homo sapien
tctgcttggactagcacccaaagac

SEQ ID NO: 1739620 - DNA, 25 bp, Homo sapien
atatggccggagctgatcacaccca

SEQ ID NO: 1739621 - DNA, 25 bp, Homo sapien
gcatccatataccacattgctctgc

SEQ ID NO: 1739622 - DNA, 25 bp, Homo sapien
tgctctgcctgtggtgaatatggcc

SEQ ID NO: 1739623 - DNA, 25 bp, Homo sapien
tttacaagtgtaatatcaatgattc

SEQ ID NO: 1739624 - DNA, 25 bp, Homo sapien
tagctcctagaccatataaaaacag

SEQ ID NO: 1739625 - DNA, 25 bp, Homo sapien
ggatgaatttttgtccggatggaaa

SEQ ID NO: 1739626 - DNA, 25 bp, Homo sapien
atgattcttagctcctagaccatat

SEQ ID NO: 1739627 - DNA, 25 bp, Homo sapien
gtttggaaatcagtagagaacatcc

SEQ ID NO: 1739628 - DNA, 25 bp, Homo sapien
gcataagaagatccttgagattcag

SEQ ID NO: 1739629 - DNA, 25 bp, Homo sapien
cttggtctggtctcaggcttagcat

SEQ ID NO: 1739630 - DNA, 25 bp, Homo sapien
tctggtcaagatggtcaaaagcact

SEQ ID NO: 1739631 - DNA, 25 bp, Homo sapien
tatacgcagcatgcttaggtgccaa

SEQ ID NO: 1739632 - DNA, 25 bp, Homo sapien
ccagaccttggatacctgtggtagt

SEQ ID NO: 1739633 - DNA, 25 bp, Homo sapien
tcccttaaaggtgcatgcaggctct

SEQ ID NO: 1739634 - DNA, 25 bp, Homo sapien
gagatgggcctgtcatcagaccaca

SEQ ID NO: 1739635 - DNA, 25 bp, Homo sapien
tgcctcagctaaccaatatgttcag

SEQ ID NO: 1739636 - DNA, 25 bp, Homo sapien
taatccagctgagataaaagaccca

SEQ ID NO: 1739637 - DNA, 25 bp, Homo sapien
gtaaattatatcatcgggacctgct

SEQ ID NO: 1739638 - DNA, 25 bp, Homo sapien
tgccagtactttacacttacaggtg

SEQ ID NO: 1739639 - DNA, 25 bp, Homo sapien
tatatcagtgctgcttggaaaatgt

SEQ ID NO: 1739640 - DNA, 25 bp, Homo sapien
tgtaccagagattaagaccacagtg

SEQ ID NO: 1739641 - DNA, 25 bp, Homo sapien
gaccacagtggaattctagtatatc

SEQ ID NO: 1739642 - DNA, 25 bp, Homo sapien
tggaattctagtatatcagtgctgc

SEQ ID NO: 1739643 - DNA, 25 bp, Homo sapien
ttggcatgtcaaagatggagtcact

SEQ ID NO: 1739644 - DNA, 25 bp, Homo sapien
tcaggcagttaaccatagaagacat

SEQ ID NO: 1739645 - DNA, 25 bp, Homo sapien
tgtgatgaggcataccccaaccttc

SEQ ID NO: 1739646 - DNA, 25 bp, Homo sapien
ttcccaagagtccagtcccaagagt

SEQ ID NO: 1739647 - DNA, 25 bp, Homo sapien
cagcattctgccatcgatagggatc

SEQ ID NO: 1739648 - DNA, 25 bp, Homo sapien
tgagaagcccgccaacacatctcag

SEQ ID NO: 1739649 - DNA, 25 bp, Homo sapien
ctggactatgggcaactcatgtcag

SEQ ID NO: 1739650 - DNA, 25 bp, Homo sapien
gactatgggcaactcatgtcagcat

SEQ ID NO: 1739651 - DNA, 25 bp, Homo sapien
taagtacaagcttaattctggccag

SEQ ID NO: 1739652 - DNA, 25 bp, Homo sapien
gctggagccgctagagtcatctgct

SEQ ID NO: 1739653 - DNA, 25 bp, Homo sapien
agaggctttggagcgtcatgtgacc

SEQ ID NO: 1739654 - DNA, 25 bp, Homo sapien
gacataagttgttttggcactctcc

SEQ ID NO: 1739655 - DNA, 25 bp, Homo sapien
ggcacaaacctttgctgtagtaaac

SEQ ID NO: 1739656 - DNA, 25 bp, Homo sapien
gatttgggatcatcagaagtctagt

SEQ ID NO: 1739657 - DNA, 25 bp, Homo sapien
ggttttctgataattacccaatgag

SEQ ID NO: 1739658 - DNA, 25 bp, Homo sapien
gaggcttactaccttaatagttaca

SEQ ID NO: 1739659 - DNA, 25 bp, Homo sapien
aagagaggatttctcaccacaaaga

SEQ ID NO: 1739660 - DNA, 25 bp, Homo sapien
gatagatatgctaattaacctcatt

SEQ ID NO: 1739661 - DNA, 25 bp, Homo sapien
caaatggatactatttagagcctca

SEQ ID NO: 1739662 - DNA, 25 bp, Homo sapien
tattatctgacttccccgttacctg

SEQ ID NO: 1739663 - DNA, 25 bp, Homo sapien
taaattggcttcaccggggaaatga

SEQ ID NO: 1739664 - DNA, 25 bp, Homo sapien
tacataactattagagccatttagg

SEQ ID NO: 1739665 - DNA, 25 bp, Homo sapien
gtccacataaacatacagggcgaag

SEQ ID NO: 1739666 - DNA, 25 bp, Homo sapien
gagaatgttacaatagaaattgtcc

SEQ ID NO: 1739667 - DNA, 25 bp, Homo sapien
gccctgcaccctaaatgatgcacag

SEQ ID NO: 1739668 - DNA, 25 bp, Homo sapien
ttggcctatgcttccaggtgtagcc

SEQ ID NO: 1739669 - DNA, 25 bp, Homo sapien
ctatgcttccaggtgtagcccagga

SEQ ID NO: 1739670 - DNA, 25 bp, Homo sapien
ccatcggccttgcaaagaagccctg

SEQ ID NO: 1739671 - DNA, 25 bp, Homo sapien
ttctttttaaccggaggctctgtga

SEQ ID NO: 1739672 - DNA, 25 bp, Homo sapien
tctgaccgaacacagaaatcatgtt

SEQ ID NO: 1739673 - DNA, 25 bp, Homo sapien
ggctctgtgagaggaaagtttctta

SEQ ID NO: 1739674 - DNA, 25 bp, Homo sapien
agtttatctttcattgttcccagtg

SEQ ID NO: 1739675 - DNA, 25 bp, Homo sapien
tggctcactgtaacctccgtctccc

SEQ ID NO: 1739676 - DNA, 25 bp, Homo sapien
acaggcataagccaatgcacctggc

SEQ ID NO: 1739677 - DNA, 25 bp, Homo sapien
aggcataagccaatgcacctggcca

SEQ ID NO: 1739678 - DNA, 25 bp, Homo sapien
ctggtgtgcagtggcgtgattcttg

SEQ ID NO: 1739679 - DNA, 25 bp, Homo sapien
tttccccgagtagttctctgtatac

SEQ ID NO: 1739680 - DNA, 25 bp, Homo sapien
taaatgatgttgcaattgtatgact

SEQ ID NO: 1739681 - DNA, 25 bp, Homo sapien
agtaatttccccgagtagttctctg

SEQ ID NO: 1739682 - DNA, 25 bp, Homo sapien
caaaattgtttagtccagtgaaact

SEQ ID NO: 1739683 - DNA, 25 bp, Homo sapien
gcgtccattgttcctatacttttca

SEQ ID NO: 1739684 - DNA, 25 bp, Homo sapien
agcgtccattgttcctatacttttc

SEQ ID NO: 1739685 - DNA, 25 bp, Homo sapien
caccgcgccaggccggtgaagtctt

SEQ ID NO: 1739686 - DNA, 25 bp, Homo sapien
aatgctgtgtgaccaatgatcatga

SEQ ID NO: 1739687 - DNA, 25 bp, Homo sapien
gctgtgtgaccaatgatcatgatga

SEQ ID NO: 1739688 - DNA, 25 bp, Homo sapien
gccaggccggtgaagtcttttaaga

SEQ ID NO: 1739689 - DNA, 25 bp, Homo sapien
cataaaagaagtaccaggtatccca

SEQ ID NO: 1739690 - DNA, 25 bp, Homo sapien
ctgtttctgaggaatcataaaagaa

SEQ ID NO: 1739691 - DNA, 25 bp, Homo sapien
ttagtatcctttgcagtctcgagaa

SEQ ID NO: 1739692 - DNA, 25 bp, Homo sapien
gcagtctcgagaaatctgtttctga

SEQ ID NO: 1739693 - DNA, 25 bp, Homo sapien
ccacaaggaagagtgtaacagctgc

SEQ ID NO: 1739694 - DNA, 25 bp, Homo sapien
ccaagatgacatagtgcagtagcca

SEQ ID NO: 1739695 - DNA, 25 bp, Homo sapien
tctctagggagagcatacaggtgtg

SEQ ID NO: 1739696 - DNA, 25 bp, Homo sapien
caaggcatcgtttccttaggcggca

SEQ ID NO: 1739697 - DNA, 25 bp, Homo sapien
tctcagtgacctaggatatgggagt

SEQ ID NO: 1739698 - DNA, 25 bp, Homo sapien
ctttggttccaagtaggtgcagtga

SEQ ID NO: 1739699 - DNA, 25 bp, Homo sapien
gaagactttcacttgaagatgggtc

SEQ ID NO: 1739700 - DNA, 25 bp, Homo sapien
catcagtgattagtgtgggtgtctc

SEQ ID NO: 1739701 - DNA, 25 bp, Homo sapien
aatactccccttacgtggtgcctgg

SEQ ID NO: 1739702 - DNA, 25 bp, Homo sapien
acctgaatatggaaagaacctgccc

SEQ ID NO: 1739703 - DNA, 25 bp, Homo sapien
gaacctgcccatccactttggaatg

SEQ ID NO: 1739704 - DNA, 25 bp, Homo sapien
tggaatgcccctgttaagctcacct

SEQ ID NO: 1739705 - DNA, 25 bp, Homo sapien
tttatccacataccggtagcaaatg

SEQ ID NO: 1739706 - DNA, 25 bp, Homo sapien
tagcaaatgcggttgccaatgattt

SEQ ID NO: 1739707 - DNA, 25 bp, Homo sapien
gatttccatatttgacacctcatta

SEQ ID NO: 1739708 - DNA, 25 bp, Homo sapien
tcattgcaagacgaatttatccaca

SEQ ID NO: 1739709 - DNA, 25 bp, Homo sapien
tctatgacggtattgcaggaagcac

SEQ ID NO: 1739710 - DNA, 25 bp, Homo sapien
tgcattcccagacgtggaagggctc

SEQ ID NO: 1739711 - DNA, 25 bp, Homo sapien
gaggtccaacaatgagataatccaa

SEQ ID NO: 1739712 - DNA, 25 bp, Homo sapien
gcaaagtccaagtacacaatgtgag

SEQ ID NO: 1739713 - DNA, 25 bp, Homo sapien
ccctggttaaactgctcaatggttc

SEQ ID NO: 1739714 - DNA, 25 bp, Homo sapien
taagatcaccttatgtcccaatccc

SEQ ID NO: 1739715 - DNA, 25 bp, Homo sapien
catgatattatctccccagccttat

SEQ ID NO: 1739716 - DNA, 25 bp, Homo sapien
catgaccactgctttagttcagaaa

SEQ ID NO: 1739717 - DNA, 25 bp, Homo sapien
agtccaggatctgtgagtggtgctc

SEQ ID NO: 1739718 - DNA, 25 bp, Homo sapien
tgcatccattgttgagtccaggatc

SEQ ID NO: 1739719 - DNA, 25 bp, Homo sapien
cattgttgagtccaggatctgtgag

SEQ ID NO: 1739720 - DNA, 25 bp, Homo sapien
tctgtgagtggtgctccataatctt

SEQ ID NO: 1739721 - DNA, 25 bp, Homo sapien
cagtgggaagtgaatatgaaaccat

SEQ ID NO: 1739722 - DNA, 25 bp, Homo sapien
ctttgcacaacagttttccaacagg

SEQ ID NO: 1739723 - DNA, 25 bp, Homo sapien
acagtctaaactcagtgggaagtga

SEQ ID NO: 1739724 - DNA, 25 bp, Homo sapien
ctccaacagtctaaactcagtggga

SEQ ID NO: 1739725 - DNA, 25 bp, Homo sapien
atacatctttttcagcacccacatt

SEQ ID NO: 1739726 - DNA, 25 bp, Homo sapien
tacatctttttcagcacccacattc

SEQ ID NO: 1739727 - DNA, 25 bp, Homo sapien
acatctttttcagcacccacattca

SEQ ID NO: 1739728 - DNA, 25 bp, Homo sapien
catctttttcagcacccacattcat

SEQ ID NO: 1739729 - DNA, 25 bp, Homo sapien
agttctgttacatccgttttctcac

SEQ ID NO: 1739730 - DNA, 25 bp, Homo sapien
ctagttctgttacatccgttttctc

SEQ ID NO: 1739731 - DNA, 25 bp, Homo sapien
tagttctgttacatccgttttctca

SEQ ID NO: 1739732 - DNA, 25 bp, Homo sapien
gctcaaggcatctatggcttcatca

SEQ ID NO: 1739733 - DNA, 25 bp, Homo sapien
caaggcatctatggcttcatcaggc

SEQ ID NO: 1739734 - DNA, 25 bp, Homo sapien
tcaaggcatctatggcttcatcagg

SEQ ID NO: 1739735 - DNA, 25 bp, Homo sapien
tcagaaaacttggccaaggaccctc

SEQ ID NO: 1739736 - DNA, 25 bp, Homo sapien
cagtgtctatatggtaggcactcaa

SEQ ID NO: 1739737 - DNA, 25 bp, Homo sapien
tcccagtgtctatatggtaggcact

SEQ ID NO: 1739738 - DNA, 25 bp, Homo sapien
ggtcccagtgtctatatggtaggca

SEQ ID NO: 1739739 - DNA, 25 bp, Homo sapien
tggtcccagtgtctatatggtaggc

SEQ ID NO: 1739740 - DNA, 25 bp, Homo sapien
aatgcttctccctagttttcgtaga

SEQ ID NO: 1739741 - DNA, 25 bp, Homo sapien
taggaaaggccgcattacctgcctt

SEQ ID NO: 1739742 - DNA, 25 bp, Homo sapien
cagccagcttgacattaacacttga

SEQ ID NO: 1739743 - DNA, 25 bp, Homo sapien
tcagctaaagtgaactgaggaagcc

SEQ ID NO: 1739744 - DNA, 25 bp, Homo sapien
tatgcagggtaataatttcctaagc

SEQ ID NO: 1739745 - DNA, 25 bp, Homo sapien
ttgaatctctcttaagattgacagg

SEQ ID NO: 1739746 - DNA, 25 bp, Homo sapien
tatacatgatgcctttaacatttgg

SEQ ID NO: 1739747 - DNA, 25 bp, Homo sapien
taacagagtcagaataatatacatg

SEQ ID NO: 1739748 - DNA, 25 bp, Homo sapien
ctgcgctccagagtttccataggtg

SEQ ID NO: 1739749 - DNA, 25 bp, Homo sapien
tgcgctccagagtttccataggtgg

SEQ ID NO: 1739750 - DNA, 25 bp, Homo sapien
gagtcaagctgtgcagagtcagcat

SEQ ID NO: 1739751 - DNA, 25 bp, Homo sapien
ccgagggcctatgtgttatacagct

SEQ ID NO: 1739752 - DNA, 25 bp, Homo sapien
ggtatagactggttgggtctcttta

SEQ ID NO: 1739753 - DNA, 25 bp, Homo sapien
cctgggttcagtggcaagcggtata

SEQ ID NO: 1739754 - DNA, 25 bp, Homo sapien
tctgtacttttgaagattttagagg

SEQ ID NO: 1739755 - DNA, 25 bp, Homo sapien
ggtagataatatatcctctcttgct

SEQ ID NO: 1739756 - DNA, 25 bp, Homo sapien
tggctcacaccaacatctgcatact

SEQ ID NO: 1739757 - DNA, 25 bp, Homo sapien
gctacttccatattaaatctgtgcc

SEQ ID NO: 1739758 - DNA, 25 bp, Homo sapien
ttctgcaacagtatagaaggaacca

SEQ ID NO: 1739759 - DNA, 25 bp, Homo sapien
tttctgcaacagtatagaaggaacc

SEQ ID NO: 1739760 - DNA, 25 bp, Homo sapien
tctgcaacagtatagaaggaaccat

SEQ ID NO: 1739761 - DNA, 25 bp, Homo sapien
ggcatttctgatgtctaaatccgag

SEQ ID NO: 1739762 - DNA, 25 bp, Homo sapien
catttctgatgtctaaatccgaggg

SEQ ID NO: 1739763 - DNA, 25 bp, Homo sapien
tcaggcatttctgatgtctaaatcc

SEQ ID NO: 1739764 - DNA, 25 bp, Homo sapien
caggcatttctgatgtctaaatccg

SEQ ID NO: 1739765 - DNA, 25 bp, Homo sapien
aataggatttgtgggagtagtactg

SEQ ID NO: 1739766 - DNA, 25 bp, Homo sapien
cagtttccatgagccgaattggctc

SEQ ID NO: 1739767 - DNA, 25 bp, Homo sapien
ttcattgttgtgtgaagttcttcaa

SEQ ID NO: 1739768 - DNA, 25 bp, Homo sapien
gagcagctcagagaatctaccatca

SEQ ID NO: 1739769 - DNA, 25 bp, Homo sapien
caaggcatacttctcgagtttgtta

SEQ ID NO: 1739770 - DNA, 25 bp, Homo sapien
ccaggcaaggcatacttctcgagtt

SEQ ID NO: 1739771 - DNA, 25 bp, Homo sapien
catacttctcgagtttgttactcat

SEQ ID NO: 1739772 - DNA, 25 bp, Homo sapien
ggcaaggcatacttctcgagtttgt

SEQ ID NO: 1739773 - DNA, 25 bp, Homo sapien
gatgagggaccactagccctgtgag

SEQ ID NO: 1739774 - DNA, 25 bp, Homo sapien
tccatgatgtctggcagtgcctgct

SEQ ID NO: 1739775 - DNA, 25 bp, Homo sapien
gggctacactcccagtttccatgat

SEQ ID NO: 1739776 - DNA, 25 bp, Homo sapien
tacgactaagttaagcagatatggg

SEQ ID NO: 1739777 - DNA, 25 bp, Homo sapien
agctgctgtgtatttcgagcgggca

SEQ ID NO: 1739778 - DNA, 25 bp, Homo sapien
gaagttagtgcatcaacgggataca

SEQ ID NO: 1739779 - DNA, 25 bp, Homo sapien
tcttctatctctgttatacgccggg

SEQ ID NO: 1739780 - DNA, 25 bp, Homo sapien
gagggaaacgtcaactccattgcaa

SEQ ID NO: 1739781 - DNA, 25 bp, Homo sapien
aagcctgccgcttgctctatgccgg

SEQ ID NO: 1739782 - DNA, 25 bp, Homo sapien
aactactaaccagaggagtctatgc

SEQ ID NO: 1739783 - DNA, 25 bp, Homo sapien
tctatgccggaataacaccaaatgg

SEQ ID NO: 1739784 - DNA, 25 bp, Homo sapien
ttagcgatgtgtctgattcagggca

SEQ ID NO: 1739785 - DNA, 25 bp, Homo sapien
gggacaggtggatcgagaccatcat

SEQ ID NO: 1739786 - DNA, 25 bp, Homo sapien
ggtgttatacttctatatgctaagt

SEQ ID NO: 1739787 - DNA, 25 bp, Homo sapien
gcctctaagtctagatattccaata

SEQ ID NO: 1739788 - DNA, 25 bp, Homo sapien
ctgcatatgattctagtggcttaat

SEQ ID NO: 1739789 - DNA, 25 bp, Homo sapien
catgatgttgagtaacatgggcccc

SEQ ID NO: 1739790 - DNA, 25 bp, Homo sapien
tataataactctgacgttgccaggg

SEQ ID NO: 1739791 - DNA, 25 bp, Homo sapien
tatccagaggcatggtgtcagccgg

SEQ ID NO: 1739792 - DNA, 25 bp, Homo sapien
tgtcagccggcaggagcattctgta

SEQ ID NO: 1739793 - DNA, 25 bp, Homo sapien
cttcccttggcagggaacccggctg

SEQ ID NO: 1739794 - DNA, 25 bp, Homo sapien
agtacgcggcttcccttggcaggga

SEQ ID NO: 1739795 - DNA, 25 bp, Homo sapien
ccagtccgccccaagtggcggagta

SEQ ID NO: 1739796 - DNA, 25 bp, Homo sapien
aagtggcggagtacgcggcttccct

SEQ ID NO: 1739797 - DNA, 25 bp, Homo sapien
gatagatgcattggcagctcggagc

SEQ ID NO: 1739798 - DNA, 25 bp, Homo sapien
ggaagcccgtgactgtctttggatc

SEQ ID NO: 1739799 - DNA, 25 bp, Homo sapien
ccgcaggaaagggaagcccgtgact

SEQ ID NO: 1739800 - DNA, 25 bp, Homo sapien
tttggatccccggagggtgactgct

SEQ ID NO: 1739801 - DNA, 25 bp, Homo sapien
caaagttgctcattcgctagtaggg

SEQ ID NO: 1739802 - DNA, 25 bp, Homo sapien
tatttcggtacaggtgagatggtct

SEQ ID NO: 1739803 - DNA, 25 bp, Homo sapien
tcatatgaggtttgagctaccagtt

SEQ ID NO: 1739804 - DNA, 25 bp, Homo sapien
gctaccagtttgcatagtaagagaa

SEQ ID NO: 1739805 - DNA, 25 bp, Homo sapien
cagtaatctgataaataaccgagct

SEQ ID NO: 1739806 - DNA, 25 bp, Homo sapien
ttagcatttctcaggcagtcttggg

SEQ ID NO: 1739807 - DNA, 25 bp, Homo sapien
tgtagtaactgccaccaataaagca

SEQ ID NO: 1739808 - DNA, 25 bp, Homo sapien
tgacttcagtcatcccagcaatcgc

SEQ ID NO: 1739809 - DNA, 25 bp, Homo sapien
gattccacaggttgatggcacaaga

SEQ ID NO: 1739810 - DNA, 25 bp, Homo sapien
gtttttccctgcacaccaagtaatg

SEQ ID NO: 1739811 - DNA, 25 bp, Homo sapien
gtttgggaaactctactctcacacc

SEQ ID NO: 1739812 - DNA, 25 bp, Homo sapien
ccaagtaatggacaccagctaggtg

SEQ ID NO: 1739813 - DNA, 25 bp, Homo sapien
tctgagtcccattgatggcagtgaa

SEQ ID NO: 1739814 - DNA, 25 bp, Homo sapien
acaccagtaagatttgatgattatg

SEQ ID NO: 1739815 - DNA, 25 bp, Homo sapien
tgttgtgatagagttggctttctga

SEQ ID NO: 1739816 - DNA, 25 bp, Homo sapien
ctcttacagcaagggctttaaaaca

SEQ ID NO: 1739817 - DNA, 25 bp, Homo sapien
tacagttggtggtaaggcctttgga

SEQ ID NO: 1739818 - DNA, 25 bp, Homo sapien
aattccactgtatctaaagggtggg

SEQ ID NO: 1739819 - DNA, 25 bp, Homo sapien
caagagggtgactgatacatactgt

SEQ ID NO: 1739820 - DNA, 25 bp, Homo sapien
gctgatgccctcctgtatagagcca

SEQ ID NO: 1739821 - DNA, 25 bp, Homo sapien
gatttaagttcgtgaatgcatacgc

SEQ ID NO: 1739822 - DNA, 25 bp, Homo sapien
ttaggagcgcaagcctctcttcggc

SEQ ID NO: 1739823 - DNA, 25 bp, Homo sapien
tgcatacgcaagactcggaggtagt

SEQ ID NO: 1739824 - DNA, 25 bp, Homo sapien
tagagcggatagagccgtactgccg

SEQ ID NO: 1739825 - DNA, 25 bp, Homo sapien
taatgtgccgcagcaattccttcgg

SEQ ID NO: 1739826 - DNA, 25 bp, Homo sapien
tcagagctgtatttcggccaaccca

SEQ ID NO: 1739827 - DNA, 25 bp, Homo sapien
taacgtttcctcagaagcgagcgag

SEQ ID NO: 1739828 - DNA, 25 bp, Homo sapien
gcaaaatggatgacaccgacagcct

SEQ ID NO: 1739829 - DNA, 25 bp, Homo sapien
ttcacacatacttccttgtatctgt

SEQ ID NO: 1739830 - DNA, 25 bp, Homo sapien
cacttcacacatacttccttgtatc

SEQ ID NO: 1739831 - DNA, 25 bp, Homo sapien
acttcacacatacttccttgtatct

SEQ ID NO: 1739832 - DNA, 25 bp, Homo sapien
cttcacacatacttccttgtatctg

SEQ ID NO: 1739833 - DNA, 25 bp, Homo sapien
ttttaactgtgcttcttccttgtcc

SEQ ID NO: 1739834 - DNA, 25 bp, Homo sapien
tgcttttaactgtgcttcttccttg

SEQ ID NO: 1739835 - DNA, 25 bp, Homo sapien
actgcttttaactgtgcttcttcct

SEQ ID NO: 1739836 - DNA, 25 bp, Homo sapien
ttactgcttttaactgtgcttcttc

SEQ ID NO: 1739837 - DNA, 25 bp, Homo sapien
aaattttaacacagcgtcagtgagt

SEQ ID NO: 1739838 - DNA, 25 bp, Homo sapien
cagtgagtccaggttttaacttctt

SEQ ID NO: 1739839 - DNA, 25 bp, Homo sapien
acagcgtcagtgagtccaggtttta

SEQ ID NO: 1739840 - DNA, 25 bp, Homo sapien
taacacagcgtcagtgagtccaggt

SEQ ID NO: 1739841 - DNA, 25 bp, Homo sapien
ggaacattcgtatagtctctgtgaa

SEQ ID NO: 1739842 - DNA, 25 bp, Homo sapien
cattgatggcctaagttcctcctgt

SEQ ID NO: 1739843 - DNA, 25 bp, Homo sapien
taaatgcacccagcttaagtagaag

SEQ ID NO: 1739844 - DNA, 25 bp, Homo sapien
tctgttttacaagtccattgatggc

SEQ ID NO: 1739845 - DNA, 25 bp, Homo sapien
catcctgcaactctttttctaactg

SEQ ID NO: 1739846 - DNA, 25 bp, Homo sapien
gggcacagaggatgtcgctaaagaa

SEQ ID NO: 1739847 - DNA, 25 bp, Homo sapien
gaaaagttgaagagccctttcagca

SEQ ID NO: 1739848 - DNA, 25 bp, Homo sapien
taaggaggactaccatcctgcaact

SEQ ID NO: 1739849 - DNA, 25 bp, Homo sapien
ttactcagagtttatattttccttc

SEQ ID NO: 1739850 - DNA, 25 bp, Homo sapien
gtttgtgtagaagaatgcctgttta

SEQ ID NO: 1739851 - DNA, 25 bp, Homo sapien
ggttaatagtagaaatgtgccacac

SEQ ID NO: 1739852 - DNA, 25 bp, Homo sapien
aaaacaatgtaatggttaatagtag

SEQ ID NO: 1739853 - DNA, 25 bp, Homo sapien
cacattggagcagttttggacagac

SEQ ID NO: 1739854 - DNA, 25 bp, Homo sapien
gatagtcaaactagagagtagctct

SEQ ID NO: 1739855 - DNA, 25 bp, Homo sapien
tatggcaggctaaaagtgaccaagt

SEQ ID NO: 1739856 - DNA, 25 bp, Homo sapien
gacagacagacccacttcaagtgct

SEQ ID NO: 1739857 - DNA, 25 bp, Homo sapien
cacactcagggagtaagttgtgcac

SEQ ID NO: 1739858 - DNA, 25 bp, Homo sapien
gcgaagacggttgacagtacactgt

SEQ ID NO: 1739859 - DNA, 25 bp, Homo sapien
taggtgtccagtattaagcatctct

SEQ ID NO: 1739860 - DNA, 25 bp, Homo sapien
tacaaaaagagccagtgaccacact

SEQ ID NO: 1739861 - DNA, 25 bp, Homo sapien
ccaacagagcgaagatgcgcctaca

SEQ ID NO: 1739862 - DNA, 25 bp, Homo sapien
gcacgcgaagtgtcaccgtagctct

SEQ ID NO: 1739863 - DNA, 25 bp, Homo sapien
taaatgctccgactcccttcagaga

SEQ ID NO: 1739864 - DNA, 25 bp, Homo sapien
tcgccacgataaccagagtagcagg

SEQ ID NO: 1739865 - DNA, 25 bp, Homo sapien
tttagattcacttttatactggggc

SEQ ID NO: 1739866 - DNA, 25 bp, Homo sapien
cttttcagattgttgggcttgcatc

SEQ ID NO: 1739867 - DNA, 25 bp, Homo sapien
tgttctatcattttagattcacttt

SEQ ID NO: 1739868 - DNA, 25 bp, Homo sapien
ttcacttttatactggggcttgtgc

SEQ ID NO: 1739869 - DNA, 25 bp, Homo sapien
tgtgcccacggaaggtttcagaggc

SEQ ID NO: 1739870 - DNA, 25 bp, Homo sapien
ggtttcagaggcagattatctggat

SEQ ID NO: 1739871 - DNA, 25 bp, Homo sapien
tggttgctgatgctttccttgcaga

SEQ ID NO: 1739872 - DNA, 25 bp, Homo sapien
gaaaagacctttagtaatcactgat

SEQ ID NO: 1739873 - DNA, 25 bp, Homo sapien
cattcagatgttactccacagccgc

SEQ ID NO: 1739874 - DNA, 25 bp, Homo sapien
gtccacagcccagtatctacagagg

SEQ ID NO: 1739875 - DNA, 25 bp, Homo sapien
cctgtgccagaaatagggatctata

SEQ ID NO: 1739876 - DNA, 25 bp, Homo sapien
gatcactcagtagagcaaaggctcc

SEQ ID NO: 1739877 - DNA, 25 bp, Homo sapien
gtagatccacacatttgaacagaaa

SEQ ID NO: 1739878 - DNA, 25 bp, Homo sapien
ggaaattttaccttaccatcacaga

SEQ ID NO: 1739879 - DNA, 25 bp, Homo sapien
caactgtgtgtgttacctagagaaa

SEQ ID NO: 1739880 - DNA, 25 bp, Homo sapien
cgatgccataacgtgatacatttgc

SEQ ID NO: 1739881 - DNA, 25 bp, Homo sapien
cacagctactacaaatcagtggcag

SEQ ID NO: 1739882 - DNA, 25 bp, Homo sapien
gagacaacagcgctactgcagtaat

SEQ ID NO: 1739883 - DNA, 25 bp, Homo sapien
aattcatggtgtggaatctctaagc

SEQ ID NO: 1739884 - DNA, 25 bp, Homo sapien
taaatacaccagctgtcagatgcct

SEQ ID NO: 1739885 - DNA, 25 bp, Homo sapien
tagatggtgagccttttctgtccat

SEQ ID NO: 1739886 - DNA, 25 bp, Homo sapien
catttagatagatggtgagcctttt

SEQ ID NO: 1739887 - DNA, 25 bp, Homo sapien
agtcatttagatagatggtgagcct

SEQ ID NO: 1739888 - DNA, 25 bp, Homo sapien
ttagatagatggtgagccttttctg

SEQ ID NO: 1739889 - DNA, 25 bp, Homo sapien
agatcgcgtcactccaccccagcct

SEQ ID NO: 1739890 - DNA, 25 bp, Homo sapien
cgcgtcactccaccccagcctgggc

SEQ ID NO: 1739891 - DNA, 25 bp, Homo sapien
cagcctgggcgacagagcgagactc

SEQ ID NO: 1739892 - DNA, 25 bp, Homo sapien
cctgggcgacagagcgagactccac

SEQ ID NO: 1739893 - DNA, 25 bp, Homo sapien
tgtgactagccatagacttagaaca

SEQ ID NO: 1739894 - DNA, 25 bp, Homo sapien
taaaagagtagaacctcagcatgct

SEQ ID NO: 1739895 - DNA, 25 bp, Homo sapien
caaatgacagaacctattagcggaa

SEQ ID NO: 1739896 - DNA, 25 bp, Homo sapien
tattaggtggttgagaactcccaag

SEQ ID NO: 1739897 - DNA, 25 bp, Homo sapien
tgtaatcatctccaagacgtataat

SEQ ID NO: 1739898 - DNA, 25 bp, Homo sapien
cgtataatttgttattagtcatgaa

SEQ ID NO: 1739899 - DNA, 25 bp, Homo sapien
taagaaatgtaatcatctccaagac

SEQ ID NO: 1739900 - DNA, 25 bp, Homo sapien
catctccaagacgtataatttgtta

SEQ ID NO: 1739901 - DNA, 25 bp, Homo sapien
ttggatcaggaacttggacagattg

SEQ ID NO: 1739902 - DNA, 25 bp, Homo sapien
tcctaatggtcccagaggttagtcg

SEQ ID NO: 1739903 - DNA, 25 bp, Homo sapien
gaacttggacagattggcaactgag

SEQ ID NO: 1739904 - DNA, 25 bp, Homo sapien
ccagaggttagtcgcaactccagaa

SEQ ID NO: 1739905 - DNA, 25 bp, Homo sapien
ttttcccgaaaagtccctgtgagca

SEQ ID NO: 1739906 - DNA, 25 bp, Homo sapien
cctcgtgtcctatagactgttccaa

SEQ ID NO: 1739907 - DNA, 25 bp, Homo sapien
gcaaaaagcacagccaagaactttg

SEQ ID NO: 1739908 - DNA, 25 bp, Homo sapien
gagaacaagtgggagtcctcgtgtc

SEQ ID NO: 1739909 - DNA, 25 bp, Homo sapien
cggagaccacggaccacggaccttg

SEQ ID NO: 1739910 - DNA, 25 bp, Homo sapien
gcaggaggctgaccccgaggctttc

SEQ ID NO: 1739911 - DNA, 25 bp, Homo sapien
gaccacggaccttggctgggtcgct

SEQ ID NO: 1739912 - DNA, 25 bp, Homo sapien
gaggctttctttcccgcgagccaag

SEQ ID NO: 1739913 - DNA, 25 bp, Homo sapien
tctttttgaagtaagcggtcataat

SEQ ID NO: 1739914 - DNA, 25 bp, Homo sapien
atcctctttttgaagtaagcggtca

SEQ ID NO: 1739915 - DNA, 25 bp, Homo sapien
ttgaagtaagcggtcataattagat

SEQ ID NO: 1739916 - DNA, 25 bp, Homo sapien
cctctttttgaagtaagcggtcata

SEQ ID NO: 1739917 - DNA, 25 bp, Homo sapien
tccagatgtccatgtaatgactatc

SEQ ID NO: 1739918 - DNA, 25 bp, Homo sapien
gaacacttgatacttccatgtgctg

SEQ ID NO: 1739919 - DNA, 25 bp, Homo sapien
gatgtccatgtaatgactatctctt

SEQ ID NO: 1739920 - DNA, 25 bp, Homo sapien
agaacacttgatacttccatgtgct

SEQ ID NO: 1739921 - DNA, 25 bp, Homo sapien
atcactgttccattagcctcctggg

SEQ ID NO: 1739922 - DNA, 25 bp, Homo sapien
ggagcagaatcctgcttccaaattc

SEQ ID NO: 1739923 - DNA, 25 bp, Homo sapien
cctcctgggatcacgagcaggtagt

SEQ ID NO: 1739924 - DNA, 25 bp, Homo sapien
attcacgaggcaggaaccgcgatac

SEQ ID NO: 1739925 - DNA, 25 bp, Homo sapien
attactgcagcaagaatagactgga

SEQ ID NO: 1739926 - DNA, 25 bp, Homo sapien
tagactggagctctattctcatctt

SEQ ID NO: 1739927 - DNA, 25 bp, Homo sapien
agacagcattcacaacagattgatg

SEQ ID NO: 1739928 - DNA, 25 bp, Homo sapien
tgtcaagcctttggatcagctcagt

SEQ ID NO: 1739929 - DNA, 25 bp, Homo sapien
tgcactttctattacaggccagaga

SEQ ID NO: 1739930 - DNA, 25 bp, Homo sapien
tctggaggctcattacgggtctgcg

SEQ ID NO: 1739931 - DNA, 25 bp, Homo sapien
ggtcctgcaccgagatgccattctt

SEQ ID NO: 1739932 - DNA, 25 bp, Homo sapien
gaaaaccaagcctgaggttctggag

SEQ ID NO: 1739933 - DNA, 25 bp, Homo sapien
tcagtggctgttttacctctggctt

SEQ ID NO: 1739934 - DNA, 25 bp, Homo sapien
ctgaggcgcggggatcaattgagcc

SEQ ID NO: 1739935 - DNA, 25 bp, Homo sapien
cgcggggatcaattgagccttggag

SEQ ID NO: 1739936 - DNA, 25 bp, Homo sapien
ggcgcggggatcaattgagccttgg

SEQ ID NO: 1739937 - DNA, 25 bp, Homo sapien
gaggcgcggggatcaattgagcctt

SEQ ID NO: 1739938 - DNA, 25 bp, Homo sapien
accagttcctggttgacttcaggat

SEQ ID NO: 1739939 - DNA, 25 bp, Homo sapien
caaccagttcctggttgacttcagg

SEQ ID NO: 1739940 - DNA, 25 bp, Homo sapien
aaccagttcctggttgacttcagga

SEQ ID NO: 1739941 - DNA, 25 bp, Homo sapien
gaagcacgattatgacagctcagag

SEQ ID NO: 1739942 - DNA, 25 bp, Homo sapien
actcagtagaggtcaatgcatatca

SEQ ID NO: 1739943 - DNA, 25 bp, Homo sapien
gttcctgaccacaaaaactcagtag

SEQ ID NO: 1739944 - DNA, 25 bp, Homo sapien
tctgaccacttgcttggagatgatg

SEQ ID NO: 1739945 - DNA, 25 bp, Homo sapien
tgtggtaaagctgctataagtttct

SEQ ID NO: 1739946 - DNA, 25 bp, Homo sapien
tgatttttccttattggcgatgtgg

SEQ ID NO: 1739947 - DNA, 25 bp, Homo sapien
ttctgaagaccatcaaaggggtttc

SEQ ID NO: 1739948 - DNA, 25 bp, Homo sapien
gaagaccatcaaaggggtttcctga

SEQ ID NO: 1739949 - DNA, 25 bp, Homo sapien
gatcaagcttgtagatggagcacag

SEQ ID NO: 1739950 - DNA, 25 bp, Homo sapien
tctccccttggaaagtaacattgac

SEQ ID NO: 1739951 - DNA, 25 bp, Homo sapien
tggacaattcctctccaggacgttt

SEQ ID NO: 1739952 - DNA, 25 bp, Homo sapien
ggcatcctgaggaacccattccctg

SEQ ID NO: 1739953 - DNA, 25 bp, Homo sapien
tgtaggatcggatcttatcctgtgg

SEQ ID NO: 1739954 - DNA, 25 bp, Homo sapien
tttactgtaggatcggatcttatcc

SEQ ID NO: 1739955 - DNA, 25 bp, Homo sapien
acataattttgggtgttatgaggta

SEQ ID NO: 1739956 - DNA, 25 bp, Homo sapien
cggatcttatcctgtggagaagtta

SEQ ID NO: 1739957 - DNA, 25 bp, Homo sapien
cttatgggcaaagatggagttgagt

SEQ ID NO: 1739958 - DNA, 25 bp, Homo sapien
tctgtgtctgggatctgggttgaaa

SEQ ID NO: 1739959 - DNA, 25 bp, Homo sapien
gatggagttgagtggcactctgtcc

SEQ ID NO: 1739960 - DNA, 25 bp, Homo sapien
tggcagggaggagcttttaaacctg

SEQ ID NO: 1739961 - DNA, 25 bp, Homo sapien
tattgccagacgtcccccagggaga

SEQ ID NO: 1739962 - DNA, 25 bp, Homo sapien
gcgtccttcctagttttgacatccc

SEQ ID NO: 1739963 - DNA, 25 bp, Homo sapien
tagctattgccagacgtcccccagg

SEQ ID NO: 1739964 - DNA, 25 bp, Homo sapien
tgatgcagtagcgtccttcctagtt

SEQ ID NO: 1739965 - DNA, 25 bp, Homo sapien
gagttaggctctcctaaagactcaa

SEQ ID NO: 1739966 - DNA, 25 bp, Homo sapien
gagagagtagacatgatcagagctc

SEQ ID NO: 1739967 - DNA, 25 bp, Homo sapien
aatacttgaataaggagttaggctc

SEQ ID NO: 1739968 - DNA, 25 bp, Homo sapien
tcagagctcattccaagccagtgtt

SEQ ID NO: 1739969 - DNA, 25 bp, Homo sapien
gccctgtgcatcttgtgtcatgtct

SEQ ID NO: 1739970 - DNA, 25 bp, Homo sapien
caatggttggaaattgtaagggact

SEQ ID NO: 1739971 - DNA, 25 bp, Homo sapien
catcatcttctagaccgcagttaac

SEQ ID NO: 1739972 - DNA, 25 bp, Homo sapien
gtaagggacttttgctccagagccc

SEQ ID NO: 1739973 - DNA, 25 bp, Homo sapien
agggctgcttctggttatttaggtc

SEQ ID NO: 1739974 - DNA, 25 bp, Homo sapien
caccacttcattggagctagtaact

SEQ ID NO: 1739975 - DNA, 25 bp, Homo sapien
ctagcattgatatgggtcagtgaaa

SEQ ID NO: 1739976 - DNA, 25 bp, Homo sapien
tcagtgaaatgggtccaccacttca

SEQ ID NO: 1739977 - DNA, 25 bp, Homo sapien
gaagacgtaatatttaggacatact

SEQ ID NO: 1739978 - DNA, 25 bp, Homo sapien
tcagtccattaaccatagttaatgt

SEQ ID NO: 1739979 - DNA, 25 bp, Homo sapien
tgtacatgtcatagttaaagaccaa

SEQ ID NO: 1739980 - DNA, 25 bp, Homo sapien
tatatgtgttgtggagataatttga

SEQ ID NO: 1739981 - DNA, 25 bp, Homo sapien
cctctggtagtaggaggtggtaata

SEQ ID NO: 1739982 - DNA, 25 bp, Homo sapien
cttccagtcctctggtagtaggagg

SEQ ID NO: 1739983 - DNA, 25 bp, Homo sapien
cagtcctctggtagtaggaggtggt

SEQ ID NO: 1739984 - DNA, 25 bp, Homo sapien
ctctggtagtaggaggtggtaataa

SEQ ID NO: 1739985 - DNA, 25 bp, Homo sapien
ccacatttaggcaagcttgtcagca

SEQ ID NO: 1739986 - DNA, 25 bp, Homo sapien
tatagggtattctggcaggcggata

SEQ ID NO: 1739987 - DNA, 25 bp, Homo sapien
tctgaaggtctaacatgtggttata

SEQ ID NO: 1739988 - DNA, 25 bp, Homo sapien
tagagtggttcaagctagcagctgg

SEQ ID NO: 1739989 - DNA, 25 bp, Homo sapien
cccaaagtggaatcagaagcttcaa

SEQ ID NO: 1739990 - DNA, 25 bp, Homo sapien
tggttcttggtttctacacgctggg

SEQ ID NO: 1739991 - DNA, 25 bp, Homo sapien
tcagaaggctaacagaggctctttt

SEQ ID NO: 1739992 - DNA, 25 bp, Homo sapien
gccagtagagttgggccaccctgga

SEQ ID NO: 1739993 - DNA, 25 bp, Homo sapien
tacagggtgagcagcgctgtatcca

SEQ ID NO: 1739994 - DNA, 25 bp, Homo sapien
agcgctgtatccactgataacccag

SEQ ID NO: 1739995 - DNA, 25 bp, Homo sapien
tgagcagcgctgtatccactgataa

SEQ ID NO: 1739996 - DNA, 25 bp, Homo sapien
caatcttttacagggtgagcagcgc

SEQ ID NO: 1739997 - DNA, 25 bp, Homo sapien
cacactcctgattgaagtggcagac

SEQ ID NO: 1739998 - DNA, 25 bp, Homo sapien
tgatctcaggaagagggtcaacctt

SEQ ID NO: 1739999 - DNA, 25 bp, Homo sapien
tttgcatgtcaaaaagagggtatct

SEQ ID NO: 1740000 - DNA, 25 bp, Homo sapien
aaagactgagtctgagcaaatgcaa

SEQ ID NO: 1740001 - DNA, 25 bp, Homo sapien
tccctgtgaacctggactacgttgc

SEQ ID NO: 1740002 - DNA, 25 bp, Homo sapien
gctggagtaaatgcccacatggaca

SEQ ID NO: 1740003 - DNA, 25 bp, Homo sapien
catctagtgttagcccagtgacaac

SEQ ID NO: 1740004 - DNA, 25 bp, Homo sapien
tcatcatcctttcacgtaggcatgg

SEQ ID NO: 1740005 - DNA, 25 bp, Homo sapien
tgggaatccccaacttagctcaggt

SEQ ID NO: 1740006 - DNA, 25 bp, Homo sapien
tgtctcaagtgggtagatccagctg

SEQ ID NO: 1740007 - DNA, 25 bp, Homo sapien
tagatggcatctctgtaaacaggcc

SEQ ID NO: 1740008 - DNA, 25 bp, Homo sapien
cctacaggtctcagtttagatggca

SEQ ID NO: 1740009 - DNA, 25 bp, Homo sapien
gcagcaagaactcaagagttcttga

SEQ ID NO: 1740010 - DNA, 25 bp, Homo sapien
aagaactcaagagttcttgaaactt

SEQ ID NO: 1740011 - DNA, 25 bp, Homo sapien
cttgcagcaagaactcaagagttct

SEQ ID NO: 1740012 - DNA, 25 bp, Homo sapien
cccttgcagcaagaactcaagagtt

SEQ ID NO: 1740013 - DNA, 25 bp, Homo sapien
taatgtgactaggtggagtccgcaa

SEQ ID NO: 1740014 - DNA, 25 bp, Homo sapien
actgaacttggctatataatgtgac

SEQ ID NO: 1740015 - DNA, 25 bp, Homo sapien
tgggacttaaccacaacaaactgaa

SEQ ID NO: 1740016 - DNA, 25 bp, Homo sapien
gactaggtggagtccgcaaagttta

SEQ ID NO: 1740017 - DNA, 25 bp, Homo sapien
ctaaaactgggccttgagggttgca

SEQ ID NO: 1740018 - DNA, 25 bp, Homo sapien
gataggtactagactttaagaagac

SEQ ID NO: 1740019 - DNA, 25 bp, Homo sapien
aagacagtagagttcaaagcaagcc

SEQ ID NO: 1740020 - DNA, 25 bp, Homo sapien
ggtccaggataagaagataggtact

SEQ ID NO: 1740021 - DNA, 25 bp, Homo sapien
ctggcaattctgtaggagggaagat

SEQ ID NO: 1740022 - DNA, 25 bp, Homo sapien
gggagtatttctccagcgttatacg

SEQ ID NO: 1740023 - DNA, 25 bp, Homo sapien
tctgtaggagggaagatgggcggca

SEQ ID NO: 1740024 - DNA, 25 bp, Homo sapien
gcgttatacgcaacaaccattcttc

SEQ ID NO: 1740025 - DNA, 25 bp, Homo sapien
tgtatttgagtggaaaaataggcaa

SEQ ID NO: 1740026 - DNA, 25 bp, Homo sapien
atgtatttgagtggaaaaataggca

SEQ ID NO: 1740027 - DNA, 25 bp, Homo sapien
tggcttggatatcagctgtctctag

SEQ ID NO: 1740028 - DNA, 25 bp, Homo sapien
gatttttaccaacagacctcctgtc

SEQ ID NO: 1740029 - DNA, 25 bp, Homo sapien
gtctcatgagatgaaccatgcattt

SEQ ID NO: 1740030 - DNA, 25 bp, Homo sapien
tgtacattgctgattaattctgaga

SEQ ID NO: 1740031 - DNA, 25 bp, Homo sapien
taatcagaaacaatagattataaat

SEQ ID NO: 1740032 - DNA, 25 bp, Homo sapien
cagaaacaatagattataaataata

SEQ ID NO: 1740033 - DNA, 25 bp, Homo sapien
aatcagaaacaatagattataaata

SEQ ID NO: 1740034 - DNA, 25 bp, Homo sapien
tcagaaacaatagattataaataat

SEQ ID NO: 1740035 - DNA, 25 bp, Homo sapien
cagtcacttttcagtgccatgagtt

SEQ ID NO: 1740036 - DNA, 25 bp, Homo sapien
tatcagtcacttttcagtgccatga

SEQ ID NO: 1740037 - DNA, 25 bp, Homo sapien
tttcagtgccatgagttgcaatatt

SEQ ID NO: 1740038 - DNA, 25 bp, Homo sapien
tcacttttcagtgccatgagttgca

SEQ ID NO: 1740039 - DNA, 25 bp, Homo sapien
agtgtgcacaccactgattagtctc

SEQ ID NO: 1740040 - DNA, 25 bp, Homo sapien
gccagtgtgcacaccactgattagt

SEQ ID NO: 1740041 - DNA, 25 bp, Homo sapien
cactgattagtctcctaatggcttc

SEQ ID NO: 1740042 - DNA, 25 bp, Homo sapien
tgcacaccactgattagtctcctaa

SEQ ID NO: 1740043 - DNA, 25 bp, Homo sapien
tggagctctgcgagctagtggcagt

SEQ ID NO: 1740044 - DNA, 25 bp, Homo sapien
ggagctctgcgagctagtggcagtg

SEQ ID NO: 1740045 - DNA, 25 bp, Homo sapien
gagctctgcgagctagtggcagtgc

SEQ ID NO: 1740046 - DNA, 25 bp, Homo sapien
aatttgttacacatggatagcacac

SEQ ID NO: 1740047 - DNA, 25 bp, Homo sapien
agggtacactccctctcgagtggct

SEQ ID NO: 1740048 - DNA, 25 bp, Homo sapien
taaagttctgagctagttctcatgc

SEQ ID NO: 1740049 - DNA, 25 bp, Homo sapien
ccatttgctttctgggtgcgttgtc

SEQ ID NO: 1740050 - DNA, 25 bp, Homo sapien
tatatgtgctgtcaaagcaagcact

SEQ ID NO: 1740051 - DNA, 25 bp, Homo sapien
tcagcggaggcctttgcgactgtcc

SEQ ID NO: 1740052 - DNA, 25 bp, Homo sapien
gaatgaaagcgagcacacaaacacg

SEQ ID NO: 1740053 - DNA, 25 bp, Homo sapien
ttcagacgggcctatacaaaggcag

SEQ ID NO: 1740054 - DNA, 25 bp, Homo sapien
gggctcggcctagacacgttacatc

SEQ ID NO: 1740055 - DNA, 25 bp, Homo sapien
tcccctgcgctaccgccgctcttgc

SEQ ID NO: 1740056 - DNA, 25 bp, Homo sapien
agtaatctcccctgcgctaccgccg

SEQ ID NO: 1740057 - DNA, 25 bp, Homo sapien
gaaaagtaatctcccctgcgctacc

SEQ ID NO: 1740058 - DNA, 25 bp, Homo sapien
cttccagaaaagtaatctcccctgc

SEQ ID NO: 1740059 - DNA, 25 bp, Homo sapien
cccacccagcgcagataactgaata

SEQ ID NO: 1740060 - DNA, 25 bp, Homo sapien
ataactgaatatccggggttctggg

SEQ ID NO: 1740061 - DNA, 25 bp, Homo sapien
gaaacccacccagcgcagataactg

SEQ ID NO: 1740062 - DNA, 25 bp, Homo sapien
ccccgaaacccacccagcgcagata

SEQ ID NO: 1740063 - DNA, 25 bp, Homo sapien
ttgcaccgctctcctatctgacacc

SEQ ID NO: 1740064 - DNA, 25 bp, Homo sapien
gcaccgctctcctatctgacaccat

SEQ ID NO: 1740065 - DNA, 25 bp, Homo sapien
cctccagtatcatcttgcaccgctc

SEQ ID NO: 1740066 - DNA, 25 bp, Homo sapien
atcttgcaccgctctcctatctgac

SEQ ID NO: 1740067 - DNA, 25 bp, Homo sapien
tgttaaactaggacaaggcagagtg

SEQ ID NO: 1740068 - DNA, 25 bp, Homo sapien
tcagatggcttcaaggtagctgttg

SEQ ID NO: 1740069 - DNA, 25 bp, Homo sapien
taccatctattggatgccagcactg

SEQ ID NO: 1740070 - DNA, 25 bp, Homo sapien
tgtatttgatatagcaactcctccc

SEQ ID NO: 1740071 - DNA, 25 bp, Homo sapien
ttaaaccgagaaatgactgcatgag

SEQ ID NO: 1740072 - DNA, 25 bp, Homo sapien
tgaaaaccaacctgggctgaaaaca

SEQ ID NO: 1740073 - DNA, 25 bp, Homo sapien
gaggagctgatacccaaacttgtga

SEQ ID NO: 1740074 - DNA, 25 bp, Homo sapien
caaagcagtgcagttggcgctacct

SEQ ID NO: 1740075 - DNA, 25 bp, Homo sapien
tgagggcacaagttaccaaatgaac

SEQ ID NO: 1740076 - DNA, 25 bp, Homo sapien
ggaagaaaagtagcaacccataaga

SEQ ID NO: 1740077 - DNA, 25 bp, Homo sapien
aaacctaaatgtctatgagggcaca

SEQ ID NO: 1740078 - DNA, 25 bp, Homo sapien
ttcggtggatgaataggaactagta

SEQ ID NO: 1740079 - DNA, 25 bp, Homo sapien
tattggctaggatgtgggagaaact

SEQ ID NO: 1740080 - DNA, 25 bp, Homo sapien
taccctacgagctagcaatttcact

SEQ ID NO: 1740081 - DNA, 25 bp, Homo sapien
tgggaacgcaaaacagttcaggcac

SEQ ID NO: 1740082 - DNA, 25 bp, Homo sapien
cctgcctggctgctattatttactt

SEQ ID NO: 1740083 - DNA, 25 bp, Homo sapien
ggctttctgagttgaactaaagaca

SEQ ID NO: 1740084 - DNA, 25 bp, Homo sapien
ttctgagttgaactaaagacaaata

SEQ ID NO: 1740085 - DNA, 25 bp, Homo sapien
ctgatgtcttaagcttggctctggc

SEQ ID NO: 1740086 - DNA, 25 bp, Homo sapien
attctgatgtcttaagcttggctct

SEQ ID NO: 1740087 - DNA, 25 bp, Homo sapien
caacgttttcggttttggcaatgtg

SEQ ID NO: 1740088 - DNA, 25 bp, Homo sapien
ttggcaatgtggttaaaacttgaca

SEQ ID NO: 1740089 - DNA, 25 bp, Homo sapien
ttttggcaatgtggttaaaacttga

SEQ ID NO: 1740090 - DNA, 25 bp, Homo sapien
tttggcaatgtggttaaaacttgac

SEQ ID NO: 1740091 - DNA, 25 bp, Homo sapien
tcttcatgatcaaagctccaattat

SEQ ID NO: 1740092 - DNA, 25 bp, Homo sapien
ccatctctcttagactctgatctag

SEQ ID NO: 1740093 - DNA, 25 bp, Homo sapien
catctctcttagactctgatctagc

SEQ ID NO: 1740094 - DNA, 25 bp, Homo sapien
aatcaacatctcatcggtgaaggca

SEQ ID NO: 1740095 - DNA, 25 bp, Homo sapien
taaagtggtaatgatgaacggagct

SEQ ID NO: 1740096 - DNA, 25 bp, Homo sapien
gaacggagctgttgcccagacagaa

SEQ ID NO: 1740097 - DNA, 25 bp, Homo sapien
catctcatcggtgaaggcacataaa

SEQ ID NO: 1740098 - DNA, 25 bp, Homo sapien
catccacactgagcagatttgtccc

SEQ ID NO: 1740099 - DNA, 25 bp, Homo sapien
atccacactgagcagatttgtccca

SEQ ID NO: 1740100 - DNA, 25 bp, Homo sapien
tcatccacactgagcagatttgtcc

SEQ ID NO: 1740101 - DNA, 25 bp, Homo sapien
aaaagtgtgtcttagactaaatata

SEQ ID NO: 1740102 - DNA, 25 bp, Homo sapien
taagatgcatctagatttcaaagat

SEQ ID NO: 1740103 - DNA, 25 bp, Homo sapien
gcatatcatgctatcttaataagat

SEQ ID NO: 1740104 - DNA, 25 bp, Homo sapien
ctaaagaccagatagaaaaatgggc

SEQ ID NO: 1740105 - DNA, 25 bp, Homo sapien
taaagccaggtattactgtccagag

SEQ ID NO: 1740106 - DNA, 25 bp, Homo sapien
ggtttcatcaatgcttcatccgagg

SEQ ID NO: 1740107 - DNA, 25 bp, Homo sapien
gggcctccggatatcaatctatgaa

SEQ ID NO: 1740108 - DNA, 25 bp, Homo sapien
taactctggtactatgcagcaatgc

SEQ ID NO: 1740109 - DNA, 25 bp, Homo sapien
tgaattcaccagagctattagcaac

SEQ ID NO: 1740110 - DNA, 25 bp, Homo sapien
tattagcaacaatttcagatcgacg

SEQ ID NO: 1740111 - DNA, 25 bp, Homo sapien
tcagacttgtttcgtcttacatatg

SEQ ID NO: 1740112 - DNA, 25 bp, Homo sapien
ttaagtccaattgggttgcctttca

SEQ ID NO: 1740113 - DNA, 25 bp, Homo sapien
cagaacataatgacgtattttgcgt

SEQ ID NO: 1740114 - DNA, 25 bp, Homo sapien
catgagcatgatgaaaacgtctacc

SEQ ID NO: 1740115 - DNA, 25 bp, Homo sapien
tgatgaaaacgtctaccatgaacta

SEQ ID NO: 1740116 - DNA, 25 bp, Homo sapien
catgaactacagttccagaacataa

SEQ ID NO: 1740117 - DNA, 25 bp, Homo sapien
gatatctcagtcaaacactttcagg

SEQ ID NO: 1740118 - DNA, 25 bp, Homo sapien
gatgccatgtatatactaaccaaag

SEQ ID NO: 1740119 - DNA, 25 bp, Homo sapien
tactcttcagagctaaactaccaac

SEQ ID NO: 1740120 - DNA, 25 bp, Homo sapien
gcaatacaacaggtcttagtgaaaa

SEQ ID NO: 1740121 - DNA, 25 bp, Homo sapien
gatagcccatctatgtaaacagaaa

SEQ ID NO: 1740122 - DNA, 25 bp, Homo sapien
gtcttctaaatgacgagcagtctag

SEQ ID NO: 1740123 - DNA, 25 bp, Homo sapien
tcagtcaactgaaaggtcatgtaac

SEQ ID NO: 1740124 - DNA, 25 bp, Homo sapien
aatatagcaaggttcaggacgtgtc

SEQ ID NO: 1740125 - DNA, 25 bp, Homo sapien
ttctaagaaccttataagaattaca

SEQ ID NO: 1740126 - DNA, 25 bp, Homo sapien
gcagggatggtatgaactacagact

SEQ ID NO: 1740127 - DNA, 25 bp, Homo sapien
tgaaagtgtaagtaaaacatcaacc

SEQ ID NO: 1740128 - DNA, 25 bp, Homo sapien
gttgtttcaacaagtcagattgaag

SEQ ID NO: 1740129 - DNA, 25 bp, Homo sapien
tatactcacctgtacagaggaaagg

SEQ ID NO: 1740130 - DNA, 25 bp, Homo sapien
aaccatgtccggcctctgttgtttt

SEQ ID NO: 1740131 - DNA, 25 bp, Homo sapien
gattacaggtctaagtcaaccatgt

SEQ ID NO: 1740132 - DNA, 25 bp, Homo sapien
ttttatactcacctgtacagaggaa

SEQ ID NO: 1740133 - DNA, 25 bp, Homo sapien
tggtatatgatttgggacacaagga

SEQ ID NO: 1740134 - DNA, 25 bp, Homo sapien
aagctattaacatcaattactcgag

SEQ ID NO: 1740135 - DNA, 25 bp, Homo sapien
cagactgatcctaatatcaggtatg

SEQ ID NO: 1740136 - DNA, 25 bp, Homo sapien
tctccatagttcatgaaaactccaa

SEQ ID NO: 1740137 - DNA, 25 bp, Homo sapien
aaaaaatataagaggcaagacctca

SEQ ID NO: 1740138 - DNA, 25 bp, Homo sapien
tgttgatatatcactgtagttgcag

SEQ ID NO: 1740139 - DNA, 25 bp, Homo sapien
tatatcactgtagttgcagtaacta

SEQ ID NO: 1740140 - DNA, 25 bp, Homo sapien
caagacctcattgttgatatatcac

SEQ ID NO: 1740141 - DNA, 25 bp, Homo sapien
gatgcactgtatcctgtaacagcag

SEQ ID NO: 1740142 - DNA, 25 bp, Homo sapien
taacagcaggttcgataaatacttg

SEQ ID NO: 1740143 - DNA, 25 bp, Homo sapien
catttgaaaggcactatagactcgt

SEQ ID NO: 1740144 - DNA, 25 bp, Homo sapien
tgaatgctgacaacacaaaggaaca

SEQ ID NO: 1740145 - DNA, 25 bp, Homo sapien
gctctgaaagcttctatcgcactaa

SEQ ID NO: 1740146 - DNA, 25 bp, Homo sapien
tatcacaaccccagaatcagccatt

SEQ ID NO: 1740147 - DNA, 25 bp, Homo sapien
tgggtttaatcaaatcagcatgtct

SEQ ID NO: 1740148 - DNA, 25 bp, Homo sapien
tagtacaggtgcttttgaagtgggc

SEQ ID NO: 1740149 - DNA, 25 bp, Homo sapien
tacaatgcattaagtcatcatgtct

SEQ ID NO: 1740150 - DNA, 25 bp, Homo sapien
gaaatttaccagctatttactaata

SEQ ID NO: 1740151 - DNA, 25 bp, Homo sapien
tccaggatccaatctaggatacaat

SEQ ID NO: 1740152 - DNA, 25 bp, Homo sapien
taccagctatttactaataccccat

SEQ ID NO: 1740153 - DNA, 25 bp, Homo sapien
cctggccagcatttacattaatttc

SEQ ID NO: 1740154 - DNA, 25 bp, Homo sapien
aatttcttaatttgaggattccatt

SEQ ID NO: 1740155 - DNA, 25 bp, Homo sapien
tcttaatttgaggattccattactc

SEQ ID NO: 1740156 - DNA, 25 bp, Homo sapien
aatttgaggattccattactcttgc

SEQ ID NO: 1740157 - DNA, 25 bp, Homo sapien
ctggagaacagtagcgtgcgcaatc

SEQ ID NO: 1740158 - DNA, 25 bp, Homo sapien
tgctaatgagggacaacatgctgaa

SEQ ID NO: 1740159 - DNA, 25 bp, Homo sapien
gtatttccagaatttatggccactg

SEQ ID NO: 1740160 - DNA, 25 bp, Homo sapien
tatgatagctacaatcttaccaagt

SEQ ID NO: 1740161 - DNA, 25 bp, Homo sapien
gagcaacatctggtaaaactgggca

SEQ ID NO: 1740162 - DNA, 25 bp, Homo sapien
tagcaatgccagaatctgaatccca

SEQ ID NO: 1740163 - DNA, 25 bp, Homo sapien
gcaccaatatcaagcagagcaacat

SEQ ID NO: 1740164 - DNA, 25 bp, Homo sapien
cccggctgacagtagtgtacttata

SEQ ID NO: 1740165 - DNA, 25 bp, Homo sapien
aattctattcacactggtgatctag

SEQ ID NO: 1740166 - DNA, 25 bp, Homo sapien
cactggtgatctagtaatgtaaatc

SEQ ID NO: 1740167 - DNA, 25 bp, Homo sapien
caatagctactttcctactctaaat

SEQ ID NO: 1740168 - DNA, 25 bp, Homo sapien
caacagaccagggagctacaatagc

SEQ ID NO: 1740169 - DNA, 25 bp, Homo sapien
agttttattctaacaggaaatacag

SEQ ID NO: 1740170 - DNA, 25 bp, Homo sapien
tctttgccatataaaaagtgatact

SEQ ID NO: 1740171 - DNA, 25 bp, Homo sapien
taaaagcaaatcatagcttctttgc

SEQ ID NO: 1740172 - DNA, 25 bp, Homo sapien
ttatgtagttttattctaacaggaa

SEQ ID NO: 1740173 - DNA, 25 bp, Homo sapien
gagccgacttaaccttacaggatta

SEQ ID NO: 1740174 - DNA, 25 bp, Homo sapien
ccttggagccgacttaaccttacag

SEQ ID NO: 1740175 - DNA, 25 bp, Homo sapien
caacaccttggagccgacttaacct

SEQ ID NO: 1740176 - DNA, 25 bp, Homo sapien
tttttggacatgaggtgggtattct

SEQ ID NO: 1740177 - DNA, 25 bp, Homo sapien
gccagcaagacccaccaatggatgc

SEQ ID NO: 1740178 - DNA, 25 bp, Homo sapien
aacccagcagagagtatcttaacca

SEQ ID NO: 1740179 - DNA, 25 bp, Homo sapien
gatcttccctacagacgatttccaa

SEQ ID NO: 1740180 - DNA, 25 bp, Homo sapien
gaaagaccatgatatcgtttaggag

SEQ ID NO: 1740181 - DNA, 25 bp, Homo sapien
gccacataaacatagtgggccactg

SEQ ID NO: 1740182 - DNA, 25 bp, Homo sapien
tgtaaggaagtcctccataaattta

SEQ ID NO: 1740183 - DNA, 25 bp, Homo sapien
agttgtaaggaagtcctccataaat

SEQ ID NO: 1740184 - DNA, 25 bp, Homo sapien
acataaacatagtgggccactgcac

SEQ ID NO: 1740185 - DNA, 25 bp, Homo sapien
atataaaaagcacgtaccagtacag

SEQ ID NO: 1740186 - DNA, 25 bp, Homo sapien
atatataaaaagcacgtaccagtac

SEQ ID NO: 1740187 - DNA, 25 bp, Homo sapien
ggcattaacgtatcaagtcttaaaa

SEQ ID NO: 1740188 - DNA, 25 bp, Homo sapien
ctggccacacaaggcattttggcat

SEQ ID NO: 1740189 - DNA, 25 bp, Homo sapien
gactaactgtgaaagaacatgaggg

SEQ ID NO: 1740190 - DNA, 25 bp, Homo sapien
cacactgggtgaaagaggacgacca

SEQ ID NO: 1740191 - DNA, 25 bp, Homo sapien
caaactattgatgcaagcaccagga

SEQ ID NO: 1740192 - DNA, 25 bp, Homo sapien
tcccttccaaagctgcacactgggt

SEQ ID NO: 1740193 - DNA, 25 bp, Homo sapien
tctaactttggaacacgcaagagaa

SEQ ID NO: 1740194 - DNA, 25 bp, Homo sapien
gaaactaaactaagcctgccacaag

SEQ ID NO: 1740195 - DNA, 25 bp, Homo sapien
aatctgtaaaccaaaataacctgca

SEQ ID NO: 1740196 - DNA, 25 bp, Homo sapien
tattcttgcttagtgcaatcacaaa

SEQ ID NO: 1740197 - DNA, 25 bp, Homo sapien
ggagtaggctgataggtactacagt

SEQ ID NO: 1740198 - DNA, 25 bp, Homo sapien
gataggtactacagtgtcgtttctg

SEQ ID NO: 1740199 - DNA, 25 bp, Homo sapien
tcaggctccacttgtgattcggact

SEQ ID NO: 1740200 - DNA, 25 bp, Homo sapien
ttgtgattcggactcttctgttttc

SEQ ID NO: 1740201 - DNA, 25 bp, Homo sapien
cattttgaacattcacggtgttcat

SEQ ID NO: 1740202 - DNA, 25 bp, Homo sapien
ttttgaacattcacggtgttcataa

SEQ ID NO: 1740203 - DNA, 25 bp, Homo sapien
ccacattttgaacattcacggtgtt

SEQ ID NO: 1740204 - DNA, 25 bp, Homo sapien
cacattttgaacattcacggtgttc

SEQ ID NO: 1740205 - DNA, 25 bp, Homo sapien
cttgtctgcaatttctttgcaaatc

SEQ ID NO: 1740206 - DNA, 25 bp, Homo sapien
taatatcaattggaaccttttccac

SEQ ID NO: 1740207 - DNA, 25 bp, Homo sapien
tctgatgaattgacgttcttaataa

SEQ ID NO: 1740208 - DNA, 25 bp, Homo sapien
cgttcttaataatggtccagtagac

SEQ ID NO: 1740209 - DNA, 25 bp, Homo sapien
aaacttcttggttgttaatcctgtg

SEQ ID NO: 1740210 - DNA, 25 bp, Homo sapien
ccacttactggttatttggctcaat

SEQ ID NO: 1740211 - DNA, 25 bp, Homo sapien
tcacagaatcgttgcaagaacaaat

SEQ ID NO: 1740212 - DNA, 25 bp, Homo sapien
gaaaacctaacaggccagattagac

SEQ ID NO: 1740213 - DNA, 25 bp, Homo sapien
tagaattagggacaataagggtatc

SEQ ID NO: 1740214 - DNA, 25 bp, Homo sapien
gcaagtattttcatttagcgctgct

SEQ ID NO: 1740215 - DNA, 25 bp, Homo sapien
agcaggctgaggagatatgctttct

SEQ ID NO: 1740216 - DNA, 25 bp, Homo sapien
cgtagttcacgctctgctctgcaag

SEQ ID NO: 1740217 - DNA, 25 bp, Homo sapien
tctgttagttctgtcgttgtcatca

SEQ ID NO: 1740218 - DNA, 25 bp, Homo sapien
ctgtcaaaggaactttggcagctta

SEQ ID NO: 1740219 - DNA, 25 bp, Homo sapien
ggtgtgttgataatagaattgccaa

SEQ ID NO: 1740220 - DNA, 25 bp, Homo sapien
cagcttaaagctaaagcatctggag

SEQ ID NO: 1740221 - DNA, 25 bp, Homo sapien
aacactttacgacgtttcagaggtg

SEQ ID NO: 1740222 - DNA, 25 bp, Homo sapien
gccggaagagtgttcctactcgtat

SEQ ID NO: 1740223 - DNA, 25 bp, Homo sapien
cgtatacttcgacagtttaaaatga

SEQ ID NO: 1740224 - DNA, 25 bp, Homo sapien
tgttcctactcgtatacttcgacag

SEQ ID NO: 1740225 - DNA, 25 bp, Homo sapien
caggctctattaacagccggaagag

SEQ ID NO: 1740226 - DNA, 25 bp, Homo sapien
taattggtatagtaaagagcttaag

SEQ ID NO: 1740227 - DNA, 25 bp, Homo sapien
tagcaacggaatttttaatgttata

SEQ ID NO: 1740228 - DNA, 25 bp, Homo sapien
tattatatattagctttagcaacgg

SEQ ID NO: 1740229 - DNA, 25 bp, Homo sapien
tgtgaaatcttgaactaactgatat

SEQ ID NO: 1740230 - DNA, 25 bp, Homo sapien
attaaatgtctaaatcaccagcaaa

SEQ ID NO: 1740231 - DNA, 25 bp, Homo sapien
cactgtagcaaatataacctattag

SEQ ID NO: 1740232 - DNA, 25 bp, Homo sapien
cattaatgtgggagaaagccgtaaa

SEQ ID NO: 1740233 - DNA, 25 bp, Homo sapien
agcaaaaccttactcatcacactga

SEQ ID NO: 1740234 - DNA, 25 bp, Homo sapien
cccacagagaagttggtataacatt

SEQ ID NO: 1740235 - DNA, 25 bp, Homo sapien
ggtccttgcctgaattacttattac

SEQ ID NO: 1740236 - DNA, 25 bp, Homo sapien
gacacattaagcctattatagcctg

SEQ ID NO: 1740237 - DNA, 25 bp, Homo sapien
cttattactggtggttacaacatgg

SEQ ID NO: 1740238 - DNA, 25 bp, Homo sapien
cgtctagctgtatcttgataaaatc

SEQ ID NO: 1740239 - DNA, 25 bp, Homo sapien
cttttattcctgtaaagtgctttgg

SEQ ID NO: 1740240 - DNA, 25 bp, Homo sapien
tgccctttgataagaagatatatgt

SEQ ID NO: 1740241 - DNA, 25 bp, Homo sapien
ttacaccaagatatatgccctttga

SEQ ID NO: 1740242 - DNA, 25 bp, Homo sapien
tgtaacaactaaccatcttaataaa

SEQ ID NO: 1740243 - DNA, 25 bp, Homo sapien
cattcacatttagttagatcagagg

SEQ ID NO: 1740244 - DNA, 25 bp, Homo sapien
agcttttgataaactgctggaattg

SEQ ID NO: 1740245 - DNA, 25 bp, Homo sapien
tacaggtaattttcggacattacac

SEQ ID NO: 1740246 - DNA, 25 bp, Homo sapien
atcctccttattcatttgcagttgg

SEQ ID NO: 1740247 - DNA, 25 bp, Homo sapien
catatttgccggaggatcaaggcca

SEQ ID NO: 1740248 - DNA, 25 bp, Homo sapien
tgtacaggcaacaagtctgccatta

SEQ ID NO: 1740249 - DNA, 25 bp, Homo sapien
ccaatttcattaatgatactttcaa

SEQ ID NO: 1740250 - DNA, 25 bp, Homo sapien
aggttcttgtacaggcaacaagtct

SEQ ID NO: 1740251 - DNA, 25 bp, Homo sapien
cctttgatgctctcttcataggttc

SEQ ID NO: 1740252 - DNA, 25 bp, Homo sapien
gcttctagatagtgatactctccca

SEQ ID NO: 1740253 - DNA, 25 bp, Homo sapien
cctcttagttcaatggctaggcaat

SEQ ID NO: 1740254 - DNA, 25 bp, Homo sapien
taaaaagggtaagcacaaggcaaga

SEQ ID NO: 1740255 - DNA, 25 bp, Homo sapien
gagtttcagccctccataaagctaa

SEQ ID NO: 1740256 - DNA, 25 bp, Homo sapien
tttctactgggccaatgaagatggt

SEQ ID NO: 1740257 - DNA, 25 bp, Homo sapien
aattcttgtttgcttctaagttgta

SEQ ID NO: 1740258 - DNA, 25 bp, Homo sapien
caatgaagatggtgtggttttctcc

SEQ ID NO: 1740259 - DNA, 25 bp, Homo sapien
tttgcttctaagttgtattttagat

SEQ ID NO: 1740260 - DNA, 25 bp, Homo sapien
tggtaacagagatgcctcccttagc

SEQ ID NO: 1740261 - DNA, 25 bp, Homo sapien
ttggtaacagagatgcctcccttag

SEQ ID NO: 1740262 - DNA, 25 bp, Homo sapien
tctccttcatttagacagtgcaggt

SEQ ID NO: 1740263 - DNA, 25 bp, Homo sapien
ggtaacagagatgcctcccttagct

SEQ ID NO: 1740264 - DNA, 25 bp, Homo sapien
tctcatctgctaggactgtaccatg

SEQ ID NO: 1740265 - DNA, 25 bp, Homo sapien
tcccaacctccaaagataatgaagc

SEQ ID NO: 1740266 - DNA, 25 bp, Homo sapien
taaaactcaaaaagcctgactctgg

SEQ ID NO: 1740267 - DNA, 25 bp, Homo sapien
taagccagatatctccctggcccaa

SEQ ID NO: 1740268 - DNA, 25 bp, Homo sapien
agaaaatattacagagaactatgca

SEQ ID NO: 1740269 - DNA, 25 bp, Homo sapien
ttaatgaaacacagtataagaaact

SEQ ID NO: 1740270 - DNA, 25 bp, Homo sapien
ttgtttaatgaaacacagtataaga

SEQ ID NO: 1740271 - DNA, 25 bp, Homo sapien
gtttaatgaaacacagtataagaaa

SEQ ID NO: 1740272 - DNA, 25 bp, Homo sapien
tgtgttttagcagacttcctctagc

SEQ ID NO: 1740273 - DNA, 25 bp, Homo sapien
cagagcaggagtaacagagagcaaa

SEQ ID NO: 1740274 - DNA, 25 bp, Homo sapien
gggacacaaacctcaactgtatcag

SEQ ID NO: 1740275 - DNA, 25 bp, Homo sapien
cactccagtgggtagtagggtgtta

SEQ ID NO: 1740276 - DNA, 25 bp, Homo sapien
tagttctgttgtttagtacatagga

SEQ ID NO: 1740277 - DNA, 25 bp, Homo sapien
gacattccttgtagacagttcactg

SEQ ID NO: 1740278 - DNA, 25 bp, Homo sapien
tcttggtggatcattcctttatcat

SEQ ID NO: 1740279 - DNA, 25 bp, Homo sapien
cataacatccttcttgatccctggt

SEQ ID NO: 1740280 - DNA, 25 bp, Homo sapien
ggcgcccggccacagttcgctttgt

SEQ ID NO: 1740281 - DNA, 25 bp, Homo sapien
atggcgcccggccacagttcgcttt

SEQ ID NO: 1740282 - DNA, 25 bp, Homo sapien
tggcgcccggccacagttcgctttg

SEQ ID NO: 1740283 - DNA, 25 bp, Homo sapien
aactgaatatatgaattcggtcagc

SEQ ID NO: 1740284 - DNA, 25 bp, Homo sapien
tatgaattcggtcagcgtcttcctt

SEQ ID NO: 1740285 - DNA, 25 bp, Homo sapien
tctctctgattaaggcgtttataga

SEQ ID NO: 1740286 - DNA, 25 bp, Homo sapien
tctctctctgattaaggcgtttata

SEQ ID NO: 1740287 - DNA, 25 bp, Homo sapien
tctacgtgccgggtccatgttttta

SEQ ID NO: 1740288 - DNA, 25 bp, Homo sapien
ccttctcaaaaatatctacgtgccg

SEQ ID NO: 1740289 - DNA, 25 bp, Homo sapien
aaaatatctacgtgccgggtccatg

SEQ ID NO: 1740290 - DNA, 25 bp, Homo sapien
tcaaaaatatctacgtgccgggtcc

SEQ ID NO: 1740291 - DNA, 25 bp, Homo sapien
gattgagggcatagaaaagcgaaag

SEQ ID NO: 1740292 - DNA, 25 bp, Homo sapien
ctgcttcaagtagtccacatggttt

SEQ ID NO: 1740293 - DNA, 25 bp, Homo sapien
tggcccatggtgtgtgtcattcctt

SEQ ID NO: 1740294 - DNA, 25 bp, Homo sapien
tccttgatgcaagtgataaacccaa

SEQ ID NO: 1740295 - DNA, 25 bp, Homo sapien
tagagagttccagctatcaagtagg

SEQ ID NO: 1740296 - DNA, 25 bp, Homo sapien
tcaagtaggtgcttatgatacagct

SEQ ID NO: 1740297 - DNA, 25 bp, Homo sapien
tcttcagcagtctaattaggtcata

SEQ ID NO: 1740298 - DNA, 25 bp, Homo sapien
gctgaattcaggtatcactgttccc

SEQ ID NO: 1740299 - DNA, 25 bp, Homo sapien
gaaatgactaaatatgttattagaa

SEQ ID NO: 1740300 - DNA, 25 bp, Homo sapien
ttagtcctatcagcaactttctggg

SEQ ID NO: 1740301 - DNA, 25 bp, Homo sapien
taattacaggcttggcagaagagtt

SEQ ID NO: 1740302 - DNA, 25 bp, Homo sapien
tcctgcccaggattggaatcaatta

SEQ ID NO: 1740303 - DNA, 25 bp, Homo sapien
aacaacagccaaaaaccagtgtgca

SEQ ID NO: 1740304 - DNA, 25 bp, Homo sapien
tgtctatcactcatagtatatgagg

SEQ ID NO: 1740305 - DNA, 25 bp, Homo sapien
aaaaggccatgtctatcactcatag

SEQ ID NO: 1740306 - DNA, 25 bp, Homo sapien
ggccatgtctatcactcatagtata

SEQ ID NO: 1740307 - DNA, 25 bp, Homo sapien
taaaaaaggccatgtctatcactca

SEQ ID NO: 1740308 - DNA, 25 bp, Homo sapien
tcaagcattttaccagcttcaggtg

SEQ ID NO: 1740309 - DNA, 25 bp, Homo sapien
gatcttctgagaagtcgacgagttc

SEQ ID NO: 1740310 - DNA, 25 bp, Homo sapien
gattcatcgctatagtttagtctga

SEQ ID NO: 1740311 - DNA, 25 bp, Homo sapien
gtttagtctgattttgcttaagcca

SEQ ID NO: 1740312 - DNA, 25 bp, Homo sapien
ttgtcatcagcgaggaatccatcgt

SEQ ID NO: 1740313 - DNA, 25 bp, Homo sapien
cagttgtcatcagcgaggaatccat

SEQ ID NO: 1740314 - DNA, 25 bp, Homo sapien
gaggaatccatcgtcactgctatca

SEQ ID NO: 1740315 - DNA, 25 bp, Homo sapien
tcagcgaggaatccatcgtcactgc

SEQ ID NO: 1740316 - DNA, 25 bp, Homo sapien
ggactgaaatgattacccattcttc

SEQ ID NO: 1740317 - DNA, 25 bp, Homo sapien
attatgtagttttcaagatacacag

SEQ ID NO: 1740318 - DNA, 25 bp, Homo sapien
ttttaatccctagatagcatgcctc

SEQ ID NO: 1740319 - DNA, 25 bp, Homo sapien
cctgttatgttttatgagcatactt

SEQ ID NO: 1740320 - DNA, 25 bp, Homo sapien
tgggttactccacagccttcaaaga

SEQ ID NO: 1740321 - DNA, 25 bp, Homo sapien
gagcagattgtttaactaccctagg

SEQ ID NO: 1740322 - DNA, 25 bp, Homo sapien
aactttttccagagatggcgtctca

SEQ ID NO: 1740323 - DNA, 25 bp, Homo sapien
tggaacatgtctcttacgtctgcct

SEQ ID NO: 1740324 - DNA, 25 bp, Homo sapien
aaatcccctttgtatgactcagtac

SEQ ID NO: 1740325 - DNA, 25 bp, Homo sapien
aaatgaccaaaagtcgaatacttca

SEQ ID NO: 1740326 - DNA, 25 bp, Homo sapien
tatgactcagtactactgagggaaa

SEQ ID NO: 1740327 - DNA, 25 bp, Homo sapien
gaaccttatagacacatacgaacct

SEQ ID NO: 1740328 - DNA, 25 bp, Homo sapien
ttttgacaacatttgaccgagaagg

SEQ ID NO: 1740329 - DNA, 25 bp, Homo sapien
aagggcctcggagtgagtccataag

SEQ ID NO: 1740330 - DNA, 25 bp, Homo sapien
acatttgaccgagaagggcctcgga

SEQ ID NO: 1740331 - DNA, 25 bp, Homo sapien
tgagtccataagtaggatacaaggt

SEQ ID NO: 1740332 - DNA, 25 bp, Homo sapien
tttggattagagcccttcataacat

SEQ ID NO: 1740333 - DNA, 25 bp, Homo sapien
tgttttgctgtggtacttttggatt

SEQ ID NO: 1740334 - DNA, 25 bp, Homo sapien
tggattagagcccttcataacatct

SEQ ID NO: 1740335 - DNA, 25 bp, Homo sapien
tttgctgtggtacttttggattaga

SEQ ID NO: 1740336 - DNA, 25 bp, Homo sapien
gttccttcgcctaaaggtgcttctg

SEQ ID NO: 1740337 - DNA, 25 bp, Homo sapien
ggtgcttctgttgagtaagtgtcct

SEQ ID NO: 1740338 - DNA, 25 bp, Homo sapien
ttctcattcttggtggaggaaacca

SEQ ID NO: 1740339 - DNA, 25 bp, Homo sapien
caaattcataggtagttcaaaactg

SEQ ID NO: 1740340 - DNA, 25 bp, Homo sapien
aaagtagaaatgacaagtaacagaa

SEQ ID NO: 1740341 - DNA, 25 bp, Homo sapien
aatacatacgcctttggaaattaat

SEQ ID NO: 1740342 - DNA, 25 bp, Homo sapien
tacagacttttacttaatacatacg

SEQ ID NO: 1740343 - DNA, 25 bp, Homo sapien
tacttaatacatacgcctttggaaa

SEQ ID NO: 1740344 - DNA, 25 bp, Homo sapien
cttttacttaatacatacgcctttg

SEQ ID NO: 1740345 - DNA, 25 bp, Homo sapien
tttatttgtgtttagaagttgcaat

SEQ ID NO: 1740346 - DNA, 25 bp, Homo sapien
agaagttgcaattttaggtactatt

SEQ ID NO: 1740347 - DNA, 25 bp, Homo sapien
gttgcaattttaggtactattaaca

SEQ ID NO: 1740348 - DNA, 25 bp, Homo sapien
tatttgtgtttagaagttgcaattt

SEQ ID NO: 1740349 - DNA, 25 bp, Homo sapien
gcacagcaacattaacgggaaggga

SEQ ID NO: 1740350 - DNA, 25 bp, Homo sapien
tgggttcactgaacacaaggcagta

SEQ ID NO: 1740351 - DNA, 25 bp, Homo sapien
ggcagcctccgaagatttcaatata

SEQ ID NO: 1740352 - DNA, 25 bp, Homo sapien
tagttttgaagctcaacctggcagc

SEQ ID NO: 1740353 - DNA, 25 bp, Homo sapien
tctagacaaacagcactacactgag

SEQ ID NO: 1740354 - DNA, 25 bp, Homo sapien
gatggtagggctgggctactttccc

SEQ ID NO: 1740355 - DNA, 25 bp, Homo sapien
tgaagacaataaagaccgctatgct

SEQ ID NO: 1740356 - DNA, 25 bp, Homo sapien
aatgtaccagaaatccctgttggag

SEQ ID NO: 1740357 - DNA, 25 bp, Homo sapien
ctactcgggaagatgaagtgggaga

SEQ ID NO: 1740358 - DNA, 25 bp, Homo sapien
cgggaagatgaagtgggagaatggc

SEQ ID NO: 1740359 - DNA, 25 bp, Homo sapien
ggaagatgaagtgggagaatggcct

SEQ ID NO: 1740360 - DNA, 25 bp, Homo sapien
ctcgggaagatgaagtgggagaatg

SEQ ID NO: 1740361 - DNA, 25 bp, Homo sapien
tttcagcattcctatgatcacaggc

SEQ ID NO: 1740362 - DNA, 25 bp, Homo sapien
ttcttgtccccagtaatgctttcat

SEQ ID NO: 1740363 - DNA, 25 bp, Homo sapien
ggcataattgtatccgttaccctaa

SEQ ID NO: 1740364 - DNA, 25 bp, Homo sapien
catgtggccttgttatgttgcacag

SEQ ID NO: 1740365 - DNA, 25 bp, Homo sapien
gctggcttcctgctcggacagatcc

SEQ ID NO: 1740366 - DNA, 25 bp, Homo sapien
tggagggcgcggtgagaagtgatga

SEQ ID NO: 1740367 - DNA, 25 bp, Homo sapien
gggctacctgtacgggtgaagctgg

SEQ ID NO: 1740368 - DNA, 25 bp, Homo sapien
agtgaagagggcgacgacgcggacg

SEQ ID NO: 1740369 - DNA, 25 bp, Homo sapien
tgcttcagtactcacagggaaaact

SEQ ID NO: 1740370 - DNA, 25 bp, Homo sapien
ggtttcacttgagacatgccttctg

SEQ ID NO: 1740371 - DNA, 25 bp, Homo sapien
gaacattatataatgccggcaaggc

SEQ ID NO: 1740372 - DNA, 25 bp, Homo sapien
gaaaagatcctggttcctctgaaca

SEQ ID NO: 1740373 - DNA, 25 bp, Homo sapien
ttattcatctgctcaaccctgcaca

SEQ ID NO: 1740374 - DNA, 25 bp, Homo sapien
tgcttcttaatctgagtaagatctt

SEQ ID NO: 1740375 - DNA, 25 bp, Homo sapien
cacaatacggcttttccttttctgg

SEQ ID NO: 1740376 - DNA, 25 bp, Homo sapien
tctctcagccagatgtttattcatc

SEQ ID NO: 1740377 - DNA, 25 bp, Homo sapien
gtgtggctgtcattccgaaccttag

SEQ ID NO: 1740378 - DNA, 25 bp, Homo sapien
aacataagcttgatgatggtgggac

SEQ ID NO: 1740379 - DNA, 25 bp, Homo sapien
taaacagcctgcctaccagaatatg

SEQ ID NO: 1740380 - DNA, 25 bp, Homo sapien
ttagttcacagaggtattccgtcac

SEQ ID NO: 1740381 - DNA, 25 bp, Homo sapien
ctgtagcccaggtgacacagtgaga

SEQ ID NO: 1740382 - DNA, 25 bp, Homo sapien
ctgcactgtagcccaggtgacacag

SEQ ID NO: 1740383 - DNA, 25 bp, Homo sapien
gggagactgaggtgccaggatcatc

SEQ ID NO: 1740384 - DNA, 25 bp, Homo sapien
ggagactgaggtgccaggatcatct

SEQ ID NO: 1740385 - DNA, 25 bp, Homo sapien
cacaagttgggttaccggttcagtg

SEQ ID NO: 1740386 - DNA, 25 bp, Homo sapien
aacaagaccttgtgcctataggcta

SEQ ID NO: 1740387 - DNA, 25 bp, Homo sapien
ttaggagaaaactagaggcactctg

SEQ ID NO: 1740388 - DNA, 25 bp, Homo sapien
gactaaaaatctatctgggaggcca

SEQ ID NO: 1740389 - DNA, 25 bp, Homo sapien
tctctacgctttagctcaaatggct

SEQ ID NO: 1740390 - DNA, 25 bp, Homo sapien
ttctggaccggaggcagtggttcat

SEQ ID NO: 1740391 - DNA, 25 bp, Homo sapien
tcctccaagtattccaggtttatcc

SEQ ID NO: 1740392 - DNA, 25 bp, Homo sapien
gacaaaatcattctggaccggaggc

SEQ ID NO: 1740393 - DNA, 25 bp, Homo sapien
tcacagccttacactggttagaaat

SEQ ID NO: 1740394 - DNA, 25 bp, Homo sapien
ttcacagccttacactggttagaaa

SEQ ID NO: 1740395 - DNA, 25 bp, Homo sapien
tttcacagccttacactggttagaa

SEQ ID NO: 1740396 - DNA, 25 bp, Homo sapien
cacagccttacactggttagaaatc

SEQ ID NO: 1740397 - DNA, 25 bp, Homo sapien
ggcaatggcaagatcgcgaatcact

SEQ ID NO: 1740398 - DNA, 25 bp, Homo sapien
aaggcaatggcaagatcgcgaatca

SEQ ID NO: 1740399 - DNA, 25 bp, Homo sapien
gaaggcaatggcaagatcgcgaatc

SEQ ID NO: 1740400 - DNA, 25 bp, Homo sapien
ggaaggcaatggcaagatcgcgaat

SEQ ID NO: 1740401 - DNA, 25 bp, Homo sapien
tcaggtgcatgcaggtaatttttgt

SEQ ID NO: 1740402 - DNA, 25 bp, Homo sapien
tgggaccatcaggtgcatgcaggta

SEQ ID NO: 1740403 - DNA, 25 bp, Homo sapien
ggaccatcaggtgcatgcaggtaat

SEQ ID NO: 1740404 - DNA, 25 bp, Homo sapien
ccatcaggtgcatgcaggtaatttt

SEQ ID NO: 1740405 - DNA, 25 bp, Homo sapien
ggccaagcagaggttgttccaccct

SEQ ID NO: 1740406 - DNA, 25 bp, Homo sapien
tctacttttagatgaggccaagcag

SEQ ID NO: 1740407 - DNA, 25 bp, Homo sapien
ggtacacctgctctactactgcctt

SEQ ID NO: 1740408 - DNA, 25 bp, Homo sapien
tgcagtagagtacaaccctctgact

SEQ ID NO: 1740409 - DNA, 25 bp, Homo sapien
ttttgaaggaggatccacgatctcc

SEQ ID NO: 1740410 - DNA, 25 bp, Homo sapien
cacgatctcctgtttccactatcca

SEQ ID NO: 1740411 - DNA, 25 bp, Homo sapien
gatctcctgtttccactatccactg

SEQ ID NO: 1740412 - DNA, 25 bp, Homo sapien
tgaaggaggatccacgatctcctgt

SEQ ID NO: 1740413 - DNA, 25 bp, Homo sapien
aatatccacaatattgcccatctga

SEQ ID NO: 1740414 - DNA, 25 bp, Homo sapien
catctgtagggtgtggcgcccaaac

SEQ ID NO: 1740415 - DNA, 25 bp, Homo sapien
gctgtcggggccaatatccacaata

SEQ ID NO: 1740416 - DNA, 25 bp, Homo sapien
agggttcaattgttaagctgtcggg

SEQ ID NO: 1740417 - DNA, 25 bp, Homo sapien
cacttggtttatgagagccaaaaat

SEQ ID NO: 1740418 - DNA, 25 bp, Homo sapien
acacttggtttatgagagccaaaaa

SEQ ID NO: 1740419 - DNA, 25 bp, Homo sapien
cttggtttatgagagccaaaaatgt

SEQ ID NO: 1740420 - DNA, 25 bp, Homo sapien
aacacttggtttatgagagccaaaa

SEQ ID NO: 1740421 - DNA, 25 bp, Homo sapien
cagggagtccttcacaactgacata

SEQ ID NO: 1740422 - DNA, 25 bp, Homo sapien
tgctagagtagacaaaaaccactcc

SEQ ID NO: 1740423 - DNA, 25 bp, Homo sapien
gaacagaccatcaaatcattcaggg

SEQ ID NO: 1740424 - DNA, 25 bp, Homo sapien
gattaaaaagcacaattcaagaggg

SEQ ID NO: 1740425 - DNA, 25 bp, Homo sapien
ataaaatttatatgtcattagagaa

SEQ ID NO: 1740426 - DNA, 25 bp, Homo sapien
tgactcatcctaaaaatcaattgtt

SEQ ID NO: 1740427 - DNA, 25 bp, Homo sapien
cataaaatttatatgtcattagaga

SEQ ID NO: 1740428 - DNA, 25 bp, Homo sapien
tctgaatcactttgactcatcctaa

SEQ ID NO: 1740429 - DNA, 25 bp, Homo sapien
tttgatattatggagcagtgtggct

SEQ ID NO: 1740430 - DNA, 25 bp, Homo sapien
ctgtctttactatatcgaactttga

SEQ ID NO: 1740431 - DNA, 25 bp, Homo sapien
cgaactttgatattatggagcagtg

SEQ ID NO: 1740432 - DNA, 25 bp, Homo sapien
tatcgaactttgatattatggagca

SEQ ID NO: 1740433 - DNA, 25 bp, Homo sapien
caatatacattccttataggctgcc

SEQ ID NO: 1740434 - DNA, 25 bp, Homo sapien
ggcatgctttaactcctagagttcg

SEQ ID NO: 1740435 - DNA, 25 bp, Homo sapien
taggctgccttacattgtcttccaa

SEQ ID NO: 1740436 - DNA, 25 bp, Homo sapien
tcaagaggctcagatcaagcatgat

SEQ ID NO: 1740437 - DNA, 25 bp, Homo sapien
caatcagaatgttggcgacatatgt

SEQ ID NO: 1740438 - DNA, 25 bp, Homo sapien
gattcactgcaatcagaatgttggc

SEQ ID NO: 1740439 - DNA, 25 bp, Homo sapien
taggtatgtcaaagtatggattcac

SEQ ID NO: 1740440 - DNA, 25 bp, Homo sapien
caaagtatggattcactgcaatcag

SEQ ID NO: 1740441 - DNA, 25 bp, Homo sapien
caattgcaaagacatgaggtggtct

SEQ ID NO: 1740442 - DNA, 25 bp, Homo sapien
gacatgaggtggtcttgtcccaaga

SEQ ID NO: 1740443 - DNA, 25 bp, Homo sapien
aagacatgaggtggtcttgtcccaa

SEQ ID NO: 1740444 - DNA, 25 bp, Homo sapien
caaagacatgaggtggtcttgtccc

SEQ ID NO: 1740445 - DNA, 25 bp, Homo sapien
tatagtggcatgacttcacctcact

SEQ ID NO: 1740446 - DNA, 25 bp, Homo sapien
tcgtattcaggttctaagggatggg

SEQ ID NO: 1740447 - DNA, 25 bp, Homo sapien
gatgtttgctcgtattcaggttcta

SEQ ID NO: 1740448 - DNA, 25 bp, Homo sapien
ccagtgatgtttgctcgtattcagg

SEQ ID NO: 1740449 - DNA, 25 bp, Homo sapien
attttctgttttgccggctcctgat

SEQ ID NO: 1740450 - DNA, 25 bp, Homo sapien
tgattctccagatacaatgatagac

SEQ ID NO: 1740451 - DNA, 25 bp, Homo sapien
gatagactgactcatcttgagcacc

SEQ ID NO: 1740452 - DNA, 25 bp, Homo sapien
ttcatgtctcgaaaagctttatcag

SEQ ID NO: 1740453 - DNA, 25 bp, Homo sapien
cttgacctgttccataggattcagt

SEQ ID NO: 1740454 - DNA, 25 bp, Homo sapien
atcttgacctgttccataggattca

SEQ ID NO: 1740455 - DNA, 25 bp, Homo sapien
tcttgacctgttccataggattcag

SEQ ID NO: 1740456 - DNA, 25 bp, Homo sapien
ttgacctgttccataggattcagtc

SEQ ID NO: 1740457 - DNA, 25 bp, Homo sapien
ttcacatgccaaaataagaaaacat

SEQ ID NO: 1740458 - DNA, 25 bp, Homo sapien
atttctcctattctatctagagtag

SEQ ID NO: 1740459 - DNA, 25 bp, Homo sapien
tagagtagaatgcttaactagtctc

SEQ ID NO: 1740460 - DNA, 25 bp, Homo sapien
agccttttcaagcagatttctccta

SEQ ID NO: 1740461 - DNA, 25 bp, Homo sapien
ccaaaggcttctaggagtgggttag

SEQ ID NO: 1740462 - DNA, 25 bp, Homo sapien
atttccaaaggcttctaggagtggg

SEQ ID NO: 1740463 - DNA, 25 bp, Homo sapien
tttcccaaatcgactgctattattg

SEQ ID NO: 1740464 - DNA, 25 bp, Homo sapien
tattattgttgcgaacagtcttcgc

SEQ ID NO: 1740465 - DNA, 25 bp, Homo sapien
gagataatgtgaaacaaatcctcca

SEQ ID NO: 1740466 - DNA, 25 bp, Homo sapien
tctttgccttgaacacagatcctag

SEQ ID NO: 1740467 - DNA, 25 bp, Homo sapien
ccgaaaattatctggtgaactcaaa

SEQ ID NO: 1740468 - DNA, 25 bp, Homo sapien
gcaccagcacacaacctataaaaga

SEQ ID NO: 1740469 - DNA, 25 bp, Homo sapien
gtttctttgttagcaaagtatctag

SEQ ID NO: 1740470 - DNA, 25 bp, Homo sapien
gacttttgcggttctgtaaaatctg

SEQ ID NO: 1740471 - DNA, 25 bp, Homo sapien
ttagcaaagtatctagtgcagcctc

SEQ ID NO: 1740472 - DNA, 25 bp, Homo sapien
ctcaggacttttgcggttctgtaaa

SEQ ID NO: 1740473 - DNA, 25 bp, Homo sapien
tagccgtgcacattctaataaaatc

SEQ ID NO: 1740474 - DNA, 25 bp, Homo sapien
tcatctagcagaggatctttcatag

SEQ ID NO: 1740475 - DNA, 25 bp, Homo sapien
ggtgcaggacgccagctactacccg

SEQ ID NO: 1740476 - DNA, 25 bp, Homo sapien
tactacccggaagagatcaagcttt

SEQ ID NO: 1740477 - DNA, 25 bp, Homo sapien
gatgacaaatttcagtggcctggga

SEQ ID NO: 1740478 - DNA, 25 bp, Homo sapien
tacagacagtatgtggtaaagcatc

SEQ ID NO: 1740479 - DNA, 25 bp, Homo sapien
taaagcatctggatcaggagcacgt

SEQ ID NO: 1740480 - DNA, 25 bp, Homo sapien
gacacgaaaaggctaagttccctgc

SEQ ID NO: 1740481 - DNA, 25 bp, Homo sapien
aatattccaaagactgagcagattt

SEQ ID NO: 1740482 - DNA, 25 bp, Homo sapien
tggtcaaacttactcgaagatcatc

SEQ ID NO: 1740483 - DNA, 25 bp, Homo sapien
cccctgctgttgttagcatgactct

SEQ ID NO: 1740484 - DNA, 25 bp, Homo sapien
gaagatcatcttggtccaaacccag

SEQ ID NO: 1740485 - DNA, 25 bp, Homo sapien
tttgccagggcatcacgagcattgt

SEQ ID NO: 1740486 - DNA, 25 bp, Homo sapien
tcaaaaagatggctatacactgtct

SEQ ID NO: 1740487 - DNA, 25 bp, Homo sapien
cacgagcattgtttgcttgctccac

SEQ ID NO: 1740488 - DNA, 25 bp, Homo sapien
ctgatttactctgtttaccacatga

SEQ ID NO: 1740489 - DNA, 25 bp, Homo sapien
ttttcattgcaatagttgatgcaaa

SEQ ID NO: 1740490 - DNA, 25 bp, Homo sapien
tttcattgcaatagttgatgcaaaa

SEQ ID NO: 1740491 - DNA, 25 bp, Homo sapien
attgcaatagttgatgcaaaattgt

SEQ ID NO: 1740492 - DNA, 25 bp, Homo sapien
tcattgcaatagttgatgcaaaatt

SEQ ID NO: 1740493 - DNA, 25 bp, Homo sapien
cacataatgcacttcattaacacct

SEQ ID NO: 1740494 - DNA, 25 bp, Homo sapien
attatccacataatgcacttcatta

SEQ ID NO: 1740495 - DNA, 25 bp, Homo sapien
cataatgcacttcattaacacctaa

SEQ ID NO: 1740496 - DNA, 25 bp, Homo sapien
tccacataatgcacttcattaacac

SEQ ID NO: 1740497 - DNA, 25 bp, Homo sapien
gtcgaaaatgatccttgtgcttttg

SEQ ID NO: 1740498 - DNA, 25 bp, Homo sapien
gggaaggcgattttcttcatccaaa

SEQ ID NO: 1740499 - DNA, 25 bp, Homo sapien
gatgtaaagtgttgatcacttggct

SEQ ID NO: 1740500 - DNA, 25 bp, Homo sapien
agtgagtcgaaaatgatccttgtgc

SEQ ID NO: 1740501 - DNA, 25 bp, Homo sapien
gaggaagatcgcacacatgagcatg

SEQ ID NO: 1740502 - DNA, 25 bp, Homo sapien
agtaatgtgccaacacattaacaag

SEQ ID NO: 1740503 - DNA, 25 bp, Homo sapien
agggaggaagatcgcacacatgagc

SEQ ID NO: 1740504 - DNA, 25 bp, Homo sapien
caacacattaacaaggctgagggag

SEQ ID NO: 1740505 - DNA, 25 bp, Homo sapien
aactgccagcttagattttctggga

SEQ ID NO: 1740506 - DNA, 25 bp, Homo sapien
gatattcctatgaactgccagctta

SEQ ID NO: 1740507 - DNA, 25 bp, Homo sapien
tgcccccgcaaaatgcctgataatg

SEQ ID NO: 1740508 - DNA, 25 bp, Homo sapien
taatgaagccttcgtcgtctctgat

SEQ ID NO: 1740509 - DNA, 25 bp, Homo sapien
ctctggattcacatattaaggattc

SEQ ID NO: 1740510 - DNA, 25 bp, Homo sapien
tgttgttatttgtggatgattcaaa

SEQ ID NO: 1740511 - DNA, 25 bp, Homo sapien
cttaaacttgtttcccacgctgatg

SEQ ID NO: 1740512 - DNA, 25 bp, Homo sapien
tgtttcccacgctgatgaagctaag

SEQ ID NO: 1740513 - DNA, 25 bp, Homo sapien
ctctctagccatcccgagctggact

SEQ ID NO: 1740514 - DNA, 25 bp, Homo sapien
gagctggactactccagctaaaaca

SEQ ID NO: 1740515 - DNA, 25 bp, Homo sapien
tcccgagctggactactccagctaa

SEQ ID NO: 1740516 - DNA, 25 bp, Homo sapien
gctttcctctctcaactcaactagt

SEQ ID NO: 1740517 - DNA, 25 bp, Homo sapien
ttcgaagtttatccagaagcaaatt

SEQ ID NO: 1740518 - DNA, 25 bp, Homo sapien
tacttcgaagtttatccagaagcaa

SEQ ID NO: 1740519 - DNA, 25 bp, Homo sapien
acttcgaagtttatccagaagcaaa

SEQ ID NO: 1740520 - DNA, 25 bp, Homo sapien
agtacttcgaagtttatccagaagc

SEQ ID NO: 1740521 - DNA, 25 bp, Homo sapien
ctaataatagttttagatgacccat

SEQ ID NO: 1740522 - DNA, 25 bp, Homo sapien
taatagttttagatgacccataaaa

SEQ ID NO: 1740523 - DNA, 25 bp, Homo sapien
taataatagttttagatgacccata

SEQ ID NO: 1740524 - DNA, 25 bp, Homo sapien
aataatagttttagatgacccataa

SEQ ID NO: 1740525 - DNA, 25 bp, Homo sapien
gacagaatttgagcaccttcaaagt

SEQ ID NO: 1740526 - DNA, 25 bp, Homo sapien
catctttaagttaggtttgatgcaa

SEQ ID NO: 1740527 - DNA, 25 bp, Homo sapien
tgatgcaacgaataaagcttgctcc

SEQ ID NO: 1740528 - DNA, 25 bp, Homo sapien
atttgagcaccttcaaagtggtggc

SEQ ID NO: 1740529 - DNA, 25 bp, Homo sapien
ctagattcacgaacaagcacaaagc

SEQ ID NO: 1740530 - DNA, 25 bp, Homo sapien
agattcacgaacaagcacaaagcac

SEQ ID NO: 1740531 - DNA, 25 bp, Homo sapien
cactgttcggaagtccaaaataatt

SEQ ID NO: 1740532 - DNA, 25 bp, Homo sapien
cacaaagcactgtcaatcactgttc

SEQ ID NO: 1740533 - DNA, 25 bp, Homo sapien
tacaaaatagtcttggatccaatct

SEQ ID NO: 1740534 - DNA, 25 bp, Homo sapien
tgtacatgttgtagagttcatgaaa

SEQ ID NO: 1740535 - DNA, 25 bp, Homo sapien
gggtaaccaccctgcatcaagtcca

SEQ ID NO: 1740536 - DNA, 25 bp, Homo sapien
ttcatgaaatgaagctcgtgatggg

SEQ ID NO: 1740537 - DNA, 25 bp, Homo sapien
tcatttaagcccaaagctttaaaca

SEQ ID NO: 1740538 - DNA, 25 bp, Homo sapien
taacccaaacttgtagtcattttca

SEQ ID NO: 1740539 - DNA, 25 bp, Homo sapien
agtggtcagggtcagacttcatgat

SEQ ID NO: 1740540 - DNA, 25 bp, Homo sapien
gactgagagtgagcaccactgaact

SEQ ID NO: 1740541 - DNA, 25 bp, Homo sapien
tttcttccagcgactgcatgtgagc

SEQ ID NO: 1740542 - DNA, 25 bp, Homo sapien
gccagtgattgactcttttaaccaa

SEQ ID NO: 1740543 - DNA, 25 bp, Homo sapien
gatctcatcaaaagacagcttgttc

SEQ ID NO: 1740544 - DNA, 25 bp, Homo sapien
gactgcagtaacaaagctgggtgca

SEQ ID NO: 1740545 - DNA, 25 bp, Homo sapien
caaatgcagtggtgactcactatgg

SEQ ID NO: 1740546 - DNA, 25 bp, Homo sapien
ttctctgggcaactacaaatgcagt

SEQ ID NO: 1740547 - DNA, 25 bp, Homo sapien
tcttgcaaagccacattcgaatagt

SEQ ID NO: 1740548 - DNA, 25 bp, Homo sapien
gtctcctcttgcaaagccacattcg

SEQ ID NO: 1740549 - DNA, 25 bp, Homo sapien
gcaggcttcagctcgatattttatt

SEQ ID NO: 1740550 - DNA, 25 bp, Homo sapien
ttgcattttaatgcaggcttcagct

SEQ ID NO: 1740551 - DNA, 25 bp, Homo sapien
agtgtgcccaccttaaccagaccat

SEQ ID NO: 1740552 - DNA, 25 bp, Homo sapien
ctgtttattcatctcgggttttcca

SEQ ID NO: 1740553 - DNA, 25 bp, Homo sapien
atctttcaacacactgactacctca

SEQ ID NO: 1740554 - DNA, 25 bp, Homo sapien
tgactacctcattaaatttatcaag

SEQ ID NO: 1740555 - DNA, 25 bp, Homo sapien
catggtgggtttgatgcacagatca

SEQ ID NO: 1740556 - DNA, 25 bp, Homo sapien
accatgtatggcctccaacttttat

SEQ ID NO: 1740557 - DNA, 25 bp, Homo sapien
taatttcagggatgcacgtgcagga

SEQ ID NO: 1740558 - DNA, 25 bp, Homo sapien
tgccatggtgggtttgatgcacaga

SEQ ID NO: 1740559 - DNA, 25 bp, Homo sapien
aatgcactgaggagttcctctgagc

SEQ ID NO: 1740560 - DNA, 25 bp, Homo sapien
ttttctgtaatgcactgaggagttc

SEQ ID NO: 1740561 - DNA, 25 bp, Homo sapien
ccatttcttcttgaatacgcctcag

SEQ ID NO: 1740562 - DNA, 25 bp, Homo sapien
gagcttttaaccagtgcatcatatt

SEQ ID NO: 1740563 - DNA, 25 bp, Homo sapien
gaatgcgtttttcatcatcttccct

SEQ ID NO: 1740564 - DNA, 25 bp, Homo sapien
tctctttgcttccatctcaagtttc

SEQ ID NO: 1740565 - DNA, 25 bp, Homo sapien
tttctctttgcttccatctcaagtt

SEQ ID NO: 1740566 - DNA, 25 bp, Homo sapien
ttgaatgcgtttttcatcatcttcc

SEQ ID NO: 1740567 - DNA, 25 bp, Homo sapien
gctcctgctccagaactgcttgctg

SEQ ID NO: 1740568 - DNA, 25 bp, Homo sapien
gcgctcctgctccagaactgcttgc

SEQ ID NO: 1740569 - DNA, 25 bp, Homo sapien
tcctgctccagaactgcttgctgtt

SEQ ID NO: 1740570 - DNA, 25 bp, Homo sapien
gctccagaactgcttgctgttggga

SEQ ID NO: 1740571 - DNA, 25 bp, Homo sapien
agcaaaggagagagcgctatacccc

SEQ ID NO: 1740572 - DNA, 25 bp, Homo sapien
gcaaaggagagagcgctatacccca

SEQ ID NO: 1740573 - DNA, 25 bp, Homo sapien
caaaggagagagcgctataccccac

SEQ ID NO: 1740574 - DNA, 25 bp, Homo sapien
aagcaaaggagagagcgctataccc

SEQ ID NO: 1740575 - DNA, 25 bp, Homo sapien
gaggcattgcagagtagagttctca

SEQ ID NO: 1740576 - DNA, 25 bp, Homo sapien
gctcaaatatatcagggccttcaga

SEQ ID NO: 1740577 - DNA, 25 bp, Homo sapien
ggtgtctacctaatatactatactc

SEQ ID NO: 1740578 - DNA, 25 bp, Homo sapien
gagttctcatttcaactgacaggat

SEQ ID NO: 1740579 - DNA, 25 bp, Homo sapien
tttaagctcggaaaagcatggttac

SEQ ID NO: 1740580 - DNA, 25 bp, Homo sapien
gtgtctatgtgcctctcagtatata

SEQ ID NO: 1740581 - DNA, 25 bp, Homo sapien
acaaggaaacatcgccatctagtgg

SEQ ID NO: 1740582 - DNA, 25 bp, Homo sapien
taattaatgcctctacatactaaat

SEQ ID NO: 1740583 - DNA, 25 bp, Homo sapien
agtataaaataaccacgacgaccag

SEQ ID NO: 1740584 - DNA, 25 bp, Homo sapien
cctaggcggctagtcagttacacat

SEQ ID NO: 1740585 - DNA, 25 bp, Homo sapien
tggttcgtttaagagcctgccctag

SEQ ID NO: 1740586 - DNA, 25 bp, Homo sapien
ctcacagacatcagggatagcagct

SEQ ID NO: 1740587 - DNA, 25 bp, Homo sapien
agaagttaccggataggaatccaag

SEQ ID NO: 1740588 - DNA, 25 bp, Homo sapien
ttagaagttaccggataggaatcca

SEQ ID NO: 1740589 - DNA, 25 bp, Homo sapien
tagaagttaccggataggaatccaa

SEQ ID NO: 1740590 - DNA, 25 bp, Homo sapien
ccatctctttgcatcaagaatcata

SEQ ID NO: 1740591 - DNA, 25 bp, Homo sapien
tctggattgtgcaaatttgtgtttc

SEQ ID NO: 1740592 - DNA, 25 bp, Homo sapien
gaatcatatgtgtaattgattgaaa

SEQ ID NO: 1740593 - DNA, 25 bp, Homo sapien
tttcagaacatatgacatacataga

SEQ ID NO: 1740594 - DNA, 25 bp, Homo sapien
tgtcattttgggtcttgttccatca

SEQ ID NO: 1740595 - DNA, 25 bp, Homo sapien
gtcattttgggtcttgttccatcat

SEQ ID NO: 1740596 - DNA, 25 bp, Homo sapien
tcattttgggtcttgttccatcatt

SEQ ID NO: 1740597 - DNA, 25 bp, Homo sapien
ggtgtcattttgggtcttgttccat

SEQ ID NO: 1740598 - DNA, 25 bp, Homo sapien
cacagaatttgtctagggcttacgc

SEQ ID NO: 1740599 - DNA, 25 bp, Homo sapien
gagtatactcctggcatctgctgag

SEQ ID NO: 1740600 - DNA, 25 bp, Homo sapien
gaagaactactccatgccccattta

SEQ ID NO: 1740601 - DNA, 25 bp, Homo sapien
caccttagacactgattgcgggctt

SEQ ID NO: 1740602 - DNA, 25 bp, Homo sapien
ggatttttgcaccagagttgcttag

SEQ ID NO: 1740603 - DNA, 25 bp, Homo sapien
ggcacaatggtgaaaaccacaagct

SEQ ID NO: 1740604 - DNA, 25 bp, Homo sapien
aatggactaatgaaagatctgaggc

SEQ ID NO: 1740605 - DNA, 25 bp, Homo sapien
tcaacaaatctagccgtaacacaca

SEQ ID NO: 1740606 - DNA, 25 bp, Homo sapien
ctactcaaaaattctgacatttctt

SEQ ID NO: 1740607 - DNA, 25 bp, Homo sapien
attctgacatttctttggccatttg

SEQ ID NO: 1740608 - DNA, 25 bp, Homo sapien
tctgacatttctttggccatttgtt

SEQ ID NO: 1740609 - DNA, 25 bp, Homo sapien
tgacatttctttggccatttgttcc

SEQ ID NO: 1740610 - DNA, 25 bp, Homo sapien
caaatggaagatccatgggtaggaa

SEQ ID NO: 1740611 - DNA, 25 bp, Homo sapien
gaatcaatatcgtgaaaatggccat

SEQ ID NO: 1740612 - DNA, 25 bp, Homo sapien
aacaaatggaagatccatgggtagg

SEQ ID NO: 1740613 - DNA, 25 bp, Homo sapien
caaacaaatggaagatccatgggta

SEQ ID NO: 1740614 - DNA, 25 bp, Homo sapien
aattctttgacatagtgattcttag

SEQ ID NO: 1740615 - DNA, 25 bp, Homo sapien
gaataatgtggaggcacgagccaag

SEQ ID NO: 1740616 - DNA, 25 bp, Homo sapien
aagaataatgtggaggcacgagcca

SEQ ID NO: 1740617 - DNA, 25 bp, Homo sapien
taatgtggaggcacgagccaagatg

SEQ ID NO: 1740618 - DNA, 25 bp, Homo sapien
tttaagctcaaggtaacgagaagcg

SEQ ID NO: 1740619 - DNA, 25 bp, Homo sapien
tttcaaaacagtgctacgcagtgct

SEQ ID NO: 1740620 - DNA, 25 bp, Homo sapien
aaatattgcttcttaggtgtgacac

SEQ ID NO: 1740621 - DNA, 25 bp, Homo sapien
tttgaaagataacagccatcctggc

SEQ ID NO: 1740622 - DNA, 25 bp, Homo sapien
cctggagagactgcggaaatctaca

SEQ ID NO: 1740623 - DNA, 25 bp, Homo sapien
gaaatctacagatggccaaactcca

SEQ ID NO: 1740624 - DNA, 25 bp, Homo sapien
tcaagtcagctaaaagaacggatgg

SEQ ID NO: 1740625 - DNA, 25 bp, Homo sapien
gagcaatgaggctgcacagtgcgat

SEQ ID NO: 1740626 - DNA, 25 bp, Homo sapien
tgcatgtttaaaccagaaacatgaa

SEQ ID NO: 1740627 - DNA, 25 bp, Homo sapien
accagaaacatgaagaaaacattga

SEQ ID NO: 1740628 - DNA, 25 bp, Homo sapien
ttttgcatgtttaaaccagaaacat

SEQ ID NO: 1740629 - DNA, 25 bp, Homo sapien
aaccagaaacatgaagaaaacattg

SEQ ID NO: 1740630 - DNA, 25 bp, Homo sapien
cacgtagttctgcatatttccattt

SEQ ID NO: 1740631 - DNA, 25 bp, Homo sapien
cacaagaagtattgatggtatcacg

SEQ ID NO: 1740632 - DNA, 25 bp, Homo sapien
gatcatatttcttagtaccagcagc

SEQ ID NO: 1740633 - DNA, 25 bp, Homo sapien
tttggtggctagtacagcaggacct

SEQ ID NO: 1740634 - DNA, 25 bp, Homo sapien
cgaaggcaacaagtcttgacaatag

SEQ ID NO: 1740635 - DNA, 25 bp, Homo sapien
cattaagcaatttgtcgaaggcaac

SEQ ID NO: 1740636 - DNA, 25 bp, Homo sapien
tatgcagatatactcaatggaggaa

SEQ ID NO: 1740637 - DNA, 25 bp, Homo sapien
tatgaaggaattgcatcagaaacat

SEQ ID NO: 1740638 - DNA, 25 bp, Homo sapien
gagcacgttgctctgtttcagtatt

SEQ ID NO: 1740639 - DNA, 25 bp, Homo sapien
taatcagtaacagactttggagcac

SEQ ID NO: 1740640 - DNA, 25 bp, Homo sapien
tttagtctcctatgaaattcttctc

SEQ ID NO: 1740641 - DNA, 25 bp, Homo sapien
gatttccaagcatgatacactttta

SEQ ID NO: 1740642 - DNA, 25 bp, Homo sapien
gccttccaatcgaggtggtgactga

SEQ ID NO: 1740643 - DNA, 25 bp, Homo sapien
aactgttaaatgagcatttttctaa

SEQ ID NO: 1740644 - DNA, 25 bp, Homo sapien
aatttataaagccttccaatcgagg

SEQ ID NO: 1740645 - DNA, 25 bp, Homo sapien
caatcgaggtggtgactgaaaagta

SEQ ID NO: 1740646 - DNA, 25 bp, Homo sapien
gaattgttcaaaaatggtgcaaaat

SEQ ID NO: 1740647 - DNA, 25 bp, Homo sapien
tgaattgttcaaaaatggtgcaaaa

SEQ ID NO: 1740648 - DNA, 25 bp, Homo sapien
gtgaattgttcaaaaatggtgcaaa

SEQ ID NO: 1740649 - DNA, 25 bp, Homo sapien
ttagctcatgagttaccacccattg

SEQ ID NO: 1740650 - DNA, 25 bp, Homo sapien
catgagttaccacccattgacttac

SEQ ID NO: 1740651 - DNA, 25 bp, Homo sapien
tccagttagctcatgagttaccacc

SEQ ID NO: 1740652 - DNA, 25 bp, Homo sapien
atcttccagttagctcatgagttac

SEQ ID NO: 1740653 - DNA, 25 bp, Homo sapien
tcccagagctacttacagttcagtg

SEQ ID NO: 1740654 - DNA, 25 bp, Homo sapien
gcaaagctatatatccctatgaagg

SEQ ID NO: 1740655 - DNA, 25 bp, Homo sapien
ctatgaaggaacgagaggcccggtt

SEQ ID NO: 1740656 - DNA, 25 bp, Homo sapien
catatgatataaagccaagaagagc

SEQ ID NO: 1740657 - DNA, 25 bp, Homo sapien
gccgggcaatccatggtccatcaaa

SEQ ID NO: 1740658 - DNA, 25 bp, Homo sapien
ttcatttcaatctcccgctgcctgg

SEQ ID NO: 1740659 - DNA, 25 bp, Homo sapien
gatggagttccatttgccgggcaat

SEQ ID NO: 1740660 - DNA, 25 bp, Homo sapien
catcaaaatgggcataccaccagcc

SEQ ID NO: 1740661 - DNA, 25 bp, Homo sapien
cacagcgttcccagatttcttcaaa

SEQ ID NO: 1740662 - DNA, 25 bp, Homo sapien
ttggcaagatctcagcaccacgctt

SEQ ID NO: 1740663 - DNA, 25 bp, Homo sapien
ataggtgggccgagcctgtctgctc

SEQ ID NO: 1740664 - DNA, 25 bp, Homo sapien
gctctcaatcgcattctgaaggtac

SEQ ID NO: 1740665 - DNA, 25 bp, Homo sapien
ccagctgtaaggctggtgtgcaaca

SEQ ID NO: 1740666 - DNA, 25 bp, Homo sapien
gttttgggaattacagcgggataca

SEQ ID NO: 1740667 - DNA, 25 bp, Homo sapien
cctagagaacaattacgatggatgt

SEQ ID NO: 1740668 - DNA, 25 bp, Homo sapien
caaactaagacactgcaaaggagga

SEQ ID NO: 1740669 - DNA, 25 bp, Homo sapien
gaatcaatactaacagcacacaaag

SEQ ID NO: 1740670 - DNA, 25 bp, Homo sapien
gatgttggaagcagaacacttacta

SEQ ID NO: 1740671 - DNA, 25 bp, Homo sapien
tcataaatattaggcttaaagctgc

SEQ ID NO: 1740672 - DNA, 25 bp, Homo sapien
tatgtcagcataactccttgatgta

SEQ ID NO: 1740673 - DNA, 25 bp, Homo sapien
caatcacagggacgaaatgacccga

SEQ ID NO: 1740674 - DNA, 25 bp, Homo sapien
tcatttcaaaggttagggtctctaa

SEQ ID NO: 1740675 - DNA, 25 bp, Homo sapien
ggtgaagctatgcagtaatacagcc

SEQ ID NO: 1740676 - DNA, 25 bp, Homo sapien
cactagtcagctgggaaatacttcc

SEQ ID NO: 1740677 - DNA, 25 bp, Homo sapien
taacctggcatgcatgggcttgact

SEQ ID NO: 1740678 - DNA, 25 bp, Homo sapien
ctacatatttggatcgctgagaacc

SEQ ID NO: 1740679 - DNA, 25 bp, Homo sapien
tgaacatcatttaggacaccactcc

SEQ ID NO: 1740680 - DNA, 25 bp, Homo sapien
aaaggaggcaggtctatcactaaca

SEQ ID NO: 1740681 - DNA, 25 bp, Homo sapien
tacaccgggcatatcttgatccaag

SEQ ID NO: 1740682 - DNA, 25 bp, Homo sapien
gaccttctccagtatggcagtgcca

SEQ ID NO: 1740683 - DNA, 25 bp, Homo sapien
cagaatgcctatttactgctgacct

SEQ ID NO: 1740684 - DNA, 25 bp, Homo sapien
gcagtgccattcctatgtgctaaga

SEQ ID NO: 1740685 - DNA, 25 bp, Homo sapien
tactcagagaagtgctcccagcaga

SEQ ID NO: 1740686 - DNA, 25 bp, Homo sapien
tacctactgggcacaatgtatgctt

SEQ ID NO: 1740687 - DNA, 25 bp, Homo sapien
gaataaccgacattggagactccag

SEQ ID NO: 1740688 - DNA, 25 bp, Homo sapien
gaattgaactaaagcgtactcagag

SEQ ID NO: 1740689 - DNA, 25 bp, Homo sapien
gatagaagcatgataggctgaccaa

SEQ ID NO: 1740690 - DNA, 25 bp, Homo sapien
gaatggtggcaagaggttacctacc

SEQ ID NO: 1740691 - DNA, 25 bp, Homo sapien
tagtgccccatgagggttacaaacc

SEQ ID NO: 1740692 - DNA, 25 bp, Homo sapien
tgtgtgcataccaaagtgaagatct

SEQ ID NO: 1740693 - DNA, 25 bp, Homo sapien
gactccaaatcttgagtattatgaa

SEQ ID NO: 1740694 - DNA, 25 bp, Homo sapien
tccactgatgaacaacaggttgact

SEQ ID NO: 1740695 - DNA, 25 bp, Homo sapien
tgatgaacaacaggttgactccaaa

SEQ ID NO: 1740696 - DNA, 25 bp, Homo sapien
caacaggttgactccaaatcttgag

SEQ ID NO: 1740697 - DNA, 25 bp, Homo sapien
agaacttatcccacctacctaattg

SEQ ID NO: 1740698 - DNA, 25 bp, Homo sapien
ccacgagtgagagcttgcagtattt

SEQ ID NO: 1740699 - DNA, 25 bp, Homo sapien
tttgtacccactgaccaatctctct

SEQ ID NO: 1740700 - DNA, 25 bp, Homo sapien
aaaaaatttaactgacacacaattg

SEQ ID NO: 1740701 - DNA, 25 bp, Homo sapien
agcatttccatctgcaattgactgt

SEQ ID NO: 1740702 - DNA, 25 bp, Homo sapien
gcatttccatctgcaattgactgta

SEQ ID NO: 1740703 - DNA, 25 bp, Homo sapien
tcagttgagagaattcactatgttc

SEQ ID NO: 1740704 - DNA, 25 bp, Homo sapien
ttgagagaattcactatgttcagac

SEQ ID NO: 1740705 - DNA, 25 bp, Homo sapien
ccaatgtgtaaagaacgaacggact

SEQ ID NO: 1740706 - DNA, 25 bp, Homo sapien
gaagcggagtgtcgctgcaaaccag

SEQ ID NO: 1740707 - DNA, 25 bp, Homo sapien
caagttcctggcctgcggcgaattt

SEQ ID NO: 1740708 - DNA, 25 bp, Homo sapien
tgcaaaccaggatatgacagccagg

SEQ ID NO: 1740709 - DNA, 25 bp, Homo sapien
ggcacatccaagtcaacagatacat

SEQ ID NO: 1740710 - DNA, 25 bp, Homo sapien
actgactgatccttcactgtgagct

SEQ ID NO: 1740711 - DNA, 25 bp, Homo sapien
gccttcagggagcatatatgttcct

SEQ ID NO: 1740712 - DNA, 25 bp, Homo sapien
tgttgcaaagtactctgtgtaaggg

SEQ ID NO: 1740713 - DNA, 25 bp, Homo sapien
tgtctatatattcggaaatttccaa

SEQ ID NO: 1740714 - DNA, 25 bp, Homo sapien
ccttgggcagatttgactgtttttt

SEQ ID NO: 1740715 - DNA, 25 bp, Homo sapien
cctgtctatatattcggaaatttcc

SEQ ID NO: 1740716 - DNA, 25 bp, Homo sapien
ggcagatttgactgttttttaggat

SEQ ID NO: 1740717 - DNA, 25 bp, Homo sapien
tggggctggcattgtataagtttgt

SEQ ID NO: 1740718 - DNA, 25 bp, Homo sapien
ctaaggccacagattggggctggca

SEQ ID NO: 1740719 - DNA, 25 bp, Homo sapien
gattggggctggcattgtataagtt

SEQ ID NO: 1740720 - DNA, 25 bp, Homo sapien
ctctaaggccacagattggggctgg

SEQ ID NO: 1740721 - DNA, 25 bp, Homo sapien
gaagtataaccagattttcttctgc

SEQ ID NO: 1740722 - DNA, 25 bp, Homo sapien
gtcaagaagtataaccagattttct

SEQ ID NO: 1740723 - DNA, 25 bp, Homo sapien
aagaagtataaccagattttcttct

SEQ ID NO: 1740724 - DNA, 25 bp, Homo sapien
ctgtcaagaagtataaccagatttt

SEQ ID NO: 1740725 - DNA, 25 bp, Homo sapien
aaatatggaactctttatgagtttc

SEQ ID NO: 1740726 - DNA, 25 bp, Homo sapien
tatacaagggccattttaatccacc

SEQ ID NO: 1740727 - DNA, 25 bp, Homo sapien
ccatgtcattcttatacaagggcca

SEQ ID NO: 1740728 - DNA, 25 bp, Homo sapien
gtcattcttatacaagggccatttt

SEQ ID NO: 1740729 - DNA, 25 bp, Homo sapien
cagcagacacctgggtttcagcctt

SEQ ID NO: 1740730 - DNA, 25 bp, Homo sapien
cctttgtagcagggaggagccagca

SEQ ID NO: 1740731 - DNA, 25 bp, Homo sapien
gccagcagacacctgggtttcagcc

SEQ ID NO: 1740732 - DNA, 25 bp, Homo sapien
cagacacctgggtttcagccttcat

SEQ ID NO: 1740733 - DNA, 25 bp, Homo sapien
ggaaattcctccacttcacgtccat

SEQ ID NO: 1740734 - DNA, 25 bp, Homo sapien
caggaaattcctccacttcacgtcc

SEQ ID NO: 1740735 - DNA, 25 bp, Homo sapien
tcttcaaccaggaaattcctccact

SEQ ID NO: 1740736 - DNA, 25 bp, Homo sapien
ctgtttctttcttcaaccaggaaat

SEQ ID NO: 1740737 - DNA, 25 bp, Homo sapien
tagcttctccctaaatgttatgaaa

SEQ ID NO: 1740738 - DNA, 25 bp, Homo sapien
caattacagaagacattagaagcaa

SEQ ID NO: 1740739 - DNA, 25 bp, Homo sapien
aattacagaagacattagaagcaag

SEQ ID NO: 1740740 - DNA, 25 bp, Homo sapien
gacaattacagaagacattagaagc

SEQ ID NO: 1740741 - DNA, 25 bp, Homo sapien
ttttgaacgggctctaaagaatcca

SEQ ID NO: 1740742 - DNA, 25 bp, Homo sapien
gctctaaagaatccactcgggagtt

SEQ ID NO: 1740743 - DNA, 25 bp, Homo sapien
gaatccactcgggagttctggcgag

SEQ ID NO: 1740744 - DNA, 25 bp, Homo sapien
ccactcgggagttctggcgagttac

SEQ ID NO: 1740745 - DNA, 25 bp, Homo sapien
tctccaacagtcctactgatccatg

SEQ ID NO: 1740746 - DNA, 25 bp, Homo sapien
tcttgttgtgagcagttaccaaaac

SEQ ID NO: 1740747 - DNA, 25 bp, Homo sapien
ggtctgaccagcacagcgtgatctt

SEQ ID NO: 1740748 - DNA, 25 bp, Homo sapien
ttcatcaacaagactgtttctccag

SEQ ID NO: 1740749 - DNA, 25 bp, Homo sapien
gcaaaaatcaaacctcggagcatga

SEQ ID NO: 1740750 - DNA, 25 bp, Homo sapien
tgacccctacttatcgctacaatct

SEQ ID NO: 1740751 - DNA, 25 bp, Homo sapien
cacttttgcctgaacttaccctata

SEQ ID NO: 1740752 - DNA, 25 bp, Homo sapien
tttccctcaagactcaatccaaggc

SEQ ID NO: 1740753 - DNA, 25 bp, Homo sapien
tattccagtattccagaggcaagat

SEQ ID NO: 1740754 - DNA, 25 bp, Homo sapien
gaggcaagatacactcagaggtcac

SEQ ID NO: 1740755 - DNA, 25 bp, Homo sapien
tacactcagaggtcacatatccact

SEQ ID NO: 1740756 - DNA, 25 bp, Homo sapien
tattccagaggcaagatacactcag

SEQ ID NO: 1740757 - DNA, 25 bp, Homo sapien
gtgacaatcttcacataggaatcac

SEQ ID NO: 1740758 - DNA, 25 bp, Homo sapien
cagtgacaatcttcacataggaatc

SEQ ID NO: 1740759 - DNA, 25 bp, Homo sapien
agtgacaatcttcacataggaatca

SEQ ID NO: 1740760 - DNA, 25 bp, Homo sapien
ccagtgacaatcttcacataggaat

SEQ ID NO: 1740761 - DNA, 25 bp, Homo sapien
taccgcagctctttcagtgctacat

SEQ ID NO: 1740762 - DNA, 25 bp, Homo sapien
tcattgaccattataaaatgcttta

SEQ ID NO: 1740763 - DNA, 25 bp, Homo sapien
tttctaatcatgtctatgaaagccc

SEQ ID NO: 1740764 - DNA, 25 bp, Homo sapien
tctagaataattggatagttaccct

SEQ ID NO: 1740765 - DNA, 25 bp, Homo sapien
tcagacctcggctagaatactgcat

SEQ ID NO: 1740766 - DNA, 25 bp, Homo sapien
tctgactcagacctcggctagaata

SEQ ID NO: 1740767 - DNA, 25 bp, Homo sapien
tgactcagacctcggctagaatact

SEQ ID NO: 1740768 - DNA, 25 bp, Homo sapien
actcagacctcggctagaatactgc

SEQ ID NO: 1740769 - DNA, 25 bp, Homo sapien
taaaccacgtatttcttatggtaca

SEQ ID NO: 1740770 - DNA, 25 bp, Homo sapien
tgtgtaaaccacgtatttcttatgg

SEQ ID NO: 1740771 - DNA, 25 bp, Homo sapien
tgtaaaccacgtatttcttatggta

SEQ ID NO: 1740772 - DNA, 25 bp, Homo sapien
ttgtgtaaaccacgtatttcttatg

SEQ ID NO: 1740773 - DNA, 25 bp, Homo sapien
tgtaaacagaagagggcaagacaca

SEQ ID NO: 1740774 - DNA, 25 bp, Homo sapien
ttatgtaaacagaagagggcaagac

SEQ ID NO: 1740775 - DNA, 25 bp, Homo sapien
tatgtaaacagaagagggcaagaca

SEQ ID NO: 1740776 - DNA, 25 bp, Homo sapien
gtaaacagaagagggcaagacacac

SEQ ID NO: 1740777 - DNA, 25 bp, Homo sapien
aaaagagcactttgtgggtaggagc

SEQ ID NO: 1740778 - DNA, 25 bp, Homo sapien
ataaaaaagagcactttgtgggtag

SEQ ID NO: 1740779 - DNA, 25 bp, Homo sapien
agagcactttgtgggtaggagcagg

SEQ ID NO: 1740780 - DNA, 25 bp, Homo sapien
gcactttgtgggtaggagcagggtc

SEQ ID NO: 1740781 - DNA, 25 bp, Homo sapien
cagtaagggttccagaattcttaag

SEQ ID NO: 1740782 - DNA, 25 bp, Homo sapien
aattcttaagcaacagtgacacttc

SEQ ID NO: 1740783 - DNA, 25 bp, Homo sapien
tggcagtaagggttccagaattctt

SEQ ID NO: 1740784 - DNA, 25 bp, Homo sapien
caacagtgacacttcaaaagcttta

SEQ ID NO: 1740785 - DNA, 25 bp, Homo sapien
catagtattccccaattactgacaa

SEQ ID NO: 1740786 - DNA, 25 bp, Homo sapien
ctttagggacaccacatagtattcc

SEQ ID NO: 1740787 - DNA, 25 bp, Homo sapien
tccccaattactgacaatacatttt

SEQ ID NO: 1740788 - DNA, 25 bp, Homo sapien
gacaccacatagtattccccaatta

SEQ ID NO: 1740789 - DNA, 25 bp, Homo sapien
gaaagcacacttatatccttcatat

SEQ ID NO: 1740790 - DNA, 25 bp, Homo sapien
catttttgatgccagaaagcacact

SEQ ID NO: 1740791 - DNA, 25 bp, Homo sapien
tttgagaacataccctgaagaataa

SEQ ID NO: 1740792 - DNA, 25 bp, Homo sapien
gggtttgagaacataccctgaagaa

SEQ ID NO: 1740793 - DNA, 25 bp, Homo sapien
tgtctgaaaattttgtgctcaataa

SEQ ID NO: 1740794 - DNA, 25 bp, Homo sapien
ggaatagattaatgttacctttgga

SEQ ID NO: 1740795 - DNA, 25 bp, Homo sapien
gggtcaggcattacttgagtctaca

SEQ ID NO: 1740796 - DNA, 25 bp, Homo sapien
aatgcatctagctatttcagctttt

SEQ ID NO: 1740797 - DNA, 25 bp, Homo sapien
gatatacagtatgagaatccatccc

SEQ ID NO: 1740798 - DNA, 25 bp, Homo sapien
ttaatactataaatcaccggtgtga

SEQ ID NO: 1740799 - DNA, 25 bp, Homo sapien
tgactggctagaccctggaaacgtt

SEQ ID NO: 1740800 - DNA, 25 bp, Homo sapien
tcccctatgatgtgtgcaaaggaaa

SEQ ID NO: 1740801 - DNA, 25 bp, Homo sapien
tgcagaagcttcctataacagcagt

SEQ ID NO: 1740802 - DNA, 25 bp, Homo sapien
ctatagggaatcttccagtgacagc

SEQ ID NO: 1740803 - DNA, 25 bp, Homo sapien
tcctatagggaatcttccagtgaca

SEQ ID NO: 1740804 - DNA, 25 bp, Homo sapien
cctataacagcagttcctataggga

SEQ ID NO: 1740805 - DNA, 25 bp, Homo sapien
agacaaatggaaatgagtccactct

SEQ ID NO: 1740806 - DNA, 25 bp, Homo sapien
aataactggaagcttgagctgtgta

SEQ ID NO: 1740807 - DNA, 25 bp, Homo sapien
gaaatgagtccactctaggaagaag

SEQ ID NO: 1740808 - DNA, 25 bp, Homo sapien
taactggaagcttgagctgtgtaaa

SEQ ID NO: 1740809 - DNA, 25 bp, Homo sapien
aaaaccagcatcagctttccagcca

SEQ ID NO: 1740810 - DNA, 25 bp, Homo sapien
aaaccagcatcagctttccagccat

SEQ ID NO: 1740811 - DNA, 25 bp, Homo sapien
accagcatcagctttccagccatat

SEQ ID NO: 1740812 - DNA, 25 bp, Homo sapien
agcatcagctttccagccatatttc

SEQ ID NO: 1740813 - DNA, 25 bp, Homo sapien
ctagctatgcaaggtagttccacag

SEQ ID NO: 1740814 - DNA, 25 bp, Homo sapien
gttgttggtcattatcaaccaagct

SEQ ID NO: 1740815 - DNA, 25 bp, Homo sapien
tatcaaccaagctagctatgcaagg

SEQ ID NO: 1740816 - DNA, 25 bp, Homo sapien
tatgcaaggtagttccacagtggca

SEQ ID NO: 1740817 - DNA, 25 bp, Homo sapien
gtggaactttcacagtttggcaggg

SEQ ID NO: 1740818 - DNA, 25 bp, Homo sapien
cagtgtgctcctgagggctagtttc

SEQ ID NO: 1740819 - DNA, 25 bp, Homo sapien
tctaatgtccctgctttcagtgtgc

SEQ ID NO: 1740820 - DNA, 25 bp, Homo sapien
gaagtggagggttcttctaatgtcc

SEQ ID NO: 1740821 - DNA, 25 bp, Homo sapien
ctgctgcctctacccctatatttta

SEQ ID NO: 1740822 - DNA, 25 bp, Homo sapien
gctgcctctacccctatattttata

SEQ ID NO: 1740823 - DNA, 25 bp, Homo sapien
tgctgcctctacccctatattttat

SEQ ID NO: 1740824 - DNA, 25 bp, Homo sapien
ctgcctctacccctatattttatat

SEQ ID NO: 1740825 - DNA, 25 bp, Homo sapien
ggcaaacagctccaataatgtgatg

SEQ ID NO: 1740826 - DNA, 25 bp, Homo sapien
ttcaccatcaacaagcaagcaaagg

SEQ ID NO: 1740827 - DNA, 25 bp, Homo sapien
taacaaacatctaatgagggccagt

SEQ ID NO: 1740828 - DNA, 25 bp, Homo sapien
aatggactgcacagtttcccctgag

SEQ ID NO: 1740829 - DNA, 25 bp, Homo sapien
tttcatgccacagttatgagatgtc

SEQ ID NO: 1740830 - DNA, 25 bp, Homo sapien
attactatttgcctgatccgcattt

SEQ ID NO: 1740831 - DNA, 25 bp, Homo sapien
acagttatgagatgtcagagagttc

SEQ ID NO: 1740832 - DNA, 25 bp, Homo sapien
gcctgatccgcatttttcatgccac

SEQ ID NO: 1740833 - DNA, 25 bp, Homo sapien
ttaattgcctcatgtacgggggatc

SEQ ID NO: 1740834 - DNA, 25 bp, Homo sapien
cccttagatgagatacttagagtaa

SEQ ID NO: 1740835 - DNA, 25 bp, Homo sapien
tgtacgggggatcagctcttttctg

SEQ ID NO: 1740836 - DNA, 25 bp, Homo sapien
tagatgagatacttagagtaagaga

SEQ ID NO: 1740837 - DNA, 25 bp, Homo sapien
aaatatatttgtgccgtagaaagcc

SEQ ID NO: 1740838 - DNA, 25 bp, Homo sapien
cgatgatgagcttgctaaaatatat

SEQ ID NO: 1740839 - DNA, 25 bp, Homo sapien
aacgatgatgagcttgctaaaatat

SEQ ID NO: 1740840 - DNA, 25 bp, Homo sapien
cttgctaaaatatatttgtgccgta

SEQ ID NO: 1740841 - DNA, 25 bp, Homo sapien
gaattctggggtttggttgcacatg

SEQ ID NO: 1740842 - DNA, 25 bp, Homo sapien
ttggttgcacatgtcttcaatgatc

SEQ ID NO: 1740843 - DNA, 25 bp, Homo sapien
gatcacattgaggttatactggtag

SEQ ID NO: 1740844 - DNA, 25 bp, Homo sapien
agtctgtggcacagcctcgtatcat

SEQ ID NO: 1740845 - DNA, 25 bp, Homo sapien
ccgctggtgatataatcagacatgg

SEQ ID NO: 1740846 - DNA, 25 bp, Homo sapien
cctggatcatgtacccgctggtgat

SEQ ID NO: 1740847 - DNA, 25 bp, Homo sapien
catgtacccgctggtgatataatca

SEQ ID NO: 1740848 - DNA, 25 bp, Homo sapien
ctatccctggatcatgtacccgctg

SEQ ID NO: 1740849 - DNA, 25 bp, Homo sapien
catgtttatatagaggtacgttttg

SEQ ID NO: 1740850 - DNA, 25 bp, Homo sapien
cttccgcacttgggattctaagcat

SEQ ID NO: 1740851 - DNA, 25 bp, Homo sapien
tatatagaggtacgttttgctttcc

SEQ ID NO: 1740852 - DNA, 25 bp, Homo sapien
tagaggtacgttttgctttcctgta

SEQ ID NO: 1740853 - DNA, 25 bp, Homo sapien
aaatttgagctgacctatgactgag

SEQ ID NO: 1740854 - DNA, 25 bp, Homo sapien
taaaaactctcatagggtagttgga

SEQ ID NO: 1740855 - DNA, 25 bp, Homo sapien
acaatgcagtttggctgagagcaca

SEQ ID NO: 1740856 - DNA, 25 bp, Homo sapien
tagttggaatttcaggttaccttgc

SEQ ID NO: 1740857 - DNA, 25 bp, Homo sapien
gaggcatctgcaggatgcaccaagc

SEQ ID NO: 1740858 - DNA, 25 bp, Homo sapien
ttcccaggtgaccacgtttaccaga

SEQ ID NO: 1740859 - DNA, 25 bp, Homo sapien
tgaccacgtttaccagacacagcag

SEQ ID NO: 1740860 - DNA, 25 bp, Homo sapien
ggcaggtagcacagttcccaggtga

SEQ ID NO: 1740861 - DNA, 25 bp, Homo sapien
tgaacaccacgaccacaagatgaac

SEQ ID NO: 1740862 - DNA, 25 bp, Homo sapien
attcactctcgtactgaacaccacg

SEQ ID NO: 1740863 - DNA, 25 bp, Homo sapien
agatgaacatttgactttcagaatc

SEQ ID NO: 1740864 - DNA, 25 bp, Homo sapien
tagagaaagacaagatactttctca

SEQ ID NO: 1740865 - DNA, 25 bp, Homo sapien
tgccaacagtatgatctcctttctc

SEQ ID NO: 1740866 - DNA, 25 bp, Homo sapien
aaaccagacatactggggtgggcat

SEQ ID NO: 1740867 - DNA, 25 bp, Homo sapien
ctccaatgccaacagtatgatctcc

SEQ ID NO: 1740868 - DNA, 25 bp, Homo sapien
gaaacacagaaaaccagacatactg

SEQ ID NO: 1740869 - DNA, 25 bp, Homo sapien
agctgtttctgctactttaaccgtt

SEQ ID NO: 1740870 - DNA, 25 bp, Homo sapien
tctgctactttaaccgttttctgtc

SEQ ID NO: 1740871 - DNA, 25 bp, Homo sapien
accagccaggggcaagctgtttctg

SEQ ID NO: 1740872 - DNA, 25 bp, Homo sapien
gggcaagctgtttctgctactttaa

SEQ ID NO: 1740873 - DNA, 25 bp, Homo sapien
ctagggccagatataagtggttcgg

SEQ ID NO: 1740874 - DNA, 25 bp, Homo sapien
gaagaagttgagagccatcagccga

SEQ ID NO: 1740875 - DNA, 25 bp, Homo sapien
ggaatgtgcacctgatccaagttgg

SEQ ID NO: 1740876 - DNA, 25 bp, Homo sapien
caagttggatctgtaaggaagcttc

SEQ ID NO: 1740877 - DNA, 25 bp, Homo sapien
tgtgagctgaccacctaatcttcaa

SEQ ID NO: 1740878 - DNA, 25 bp, Homo sapien
gaccacctaatcttcaacaaactgc

SEQ ID NO: 1740879 - DNA, 25 bp, Homo sapien
gcagcttatgattcattgtgagctg

SEQ ID NO: 1740880 - DNA, 25 bp, Homo sapien
gattcattgtgagctgaccacctaa

SEQ ID NO: 1740881 - DNA, 25 bp, Homo sapien
gatagcgctgacatcgctgcttaac

SEQ ID NO: 1740882 - DNA, 25 bp, Homo sapien
gtctccacagctccctgatagcgct

SEQ ID NO: 1740883 - DNA, 25 bp, Homo sapien
tccctgatagcgctgacatcgctgc

SEQ ID NO: 1740884 - DNA, 25 bp, Homo sapien
cacagctccctgatagcgctgacat

SEQ ID NO: 1740885 - DNA, 25 bp, Homo sapien
aagtaaaaactagcaggaggatctg

SEQ ID NO: 1740886 - DNA, 25 bp, Homo sapien
caactgagagtcaaattggctgaac

SEQ ID NO: 1740887 - DNA, 25 bp, Homo sapien
catatttaaaggcagcgacgctcta

SEQ ID NO: 1740888 - DNA, 25 bp, Homo sapien
cccacagtgggtagtgagtttcgta

SEQ ID NO: 1740889 - DNA, 25 bp, Homo sapien
aaagctactgcggagctgtacaagg

SEQ ID NO: 1740890 - DNA, 25 bp, Homo sapien
gcagtcttgtaagtggagttttcca

SEQ ID NO: 1740891 - DNA, 25 bp, Homo sapien
caaatcaggtcaaataaaggcagtc

SEQ ID NO: 1740892 - DNA, 25 bp, Homo sapien
aatactacccaagctccaaatcagg

SEQ ID NO: 1740893 - DNA, 25 bp, Homo sapien
cctgctccagtcttgtaacatgtgc

SEQ ID NO: 1740894 - DNA, 25 bp, Homo sapien
gggcagattgctcctttggtgctgt

SEQ ID NO: 1740895 - DNA, 25 bp, Homo sapien
gctccagtcttgtaacatgtgcttg

SEQ ID NO: 1740896 - DNA, 25 bp, Homo sapien
atgatgggggcagattgctcctttg

SEQ ID NO: 1740897 - DNA, 25 bp, Homo sapien
gcattgatgtttggctgaacatcca

SEQ ID NO: 1740898 - DNA, 25 bp, Homo sapien
caaaaagcaatgcattgatgtttgg

SEQ ID NO: 1740899 - DNA, 25 bp, Homo sapien
aaaaagcaatgcattgatgtttggc

SEQ ID NO: 1740900 - DNA, 25 bp, Homo sapien
aatgcattgatgtttggctgaacat

SEQ ID NO: 1740901 - DNA, 25 bp, Homo sapien
ctactgaggaagatgtgttgctgtg

SEQ ID NO: 1740902 - DNA, 25 bp, Homo sapien
tactgaggaagatgtgttgctgtgg

SEQ ID NO: 1740903 - DNA, 25 bp, Homo sapien
ccagatttctcttctatgggtaggt

SEQ ID NO: 1740904 - DNA, 25 bp, Homo sapien
tgagatctacccaggacatttgagc

SEQ ID NO: 1740905 - DNA, 25 bp, Homo sapien
agcagtctgagatctacccaggaca

SEQ ID NO: 1740906 - DNA, 25 bp, Homo sapien
agttccaactggtcggatcccactg

SEQ ID NO: 1740907 - DNA, 25 bp, Homo sapien
tttaatttgagggcttccttgacca

SEQ ID NO: 1740908 - DNA, 25 bp, Homo sapien
tctcaagtaattctcagaacctact

SEQ ID NO: 1740909 - DNA, 25 bp, Homo sapien
ctaatctcaagtaattctcagaacc

SEQ ID NO: 1740910 - DNA, 25 bp, Homo sapien
taattctcagaacctactaattgta

SEQ ID NO: 1740911 - DNA, 25 bp, Homo sapien
caagtaattctcagaacctactaat

SEQ ID NO: 1740912 - DNA, 25 bp, Homo sapien
cctgattgattacaaattatctagc

SEQ ID NO: 1740913 - DNA, 25 bp, Homo sapien
gaaccacatcataccgtgttataga

SEQ ID NO: 1740914 - DNA, 25 bp, Homo sapien
tcaactgccaaacataagactcaga

SEQ ID NO: 1740915 - DNA, 25 bp, Homo sapien
cctccgccctttataatgtaattgg

SEQ ID NO: 1740916 - DNA, 25 bp, Homo sapien
tgaactgttccagcagagtatggga

SEQ ID NO: 1740917 - DNA, 25 bp, Homo sapien
gcagaatcaaaactggaggccaggt

SEQ ID NO: 1740918 - DNA, 25 bp, Homo sapien
tgactcaaggaaggcaccagataac

SEQ ID NO: 1740919 - DNA, 25 bp, Homo sapien
gttcattaaacagtgggccagatta

SEQ ID NO: 1740920 - DNA, 25 bp, Homo sapien
gcacctcaaagcagagcagaactgt

SEQ ID NO: 1740921 - DNA, 25 bp, Homo sapien
agactggtagcactcacccatgcac

SEQ ID NO: 1740922 - DNA, 25 bp, Homo sapien
cttgatggtaaccagagactggtag

SEQ ID NO: 1740923 - DNA, 25 bp, Homo sapien
tggtaaccagagactggtagcactc

SEQ ID NO: 1740924 - DNA, 25 bp, Homo sapien
tgtttccgtgaacaagctgccagtt

SEQ ID NO: 1740925 - DNA, 25 bp, Homo sapien
cattccctataagcaggtctcccat

SEQ ID NO: 1740926 - DNA, 25 bp, Homo sapien
ggactgcattccctataagcaggtc

SEQ ID NO: 1740927 - DNA, 25 bp, Homo sapien
gctgccagttggcccctcttcaagg

SEQ ID NO: 1740928 - DNA, 25 bp, Homo sapien
cagttaagatgcctaactgtatctt

SEQ ID NO: 1740929 - DNA, 25 bp, Homo sapien
atcagttaagatgcctaactgtatc

SEQ ID NO: 1740930 - DNA, 25 bp, Homo sapien
ttaagatgcctaactgtatcttcat

SEQ ID NO: 1740931 - DNA, 25 bp, Homo sapien
gttaagatgcctaactgtatcttca

SEQ ID NO: 1740932 - DNA, 25 bp, Homo sapien
agagcaacactcaaacattatcaag

SEQ ID NO: 1740933 - DNA, 25 bp, Homo sapien
tctttgaggagcaacaccatgaaga

SEQ ID NO: 1740934 - DNA, 25 bp, Homo sapien
aaaaccggaagaggtcggtgtcatg

SEQ ID NO: 1740935 - DNA, 25 bp, Homo sapien
gaggagcaacaccatgaagaggcag

SEQ ID NO: 1740936 - DNA, 25 bp, Homo sapien
gtggtgatgtctatgaggctctcag

SEQ ID NO: 1740937 - DNA, 25 bp, Homo sapien
ggtgatgtctatgaggctctcagac

SEQ ID NO: 1740938 - DNA, 25 bp, Homo sapien
tgatgtctatgaggctctcagacat

SEQ ID NO: 1740939 - DNA, 25 bp, Homo sapien
ctgtgtggtgatgtctatgaggctc

SEQ ID NO: 1740940 - DNA, 25 bp, Homo sapien
cgttggtcaccattagtttgatgca

SEQ ID NO: 1740941 - DNA, 25 bp, Homo sapien
gtgttgtcgttggtcaccattagtt

SEQ ID NO: 1740942 - DNA, 25 bp, Homo sapien
tctggagctatgaataggtgatatg

SEQ ID NO: 1740943 - DNA, 25 bp, Homo sapien
tggtcaccattagtttgatgcagtg

SEQ ID NO: 1740944 - DNA, 25 bp, Homo sapien
tgagaatgtgaataagaatacctac

SEQ ID NO: 1740945 - DNA, 25 bp, Homo sapien
aatgctacacttgataaacacctga

SEQ ID NO: 1740946 - DNA, 25 bp, Homo sapien
gacaatcttttaggatccagggatg

SEQ ID NO: 1740947 - DNA, 25 bp, Homo sapien
agcttaaatactcaatgctctgcag

SEQ ID NO: 1740948 - DNA, 25 bp, Homo sapien
cagagcacagtttctaggactaggg

SEQ ID NO: 1740949 - DNA, 25 bp, Homo sapien
tcccatagagtcaggcaggaacagg

SEQ ID NO: 1740950 - DNA, 25 bp, Homo sapien
tcccaaggtggatattcctagcagt

SEQ ID NO: 1740951 - DNA, 25 bp, Homo sapien
tgtggaacgtacctcctatagcaag

SEQ ID NO: 1740952 - DNA, 25 bp, Homo sapien
tagaatgatcaccaaacatgacctg

SEQ ID NO: 1740953 - DNA, 25 bp, Homo sapien
cacatgccactcaatggtacgctaa

SEQ ID NO: 1740954 - DNA, 25 bp, Homo sapien
aactcttgaaggtgtatgctgaaaa

SEQ ID NO: 1740955 - DNA, 25 bp, Homo sapien
gaaagatctgttgctatgaactgaa

SEQ ID NO: 1740956 - DNA, 25 bp, Homo sapien
tcgtgctattgtgttgaattcctta

SEQ ID NO: 1740957 - DNA, 25 bp, Homo sapien
aaatgtctactcaggttatttgccc

SEQ ID NO: 1740958 - DNA, 25 bp, Homo sapien
tattgcccttaaaagtgtcacgaag

SEQ ID NO: 1740959 - DNA, 25 bp, Homo sapien
aattaggttatttgctttcgtgcta

SEQ ID NO: 1740960 - DNA, 25 bp, Homo sapien
cacaaggcctagaatgccagtacgg

SEQ ID NO: 1740961 - DNA, 25 bp, Homo sapien
catggaaaccctagagagtagtagc

SEQ ID NO: 1740962 - DNA, 25 bp, Homo sapien
cgagtagtactagacccatatggca

SEQ ID NO: 1740963 - DNA, 25 bp, Homo sapien
gatagatgcccagaaccacttgtca

SEQ ID NO: 1740964 - DNA, 25 bp, Homo sapien
tgtgaaatttttcttctaaagtcat

SEQ ID NO: 1740965 - DNA, 25 bp, Homo sapien
tgactaccaggtcagaacagaaggg

SEQ ID NO: 1740966 - DNA, 25 bp, Homo sapien
aacttgcggaccttgttgacaggtg

SEQ ID NO: 1740967 - DNA, 25 bp, Homo sapien
caggaactcacataggaaatccttt

SEQ ID NO: 1740968 - DNA, 25 bp, Homo sapien
atccaaaggccagaacttgcggacc

SEQ ID NO: 1740969 - DNA, 25 bp, Homo sapien
gattggcacatgttgcattcatcac

SEQ ID NO: 1740970 - DNA, 25 bp, Homo sapien
gcttctattaacgtaatgcatcatg

SEQ ID NO: 1740971 - DNA, 25 bp, Homo sapien
gatgaatcccactggttcatggtga

SEQ ID NO: 1740972 - DNA, 25 bp, Homo sapien
tgttcagtccaatgttcatcatggg

SEQ ID NO: 1740973 - DNA, 25 bp, Homo sapien
taggcgctgtagcatctgggtagca

SEQ ID NO: 1740974 - DNA, 25 bp, Homo sapien
acactgtaggcgctgtagcatctgg

SEQ ID NO: 1740975 - DNA, 25 bp, Homo sapien
aaataggtgtccacactgtaggcgc

SEQ ID NO: 1740976 - DNA, 25 bp, Homo sapien
aggaggaaataggtgtccacactgt

SEQ ID NO: 1740977 - DNA, 25 bp, Homo sapien
tgcagataatgcctacaaagagctg

SEQ ID NO: 1740978 - DNA, 25 bp, Homo sapien
gacaaggccttgcaatattccacag

SEQ ID NO: 1740979 - DNA, 25 bp, Homo sapien
tctaatctcctcattggcaagtcta

SEQ ID NO: 1740980 - DNA, 25 bp, Homo sapien
taatgactctatccctatgacaagg

SEQ ID NO: 1740981 - DNA, 25 bp, Homo sapien
ttttcttcttgattgcaggggttac

SEQ ID NO: 1740982 - DNA, 25 bp, Homo sapien
atgttctcttcttgatagcaaccat

SEQ ID NO: 1740983 - DNA, 25 bp, Homo sapien
tttcttcttgattgcaggggttact

SEQ ID NO: 1740984 - DNA, 25 bp, Homo sapien
tcttcttgattgcaggggttacttt

SEQ ID NO: 1740985 - DNA, 25 bp, Homo sapien
cctgggacaggtggagtatgcaaca

SEQ ID NO: 1740986 - DNA, 25 bp, Homo sapien
caacacttgggaattgtgacaagag

SEQ ID NO: 1740987 - DNA, 25 bp, Homo sapien
ttttccagggagctattataatgcc

SEQ ID NO: 1740988 - DNA, 25 bp, Homo sapien
cagtttctggaagattggactcatt

SEQ ID NO: 1740989 - DNA, 25 bp, Homo sapien
ctttccagtaatctgactcttcctc

SEQ ID NO: 1740990 - DNA, 25 bp, Homo sapien
tttccagtaatctgactcttcctcc

SEQ ID NO: 1740991 - DNA, 25 bp, Homo sapien
cccagacaattttctctggaaagtt

SEQ ID NO: 1740992 - DNA, 25 bp, Homo sapien
aattttctctggaaagttgctaggc

SEQ ID NO: 1740993 - DNA, 25 bp, Homo sapien
ccagacaattttctctggaaagttg

SEQ ID NO: 1740994 - DNA, 25 bp, Homo sapien
gacaattttctctggaaagttgcta

SEQ ID NO: 1740995 - DNA, 25 bp, Homo sapien
ctactgttaacttagaagccctggg

SEQ ID NO: 1740996 - DNA, 25 bp, Homo sapien
gatatttccccagatgctactgtta

SEQ ID NO: 1740997 - DNA, 25 bp, Homo sapien
tccaacagccaagtattccgtggat

SEQ ID NO: 1740998 - DNA, 25 bp, Homo sapien
aagtattccgtggatatttccccag

SEQ ID NO: 1740999 - DNA, 25 bp, Homo sapien
ttgcagtggatcactggctgactga

SEQ ID NO: 1741000 - DNA, 25 bp, Homo sapien
gactgacatggggagagtggatggc

SEQ ID NO: 1741001 - DNA, 25 bp, Homo sapien
tttgcagtggatcactggctgactg

SEQ ID NO: 1741002 - DNA, 25 bp, Homo sapien
ttttctttaatctgaggccttgtcc

SEQ ID NO: 1741003 - DNA, 25 bp, Homo sapien
tttatttgtctctactgcccctgtc

SEQ ID NO: 1741004 - DNA, 25 bp, Homo sapien
tgaggccttgtcccccagtggagag

SEQ ID NO: 1741005 - DNA, 25 bp, Homo sapien
ctgtcctcctcaattttgattcttc

SEQ ID NO: 1741006 - DNA, 25 bp, Homo sapien
ttctcacgccgctgattctggatct

SEQ ID NO: 1741007 - DNA, 25 bp, Homo sapien
tcatcctttctcacgccgctgattc

SEQ ID NO: 1741008 - DNA, 25 bp, Homo sapien
attctggatctgagaactgtactca

SEQ ID NO: 1741009 - DNA, 25 bp, Homo sapien
tctggatctgagaactgtactcagg

SEQ ID NO: 1741010 - DNA, 25 bp, Homo sapien
cagcagccagtgcttaacaggcaga

SEQ ID NO: 1741011 - DNA, 25 bp, Homo sapien
ggatgacatggaccaagccaaaagc

SEQ ID NO: 1741012 - DNA, 25 bp, Homo sapien
taacaggcagacattttgctaagga

SEQ ID NO: 1741013 - DNA, 25 bp, Homo sapien
ggaagggatgacatggaccaagcca

SEQ ID NO: 1741014 - DNA, 25 bp, Homo sapien
cataagccagtaccacagcatactc

SEQ ID NO: 1741015 - DNA, 25 bp, Homo sapien
ttacataagccagtaccacagcata

SEQ ID NO: 1741016 - DNA, 25 bp, Homo sapien
taagccagtaccacagcatactcac

SEQ ID NO: 1741017 - DNA, 25 bp, Homo sapien
tacataagccagtaccacagcatac

SEQ ID NO: 1741018 - DNA, 25 bp, Homo sapien
ctttcttcgctttatcctctgatga

SEQ ID NO: 1741019 - DNA, 25 bp, Homo sapien
ttatcctctgatgacctctctttac

SEQ ID NO: 1741020 - DNA, 25 bp, Homo sapien
ccatttgtattctggactgaatctc

SEQ ID NO: 1741021 - DNA, 25 bp, Homo sapien
aatatcgtcctcaatttgctcgttg

SEQ ID NO: 1741022 - DNA, 25 bp, Homo sapien
tcctaggatgcccatacacagagtg

SEQ ID NO: 1741023 - DNA, 25 bp, Homo sapien
cctaggatgcccatacacagagtgg

SEQ ID NO: 1741024 - DNA, 25 bp, Homo sapien
atcctaggatgcccatacacagagt

SEQ ID NO: 1741025 - DNA, 25 bp, Homo sapien
cttttcagagtcctcgggtagttga

SEQ ID NO: 1741026 - DNA, 25 bp, Homo sapien
tttcagagtcctcgggtagttgatg

SEQ ID NO: 1741027 - DNA, 25 bp, Homo sapien
agtcctcgggtagttgatgagttta

SEQ ID NO: 1741028 - DNA, 25 bp, Homo sapien
cagagtcctcgggtagttgatgagt

SEQ ID NO: 1741029 - DNA, 25 bp, Homo sapien
gaaagaatcgtccactttccaggaa

SEQ ID NO: 1741030 - DNA, 25 bp, Homo sapien
gatggctgttacaaggaggatgcta

SEQ ID NO: 1741031 - DNA, 25 bp, Homo sapien
tctgcatgcgcagcacttcgtatgt

SEQ ID NO: 1741032 - DNA, 25 bp, Homo sapien
gatgctaaaattgcttcctatcaac

SEQ ID NO: 1741033 - DNA, 25 bp, Homo sapien
attgcttcctatcaacaccaggttc

SEQ ID NO: 1741034 - DNA, 25 bp, Homo sapien
catcagctagatagtaatagtgttt

SEQ ID NO: 1741035 - DNA, 25 bp, Homo sapien
tatcatcacagattattaccgcttc

SEQ ID NO: 1741036 - DNA, 25 bp, Homo sapien
gttcgttaaggaagcccctctatca

SEQ ID NO: 1741037 - DNA, 25 bp, Homo sapien
taccgcttcataatcactataatct

SEQ ID NO: 1741038 - DNA, 25 bp, Homo sapien
cacatctaccaggagtccagaggat

SEQ ID NO: 1741039 - DNA, 25 bp, Homo sapien
tcaagcaagaccgaaacagccacat

SEQ ID NO: 1741040 - DNA, 25 bp, Homo sapien
atctaccaggagtccagaggatggt

SEQ ID NO: 1741041 - DNA, 25 bp, Homo sapien
aaacagccacatctaccaggagtcc

SEQ ID NO: 1741042 - DNA, 25 bp, Homo sapien
tcagctgtgacttctttcagaatat

SEQ ID NO: 1741043 - DNA, 25 bp, Homo sapien
gctgtgacttctttcagaatatctg

SEQ ID NO: 1741044 - DNA, 25 bp, Homo sapien
tgtgacttctttcagaatatctgct

SEQ ID NO: 1741045 - DNA, 25 bp, Homo sapien
acttctttcagaatatctgctttca

SEQ ID NO: 1741046 - DNA, 25 bp, Homo sapien
tcctctctccttggtgtttatcacc

SEQ ID NO: 1741047 - DNA, 25 bp, Homo sapien
catagccattgggtcctctatttgg

SEQ ID NO: 1741048 - DNA, 25 bp, Homo sapien
taggccaaagagatacttcccatag

SEQ ID NO: 1741049 - DNA, 25 bp, Homo sapien
ttctgtcacaattcgatatcacctc

SEQ ID NO: 1741050 - DNA, 25 bp, Homo sapien
atgcagctggatcaaagcaattgta

SEQ ID NO: 1741051 - DNA, 25 bp, Homo sapien
tgcagctggatcaaagcaattgtac

SEQ ID NO: 1741052 - DNA, 25 bp, Homo sapien
gaattcatggagtgctccttttcct

SEQ ID NO: 1741053 - DNA, 25 bp, Homo sapien
tcaaggatctgatggtgaattcatg

SEQ ID NO: 1741054 - DNA, 25 bp, Homo sapien
gatggtgaattcatggagtgctcct

SEQ ID NO: 1741055 - DNA, 25 bp, Homo sapien
tctgatggtgaattcatggagtgct

SEQ ID NO: 1741056 - DNA, 25 bp, Homo sapien
tacagctggtcaaggtagaattctc

SEQ ID NO: 1741057 - DNA, 25 bp, Homo sapien
aagtttcagcttcctagttggccct

SEQ ID NO: 1741058 - DNA, 25 bp, Homo sapien
actttcccagcaggtaatgttacga

SEQ ID NO: 1741059 - DNA, 25 bp, Homo sapien
gggatcctatccaaagagtccttgt

SEQ ID NO: 1741060 - DNA, 25 bp, Homo sapien
tctaacagggaagcgtctgacagaa

SEQ ID NO: 1741061 - DNA, 25 bp, Homo sapien
taacagggaagcgtctgacagaaac

SEQ ID NO: 1741062 - DNA, 25 bp, Homo sapien
ttctaacagggaagcgtctgacaga

SEQ ID NO: 1741063 - DNA, 25 bp, Homo sapien
catgttaaaggtggctgtccactgt

SEQ ID NO: 1741064 - DNA, 25 bp, Homo sapien
gacagtagtgatagagcagtccaca

SEQ ID NO: 1741065 - DNA, 25 bp, Homo sapien
tataatcgcaattggctcaggagag

SEQ ID NO: 1741066 - DNA, 25 bp, Homo sapien
tcctgcttacaagtatggtgaccat

SEQ ID NO: 1741067 - DNA, 25 bp, Homo sapien
tctggctggtcatcctatgtaggga

SEQ ID NO: 1741068 - DNA, 25 bp, Homo sapien
ctctgagatgtttagcagaagcagg

SEQ ID NO: 1741069 - DNA, 25 bp, Homo sapien
agaagcaggcgcagaccattcagga

SEQ ID NO: 1741070 - DNA, 25 bp, Homo sapien
cctggaacaatccaccagggggcag

SEQ ID NO: 1741071 - DNA, 25 bp, Homo sapien
ctgagatgtttagcagaagcaggcg

SEQ ID NO: 1741072 - DNA, 25 bp, Homo sapien
tgttttaactgtgaagggctgatta

SEQ ID NO: 1741073 - DNA, 25 bp, Homo sapien
ggtttgcggtggctctatcggccaa

SEQ ID NO: 1741074 - DNA, 25 bp, Homo sapien
ccttgtctagagatttctggctgtc

SEQ ID NO: 1741075 - DNA, 25 bp, Homo sapien
aaagggaacatgaaggatggtttgc

SEQ ID NO: 1741076 - DNA, 25 bp, Homo sapien
aagaaatgggttgtgctttcctatt

SEQ ID NO: 1741077 - DNA, 25 bp, Homo sapien
gaaagaaatgggttgtgctttccta

SEQ ID NO: 1741078 - DNA, 25 bp, Homo sapien
aaagaaatgggttgtgctttcctat

SEQ ID NO: 1741079 - DNA, 25 bp, Homo sapien
gcctgatatgtgctgccatgacttg

SEQ ID NO: 1741080 - DNA, 25 bp, Homo sapien
ttaggagtttgacccttcatgagag

SEQ ID NO: 1741081 - DNA, 25 bp, Homo sapien
aagcgtcgggtagtagttctattat

SEQ ID NO: 1741082 - DNA, 25 bp, Homo sapien
gtaaatgatactgtggctgcctgat

SEQ ID NO: 1741083 - DNA, 25 bp, Homo sapien
ccacaggtaggtcgaatcttctttc

SEQ ID NO: 1741084 - DNA, 25 bp, Homo sapien
tgatgcctatctgcaaagatgcctg

SEQ ID NO: 1741085 - DNA, 25 bp, Homo sapien
tcctgagaagccagaatagtcctga

SEQ ID NO: 1741086 - DNA, 25 bp, Homo sapien
gaccaagttgtgtctggttccacag

SEQ ID NO: 1741087 - DNA, 25 bp, Homo sapien
taagacccggtgtggagaggaacaa

SEQ ID NO: 1741088 - DNA, 25 bp, Homo sapien
tgggaatgcaagatctcgggacctc

SEQ ID NO: 1741089 - DNA, 25 bp, Homo sapien
gtccaggttaggagacgctcagcct

SEQ ID NO: 1741090 - DNA, 25 bp, Homo sapien
aagtctgcagatccaaaagcgtcca

SEQ ID NO: 1741091 - DNA, 25 bp, Homo sapien
tattactggtgcctcctaacctggg

SEQ ID NO: 1741092 - DNA, 25 bp, Homo sapien
gccagactgctggactaaacctgtg

SEQ ID NO: 1741093 - DNA, 25 bp, Homo sapien
taaacctgtgaccatggctaaggac

SEQ ID NO: 1741094 - DNA, 25 bp, Homo sapien
cattgggccctctacagcgatatta

SEQ ID NO: 1741095 - DNA, 25 bp, Homo sapien
aaaagaagagttctgcttgcgttcc

SEQ ID NO: 1741096 - DNA, 25 bp, Homo sapien
agagttctgcttgcgttccagaatg

SEQ ID NO: 1741097 - DNA, 25 bp, Homo sapien
aagaagagttctgcttgcgttccag

SEQ ID NO: 1741098 - DNA, 25 bp, Homo sapien
gttctgcttgcgttccagaatgctg

SEQ ID NO: 1741099 - DNA, 25 bp, Homo sapien
ccctagtctcctgtttagttgcaac

SEQ ID NO: 1741100 - DNA, 25 bp, Homo sapien
tgtccacatatcaccctgaccccaa

SEQ ID NO: 1741101 - DNA, 25 bp, Homo sapien
ccccaataatcattgaaagctctgc

SEQ ID NO: 1741102 - DNA, 25 bp, Homo sapien
ctgaccccaataatcattgaaagct

SEQ ID NO: 1741103 - DNA, 25 bp, Homo sapien
ggtttggtgcttcatctgccttcag

SEQ ID NO: 1741104 - DNA, 25 bp, Homo sapien
gaggtttggtgcttcatctgccttc

SEQ ID NO: 1741105 - DNA, 25 bp, Homo sapien
aggtttggtgcttcatctgccttca

SEQ ID NO: 1741106 - DNA, 25 bp, Homo sapien
cgaggtttggtgcttcatctgcctt

SEQ ID NO: 1741107 - DNA, 25 bp, Homo sapien
tcccctctgagaaacaaatgtatca

SEQ ID NO: 1741108 - DNA, 25 bp, Homo sapien
tccacattggtaactagaactccta

SEQ ID NO: 1741109 - DNA, 25 bp, Homo sapien
taaagaaaccacgattccacattgg

SEQ ID NO: 1741110 - DNA, 25 bp, Homo sapien
tcattgacagcgagaaacctggttc

SEQ ID NO: 1741111 - DNA, 25 bp, Homo sapien
gaaaggctgccataaaaccatgctc

SEQ ID NO: 1741112 - DNA, 25 bp, Homo sapien
aaaggctgccataaaaccatgctcc

SEQ ID NO: 1741113 - DNA, 25 bp, Homo sapien
aaggctgccataaaaccatgctcca

SEQ ID NO: 1741114 - DNA, 25 bp, Homo sapien
ctgctcaaaaagacagagtacttcc

SEQ ID NO: 1741115 - DNA, 25 bp, Homo sapien
tctgctcaaaaagacagagtacttc

SEQ ID NO: 1741116 - DNA, 25 bp, Homo sapien
gatcagagactgccaagacagctcc

SEQ ID NO: 1741117 - DNA, 25 bp, Homo sapien
catttacttggccaaaagcttagca

SEQ ID NO: 1741118 - DNA, 25 bp, Homo sapien
aaaatctcaggtgctttggccccag

SEQ ID NO: 1741119 - DNA, 25 bp, Homo sapien
agatacagccttgggtcaagatacc

SEQ ID NO: 1741120 - DNA, 25 bp, Homo sapien
caaaaacggtgttaagaatgctcag

SEQ ID NO: 1741121 - DNA, 25 bp, Homo sapien
tttatttagatcactcacttccaca

SEQ ID NO: 1741122 - DNA, 25 bp, Homo sapien
acttccacaatatataatttgcacc

SEQ ID NO: 1741123 - DNA, 25 bp, Homo sapien
acaatatataatttgcaccttccca

SEQ ID NO: 1741124 - DNA, 25 bp, Homo sapien
ttttatttagatcactcacttccac

SEQ ID NO: 1741125 - DNA, 25 bp, Homo sapien
cacacttctaggaggccttcgctga

SEQ ID NO: 1741126 - DNA, 25 bp, Homo sapien
tgaatactttagacccactgaccat

SEQ ID NO: 1741127 - DNA, 25 bp, Homo sapien
caaagtgcagtctaaaccacacttc

SEQ ID NO: 1741128 - DNA, 25 bp, Homo sapien
tctaggaggccttcgctgaatactt

SEQ ID NO: 1741129 - DNA, 25 bp, Homo sapien
gtcttgcaagcctgagctctgatca

SEQ ID NO: 1741130 - DNA, 25 bp, Homo sapien
caagcctgagctctgatcagtcatc

SEQ ID NO: 1741131 - DNA, 25 bp, Homo sapien
gtgattgtcgaatgacccagttttt

SEQ ID NO: 1741132 - DNA, 25 bp, Homo sapien
tcttcaagttcattgtgattgtcga

SEQ ID NO: 1741133 - DNA, 25 bp, Homo sapien
gctggctgagcacatattctatatc

SEQ ID NO: 1741134 - DNA, 25 bp, Homo sapien
gagcacatattctatatctcccact

SEQ ID NO: 1741135 - DNA, 25 bp, Homo sapien
ttggtttcaatcaggatggctggct

SEQ ID NO: 1741136 - DNA, 25 bp, Homo sapien
tttgtggtttggtttcaatcaggat

SEQ ID NO: 1741137 - DNA, 25 bp, Homo sapien
ccacctgcttccaattggtaggatg

SEQ ID NO: 1741138 - DNA, 25 bp, Homo sapien
cttctatatgttccacctgcttcca

SEQ ID NO: 1741139 - DNA, 25 bp, Homo sapien
tccttcaccttgatatcattgcaga

SEQ ID NO: 1741140 - DNA, 25 bp, Homo sapien
tgctgtagtaagacctagttcttct

SEQ ID NO: 1741141 - DNA, 25 bp, Homo sapien
ccaactcttgttcacagacccaaat

SEQ ID NO: 1741142 - DNA, 25 bp, Homo sapien
gactcccaactcttgttcacagacc

SEQ ID NO: 1741143 - DNA, 25 bp, Homo sapien
cccaactcttgttcacagacccaaa

SEQ ID NO: 1741144 - DNA, 25 bp, Homo sapien
cttaggaaagccaaccctctcagat

SEQ ID NO: 1741145 - DNA, 25 bp, Homo sapien
gttttgtaacacaactggttgctgt

SEQ ID NO: 1741146 - DNA, 25 bp, Homo sapien
cactgttttgtaacacaactggttg

SEQ ID NO: 1741147 - DNA, 25 bp, Homo sapien
cacactgttttgtaacacaactggt

SEQ ID NO: 1741148 - DNA, 25 bp, Homo sapien
tgttttgtaacacaactggttgctg

SEQ ID NO: 1741149 - DNA, 25 bp, Homo sapien
cacctggatatacattactgctgac

SEQ ID NO: 1741150 - DNA, 25 bp, Homo sapien
catgaaatagggaattctgaaggcc

SEQ ID NO: 1741151 - DNA, 25 bp, Homo sapien
caaaatctgaaggactgtggcaatg

SEQ ID NO: 1741152 - DNA, 25 bp, Homo sapien
tcagaatatctccaacagctaccag

SEQ ID NO: 1741153 - DNA, 25 bp, Homo sapien
ctctttggcacaggcaccaatgttc

SEQ ID NO: 1741154 - DNA, 25 bp, Homo sapien
tggcacaggcaccaatgttccaagt

SEQ ID NO: 1741155 - DNA, 25 bp, Homo sapien
ctttggcacaggcaccaatgttcca

SEQ ID NO: 1741156 - DNA, 25 bp, Homo sapien
cacaggcaccaatgttccaagtggg

SEQ ID NO: 1741157 - DNA, 25 bp, Homo sapien
tactcaaagtaagggtcacagccat

SEQ ID NO: 1741158 - DNA, 25 bp, Homo sapien
aatgctaagaggctcttatgaacac

SEQ ID NO: 1741159 - DNA, 25 bp, Homo sapien
gaggctcttatgaacacaagtcctc

SEQ ID NO: 1741160 - DNA, 25 bp, Homo sapien
gaacacaagtcctcctactcaaagt

SEQ ID NO: 1741161 - DNA, 25 bp, Homo sapien
gttcaatcctgttgaactcacaggg

SEQ ID NO: 1741162 - DNA, 25 bp, Homo sapien
agcacataacaggagttcaatcctg

SEQ ID NO: 1741163 - DNA, 25 bp, Homo sapien
caggagttcaatcctgttgaactca

SEQ ID NO: 1741164 - DNA, 25 bp, Homo sapien
cctgttgaactcacagggtgagtca

SEQ ID NO: 1741165 - DNA, 25 bp, Homo sapien
gaaaataactccagctctaagcagg

SEQ ID NO: 1741166 - DNA, 25 bp, Homo sapien
ggaaatggcgcaggccaagtctctt

SEQ ID NO: 1741167 - DNA, 25 bp, Homo sapien
ctaagcaggagcctagtcaacgcgg

SEQ ID NO: 1741168 - DNA, 25 bp, Homo sapien
tccgaggaggagacgagtgctccac

SEQ ID NO: 1741169 - DNA, 25 bp, Homo sapien
gtgcggagctccatacacacctgaa

SEQ ID NO: 1741170 - DNA, 25 bp, Homo sapien
aaacagaaacgtccaaacgtgtgcg

SEQ ID NO: 1741171 - DNA, 25 bp, Homo sapien
cacgtgaaagggacgagtggtccac

SEQ ID NO: 1741172 - DNA, 25 bp, Homo sapien
gaaaatattgcgagctcaggtccaa

SEQ ID NO: 1741173 - DNA, 25 bp, Homo sapien
ccacacaggtgtgggccgatgcttc

SEQ ID NO: 1741174 - DNA, 25 bp, Homo sapien
cacacaggtgtgggccgatgcttca

SEQ ID NO: 1741175 - DNA, 25 bp, Homo sapien
acacaggtgtgggccgatgcttcag

SEQ ID NO: 1741176 - DNA, 25 bp, Homo sapien
cacaggtgtgggccgatgcttcagc

SEQ ID NO: 1741177 - DNA, 25 bp, Homo sapien
tccattttgactgctcctcagacag

SEQ ID NO: 1741178 - DNA, 25 bp, Homo sapien
gcggataattgccaaggccagagcc

SEQ ID NO: 1741179 - DNA, 25 bp, Homo sapien
tgctggttttgagcggataattgcc

SEQ ID NO: 1741180 - DNA, 25 bp, Homo sapien
taacttcagcttccaagatttcaac

SEQ ID NO: 1741181 - DNA, 25 bp, Homo sapien
tcttaaaggatcctgaacaaagcct

SEQ ID NO: 1741182 - DNA, 25 bp, Homo sapien
cactcttaaaggatcctgaacaaag

SEQ ID NO: 1741183 - DNA, 25 bp, Homo sapien
ttaaaggatcctgaacaaagcctgc

SEQ ID NO: 1741184 - DNA, 25 bp, Homo sapien
aaaggatcctgaacaaagcctgctc

SEQ ID NO: 1741185 - DNA, 25 bp, Homo sapien
gttctcttccatagatcaggaagat

SEQ ID NO: 1741186 - DNA, 25 bp, Homo sapien
tctcttccatagatcaggaagatga

SEQ ID NO: 1741187 - DNA, 25 bp, Homo sapien
ttctcttccatagatcaggaagatg

SEQ ID NO: 1741188 - DNA, 25 bp, Homo sapien
ctcggaagacaaataggagaagatg

SEQ ID NO: 1741189 - DNA, 25 bp, Homo sapien
cacagccacataaagcagcccacag

SEQ ID NO: 1741190 - DNA, 25 bp, Homo sapien
ttggactgatttctgctcggaagac

SEQ ID NO: 1741191 - DNA, 25 bp, Homo sapien
gatttctgctcggaagacaaatagg

SEQ ID NO: 1741192 - DNA, 25 bp, Homo sapien
tgtcagaaaggtccacatcagttcc

SEQ ID NO: 1741193 - DNA, 25 bp, Homo sapien
tccatgtcagaaaggtccacatcag

SEQ ID NO: 1741194 - DNA, 25 bp, Homo sapien
aaaggtccacatcagttccttccat

SEQ ID NO: 1741195 - DNA, 25 bp, Homo sapien
aaaaggtccatgtcagaaaggtcca

SEQ ID NO: 1741196 - DNA, 25 bp, Homo sapien
agcagcacttcccaatatgcacaga

SEQ ID NO: 1741197 - DNA, 25 bp, Homo sapien
cagcacttcccaatatgcacagaga

SEQ ID NO: 1741198 - DNA, 25 bp, Homo sapien
caagtccaaacccagctgtgccagc

SEQ ID NO: 1741199 - DNA, 25 bp, Homo sapien
gagcccaagtccaaacccagctgtg

SEQ ID NO: 1741200 - DNA, 25 bp, Homo sapien
taaatcatgcaataaaaagcacctc

SEQ ID NO: 1741201 - DNA, 25 bp, Homo sapien
ttgcaaatgttcagcgtactgccaa

SEQ ID NO: 1741202 - DNA, 25 bp, Homo sapien
tcatagccagcttatataagaagtc

SEQ ID NO: 1741203 - DNA, 25 bp, Homo sapien
tcagcgtactgccaataatatttca

SEQ ID NO: 1741204 - DNA, 25 bp, Homo sapien
tttattcctaagagaagcagaccca

SEQ ID NO: 1741205 - DNA, 25 bp, Homo sapien
acttttgattctggactgaaactgg

SEQ ID NO: 1741206 - DNA, 25 bp, Homo sapien
ctaagagaagcagacccataacaca

SEQ ID NO: 1741207 - DNA, 25 bp, Homo sapien
gtaacacctgaattcctacattttc

SEQ ID NO: 1741208 - DNA, 25 bp, Homo sapien
ttgtggaggtatcaccccaagagaa

SEQ ID NO: 1741209 - DNA, 25 bp, Homo sapien
taaccctggagggtccagaatcacc

SEQ ID NO: 1741210 - DNA, 25 bp, Homo sapien
tctgagagaccctctcccgtttttg

SEQ ID NO: 1741211 - DNA, 25 bp, Homo sapien
cagaatcaccactcacatctgagag

SEQ ID NO: 1741212 - DNA, 25 bp, Homo sapien
tcaatgtgtgaatgctaccatgagg

SEQ ID NO: 1741213 - DNA, 25 bp, Homo sapien
caatgtgtgaatgctaccatgagga

SEQ ID NO: 1741214 - DNA, 25 bp, Homo sapien
aatgtgtgaatgctaccatgaggaa

SEQ ID NO: 1741215 - DNA, 25 bp, Homo sapien
gcctccaactgggaggaaacgtatc

SEQ ID NO: 1741216 - DNA, 25 bp, Homo sapien
ctgagcctccaactgggaggaaacg

SEQ ID NO: 1741217 - DNA, 25 bp, Homo sapien
gagcctccaactgggaggaaacgta

SEQ ID NO: 1741218 - DNA, 25 bp, Homo sapien
tgagcctccaactgggaggaaacgt

SEQ ID NO: 1741219 - DNA, 25 bp, Homo sapien
caaggtcttttcacaagaggcagtg

SEQ ID NO: 1741220 - DNA, 25 bp, Homo sapien
gattttgcaggatagcacaaggtct

SEQ ID NO: 1741221 - DNA, 25 bp, Homo sapien
tgctcattcgacaaatcacatccag

SEQ ID NO: 1741222 - DNA, 25 bp, Homo sapien
gacaggtctgaggattcagttctct

SEQ ID NO: 1741223 - DNA, 25 bp, Homo sapien
gataagttatagtcactgatcagac

SEQ ID NO: 1741224 - DNA, 25 bp, Homo sapien
tttcctaaaatagcatgtagtaggg

SEQ ID NO: 1741225 - DNA, 25 bp, Homo sapien
gctaaagtaccaacagcttctgtcc

SEQ ID NO: 1741226 - DNA, 25 bp, Homo sapien
ttgggattacggtaaaaagtgatca

SEQ ID NO: 1741227 - DNA, 25 bp, Homo sapien
aatgtcatggtgttaataagagctg

SEQ ID NO: 1741228 - DNA, 25 bp, Homo sapien
cacaaagagataatatacagcttcc

SEQ ID NO: 1741229 - DNA, 25 bp, Homo sapien
gaaaatcagctgatggtccccttcc

SEQ ID NO: 1741230 - DNA, 25 bp, Homo sapien
gtggaaaatagtgacacaaagagat

SEQ ID NO: 1741231 - DNA, 25 bp, Homo sapien
cacagctttataggaagggaccagt

SEQ ID NO: 1741232 - DNA, 25 bp, Homo sapien
gacagtactagagggaatcaccaac

SEQ ID NO: 1741233 - DNA, 25 bp, Homo sapien
tgattgaagcaaaaacgacagtact

SEQ ID NO: 1741234 - DNA, 25 bp, Homo sapien
tatcagagatgcaacatagcacagc

SEQ ID NO: 1741235 - DNA, 25 bp, Homo sapien
tattgagggagtctcagtcaccagg

SEQ ID NO: 1741236 - DNA, 25 bp, Homo sapien
tttattgagggagtctcagtcacca

SEQ ID NO: 1741237 - DNA, 25 bp, Homo sapien
tatttattgagggagtctcagtcac

SEQ ID NO: 1741238 - DNA, 25 bp, Homo sapien
attgagggagtctcagtcaccaggc

SEQ ID NO: 1741239 - DNA, 25 bp, Homo sapien
tggtttttattaagatccatggaaa

SEQ ID NO: 1741240 - DNA, 25 bp, Homo sapien
ttttattaagatccatggaaataaa

SEQ ID NO: 1741241 - DNA, 25 bp, Homo sapien
tttttattaagatccatggaaataa

SEQ ID NO: 1741242 - DNA, 25 bp, Homo sapien
gtttttattaagatccatggaaata

SEQ ID NO: 1741243 - DNA, 25 bp, Homo sapien
tttcccaaggtaaccagactctgag

SEQ ID NO: 1741244 - DNA, 25 bp, Homo sapien
ttctcaacaagctgcaatttcccaa

SEQ ID NO: 1741245 - DNA, 25 bp, Homo sapien
caagctgcaatttcccaaggtaacc

SEQ ID NO: 1741246 - DNA, 25 bp, Homo sapien
caaggtaaccagactctgagagaca

SEQ ID NO: 1741247 - DNA, 25 bp, Homo sapien
gaaatgtctatcaggtattttggcc

SEQ ID NO: 1741248 - DNA, 25 bp, Homo sapien
tgtccaggccaatgtcctacagcac

SEQ ID NO: 1741249 - DNA, 25 bp, Homo sapien
tttggccaatgcaaaactccttagc

SEQ ID NO: 1741250 - DNA, 25 bp, Homo sapien
tatcttaactgtcagaacatctggg

SEQ ID NO: 1741251 - DNA, 25 bp, Homo sapien
cgtgacacatcataactggcttgct

SEQ ID NO: 1741252 - DNA, 25 bp, Homo sapien
gtcatcatgacctatacttgaagtg

SEQ ID NO: 1741253 - DNA, 25 bp, Homo sapien
gaaaatgttttcatagcgtgacaca

SEQ ID NO: 1741254 - DNA, 25 bp, Homo sapien
aagagtttctatctgtgctgagctc

SEQ ID NO: 1741255 - DNA, 25 bp, Homo sapien
tattttcaaaagagctcgacaaatg

SEQ ID NO: 1741256 - DNA, 25 bp, Homo sapien
gctcgacaaatgtattagccatatg

SEQ ID NO: 1741257 - DNA, 25 bp, Homo sapien
gcaatgatataagttcaactatgta

SEQ ID NO: 1741258 - DNA, 25 bp, Homo sapien
tatatgattctcgtctaaggtgaaa

SEQ ID NO: 1741259 - DNA, 25 bp, Homo sapien
aaaatgcttaggtaagtacctggct

SEQ ID NO: 1741260 - DNA, 25 bp, Homo sapien
tcaggatgaaacctaactgccactt

SEQ ID NO: 1741261 - DNA, 25 bp, Homo sapien
ccactgttgtgccttaaggttcata

SEQ ID NO: 1741262 - DNA, 25 bp, Homo sapien
tgtggaattggaagatggactgcct

SEQ ID NO: 1741263 - DNA, 25 bp, Homo sapien
tgcaaatgccttgtttccctgcctc

SEQ ID NO: 1741264 - DNA, 25 bp, Homo sapien
tattgactgctaagagaaagcttgg

SEQ ID NO: 1741265 - DNA, 25 bp, Homo sapien
ccataatatggcgttcagaaaatct

SEQ ID NO: 1741266 - DNA, 25 bp, Homo sapien
aaagcagagctgtcaatattttccc

SEQ ID NO: 1741267 - DNA, 25 bp, Homo sapien
ggtccagtctggctttaccatatta

SEQ ID NO: 1741268 - DNA, 25 bp, Homo sapien
cacagttaggcagatgacaagtatg

SEQ ID NO: 1741269 - DNA, 25 bp, Homo sapien
taagccttccggcaggtttcttcaa

SEQ ID NO: 1741270 - DNA, 25 bp, Homo sapien
cagtttaagttatgcctaagagaaa

SEQ ID NO: 1741271 - DNA, 25 bp, Homo sapien
accacacccgggtgggatatgccat

SEQ ID NO: 1741272 - DNA, 25 bp, Homo sapien
caccacacccgggtgggatatgcca

SEQ ID NO: 1741273 - DNA, 25 bp, Homo sapien
ccacacccgggtgggatatgccatt

SEQ ID NO: 1741274 - DNA, 25 bp, Homo sapien
cacacccgggtgggatatgccattt

SEQ ID NO: 1741275 - DNA, 25 bp, Homo sapien
tttctatgcacggattagagctcat

SEQ ID NO: 1741276 - DNA, 25 bp, Homo sapien
agctctttctatgcacggattagag

SEQ ID NO: 1741277 - DNA, 25 bp, Homo sapien
tagctctttctatgcacggattaga

SEQ ID NO: 1741278 - DNA, 25 bp, Homo sapien
tctttctatgcacggattagagctc

SEQ ID NO: 1741279 - DNA, 25 bp, Homo sapien
gtcatcagacgtgggatatttgttt

SEQ ID NO: 1741280 - DNA, 25 bp, Homo sapien
aaaatatatcatttaagtcatcaga

SEQ ID NO: 1741281 - DNA, 25 bp, Homo sapien
tttaagtcatcagacgtgggatatt

SEQ ID NO: 1741282 - DNA, 25 bp, Homo sapien
taagtcatcagacgtgggatatttg

SEQ ID NO: 1741283 - DNA, 25 bp, Homo sapien
ggctgtaagtctcactacccaggag

SEQ ID NO: 1741284 - DNA, 25 bp, Homo sapien
cagaaatgatacatgcagaccgggt

SEQ ID NO: 1741285 - DNA, 25 bp, Homo sapien
caacagtgcattgaggacacatggc

SEQ ID NO: 1741286 - DNA, 25 bp, Homo sapien
ttagattagaggagtgggttccacc

SEQ ID NO: 1741287 - DNA, 25 bp, Homo sapien
ttgttttaagcgtgagagctgccag

SEQ ID NO: 1741288 - DNA, 25 bp, Homo sapien
gcttggctctcatcctcccttggag

SEQ ID NO: 1741289 - DNA, 25 bp, Homo sapien
cactgtcacagagcctagcgcttgg

SEQ ID NO: 1741290 - DNA, 25 bp, Homo sapien
gctgatgaccaaagtgttagcccaa

SEQ ID NO: 1741291 - DNA, 25 bp, Homo sapien
gaggagagagtaagcatcctccaca

SEQ ID NO: 1741292 - DNA, 25 bp, Homo sapien
aagggaggagagagtaagcatcctc

SEQ ID NO: 1741293 - DNA, 25 bp, Homo sapien
ctgatgatgagaattaggtggagga

SEQ ID NO: 1741294 - DNA, 25 bp, Homo sapien
ttcttctgctgatgatgagaattag

SEQ ID NO: 1741295 - DNA, 25 bp, Homo sapien
tcagtaactctgcatctgtcttccc

SEQ ID NO: 1741296 - DNA, 25 bp, Homo sapien
agtaactctgcatctgtcttcccct

SEQ ID NO: 1741297 - DNA, 25 bp, Homo sapien
cagtaactctgcatctgtcttcccc

SEQ ID NO: 1741298 - DNA, 25 bp, Homo sapien
tcagatgcacgactcaggaaagcga

SEQ ID NO: 1741299 - DNA, 25 bp, Homo sapien
gatgcacgactcaggaaagcgatga

SEQ ID NO: 1741300 - DNA, 25 bp, Homo sapien
aaagcgatgacaacccactaatgtc

SEQ ID NO: 1741301 - DNA, 25 bp, Homo sapien
aagcgatgacaacccactaatgtca

SEQ ID NO: 1741302 - DNA, 25 bp, Homo sapien
cctggcatcacagatattggtgcat

SEQ ID NO: 1741303 - DNA, 25 bp, Homo sapien
tatgatcattgatacatctcctggc

SEQ ID NO: 1741304 - DNA, 25 bp, Homo sapien
gacaggatcacaatcttcaagagta

SEQ ID NO: 1741305 - DNA, 25 bp, Homo sapien
gcatgtgactcccaagactgtattt

SEQ ID NO: 1741306 - DNA, 25 bp, Homo sapien
tcagatgtagatccggtagtaaaca

SEQ ID NO: 1741307 - DNA, 25 bp, Homo sapien
aatctcagatgtagatccggtagta

SEQ ID NO: 1741308 - DNA, 25 bp, Homo sapien
tctcagatgtagatccggtagtaaa

SEQ ID NO: 1741309 - DNA, 25 bp, Homo sapien
agcaatctcagatgtagatccggta

SEQ ID NO: 1741310 - DNA, 25 bp, Homo sapien
cactgcagtcatcattgatcagcaa

SEQ ID NO: 1741311 - DNA, 25 bp, Homo sapien
ggtgctgctgttaacgtactgtagc

SEQ ID NO: 1741312 - DNA, 25 bp, Homo sapien
tactgtagctatcactgcagtcatc

SEQ ID NO: 1741313 - DNA, 25 bp, Homo sapien
ccaacttgaatcatgtttctgatgg

SEQ ID NO: 1741314 - DNA, 25 bp, Homo sapien
catcatgtctcctgaggagtgttca

SEQ ID NO: 1741315 - DNA, 25 bp, Homo sapien
ctgaggagtgttcaaacaggttggc

SEQ ID NO: 1741316 - DNA, 25 bp, Homo sapien
ttattgagatatccgtctgtttatt

SEQ ID NO: 1741317 - DNA, 25 bp, Homo sapien
gagatatccgtctgtttattcttgc

SEQ ID NO: 1741318 - DNA, 25 bp, Homo sapien
cccaaattgaaagacggtgttcttg

SEQ ID NO: 1741319 - DNA, 25 bp, Homo sapien
tgaaagacggtgttcttggtagatg

SEQ ID NO: 1741320 - DNA, 25 bp, Homo sapien
gaggatcgttggcttttcacactca

SEQ ID NO: 1741321 - DNA, 25 bp, Homo sapien
gtcttattttcgaggatcgttggct

SEQ ID NO: 1741322 - DNA, 25 bp, Homo sapien
cataaagctggtcatcatatttacg

SEQ ID NO: 1741323 - DNA, 25 bp, Homo sapien
gctggtcatcatatttacggaaaat

SEQ ID NO: 1741324 - DNA, 25 bp, Homo sapien
catatttacggaaaattgcctccat

SEQ ID NO: 1741325 - DNA, 25 bp, Homo sapien
tcatcatatttacggaaaattgcct

SEQ ID NO: 1741326 - DNA, 25 bp, Homo sapien
cggtgtagaacaaggcatccttctt

SEQ ID NO: 1741327 - DNA, 25 bp, Homo sapien
ctaatcggtgtagaacaaggcatcc

SEQ ID NO: 1741328 - DNA, 25 bp, Homo sapien
cagatgtcataatgaaagaggctgg

SEQ ID NO: 1741329 - DNA, 25 bp, Homo sapien
cacagatgtcataatgaaagaggct

SEQ ID NO: 1741330 - DNA, 25 bp, Homo sapien
gaactggagtcatgtcatcatcata

SEQ ID NO: 1741331 - DNA, 25 bp, Homo sapien
tcccttggcctatgtctcttcagtc

SEQ ID NO: 1741332 - DNA, 25 bp, Homo sapien
tcatcataaatttcccttggcctat

SEQ ID NO: 1741333 - DNA, 25 bp, Homo sapien
tccacaatataagaccattgaattt

SEQ ID NO: 1741334 - DNA, 25 bp, Homo sapien
tgtagactttgttcttatttccaca

SEQ ID NO: 1741335 - DNA, 25 bp, Homo sapien
ctctcaggccacatggtttgaaaat

SEQ ID NO: 1741336 - DNA, 25 bp, Homo sapien
gccttttagatctctcaggccacat

SEQ ID NO: 1741337 - DNA, 25 bp, Homo sapien
gcatgatcaaagccttttagatctc

SEQ ID NO: 1741338 - DNA, 25 bp, Homo sapien
aatggcatactttaatctcccaagg

SEQ ID NO: 1741339 - DNA, 25 bp, Homo sapien
gcaatagattctagcaggtttttca

SEQ ID NO: 1741340 - DNA, 25 bp, Homo sapien
cctcttgtcaatggcatactttaat

SEQ ID NO: 1741341 - DNA, 25 bp, Homo sapien
catgttctctgcaatagattctagc

SEQ ID NO: 1741342 - DNA, 25 bp, Homo sapien
tagatgtatactttgaatagttcat

SEQ ID NO: 1741343 - DNA, 25 bp, Homo sapien
tgcttagatgtatactttgaatagt

SEQ ID NO: 1741344 - DNA, 25 bp, Homo sapien
ctctgcttagatgtatactttgaat

SEQ ID NO: 1741345 - DNA, 25 bp, Homo sapien
cttagatgtatactttgaatagttc

SEQ ID NO: 1741346 - DNA, 25 bp, Homo sapien
caataagtgcctgatgatgccccat

SEQ ID NO: 1741347 - DNA, 25 bp, Homo sapien
cattacgagaaagctgcctcttcag

SEQ ID NO: 1741348 - DNA, 25 bp, Homo sapien
ttacacgggaaaaccatcatatggg

SEQ ID NO: 1741349 - DNA, 25 bp, Homo sapien
tgtcagacacactgtgaatgccact

SEQ ID NO: 1741350 - DNA, 25 bp, Homo sapien
gcttcttgaggacccttcccattaa

SEQ ID NO: 1741351 - DNA, 25 bp, Homo sapien
tatgcttcttgaggacccttcccat

SEQ ID NO: 1741352 - DNA, 25 bp, Homo sapien
tgcttcttgaggacccttcccatta

SEQ ID NO: 1741353 - DNA, 25 bp, Homo sapien
tttatgcttcttgaggacccttccc

SEQ ID NO: 1741354 - DNA, 25 bp, Homo sapien
aggaaacgagaagcatttattgtca

SEQ ID NO: 1741355 - DNA, 25 bp, Homo sapien
gcatttattgtcaccaggggttgct

SEQ ID NO: 1741356 - DNA, 25 bp, Homo sapien
agcatttattgtcaccaggggttgc

SEQ ID NO: 1741357 - DNA, 25 bp, Homo sapien
ctgaggaaacgagaagcatttattg

SEQ ID NO: 1741358 - DNA, 25 bp, Homo sapien
ctgaagctttccattctgagcttcc

SEQ ID NO: 1741359 - DNA, 25 bp, Homo sapien
tgggtccatttgctgaagctttcca

SEQ ID NO: 1741360 - DNA, 25 bp, Homo sapien
ttaaaatgggtccatttgctgaagc

SEQ ID NO: 1741361 - DNA, 25 bp, Homo sapien
aaatgggtccatttgctgaagcttt

SEQ ID NO: 1741362 - DNA, 25 bp, Homo sapien
ttaaactagcagacactggtccttc

SEQ ID NO: 1741363 - DNA, 25 bp, Homo sapien
taaactagcagacactggtccttcg

SEQ ID NO: 1741364 - DNA, 25 bp, Homo sapien
aactagcagacactggtccttcgga

SEQ ID NO: 1741365 - DNA, 25 bp, Homo sapien
actagcagacactggtccttcggac

SEQ ID NO: 1741366 - DNA, 25 bp, Homo sapien
acttggcattcttgttatcaacaga

SEQ ID NO: 1741367 - DNA, 25 bp, Homo sapien
gacacttcaagttggtgcttctcac

SEQ ID NO: 1741368 - DNA, 25 bp, Homo sapien
gcttctcactttatacttggcattc

SEQ ID NO: 1741369 - DNA, 25 bp, Homo sapien
tcttgttatcaacagaataaagcat

SEQ ID NO: 1741370 - DNA, 25 bp, Homo sapien
tggagacgtgtactttctacttgcc

SEQ ID NO: 1741371 - DNA, 25 bp, Homo sapien
tgttactgttgttggagacgtgtac

SEQ ID NO: 1741372 - DNA, 25 bp, Homo sapien
taaaggactgtaatgcaccttgttg

SEQ ID NO: 1741373 - DNA, 25 bp, Homo sapien
tctacttgcctgacaatcaaagagt

SEQ ID NO: 1741374 - DNA, 25 bp, Homo sapien
tccatgggaaacaattatcttgctg

SEQ ID NO: 1741375 - DNA, 25 bp, Homo sapien
tgcttctccaggtgtgcttttaggt

SEQ ID NO: 1741376 - DNA, 25 bp, Homo sapien
ggaagtgcagcacactaccattcca

SEQ ID NO: 1741377 - DNA, 25 bp, Homo sapien
taggtggacccatatctggtccatg

SEQ ID NO: 1741378 - DNA, 25 bp, Homo sapien
tatttcccaggcataaaccagatag

SEQ ID NO: 1741379 - DNA, 25 bp, Homo sapien
taaacaaggtctttccagctgtctg

SEQ ID NO: 1741380 - DNA, 25 bp, Homo sapien
ctgacataggactgccttctcagtc

SEQ ID NO: 1741381 - DNA, 25 bp, Homo sapien
cacataccgcacagtgctggatgct

SEQ ID NO: 1741382 - DNA, 25 bp, Homo sapien
ttggtcagactcagatagtcccacg

SEQ ID NO: 1741383 - DNA, 25 bp, Homo sapien
gggatagactcaagttggtcagact

SEQ ID NO: 1741384 - DNA, 25 bp, Homo sapien
aggaagggatagactcaagttggtc

SEQ ID NO: 1741385 - DNA, 25 bp, Homo sapien
cagactcagatagtcccacggccat

SEQ ID NO: 1741386 - DNA, 25 bp, Homo sapien
taatagagcttggtttggtatcatc

SEQ ID NO: 1741387 - DNA, 25 bp, Homo sapien
tgaagagctgtcttactacttaagt

SEQ ID NO: 1741388 - DNA, 25 bp, Homo sapien
ttggaatgcgtttattctgtgagct

SEQ ID NO: 1741389 - DNA, 25 bp, Homo sapien
gcatttcacataggcgttaatagag

SEQ ID NO: 1741390 - DNA, 25 bp, Homo sapien
gcccatgaaggcagcattggtggtg

SEQ ID NO: 1741391 - DNA, 25 bp, Homo sapien
cccatgaaggcagcattggtggtgc

SEQ ID NO: 1741392 - DNA, 25 bp, Homo sapien
ccatgaaggcagcattggtggtgct

SEQ ID NO: 1741393 - DNA, 25 bp, Homo sapien
gaaggcagcattggtggtgctgtcc

SEQ ID NO: 1741394 - DNA, 25 bp, Homo sapien
tgtgtatgcattctgccaccagaag

SEQ ID NO: 1741395 - DNA, 25 bp, Homo sapien
tacgaatcttggagcttatataggg

SEQ ID NO: 1741396 - DNA, 25 bp, Homo sapien
tgtatgcattctgccaccagaagat

SEQ ID NO: 1741397 - DNA, 25 bp, Homo sapien
tatatagggtggctggaatgtgtat

SEQ ID NO: 1741398 - DNA, 25 bp, Homo sapien
cagagcctccttcacatctgtgcat

SEQ ID NO: 1741399 - DNA, 25 bp, Homo sapien
tttcagtttcccacacttgccagag

SEQ ID NO: 1741400 - DNA, 25 bp, Homo sapien
cttgccagagcctccttcacatctg

SEQ ID NO: 1741401 - DNA, 25 bp, Homo sapien
tgccagagcctccttcacatctgtg

SEQ ID NO: 1741402 - DNA, 25 bp, Homo sapien
tctctcaaaagaggaactacctggc

SEQ ID NO: 1741403 - DNA, 25 bp, Homo sapien
gcagctctctcaaaagaggaactac

SEQ ID NO: 1741404 - DNA, 25 bp, Homo sapien
cctggccgtattatagtctttagtc

SEQ ID NO: 1741405 - DNA, 25 bp, Homo sapien
gaggaactacctggccgtattatag

SEQ ID NO: 1741406 - DNA, 25 bp, Homo sapien
tgttcttgtaggttgatatgcttac

SEQ ID NO: 1741407 - DNA, 25 bp, Homo sapien
ctactgttcttgtaggttgatatgc

SEQ ID NO: 1741408 - DNA, 25 bp, Homo sapien
ctgttcttgtaggttgatatgctta

SEQ ID NO: 1741409 - DNA, 25 bp, Homo sapien
tactgttcttgtaggttgatatgct

SEQ ID NO: 1741410 - DNA, 25 bp, Homo sapien
taccataaaacctagagtaattggc

SEQ ID NO: 1741411 - DNA, 25 bp, Homo sapien
agtgtttgccctgacaagttgtaga

SEQ ID NO: 1741412 - DNA, 25 bp, Homo sapien
tattcttgcggatactataccataa

SEQ ID NO: 1741413 - DNA, 25 bp, Homo sapien
gcgtaaggcattccctccatgtcct

SEQ ID NO: 1741414 - DNA, 25 bp, Homo sapien
tctagctctggtgggtatcttctgg

SEQ ID NO: 1741415 - DNA, 25 bp, Homo sapien
tcaggttgaaatctgcagtaacact

SEQ ID NO: 1741416 - DNA, 25 bp, Homo sapien
cagtaacactaccagataatgacag

SEQ ID NO: 1741417 - DNA, 25 bp, Homo sapien
tttgtgctgtcaacataagccctat

SEQ ID NO: 1741418 - DNA, 25 bp, Homo sapien
tagcatgcttcttatgtttagccat

SEQ ID NO: 1741419 - DNA, 25 bp, Homo sapien
tcttctttttgtagcatgcttctta

SEQ ID NO: 1741420 - DNA, 25 bp, Homo sapien
ccactggctttcattttggttcttc

SEQ ID NO: 1741421 - DNA, 25 bp, Homo sapien
ggttcttctttttgtagcatgcttc

SEQ ID NO: 1741422 - DNA, 25 bp, Homo sapien
gggccacgggcaagtgtgtcttcat

SEQ ID NO: 1741423 - DNA, 25 bp, Homo sapien
gcatcattctcagtcagggccacgg

SEQ ID NO: 1741424 - DNA, 25 bp, Homo sapien
tcagggccacgggcaagtgtgtctt

SEQ ID NO: 1741425 - DNA, 25 bp, Homo sapien
catcattctcagtcagggccacggg

SEQ ID NO: 1741426 - DNA, 25 bp, Homo sapien
agtgacaaggtctggtggttggcca

SEQ ID NO: 1741427 - DNA, 25 bp, Homo sapien
cagaaatcttagctagaggaggggt

SEQ ID NO: 1741428 - DNA, 25 bp, Homo sapien
gtgacaaggtctggtggttggccat

SEQ ID NO: 1741429 - DNA, 25 bp, Homo sapien
tcttagctagaggaggggtcatgat

SEQ ID NO: 1741430 - DNA, 25 bp, Homo sapien
tcagccaatagggggcaaacaattt

SEQ ID NO: 1741431 - DNA, 25 bp, Homo sapien
atagggggcaaacaatttgggtctg

SEQ ID NO: 1741432 - DNA, 25 bp, Homo sapien
ggcaaacaatttgggtctgaccact

SEQ ID NO: 1741433 - DNA, 25 bp, Homo sapien
ggggcaaacaatttgggtctgacca

SEQ ID NO: 1741434 - DNA, 25 bp, Homo sapien
gcactactcctgatatagtcatctg

SEQ ID NO: 1741435 - DNA, 25 bp, Homo sapien
tactcctgatatagtcatctgactt

SEQ ID NO: 1741436 - DNA, 25 bp, Homo sapien
tatagtcatctgacttttgaaccat

SEQ ID NO: 1741437 - DNA, 25 bp, Homo sapien
acttcttaggtcagcactactcctg

SEQ ID NO: 1741438 - DNA, 25 bp, Homo sapien
tctaagaaaggccatgacatacctg

SEQ ID NO: 1741439 - DNA, 25 bp, Homo sapien
tgagcacttgctatgatgcgctttg

SEQ ID NO: 1741440 - DNA, 25 bp, Homo sapien
gacatacctgcatcattgtacacag

SEQ ID NO: 1741441 - DNA, 25 bp, Homo sapien
gaccttcctcctgaaagtataagca

SEQ ID NO: 1741442 - DNA, 25 bp, Homo sapien
atactgccaaaactgggaatgccca

SEQ ID NO: 1741443 - DNA, 25 bp, Homo sapien
tcagctcatactgccaaaactggga

SEQ ID NO: 1741444 - DNA, 25 bp, Homo sapien
tcatactgccaaaactgggaatgcc

SEQ ID NO: 1741445 - DNA, 25 bp, Homo sapien
gctcatactgccaaaactgggaatg

SEQ ID NO: 1741446 - DNA, 25 bp, Homo sapien
tatcccttcattatctgcctttgcc

SEQ ID NO: 1741447 - DNA, 25 bp, Homo sapien
tttattgtcaccgattgttgaggat

SEQ ID NO: 1741448 - DNA, 25 bp, Homo sapien
tttatcccttcattatctgcctttg

SEQ ID NO: 1741449 - DNA, 25 bp, Homo sapien
tcaccgattgttgaggattctattt

SEQ ID NO: 1741450 - DNA, 25 bp, Homo sapien
aaggatgttaccttgccacccaagc

SEQ ID NO: 1741451 - DNA, 25 bp, Homo sapien
gatgaaattaaggatgttaccttgc

SEQ ID NO: 1741452 - DNA, 25 bp, Homo sapien
attaaggatgttaccttgccaccca

SEQ ID NO: 1741453 - DNA, 25 bp, Homo sapien
gaaattaaggatgttaccttgccac

SEQ ID NO: 1741454 - DNA, 25 bp, Homo sapien
catttccttcaatacgaccatcaaa

SEQ ID NO: 1741455 - DNA, 25 bp, Homo sapien
atttccttcaatacgaccatcaaaa

SEQ ID NO: 1741456 - DNA, 25 bp, Homo sapien
ttcaatacgaccatcaaaagaaaag

SEQ ID NO: 1741457 - DNA, 25 bp, Homo sapien
tttccttcaatacgaccatcaaaag

SEQ ID NO: 1741458 - DNA, 25 bp, Homo sapien
gcaagaagataacatctctgacatc

SEQ ID NO: 1741459 - DNA, 25 bp, Homo sapien
tgtagcaagaagataacatctctga

SEQ ID NO: 1741460 - DNA, 25 bp, Homo sapien
tttgtagcaagaagataacatctct

SEQ ID NO: 1741461 - DNA, 25 bp, Homo sapien
aatttgtagcaagaagataacatct

SEQ ID NO: 1741462 - DNA, 25 bp, Homo sapien
gggccaaggctttcaatcattagac

SEQ ID NO: 1741463 - DNA, 25 bp, Homo sapien
catattttgacatcgctgtggcatg

SEQ ID NO: 1741464 - DNA, 25 bp, Homo sapien
tcgatgagctctatggacttgacca

SEQ ID NO: 1741465 - DNA, 25 bp, Homo sapien
tgatctgacccaagttgacatgtgc

SEQ ID NO: 1741466 - DNA, 25 bp, Homo sapien
gaaatgtcaaagtcacgtgccacca

SEQ ID NO: 1741467 - DNA, 25 bp, Homo sapien
tgaaccttcattgtagctccacctg

SEQ ID NO: 1741468 - DNA, 25 bp, Homo sapien
tctgagctcatatcctaagggaagc

SEQ ID NO: 1741469 - DNA, 25 bp, Homo sapien
gatgaggatcacatcaccaggatgc

SEQ ID NO: 1741470 - DNA, 25 bp, Homo sapien
ttaaatgatacaggtagaataggat

SEQ ID NO: 1741471 - DNA, 25 bp, Homo sapien
tgatacaggtagaataggatgctgt

SEQ ID NO: 1741472 - DNA, 25 bp, Homo sapien
aaatgatacaggtagaataggatgc

SEQ ID NO: 1741473 - DNA, 25 bp, Homo sapien
gatacaggtagaataggatgctgtg

SEQ ID NO: 1741474 - DNA, 25 bp, Homo sapien
aattgttagcggactttctctgttg

SEQ ID NO: 1741475 - DNA, 25 bp, Homo sapien
tcaaaaattgttagcggactttctc

SEQ ID NO: 1741476 - DNA, 25 bp, Homo sapien
tcttttttactagatgtcggctgag

SEQ ID NO: 1741477 - DNA, 25 bp, Homo sapien
gtgagtagctacagtttttaacatg

SEQ ID NO: 1741478 - DNA, 25 bp, Homo sapien
ctgtgcacggcgcaaagtatgccgg

SEQ ID NO: 1741479 - DNA, 25 bp, Homo sapien
cgcggaacttctggcgggcgcaagc

SEQ ID NO: 1741480 - DNA, 25 bp, Homo sapien
aaagtatgccgggatgggtgtggag

SEQ ID NO: 1741481 - DNA, 25 bp, Homo sapien
atgggtgtggaggccgcggaacttc

SEQ ID NO: 1741482 - DNA, 25 bp, Homo sapien
cggccgaaggggccaatgcgcacca

SEQ ID NO: 1741483 - DNA, 25 bp, Homo sapien
tccatagtaactaccggccgacggc

SEQ ID NO: 1741484 - DNA, 25 bp, Homo sapien
ccatagtaactaccggccgacggcg

SEQ ID NO: 1741485 - DNA, 25 bp, Homo sapien
ggggccaatgcgcaccagggcttgc

SEQ ID NO: 1741486 - DNA, 25 bp, Homo sapien
cacctcgcgggtagcagtttgggct

SEQ ID NO: 1741487 - DNA, 25 bp, Homo sapien
gatgtaatctagacggcgacaaacg

SEQ ID NO: 1741488 - DNA, 25 bp, Homo sapien
gctggaggctctgcgtgatgtaatc

SEQ ID NO: 1741489 - DNA, 25 bp, Homo sapien
cagttccacgaacactcgggtcgga

SEQ ID NO: 1741490 - DNA, 25 bp, Homo sapien
catttactcctagtcctctcttgca

SEQ ID NO: 1741491 - DNA, 25 bp, Homo sapien
gctcatactgcaatgggttaaaggg

SEQ ID NO: 1741492 - DNA, 25 bp, Homo sapien
cttcagcatttactcctagtcctct

SEQ ID NO: 1741493 - DNA, 25 bp, Homo sapien
taaaggaatcttacagtagtcttgc

SEQ ID NO: 1741494 - DNA, 25 bp, Homo sapien
aaggtaagttctcgtctgctgttcc

SEQ ID NO: 1741495 - DNA, 25 bp, Homo sapien
cttgatgtgtcatgatgtaaggtaa

SEQ ID NO: 1741496 - DNA, 25 bp, Homo sapien
tgctgttcctgtggaatacctccta

SEQ ID NO: 1741497 - DNA, 25 bp, Homo sapien
tcctactgggtgtcatggtggctga

SEQ ID NO: 1741498 - DNA, 25 bp, Homo sapien
ttgtcagatggaagctgggcctgca

SEQ ID NO: 1741499 - DNA, 25 bp, Homo sapien
gctgtgaccgtgtgcaagcaacctg

SEQ ID NO: 1741500 - DNA, 25 bp, Homo sapien
tccactgtcaagagaataaagaagc

SEQ ID NO: 1741501 - DNA, 25 bp, Homo sapien
taattccctggcattacactctggc

SEQ ID NO: 1741502 - DNA, 25 bp, Homo sapien
tgctaagttggcaaaattacagaag

SEQ ID NO: 1741503 - DNA, 25 bp, Homo sapien
aaataatgcctactgtgccaagtga

SEQ ID NO: 1741504 - DNA, 25 bp, Homo sapien
aatggcagtatcatttcttggactg

SEQ ID NO: 1741505 - DNA, 25 bp, Homo sapien
catttcttggactgctaagttggca

SEQ ID NO: 1741506 - DNA, 25 bp, Homo sapien
cttggaacctatgccagcccagtag

SEQ ID NO: 1741507 - DNA, 25 bp, Homo sapien
tgctagcagcaagagaggctctgtg

SEQ ID NO: 1741508 - DNA, 25 bp, Homo sapien
gaacctatgccagcccagtagtttt

SEQ ID NO: 1741509 - DNA, 25 bp, Homo sapien
tgtgctagcagcaagagaggctctg

SEQ ID NO: 1741510 - DNA, 25 bp, Homo sapien
cgttctcagatctcaaactccgtgc

SEQ ID NO: 1741511 - DNA, 25 bp, Homo sapien
cagatctcaaactccgtgctgggag

SEQ ID NO: 1741512 - DNA, 25 bp, Homo sapien
acgtatgaggtgtcagttggcccct

SEQ ID NO: 1741513 - DNA, 25 bp, Homo sapien
gtccgttctcagatctcaaactccg

SEQ ID NO: 1741514 - DNA, 25 bp, Homo sapien
tttgagtgagaactcaacctagcct

SEQ ID NO: 1741515 - DNA, 25 bp, Homo sapien
gagtgagaactcaacctagccttgc

SEQ ID NO: 1741516 - DNA, 25 bp, Homo sapien
tgagaactcaacctagccttgctag

SEQ ID NO: 1741517 - DNA, 25 bp, Homo sapien
cccacctttgagtgagaactcaacc

SEQ ID NO: 1741518 - DNA, 25 bp, Homo sapien
agtccttctgttgcagcacaagaga

SEQ ID NO: 1741519 - DNA, 25 bp, Homo sapien
gggactgacatgtactactgactct

SEQ ID NO: 1741520 - DNA, 25 bp, Homo sapien
gatgtgcatgtaggtcaactgcccc

SEQ ID NO: 1741521 - DNA, 25 bp, Homo sapien
tctctacataagtaaggtttgttcc

SEQ ID NO: 1741522 - DNA, 25 bp, Homo sapien
tgtgataagcattttccactctcct

SEQ ID NO: 1741523 - DNA, 25 bp, Homo sapien
ttccactctcctaaaatcctttgtc

SEQ ID NO: 1741524 - DNA, 25 bp, Homo sapien
ctctcctaaaatcctttgtcacagt

SEQ ID NO: 1741525 - DNA, 25 bp, Homo sapien
tgataagcattttccactctcctaa

SEQ ID NO: 1741526 - DNA, 25 bp, Homo sapien
tttctgaatgttaaccaacctggga

SEQ ID NO: 1741527 - DNA, 25 bp, Homo sapien
gcagtgtttagcacacaggtctttc

SEQ ID NO: 1741528 - DNA, 25 bp, Homo sapien
tatacctgcatgtaaaggatacgtg

SEQ ID NO: 1741529 - DNA, 25 bp, Homo sapien
tgtacctgatcgtaggcacaaagca

SEQ ID NO: 1741530 - DNA, 25 bp, Homo sapien
cctcaccttatacaatgcagaacat

SEQ ID NO: 1741531 - DNA, 25 bp, Homo sapien
gagagagacataagataacctcacc

SEQ ID NO: 1741532 - DNA, 25 bp, Homo sapien
cccaccttagcggttgtagacatga

SEQ ID NO: 1741533 - DNA, 25 bp, Homo sapien
cccttaacacaaggtcaatatgcaa

SEQ ID NO: 1741534 - DNA, 25 bp, Homo sapien
gtctgatgtactgtttcaagatttt

SEQ ID NO: 1741535 - DNA, 25 bp, Homo sapien
aaaagtatagccagactatgaggtc

SEQ ID NO: 1741536 - DNA, 25 bp, Homo sapien
aaagcctatttgatacttataacta

SEQ ID NO: 1741537 - DNA, 25 bp, Homo sapien
aatgaaatgacacgatattattttc

SEQ ID NO: 1741538 - DNA, 25 bp, Homo sapien
tatgatagaactggggtgggctgat

SEQ ID NO: 1741539 - DNA, 25 bp, Homo sapien
tctcaacagaacctggagtatgata

SEQ ID NO: 1741540 - DNA, 25 bp, Homo sapien
ggctgatgacaacagagctatctag

SEQ ID NO: 1741541 - DNA, 25 bp, Homo sapien
ctgatgacaacagagctatctagct

SEQ ID NO: 1741542 - DNA, 25 bp, Homo sapien
tatgacactcaatgaaatgtagcac

SEQ ID NO: 1741543 - DNA, 25 bp, Homo sapien
atatgacactcaatgaaatgtagca

SEQ ID NO: 1741544 - DNA, 25 bp, Homo sapien
gagagattattaatatgacactcaa

SEQ ID NO: 1741545 - DNA, 25 bp, Homo sapien
gattattaatatgacactcaatgaa

SEQ ID NO: 1741546 - DNA, 25 bp, Homo sapien
ggtgatcatctatttggccttccca

SEQ ID NO: 1741547 - DNA, 25 bp, Homo sapien
tttgcgccacgcattctcaacagca

SEQ ID NO: 1741548 - DNA, 25 bp, Homo sapien
tggccaacaaggttacagacttctt

SEQ ID NO: 1741549 - DNA, 25 bp, Homo sapien
acttcttgagctttgcgccacgcat

SEQ ID NO: 1741550 - DNA, 25 bp, Homo sapien
caaaggtgcttttttctcttctctt

SEQ ID NO: 1741551 - DNA, 25 bp, Homo sapien
tcaaaggtgcttttttctcttctct

SEQ ID NO: 1741552 - DNA, 25 bp, Homo sapien
ttttggaaagaaatagcttatctcc

SEQ ID NO: 1741553 - DNA, 25 bp, Homo sapien
tccaagagtgtttttcagagtagtc

SEQ ID NO: 1741554 - DNA, 25 bp, Homo sapien
tcaggacaaacgtaaacattataaa

SEQ ID NO: 1741555 - DNA, 25 bp, Homo sapien
gaacataagtattctgtgggactat

SEQ ID NO: 1741556 - DNA, 25 bp, Homo sapien
aaaaattatgaaatgcaagggtcaa

SEQ ID NO: 1741557 - DNA, 25 bp, Homo sapien
cacatgtgcttgtatgaactgtcag

SEQ ID NO: 1741558 - DNA, 25 bp, Homo sapien
attatgaaatgcaagggtcaatatc

SEQ ID NO: 1741559 - DNA, 25 bp, Homo sapien
gaaatgcaagggtcaatatctgtcc

SEQ ID NO: 1741560 - DNA, 25 bp, Homo sapien
taaaaatgtgcgtacagggccagat

SEQ ID NO: 1741561 - DNA, 25 bp, Homo sapien
tttaggcatgctagaacaacctggg

SEQ ID NO: 1741562 - DNA, 25 bp, Homo sapien
aactgttagatgtgagatagccctc

SEQ ID NO: 1741563 - DNA, 25 bp, Homo sapien
gcatacttgatattggccctgagac

SEQ ID NO: 1741564 - DNA, 25 bp, Homo sapien
ttctgtacaactggatagtaacttc

SEQ ID NO: 1741565 - DNA, 25 bp, Homo sapien
acaactggatagtaacttctttttg

SEQ ID NO: 1741566 - DNA, 25 bp, Homo sapien
tttttttcttgatgcacaacctcat

SEQ ID NO: 1741567 - DNA, 25 bp, Homo sapien
ctacttttctgtacaactggatagt

SEQ ID NO: 1741568 - DNA, 25 bp, Homo sapien
aatatgatgcaaccaaatacagcat

SEQ ID NO: 1741569 - DNA, 25 bp, Homo sapien
ggcacaggtcccctaaataattcat

SEQ ID NO: 1741570 - DNA, 25 bp, Homo sapien
ccagtgtatgccatgtatcaagaaa

SEQ ID NO: 1741571 - DNA, 25 bp, Homo sapien
tctagtagactttgtggcacaggtc

SEQ ID NO: 1741572 - DNA, 25 bp, Homo sapien
tgctatcaactgacaactaaatttg

SEQ ID NO: 1741573 - DNA, 25 bp, Homo sapien
gcagataatcatatagtaactccca

SEQ ID NO: 1741574 - DNA, 25 bp, Homo sapien
tccttagcccatattcctgagaagg

SEQ ID NO: 1741575 - DNA, 25 bp, Homo sapien
tcttatcaacaaatctgacagagtt

SEQ ID NO: 1741576 - DNA, 25 bp, Homo sapien
gacagagttgagatatccttagccc

SEQ ID NO: 1741577 - DNA, 25 bp, Homo sapien
gtgcctggcctacccgggcatttta

SEQ ID NO: 1741578 - DNA, 25 bp, Homo sapien
agagcaacagcctcaaacaacgaca

SEQ ID NO: 1741579 - DNA, 25 bp, Homo sapien
ggtggtgtgcacctaatgtttcagc

SEQ ID NO: 1741580 - DNA, 25 bp, Homo sapien
cactaggttatgagtagaagctatt

SEQ ID NO: 1741581 - DNA, 25 bp, Homo sapien
ctacagtcttgtaagatactgggca

SEQ ID NO: 1741582 - DNA, 25 bp, Homo sapien
tgtctgatttgaattacccactgtg

SEQ ID NO: 1741583 - DNA, 25 bp, Homo sapien
tacccactgtgaactacagtcttgt

SEQ ID NO: 1741584 - DNA, 25 bp, Homo sapien
tctcttgaagagcagtgtctgattt

SEQ ID NO: 1741585 - DNA, 25 bp, Homo sapien
tgaaacagaaatatccttctgataa

SEQ ID NO: 1741586 - DNA, 25 bp, Homo sapien
ctgaaacagaaatatccttctgata

SEQ ID NO: 1741587 - DNA, 25 bp, Homo sapien
gaaacagaaatatccttctgataaa

SEQ ID NO: 1741588 - DNA, 25 bp, Homo sapien
catgataattcacaggtgacatggc

SEQ ID NO: 1741589 - DNA, 25 bp, Homo sapien
ttcatttgatgtgggattcatgata

SEQ ID NO: 1741590 - DNA, 25 bp, Homo sapien
gctatctgggagtaattgttggttg

SEQ ID NO: 1741591 - DNA, 25 bp, Homo sapien
taattgttggttgggatgttgaaga

SEQ ID NO: 1741592 - DNA, 25 bp, Homo sapien
tctcactcttataatgaaccaactt

SEQ ID NO: 1741593 - DNA, 25 bp, Homo sapien
tttaaaccctatgtagcaaagaata

SEQ ID NO: 1741594 - DNA, 25 bp, Homo sapien
aaaccctatgtagcaaagaatacag

SEQ ID NO: 1741595 - DNA, 25 bp, Homo sapien
tgcctggcctcctaataaagtttaa

SEQ ID NO: 1741596 - DNA, 25 bp, Homo sapien
tgtggacgacatgaatctgtatcac

SEQ ID NO: 1741597 - DNA, 25 bp, Homo sapien
caaaatgaaaccaatacagtcattc

SEQ ID NO: 1741598 - DNA, 25 bp, Homo sapien
caatgcttcagaggagtaatatttt

SEQ ID NO: 1741599 - DNA, 25 bp, Homo sapien
tatgcttactttgtacgtattgagc

SEQ ID NO: 1741600 - DNA, 25 bp, Homo sapien
tatttctaggtcaggtacggtggct

SEQ ID NO: 1741601 - DNA, 25 bp, Homo sapien
tatactacatcccatactgctgatc

SEQ ID NO: 1741602 - DNA, 25 bp, Homo sapien
tctgtgggtgtacaaaaagtatgga

SEQ ID NO: 1741603 - DNA, 25 bp, Homo sapien
cagtcttgactttcacttaggtaca

SEQ ID NO: 1741604 - DNA, 25 bp, Homo sapien
tcctagcagctgtatcaatatggca

SEQ ID NO: 1741605 - DNA, 25 bp, Homo sapien
aaactagctctgatcactgatgggc

SEQ ID NO: 1741606 - DNA, 25 bp, Homo sapien
tagtattttgggatttcagggcaga

SEQ ID NO: 1741607 - DNA, 25 bp, Homo sapien
ccttaggtgacaacgtgtaatttcg

SEQ ID NO: 1741608 - DNA, 25 bp, Homo sapien
ctcttgtaactgataggccctcgcc

SEQ ID NO: 1741609 - DNA, 25 bp, Homo sapien
ttttgtagctatcgcacgacctagg

SEQ ID NO: 1741610 - DNA, 25 bp, Homo sapien
tatcctggactatggtggacacaca

SEQ ID NO: 1741611 - DNA, 25 bp, Homo sapien
tctgcccgggcttgatatcactttt

SEQ ID NO: 1741612 - DNA, 25 bp, Homo sapien
cacggagcgcgcacccagcaatcat

SEQ ID NO: 1741613 - DNA, 25 bp, Homo sapien
catgacagcgcggagcgccctggaa

SEQ ID NO: 1741614 - DNA, 25 bp, Homo sapien
tgtcccagcacggagcgcgcaccca

SEQ ID NO: 1741615 - DNA, 25 bp, Homo sapien
acccagcaatcatgacagcgcggag

SEQ ID NO: 1741616 - DNA, 25 bp, Homo sapien
ccaggacccggtgccagtaggccaa

SEQ ID NO: 1741617 - DNA, 25 bp, Homo sapien
cacaagataaagctcagttggaccg

SEQ ID NO: 1741618 - DNA, 25 bp, Homo sapien
taaagctcagttggaccgcggtaga

SEQ ID NO: 1741619 - DNA, 25 bp, Homo sapien
gtgctaacgccctccgctgttggtg

SEQ ID NO: 1741620 - DNA, 25 bp, Homo sapien
gcattctttacatggagtagctcat

SEQ ID NO: 1741621 - DNA, 25 bp, Homo sapien
tacgtatgttcaagtgccaaactca

SEQ ID NO: 1741622 - DNA, 25 bp, Homo sapien
tgggcttgtctctaaccactctgtt

SEQ ID NO: 1741623 - DNA, 25 bp, Homo sapien
gctgtcttggcaaactacgtatgtt

SEQ ID NO: 1741624 - DNA, 25 bp, Homo sapien
tctggctaatttgaaagacctgtct

SEQ ID NO: 1741625 - DNA, 25 bp, Homo sapien
gacctgtcttcgaaatctgaatttt

SEQ ID NO: 1741626 - DNA, 25 bp, Homo sapien
tgtacgttattccatacttctcaaa

SEQ ID NO: 1741627 - DNA, 25 bp, Homo sapien
ccaacaatttgtaggtttggttgct

SEQ ID NO: 1741628 - DNA, 25 bp, Homo sapien
tgaaactattgtgccaagcagccaa

SEQ ID NO: 1741629 - DNA, 25 bp, Homo sapien
tggtaaccatgcatccagcaaggct

SEQ ID NO: 1741630 - DNA, 25 bp, Homo sapien
tgcactttgcagataactggtaacc

SEQ ID NO: 1741631 - DNA, 25 bp, Homo sapien
gccaagagaggctgaaagctgaaac

SEQ ID NO: 1741632 - DNA, 25 bp, Homo sapien
atacttcactattcagatactttcg

SEQ ID NO: 1741633 - DNA, 25 bp, Homo sapien
ctttcgtaagagatacatttcagtg

SEQ ID NO: 1741634 - DNA, 25 bp, Homo sapien
actattcagatactttcgtaagaga

SEQ ID NO: 1741635 - DNA, 25 bp, Homo sapien
tcagatactttcgtaagagatacat

SEQ ID NO: 1741636 - DNA, 25 bp, Homo sapien
tttatgtgtacatttaataaaacaa

SEQ ID NO: 1741637 - DNA, 25 bp, Homo sapien
atgtgtacatttaataaaacaattt

SEQ ID NO: 1741638 - DNA, 25 bp, Homo sapien
ttatgtgtacatttaataaaacaat

SEQ ID NO: 1741639 - DNA, 25 bp, Homo sapien
tatgtgtacatttaataaaacaatt

SEQ ID NO: 1741640 - DNA, 25 bp, Homo sapien
tacctgtccctgcaatgtagtaact

SEQ ID NO: 1741641 - DNA, 25 bp, Homo sapien
tccgaacctggagtatcatattata

SEQ ID NO: 1741642 - DNA, 25 bp, Homo sapien
tactgttacgtggacactttctatg

SEQ ID NO: 1741643 - DNA, 25 bp, Homo sapien
agtttcacaccagaatagcagtgcc

SEQ ID NO: 1741644 - DNA, 25 bp, Homo sapien
tattggcagttgtcttaggtaagca

SEQ ID NO: 1741645 - DNA, 25 bp, Homo sapien
gagcgtacacagtcttagagtggaa

SEQ ID NO: 1741646 - DNA, 25 bp, Homo sapien
gacactggtttcttagtaaagcaca

SEQ ID NO: 1741647 - DNA, 25 bp, Homo sapien
ggatcagattctttgtaaccgaaac

SEQ ID NO: 1741648 - DNA, 25 bp, Homo sapien
aacttctagtagaggacgagtccga

SEQ ID NO: 1741649 - DNA, 25 bp, Homo sapien
caaaggctctgaaccccacatgaga

SEQ ID NO: 1741650 - DNA, 25 bp, Homo sapien
tcctagtccctgcaagtgtcaaagt

SEQ ID NO: 1741651 - DNA, 25 bp, Homo sapien
tagaaatcaaggtcgaaggacagct

SEQ ID NO: 1741652 - DNA, 25 bp, Homo sapien
catcagctgtcattgagcaaggtaa

SEQ ID NO: 1741653 - DNA, 25 bp, Homo sapien
cagtcaaacgtaaaatgaagtcatc

SEQ ID NO: 1741654 - DNA, 25 bp, Homo sapien
tgataaatttactgcaatgagctat

SEQ ID NO: 1741655 - DNA, 25 bp, Homo sapien
tgtactcccaaaggcgtccactctt

SEQ ID NO: 1741656 - DNA, 25 bp, Homo sapien
ccagtcctggtcaatccagttttag

SEQ ID NO: 1741657 - DNA, 25 bp, Homo sapien
caggttttgttgtcttggctaattc

SEQ ID NO: 1741658 - DNA, 25 bp, Homo sapien
ctaaaagggctgaaactattaagag

SEQ ID NO: 1741659 - DNA, 25 bp, Homo sapien
ccagttttagtcatggcactaggaa

SEQ ID NO: 1741660 - DNA, 25 bp, Homo sapien
tggcaactctgatctaaactacctg

SEQ ID NO: 1741661 - DNA, 25 bp, Homo sapien
aatggcaactctgatctaaactacc

SEQ ID NO: 1741662 - DNA, 25 bp, Homo sapien
atggcaactctgatctaaactacct

SEQ ID NO: 1741663 - DNA, 25 bp, Homo sapien
gctaatgcatctgcaataccaggga

SEQ ID NO: 1741664 - DNA, 25 bp, Homo sapien
tcaataccgccaagacacaatgctg

SEQ ID NO: 1741665 - DNA, 25 bp, Homo sapien
cacaatgctgctcagataaacggta

SEQ ID NO: 1741666 - DNA, 25 bp, Homo sapien
tagatccagttgtcactgagcaacc

SEQ ID NO: 1741667 - DNA, 25 bp, Homo sapien
tcagcaacatgctaagacccgtctc

SEQ ID NO: 1741668 - DNA, 25 bp, Homo sapien
ctgagggactgttgaaaagctgcag

SEQ ID NO: 1741669 - DNA, 25 bp, Homo sapien
tcaagacgggcaggtcatttaagcc

SEQ ID NO: 1741670 - DNA, 25 bp, Homo sapien
aaaatatagtcgcatactgagggac

SEQ ID NO: 1741671 - DNA, 25 bp, Homo sapien
caccatgcccgatggccaagaattt

SEQ ID NO: 1741672 - DNA, 25 bp, Homo sapien
cctgatcgggatatacaagaaaaga

SEQ ID NO: 1741673 - DNA, 25 bp, Homo sapien
tgagaagctatgattcctgatcggg

SEQ ID NO: 1741674 - DNA, 25 bp, Homo sapien
gaattggtaaacatttgagaagcta

SEQ ID NO: 1741675 - DNA, 25 bp, Homo sapien
gaatcccacacagaatgataaagag

SEQ ID NO: 1741676 - DNA, 25 bp, Homo sapien
gtaaagatctaagcaaattctatag

SEQ ID NO: 1741677 - DNA, 25 bp, Homo sapien
cagactaaagagatagtaagtgtaa

SEQ ID NO: 1741678 - DNA, 25 bp, Homo sapien
tagtggtagatagaaagagaaggtc

SEQ ID NO: 1741679 - DNA, 25 bp, Homo sapien
aatgtatttctttcaaacggctact

SEQ ID NO: 1741680 - DNA, 25 bp, Homo sapien
gtcagattcatgaaatacttaaagc

SEQ ID NO: 1741681 - DNA, 25 bp, Homo sapien
gtgatggatccttttaatacagttt

SEQ ID NO: 1741682 - DNA, 25 bp, Homo sapien
ttttttagcagatagtcttcaagat

SEQ ID NO: 1741683 - DNA, 25 bp, Homo sapien
caccatcgttagttgaggaacatct

SEQ ID NO: 1741684 - DNA, 25 bp, Homo sapien
ggcattaccctagttttgtagccaa

SEQ ID NO: 1741685 - DNA, 25 bp, Homo sapien
aaattgcctgttttccaacctgata

SEQ ID NO: 1741686 - DNA, 25 bp, Homo sapien
cactcattggtgttagacttcttac

SEQ ID NO: 1741687 - DNA, 25 bp, Homo sapien
tattaagggtgattgagatgaagga

SEQ ID NO: 1741688 - DNA, 25 bp, Homo sapien
tgtttttagcgtggagtcttgattg

SEQ ID NO: 1741689 - DNA, 25 bp, Homo sapien
caaatgctagattggtaaaaatgcc

SEQ ID NO: 1741690 - DNA, 25 bp, Homo sapien
tgagtggaacttgccgcaattataa

SEQ ID NO: 1741691 - DNA, 25 bp, Homo sapien
taaaactttgtactcatcctatggg

SEQ ID NO: 1741692 - DNA, 25 bp, Homo sapien
aacagaatccaaccggagaatgggc

SEQ ID NO: 1741693 - DNA, 25 bp, Homo sapien
tggcctatggtcaagcaagactgtg

SEQ ID NO: 1741694 - DNA, 25 bp, Homo sapien
tcttcctaagaatctctccagtggg

SEQ ID NO: 1741695 - DNA, 25 bp, Homo sapien
gtacgtggacacagcatgaactcaa

SEQ ID NO: 1741696 - DNA, 25 bp, Homo sapien
tactttagggtttcagacacaggga

SEQ ID NO: 1741697 - DNA, 25 bp, Homo sapien
gaaatgtcttcagtctctcggagag

SEQ ID NO: 1741698 - DNA, 25 bp, Homo sapien
gaatcacagggactctaacctcagc

SEQ ID NO: 1741699 - DNA, 25 bp, Homo sapien
aaattcagagtggtgattggccacc

SEQ ID NO: 1741700 - DNA, 25 bp, Homo sapien
cactgctaaagaagttttcaactgg

SEQ ID NO: 1741701 - DNA, 25 bp, Homo sapien
tggaacatagtctgaagaagcactg

SEQ ID NO: 1741702 - DNA, 25 bp, Homo sapien
gccacctctgtttgattgacaggtt

SEQ ID NO: 1741703 - DNA, 25 bp, Homo sapien
gcttggagttgaatttgtagacccc

SEQ ID NO: 1741704 - DNA, 25 bp, Homo sapien
tgtagaccccatgtttttagtagct

SEQ ID NO: 1741705 - DNA, 25 bp, Homo sapien
tctctatagccctagctgtgtctct

SEQ ID NO: 1741706 - DNA, 25 bp, Homo sapien
tagtttgttgcctcctgtctggttt

SEQ ID NO: 1741707 - DNA, 25 bp, Homo sapien
taatgagcactctttcgcagtaatt

SEQ ID NO: 1741708 - DNA, 25 bp, Homo sapien
taagggctatacagatttgcttgag

SEQ ID NO: 1741709 - DNA, 25 bp, Homo sapien
aaaccctgtaaatttggtgtctcat

SEQ ID NO: 1741710 - DNA, 25 bp, Homo sapien
tgggatttaaataagctaagggcta

SEQ ID NO: 1741711 - DNA, 25 bp, Homo sapien
ttgtattttgttaattcatagtcat

SEQ ID NO: 1741712 - DNA, 25 bp, Homo sapien
tgtattttgttaattcatagtcatt

SEQ ID NO: 1741713 - DNA, 25 bp, Homo sapien
tttgtattttgttaattcatagtca

SEQ ID NO: 1741714 - DNA, 25 bp, Homo sapien
aaacagccgtatttgagcttaggca

SEQ ID NO: 1741715 - DNA, 25 bp, Homo sapien
taggtggcaacatagtcgaatgcag

SEQ ID NO: 1741716 - DNA, 25 bp, Homo sapien
gccttccttatctgcgggtgtcaca

SEQ ID NO: 1741717 - DNA, 25 bp, Homo sapien
ggtaagccctaggttatccatgaca

SEQ ID NO: 1741718 - DNA, 25 bp, Homo sapien
aatctggtgagacattcacgtcgca

SEQ ID NO: 1741719 - DNA, 25 bp, Homo sapien
gactggaccgggaaggagcatccca

SEQ ID NO: 1741720 - DNA, 25 bp, Homo sapien
ttcacgtcgcagagcaaagaaactt

SEQ ID NO: 1741721 - DNA, 25 bp, Homo sapien
tcccaggacctaccagaatctggtg

SEQ ID NO: 1741722 - DNA, 25 bp, Homo sapien
gcctctcggagctgcgatcgggtaa

SEQ ID NO: 1741723 - DNA, 25 bp, Homo sapien
tccgccgccgttgcttgaatggtgg

SEQ ID NO: 1741724 - DNA, 25 bp, Homo sapien
cacacactgacagctatagggcagg

SEQ ID NO: 1741725 - DNA, 25 bp, Homo sapien
ggttcctggaagatggaccctgtca

SEQ ID NO: 1741726 - DNA, 25 bp, Homo sapien
actatcggcctccacagagaaagcg

SEQ ID NO: 1741727 - DNA, 25 bp, Homo sapien
tgctgcggctccgtgtgcgtcagat

SEQ ID NO: 1741728 - DNA, 25 bp, Homo sapien
gccagcgccgctgaatagagcctgt

SEQ ID NO: 1741729 - DNA, 25 bp, Homo sapien
gctccgacatcttctccgactggaa

SEQ ID NO: 1741730 - DNA, 25 bp, Homo sapien
tgtgtacgcgcgtgagtgagaccca

SEQ ID NO: 1741731 - DNA, 25 bp, Homo sapien
tagtatagggcatcacactggtgca

SEQ ID NO: 1741732 - DNA, 25 bp, Homo sapien
cattcaactcgggaagggtagcgcg

SEQ ID NO: 1741733 - DNA, 25 bp, Homo sapien
taaccaggttgcaataggacaagtc

SEQ ID NO: 1741734 - DNA, 25 bp, Homo sapien
tctattagtaagaatcatacattcc

SEQ ID NO: 1741735 - DNA, 25 bp, Homo sapien
aacatctattagtaagaatcataca

SEQ ID NO: 1741736 - DNA, 25 bp, Homo sapien
tagtaagaatcatacattccaagcc

SEQ ID NO: 1741737 - DNA, 25 bp, Homo sapien
aaaacatctattagtaagaatcata

SEQ ID NO: 1741738 - DNA, 25 bp, Homo sapien
tgagataatcatgctagttttctat

SEQ ID NO: 1741739 - DNA, 25 bp, Homo sapien
ctagtagcatatttaggtgaaagct

SEQ ID NO: 1741740 - DNA, 25 bp, Homo sapien
gaatatatgagataatcatgctagt

SEQ ID NO: 1741741 - DNA, 25 bp, Homo sapien
ggtgaaagcttttgtggcttctaaa

SEQ ID NO: 1741742 - DNA, 25 bp, Homo sapien
tatcttctatacactctggttcatt

SEQ ID NO: 1741743 - DNA, 25 bp, Homo sapien
cctcacccccttcacgtgatatcat

SEQ ID NO: 1741744 - DNA, 25 bp, Homo sapien
ctcctcacccccttcacgtgatatc

SEQ ID NO: 1741745 - DNA, 25 bp, Homo sapien
tcctcacccccttcacgtgatatca

SEQ ID NO: 1741746 - DNA, 25 bp, Homo sapien
agaagtgcctgtgtatcctgctggg

SEQ ID NO: 1741747 - DNA, 25 bp, Homo sapien
tgtgtagaccaaagagtctgctctc

SEQ ID NO: 1741748 - DNA, 25 bp, Homo sapien
tgagaagcccaacagtggcacttgg

SEQ ID NO: 1741749 - DNA, 25 bp, Homo sapien
gaaggaccaatggactaacaaggtc

SEQ ID NO: 1741750 - DNA, 25 bp, Homo sapien
tgtaattgctggatgtgtaaatgcc

SEQ ID NO: 1741751 - DNA, 25 bp, Homo sapien
tctacctgagatgggtgcaagctgg

SEQ ID NO: 1741752 - DNA, 25 bp, Homo sapien
aatgctgaaaccaggccatcaggat

SEQ ID NO: 1741753 - DNA, 25 bp, Homo sapien
tcaggatcagctctcttcttctacc

SEQ ID NO: 1741754 - DNA, 25 bp, Homo sapien
ccagctactccagaacggaagcatg

SEQ ID NO: 1741755 - DNA, 25 bp, Homo sapien
gctactccagaacggaagcatgaga

SEQ ID NO: 1741756 - DNA, 25 bp, Homo sapien
cagctactccagaacggaagcatga

SEQ ID NO: 1741757 - DNA, 25 bp, Homo sapien
tactccagaacggaagcatgagaat

SEQ ID NO: 1741758 - DNA, 25 bp, Homo sapien
gatttataagtaaggccaacaggag

SEQ ID NO: 1741759 - DNA, 25 bp, Homo sapien
caagtgctattgacaaattccgcag

SEQ ID NO: 1741760 - DNA, 25 bp, Homo sapien
tatagttgtgtccataaatgccacc

SEQ ID NO: 1741761 - DNA, 25 bp, Homo sapien
tctcagctgagtaagaagcaatggc

SEQ ID NO: 1741762 - DNA, 25 bp, Homo sapien
caggtatgttgtcatatcattccca

SEQ ID NO: 1741763 - DNA, 25 bp, Homo sapien
cccaatagggaatacaaactttcat

SEQ ID NO: 1741764 - DNA, 25 bp, Homo sapien
taaccacaaatactatcgattggct

SEQ ID NO: 1741765 - DNA, 25 bp, Homo sapien
cagataaatgttgtgcccaagacca

SEQ ID NO: 1741766 - DNA, 25 bp, Homo sapien
cactcagagttgaaataggttttgc

SEQ ID NO: 1741767 - DNA, 25 bp, Homo sapien
cagtgagagttaagggtacagtaga

SEQ ID NO: 1741768 - DNA, 25 bp, Homo sapien
caactgttaatgtctcaacctccag

SEQ ID NO: 1741769 - DNA, 25 bp, Homo sapien
catgtttgcagtgactagaatcaga

SEQ ID NO: 1741770 - DNA, 25 bp, Homo sapien
ttctcagctggttcctaagcaagtg

SEQ ID NO: 1741771 - DNA, 25 bp, Homo sapien
tgaagcaaaattacacctaatgtct

SEQ ID NO: 1741772 - DNA, 25 bp, Homo sapien
accgccagcctcagtgtttccaaca

SEQ ID NO: 1741773 - DNA, 25 bp, Homo sapien
cagtgtcaacgagtgtgggtattaa

SEQ ID NO: 1741774 - DNA, 25 bp, Homo sapien
ttggcagcgtggaagacgggacggc

SEQ ID NO: 1741775 - DNA, 25 bp, Homo sapien
cgcgtctagcgaactggagtcattt

SEQ ID NO: 1741776 - DNA, 25 bp, Homo sapien
gcgactggaacccacactcggttgg

SEQ ID NO: 1741777 - DNA, 25 bp, Homo sapien
caatatggctcgtccaaggtcaggg

SEQ ID NO: 1741778 - DNA, 25 bp, Homo sapien
atgtttaaaatagcgctcaccctcc

SEQ ID NO: 1741779 - DNA, 25 bp, Homo sapien
taccaactccagtgtcaatcagggc

SEQ ID NO: 1741780 - DNA, 25 bp, Homo sapien
cgctgcagacccgtatgtaccaact

SEQ ID NO: 1741781 - DNA, 25 bp, Homo sapien
gccatgtttaaaatagcgctcaccc

SEQ ID NO: 1741782 - DNA, 25 bp, Homo sapien
caagataagccccacaggtcatgat

SEQ ID NO: 1741783 - DNA, 25 bp, Homo sapien
ggcgtgccctcgtggaatttagaac

SEQ ID NO: 1741784 - DNA, 25 bp, Homo sapien
tgaagtggaaactacaacagcgcgt

SEQ ID NO: 1741785 - DNA, 25 bp, Homo sapien
ttagaacgttgcctcagccaatggg

SEQ ID NO: 1741786 - DNA, 25 bp, Homo sapien
caaccacctctggagagtactagat

SEQ ID NO: 1741787 - DNA, 25 bp, Homo sapien
tagcactacctttgttgtggcacct

SEQ ID NO: 1741788 - DNA, 25 bp, Homo sapien
gattgcaagtgctactcagtatcct

SEQ ID NO: 1741789 - DNA, 25 bp, Homo sapien
aaaatagccatccagtccagattgc

SEQ ID NO: 1741790 - DNA, 25 bp, Homo sapien
agccaatttaagtcattctgggcca

SEQ ID NO: 1741791 - DNA, 25 bp, Homo sapien
tgacagctacgccttttcccatgag

SEQ ID NO: 1741792 - DNA, 25 bp, Homo sapien
tcccctaattataggttccttgagc

SEQ ID NO: 1741793 - DNA, 25 bp, Homo sapien
ttgagcctagcagtgacagctacgc

SEQ ID NO: 1741794 - DNA, 25 bp, Homo sapien
cttctctgaataggcaccctgcttc

SEQ ID NO: 1741795 - DNA, 25 bp, Homo sapien
gattctcggattctccctttgggaa

SEQ ID NO: 1741796 - DNA, 25 bp, Homo sapien
tgtccactgatctccgtgattctcg

SEQ ID NO: 1741797 - DNA, 25 bp, Homo sapien
tgttccttgaataggctggatttcc

SEQ ID NO: 1741798 - DNA, 25 bp, Homo sapien
tgcagtcttcacttcagggcatgaa

SEQ ID NO: 1741799 - DNA, 25 bp, Homo sapien
caatcctgtcatgaggcagtaaagc

SEQ ID NO: 1741800 - DNA, 25 bp, Homo sapien
gaaacatatggcagtcattggcctg

SEQ ID NO: 1741801 - DNA, 25 bp, Homo sapien
aggatccctggatgacgcatggtag

SEQ ID NO: 1741802 - DNA, 25 bp, Homo sapien
tgtcccaacacacctcaaattaaac

SEQ ID NO: 1741803 - DNA, 25 bp, Homo sapien
tatctgctccaagctatagcctata

SEQ ID NO: 1741804 - DNA, 25 bp, Homo sapien
tatatcaccattcatactatctgct

SEQ ID NO: 1741805 - DNA, 25 bp, Homo sapien
gaagtctgagatcagttcagttcca

SEQ ID NO: 1741806 - DNA, 25 bp, Homo sapien
taccctcatgactctctccaaactc

SEQ ID NO: 1741807 - DNA, 25 bp, Homo sapien
attaaatgccaatactccccagagc

SEQ ID NO: 1741808 - DNA, 25 bp, Homo sapien
aatgccaatactccccagagctctt

SEQ ID NO: 1741809 - DNA, 25 bp, Homo sapien
tccattaaatgccaatactccccag

SEQ ID NO: 1741810 - DNA, 25 bp, Homo sapien
taaatgccaatactccccagagctc

SEQ ID NO: 1741811 - DNA, 25 bp, Homo sapien
ttgcctccatttctgttgctttcct

SEQ ID NO: 1741812 - DNA, 25 bp, Homo sapien
ttctgttgctttcctggtttacttc

SEQ ID NO: 1741813 - DNA, 25 bp, Homo sapien
cttgcctccatttctgttgctttcc

SEQ ID NO: 1741814 - DNA, 25 bp, Homo sapien
tgttgctttcctggtttacttctac

SEQ ID NO: 1741815 - DNA, 25 bp, Homo sapien
atcaatggatggcagaaatttacca

SEQ ID NO: 1741816 - DNA, 25 bp, Homo sapien
caagaggttagaggattcactgagc

SEQ ID NO: 1741817 - DNA, 25 bp, Homo sapien
tcttaaacagacagaaggacgtgaa

SEQ ID NO: 1741818 - DNA, 25 bp, Homo sapien
aacagagattgacctcatcaagagg

SEQ ID NO: 1741819 - DNA, 25 bp, Homo sapien
gtggcatcacgcagtaacaaaaatg

SEQ ID NO: 1741820 - DNA, 25 bp, Homo sapien
tgaagttgccaaactggggtggcat

SEQ ID NO: 1741821 - DNA, 25 bp, Homo sapien
gccaaactggggtggcatcacgcag

SEQ ID NO: 1741822 - DNA, 25 bp, Homo sapien
ctggggtggcatcacgcagtaacaa

SEQ ID NO: 1741823 - DNA, 25 bp, Homo sapien
cttccaggatcacaaaggggaatga

SEQ ID NO: 1741824 - DNA, 25 bp, Homo sapien
gatcacaaaggggaatgatggctat

SEQ ID NO: 1741825 - DNA, 25 bp, Homo sapien
caaaggggaatgatggctattttct

SEQ ID NO: 1741826 - DNA, 25 bp, Homo sapien
caggatcacaaaggggaatgatggc

SEQ ID NO: 1741827 - DNA, 25 bp, Homo sapien
tactgaacttgactagtccaaacag

SEQ ID NO: 1741828 - DNA, 25 bp, Homo sapien
ttctgggccaaagtaaatctgttag

SEQ ID NO: 1741829 - DNA, 25 bp, Homo sapien
catagtttagaagattgtgggctgg

SEQ ID NO: 1741830 - DNA, 25 bp, Homo sapien
gctttgtttgctgggacaaggccca

SEQ ID NO: 1741831 - DNA, 25 bp, Homo sapien
tggtggaggcgcctataacttcagc

SEQ ID NO: 1741832 - DNA, 25 bp, Homo sapien
tggaggcgcctataacttcagctac

SEQ ID NO: 1741833 - DNA, 25 bp, Homo sapien
aagattgcacaactgaatgccagcc

SEQ ID NO: 1741834 - DNA, 25 bp, Homo sapien
gcctaaagcaataggaggtgggcag

SEQ ID NO: 1741835 - DNA, 25 bp, Homo sapien
tctggatggcaactgaatgagcacc

SEQ ID NO: 1741836 - DNA, 25 bp, Homo sapien
tacaagctaagtcatcctgatatac

SEQ ID NO: 1741837 - DNA, 25 bp, Homo sapien
caatgtgatctgagtagttcaggcc

SEQ ID NO: 1741838 - DNA, 25 bp, Homo sapien
agttcaggcctgacaactaagattc

SEQ ID NO: 1741839 - DNA, 25 bp, Homo sapien
agccttctggtgcagcatgactcag

SEQ ID NO: 1741840 - DNA, 25 bp, Homo sapien
aatggctgtgctttagtcaggagta

SEQ ID NO: 1741841 - DNA, 25 bp, Homo sapien
tggtgcagcatgactcagtgggttt

SEQ ID NO: 1741842 - DNA, 25 bp, Homo sapien
caaccttgctcgttatgtaaccaca

SEQ ID NO: 1741843 - DNA, 25 bp, Homo sapien
caccagcatggatctgtttgtccat

SEQ ID NO: 1741844 - DNA, 25 bp, Homo sapien
gaagggacccatttccatctgactt

SEQ ID NO: 1741845 - DNA, 25 bp, Homo sapien
cattccgtcttcagggaagtttttg

SEQ ID NO: 1741846 - DNA, 25 bp, Homo sapien
tctttgaaggcccatttgggggcat

SEQ ID NO: 1741847 - DNA, 25 bp, Homo sapien
tctgacttctttgaaggcccatttg

SEQ ID NO: 1741848 - DNA, 25 bp, Homo sapien
ccttttccacctttcagcatagact

SEQ ID NO: 1741849 - DNA, 25 bp, Homo sapien
tctccttttccacctttcagcatag

SEQ ID NO: 1741850 - DNA, 25 bp, Homo sapien
ttttccacctttcagcatagactta

SEQ ID NO: 1741851 - DNA, 25 bp, Homo sapien
tccttttccacctttcagcatagac

SEQ ID NO: 1741852 - DNA, 25 bp, Homo sapien
gataactggctacgtctggtgactg

SEQ ID NO: 1741853 - DNA, 25 bp, Homo sapien
tttgataactggctacgtctggtga

SEQ ID NO: 1741854 - DNA, 25 bp, Homo sapien
tttttgataactggctacgtctggt

SEQ ID NO: 1741855 - DNA, 25 bp, Homo sapien
actggctacgtctggtgactgtaca

SEQ ID NO: 1741856 - DNA, 25 bp, Homo sapien
tcctccactgcaatcaaggaaacca

SEQ ID NO: 1741857 - DNA, 25 bp, Homo sapien
tccactgcaatcaaggaaaccactt

SEQ ID NO: 1741858 - DNA, 25 bp, Homo sapien
ttttcctccactgcaatcaaggaaa

SEQ ID NO: 1741859 - DNA, 25 bp, Homo sapien
ctgcaatcaaggaaaccacttcctc

SEQ ID NO: 1741860 - DNA, 25 bp, Homo sapien
tcagaagctcattcaatgggacttt

SEQ ID NO: 1741861 - DNA, 25 bp, Homo sapien
gtgctattttcagaagctcattcaa

SEQ ID NO: 1741862 - DNA, 25 bp, Homo sapien
ggtcaagttgccaaataagtgctat

SEQ ID NO: 1741863 - DNA, 25 bp, Homo sapien
tattttcagaagctcattcaatggg

SEQ ID NO: 1741864 - DNA, 25 bp, Homo sapien
gctttacaatcccactatatgtttt

SEQ ID NO: 1741865 - DNA, 25 bp, Homo sapien
tacaatcccactatatgttttattt

SEQ ID NO: 1741866 - DNA, 25 bp, Homo sapien
caatcccactatatgttttatttgg

SEQ ID NO: 1741867 - DNA, 25 bp, Homo sapien
gtagctttacaatcccactatatgt

SEQ ID NO: 1741868 - DNA, 25 bp, Homo sapien
tttgaagcaattaggtgcaagtgct

SEQ ID NO: 1741869 - DNA, 25 bp, Homo sapien
cattggtaggttcctgtacctccac

SEQ ID NO: 1741870 - DNA, 25 bp, Homo sapien
tgtacctccacattcctcgtatgca

SEQ ID NO: 1741871 - DNA, 25 bp, Homo sapien
gcaagtgctatttcctgttcgggct

SEQ ID NO: 1741872 - DNA, 25 bp, Homo sapien
caatttaaagtgcacaaaagttgta

SEQ ID NO: 1741873 - DNA, 25 bp, Homo sapien
cttccaatttaaagtgcacaaaagt

SEQ ID NO: 1741874 - DNA, 25 bp, Homo sapien
tccaatttaaagtgcacaaaagttg

SEQ ID NO: 1741875 - DNA, 25 bp, Homo sapien
ccaatttaaagtgcacaaaagttgt

SEQ ID NO: 1741876 - DNA, 25 bp, Homo sapien
gctctgctgatctaagcttgggcca

SEQ ID NO: 1741877 - DNA, 25 bp, Homo sapien
gcatttcttctcacagtcataggtc

SEQ ID NO: 1741878 - DNA, 25 bp, Homo sapien
gtccggagatcaagtcaggctctgc

SEQ ID NO: 1741879 - DNA, 25 bp, Homo sapien
gcttcaggctgcacgttgggttgaa

SEQ ID NO: 1741880 - DNA, 25 bp, Homo sapien
tgcagcataataagccaccccactg

SEQ ID NO: 1741881 - DNA, 25 bp, Homo sapien
tcacaatactgcagcataataagcc

SEQ ID NO: 1741882 - DNA, 25 bp, Homo sapien
cataataagccaccccactgttcag

SEQ ID NO: 1741883 - DNA, 25 bp, Homo sapien
tactgcagcataataagccacccca

SEQ ID NO: 1741884 - DNA, 25 bp, Homo sapien
tcagttaaagtctctactctgggcc

SEQ ID NO: 1741885 - DNA, 25 bp, Homo sapien
gcaactcagggacacaaactgattt

SEQ ID NO: 1741886 - DNA, 25 bp, Homo sapien
aactcagggacacaaactgattttg

SEQ ID NO: 1741887 - DNA, 25 bp, Homo sapien
ttggtggacgtttcttctccactta

SEQ ID NO: 1741888 - DNA, 25 bp, Homo sapien
caggtgtttcctggttggtggacgt

SEQ ID NO: 1741889 - DNA, 25 bp, Homo sapien
cataaattaacctgtagacaaatag

SEQ ID NO: 1741890 - DNA, 25 bp, Homo sapien
tcagttcagtggcagtttaaaacat

SEQ ID NO: 1741891 - DNA, 25 bp, Homo sapien
caaagtttaaatatgtgactaagtc

SEQ ID NO: 1741892 - DNA, 25 bp, Homo sapien
aacataaattaacctgtagacaaat

SEQ ID NO: 1741893 - DNA, 25 bp, Homo sapien
ctgaagccactattaaagcgggtgt

SEQ ID NO: 1741894 - DNA, 25 bp, Homo sapien
gccactattaaagcgggtgtccatg

SEQ ID NO: 1741895 - DNA, 25 bp, Homo sapien
aagccactattaaagcgggtgtcca

SEQ ID NO: 1741896 - DNA, 25 bp, Homo sapien
gaagccactattaaagcgggtgtcc

SEQ ID NO: 1741897 - DNA, 25 bp, Homo sapien
gagctcctctgtcacaaggtgcctc

SEQ ID NO: 1741898 - DNA, 25 bp, Homo sapien
gctcctctgtcacaaggtgcctcat

SEQ ID NO: 1741899 - DNA, 25 bp, Homo sapien
ggaagagctcctctgtcacaaggtg

SEQ ID NO: 1741900 - DNA, 25 bp, Homo sapien
aagagctcctctgtcacaaggtgcc

SEQ ID NO: 1741901 - DNA, 25 bp, Homo sapien
gatcatcatcacaagctgttaccaa

SEQ ID NO: 1741902 - DNA, 25 bp, Homo sapien
tcatcatcacaagctgttaccaagg

SEQ ID NO: 1741903 - DNA, 25 bp, Homo sapien
aagaagaatctgagtatcagcagaa

SEQ ID NO: 1741904 - DNA, 25 bp, Homo sapien
aagaatctgagtatcagcagaaaag

SEQ ID NO: 1741905 - DNA, 25 bp, Homo sapien
tcctcagagtgaagtaagaatggct

SEQ ID NO: 1741906 - DNA, 25 bp, Homo sapien
gaatggccaaagatagcaatgtgct

SEQ ID NO: 1741907 - DNA, 25 bp, Homo sapien
gcgagcacctcccagtaagactgat

SEQ ID NO: 1741908 - DNA, 25 bp, Homo sapien
tagccaggaactgaatgcgagcacc

SEQ ID NO: 1741909 - DNA, 25 bp, Homo sapien
gctgctgccgcattgatcctcgact

SEQ ID NO: 1741910 - DNA, 25 bp, Homo sapien
tctctgagaatggtgcaaagtggaa

SEQ ID NO: 1741911 - DNA, 25 bp, Homo sapien
cacctaccagcgatatctctgagaa

SEQ ID NO: 1741912 - DNA, 25 bp, Homo sapien
tagccgatagtttccaagctgcagg

SEQ ID NO: 1741913 - DNA, 25 bp, Homo sapien
tccacatctctttggcacccaccca

SEQ ID NO: 1741914 - DNA, 25 bp, Homo sapien
cctccacatctctttggcacccacc

SEQ ID NO: 1741915 - DNA, 25 bp, Homo sapien
ctcctccacatctctttggcaccca

SEQ ID NO: 1741916 - DNA, 25 bp, Homo sapien
ccacatctctttggcacccacccat

SEQ ID NO: 1741917 - DNA, 25 bp, Homo sapien
aaatctcctcgttttctgagaaggc

SEQ ID NO: 1741918 - DNA, 25 bp, Homo sapien
aatctcctcgttttctgagaaggct

SEQ ID NO: 1741919 - DNA, 25 bp, Homo sapien
atctcctcgttttctgagaaggctt

SEQ ID NO: 1741920 - DNA, 25 bp, Homo sapien
ccccgactagttgttagttggatag

SEQ ID NO: 1741921 - DNA, 25 bp, Homo sapien
tgagatactcggcttctggtatccc

SEQ ID NO: 1741922 - DNA, 25 bp, Homo sapien
tattccatggctgacttgccatttt

SEQ ID NO: 1741923 - DNA, 25 bp, Homo sapien
agttggatagagcatgtaaatctgc

SEQ ID NO: 1741924 - DNA, 25 bp, Homo sapien
tctggctcagcgcttggtacttact

SEQ ID NO: 1741925 - DNA, 25 bp, Homo sapien
tactggacacctaatatatgagtgg

SEQ ID NO: 1741926 - DNA, 25 bp, Homo sapien
tcttgagtttgaaaggcccctggaa

SEQ ID NO: 1741927 - DNA, 25 bp, Homo sapien
gagtggaactttatacgcacgcgca

SEQ ID NO: 1741928 - DNA, 25 bp, Homo sapien
cagtatagactaacctagggacaaa

SEQ ID NO: 1741929 - DNA, 25 bp, Homo sapien
taggaggccacccaattaaggagtc

SEQ ID NO: 1741930 - DNA, 25 bp, Homo sapien
tccccagaaacaacttaggaggcca

SEQ ID NO: 1741931 - DNA, 25 bp, Homo sapien
gaaaatgcctgttagtctcaagaaa

SEQ ID NO: 1741932 - DNA, 25 bp, Homo sapien
aacatctcaagtgcttgatagccac

SEQ ID NO: 1741933 - DNA, 25 bp, Homo sapien
tagtgcccagctgcaccaataataa

SEQ ID NO: 1741934 - DNA, 25 bp, Homo sapien
cccctgtagcagtgttgtttagtaa

SEQ ID NO: 1741935 - DNA, 25 bp, Homo sapien
tgttggacagccctaccctagcgaa

SEQ ID NO: 1741936 - DNA, 25 bp, Homo sapien
cgcatctcggcaacctcggcacccg

SEQ ID NO: 1741937 - DNA, 25 bp, Homo sapien
aggaaccaggcacccgctctttggc

SEQ ID NO: 1741938 - DNA, 25 bp, Homo sapien
tctttggcggtcagacgccgaggcc

SEQ ID NO: 1741939 - DNA, 25 bp, Homo sapien
ttgtgttcaaacctcccgcatctcg

SEQ ID NO: 1741940 - DNA, 25 bp, Homo sapien
aggagccccgatcctcgcctctgtc

SEQ ID NO: 1741941 - DNA, 25 bp, Homo sapien
cccaggagccccgatcctcgcctct

SEQ ID NO: 1741942 - DNA, 25 bp, Homo sapien
tggagcccaggttaccgccgctgcc

SEQ ID NO: 1741943 - DNA, 25 bp, Homo sapien
cctggagcccaggttaccgccgctg

SEQ ID NO: 1741944 - DNA, 25 bp, Homo sapien
acgacgctcagcagtcgagccctgg

SEQ ID NO: 1741945 - DNA, 25 bp, Homo sapien
agcgctccgcgttttgccccaattt

SEQ ID NO: 1741946 - DNA, 25 bp, Homo sapien
cgctacagctagagcggtcggccaa

SEQ ID NO: 1741947 - DNA, 25 bp, Homo sapien
ggtcggccaatggagaccttctccc

SEQ ID NO: 1741948 - DNA, 25 bp, Homo sapien
ttacattacgcagtcgccaatttta

SEQ ID NO: 1741949 - DNA, 25 bp, Homo sapien
acattacgcagtcgccaattttaca

SEQ ID NO: 1741950 - DNA, 25 bp, Homo sapien
tacgcagtcgccaattttacaattc

SEQ ID NO: 1741951 - DNA, 25 bp, Homo sapien
tttacaattcatatcatgaacccac

SEQ ID NO: 1741952 - DNA, 25 bp, Homo sapien
tcctagcaacttcctttataagtaa

SEQ ID NO: 1741953 - DNA, 25 bp, Homo sapien
ttctgattcttcctagcaacttcct

SEQ ID NO: 1741954 - DNA, 25 bp, Homo sapien
taaatacggtatgttttctgattct

SEQ ID NO: 1741955 - DNA, 25 bp, Homo sapien
cagacatttgtccacgtaaatacgg

SEQ ID NO: 1741956 - DNA, 25 bp, Homo sapien
gtcatgaatgaagatggaatgagat

SEQ ID NO: 1741957 - DNA, 25 bp, Homo sapien
ctgcctggagcattctgagtgctga

SEQ ID NO: 1741958 - DNA, 25 bp, Homo sapien
tggagtcatgaatgaagatggaatg

SEQ ID NO: 1741959 - DNA, 25 bp, Homo sapien
ttacactgcctggagcattctgagt

SEQ ID NO: 1741960 - DNA, 25 bp, Homo sapien
gaaaccacgaaatttggaagcagac

SEQ ID NO: 1741961 - DNA, 25 bp, Homo sapien
gaagcagacctaggcttgtactctg

SEQ ID NO: 1741962 - DNA, 25 bp, Homo sapien
tgaaggcactaaatccgaaaccacg

SEQ ID NO: 1741963 - DNA, 25 bp, Homo sapien
gagactatgttacacacaactagac

SEQ ID NO: 1741964 - DNA, 25 bp, Homo sapien
tgtaaatctggagcactggtggcca

SEQ ID NO: 1741965 - DNA, 25 bp, Homo sapien
taataccaagatttctgctggacca

SEQ ID NO: 1741966 - DNA, 25 bp, Homo sapien
tctttcccgaagcaaactcttggcc

SEQ ID NO: 1741967 - DNA, 25 bp, Homo sapien
catattcaagtgtgggcagtcagag

SEQ ID NO: 1741968 - DNA, 25 bp, Homo sapien
cattagactagagccaattgttgcc

SEQ ID NO: 1741969 - DNA, 25 bp, Homo sapien
cattttggcagaacctaccgataag

SEQ ID NO: 1741970 - DNA, 25 bp, Homo sapien
gaaatgcagtttgttgagtcctagc

SEQ ID NO: 1741971 - DNA, 25 bp, Homo sapien
ccgataagccaactagcaagggtgt

SEQ ID NO: 1741972 - DNA, 25 bp, Homo sapien
aaaaagagttgctacttagcaggcc

SEQ ID NO: 1741973 - DNA, 25 bp, Homo sapien
aatgctttattccaatggcaacaca

SEQ ID NO: 1741974 - DNA, 25 bp, Homo sapien
agagtttcaacttaggccaggccca

SEQ ID NO: 1741975 - DNA, 25 bp, Homo sapien
tcaggaagggagatgccaatctcct

SEQ ID NO: 1741976 - DNA, 25 bp, Homo sapien
cctttaaggtcatagagaaccagac

SEQ ID NO: 1741977 - DNA, 25 bp, Homo sapien
taaggtcatagagaaccagactgtg

SEQ ID NO: 1741978 - DNA, 25 bp, Homo sapien
cagactgtggacagtctggttctta

SEQ ID NO: 1741979 - DNA, 25 bp, Homo sapien
acagtctggttcttatcctcttctc

SEQ ID NO: 1741980 - DNA, 25 bp, Homo sapien
tctcctctaactcatggaaccacaa

SEQ ID NO: 1741981 - DNA, 25 bp, Homo sapien
ctcctctaactcatggaaccacaaa

SEQ ID NO: 1741982 - DNA, 25 bp, Homo sapien
tctgggttgtgctctttactaccca

SEQ ID NO: 1741983 - DNA, 25 bp, Homo sapien
ggttgtgctctttactacccagcag

SEQ ID NO: 1741984 - DNA, 25 bp, Homo sapien
atctctgggttgtgctctttactac

SEQ ID NO: 1741985 - DNA, 25 bp, Homo sapien
tgtgctctttactacccagcagctc

SEQ ID NO: 1741986 - DNA, 25 bp, Homo sapien
ggaatggatccagcttcttacgcga

SEQ ID NO: 1741987 - DNA, 25 bp, Homo sapien
tgttcaggtcagatgccagcgcatc

SEQ ID NO: 1741988 - DNA, 25 bp, Homo sapien
tcactccagttcagcatgttcaggt

SEQ ID NO: 1741989 - DNA, 25 bp, Homo sapien
gggcaatgctcagctttacccagca

SEQ ID NO: 1741990 - DNA, 25 bp, Homo sapien
tgcaaaggcatctcctatgacggct

SEQ ID NO: 1741991 - DNA, 25 bp, Homo sapien
taatagttcggccaccaaggctgct

SEQ ID NO: 1741992 - DNA, 25 bp, Homo sapien
gacggctattactttctgatcatac

SEQ ID NO: 1741993 - DNA, 25 bp, Homo sapien
catacttggtgatcatcctgtagac

SEQ ID NO: 1741994 - DNA, 25 bp, Homo sapien
ttgcaagaaagtggccttcacctgg

SEQ ID NO: 1741995 - DNA, 25 bp, Homo sapien
agccatggctccctgaatattgcaa

SEQ ID NO: 1741996 - DNA, 25 bp, Homo sapien
agaacgtccttgcagcttgtaatgg

SEQ ID NO: 1741997 - DNA, 25 bp, Homo sapien
taacattgcacgcttgaccactgac

SEQ ID NO: 1741998 - DNA, 25 bp, Homo sapien
gagcccctattttgacatctgagaa

SEQ ID NO: 1741999 - DNA, 25 bp, Homo sapien
tgccagtcaagggttaagtcacact

SEQ ID NO: 1742000 - DNA, 25 bp, Homo sapien
tgatcacagctcacccagttcacag

SEQ ID NO: 1742001 - DNA, 25 bp, Homo sapien
ttcacagacatgaacgggaaccctg

SEQ ID NO: 1742002 - DNA, 25 bp, Homo sapien
acatagggtcttatgcttagagtaa

SEQ ID NO: 1742003 - DNA, 25 bp, Homo sapien
gacatagggtcttatgcttagagta

SEQ ID NO: 1742004 - DNA, 25 bp, Homo sapien
ggacatagggtcttatgcttagagt

SEQ ID NO: 1742005 - DNA, 25 bp, Homo sapien
gatccgagtaacattgggactggca

SEQ ID NO: 1742006 - DNA, 25 bp, Homo sapien
tgtgtgtatcttgcctaaagctgag

SEQ ID NO: 1742007 - DNA, 25 bp, Homo sapien
tggactcctttctaatctactgcaa

SEQ ID NO: 1742008 - DNA, 25 bp, Homo sapien
cattagggctgcaagaatcaccctt

SEQ ID NO: 1742009 - DNA, 25 bp, Homo sapien
tttactccctattgcagactcctca

SEQ ID NO: 1742010 - DNA, 25 bp, Homo sapien
gcaacaagaaccctcaaatgactgt

SEQ ID NO: 1742011 - DNA, 25 bp, Homo sapien
tgtcaagagaagcttagaaaggctt

SEQ ID NO: 1742012 - DNA, 25 bp, Homo sapien
gcatacattatgtcccttagcaaaa

SEQ ID NO: 1742013 - DNA, 25 bp, Homo sapien
attcacttgctatgtgtttgatgaa

SEQ ID NO: 1742014 - DNA, 25 bp, Homo sapien
tgatgaaatagtatgaggtacagat

SEQ ID NO: 1742015 - DNA, 25 bp, Homo sapien
taagcccacgacatgtcccagaatc

SEQ ID NO: 1742016 - DNA, 25 bp, Homo sapien
aatatttggatatggtacatctttc

SEQ ID NO: 1742017 - DNA, 25 bp, Homo sapien
acattgtacctggtctatctgcagg

SEQ ID NO: 1742018 - DNA, 25 bp, Homo sapien
gatttgggttatccatgcctggctg

SEQ ID NO: 1742019 - DNA, 25 bp, Homo sapien
gagtccttttccagtcatattgcga

SEQ ID NO: 1742020 - DNA, 25 bp, Homo sapien
ttgcgagacacaaaatatccacctg

SEQ ID NO: 1742021 - DNA, 25 bp, Homo sapien
taaaggatctagtctaatacgaagt

SEQ ID NO: 1742022 - DNA, 25 bp, Homo sapien
caagagtacagggtgaattttaaca

SEQ ID NO: 1742023 - DNA, 25 bp, Homo sapien
tagatgcacgtttgctttcaagagt

SEQ ID NO: 1742024 - DNA, 25 bp, Homo sapien
tattaaagaatgtattgttggccgg

SEQ ID NO: 1742025 - DNA, 25 bp, Homo sapien
gccatgttcacaaactattctgtaa

SEQ ID NO: 1742026 - DNA, 25 bp, Homo sapien
gcttgaaagtataagtgaatgagta

SEQ ID NO: 1742027 - DNA, 25 bp, Homo sapien
aaagatcagacatcccagtacagac

SEQ ID NO: 1742028 - DNA, 25 bp, Homo sapien
tctattggaaaaggaggatgaaaca

SEQ ID NO: 1742029 - DNA, 25 bp, Homo sapien
taagtgaatgagtaggtatgtggtc

SEQ ID NO: 1742030 - DNA, 25 bp, Homo sapien
cagtatgagttaccagttttccagc

SEQ ID NO: 1742031 - DNA, 25 bp, Homo sapien
tagatatttgtcgtggcaaaacccc

SEQ ID NO: 1742032 - DNA, 25 bp, Homo sapien
tgttttccaagataccacaggtgag

SEQ ID NO: 1742033 - DNA, 25 bp, Homo sapien
catcagctgcctagtcctaaagcca

SEQ ID NO: 1742034 - DNA, 25 bp, Homo sapien
aaatgataataaatagcgtctctac

SEQ ID NO: 1742035 - DNA, 25 bp, Homo sapien
taaatagcgtctctactgagaaagt

SEQ ID NO: 1742036 - DNA, 25 bp, Homo sapien
taataaatagcgtctctactgagaa

SEQ ID NO: 1742037 - DNA, 25 bp, Homo sapien
tagcgtctctactgagaaagtatgc

SEQ ID NO: 1742038 - DNA, 25 bp, Homo sapien
cattcaatgtgttgggactgggata

SEQ ID NO: 1742039 - DNA, 25 bp, Homo sapien
gtgactataccatatccccaaaggg

SEQ ID NO: 1742040 - DNA, 25 bp, Homo sapien
ggatagaaggaaattagtggctgcc

SEQ ID NO: 1742041 - DNA, 25 bp, Homo sapien
ttcatgagcatgagtaagatgcccc

SEQ ID NO: 1742042 - DNA, 25 bp, Homo sapien
ccactcatctcagttaatactagaa

SEQ ID NO: 1742043 - DNA, 25 bp, Homo sapien
atctcagttaatactagaactgtag

SEQ ID NO: 1742044 - DNA, 25 bp, Homo sapien
cactcatctcagttaatactagaac

SEQ ID NO: 1742045 - DNA, 25 bp, Homo sapien
tcatctcagttaatactagaactgt

SEQ ID NO: 1742046 - DNA, 25 bp, Homo sapien
gaattcagaatctggtaggtactga

SEQ ID NO: 1742047 - DNA, 25 bp, Homo sapien
tgaacaccggttctgggctgaaaga

SEQ ID NO: 1742048 - DNA, 25 bp, Homo sapien
ttcagaatctggtaggtactgagat

SEQ ID NO: 1742049 - DNA, 25 bp, Homo sapien
agaatgttgaacaccggttctgggc

SEQ ID NO: 1742050 - DNA, 25 bp, Homo sapien
gtacccggccctgttctagatatta

SEQ ID NO: 1742051 - DNA, 25 bp, Homo sapien
cctgagaacttgaaggcggccctat

SEQ ID NO: 1742052 - DNA, 25 bp, Homo sapien
taacttgaggtccagtagggactgc

SEQ ID NO: 1742053 - DNA, 25 bp, Homo sapien
tcagcgttttgagtagccaccatgc

SEQ ID NO: 1742054 - DNA, 25 bp, Homo sapien
tgcgtgttcccattgacagtcttac

SEQ ID NO: 1742055 - DNA, 25 bp, Homo sapien
cttactctatacagtttgggtgtaa

SEQ ID NO: 1742056 - DNA, 25 bp, Homo sapien
acagtcttactctatacagtttggg

SEQ ID NO: 1742057 - DNA, 25 bp, Homo sapien
gcgtgttcccattgacagtcttact

SEQ ID NO: 1742058 - DNA, 25 bp, Homo sapien
tctaggttatttgtcagtggtgaca

SEQ ID NO: 1742059 - DNA, 25 bp, Homo sapien
gtgatcaaagggtgttaccaataga

SEQ ID NO: 1742060 - DNA, 25 bp, Homo sapien
aactatgccatgaaggtaaagggac

SEQ ID NO: 1742061 - DNA, 25 bp, Homo sapien
taatttcttaggttgggtgatggat

SEQ ID NO: 1742062 - DNA, 25 bp, Homo sapien
cctttactggagataacttagcaac

SEQ ID NO: 1742063 - DNA, 25 bp, Homo sapien
gcaattgaatagcaacaaagagagg

SEQ ID NO: 1742064 - DNA, 25 bp, Homo sapien
tgctctgcaagcatgaataaacttg

SEQ ID NO: 1742065 - DNA, 25 bp, Homo sapien
caggattctcccacatgatgtgctc

SEQ ID NO: 1742066 - DNA, 25 bp, Homo sapien
gaggtccactctggatgctgttttc

SEQ ID NO: 1742067 - DNA, 25 bp, Homo sapien
gcctccacccatatgaggtgtctgt

SEQ ID NO: 1742068 - DNA, 25 bp, Homo sapien
ggcctccacccatatgaggtgtctg

SEQ ID NO: 1742069 - DNA, 25 bp, Homo sapien
gtccactctggatgctgttttcctg

SEQ ID NO: 1742070 - DNA, 25 bp, Homo sapien
tttctgaagtctacttctgcctact

SEQ ID NO: 1742071 - DNA, 25 bp, Homo sapien
gtctacttctgcctacttgtaaaag

SEQ ID NO: 1742072 - DNA, 25 bp, Homo sapien
tatcttcctttcaatgggtttgaac

SEQ ID NO: 1742073 - DNA, 25 bp, Homo sapien
ttctgcctacttgtaaaagtcaatc

SEQ ID NO: 1742074 - DNA, 25 bp, Homo sapien
attttgccaattaattattgtggtt

SEQ ID NO: 1742075 - DNA, 25 bp, Homo sapien
tattttgccaattaattattgtggt

SEQ ID NO: 1742076 - DNA, 25 bp, Homo sapien
aattattgtggtttcttcatagcat

SEQ ID NO: 1742077 - DNA, 25 bp, Homo sapien
taattattgtggtttcttcatagca

SEQ ID NO: 1742078 - DNA, 25 bp, Homo sapien
ccgatttggcctcttgttattagaa

SEQ ID NO: 1742079 - DNA, 25 bp, Homo sapien
ttgcagaatgtcacttgcatacagc

SEQ ID NO: 1742080 - DNA, 25 bp, Homo sapien
taattctacgattttgaaccaagac

SEQ ID NO: 1742081 - DNA, 25 bp, Homo sapien
tacaaattgcattcagcccatcaga

SEQ ID NO: 1742082 - DNA, 25 bp, Homo sapien
gagaatcctatagaaactgctgggt

SEQ ID NO: 1742083 - DNA, 25 bp, Homo sapien
cacacttccctagaacatgggcctt

SEQ ID NO: 1742084 - DNA, 25 bp, Homo sapien
caagtatgggtttatctgtaagaga

SEQ ID NO: 1742085 - DNA, 25 bp, Homo sapien
actaaagagtatccatttccccaca

SEQ ID NO: 1742086 - DNA, 25 bp, Homo sapien
agtttgccatttatcttgaaagaca

SEQ ID NO: 1742087 - DNA, 25 bp, Homo sapien
gaacaatctagtggtatacaaaatg

SEQ ID NO: 1742088 - DNA, 25 bp, Homo sapien
aagaaggctataggcttgaaaaatc

SEQ ID NO: 1742089 - DNA, 25 bp, Homo sapien
tgaaaaatcatctgctgtgcaaatt

SEQ ID NO: 1742090 - DNA, 25 bp, Homo sapien
caggccaccctatgattccagagga

SEQ ID NO: 1742091 - DNA, 25 bp, Homo sapien
tgatggaagacagcagttcctccct

SEQ ID NO: 1742092 - DNA, 25 bp, Homo sapien
taggccttagtacagaagggcagag

SEQ ID NO: 1742093 - DNA, 25 bp, Homo sapien
ttgcatggactctattccaagtcat

SEQ ID NO: 1742094 - DNA, 25 bp, Homo sapien
tatatccgtatatactcagtgttta

SEQ ID NO: 1742095 - DNA, 25 bp, Homo sapien
gctcaggtttgggctatggatgatc

SEQ ID NO: 1742096 - DNA, 25 bp, Homo sapien
cgctgtattccatggcgcatatata

SEQ ID NO: 1742097 - DNA, 25 bp, Homo sapien
tggctgcgctgtattccatggcgca

SEQ ID NO: 1742098 - DNA, 25 bp, Homo sapien
tgttactatctataaatccaattga

SEQ ID NO: 1742099 - DNA, 25 bp, Homo sapien
gagcaagatcttggccacctttcca

SEQ ID NO: 1742100 - DNA, 25 bp, Homo sapien
tgttgatctgtgtcctacaacctag

SEQ ID NO: 1742101 - DNA, 25 bp, Homo sapien
cctacaacctagctgaactcactta

SEQ ID NO: 1742102 - DNA, 25 bp, Homo sapien
tataatttcagctctcaggttagat

SEQ ID NO: 1742103 - DNA, 25 bp, Homo sapien
gctctcaggttagatttattttgac

SEQ ID NO: 1742104 - DNA, 25 bp, Homo sapien
tttcagctctcaggttagatttatt

SEQ ID NO: 1742105 - DNA, 25 bp, Homo sapien
ttgccatgttcaaagtcatgaagat

SEQ ID NO: 1742106 - DNA, 25 bp, Homo sapien
cctaaacttgaaaaagctcagggtg

SEQ ID NO: 1742107 - DNA, 25 bp, Homo sapien
gaattctctaggagtcagctgtacc

SEQ ID NO: 1742108 - DNA, 25 bp, Homo sapien
ggaagtgattcccacttatgtctgc

SEQ ID NO: 1742109 - DNA, 25 bp, Homo sapien
gcaatgggggtcctgcttatcttca

SEQ ID NO: 1742110 - DNA, 25 bp, Homo sapien
gaacacttgctctctatcagtaact

SEQ ID NO: 1742111 - DNA, 25 bp, Homo sapien
tttacatttgcccagaacacatagc

SEQ ID NO: 1742112 - DNA, 25 bp, Homo sapien
taaaagaccattctgctcaattcag

SEQ ID NO: 1742113 - DNA, 25 bp, Homo sapien
ccatgcccagcaatcagacatattt

SEQ ID NO: 1742114 - DNA, 25 bp, Homo sapien
cattcagaggcaactcaaattgcag

SEQ ID NO: 1742115 - DNA, 25 bp, Homo sapien
caccactttgtaaatgattaccatg

SEQ ID NO: 1742116 - DNA, 25 bp, Homo sapien
aaaaccagacaccttaacattagct

SEQ ID NO: 1742117 - DNA, 25 bp, Homo sapien
gatatcactctagtctgtactgcaa

SEQ ID NO: 1742118 - DNA, 25 bp, Homo sapien
cacatttgtgttcttcccccggcat

SEQ ID NO: 1742119 - DNA, 25 bp, Homo sapien
ccacatttgtgttcttcccccggca

SEQ ID NO: 1742120 - DNA, 25 bp, Homo sapien
tggtcacagatatttggaatatttg

SEQ ID NO: 1742121 - DNA, 25 bp, Homo sapien
tgggatttgtagtttccgtctctcc

SEQ ID NO: 1742122 - DNA, 25 bp, Homo sapien
gatttgtagtttccgtctctccctg

SEQ ID NO: 1742123 - DNA, 25 bp, Homo sapien
gtagtttccgtctctccctggagtg

SEQ ID NO: 1742124 - DNA, 25 bp, Homo sapien
tttgtagtttccgtctctccctgga

SEQ ID NO: 1742125 - DNA, 25 bp, Homo sapien
ggcgggtccgcagataaaagcccag

SEQ ID NO: 1742126 - DNA, 25 bp, Homo sapien
gccggcagcctctgggtaaagcgct

SEQ ID NO: 1742127 - DNA, 25 bp, Homo sapien
agagctgaacccagctacgagccgc

SEQ ID NO: 1742128 - DNA, 25 bp, Homo sapien
taaagcgctgccgtcggggaagatc

SEQ ID NO: 1742129 - DNA, 25 bp, Homo sapien
agcccgaggaagaggcgatgaacac

SEQ ID NO: 1742130 - DNA, 25 bp, Homo sapien
gaggcgatgaacacgcggatgacca

SEQ ID NO: 1742131 - DNA, 25 bp, Homo sapien
acgaagcccgaggaagaggcgatga

SEQ ID NO: 1742132 - DNA, 25 bp, Homo sapien
aagaggcgatgaacacgcggatgac

SEQ ID NO: 1742133 - DNA, 25 bp, Homo sapien
tcggagtgtgatggatcacctgccg

SEQ ID NO: 1742134 - DNA, 25 bp, Homo sapien
tgagcgcaaggacgcgcagtgacga

SEQ ID NO: 1742135 - DNA, 25 bp, Homo sapien
cccgccctcttcattgttgtcggag

SEQ ID NO: 1742136 - DNA, 25 bp, Homo sapien
gggcggaccggctgagcgcaaggac

SEQ ID NO: 1742137 - DNA, 25 bp, Homo sapien
ttttcaggccgcgttgtctgccttt

SEQ ID NO: 1742138 - DNA, 25 bp, Homo sapien
gcttccctcggactccattttcagg

SEQ ID NO: 1742139 - DNA, 25 bp, Homo sapien
ctgggggcttccctcggactccatt

SEQ ID NO: 1742140 - DNA, 25 bp, Homo sapien
aggccgcgttgtctgcctttcaggc

SEQ ID NO: 1742141 - DNA, 25 bp, Homo sapien
cattcaggagctagggtaacaaacc

SEQ ID NO: 1742142 - DNA, 25 bp, Homo sapien
ctaaacaaatgcacttgctggcggg

SEQ ID NO: 1742143 - DNA, 25 bp, Homo sapien
aagcagcagaaaaggctcccgtgca

SEQ ID NO: 1742144 - DNA, 25 bp, Homo sapien
ccacaattcatagatccccaggata

SEQ ID NO: 1742145 - DNA, 25 bp, Homo sapien
ctctgggttacagccatcctggcca

SEQ ID NO: 1742146 - DNA, 25 bp, Homo sapien
tgtaaaggatgagggcgcacacctc

SEQ ID NO: 1742147 - DNA, 25 bp, Homo sapien
caagaacacctttgtgcagagcata

SEQ ID NO: 1742148 - DNA, 25 bp, Homo sapien
cattcaactccctcagtaggctgca

SEQ ID NO: 1742149 - DNA, 25 bp, Homo sapien
aacagccagaccattctccacccca

SEQ ID NO: 1742150 - DNA, 25 bp, Homo sapien
ctggccaacagccagaccattctcc

SEQ ID NO: 1742151 - DNA, 25 bp, Homo sapien
ggccaacagccagaccattctccac

SEQ ID NO: 1742152 - DNA, 25 bp, Homo sapien
ccaccccaaaacctgctgctgccat

SEQ ID NO: 1742153 - DNA, 25 bp, Homo sapien
gccagcgggacaatgcaacatacat

SEQ ID NO: 1742154 - DNA, 25 bp, Homo sapien
cttgagctagccagcgggacaatgc

SEQ ID NO: 1742155 - DNA, 25 bp, Homo sapien
gaaccttgagaccaccaccaagtga

SEQ ID NO: 1742156 - DNA, 25 bp, Homo sapien
attagaaccttgagaccaccaccaa

SEQ ID NO: 1742157 - DNA, 25 bp, Homo sapien
caccaccagctacaagagccacatc

SEQ ID NO: 1742158 - DNA, 25 bp, Homo sapien
gccctttctccctacaactcctcca

SEQ ID NO: 1742159 - DNA, 25 bp, Homo sapien
tagtaaccacaaagtcatctccttt

SEQ ID NO: 1742160 - DNA, 25 bp, Homo sapien
tggtttcctagtaaccacaaagtca

SEQ ID NO: 1742161 - DNA, 25 bp, Homo sapien
ctgaagcttgagttttacagaatcc

SEQ ID NO: 1742162 - DNA, 25 bp, Homo sapien
gagtaagctgcggggtctcctgact

SEQ ID NO: 1742163 - DNA, 25 bp, Homo sapien
gctgcggggtctcctgactccgcat

SEQ ID NO: 1742164 - DNA, 25 bp, Homo sapien
cacagggccctggggagtaagctgc

SEQ ID NO: 1742165 - DNA, 25 bp, Homo sapien
cctggggagtaagctgcggggtctc

SEQ ID NO: 1742166 - DNA, 25 bp, Homo sapien
aaaggacgaagagtgcatttcaccc

SEQ ID NO: 1742167 - DNA, 25 bp, Homo sapien
ttgcagaaacgcagatatggtgcct

SEQ ID NO: 1742168 - DNA, 25 bp, Homo sapien
taatgacattttgtagctgccaccc

SEQ ID NO: 1742169 - DNA, 25 bp, Homo sapien
gcagaaagacagtagcctgggtcct

SEQ ID NO: 1742170 - DNA, 25 bp, Homo sapien
gaaatctaaccacatcttgctgctt

SEQ ID NO: 1742171 - DNA, 25 bp, Homo sapien
gacattgtgatatccacctcctcaa

SEQ ID NO: 1742172 - DNA, 25 bp, Homo sapien
tcaaactctatcttgttggcttcca

SEQ ID NO: 1742173 - DNA, 25 bp, Homo sapien
tccacagtatcggtcgccattaaat

SEQ ID NO: 1742174 - DNA, 25 bp, Homo sapien
gggttcttgatgcaaataactgaga

SEQ ID NO: 1742175 - DNA, 25 bp, Homo sapien
tcacccacattctcagagaaggaag

SEQ ID NO: 1742176 - DNA, 25 bp, Homo sapien
tccagggaatcaacaagaataagtt

SEQ ID NO: 1742177 - DNA, 25 bp, Homo sapien
agtaaggattgattccactccaggg

SEQ ID NO: 1742178 - DNA, 25 bp, Homo sapien
ttgatgccaaccgtggtttcaggcc

SEQ ID NO: 1742179 - DNA, 25 bp, Homo sapien
gatgccaaccgtggtttcaggccta

SEQ ID NO: 1742180 - DNA, 25 bp, Homo sapien
tgccaaccgtggtttcaggcctaaa

SEQ ID NO: 1742181 - DNA, 25 bp, Homo sapien
ctttgatgccaaccgtggtttcagg

SEQ ID NO: 1742182 - DNA, 25 bp, Homo sapien
agagatgaattctaaaacaagaata

SEQ ID NO: 1742183 - DNA, 25 bp, Homo sapien
aaaagagatgaattctaaaacaaga

SEQ ID NO: 1742184 - DNA, 25 bp, Homo sapien
gaaaaattcaaaagagatgaattct

SEQ ID NO: 1742185 - DNA, 25 bp, Homo sapien
gatgaattctaaaacaagaataaga

SEQ ID NO: 1742186 - DNA, 25 bp, Homo sapien
tcactacctttaggatggtcccctg

SEQ ID NO: 1742187 - DNA, 25 bp, Homo sapien
gaaatcaagttaacttcagtgacac

SEQ ID NO: 1742188 - DNA, 25 bp, Homo sapien
caactttaatactgtggccaaaagc

SEQ ID NO: 1742189 - DNA, 25 bp, Homo sapien
aagatcaactttaatactgtggcca

SEQ ID NO: 1742190 - DNA, 25 bp, Homo sapien
tggtcccagatactcctgtccaggt

SEQ ID NO: 1742191 - DNA, 25 bp, Homo sapien
cagatactcctgtccaggtataact

SEQ ID NO: 1742192 - DNA, 25 bp, Homo sapien
gtccaggtataactgatttaggtcc

SEQ ID NO: 1742193 - DNA, 25 bp, Homo sapien
ctcctgtccaggtataactgattta

SEQ ID NO: 1742194 - DNA, 25 bp, Homo sapien
atctgttagtaaagagtcgctgccc

SEQ ID NO: 1742195 - DNA, 25 bp, Homo sapien
ttagtaaagagtcgctgccccagtc

SEQ ID NO: 1742196 - DNA, 25 bp, Homo sapien
agaaccactctagaacgaccatatc

SEQ ID NO: 1742197 - DNA, 25 bp, Homo sapien
agaacgaccatatctgttagtaaag

SEQ ID NO: 1742198 - DNA, 25 bp, Homo sapien
gaaaatgccttcagatactcgtcag

SEQ ID NO: 1742199 - DNA, 25 bp, Homo sapien
tattctctgagctaagtgtggtccc

SEQ ID NO: 1742200 - DNA, 25 bp, Homo sapien
tttgcttgacaagtacaattccggg

SEQ ID NO: 1742201 - DNA, 25 bp, Homo sapien
gaagtgggtttacgcaattccggca

SEQ ID NO: 1742202 - DNA, 25 bp, Homo sapien
cagaaagaagctttggtacttttca

SEQ ID NO: 1742203 - DNA, 25 bp, Homo sapien
tatggagcaaagtgcagcctgacac

SEQ ID NO: 1742204 - DNA, 25 bp, Homo sapien
gcctgacacttaacaaaagctgtta

SEQ ID NO: 1742205 - DNA, 25 bp, Homo sapien
tgtgatttcaccaatgctttaagag

SEQ ID NO: 1742206 - DNA, 25 bp, Homo sapien
gataggttcaggaaaccgcacacgg

SEQ ID NO: 1742207 - DNA, 25 bp, Homo sapien
tacttgagagtagagatattgccct

SEQ ID NO: 1742208 - DNA, 25 bp, Homo sapien
ggtcaacacaaagttcagtacaggg

SEQ ID NO: 1742209 - DNA, 25 bp, Homo sapien
ttgaaccctggctaaaactgctgct

SEQ ID NO: 1742210 - DNA, 25 bp, Homo sapien
taacattttatactccccagcttgg

SEQ ID NO: 1742211 - DNA, 25 bp, Homo sapien
tgaaaaaactccgatggcaatgaac

SEQ ID NO: 1742212 - DNA, 25 bp, Homo sapien
aaaagacatgaagagggattgccaa

SEQ ID NO: 1742213 - DNA, 25 bp, Homo sapien
ttcagtatgtacaccagaagtcaca

SEQ ID NO: 1742214 - DNA, 25 bp, Homo sapien
ccaacacatggaggggcagagctct

SEQ ID NO: 1742215 - DNA, 25 bp, Homo sapien
catcctccaacacatggaggggcag

SEQ ID NO: 1742216 - DNA, 25 bp, Homo sapien
tctgccatcctccaacacatggagg

SEQ ID NO: 1742217 - DNA, 25 bp, Homo sapien
cctccaacacatggaggggcagagc

SEQ ID NO: 1742218 - DNA, 25 bp, Homo sapien
tttgctgaattatctcctcctccat

SEQ ID NO: 1742219 - DNA, 25 bp, Homo sapien
agctttgctgaattatctcctcctc

SEQ ID NO: 1742220 - DNA, 25 bp, Homo sapien
gagctttgctgaattatctcctcct

SEQ ID NO: 1742221 - DNA, 25 bp, Homo sapien
gggagctttgctgaattatctcctc

SEQ ID NO: 1742222 - DNA, 25 bp, Homo sapien
gaaggacgcacacatgaaggtccat

SEQ ID NO: 1742223 - DNA, 25 bp, Homo sapien
aaggacgcacacatgaaggtccatg

SEQ ID NO: 1742224 - DNA, 25 bp, Homo sapien
aaggtgggagaagaccatcagaagg

SEQ ID NO: 1742225 - DNA, 25 bp, Homo sapien
ggtttgttgagaaacagtaatcgaa

SEQ ID NO: 1742226 - DNA, 25 bp, Homo sapien
ggtgaccacgtcctcattggtttgt

SEQ ID NO: 1742227 - DNA, 25 bp, Homo sapien
ttgttgagaaacagtaatcgaagct

SEQ ID NO: 1742228 - DNA, 25 bp, Homo sapien
cacgtcctcattggtttgttgagaa

SEQ ID NO: 1742229 - DNA, 25 bp, Homo sapien
agctcactggagagcgtgtgtttcc

SEQ ID NO: 1742230 - DNA, 25 bp, Homo sapien
tcacagttccaatggacattgcctg

SEQ ID NO: 1742231 - DNA, 25 bp, Homo sapien
cattgcctggatttcggggacaaac

SEQ ID NO: 1742232 - DNA, 25 bp, Homo sapien
aaagaggtgaagtgatagaatgaca

SEQ ID NO: 1742233 - DNA, 25 bp, Homo sapien
caacagcaactgcagccgcggagcc

SEQ ID NO: 1742234 - DNA, 25 bp, Homo sapien
gccagcggccgccaaagacttagtg

SEQ ID NO: 1742235 - DNA, 25 bp, Homo sapien
ctttccacggtcgggaaggccagcg

SEQ ID NO: 1742236 - DNA, 25 bp, Homo sapien
caaagacttagtgccaccttgtggc

SEQ ID NO: 1742237 - DNA, 25 bp, Homo sapien
aagccacggcgggactccagaagag

SEQ ID NO: 1742238 - DNA, 25 bp, Homo sapien
aaacatcttctcttcctatggcgcc

SEQ ID NO: 1742239 - DNA, 25 bp, Homo sapien
ttctcttcctatggcgccagcagct

SEQ ID NO: 1742240 - DNA, 25 bp, Homo sapien
gagtaagccacggcgggactccaga

SEQ ID NO: 1742241 - DNA, 25 bp, Homo sapien
aggttggaaggttcgggtcgctgag

SEQ ID NO: 1742242 - DNA, 25 bp, Homo sapien
tggacccagccgtggagattctgaa

SEQ ID NO: 1742243 - DNA, 25 bp, Homo sapien
ccagagtacgtgcagcccagcgagg

SEQ ID NO: 1742244 - DNA, 25 bp, Homo sapien
ctaaggcggccagagtacgtgcagc

SEQ ID NO: 1742245 - DNA, 25 bp, Homo sapien
ccgatcactcaaaatggaggcctta

SEQ ID NO: 1742246 - DNA, 25 bp, Homo sapien
tgcatggccctacagaacatagcct

SEQ ID NO: 1742247 - DNA, 25 bp, Homo sapien
tcagatgtcctcttacaacgaaggc

SEQ ID NO: 1742248 - DNA, 25 bp, Homo sapien
tatctcattggccttgtagtggctc

SEQ ID NO: 1742249 - DNA, 25 bp, Homo sapien
tcagagtgggagttcacttaccacc

SEQ ID NO: 1742250 - DNA, 25 bp, Homo sapien
ggcctcgtgggccaaacatcctggt

SEQ ID NO: 1742251 - DNA, 25 bp, Homo sapien
tatcatgatcacttaaatgtagcca

SEQ ID NO: 1742252 - DNA, 25 bp, Homo sapien
aatgtagccagtaaaggcctcgtgg

SEQ ID NO: 1742253 - DNA, 25 bp, Homo sapien
ccctgtgttctttggccagcagtta

SEQ ID NO: 1742254 - DNA, 25 bp, Homo sapien
cctgtgttctttggccagcagttat

SEQ ID NO: 1742255 - DNA, 25 bp, Homo sapien
gagtcacaggcatccctgtgttctt

SEQ ID NO: 1742256 - DNA, 25 bp, Homo sapien
gaatcatcttcgtggaaagaatagg

SEQ ID NO: 1742257 - DNA, 25 bp, Homo sapien
gagcttgagctgtttagaatcatct

SEQ ID NO: 1742258 - DNA, 25 bp, Homo sapien
tgagctgtttagaatcatcttcgtg

SEQ ID NO: 1742259 - DNA, 25 bp, Homo sapien
agaaatgagagcttgagctgtttag

SEQ ID NO: 1742260 - DNA, 25 bp, Homo sapien
aatcagtctgagaacaattaagact

SEQ ID NO: 1742261 - DNA, 25 bp, Homo sapien
atcagtctgagaacaattaagactt

SEQ ID NO: 1742262 - DNA, 25 bp, Homo sapien
cagggagaactctgcaagtctcctc

SEQ ID NO: 1742263 - DNA, 25 bp, Homo sapien
agggagaactctgcaagtctcctca

SEQ ID NO: 1742264 - DNA, 25 bp, Homo sapien
ctccagggagaactctgcaagtctc

SEQ ID NO: 1742265 - DNA, 25 bp, Homo sapien
tccagggagaactctgcaagtctcc

SEQ ID NO: 1742266 - DNA, 25 bp, Homo sapien
tcgatccattaaagtcctcagccac

SEQ ID NO: 1742267 - DNA, 25 bp, Homo sapien
tgtccattagtctccaagcctcgat

SEQ ID NO: 1742268 - DNA, 25 bp, Homo sapien
gtcctcagccactcattacgtatat

SEQ ID NO: 1742269 - DNA, 25 bp, Homo sapien
tacgtatattgtgcaggagtcctgc

SEQ ID NO: 1742270 - DNA, 25 bp, Homo sapien
gtcagaattgtctctgggatatcca

SEQ ID NO: 1742271 - DNA, 25 bp, Homo sapien
ggatatccattggacaaaaccagtc

SEQ ID NO: 1742272 - DNA, 25 bp, Homo sapien
tctgcagtccctcggaattctgact

SEQ ID NO: 1742273 - DNA, 25 bp, Homo sapien
taaatagccggtctcttatcttctg

SEQ ID NO: 1742274 - DNA, 25 bp, Homo sapien
ggcatttgggatgcctgtcttagaa

SEQ ID NO: 1742275 - DNA, 25 bp, Homo sapien
tttgggatgcctgtcttagaattcc

SEQ ID NO: 1742276 - DNA, 25 bp, Homo sapien
gatgcctgtcttagaattccatata

SEQ ID NO: 1742277 - DNA, 25 bp, Homo sapien
gaggcatttgggatgcctgtcttag

SEQ ID NO: 1742278 - DNA, 25 bp, Homo sapien
cagatggcagacatactttcaaaaa

SEQ ID NO: 1742279 - DNA, 25 bp, Homo sapien
ggcagacatactttcaaaaattcta

SEQ ID NO: 1742280 - DNA, 25 bp, Homo sapien
acagatggcagacatactttcaaaa

SEQ ID NO: 1742281 - DNA, 25 bp, Homo sapien
gatggcagacatactttcaaaaatt

SEQ ID NO: 1742282 - DNA, 25 bp, Homo sapien
tattttctgagatgtaagcatgata

SEQ ID NO: 1742283 - DNA, 25 bp, Homo sapien
ttttctgagatgtaagcatgataaa

SEQ ID NO: 1742284 - DNA, 25 bp, Homo sapien
ctgagatgtaagcatgataaacctt

SEQ ID NO: 1742285 - DNA, 25 bp, Homo sapien
ttctgagatgtaagcatgataaacc

SEQ ID NO: 1742286 - DNA, 25 bp, Homo sapien
atataccatctgatagcctctggga

SEQ ID NO: 1742287 - DNA, 25 bp, Homo sapien
ataccatctgatagcctctgggaca

SEQ ID NO: 1742288 - DNA, 25 bp, Homo sapien
tataccatctgatagcctctgggac

SEQ ID NO: 1742289 - DNA, 25 bp, Homo sapien
taccatctgatagcctctgggacag

SEQ ID NO: 1742290 - DNA, 25 bp, Homo sapien
aactgcatcttcatcttcacgtacc

SEQ ID NO: 1742291 - DNA, 25 bp, Homo sapien
ctgcatcttcatcttcacgtaccat

SEQ ID NO: 1742292 - DNA, 25 bp, Homo sapien
gctcctttagaataaactgcatctt

SEQ ID NO: 1742293 - DNA, 25 bp, Homo sapien
ctgctcctttagaataaactgcatc

SEQ ID NO: 1742294 - DNA, 25 bp, Homo sapien
tgctggttctttgctggtaacctcc

SEQ ID NO: 1742295 - DNA, 25 bp, Homo sapien
tgttagaagcaagggtaagtctttc

SEQ ID NO: 1742296 - DNA, 25 bp, Homo sapien
tttgctggtaacctccagggacagg

SEQ ID NO: 1742297 - DNA, 25 bp, Homo sapien
gaagcaagggtaagtctttccctga

SEQ ID NO: 1742298 - DNA, 25 bp, Homo sapien
tcattgatccttgttcctttcctgc

SEQ ID NO: 1742299 - DNA, 25 bp, Homo sapien
tgatgtgtgtgatttaacctctttc

SEQ ID NO: 1742300 - DNA, 25 bp, Homo sapien
tgcagtatcttctcaagcttaagaa

SEQ ID NO: 1742301 - DNA, 25 bp, Homo sapien
cctttctttgatggccccaattgat

SEQ ID NO: 1742302 - DNA, 25 bp, Homo sapien
ctgggttgtagttgtccctctctga

SEQ ID NO: 1742303 - DNA, 25 bp, Homo sapien
gattgagctgctcacgagtttcatc

SEQ ID NO: 1742304 - DNA, 25 bp, Homo sapien
gggaagcactggctgcagtaattca

SEQ ID NO: 1742305 - DNA, 25 bp, Homo sapien
caaggtggagccacatcgggaagca

SEQ ID NO: 1742306 - DNA, 25 bp, Homo sapien
tctgctggacttacgataatgggtg

SEQ ID NO: 1742307 - DNA, 25 bp, Homo sapien
tagagatttctgtgccctaccatgc

SEQ ID NO: 1742308 - DNA, 25 bp, Homo sapien
tgtcttatagacagatgcaccctct

SEQ ID NO: 1742309 - DNA, 25 bp, Homo sapien
tataacatgggatccacgggtgctg

SEQ ID NO: 1742310 - DNA, 25 bp, Homo sapien
tggtcactgattcgttctccagtct

SEQ ID NO: 1742311 - DNA, 25 bp, Homo sapien
agtgcacactggtcactgattcgtt

SEQ ID NO: 1742312 - DNA, 25 bp, Homo sapien
cactggtcactgattcgttctccag

SEQ ID NO: 1742313 - DNA, 25 bp, Homo sapien
cactgattcgttctccagtctcctg

SEQ ID NO: 1742314 - DNA, 25 bp, Homo sapien
tcttagaacaaatatctccagaaag

SEQ ID NO: 1742315 - DNA, 25 bp, Homo sapien
tatctccagaaagctcataaaagga

SEQ ID NO: 1742316 - DNA, 25 bp, Homo sapien
tattcagagtcaccaaaggtacggg

SEQ ID NO: 1742317 - DNA, 25 bp, Homo sapien
gcttgctcgctttccttattcagag

SEQ ID NO: 1742318 - DNA, 25 bp, Homo sapien
cgaatgcgttgctaaagtcctctct

SEQ ID NO: 1742319 - DNA, 25 bp, Homo sapien
tatcttctccaaggccgaatgcgtt

SEQ ID NO: 1742320 - DNA, 25 bp, Homo sapien
ttctccaaggccgaatgcgttgcta

SEQ ID NO: 1742321 - DNA, 25 bp, Homo sapien
aaggccgaatgcgttgctaaagtcc

SEQ ID NO: 1742322 - DNA, 25 bp, Homo sapien
gaatattggacaaagtattgcatcc

SEQ ID NO: 1742323 - DNA, 25 bp, Homo sapien
aaagtattgcatcccgtagactgga

SEQ ID NO: 1742324 - DNA, 25 bp, Homo sapien
gacaaagtattgcatcccgtagact

SEQ ID NO: 1742325 - DNA, 25 bp, Homo sapien
gttaactgaatattggacaaagtat

SEQ ID NO: 1742326 - DNA, 25 bp, Homo sapien
agtaaggccactttcttgtgcaggc

SEQ ID NO: 1742327 - DNA, 25 bp, Homo sapien
catttccgctattgggagtaaggcc

SEQ ID NO: 1742328 - DNA, 25 bp, Homo sapien
tccgctcggcgtgtgtgatgtcctt

SEQ ID NO: 1742329 - DNA, 25 bp, Homo sapien
gaaagtaggtgagctctctcggacg

SEQ ID NO: 1742330 - DNA, 25 bp, Homo sapien
cagccatccatttcctaagtttaac

SEQ ID NO: 1742331 - DNA, 25 bp, Homo sapien
gacccaattccacagtcgttgatga

SEQ ID NO: 1742332 - DNA, 25 bp, Homo sapien
tcctctgcgatgaagtggtcattct

SEQ ID NO: 1742333 - DNA, 25 bp, Homo sapien
tccacagtcgttgatgagcataagc

SEQ ID NO: 1742334 - DNA, 25 bp, Homo sapien
tctctatggctgtccatggaggata

SEQ ID NO: 1742335 - DNA, 25 bp, Homo sapien
gattatactactggcaagggtcagg

SEQ ID NO: 1742336 - DNA, 25 bp, Homo sapien
tccttgagatgctacttgatgctat

SEQ ID NO: 1742337 - DNA, 25 bp, Homo sapien
ccttttcagtgcttgacgatcgtga

SEQ ID NO: 1742338 - DNA, 25 bp, Homo sapien
cagccatcaaataagttgtacctct

SEQ ID NO: 1742339 - DNA, 25 bp, Homo sapien
cgatccttttgcaaaacactcattt

SEQ ID NO: 1742340 - DNA, 25 bp, Homo sapien
tatatcattgacacccaacttctcc

SEQ ID NO: 1742341 - DNA, 25 bp, Homo sapien
ttctttccgatccttttgcaaaaca

SEQ ID NO: 1742342 - DNA, 25 bp, Homo sapien
tttgggcattcacagtgccacatga

SEQ ID NO: 1742343 - DNA, 25 bp, Homo sapien
tgccacatgatctgtttagttcagg

SEQ ID NO: 1742344 - DNA, 25 bp, Homo sapien
aaagggatcaccttcattacccact

SEQ ID NO: 1742345 - DNA, 25 bp, Homo sapien
gaaagggatcaccttcattacccac

SEQ ID NO: 1742346 - DNA, 25 bp, Homo sapien
tggtggtccaacatggagcattctc

SEQ ID NO: 1742347 - DNA, 25 bp, Homo sapien
agaaatggtggtccaacatggagca

SEQ ID NO: 1742348 - DNA, 25 bp, Homo sapien
aatggtggtccaacatggagcattc

SEQ ID NO: 1742349 - DNA, 25 bp, Homo sapien
gaaatggtggtccaacatggagcat

SEQ ID NO: 1742350 - DNA, 25 bp, Homo sapien
tgctgatcccctttatgcctgcctt

SEQ ID NO: 1742351 - DNA, 25 bp, Homo sapien
gggatgctgatcccctttatgcctg

SEQ ID NO: 1742352 - DNA, 25 bp, Homo sapien
ttccaaggggatgctgatccccttt

SEQ ID NO: 1742353 - DNA, 25 bp, Homo sapien
ctgccttctcccctttcagtgccat

SEQ ID NO: 1742354 - DNA, 25 bp, Homo sapien
gaccactgggaaatgggatactgtt

SEQ ID NO: 1742355 - DNA, 25 bp, Homo sapien
tatggccacataggatggaatagct

SEQ ID NO: 1742356 - DNA, 25 bp, Homo sapien
taggcagtgataacttcatgaccac

SEQ ID NO: 1742357 - DNA, 25 bp, Homo sapien
ccgtgaagcaaatagctaaatgatc

SEQ ID NO: 1742358 - DNA, 25 bp, Homo sapien
tgttttgatttatggctgttcctga

SEQ ID NO: 1742359 - DNA, 25 bp, Homo sapien
tgacaaatagcatacaccaaacatt

SEQ ID NO: 1742360 - DNA, 25 bp, Homo sapien
ttgcttttatgacaaatagcataca

SEQ ID NO: 1742361 - DNA, 25 bp, Homo sapien
ctacctcttccgttggaaagaacat

SEQ ID NO: 1742362 - DNA, 25 bp, Homo sapien
ggagattaaattgaactgggcctta

SEQ ID NO: 1742363 - DNA, 25 bp, Homo sapien
aaacaactcatgatagaaaatggaa

SEQ ID NO: 1742364 - DNA, 25 bp, Homo sapien
gaaaaactcccatatcatataaaat

SEQ ID NO: 1742365 - DNA, 25 bp, Homo sapien
atgtcctagtaactcttagactgag

SEQ ID NO: 1742366 - DNA, 25 bp, Homo sapien
catttgtccagttgtatttgaaggg

SEQ ID NO: 1742367 - DNA, 25 bp, Homo sapien
agttctgcctttttcacctcactga

SEQ ID NO: 1742368 - DNA, 25 bp, Homo sapien
cagttgtatttgaagggcccttctc

SEQ ID NO: 1742369 - DNA, 25 bp, Homo sapien
ttctagttctgcctttttcacctca

SEQ ID NO: 1742370 - DNA, 25 bp, Homo sapien
gtggtaatgattggcattggccctc

SEQ ID NO: 1742371 - DNA, 25 bp, Homo sapien
gaacataacttgctgggtccttgaa

SEQ ID NO: 1742372 - DNA, 25 bp, Homo sapien
ttttcgcagatatagtaccctgcat

SEQ ID NO: 1742373 - DNA, 25 bp, Homo sapien
tacttggtagttgcagttagaacat

SEQ ID NO: 1742374 - DNA, 25 bp, Homo sapien
caaaagtggcgttggaaaacagcct

SEQ ID NO: 1742375 - DNA, 25 bp, Homo sapien
ccttcgtacacagaagcacatctct

SEQ ID NO: 1742376 - DNA, 25 bp, Homo sapien
tttccttcgtacacagaagcacatc

SEQ ID NO: 1742377 - DNA, 25 bp, Homo sapien
ttacagccatcaaaagtggcgttgg

SEQ ID NO: 1742378 - DNA, 25 bp, Homo sapien
tcacttttttcatgggcacaagtta

SEQ ID NO: 1742379 - DNA, 25 bp, Homo sapien
gttttggaatttattatgaacgatg

SEQ ID NO: 1742380 - DNA, 25 bp, Homo sapien
cacttttttcatgggcacaagttac

SEQ ID NO: 1742381 - DNA, 25 bp, Homo sapien
gaatttattatgaacgatgtcactt

SEQ ID NO: 1742382 - DNA, 25 bp, Homo sapien
gaaaggatctttcactgagctacgt

SEQ ID NO: 1742383 - DNA, 25 bp, Homo sapien
gaatttttgcctgggaggtagccac

SEQ ID NO: 1742384 - DNA, 25 bp, Homo sapien
tgctagccacgtagaagcgacagtc

SEQ ID NO: 1742385 - DNA, 25 bp, Homo sapien
acctaaaagatgcaccttgggccgg

SEQ ID NO: 1742386 - DNA, 25 bp, Homo sapien
tctgccacttaaatcctcggattcc

SEQ ID NO: 1742387 - DNA, 25 bp, Homo sapien
tgccacttaaatcctcggattccat

SEQ ID NO: 1742388 - DNA, 25 bp, Homo sapien
tcaattgtcaattctctgccactta

SEQ ID NO: 1742389 - DNA, 25 bp, Homo sapien
tggaatcaattgtcaattctctgcc

SEQ ID NO: 1742390 - DNA, 25 bp, Homo sapien
ctgtagtatcagcagaaattttatt

SEQ ID NO: 1742391 - DNA, 25 bp, Homo sapien
agaaattttattcaagcttagttca

SEQ ID NO: 1742392 - DNA, 25 bp, Homo sapien
tattcaagcttagttcatcagtaag

SEQ ID NO: 1742393 - DNA, 25 bp, Homo sapien
catcagtaaggtcttcatttttaaa

SEQ ID NO: 1742394 - DNA, 25 bp, Homo sapien
catcataatttggttaacagttccc

SEQ ID NO: 1742395 - DNA, 25 bp, Homo sapien
cataatttggttaacagttcccgag

SEQ ID NO: 1742396 - DNA, 25 bp, Homo sapien
tgccatcatcataatttggttaaca

SEQ ID NO: 1742397 - DNA, 25 bp, Homo sapien
gccatcatcataatttggttaacag

SEQ ID NO: 1742398 - DNA, 25 bp, Homo sapien
tttggccatatttatctgggggaag

SEQ ID NO: 1742399 - DNA, 25 bp, Homo sapien
tcacttgaattctagcaaaactctc

SEQ ID NO: 1742400 - DNA, 25 bp, Homo sapien
tttatttaaaagagcatcacttagc

SEQ ID NO: 1742401 - DNA, 25 bp, Homo sapien
gggggaagcgcttcaattgcttgac

SEQ ID NO: 1742402 - DNA, 25 bp, Homo sapien
ggccatttgaaagtagtcacgtgca

SEQ ID NO: 1742403 - DNA, 25 bp, Homo sapien
tagtcacgtgcatcatctggctctt

SEQ ID NO: 1742404 - DNA, 25 bp, Homo sapien
gttcaaattgtgcaaaagatatatg

SEQ ID NO: 1742405 - DNA, 25 bp, Homo sapien
agcaaatttcttgcagtttgctctg

SEQ ID NO: 1742406 - DNA, 25 bp, Homo sapien
atattaggaagtaagttgtaataag

SEQ ID NO: 1742407 - DNA, 25 bp, Homo sapien
tactgctccacgttctacagctttt

SEQ ID NO: 1742408 - DNA, 25 bp, Homo sapien
tgctccacgttctacagctttttga

SEQ ID NO: 1742409 - DNA, 25 bp, Homo sapien
ccgcagggcaatttccagcatttct

SEQ ID NO: 1742410 - DNA, 25 bp, Homo sapien
ttggaggtttaaattccgcagggca

SEQ ID NO: 1742411 - DNA, 25 bp, Homo sapien
tgttcctattctgtaaatgcccaag

SEQ ID NO: 1742412 - DNA, 25 bp, Homo sapien
ggctttagtagtctgtcctctggaa

SEQ ID NO: 1742413 - DNA, 25 bp, Homo sapien
tcttgggcagttaataccgtagatg

SEQ ID NO: 1742414 - DNA, 25 bp, Homo sapien
tgcccaagtgaaccggaaaatgatt

SEQ ID NO: 1742415 - DNA, 25 bp, Homo sapien
aatgaattccggtaacctatttctg

SEQ ID NO: 1742416 - DNA, 25 bp, Homo sapien
tgaattccggtaacctatttctgca

SEQ ID NO: 1742417 - DNA, 25 bp, Homo sapien
tctcaatgaattccggtaacctatt

SEQ ID NO: 1742418 - DNA, 25 bp, Homo sapien
tttgtctcaatgaattccggtaacc

SEQ ID NO: 1742419 - DNA, 25 bp, Homo sapien
ctgggctatttagaaggttaactgg

SEQ ID NO: 1742420 - DNA, 25 bp, Homo sapien
tctgggctatttagaaggttaactg

SEQ ID NO: 1742421 - DNA, 25 bp, Homo sapien
aacaaggtacaactgaatcatctgt

SEQ ID NO: 1742422 - DNA, 25 bp, Homo sapien
aaacaaggtacaactgaatcatctg

SEQ ID NO: 1742423 - DNA, 25 bp, Homo sapien
tcggcattctgatctagaggtttgt

SEQ ID NO: 1742424 - DNA, 25 bp, Homo sapien
tagatccaggcacaaccaaatctcg

SEQ ID NO: 1742425 - DNA, 25 bp, Homo sapien
tttccacttggtttagatccaggca

SEQ ID NO: 1742426 - DNA, 25 bp, Homo sapien
ggcacaaccaaatctcggcattctg

SEQ ID NO: 1742427 - DNA, 25 bp, Homo sapien
ttcatctgacaccagaggttccttg

SEQ ID NO: 1742428 - DNA, 25 bp, Homo sapien
aatcagtaataataagttcagaact

SEQ ID NO: 1742429 - DNA, 25 bp, Homo sapien
ttagctagaagacttgattccgttt

SEQ ID NO: 1742430 - DNA, 25 bp, Homo sapien
actcttttcatctgacaccagaggt

SEQ ID NO: 1742431 - DNA, 25 bp, Homo sapien
gctaactccggaatctgccagtgat

SEQ ID NO: 1742432 - DNA, 25 bp, Homo sapien
gactttctcttagattgccactgtt

SEQ ID NO: 1742433 - DNA, 25 bp, Homo sapien
tctggttactctctggaacctctgg

SEQ ID NO: 1742434 - DNA, 25 bp, Homo sapien
atgcagcaggattctggttaataca

SEQ ID NO: 1742435 - DNA, 25 bp, Homo sapien
gggtcaaaccatttagatgttgata

SEQ ID NO: 1742436 - DNA, 25 bp, Homo sapien
aagacaggttgctcaaaagtggtat

SEQ ID NO: 1742437 - DNA, 25 bp, Homo sapien
catccaaggtattgctgcttggtgt

SEQ ID NO: 1742438 - DNA, 25 bp, Homo sapien
cagctcatgtaatcatccaaggtat

SEQ ID NO: 1742439 - DNA, 25 bp, Homo sapien
ggcaggttggccataaggtgttgac

SEQ ID NO: 1742440 - DNA, 25 bp, Homo sapien
aagtggagtggcaagtatttgatgc

SEQ ID NO: 1742441 - DNA, 25 bp, Homo sapien
tggagtggcaagtatttgatgctgt

SEQ ID NO: 1742442 - DNA, 25 bp, Homo sapien
gccataaggtgttgacaactgacaa

SEQ ID NO: 1742443 - DNA, 25 bp, Homo sapien
taagtgtcatgctctgtattaggag

SEQ ID NO: 1742444 - DNA, 25 bp, Homo sapien
aacactatcacctctttccagttag

SEQ ID NO: 1742445 - DNA, 25 bp, Homo sapien
catcctaggaggtagttagctttac

SEQ ID NO: 1742446 - DNA, 25 bp, Homo sapien
ggatggtggtgcaaataccactgaa

SEQ ID NO: 1742447 - DNA, 25 bp, Homo sapien
caaagtattgggcttctaaacatgt

SEQ ID NO: 1742448 - DNA, 25 bp, Homo sapien
ttcctgtaacaaagtattgggcttc

SEQ ID NO: 1742449 - DNA, 25 bp, Homo sapien
ctaggattgagatacattgtctata

SEQ ID NO: 1742450 - DNA, 25 bp, Homo sapien
ctctaggattgagatacattgtcta

SEQ ID NO: 1742451 - DNA, 25 bp, Homo sapien
ttcctttaaccgaaatgcattcatt

SEQ ID NO: 1742452 - DNA, 25 bp, Homo sapien
ttgcttgaacctccacttcctatct

SEQ ID NO: 1742453 - DNA, 25 bp, Homo sapien
ctttaaccgaaatgcattcatttgc

SEQ ID NO: 1742454 - DNA, 25 bp, Homo sapien
gaacctccacttcctatctgcttta

SEQ ID NO: 1742455 - DNA, 25 bp, Homo sapien
atttcgttccggtaactatcaagag

SEQ ID NO: 1742456 - DNA, 25 bp, Homo sapien
tatcaagagtttggttatctgcttc

SEQ ID NO: 1742457 - DNA, 25 bp, Homo sapien
ggttatctgcttcttctaagttcac

SEQ ID NO: 1742458 - DNA, 25 bp, Homo sapien
tcataaagtcggatgatcttatcac

SEQ ID NO: 1742459 - DNA, 25 bp, Homo sapien
tgcgttcccatggatcaatggattt

SEQ ID NO: 1742460 - DNA, 25 bp, Homo sapien
tttccagtaactcttgcgttcccat

SEQ ID NO: 1742461 - DNA, 25 bp, Homo sapien
taagatcaatatttccacactccat

SEQ ID NO: 1742462 - DNA, 25 bp, Homo sapien
ccattaccatgtagatgtactggtc

SEQ ID NO: 1742463 - DNA, 25 bp, Homo sapien
ctgtaatattaaacaatgcaaaaca

SEQ ID NO: 1742464 - DNA, 25 bp, Homo sapien
gttagctggtttaagatcactgtga

SEQ ID NO: 1742465 - DNA, 25 bp, Homo sapien
taacaacacttgttgtatctggttg

SEQ ID NO: 1742466 - DNA, 25 bp, Homo sapien
gctttagcattccatcaactatcag

SEQ ID NO: 1742467 - DNA, 25 bp, Homo sapien
tttgcaatcccaaaatcaattagct

SEQ ID NO: 1742468 - DNA, 25 bp, Homo sapien
cattgagggacttaccattcgtttc

SEQ ID NO: 1742469 - DNA, 25 bp, Homo sapien
aactgcagcaaaacgagttgggttc

SEQ ID NO: 1742470 - DNA, 25 bp, Homo sapien
tctatgattatactgggcaactagt

SEQ ID NO: 1742471 - DNA, 25 bp, Homo sapien
cataaactttgaggccattgaggga

SEQ ID NO: 1742472 - DNA, 25 bp, Homo sapien
ggtggcatataattaactgtgccaa

SEQ ID NO: 1742473 - DNA, 25 bp, Homo sapien
tggtggcatataattaactgtgcca

SEQ ID NO: 1742474 - DNA, 25 bp, Homo sapien
tctctggaggaagacatatctttga

SEQ ID NO: 1742475 - DNA, 25 bp, Homo sapien
tgttttcccgtaagtcatatagtac

SEQ ID NO: 1742476 - DNA, 25 bp, Homo sapien
gatctttctctggaatatcgggaaa

SEQ ID NO: 1742477 - DNA, 25 bp, Homo sapien
tatctgctgaaatggtgttttcccg

SEQ ID NO: 1742478 - DNA, 25 bp, Homo sapien
tacatcctaaggaccaaacatcact

SEQ ID NO: 1742479 - DNA, 25 bp, Homo sapien
aatggatatcctctgttttgggtcc

SEQ ID NO: 1742480 - DNA, 25 bp, Homo sapien
gctcaggaatggatatcctctgttt

SEQ ID NO: 1742481 - DNA, 25 bp, Homo sapien
caggaatggatatcctctgttttgg

SEQ ID NO: 1742482 - DNA, 25 bp, Homo sapien
agctcaggaatggatatcctctgtt

SEQ ID NO: 1742483 - DNA, 25 bp, Homo sapien
gagttaggagaattcagaccaacaa

SEQ ID NO: 1742484 - DNA, 25 bp, Homo sapien
gaccaacaagttggcccagaacata

SEQ ID NO: 1742485 - DNA, 25 bp, Homo sapien
taggagaattcagaccaacaagttg

SEQ ID NO: 1742486 - DNA, 25 bp, Homo sapien
gaattcagaccaacaagttggccca

SEQ ID NO: 1742487 - DNA, 25 bp, Homo sapien
tgtcgaattcactatataaaacagt

SEQ ID NO: 1742488 - DNA, 25 bp, Homo sapien
cataactgatctgatgattggacca

SEQ ID NO: 1742489 - DNA, 25 bp, Homo sapien
agtaaatcgatatttgtcaaaatgc

SEQ ID NO: 1742490 - DNA, 25 bp, Homo sapien
ttcagactacctgtttccttaagtg

SEQ ID NO: 1742491 - DNA, 25 bp, Homo sapien
tattccagttgagacgtgacagcaa

SEQ ID NO: 1742492 - DNA, 25 bp, Homo sapien
attccagttgagacgtgacagcaat

SEQ ID NO: 1742493 - DNA, 25 bp, Homo sapien
gtattccagttgagacgtgacagca

SEQ ID NO: 1742494 - DNA, 25 bp, Homo sapien
gatgaagaattatgactttcaccac

SEQ ID NO: 1742495 - DNA, 25 bp, Homo sapien
ggaggatgaagaattatgactttca

SEQ ID NO: 1742496 - DNA, 25 bp, Homo sapien
ccaccactatagtgttcatataaag

SEQ ID NO: 1742497 - DNA, 25 bp, Homo sapien
caccactatagtgttcatataaagt

SEQ ID NO: 1742498 - DNA, 25 bp, Homo sapien
tataggtggtatctgacattacgaa

SEQ ID NO: 1742499 - DNA, 25 bp, Homo sapien
tgctatccacccactattccaagag

SEQ ID NO: 1742500 - DNA, 25 bp, Homo sapien
tccacagggattcaagagtataaca

SEQ ID NO: 1742501 - DNA, 25 bp, Homo sapien
tgtcaagtagattacacaagagcat

SEQ ID NO: 1742502 - DNA, 25 bp, Homo sapien
acaacacagaatccagcatgatatt

SEQ ID NO: 1742503 - DNA, 25 bp, Homo sapien
agcaaccacggtatctttcagcaga

SEQ ID NO: 1742504 - DNA, 25 bp, Homo sapien
acttacgtgacggtcacattctgga

SEQ ID NO: 1742505 - DNA, 25 bp, Homo sapien
gaacagaggactttcaagacagtga

SEQ ID NO: 1742506 - DNA, 25 bp, Homo sapien
tggaaaagtaaaactacagagatag

SEQ ID NO: 1742507 - DNA, 25 bp, Homo sapien
agagatgaatgacaaacttaaaagt

SEQ ID NO: 1742508 - DNA, 25 bp, Homo sapien
aggcagaaatgcagagatgaatgac

SEQ ID NO: 1742509 - DNA, 25 bp, Homo sapien
aatgcagagatgaatgacaaactta

SEQ ID NO: 1742510 - DNA, 25 bp, Homo sapien
ggcagaaatgcagagatgaatgaca

SEQ ID NO: 1742511 - DNA, 25 bp, Homo sapien
ggccatttctcttatgcctaattgt

SEQ ID NO: 1742512 - DNA, 25 bp, Homo sapien
tgtttattttctgaccattgagcaa

SEQ ID NO: 1742513 - DNA, 25 bp, Homo sapien
accattgagcaaagggtcctccaac

SEQ ID NO: 1742514 - DNA, 25 bp, Homo sapien
taatatattgccagtgttcttcctg

SEQ ID NO: 1742515 - DNA, 25 bp, Homo sapien
taaggtgttactccccatagaatgc

SEQ ID NO: 1742516 - DNA, 25 bp, Homo sapien
taactcttaaagcaagcagctaggc

SEQ ID NO: 1742517 - DNA, 25 bp, Homo sapien
aaccaggccgctccagagtagttga

SEQ ID NO: 1742518 - DNA, 25 bp, Homo sapien
gagcccagggagtagagatcaaacc

SEQ ID NO: 1742519 - DNA, 25 bp, Homo sapien
cattctttagtcattccaggtggat

SEQ ID NO: 1742520 - DNA, 25 bp, Homo sapien
caggtggatacagaacttccattct

SEQ ID NO: 1742521 - DNA, 25 bp, Homo sapien
tcttcagataccagatttgatataa

SEQ ID NO: 1742522 - DNA, 25 bp, Homo sapien
ttaccagttttaacacaggtggata

SEQ ID NO: 1742523 - DNA, 25 bp, Homo sapien
ggaaccaggaaacctagcaatagtg

SEQ ID NO: 1742524 - DNA, 25 bp, Homo sapien
gaaagaggtcttgaatatacacgta

SEQ ID NO: 1742525 - DNA, 25 bp, Homo sapien
gaagaactcaacaagggaatggctg

SEQ ID NO: 1742526 - DNA, 25 bp, Homo sapien
ttgaagccaatcgtaaagaggagcc

SEQ ID NO: 1742527 - DNA, 25 bp, Homo sapien
caccgggattctcaggctatgcagc

SEQ ID NO: 1742528 - DNA, 25 bp, Homo sapien
gattctcaggctatgcagccgcacg

SEQ ID NO: 1742529 - DNA, 25 bp, Homo sapien
gctcaccaccgggattctcaggcta

SEQ ID NO: 1742530 - DNA, 25 bp, Homo sapien
tcaccaccgggattctcaggctatg

SEQ ID NO: 1742531 - DNA, 25 bp, Homo sapien
ccctgccgccctgagcctgagtagc

SEQ ID NO: 1742532 - DNA, 25 bp, Homo sapien
ggctccggatctggctggaaagtaa

SEQ ID NO: 1742533 - DNA, 25 bp, Homo sapien
cggggtgcaaaaagccccgcgccag

SEQ ID NO: 1742534 - DNA, 25 bp, Homo sapien
tgggccgcatcctcgacagtcgcgg

SEQ ID NO: 1742535 - DNA, 25 bp, Homo sapien
tgcagcgggaccgagtgggcagtcc

SEQ ID NO: 1742536 - DNA, 25 bp, Homo sapien
aaggattgcagcctgccggcccctg

SEQ ID NO: 1742537 - DNA, 25 bp, Homo sapien
gggcgcctgcgagcctgggagtccg

SEQ ID NO: 1742538 - DNA, 25 bp, Homo sapien
ttaataagctgggatgcaaggattg

SEQ ID NO: 1742539 - DNA, 25 bp, Homo sapien
aacaaatcttccaacagtaatttct

SEQ ID NO: 1742540 - DNA, 25 bp, Homo sapien
aacagtaatttctagtagtatcaag

SEQ ID NO: 1742541 - DNA, 25 bp, Homo sapien
tgtcaaattgagaaacaaatcttcc

SEQ ID NO: 1742542 - DNA, 25 bp, Homo sapien
tagtagtatcaagctgcccaggccc

SEQ ID NO: 1742543 - DNA, 25 bp, Homo sapien
cactggaagattgactggccctgct

SEQ ID NO: 1742544 - DNA, 25 bp, Homo sapien
cagtcccctgccaaaaatgcgagag

SEQ ID NO: 1742545 - DNA, 25 bp, Homo sapien
tgcgagagcatcagttacaacccct

SEQ ID NO: 1742546 - DNA, 25 bp, Homo sapien
tggataaaggactatattaagcccc

SEQ ID NO: 1742547 - DNA, 25 bp, Homo sapien
ctggagaagcttgttaatggggcaa

SEQ ID NO: 1742548 - DNA, 25 bp, Homo sapien
aagtgactaaatgcgtgtagacaat

SEQ ID NO: 1742549 - DNA, 25 bp, Homo sapien
gagaagcttgttaatggggcaaaat

SEQ ID NO: 1742550 - DNA, 25 bp, Homo sapien
aggaagaaggaatataaccaagtga

SEQ ID NO: 1742551 - DNA, 25 bp, Homo sapien
ctgcagtaggatctttggccaatga

SEQ ID NO: 1742552 - DNA, 25 bp, Homo sapien
gccaatgagttatccaaggcacttg

SEQ ID NO: 1742553 - DNA, 25 bp, Homo sapien
aggcacttgttacagactggaaaag

SEQ ID NO: 1742554 - DNA, 25 bp, Homo sapien
tgttacagactggaaaagattcatt

SEQ ID NO: 1742555 - DNA, 25 bp, Homo sapien
tcgcaagccaacagtgcatctaaag

SEQ ID NO: 1742556 - DNA, 25 bp, Homo sapien
caacagtgcatctaaagactccacc

SEQ ID NO: 1742557 - DNA, 25 bp, Homo sapien
atatttgtctcgcaagccaacagtg

SEQ ID NO: 1742558 - DNA, 25 bp, Homo sapien
tgtctcgcaagccaacagtgcatct

SEQ ID NO: 1742559 - DNA, 25 bp, Homo sapien
aagtagaatgggttcttgccaggga

SEQ ID NO: 1742560 - DNA, 25 bp, Homo sapien
agaaagtagaatgggttcttgccag

SEQ ID NO: 1742561 - DNA, 25 bp, Homo sapien
gagatagaaagtagaatgggttctt

SEQ ID NO: 1742562 - DNA, 25 bp, Homo sapien
gatagaaagtagaatgggttcttgc

SEQ ID NO: 1742563 - DNA, 25 bp, Homo sapien
tctgcaaactgaatttccgcaatgg

SEQ ID NO: 1742564 - DNA, 25 bp, Homo sapien
gaatttccgcaatggcagtagctcc

SEQ ID NO: 1742565 - DNA, 25 bp, Homo sapien
gtagctccagtgaccgcaattccga

SEQ ID NO: 1742566 - DNA, 25 bp, Homo sapien
gaccgcaattccgattccaaatcca

SEQ ID NO: 1742567 - DNA, 25 bp, Homo sapien
gactctgagaatgatagagagcccc

SEQ ID NO: 1742568 - DNA, 25 bp, Homo sapien
cacagttaaaaagatccccagagcg

SEQ ID NO: 1742569 - DNA, 25 bp, Homo sapien
ttgattcctgggcaatgggcaaaaa

SEQ ID NO: 1742570 - DNA, 25 bp, Homo sapien
gcgatacttggcagcttcattaaca

SEQ ID NO: 1742571 - DNA, 25 bp, Homo sapien
tcgcacatggcttctttcccagtct

SEQ ID NO: 1742572 - DNA, 25 bp, Homo sapien
tcaaaaatcaggcaacatctactca

SEQ ID NO: 1742573 - DNA, 25 bp, Homo sapien
tacaacttctagctcacattcaaaa

SEQ ID NO: 1742574 - DNA, 25 bp, Homo sapien
caaaaatcaggcaacatctactcaa

SEQ ID NO: 1742575 - DNA, 25 bp, Homo sapien
gatttttatcctctatgcatgacaa

SEQ ID NO: 1742576 - DNA, 25 bp, Homo sapien
ttttatcctctatgcatgacaaaag

SEQ ID NO: 1742577 - DNA, 25 bp, Homo sapien
tatcctctatgcatgacaaaagaag

SEQ ID NO: 1742578 - DNA, 25 bp, Homo sapien
ggatttttatcctctatgcatgaca

SEQ ID NO: 1742579 - DNA, 25 bp, Homo sapien
gtgtaaagtacatctgagacacagg

SEQ ID NO: 1742580 - DNA, 25 bp, Homo sapien
tggagtttacaccaccagtgtaaag

SEQ ID NO: 1742581 - DNA, 25 bp, Homo sapien
tgaatcacaatgcaccattcctttt

SEQ ID NO: 1742582 - DNA, 25 bp, Homo sapien
tatatcattccaaacaactgtatgt

SEQ ID NO: 1742583 - DNA, 25 bp, Homo sapien
tggcctccagctatagtggataatg

SEQ ID NO: 1742584 - DNA, 25 bp, Homo sapien
taatgttttgctatggataatggcc

SEQ ID NO: 1742585 - DNA, 25 bp, Homo sapien
ggctaaatatcagctgaccccactt

SEQ ID NO: 1742586 - DNA, 25 bp, Homo sapien
tctcgtatgcttgttggctacatga

SEQ ID NO: 1742587 - DNA, 25 bp, Homo sapien
ccaggcaactagagtaacatcactc

SEQ ID NO: 1742588 - DNA, 25 bp, Homo sapien
gacagtgggatgttgtatggttcta

SEQ ID NO: 1742589 - DNA, 25 bp, Homo sapien
tcctgtatgacttcggcctgggaca

SEQ ID NO: 1742590 - DNA, 25 bp, Homo sapien
tatggttctatagggacttcttccg

SEQ ID NO: 1742591 - DNA, 25 bp, Homo sapien
attgtgtccacatcccaaggtatta

SEQ ID NO: 1742592 - DNA, 25 bp, Homo sapien
gaagctacctctcggatcacatgaa

SEQ ID NO: 1742593 - DNA, 25 bp, Homo sapien
tgacttcacaagacactccaagctt

SEQ ID NO: 1742594 - DNA, 25 bp, Homo sapien
caaggtattatagtcctcagatcaa

SEQ ID NO: 1742595 - DNA, 25 bp, Homo sapien
ttcccagtaggatagagccctaagg

SEQ ID NO: 1742596 - DNA, 25 bp, Homo sapien
taatgacgctaataagtcagaggtc

SEQ ID NO: 1742597 - DNA, 25 bp, Homo sapien
ggctttcactgtcacaaccggatga

SEQ ID NO: 1742598 - DNA, 25 bp, Homo sapien
cattcagtagagatcgcttgtctcc

SEQ ID NO: 1742599 - DNA, 25 bp, Homo sapien
tcttcctggctaaggacaccaaggc

SEQ ID NO: 1742600 - DNA, 25 bp, Homo sapien
ttcctggctaaggacaccaaggctc

SEQ ID NO: 1742601 - DNA, 25 bp, Homo sapien
aaactgaacgaagggtgtggacaga

SEQ ID NO: 1742602 - DNA, 25 bp, Homo sapien
agggagaaactgaacgaagggtgtg

SEQ ID NO: 1742603 - DNA, 25 bp, Homo sapien
gccagccttagtgcctgtcctgcta

SEQ ID NO: 1742604 - DNA, 25 bp, Homo sapien
caaaatagctagtattcagtcacgg

SEQ ID NO: 1742605 - DNA, 25 bp, Homo sapien
gaagacctctgctccctgatcgtct

SEQ ID NO: 1742606 - DNA, 25 bp, Homo sapien
cttggtgattaacacccaggtgcaa

SEQ ID NO: 1742607 - DNA, 25 bp, Homo sapien
tcttaacgattacagaataaataca

SEQ ID NO: 1742608 - DNA, 25 bp, Homo sapien
caaagccagggtgttataatagaaa

SEQ ID NO: 1742609 - DNA, 25 bp, Homo sapien
taagaaattcttaacgattacagaa

SEQ ID NO: 1742610 - DNA, 25 bp, Homo sapien
agttaaattatcactgctcagcact

SEQ ID NO: 1742611 - DNA, 25 bp, Homo sapien
tatgcaactttttccatagtggaaa

SEQ ID NO: 1742612 - DNA, 25 bp, Homo sapien
ctatgcaactttttccatagtggaa

SEQ ID NO: 1742613 - DNA, 25 bp, Homo sapien
tgcaactttttccatagtggaaaag

SEQ ID NO: 1742614 - DNA, 25 bp, Homo sapien
gcaactttttccatagtggaaaagc

SEQ ID NO: 1742615 - DNA, 25 bp, Homo sapien
ctaaagcaatgtctcatccatgtgc

SEQ ID NO: 1742616 - DNA, 25 bp, Homo sapien
aagcaatgtctcatccatgtgcaca

SEQ ID NO: 1742617 - DNA, 25 bp, Homo sapien
aaagcaatgtctcatccatgtgcac

SEQ ID NO: 1742618 - DNA, 25 bp, Homo sapien
gcaatgtctcatccatgtgcacaga

SEQ ID NO: 1742619 - DNA, 25 bp, Homo sapien
ttcagctgccaaacattttcaatca

SEQ ID NO: 1742620 - DNA, 25 bp, Homo sapien
tggaaactgaggttgtcaggcttcc

SEQ ID NO: 1742621 - DNA, 25 bp, Homo sapien
tctcatccctagagggactaattaa

SEQ ID NO: 1742622 - DNA, 25 bp, Homo sapien
cttctggtcagaaatactaatgaga

SEQ ID NO: 1742623 - DNA, 25 bp, Homo sapien
tagaaccgcacaacaaaagaactgg

SEQ ID NO: 1742624 - DNA, 25 bp, Homo sapien
gagatgaactgcgtggcttccaaag

SEQ ID NO: 1742625 - DNA, 25 bp, Homo sapien
gaactggttgcctcactttatggga

SEQ ID NO: 1742626 - DNA, 25 bp, Homo sapien
ggtgctcagcaaccatctgtcaggg

SEQ ID NO: 1742627 - DNA, 25 bp, Homo sapien
ccaaaggctggctatcacaaaaccc

SEQ ID NO: 1742628 - DNA, 25 bp, Homo sapien
tgagagtagtacaagcaccaaaggc

SEQ ID NO: 1742629 - DNA, 25 bp, Homo sapien
gacaagttgggtcagtacacctcaa

SEQ ID NO: 1742630 - DNA, 25 bp, Homo sapien
ctgcacatgtggctcgggtatggtt

SEQ ID NO: 1742631 - DNA, 25 bp, Homo sapien
gatctctccactgctatacttttta

SEQ ID NO: 1742632 - DNA, 25 bp, Homo sapien
cactgctatactttttaactcccat

SEQ ID NO: 1742633 - DNA, 25 bp, Homo sapien
tctccactgctatactttttaactc

SEQ ID NO: 1742634 - DNA, 25 bp, Homo sapien
tggatctctccactgctatactttt

SEQ ID NO: 1742635 - DNA, 25 bp, Homo sapien
gtccttgctatagactactgggcat

SEQ ID NO: 1742636 - DNA, 25 bp, Homo sapien
ccttgctatagactactgggcatgt

SEQ ID NO: 1742637 - DNA, 25 bp, Homo sapien
gctatagactactgggcatgttcag

SEQ ID NO: 1742638 - DNA, 25 bp, Homo sapien
ttgctatagactactgggcatgttc

SEQ ID NO: 1742639 - DNA, 25 bp, Homo sapien
tcttctcagataccaagtgtctgct

SEQ ID NO: 1742640 - DNA, 25 bp, Homo sapien
tactaatgataagaatggacatccc

SEQ ID NO: 1742641 - DNA, 25 bp, Homo sapien
tacaatctttgcttacccgactaca

SEQ ID NO: 1742642 - DNA, 25 bp, Homo sapien
gactacaaccacaccaagcttattg

SEQ ID NO: 1742643 - DNA, 25 bp, Homo sapien
aaatggaaacaatgattaagtccaa

SEQ ID NO: 1742644 - DNA, 25 bp, Homo sapien
agataaggacaaaaatggtgccaaa

SEQ ID NO: 1742645 - DNA, 25 bp, Homo sapien
aatggaaacaatgattaagtccaaa

SEQ ID NO: 1742646 - DNA, 25 bp, Homo sapien
gagataaggacaaaaatggtgccaa

SEQ ID NO: 1742647 - DNA, 25 bp, Homo sapien
taaccccaattgagagatagaatcc

SEQ ID NO: 1742648 - DNA, 25 bp, Homo sapien
gatagaatcctttgcccgatcgaga

SEQ ID NO: 1742649 - DNA, 25 bp, Homo sapien
gatcgagagatgtcaaccttctctg

SEQ ID NO: 1742650 - DNA, 25 bp, Homo sapien
tatgcctgagtcgtttcccgattaa

SEQ ID NO: 1742651 - DNA, 25 bp, Homo sapien
gaaacataataagcctttgcctggg

SEQ ID NO: 1742652 - DNA, 25 bp, Homo sapien
tatcctattgtccagtctttcagtg

SEQ ID NO: 1742653 - DNA, 25 bp, Homo sapien
gattctggccatactgtccagttag

SEQ ID NO: 1742654 - DNA, 25 bp, Homo sapien
cttctagtctcagtaccaggtggta

SEQ ID NO: 1742655 - DNA, 25 bp, Homo sapien
tataagcacctttcagtttccggtc

SEQ ID NO: 1742656 - DNA, 25 bp, Homo sapien
ttctgtgtgtgcaaaagtggcaaac

SEQ ID NO: 1742657 - DNA, 25 bp, Homo sapien
gaaatcctaagttcctgtcttccag

SEQ ID NO: 1742658 - DNA, 25 bp, Homo sapien
ccaagctaggagaactatgattcag

SEQ ID NO: 1742659 - DNA, 25 bp, Homo sapien
caggataacatgaagacaaaggtca

SEQ ID NO: 1742660 - DNA, 25 bp, Homo sapien
caagatgccccaattgttgtatagc

SEQ ID NO: 1742661 - DNA, 25 bp, Homo sapien
tatagcaatgcaggataacatgaag

SEQ ID NO: 1742662 - DNA, 25 bp, Homo sapien
ttaaaacttcaaccacaagatgccc

SEQ ID NO: 1742663 - DNA, 25 bp, Homo sapien
ttatctcctcaaccagaatatcaag

SEQ ID NO: 1742664 - DNA, 25 bp, Homo sapien
agttatctcctcaaccagaatatca

SEQ ID NO: 1742665 - DNA, 25 bp, Homo sapien
tatctcctcaaccagaatatcaaga

SEQ ID NO: 1742666 - DNA, 25 bp, Homo sapien
tctcctcaaccagaatatcaagaat

SEQ ID NO: 1742667 - DNA, 25 bp, Homo sapien
tgctgcaaataccatacacaaacag

SEQ ID NO: 1742668 - DNA, 25 bp, Homo sapien
tgttgatgttggttgctgcaaatac

SEQ ID NO: 1742669 - DNA, 25 bp, Homo sapien
tatcaagggtacaattttccctgaa

SEQ ID NO: 1742670 - DNA, 25 bp, Homo sapien
ggtcatgcttccctaaggaatgatc

SEQ ID NO: 1742671 - DNA, 25 bp, Homo sapien
cctgaagccagctggttgtctacca

SEQ ID NO: 1742672 - DNA, 25 bp, Homo sapien
tccctaaggaatgatcaaaagtata

SEQ ID NO: 1742673 - DNA, 25 bp, Homo sapien
gcaaagccgcctgtcaagggagcct

SEQ ID NO: 1742674 - DNA, 25 bp, Homo sapien
ctgtagagctgatttccgatgcaaa

SEQ ID NO: 1742675 - DNA, 25 bp, Homo sapien
ctgattagcagtcgccctgttttga

SEQ ID NO: 1742676 - DNA, 25 bp, Homo sapien
aagggagcctcgtgactgattagca

SEQ ID NO: 1742677 - DNA, 25 bp, Homo sapien
gggccaaatataccagacctcagct

SEQ ID NO: 1742678 - DNA, 25 bp, Homo sapien
aattccttgcacgatgaaagagcca

SEQ ID NO: 1742679 - DNA, 25 bp, Homo sapien
gaaacaaacctaagatgtgggcact

SEQ ID NO: 1742680 - DNA, 25 bp, Homo sapien
cataccctaaagtgagaacagatgg

SEQ ID NO: 1742681 - DNA, 25 bp, Homo sapien
tataagctgatttccataaactagc

SEQ ID NO: 1742682 - DNA, 25 bp, Homo sapien
ccatgtgcatatgcctaccttttct

SEQ ID NO: 1742683 - DNA, 25 bp, Homo sapien
cataaactagcaaataaccatgtgc

SEQ ID NO: 1742684 - DNA, 25 bp, Homo sapien
tgggtctaaagctcaacaggtcaaa

SEQ ID NO: 1742685 - DNA, 25 bp, Homo sapien
tatgctccactatgatctcatggga

SEQ ID NO: 1742686 - DNA, 25 bp, Homo sapien
cagtctgtgactagctttttagcaa

SEQ ID NO: 1742687 - DNA, 25 bp, Homo sapien
tagaagaccgtcaaatctcacctag

SEQ ID NO: 1742688 - DNA, 25 bp, Homo sapien
cccatgtccttggtttagaagaccg
